United States Patent Application Publication US 2019/0048337 A1 - sequence listing, part 11

SEQ ID NO: 344537 - RNA, 19 nt, Artificial Sequence
  Synthetic
uuugcuauugugaauagug

SEQ ID NO: 344538 - RNA, 20 nt, Artificial Sequence
  Synthetic
cuuugcuauugugaauagug

SEQ ID NO: 344539 - RNA, 21 nt, Artificial Sequence
  Synthetic
ccuuugcuauugugaauagug

SEQ ID NO: 344540 - RNA, 22 nt, Artificial Sequence
  Synthetic
accuuugcuauugugaauagug

SEQ ID NO: 344541 - RNA, 23 nt, Artificial Sequence
  Synthetic
uaccuuugcuauugugaauagug

SEQ ID NO: 344542 - RNA, 24 nt, Artificial Sequence
  Synthetic
auaccuuugcuauugugaauagug

SEQ ID NO: 344543 - RNA, 18 nt, Artificial Sequence
  Synthetic
aaagaggaauuaauagug

SEQ ID NO: 344544 - RNA, 19 nt, Artificial Sequence
  Synthetic
aaaagaggaauuaauagug

SEQ ID NO: 344545 - RNA, 20 nt, Artificial Sequence
  Synthetic
caaaagaggaauuaauagug

SEQ ID NO: 344546 - RNA, 21 nt, Artificial Sequence
  Synthetic
ccaaaagaggaauuaauagug

SEQ ID NO: 344547 - RNA, 22 nt, Artificial Sequence
  Synthetic
cccaaaagaggaauuaauagug

SEQ ID NO: 344548 - RNA, 23 nt, Artificial Sequence
  Synthetic
ccccaaaagaggaauuaauagug

SEQ ID NO: 344549 - RNA, 24 nt, Artificial Sequence
  Synthetic
accccaaaagaggaauuaauagug

SEQ ID NO: 344550 - RNA, 18 nt, Artificial Sequence
  Synthetic
cuccuauucaacauagug

SEQ ID NO: 344551 - RNA, 19 nt, Artificial Sequence
  Synthetic
acuccuauucaacauagug

SEQ ID NO: 344552 - RNA, 20 nt, Artificial Sequence
  Synthetic
cacuccuauucaacauagug

SEQ ID NO: 344553 - RNA, 19 nt, Artificial Sequence
  Synthetic
gcuccuauucaacauagug

SEQ ID NO: 344554 - RNA, 20 nt, Artificial Sequence
  Synthetic
cgcuccuauucaacauagug

SEQ ID NO: 344555 - RNA, 21 nt, Artificial Sequence
  Synthetic
ccgcuccuauucaacauagug

SEQ ID NO: 344556 - RNA, 22 nt, Artificial Sequence
  Synthetic
accgcuccuauucaacauagug

SEQ ID NO: 344557 - RNA, 23 nt, Artificial Sequence
  Synthetic
caccgcuccuauucaacauagug

SEQ ID NO: 344558 - RNA, 24 nt, Artificial Sequence
  Synthetic
ucaccgcuccuauucaacauagug

SEQ ID NO: 344559 - RNA, 18 nt, Artificial Sequence
  Synthetic
ccucagccucccauagug

SEQ ID NO: 344560 - RNA, 19 nt, Artificial Sequence
  Synthetic
gccucagccucccauagug

SEQ ID NO: 344561 - RNA, 20 nt, Artificial Sequence
  Synthetic
ugccucagccucccauagug

SEQ ID NO: 344562 - RNA, 21 nt, Artificial Sequence
  Synthetic
cugccucagccucccauagug

SEQ ID NO: 344563 - RNA, 22 nt, Artificial Sequence
  Synthetic
ccugccucagccucccauagug

SEQ ID NO: 344564 - RNA, 23 nt, Artificial Sequence
  Synthetic
accugccucagccucccauagug

SEQ ID NO: 344565 - RNA, 24 nt, Artificial Sequence
  Synthetic
caccugccucagccucccauagug

SEQ ID NO: 344566 - RNA, 18 nt, Artificial Sequence
  Synthetic
uaaaaauuaugcauagug

SEQ ID NO: 344567 - RNA, 19 nt, Artificial Sequence
  Synthetic
auaaaaauuaugcauagug

SEQ ID NO: 344568 - RNA, 20 nt, Artificial Sequence
  Synthetic
aauaaaaauuaugcauagug

SEQ ID NO: 344569 - RNA, 21 nt, Artificial Sequence
  Synthetic
uaauaaaaauuaugcauagug

SEQ ID NO: 344570 - RNA, 22 nt, Artificial Sequence
  Synthetic
auaauaaaaauuaugcauagug

SEQ ID NO: 344571 - RNA, 23 nt, Artificial Sequence
  Synthetic
uauaauaaaaauuaugcauagug

SEQ ID NO: 344572 - RNA, 24 nt, Artificial Sequence
  Synthetic
cuauaauaaaaauuaugcauagug

SEQ ID NO: 344573 - RNA, 18 nt, Artificial Sequence
  Synthetic
cucaggacugauauagug

SEQ ID NO: 344574 - RNA, 19 nt, Artificial Sequence
  Synthetic
gcucaggacugauauagug

SEQ ID NO: 344575 - RNA, 20 nt, Artificial Sequence
  Synthetic
ugcucaggacugauauagug

SEQ ID NO: 344576 - RNA, 21 nt, Artificial Sequence
  Synthetic
augcucaggacugauauagug

SEQ ID NO: 344577 - RNA, 22 nt, Artificial Sequence
  Synthetic
uaugcucaggacugauauagug

SEQ ID NO: 344578 - RNA, 23 nt, Artificial Sequence
  Synthetic
auaugcucaggacugauauagug

SEQ ID NO: 344579 - RNA, 24 nt, Artificial Sequence
  Synthetic
uauaugcucaggacugauauagug

SEQ ID NO: 344580 - RNA, 18 nt, Artificial Sequence
  Synthetic
guaaauuggaguauagug

SEQ ID NO: 344581 - RNA, 19 nt, Artificial Sequence
  Synthetic
uguaaauuggaguauagug

SEQ ID NO: 344582 - RNA, 20 nt, Artificial Sequence
  Synthetic
guguaaauuggaguauagug

SEQ ID NO: 344583 - RNA, 21 nt, Artificial Sequence
  Synthetic
uguguaaauuggaguauagug

SEQ ID NO: 344584 - RNA, 22 nt, Artificial Sequence
  Synthetic
guguguaaauuggaguauagug

SEQ ID NO: 344585 - RNA, 23 nt, Artificial Sequence
  Synthetic
gguguguaaauuggaguauagug

SEQ ID NO: 344586 - RNA, 24 nt, Artificial Sequence
  Synthetic
ugguguguaaauuggaguauagug

SEQ ID NO: 344587 - RNA, 18 nt, Artificial Sequence
  Synthetic
ugaauauauuuuauagug

SEQ ID NO: 344588 - RNA, 19 nt, Artificial Sequence
  Synthetic
augaauauauuuuauagug

SEQ ID NO: 344589 - RNA, 20 nt, Artificial Sequence
  Synthetic
uaugaauauauuuuauagug

SEQ ID NO: 344590 - RNA, 21 nt, Artificial Sequence
  Synthetic
auaugaauauauuuuauagug

SEQ ID NO: 344591 - RNA, 22 nt, Artificial Sequence
  Synthetic
uauaugaauauauuuuauagug

SEQ ID NO: 344592 - RNA, 23 nt, Artificial Sequence
  Synthetic
uuauaugaauauauuuuauagug

SEQ ID NO: 344593 - RNA, 24 nt, Artificial Sequence
  Synthetic
guuauaugaauauauuuuauagug

SEQ ID NO: 344594 - RNA, 18 nt, Artificial Sequence
  Synthetic
cuagaauagugccuagug

SEQ ID NO: 344595 - RNA, 19 nt, Artificial Sequence
  Synthetic
ccuagaauagugccuagug

SEQ ID NO: 344596 - RNA, 20 nt, Artificial Sequence
  Synthetic
cccuagaauagugccuagug

SEQ ID NO: 344597 - RNA, 21 nt, Artificial Sequence
  Synthetic
ucccuagaauagugccuagug

SEQ ID NO: 344598 - RNA, 22 nt, Artificial Sequence
  Synthetic
gucccuagaauagugccuagug

SEQ ID NO: 344599 - RNA, 23 nt, Artificial Sequence
  Synthetic
agucccuagaauagugccuagug

SEQ ID NO: 344600 - RNA, 24 nt, Artificial Sequence
  Synthetic
uagucccuagaauagugccuagug

SEQ ID NO: 344601 - RNA, 18 nt, Artificial Sequence
  Synthetic
aagaaagccagucuagug

SEQ ID NO: 344602 - RNA, 19 nt, Artificial Sequence
  Synthetic
caagaaagccagucuagug

SEQ ID NO: 344603 - RNA, 20 nt, Artificial Sequence
  Synthetic
ucaagaaagccagucuagug

SEQ ID NO: 344604 - RNA, 21 nt, Artificial Sequence
  Synthetic
cucaagaaagccagucuagug

SEQ ID NO: 344605 - RNA, 22 nt, Artificial Sequence
  Synthetic
acucaagaaagccagucuagug

SEQ ID NO: 344606 - RNA, 23 nt, Artificial Sequence
  Synthetic
cacucaagaaagccagucuagug

SEQ ID NO: 344607 - RNA, 24 nt, Artificial Sequence
  Synthetic
gcacucaagaaagccagucuagug

SEQ ID NO: 344608 - RNA, 18 nt, Artificial Sequence
  Synthetic
gaguuuuucagucuagug

SEQ ID NO: 344609 - RNA, 19 nt, Artificial Sequence
  Synthetic
ggaguuuuucagucuagug

SEQ ID NO: 344610 - RNA, 20 nt, Artificial Sequence
  Synthetic
uggaguuuuucagucuagug

SEQ ID NO: 344611 - RNA, 21 nt, Artificial Sequence
  Synthetic
auggaguuuuucagucuagug

SEQ ID NO: 344612 - RNA, 22 nt, Artificial Sequence
  Synthetic
gauggaguuuuucagucuagug

SEQ ID NO: 344613 - RNA, 23 nt, Artificial Sequence
  Synthetic
ugauggaguuuuucagucuagug

SEQ ID NO: 344614 - RNA, 24 nt, Artificial Sequence
  Synthetic
cugauggaguuuuucagucuagug

SEQ ID NO: 344615 - RNA, 18 nt, Artificial Sequence
  Synthetic
aucucccagcgucuagug

SEQ ID NO: 344616 - RNA, 19 nt, Artificial Sequence
  Synthetic
caucucccagcgucuagug

SEQ ID NO: 344617 - RNA, 20 nt, Artificial Sequence
  Synthetic
ccaucucccagcgucuagug

SEQ ID NO: 344618 - RNA, 21 nt, Artificial Sequence
  Synthetic
cccaucucccagcgucuagug

SEQ ID NO: 344619 - RNA, 22 nt, Artificial Sequence
  Synthetic
gcccaucucccagcgucuagug

SEQ ID NO: 344620 - RNA, 23 nt, Artificial Sequence
  Synthetic
ugcccaucucccagcgucuagug

SEQ ID NO: 344621 - RNA, 24 nt, Artificial Sequence
  Synthetic
uugcccaucucccagcgucuagug

SEQ ID NO: 344622 - RNA, 18 nt, Artificial Sequence
  Synthetic
gugaccuacauucuagug

SEQ ID NO: 344623 - RNA, 19 nt, Artificial Sequence
  Synthetic
agugaccuacauucuagug

SEQ ID NO: 344624 - RNA, 20 nt, Artificial Sequence
  Synthetic
cagugaccuacauucuagug

SEQ ID NO: 344625 - RNA, 21 nt, Artificial Sequence
  Synthetic
ucagugaccuacauucuagug

SEQ ID NO: 344626 - RNA, 22 nt, Artificial Sequence
  Synthetic
cucagugaccuacauucuagug

SEQ ID NO: 344627 - RNA, 23 nt, Artificial Sequence
  Synthetic
gcucagugaccuacauucuagug

SEQ ID NO: 344628 - RNA, 24 nt, Artificial Sequence
  Synthetic
agcucagugaccuacauucuagug

SEQ ID NO: 344629 - RNA, 18 nt, Artificial Sequence
  Synthetic
uuugagaauauucuagug

SEQ ID NO: 344630 - RNA, 19 nt, Artificial Sequence
  Synthetic
guuugagaauauucuagug

SEQ ID NO: 344631 - RNA, 20 nt, Artificial Sequence
  Synthetic
aguuugagaauauucuagug

SEQ ID NO: 344632 - RNA, 21 nt, Artificial Sequence
  Synthetic
aaguuugagaauauucuagug

SEQ ID NO: 344633 - RNA, 22 nt, Artificial Sequence
  Synthetic
gaaguuugagaauauucuagug

SEQ ID NO: 344634 - RNA, 23 nt, Artificial Sequence
  Synthetic
ggaaguuugagaauauucuagug

SEQ ID NO: 344635 - RNA, 24 nt, Artificial Sequence
  Synthetic
aggaaguuugagaauauucuagug

SEQ ID NO: 344636 - RNA, 18 nt, Artificial Sequence
  Synthetic
ugcaguaaaaaaguagug

SEQ ID NO: 344637 - RNA, 19 nt, Artificial Sequence
  Synthetic
uugcaguaaaaaaguagug

SEQ ID NO: 344638 - RNA, 20 nt, Artificial Sequence
  Synthetic
uuugcaguaaaaaaguagug

SEQ ID NO: 344639 - RNA, 21 nt, Artificial Sequence
  Synthetic
uuuugcaguaaaaaaguagug

SEQ ID NO: 344640 - RNA, 22 nt, Artificial Sequence
  Synthetic
auuuugcaguaaaaaaguagug

SEQ ID NO: 344641 - RNA, 23 nt, Artificial Sequence
  Synthetic
uauuuugcaguaaaaaaguagug

SEQ ID NO: 344642 - RNA, 24 nt, Artificial Sequence
  Synthetic
auauuuugcaguaaaaaaguagug

SEQ ID NO: 344643 - RNA, 18 nt, Artificial Sequence
  Synthetic
ggugagugagugguagug

SEQ ID NO: 344644 - RNA, 19 nt, Artificial Sequence
  Synthetic
cggugagugagugguagug

SEQ ID NO: 344645 - RNA, 20 nt, Artificial Sequence
  Synthetic
ucggugagugagugguagug

SEQ ID NO: 344646 - RNA, 21 nt, Artificial Sequence
  Synthetic
gucggugagugagugguagug

SEQ ID NO: 344647 - RNA, 22 nt, Artificial Sequence
  Synthetic
agucggugagugagugguagug

SEQ ID NO: 344648 - RNA, 23 nt, Artificial Sequence
  Synthetic
gagucggugagugagugguagug

SEQ ID NO: 344649 - RNA, 24 nt, Artificial Sequence
  Synthetic
ugagucggugagugagugguagug

SEQ ID NO: 344650 - RNA, 18 nt, Artificial Sequence
  Synthetic
aucacacuuuugguagug

SEQ ID NO: 344651 - RNA, 19 nt, Artificial Sequence
  Synthetic
caucacacuuuugguagug

SEQ ID NO: 344652 - RNA, 20 nt, Artificial Sequence
  Synthetic
ccaucacacuuuugguagug

SEQ ID NO: 344653 - RNA, 21 nt, Artificial Sequence
  Synthetic
accaucacacuuuugguagug

SEQ ID NO: 344654 - RNA, 22 nt, Artificial Sequence
  Synthetic
uaccaucacacuuuugguagug

SEQ ID NO: 344655 - RNA, 23 nt, Artificial Sequence
  Synthetic
cuaccaucacacuuuugguagug

SEQ ID NO: 344656 - RNA, 24 nt, Artificial Sequence
  Synthetic
ccuaccaucacacuuuugguagug

SEQ ID NO: 344657 - RNA, 18 nt, Artificial Sequence
  Synthetic
aagucuuggaguguagug

SEQ ID NO: 344658 - RNA, 19 nt, Artificial Sequence
  Synthetic
gaagucuuggaguguagug

SEQ ID NO: 344659 - RNA, 20 nt, Artificial Sequence
  Synthetic
ggaagucuuggaguguagug

SEQ ID NO: 344660 - RNA, 21 nt, Artificial Sequence
  Synthetic
gggaagucuuggaguguagug

SEQ ID NO: 344661 - RNA, 22 nt, Artificial Sequence
  Synthetic
agggaagucuuggaguguagug

SEQ ID NO: 344662 - RNA, 23 nt, Artificial Sequence
  Synthetic
aagggaagucuuggaguguagug

SEQ ID NO: 344663 - RNA, 24 nt, Artificial Sequence
  Synthetic
aaagggaagucuuggaguguagug

SEQ ID NO: 344664 - RNA, 18 nt, Artificial Sequence
  Synthetic
ggaggcauccuuguagug

SEQ ID NO: 344665 - RNA, 19 nt, Artificial Sequence
  Synthetic
aggaggcauccuuguagug

SEQ ID NO: 344666 - RNA, 20 nt, Artificial Sequence
  Synthetic
caggaggcauccuuguagug

SEQ ID NO: 344667 - RNA, 21 nt, Artificial Sequence
  Synthetic
acaggaggcauccuuguagug

SEQ ID NO: 344668 - RNA, 22 nt, Artificial Sequence
  Synthetic
cacaggaggcauccuuguagug

SEQ ID NO: 344669 - RNA, 23 nt, Artificial Sequence
  Synthetic
acacaggaggcauccuuguagug

SEQ ID NO: 344670 - RNA, 24 nt, Artificial Sequence
  Synthetic
aacacaggaggcauccuuguagug

SEQ ID NO: 344671 - RNA, 18 nt, Artificial Sequence
  Synthetic
gaagaauccuuuguagug

SEQ ID NO: 344672 - RNA, 19 nt, Artificial Sequence
  Synthetic
cgaagaauccuuuguagug

SEQ ID NO: 344673 - RNA, 20 nt, Artificial Sequence
  Synthetic
ccgaagaauccuuuguagug

SEQ ID NO: 344674 - RNA, 21 nt, Artificial Sequence
  Synthetic
cccgaagaauccuuuguagug

SEQ ID NO: 344675 - RNA, 22 nt, Artificial Sequence
  Synthetic
acccgaagaauccuuuguagug

SEQ ID NO: 344676 - RNA, 23 nt, Artificial Sequence
  Synthetic
aacccgaagaauccuuuguagug

SEQ ID NO: 344677 - RNA, 24 nt, Artificial Sequence
  Synthetic
caacccgaagaauccuuuguagug

SEQ ID NO: 344678 - RNA, 18 nt, Artificial Sequence
  Synthetic
gcuucugauaaauuagug

SEQ ID NO: 344679 - RNA, 19 nt, Artificial Sequence
  Synthetic
ggcuucugauaaauuagug

SEQ ID NO: 344680 - RNA, 20 nt, Artificial Sequence
  Synthetic
aggcuucugauaaauuagug

SEQ ID NO: 344681 - RNA, 21 nt, Artificial Sequence
  Synthetic
aaggcuucugauaaauuagug

SEQ ID NO: 344682 - RNA, 22 nt, Artificial Sequence
  Synthetic
aaaggcuucugauaaauuagug

SEQ ID NO: 344683 - RNA, 23 nt, Artificial Sequence
  Synthetic
uaaaggcuucugauaaauuagug

SEQ ID NO: 344684 - RNA, 24 nt, Artificial Sequence
  Synthetic
auaaaggcuucugauaaauuagug

SEQ ID NO: 344685 - RNA, 18 nt, Artificial Sequence
  Synthetic
uguucaucagaauuagug

SEQ ID NO: 344686 - RNA, 19 nt, Artificial Sequence
  Synthetic
cuguucaucagaauuagug

SEQ ID NO: 344687 - RNA, 20 nt, Artificial Sequence
  Synthetic
gcuguucaucagaauuagug

SEQ ID NO: 344688 - RNA, 21 nt, Artificial Sequence
  Synthetic
agcuguucaucagaauuagug

SEQ ID NO: 344689 - RNA, 22 nt, Artificial Sequence
  Synthetic
uagcuguucaucagaauuagug

SEQ ID NO: 344690 - RNA, 23 nt, Artificial Sequence
  Synthetic
auagcuguucaucagaauuagug

SEQ ID NO: 344691 - RNA, 24 nt, Artificial Sequence
  Synthetic
gauagcuguucaucagaauuagug

SEQ ID NO: 344692 - RNA, 18 nt, Artificial Sequence
  Synthetic
ggauacucaagcuuagug

SEQ ID NO: 344693 - RNA, 19 nt, Artificial Sequence
  Synthetic
gggauacucaagcuuagug

SEQ ID NO: 344694 - RNA, 20 nt, Artificial Sequence
  Synthetic
ugggauacucaagcuuagug

SEQ ID NO: 344695 - RNA, 21 nt, Artificial Sequence
  Synthetic
cugggauacucaagcuuagug

SEQ ID NO: 344696 - RNA, 22 nt, Artificial Sequence
  Synthetic
ccugggauacucaagcuuagug

SEQ ID NO: 344697 - RNA, 23 nt, Artificial Sequence
  Synthetic
accugggauacucaagcuuagug

SEQ ID NO: 344698 - RNA, 24 nt, Artificial Sequence
  Synthetic
gaccugggauacucaagcuuagug

SEQ ID NO: 344699 - RNA, 18 nt, Artificial Sequence
  Synthetic
guacuuuauagcuuagug

SEQ ID NO: 344700 - RNA, 19 nt, Artificial Sequence
  Synthetic
uguacuuuauagcuuagug

SEQ ID NO: 344701 - RNA, 20 nt, Artificial Sequence
  Synthetic
uuguacuuuauagcuuagug

SEQ ID NO: 344702 - RNA, 21 nt, Artificial Sequence
  Synthetic
uuuguacuuuauagcuuagug

SEQ ID NO: 344703 - RNA, 22 nt, Artificial Sequence
  Synthetic
auuuguacuuuauagcuuagug

SEQ ID NO: 344704 - RNA, 23 nt, Artificial Sequence
  Synthetic
gauuuguacuuuauagcuuagug

SEQ ID NO: 344705 - RNA, 24 nt, Artificial Sequence
  Synthetic
ugauuuguacuuuauagcuuagug

SEQ ID NO: 344706 - RNA, 18 nt, Artificial Sequence
  Synthetic
ucucuauucaaguuagug

SEQ ID NO: 344707 - RNA, 19 nt, Artificial Sequence
  Synthetic
uucucuauucaaguuagug

SEQ ID NO: 344708 - RNA, 20 nt, Artificial Sequence
  Synthetic
uuucucuauucaaguuagug

SEQ ID NO: 344709 - RNA, 21 nt, Artificial Sequence
  Synthetic
auuucucuauucaaguuagug

SEQ ID NO: 344710 - RNA, 22 nt, Artificial Sequence
  Synthetic
uauuucucuauucaaguuagug

SEQ ID NO: 344711 - RNA, 23 nt, Artificial Sequence
  Synthetic
uuauuucucuauucaaguuagug

SEQ ID NO: 344712 - RNA, 24 nt, Artificial Sequence
  Synthetic
auuauuucucuauucaaguuagug

SEQ ID NO: 344713 - RNA, 18 nt, Artificial Sequence
  Synthetic
uaucaaauucuguuagug

SEQ ID NO: 344714 - RNA, 19 nt, Artificial Sequence
  Synthetic
uuaucaaauucuguuagug

SEQ ID NO: 344715 - RNA, 20 nt, Artificial Sequence
  Synthetic
auuaucaaauucuguuagug

SEQ ID NO: 344716 - RNA, 21 nt, Artificial Sequence
  Synthetic
gauuaucaaauucuguuagug

SEQ ID NO: 344717 - RNA, 22 nt, Artificial Sequence
  Synthetic
agauuaucaaauucuguuagug

SEQ ID NO: 344718 - RNA, 23 nt, Artificial Sequence
  Synthetic
uagauuaucaaauucuguuagug

SEQ ID NO: 344719 - RNA, 24 nt, Artificial Sequence
  Synthetic
guagauuaucaaauucuguuagug

SEQ ID NO: 344720 - RNA, 18 nt, Artificial Sequence
  Synthetic
gaugggggaaauuuagug

SEQ ID NO: 344721 - RNA, 19 nt, Artificial Sequence
  Synthetic
ggaugggggaaauuuagug

SEQ ID NO: 344722 - RNA, 20 nt, Artificial Sequence
  Synthetic
uggaugggggaaauuuagug

SEQ ID NO: 344723 - RNA, 21 nt, Artificial Sequence
  Synthetic
auggaugggggaaauuuagug

SEQ ID NO: 344724 - RNA, 22 nt, Artificial Sequence
  Synthetic
gauggaugggggaaauuuagug

SEQ ID NO: 344725 - RNA, 23 nt, Artificial Sequence
  Synthetic
cgauggaugggggaaauuuagug

SEQ ID NO: 344726 - RNA, 24 nt, Artificial Sequence
  Synthetic
ucgauggaugggggaaauuuagug

SEQ ID NO: 344727 - RNA, 18 nt, Artificial Sequence
  Synthetic
uuacauugucauuuagug

SEQ ID NO: 344728 - RNA, 19 nt, Artificial Sequence
  Synthetic
guuacauugucauuuagug

SEQ ID NO: 344729 - RNA, 20 nt, Artificial Sequence
  Synthetic
uguuacauugucauuuagug

SEQ ID NO: 344730 - RNA, 21 nt, Artificial Sequence
  Synthetic
uuguuacauugucauuuagug

SEQ ID NO: 344731 - RNA, 22 nt, Artificial Sequence
  Synthetic
cuuguuacauugucauuuagug

SEQ ID NO: 344732 - RNA, 23 nt, Artificial Sequence
  Synthetic
acuuguuacauugucauuuagug

SEQ ID NO: 344733 - RNA, 24 nt, Artificial Sequence
  Synthetic
cacuuguuacauugucauuuagug

SEQ ID NO: 344734 - RNA, 18 nt, Artificial Sequence
  Synthetic
uuauauacuucuuuagug

SEQ ID NO: 344735 - RNA, 19 nt, Artificial Sequence
  Synthetic
uuuauauacuucuuuagug

SEQ ID NO: 344736 - RNA, 20 nt, Artificial Sequence
  Synthetic
cuuuauauacuucuuuagug

SEQ ID NO: 344737 - RNA, 21 nt, Artificial Sequence
  Synthetic
ccuuuauauacuucuuuagug

SEQ ID NO: 344738 - RNA, 22 nt, Artificial Sequence
  Synthetic
uccuuuauauacuucuuuagug

SEQ ID NO: 344739 - RNA, 23 nt, Artificial Sequence
  Synthetic
uuccuuuauauacuucuuuagug

SEQ ID NO: 344740 - RNA, 24 nt, Artificial Sequence
  Synthetic
guuccuuuauauacuucuuuagug

SEQ ID NO: 344741 - RNA, 18 nt, Artificial Sequence
  Synthetic
uugaucuguaguuuagug

SEQ ID NO: 344742 - RNA, 19 nt, Artificial Sequence
  Synthetic
uuugaucuguaguuuagug

SEQ ID NO: 344743 - RNA, 20 nt, Artificial Sequence
  Synthetic
cuuugaucuguaguuuagug

SEQ ID NO: 344744 - RNA, 21 nt, Artificial Sequence
  Synthetic
ucuuugaucuguaguuuagug

SEQ ID NO: 344745 - RNA, 22 nt, Artificial Sequence
  Synthetic
uucuuugaucuguaguuuagug

SEQ ID NO: 344746 - RNA, 23 nt, Artificial Sequence
  Synthetic
cuucuuugaucuguaguuuagug

SEQ ID NO: 344747 - RNA, 24 nt, Artificial Sequence
  Synthetic
ucuucuuugaucuguaguuuagug

SEQ ID NO: 344748 - RNA, 18 nt, Artificial Sequence
  Synthetic
ggagcugaauguuuagug

SEQ ID NO: 344749 - RNA, 19 nt, Artificial Sequence
  Synthetic
uggagcugaauguuuagug

SEQ ID NO: 344750 - RNA, 20 nt, Artificial Sequence
  Synthetic
uuggagcugaauguuuagug

SEQ ID NO: 344751 - RNA, 21 nt, Artificial Sequence
  Synthetic
uuuggagcugaauguuuagug

SEQ ID NO: 344752 - RNA, 22 nt, Artificial Sequence
  Synthetic
uuuuggagcugaauguuuagug

SEQ ID NO: 344753 - RNA, 23 nt, Artificial Sequence
  Synthetic
uuuuuggagcugaauguuuagug

SEQ ID NO: 344754 - RNA, 24 nt, Artificial Sequence
  Synthetic
cuuuuuggagcugaauguuuagug

SEQ ID NO: 344755 - RNA, 18 nt, Artificial Sequence
  Synthetic
augauaagguguuuagug

SEQ ID NO: 344756 - RNA, 19 nt, Artificial Sequence
  Synthetic
uaugauaagguguuuagug

SEQ ID NO: 344757 - RNA, 20 nt, Artificial Sequence
  Synthetic
cuaugauaagguguuuagug

SEQ ID NO: 344758 - RNA, 21 nt, Artificial Sequence
  Synthetic
gcuaugauaagguguuuagug

SEQ ID NO: 344759 - RNA, 22 nt, Artificial Sequence
  Synthetic
ugcuaugauaagguguuuagug

SEQ ID NO: 344760 - RNA, 23 nt, Artificial Sequence
  Synthetic
cugcuaugauaagguguuuagug

SEQ ID NO: 344761 - RNA, 24 nt, Artificial Sequence
  Synthetic
gcugcuaugauaagguguuuagug

SEQ ID NO: 344762 - RNA, 18 nt, Artificial Sequence
  Synthetic
aauuagguuauuuuagug

SEQ ID NO: 344763 - RNA, 19 nt, Artificial Sequence
  Synthetic
uaauuagguuauuuuagug

SEQ ID NO: 344764 - RNA, 20 nt, Artificial Sequence
  Synthetic
auaauuagguuauuuuagug

SEQ ID NO: 344765 - RNA, 21 nt, Artificial Sequence
  Synthetic
aauaauuagguuauuuuagug

SEQ ID NO: 344766 - RNA, 22 nt, Artificial Sequence
  Synthetic
aaauaauuagguuauuuuagug

SEQ ID NO: 344767 - RNA, 23 nt, Artificial Sequence
  Synthetic
uaaauaauuagguuauuuuagug

SEQ ID NO: 344768 - RNA, 24 nt, Artificial Sequence
  Synthetic
auaaauaauuagguuauuuuagug

SEQ ID NO: 344769 - RNA, 18 nt, Artificial Sequence
  Synthetic
ccuuggccugacaacgug

SEQ ID NO: 344770 - RNA, 19 nt, Artificial Sequence
  Synthetic
accuuggccugacaacgug

SEQ ID NO: 344771 - RNA, 20 nt, Artificial Sequence
  Synthetic
caccuuggccugacaacgug

SEQ ID NO: 344772 - RNA, 21 nt, Artificial Sequence
  Synthetic
ccaccuuggccugacaacgug

SEQ ID NO: 344773 - RNA, 22 nt, Artificial Sequence
  Synthetic
cccaccuuggccugacaacgug

SEQ ID NO: 344774 - RNA, 23 nt, Artificial Sequence
  Synthetic
acccaccuuggccugacaacgug

SEQ ID NO: 344775 - RNA, 24 nt, Artificial Sequence
  Synthetic
cacccaccuuggccugacaacgug

SEQ ID NO: 344776 - RNA, 18 nt, Artificial Sequence
  Synthetic
guucuuggggucaacgug

SEQ ID NO: 344777 - RNA, 19 nt, Artificial Sequence
  Synthetic
uguucuuggggucaacgug

SEQ ID NO: 344778 - RNA, 20 nt, Artificial Sequence
  Synthetic
guguucuuggggucaacgug

SEQ ID NO: 344779 - RNA, 21 nt, Artificial Sequence
  Synthetic
aguguucuuggggucaacgug

SEQ ID NO: 344780 - RNA, 22 nt, Artificial Sequence
  Synthetic
gaguguucuuggggucaacgug

SEQ ID NO: 344781 - RNA, 23 nt, Artificial Sequence
  Synthetic
ggaguguucuuggggucaacgug

SEQ ID NO: 344782 - RNA, 24 nt, Artificial Sequence
  Synthetic
aggaguguucuuggggucaacgug

SEQ ID NO: 344783 - RNA, 18 nt, Artificial Sequence
  Synthetic
aaaagugaaaauaacgug

SEQ ID NO: 344784 - RNA, 19 nt, Artificial Sequence
  Synthetic
aaaaagugaaaauaacgug

SEQ ID NO: 344785 - RNA, 20 nt, Artificial Sequence
  Synthetic
aaaaaagugaaaauaacgug

SEQ ID NO: 344786 - RNA, 21 nt, Artificial Sequence
  Synthetic
aaaaaaagugaaaauaacgug

SEQ ID NO: 344787 - RNA, 22 nt, Artificial Sequence
  Synthetic
aaaaaaaagugaaaauaacgug

SEQ ID NO: 344788 - RNA, 23 nt, Artificial Sequence
  Synthetic
aaaaaaaaagugaaaauaacgug

SEQ ID NO: 344789 - RNA, 24 nt, Artificial Sequence
  Synthetic
aaaaaaaaaagugaaaauaacgug

SEQ ID NO: 344790 - RNA, 18 nt, Artificial Sequence
  Synthetic
aguucugggacacacgug

SEQ ID NO: 344791 - RNA, 19 nt, Artificial Sequence
  Synthetic
aaguucugggacacacgug

SEQ ID NO: 344792 - RNA, 20 nt, Artificial Sequence
  Synthetic
uaaguucugggacacacgug

SEQ ID NO: 344793 - RNA, 21 nt, Artificial Sequence
  Synthetic
uuaaguucugggacacacgug

SEQ ID NO: 344794 - RNA, 22 nt, Artificial Sequence
  Synthetic
uuuaaguucugggacacacgug

SEQ ID NO: 344795 - RNA, 23 nt, Artificial Sequence
  Synthetic
cuuuaaguucugggacacacgug

SEQ ID NO: 344796 - RNA, 24 nt, Artificial Sequence
  Synthetic
acuuuaaguucugggacacacgug

SEQ ID NO: 344797 - RNA, 18 nt, Artificial Sequence
  Synthetic
gaucccucccaggacgug

SEQ ID NO: 344798 - RNA, 19 nt, Artificial Sequence
  Synthetic
ugaucccucccaggacgug

SEQ ID NO: 344799 - RNA, 20 nt, Artificial Sequence
  Synthetic
cugaucccucccaggacgug

SEQ ID NO: 344800 - RNA, 21 nt, Artificial Sequence
  Synthetic
ccugaucccucccaggacgug

SEQ ID NO: 344801 - RNA, 22 nt, Artificial Sequence
  Synthetic
accugaucccucccaggacgug

SEQ ID NO: 344802 - RNA, 23 nt, Artificial Sequence
  Synthetic
caccugaucccucccaggacgug

SEQ ID NO: 344803 - RNA, 24 nt, Artificial Sequence
  Synthetic
ccaccugaucccucccaggacgug

SEQ ID NO: 344804 - RNA, 18 nt, Artificial Sequence
  Synthetic
auuaauuccaguuacgug

SEQ ID NO: 344805 - RNA, 19 nt, Artificial Sequence
  Synthetic
aauuaauuccaguuacgug

SEQ ID NO: 344806 - RNA, 20 nt, Artificial Sequence
  Synthetic
aaauuaauuccaguuacgug

SEQ ID NO: 344807 - RNA, 21 nt, Artificial Sequence
  Synthetic
uaaauuaauuccaguuacgug

SEQ ID NO: 344808 - RNA, 22 nt, Artificial Sequence
  Synthetic
auaaauuaauuccaguuacgug

SEQ ID NO: 344809 - RNA, 23 nt, Artificial Sequence
  Synthetic
aauaaauuaauuccaguuacgug

SEQ ID NO: 344810 - RNA, 24 nt, Artificial Sequence
  Synthetic
gaauaaauuaauuccaguuacgug

SEQ ID NO: 344811 - RNA, 18 nt, Artificial Sequence
  Synthetic
ggacgaaaggugaccgug

SEQ ID NO: 344812 - RNA, 19 nt, Artificial Sequence
  Synthetic
aggacgaaaggugaccgug

SEQ ID NO: 344813 - RNA, 20 nt, Artificial Sequence
  Synthetic
caggacgaaaggugaccgug

SEQ ID NO: 344814 - RNA, 21 nt, Artificial Sequence
  Synthetic
ucaggacgaaaggugaccgug

SEQ ID NO: 344815 - RNA, 22 nt, Artificial Sequence
  Synthetic
gucaggacgaaaggugaccgug

SEQ ID NO: 344816 - RNA, 23 nt, Artificial Sequence
  Synthetic
ugucaggacgaaaggugaccgug

SEQ ID NO: 344817 - RNA, 24 nt, Artificial Sequence
  Synthetic
augucaggacgaaaggugaccgug

SEQ ID NO: 344818 - RNA, 18 nt, Artificial Sequence
  Synthetic
uggcuaauggcuaccgug

SEQ ID NO: 344819 - RNA, 19 nt, Artificial Sequence
  Synthetic
guggcuaauggcuaccgug

SEQ ID NO: 344820 - RNA, 20 nt, Artificial Sequence
  Synthetic
gguggcuaauggcuaccgug

SEQ ID NO: 344821 - RNA, 21 nt, Artificial Sequence
  Synthetic
agguggcuaauggcuaccgug

SEQ ID NO: 344822 - RNA, 22 nt, Artificial Sequence
  Synthetic
cagguggcuaauggcuaccgug

SEQ ID NO: 344823 - RNA, 23 nt, Artificial Sequence
  Synthetic
acagguggcuaauggcuaccgug

SEQ ID NO: 344824 - RNA, 24 nt, Artificial Sequence
  Synthetic
cacagguggcuaauggcuaccgug

SEQ ID NO: 344825 - RNA, 18 nt, Artificial Sequence
  Synthetic
uagccaacagaagccgug

SEQ ID NO: 344826 - RNA, 19 nt, Artificial Sequence
  Synthetic
cuagccaacagaagccgug

SEQ ID NO: 344827 - RNA, 20 nt, Artificial Sequence
  Synthetic
ccuagccaacagaagccgug

SEQ ID NO: 344828 - RNA, 21 nt, Artificial Sequence
  Synthetic
cccuagccaacagaagccgug

SEQ ID NO: 344829 - RNA, 22 nt, Artificial Sequence
  Synthetic
ccccuagccaacagaagccgug

SEQ ID NO: 344830 - RNA, 23 nt, Artificial Sequence
  Synthetic
uccccuagccaacagaagccgug

SEQ ID NO: 344831 - RNA, 24 nt, Artificial Sequence
  Synthetic
cuccccuagccaacagaagccgug

SEQ ID NO: 344832 - RNA, 18 nt, Artificial Sequence
  Synthetic
uacaaaugaauugccgug

SEQ ID NO: 344833 - RNA, 19 nt, Artificial Sequence
  Synthetic
cuacaaaugaauugccgug

SEQ ID NO: 344834 - RNA, 20 nt, Artificial Sequence
  Synthetic
acuacaaaugaauugccgug

SEQ ID NO: 344835 - RNA, 21 nt, Artificial Sequence
  Synthetic
aacuacaaaugaauugccgug

SEQ ID NO: 344836 - RNA, 22 nt, Artificial Sequence
  Synthetic
gaacuacaaaugaauugccgug

SEQ ID NO: 344837 - RNA, 23 nt, Artificial Sequence
  Synthetic
agaacuacaaaugaauugccgug

SEQ ID NO: 344838 - RNA, 24 nt, Artificial Sequence
  Synthetic
aagaacuacaaaugaauugccgug

SEQ ID NO: 344839 - RNA, 18 nt, Artificial Sequence
  Synthetic
accagcacacuguccgug

SEQ ID NO: 344840 - RNA, 19 nt, Artificial Sequence
  Synthetic
uaccagcacacuguccgug

SEQ ID NO: 344841 - RNA, 20 nt, Artificial Sequence
  Synthetic
auaccagcacacuguccgug

SEQ ID NO: 344842 - RNA, 21 nt, Artificial Sequence
  Synthetic
uauaccagcacacuguccgug

SEQ ID NO: 344843 - RNA, 22 nt, Artificial Sequence
  Synthetic
cuauaccagcacacuguccgug

SEQ ID NO: 344844 - RNA, 23 nt, Artificial Sequence
  Synthetic
ucuauaccagcacacuguccgug

SEQ ID NO: 344845 - RNA, 24 nt, Artificial Sequence
  Synthetic
aucuauaccagcacacuguccgug

SEQ ID NO: 344846 - RNA, 18 nt, Artificial Sequence
  Synthetic
uuuugcaauaguuccgug

SEQ ID NO: 344847 - RNA, 19 nt, Artificial Sequence
  Synthetic
guuuugcaauaguuccgug

SEQ ID NO: 344848 - RNA, 20 nt, Artificial Sequence
  Synthetic
aguuuugcaauaguuccgug

SEQ ID NO: 344849 - RNA, 21 nt, Artificial Sequence
  Synthetic
caguuuugcaauaguuccgug

SEQ ID NO: 344850 - RNA, 22 nt, Artificial Sequence
  Synthetic
ccaguuuugcaauaguuccgug

SEQ ID NO: 344851 - RNA, 23 nt, Artificial Sequence
  Synthetic
accaguuuugcaauaguuccgug

SEQ ID NO: 344852 - RNA, 24 nt, Artificial Sequence
  Synthetic
uaccaguuuugcaauaguuccgug

SEQ ID NO: 344853 - RNA, 18 nt, Artificial Sequence
  Synthetic
uucaagugcuaacgcgug

SEQ ID NO: 344854 - RNA, 19 nt, Artificial Sequence
  Synthetic
auucaagugcuaacgcgug

SEQ ID NO: 344855 - RNA, 20 nt, Artificial Sequence
  Synthetic
uauucaagugcuaacgcgug

SEQ ID NO: 344856 - RNA, 21 nt, Artificial Sequence
  Synthetic
uuauucaagugcuaacgcgug

SEQ ID NO: 344857 - RNA, 22 nt, Artificial Sequence
  Synthetic
uuuauucaagugcuaacgcgug

SEQ ID NO: 344858 - RNA, 23 nt, Artificial Sequence
  Synthetic
auuuauucaagugcuaacgcgug

SEQ ID NO: 344859 - RNA, 24 nt, Artificial Sequence
  Synthetic
cauuuauucaagugcuaacgcgug

SEQ ID NO: 344860 - RNA, 18 nt, Artificial Sequence
  Synthetic
auggcucuuuuggucgug

SEQ ID NO: 344861 - RNA, 19 nt, Artificial Sequence
  Synthetic
uauggcucuuuuggucgug

SEQ ID NO: 344862 - RNA, 20 nt, Artificial Sequence
  Synthetic
cuauggcucuuuuggucgug

SEQ ID NO: 344863 - RNA, 21 nt, Artificial Sequence
  Synthetic
ccuauggcucuuuuggucgug

SEQ ID NO: 344864 - RNA, 22 nt, Artificial Sequence
  Synthetic
gccuauggcucuuuuggucgug

SEQ ID NO: 344865 - RNA, 23 nt, Artificial Sequence
  Synthetic
ugccuauggcucuuuuggucgug

SEQ ID NO: 344866 - RNA, 24 nt, Artificial Sequence
  Synthetic
uugccuauggcucuuuuggucgug

SEQ ID NO: 344867 - RNA, 18 nt, Artificial Sequence
  Synthetic
acaggagggagaaaggug

SEQ ID NO: 344868 - RNA, 19 nt, Artificial Sequence
  Synthetic
gacaggagggagaaaggug

SEQ ID NO: 344869 - RNA, 20 nt, Artificial Sequence
  Synthetic
agacaggagggagaaaggug

SEQ ID NO: 344870 - RNA, 21 nt, Artificial Sequence
  Synthetic
gagacaggagggagaaaggug

SEQ ID NO: 344871 - RNA, 22 nt, Artificial Sequence
  Synthetic
ggagacaggagggagaaaggug

SEQ ID NO: 344872 - RNA, 23 nt, Artificial Sequence
  Synthetic
gggagacaggagggagaaaggug

SEQ ID NO: 344873 - RNA, 24 nt, Artificial Sequence
  Synthetic
ugggagacaggagggagaaaggug

SEQ ID NO: 344874 - RNA, 18 nt, Artificial Sequence
  Synthetic
acuugccaaggaaaggug

SEQ ID NO: 344875 - RNA, 19 nt, Artificial Sequence
  Synthetic
gacuugccaaggaaaggug

SEQ ID NO: 344876 - RNA, 20 nt, Artificial Sequence
  Synthetic
ugacuugccaaggaaaggug

SEQ ID NO: 344877 - RNA, 21 nt, Artificial Sequence
  Synthetic
cugacuugccaaggaaaggug

SEQ ID NO: 344878 - RNA, 22 nt, Artificial Sequence
  Synthetic
ccugacuugccaaggaaaggug

SEQ ID NO: 344879 - RNA, 23 nt, Artificial Sequence
  Synthetic
uccugacuugccaaggaaaggug

SEQ ID NO: 344880 - RNA, 24 nt, Artificial Sequence
  Synthetic
auccugacuugccaaggaaaggug

SEQ ID NO: 344881 - RNA, 18 nt, Artificial Sequence
  Synthetic
guuaucuuagacaaggug

SEQ ID NO: 344882 - RNA, 19 nt, Artificial Sequence
  Synthetic
aguuaucuuagacaaggug

SEQ ID NO: 344883 - RNA, 20 nt, Artificial Sequence
  Synthetic
gaguuaucuuagacaaggug

SEQ ID NO: 344884 - RNA, 21 nt, Artificial Sequence
  Synthetic
agaguuaucuuagacaaggug

SEQ ID NO: 344885 - RNA, 22 nt, Artificial Sequence
  Synthetic
cagaguuaucuuagacaaggug

SEQ ID NO: 344886 - RNA, 23 nt, Artificial Sequence
  Synthetic
ucagaguuaucuuagacaaggug

SEQ ID NO: 344887 - RNA, 24 nt, Artificial Sequence
  Synthetic
cucagaguuaucuuagacaaggug

SEQ ID NO: 344888 - RNA, 18 nt, Artificial Sequence
  Synthetic
accagccuggccaaggug

SEQ ID NO: 344889 - RNA, 19 nt, Artificial Sequence
  Synthetic
gaccagccuggccaaggug

SEQ ID NO: 344890 - RNA, 20 nt, Artificial Sequence
  Synthetic
agaccagccuggccaaggug

SEQ ID NO: 344891 - RNA, 21 nt, Artificial Sequence
  Synthetic
cagaccagccuggccaaggug

SEQ ID NO: 344892 - RNA, 22 nt, Artificial Sequence
  Synthetic
ccagaccagccuggccaaggug

SEQ ID NO: 344893 - RNA, 23 nt, Artificial Sequence
  Synthetic
uccagaccagccuggccaaggug

SEQ ID NO: 344894 - RNA, 24 nt, Artificial Sequence
  Synthetic
uuccagaccagccuggccaaggug

SEQ ID NO: 344895 - RNA, 18 nt, Artificial Sequence
  Synthetic
auugcuucaagcaaggug

SEQ ID NO: 344896 - RNA, 19 nt, Artificial Sequence
  Synthetic
aauugcuucaagcaaggug

SEQ ID NO: 344897 - RNA, 20 nt, Artificial Sequence
  Synthetic
aaauugcuucaagcaaggug

SEQ ID NO: 344898 - RNA, 21 nt, Artificial Sequence
  Synthetic
aaaauugcuucaagcaaggug

SEQ ID NO: 344899 - RNA, 22 nt, Artificial Sequence
  Synthetic
uaaaauugcuucaagcaaggug

SEQ ID NO: 344900 - RNA, 23 nt, Artificial Sequence
  Synthetic
uuaaaauugcuucaagcaaggug

SEQ ID NO: 344901 - RNA, 24 nt, Artificial Sequence
  Synthetic
auuaaaauugcuucaagcaaggug

SEQ ID NO: 344902 - RNA, 18 nt, Artificial Sequence
  Synthetic
uucaaaggcugcaaggug

SEQ ID NO: 344903 - RNA, 19 nt, Artificial Sequence
  Synthetic
uuucaaaggcugcaaggug

SEQ ID NO: 344904 - RNA, 20 nt, Artificial Sequence
  Synthetic
uuuucaaaggcugcaaggug

SEQ ID NO: 344905 - RNA, 21 nt, Artificial Sequence
  Synthetic
cuuuucaaaggcugcaaggug

SEQ ID NO: 344906 - RNA, 22 nt, Artificial Sequence
  Synthetic
gcuuuucaaaggcugcaaggug

SEQ ID NO: 344907 - RNA, 23 nt, Artificial Sequence
  Synthetic
ugcuuuucaaaggcugcaaggug

SEQ ID NO: 344908 - RNA, 24 nt, Artificial Sequence
  Synthetic
cugcuuuucaaaggcugcaaggug

SEQ ID NO: 344909 - RNA, 18 nt, Artificial Sequence
  Synthetic
guggcuguguucaaggug

SEQ ID NO: 344910 - RNA, 19 nt, Artificial Sequence
  Synthetic
uguggcuguguucaaggug

SEQ ID NO: 344911 - RNA, 20 nt, Artificial Sequence
  Synthetic
uuguggcuguguucaaggug

SEQ ID NO: 344912 - RNA, 21 nt, Artificial Sequence
  Synthetic
cuuguggcuguguucaaggug

SEQ ID NO: 344913 - RNA, 22 nt, Artificial Sequence
  Synthetic
gcuuguggcuguguucaaggug

SEQ ID NO: 344914 - RNA, 23 nt, Artificial Sequence
  Synthetic
ugcuuguggcuguguucaaggug

SEQ ID NO: 344915 - RNA, 24 nt, Artificial Sequence
  Synthetic
cugcuuguggcuguguucaaggug

SEQ ID NO: 344916 - RNA, 18 nt, Artificial Sequence
  Synthetic
caaucauggcagaaggug

SEQ ID NO: 344917 - RNA, 19 nt, Artificial Sequence
  Synthetic
acaaucauggcagaaggug

SEQ ID NO: 344918 - RNA, 20 nt, Artificial Sequence
  Synthetic
uacaaucauggcagaaggug

SEQ ID NO: 344919 - RNA, 21 nt, Artificial Sequence
  Synthetic
uuacaaucauggcagaaggug

SEQ ID NO: 344920 - RNA, 22 nt, Artificial Sequence
  Synthetic
cuuacaaucauggcagaaggug

SEQ ID NO: 344921 - RNA, 23 nt, Artificial Sequence
  Synthetic
acuuacaaucauggcagaaggug

SEQ ID NO: 344922 - RNA, 24 nt, Artificial Sequence
  Synthetic
aacuuacaaucauggcagaaggug

SEQ ID NO: 344923 - RNA, 18 nt, Artificial Sequence
  Synthetic
ccaguguaagagaaggug

SEQ ID NO: 344924 - RNA, 19 nt, Artificial Sequence
  Synthetic
uccaguguaagagaaggug

SEQ ID NO: 344925 - RNA, 20 nt, Artificial Sequence
  Synthetic
uuccaguguaagagaaggug

SEQ ID NO: 344926 - RNA, 21 nt, Artificial Sequence
  Synthetic
auuccaguguaagagaaggug

SEQ ID NO: 344927 - RNA, 22 nt, Artificial Sequence
  Synthetic
gauuccaguguaagagaaggug

SEQ ID NO: 344928 - RNA, 23 nt, Artificial Sequence
  Synthetic
ggauuccaguguaagagaaggug

SEQ ID NO: 344929 - RNA, 24 nt, Artificial Sequence
  Synthetic
aggauuccaguguaagagaaggug

SEQ ID NO: 344930 - RNA, 18 nt, Artificial Sequence
  Synthetic
ccagugaugaggaaggug

SEQ ID NO: 344931 - RNA, 19 nt, Artificial Sequence
  Synthetic
cccagugaugaggaaggug

SEQ ID NO: 344932 - RNA, 20 nt, Artificial Sequence
  Synthetic
gcccagugaugaggaaggug

SEQ ID NO: 344933 - RNA, 21 nt, Artificial Sequence
  Synthetic
ugcccagugaugaggaaggug

SEQ ID NO: 344934 - RNA, 22 nt, Artificial Sequence
  Synthetic
augcccagugaugaggaaggug

SEQ ID NO: 344935 - RNA, 23 nt, Artificial Sequence
  Synthetic
aaugcccagugaugaggaaggug

SEQ ID NO: 344936 - RNA, 24 nt, Artificial Sequence
  Synthetic
aaaugcccagugaugaggaaggug

SEQ ID NO: 344937 - RNA, 18 nt, Artificial Sequence
  Synthetic
caaucaugguggaaggug

SEQ ID NO: 344938 - RNA, 19 nt, Artificial Sequence
  Synthetic
acaaucaugguggaaggug

SEQ ID NO: 344939 - RNA, 20 nt, Artificial Sequence
  Synthetic
cacaaucaugguggaaggug

SEQ ID NO: 344940 - RNA, 21 nt, Artificial Sequence
  Synthetic
ucacaaucaugguggaaggug

SEQ ID NO: 344941 - RNA, 22 nt, Artificial Sequence
  Synthetic
cucacaaucaugguggaaggug

SEQ ID NO: 344942 - RNA, 23 nt, Artificial Sequence
  Synthetic
ccucacaaucaugguggaaggug

SEQ ID NO: 344943 - RNA, 24 nt, Artificial Sequence
  Synthetic
gccucacaaucaugguggaaggug

SEQ ID NO: 344944 - RNA, 18 nt, Artificial Sequence
  Synthetic
aaaacuaccgugaaggug

SEQ ID NO: 344945 - RNA, 19 nt, Artificial Sequence
  Synthetic
caaaacuaccgugaaggug

SEQ ID NO: 344946 - RNA, 20 nt, Artificial Sequence
  Synthetic
acaaaacuaccgugaaggug

SEQ ID NO: 344947 - RNA, 21 nt, Artificial Sequence
  Synthetic
cacaaaacuaccgugaaggug

SEQ ID NO: 344948 - RNA, 22 nt, Artificial Sequence
  Synthetic
acacaaaacuaccgugaaggug

SEQ ID NO: 344949 - RNA, 23 nt, Artificial Sequence
  Synthetic
cacacaaaacuaccgugaaggug

SEQ ID NO: 344950 - RNA, 24 nt, Artificial Sequence
  Synthetic
ccacacaaaacuaccgugaaggug

SEQ ID NO: 344951 - RNA, 18 nt, Artificial Sequence
  Synthetic
gcuuaaaggaauaaggug

SEQ ID NO: 344952 - RNA, 19 nt, Artificial Sequence
  Synthetic
agcuuaaaggaauaaggug

SEQ ID NO: 344953 - RNA, 20 nt, Artificial Sequence
  Synthetic
gagcuuaaaggaauaaggug

SEQ ID NO: 344954 - RNA, 21 nt, Artificial Sequence
  Synthetic
ggagcuuaaaggaauaaggug

SEQ ID NO: 344955 - RNA, 22 nt, Artificial Sequence
  Synthetic
uggagcuuaaaggaauaaggug

SEQ ID NO: 344956 - RNA, 23 nt, Artificial Sequence
  Synthetic
uuggagcuuaaaggaauaaggug

SEQ ID NO: 344957 - RNA, 24 nt, Artificial Sequence
  Synthetic
cuuggagcuuaaaggaauaaggug

SEQ ID NO: 344958 - RNA, 18 nt, Artificial Sequence
  Synthetic
caucuaccuccuaaggug

SEQ ID NO: 344959 - RNA, 19 nt, Artificial Sequence
  Synthetic
acaucuaccuccuaaggug

SEQ ID NO: 344960 - RNA, 20 nt, Artificial Sequence
  Synthetic
cacaucuaccuccuaaggug

SEQ ID NO: 344961 - RNA, 21 nt, Artificial Sequence
  Synthetic
ccacaucuaccuccuaaggug

SEQ ID NO: 344962 - RNA, 22 nt, Artificial Sequence
  Synthetic
cccacaucuaccuccuaaggug

SEQ ID NO: 344963 - RNA, 23 nt, Artificial Sequence
  Synthetic
acccacaucuaccuccuaaggug

SEQ ID NO: 344964 - RNA, 24 nt, Artificial Sequence
  Synthetic
cacccacaucuaccuccuaaggug

SEQ ID NO: 344965 - RNA, 18 nt, Artificial Sequence
  Synthetic
aacccccacuuuaaggug

SEQ ID NO: 344966 - RNA, 19 nt, Artificial Sequence
  Synthetic
aaacccccacuuuaaggug

SEQ ID NO: 344967 - RNA, 20 nt, Artificial Sequence
  Synthetic
gaaacccccacuuuaaggug

SEQ ID NO: 344968 - RNA, 21 nt, Artificial Sequence
  Synthetic
ugaaacccccacuuuaaggug

SEQ ID NO: 344969 - RNA, 22 nt, Artificial Sequence
  Synthetic
uugaaacccccacuuuaaggug

SEQ ID NO: 344970 - RNA, 23 nt, Artificial Sequence
  Synthetic
uuugaaacccccacuuuaaggug

SEQ ID NO: 344971 - RNA, 24 nt, Artificial Sequence
  Synthetic
cuuugaaacccccacuuuaaggug

SEQ ID NO: 344972 - RNA, 18 nt, Artificial Sequence
  Synthetic
uauuuacaaaaacaggug

SEQ ID NO: 344973 - RNA, 19 nt, Artificial Sequence
  Synthetic
uuauuuacaaaaacaggug

SEQ ID NO: 344974 - RNA, 20 nt, Artificial Sequence
  Synthetic
uuuauuuacaaaaacaggug

SEQ ID NO: 344975 - RNA, 21 nt, Artificial Sequence
  Synthetic
cuuuauuuacaaaaacaggug

SEQ ID NO: 344976 - RNA, 22 nt, Artificial Sequence
  Synthetic
acuuuauuuacaaaaacaggug

SEQ ID NO: 344977 - RNA, 23 nt, Artificial Sequence
  Synthetic
aacuuuauuuacaaaaacaggug

SEQ ID NO: 344978 - RNA, 24 nt, Artificial Sequence
  Synthetic
aaacuuuauuuacaaaaacaggug

SEQ ID NO: 344979 - RNA, 18 nt, Artificial Sequence
  Synthetic
gucaggaaacaacaggug

SEQ ID NO: 344980 - RNA, 19 nt, Artificial Sequence
  Synthetic
agucaggaaacaacaggug

SEQ ID NO: 344981 - RNA, 20 nt, Artificial Sequence
  Synthetic
aagucaggaaacaacaggug

SEQ ID NO: 344982 - RNA, 21 nt, Artificial Sequence
  Synthetic
aaagucaggaaacaacaggug

SEQ ID NO: 344983 - RNA, 22 nt, Artificial Sequence
  Synthetic
aaaagucaggaaacaacaggug

SEQ ID NO: 344984 - RNA, 23 nt, Artificial Sequence
  Synthetic
aaaaagucaggaaacaacaggug

SEQ ID NO: 344985 - RNA, 24 nt, Artificial Sequence
  Synthetic
uaaaaagucaggaaacaacaggug

SEQ ID NO: 344986 - RNA, 23 nt, Artificial Sequence
  Synthetic
caaaagucaggaaacaacaggug

SEQ ID NO: 344987 - RNA, 24 nt, Artificial Sequence
  Synthetic
ucaaaagucaggaaacaacaggug

SEQ ID NO: 344988 - RNA, 23 nt, Artificial Sequence
  Synthetic
uaaaagucaggaaacaacaggug

SEQ ID NO: 344989 - RNA, 24 nt, Artificial Sequence
  Synthetic
uuaaaagucaggaaacaacaggug

SEQ ID NO: 344990 - RNA, 18 nt, Artificial Sequence
  Synthetic
uuaugaaugcaacaggug

SEQ ID NO: 344991 - RNA, 19 nt, Artificial Sequence
  Synthetic
auuaugaaugcaacaggug

SEQ ID NO: 344992 - RNA, 20 nt, Artificial Sequence
  Synthetic
uauuaugaaugcaacaggug

SEQ ID NO: 344993 - RNA, 21 nt, Artificial Sequence
  Synthetic
cuauuaugaaugcaacaggug

SEQ ID NO: 344994 - RNA, 22 nt, Artificial Sequence
  Synthetic
acuauuaugaaugcaacaggug

SEQ ID NO: 344995 - RNA, 23 nt, Artificial Sequence
  Synthetic
uacuauuaugaaugcaacaggug

SEQ ID NO: 344996 - RNA, 24 nt, Artificial Sequence
  Synthetic
cuacuauuaugaaugcaacaggug

SEQ ID NO: 344997 - RNA, 18 nt, Artificial Sequence
  Synthetic
cacgugcaugcacaggug

SEQ ID NO: 344998 - RNA, 19 nt, Artificial Sequence
  Synthetic
acacgugcaugcacaggug

SEQ ID NO: 344999 - RNA, 20 nt, Artificial Sequence
  Synthetic
cacacgugcaugcacaggug

SEQ ID NO: 345000 - RNA, 21 nt, Artificial Sequence
  Synthetic
acacacgugcaugcacaggug

SEQ ID NO: 345001 - RNA, 22 nt, Artificial Sequence
  Synthetic
cacacacgugcaugcacaggug

SEQ ID NO: 345002 - RNA, 23 nt, Artificial Sequence
  Synthetic
acacacacgugcaugcacaggug

SEQ ID NO: 345003 - RNA, 24 nt, Artificial Sequence
  Synthetic
cacacacacgugcaugcacaggug

SEQ ID NO: 345004 - RNA, 18 nt, Artificial Sequence
  Synthetic
cguucugggauacaggug

SEQ ID NO: 345005 - RNA, 19 nt, Artificial Sequence
  Synthetic
acguucugggauacaggug

SEQ ID NO: 345006 - RNA, 20 nt, Artificial Sequence
  Synthetic
uacguucugggauacaggug

SEQ ID NO: 345007 - RNA, 21 nt, Artificial Sequence
  Synthetic
uuacguucugggauacaggug

SEQ ID NO: 345008 - RNA, 22 nt, Artificial Sequence
  Synthetic
uuuacguucugggauacaggug

SEQ ID NO: 345009 - RNA, 23 nt, Artificial Sequence
  Synthetic
cuuuacguucugggauacaggug

SEQ ID NO: 345010 - RNA, 24 nt, Artificial Sequence
  Synthetic
acuuuacguucugggauacaggug

SEQ ID NO: 345011 - RNA, 18 nt, Artificial Sequence
  Synthetic
guuaaaauuggccaggug

SEQ ID NO: 345012 - RNA, 19 nt, Artificial Sequence
  Synthetic
uguuaaaauuggccaggug

SEQ ID NO: 345013 - RNA, 20 nt, Artificial Sequence
  Synthetic
uuguuaaaauuggccaggug

SEQ ID NO: 345014 - RNA, 21 nt, Artificial Sequence
  Synthetic
guuguuaaaauuggccaggug

SEQ ID NO: 345015 - RNA, 22 nt, Artificial Sequence
  Synthetic
gguuguuaaaauuggccaggug

SEQ ID NO: 345016 - RNA, 23 nt, Artificial Sequence
  Synthetic
agguuguuaaaauuggccaggug

SEQ ID NO: 345017 - RNA, 24 nt, Artificial Sequence
  Synthetic
gagguuguuaaaauuggccaggug

SEQ ID NO: 345018 - RNA, 18 nt, Artificial Sequence
  Synthetic
aguuguuaagagcaggug

SEQ ID NO: 345019 - RNA, 19 nt, Artificial Sequence
  Synthetic
uaguuguuaagagcaggug

SEQ ID NO: 345020 - RNA, 20 nt, Artificial Sequence
  Synthetic
uuaguuguuaagagcaggug

SEQ ID NO: 345021 - RNA, 21 nt, Artificial Sequence
  Synthetic
cuuaguuguuaagagcaggug

SEQ ID NO: 345022 - RNA, 22 nt, Artificial Sequence
  Synthetic
ucuuaguuguuaagagcaggug

SEQ ID NO: 345023 - RNA, 23 nt, Artificial Sequence
  Synthetic
uucuuaguuguuaagagcaggug

SEQ ID NO: 345024 - RNA, 24 nt, Artificial Sequence
  Synthetic
auucuuaguuguuaagagcaggug

SEQ ID NO: 345025 - RNA, 18 nt, Artificial Sequence
  Synthetic
gucaggaaacaucaggug

SEQ ID NO: 345026 - RNA, 19 nt, Artificial Sequence
  Synthetic
agucaggaaacaucaggug

SEQ ID NO: 345027 - RNA, 20 nt, Artificial Sequence
  Synthetic
aagucaggaaacaucaggug

SEQ ID NO: 345028 - RNA, 21 nt, Artificial Sequence
  Synthetic
aaagucaggaaacaucaggug

SEQ ID NO: 345029 - RNA, 22 nt, Artificial Sequence
  Synthetic
aaaagucaggaaacaucaggug

SEQ ID NO: 345030 - RNA, 23 nt, Artificial Sequence
  Synthetic
aaaaagucaggaaacaucaggug

SEQ ID NO: 345031 - RNA, 24 nt, Artificial Sequence
  Synthetic
uaaaaagucaggaaacaucaggug

SEQ ID NO: 345032 - RNA, 18 nt, Artificial Sequence
  Synthetic
gagucuugguaucaggug

SEQ ID NO: 345033 - RNA, 19 nt, Artificial Sequence
  Synthetic
ggagucuugguaucaggug

SEQ ID NO: 345034 - RNA, 20 nt, Artificial Sequence
  Synthetic
uggagucuugguaucaggug

SEQ ID NO: 345035 - RNA, 21 nt, Artificial Sequence
  Synthetic
cuggagucuugguaucaggug

SEQ ID NO: 345036 - RNA, 22 nt, Artificial Sequence
  Synthetic
gcuggagucuugguaucaggug

SEQ ID NO: 345037 - RNA, 23 nt, Artificial Sequence
  Synthetic
agcuggagucuugguaucaggug

SEQ ID NO: 345038 - RNA, 24 nt, Artificial Sequence
  Synthetic
cagcuggagucuugguaucaggug

SEQ ID NO: 345039 - RNA, 18 nt, Artificial Sequence
  Synthetic
gacacauggggucaggug

SEQ ID NO: 345040 - RNA, 19 nt, Artificial Sequence
  Synthetic
agacacauggggucaggug

SEQ ID NO: 345041 - RNA, 20 nt, Artificial Sequence
  Synthetic
uagacacauggggucaggug

SEQ ID NO: 345042 - RNA, 21 nt, Artificial Sequence
  Synthetic
guagacacauggggucaggug

SEQ ID NO: 345043 - RNA, 22 nt, Artificial Sequence
  Synthetic
gguagacacauggggucaggug

SEQ ID NO: 345044 - RNA, 23 nt, Artificial Sequence
  Synthetic
ugguagacacauggggucaggug

SEQ ID NO: 345045 - RNA, 24 nt, Artificial Sequence
  Synthetic
augguagacacauggggucaggug

SEQ ID NO: 345046 - RNA, 18 nt, Artificial Sequence
  Synthetic
cccaugcuuugucaggug

SEQ ID NO: 345047 - RNA, 19 nt, Artificial Sequence
  Synthetic
ccccaugcuuugucaggug

SEQ ID NO: 345048 - RNA, 20 nt, Artificial Sequence
  Synthetic
gccccaugcuuugucaggug

SEQ ID NO: 345049 - RNA, 21 nt, Artificial Sequence
  Synthetic
agccccaugcuuugucaggug

SEQ ID NO: 345050 - RNA, 22 nt, Artificial Sequence
  Synthetic
cagccccaugcuuugucaggug

SEQ ID NO: 345051 - RNA, 23 nt, Artificial Sequence
  Synthetic
gcagccccaugcuuugucaggug

SEQ ID NO: 345052 - RNA, 24 nt, Artificial Sequence
  Synthetic
agcagccccaugcuuugucaggug

SEQ ID NO: 345053 - RNA, 18 nt, Artificial Sequence
  Synthetic
cucaaacuuuuucaggug

SEQ ID NO: 345054 - RNA, 19 nt, Artificial Sequence
  Synthetic
ccucaaacuuuuucaggug

SEQ ID NO: 345055 - RNA, 20 nt, Artificial Sequence
  Synthetic
accucaaacuuuuucaggug

SEQ ID NO: 345056 - RNA, 21 nt, Artificial Sequence
  Synthetic
gaccucaaacuuuuucaggug

SEQ ID NO: 345057 - RNA, 22 nt, Artificial Sequence
  Synthetic
ggaccucaaacuuuuucaggug

SEQ ID NO: 345058 - RNA, 23 nt, Artificial Sequence
  Synthetic
aggaccucaaacuuuuucaggug

SEQ ID NO: 345059 - RNA, 24 nt, Artificial Sequence
  Synthetic
gaggaccucaaacuuuuucaggug

SEQ ID NO: 345060 - RNA, 18 nt, Artificial Sequence
  Synthetic
ugaaugccgagagaggug

SEQ ID NO: 345061 - RNA, 19 nt, Artificial Sequence
  Synthetic
gugaaugccgagagaggug

SEQ ID NO: 345062 - RNA, 20 nt, Artificial Sequence
  Synthetic
ugugaaugccgagagaggug

SEQ ID NO: 345063 - RNA, 21 nt, Artificial Sequence
  Synthetic
cugugaaugccgagagaggug

SEQ ID NO: 345064 - RNA, 22 nt, Artificial Sequence
  Synthetic
ucugugaaugccgagagaggug

SEQ ID NO: 345065 - RNA, 23 nt, Artificial Sequence
  Synthetic
uucugugaaugccgagagaggug

SEQ ID NO: 345066 - RNA, 24 nt, Artificial Sequence
  Synthetic
auucugugaaugccgagagaggug

SEQ ID NO: 345067 - RNA, 18 nt, Artificial Sequence
  Synthetic
gaggccugucgcgaggug

SEQ ID NO: 345068 - RNA, 19 nt, Artificial Sequence
  Synthetic
cgaggccugucgcgaggug

SEQ ID NO: 345069 - RNA, 20 nt, Artificial Sequence
  Synthetic
ccgaggccugucgcgaggug

SEQ ID NO: 345070 - RNA, 21 nt, Artificial Sequence
  Synthetic
accgaggccugucgcgaggug

SEQ ID NO: 345071 - RNA, 22 nt, Artificial Sequence
  Synthetic
caccgaggccugucgcgaggug

SEQ ID NO: 345072 - RNA, 23 nt, Artificial Sequence
  Synthetic
acaccgaggccugucgcgaggug

SEQ ID NO: 345073 - RNA, 24 nt, Artificial Sequence
  Synthetic
cacaccgaggccugucgcgaggug

SEQ ID NO: 345074 - RNA, 18 nt, Artificial Sequence
  Synthetic
aaguaggcugaggaggug

SEQ ID NO: 345075 - RNA, 19 nt, Artificial Sequence
  Synthetic
uaaguaggcugaggaggug

SEQ ID NO: 345076 - RNA, 20 nt, Artificial Sequence
  Synthetic
uuaaguaggcugaggaggug

SEQ ID NO: 345077 - RNA, 21 nt, Artificial Sequence
  Synthetic
guuaaguaggcugaggaggug

SEQ ID NO: 345078 - RNA, 22 nt, Artificial Sequence
  Synthetic
cguuaaguaggcugaggaggug

SEQ ID NO: 345079 - RNA, 23 nt, Artificial Sequence
  Synthetic
acguuaaguaggcugaggaggug

SEQ ID NO: 345080 - RNA, 24 nt, Artificial Sequence
  Synthetic
cacguuaaguaggcugaggaggug

SEQ ID NO: 345081 - RNA, 18 nt, Artificial Sequence
  Synthetic
acauagguuacugaggug

SEQ ID NO: 345082 - RNA, 19 nt, Artificial Sequence
  Synthetic
gacauagguuacugaggug

SEQ ID NO: 345083 - RNA, 20 nt, Artificial Sequence
  Synthetic
agacauagguuacugaggug

SEQ ID NO: 345084 - RNA, 21 nt, Artificial Sequence
  Synthetic
aagacauagguuacugaggug

SEQ ID NO: 345085 - RNA, 22 nt, Artificial Sequence
  Synthetic
uaagacauagguuacugaggug

SEQ ID NO: 345086 - RNA, 23 nt, Artificial Sequence
  Synthetic
cuaagacauagguuacugaggug

SEQ ID NO: 345087 - RNA, 24 nt, Artificial Sequence
  Synthetic
ucuaagacauagguuacugaggug

SEQ ID NO: 345088 - RNA, 18 nt, Artificial Sequence
  Synthetic
ucagugggaccugaggug

SEQ ID NO: 345089 - RNA, 19 nt, Artificial Sequence
  Synthetic
uucagugggaccugaggug

SEQ ID NO: 345090 - RNA, 20 nt, Artificial Sequence
  Synthetic
cuucagugggaccugaggug

SEQ ID NO: 345091 - RNA, 21 nt, Artificial Sequence
  Synthetic
acuucagugggaccugaggug

SEQ ID NO: 345092 - RNA, 22 nt, Artificial Sequence
  Synthetic
gacuucagugggaccugaggug

SEQ ID NO: 345093 - RNA, 23 nt, Artificial Sequence
  Synthetic
ugacuucagugggaccugaggug

SEQ ID NO: 345094 - RNA, 24 nt, Artificial Sequence
  Synthetic
augacuucagugggaccugaggug

SEQ ID NO: 345095 - RNA, 18 nt, Artificial Sequence
  Synthetic
aaguaugugugugaggug

SEQ ID NO: 345096 - RNA, 19 nt, Artificial Sequence
  Synthetic
uaaguaugugugugaggug

SEQ ID NO: 345097 - RNA, 20 nt, Artificial Sequence
  Synthetic
auaaguaugugugugaggug

SEQ ID NO: 345098 - RNA, 21 nt, Artificial Sequence
  Synthetic
uauaaguaugugugugaggug

SEQ ID NO: 345099 - RNA, 22 nt, Artificial Sequence
  Synthetic
guauaaguaugugugugaggug

SEQ ID NO: 345100 - RNA, 23 nt, Artificial Sequence
  Synthetic
aguauaaguaugugugugaggug

SEQ ID NO: 345101 - RNA, 24 nt, Artificial Sequence
  Synthetic
aaguauaaguaugugugugaggug

SEQ ID NO: 345102 - RNA, 18 nt, Artificial Sequence
  Synthetic
gcugcacugcuugaggug

SEQ ID NO: 345103 - RNA, 19 nt, Artificial Sequence
  Synthetic
ggcugcacugcuugaggug

SEQ ID NO: 345104 - RNA, 20 nt, Artificial Sequence
  Synthetic
gggcugcacugcuugaggug

SEQ ID NO: 345105 - RNA, 21 nt, Artificial Sequence
  Synthetic
ugggcugcacugcuugaggug

SEQ ID NO: 345106 - RNA, 22 nt, Artificial Sequence
  Synthetic
gugggcugcacugcuugaggug

SEQ ID NO: 345107 - RNA, 23 nt, Artificial Sequence
  Synthetic
ugugggcugcacugcuugaggug

SEQ ID NO: 345108 - RNA, 24 nt, Artificial Sequence
  Synthetic
cugugggcugcacugcuugaggug

SEQ ID NO: 345109 - RNA, 18 nt, Artificial Sequence
  Synthetic
uauauuuaucuugaggug

SEQ ID NO: 345110 - RNA, 19 nt, Artificial Sequence
  Synthetic
guauauuuaucuugaggug

SEQ ID NO: 345111 - RNA, 20 nt, Artificial Sequence
  Synthetic
uguauauuuaucuugaggug

SEQ ID NO: 345112 - RNA, 21 nt, Artificial Sequence
  Synthetic
uuguauauuuaucuugaggug

SEQ ID NO: 345113 - RNA, 22 nt, Artificial Sequence
  Synthetic
auuguauauuuaucuugaggug

SEQ ID NO: 345114 - RNA, 23 nt, Artificial Sequence
  Synthetic
uauuguauauuuaucuugaggug

SEQ ID NO: 345115 - RNA, 24 nt, Artificial Sequence
  Synthetic
uuauuguauauuuaucuugaggug

SEQ ID NO: 345116 - RNA, 18 nt, Artificial Sequence
  Synthetic
gaaagauuauuauaggug

SEQ ID NO: 345117 - RNA, 19 nt, Artificial Sequence
  Synthetic
ggaaagauuauuauaggug

SEQ ID NO: 345118 - RNA, 20 nt, Artificial Sequence
  Synthetic
aggaaagauuauuauaggug

SEQ ID NO: 345119 - RNA, 21 nt, Artificial Sequence
  Synthetic
gaggaaagauuauuauaggug

SEQ ID NO: 345120 - RNA, 22 nt, Artificial Sequence
  Synthetic
agaggaaagauuauuauaggug

SEQ ID NO: 345121 - RNA, 23 nt, Artificial Sequence
  Synthetic
aagaggaaagauuauuauaggug

SEQ ID NO: 345122 - RNA, 24 nt, Artificial Sequence
  Synthetic
gaagaggaaagauuauuauaggug

SEQ ID NO: 345123 - RNA, 18 nt, Artificial Sequence
  Synthetic
gggcuuaauaucuaggug

SEQ ID NO: 345124 - RNA, 19 nt, Artificial Sequence
  Synthetic
ugggcuuaauaucuaggug

SEQ ID NO: 345125 - RNA, 20 nt, Artificial Sequence
  Synthetic
cugggcuuaauaucuaggug

SEQ ID NO: 345126 - RNA, 21 nt, Artificial Sequence
  Synthetic
gcugggcuuaauaucuaggug

SEQ ID NO: 345127 - RNA, 22 nt, Artificial Sequence
  Synthetic
ugcugggcuuaauaucuaggug

SEQ ID NO: 345128 - RNA, 23 nt, Artificial Sequence
  Synthetic
augcugggcuuaauaucuaggug

SEQ ID NO: 345129 - RNA, 24 nt, Artificial Sequence
  Synthetic
caugcugggcuuaauaucuaggug

SEQ ID NO: 345130 - RNA, 18 nt, Artificial Sequence
  Synthetic
aaauuaauuccguaggug

SEQ ID NO: 345131 - RNA, 19 nt, Artificial Sequence
  Synthetic
gaaauuaauuccguaggug

SEQ ID NO: 345132 - RNA, 20 nt, Artificial Sequence
  Synthetic
ggaaauuaauuccguaggug

SEQ ID NO: 345133 - RNA, 21 nt, Artificial Sequence
  Synthetic
aggaaauuaauuccguaggug

SEQ ID NO: 345134 - RNA, 22 nt, Artificial Sequence
  Synthetic
gaggaaauuaauuccguaggug

SEQ ID NO: 345135 - RNA, 23 nt, Artificial Sequence
  Synthetic
agaggaaauuaauuccguaggug

SEQ ID NO: 345136 - RNA, 24 nt, Artificial Sequence
  Synthetic
uagaggaaauuaauuccguaggug

SEQ ID NO: 345137 - RNA, 18 nt, Artificial Sequence
  Synthetic
ccuacucaauaaacggug

SEQ ID NO: 345138 - RNA, 19 nt, Artificial Sequence
  Synthetic
cccuacucaauaaacggug

SEQ ID NO: 345139 - RNA, 20 nt, Artificial Sequence
  Synthetic
ucccuacucaauaaacggug

SEQ ID NO: 345140 - RNA, 21 nt, Artificial Sequence
  Synthetic
cucccuacucaauaaacggug

SEQ ID NO: 345141 - RNA, 22 nt, Artificial Sequence
  Synthetic
acucccuacucaauaaacggug

SEQ ID NO: 345142 - RNA, 23 nt, Artificial Sequence
  Synthetic
gacucccuacucaauaaacggug

SEQ ID NO: 345143 - RNA, 24 nt, Artificial Sequence
  Synthetic
ggacucccuacucaauaaacggug

SEQ ID NO: 345144 - RNA, 18 nt, Artificial Sequence
  Synthetic
aauuagcugggcacggug

SEQ ID NO: 345145 - RNA, 19 nt, Artificial Sequence
  Synthetic
aaauuagcugggcacggug

SEQ ID NO: 345146 - RNA, 20 nt, Artificial Sequence
  Synthetic
aaaauuagcugggcacggug

SEQ ID NO: 345147 - RNA, 21 nt, Artificial Sequence
  Synthetic
aaaaauuagcugggcacggug

SEQ ID NO: 345148 - RNA, 22 nt, Artificial Sequence
  Synthetic
aaaaaauuagcugggcacggug

SEQ ID NO: 345149 - RNA, 23 nt, Artificial Sequence
  Synthetic
caaaaaauuagcugggcacggug

SEQ ID NO: 345150 - RNA, 24 nt, Artificial Sequence
  Synthetic
acaaaaaauuagcugggcacggug

SEQ ID NO: 345151 - RNA, 18 nt, Artificial Sequence
  Synthetic
ggcagaagacuuacggug

SEQ ID NO: 345152 - RNA, 19 nt, Artificial Sequence
  Synthetic
aggcagaagacuuacggug

SEQ ID NO: 345153 - RNA, 20 nt, Artificial Sequence
  Synthetic
caggcagaagacuuacggug

SEQ ID NO: 345154 - RNA, 21 nt, Artificial Sequence
  Synthetic
ucaggcagaagacuuacggug

SEQ ID NO: 345155 - RNA, 22 nt, Artificial Sequence
  Synthetic
cucaggcagaagacuuacggug

SEQ ID NO: 345156 - RNA, 23 nt, Artificial Sequence
  Synthetic
ucucaggcagaagacuuacggug

SEQ ID NO: 345157 - RNA, 24 nt, Artificial Sequence
  Synthetic
uucucaggcagaagacuuacggug

SEQ ID NO: 345158 - RNA, 18 nt, Artificial Sequence
  Synthetic
uccauucccagcccggug

SEQ ID NO: 345159 - RNA, 19 nt, Artificial Sequence
  Synthetic
guccauucccagcccggug

SEQ ID NO: 345160 - RNA, 20 nt, Artificial Sequence
  Synthetic
aguccauucccagcccggug

SEQ ID NO: 345161 - RNA, 21 nt, Artificial Sequence
  Synthetic
gaguccauucccagcccggug

SEQ ID NO: 345162 - RNA, 22 nt, Artificial Sequence
  Synthetic
ggaguccauucccagcccggug

SEQ ID NO: 345163 - RNA, 23 nt, Artificial Sequence
  Synthetic
aggaguccauucccagcccggug

SEQ ID NO: 345164 - RNA, 24 nt, Artificial Sequence
  Synthetic
caggaguccauucccagcccggug

SEQ ID NO: 345165 - RNA, 18 nt, Artificial Sequence
  Synthetic
gacaugugccuuccggug

SEQ ID NO: 345166 - RNA, 19 nt, Artificial Sequence
  Synthetic
agacaugugccuuccggug

SEQ ID NO: 345167 - RNA, 20 nt, Artificial Sequence
  Synthetic
uagacaugugccuuccggug

SEQ ID NO: 345168 - RNA, 21 nt, Artificial Sequence
  Synthetic
uuagacaugugccuuccggug

SEQ ID NO: 345169 - RNA, 22 nt, Artificial Sequence
  Synthetic
uuuagacaugugccuuccggug

SEQ ID NO: 345170 - RNA, 23 nt, Artificial Sequence
  Synthetic
guuuagacaugugccuuccggug

SEQ ID NO: 345171 - RNA, 24 nt, Artificial Sequence
  Synthetic
gguuuagacaugugccuuccggug

SEQ ID NO: 345172 - RNA, 18 nt, Artificial Sequence
  Synthetic
ggcagacagaacgcggug

SEQ ID NO: 345173 - RNA, 19 nt, Artificial Sequence
  Synthetic
uggcagacagaacgcggug

SEQ ID NO: 345174 - RNA, 20 nt, Artificial Sequence
  Synthetic
uuggcagacagaacgcggug

SEQ ID NO: 345175 - RNA, 21 nt, Artificial Sequence
  Synthetic
auuggcagacagaacgcggug

SEQ ID NO: 345176 - RNA, 22 nt, Artificial Sequence
  Synthetic
gauuggcagacagaacgcggug

SEQ ID NO: 345177 - RNA, 23 nt, Artificial Sequence
  Synthetic
ugauuggcagacagaacgcggug

SEQ ID NO: 345178 - RNA, 24 nt, Artificial Sequence
  Synthetic
uugauuggcagacagaacgcggug

SEQ ID NO: 345179 - RNA, 18 nt, Artificial Sequence
  Synthetic
ugugugugucugucggug

SEQ ID NO: 345180 - RNA, 19 nt, Artificial Sequence
  Synthetic
gugugugugucugucggug

SEQ ID NO: 345181 - RNA, 20 nt, Artificial Sequence
  Synthetic
ugugugugugucugucggug

SEQ ID NO: 345182 - RNA, 21 nt, Artificial Sequence
  Synthetic
gugugugugugucugucggug

SEQ ID NO: 345183 - RNA, 22 nt, Artificial Sequence
  Synthetic
ugugugugugugucugucggug

SEQ ID NO: 345184 - RNA, 23 nt, Artificial Sequence
  Synthetic
gugugugugugugucugucggug

SEQ ID NO: 345185 - RNA, 24 nt, Artificial Sequence
  Synthetic
ugugugugugugugucugucggug

SEQ ID NO: 345186 - RNA, 18 nt, Artificial Sequence
  Synthetic
cuaaguuaaacaagggug

SEQ ID NO: 345187 - RNA, 19 nt, Artificial Sequence
  Synthetic
acuaaguuaaacaagggug

SEQ ID NO: 345188 - RNA, 20 nt, Artificial Sequence
  Synthetic
uacuaaguuaaacaagggug

SEQ ID NO: 345189 - RNA, 21 nt, Artificial Sequence
  Synthetic
guacuaaguuaaacaagggug

SEQ ID NO: 345190 - RNA, 22 nt, Artificial Sequence
  Synthetic
aguacuaaguuaaacaagggug

SEQ ID NO: 345191 - RNA, 23 nt, Artificial Sequence
  Synthetic
caguacuaaguuaaacaagggug

SEQ ID NO: 345192 - RNA, 24 nt, Artificial Sequence
  Synthetic
ccaguacuaaguuaaacaagggug

SEQ ID NO: 345193 - RNA, 18 nt, Artificial Sequence
  Synthetic
cuucauuuuacaagggug

SEQ ID NO: 345194 - RNA, 19 nt, Artificial Sequence
  Synthetic
ccuucauuuuacaagggug

SEQ ID NO: 345195 - RNA, 20 nt, Artificial Sequence
  Synthetic
uccuucauuuuacaagggug

SEQ ID NO: 345196 - RNA, 21 nt, Artificial Sequence
  Synthetic
auccuucauuuuacaagggug

SEQ ID NO: 345197 - RNA, 22 nt, Artificial Sequence
  Synthetic
cauccuucauuuuacaagggug

SEQ ID NO: 345198 - RNA, 23 nt, Artificial Sequence
  Synthetic
acauccuucauuuuacaagggug

SEQ ID NO: 345199 - RNA, 24 nt, Artificial Sequence
  Synthetic
aacauccuucauuuuacaagggug

SEQ ID NO: 345200 - RNA, 18 nt, Artificial Sequence
  Synthetic
aggauggaaucaagggug

SEQ ID NO: 345201 - RNA, 19 nt, Artificial Sequence
  Synthetic
uaggauggaaucaagggug

SEQ ID NO: 345202 - RNA, 20 nt, Artificial Sequence
  Synthetic
uuaggauggaaucaagggug

SEQ ID NO: 345203 - RNA, 21 nt, Artificial Sequence
  Synthetic
guuaggauggaaucaagggug

SEQ ID NO: 345204 - RNA, 22 nt, Artificial Sequence
  Synthetic
uguuaggauggaaucaagggug

SEQ ID NO: 345205 - RNA, 23 nt, Artificial Sequence
  Synthetic
uuguuaggauggaaucaagggug

SEQ ID NO: 345206 - RNA, 24 nt, Artificial Sequence
  Synthetic
cuuguuaggauggaaucaagggug

SEQ ID NO: 345207 - RNA, 18 nt, Artificial Sequence
  Synthetic
aacgaagggagaagggug

SEQ ID NO: 345208 - RNA, 19 nt, Artificial Sequence
  Synthetic
gaacgaagggagaagggug

SEQ ID NO: 345209 - RNA, 20 nt, Artificial Sequence
  Synthetic
agaacgaagggagaagggug

SEQ ID NO: 345210 - RNA, 21 nt, Artificial Sequence
  Synthetic
cagaacgaagggagaagggug

SEQ ID NO: 345211 - RNA, 22 nt, Artificial Sequence
  Synthetic
acagaacgaagggagaagggug

SEQ ID NO: 345212 - RNA, 23 nt, Artificial Sequence
  Synthetic
gacagaacgaagggagaagggug

SEQ ID NO: 345213 - RNA, 24 nt, Artificial Sequence
  Synthetic
agacagaacgaagggagaagggug

SEQ ID NO: 345214 - RNA, 18 nt, Artificial Sequence
  Synthetic
aucagguucugaagggug

SEQ ID NO: 345215 - RNA, 19 nt, Artificial Sequence
  Synthetic
gaucagguucugaagggug

SEQ ID NO: 345216 - RNA, 20 nt, Artificial Sequence
  Synthetic
agaucagguucugaagggug

SEQ ID NO: 345217 - RNA, 21 nt, Artificial Sequence
  Synthetic
aagaucagguucugaagggug

SEQ ID NO: 345218 - RNA, 22 nt, Artificial Sequence
  Synthetic
aaagaucagguucugaagggug

SEQ ID NO: 345219 - RNA, 23 nt, Artificial Sequence
  Synthetic
uaaagaucagguucugaagggug

SEQ ID NO: 345220 - RNA, 24 nt, Artificial Sequence
  Synthetic
uuaaagaucagguucugaagggug

SEQ ID NO: 345221 - RNA, 18 nt, Artificial Sequence
  Synthetic
acacuuggacacagggug

SEQ ID NO: 345222 - RNA, 19 nt, Artificial Sequence
  Synthetic
aacacuuggacacagggug

SEQ ID NO: 345223 - RNA, 20 nt, Artificial Sequence
  Synthetic
gaacacuuggacacagggug

SEQ ID NO: 345224 - RNA, 21 nt, Artificial Sequence
  Synthetic
agaacacuuggacacagggug

SEQ ID NO: 345225 - RNA, 22 nt, Artificial Sequence
  Synthetic
gagaacacuuggacacagggug

SEQ ID NO: 345226 - RNA, 23 nt, Artificial Sequence
  Synthetic
ugagaacacuuggacacagggug

SEQ ID NO: 345227 - RNA, 24 nt, Artificial Sequence
  Synthetic
augagaacacuuggacacagggug

SEQ ID NO: 345228 - RNA, 18 nt, Artificial Sequence
  Synthetic
ucaggauugggcagggug

SEQ ID NO: 345229 - RNA, 19 nt, Artificial Sequence
  Synthetic
cucaggauugggcagggug

SEQ ID NO: 345230 - RNA, 20 nt, Artificial Sequence
  Synthetic
acucaggauugggcagggug

SEQ ID NO: 345231 - RNA, 21 nt, Artificial Sequence
  Synthetic
uacucaggauugggcagggug

SEQ ID NO: 345232 - RNA, 22 nt, Artificial Sequence
  Synthetic
auacucaggauugggcagggug

SEQ ID NO: 345233 - RNA, 23 nt, Artificial Sequence
  Synthetic
cauacucaggauugggcagggug

SEQ ID NO: 345234 - RNA, 24 nt, Artificial Sequence
  Synthetic
acauacucaggauugggcagggug

SEQ ID NO: 345235 - RNA, 18 nt, Artificial Sequence
  Synthetic
uggguaaccaagagggug

SEQ ID NO: 345236 - RNA, 19 nt, Artificial Sequence
  Synthetic
uuggguaaccaagagggug

SEQ ID NO: 345237 - RNA, 20 nt, Artificial Sequence
  Synthetic
uuuggguaaccaagagggug

SEQ ID NO: 345238 - RNA, 21 nt, Artificial Sequence
  Synthetic
cuuuggguaaccaagagggug

SEQ ID NO: 345239 - RNA, 22 nt, Artificial Sequence
  Synthetic
acuuuggguaaccaagagggug

SEQ ID NO: 345240 - RNA, 23 nt, Artificial Sequence
  Synthetic
uacuuuggguaaccaagagggug

SEQ ID NO: 345241 - RNA, 24 nt, Artificial Sequence
  Synthetic
auacuuuggguaaccaagagggug

SEQ ID NO: 345242 - RNA, 18 nt, Artificial Sequence
  Synthetic
acacagaaaaggagggug

SEQ ID NO: 345243 - RNA, 19 nt, Artificial Sequence
  Synthetic
gacacagaaaaggagggug

SEQ ID NO: 345244 - RNA, 20 nt, Artificial Sequence
  Synthetic
agacacagaaaaggagggug

SEQ ID NO: 345245 - RNA, 21 nt, Artificial Sequence
  Synthetic
aagacacagaaaaggagggug

SEQ ID NO: 345246 - RNA, 22 nt, Artificial Sequence
  Synthetic
gaagacacagaaaaggagggug

SEQ ID NO: 345247 - RNA, 23 nt, Artificial Sequence
  Synthetic
ugaagacacagaaaaggagggug

SEQ ID NO: 345248 - RNA, 24 nt, Artificial Sequence
  Synthetic
cugaagacacagaaaaggagggug

SEQ ID NO: 345249 - RNA, 18 nt, Artificial Sequence
  Synthetic
ugggguggggggagggug

SEQ ID NO: 345250 - RNA, 19 nt, Artificial Sequence
  Synthetic
gugggguggggggagggug

SEQ ID NO: 345251 - RNA, 20 nt, Artificial Sequence
  Synthetic
ugugggguggggggagggug

SEQ ID NO: 345252 - RNA, 21 nt, Artificial Sequence
  Synthetic
uugugggguggggggagggug

SEQ ID NO: 345253 - RNA, 22 nt, Artificial Sequence
  Synthetic
guugugggguggggggagggug

SEQ ID NO: 345254 - RNA, 23 nt, Artificial Sequence
  Synthetic
uguugugggguggggggagggug

SEQ ID NO: 345255 - RNA, 24 nt, Artificial Sequence
  Synthetic
cuguugugggguggggggagggug

SEQ ID NO: 345256 - RNA, 18 nt, Artificial Sequence
  Synthetic
cagaaggaaaauagggug

SEQ ID NO: 345257 - RNA, 19 nt, Artificial Sequence
  Synthetic
ucagaaggaaaauagggug

SEQ ID NO: 345258 - RNA, 20 nt, Artificial Sequence
  Synthetic
uucagaaggaaaauagggug

SEQ ID NO: 345259 - RNA, 21 nt, Artificial Sequence
  Synthetic
guucagaaggaaaauagggug

SEQ ID NO: 345260 - RNA, 22 nt, Artificial Sequence
  Synthetic
gguucagaaggaaaauagggug

SEQ ID NO: 345261 - RNA, 23 nt, Artificial Sequence
  Synthetic
ggguucagaaggaaaauagggug

SEQ ID NO: 345262 - RNA, 24 nt, Artificial Sequence
  Synthetic
aggguucagaaggaaaauagggug

SEQ ID NO: 345263 - RNA, 18 nt, Artificial Sequence
  Synthetic
guaccaagcccuagggug

SEQ ID NO: 345264 - RNA, 19 nt, Artificial Sequence
  Synthetic
gguaccaagcccuagggug

SEQ ID NO: 345265 - RNA, 20 nt, Artificial Sequence
  Synthetic
ugguaccaagcccuagggug

SEQ ID NO: 345266 - RNA, 21 nt, Artificial Sequence
  Synthetic
cugguaccaagcccuagggug

SEQ ID NO: 345267 - RNA, 22 nt, Artificial Sequence
  Synthetic
ucugguaccaagcccuagggug

SEQ ID NO: 345268 - RNA, 23 nt, Artificial Sequence
  Synthetic
gucugguaccaagcccuagggug

SEQ ID NO: 345269 - RNA, 24 nt, Artificial Sequence
  Synthetic
ugucugguaccaagcccuagggug

SEQ ID NO: 345270 - RNA, 18 nt, Artificial Sequence
  Synthetic
aaaaggcugccuagggug

SEQ ID NO: 345271 - RNA, 19 nt, Artificial Sequence
  Synthetic
gaaaaggcugccuagggug

SEQ ID NO: 345272 - RNA, 20 nt, Artificial Sequence
  Synthetic
ggaaaaggcugccuagggug

SEQ ID NO: 345273 - RNA, 21 nt, Artificial Sequence
  Synthetic
uggaaaaggcugccuagggug

SEQ ID NO: 345274 - RNA, 22 nt, Artificial Sequence
  Synthetic
auggaaaaggcugccuagggug

SEQ ID NO: 345275 - RNA, 23 nt, Artificial Sequence
  Synthetic
aauggaaaaggcugccuagggug

SEQ ID NO: 345276 - RNA, 24 nt, Artificial Sequence
  Synthetic
caauggaaaaggcugccuagggug

SEQ ID NO: 345277 - RNA, 18 nt, Artificial Sequence
  Synthetic
gacagucaucuuagggug

SEQ ID NO: 345278 - RNA, 19 nt, Artificial Sequence
  Synthetic
ugacagucaucuuagggug

SEQ ID NO: 345279 - RNA, 20 nt, Artificial Sequence
  Synthetic
gugacagucaucuuagggug

SEQ ID NO: 345280 - RNA, 21 nt, Artificial Sequence
  Synthetic
ggugacagucaucuuagggug

SEQ ID NO: 345281 - RNA, 22 nt, Artificial Sequence
  Synthetic
gggugacagucaucuuagggug

SEQ ID NO: 345282 - RNA, 23 nt, Artificial Sequence
  Synthetic
ugggugacagucaucuuagggug

SEQ ID NO: 345283 - RNA, 24 nt, Artificial Sequence
  Synthetic
uugggugacagucaucuuagggug

SEQ ID NO: 345284 - RNA, 18 nt, Artificial Sequence
  Synthetic
ggggaaaaaguuagggug

SEQ ID NO: 345285 - RNA, 19 nt, Artificial Sequence
  Synthetic
aggggaaaaaguuagggug

SEQ ID NO: 345286 - RNA, 20 nt, Artificial Sequence
  Synthetic
gaggggaaaaaguuagggug

SEQ ID NO: 345287 - RNA, 21 nt, Artificial Sequence
  Synthetic
ugaggggaaaaaguuagggug

SEQ ID NO: 345288 - RNA, 22 nt, Artificial Sequence
  Synthetic
gugaggggaaaaaguuagggug

SEQ ID NO: 345289 - RNA, 23 nt, Artificial Sequence
  Synthetic
ggugaggggaaaaaguuagggug

SEQ ID NO: 345290 - RNA, 24 nt, Artificial Sequence
  Synthetic
gggugaggggaaaaaguuagggug

SEQ ID NO: 345291 - RNA, 18 nt, Artificial Sequence
  Synthetic
agaggcaaaagacgggug

SEQ ID NO: 345292 - RNA, 19 nt, Artificial Sequence
  Synthetic
cagaggcaaaagacgggug

SEQ ID NO: 345293 - RNA, 20 nt, Artificial Sequence
  Synthetic
ccagaggcaaaagacgggug

SEQ ID NO: 345294 - RNA, 21 nt, Artificial Sequence
  Synthetic
uccagaggcaaaagacgggug

SEQ ID NO: 345295 - RNA, 22 nt, Artificial Sequence
  Synthetic
cuccagaggcaaaagacgggug

SEQ ID NO: 345296 - RNA, 23 nt, Artificial Sequence
  Synthetic
ccuccagaggcaaaagacgggug

SEQ ID NO: 345297 - RNA, 24 nt, Artificial Sequence
  Synthetic
gccuccagaggcaaaagacgggug

SEQ ID NO: 345298 - RNA, 18 nt, Artificial Sequence
  Synthetic
gcugaucaucugcgggug

SEQ ID NO: 345299 - RNA, 19 nt, Artificial Sequence
  Synthetic
agcugaucaucugcgggug

SEQ ID NO: 345300 - RNA, 20 nt, Artificial Sequence
  Synthetic
uagcugaucaucugcgggug

SEQ ID NO: 345301 - RNA, 21 nt, Artificial Sequence
  Synthetic
cuagcugaucaucugcgggug

SEQ ID NO: 345302 - RNA, 22 nt, Artificial Sequence
  Synthetic
gcuagcugaucaucugcgggug

SEQ ID NO: 345303 - RNA, 23 nt, Artificial Sequence
  Synthetic
ugcuagcugaucaucugcgggug

SEQ ID NO: 345304 - RNA, 24 nt, Artificial Sequence
  Synthetic
uugcuagcugaucaucugcgggug

SEQ ID NO: 345305 - RNA, 18 nt, Artificial Sequence
  Synthetic
agcaguuugagcggggug

SEQ ID NO: 345306 - RNA, 19 nt, Artificial Sequence
  Synthetic
cagcaguuugagcggggug

SEQ ID NO: 345307 - RNA, 20 nt, Artificial Sequence
  Synthetic
ucagcaguuugagcggggug

SEQ ID NO: 345308 - RNA, 21 nt, Artificial Sequence
  Synthetic
cucagcaguuugagcggggug

SEQ ID NO: 345309 - RNA, 22 nt, Artificial Sequence
  Synthetic
ccucagcaguuugagcggggug

SEQ ID NO: 345310 - RNA, 23 nt, Artificial Sequence
  Synthetic
uccucagcaguuugagcggggug

SEQ ID NO: 345311 - RNA, 24 nt, Artificial Sequence
  Synthetic
uuccucagcaguuugagcggggug

SEQ ID NO: 345312 - RNA, 18 nt, Artificial Sequence
  Synthetic
agagcauuuuggggggug

SEQ ID NO: 345313 - RNA, 19 nt, Artificial Sequence
  Synthetic
aagagcauuuuggggggug

SEQ ID NO: 345314 - RNA, 20 nt, Artificial Sequence
  Synthetic
caagagcauuuuggggggug

SEQ ID NO: 345315 - RNA, 21 nt, Artificial Sequence
  Synthetic
acaagagcauuuuggggggug

SEQ ID NO: 345316 - RNA, 22 nt, Artificial Sequence
  Synthetic
cacaagagcauuuuggggggug

SEQ ID NO: 345317 - RNA, 23 nt, Artificial Sequence
  Synthetic
gcacaagagcauuuuggggggug

SEQ ID NO: 345318 - RNA, 24 nt, Artificial Sequence
  Synthetic
agcacaagagcauuuuggggggug

SEQ ID NO: 345319 - RNA, 18 nt, Artificial Sequence
  Synthetic
cugauuugucugggggug

SEQ ID NO: 345320 - RNA, 19 nt, Artificial Sequence
  Synthetic
gcugauuugucugggggug

SEQ ID NO: 345321 - RNA, 20 nt, Artificial Sequence
  Synthetic
agcugauuugucugggggug

SEQ ID NO: 345322 - RNA, 21 nt, Artificial Sequence
  Synthetic
uagcugauuugucugggggug

SEQ ID NO: 345323 - RNA, 22 nt, Artificial Sequence
  Synthetic
uuagcugauuugucugggggug

SEQ ID NO: 345324 - RNA, 23 nt, Artificial Sequence
  Synthetic
uuuagcugauuugucugggggug

SEQ ID NO: 345325 - RNA, 24 nt, Artificial Sequence
  Synthetic
uuuuagcugauuugucugggggug

SEQ ID NO: 345326 - RNA, 18 nt, Artificial Sequence
  Synthetic
ggcuguaauaauggggug

SEQ ID NO: 345327 - RNA, 19 nt, Artificial Sequence
  Synthetic
uggcuguaauaauggggug

SEQ ID NO: 345328 - RNA, 20 nt, Artificial Sequence
  Synthetic
uuggcuguaauaauggggug

SEQ ID NO: 345329 - RNA, 21 nt, Artificial Sequence
  Synthetic
guuggcuguaauaauggggug

SEQ ID NO: 345330 - RNA, 22 nt, Artificial Sequence
  Synthetic
uguuggcuguaauaauggggug

SEQ ID NO: 345331 - RNA, 23 nt, Artificial Sequence
  Synthetic
cuguuggcuguaauaauggggug

SEQ ID NO: 345332 - RNA, 24 nt, Artificial Sequence
  Synthetic
acuguuggcuguaauaauggggug

SEQ ID NO: 345333 - RNA, 18 nt, Artificial Sequence
  Synthetic
agggccugucguggggug

SEQ ID NO: 345334 - RNA, 19 nt, Artificial Sequence
  Synthetic
cagggccugucguggggug

SEQ ID NO: 345335 - RNA, 20 nt, Artificial Sequence
  Synthetic
ccagggccugucguggggug

SEQ ID NO: 345336 - RNA, 21 nt, Artificial Sequence
  Synthetic
accagggccugucguggggug

SEQ ID NO: 345337 - RNA, 22 nt, Artificial Sequence
  Synthetic
caccagggccugucguggggug

SEQ ID NO: 345338 - RNA, 23 nt, Artificial Sequence
  Synthetic
acaccagggccugucguggggug

SEQ ID NO: 345339 - RNA, 24 nt, Artificial Sequence
  Synthetic
cacaccagggccugucguggggug

SEQ ID NO: 345340 - RNA, 18 nt, Artificial Sequence
  Synthetic
ggggacgcagguggggug

SEQ ID NO: 345341 - RNA, 19 nt, Artificial Sequence
  Synthetic
aggggacgcagguggggug

SEQ ID NO: 345342 - RNA, 20 nt, Artificial Sequence
  Synthetic
caggggacgcagguggggug

SEQ ID NO: 345343 - RNA, 21 nt, Artificial Sequence
  Synthetic
ucaggggacgcagguggggug

SEQ ID NO: 345344 - RNA, 22 nt, Artificial Sequence
  Synthetic
aucaggggacgcagguggggug

SEQ ID NO: 345345 - RNA, 23 nt, Artificial Sequence
  Synthetic
caucaggggacgcagguggggug

SEQ ID NO: 345346 - RNA, 24 nt, Artificial Sequence
  Synthetic
ccaucaggggacgcagguggggug

SEQ ID NO: 345347 - RNA, 18 nt, Artificial Sequence
  Synthetic
ggggacugugguggggug

SEQ ID NO: 345348 - RNA, 19 nt, Artificial Sequence
  Synthetic
uggggacugugguggggug

SEQ ID NO: 345349 - RNA, 20 nt, Artificial Sequence
  Synthetic
cuggggacugugguggggug

SEQ ID NO: 345350 - RNA, 21 nt, Artificial Sequence
  Synthetic
ucuggggacugugguggggug

SEQ ID NO: 345351 - RNA, 22 nt, Artificial Sequence
  Synthetic
cucuggggacugugguggggug

SEQ ID NO: 345352 - RNA, 23 nt, Artificial Sequence
  Synthetic
acucuggggacugugguggggug

SEQ ID NO: 345353 - RNA, 24 nt, Artificial Sequence
  Synthetic
cacucuggggacugugguggggug

SEQ ID NO: 345354 - RNA, 18 nt, Artificial Sequence
  Synthetic
ggggccuguuguggggug

SEQ ID NO: 345355 - RNA, 19 nt, Artificial Sequence
  Synthetic
cggggccuguuguggggug

SEQ ID NO: 345356 - RNA, 20 nt, Artificial Sequence
  Synthetic
ccggggccuguuguggggug

SEQ ID NO: 345357 - RNA, 18 nt, Artificial Sequence
  Synthetic
ugagguaugguuggggug

SEQ ID NO: 345358 - RNA, 19 nt, Artificial Sequence
  Synthetic
gugagguaugguuggggug

SEQ ID NO: 345359 - RNA, 20 nt, Artificial Sequence
  Synthetic
ggugagguaugguuggggug

SEQ ID NO: 345360 - RNA, 21 nt, Artificial Sequence
  Synthetic
gggugagguaugguuggggug

SEQ ID NO: 345361 - RNA, 22 nt, Artificial Sequence
  Synthetic
agggugagguaugguuggggug

SEQ ID NO: 345362 - RNA, 23 nt, Artificial Sequence
  Synthetic
uagggugagguaugguuggggug

SEQ ID NO: 345363 - RNA, 24 nt, Artificial Sequence
  Synthetic
auagggugagguaugguuggggug

SEQ ID NO: 345364 - RNA, 18 nt, Artificial Sequence
  Synthetic
acauuccugguuggggug

SEQ ID NO: 345365 - RNA, 19 nt, Artificial Sequence
  Synthetic
gacauuccugguuggggug

SEQ ID NO: 345366 - RNA, 20 nt, Artificial Sequence
  Synthetic
ugacauuccugguuggggug

SEQ ID NO: 345367 - RNA, 21 nt, Artificial Sequence
  Synthetic
cugacauuccugguuggggug

SEQ ID NO: 345368 - RNA, 22 nt, Artificial Sequence
  Synthetic
ccugacauuccugguuggggug

SEQ ID NO: 345369 - RNA, 23 nt, Artificial Sequence
  Synthetic
gccugacauuccugguuggggug

SEQ ID NO: 345370 - RNA, 24 nt, Artificial Sequence
  Synthetic
ugccugacauuccugguuggggug

SEQ ID NO: 345371 - RNA, 18 nt, Artificial Sequence
  Synthetic
ugggguugggaaugggug

SEQ ID NO: 345372 - RNA, 19 nt, Artificial Sequence
  Synthetic
uugggguugggaaugggug

SEQ ID NO: 345373 - RNA, 20 nt, Artificial Sequence
  Synthetic
guugggguugggaaugggug

SEQ ID NO: 345374 - RNA, 21 nt, Artificial Sequence
  Synthetic
aguugggguugggaaugggug

SEQ ID NO: 345375 - RNA, 22 nt, Artificial Sequence
  Synthetic
gaguugggguugggaaugggug

SEQ ID NO: 345376 - RNA, 23 nt, Artificial Sequence
  Synthetic
ugaguugggguugggaaugggug

SEQ ID NO: 345377 - RNA, 24 nt, Artificial Sequence
  Synthetic
cugaguugggguugggaaugggug

SEQ ID NO: 345378 - RNA, 18 nt, Artificial Sequence
  Synthetic
augaccaguuaaugggug

SEQ ID NO: 345379 - RNA, 19 nt, Artificial Sequence
  Synthetic
aaugaccaguuaaugggug

SEQ ID NO: 345380 - RNA, 20 nt, Artificial Sequence
  Synthetic
aaaugaccaguuaaugggug

SEQ ID NO: 345381 - RNA, 21 nt, Artificial Sequence
  Synthetic
uaaaugaccaguuaaugggug

SEQ ID NO: 345382 - RNA, 22 nt, Artificial Sequence
  Synthetic
cuaaaugaccaguuaaugggug

SEQ ID NO: 345383 - RNA, 23 nt, Artificial Sequence
  Synthetic
gcuaaaugaccaguuaaugggug

SEQ ID NO: 345384 - RNA, 24 nt, Artificial Sequence
  Synthetic
ugcuaaaugaccaguuaaugggug

SEQ ID NO: 345385 - RNA, 18 nt, Artificial Sequence
  Synthetic
gcacaauagacaugggug

SEQ ID NO: 345386 - RNA, 19 nt, Artificial Sequence
  Synthetic
ugcacaauagacaugggug

SEQ ID NO: 345387 - RNA, 20 nt, Artificial Sequence
  Synthetic
augcacaauagacaugggug

SEQ ID NO: 345388 - RNA, 21 nt, Artificial Sequence
  Synthetic
aaugcacaauagacaugggug

SEQ ID NO: 345389 - RNA, 22 nt, Artificial Sequence
  Synthetic
gaaugcacaauagacaugggug

SEQ ID NO: 345390 - RNA, 23 nt, Artificial Sequence
  Synthetic
agaaugcacaauagacaugggug

SEQ ID NO: 345391 - RNA, 24 nt, Artificial Sequence
  Synthetic
gagaaugcacaauagacaugggug

SEQ ID NO: 345392 - RNA, 18 nt, Artificial Sequence
  Synthetic
aaaucaggcugaugggug

SEQ ID NO: 345393 - RNA, 19 nt, Artificial Sequence
  Synthetic
gaaaucaggcugaugggug

SEQ ID NO: 345394 - RNA, 20 nt, Artificial Sequence
  Synthetic
ggaaaucaggcugaugggug

SEQ ID NO: 345395 - RNA, 21 nt, Artificial Sequence
  Synthetic
gggaaaucaggcugaugggug

SEQ ID NO: 345396 - RNA, 22 nt, Artificial Sequence
  Synthetic
ugggaaaucaggcugaugggug

SEQ ID NO: 345397 - RNA, 23 nt, Artificial Sequence
  Synthetic
cugggaaaucaggcugaugggug

SEQ ID NO: 345398 - RNA, 24 nt, Artificial Sequence
  Synthetic
acugggaaaucaggcugaugggug

SEQ ID NO: 345399 - RNA, 18 nt, Artificial Sequence
  Synthetic
ucaaaaauuaacugggug

SEQ ID NO: 345400 - RNA, 19 nt, Artificial Sequence
  Synthetic
uucaaaaauuaacugggug

SEQ ID NO: 345401 - RNA, 20 nt, Artificial Sequence
  Synthetic
auucaaaaauuaacugggug

SEQ ID NO: 345402 - RNA, 21 nt, Artificial Sequence
  Synthetic
aauucaaaaauuaacugggug

SEQ ID NO: 345403 - RNA, 22 nt, Artificial Sequence
  Synthetic
gaauucaaaaauuaacugggug

SEQ ID NO: 345404 - RNA, 23 nt, Artificial Sequence
  Synthetic
agaauucaaaaauuaacugggug

SEQ ID NO: 345405 - RNA, 24 nt, Artificial Sequence
  Synthetic
aagaauucaaaaauuaacugggug

SEQ ID NO: 345406 - RNA, 18 nt, Artificial Sequence
  Synthetic
aaugauauaggcugggug

SEQ ID NO: 345407 - RNA, 19 nt, Artificial Sequence
  Synthetic
caaugauauaggcugggug

SEQ ID NO: 345408 - RNA, 20 nt, Artificial Sequence
  Synthetic
acaaugauauaggcugggug

SEQ ID NO: 345409 - RNA, 21 nt, Artificial Sequence
  Synthetic
aacaaugauauaggcugggug

SEQ ID NO: 345410 - RNA, 22 nt, Artificial Sequence
  Synthetic
uaacaaugauauaggcugggug

SEQ ID NO: 345411 - RNA, 23 nt, Artificial Sequence
  Synthetic
auaacaaugauauaggcugggug

SEQ ID NO: 345412 - RNA, 24 nt, Artificial Sequence
  Synthetic
aauaacaaugauauaggcugggug

SEQ ID NO: 345413 - RNA, 18 nt, Artificial Sequence
  Synthetic
auguucacuaucugggug

SEQ ID NO: 345414 - RNA, 19 nt, Artificial Sequence
  Synthetic
uauguucacuaucugggug

SEQ ID NO: 345415 - RNA, 20 nt, Artificial Sequence
  Synthetic
cuauguucacuaucugggug

SEQ ID NO: 345416 - RNA, 21 nt, Artificial Sequence
  Synthetic
acuauguucacuaucugggug

SEQ ID NO: 345417 - RNA, 22 nt, Artificial Sequence
  Synthetic
uacuauguucacuaucugggug

SEQ ID NO: 345418 - RNA, 23 nt, Artificial Sequence
  Synthetic
guacuauguucacuaucugggug

SEQ ID NO: 345419 - RNA, 24 nt, Artificial Sequence
  Synthetic
gguacuauguucacuaucugggug

SEQ ID NO: 345420 - RNA, 18 nt, Artificial Sequence
  Synthetic
uaauagacuaucugggug

SEQ ID NO: 345421 - RNA, 19 nt, Artificial Sequence
  Synthetic
uuaauagacuaucugggug

SEQ ID NO: 345422 - RNA, 20 nt, Artificial Sequence
  Synthetic
guuaauagacuaucugggug

SEQ ID NO: 345423 - RNA, 21 nt, Artificial Sequence
  Synthetic
aguuaauagacuaucugggug

SEQ ID NO: 345424 - RNA, 22 nt, Artificial Sequence
  Synthetic
uaguuaauagacuaucugggug

SEQ ID NO: 345425 - RNA, 23 nt, Artificial Sequence
  Synthetic
uuaguuaauagacuaucugggug

SEQ ID NO: 345426 - RNA, 24 nt, Artificial Sequence
  Synthetic
cuuaguuaauagacuaucugggug

SEQ ID NO: 345427 - RNA, 18 nt, Artificial Sequence
  Synthetic
aagaugcuuaucugggug

SEQ ID NO: 345428 - RNA, 19 nt, Artificial Sequence
  Synthetic
caagaugcuuaucugggug

SEQ ID NO: 345429 - RNA, 20 nt, Artificial Sequence
  Synthetic
acaagaugcuuaucugggug

SEQ ID NO: 345430 - RNA, 21 nt, Artificial Sequence
  Synthetic
cacaagaugcuuaucugggug

SEQ ID NO: 345431 - RNA, 22 nt, Artificial Sequence
  Synthetic
ccacaagaugcuuaucugggug

SEQ ID NO: 345432 - RNA, 23 nt, Artificial Sequence
  Synthetic
uccacaagaugcuuaucugggug

SEQ ID NO: 345433 - RNA, 24 nt, Artificial Sequence
  Synthetic
uuccacaagaugcuuaucugggug

SEQ ID NO: 345434 - RNA, 18 nt, Artificial Sequence
  Synthetic
ucagaugguuucugggug

SEQ ID NO: 345435 - RNA, 19 nt, Artificial Sequence
  Synthetic
aucagaugguuucugggug

SEQ ID NO: 345436 - RNA, 20 nt, Artificial Sequence
  Synthetic
uaucagaugguuucugggug

SEQ ID NO: 345437 - RNA, 21 nt, Artificial Sequence
  Synthetic
guaucagaugguuucugggug

SEQ ID NO: 345438 - RNA, 22 nt, Artificial Sequence
  Synthetic
gguaucagaugguuucugggug

SEQ ID NO: 345439 - RNA, 23 nt, Artificial Sequence
  Synthetic
ugguaucagaugguuucugggug

SEQ ID NO: 345440 - RNA, 24 nt, Artificial Sequence
  Synthetic
augguaucagaugguuucugggug

SEQ ID NO: 345441 - RNA, 18 nt, Artificial Sequence
  Synthetic
cccaucaaaaagugggug

SEQ ID NO: 345442 - RNA, 19 nt, Artificial Sequence
  Synthetic
ccccaucaaaaagugggug

SEQ ID NO: 345443 - RNA, 20 nt, Artificial Sequence
  Synthetic
accccaucaaaaagugggug

SEQ ID NO: 345444 - RNA, 21 nt, Artificial Sequence
  Synthetic
aaccccaucaaaaagugggug

SEQ ID NO: 345445 - RNA, 22 nt, Artificial Sequence
  Synthetic
caaccccaucaaaaagugggug

SEQ ID NO: 345446 - RNA, 23 nt, Artificial Sequence
  Synthetic
acaaccccaucaaaaagugggug

SEQ ID NO: 345447 - RNA, 24 nt, Artificial Sequence
  Synthetic
aacaaccccaucaaaaagugggug

SEQ ID NO: 345448 - RNA, 18 nt, Artificial Sequence
  Synthetic
agaauuucagagugggug

SEQ ID NO: 345449 - RNA, 19 nt, Artificial Sequence
  Synthetic
cagaauuucagagugggug

SEQ ID NO: 345450 - RNA, 20 nt, Artificial Sequence
  Synthetic
gcagaauuucagagugggug

SEQ ID NO: 345451 - RNA, 21 nt, Artificial Sequence
  Synthetic
agcagaauuucagagugggug

SEQ ID NO: 345452 - RNA, 22 nt, Artificial Sequence
  Synthetic
aagcagaauuucagagugggug

SEQ ID NO: 345453 - RNA, 23 nt, Artificial Sequence
  Synthetic
aaagcagaauuucagagugggug

SEQ ID NO: 345454 - RNA, 24 nt, Artificial Sequence
  Synthetic
gaaagcagaauuucagagugggug

SEQ ID NO: 345455 - RNA, 18 nt, Artificial Sequence
  Synthetic
aauguuuaugagugggug

SEQ ID NO: 345456 - RNA, 19 nt, Artificial Sequence
  Synthetic
uaauguuuaugagugggug

SEQ ID NO: 345457 - RNA, 20 nt, Artificial Sequence
  Synthetic
uuaauguuuaugagugggug

SEQ ID NO: 345458 - RNA, 21 nt, Artificial Sequence
  Synthetic
cuuaauguuuaugagugggug

SEQ ID NO: 345459 - RNA, 22 nt, Artificial Sequence
  Synthetic
gcuuaauguuuaugagugggug

SEQ ID NO: 345460 - RNA, 23 nt, Artificial Sequence
  Synthetic
ggcuuaauguuuaugagugggug

SEQ ID NO: 345461 - RNA, 24 nt, Artificial Sequence
  Synthetic
aggcuuaauguuuaugagugggug

SEQ ID NO: 345462 - RNA, 18 nt, Artificial Sequence
  Synthetic
uagauagacaggugggug

SEQ ID NO: 345463 - RNA, 19 nt, Artificial Sequence
  Synthetic
auagauagacaggugggug

SEQ ID NO: 345464 - RNA, 20 nt, Artificial Sequence
  Synthetic
gauagauagacaggugggug

SEQ ID NO: 345465 - RNA, 21 nt, Artificial Sequence
  Synthetic
agauagauagacaggugggug

SEQ ID NO: 345466 - RNA, 22 nt, Artificial Sequence
  Synthetic
uagauagauagacaggugggug

SEQ ID NO: 345467 - RNA, 23 nt, Artificial Sequence
  Synthetic
guagauagauagacaggugggug

SEQ ID NO: 345468 - RNA, 24 nt, Artificial Sequence
  Synthetic
gguagauagauagacaggugggug

SEQ ID NO: 345469 - RNA, 18 nt, Artificial Sequence
  Synthetic
agggccuuguggugggug

SEQ ID NO: 345470 - RNA, 19 nt, Artificial Sequence
  Synthetic
cagggccuuguggugggug

SEQ ID NO: 345471 - RNA, 20 nt, Artificial Sequence
  Synthetic
acagggccuuguggugggug

SEQ ID NO: 345472 - RNA, 21 nt, Artificial Sequence
  Synthetic
uacagggccuuguggugggug

SEQ ID NO: 345473 - RNA, 22 nt, Artificial Sequence
  Synthetic
auacagggccuuguggugggug

SEQ ID NO: 345474 - RNA, 23 nt, Artificial Sequence
  Synthetic
aauacagggccuuguggugggug

SEQ ID NO: 345475 - RNA, 24 nt, Artificial Sequence
  Synthetic
aaauacagggccuuguggugggug

SEQ ID NO: 345476 - RNA, 18 nt, Artificial Sequence
  Synthetic
ugaacaugcaugugggug

SEQ ID NO: 345477 - RNA, 19 nt, Artificial Sequence
  Synthetic
cugaacaugcaugugggug

SEQ ID NO: 345478 - RNA, 20 nt, Artificial Sequence
  Synthetic
ucugaacaugcaugugggug

SEQ ID NO: 345479 - RNA, 21 nt, Artificial Sequence
  Synthetic
cucugaacaugcaugugggug

SEQ ID NO: 345480 - RNA, 22 nt, Artificial Sequence
  Synthetic
ucucugaacaugcaugugggug

SEQ ID NO: 345481 - RNA, 23 nt, Artificial Sequence
  Synthetic
uucucugaacaugcaugugggug

SEQ ID NO: 345482 - RNA, 24 nt, Artificial Sequence
  Synthetic
uuucucugaacaugcaugugggug

SEQ ID NO: 345483 - RNA, 18 nt, Artificial Sequence
  Synthetic
gaagguuuguugugggug

SEQ ID NO: 345484 - RNA, 19 nt, Artificial Sequence
  Synthetic
ggaagguuuguugugggug

SEQ ID NO: 345485 - RNA, 20 nt, Artificial Sequence
  Synthetic
aggaagguuuguugugggug

SEQ ID NO: 345486 - RNA, 21 nt, Artificial Sequence
  Synthetic
gaggaagguuuguugugggug

SEQ ID NO: 345487 - RNA, 22 nt, Artificial Sequence
  Synthetic
ggaggaagguuuguugugggug

SEQ ID NO: 345488 - RNA, 23 nt, Artificial Sequence
  Synthetic
uggaggaagguuuguugugggug

SEQ ID NO: 345489 - RNA, 24 nt, Artificial Sequence
  Synthetic
guggaggaagguuuguugugggug

SEQ ID NO: 345490 - RNA, 18 nt, Artificial Sequence
  Synthetic
acacccaaucauugggug

SEQ ID NO: 345491 - RNA, 19 nt, Artificial Sequence
  Synthetic
cacacccaaucauugggug

SEQ ID NO: 345492 - RNA, 20 nt, Artificial Sequence
  Synthetic
ccacacccaaucauugggug

SEQ ID NO: 345493 - RNA, 21 nt, Artificial Sequence
  Synthetic
accacacccaaucauugggug

SEQ ID NO: 345494 - RNA, 22 nt, Artificial Sequence
  Synthetic
caccacacccaaucauugggug

SEQ ID NO: 345495 - RNA, 23 nt, Artificial Sequence
  Synthetic
ccaccacacccaaucauugggug

SEQ ID NO: 345496 - RNA, 24 nt, Artificial Sequence
  Synthetic
cccaccacacccaaucauugggug

SEQ ID NO: 345497 - RNA, 18 nt, Artificial Sequence
  Synthetic
uaucuccuuuguugggug

SEQ ID NO: 345498 - RNA, 19 nt, Artificial Sequence
  Synthetic
auaucuccuuuguugggug

SEQ ID NO: 345499 - RNA, 20 nt, Artificial Sequence
  Synthetic
uauaucuccuuuguugggug

SEQ ID NO: 345500 - RNA, 21 nt, Artificial Sequence
  Synthetic
auauaucuccuuuguugggug

SEQ ID NO: 345501 - RNA, 22 nt, Artificial Sequence
  Synthetic
uauauaucuccuuuguugggug

SEQ ID NO: 345502 - RNA, 23 nt, Artificial Sequence
  Synthetic
uuauauaucuccuuuguugggug

SEQ ID NO: 345503 - RNA, 24 nt, Artificial Sequence
  Synthetic
uuuauauaucuccuuuguugggug

SEQ ID NO: 345504 - RNA, 18 nt, Artificial Sequence
  Synthetic
agaauuacagaaauggug

SEQ ID NO: 345505 - RNA, 19 nt, Artificial Sequence
  Synthetic
cagaauuacagaaauggug

SEQ ID NO: 345506 - RNA, 20 nt, Artificial Sequence
  Synthetic
ccagaauuacagaaauggug

SEQ ID NO: 345507 - RNA, 21 nt, Artificial Sequence
  Synthetic
uccagaauuacagaaauggug

SEQ ID NO: 345508 - RNA, 22 nt, Artificial Sequence
  Synthetic
uuccagaauuacagaaauggug

SEQ ID NO: 345509 - RNA, 23 nt, Artificial Sequence
  Synthetic
guuccagaauuacagaaauggug

SEQ ID NO: 345510 - RNA, 24 nt, Artificial Sequence
  Synthetic
aguuccagaauuacagaaauggug

SEQ ID NO: 345511 - RNA, 18 nt, Artificial Sequence
  Synthetic
ccuauuuaauaaauggug

SEQ ID NO: 345512 - RNA, 19 nt, Artificial Sequence
  Synthetic
cccuauuuaauaaauggug

SEQ ID NO: 345513 - RNA, 20 nt, Artificial Sequence
  Synthetic
ucccuauuuaauaaauggug

SEQ ID NO: 345514 - RNA, 23 nt, Artificial Sequence
  Synthetic
aauucccuauuuaauaaauggug

SEQ ID NO: 345515 - RNA, 24 nt, Artificial Sequence
  Synthetic
aaauucccuauuuaauaaauggug

SEQ ID NO: 345516 - RNA, 24 nt, Artificial Sequence
  Synthetic
ggauucccuauuuaauaaauggug

SEQ ID NO: 345517 - RNA, 18 nt, Artificial Sequence
  Synthetic
auaauuauaacaauggug

SEQ ID NO: 345518 - RNA, 19 nt, Artificial Sequence
  Synthetic
gauaauuauaacaauggug

SEQ ID NO: 345519 - RNA, 20 nt, Artificial Sequence
  Synthetic
agauaauuauaacaauggug

SEQ ID NO: 345520 - RNA, 21 nt, Artificial Sequence
  Synthetic
gagauaauuauaacaauggug

SEQ ID NO: 345521 - RNA, 22 nt, Artificial Sequence
  Synthetic
ugagauaauuauaacaauggug

SEQ ID NO: 345522 - RNA, 23 nt, Artificial Sequence
  Synthetic
augagauaauuauaacaauggug

SEQ ID NO: 345523 - RNA, 24 nt, Artificial Sequence
  Synthetic
uaugagauaauuauaacaauggug

SEQ ID NO: 345524 - RNA, 18 nt, Artificial Sequence
  Synthetic
ugaaguaagcacauggug

SEQ ID NO: 345525 - RNA, 19 nt, Artificial Sequence
  Synthetic
augaaguaagcacauggug

SEQ ID NO: 345526 - RNA, 20 nt, Artificial Sequence
  Synthetic
caugaaguaagcacauggug

SEQ ID NO: 345527 - RNA, 21 nt, Artificial Sequence
  Synthetic
acaugaaguaagcacauggug

SEQ ID NO: 345528 - RNA, 22 nt, Artificial Sequence
  Synthetic
gacaugaaguaagcacauggug

SEQ ID NO: 345529 - RNA, 23 nt, Artificial Sequence
  Synthetic
agacaugaaguaagcacauggug

SEQ ID NO: 345530 - RNA, 24 nt, Artificial Sequence
  Synthetic
gagacaugaaguaagcacauggug

SEQ ID NO: 345531 - RNA, 18 nt, Artificial Sequence
  Synthetic
gaucuaaucuccauggug

SEQ ID NO: 345532 - RNA, 19 nt, Artificial Sequence
  Synthetic
agaucuaaucuccauggug

SEQ ID NO: 345533 - RNA, 20 nt, Artificial Sequence
  Synthetic
cagaucuaaucuccauggug

SEQ ID NO: 345534 - RNA, 21 nt, Artificial Sequence
  Synthetic
acagaucuaaucuccauggug

SEQ ID NO: 345535 - RNA, 22 nt, Artificial Sequence
  Synthetic
uacagaucuaaucuccauggug

SEQ ID NO: 345536 - RNA, 23 nt, Artificial Sequence
  Synthetic
cuacagaucuaaucuccauggug

SEQ ID NO: 345537 - RNA, 24 nt, Artificial Sequence
  Synthetic
gcuacagaucuaaucuccauggug

SEQ ID NO: 345538 - RNA, 18 nt, Artificial Sequence
  Synthetic
aauuagccaggcauggug

SEQ ID NO: 345539 - RNA, 19 nt, Artificial Sequence
  Synthetic
aaauuagccaggcauggug

SEQ ID NO: 345540 - RNA, 20 nt, Artificial Sequence
  Synthetic
aaaauuagccaggcauggug

SEQ ID NO: 345541 - RNA, 21 nt, Artificial Sequence
  Synthetic
aaaaauuagccaggcauggug

SEQ ID NO: 345542 - RNA, 22 nt, Artificial Sequence
  Synthetic
aaaaaauuagccaggcauggug

SEQ ID NO: 345543 - RNA, 23 nt, Artificial Sequence
  Synthetic
aaaaaaauuagccaggcauggug

SEQ ID NO: 345544 - RNA, 24 nt, Artificial Sequence
  Synthetic
caaaaaaauuagccaggcauggug

SEQ ID NO: 345545 - RNA, 18 nt, Artificial Sequence
  Synthetic
aauuagccgggcauggug

SEQ ID NO: 345546 - RNA, 19 nt, Artificial Sequence
  Synthetic
aaauuagccgggcauggug

SEQ ID NO: 345547 - RNA, 20 nt, Artificial Sequence
  Synthetic
aaaauuagccgggcauggug

SEQ ID NO: 345548 - RNA, 24 nt, Artificial Sequence
  Synthetic
acaaaaaauuagccgggcauggug

SEQ ID NO: 345549 - RNA, 18 nt, Artificial Sequence
  Synthetic
cuucuuccauucauggug

SEQ ID NO: 345550 - RNA, 19 nt, Artificial Sequence
  Synthetic
gcuucuuccauucauggug

SEQ ID NO: 345551 - RNA, 20 nt, Artificial Sequence
  Synthetic
ggcuucuuccauucauggug

SEQ ID NO: 345552 - RNA, 21 nt, Artificial Sequence
  Synthetic
aggcuucuuccauucauggug

SEQ ID NO: 345553 - RNA, 22 nt, Artificial Sequence
  Synthetic
caggcuucuuccauucauggug

SEQ ID NO: 345554 - RNA, 23 nt, Artificial Sequence
  Synthetic
ucaggcuucuuccauucauggug

SEQ ID NO: 345555 - RNA, 24 nt, Artificial Sequence
  Synthetic
cucaggcuucuuccauucauggug

SEQ ID NO: 345556 - RNA, 18 nt, Artificial Sequence
  Synthetic
uagguaaauuucauggug

SEQ ID NO: 345557 - RNA, 19 nt, Artificial Sequence
  Synthetic
uuagguaaauuucauggug

SEQ ID NO: 345558 - RNA, 20 nt, Artificial Sequence
  Synthetic
auuagguaaauuucauggug

SEQ ID NO: 345559 - RNA, 21 nt, Artificial Sequence
  Synthetic
aauuagguaaauuucauggug

SEQ ID NO: 345560 - RNA, 22 nt, Artificial Sequence
  Synthetic
gaauuagguaaauuucauggug

SEQ ID NO: 345561 - RNA, 23 nt, Artificial Sequence
  Synthetic
ggaauuagguaaauuucauggug

SEQ ID NO: 345562 - RNA, 24 nt, Artificial Sequence
  Synthetic
aggaauuagguaaauuucauggug

SEQ ID NO: 345563 - RNA, 18 nt, Artificial Sequence
  Synthetic
ggugccagaaagauggug

SEQ ID NO: 345564 - RNA, 19 nt, Artificial Sequence
  Synthetic
uggugccagaaagauggug

SEQ ID NO: 345565 - RNA, 20 nt, Artificial Sequence
  Synthetic
guggugccagaaagauggug

SEQ ID NO: 345566 - RNA, 21 nt, Artificial Sequence
  Synthetic
aguggugccagaaagauggug

SEQ ID NO: 345567 - RNA, 22 nt, Artificial Sequence
  Synthetic
aaguggugccagaaagauggug

SEQ ID NO: 345568 - RNA, 23 nt, Artificial Sequence
  Synthetic
aaaguggugccagaaagauggug

SEQ ID NO: 345569 - RNA, 24 nt, Artificial Sequence
  Synthetic
caaaguggugccagaaagauggug

SEQ ID NO: 345570 - RNA, 18 nt, Artificial Sequence
  Synthetic
aauucagaagagauggug

SEQ ID NO: 345571 - RNA, 19 nt, Artificial Sequence
  Synthetic
caauucagaagagauggug

SEQ ID NO: 345572 - RNA, 20 nt, Artificial Sequence
  Synthetic
ucaauucagaagagauggug

SEQ ID NO: 345573 - RNA, 21 nt, Artificial Sequence
  Synthetic
aucaauucagaagagauggug

SEQ ID NO: 345574 - RNA, 22 nt, Artificial Sequence
  Synthetic
aaucaauucagaagagauggug

SEQ ID NO: 345575 - RNA, 23 nt, Artificial Sequence
  Synthetic
aaaucaauucagaagagauggug

SEQ ID NO: 345576 - RNA, 24 nt, Artificial Sequence
  Synthetic
uaaaucaauucagaagagauggug

SEQ ID NO: 345577 - RNA, 18 nt, Artificial Sequence
  Synthetic
auucuuuuuaggauggug

SEQ ID NO: 345578 - RNA, 19 nt, Artificial Sequence
  Synthetic
uauucuuuuuaggauggug

SEQ ID NO: 345579 - RNA, 20 nt, Artificial Sequence
  Synthetic
guauucuuuuuaggauggug

SEQ ID NO: 345580 - RNA, 21 nt, Artificial Sequence
  Synthetic
uguauucuuuuuaggauggug

SEQ ID NO: 345581 - RNA, 22 nt, Artificial Sequence
  Synthetic
guguauucuuuuuaggauggug

SEQ ID NO: 345582 - RNA, 23 nt, Artificial Sequence
  Synthetic
aguguauucuuuuuaggauggug

SEQ ID NO: 345583 - RNA, 24 nt, Artificial Sequence
  Synthetic
aaguguauucuuuuuaggauggug

SEQ ID NO: 345584 - RNA, 18 nt, Artificial Sequence
  Synthetic
ugagucaagaaacuggug

SEQ ID NO: 345585 - RNA, 19 nt, Artificial Sequence
  Synthetic
uugagucaagaaacuggug

SEQ ID NO: 345586 - RNA, 20 nt, Artificial Sequence
  Synthetic
auugagucaagaaacuggug

SEQ ID NO: 345587 - RNA, 21 nt, Artificial Sequence
  Synthetic
aauugagucaagaaacuggug

SEQ ID NO: 345588 - RNA, 22 nt, Artificial Sequence
  Synthetic
gaauugagucaagaaacuggug

SEQ ID NO: 345589 - RNA, 23 nt, Artificial Sequence
  Synthetic
ugaauugagucaagaaacuggug

SEQ ID NO: 345590 - RNA, 24 nt, Artificial Sequence
  Synthetic
uugaauugagucaagaaacuggug

SEQ ID NO: 345591 - RNA, 18 nt, Artificial Sequence
  Synthetic
cuccgguauacacuggug

SEQ ID NO: 345592 - RNA, 19 nt, Artificial Sequence
  Synthetic
ucuccgguauacacuggug

SEQ ID NO: 345593 - RNA, 20 nt, Artificial Sequence
  Synthetic
uucuccgguauacacuggug

SEQ ID NO: 345594 - RNA, 21 nt, Artificial Sequence
  Synthetic
cuucuccgguauacacuggug

SEQ ID NO: 345595 - RNA, 22 nt, Artificial Sequence
  Synthetic
acuucuccgguauacacuggug

SEQ ID NO: 345596 - RNA, 23 nt, Artificial Sequence
  Synthetic
aacuucuccgguauacacuggug

SEQ ID NO: 345597 - RNA, 24 nt, Artificial Sequence
  Synthetic
aaacuucuccgguauacacuggug

SEQ ID NO: 345598 - RNA, 18 nt, Artificial Sequence
  Synthetic
auuggugauuuacuggug

SEQ ID NO: 345599 - RNA, 19 nt, Artificial Sequence
  Synthetic
cauuggugauuuacuggug

SEQ ID NO: 345600 - RNA, 20 nt, Artificial Sequence
  Synthetic
ucauuggugauuuacuggug

SEQ ID NO: 345601 - RNA, 21 nt, Artificial Sequence
  Synthetic
gucauuggugauuuacuggug

SEQ ID NO: 345602 - RNA, 22 nt, Artificial Sequence
  Synthetic
ugucauuggugauuuacuggug

SEQ ID NO: 345603 - RNA, 23 nt, Artificial Sequence
  Synthetic
augucauuggugauuuacuggug

SEQ ID NO: 345604 - RNA, 24 nt, Artificial Sequence
  Synthetic
caugucauuggugauuuacuggug

SEQ ID NO: 345605 - RNA, 18 nt, Artificial Sequence
  Synthetic
augaaaaagacccuggug

SEQ ID NO: 345606 - RNA, 19 nt, Artificial Sequence
  Synthetic
uaugaaaaagacccuggug

SEQ ID NO: 345607 - RNA, 20 nt, Artificial Sequence
  Synthetic
cuaugaaaaagacccuggug

SEQ ID NO: 345608 - RNA, 21 nt, Artificial Sequence
  Synthetic
ccuaugaaaaagacccuggug

SEQ ID NO: 345609 - RNA, 22 nt, Artificial Sequence
  Synthetic
cccuaugaaaaagacccuggug

SEQ ID NO: 345610 - RNA, 23 nt, Artificial Sequence
  Synthetic
gcccuaugaaaaagacccuggug

SEQ ID NO: 345611 - RNA, 24 nt, Artificial Sequence
  Synthetic
agcccuaugaaaaagacccuggug

SEQ ID NO: 345612 - RNA, 18 nt, Artificial Sequence
  Synthetic
auuuugaugccgcuggug

SEQ ID NO: 345613 - RNA, 19 nt, Artificial Sequence
  Synthetic
gauuuugaugccgcuggug

SEQ ID NO: 345614 - RNA, 20 nt, Artificial Sequence
  Synthetic
ugauuuugaugccgcuggug

SEQ ID NO: 345615 - RNA, 21 nt, Artificial Sequence
  Synthetic
augauuuugaugccgcuggug

SEQ ID NO: 345616 - RNA, 22 nt, Artificial Sequence
  Synthetic
caugauuuugaugccgcuggug

SEQ ID NO: 345617 - RNA, 23 nt, Artificial Sequence
  Synthetic
ccaugauuuugaugccgcuggug

SEQ ID NO: 345618 - RNA, 24 nt, Artificial Sequence
  Synthetic
uccaugauuuugaugccgcuggug

SEQ ID NO: 345619 - RNA, 18 nt, Artificial Sequence
  Synthetic
ccuuugcccuugcuggug

SEQ ID NO: 345620 - RNA, 19 nt, Artificial Sequence
  Synthetic
cccuuugcccuugcuggug

SEQ ID NO: 345621 - RNA, 20 nt, Artificial Sequence
  Synthetic
gcccuuugcccuugcuggug

SEQ ID NO: 345622 - RNA, 21 nt, Artificial Sequence
  Synthetic
ggcccuuugcccuugcuggug

SEQ ID NO: 345623 - RNA, 22 nt, Artificial Sequence
  Synthetic
aggcccuuugcccuugcuggug

SEQ ID NO: 345624 - RNA, 23 nt, Artificial Sequence
  Synthetic
aaggcccuuugcccuugcuggug

SEQ ID NO: 345625 - RNA, 24 nt, Artificial Sequence
  Synthetic
aaaggcccuuugcccuugcuggug

SEQ ID NO: 345626 - RNA, 18 nt, Artificial Sequence
  Synthetic
agacuccacaaucuggug

SEQ ID NO: 345627 - RNA, 19 nt, Artificial Sequence
  Synthetic
cagacuccacaaucuggug

SEQ ID NO: 345628 - RNA, 20 nt, Artificial Sequence
  Synthetic
acagacuccacaaucuggug

SEQ ID NO: 345629 - RNA, 21 nt, Artificial Sequence
  Synthetic
cacagacuccacaaucuggug

SEQ ID NO: 345630 - RNA, 22 nt, Artificial Sequence
  Synthetic
ucacagacuccacaaucuggug

SEQ ID NO: 345631 - RNA, 23 nt, Artificial Sequence
  Synthetic
uucacagacuccacaaucuggug

SEQ ID NO: 345632 - RNA, 24 nt, Artificial Sequence
  Synthetic
cuucacagacuccacaaucuggug

SEQ ID NO: 345633 - RNA, 18 nt, Artificial Sequence
  Synthetic
cuaaaccagucucuggug

SEQ ID NO: 345634 - RNA, 19 nt, Artificial Sequence
  Synthetic
ucuaaaccagucucuggug

SEQ ID NO: 345635 - RNA, 20 nt, Artificial Sequence
  Synthetic
cucuaaaccagucucuggug

SEQ ID NO: 345636 - RNA, 21 nt, Artificial Sequence
  Synthetic
ccucuaaaccagucucuggug

SEQ ID NO: 345637 - RNA, 22 nt, Artificial Sequence
  Synthetic
uccucuaaaccagucucuggug

SEQ ID NO: 345638 - RNA, 23 nt, Artificial Sequence
  Synthetic
uuccucuaaaccagucucuggug

SEQ ID NO: 345639 - RNA, 24 nt, Artificial Sequence
  Synthetic
cuuccucuaaaccagucucuggug

SEQ ID NO: 345640 - RNA, 18 nt, Artificial Sequence
  Synthetic
auaaaucuagcaguggug

SEQ ID NO: 345641 - RNA, 19 nt, Artificial Sequence
  Synthetic
gauaaaucuagcaguggug

SEQ ID NO: 345642 - RNA, 20 nt, Artificial Sequence
  Synthetic
agauaaaucuagcaguggug

SEQ ID NO: 345643 - RNA, 21 nt, Artificial Sequence
  Synthetic
aagauaaaucuagcaguggug

SEQ ID NO: 345644 - RNA, 22 nt, Artificial Sequence
  Synthetic
gaagauaaaucuagcaguggug

SEQ ID NO: 345645 - RNA, 23 nt, Artificial Sequence
  Synthetic
ggaagauaaaucuagcaguggug

SEQ ID NO: 345646 - RNA, 24 nt, Artificial Sequence
  Synthetic
aggaagauaaaucuagcaguggug

SEQ ID NO: 345647 - RNA, 18 nt, Artificial Sequence
  Synthetic
auagaaggaucaguggug

SEQ ID NO: 345648 - RNA, 19 nt, Artificial Sequence
  Synthetic
gauagaaggaucaguggug

SEQ ID NO: 345649 - RNA, 20 nt, Artificial Sequence
  Synthetic
ugauagaaggaucaguggug

SEQ ID NO: 345650 - RNA, 21 nt, Artificial Sequence
  Synthetic
uugauagaaggaucaguggug

SEQ ID NO: 345651 - RNA, 22 nt, Artificial Sequence
  Synthetic
auugauagaaggaucaguggug

SEQ ID NO: 345652 - RNA, 23 nt, Artificial Sequence
  Synthetic
uauugauagaaggaucaguggug

SEQ ID NO: 345653 - RNA, 24 nt, Artificial Sequence
  Synthetic
auauugauagaaggaucaguggug

SEQ ID NO: 345654 - RNA, 18 nt, Artificial Sequence
  Synthetic
auuuuagcaagaguggug

SEQ ID NO: 345655 - RNA, 19 nt, Artificial Sequence
  Synthetic
uauuuuagcaagaguggug

SEQ ID NO: 345656 - RNA, 20 nt, Artificial Sequence
  Synthetic
guauuuuagcaagaguggug

SEQ ID NO: 345657 - RNA, 21 nt, Artificial Sequence
  Synthetic
aguauuuuagcaagaguggug

SEQ ID NO: 345658 - RNA, 22 nt, Artificial Sequence
  Synthetic
caguauuuuagcaagaguggug

SEQ ID NO: 345659 - RNA, 23 nt, Artificial Sequence
  Synthetic
gcaguauuuuagcaagaguggug

SEQ ID NO: 345660 - RNA, 24 nt, Artificial Sequence
  Synthetic
agcaguauuuuagcaagaguggug

SEQ ID NO: 345661 - RNA, 18 nt, Artificial Sequence
  Synthetic
uggggacaaggaguggug

SEQ ID NO: 345662 - RNA, 19 nt, Artificial Sequence
  Synthetic
guggggacaaggaguggug

SEQ ID NO: 345663 - RNA, 20 nt, Artificial Sequence
  Synthetic
uguggggacaaggaguggug

SEQ ID NO: 345664 - RNA, 21 nt, Artificial Sequence
  Synthetic
cuguggggacaaggaguggug

SEQ ID NO: 345665 - RNA, 22 nt, Artificial Sequence
  Synthetic
acuguggggacaaggaguggug

SEQ ID NO: 345666 - RNA, 23 nt, Artificial Sequence
  Synthetic
cacuguggggacaaggaguggug

SEQ ID NO: 345667 - RNA, 24 nt, Artificial Sequence
  Synthetic
ccacuguggggacaaggaguggug

SEQ ID NO: 345668 - RNA, 18 nt, Artificial Sequence
  Synthetic
aaacaaacaggaguggug

SEQ ID NO: 345669 - RNA, 19 nt, Artificial Sequence
  Synthetic
caaacaaacaggaguggug

SEQ ID NO: 345670 - RNA, 20 nt, Artificial Sequence
  Synthetic
acaaacaaacaggaguggug

SEQ ID NO: 345671 - RNA, 21 nt, Artificial Sequence
  Synthetic
aacaaacaaacaggaguggug

SEQ ID NO: 345672 - RNA, 22 nt, Artificial Sequence
  Synthetic
aaacaaacaaacaggaguggug

SEQ ID NO: 345673 - RNA, 23 nt, Artificial Sequence
  Synthetic
aaaacaaacaaacaggaguggug

SEQ ID NO: 345674 - RNA, 24 nt, Artificial Sequence
  Synthetic
caaaacaaacaaacaggaguggug

SEQ ID NO: 345675 - RNA, 18 nt, Artificial Sequence
  Synthetic
aaauagcuaggaguggug

SEQ ID NO: 345676 - RNA, 19 nt, Artificial Sequence
  Synthetic
aaaauagcuaggaguggug

SEQ ID NO: 345677 - RNA, 20 nt, Artificial Sequence
  Synthetic
aaaaauagcuaggaguggug

SEQ ID NO: 345678 - RNA, 21 nt, Artificial Sequence
  Synthetic
aaaaaauagcuaggaguggug

SEQ ID NO: 345679 - RNA, 22 nt, Artificial Sequence
  Synthetic
caaaaaauagcuaggaguggug

SEQ ID NO: 345680 - RNA, 23 nt, Artificial Sequence
  Synthetic
acaaaaaauagcuaggaguggug

SEQ ID NO: 345681 - RNA, 24 nt, Artificial Sequence
  Synthetic
uacaaaaaauagcuaggaguggug

SEQ ID NO: 345682 - RNA, 21 nt, Artificial Sequence
  Synthetic
aaaaauuagccaggcguggug

SEQ ID NO: 345683 - RNA, 22 nt, Artificial Sequence
  Synthetic
aaaaaauuagccaggcguggug

SEQ ID NO: 345684 - RNA, 23 nt, Artificial Sequence
  Synthetic
aaaaaaauuagccaggcguggug

SEQ ID NO: 345685 - RNA, 24 nt, Artificial Sequence
  Synthetic
aaaaaaaauuagccaggcguggug

SEQ ID NO: 345686 - RNA, 23 nt, Artificial Sequence
  Synthetic
caaaaaauuagccaggcguggug

SEQ ID NO: 345687 - RNA, 24 nt, Artificial Sequence
  Synthetic
acaaaaaauuagccaggcguggug

SEQ ID NO: 345688 - RNA, 21 nt, Artificial Sequence
  Synthetic
caaaauuagccaggcguggug

SEQ ID NO: 345689 - RNA, 22 nt, Artificial Sequence
  Synthetic
acaaaauuagccaggcguggug

SEQ ID NO: 345690 - RNA, 23 nt, Artificial Sequence
  Synthetic
uacaaaauuagccaggcguggug

SEQ ID NO: 345691 - RNA, 24 nt, Artificial Sequence
  Synthetic
auacaaaauuagccaggcguggug

SEQ ID NO: 345692 - RNA, 24 nt, Artificial Sequence
  Synthetic
aaaaaaaauuagccgggcguggug

SEQ ID NO: 345693 - RNA, 21 nt, Artificial Sequence
  Synthetic
aaaaauuagcugggcguggug

SEQ ID NO: 345694 - RNA, 22 nt, Artificial Sequence
  Synthetic
aaaaaauuagcugggcguggug

SEQ ID NO: 345695 - RNA, 23 nt, Artificial Sequence
  Synthetic
caaaaaauuagcugggcguggug

SEQ ID NO: 345696 - RNA, 24 nt, Artificial Sequence
  Synthetic
acaaaaaauuagcugggcguggug

SEQ ID NO: 345697 - RNA, 18 nt, Artificial Sequence
  Synthetic
aauuagccaugcguggug

SEQ ID NO: 345698 - RNA, 19 nt, Artificial Sequence
  Synthetic
aaauuagccaugcguggug

SEQ ID NO: 345699 - RNA, 20 nt, Artificial Sequence
  Synthetic
aaaauuagccaugcguggug

SEQ ID NO: 345700 - RNA, 21 nt, Artificial Sequence
  Synthetic
aaaaauuagccaugcguggug

SEQ ID NO: 345701 - RNA, 22 nt, Artificial Sequence
  Synthetic
aaaaaauuagccaugcguggug

SEQ ID NO: 345702 - RNA, 23 nt, Artificial Sequence
  Synthetic
aaaaaaauuagccaugcguggug

SEQ ID NO: 345703 - RNA, 24 nt, Artificial Sequence
  Synthetic
aaaaaaaauuagccaugcguggug

SEQ ID NO: 345704 - RNA, 18 nt, Artificial Sequence
  Synthetic
gaccagugucagguggug

SEQ ID NO: 345705 - RNA, 19 nt, Artificial Sequence
  Synthetic
agaccagugucagguggug

SEQ ID NO: 345706 - RNA, 20 nt, Artificial Sequence
  Synthetic
uagaccagugucagguggug

SEQ ID NO: 345707 - RNA, 21 nt, Artificial Sequence
  Synthetic
auagaccagugucagguggug

SEQ ID NO: 345708 - RNA, 22 nt, Artificial Sequence
  Synthetic
aauagaccagugucagguggug

SEQ ID NO: 345709 - RNA, 23 nt, Artificial Sequence
  Synthetic
uaauagaccagugucagguggug

SEQ ID NO: 345710 - RNA, 24 nt, Artificial Sequence
  Synthetic
uuaauagaccagugucagguggug

SEQ ID NO: 345711 - RNA, 18 nt, Artificial Sequence
  Synthetic
uuggggagagagguggug

SEQ ID NO: 345712 - RNA, 19 nt, Artificial Sequence
  Synthetic
guuggggagagagguggug

SEQ ID NO: 345713 - RNA, 20 nt, Artificial Sequence
  Synthetic
uguuggggagagagguggug

SEQ ID NO: 345714 - RNA, 21 nt, Artificial Sequence
  Synthetic
auguuggggagagagguggug

SEQ ID NO: 345715 - RNA, 22 nt, Artificial Sequence
  Synthetic
uauguuggggagagagguggug

SEQ ID NO: 345716 - RNA, 23 nt, Artificial Sequence
  Synthetic
guauguuggggagagagguggug

SEQ ID NO: 345717 - RNA, 24 nt, Artificial Sequence
  Synthetic
cguauguuggggagagagguggug

SEQ ID NO: 345718 - RNA, 18 nt, Artificial Sequence
  Synthetic
augacgguuaggguggug

SEQ ID NO: 345719 - RNA, 19 nt, Artificial Sequence
  Synthetic
gaugacgguuaggguggug

SEQ ID NO: 345720 - RNA, 20 nt, Artificial Sequence
  Synthetic
ugaugacgguuaggguggug

SEQ ID NO: 345721 - RNA, 21 nt, Artificial Sequence
  Synthetic
augaugacgguuaggguggug

SEQ ID NO: 345722 - RNA, 22 nt, Artificial Sequence
  Synthetic
gaugaugacgguuaggguggug

SEQ ID NO: 345723 - RNA, 23 nt, Artificial Sequence
  Synthetic
ugaugaugacgguuaggguggug

SEQ ID NO: 345724 - RNA, 24 nt, Artificial Sequence
  Synthetic
augaugaugacgguuaggguggug

SEQ ID NO: 345725 - RNA, 18 nt, Artificial Sequence
  Synthetic
gaaggaggaaugguggug

SEQ ID NO: 345726 - RNA, 19 nt, Artificial Sequence
  Synthetic
agaaggaggaaugguggug

SEQ ID NO: 345727 - RNA, 20 nt, Artificial Sequence
  Synthetic
aagaaggaggaaugguggug

SEQ ID NO: 345728 - RNA, 21 nt, Artificial Sequence
  Synthetic
gaagaaggaggaaugguggug

SEQ ID NO: 345729 - RNA, 22 nt, Artificial Sequence
  Synthetic
ggaagaaggaggaaugguggug

SEQ ID NO: 345730 - RNA, 23 nt, Artificial Sequence
  Synthetic
aggaagaaggaggaaugguggug

SEQ ID NO: 345731 - RNA, 24 nt, Artificial Sequence
  Synthetic
aaggaagaaggaggaaugguggug

SEQ ID NO: 345732 - RNA, 18 nt, Artificial Sequence
  Synthetic
aguggcuuacauguggug

SEQ ID NO: 345733 - RNA, 19 nt, Artificial Sequence
  Synthetic
uaguggcuuacauguggug

SEQ ID NO: 345734 - RNA, 20 nt, Artificial Sequence
  Synthetic
uuaguggcuuacauguggug

SEQ ID NO: 345735 - RNA, 21 nt, Artificial Sequence
  Synthetic
cuuaguggcuuacauguggug

SEQ ID NO: 345736 - RNA, 22 nt, Artificial Sequence
  Synthetic
ccuuaguggcuuacauguggug

SEQ ID NO: 345737 - RNA, 23 nt, Artificial Sequence
  Synthetic
gccuuaguggcuuacauguggug

SEQ ID NO: 345738 - RNA, 24 nt, Artificial Sequence
  Synthetic
ggccuuaguggcuuacauguggug

SEQ ID NO: 345739 - RNA, 18 nt, Artificial Sequence
  Synthetic
ugacaauuccauguggug

SEQ ID NO: 345740 - RNA, 19 nt, Artificial Sequence
  Synthetic
cugacaauuccauguggug

SEQ ID NO: 345741 - RNA, 20 nt, Artificial Sequence
  Synthetic
ucugacaauuccauguggug

SEQ ID NO: 345742 - RNA, 21 nt, Artificial Sequence
  Synthetic
gucugacaauuccauguggug

SEQ ID NO: 345743 - RNA, 22 nt, Artificial Sequence
  Synthetic
agucugacaauuccauguggug

SEQ ID NO: 345744 - RNA, 23 nt, Artificial Sequence
  Synthetic
aagucugacaauuccauguggug

SEQ ID NO: 345745 - RNA, 24 nt, Artificial Sequence
  Synthetic
uaagucugacaauuccauguggug

SEQ ID NO: 345746 - RNA, 18 nt, Artificial Sequence
  Synthetic
aauuagcuggguguggug

SEQ ID NO: 345747 - RNA, 19 nt, Artificial Sequence
  Synthetic
aaauuagcuggguguggug

SEQ ID NO: 345748 - RNA, 20 nt, Artificial Sequence
  Synthetic
aaaauuagcuggguguggug

SEQ ID NO: 345749 - RNA, 21 nt, Artificial Sequence
  Synthetic
aaaaauuagcuggguguggug

SEQ ID NO: 345750 - RNA, 22 nt, Artificial Sequence
  Synthetic
caaaaauuagcuggguguggug

SEQ ID NO: 345751 - RNA, 23 nt, Artificial Sequence
  Synthetic
ccaaaaauuagcuggguguggug

SEQ ID NO: 345752 - RNA, 24 nt, Artificial Sequence
  Synthetic
accaaaaauuagcuggguguggug

SEQ ID NO: 345753 - RNA, 18 nt, Artificial Sequence
  Synthetic
aauaggugugguguggug

SEQ ID NO: 345754 - RNA, 19 nt, Artificial Sequence
  Synthetic
gaauaggugugguguggug

SEQ ID NO: 345755 - RNA, 20 nt, Artificial Sequence
  Synthetic
ggaauaggugugguguggug

SEQ ID NO: 345756 - RNA, 21 nt, Artificial Sequence
  Synthetic
uggaauaggugugguguggug

SEQ ID NO: 345757 - RNA, 22 nt, Artificial Sequence
  Synthetic
uuggaauaggugugguguggug

SEQ ID NO: 345758 - RNA, 23 nt, Artificial Sequence
  Synthetic
uuuggaauaggugugguguggug

SEQ ID NO: 345759 - RNA, 24 nt, Artificial Sequence
  Synthetic
uuuuggaauaggugugguguggug

SEQ ID NO: 345760 - RNA, 18 nt, Artificial Sequence
  Synthetic
uaggguuugcuuguggug

SEQ ID NO: 345761 - RNA, 19 nt, Artificial Sequence
  Synthetic
uuaggguuugcuuguggug

SEQ ID NO: 345762 - RNA, 20 nt, Artificial Sequence
  Synthetic
cuuaggguuugcuuguggug

SEQ ID NO: 345763 - RNA, 21 nt, Artificial Sequence
  Synthetic
acuuaggguuugcuuguggug

SEQ ID NO: 345764 - RNA, 22 nt, Artificial Sequence
  Synthetic
cacuuaggguuugcuuguggug

SEQ ID NO: 345765 - RNA, 23 nt, Artificial Sequence
  Synthetic
ccacuuaggguuugcuuguggug

SEQ ID NO: 345766 - RNA, 24 nt, Artificial Sequence
  Synthetic
cccacuuaggguuugcuuguggug

SEQ ID NO: 345767 - RNA, 18 nt, Artificial Sequence
  Synthetic
aaaugauuaagauuggug

SEQ ID NO: 345768 - RNA, 19 nt, Artificial Sequence
  Synthetic
gaaaugauuaagauuggug

SEQ ID NO: 345769 - RNA, 20 nt, Artificial Sequence
  Synthetic
agaaaugauuaagauuggug

SEQ ID NO: 345770 - RNA, 21 nt, Artificial Sequence
  Synthetic
cagaaaugauuaagauuggug

SEQ ID NO: 345771 - RNA, 22 nt, Artificial Sequence
  Synthetic
ucagaaaugauuaagauuggug

SEQ ID NO: 345772 - RNA, 23 nt, Artificial Sequence
  Synthetic
gucagaaaugauuaagauuggug

SEQ ID NO: 345773 - RNA, 24 nt, Artificial Sequence
  Synthetic
agucagaaaugauuaagauuggug

SEQ ID NO: 345774 - RNA, 18 nt, Artificial Sequence
  Synthetic
accuucauaaccuuggug

SEQ ID NO: 345775 - RNA, 19 nt, Artificial Sequence
  Synthetic
uaccuucauaaccuuggug

SEQ ID NO: 345776 - RNA, 20 nt, Artificial Sequence
  Synthetic
cuaccuucauaaccuuggug

SEQ ID NO: 345777 - RNA, 21 nt, Artificial Sequence
  Synthetic
gcuaccuucauaaccuuggug

SEQ ID NO: 345778 - RNA, 22 nt, Artificial Sequence
  Synthetic
ugcuaccuucauaaccuuggug

SEQ ID NO: 345779 - RNA, 23 nt, Artificial Sequence
  Synthetic
augcuaccuucauaaccuuggug

SEQ ID NO: 345780 - RNA, 24 nt, Artificial Sequence
  Synthetic
uaugcuaccuucauaaccuuggug

SEQ ID NO: 345781 - RNA, 18 nt, Artificial Sequence
  Synthetic
uauuaggucuccuuggug

SEQ ID NO: 345782 - RNA, 19 nt, Artificial Sequence
  Synthetic
cuauuaggucuccuuggug

SEQ ID NO: 345783 - RNA, 20 nt, Artificial Sequence
  Synthetic
ucuauuaggucuccuuggug

SEQ ID NO: 345784 - RNA, 21 nt, Artificial Sequence
  Synthetic
gucuauuaggucuccuuggug

SEQ ID NO: 345785 - RNA, 22 nt, Artificial Sequence
  Synthetic
ugucuauuaggucuccuuggug

SEQ ID NO: 345786 - RNA, 23 nt, Artificial Sequence
  Synthetic
augucuauuaggucuccuuggug

SEQ ID NO: 345787 - RNA, 24 nt, Artificial Sequence
  Synthetic
gaugucuauuaggucuccuuggug

SEQ ID NO: 345788 - RNA, 18 nt, Artificial Sequence
  Synthetic
agagagagagaguuggug

SEQ ID NO: 345789 - RNA, 19 nt, Artificial Sequence
  Synthetic
cagagagagagaguuggug

SEQ ID NO: 345790 - RNA, 20 nt, Artificial Sequence
  Synthetic
gcagagagagagaguuggug

SEQ ID NO: 345791 - RNA, 21 nt, Artificial Sequence
  Synthetic
agcagagagagagaguuggug

SEQ ID NO: 345792 - RNA, 22 nt, Artificial Sequence
  Synthetic
aagcagagagagagaguuggug

SEQ ID NO: 345793 - RNA, 23 nt, Artificial Sequence
  Synthetic
aaagcagagagagagaguuggug

SEQ ID NO: 345794 - RNA, 24 nt, Artificial Sequence
  Synthetic
gaaagcagagagagagaguuggug

SEQ ID NO: 345795 - RNA, 18 nt, Artificial Sequence
  Synthetic
gggccguaaagguuggug

SEQ ID NO: 345796 - RNA, 19 nt, Artificial Sequence
  Synthetic
agggccguaaagguuggug

SEQ ID NO: 345797 - RNA, 20 nt, Artificial Sequence
  Synthetic
aagggccguaaagguuggug

SEQ ID NO: 345798 - RNA, 21 nt, Artificial Sequence
  Synthetic
gaagggccguaaagguuggug

SEQ ID NO: 345799 - RNA, 22 nt, Artificial Sequence
  Synthetic
ggaagggccguaaagguuggug

SEQ ID NO: 345800 - RNA, 23 nt, Artificial Sequence
  Synthetic
uggaagggccguaaagguuggug

SEQ ID NO: 345801 - RNA, 24 nt, Artificial Sequence
  Synthetic
auggaagggccguaaagguuggug

SEQ ID NO: 345802 - RNA, 18 nt, Artificial Sequence
  Synthetic
uuugagcaaaauuuggug

SEQ ID NO: 345803 - RNA, 19 nt, Artificial Sequence
  Synthetic
guuugagcaaaauuuggug

SEQ ID NO: 345804 - RNA, 20 nt, Artificial Sequence
  Synthetic
uguuugagcaaaauuuggug

SEQ ID NO: 345805 - RNA, 21 nt, Artificial Sequence
  Synthetic
uuguuugagcaaaauuuggug

SEQ ID NO: 345806 - RNA, 22 nt, Artificial Sequence
  Synthetic
cuuguuugagcaaaauuuggug

SEQ ID NO: 345807 - RNA, 23 nt, Artificial Sequence
  Synthetic
ccuuguuugagcaaaauuuggug

SEQ ID NO: 345808 - RNA, 24 nt, Artificial Sequence
  Synthetic
gccuuguuugagcaaaauuuggug

SEQ ID NO: 345809 - RNA, 18 nt, Artificial Sequence
  Synthetic
gugcauuucacuuuggug

SEQ ID NO: 345810 - RNA, 19 nt, Artificial Sequence
  Synthetic
ggugcauuucacuuuggug

SEQ ID NO: 345811 - RNA, 20 nt, Artificial Sequence
  Synthetic
uggugcauuucacuuuggug

SEQ ID NO: 345812 - RNA, 21 nt, Artificial Sequence
  Synthetic
uuggugcauuucacuuuggug

SEQ ID NO: 345813 - RNA, 22 nt, Artificial Sequence
  Synthetic
uuuggugcauuucacuuuggug

SEQ ID NO: 345814 - RNA, 23 nt, Artificial Sequence
  Synthetic
guuuggugcauuucacuuuggug

SEQ ID NO: 345815 - RNA, 24 nt, Artificial Sequence
  Synthetic
gguuuggugcauuucacuuuggug

SEQ ID NO: 345816 - RNA, 18 nt, Artificial Sequence
  Synthetic
aaaauggcugcuuuggug

SEQ ID NO: 345817 - RNA, 19 nt, Artificial Sequence
  Synthetic
caaaauggcugcuuuggug

SEQ ID NO: 345818 - RNA, 20 nt, Artificial Sequence
  Synthetic
acaaaauggcugcuuuggug

SEQ ID NO: 345819 - RNA, 21 nt, Artificial Sequence
  Synthetic
aacaaaauggcugcuuuggug

SEQ ID NO: 345820 - RNA, 22 nt, Artificial Sequence
  Synthetic
uaacaaaauggcugcuuuggug

SEQ ID NO: 345821 - RNA, 23 nt, Artificial Sequence
  Synthetic
auaacaaaauggcugcuuuggug

SEQ ID NO: 345822 - RNA, 24 nt, Artificial Sequence
  Synthetic
aauaacaaaauggcugcuuuggug

SEQ ID NO: 345823 - RNA, 18 nt, Artificial Sequence
  Synthetic
ugugaguggauuuuggug

SEQ ID NO: 345824 - RNA, 19 nt, Artificial Sequence
  Synthetic
gugugaguggauuuuggug

SEQ ID NO: 345825 - RNA, 20 nt, Artificial Sequence
  Synthetic
agugugaguggauuuuggug

SEQ ID NO: 345826 - RNA, 21 nt, Artificial Sequence
  Synthetic
aagugugaguggauuuuggug

SEQ ID NO: 345827 - RNA, 22 nt, Artificial Sequence
  Synthetic
aaagugugaguggauuuuggug

SEQ ID NO: 345828 - RNA, 23 nt, Artificial Sequence
  Synthetic
aaaagugugaguggauuuuggug

SEQ ID NO: 345829 - RNA, 24 nt, Artificial Sequence
  Synthetic
gaaaagugugaguggauuuuggug

SEQ ID NO: 345830 - RNA, 18 nt, Artificial Sequence
  Synthetic
uggaaaagucaaaaugug

SEQ ID NO: 345831 - RNA, 19 nt, Artificial Sequence
  Synthetic
auggaaaagucaaaaugug

SEQ ID NO: 345832 - RNA, 20 nt, Artificial Sequence
  Synthetic
aauggaaaagucaaaaugug

SEQ ID NO: 345833 - RNA, 21 nt, Artificial Sequence
  Synthetic
aaauggaaaagucaaaaugug

SEQ ID NO: 345834 - RNA, 22 nt, Artificial Sequence
  Synthetic
gaaauggaaaagucaaaaugug

SEQ ID NO: 345835 - RNA, 23 nt, Artificial Sequence
  Synthetic
agaaauggaaaagucaaaaugug

SEQ ID NO: 345836 - RNA, 24 nt, Artificial Sequence
  Synthetic
uagaaauggaaaagucaaaaugug

SEQ ID NO: 345837 - RNA, 18 nt, Artificial Sequence
  Synthetic
ugaaauaaauaaaaugug

SEQ ID NO: 345838 - RNA, 19 nt, Artificial Sequence
  Synthetic
uugaaauaaauaaaaugug

SEQ ID NO: 345839 - RNA, 20 nt, Artificial Sequence
  Synthetic
uuugaaauaaauaaaaugug

SEQ ID NO: 345840 - RNA, 21 nt, Artificial Sequence
  Synthetic
auuugaaauaaauaaaaugug

SEQ ID NO: 345841 - RNA, 22 nt, Artificial Sequence
  Synthetic
uauuugaaauaaauaaaaugug

SEQ ID NO: 345842 - RNA, 23 nt, Artificial Sequence
  Synthetic
uuauuugaaauaaauaaaaugug

SEQ ID NO: 345843 - RNA, 24 nt, Artificial Sequence
  Synthetic
auuauuugaaauaaauaaaaugug

SEQ ID NO: 345844 - RNA, 18 nt, Artificial Sequence
  Synthetic
cauuucagcuaaaaugug

SEQ ID NO: 345845 - RNA, 19 nt, Artificial Sequence
  Synthetic
gcauuucagcuaaaaugug

SEQ ID NO: 345846 - RNA, 20 nt, Artificial Sequence
  Synthetic
agcauuucagcuaaaaugug

SEQ ID NO: 345847 - RNA, 21 nt, Artificial Sequence
  Synthetic
uagcauuucagcuaaaaugug

SEQ ID NO: 345848 - RNA, 22 nt, Artificial Sequence
  Synthetic
cuagcauuucagcuaaaaugug

SEQ ID NO: 345849 - RNA, 23 nt, Artificial Sequence
  Synthetic
acuagcauuucagcuaaaaugug

SEQ ID NO: 345850 - RNA, 24 nt, Artificial Sequence
  Synthetic
aacuagcauuucagcuaaaaugug

SEQ ID NO: 345851 - RNA, 18 nt, Artificial Sequence
  Synthetic
agcugucuuucaaaugug

SEQ ID NO: 345852 - RNA, 19 nt, Artificial Sequence
  Synthetic
cagcugucuuucaaaugug

SEQ ID NO: 345853 - RNA, 20 nt, Artificial Sequence
  Synthetic
gcagcugucuuucaaaugug

SEQ ID NO: 345854 - RNA, 21 nt, Artificial Sequence
  Synthetic
agcagcugucuuucaaaugug

SEQ ID NO: 345855 - RNA, 22 nt, Artificial Sequence
  Synthetic
aagcagcugucuuucaaaugug

SEQ ID NO: 345856 - RNA, 23 nt, Artificial Sequence
  Synthetic
uaagcagcugucuuucaaaugug

SEQ ID NO: 345857 - RNA, 24 nt, Artificial Sequence
  Synthetic
uuaagcagcugucuuucaaaugug

SEQ ID NO: 345858 - RNA, 18 nt, Artificial Sequence
  Synthetic
uggaucuguggcaaugug

SEQ ID NO: 345859 - RNA, 19 nt, Artificial Sequence
  Synthetic
cuggaucuguggcaaugug

SEQ ID NO: 345860 - RNA, 20 nt, Artificial Sequence
  Synthetic
ccuggaucuguggcaaugug

SEQ ID NO: 345861 - RNA, 21 nt, Artificial Sequence
  Synthetic
accuggaucuguggcaaugug

SEQ ID NO: 345862 - RNA, 22 nt, Artificial Sequence
  Synthetic
caccuggaucuguggcaaugug

SEQ ID NO: 345863 - RNA, 23 nt, Artificial Sequence
  Synthetic
ccaccuggaucuguggcaaugug

SEQ ID NO: 345864 - RNA, 24 nt, Artificial Sequence
  Synthetic
uccaccuggaucuguggcaaugug

SEQ ID NO: 345865 - RNA, 18 nt, Artificial Sequence
  Synthetic
ucuuucuaauucaaugug

SEQ ID NO: 345866 - RNA, 19 nt, Artificial Sequence
  Synthetic
uucuuucuaauucaaugug

SEQ ID NO: 345867 - RNA, 20 nt, Artificial Sequence
  Synthetic
uuucuuucuaauucaaugug

SEQ ID NO: 345868 - RNA, 21 nt, Artificial Sequence
  Synthetic
uuuucuuucuaauucaaugug

SEQ ID NO: 345869 - RNA, 22 nt, Artificial Sequence
  Synthetic
guuuucuuucuaauucaaugug

SEQ ID NO: 345870 - RNA, 23 nt, Artificial Sequence
  Synthetic
aguuuucuuucuaauucaaugug

SEQ ID NO: 345871 - RNA, 24 nt, Artificial Sequence
  Synthetic
aaguuuucuuucuaauucaaugug

SEQ ID NO: 345872 - RNA, 18 nt, Artificial Sequence
  Synthetic
ugucugauguucaaugug

SEQ ID NO: 345873 - RNA, 19 nt, Artificial Sequence
  Synthetic
augucugauguucaaugug

SEQ ID NO: 345874 - RNA, 20 nt, Artificial Sequence
  Synthetic
aaugucugauguucaaugug

SEQ ID NO: 345875 - RNA, 21 nt, Artificial Sequence
  Synthetic
caaugucugauguucaaugug

SEQ ID NO: 345876 - RNA, 22 nt, Artificial Sequence
  Synthetic
ucaaugucugauguucaaugug

SEQ ID NO: 345877 - RNA, 23 nt, Artificial Sequence
  Synthetic
uucaaugucugauguucaaugug

SEQ ID NO: 345878 - RNA, 24 nt, Artificial Sequence
  Synthetic
cuucaaugucugauguucaaugug

SEQ ID NO: 345879 - RNA, 18 nt, Artificial Sequence
  Synthetic
aaugagucuuucaaugug

SEQ ID NO: 345880 - RNA, 19 nt, Artificial Sequence
  Synthetic
caaugagucuuucaaugug

SEQ ID NO: 345881 - RNA, 20 nt, Artificial Sequence
  Synthetic
acaaugagucuuucaaugug

SEQ ID NO: 345882 - RNA, 21 nt, Artificial Sequence
  Synthetic
gacaaugagucuuucaaugug

SEQ ID NO: 345883 - RNA, 22 nt, Artificial Sequence
  Synthetic
agacaaugagucuuucaaugug

SEQ ID NO: 345884 - RNA, 23 nt, Artificial Sequence
  Synthetic
cagacaaugagucuuucaaugug

SEQ ID NO: 345885 - RNA, 24 nt, Artificial Sequence
  Synthetic
acagacaaugagucuuucaaugug

SEQ ID NO: 345886 - RNA, 18 nt, Artificial Sequence
  Synthetic
uccaaaauucagaaugug

SEQ ID NO: 345887 - RNA, 19 nt, Artificial Sequence
  Synthetic
auccaaaauucagaaugug

SEQ ID NO: 345888 - RNA, 20 nt, Artificial Sequence
  Synthetic
gauccaaaauucagaaugug

SEQ ID NO: 345889 - RNA, 21 nt, Artificial Sequence
  Synthetic
agauccaaaauucagaaugug

SEQ ID NO: 345890 - RNA, 22 nt, Artificial Sequence
  Synthetic
aagauccaaaauucagaaugug

SEQ ID NO: 345891 - RNA, 23 nt, Artificial Sequence
  Synthetic
aaagauccaaaauucagaaugug

SEQ ID NO: 345892 - RNA, 24 nt, Artificial Sequence
  Synthetic
uaaagauccaaaauucagaaugug

SEQ ID NO: 345893 - RNA, 18 nt, Artificial Sequence
  Synthetic
uuuaugcucacgaaugug

SEQ ID NO: 345894 - RNA, 19 nt, Artificial Sequence
  Synthetic
cuuuaugcucacgaaugug

SEQ ID NO: 345895 - RNA, 20 nt, Artificial Sequence
  Synthetic
acuuuaugcucacgaaugug

SEQ ID NO: 345896 - RNA, 21 nt, Artificial Sequence
  Synthetic
aacuuuaugcucacgaaugug

SEQ ID NO: 345897 - RNA, 22 nt, Artificial Sequence
  Synthetic
caacuuuaugcucacgaaugug

SEQ ID NO: 345898 - RNA, 23 nt, Artificial Sequence
  Synthetic
ucaacuuuaugcucacgaaugug

SEQ ID NO: 345899 - RNA, 24 nt, Artificial Sequence
  Synthetic
uucaacuuuaugcucacgaaugug

SEQ ID NO: 345900 - RNA, 18 nt, Artificial Sequence
  Synthetic
uaucacaucuggaaugug

SEQ ID NO: 345901 - RNA, 19 nt, Artificial Sequence
  Synthetic
uuaucacaucuggaaugug

SEQ ID NO: 345902 - RNA, 20 nt, Artificial Sequence
  Synthetic
uuuaucacaucuggaaugug

SEQ ID NO: 345903 - RNA, 21 nt, Artificial Sequence
  Synthetic
uuuuaucacaucuggaaugug

SEQ ID NO: 345904 - RNA, 22 nt, Artificial Sequence
  Synthetic
guuuuaucacaucuggaaugug

SEQ ID NO: 345905 - RNA, 23 nt, Artificial Sequence
  Synthetic
uguuuuaucacaucuggaaugug

SEQ ID NO: 345906 - RNA, 24 nt, Artificial Sequence
  Synthetic
guguuuuaucacaucuggaaugug

SEQ ID NO: 345907 - RNA, 18 nt, Artificial Sequence
  Synthetic
augggagaggugaaugug

SEQ ID NO: 345908 - RNA, 19 nt, Artificial Sequence
  Synthetic
aaugggagaggugaaugug

SEQ ID NO: 345909 - RNA, 20 nt, Artificial Sequence
  Synthetic
gaaugggagaggugaaugug

SEQ ID NO: 345910 - RNA, 21 nt, Artificial Sequence
  Synthetic
agaaugggagaggugaaugug

SEQ ID NO: 345911 - RNA, 22 nt, Artificial Sequence
  Synthetic
cagaaugggagaggugaaugug

SEQ ID NO: 345912 - RNA, 23 nt, Artificial Sequence
  Synthetic
ucagaaugggagaggugaaugug

SEQ ID NO: 345913 - RNA, 24 nt, Artificial Sequence
  Synthetic
aucagaaugggagaggugaaugug

SEQ ID NO: 345914 - RNA, 18 nt, Artificial Sequence
  Synthetic
gauuuuguugugaaugug

SEQ ID NO: 345915 - RNA, 19 nt, Artificial Sequence
  Synthetic
agauuuuguugugaaugug

SEQ ID NO: 345916 - RNA, 20 nt, Artificial Sequence
  Synthetic
uagauuuuguugugaaugug

SEQ ID NO: 345917 - RNA, 21 nt, Artificial Sequence
  Synthetic
auagauuuuguugugaaugug

SEQ ID NO: 345918 - RNA, 22 nt, Artificial Sequence
  Synthetic
aauagauuuuguugugaaugug

SEQ ID NO: 345919 - RNA, 23 nt, Artificial Sequence
  Synthetic
gaauagauuuuguugugaaugug

SEQ ID NO: 345920 - RNA, 24 nt, Artificial Sequence
  Synthetic
ugaauagauuuuguugugaaugug

SEQ ID NO: 345921 - RNA, 18 nt, Artificial Sequence
  Synthetic
gagucauuauauaaugug

SEQ ID NO: 345922 - RNA, 19 nt, Artificial Sequence
  Synthetic
ugagucauuauauaaugug

SEQ ID NO: 345923 - RNA, 20 nt, Artificial Sequence
  Synthetic
augagucauuauauaaugug

SEQ ID NO: 345924 - RNA, 21 nt, Artificial Sequence
  Synthetic
uaugagucauuauauaaugug

SEQ ID NO: 345925 - RNA, 22 nt, Artificial Sequence
  Synthetic
uuaugagucauuauauaaugug

SEQ ID NO: 345926 - RNA, 23 nt, Artificial Sequence
  Synthetic
uuuaugagucauuauauaaugug

SEQ ID NO: 345927 - RNA, 24 nt, Artificial Sequence
  Synthetic
guuuaugagucauuauauaaugug

SEQ ID NO: 345928 - RNA, 18 nt, Artificial Sequence
  Synthetic
uuuuacuuuuguaaugug

SEQ ID NO: 345929 - RNA, 19 nt, Artificial Sequence
  Synthetic
uuuuuacuuuuguaaugug

SEQ ID NO: 345930 - RNA, 20 nt, Artificial Sequence
  Synthetic
uuuuuuacuuuuguaaugug

SEQ ID NO: 345931 - RNA, 21 nt, Artificial Sequence
  Synthetic
guuuuuuacuuuuguaaugug

SEQ ID NO: 345932 - RNA, 22 nt, Artificial Sequence
  Synthetic
uguuuuuuacuuuuguaaugug

SEQ ID NO: 345933 - RNA, 23 nt, Artificial Sequence
  Synthetic
cuguuuuuuacuuuuguaaugug

SEQ ID NO: 345934 - RNA, 24 nt, Artificial Sequence
  Synthetic
ccuguuuuuuacuuuuguaaugug

SEQ ID NO: 345935 - RNA, 18 nt, Artificial Sequence
  Synthetic
ucucccauuauuaaugug

SEQ ID NO: 345936 - RNA, 19 nt, Artificial Sequence
  Synthetic
gucucccauuauuaaugug

SEQ ID NO: 345937 - RNA, 20 nt, Artificial Sequence
  Synthetic
agucucccauuauuaaugug

SEQ ID NO: 345938 - RNA, 21 nt, Artificial Sequence
  Synthetic
aagucucccauuauuaaugug

SEQ ID NO: 345939 - RNA, 22 nt, Artificial Sequence
  Synthetic
aaagucucccauuauuaaugug

SEQ ID NO: 345940 - RNA, 23 nt, Artificial Sequence
  Synthetic
uaaagucucccauuauuaaugug

SEQ ID NO: 345941 - RNA, 24 nt, Artificial Sequence
  Synthetic
uuaaagucucccauuauuaaugug

SEQ ID NO: 345942 - RNA, 18 nt, Artificial Sequence
  Synthetic
aagcagaggucacaugug

SEQ ID NO: 345943 - RNA, 19 nt, Artificial Sequence
  Synthetic
uaagcagaggucacaugug

SEQ ID NO: 345944 - RNA, 20 nt, Artificial Sequence
  Synthetic
auaagcagaggucacaugug

SEQ ID NO: 345945 - RNA, 21 nt, Artificial Sequence
  Synthetic
cauaagcagaggucacaugug

SEQ ID NO: 345946 - RNA, 22 nt, Artificial Sequence
  Synthetic
ccauaagcagaggucacaugug

SEQ ID NO: 345947 - RNA, 23 nt, Artificial Sequence
  Synthetic
cccauaagcagaggucacaugug

SEQ ID NO: 345948 - RNA, 24 nt, Artificial Sequence
  Synthetic
ucccauaagcagaggucacaugug

SEQ ID NO: 345949 - RNA, 18 nt, Artificial Sequence
  Synthetic
uuuauuuugucacaugug

SEQ ID NO: 345950 - RNA, 19 nt, Artificial Sequence
  Synthetic
auuuauuuugucacaugug

SEQ ID NO: 345951 - RNA, 20 nt, Artificial Sequence
  Synthetic
aauuuauuuugucacaugug

SEQ ID NO: 345952 - RNA, 21 nt, Artificial Sequence
  Synthetic
gaauuuauuuugucacaugug

SEQ ID NO: 345953 - RNA, 22 nt, Artificial Sequence
  Synthetic
ugaauuuauuuugucacaugug

SEQ ID NO: 345954 - RNA, 23 nt, Artificial Sequence
  Synthetic
uugaauuuauuuugucacaugug

SEQ ID NO: 345955 - RNA, 24 nt, Artificial Sequence
  Synthetic
cuugaauuuauuuugucacaugug

SEQ ID NO: 345956 - RNA, 18 nt, Artificial Sequence
  Synthetic
cauucugggauacaugug

SEQ ID NO: 345957 - RNA, 19 nt, Artificial Sequence
  Synthetic
acauucugggauacaugug

SEQ ID NO: 345958 - RNA, 20 nt, Artificial Sequence
  Synthetic
uacauucugggauacaugug

SEQ ID NO: 345959 - RNA, 21 nt, Artificial Sequence
  Synthetic
uuacauucugggauacaugug

SEQ ID NO: 345960 - RNA, 22 nt, Artificial Sequence
  Synthetic
uuuacauucugggauacaugug

SEQ ID NO: 345961 - RNA, 23 nt, Artificial Sequence
  Synthetic
cuuuacauucugggauacaugug

SEQ ID NO: 345962 - RNA, 24 nt, Artificial Sequence
  Synthetic
acuuuacauucugggauacaugug

SEQ ID NO: 345963 - RNA, 18 nt, Artificial Sequence
  Synthetic
aguucugggauacaugug

SEQ ID NO: 345964 - RNA, 19 nt, Artificial Sequence
  Synthetic
aaguucugggauacaugug

SEQ ID NO: 345965 - RNA, 20 nt, Artificial Sequence
  Synthetic
uaaguucugggauacaugug

SEQ ID NO: 345966 - RNA, 21 nt, Artificial Sequence
  Synthetic
uuaaguucugggauacaugug

SEQ ID NO: 345967 - RNA, 22 nt, Artificial Sequence
  Synthetic
uuuaaguucugggauacaugug

SEQ ID NO: 345968 - RNA, 23 nt, Artificial Sequence
  Synthetic
cuuuaaguucugggauacaugug

SEQ ID NO: 345969 - RNA, 24 nt, Artificial Sequence
  Synthetic
acuuuaaguucugggauacaugug

SEQ ID NO: 345970 - RNA, 18 nt, Artificial Sequence
  Synthetic
gauugucuuuuacaugug

SEQ ID NO: 345971 - RNA, 19 nt, Artificial Sequence
  Synthetic
ggauugucuuuuacaugug

SEQ ID NO: 345972 - RNA, 20 nt, Artificial Sequence
  Synthetic
aggauugucuuuuacaugug

SEQ ID NO: 345973 - RNA, 21 nt, Artificial Sequence
  Synthetic
aaggauugucuuuuacaugug

SEQ ID NO: 345974 - RNA, 22 nt, Artificial Sequence
  Synthetic
aaaggauugucuuuuacaugug

SEQ ID NO: 345975 - RNA, 23 nt, Artificial Sequence
  Synthetic
caaaggauugucuuuuacaugug

SEQ ID NO: 345976 - RNA, 24 nt, Artificial Sequence
  Synthetic
ucaaaggauugucuuuuacaugug

SEQ ID NO: 345977 - RNA, 18 nt, Artificial Sequence
  Synthetic
gagugacaacuccaugug

SEQ ID NO: 345978 - RNA, 19 nt, Artificial Sequence
  Synthetic
ugagugacaacuccaugug

SEQ ID NO: 345979 - RNA, 20 nt, Artificial Sequence
  Synthetic
uugagugacaacuccaugug

SEQ ID NO: 345980 - RNA, 21 nt, Artificial Sequence
  Synthetic
cuugagugacaacuccaugug

SEQ ID NO: 345981 - RNA, 22 nt, Artificial Sequence
  Synthetic
gcuugagugacaacuccaugug

SEQ ID NO: 345982 - RNA, 23 nt, Artificial Sequence
  Synthetic
ugcuugagugacaacuccaugug

SEQ ID NO: 345983 - RNA, 24 nt, Artificial Sequence
  Synthetic
gugcuugagugacaacuccaugug

SEQ ID NO: 345984 - RNA, 18 nt, Artificial Sequence
  Synthetic
uuuauuaacuuccaugug

SEQ ID NO: 345985 - RNA, 19 nt, Artificial Sequence
  Synthetic
auuuauuaacuuccaugug

SEQ ID NO: 345986 - RNA, 20 nt, Artificial Sequence
  Synthetic
uauuuauuaacuuccaugug

SEQ ID NO: 345987 - RNA, 21 nt, Artificial Sequence
  Synthetic
uuauuuauuaacuuccaugug

SEQ ID NO: 345988 - RNA, 22 nt, Artificial Sequence
  Synthetic
uuuauuuauuaacuuccaugug

SEQ ID NO: 345989 - RNA, 23 nt, Artificial Sequence
  Synthetic
cuuuauuuauuaacuuccaugug

SEQ ID NO: 345990 - RNA, 24 nt, Artificial Sequence
  Synthetic
acuuuauuuauuaacuuccaugug

SEQ ID NO: 345991 - RNA, 18 nt, Artificial Sequence
  Synthetic
cuaucucaagagcaugug

SEQ ID NO: 345992 - RNA, 19 nt, Artificial Sequence
  Synthetic
ucuaucucaagagcaugug

SEQ ID NO: 345993 - RNA, 20 nt, Artificial Sequence
  Synthetic
gucuaucucaagagcaugug

SEQ ID NO: 345994 - RNA, 21 nt, Artificial Sequence
  Synthetic
agucuaucucaagagcaugug

SEQ ID NO: 345995 - RNA, 22 nt, Artificial Sequence
  Synthetic
uagucuaucucaagagcaugug

SEQ ID NO: 345996 - RNA, 23 nt, Artificial Sequence
  Synthetic
auagucuaucucaagagcaugug

SEQ ID NO: 345997 - RNA, 24 nt, Artificial Sequence
  Synthetic
aauagucuaucucaagagcaugug

SEQ ID NO: 345998 - RNA, 18 nt, Artificial Sequence
  Synthetic
caggcaagagagcaugug

SEQ ID NO: 345999 - RNA, 19 nt, Artificial Sequence
  Synthetic
gcaggcaagagagcaugug

SEQ ID NO: 346000 - RNA, 20 nt, Artificial Sequence
  Synthetic
agcaggcaagagagcaugug

SEQ ID NO: 346001 - RNA, 21 nt, Artificial Sequence
  Synthetic
cagcaggcaagagagcaugug

SEQ ID NO: 346002 - RNA, 22 nt, Artificial Sequence
  Synthetic
acagcaggcaagagagcaugug

SEQ ID NO: 346003 - RNA, 23 nt, Artificial Sequence
  Synthetic
gacagcaggcaagagagcaugug

SEQ ID NO: 346004 - RNA, 24 nt, Artificial Sequence
  Synthetic
ugacagcaggcaagagagcaugug

SEQ ID NO: 346005 - RNA, 18 nt, Artificial Sequence
  Synthetic
uuauagagucaucaugug

SEQ ID NO: 346006 - RNA, 19 nt, Artificial Sequence
  Synthetic
guuauagagucaucaugug

SEQ ID NO: 346007 - RNA, 20 nt, Artificial Sequence
  Synthetic
aguuauagagucaucaugug

SEQ ID NO: 346008 - RNA, 21 nt, Artificial Sequence
  Synthetic
aaguuauagagucaucaugug

SEQ ID NO: 346009 - RNA, 22 nt, Artificial Sequence
  Synthetic
uaaguuauagagucaucaugug

SEQ ID NO: 346010 - RNA, 23 nt, Artificial Sequence
  Synthetic
cuaaguuauagagucaucaugug

SEQ ID NO: 346011 - RNA, 24 nt, Artificial Sequence
  Synthetic
gcuaaguuauagagucaucaugug

SEQ ID NO: 346012 - RNA, 18 nt, Artificial Sequence
  Synthetic
gaagacccaccucaugug

SEQ ID NO: 346013 - RNA, 19 nt, Artificial Sequence
  Synthetic
agaagacccaccucaugug

SEQ ID NO: 346014 - RNA, 20 nt, Artificial Sequence
  Synthetic
cagaagacccaccucaugug

SEQ ID NO: 346015 - RNA, 21 nt, Artificial Sequence
  Synthetic
ucagaagacccaccucaugug

SEQ ID NO: 346016 - RNA, 22 nt, Artificial Sequence
  Synthetic
uucagaagacccaccucaugug

SEQ ID NO: 346017 - RNA, 23 nt, Artificial Sequence
  Synthetic
auucagaagacccaccucaugug

SEQ ID NO: 346018 - RNA, 24 nt, Artificial Sequence
  Synthetic
uauucagaagacccaccucaugug

SEQ ID NO: 346019 - RNA, 18 nt, Artificial Sequence
  Synthetic
ggugcuggggaagaugug

SEQ ID NO: 346020 - RNA, 19 nt, Artificial Sequence
  Synthetic
aggugcuggggaagaugug

SEQ ID NO: 346021 - RNA, 20 nt, Artificial Sequence
  Synthetic
caggugcuggggaagaugug

SEQ ID NO: 346022 - RNA, 21 nt, Artificial Sequence
  Synthetic
ucaggugcuggggaagaugug

SEQ ID NO: 346023 - RNA, 22 nt, Artificial Sequence
  Synthetic
aucaggugcuggggaagaugug

SEQ ID NO: 346024 - RNA, 23 nt, Artificial Sequence
  Synthetic
caucaggugcuggggaagaugug

SEQ ID NO: 346025 - RNA, 24 nt, Artificial Sequence
  Synthetic
acaucaggugcuggggaagaugug

SEQ ID NO: 346026 - RNA, 18 nt, Artificial Sequence
  Synthetic
aacagaaaauuagaugug

SEQ ID NO: 346027 - RNA, 19 nt, Artificial Sequence
  Synthetic
aaacagaaaauuagaugug

SEQ ID NO: 346028 - RNA, 20 nt, Artificial Sequence
  Synthetic
aaaacagaaaauuagaugug

SEQ ID NO: 346029 - RNA, 21 nt, Artificial Sequence
  Synthetic
gaaaacagaaaauuagaugug

SEQ ID NO: 346030 - RNA, 22 nt, Artificial Sequence
  Synthetic
agaaaacagaaaauuagaugug

SEQ ID NO: 346031 - RNA, 23 nt, Artificial Sequence
  Synthetic
aagaaaacagaaaauuagaugug

SEQ ID NO: 346032 - RNA, 24 nt, Artificial Sequence
  Synthetic
aaagaaaacagaaaauuagaugug

SEQ ID NO: 346033 - RNA, 18 nt, Artificial Sequence
  Synthetic
uuaacuugagucgaugug

SEQ ID NO: 346034 - RNA, 19 nt, Artificial Sequence
  Synthetic
uuuaacuugagucgaugug

SEQ ID NO: 346035 - RNA, 20 nt, Artificial Sequence
  Synthetic
guuuaacuugagucgaugug

SEQ ID NO: 346036 - RNA, 21 nt, Artificial Sequence
  Synthetic
uguuuaacuugagucgaugug

SEQ ID NO: 346037 - RNA, 22 nt, Artificial Sequence
  Synthetic
auguuuaacuugagucgaugug

SEQ ID NO: 346038 - RNA, 23 nt, Artificial Sequence
  Synthetic
aauguuuaacuugagucgaugug

SEQ ID NO: 346039 - RNA, 24 nt, Artificial Sequence
  Synthetic
uaauguuuaacuugagucgaugug

SEQ ID NO: 346040 - RNA, 18 nt, Artificial Sequence
  Synthetic
gaugcuagcaaggaugug

SEQ ID NO: 346041 - RNA, 19 nt, Artificial Sequence
  Synthetic
agaugcuagcaaggaugug

SEQ ID NO: 346042 - RNA, 20 nt, Artificial Sequence
  Synthetic
cagaugcuagcaaggaugug

SEQ ID NO: 346043 - RNA, 21 nt, Artificial Sequence
  Synthetic
ccagaugcuagcaaggaugug

SEQ ID NO: 346044 - RNA, 22 nt, Artificial Sequence
  Synthetic
accagaugcuagcaaggaugug

SEQ ID NO: 346045 - RNA, 23 nt, Artificial Sequence
  Synthetic
caccagaugcuagcaaggaugug

SEQ ID NO: 346046 - RNA, 24 nt, Artificial Sequence
  Synthetic
acaccagaugcuagcaaggaugug

SEQ ID NO: 346047 - RNA, 18 nt, Artificial Sequence
  Synthetic
gaugcuggagaggaugug

SEQ ID NO: 346048 - RNA, 19 nt, Artificial Sequence
  Synthetic
agaugcuggagaggaugug

SEQ ID NO: 346049 - RNA, 20 nt, Artificial Sequence
  Synthetic
cagaugcuggagaggaugug

SEQ ID NO: 346050 - RNA, 18 nt, Artificial Sequence
  Synthetic
ggugcuggagaggaugug

SEQ ID NO: 346051 - RNA, 19 nt, Artificial Sequence
  Synthetic
aggugcuggagaggaugug

SEQ ID NO: 346052 - RNA, 20 nt, Artificial Sequence
  Synthetic
caggugcuggagaggaugug

SEQ ID NO: 346053 - RNA, 18 nt, Artificial Sequence
  Synthetic
ggugcuggugaggaugug

SEQ ID NO: 346054 - RNA, 19 nt, Artificial Sequence
  Synthetic
aggugcuggugaggaugug

SEQ ID NO: 346055 - RNA, 20 nt, Artificial Sequence
  Synthetic
caggugcuggugaggaugug

SEQ ID NO: 346056 - RNA, 21 nt, Artificial Sequence
  Synthetic
acaggugcuggugaggaugug

SEQ ID NO: 346057 - RNA, 22 nt, Artificial Sequence
  Synthetic
aacaggugcuggugaggaugug

SEQ ID NO: 346058 - RNA, 23 nt, Artificial Sequence
  Synthetic
caacaggugcuggugaggaugug

SEQ ID NO: 346059 - RNA, 24 nt, Artificial Sequence
  Synthetic
acaacaggugcuggugaggaugug

SEQ ID NO: 346060 - RNA, 18 nt, Artificial Sequence
  Synthetic
aauguuguugaggaugug

SEQ ID NO: 346061 - RNA, 19 nt, Artificial Sequence
  Synthetic
aaauguuguugaggaugug

SEQ ID NO: 346062 - RNA, 20 nt, Artificial Sequence
  Synthetic
gaaauguuguugaggaugug

SEQ ID NO: 346063 - RNA, 21 nt, Artificial Sequence
  Synthetic
agaaauguuguugaggaugug

SEQ ID NO: 346064 - RNA, 22 nt, Artificial Sequence
  Synthetic
aagaaauguuguugaggaugug

SEQ ID NO: 346065 - RNA, 23 nt, Artificial Sequence
  Synthetic
uaagaaauguuguugaggaugug

SEQ ID NO: 346066 - RNA, 24 nt, Artificial Sequence
  Synthetic
auaagaaauguuguugaggaugug

SEQ ID NO: 346067 - RNA, 19 nt, Artificial Sequence
  Synthetic
ccaacuuacaagggaugug

SEQ ID NO: 346068 - RNA, 20 nt, Artificial Sequence
  Synthetic
uccaacuuacaagggaugug

SEQ ID NO: 346069 - RNA, 19 nt, Artificial Sequence
  Synthetic
gcaacuuacaagggaugug

SEQ ID NO: 346070 - RNA, 20 nt, Artificial Sequence
  Synthetic
ugcaacuuacaagggaugug

SEQ ID NO: 346071 - RNA, 21 nt, Artificial Sequence
  Synthetic
augcaacuuacaagggaugug

SEQ ID NO: 346072 - RNA, 22 nt, Artificial Sequence
  Synthetic
aaugcaacuuacaagggaugug

SEQ ID NO: 346073 - RNA, 23 nt, Artificial Sequence
  Synthetic
gaaugcaacuuacaagggaugug

SEQ ID NO: 346074 - RNA, 24 nt, Artificial Sequence
  Synthetic
ggaaugcaacuuacaagggaugug

SEQ ID NO: 346075 - RNA, 18 nt, Artificial Sequence
  Synthetic
gcuacauggauggaugug

SEQ ID NO: 346076 - RNA, 19 nt, Artificial Sequence
  Synthetic
ggcuacauggauggaugug

SEQ ID NO: 346077 - RNA, 20 nt, Artificial Sequence
  Synthetic
uggcuacauggauggaugug

SEQ ID NO: 346078 - RNA, 21 nt, Artificial Sequence
  Synthetic
cuggcuacauggauggaugug

SEQ ID NO: 346079 - RNA, 22 nt, Artificial Sequence
  Synthetic
gcuggcuacauggauggaugug

SEQ ID NO: 346080 - RNA, 23 nt, Artificial Sequence
  Synthetic
agcuggcuacauggauggaugug

SEQ ID NO: 346081 - RNA, 24 nt, Artificial Sequence
  Synthetic
uagcuggcuacauggauggaugug

SEQ ID NO: 346082 - RNA, 18 nt, Artificial Sequence
  Synthetic
aaaaaauaguuggaugug

SEQ ID NO: 346083 - RNA, 19 nt, Artificial Sequence
  Synthetic
uaaaaaauaguuggaugug

SEQ ID NO: 346084 - RNA, 20 nt, Artificial Sequence
  Synthetic
uuaaaaaauaguuggaugug

SEQ ID NO: 346085 - RNA, 21 nt, Artificial Sequence
  Synthetic
uuuaaaaaauaguuggaugug

SEQ ID NO: 346086 - RNA, 22 nt, Artificial Sequence
  Synthetic
uuuuaaaaaauaguuggaugug

SEQ ID NO: 346087 - RNA, 23 nt, Artificial Sequence
  Synthetic
uuuuuaaaaaauaguuggaugug

SEQ ID NO: 346088 - RNA, 24 nt, Artificial Sequence
  Synthetic
uuuuuuaaaaaauaguuggaugug

SEQ ID NO: 346089 - RNA, 18 nt, Artificial Sequence
  Synthetic
auauugugucaauaugug

SEQ ID NO: 346090 - RNA, 19 nt, Artificial Sequence
  Synthetic
cauauugugucaauaugug

SEQ ID NO: 346091 - RNA, 20 nt, Artificial Sequence
  Synthetic
acauauugugucaauaugug

SEQ ID NO: 346092 - RNA, 21 nt, Artificial Sequence
  Synthetic
aacauauugugucaauaugug

SEQ ID NO: 346093 - RNA, 22 nt, Artificial Sequence
  Synthetic
uaacauauugugucaauaugug

SEQ ID NO: 346094 - RNA, 23 nt, Artificial Sequence
  Synthetic
auaacauauugugucaauaugug

SEQ ID NO: 346095 - RNA, 24 nt, Artificial Sequence
  Synthetic
cauaacauauugugucaauaugug

SEQ ID NO: 346096 - RNA, 18 nt, Artificial Sequence
  Synthetic
ugaggacacgaauaugug

SEQ ID NO: 346097 - RNA, 19 nt, Artificial Sequence
  Synthetic
uugaggacacgaauaugug

SEQ ID NO: 346098 - RNA, 20 nt, Artificial Sequence
  Synthetic
cuugaggacacgaauaugug

SEQ ID NO: 346099 - RNA, 21 nt, Artificial Sequence
  Synthetic
ccuugaggacacgaauaugug

SEQ ID NO: 346100 - RNA, 22 nt, Artificial Sequence
  Synthetic
gccuugaggacacgaauaugug

SEQ ID NO: 346101 - RNA, 23 nt, Artificial Sequence
  Synthetic
ugccuugaggacacgaauaugug

SEQ ID NO: 346102 - RNA, 24 nt, Artificial Sequence
  Synthetic
gugccuugaggacacgaauaugug

SEQ ID NO: 346103 - RNA, 18 nt, Artificial Sequence
  Synthetic
ucugacacaauauaugug

SEQ ID NO: 346104 - RNA, 19 nt, Artificial Sequence
  Synthetic
aucugacacaauauaugug

SEQ ID NO: 346105 - RNA, 20 nt, Artificial Sequence
  Synthetic
uaucugacacaauauaugug

SEQ ID NO: 346106 - RNA, 21 nt, Artificial Sequence
  Synthetic
uuaucugacacaauauaugug

SEQ ID NO: 346107 - RNA, 22 nt, Artificial Sequence
  Synthetic
auuaucugacacaauauaugug

SEQ ID NO: 346108 - RNA, 23 nt, Artificial Sequence
  Synthetic
gauuaucugacacaauauaugug

SEQ ID NO: 346109 - RNA, 24 nt, Artificial Sequence
  Synthetic
ggauuaucugacacaauauaugug

SEQ ID NO: 346110 - RNA, 18 nt, Artificial Sequence
  Synthetic
aggguguagauauaugug

SEQ ID NO: 346111 - RNA, 19 nt, Artificial Sequence
  Synthetic
aaggguguagauauaugug

SEQ ID NO: 346112 - RNA, 20 nt, Artificial Sequence
  Synthetic
uaaggguguagauauaugug

SEQ ID NO: 346113 - RNA, 21 nt, Artificial Sequence
  Synthetic
uuaaggguguagauauaugug

SEQ ID NO: 346114 - RNA, 22 nt, Artificial Sequence
  Synthetic
guuaaggguguagauauaugug

SEQ ID NO: 346115 - RNA, 23 nt, Artificial Sequence
  Synthetic
uguuaaggguguagauauaugug

SEQ ID NO: 346116 - RNA, 24 nt, Artificial Sequence
  Synthetic
cuguuaaggguguagauauaugug

SEQ ID NO: 346117 - RNA, 18 nt, Artificial Sequence
  Synthetic
agugauucuguauaugug

SEQ ID NO: 346118 - RNA, 19 nt, Artificial Sequence
  Synthetic
aagugauucuguauaugug

SEQ ID NO: 346119 - RNA, 20 nt, Artificial Sequence
  Synthetic
aaagugauucuguauaugug

SEQ ID NO: 346120 - RNA, 21 nt, Artificial Sequence
  Synthetic
aaaagugauucuguauaugug

SEQ ID NO: 346121 - RNA, 22 nt, Artificial Sequence
  Synthetic
aaaaagugauucuguauaugug

SEQ ID NO: 346122 - RNA, 23 nt, Artificial Sequence
  Synthetic
aaaaaagugauucuguauaugug

SEQ ID NO: 346123 - RNA, 24 nt, Artificial Sequence
  Synthetic
uaaaaaagugauucuguauaugug

SEQ ID NO: 346124 - RNA, 18 nt, Artificial Sequence
  Synthetic
auuuaucauuuauaugug

SEQ ID NO: 346125 - RNA, 19 nt, Artificial Sequence
  Synthetic
uauuuaucauuuauaugug

SEQ ID NO: 346126 - RNA, 20 nt, Artificial Sequence
  Synthetic
guauuuaucauuuauaugug

SEQ ID NO: 346127 - RNA, 21 nt, Artificial Sequence
  Synthetic
aguauuuaucauuuauaugug

SEQ ID NO: 346128 - RNA, 22 nt, Artificial Sequence
  Synthetic
aaguauuuaucauuuauaugug

SEQ ID NO: 346129 - RNA, 23 nt, Artificial Sequence
  Synthetic
caaguauuuaucauuuauaugug

SEQ ID NO: 346130 - RNA, 24 nt, Artificial Sequence
  Synthetic
ucaaguauuuaucauuuauaugug

SEQ ID NO: 346131 - RNA, 18 nt, Artificial Sequence
  Synthetic
gcauggugugacuaugug

SEQ ID NO: 346132 - RNA, 19 nt, Artificial Sequence
  Synthetic
agcauggugugacuaugug

SEQ ID NO: 346133 - RNA, 20 nt, Artificial Sequence
  Synthetic
cagcauggugugacuaugug

SEQ ID NO: 346134 - RNA, 21 nt, Artificial Sequence
  Synthetic
ucagcauggugugacuaugug

SEQ ID NO: 346135 - RNA, 22 nt, Artificial Sequence
  Synthetic
gucagcauggugugacuaugug

SEQ ID NO: 346136 - RNA, 23 nt, Artificial Sequence
  Synthetic
ugucagcauggugugacuaugug

SEQ ID NO: 346137 - RNA, 24 nt, Artificial Sequence
  Synthetic
cugucagcauggugugacuaugug

SEQ ID NO: 346138 - RNA, 18 nt, Artificial Sequence
  Synthetic
ggaguacuggccuaugug

SEQ ID NO: 346139 - RNA, 19 nt, Artificial Sequence
  Synthetic
aggaguacuggccuaugug

SEQ ID NO: 346140 - RNA, 20 nt, Artificial Sequence
  Synthetic
gaggaguacuggccuaugug

SEQ ID NO: 346141 - RNA, 21 nt, Artificial Sequence
  Synthetic
ugaggaguacuggccuaugug

SEQ ID NO: 346142 - RNA, 22 nt, Artificial Sequence
  Synthetic
uugaggaguacuggccuaugug

SEQ ID NO: 346143 - RNA, 23 nt, Artificial Sequence
  Synthetic
auugaggaguacuggccuaugug

SEQ ID NO: 346144 - RNA, 24 nt, Artificial Sequence
  Synthetic
gauugaggaguacuggccuaugug

SEQ ID NO: 346145 - RNA, 18 nt, Artificial Sequence
  Synthetic
agagagagggaguaugug

SEQ ID NO: 346146 - RNA, 19 nt, Artificial Sequence
  Synthetic
aagagagagggaguaugug

SEQ ID NO: 346147 - RNA, 20 nt, Artificial Sequence
  Synthetic
aaagagagagggaguaugug

SEQ ID NO: 346148 - RNA, 21 nt, Artificial Sequence
  Synthetic
caaagagagagggaguaugug

SEQ ID NO: 346149 - RNA, 22 nt, Artificial Sequence
  Synthetic
acaaagagagagggaguaugug

SEQ ID NO: 346150 - RNA, 23 nt, Artificial Sequence
  Synthetic
cacaaagagagagggaguaugug

SEQ ID NO: 346151 - RNA, 24 nt, Artificial Sequence
  Synthetic
acacaaagagagagggaguaugug

SEQ ID NO: 346152 - RNA, 18 nt, Artificial Sequence
  Synthetic
cuugggagaguguaugug

SEQ ID NO: 346153 - RNA, 19 nt, Artificial Sequence
  Synthetic
ucuugggagaguguaugug

SEQ ID NO: 346154 - RNA, 20 nt, Artificial Sequence
  Synthetic
gucuugggagaguguaugug

SEQ ID NO: 346155 - RNA, 18 nt, Artificial Sequence
  Synthetic
aacaaagaauuguaugug

SEQ ID NO: 346156 - RNA, 19 nt, Artificial Sequence
  Synthetic
uaacaaagaauuguaugug

SEQ ID NO: 346157 - RNA, 20 nt, Artificial Sequence
  Synthetic
uuaacaaagaauuguaugug

SEQ ID NO: 346158 - RNA, 21 nt, Artificial Sequence
  Synthetic
auuaacaaagaauuguaugug

SEQ ID NO: 346159 - RNA, 22 nt, Artificial Sequence
  Synthetic
cauuaacaaagaauuguaugug

SEQ ID NO: 346160 - RNA, 23 nt, Artificial Sequence
  Synthetic
ucauuaacaaagaauuguaugug

SEQ ID NO: 346161 - RNA, 24 nt, Artificial Sequence
  Synthetic
uucauuaacaaagaauuguaugug

SEQ ID NO: 346162 - RNA, 18 nt, Artificial Sequence
  Synthetic
uaguauuuaaauuaugug

SEQ ID NO: 346163 - RNA, 19 nt, Artificial Sequence
  Synthetic
uuaguauuuaaauuaugug

SEQ ID NO: 346164 - RNA, 20 nt, Artificial Sequence
  Synthetic
auuaguauuuaaauuaugug

SEQ ID NO: 346165 - RNA, 21 nt, Artificial Sequence
  Synthetic
cauuaguauuuaaauuaugug

SEQ ID NO: 346166 - RNA, 22 nt, Artificial Sequence
  Synthetic
gcauuaguauuuaaauuaugug

SEQ ID NO: 346167 - RNA, 23 nt, Artificial Sequence
  Synthetic
ugcauuaguauuuaaauuaugug

SEQ ID NO: 346168 - RNA, 24 nt, Artificial Sequence
  Synthetic
uugcauuaguauuuaaauuaugug

SEQ ID NO: 346169 - RNA, 18 nt, Artificial Sequence
  Synthetic
cagaccuuagauuaugug

SEQ ID NO: 346170 - RNA, 19 nt, Artificial Sequence
  Synthetic
ucagaccuuagauuaugug

SEQ ID NO: 346171 - RNA, 20 nt, Artificial Sequence
  Synthetic
uucagaccuuagauuaugug

SEQ ID NO: 346172 - RNA, 21 nt, Artificial Sequence
  Synthetic
cuucagaccuuagauuaugug

SEQ ID NO: 346173 - RNA, 22 nt, Artificial Sequence
  Synthetic
acuucagaccuuagauuaugug

SEQ ID NO: 346174 - RNA, 23 nt, Artificial Sequence
  Synthetic
gacuucagaccuuagauuaugug

SEQ ID NO: 346175 - RNA, 24 nt, Artificial Sequence
  Synthetic
agacuucagaccuuagauuaugug

SEQ ID NO: 346176 - RNA, 18 nt, Artificial Sequence
  Synthetic
uacagcuaauauuaugug

SEQ ID NO: 346177 - RNA, 19 nt, Artificial Sequence
  Synthetic
uuacagcuaauauuaugug

SEQ ID NO: 346178 - RNA, 20 nt, Artificial Sequence
  Synthetic
cuuacagcuaauauuaugug

SEQ ID NO: 346179 - RNA, 21 nt, Artificial Sequence
  Synthetic
ucuuacagcuaauauuaugug

SEQ ID NO: 346180 - RNA, 22 nt, Artificial Sequence
  Synthetic
uucuuacagcuaauauuaugug

SEQ ID NO: 346181 - RNA, 23 nt, Artificial Sequence
  Synthetic
auucuuacagcuaauauuaugug

SEQ ID NO: 346182 - RNA, 24 nt, Artificial Sequence
  Synthetic
aauucuuacagcuaauauuaugug

SEQ ID NO: 346183 - RNA, 18 nt, Artificial Sequence
  Synthetic
gaugccugccuuuaugug

SEQ ID NO: 346184 - RNA, 19 nt, Artificial Sequence
  Synthetic
agaugccugccuuuaugug

SEQ ID NO: 346185 - RNA, 20 nt, Artificial Sequence
  Synthetic
cagaugccugccuuuaugug

SEQ ID NO: 346186 - RNA, 21 nt, Artificial Sequence
  Synthetic
gcagaugccugccuuuaugug

SEQ ID NO: 346187 - RNA, 22 nt, Artificial Sequence
  Synthetic
ggcagaugccugccuuuaugug

SEQ ID NO: 346188 - RNA, 23 nt, Artificial Sequence
  Synthetic
aggcagaugccugccuuuaugug

SEQ ID NO: 346189 - RNA, 24 nt, Artificial Sequence
  Synthetic
gaggcagaugccugccuuuaugug

SEQ ID NO: 346190 - RNA, 18 nt, Artificial Sequence
  Synthetic
uuuuuuaaaguuuaugug

SEQ ID NO: 346191 - RNA, 19 nt, Artificial Sequence
  Synthetic
cuuuuuuaaaguuuaugug

SEQ ID NO: 346192 - RNA, 20 nt, Artificial Sequence
  Synthetic
ucuuuuuuaaaguuuaugug

SEQ ID NO: 346193 - RNA, 21 nt, Artificial Sequence
  Synthetic
uucuuuuuuaaaguuuaugug

SEQ ID NO: 346194 - RNA, 22 nt, Artificial Sequence
  Synthetic
auucuuuuuuaaaguuuaugug

SEQ ID NO: 346195 - RNA, 23 nt, Artificial Sequence
  Synthetic
cauucuuuuuuaaaguuuaugug

SEQ ID NO: 346196 - RNA, 24 nt, Artificial Sequence
  Synthetic
ccauucuuuuuuaaaguuuaugug

SEQ ID NO: 346197 - RNA, 18 nt, Artificial Sequence
  Synthetic
agaagagaggcaacugug

SEQ ID NO: 346198 - RNA, 19 nt, Artificial Sequence
  Synthetic
cagaagagaggcaacugug

SEQ ID NO: 346199 - RNA, 20 nt, Artificial Sequence
  Synthetic
acagaagagaggcaacugug

SEQ ID NO: 346200 - RNA, 21 nt, Artificial Sequence
  Synthetic
aacagaagagaggcaacugug

SEQ ID NO: 346201 - RNA, 22 nt, Artificial Sequence
  Synthetic
aaacagaagagaggcaacugug

SEQ ID NO: 346202 - RNA, 23 nt, Artificial Sequence
  Synthetic
aaaacagaagagaggcaacugug

SEQ ID NO: 346203 - RNA, 24 nt, Artificial Sequence
  Synthetic
uaaaacagaagagaggcaacugug

SEQ ID NO: 346204 - RNA, 18 nt, Artificial Sequence
  Synthetic
ucaugagggugaacugug

SEQ ID NO: 346205 - RNA, 19 nt, Artificial Sequence
  Synthetic
uucaugagggugaacugug

SEQ ID NO: 346206 - RNA, 20 nt, Artificial Sequence
  Synthetic
cuucaugagggugaacugug

SEQ ID NO: 346207 - RNA, 21 nt, Artificial Sequence
  Synthetic
gcuucaugagggugaacugug

SEQ ID NO: 346208 - RNA, 22 nt, Artificial Sequence
  Synthetic
ugcuucaugagggugaacugug

SEQ ID NO: 346209 - RNA, 23 nt, Artificial Sequence
  Synthetic
cugcuucaugagggugaacugug

SEQ ID NO: 346210 - RNA, 24 nt, Artificial Sequence
  Synthetic
ccugcuucaugagggugaacugug

SEQ ID NO: 346211 - RNA, 18 nt, Artificial Sequence
  Synthetic
caacagccacacacugug

SEQ ID NO: 346212 - RNA, 19 nt, Artificial Sequence
  Synthetic
ucaacagccacacacugug

SEQ ID NO: 346213 - RNA, 20 nt, Artificial Sequence
  Synthetic
aucaacagccacacacugug

SEQ ID NO: 346214 - RNA, 21 nt, Artificial Sequence
  Synthetic
uaucaacagccacacacugug

SEQ ID NO: 346215 - RNA, 22 nt, Artificial Sequence
  Synthetic
auaucaacagccacacacugug

SEQ ID NO: 346216 - RNA, 23 nt, Artificial Sequence
  Synthetic
aauaucaacagccacacacugug

SEQ ID NO: 346217 - RNA, 24 nt, Artificial Sequence
  Synthetic
gaauaucaacagccacacacugug

SEQ ID NO: 346218 - RNA, 18 nt, Artificial Sequence
  Synthetic
aaugaugauaccacugug

SEQ ID NO: 346219 - RNA, 19 nt, Artificial Sequence
  Synthetic
uaaugaugauaccacugug

SEQ ID NO: 346220 - RNA, 20 nt, Artificial Sequence
  Synthetic
guaaugaugauaccacugug

SEQ ID NO: 346221 - RNA, 21 nt, Artificial Sequence
  Synthetic
gguaaugaugauaccacugug

SEQ ID NO: 346222 - RNA, 22 nt, Artificial Sequence
  Synthetic
ugguaaugaugauaccacugug

SEQ ID NO: 346223 - RNA, 23 nt, Artificial Sequence
  Synthetic
cugguaaugaugauaccacugug

SEQ ID NO: 346224 - RNA, 24 nt, Artificial Sequence
  Synthetic
gcugguaaugaugauaccacugug

SEQ ID NO: 346225 - RNA, 18 nt, Artificial Sequence
  Synthetic
augaguuuaggcacugug

SEQ ID NO: 346226 - RNA, 19 nt, Artificial Sequence
  Synthetic
aaugaguuuaggcacugug

SEQ ID NO: 346227 - RNA, 20 nt, Artificial Sequence
  Synthetic
aaaugaguuuaggcacugug

SEQ ID NO: 346228 - RNA, 21 nt, Artificial Sequence
  Synthetic
uaaaugaguuuaggcacugug

SEQ ID NO: 346229 - RNA, 22 nt, Artificial Sequence
  Synthetic
guaaaugaguuuaggcacugug

SEQ ID NO: 346230 - RNA, 23 nt, Artificial Sequence
  Synthetic
uguaaaugaguuuaggcacugug

SEQ ID NO: 346231 - RNA, 24 nt, Artificial Sequence
  Synthetic
auguaaaugaguuuaggcacugug

SEQ ID NO: 346232 - RNA, 18 nt, Artificial Sequence
  Synthetic
acuccauccugcacugug

SEQ ID NO: 346233 - RNA, 19 nt, Artificial Sequence
  Synthetic
uacuccauccugcacugug

SEQ ID NO: 346234 - RNA, 20 nt, Artificial Sequence
  Synthetic
uuacuccauccugcacugug

SEQ ID NO: 346235 - RNA, 21 nt, Artificial Sequence
  Synthetic
uuuacuccauccugcacugug

SEQ ID NO: 346236 - RNA, 22 nt, Artificial Sequence
  Synthetic
cuuuacuccauccugcacugug

SEQ ID NO: 346237 - RNA, 23 nt, Artificial Sequence
  Synthetic
ccuuuacuccauccugcacugug

SEQ ID NO: 346238 - RNA, 24 nt, Artificial Sequence
  Synthetic
uccuuuacuccauccugcacugug

SEQ ID NO: 346239 - RNA, 18 nt, Artificial Sequence
  Synthetic
auaaauucuuucacugug

SEQ ID NO: 346240 - RNA, 19 nt, Artificial Sequence
  Synthetic
gauaaauucuuucacugug

SEQ ID NO: 346241 - RNA, 20 nt, Artificial Sequence
  Synthetic
ugauaaauucuuucacugug

SEQ ID NO: 346242 - RNA, 21 nt, Artificial Sequence
  Synthetic
uugauaaauucuuucacugug

SEQ ID NO: 346243 - RNA, 22 nt, Artificial Sequence
  Synthetic
guugauaaauucuuucacugug

SEQ ID NO: 346244 - RNA, 23 nt, Artificial Sequence
  Synthetic
uguugauaaauucuuucacugug

SEQ ID NO: 346245 - RNA, 24 nt, Artificial Sequence
  Synthetic
cuguugauaaauucuuucacugug

SEQ ID NO: 346246 - RNA, 18 nt, Artificial Sequence
  Synthetic
uaagauagugagacugug

SEQ ID NO: 346247 - RNA, 19 nt, Artificial Sequence
  Synthetic
guaagauagugagacugug

SEQ ID NO: 346248 - RNA, 20 nt, Artificial Sequence
  Synthetic
gguaagauagugagacugug

SEQ ID NO: 346249 - RNA, 21 nt, Artificial Sequence
  Synthetic
agguaagauagugagacugug

SEQ ID NO: 346250 - RNA, 22 nt, Artificial Sequence
  Synthetic
gagguaagauagugagacugug

SEQ ID NO: 346251 - RNA, 23 nt, Artificial Sequence
  Synthetic
ugagguaagauagugagacugug

SEQ ID NO: 346252 - RNA, 24 nt, Artificial Sequence
  Synthetic
gugagguaagauagugagacugug

SEQ ID NO: 346253 - RNA, 18 nt, Artificial Sequence
  Synthetic
aaaucauguacgacugug

SEQ ID NO: 346254 - RNA, 19 nt, Artificial Sequence
  Synthetic
gaaaucauguacgacugug

SEQ ID NO: 346255 - RNA, 20 nt, Artificial Sequence
  Synthetic
ugaaaucauguacgacugug

SEQ ID NO: 346256 - RNA, 21 nt, Artificial Sequence
  Synthetic
gugaaaucauguacgacugug

SEQ ID NO: 346257 - RNA, 22 nt, Artificial Sequence
  Synthetic
agugaaaucauguacgacugug

SEQ ID NO: 346258 - RNA, 23 nt, Artificial Sequence
  Synthetic
cagugaaaucauguacgacugug

SEQ ID NO: 346259 - RNA, 24 nt, Artificial Sequence
  Synthetic
acagugaaaucauguacgacugug

SEQ ID NO: 346260 - RNA, 18 nt, Artificial Sequence
  Synthetic
cacacucuggggacugug

SEQ ID NO: 346261 - RNA, 19 nt, Artificial Sequence
  Synthetic
ucacacucuggggacugug

SEQ ID NO: 346262 - RNA, 20 nt, Artificial Sequence
  Synthetic
aucacacucuggggacugug

SEQ ID NO: 346263 - RNA, 21 nt, Artificial Sequence
  Synthetic
uaucacacucuggggacugug

SEQ ID NO: 346264 - RNA, 22 nt, Artificial Sequence
  Synthetic
auaucacacucuggggacugug

SEQ ID NO: 346265 - RNA, 23 nt, Artificial Sequence
  Synthetic
aauaucacacucuggggacugug

SEQ ID NO: 346266 - RNA, 24 nt, Artificial Sequence
  Synthetic
gaauaucacacucuggggacugug

SEQ ID NO: 346267 - RNA, 18 nt, Artificial Sequence
  Synthetic
ucaagaaguuuuacugug

SEQ ID NO: 346268 - RNA, 19 nt, Artificial Sequence
  Synthetic
uucaagaaguuuuacugug

SEQ ID NO: 346269 - RNA, 20 nt, Artificial Sequence
  Synthetic
uuucaagaaguuuuacugug

SEQ ID NO: 346270 - RNA, 21 nt, Artificial Sequence
  Synthetic
uuuucaagaaguuuuacugug

SEQ ID NO: 346271 - RNA, 22 nt, Artificial Sequence
  Synthetic
uuuuucaagaaguuuuacugug

SEQ ID NO: 346272 - RNA, 23 nt, Artificial Sequence
  Synthetic
cuuuuucaagaaguuuuacugug

SEQ ID NO: 346273 - RNA, 24 nt, Artificial Sequence
  Synthetic
acuuuuucaagaaguuuuacugug

SEQ ID NO: 346274 - RNA, 18 nt, Artificial Sequence
  Synthetic
auucaaaguacaccugug

SEQ ID NO: 346275 - RNA, 19 nt, Artificial Sequence
  Synthetic
gauucaaaguacaccugug

SEQ ID NO: 346276 - RNA, 20 nt, Artificial Sequence
  Synthetic
ugauucaaaguacaccugug

SEQ ID NO: 346277 - RNA, 21 nt, Artificial Sequence
  Synthetic
cugauucaaaguacaccugug

SEQ ID NO: 346278 - RNA, 22 nt, Artificial Sequence
  Synthetic
ucugauucaaaguacaccugug

SEQ ID NO: 346279 - RNA, 23 nt, Artificial Sequence
  Synthetic
aucugauucaaaguacaccugug

SEQ ID NO: 346280 - RNA, 24 nt, Artificial Sequence
  Synthetic
aaucugauucaaaguacaccugug

SEQ ID NO: 346281 - RNA, 18 nt, Artificial Sequence
  Synthetic
uucuuccugccaccugug

SEQ ID NO: 346282 - RNA, 19 nt, Artificial Sequence
  Synthetic
cuucuuccugccaccugug

SEQ ID NO: 346283 - RNA, 20 nt, Artificial Sequence
  Synthetic
acuucuuccugccaccugug

SEQ ID NO: 346284 - RNA, 21 nt, Artificial Sequence
  Synthetic
cacuucuuccugccaccugug

SEQ ID NO: 346285 - RNA, 22 nt, Artificial Sequence
  Synthetic
gcacuucuuccugccaccugug

SEQ ID NO: 346286 - RNA, 23 nt, Artificial Sequence
  Synthetic
ggcacuucuuccugccaccugug

SEQ ID NO: 346287 - RNA, 24 nt, Artificial Sequence
  Synthetic
gggcacuucuuccugccaccugug

SEQ ID NO: 346288 - RNA, 18 nt, Artificial Sequence
  Synthetic
cacugcaaaagaccugug

SEQ ID NO: 346289 - RNA, 19 nt, Artificial Sequence
  Synthetic
gcacugcaaaagaccugug

SEQ ID NO: 346290 - RNA, 20 nt, Artificial Sequence
  Synthetic
ugcacugcaaaagaccugug

SEQ ID NO: 346291 - RNA, 21 nt, Artificial Sequence
  Synthetic
uugcacugcaaaagaccugug

SEQ ID NO: 346292 - RNA, 22 nt, Artificial Sequence
  Synthetic
uuugcacugcaaaagaccugug

SEQ ID NO: 346293 - RNA, 23 nt, Artificial Sequence
  Synthetic
cuuugcacugcaaaagaccugug

SEQ ID NO: 346294 - RNA, 24 nt, Artificial Sequence
  Synthetic
ccuuugcacugcaaaagaccugug

SEQ ID NO: 346295 - RNA, 18 nt, Artificial Sequence
  Synthetic
cccuccugccacccugug

SEQ ID NO: 346296 - RNA, 19 nt, Artificial Sequence
  Synthetic
ucccuccugccacccugug

SEQ ID NO: 346297 - RNA, 20 nt, Artificial Sequence
  Synthetic
cucccuccugccacccugug

SEQ ID NO: 346298 - RNA, 21 nt, Artificial Sequence
  Synthetic
ucucccuccugccacccugug

SEQ ID NO: 346299 - RNA, 22 nt, Artificial Sequence
  Synthetic
uucucccuccugccacccugug

SEQ ID NO: 346300 - RNA, 23 nt, Artificial Sequence
  Synthetic
auucucccuccugccacccugug

SEQ ID NO: 346301 - RNA, 24 nt, Artificial Sequence
  Synthetic
cauucucccuccugccacccugug

SEQ ID NO: 346302 - RNA, 18 nt, Artificial Sequence
  Synthetic
acagagcaagacccugug

SEQ ID NO: 346303 - RNA, 19 nt, Artificial Sequence
  Synthetic
gacagagcaagacccugug

SEQ ID NO: 346304 - RNA, 20 nt, Artificial Sequence
  Synthetic
ugacagagcaagacccugug

SEQ ID NO: 346305 - RNA, 21 nt, Artificial Sequence
  Synthetic
augacagagcaagacccugug

SEQ ID NO: 346306 - RNA, 22 nt, Artificial Sequence
  Synthetic
aaugacagagcaagacccugug

SEQ ID NO: 346307 - RNA, 23 nt, Artificial Sequence
  Synthetic
gaaugacagagcaagacccugug

SEQ ID NO: 346308 - RNA, 24 nt, Artificial Sequence
  Synthetic
agaaugacagagcaagacccugug

SEQ ID NO: 346309 - RNA, 18 nt, Artificial Sequence
  Synthetic
cucauaggauggccugug

SEQ ID NO: 346310 - RNA, 19 nt, Artificial Sequence
  Synthetic
ccucauaggauggccugug

SEQ ID NO: 346311 - RNA, 20 nt, Artificial Sequence
  Synthetic
accucauaggauggccugug

SEQ ID NO: 346312 - RNA, 21 nt, Artificial Sequence
  Synthetic
caccucauaggauggccugug

SEQ ID NO: 346313 - RNA, 22 nt, Artificial Sequence
  Synthetic
gcaccucauaggauggccugug

SEQ ID NO: 346314 - RNA, 23 nt, Artificial Sequence
  Synthetic
agcaccucauaggauggccugug

SEQ ID NO: 346315 - RNA, 24 nt, Artificial Sequence
  Synthetic
cagcaccucauaggauggccugug

SEQ ID NO: 346316 - RNA, 18 nt, Artificial Sequence
  Synthetic
aaguguaucauuccugug

SEQ ID NO: 346317 - RNA, 19 nt, Artificial Sequence
  Synthetic
aaaguguaucauuccugug

SEQ ID NO: 346318 - RNA, 20 nt, Artificial Sequence
  Synthetic
aaaaguguaucauuccugug

SEQ ID NO: 346319 - RNA, 21 nt, Artificial Sequence
  Synthetic
gaaaaguguaucauuccugug

SEQ ID NO: 346320 - RNA, 22 nt, Artificial Sequence
  Synthetic
agaaaaguguaucauuccugug

SEQ ID NO: 346321 - RNA, 23 nt, Artificial Sequence
  Synthetic
gagaaaaguguaucauuccugug

SEQ ID NO: 346322 - RNA, 24 nt, Artificial Sequence
  Synthetic
ugagaaaaguguaucauuccugug

SEQ ID NO: 346323 - RNA, 18 nt, Artificial Sequence
  Synthetic
auuacaguauuuccugug

SEQ ID NO: 346324 - RNA, 19 nt, Artificial Sequence
  Synthetic
aauuacaguauuuccugug

SEQ ID NO: 346325 - RNA, 20 nt, Artificial Sequence
  Synthetic
aaauuacaguauuuccugug

SEQ ID NO: 346326 - RNA, 21 nt, Artificial Sequence
  Synthetic
gaaauuacaguauuuccugug

SEQ ID NO: 346327 - RNA, 22 nt, Artificial Sequence
  Synthetic
ggaaauuacaguauuuccugug

SEQ ID NO: 346328 - RNA, 23 nt, Artificial Sequence
  Synthetic
gggaaauuacaguauuuccugug

SEQ ID NO: 346329 - RNA, 24 nt, Artificial Sequence
  Synthetic
ugggaaauuacaguauuuccugug

SEQ ID NO: 346330 - RNA, 18 nt, Artificial Sequence
  Synthetic
cucaagagaacagcugug

SEQ ID NO: 346331 - RNA, 19 nt, Artificial Sequence
  Synthetic
gcucaagagaacagcugug

SEQ ID NO: 346332 - RNA, 20 nt, Artificial Sequence
  Synthetic
ugcucaagagaacagcugug

SEQ ID NO: 346333 - RNA, 21 nt, Artificial Sequence
  Synthetic
cugcucaagagaacagcugug

SEQ ID NO: 346334 - RNA, 22 nt, Artificial Sequence
  Synthetic
acugcucaagagaacagcugug

SEQ ID NO: 346335 - RNA, 23 nt, Artificial Sequence
  Synthetic
cacugcucaagagaacagcugug

SEQ ID NO: 346336 - RNA, 24 nt, Artificial Sequence
  Synthetic
ccacugcucaagagaacagcugug

SEQ ID NO: 346337 - RNA, 18 nt, Artificial Sequence
  Synthetic
acaucugggcuggcugug

SEQ ID NO: 346338 - RNA, 19 nt, Artificial Sequence
  Synthetic
uacaucugggcuggcugug

SEQ ID NO: 346339 - RNA, 20 nt, Artificial Sequence
  Synthetic
cuacaucugggcuggcugug

SEQ ID NO: 346340 - RNA, 21 nt, Artificial Sequence
  Synthetic
ccuacaucugggcuggcugug

SEQ ID NO: 346341 - RNA, 22 nt, Artificial Sequence
  Synthetic
cccuacaucugggcuggcugug

SEQ ID NO: 346342 - RNA, 23 nt, Artificial Sequence
  Synthetic
gcccuacaucugggcuggcugug

SEQ ID NO: 346343 - RNA, 24 nt, Artificial Sequence
  Synthetic
agcccuacaucugggcuggcugug

SEQ ID NO: 346344 - RNA, 18 nt, Artificial Sequence
  Synthetic
ugcaaggagcaugcugug

SEQ ID NO: 346345 - RNA, 19 nt, Artificial Sequence
  Synthetic
cugcaaggagcaugcugug

SEQ ID NO: 346346 - RNA, 20 nt, Artificial Sequence
  Synthetic
gcugcaaggagcaugcugug

SEQ ID NO: 346347 - RNA, 21 nt, Artificial Sequence
  Synthetic
ugcugcaaggagcaugcugug

SEQ ID NO: 346348 - RNA, 22 nt, Artificial Sequence
  Synthetic
cugcugcaaggagcaugcugug

SEQ ID NO: 346349 - RNA, 23 nt, Artificial Sequence
  Synthetic
gcugcugcaaggagcaugcugug

SEQ ID NO: 346350 - RNA, 24 nt, Artificial Sequence
  Synthetic
ugcugcugcaaggagcaugcugug

SEQ ID NO: 346351 - RNA, 18 nt, Artificial Sequence
  Synthetic
ucucuaucaggugcugug

SEQ ID NO: 346352 - RNA, 19 nt, Artificial Sequence
  Synthetic
cucucuaucaggugcugug

SEQ ID NO: 346353 - RNA, 20 nt, Artificial Sequence
  Synthetic
acucucuaucaggugcugug

SEQ ID NO: 346354 - RNA, 21 nt, Artificial Sequence
  Synthetic
aacucucuaucaggugcugug

SEQ ID NO: 346355 - RNA, 22 nt, Artificial Sequence
  Synthetic
gaacucucuaucaggugcugug

SEQ ID NO: 346356 - RNA, 23 nt, Artificial Sequence
  Synthetic
agaacucucuaucaggugcugug

SEQ ID NO: 346357 - RNA, 24 nt, Artificial Sequence
  Synthetic
uagaacucucuaucaggugcugug

SEQ ID NO: 346358 - RNA, 18 nt, Artificial Sequence
  Synthetic
gauaucuaaugugcugug

SEQ ID NO: 346359 - RNA, 19 nt, Artificial Sequence
  Synthetic
agauaucuaaugugcugug

SEQ ID NO: 346360 - RNA, 20 nt, Artificial Sequence
  Synthetic
uagauaucuaaugugcugug

SEQ ID NO: 346361 - RNA, 21 nt, Artificial Sequence
  Synthetic
uuagauaucuaaugugcugug

SEQ ID NO: 346362 - RNA, 22 nt, Artificial Sequence
  Synthetic
cuuagauaucuaaugugcugug

SEQ ID NO: 346363 - RNA, 23 nt, Artificial Sequence
  Synthetic
ucuuagauaucuaaugugcugug

SEQ ID NO: 346364 - RNA, 24 nt, Artificial Sequence
  Synthetic
uucuuagauaucuaaugugcugug

SEQ ID NO: 346365 - RNA, 18 nt, Artificial Sequence
  Synthetic
ugcaggcacugugcugug

SEQ ID NO: 346366 - RNA, 19 nt, Artificial Sequence
  Synthetic
uugcaggcacugugcugug

SEQ ID NO: 346367 - RNA, 20 nt, Artificial Sequence
  Synthetic
guugcaggcacugugcugug

SEQ ID NO: 346368 - RNA, 21 nt, Artificial Sequence
  Synthetic
uguugcaggcacugugcugug

SEQ ID NO: 346369 - RNA, 22 nt, Artificial Sequence
  Synthetic
cuguugcaggcacugugcugug

SEQ ID NO: 346370 - RNA, 23 nt, Artificial Sequence
  Synthetic
ucuguugcaggcacugugcugug

SEQ ID NO: 346371 - RNA, 24 nt, Artificial Sequence
  Synthetic
uucuguugcaggcacugugcugug

SEQ ID NO: 346372 - RNA, 18 nt, Artificial Sequence
  Synthetic
ggaggcgauugugcugug

SEQ ID NO: 346373 - RNA, 19 nt, Artificial Sequence
  Synthetic
uggaggcgauugugcugug

SEQ ID NO: 346374 - RNA, 20 nt, Artificial Sequence
  Synthetic
auggaggcgauugugcugug

SEQ ID NO: 346375 - RNA, 21 nt, Artificial Sequence
  Synthetic
gauggaggcgauugugcugug

SEQ ID NO: 346376 - RNA, 22 nt, Artificial Sequence
  Synthetic
agauggaggcgauugugcugug

SEQ ID NO: 346377 - RNA, 23 nt, Artificial Sequence
  Synthetic
gagauggaggcgauugugcugug

SEQ ID NO: 346378 - RNA, 24 nt, Artificial Sequence
  Synthetic
ggagauggaggcgauugugcugug

SEQ ID NO: 346379 - RNA, 18 nt, Artificial Sequence
  Synthetic
gcucauuaucuugcugug

SEQ ID NO: 346380 - RNA, 19 nt, Artificial Sequence
  Synthetic
ugcucauuaucuugcugug

SEQ ID NO: 346381 - RNA, 20 nt, Artificial Sequence
  Synthetic
uugcucauuaucuugcugug

SEQ ID NO: 346382 - RNA, 21 nt, Artificial Sequence
  Synthetic
auugcucauuaucuugcugug

SEQ ID NO: 346383 - RNA, 22 nt, Artificial Sequence
  Synthetic
uauugcucauuaucuugcugug

SEQ ID NO: 346384 - RNA, 23 nt, Artificial Sequence
  Synthetic
cuauugcucauuaucuugcugug

SEQ ID NO: 346385 - RNA, 24 nt, Artificial Sequence
  Synthetic
ucuauugcucauuaucuugcugug

SEQ ID NO: 346386 - RNA, 18 nt, Artificial Sequence
  Synthetic
guacuuucuuuugcugug

SEQ ID NO: 346387 - RNA, 19 nt, Artificial Sequence
  Synthetic
gguacuuucuuuugcugug

SEQ ID NO: 346388 - RNA, 20 nt, Artificial Sequence
  Synthetic
ugguacuuucuuuugcugug

SEQ ID NO: 346389 - RNA, 21 nt, Artificial Sequence
  Synthetic
augguacuuucuuuugcugug

SEQ ID NO: 346390 - RNA, 22 nt, Artificial Sequence
  Synthetic
gaugguacuuucuuuugcugug

SEQ ID NO: 346391 - RNA, 23 nt, Artificial Sequence
  Synthetic
ugaugguacuuucuuuugcugug

SEQ ID NO: 346392 - RNA, 24 nt, Artificial Sequence
  Synthetic
cugaugguacuuucuuuugcugug

SEQ ID NO: 346393 - RNA, 18 nt, Artificial Sequence
  Synthetic
guaguuucuuuugcugug

SEQ ID NO: 346394 - RNA, 19 nt, Artificial Sequence
  Synthetic
gguaguuucuuuugcugug

SEQ ID NO: 346395 - RNA, 20 nt, Artificial Sequence
  Synthetic
ugguaguuucuuuugcugug

SEQ ID NO: 346396 - RNA, 18 nt, Artificial Sequence
  Synthetic
gguacaguaaaaucugug

SEQ ID NO: 346397 - RNA, 19 nt, Artificial Sequence
  Synthetic
agguacaguaaaaucugug

SEQ ID NO: 346398 - RNA, 20 nt, Artificial Sequence
  Synthetic
uagguacaguaaaaucugug

SEQ ID NO: 346399 - RNA, 21 nt, Artificial Sequence
  Synthetic
auagguacaguaaaaucugug

SEQ ID NO: 346400 - RNA, 22 nt, Artificial Sequence
  Synthetic
gauagguacaguaaaaucugug

SEQ ID NO: 346401 - RNA, 23 nt, Artificial Sequence
  Synthetic
agauagguacaguaaaaucugug

SEQ ID NO: 346402 - RNA, 24 nt, Artificial Sequence
  Synthetic
aagauagguacaguaaaaucugug

SEQ ID NO: 346403 - RNA, 18 nt, Artificial Sequence
  Synthetic
auuugagagucaucugug

SEQ ID NO: 346404 - RNA, 19 nt, Artificial Sequence
  Synthetic
gauuugagagucaucugug

SEQ ID NO: 346405 - RNA, 20 nt, Artificial Sequence
  Synthetic
agauuugagagucaucugug

SEQ ID NO: 346406 - RNA, 21 nt, Artificial Sequence
  Synthetic
cagauuugagagucaucugug

SEQ ID NO: 346407 - RNA, 22 nt, Artificial Sequence
  Synthetic
gcagauuugagagucaucugug

SEQ ID NO: 346408 - RNA, 23 nt, Artificial Sequence
  Synthetic
ugcagauuugagagucaucugug

SEQ ID NO: 346409 - RNA, 24 nt, Artificial Sequence
  Synthetic
augcagauuugagagucaucugug

SEQ ID NO: 346410 - RNA, 18 nt, Artificial Sequence
  Synthetic
aaaugcagaugaucugug

SEQ ID NO: 346411 - RNA, 19 nt, Artificial Sequence
  Synthetic
caaaugcagaugaucugug

SEQ ID NO: 346412 - RNA, 20 nt, Artificial Sequence
  Synthetic
ucaaaugcagaugaucugug

SEQ ID NO: 346413 - RNA, 21 nt, Artificial Sequence
  Synthetic
cucaaaugcagaugaucugug

SEQ ID NO: 346414 - RNA, 22 nt, Artificial Sequence
  Synthetic
ucucaaaugcagaugaucugug

SEQ ID NO: 346415 - RNA, 23 nt, Artificial Sequence
  Synthetic
uucucaaaugcagaugaucugug

SEQ ID NO: 346416 - RNA, 24 nt, Artificial Sequence
  Synthetic
guucucaaaugcagaugaucugug

SEQ ID NO: 346417 - RNA, 18 nt, Artificial Sequence
  Synthetic
ugagaguaauuaucugug

SEQ ID NO: 346418 - RNA, 19 nt, Artificial Sequence
  Synthetic
cugagaguaauuaucugug

SEQ ID NO: 346419 - RNA, 20 nt, Artificial Sequence
  Synthetic
acugagaguaauuaucugug

SEQ ID NO: 346420 - RNA, 21 nt, Artificial Sequence
  Synthetic
gacugagaguaauuaucugug

SEQ ID NO: 346421 - RNA, 22 nt, Artificial Sequence
  Synthetic
agacugagaguaauuaucugug

SEQ ID NO: 346422 - RNA, 23 nt, Artificial Sequence
  Synthetic
gagacugagaguaauuaucugug

SEQ ID NO: 346423 - RNA, 24 nt, Artificial Sequence
  Synthetic
agagacugagaguaauuaucugug

SEQ ID NO: 346424 - RNA, 18 nt, Artificial Sequence
  Synthetic
caaagggaguuaucugug

SEQ ID NO: 346425 - RNA, 19 nt, Artificial Sequence
  Synthetic
acaaagggaguuaucugug

SEQ ID NO: 346426 - RNA, 20 nt, Artificial Sequence
  Synthetic
aacaaagggaguuaucugug

SEQ ID NO: 346427 - RNA, 21 nt, Artificial Sequence
  Synthetic
aaacaaagggaguuaucugug

SEQ ID NO: 346428 - RNA, 22 nt, Artificial Sequence
  Synthetic
uaaacaaagggaguuaucugug

SEQ ID NO: 346429 - RNA, 23 nt, Artificial Sequence
  Synthetic
auaaacaaagggaguuaucugug

SEQ ID NO: 346430 - RNA, 24 nt, Artificial Sequence
  Synthetic
aauaaacaaagggaguuaucugug

SEQ ID NO: 346431 - RNA, 18 nt, Artificial Sequence
  Synthetic
cugugauugaacucugug

SEQ ID NO: 346432 - RNA, 19 nt, Artificial Sequence
  Synthetic
gcugugauugaacucugug

SEQ ID NO: 346433 - RNA, 20 nt, Artificial Sequence
  Synthetic
ggcugugauugaacucugug

SEQ ID NO: 346434 - RNA, 21 nt, Artificial Sequence
  Synthetic
uggcugugauugaacucugug

SEQ ID NO: 346435 - RNA, 22 nt, Artificial Sequence
  Synthetic
uuggcugugauugaacucugug

SEQ ID NO: 346436 - RNA, 23 nt, Artificial Sequence
  Synthetic
auuggcugugauugaacucugug

SEQ ID NO: 346437 - RNA, 24 nt, Artificial Sequence
  Synthetic
aauuggcugugauugaacucugug

SEQ ID NO: 346438 - RNA, 18 nt, Artificial Sequence
  Synthetic
cccaguggggacucugug

SEQ ID NO: 346439 - RNA, 19 nt, Artificial Sequence
  Synthetic
ccccaguggggacucugug

SEQ ID NO: 346440 - RNA, 20 nt, Artificial Sequence
  Synthetic
gccccaguggggacucugug

SEQ ID NO: 346441 - RNA, 24 nt, Artificial Sequence
  Synthetic
cagugccccaguggggacucugug

SEQ ID NO: 346442 - RNA, 18 nt, Artificial Sequence
  Synthetic
uaugaaaccuccucugug

SEQ ID NO: 346443 - RNA, 19 nt, Artificial Sequence
  Synthetic
auaugaaaccuccucugug

SEQ ID NO: 346444 - RNA, 20 nt, Artificial Sequence
  Synthetic
uauaugaaaccuccucugug

SEQ ID NO: 346445 - RNA, 21 nt, Artificial Sequence
  Synthetic
auauaugaaaccuccucugug

SEQ ID NO: 346446 - RNA, 22 nt, Artificial Sequence
  Synthetic
uauauaugaaaccuccucugug

SEQ ID NO: 346447 - RNA, 23 nt, Artificial Sequence
  Synthetic
auauauaugaaaccuccucugug

SEQ ID NO: 346448 - RNA, 24 nt, Artificial Sequence
  Synthetic
uauauauaugaaaccuccucugug

SEQ ID NO: 346449 - RNA, 18 nt, Artificial Sequence
  Synthetic
gggacaauugucucugug

SEQ ID NO: 346450 - RNA, 19 nt, Artificial Sequence
  Synthetic
agggacaauugucucugug

SEQ ID NO: 346451 - RNA, 20 nt, Artificial Sequence
  Synthetic
uagggacaauugucucugug

SEQ ID NO: 346452 - RNA, 21 nt, Artificial Sequence
  Synthetic
auagggacaauugucucugug

SEQ ID NO: 346453 - RNA, 22 nt, Artificial Sequence
  Synthetic
aauagggacaauugucucugug

SEQ ID NO: 346454 - RNA, 23 nt, Artificial Sequence
  Synthetic
uaauagggacaauugucucugug

SEQ ID NO: 346455 - RNA, 24 nt, Artificial Sequence
  Synthetic
auaauagggacaauugucucugug

SEQ ID NO: 346456 - RNA, 18 nt, Artificial Sequence
  Synthetic
auuuauaauuucucugug

SEQ ID NO: 346457 - RNA, 19 nt, Artificial Sequence
  Synthetic
cauuuauaauuucucugug

SEQ ID NO: 346458 - RNA, 20 nt, Artificial Sequence
  Synthetic
acauuuauaauuucucugug

SEQ ID NO: 346459 - RNA, 21 nt, Artificial Sequence
  Synthetic
aacauuuauaauuucucugug

SEQ ID NO: 346460 - RNA, 22 nt, Artificial Sequence
  Synthetic
aaacauuuauaauuucucugug

SEQ ID NO: 346461 - RNA, 23 nt, Artificial Sequence
  Synthetic
caaacauuuauaauuucucugug

SEQ ID NO: 346462 - RNA, 24 nt, Artificial Sequence
  Synthetic
ucaaacauuuauaauuucucugug

SEQ ID NO: 346463 - RNA, 18 nt, Artificial Sequence
  Synthetic
uggaacacuaagucugug

SEQ ID NO: 346464 - RNA, 19 nt, Artificial Sequence
  Synthetic
auggaacacuaagucugug

SEQ ID NO: 346465 - RNA, 20 nt, Artificial Sequence
  Synthetic
uauggaacacuaagucugug

SEQ ID NO: 346466 - RNA, 21 nt, Artificial Sequence
  Synthetic
uuauggaacacuaagucugug

SEQ ID NO: 346467 - RNA, 22 nt, Artificial Sequence
  Synthetic
guuauggaacacuaagucugug

SEQ ID NO: 346468 - RNA, 23 nt, Artificial Sequence
  Synthetic
uguuauggaacacuaagucugug

SEQ ID NO: 346469 - RNA, 24 nt, Artificial Sequence
  Synthetic
auguuauggaacacuaagucugug

SEQ ID NO: 346470 - RNA, 18 nt, Artificial Sequence
  Synthetic
ggcuaucaagagucugug

SEQ ID NO: 346471 - RNA, 19 nt, Artificial Sequence
  Synthetic
uggcuaucaagagucugug

SEQ ID NO: 346472 - RNA, 20 nt, Artificial Sequence
  Synthetic
guggcuaucaagagucugug

SEQ ID NO: 346473 - RNA, 21 nt, Artificial Sequence
  Synthetic
aguggcuaucaagagucugug

SEQ ID NO: 346474 - RNA, 22 nt, Artificial Sequence
  Synthetic
gaguggcuaucaagagucugug

SEQ ID NO: 346475 - RNA, 23 nt, Artificial Sequence
  Synthetic
agaguggcuaucaagagucugug

SEQ ID NO: 346476 - RNA, 24 nt, Artificial Sequence
  Synthetic
gagaguggcuaucaagagucugug

SEQ ID NO: 346477 - RNA, 18 nt, Artificial Sequence
  Synthetic
ucagccauggagucugug

SEQ ID NO: 346478 - RNA, 19 nt, Artificial Sequence
  Synthetic
gucagccauggagucugug

SEQ ID NO: 346479 - RNA, 20 nt, Artificial Sequence
  Synthetic
agucagccauggagucugug

SEQ ID NO: 346480 - RNA, 21 nt, Artificial Sequence
  Synthetic
gagucagccauggagucugug

SEQ ID NO: 346481 - RNA, 22 nt, Artificial Sequence
  Synthetic
ggagucagccauggagucugug

SEQ ID NO: 346482 - RNA, 23 nt, Artificial Sequence
  Synthetic
gggagucagccauggagucugug

SEQ ID NO: 346483 - RNA, 24 nt, Artificial Sequence
  Synthetic
agggagucagccauggagucugug

SEQ ID NO: 346484 - RNA, 18 nt, Artificial Sequence
  Synthetic
uagaccucugggucugug

SEQ ID NO: 346485 - RNA, 19 nt, Artificial Sequence
  Synthetic
cuagaccucugggucugug

SEQ ID NO: 346486 - RNA, 20 nt, Artificial Sequence
  Synthetic
ccuagaccucugggucugug

SEQ ID NO: 346487 - RNA, 21 nt, Artificial Sequence
  Synthetic
uccuagaccucugggucugug

SEQ ID NO: 346488 - RNA, 22 nt, Artificial Sequence
  Synthetic
cuccuagaccucugggucugug

SEQ ID NO: 346489 - RNA, 23 nt, Artificial Sequence
  Synthetic
ccuccuagaccucugggucugug

SEQ ID NO: 346490 - RNA, 24 nt, Artificial Sequence
  Synthetic
gccuccuagaccucugggucugug

SEQ ID NO: 346491 - RNA, 18 nt, Artificial Sequence
  Synthetic
uuaaucacauugucugug

SEQ ID NO: 346492 - RNA, 19 nt, Artificial Sequence
  Synthetic
guuaaucacauugucugug

SEQ ID NO: 346493 - RNA, 20 nt, Artificial Sequence
  Synthetic
uguuaaucacauugucugug

SEQ ID NO: 346494 - RNA, 21 nt, Artificial Sequence
  Synthetic
guguuaaucacauugucugug

SEQ ID NO: 346495 - RNA, 22 nt, Artificial Sequence
  Synthetic
aguguuaaucacauugucugug

SEQ ID NO: 346496 - RNA, 23 nt, Artificial Sequence
  Synthetic
aaguguuaaucacauugucugug

SEQ ID NO: 346497 - RNA, 24 nt, Artificial Sequence
  Synthetic
gaaguguuaaucacauugucugug

SEQ ID NO: 346498 - RNA, 18 nt, Artificial Sequence
  Synthetic
guuuuuuccaauucugug

SEQ ID NO: 346499 - RNA, 19 nt, Artificial Sequence
  Synthetic
aguuuuuuccaauucugug

SEQ ID NO: 346500 - RNA, 20 nt, Artificial Sequence
  Synthetic
uaguuuuuuccaauucugug

SEQ ID NO: 346501 - RNA, 21 nt, Artificial Sequence
  Synthetic
guaguuuuuuccaauucugug

SEQ ID NO: 346502 - RNA, 22 nt, Artificial Sequence
  Synthetic
aguaguuuuuuccaauucugug

SEQ ID NO: 346503 - RNA, 23 nt, Artificial Sequence
  Synthetic
aaguaguuuuuuccaauucugug

SEQ ID NO: 346504 - RNA, 24 nt, Artificial Sequence
  Synthetic
aaaguaguuuuuuccaauucugug

SEQ ID NO: 346505 - RNA, 18 nt, Artificial Sequence
  Synthetic
guuuguucuaauucugug

SEQ ID NO: 346506 - RNA, 19 nt, Artificial Sequence
  Synthetic
aguuuguucuaauucugug

SEQ ID NO: 346507 - RNA, 20 nt, Artificial Sequence
  Synthetic
uaguuuguucuaauucugug

SEQ ID NO: 346508 - RNA, 21 nt, Artificial Sequence
  Synthetic
guaguuuguucuaauucugug

SEQ ID NO: 346509 - RNA, 22 nt, Artificial Sequence
  Synthetic
aguaguuuguucuaauucugug

SEQ ID NO: 346510 - RNA, 23 nt, Artificial Sequence
  Synthetic
aaguaguuuguucuaauucugug

SEQ ID NO: 346511 - RNA, 24 nt, Artificial Sequence
  Synthetic
aaaguaguuuguucuaauucugug

SEQ ID NO: 346512 - RNA, 18 nt, Artificial Sequence
  Synthetic
aagggaaaacauucugug

SEQ ID NO: 346513 - RNA, 19 nt, Artificial Sequence
  Synthetic
aaagggaaaacauucugug

SEQ ID NO: 346514 - RNA, 20 nt, Artificial Sequence
  Synthetic
gaaagggaaaacauucugug

SEQ ID NO: 346515 - RNA, 21 nt, Artificial Sequence
  Synthetic
agaaagggaaaacauucugug

SEQ ID NO: 346516 - RNA, 22 nt, Artificial Sequence
  Synthetic
gagaaagggaaaacauucugug

SEQ ID NO: 346517 - RNA, 23 nt, Artificial Sequence
  Synthetic
ggagaaagggaaaacauucugug

SEQ ID NO: 346518 - RNA, 24 nt, Artificial Sequence
  Synthetic
aggagaaagggaaaacauucugug

SEQ ID NO: 346519 - RNA, 18 nt, Artificial Sequence
  Synthetic
ucucuuucugauucugug

SEQ ID NO: 346520 - RNA, 19 nt, Artificial Sequence
  Synthetic
aucucuuucugauucugug

SEQ ID NO: 346521 - RNA, 20 nt, Artificial Sequence
  Synthetic
caucucuuucugauucugug

SEQ ID NO: 346522 - RNA, 21 nt, Artificial Sequence
  Synthetic
ucaucucuuucugauucugug

SEQ ID NO: 346523 - RNA, 22 nt, Artificial Sequence
  Synthetic
gucaucucuuucugauucugug

SEQ ID NO: 346524 - RNA, 23 nt, Artificial Sequence
  Synthetic
ugucaucucuuucugauucugug

SEQ ID NO: 346525 - RNA, 24 nt, Artificial Sequence
  Synthetic
gugucaucucuuucugauucugug

SEQ ID NO: 346526 - RNA, 18 nt, Artificial Sequence
  Synthetic
aauuccuauccuucugug

SEQ ID NO: 346527 - RNA, 19 nt, Artificial Sequence
  Synthetic
caauuccuauccuucugug

SEQ ID NO: 346528 - RNA, 20 nt, Artificial Sequence
  Synthetic
ucaauuccuauccuucugug

SEQ ID NO: 346529 - RNA, 21 nt, Artificial Sequence
  Synthetic
cucaauuccuauccuucugug

SEQ ID NO: 346530 - RNA, 22 nt, Artificial Sequence
  Synthetic
ccucaauuccuauccuucugug

SEQ ID NO: 346531 - RNA, 23 nt, Artificial Sequence
  Synthetic
uccucaauuccuauccuucugug

SEQ ID NO: 346532 - RNA, 24 nt, Artificial Sequence
  Synthetic
uuccucaauuccuauccuucugug

SEQ ID NO: 346533 - RNA, 18 nt, Artificial Sequence
  Synthetic
ucaccaaaagcuucugug

SEQ ID NO: 346534 - RNA, 19 nt, Artificial Sequence
  Synthetic
gucaccaaaagcuucugug

SEQ ID NO: 346535 - RNA, 20 nt, Artificial Sequence
  Synthetic
ggucaccaaaagcuucugug

SEQ ID NO: 346536 - RNA, 21 nt, Artificial Sequence
  Synthetic
gggucaccaaaagcuucugug

SEQ ID NO: 346537 - RNA, 22 nt, Artificial Sequence
  Synthetic
ugggucaccaaaagcuucugug

SEQ ID NO: 346538 - RNA, 23 nt, Artificial Sequence
  Synthetic
cugggucaccaaaagcuucugug

SEQ ID NO: 346539 - RNA, 24 nt, Artificial Sequence
  Synthetic
ucugggucaccaaaagcuucugug

SEQ ID NO: 346540 - RNA, 18 nt, Artificial Sequence
  Synthetic
uggugguugaguucugug

SEQ ID NO: 346541 - RNA, 19 nt, Artificial Sequence
  Synthetic
uuggugguugaguucugug

SEQ ID NO: 346542 - RNA, 20 nt, Artificial Sequence
  Synthetic
cuuggugguugaguucugug

SEQ ID NO: 346543 - RNA, 21 nt, Artificial Sequence
  Synthetic
gcuuggugguugaguucugug

SEQ ID NO: 346544 - RNA, 22 nt, Artificial Sequence
  Synthetic
agcuuggugguugaguucugug

SEQ ID NO: 346545 - RNA, 23 nt, Artificial Sequence
  Synthetic
cagcuuggugguugaguucugug

SEQ ID NO: 346546 - RNA, 24 nt, Artificial Sequence
  Synthetic
acagcuuggugguugaguucugug

SEQ ID NO: 346547 - RNA, 18 nt, Artificial Sequence
  Synthetic
aucuuuuuguaaagugug

SEQ ID NO: 346548 - RNA, 19 nt, Artificial Sequence
  Synthetic
caucuuuuuguaaagugug

SEQ ID NO: 346549 - RNA, 20 nt, Artificial Sequence
  Synthetic
gcaucuuuuuguaaagugug

SEQ ID NO: 346550 - RNA, 21 nt, Artificial Sequence
  Synthetic
agcaucuuuuuguaaagugug

SEQ ID NO: 346551 - RNA, 22 nt, Artificial Sequence
  Synthetic
aagcaucuuuuuguaaagugug

SEQ ID NO: 346552 - RNA, 23 nt, Artificial Sequence
  Synthetic
uaagcaucuuuuuguaaagugug

SEQ ID NO: 346553 - RNA, 24 nt, Artificial Sequence
  Synthetic
uuaagcaucuuuuuguaaagugug

SEQ ID NO: 346554 - RNA, 18 nt, Artificial Sequence
  Synthetic
caugguuggccaagugug

SEQ ID NO: 346555 - RNA, 19 nt, Artificial Sequence
  Synthetic
gcaugguuggccaagugug

SEQ ID NO: 346556 - RNA, 20 nt, Artificial Sequence
  Synthetic
ggcaugguuggccaagugug

SEQ ID NO: 346557 - RNA, 21 nt, Artificial Sequence
  Synthetic
uggcaugguuggccaagugug

SEQ ID NO: 346558 - RNA, 22 nt, Artificial Sequence
  Synthetic
uuggcaugguuggccaagugug

SEQ ID NO: 346559 - RNA, 23 nt, Artificial Sequence
  Synthetic
uuuggcaugguuggccaagugug

SEQ ID NO: 346560 - RNA, 24 nt, Artificial Sequence
  Synthetic
cuuuggcaugguuggccaagugug

SEQ ID NO: 346561 - RNA, 18 nt, Artificial Sequence
  Synthetic
gaggagaagagaagugug

SEQ ID NO: 346562 - RNA, 19 nt, Artificial Sequence
  Synthetic
agaggagaagagaagugug

SEQ ID NO: 346563 - RNA, 20 nt, Artificial Sequence
  Synthetic
gagaggagaagagaagugug

SEQ ID NO: 346564 - RNA, 21 nt, Artificial Sequence
  Synthetic
agagaggagaagagaagugug

SEQ ID NO: 346565 - RNA, 22 nt, Artificial Sequence
  Synthetic
gagagaggagaagagaagugug

SEQ ID NO: 346566 - RNA, 23 nt, Artificial Sequence
  Synthetic
agagagaggagaagagaagugug

SEQ ID NO: 346567 - RNA, 24 nt, Artificial Sequence
  Synthetic
cagagagaggagaagagaagugug

SEQ ID NO: 346568 - RNA, 18 nt, Artificial Sequence
  Synthetic
ugggucaggggaagugug

SEQ ID NO: 346569 - RNA, 19 nt, Artificial Sequence
  Synthetic
gugggucaggggaagugug

SEQ ID NO: 346570 - RNA, 20 nt, Artificial Sequence
  Synthetic
agugggucaggggaagugug

SEQ ID NO: 346571 - RNA, 21 nt, Artificial Sequence
  Synthetic
gagugggucaggggaagugug

SEQ ID NO: 346572 - RNA, 22 nt, Artificial Sequence
  Synthetic
ggagugggucaggggaagugug

SEQ ID NO: 346573 - RNA, 23 nt, Artificial Sequence
  Synthetic
aggagugggucaggggaagugug

SEQ ID NO: 346574 - RNA, 24 nt, Artificial Sequence
  Synthetic
gaggagugggucaggggaagugug

SEQ ID NO: 346575 - RNA, 18 nt, Artificial Sequence
  Synthetic
cuaaugauugugagugug

SEQ ID NO: 346576 - RNA, 19 nt, Artificial Sequence
  Synthetic
gcuaaugauugugagugug

SEQ ID NO: 346577 - RNA, 20 nt, Artificial Sequence
  Synthetic
ugcuaaugauugugagugug

SEQ ID NO: 346578 - RNA, 21 nt, Artificial Sequence
  Synthetic
cugcuaaugauugugagugug

SEQ ID NO: 346579 - RNA, 22 nt, Artificial Sequence
  Synthetic
ucugcuaaugauugugagugug

SEQ ID NO: 346580 - RNA, 23 nt, Artificial Sequence
  Synthetic
cucugcuaaugauugugagugug

SEQ ID NO: 346581 - RNA, 24 nt, Artificial Sequence
  Synthetic
ccucugcuaaugauugugagugug

SEQ ID NO: 346582 - RNA, 18 nt, Artificial Sequence
  Synthetic
auacucaagcuuagugug

SEQ ID NO: 346583 - RNA, 19 nt, Artificial Sequence
  Synthetic
gauacucaagcuuagugug

SEQ ID NO: 346584 - RNA, 20 nt, Artificial Sequence
  Synthetic
ggauacucaagcuuagugug

SEQ ID NO: 346585 - RNA, 21 nt, Artificial Sequence
  Synthetic
gggauacucaagcuuagugug

SEQ ID NO: 346586 - RNA, 22 nt, Artificial Sequence
  Synthetic
ugggauacucaagcuuagugug

SEQ ID NO: 346587 - RNA, 23 nt, Artificial Sequence
  Synthetic
cugggauacucaagcuuagugug

SEQ ID NO: 346588 - RNA, 24 nt, Artificial Sequence
  Synthetic
ccugggauacucaagcuuagugug

SEQ ID NO: 346589 - RNA, 18 nt, Artificial Sequence
  Synthetic
guuuauguuguuagugug

SEQ ID NO: 346590 - RNA, 19 nt, Artificial Sequence
  Synthetic
gguuuauguuguuagugug

SEQ ID NO: 346591 - RNA, 20 nt, Artificial Sequence
  Synthetic
agguuuauguuguuagugug

SEQ ID NO: 346592 - RNA, 21 nt, Artificial Sequence
  Synthetic
aagguuuauguuguuagugug

SEQ ID NO: 346593 - RNA, 22 nt, Artificial Sequence
  Synthetic
uaagguuuauguuguuagugug

SEQ ID NO: 346594 - RNA, 23 nt, Artificial Sequence
  Synthetic
uuaagguuuauguuguuagugug

SEQ ID NO: 346595 - RNA, 24 nt, Artificial Sequence
  Synthetic
uuuaagguuuauguuguuagugug

SEQ ID NO: 346596 - RNA, 18 nt, Artificial Sequence
  Synthetic
ggcaggcaagagcgugug

SEQ ID NO: 346597 - RNA, 19 nt, Artificial Sequence
  Synthetic
uggcaggcaagagcgugug

SEQ ID NO: 346598 - RNA, 20 nt, Artificial Sequence
  Synthetic
guggcaggcaagagcgugug

SEQ ID NO: 346599 - RNA, 21 nt, Artificial Sequence
  Synthetic
gguggcaggcaagagcgugug

SEQ ID NO: 346600 - RNA, 22 nt, Artificial Sequence
  Synthetic
ugguggcaggcaagagcgugug

SEQ ID NO: 346601 - RNA, 23 nt, Artificial Sequence
  Synthetic
augguggcaggcaagagcgugug

SEQ ID NO: 346602 - RNA, 24 nt, Artificial Sequence
  Synthetic
caugguggcaggcaagagcgugug

SEQ ID NO: 346603 - RNA, 18 nt, Artificial Sequence
  Synthetic
guaacagaaaaaggugug

SEQ ID NO: 346604 - RNA, 19 nt, Artificial Sequence
  Synthetic
uguaacagaaaaaggugug

SEQ ID NO: 346605 - RNA, 20 nt, Artificial Sequence
  Synthetic
auguaacagaaaaaggugug

SEQ ID NO: 346606 - RNA, 21 nt, Artificial Sequence
  Synthetic
aauguaacagaaaaaggugug

SEQ ID NO: 346607 - RNA, 22 nt, Artificial Sequence
  Synthetic
caauguaacagaaaaaggugug

SEQ ID NO: 346608 - RNA, 23 nt, Artificial Sequence
  Synthetic
ucaauguaacagaaaaaggugug

SEQ ID NO: 346609 - RNA, 24 nt, Artificial Sequence
  Synthetic
uucaauguaacagaaaaaggugug

SEQ ID NO: 346610 - RNA, 18 nt, Artificial Sequence
  Synthetic
guuaggguacaaggugug

SEQ ID NO: 346611 - RNA, 19 nt, Artificial Sequence
  Synthetic
aguuaggguacaaggugug

SEQ ID NO: 346612 - RNA, 20 nt, Artificial Sequence
  Synthetic
aaguuaggguacaaggugug

SEQ ID NO: 346613 - RNA, 21 nt, Artificial Sequence
  Synthetic
aaaguuaggguacaaggugug

SEQ ID NO: 346614 - RNA, 22 nt, Artificial Sequence
  Synthetic
aaaaguuaggguacaaggugug

SEQ ID NO: 346615 - RNA, 23 nt, Artificial Sequence
  Synthetic
aaaaaguuaggguacaaggugug

SEQ ID NO: 346616 - RNA, 24 nt, Artificial Sequence
  Synthetic
gaaaaaguuaggguacaaggugug

SEQ ID NO: 346617 - RNA, 18 nt, Artificial Sequence
  Synthetic
ucaaaaguaacaggugug

SEQ ID NO: 346618 - RNA, 19 nt, Artificial Sequence
  Synthetic
gucaaaaguaacaggugug

SEQ ID NO: 346619 - RNA, 20 nt, Artificial Sequence
  Synthetic
ugucaaaaguaacaggugug

SEQ ID NO: 346620 - RNA, 21 nt, Artificial Sequence
  Synthetic
augucaaaaguaacaggugug

SEQ ID NO: 346621 - RNA, 22 nt, Artificial Sequence
  Synthetic
uaugucaaaaguaacaggugug

SEQ ID NO: 346622 - RNA, 23 nt, Artificial Sequence
  Synthetic
auaugucaaaaguaacaggugug

SEQ ID NO: 346623 - RNA, 24 nt, Artificial Sequence
  Synthetic
aauaugucaaaaguaacaggugug

SEQ ID NO: 346624 - RNA, 18 nt, Artificial Sequence
  Synthetic
aucuugaaaccaggugug

SEQ ID NO: 346625 - RNA, 19 nt, Artificial Sequence
  Synthetic
aaucuugaaaccaggugug

SEQ ID NO: 346626 - RNA, 20 nt, Artificial Sequence
  Synthetic
gaaucuugaaaccaggugug

SEQ ID NO: 346627 - RNA, 21 nt, Artificial Sequence
  Synthetic
ggaaucuugaaaccaggugug

SEQ ID NO: 346628 - RNA, 22 nt, Artificial Sequence
  Synthetic
aggaaucuugaaaccaggugug

SEQ ID NO: 346629 - RNA, 23 nt, Artificial Sequence
  Synthetic
aaggaaucuugaaaccaggugug

SEQ ID NO: 346630 - RNA, 24 nt, Artificial Sequence
  Synthetic
uaaggaaucuugaaaccaggugug

SEQ ID NO: 346631 - RNA, 18 nt, Artificial Sequence
  Synthetic
auuaaaauaugaggugug

SEQ ID NO: 346632 - RNA, 19 nt, Artificial Sequence
  Synthetic
uauuaaaauaugaggugug

SEQ ID NO: 346633 - RNA, 20 nt, Artificial Sequence
  Synthetic
uuauuaaaauaugaggugug

SEQ ID NO: 346634 - RNA, 21 nt, Artificial Sequence
  Synthetic
uuuauuaaaauaugaggugug

SEQ ID NO: 346635 - RNA, 22 nt, Artificial Sequence
  Synthetic
uuuuauuaaaauaugaggugug

SEQ ID NO: 346636 - RNA, 23 nt, Artificial Sequence
  Synthetic
uuuuuauuaaaauaugaggugug

SEQ ID NO: 346637 - RNA, 24 nt, Artificial Sequence
  Synthetic
cuuuuuauuaaaauaugaggugug

SEQ ID NO: 346638 - RNA, 18 nt, Artificial Sequence
  Synthetic
aaaaauuagccgggugug

SEQ ID NO: 346639 - RNA, 19 nt, Artificial Sequence
  Synthetic
caaaaauuagccgggugug

SEQ ID NO: 346640 - RNA, 20 nt, Artificial Sequence
  Synthetic
acaaaaauuagccgggugug

SEQ ID NO: 346641 - RNA, 21 nt, Artificial Sequence
  Synthetic
uacaaaaauuagccgggugug

SEQ ID NO: 346642 - RNA, 22 nt, Artificial Sequence
  Synthetic
auacaaaaauuagccgggugug

SEQ ID NO: 346643 - RNA, 23 nt, Artificial Sequence
  Synthetic
aauacaaaaauuagccgggugug

SEQ ID NO: 346644 - RNA, 24 nt, Artificial Sequence
  Synthetic
aaauacaaaaauuagccgggugug

SEQ ID NO: 346645 - RNA, 18 nt, Artificial Sequence
  Synthetic
acaauagacaugggugug

SEQ ID NO: 346646 - RNA, 19 nt, Artificial Sequence
  Synthetic
cacaauagacaugggugug

SEQ ID NO: 346647 - RNA, 20 nt, Artificial Sequence
  Synthetic
gcacaauagacaugggugug

SEQ ID NO: 346648 - RNA, 21 nt, Artificial Sequence
  Synthetic
ugcacaauagacaugggugug

SEQ ID NO: 346649 - RNA, 22 nt, Artificial Sequence
  Synthetic
augcacaauagacaugggugug

SEQ ID NO: 346650 - RNA, 23 nt, Artificial Sequence
  Synthetic
aaugcacaauagacaugggugug

SEQ ID NO: 346651 - RNA, 24 nt, Artificial Sequence
  Synthetic
gaaugcacaauagacaugggugug

SEQ ID NO: 346652 - RNA, 18 nt, Artificial Sequence
  Synthetic
uguuuaugagugggugug

SEQ ID NO: 346653 - RNA, 19 nt, Artificial Sequence
  Synthetic
auguuuaugagugggugug

SEQ ID NO: 346654 - RNA, 20 nt, Artificial Sequence
  Synthetic
aauguuuaugagugggugug

SEQ ID NO: 346655 - RNA, 21 nt, Artificial Sequence
  Synthetic
uaauguuuaugagugggugug

SEQ ID NO: 346656 - RNA, 22 nt, Artificial Sequence
  Synthetic
uuaauguuuaugagugggugug

SEQ ID NO: 346657 - RNA, 23 nt, Artificial Sequence
  Synthetic
cuuaauguuuaugagugggugug

SEQ ID NO: 346658 - RNA, 24 nt, Artificial Sequence
  Synthetic
gcuuaauguuuaugagugggugug

SEQ ID NO: 346659 - RNA, 18 nt, Artificial Sequence
  Synthetic
caaaggggagcuggugug

SEQ ID NO: 346660 - RNA, 19 nt, Artificial Sequence
  Synthetic
gcaaaggggagcuggugug

SEQ ID NO: 346661 - RNA, 20 nt, Artificial Sequence
  Synthetic
ggcaaaggggagcuggugug

SEQ ID NO: 346662 - RNA, 21 nt, Artificial Sequence
  Synthetic
gggcaaaggggagcuggugug

SEQ ID NO: 346663 - RNA, 22 nt, Artificial Sequence
  Synthetic
agggcaaaggggagcuggugug

SEQ ID NO: 346664 - RNA, 23 nt, Artificial Sequence
  Synthetic
aagggcaaaggggagcuggugug

SEQ ID NO: 346665 - RNA, 24 nt, Artificial Sequence
  Synthetic
gaagggcaaaggggagcuggugug

SEQ ID NO: 346666 - RNA, 18 nt, Artificial Sequence
  Synthetic
uuucuucuaaaaugugug

SEQ ID NO: 346667 - RNA, 19 nt, Artificial Sequence
  Synthetic
cuuucuucuaaaaugugug

SEQ ID NO: 346668 - RNA, 20 nt, Artificial Sequence
  Synthetic
ucuuucuucuaaaaugugug

SEQ ID NO: 346669 - RNA, 21 nt, Artificial Sequence
  Synthetic
cucuuucuucuaaaaugugug

SEQ ID NO: 346670 - RNA, 22 nt, Artificial Sequence
  Synthetic
ucucuuucuucuaaaaugugug

SEQ ID NO: 346671 - RNA, 23 nt, Artificial Sequence
  Synthetic
cucucuuucuucuaaaaugugug

SEQ ID NO: 346672 - RNA, 24 nt, Artificial Sequence
  Synthetic
ucucucuuucuucuaaaaugugug

SEQ ID NO: 346673 - RNA, 18 nt, Artificial Sequence
  Synthetic
ucacaucuggaaugugug

SEQ ID NO: 346674 - RNA, 19 nt, Artificial Sequence
  Synthetic
aucacaucuggaaugugug

SEQ ID NO: 346675 - RNA, 20 nt, Artificial Sequence
  Synthetic
uaucacaucuggaaugugug

SEQ ID NO: 346676 - RNA, 21 nt, Artificial Sequence
  Synthetic
uuaucacaucuggaaugugug

SEQ ID NO: 346677 - RNA, 22 nt, Artificial Sequence
  Synthetic
uuuaucacaucuggaaugugug

SEQ ID NO: 346678 - RNA, 23 nt, Artificial Sequence
  Synthetic
uuuuaucacaucuggaaugugug

SEQ ID NO: 346679 - RNA, 24 nt, Artificial Sequence
  Synthetic
guuuuaucacaucuggaaugugug

SEQ ID NO: 346680 - RNA, 18 nt, Artificial Sequence
  Synthetic
ugggaagguguaugugug

SEQ ID NO: 346681 - RNA, 19 nt, Artificial Sequence
  Synthetic
uugggaagguguaugugug

SEQ ID NO: 346682 - RNA, 20 nt, Artificial Sequence
  Synthetic
cuugggaagguguaugugug

SEQ ID NO: 346683 - RNA, 21 nt, Artificial Sequence
  Synthetic
ucuugggaagguguaugugug

SEQ ID NO: 346684 - RNA, 22 nt, Artificial Sequence
  Synthetic
gucuugggaagguguaugugug

SEQ ID NO: 346685 - RNA, 23 nt, Artificial Sequence
  Synthetic
agucuugggaagguguaugugug

SEQ ID NO: 346686 - RNA, 24 nt, Artificial Sequence
  Synthetic
uagucuugggaagguguaugugug

SEQ ID NO: 346687 - RNA, 18 nt, Artificial Sequence
  Synthetic
ucauauagauuaugugug

SEQ ID NO: 346688 - RNA, 19 nt, Artificial Sequence
  Synthetic
uucauauagauuaugugug

SEQ ID NO: 346689 - RNA, 20 nt, Artificial Sequence
  Synthetic
auucauauagauuaugugug

SEQ ID NO: 346690 - RNA, 21 nt, Artificial Sequence
  Synthetic
cauucauauagauuaugugug

SEQ ID NO: 346691 - RNA, 22 nt, Artificial Sequence
  Synthetic
acauucauauagauuaugugug

SEQ ID NO: 346692 - RNA, 23 nt, Artificial Sequence
  Synthetic
gacauucauauagauuaugugug

SEQ ID NO: 346693 - RNA, 24 nt, Artificial Sequence
  Synthetic
ggacauucauauagauuaugugug

SEQ ID NO: 346694 - RNA, 18 nt, Artificial Sequence
  Synthetic
cccuccaacuacugugug

SEQ ID NO: 346695 - RNA, 19 nt, Artificial Sequence
  Synthetic
acccuccaacuacugugug

SEQ ID NO: 346696 - RNA, 20 nt, Artificial Sequence
  Synthetic
uacccuccaacuacugugug

SEQ ID NO: 346697 - RNA, 21 nt, Artificial Sequence
  Synthetic
uuacccuccaacuacugugug

SEQ ID NO: 346698 - RNA, 22 nt, Artificial Sequence
  Synthetic
uuuacccuccaacuacugugug

SEQ ID NO: 346699 - RNA, 23 nt, Artificial Sequence
  Synthetic
cuuuacccuccaacuacugugug

SEQ ID NO: 346700 - RNA, 24 nt, Artificial Sequence
  Synthetic
acuuuacccuccaacuacugugug

SEQ ID NO: 346701 - RNA, 18 nt, Artificial Sequence
  Synthetic
aauuuaugucccugugug

SEQ ID NO: 346702 - RNA, 19 nt, Artificial Sequence
  Synthetic
gaauuuaugucccugugug

SEQ ID NO: 346703 - RNA, 20 nt, Artificial Sequence
  Synthetic
ggaauuuaugucccugugug

SEQ ID NO: 346704 - RNA, 21 nt, Artificial Sequence
  Synthetic
uggaauuuaugucccugugug

SEQ ID NO: 346705 - RNA, 22 nt, Artificial Sequence
  Synthetic
cuggaauuuaugucccugugug

SEQ ID NO: 346706 - RNA, 23 nt, Artificial Sequence
  Synthetic
ccuggaauuuaugucccugugug

SEQ ID NO: 346707 - RNA, 24 nt, Artificial Sequence
  Synthetic
uccuggaauuuaugucccugugug

SEQ ID NO: 346708 - RNA, 18 nt, Artificial Sequence
  Synthetic
gggaaaaaggccugugug

SEQ ID NO: 346709 - RNA, 19 nt, Artificial Sequence
  Synthetic
agggaaaaaggccugugug

SEQ ID NO: 346710 - RNA, 20 nt, Artificial Sequence
  Synthetic
aagggaaaaaggccugugug

SEQ ID NO: 346711 - RNA, 21 nt, Artificial Sequence
  Synthetic
uaagggaaaaaggccugugug

SEQ ID NO: 346712 - RNA, 22 nt, Artificial Sequence
  Synthetic
uuaagggaaaaaggccugugug

SEQ ID NO: 346713 - RNA, 23 nt, Artificial Sequence
  Synthetic
auuaagggaaaaaggccugugug

SEQ ID NO: 346714 - RNA, 24 nt, Artificial Sequence
  Synthetic
uauuaagggaaaaaggccugugug

SEQ ID NO: 346715 - RNA, 18 nt, Artificial Sequence
  Synthetic
uugauaauaaucugugug

SEQ ID NO: 346716 - RNA, 19 nt, Artificial Sequence
  Synthetic
uuugauaauaaucugugug

SEQ ID NO: 346717 - RNA, 20 nt, Artificial Sequence
  Synthetic
cuuugauaauaaucugugug

SEQ ID NO: 346718 - RNA, 21 nt, Artificial Sequence
  Synthetic
ucuuugauaauaaucugugug

SEQ ID NO: 346719 - RNA, 22 nt, Artificial Sequence
  Synthetic
aucuuugauaauaaucugugug

SEQ ID NO: 346720 - RNA, 23 nt, Artificial Sequence
  Synthetic
uaucuuugauaauaaucugugug

SEQ ID NO: 346721 - RNA, 24 nt, Artificial Sequence
  Synthetic
cuaucuuugauaauaaucugugug

SEQ ID NO: 346722 - RNA, 18 nt, Artificial Sequence
  Synthetic
ucuuucugauucugugug

SEQ ID NO: 346723 - RNA, 19 nt, Artificial Sequence
  Synthetic
cucuuucugauucugugug

SEQ ID NO: 346724 - RNA, 20 nt, Artificial Sequence
  Synthetic
ucucuuucugauucugugug

SEQ ID NO: 346725 - RNA, 21 nt, Artificial Sequence
  Synthetic
aucucuuucugauucugugug

SEQ ID NO: 346726 - RNA, 22 nt, Artificial Sequence
  Synthetic
caucucuuucugauucugugug

SEQ ID NO: 346727 - RNA, 23 nt, Artificial Sequence
  Synthetic
ucaucucuuucugauucugugug

SEQ ID NO: 346728 - RNA, 24 nt, Artificial Sequence
  Synthetic
gucaucucuuucugauucugugug

SEQ ID NO: 346729 - RNA, 18 nt, Artificial Sequence
  Synthetic
uguuugcauuucugugug

SEQ ID NO: 346730 - RNA, 19 nt, Artificial Sequence
  Synthetic
auguuugcauuucugugug

SEQ ID NO: 346731 - RNA, 20 nt, Artificial Sequence
  Synthetic
aauguuugcauuucugugug

SEQ ID NO: 346732 - RNA, 21 nt, Artificial Sequence
  Synthetic
caauguuugcauuucugugug

SEQ ID NO: 346733 - RNA, 22 nt, Artificial Sequence
  Synthetic
ucaauguuugcauuucugugug

SEQ ID NO: 346734 - RNA, 23 nt, Artificial Sequence
  Synthetic
uucaauguuugcauuucugugug

SEQ ID NO: 346735 - RNA, 24 nt, Artificial Sequence
  Synthetic
uuucaauguuugcauuucugugug

SEQ ID NO: 346736 - RNA, 18 nt, Artificial Sequence
  Synthetic
gagguuacuaggugugug

SEQ ID NO: 346737 - RNA, 19 nt, Artificial Sequence
  Synthetic
ggagguuacuaggugugug

SEQ ID NO: 346738 - RNA, 20 nt, Artificial Sequence
  Synthetic
aggagguuacuaggugugug

SEQ ID NO: 346739 - RNA, 21 nt, Artificial Sequence
  Synthetic
gaggagguuacuaggugugug

SEQ ID NO: 346740 - RNA, 22 nt, Artificial Sequence
  Synthetic
ugaggagguuacuaggugugug

SEQ ID NO: 346741 - RNA, 23 nt, Artificial Sequence
  Synthetic
cugaggagguuacuaggugugug

SEQ ID NO: 346742 - RNA, 24 nt, Artificial Sequence
  Synthetic
ccugaggagguuacuaggugugug

SEQ ID NO: 346743 - RNA, 18 nt, Artificial Sequence
  Synthetic
ugguguuggaugugugug

SEQ ID NO: 346744 - RNA, 19 nt, Artificial Sequence
  Synthetic
uugguguuggaugugugug

SEQ ID NO: 346745 - RNA, 20 nt, Artificial Sequence
  Synthetic
guugguguuggaugugugug

SEQ ID NO: 346746 - RNA, 21 nt, Artificial Sequence
  Synthetic
aguugguguuggaugugugug

SEQ ID NO: 346747 - RNA, 22 nt, Artificial Sequence
  Synthetic
uaguugguguuggaugugugug

SEQ ID NO: 346748 - RNA, 23 nt, Artificial Sequence
  Synthetic
uuaguugguguuggaugugugug

SEQ ID NO: 346749 - RNA, 24 nt, Artificial Sequence
  Synthetic
guuaguugguguuggaugugugug

SEQ ID NO: 346750 - RNA, 18 nt, Artificial Sequence
  Synthetic
gcucacuaccugugugug

SEQ ID NO: 346751 - RNA, 19 nt, Artificial Sequence
  Synthetic
ugcucacuaccugugugug

SEQ ID NO: 346752 - RNA, 20 nt, Artificial Sequence
  Synthetic
augcucacuaccugugugug

SEQ ID NO: 346753 - RNA, 21 nt, Artificial Sequence
  Synthetic
uaugcucacuaccugugugug

SEQ ID NO: 346754 - RNA, 22 nt, Artificial Sequence
  Synthetic
cuaugcucacuaccugugugug

SEQ ID NO: 346755 - RNA, 23 nt, Artificial Sequence
  Synthetic
acuaugcucacuaccugugugug

SEQ ID NO: 346756 - RNA, 24 nt, Artificial Sequence
  Synthetic
uacuaugcucacuaccugugugug

SEQ ID NO: 346757 - RNA, 18 nt, Artificial Sequence
  Synthetic
ccauggugugugugugug

SEQ ID NO: 346758 - RNA, 19 nt, Artificial Sequence
  Synthetic
accauggugugugugugug

SEQ ID NO: 346759 - RNA, 20 nt, Artificial Sequence
  Synthetic
uaccauggugugugugugug

SEQ ID NO: 346760 - RNA, 21 nt, Artificial Sequence
  Synthetic
auaccauggugugugugugug

SEQ ID NO: 346761 - RNA, 22 nt, Artificial Sequence
  Synthetic
aauaccauggugugugugugug

SEQ ID NO: 346762 - RNA, 23 nt, Artificial Sequence
  Synthetic
aaauaccauggugugugugugug

SEQ ID NO: 346763 - RNA, 24 nt, Artificial Sequence
  Synthetic
gaaauaccauggugugugugugug

SEQ ID NO: 346764 - RNA, 18 nt, Artificial Sequence
  Synthetic
guuacuauugugugugug

SEQ ID NO: 346765 - RNA, 19 nt, Artificial Sequence
  Synthetic
aguuacuauugugugugug

SEQ ID NO: 346766 - RNA, 20 nt, Artificial Sequence
  Synthetic
uaguuacuauugugugugug

SEQ ID NO: 346767 - RNA, 21 nt, Artificial Sequence
  Synthetic
auaguuacuauugugugugug

SEQ ID NO: 346768 - RNA, 22 nt, Artificial Sequence
  Synthetic
aauaguuacuauugugugugug

SEQ ID NO: 346769 - RNA, 23 nt, Artificial Sequence
  Synthetic
aaauaguuacuauugugugugug

SEQ ID NO: 346770 - RNA, 24 nt, Artificial Sequence
  Synthetic
gaaauaguuacuauugugugugug

SEQ ID NO: 346771 - RNA, 18 nt, Artificial Sequence
  Synthetic
uaaauugaucauugugug

SEQ ID NO: 346772 - RNA, 19 nt, Artificial Sequence
  Synthetic
cuaaauugaucauugugug

SEQ ID NO: 346773 - RNA, 20 nt, Artificial Sequence
  Synthetic
ucuaaauugaucauugugug

SEQ ID NO: 346774 - RNA, 21 nt, Artificial Sequence
  Synthetic
gucuaaauugaucauugugug

SEQ ID NO: 346775 - RNA, 22 nt, Artificial Sequence
  Synthetic
ugucuaaauugaucauugugug

SEQ ID NO: 346776 - RNA, 23 nt, Artificial Sequence
  Synthetic
uugucuaaauugaucauugugug

SEQ ID NO: 346777 - RNA, 24 nt, Artificial Sequence
  Synthetic
auugucuaaauugaucauugugug

SEQ ID NO: 346778 - RNA, 18 nt, Artificial Sequence
  Synthetic
uauguaugaccuugugug

SEQ ID NO: 346779 - RNA, 19 nt, Artificial Sequence
  Synthetic
uuauguaugaccuugugug

SEQ ID NO: 346780 - RNA, 20 nt, Artificial Sequence
  Synthetic
uuuauguaugaccuugugug

SEQ ID NO: 346781 - RNA, 21 nt, Artificial Sequence
  Synthetic
uuuuauguaugaccuugugug

SEQ ID NO: 346782 - RNA, 22 nt, Artificial Sequence
  Synthetic
auuuuauguaugaccuugugug

SEQ ID NO: 346783 - RNA, 23 nt, Artificial Sequence
  Synthetic
uauuuuauguaugaccuugugug

SEQ ID NO: 346784 - RNA, 24 nt, Artificial Sequence
  Synthetic
auauuuuauguaugaccuugugug

SEQ ID NO: 346785 - RNA, 18 nt, Artificial Sequence
  Synthetic
gauaaacuauaaauugug

SEQ ID NO: 346786 - RNA, 19 nt, Artificial Sequence
  Synthetic
ugauaaacuauaaauugug

SEQ ID NO: 346787 - RNA, 20 nt, Artificial Sequence
  Synthetic
cugauaaacuauaaauugug

SEQ ID NO: 346788 - RNA, 21 nt, Artificial Sequence
  Synthetic
ccugauaaacuauaaauugug

SEQ ID NO: 346789 - RNA, 22 nt, Artificial Sequence
  Synthetic
cccugauaaacuauaaauugug

SEQ ID NO: 346790 - RNA, 23 nt, Artificial Sequence
  Synthetic
acccugauaaacuauaaauugug

SEQ ID NO: 346791 - RNA, 24 nt, Artificial Sequence
  Synthetic
cacccugauaaacuauaaauugug

SEQ ID NO: 346792 - RNA, 18 nt, Artificial Sequence
  Synthetic
aucuaaaaaacaauugug

SEQ ID NO: 346793 - RNA, 19 nt, Artificial Sequence
  Synthetic
aaucuaaaaaacaauugug

SEQ ID NO: 346794 - RNA, 20 nt, Artificial Sequence
  Synthetic
aaaucuaaaaaacaauugug

SEQ ID NO: 346795 - RNA, 21 nt, Artificial Sequence
  Synthetic
uaaaucuaaaaaacaauugug

SEQ ID NO: 346796 - RNA, 22 nt, Artificial Sequence
  Synthetic
guaaaucuaaaaaacaauugug

SEQ ID NO: 346797 - RNA, 23 nt, Artificial Sequence
  Synthetic
cguaaaucuaaaaaacaauugug

SEQ ID NO: 346798 - RNA, 24 nt, Artificial Sequence
  Synthetic
gcguaaaucuaaaaaacaauugug

SEQ ID NO: 346799 - RNA, 18 nt, Artificial Sequence
  Synthetic
uaaaugauaacaauugug

SEQ ID NO: 346800 - RNA, 19 nt, Artificial Sequence
  Synthetic
guaaaugauaacaauugug

SEQ ID NO: 346801 - RNA, 20 nt, Artificial Sequence
  Synthetic
uguaaaugauaacaauugug

SEQ ID NO: 346802 - RNA, 21 nt, Artificial Sequence
  Synthetic
uuguaaaugauaacaauugug

SEQ ID NO: 346803 - RNA, 22 nt, Artificial Sequence
  Synthetic
auuguaaaugauaacaauugug

SEQ ID NO: 346804 - RNA, 23 nt, Artificial Sequence
  Synthetic
aauuguaaaugauaacaauugug

SEQ ID NO: 346805 - RNA, 24 nt, Artificial Sequence
  Synthetic
uaauuguaaaugauaacaauugug

SEQ ID NO: 346806 - RNA, 18 nt, Artificial Sequence
  Synthetic
acaucaaguguaauugug

SEQ ID NO: 346807 - RNA, 19 nt, Artificial Sequence
  Synthetic
aacaucaaguguaauugug

SEQ ID NO: 346808 - RNA, 20 nt, Artificial Sequence
  Synthetic
gaacaucaaguguaauugug

SEQ ID NO: 346809 - RNA, 21 nt, Artificial Sequence
  Synthetic
ugaacaucaaguguaauugug

SEQ ID NO: 346810 - RNA, 22 nt, Artificial Sequence
  Synthetic
gugaacaucaaguguaauugug

SEQ ID NO: 346811 - RNA, 23 nt, Artificial Sequence
  Synthetic
ugugaacaucaaguguaauugug

SEQ ID NO: 346812 - RNA, 24 nt, Artificial Sequence
  Synthetic
augugaacaucaaguguaauugug

SEQ ID NO: 346813 - RNA, 18 nt, Artificial Sequence
  Synthetic
cagacaugguccauugug

SEQ ID NO: 346814 - RNA, 19 nt, Artificial Sequence
  Synthetic
acagacaugguccauugug

SEQ ID NO: 346815 - RNA, 20 nt, Artificial Sequence
  Synthetic
uacagacaugguccauugug

SEQ ID NO: 346816 - RNA, 21 nt, Artificial Sequence
  Synthetic
uuacagacaugguccauugug

SEQ ID NO: 346817 - RNA, 22 nt, Artificial Sequence
  Synthetic
auuacagacaugguccauugug

SEQ ID NO: 346818 - RNA, 23 nt, Artificial Sequence
  Synthetic
aauuacagacaugguccauugug

SEQ ID NO: 346819 - RNA, 24 nt, Artificial Sequence
  Synthetic
aaauuacagacaugguccauugug

SEQ ID NO: 346820 - RNA, 18 nt, Artificial Sequence
  Synthetic
agggaucagagcauugug

SEQ ID NO: 346821 - RNA, 19 nt, Artificial Sequence
  Synthetic
uagggaucagagcauugug

SEQ ID NO: 346822 - RNA, 20 nt, Artificial Sequence
  Synthetic
cuagggaucagagcauugug

SEQ ID NO: 346823 - RNA, 21 nt, Artificial Sequence
  Synthetic
ucuagggaucagagcauugug

SEQ ID NO: 346824 - RNA, 22 nt, Artificial Sequence
  Synthetic
aucuagggaucagagcauugug

SEQ ID NO: 346825 - RNA, 23 nt, Artificial Sequence
  Synthetic
uaucuagggaucagagcauugug

SEQ ID NO: 346826 - RNA, 24 nt, Artificial Sequence
  Synthetic
auaucuagggaucagagcauugug

SEQ ID NO: 346827 - RNA, 18 nt, Artificial Sequence
  Synthetic
aaauaaaaaaagauugug

SEQ ID NO: 346828 - RNA, 19 nt, Artificial Sequence
  Synthetic
uaaauaaaaaaagauugug

SEQ ID NO: 346829 - RNA, 20 nt, Artificial Sequence
  Synthetic
cuaaauaaaaaaagauugug

SEQ ID NO: 346830 - RNA, 21 nt, Artificial Sequence
  Synthetic
acuaaauaaaaaaagauugug

SEQ ID NO: 346831 - RNA, 22 nt, Artificial Sequence
  Synthetic
cacuaaauaaaaaaagauugug

SEQ ID NO: 346832 - RNA, 23 nt, Artificial Sequence
  Synthetic
acacuaaauaaaaaaagauugug

SEQ ID NO: 346833 - RNA, 24 nt, Artificial Sequence
  Synthetic
aacacuaaauaaaaaaagauugug

SEQ ID NO: 346834 - RNA, 18 nt, Artificial Sequence
  Synthetic
agagguugaaagauugug

SEQ ID NO: 346835 - RNA, 19 nt, Artificial Sequence
  Synthetic
cagagguugaaagauugug

SEQ ID NO: 346836 - RNA, 20 nt, Artificial Sequence
  Synthetic
ucagagguugaaagauugug

SEQ ID NO: 346837 - RNA, 21 nt, Artificial Sequence
  Synthetic
uucagagguugaaagauugug

SEQ ID NO: 346838 - RNA, 22 nt, Artificial Sequence
  Synthetic
uuucagagguugaaagauugug

SEQ ID NO: 346839 - RNA, 23 nt, Artificial Sequence
  Synthetic
guuucagagguugaaagauugug

SEQ ID NO: 346840 - RNA, 24 nt, Artificial Sequence
  Synthetic
uguuucagagguugaaagauugug

SEQ ID NO: 346841 - RNA, 18 nt, Artificial Sequence
  Synthetic
gugaguguccagauugug

SEQ ID NO: 346842 - RNA, 19 nt, Artificial Sequence
  Synthetic
ugugaguguccagauugug

SEQ ID NO: 346843 - RNA, 20 nt, Artificial Sequence
  Synthetic
uugugaguguccagauugug

SEQ ID NO: 346844 - RNA, 21 nt, Artificial Sequence
  Synthetic
guugugaguguccagauugug

SEQ ID NO: 346845 - RNA, 22 nt, Artificial Sequence
  Synthetic
aguugugaguguccagauugug

SEQ ID NO: 346846 - RNA, 23 nt, Artificial Sequence
  Synthetic
gaguugugaguguccagauugug

SEQ ID NO: 346847 - RNA, 24 nt, Artificial Sequence
  Synthetic
ggaguugugaguguccagauugug

SEQ ID NO: 346848 - RNA, 18 nt, Artificial Sequence
  Synthetic
uuuuacaaggagauugug

SEQ ID NO: 346849 - RNA, 19 nt, Artificial Sequence
  Synthetic
cuuuuacaaggagauugug

SEQ ID NO: 346850 - RNA, 20 nt, Artificial Sequence
  Synthetic
gcuuuuacaaggagauugug

SEQ ID NO: 346851 - RNA, 21 nt, Artificial Sequence
  Synthetic
ugcuuuuacaaggagauugug

SEQ ID NO: 346852 - RNA, 22 nt, Artificial Sequence
  Synthetic
cugcuuuuacaaggagauugug

SEQ ID NO: 346853 - RNA, 23 nt, Artificial Sequence
  Synthetic
gcugcuuuuacaaggagauugug

SEQ ID NO: 346854 - RNA, 24 nt, Artificial Sequence
  Synthetic
agcugcuuuuacaaggagauugug

SEQ ID NO: 346855 - RNA, 18 nt, Artificial Sequence
  Synthetic
cauagacagcauauugug

SEQ ID NO: 346856 - RNA, 19 nt, Artificial Sequence
  Synthetic
ucauagacagcauauugug

SEQ ID NO: 346857 - RNA, 20 nt, Artificial Sequence
  Synthetic
uucauagacagcauauugug

SEQ ID NO: 346858 - RNA, 21 nt, Artificial Sequence
  Synthetic
auucauagacagcauauugug

SEQ ID NO: 346859 - RNA, 22 nt, Artificial Sequence
  Synthetic
aauucauagacagcauauugug

SEQ ID NO: 346860 - RNA, 23 nt, Artificial Sequence
  Synthetic
uaauucauagacagcauauugug

SEQ ID NO: 346861 - RNA, 24 nt, Artificial Sequence
  Synthetic
uuaauucauagacagcauauugug

SEQ ID NO: 346862 - RNA, 18 nt, Artificial Sequence
  Synthetic
gcuucuuuagauauugug

SEQ ID NO: 346863 - RNA, 19 nt, Artificial Sequence
  Synthetic
ggcuucuuuagauauugug

SEQ ID NO: 346864 - RNA, 20 nt, Artificial Sequence
  Synthetic
gggcuucuuuagauauugug

SEQ ID NO: 346865 - RNA, 21 nt, Artificial Sequence
  Synthetic
agggcuucuuuagauauugug

SEQ ID NO: 346866 - RNA, 22 nt, Artificial Sequence
  Synthetic
cagggcuucuuuagauauugug

SEQ ID NO: 346867 - RNA, 23 nt, Artificial Sequence
  Synthetic
gcagggcuucuuuagauauugug

SEQ ID NO: 346868 - RNA, 24 nt, Artificial Sequence
  Synthetic
ugcagggcuucuuuagauauugug

SEQ ID NO: 346869 - RNA, 18 nt, Artificial Sequence
  Synthetic
uuaaauaggauuauugug

SEQ ID NO: 346870 - RNA, 19 nt, Artificial Sequence
  Synthetic
guuaaauaggauuauugug

SEQ ID NO: 346871 - RNA, 20 nt, Artificial Sequence
  Synthetic
uguuaaauaggauuauugug

SEQ ID NO: 346872 - RNA, 21 nt, Artificial Sequence
  Synthetic
uuguuaaauaggauuauugug

SEQ ID NO: 346873 - RNA, 22 nt, Artificial Sequence
  Synthetic
auuguuaaauaggauuauugug

SEQ ID NO: 346874 - RNA, 23 nt, Artificial Sequence
  Synthetic
uauuguuaaauaggauuauugug

SEQ ID NO: 346875 - RNA, 24 nt, Artificial Sequence
  Synthetic
uuauuguuaaauaggauuauugug

SEQ ID NO: 346876 - RNA, 18 nt, Artificial Sequence
  Synthetic
agacugggaguuauugug

SEQ ID NO: 346877 - RNA, 19 nt, Artificial Sequence
  Synthetic
cagacugggaguuauugug

SEQ ID NO: 346878 - RNA, 20 nt, Artificial Sequence
  Synthetic
ccagacugggaguuauugug

SEQ ID NO: 346879 - RNA, 21 nt, Artificial Sequence
  Synthetic
gccagacugggaguuauugug

SEQ ID NO: 346880 - RNA, 22 nt, Artificial Sequence
  Synthetic
agccagacugggaguuauugug

SEQ ID NO: 346881 - RNA, 23 nt, Artificial Sequence
  Synthetic
cagccagacugggaguuauugug

SEQ ID NO: 346882 - RNA, 24 nt, Artificial Sequence
  Synthetic
gcagccagacugggaguuauugug

SEQ ID NO: 346883 - RNA, 18 nt, Artificial Sequence
  Synthetic
gcagcaagauuuauugug

SEQ ID NO: 346884 - RNA, 19 nt, Artificial Sequence
  Synthetic
agcagcaagauuuauugug

SEQ ID NO: 346885 - RNA, 20 nt, Artificial Sequence
  Synthetic
cagcagcaagauuuauugug

SEQ ID NO: 346886 - RNA, 21 nt, Artificial Sequence
  Synthetic
gcagcagcaagauuuauugug

SEQ ID NO: 346887 - RNA, 22 nt, Artificial Sequence
  Synthetic
agcagcagcaagauuuauugug

SEQ ID NO: 346888 - RNA, 23 nt, Artificial Sequence
  Synthetic
gagcagcagcaagauuuauugug

SEQ ID NO: 346889 - RNA, 24 nt, Artificial Sequence
  Synthetic
cgagcagcagcaagauuuauugug

SEQ ID NO: 346890 - RNA, 18 nt, Artificial Sequence
  Synthetic
uucuuaccuuuuauugug

SEQ ID NO: 346891 - RNA, 19 nt, Artificial Sequence
  Synthetic
uuucuuaccuuuuauugug

SEQ ID NO: 346892 - RNA, 20 nt, Artificial Sequence
  Synthetic
guuucuuaccuuuuauugug

SEQ ID NO: 346893 - RNA, 21 nt, Artificial Sequence
  Synthetic
gguuucuuaccuuuuauugug

SEQ ID NO: 346894 - RNA, 22 nt, Artificial Sequence
  Synthetic
ggguuucuuaccuuuuauugug

SEQ ID NO: 346895 - RNA, 23 nt, Artificial Sequence
  Synthetic
uggguuucuuaccuuuuauugug

SEQ ID NO: 346896 - RNA, 24 nt, Artificial Sequence
  Synthetic
auggguuucuuaccuuuuauugug

SEQ ID NO: 346897 - RNA, 18 nt, Artificial Sequence
  Synthetic
aauguuccuugacuugug

SEQ ID NO: 346898 - RNA, 19 nt, Artificial Sequence
  Synthetic
gaauguuccuugacuugug

SEQ ID NO: 346899 - RNA, 20 nt, Artificial Sequence
  Synthetic
agaauguuccuugacuugug

SEQ ID NO: 346900 - RNA, 21 nt, Artificial Sequence
  Synthetic
cagaauguuccuugacuugug

SEQ ID NO: 346901 - RNA, 22 nt, Artificial Sequence
  Synthetic
acagaauguuccuugacuugug

SEQ ID NO: 346902 - RNA, 23 nt, Artificial Sequence
  Synthetic
uacagaauguuccuugacuugug

SEQ ID NO: 346903 - RNA, 24 nt, Artificial Sequence
  Synthetic
guacagaauguuccuugacuugug

SEQ ID NO: 346904 - RNA, 18 nt, Artificial Sequence
  Synthetic
uuuauguaugaccuugug

SEQ ID NO: 346905 - RNA, 19 nt, Artificial Sequence
  Synthetic
uuuuauguaugaccuugug

SEQ ID NO: 346906 - RNA, 20 nt, Artificial Sequence
  Synthetic
auuuuauguaugaccuugug

SEQ ID NO: 346907 - RNA, 21 nt, Artificial Sequence
  Synthetic
uauuuuauguaugaccuugug

SEQ ID NO: 346908 - RNA, 22 nt, Artificial Sequence
  Synthetic
auauuuuauguaugaccuugug

SEQ ID NO: 346909 - RNA, 23 nt, Artificial Sequence
  Synthetic
uauauuuuauguaugaccuugug

SEQ ID NO: 346910 - RNA, 24 nt, Artificial Sequence
  Synthetic
auauauuuuauguaugaccuugug

SEQ ID NO: 346911 - RNA, 18 nt, Artificial Sequence
  Synthetic
auuggcuugguccuugug

SEQ ID NO: 346912 - RNA, 19 nt, Artificial Sequence
  Synthetic
uauuggcuugguccuugug

SEQ ID NO: 346913 - RNA, 20 nt, Artificial Sequence
  Synthetic
cuauuggcuugguccuugug

SEQ ID NO: 346914 - RNA, 21 nt, Artificial Sequence
  Synthetic
ucuauuggcuugguccuugug

SEQ ID NO: 346915 - RNA, 22 nt, Artificial Sequence
  Synthetic
gucuauuggcuugguccuugug

SEQ ID NO: 346916 - RNA, 23 nt, Artificial Sequence
  Synthetic
ugucuauuggcuugguccuugug

SEQ ID NO: 346917 - RNA, 24 nt, Artificial Sequence
  Synthetic
uugucuauuggcuugguccuugug

SEQ ID NO: 346918 - RNA, 18 nt, Artificial Sequence
  Synthetic
uaauacuuccugcuugug

SEQ ID NO: 346919 - RNA, 19 nt, Artificial Sequence
  Synthetic
auaauacuuccugcuugug

SEQ ID NO: 346920 - RNA, 20 nt, Artificial Sequence
  Synthetic
aauaauacuuccugcuugug

SEQ ID NO: 346921 - RNA, 21 nt, Artificial Sequence
  Synthetic
aaauaauacuuccugcuugug

SEQ ID NO: 346922 - RNA, 22 nt, Artificial Sequence
  Synthetic
aaaauaauacuuccugcuugug

SEQ ID NO: 346923 - RNA, 23 nt, Artificial Sequence
  Synthetic
gaaaauaauacuuccugcuugug

SEQ ID NO: 346924 - RNA, 24 nt, Artificial Sequence
  Synthetic
agaaaauaauacuuccugcuugug

SEQ ID NO: 346925 - RNA, 18 nt, Artificial Sequence
  Synthetic
acuuaggguuugcuugug

SEQ ID NO: 346926 - RNA, 19 nt, Artificial Sequence
  Synthetic
cacuuaggguuugcuugug

SEQ ID NO: 346927 - RNA, 20 nt, Artificial Sequence
  Synthetic
ccacuuaggguuugcuugug

SEQ ID NO: 346928 - RNA, 21 nt, Artificial Sequence
  Synthetic
cccacuuaggguuugcuugug

SEQ ID NO: 346929 - RNA, 22 nt, Artificial Sequence
  Synthetic
ucccacuuaggguuugcuugug

SEQ ID NO: 346930 - RNA, 23 nt, Artificial Sequence
  Synthetic
cucccacuuaggguuugcuugug

SEQ ID NO: 346931 - RNA, 24 nt, Artificial Sequence
  Synthetic
ucucccacuuaggguuugcuugug

SEQ ID NO: 346932 - RNA, 18 nt, Artificial Sequence
  Synthetic
caccauaaaaaucuugug

SEQ ID NO: 346933 - RNA, 19 nt, Artificial Sequence
  Synthetic
ccaccauaaaaaucuugug

SEQ ID NO: 346934 - RNA, 20 nt, Artificial Sequence
  Synthetic
accaccauaaaaaucuugug

SEQ ID NO: 346935 - RNA, 21 nt, Artificial Sequence
  Synthetic
caccaccauaaaaaucuugug

SEQ ID NO: 346936 - RNA, 22 nt, Artificial Sequence
  Synthetic
gcaccaccauaaaaaucuugug

SEQ ID NO: 346937 - RNA, 23 nt, Artificial Sequence
  Synthetic
agcaccaccauaaaaaucuugug

SEQ ID NO: 346938 - RNA, 24 nt, Artificial Sequence
  Synthetic
aagcaccaccauaaaaaucuugug

SEQ ID NO: 346939 - RNA, 18 nt, Artificial Sequence
  Synthetic
gaguuuggagcucuugug

SEQ ID NO: 346940 - RNA, 19 nt, Artificial Sequence
  Synthetic
ugaguuuggagcucuugug

SEQ ID NO: 346941 - RNA, 20 nt, Artificial Sequence
  Synthetic
uugaguuuggagcucuugug

SEQ ID NO: 346942 - RNA, 21 nt, Artificial Sequence
  Synthetic
guugaguuuggagcucuugug

SEQ ID NO: 346943 - RNA, 22 nt, Artificial Sequence
  Synthetic
uguugaguuuggagcucuugug

SEQ ID NO: 346944 - RNA, 23 nt, Artificial Sequence
  Synthetic
cuguugaguuuggagcucuugug

SEQ ID NO: 346945 - RNA, 24 nt, Artificial Sequence
  Synthetic
ucuguugaguuuggagcucuugug

SEQ ID NO: 346946 - RNA, 18 nt, Artificial Sequence
  Synthetic
aucuuuucggcucuugug

SEQ ID NO: 346947 - RNA, 19 nt, Artificial Sequence
  Synthetic
aaucuuuucggcucuugug

SEQ ID NO: 346948 - RNA, 20 nt, Artificial Sequence
  Synthetic
gaaucuuuucggcucuugug

SEQ ID NO: 346949 - RNA, 21 nt, Artificial Sequence
  Synthetic
agaaucuuuucggcucuugug

SEQ ID NO: 346950 - RNA, 22 nt, Artificial Sequence
  Synthetic
aagaaucuuuucggcucuugug

SEQ ID NO: 346951 - RNA, 23 nt, Artificial Sequence
  Synthetic
aaagaaucuuuucggcucuugug

SEQ ID NO: 346952 - RNA, 24 nt, Artificial Sequence
  Synthetic
aaaagaaucuuuucggcucuugug

SEQ ID NO: 346953 - RNA, 18 nt, Artificial Sequence
  Synthetic
aguuuauggagucuugug

SEQ ID NO: 346954 - RNA, 19 nt, Artificial Sequence
  Synthetic
uaguuuauggagucuugug

SEQ ID NO: 346955 - RNA, 20 nt, Artificial Sequence
  Synthetic
uuaguuuauggagucuugug

SEQ ID NO: 346956 - RNA, 21 nt, Artificial Sequence
  Synthetic
uuuaguuuauggagucuugug

SEQ ID NO: 346957 - RNA, 22 nt, Artificial Sequence
  Synthetic
cuuuaguuuauggagucuugug

SEQ ID NO: 346958 - RNA, 23 nt, Artificial Sequence
  Synthetic
ucuuuaguuuauggagucuugug

SEQ ID NO: 346959 - RNA, 24 nt, Artificial Sequence
  Synthetic
uucuuuaguuuauggagucuugug

SEQ ID NO: 346960 - RNA, 18 nt, Artificial Sequence
  Synthetic
cagaccuuuggucuugug

SEQ ID NO: 346961 - RNA, 19 nt, Artificial Sequence
  Synthetic
ucagaccuuuggucuugug

SEQ ID NO: 346962 - RNA, 20 nt, Artificial Sequence
  Synthetic
uucagaccuuuggucuugug

SEQ ID NO: 346963 - RNA, 21 nt, Artificial Sequence
  Synthetic
uuucagaccuuuggucuugug

SEQ ID NO: 346964 - RNA, 22 nt, Artificial Sequence
  Synthetic
uuuucagaccuuuggucuugug

SEQ ID NO: 346965 - RNA, 23 nt, Artificial Sequence
  Synthetic
uuuuucagaccuuuggucuugug

SEQ ID NO: 346966 - RNA, 24 nt, Artificial Sequence
  Synthetic
auuuuucagaccuuuggucuugug

SEQ ID NO: 346967 - RNA, 18 nt, Artificial Sequence
  Synthetic
uguugcuuuggucuugug

SEQ ID NO: 346968 - RNA, 19 nt, Artificial Sequence
  Synthetic
cuguugcuuuggucuugug

SEQ ID NO: 346969 - RNA, 20 nt, Artificial Sequence
  Synthetic
acuguugcuuuggucuugug

SEQ ID NO: 346970 - RNA, 21 nt, Artificial Sequence
  Synthetic
cacuguugcuuuggucuugug

SEQ ID NO: 346971 - RNA, 22 nt, Artificial Sequence
  Synthetic
gcacuguugcuuuggucuugug

SEQ ID NO: 346972 - RNA, 23 nt, Artificial Sequence
  Synthetic
ugcacuguugcuuuggucuugug

SEQ ID NO: 346973 - RNA, 24 nt, Artificial Sequence
  Synthetic
augcacuguugcuuuggucuugug

SEQ ID NO: 346974 - RNA, 18 nt, Artificial Sequence
  Synthetic
caggcugacugucuugug

SEQ ID NO: 346975 - RNA, 19 nt, Artificial Sequence
  Synthetic
acaggcugacugucuugug

SEQ ID NO: 346976 - RNA, 20 nt, Artificial Sequence
  Synthetic
gacaggcugacugucuugug

SEQ ID NO: 346977 - RNA, 21 nt, Artificial Sequence
  Synthetic
ggacaggcugacugucuugug

SEQ ID NO: 346978 - RNA, 22 nt, Artificial Sequence
  Synthetic
aggacaggcugacugucuugug

SEQ ID NO: 346979 - RNA, 23 nt, Artificial Sequence
  Synthetic
aaggacaggcugacugucuugug

SEQ ID NO: 346980 - RNA, 24 nt, Artificial Sequence
  Synthetic
aaaggacaggcugacugucuugug

SEQ ID NO: 346981 - RNA, 18 nt, Artificial Sequence
  Synthetic
aagaaauacaaaguugug

SEQ ID NO: 346982 - RNA, 19 nt, Artificial Sequence
  Synthetic
aaagaaauacaaaguugug

SEQ ID NO: 346983 - RNA, 20 nt, Artificial Sequence
  Synthetic
uaaagaaauacaaaguugug

SEQ ID NO: 346984 - RNA, 21 nt, Artificial Sequence
  Synthetic
cuaaagaaauacaaaguugug

SEQ ID NO: 346985 - RNA, 22 nt, Artificial Sequence
  Synthetic
ucuaaagaaauacaaaguugug

SEQ ID NO: 346986 - RNA, 23 nt, Artificial Sequence
  Synthetic
uucuaaagaaauacaaaguugug

SEQ ID NO: 346987 - RNA, 24 nt, Artificial Sequence
  Synthetic
uuucuaaagaaauacaaaguugug

SEQ ID NO: 346988 - RNA, 18 nt, Artificial Sequence
  Synthetic
aguugcaguuaaguugug

SEQ ID NO: 346989 - RNA, 19 nt, Artificial Sequence
  Synthetic
aaguugcaguuaaguugug

SEQ ID NO: 346990 - RNA, 20 nt, Artificial Sequence
  Synthetic
gaaguugcaguuaaguugug

SEQ ID NO: 346991 - RNA, 21 nt, Artificial Sequence
  Synthetic
ugaaguugcaguuaaguugug

SEQ ID NO: 346992 - RNA, 22 nt, Artificial Sequence
  Synthetic
uugaaguugcaguuaaguugug

SEQ ID NO: 346993 - RNA, 23 nt, Artificial Sequence
  Synthetic
uuugaaguugcaguuaaguugug

SEQ ID NO: 346994 - RNA, 24 nt, Artificial Sequence
  Synthetic
uuuugaaguugcaguuaaguugug

SEQ ID NO: 346995 - RNA, 18 nt, Artificial Sequence
  Synthetic
agauggcaaacaguugug

SEQ ID NO: 346996 - RNA, 19 nt, Artificial Sequence
  Synthetic
aagauggcaaacaguugug

SEQ ID NO: 346997 - RNA, 20 nt, Artificial Sequence
  Synthetic
caagauggcaaacaguugug

SEQ ID NO: 346998 - RNA, 21 nt, Artificial Sequence
  Synthetic
ucaagauggcaaacaguugug

SEQ ID NO: 346999 - RNA, 22 nt, Artificial Sequence
  Synthetic
uucaagauggcaaacaguugug

SEQ ID NO: 347000 - RNA, 23 nt, Artificial Sequence
  Synthetic
auucaagauggcaaacaguugug

SEQ ID NO: 347001 - RNA, 24 nt, Artificial Sequence
  Synthetic
aauucaagauggcaaacaguugug

SEQ ID NO: 347002 - RNA, 18 nt, Artificial Sequence
  Synthetic
uccaaaaugucaguugug

SEQ ID NO: 347003 - RNA, 19 nt, Artificial Sequence
  Synthetic
guccaaaaugucaguugug

SEQ ID NO: 347004 - RNA, 20 nt, Artificial Sequence
  Synthetic
uguccaaaaugucaguugug

SEQ ID NO: 347005 - RNA, 21 nt, Artificial Sequence
  Synthetic
cuguccaaaaugucaguugug

SEQ ID NO: 347006 - RNA, 22 nt, Artificial Sequence
  Synthetic
ucuguccaaaaugucaguugug

SEQ ID NO: 347007 - RNA, 23 nt, Artificial Sequence
  Synthetic
uucuguccaaaaugucaguugug

SEQ ID NO: 347008 - RNA, 24 nt, Artificial Sequence
  Synthetic
auucuguccaaaaugucaguugug

SEQ ID NO: 347009 - RNA, 18 nt, Artificial Sequence
  Synthetic
agggucaggguaguugug

SEQ ID NO: 347010 - RNA, 19 nt, Artificial Sequence
  Synthetic
cagggucaggguaguugug

SEQ ID NO: 347011 - RNA, 20 nt, Artificial Sequence
  Synthetic
ccagggucaggguaguugug

SEQ ID NO: 347012 - RNA, 21 nt, Artificial Sequence
  Synthetic
accagggucaggguaguugug

SEQ ID NO: 347013 - RNA, 22 nt, Artificial Sequence
  Synthetic
uaccagggucaggguaguugug

SEQ ID NO: 347014 - RNA, 23 nt, Artificial Sequence
  Synthetic
uuaccagggucaggguaguugug

SEQ ID NO: 347015 - RNA, 24 nt, Artificial Sequence
  Synthetic
guuaccagggucaggguaguugug

SEQ ID NO: 347016 - RNA, 18 nt, Artificial Sequence
  Synthetic
acacuuccccagguugug

SEQ ID NO: 347017 - RNA, 19 nt, Artificial Sequence
  Synthetic
gacacuuccccagguugug

SEQ ID NO: 347018 - RNA, 20 nt, Artificial Sequence
  Synthetic
agacacuuccccagguugug

SEQ ID NO: 347019 - RNA, 21 nt, Artificial Sequence
  Synthetic
aagacacuuccccagguugug

SEQ ID NO: 347020 - RNA, 22 nt, Artificial Sequence
  Synthetic
gaagacacuuccccagguugug

SEQ ID NO: 347021 - RNA, 23 nt, Artificial Sequence
  Synthetic
agaagacacuuccccagguugug

SEQ ID NO: 347022 - RNA, 24 nt, Artificial Sequence
  Synthetic
aagaagacacuuccccagguugug

SEQ ID NO: 347023 - RNA, 18 nt, Artificial Sequence
  Synthetic
cuggaggcauagguugug

SEQ ID NO: 347024 - RNA, 19 nt, Artificial Sequence
  Synthetic
ccuggaggcauagguugug

SEQ ID NO: 347025 - RNA, 20 nt, Artificial Sequence
  Synthetic
cccuggaggcauagguugug

SEQ ID NO: 347026 - RNA, 21 nt, Artificial Sequence
  Synthetic
acccuggaggcauagguugug

SEQ ID NO: 347027 - RNA, 22 nt, Artificial Sequence
  Synthetic
cacccuggaggcauagguugug

SEQ ID NO: 347028 - RNA, 23 nt, Artificial Sequence
  Synthetic
ccacccuggaggcauagguugug

SEQ ID NO: 347029 - RNA, 24 nt, Artificial Sequence
  Synthetic
uccacccuggaggcauagguugug

SEQ ID NO: 347030 - RNA, 18 nt, Artificial Sequence
  Synthetic
aaucagccggguguugug

SEQ ID NO: 347031 - RNA, 19 nt, Artificial Sequence
  Synthetic
aaaucagccggguguugug

SEQ ID NO: 347032 - RNA, 20 nt, Artificial Sequence
  Synthetic
aaaaucagccggguguugug

SEQ ID NO: 347033 - RNA, 21 nt, Artificial Sequence
  Synthetic
aaaaaucagccggguguugug

SEQ ID NO: 347034 - RNA, 22 nt, Artificial Sequence
  Synthetic
aaaaaaucagccggguguugug

SEQ ID NO: 347035 - RNA, 23 nt, Artificial Sequence
  Synthetic
caaaaaaucagccggguguugug

SEQ ID NO: 347036 - RNA, 24 nt, Artificial Sequence
  Synthetic
acaaaaaaucagccggguguugug

SEQ ID NO: 347037 - RNA, 18 nt, Artificial Sequence
  Synthetic
aaauacaucuuuguugug

SEQ ID NO: 347038 - RNA, 19 nt, Artificial Sequence
  Synthetic
caaauacaucuuuguugug

SEQ ID NO: 347039 - RNA, 20 nt, Artificial Sequence
  Synthetic
ccaaauacaucuuuguugug

SEQ ID NO: 347040 - RNA, 21 nt, Artificial Sequence
  Synthetic
gccaaauacaucuuuguugug

SEQ ID NO: 347041 - RNA, 22 nt, Artificial Sequence
  Synthetic
agccaaauacaucuuuguugug

SEQ ID NO: 347042 - RNA, 23 nt, Artificial Sequence
  Synthetic
gagccaaauacaucuuuguugug

SEQ ID NO: 347043 - RNA, 24 nt, Artificial Sequence
  Synthetic
ugagccaaauacaucuuuguugug

SEQ ID NO: 347044 - RNA, 18 nt, Artificial Sequence
  Synthetic
ccaaugggaaaauuugug

SEQ ID NO: 347045 - RNA, 19 nt, Artificial Sequence
  Synthetic
cccaaugggaaaauuugug

SEQ ID NO: 347046 - RNA, 20 nt, Artificial Sequence
  Synthetic
acccaaugggaaaauuugug

SEQ ID NO: 347047 - RNA, 21 nt, Artificial Sequence
  Synthetic
cacccaaugggaaaauuugug

SEQ ID NO: 347048 - RNA, 22 nt, Artificial Sequence
  Synthetic
acacccaaugggaaaauuugug

SEQ ID NO: 347049 - RNA, 23 nt, Artificial Sequence
  Synthetic
cacacccaaugggaaaauuugug

SEQ ID NO: 347050 - RNA, 24 nt, Artificial Sequence
  Synthetic
acacacccaaugggaaaauuugug

SEQ ID NO: 347051 - RNA, 18 nt, Artificial Sequence
  Synthetic
gauccauucuaauuugug

SEQ ID NO: 347052 - RNA, 19 nt, Artificial Sequence
  Synthetic
agauccauucuaauuugug

SEQ ID NO: 347053 - RNA, 20 nt, Artificial Sequence
  Synthetic
gagauccauucuaauuugug

SEQ ID NO: 347054 - RNA, 21 nt, Artificial Sequence
  Synthetic
ugagauccauucuaauuugug

SEQ ID NO: 347055 - RNA, 22 nt, Artificial Sequence
  Synthetic
cugagauccauucuaauuugug

SEQ ID NO: 347056 - RNA, 23 nt, Artificial Sequence
  Synthetic
gcugagauccauucuaauuugug

SEQ ID NO: 347057 - RNA, 24 nt, Artificial Sequence
  Synthetic
agcugagauccauucuaauuugug

SEQ ID NO: 347058 - RNA, 18 nt, Artificial Sequence
  Synthetic
ccauggaaaccauuugug

SEQ ID NO: 347059 - RNA, 19 nt, Artificial Sequence
  Synthetic
uccauggaaaccauuugug

SEQ ID NO: 347060 - RNA, 20 nt, Artificial Sequence
  Synthetic
cuccauggaaaccauuugug

SEQ ID NO: 347061 - RNA, 21 nt, Artificial Sequence
  Synthetic
ucuccauggaaaccauuugug

SEQ ID NO: 347062 - RNA, 22 nt, Artificial Sequence
  Synthetic
uucuccauggaaaccauuugug

SEQ ID NO: 347063 - RNA, 23 nt, Artificial Sequence
  Synthetic
uuucuccauggaaaccauuugug

SEQ ID NO: 347064 - RNA, 24 nt, Artificial Sequence
  Synthetic
auuucuccauggaaaccauuugug

SEQ ID NO: 347065 - RNA, 18 nt, Artificial Sequence
  Synthetic
auaacucugugauuugug

SEQ ID NO: 347066 - RNA, 19 nt, Artificial Sequence
  Synthetic
aauaacucugugauuugug

SEQ ID NO: 347067 - RNA, 20 nt, Artificial Sequence
  Synthetic
aaauaacucugugauuugug

SEQ ID NO: 347068 - RNA, 21 nt, Artificial Sequence
  Synthetic
aaaauaacucugugauuugug

SEQ ID NO: 347069 - RNA, 22 nt, Artificial Sequence
  Synthetic
uaaaauaacucugugauuugug

SEQ ID NO: 347070 - RNA, 23 nt, Artificial Sequence
  Synthetic
guaaaauaacucugugauuugug

SEQ ID NO: 347071 - RNA, 24 nt, Artificial Sequence
  Synthetic
aguaaaauaacucugugauuugug

SEQ ID NO: 347072 - RNA, 18 nt, Artificial Sequence
  Synthetic
uuuacaucaauauuugug

SEQ ID NO: 347073 - RNA, 19 nt, Artificial Sequence
  Synthetic
guuuacaucaauauuugug

SEQ ID NO: 347074 - RNA, 20 nt, Artificial Sequence
  Synthetic
aguuuacaucaauauuugug

SEQ ID NO: 347075 - RNA, 21 nt, Artificial Sequence
  Synthetic
aaguuuacaucaauauuugug

SEQ ID NO: 347076 - RNA, 22 nt, Artificial Sequence
  Synthetic
aaaguuuacaucaauauuugug

SEQ ID NO: 347077 - RNA, 23 nt, Artificial Sequence
  Synthetic
aaaaguuuacaucaauauuugug

SEQ ID NO: 347078 - RNA, 24 nt, Artificial Sequence
  Synthetic
uaaaaguuuacaucaauauuugug

SEQ ID NO: 347079 - RNA, 18 nt, Artificial Sequence
  Synthetic
auuggucauuuauuugug

SEQ ID NO: 347080 - RNA, 19 nt, Artificial Sequence
  Synthetic
cauuggucauuuauuugug

SEQ ID NO: 347081 - RNA, 20 nt, Artificial Sequence
  Synthetic
acauuggucauuuauuugug

SEQ ID NO: 347082 - RNA, 21 nt, Artificial Sequence
  Synthetic
aacauuggucauuuauuugug

SEQ ID NO: 347083 - RNA, 22 nt, Artificial Sequence
  Synthetic
aaacauuggucauuuauuugug

SEQ ID NO: 347084 - RNA, 23 nt, Artificial Sequence
  Synthetic
caaacauuggucauuuauuugug

SEQ ID NO: 347085 - RNA, 24 nt, Artificial Sequence
  Synthetic
ucaaacauuggucauuuauuugug

SEQ ID NO: 347086 - RNA, 18 nt, Artificial Sequence
  Synthetic
acauacacuuuauuugug

SEQ ID NO: 347087 - RNA, 19 nt, Artificial Sequence
  Synthetic
cacauacacuuuauuugug

SEQ ID NO: 347088 - RNA, 20 nt, Artificial Sequence
  Synthetic
ucacauacacuuuauuugug

SEQ ID NO: 347089 - RNA, 21 nt, Artificial Sequence
  Synthetic
cucacauacacuuuauuugug

SEQ ID NO: 347090 - RNA, 22 nt, Artificial Sequence
  Synthetic
ccucacauacacuuuauuugug

SEQ ID NO: 347091 - RNA, 23 nt, Artificial Sequence
  Synthetic
accucacauacacuuuauuugug

SEQ ID NO: 347092 - RNA, 24 nt, Artificial Sequence
  Synthetic
uaccucacauacacuuuauuugug

SEQ ID NO: 347093 - RNA, 18 nt, Artificial Sequence
  Synthetic
uuguuuuugaacuuugug

SEQ ID NO: 347094 - RNA, 19 nt, Artificial Sequence
  Synthetic
uuuguuuuugaacuuugug

SEQ ID NO: 347095 - RNA, 20 nt, Artificial Sequence
  Synthetic
guuuguuuuugaacuuugug

SEQ ID NO: 347096 - RNA, 21 nt, Artificial Sequence
  Synthetic
uguuuguuuuugaacuuugug

SEQ ID NO: 347097 - RNA, 22 nt, Artificial Sequence
  Synthetic
uuguuuguuuuugaacuuugug

SEQ ID NO: 347098 - RNA, 23 nt, Artificial Sequence
  Synthetic
auuguuuguuuuugaacuuugug

SEQ ID NO: 347099 - RNA, 24 nt, Artificial Sequence
  Synthetic
uauuguuuguuuuugaacuuugug

SEQ ID NO: 347100 - RNA, 18 nt, Artificial Sequence
  Synthetic
uauuucuccuccuuugug

SEQ ID NO: 347101 - RNA, 19 nt, Artificial Sequence
  Synthetic
auauuucuccuccuuugug

SEQ ID NO: 347102 - RNA, 20 nt, Artificial Sequence
  Synthetic
gauauuucuccuccuuugug

SEQ ID NO: 347103 - RNA, 21 nt, Artificial Sequence
  Synthetic
agauauuucuccuccuuugug

SEQ ID NO: 347104 - RNA, 22 nt, Artificial Sequence
  Synthetic
cagauauuucuccuccuuugug

SEQ ID NO: 347105 - RNA, 23 nt, Artificial Sequence
  Synthetic
acagauauuucuccuccuuugug

SEQ ID NO: 347106 - RNA, 24 nt, Artificial Sequence
  Synthetic
uacagauauuucuccuccuuugug

SEQ ID NO: 347107 - RNA, 18 nt, Artificial Sequence
  Synthetic
caauggcaaagcuuugug

SEQ ID NO: 347108 - RNA, 19 nt, Artificial Sequence
  Synthetic
gcaauggcaaagcuuugug

SEQ ID NO: 347109 - RNA, 20 nt, Artificial Sequence
  Synthetic
agcaauggcaaagcuuugug

SEQ ID NO: 347110 - RNA, 21 nt, Artificial Sequence
  Synthetic
uagcaauggcaaagcuuugug

SEQ ID NO: 347111 - RNA, 22 nt, Artificial Sequence
  Synthetic
cuagcaauggcaaagcuuugug

SEQ ID NO: 347112 - RNA, 23 nt, Artificial Sequence
  Synthetic
acuagcaauggcaaagcuuugug

SEQ ID NO: 347113 - RNA, 24 nt, Artificial Sequence
  Synthetic
cacuagcaauggcaaagcuuugug

SEQ ID NO: 347114 - RNA, 18 nt, Artificial Sequence
  Synthetic
agcccauucagcuuugug

SEQ ID NO: 347115 - RNA, 19 nt, Artificial Sequence
  Synthetic
aagcccauucagcuuugug

SEQ ID NO: 347116 - RNA, 20 nt, Artificial Sequence
  Synthetic
gaagcccauucagcuuugug

SEQ ID NO: 347117 - RNA, 21 nt, Artificial Sequence
  Synthetic
ugaagcccauucagcuuugug

SEQ ID NO: 347118 - RNA, 22 nt, Artificial Sequence
  Synthetic
gugaagcccauucagcuuugug

SEQ ID NO: 347119 - RNA, 23 nt, Artificial Sequence
  Synthetic
ugugaagcccauucagcuuugug

SEQ ID NO: 347120 - RNA, 24 nt, Artificial Sequence
  Synthetic
uugugaagcccauucagcuuugug

SEQ ID NO: 347121 - RNA, 18 nt, Artificial Sequence
  Synthetic
accuucuucagcuuugug

SEQ ID NO: 347122 - RNA, 19 nt, Artificial Sequence
  Synthetic
caccuucuucagcuuugug

SEQ ID NO: 347123 - RNA, 20 nt, Artificial Sequence
  Synthetic
acaccuucuucagcuuugug

SEQ ID NO: 347124 - RNA, 21 nt, Artificial Sequence
  Synthetic
cacaccuucuucagcuuugug

SEQ ID NO: 347125 - RNA, 22 nt, Artificial Sequence
  Synthetic
ucacaccuucuucagcuuugug

SEQ ID NO: 347126 - RNA, 23 nt, Artificial Sequence
  Synthetic
uucacaccuucuucagcuuugug

SEQ ID NO: 347127 - RNA, 24 nt, Artificial Sequence
  Synthetic
auucacaccuucuucagcuuugug

SEQ ID NO: 347128 - RNA, 18 nt, Artificial Sequence
  Synthetic
augugcuugugcuuugug

SEQ ID NO: 347129 - RNA, 19 nt, Artificial Sequence
  Synthetic
uaugugcuugugcuuugug

SEQ ID NO: 347130 - RNA, 20 nt, Artificial Sequence
  Synthetic
cuaugugcuugugcuuugug

SEQ ID NO: 347131 - RNA, 21 nt, Artificial Sequence
  Synthetic
ccuaugugcuugugcuuugug

SEQ ID NO: 347132 - RNA, 22 nt, Artificial Sequence
  Synthetic
uccuaugugcuugugcuuugug

SEQ ID NO: 347133 - RNA, 23 nt, Artificial Sequence
  Synthetic
guccuaugugcuugugcuuugug

SEQ ID NO: 347134 - RNA, 24 nt, Artificial Sequence
  Synthetic
uguccuaugugcuugugcuuugug

SEQ ID NO: 347135 - RNA, 18 nt, Artificial Sequence
  Synthetic
auuuaccauugcuuugug

SEQ ID NO: 347136 - RNA, 19 nt, Artificial Sequence
  Synthetic
cauuuaccauugcuuugug

SEQ ID NO: 347137 - RNA, 20 nt, Artificial Sequence
  Synthetic
acauuuaccauugcuuugug

SEQ ID NO: 347138 - RNA, 21 nt, Artificial Sequence
  Synthetic
aacauuuaccauugcuuugug

SEQ ID NO: 347139 - RNA, 22 nt, Artificial Sequence
  Synthetic
aaacauuuaccauugcuuugug

SEQ ID NO: 347140 - RNA, 23 nt, Artificial Sequence
  Synthetic
caaacauuuaccauugcuuugug

SEQ ID NO: 347141 - RNA, 24 nt, Artificial Sequence
  Synthetic
ucaaacauuuaccauugcuuugug

SEQ ID NO: 347142 - RNA, 18 nt, Artificial Sequence
  Synthetic
uuuaauggugcguuugug

SEQ ID NO: 347143 - RNA, 19 nt, Artificial Sequence
  Synthetic
guuuaauggugcguuugug

SEQ ID NO: 347144 - RNA, 20 nt, Artificial Sequence
  Synthetic
gguuuaauggugcguuugug

SEQ ID NO: 347145 - RNA, 21 nt, Artificial Sequence
  Synthetic
agguuuaauggugcguuugug

SEQ ID NO: 347146 - RNA, 22 nt, Artificial Sequence
  Synthetic
cagguuuaauggugcguuugug

SEQ ID NO: 347147 - RNA, 23 nt, Artificial Sequence
  Synthetic
acagguuuaauggugcguuugug

SEQ ID NO: 347148 - RNA, 24 nt, Artificial Sequence
  Synthetic
uacagguuuaauggugcguuugug

SEQ ID NO: 347149 - RNA, 18 nt, Artificial Sequence
  Synthetic
uuaauuauccauuuugug

SEQ ID NO: 347150 - RNA, 19 nt, Artificial Sequence
  Synthetic
guuaauuauccauuuugug

SEQ ID NO: 347151 - RNA, 20 nt, Artificial Sequence
  Synthetic
uguuaauuauccauuuugug

SEQ ID NO: 347152 - RNA, 21 nt, Artificial Sequence
  Synthetic
auguuaauuauccauuuugug

SEQ ID NO: 347153 - RNA, 22 nt, Artificial Sequence
  Synthetic
gauguuaauuauccauuuugug

SEQ ID NO: 347154 - RNA, 23 nt, Artificial Sequence
  Synthetic
agauguuaauuauccauuuugug

SEQ ID NO: 347155 - RNA, 24 nt, Artificial Sequence
  Synthetic
uagauguuaauuauccauuuugug

SEQ ID NO: 347156 - RNA, 18 nt, Artificial Sequence
  Synthetic
ugauaucagacuuuugug

SEQ ID NO: 347157 - RNA, 19 nt, Artificial Sequence
  Synthetic
augauaucagacuuuugug

SEQ ID NO: 347158 - RNA, 20 nt, Artificial Sequence
  Synthetic
aaugauaucagacuuuugug

SEQ ID NO: 347159 - RNA, 21 nt, Artificial Sequence
  Synthetic
caaugauaucagacuuuugug

SEQ ID NO: 347160 - RNA, 22 nt, Artificial Sequence
  Synthetic
ccaaugauaucagacuuuugug

SEQ ID NO: 347161 - RNA, 23 nt, Artificial Sequence
  Synthetic
gccaaugauaucagacuuuugug

SEQ ID NO: 347162 - RNA, 24 nt, Artificial Sequence
  Synthetic
agccaaugauaucagacuuuugug

SEQ ID NO: 347163 - RNA, 18 nt, Artificial Sequence
  Synthetic
augucaacugguuuugug

SEQ ID NO: 347164 - RNA, 19 nt, Artificial Sequence
  Synthetic
caugucaacugguuuugug

SEQ ID NO: 347165 - RNA, 20 nt, Artificial Sequence
  Synthetic
ccaugucaacugguuuugug

SEQ ID NO: 347166 - RNA, 21 nt, Artificial Sequence
  Synthetic
accaugucaacugguuuugug

SEQ ID NO: 347167 - RNA, 22 nt, Artificial Sequence
  Synthetic
gaccaugucaacugguuuugug

SEQ ID NO: 347168 - RNA, 23 nt, Artificial Sequence
  Synthetic
agaccaugucaacugguuuugug

SEQ ID NO: 347169 - RNA, 24 nt, Artificial Sequence
  Synthetic
uagaccaugucaacugguuuugug

SEQ ID NO: 347170 - RNA, 18 nt, Artificial Sequence
  Synthetic
auacuucucauuuuugug

SEQ ID NO: 347171 - RNA, 19 nt, Artificial Sequence
  Synthetic
aauacuucucauuuuugug

SEQ ID NO: 347172 - RNA, 20 nt, Artificial Sequence
  Synthetic
aaauacuucucauuuuugug

SEQ ID NO: 347173 - RNA, 21 nt, Artificial Sequence
  Synthetic
caaauacuucucauuuuugug

SEQ ID NO: 347174 - RNA, 22 nt, Artificial Sequence
  Synthetic
ucaaauacuucucauuuuugug

SEQ ID NO: 347175 - RNA, 23 nt, Artificial Sequence
  Synthetic
cucaaauacuucucauuuuugug

SEQ ID NO: 347176 - RNA, 24 nt, Artificial Sequence
  Synthetic
ccucaaauacuucucauuuuugug

SEQ ID NO: 347177 - RNA, 18 nt, Artificial Sequence
  Synthetic
aaacaucauaaaaaauug

SEQ ID NO: 347178 - RNA, 19 nt, Artificial Sequence
  Synthetic
aaaacaucauaaaaaauug

SEQ ID NO: 347179 - RNA, 20 nt, Artificial Sequence
  Synthetic
aaaaacaucauaaaaaauug

SEQ ID NO: 347180 - RNA, 21 nt, Artificial Sequence
  Synthetic
gaaaaacaucauaaaaaauug

SEQ ID NO: 347181 - RNA, 22 nt, Artificial Sequence
  Synthetic
agaaaaacaucauaaaaaauug

SEQ ID NO: 347182 - RNA, 23 nt, Artificial Sequence
  Synthetic
gagaaaaacaucauaaaaaauug

SEQ ID NO: 347183 - RNA, 24 nt, Artificial Sequence
  Synthetic
agagaaaaacaucauaaaaaauug

SEQ ID NO: 347184 - RNA, 18 nt, Artificial Sequence
  Synthetic
cugcgaccaccaaaauug

SEQ ID NO: 347185 - RNA, 19 nt, Artificial Sequence
  Synthetic
acugcgaccaccaaaauug

SEQ ID NO: 347186 - RNA, 20 nt, Artificial Sequence
  Synthetic
uacugcgaccaccaaaauug

SEQ ID NO: 347187 - RNA, 21 nt, Artificial Sequence
  Synthetic
uuacugcgaccaccaaaauug

SEQ ID NO: 347188 - RNA, 22 nt, Artificial Sequence
  Synthetic
uuuacugcgaccaccaaaauug

SEQ ID NO: 347189 - RNA, 23 nt, Artificial Sequence
  Synthetic
guuuacugcgaccaccaaaauug

SEQ ID NO: 347190 - RNA, 24 nt, Artificial Sequence
  Synthetic
uguuuacugcgaccaccaaaauug

SEQ ID NO: 347191 - RNA, 18 nt, Artificial Sequence
  Synthetic
ucaaguuauagaaaauug

SEQ ID NO: 347192 - RNA, 19 nt, Artificial Sequence
  Synthetic
cucaaguuauagaaaauug

SEQ ID NO: 347193 - RNA, 20 nt, Artificial Sequence
  Synthetic
ucucaaguuauagaaaauug

SEQ ID NO: 347194 - RNA, 21 nt, Artificial Sequence
  Synthetic
cucucaaguuauagaaaauug

SEQ ID NO: 347195 - RNA, 22 nt, Artificial Sequence
  Synthetic
gcucucaaguuauagaaaauug

SEQ ID NO: 347196 - RNA, 23 nt, Artificial Sequence
  Synthetic
agcucucaaguuauagaaaauug

SEQ ID NO: 347197 - RNA, 24 nt, Artificial Sequence
  Synthetic
cagcucucaaguuauagaaaauug

SEQ ID NO: 347198 - RNA, 18 nt, Artificial Sequence
  Synthetic
guaaaauuuagaaaauug

SEQ ID NO: 347199 - RNA, 19 nt, Artificial Sequence
  Synthetic
uguaaaauuuagaaaauug

SEQ ID NO: 347200 - RNA, 20 nt, Artificial Sequence
  Synthetic
auguaaaauuuagaaaauug

SEQ ID NO: 347201 - RNA, 21 nt, Artificial Sequence
  Synthetic
cauguaaaauuuagaaaauug

SEQ ID NO: 347202 - RNA, 22 nt, Artificial Sequence
  Synthetic
acauguaaaauuuagaaaauug

SEQ ID NO: 347203 - RNA, 23 nt, Artificial Sequence
  Synthetic
aacauguaaaauuuagaaaauug

SEQ ID NO: 347204 - RNA, 24 nt, Artificial Sequence
  Synthetic
uaacauguaaaauuuagaaaauug

SEQ ID NO: 347205 - RNA, 18 nt, Artificial Sequence
  Synthetic
uaaaauaaaauaaaauug

SEQ ID NO: 347206 - RNA, 19 nt, Artificial Sequence
  Synthetic
auaaaauaaaauaaaauug

SEQ ID NO: 347207 - RNA, 20 nt, Artificial Sequence
  Synthetic
aauaaaauaaaauaaaauug

SEQ ID NO: 347208 - RNA, 21 nt, Artificial Sequence
  Synthetic
aaauaaaauaaaauaaaauug

SEQ ID NO: 347209 - RNA, 22 nt, Artificial Sequence
  Synthetic
aaaauaaaauaaaauaaaauug

SEQ ID NO: 347210 - RNA, 23 nt, Artificial Sequence
  Synthetic
uaaaauaaaauaaaauaaaauug

SEQ ID NO: 347211 - RNA, 24 nt, Artificial Sequence
  Synthetic
uuaaaauaaaauaaaauaaaauug

SEQ ID NO: 347212 - RNA, 18 nt, Artificial Sequence
  Synthetic
guaacugaaauaaaauug

SEQ ID NO: 347213 - RNA, 19 nt, Artificial Sequence
  Synthetic
aguaacugaaauaaaauug

SEQ ID NO: 347214 - RNA, 20 nt, Artificial Sequence
  Synthetic
caguaacugaaauaaaauug

SEQ ID NO: 347215 - RNA, 21 nt, Artificial Sequence
  Synthetic
ucaguaacugaaauaaaauug

SEQ ID NO: 347216 - RNA, 22 nt, Artificial Sequence
  Synthetic
cucaguaacugaaauaaaauug

SEQ ID NO: 347217 - RNA, 23 nt, Artificial Sequence
  Synthetic
acucaguaacugaaauaaaauug

SEQ ID NO: 347218 - RNA, 24 nt, Artificial Sequence
  Synthetic
gacucaguaacugaaauaaaauug

SEQ ID NO: 347219 - RNA, 18 nt, Artificial Sequence
  Synthetic
uugagaagaauaaaauug

SEQ ID NO: 347220 - RNA, 19 nt, Artificial Sequence
  Synthetic
uuugagaagaauaaaauug

SEQ ID NO: 347221 - RNA, 20 nt, Artificial Sequence
  Synthetic
auuugagaagaauaaaauug

SEQ ID NO: 347222 - RNA, 21 nt, Artificial Sequence
  Synthetic
cauuugagaagaauaaaauug

SEQ ID NO: 347223 - RNA, 22 nt, Artificial Sequence
  Synthetic
ucauuugagaagaauaaaauug

SEQ ID NO: 347224 - RNA, 23 nt, Artificial Sequence
  Synthetic
uucauuugagaagaauaaaauug

SEQ ID NO: 347225 - RNA, 24 nt, Artificial Sequence
  Synthetic
uuucauuugagaagaauaaaauug

SEQ ID NO: 347226 - RNA, 18 nt, Artificial Sequence
  Synthetic
uacauuaaccuaaaauug

SEQ ID NO: 347227 - RNA, 19 nt, Artificial Sequence
  Synthetic
auacauuaaccuaaaauug

SEQ ID NO: 347228 - RNA, 20 nt, Artificial Sequence
  Synthetic
aauacauuaaccuaaaauug

SEQ ID NO: 347229 - RNA, 21 nt, Artificial Sequence
  Synthetic
uaauacauuaaccuaaaauug

SEQ ID NO: 347230 - RNA, 22 nt, Artificial Sequence
  Synthetic
auaauacauuaaccuaaaauug

SEQ ID NO: 347231 - RNA, 23 nt, Artificial Sequence
  Synthetic
aauaauacauuaaccuaaaauug

SEQ ID NO: 347232 - RNA, 24 nt, Artificial Sequence
  Synthetic
aaauaauacauuaaccuaaaauug

SEQ ID NO: 347233 - RNA, 18 nt, Artificial Sequence
  Synthetic
uagagucuauuaaaauug

SEQ ID NO: 347234 - RNA, 19 nt, Artificial Sequence
  Synthetic
auagagucuauuaaaauug

SEQ ID NO: 347235 - RNA, 20 nt, Artificial Sequence
  Synthetic
aauagagucuauuaaaauug

SEQ ID NO: 347236 - RNA, 21 nt, Artificial Sequence
  Synthetic
caauagagucuauuaaaauug

SEQ ID NO: 347237 - RNA, 22 nt, Artificial Sequence
  Synthetic
acaauagagucuauuaaaauug

SEQ ID NO: 347238 - RNA, 23 nt, Artificial Sequence
  Synthetic
gacaauagagucuauuaaaauug

SEQ ID NO: 347239 - RNA, 24 nt, Artificial Sequence
  Synthetic
agacaauagagucuauuaaaauug

SEQ ID NO: 347240 - RNA, 18 nt, Artificial Sequence
  Synthetic
guuaaagauuuaaaauug

SEQ ID NO: 347241 - RNA, 19 nt, Artificial Sequence
  Synthetic
gguuaaagauuuaaaauug

SEQ ID NO: 347242 - RNA, 20 nt, Artificial Sequence
  Synthetic
ggguuaaagauuuaaaauug

SEQ ID NO: 347243 - RNA, 21 nt, Artificial Sequence
  Synthetic
uggguuaaagauuuaaaauug

SEQ ID NO: 347244 - RNA, 22 nt, Artificial Sequence
  Synthetic
cuggguuaaagauuuaaaauug

SEQ ID NO: 347245 - RNA, 23 nt, Artificial Sequence
  Synthetic
ucuggguuaaagauuuaaaauug

SEQ ID NO: 347246 - RNA, 24 nt, Artificial Sequence
  Synthetic
aucuggguuaaagauuuaaaauug

SEQ ID NO: 347247 - RNA, 18 nt, Artificial Sequence
  Synthetic
ccuaaaccuuacaaauug

SEQ ID NO: 347248 - RNA, 19 nt, Artificial Sequence
  Synthetic
accuaaaccuuacaaauug

SEQ ID NO: 347249 - RNA, 20 nt, Artificial Sequence
  Synthetic
uaccuaaaccuuacaaauug

SEQ ID NO: 347250 - RNA, 21 nt, Artificial Sequence
  Synthetic
uuaccuaaaccuuacaaauug

SEQ ID NO: 347251 - RNA, 22 nt, Artificial Sequence
  Synthetic
uuuaccuaaaccuuacaaauug

SEQ ID NO: 347252 - RNA, 23 nt, Artificial Sequence
  Synthetic
uuuuaccuaaaccuuacaaauug

SEQ ID NO: 347253 - RNA, 24 nt, Artificial Sequence
  Synthetic
guuuuaccuaaaccuuacaaauug

SEQ ID NO: 347254 - RNA, 18 nt, Artificial Sequence
  Synthetic
augagggagaagaaauug

SEQ ID NO: 347255 - RNA, 19 nt, Artificial Sequence
  Synthetic
uaugagggagaagaaauug

SEQ ID NO: 347256 - RNA, 20 nt, Artificial Sequence
  Synthetic
uuaugagggagaagaaauug

SEQ ID NO: 347257 - RNA, 21 nt, Artificial Sequence
  Synthetic
auuaugagggagaagaaauug

SEQ ID NO: 347258 - RNA, 22 nt, Artificial Sequence
  Synthetic
aauuaugagggagaagaaauug

SEQ ID NO: 347259 - RNA, 23 nt, Artificial Sequence
  Synthetic
gaauuaugagggagaagaaauug

SEQ ID NO: 347260 - RNA, 24 nt, Artificial Sequence
  Synthetic
agaauuaugagggagaagaaauug

SEQ ID NO: 347261 - RNA, 18 nt, Artificial Sequence
  Synthetic
augaugaggaagaaauug

SEQ ID NO: 347262 - RNA, 19 nt, Artificial Sequence
  Synthetic
uaugaugaggaagaaauug

SEQ ID NO: 347263 - RNA, 20 nt, Artificial Sequence
  Synthetic
auaugaugaggaagaaauug

SEQ ID NO: 347264 - RNA, 21 nt, Artificial Sequence
  Synthetic
uauaugaugaggaagaaauug

SEQ ID NO: 347265 - RNA, 22 nt, Artificial Sequence
  Synthetic
guauaugaugaggaagaaauug

SEQ ID NO: 347266 - RNA, 23 nt, Artificial Sequence
  Synthetic
gguauaugaugaggaagaaauug

SEQ ID NO: 347267 - RNA, 24 nt, Artificial Sequence
  Synthetic
ggguauaugaugaggaagaaauug

SEQ ID NO: 347268 - RNA, 18 nt, Artificial Sequence
  Synthetic
acuugcccagagaaauug

SEQ ID NO: 347269 - RNA, 19 nt, Artificial Sequence
  Synthetic
aacuugcccagagaaauug

SEQ ID NO: 347270 - RNA, 20 nt, Artificial Sequence
  Synthetic
aaacuugcccagagaaauug

SEQ ID NO: 347271 - RNA, 21 nt, Artificial Sequence
  Synthetic
caaacuugcccagagaaauug

SEQ ID NO: 347272 - RNA, 22 nt, Artificial Sequence
  Synthetic
acaaacuugcccagagaaauug

SEQ ID NO: 347273 - RNA, 23 nt, Artificial Sequence
  Synthetic
aacaaacuugcccagagaaauug

SEQ ID NO: 347274 - RNA, 24 nt, Artificial Sequence
  Synthetic
aaacaaacuugcccagagaaauug

SEQ ID NO: 347275 - RNA, 18 nt, Artificial Sequence
  Synthetic
caagguuugcugaaauug

SEQ ID NO: 347276 - RNA, 19 nt, Artificial Sequence
  Synthetic
ccaagguuugcugaaauug

SEQ ID NO: 347277 - RNA, 20 nt, Artificial Sequence
  Synthetic
uccaagguuugcugaaauug

SEQ ID NO: 347278 - RNA, 21 nt, Artificial Sequence
  Synthetic
auccaagguuugcugaaauug

SEQ ID NO: 347279 - RNA, 22 nt, Artificial Sequence
  Synthetic
aauccaagguuugcugaaauug

SEQ ID NO: 347280 - RNA, 23 nt, Artificial Sequence
  Synthetic
uaauccaagguuugcugaaauug

SEQ ID NO: 347281 - RNA, 24 nt, Artificial Sequence
  Synthetic
auaauccaagguuugcugaaauug

SEQ ID NO: 347282 - RNA, 18 nt, Artificial Sequence
  Synthetic
cgucucugugugaaauug

SEQ ID NO: 347283 - RNA, 19 nt, Artificial Sequence
  Synthetic
ucgucucugugugaaauug

SEQ ID NO: 347284 - RNA, 20 nt, Artificial Sequence
  Synthetic
uucgucucugugugaaauug

SEQ ID NO: 347285 - RNA, 21 nt, Artificial Sequence
  Synthetic
auucgucucugugugaaauug

SEQ ID NO: 347286 - RNA, 22 nt, Artificial Sequence
  Synthetic
cauucgucucugugugaaauug

SEQ ID NO: 347287 - RNA, 23 nt, Artificial Sequence
  Synthetic
gcauucgucucugugugaaauug

SEQ ID NO: 347288 - RNA, 24 nt, Artificial Sequence
  Synthetic
agcauucgucucugugugaaauug

SEQ ID NO: 347289 - RNA, 18 nt, Artificial Sequence
  Synthetic
aaucucugcuugaaauug

SEQ ID NO: 347290 - RNA, 19 nt, Artificial Sequence
  Synthetic
gaaucucugcuugaaauug

SEQ ID NO: 347291 - RNA, 20 nt, Artificial Sequence
  Synthetic
ugaaucucugcuugaaauug

SEQ ID NO: 347292 - RNA, 21 nt, Artificial Sequence
  Synthetic
uugaaucucugcuugaaauug

SEQ ID NO: 347293 - RNA, 22 nt, Artificial Sequence
  Synthetic
auugaaucucugcuugaaauug

SEQ ID NO: 347294 - RNA, 23 nt, Artificial Sequence
  Synthetic
uauugaaucucugcuugaaauug

SEQ ID NO: 347295 - RNA, 24 nt, Artificial Sequence
  Synthetic
guauugaaucucugcuugaaauug

SEQ ID NO: 347296 - RNA, 18 nt, Artificial Sequence
  Synthetic
aguggaauuccuaaauug

SEQ ID NO: 347297 - RNA, 19 nt, Artificial Sequence
  Synthetic
aaguggaauuccuaaauug

SEQ ID NO: 347298 - RNA, 20 nt, Artificial Sequence
  Synthetic
gaaguggaauuccuaaauug

SEQ ID NO: 347299 - RNA, 21 nt, Artificial Sequence
  Synthetic
ggaaguggaauuccuaaauug

SEQ ID NO: 347300 - RNA, 22 nt, Artificial Sequence
  Synthetic
gggaaguggaauuccuaaauug

SEQ ID NO: 347301 - RNA, 23 nt, Artificial Sequence
  Synthetic
ugggaaguggaauuccuaaauug

SEQ ID NO: 347302 - RNA, 24 nt, Artificial Sequence
  Synthetic
gugggaaguggaauuccuaaauug

SEQ ID NO: 347303 - RNA, 18 nt, Artificial Sequence
  Synthetic
auguagugagguaaauug

SEQ ID NO: 347304 - RNA, 19 nt, Artificial Sequence
  Synthetic
aauguagugagguaaauug

SEQ ID NO: 347305 - RNA, 20 nt, Artificial Sequence
  Synthetic
aaauguagugagguaaauug

SEQ ID NO: 347306 - RNA, 21 nt, Artificial Sequence
  Synthetic
uaaauguagugagguaaauug

SEQ ID NO: 347307 - RNA, 22 nt, Artificial Sequence
  Synthetic
auaaauguagugagguaaauug

SEQ ID NO: 347308 - RNA, 23 nt, Artificial Sequence
  Synthetic
aauaaauguagugagguaaauug

SEQ ID NO: 347309 - RNA, 24 nt, Artificial Sequence
  Synthetic
aaauaaauguagugagguaaauug

SEQ ID NO: 347310 - RNA, 18 nt, Artificial Sequence
  Synthetic
uucucaaaguguaaauug

SEQ ID NO: 347311 - RNA, 19 nt, Artificial Sequence
  Synthetic
auucucaaaguguaaauug

SEQ ID NO: 347312 - RNA, 20 nt, Artificial Sequence
  Synthetic
aauucucaaaguguaaauug

SEQ ID NO: 347313 - RNA, 21 nt, Artificial Sequence
  Synthetic
aaauucucaaaguguaaauug

SEQ ID NO: 347314 - RNA, 22 nt, Artificial Sequence
  Synthetic
aaaauucucaaaguguaaauug

SEQ ID NO: 347315 - RNA, 23 nt, Artificial Sequence
  Synthetic
gaaaauucucaaaguguaaauug

SEQ ID NO: 347316 - RNA, 24 nt, Artificial Sequence
  Synthetic
ggaaaauucucaaaguguaaauug

SEQ ID NO: 347317 - RNA, 18 nt, Artificial Sequence
  Synthetic
aaaucuaaaaaacaauug

SEQ ID NO: 347318 - RNA, 19 nt, Artificial Sequence
  Synthetic
uaaaucuaaaaaacaauug

SEQ ID NO: 347319 - RNA, 20 nt, Artificial Sequence
  Synthetic
guaaaucuaaaaaacaauug

SEQ ID NO: 347320 - RNA, 21 nt, Artificial Sequence
  Synthetic
cguaaaucuaaaaaacaauug

SEQ ID NO: 347321 - RNA, 22 nt, Artificial Sequence
  Synthetic
gcguaaaucuaaaaaacaauug

SEQ ID NO: 347322 - RNA, 23 nt, Artificial Sequence
  Synthetic
agcguaaaucuaaaaaacaauug

SEQ ID NO: 347323 - RNA, 24 nt, Artificial Sequence
  Synthetic
aagcguaaaucuaaaaaacaauug

SEQ ID NO: 347324 - RNA, 18 nt, Artificial Sequence
  Synthetic
uuuugguugugacaauug

SEQ ID NO: 347325 - RNA, 19 nt, Artificial Sequence
  Synthetic
uuuuugguugugacaauug

SEQ ID NO: 347326 - RNA, 20 nt, Artificial Sequence
  Synthetic
auuuuugguugugacaauug

SEQ ID NO: 347327 - RNA, 21 nt, Artificial Sequence
  Synthetic
cauuuuugguugugacaauug

SEQ ID NO: 347328 - RNA, 22 nt, Artificial Sequence
  Synthetic
acauuuuugguugugacaauug

SEQ ID NO: 347329 - RNA, 23 nt, Artificial Sequence
  Synthetic
gacauuuuugguugugacaauug

SEQ ID NO: 347330 - RNA, 24 nt, Artificial Sequence
  Synthetic
agacauuuuugguugugacaauug

SEQ ID NO: 347331 - RNA, 18 nt, Artificial Sequence
  Synthetic
aucugcaauagccaauug

SEQ ID NO: 347332 - RNA, 19 nt, Artificial Sequence
  Synthetic
caucugcaauagccaauug

SEQ ID NO: 347333 - RNA, 20 nt, Artificial Sequence
  Synthetic
ccaucugcaauagccaauug

SEQ ID NO: 347334 - RNA, 21 nt, Artificial Sequence
  Synthetic
uccaucugcaauagccaauug

SEQ ID NO: 347335 - RNA, 22 nt, Artificial Sequence
  Synthetic
uuccaucugcaauagccaauug

SEQ ID NO: 347336 - RNA, 23 nt, Artificial Sequence
  Synthetic
cuuccaucugcaauagccaauug

SEQ ID NO: 347337 - RNA, 24 nt, Artificial Sequence
  Synthetic
ucuuccaucugcaauagccaauug

SEQ ID NO: 347338 - RNA, 18 nt, Artificial Sequence
  Synthetic
aggggaauuuggcaauug

SEQ ID NO: 347339 - RNA, 19 nt, Artificial Sequence
  Synthetic
caggggaauuuggcaauug

SEQ ID NO: 347340 - RNA, 20 nt, Artificial Sequence
  Synthetic
ccaggggaauuuggcaauug

SEQ ID NO: 347341 - RNA, 21 nt, Artificial Sequence
  Synthetic
uccaggggaauuuggcaauug

SEQ ID NO: 347342 - RNA, 22 nt, Artificial Sequence
  Synthetic
uuccaggggaauuuggcaauug

SEQ ID NO: 347343 - RNA, 23 nt, Artificial Sequence
  Synthetic
auuccaggggaauuuggcaauug

SEQ ID NO: 347344 - RNA, 24 nt, Artificial Sequence
  Synthetic
gauuccaggggaauuuggcaauug

SEQ ID NO: 347345 - RNA, 18 nt, Artificial Sequence
  Synthetic
gaucuggagaugcaauug

SEQ ID NO: 347346 - RNA, 19 nt, Artificial Sequence
  Synthetic
agaucuggagaugcaauug

SEQ ID NO: 347347 - RNA, 20 nt, Artificial Sequence
  Synthetic
gagaucuggagaugcaauug

SEQ ID NO: 347348 - RNA, 21 nt, Artificial Sequence
  Synthetic
ggagaucuggagaugcaauug

SEQ ID NO: 347349 - RNA, 22 nt, Artificial Sequence
  Synthetic
aggagaucuggagaugcaauug

SEQ ID NO: 347350 - RNA, 23 nt, Artificial Sequence
  Synthetic
aaggagaucuggagaugcaauug

SEQ ID NO: 347351 - RNA, 24 nt, Artificial Sequence
  Synthetic
caaggagaucuggagaugcaauug

SEQ ID NO: 347352 - RNA, 18 nt, Artificial Sequence
  Synthetic
auagcccuggaagaauug

SEQ ID NO: 347353 - RNA, 19 nt, Artificial Sequence
  Synthetic
uauagcccuggaagaauug

SEQ ID NO: 347354 - RNA, 20 nt, Artificial Sequence
  Synthetic
guauagcccuggaagaauug

SEQ ID NO: 347355 - RNA, 21 nt, Artificial Sequence
  Synthetic
aguauagcccuggaagaauug

SEQ ID NO: 347356 - RNA, 22 nt, Artificial Sequence
  Synthetic
uaguauagcccuggaagaauug

SEQ ID NO: 347357 - RNA, 23 nt, Artificial Sequence
  Synthetic
guaguauagcccuggaagaauug

SEQ ID NO: 347358 - RNA, 24 nt, Artificial Sequence
  Synthetic
uguaguauagcccuggaagaauug

SEQ ID NO: 347359 - RNA, 18 nt, Artificial Sequence
  Synthetic
uuuagcagcacagaauug

SEQ ID NO: 347360 - RNA, 19 nt, Artificial Sequence
  Synthetic
guuuagcagcacagaauug

SEQ ID NO: 347361 - RNA, 20 nt, Artificial Sequence
  Synthetic
uguuuagcagcacagaauug

SEQ ID NO: 347362 - RNA, 21 nt, Artificial Sequence
  Synthetic
uuguuuagcagcacagaauug

SEQ ID NO: 347363 - RNA, 22 nt, Artificial Sequence
  Synthetic
uuuguuuagcagcacagaauug

SEQ ID NO: 347364 - RNA, 23 nt, Artificial Sequence
  Synthetic
guuuguuuagcagcacagaauug

SEQ ID NO: 347365 - RNA, 24 nt, Artificial Sequence
  Synthetic
aguuuguuuagcagcacagaauug

SEQ ID NO: 347366 - RNA, 18 nt, Artificial Sequence
  Synthetic
ucuuuggucacagaauug

SEQ ID NO: 347367 - RNA, 19 nt, Artificial Sequence
  Synthetic
uucuuuggucacagaauug

SEQ ID NO: 347368 - RNA, 20 nt, Artificial Sequence
  Synthetic
uuucuuuggucacagaauug

SEQ ID NO: 347369 - RNA, 21 nt, Artificial Sequence
  Synthetic
uuuucuuuggucacagaauug

SEQ ID NO: 347370 - RNA, 22 nt, Artificial Sequence
  Synthetic
cuuuucuuuggucacagaauug

SEQ ID NO: 347371 - RNA, 23 nt, Artificial Sequence
  Synthetic
acuuuucuuuggucacagaauug

SEQ ID NO: 347372 - RNA, 24 nt, Artificial Sequence
  Synthetic
uacuuuucuuuggucacagaauug

SEQ ID NO: 347373 - RNA, 18 nt, Artificial Sequence
  Synthetic
ggcaagcauacagaauug

SEQ ID NO: 347374 - RNA, 19 nt, Artificial Sequence
  Synthetic
uggcaagcauacagaauug

SEQ ID NO: 347375 - RNA, 20 nt, Artificial Sequence
  Synthetic
cuggcaagcauacagaauug

SEQ ID NO: 347376 - RNA, 21 nt, Artificial Sequence
  Synthetic
ucuggcaagcauacagaauug

SEQ ID NO: 347377 - RNA, 22 nt, Artificial Sequence
  Synthetic
aucuggcaagcauacagaauug

SEQ ID NO: 347378 - RNA, 23 nt, Artificial Sequence
  Synthetic
uaucuggcaagcauacagaauug

SEQ ID NO: 347379 - RNA, 24 nt, Artificial Sequence
  Synthetic
uuaucuggcaagcauacagaauug

SEQ ID NO: 347380 - RNA, 18 nt, Artificial Sequence
  Synthetic
aggagggagggagaauug

SEQ ID NO: 347381 - RNA, 19 nt, Artificial Sequence
  Synthetic
aaggagggagggagaauug

SEQ ID NO: 347382 - RNA, 20 nt, Artificial Sequence
  Synthetic
gaaggagggagggagaauug

SEQ ID NO: 347383 - RNA, 21 nt, Artificial Sequence
  Synthetic
ggaaggagggagggagaauug

SEQ ID NO: 347384 - RNA, 22 nt, Artificial Sequence
  Synthetic
gggaaggagggagggagaauug

SEQ ID NO: 347385 - RNA, 23 nt, Artificial Sequence
  Synthetic
agggaaggagggagggagaauug

SEQ ID NO: 347386 - RNA, 24 nt, Artificial Sequence
  Synthetic
gagggaaggagggagggagaauug

SEQ ID NO: 347387 - RNA, 18 nt, Artificial Sequence
  Synthetic
uuucaagauauagaauug

SEQ ID NO: 347388 - RNA, 19 nt, Artificial Sequence
  Synthetic
uuuucaagauauagaauug

SEQ ID NO: 347389 - RNA, 20 nt, Artificial Sequence
  Synthetic
uuuuucaagauauagaauug

SEQ ID NO: 347390 - RNA, 21 nt, Artificial Sequence
  Synthetic
uuuuuucaagauauagaauug

SEQ ID NO: 347391 - RNA, 22 nt, Artificial Sequence
  Synthetic
uuuuuuucaagauauagaauug

SEQ ID NO: 347392 - RNA, 23 nt, Artificial Sequence
  Synthetic
uuuuuuuucaagauauagaauug

SEQ ID NO: 347393 - RNA, 24 nt, Artificial Sequence
  Synthetic
uuuuuuuuucaagauauagaauug

SEQ ID NO: 347394 - RNA, 18 nt, Artificial Sequence
  Synthetic
auguauauucuagaauug

SEQ ID NO: 347395 - RNA, 19 nt, Artificial Sequence
  Synthetic
uauguauauucuagaauug

SEQ ID NO: 347396 - RNA, 20 nt, Artificial Sequence
  Synthetic
guauguauauucuagaauug

SEQ ID NO: 347397 - RNA, 21 nt, Artificial Sequence
  Synthetic
cguauguauauucuagaauug

SEQ ID NO: 347398 - RNA, 22 nt, Artificial Sequence
  Synthetic
ucguauguauauucuagaauug

SEQ ID NO: 347399 - RNA, 23 nt, Artificial Sequence
  Synthetic
uucguauguauauucuagaauug

SEQ ID NO: 347400 - RNA, 24 nt, Artificial Sequence
  Synthetic
cuucguauguauauucuagaauug

SEQ ID NO: 347401 - RNA, 18 nt, Artificial Sequence
  Synthetic
aaugaguuugacgaauug

SEQ ID NO: 347402 - RNA, 19 nt, Artificial Sequence
  Synthetic
gaaugaguuugacgaauug

SEQ ID NO: 347403 - RNA, 20 nt, Artificial Sequence
  Synthetic
agaaugaguuugacgaauug

SEQ ID NO: 347404 - RNA, 21 nt, Artificial Sequence
  Synthetic
gagaaugaguuugacgaauug

SEQ ID NO: 347405 - RNA, 22 nt, Artificial Sequence
  Synthetic
ggagaaugaguuugacgaauug

SEQ ID NO: 347406 - RNA, 23 nt, Artificial Sequence
  Synthetic
uggagaaugaguuugacgaauug

SEQ ID NO: 347407 - RNA, 24 nt, Artificial Sequence
  Synthetic
auggagaaugaguuugacgaauug

SEQ ID NO: 347408 - RNA, 18 nt, Artificial Sequence
  Synthetic
gcucuuuagcaggaauug

SEQ ID NO: 347409 - RNA, 19 nt, Artificial Sequence
  Synthetic
ugcucuuuagcaggaauug

SEQ ID NO: 347410 - RNA, 20 nt, Artificial Sequence
  Synthetic
augcucuuuagcaggaauug

SEQ ID NO: 347411 - RNA, 21 nt, Artificial Sequence
  Synthetic
aaugcucuuuagcaggaauug

SEQ ID NO: 347412 - RNA, 22 nt, Artificial Sequence
  Synthetic
aaaugcucuuuagcaggaauug

SEQ ID NO: 347413 - RNA, 23 nt, Artificial Sequence
  Synthetic
gaaaugcucuuuagcaggaauug

SEQ ID NO: 347414 - RNA, 24 nt, Artificial Sequence
  Synthetic
agaaaugcucuuuagcaggaauug

SEQ ID NO: 347415 - RNA, 18 nt, Artificial Sequence
  Synthetic
cucuuggauuaggaauug

SEQ ID NO: 347416 - RNA, 19 nt, Artificial Sequence
  Synthetic
gcucuuggauuaggaauug

SEQ ID NO: 347417 - RNA, 20 nt, Artificial Sequence
  Synthetic
ggcucuuggauuaggaauug

SEQ ID NO: 347418 - RNA, 21 nt, Artificial Sequence
  Synthetic
gggcucuuggauuaggaauug

SEQ ID NO: 347419 - RNA, 22 nt, Artificial Sequence
  Synthetic
agggcucuuggauuaggaauug

SEQ ID NO: 347420 - RNA, 23 nt, Artificial Sequence
  Synthetic
aagggcucuuggauuaggaauug

SEQ ID NO: 347421 - RNA, 24 nt, Artificial Sequence
  Synthetic
uaagggcucuuggauuaggaauug

SEQ ID NO: 347422 - RNA, 18 nt, Artificial Sequence
  Synthetic
gaaauugaucgggaauug

SEQ ID NO: 347423 - RNA, 19 nt, Artificial Sequence
  Synthetic
ggaaauugaucgggaauug

SEQ ID NO: 347424 - RNA, 20 nt, Artificial Sequence
  Synthetic
aggaaauugaucgggaauug

SEQ ID NO: 347425 - RNA, 21 nt, Artificial Sequence
  Synthetic
uaggaaauugaucgggaauug

SEQ ID NO: 347426 - RNA, 22 nt, Artificial Sequence
  Synthetic
auaggaaauugaucgggaauug

SEQ ID NO: 347427 - RNA, 23 nt, Artificial Sequence
  Synthetic
aauaggaaauugaucgggaauug

SEQ ID NO: 347428 - RNA, 24 nt, Artificial Sequence
  Synthetic
caauaggaaauugaucgggaauug

SEQ ID NO: 347429 - RNA, 18 nt, Artificial Sequence
  Synthetic
uauaacauucaugaauug

SEQ ID NO: 347430 - RNA, 19 nt, Artificial Sequence
  Synthetic
cuauaacauucaugaauug

SEQ ID NO: 347431 - RNA, 20 nt, Artificial Sequence
  Synthetic
acuauaacauucaugaauug

SEQ ID NO: 347432 - RNA, 21 nt, Artificial Sequence
  Synthetic
uacuauaacauucaugaauug

SEQ ID NO: 347433 - RNA, 22 nt, Artificial Sequence
  Synthetic
uuacuauaacauucaugaauug

SEQ ID NO: 347434 - RNA, 23 nt, Artificial Sequence
  Synthetic
uuuacuauaacauucaugaauug

SEQ ID NO: 347435 - RNA, 24 nt, Artificial Sequence
  Synthetic
auuuacuauaacauucaugaauug

SEQ ID NO: 347436 - RNA, 18 nt, Artificial Sequence
  Synthetic
cuaaugugcuaugaauug

SEQ ID NO: 347437 - RNA, 19 nt, Artificial Sequence
  Synthetic
gcuaaugugcuaugaauug

SEQ ID NO: 347438 - RNA, 20 nt, Artificial Sequence
  Synthetic
agcuaaugugcuaugaauug

SEQ ID NO: 347439 - RNA, 21 nt, Artificial Sequence
  Synthetic
uagcuaaugugcuaugaauug

SEQ ID NO: 347440 - RNA, 22 nt, Artificial Sequence
  Synthetic
guagcuaaugugcuaugaauug

SEQ ID NO: 347441 - RNA, 23 nt, Artificial Sequence
  Synthetic
uguagcuaaugugcuaugaauug

SEQ ID NO: 347442 - RNA, 24 nt, Artificial Sequence
  Synthetic
auguagcuaaugugcuaugaauug

SEQ ID NO: 347443 - RNA, 18 nt, Artificial Sequence
  Synthetic
cucuuuucugcugaauug

SEQ ID NO: 347444 - RNA, 19 nt, Artificial Sequence
  Synthetic
ccucuuuucugcugaauug

SEQ ID NO: 347445 - RNA, 20 nt, Artificial Sequence
  Synthetic
accucuuuucugcugaauug

SEQ ID NO: 347446 - RNA, 21 nt, Artificial Sequence
  Synthetic
gaccucuuuucugcugaauug

SEQ ID NO: 347447 - RNA, 22 nt, Artificial Sequence
  Synthetic
ugaccucuuuucugcugaauug

SEQ ID NO: 347448 - RNA, 23 nt, Artificial Sequence
  Synthetic
uugaccucuuuucugcugaauug

SEQ ID NO: 347449 - RNA, 24 nt, Artificial Sequence
  Synthetic
cuugaccucuuuucugcugaauug

SEQ ID NO: 347450 - RNA, 18 nt, Artificial Sequence
  Synthetic
ucucacuuuuuugaauug

SEQ ID NO: 347451 - RNA, 19 nt, Artificial Sequence
  Synthetic
gucucacuuuuuugaauug

SEQ ID NO: 347452 - RNA, 20 nt, Artificial Sequence
  Synthetic
cgucucacuuuuuugaauug

SEQ ID NO: 347453 - RNA, 21 nt, Artificial Sequence
  Synthetic
ccgucucacuuuuuugaauug

SEQ ID NO: 347454 - RNA, 22 nt, Artificial Sequence
  Synthetic
uccgucucacuuuuuugaauug

SEQ ID NO: 347455 - RNA, 23 nt, Artificial Sequence
  Synthetic
cuccgucucacuuuuuugaauug

SEQ ID NO: 347456 - RNA, 24 nt, Artificial Sequence
  Synthetic
acuccgucucacuuuuuugaauug

SEQ ID NO: 347457 - RNA, 18 nt, Artificial Sequence
  Synthetic
uagugauuuacauaauug

SEQ ID NO: 347458 - RNA, 19 nt, Artificial Sequence
  Synthetic
uuagugauuuacauaauug

SEQ ID NO: 347459 - RNA, 20 nt, Artificial Sequence
  Synthetic
auuagugauuuacauaauug

SEQ ID NO: 347460 - RNA, 21 nt, Artificial Sequence
  Synthetic
uauuagugauuuacauaauug

SEQ ID NO: 347461 - RNA, 22 nt, Artificial Sequence
  Synthetic
guauuagugauuuacauaauug

SEQ ID NO: 347462 - RNA, 23 nt, Artificial Sequence
  Synthetic
aguauuagugauuuacauaauug

SEQ ID NO: 347463 - RNA, 24 nt, Artificial Sequence
  Synthetic
aaguauuagugauuuacauaauug

SEQ ID NO: 347464 - RNA, 18 nt, Artificial Sequence
  Synthetic
agaaagguaucauaauug

SEQ ID NO: 347465 - RNA, 19 nt, Artificial Sequence
  Synthetic
uagaaagguaucauaauug

SEQ ID NO: 347466 - RNA, 20 nt, Artificial Sequence
  Synthetic
auagaaagguaucauaauug

SEQ ID NO: 347467 - RNA, 21 nt, Artificial Sequence
  Synthetic
cauagaaagguaucauaauug

SEQ ID NO: 347468 - RNA, 22 nt, Artificial Sequence
  Synthetic
gcauagaaagguaucauaauug

SEQ ID NO: 347469 - RNA, 23 nt, Artificial Sequence
  Synthetic
ugcauagaaagguaucauaauug

SEQ ID NO: 347470 - RNA, 24 nt, Artificial Sequence
  Synthetic
cugcauagaaagguaucauaauug

SEQ ID NO: 347471 - RNA, 18 nt, Artificial Sequence
  Synthetic
gggccauauguauaauug

SEQ ID NO: 347472 - RNA, 19 nt, Artificial Sequence
  Synthetic
ugggccauauguauaauug

SEQ ID NO: 347473 - RNA, 20 nt, Artificial Sequence
  Synthetic
gugggccauauguauaauug

SEQ ID NO: 347474 - RNA, 21 nt, Artificial Sequence
  Synthetic
ugugggccauauguauaauug

SEQ ID NO: 347475 - RNA, 22 nt, Artificial Sequence
  Synthetic
augugggccauauguauaauug

SEQ ID NO: 347476 - RNA, 23 nt, Artificial Sequence
  Synthetic
gaugugggccauauguauaauug

SEQ ID NO: 347477 - RNA, 24 nt, Artificial Sequence
  Synthetic
ggaugugggccauauguauaauug

SEQ ID NO: 347478 - RNA, 18 nt, Artificial Sequence
  Synthetic
gaacaaaaauuauaauug

SEQ ID NO: 347479 - RNA, 19 nt, Artificial Sequence
  Synthetic
agaacaaaaauuauaauug

SEQ ID NO: 347480 - RNA, 20 nt, Artificial Sequence
  Synthetic
aagaacaaaaauuauaauug

SEQ ID NO: 347481 - RNA, 21 nt, Artificial Sequence
  Synthetic
gaagaacaaaaauuauaauug

SEQ ID NO: 347482 - RNA, 22 nt, Artificial Sequence
  Synthetic
agaagaacaaaaauuauaauug

SEQ ID NO: 347483 - RNA, 23 nt, Artificial Sequence
  Synthetic
aagaagaacaaaaauuauaauug

SEQ ID NO: 347484 - RNA, 24 nt, Artificial Sequence
  Synthetic
aaagaagaacaaaaauuauaauug

SEQ ID NO: 347485 - RNA, 18 nt, Artificial Sequence
  Synthetic
cccuugaguuuauaauug

SEQ ID NO: 347486 - RNA, 19 nt, Artificial Sequence
  Synthetic
gcccuugaguuuauaauug

SEQ ID NO: 347487 - RNA, 20 nt, Artificial Sequence
  Synthetic
ggcccuugaguuuauaauug

SEQ ID NO: 347488 - RNA, 21 nt, Artificial Sequence
  Synthetic
gggcccuugaguuuauaauug

SEQ ID NO: 347489 - RNA, 22 nt, Artificial Sequence
  Synthetic
ugggcccuugaguuuauaauug

SEQ ID NO: 347490 - RNA, 23 nt, Artificial Sequence
  Synthetic
augggcccuugaguuuauaauug

SEQ ID NO: 347491 - RNA, 24 nt, Artificial Sequence
  Synthetic
uaugggcccuugaguuuauaauug

SEQ ID NO: 347492 - RNA, 18 nt, Artificial Sequence
  Synthetic
ucuuauguagccuaauug

SEQ ID NO: 347493 - RNA, 19 nt, Artificial Sequence
  Synthetic
aucuuauguagccuaauug

SEQ ID NO: 347494 - RNA, 20 nt, Artificial Sequence
  Synthetic
aaucuuauguagccuaauug

SEQ ID NO: 347495 - RNA, 21 nt, Artificial Sequence
  Synthetic
caaucuuauguagccuaauug

SEQ ID NO: 347496 - RNA, 22 nt, Artificial Sequence
  Synthetic
ccaaucuuauguagccuaauug

SEQ ID NO: 347497 - RNA, 23 nt, Artificial Sequence
  Synthetic
cccaaucuuauguagccuaauug

SEQ ID NO: 347498 - RNA, 24 nt, Artificial Sequence
  Synthetic
ucccaaucuuauguagccuaauug

SEQ ID NO: 347499 - RNA, 18 nt, Artificial Sequence
  Synthetic
cccuuaagcuucuaauug

SEQ ID NO: 347500 - RNA, 19 nt, Artificial Sequence
  Synthetic
acccuuaagcuucuaauug

SEQ ID NO: 347501 - RNA, 20 nt, Artificial Sequence
  Synthetic
uacccuuaagcuucuaauug

SEQ ID NO: 347502 - RNA, 21 nt, Artificial Sequence
  Synthetic
uuacccuuaagcuucuaauug

SEQ ID NO: 347503 - RNA, 22 nt, Artificial Sequence
  Synthetic
uuuacccuuaagcuucuaauug

SEQ ID NO: 347504 - RNA, 23 nt, Artificial Sequence
  Synthetic
uuuuacccuuaagcuucuaauug

SEQ ID NO: 347505 - RNA, 24 nt, Artificial Sequence
  Synthetic
guuuuacccuuaagcuucuaauug

SEQ ID NO: 347506 - RNA, 18 nt, Artificial Sequence
  Synthetic
uccauccucuucuaauug

SEQ ID NO: 347507 - RNA, 19 nt, Artificial Sequence
  Synthetic
uuccauccucuucuaauug

SEQ ID NO: 347508 - RNA, 20 nt, Artificial Sequence
  Synthetic
cuuccauccucuucuaauug

SEQ ID NO: 347509 - RNA, 21 nt, Artificial Sequence
  Synthetic
acuuccauccucuucuaauug

SEQ ID NO: 347510 - RNA, 22 nt, Artificial Sequence
  Synthetic
cacuuccauccucuucuaauug

SEQ ID NO: 347511 - RNA, 23 nt, Artificial Sequence
  Synthetic
ccacuuccauccucuucuaauug

SEQ ID NO: 347512 - RNA, 24 nt, Artificial Sequence
  Synthetic
uccacuuccauccucuucuaauug

SEQ ID NO: 347513 - RNA, 18 nt, Artificial Sequence
  Synthetic
ugucuacugaaguaauug

SEQ ID NO: 347514 - RNA, 19 nt, Artificial Sequence
  Synthetic
cugucuacugaaguaauug

SEQ ID NO: 347515 - RNA, 20 nt, Artificial Sequence
  Synthetic
acugucuacugaaguaauug

SEQ ID NO: 347516 - RNA, 21 nt, Artificial Sequence
  Synthetic
gacugucuacugaaguaauug

SEQ ID NO: 347517 - RNA, 22 nt, Artificial Sequence
  Synthetic
ugacugucuacugaaguaauug

SEQ ID NO: 347518 - RNA, 23 nt, Artificial Sequence
  Synthetic
cugacugucuacugaaguaauug

SEQ ID NO: 347519 - RNA, 24 nt, Artificial Sequence
  Synthetic
acugacugucuacugaaguaauug

SEQ ID NO: 347520 - RNA, 18 nt, Artificial Sequence
  Synthetic
uauuuaauacaguaauug

SEQ ID NO: 347521 - RNA, 19 nt, Artificial Sequence
  Synthetic
uuauuuaauacaguaauug

SEQ ID NO: 347522 - RNA, 20 nt, Artificial Sequence
  Synthetic
uuuauuuaauacaguaauug

SEQ ID NO: 347523 - RNA, 21 nt, Artificial Sequence
  Synthetic
uuuuauuuaauacaguaauug

SEQ ID NO: 347524 - RNA, 22 nt, Artificial Sequence
  Synthetic
guuuuauuuaauacaguaauug

SEQ ID NO: 347525 - RNA, 23 nt, Artificial Sequence
  Synthetic
gguuuuauuuaauacaguaauug

SEQ ID NO: 347526 - RNA, 24 nt, Artificial Sequence
  Synthetic
agguuuuauuuaauacaguaauug

SEQ ID NO: 347527 - RNA, 18 nt, Artificial Sequence
  Synthetic
uuuggcaccgaguaauug

SEQ ID NO: 347528 - RNA, 19 nt, Artificial Sequence
  Synthetic
uuuuggcaccgaguaauug

SEQ ID NO: 347529 - RNA, 20 nt, Artificial Sequence
  Synthetic
uuuuuggcaccgaguaauug

SEQ ID NO: 347530 - RNA, 21 nt, Artificial Sequence
  Synthetic
uuuuuuggcaccgaguaauug

SEQ ID NO: 347531 - RNA, 22 nt, Artificial Sequence
  Synthetic
auuuuuuggcaccgaguaauug

SEQ ID NO: 347532 - RNA, 23 nt, Artificial Sequence
  Synthetic
uauuuuuuggcaccgaguaauug

SEQ ID NO: 347533 - RNA, 24 nt, Artificial Sequence
  Synthetic
guauuuuuuggcaccgaguaauug

SEQ ID NO: 347534 - RNA, 18 nt, Artificial Sequence
  Synthetic
auacaggagacguaauug

SEQ ID NO: 347535 - RNA, 19 nt, Artificial Sequence
  Synthetic
aauacaggagacguaauug

SEQ ID NO: 347536 - RNA, 20 nt, Artificial Sequence
  Synthetic
aaauacaggagacguaauug

SEQ ID NO: 347537 - RNA, 21 nt, Artificial Sequence
  Synthetic
aaaauacaggagacguaauug

SEQ ID NO: 347538 - RNA, 22 nt, Artificial Sequence
  Synthetic
aaaaauacaggagacguaauug

SEQ ID NO: 347539 - RNA, 23 nt, Artificial Sequence
  Synthetic
gaaaaauacaggagacguaauug

SEQ ID NO: 347540 - RNA, 24 nt, Artificial Sequence
  Synthetic
agaaaaauacaggagacguaauug

SEQ ID NO: 347541 - RNA, 18 nt, Artificial Sequence
  Synthetic
uuuauccuauuguaauug

SEQ ID NO: 347542 - RNA, 19 nt, Artificial Sequence
  Synthetic
uuuuauccuauuguaauug

SEQ ID NO: 347543 - RNA, 20 nt, Artificial Sequence
  Synthetic
cuuuuauccuauuguaauug

SEQ ID NO: 347544 - RNA, 21 nt, Artificial Sequence
  Synthetic
ucuuuuauccuauuguaauug

SEQ ID NO: 347545 - RNA, 22 nt, Artificial Sequence
  Synthetic
cucuuuuauccuauuguaauug

SEQ ID NO: 347546 - RNA, 23 nt, Artificial Sequence
  Synthetic
ucucuuuuauccuauuguaauug

SEQ ID NO: 347547 - RNA, 24 nt, Artificial Sequence
  Synthetic
aucucuuuuauccuauuguaauug

SEQ ID NO: 347548 - RNA, 18 nt, Artificial Sequence
  Synthetic
uuuuaugaaaauuaauug

SEQ ID NO: 347549 - RNA, 19 nt, Artificial Sequence
  Synthetic
uuuuuaugaaaauuaauug

SEQ ID NO: 347550 - RNA, 20 nt, Artificial Sequence
  Synthetic
cuuuuuaugaaaauuaauug

SEQ ID NO: 347551 - RNA, 21 nt, Artificial Sequence
  Synthetic
ucuuuuuaugaaaauuaauug

SEQ ID NO: 347552 - RNA, 22 nt, Artificial Sequence
  Synthetic
uucuuuuuaugaaaauuaauug

SEQ ID NO: 347553 - RNA, 23 nt, Artificial Sequence
  Synthetic
cuucuuuuuaugaaaauuaauug

SEQ ID NO: 347554 - RNA, 24 nt, Artificial Sequence
  Synthetic
gcuucuuuuuaugaaaauuaauug

SEQ ID NO: 347555 - RNA, 18 nt, Artificial Sequence
  Synthetic
aagaggcgugauuaauug

SEQ ID NO: 347556 - RNA, 19 nt, Artificial Sequence
  Synthetic
caagaggcgugauuaauug

SEQ ID NO: 347557 - RNA, 20 nt, Artificial Sequence
  Synthetic
ccaagaggcgugauuaauug

SEQ ID NO: 347558 - RNA, 21 nt, Artificial Sequence
  Synthetic
uccaagaggcgugauuaauug

SEQ ID NO: 347559 - RNA, 22 nt, Artificial Sequence
  Synthetic
auccaagaggcgugauuaauug

SEQ ID NO: 347560 - RNA, 23 nt, Artificial Sequence
  Synthetic
aauccaagaggcgugauuaauug

SEQ ID NO: 347561 - RNA, 24 nt, Artificial Sequence
  Synthetic
gaauccaagaggcgugauuaauug

SEQ ID NO: 347562 - RNA, 18 nt, Artificial Sequence
  Synthetic
gaacuaucaauuuaauug

SEQ ID NO: 347563 - RNA, 19 nt, Artificial Sequence
  Synthetic
ugaacuaucaauuuaauug

SEQ ID NO: 347564 - RNA, 20 nt, Artificial Sequence
  Synthetic
augaacuaucaauuuaauug

SEQ ID NO: 347565 - RNA, 21 nt, Artificial Sequence
  Synthetic
aaugaacuaucaauuuaauug

SEQ ID NO: 347566 - RNA, 22 nt, Artificial Sequence
  Synthetic
uaaugaacuaucaauuuaauug

SEQ ID NO: 347567 - RNA, 23 nt, Artificial Sequence
  Synthetic
cuaaugaacuaucaauuuaauug

SEQ ID NO: 347568 - RNA, 24 nt, Artificial Sequence
  Synthetic
gcuaaugaacuaucaauuuaauug

SEQ ID NO: 347569 - RNA, 18 nt, Artificial Sequence
  Synthetic
gaaaaaagaacaacauug

SEQ ID NO: 347570 - RNA, 19 nt, Artificial Sequence
  Synthetic
ugaaaaaagaacaacauug

SEQ ID NO: 347571 - RNA, 20 nt, Artificial Sequence
  Synthetic
uugaaaaaagaacaacauug

SEQ ID NO: 347572 - RNA, 21 nt, Artificial Sequence
  Synthetic
cuugaaaaaagaacaacauug

SEQ ID NO: 347573 - RNA, 22 nt, Artificial Sequence
  Synthetic
ccuugaaaaaagaacaacauug

SEQ ID NO: 347574 - RNA, 23 nt, Artificial Sequence
  Synthetic
accuugaaaaaagaacaacauug

SEQ ID NO: 347575 - RNA, 24 nt, Artificial Sequence
  Synthetic
aaccuugaaaaaagaacaacauug

SEQ ID NO: 347576 - RNA, 18 nt, Artificial Sequence
  Synthetic
ccaaaaguuucaacauug

SEQ ID NO: 347577 - RNA, 19 nt, Artificial Sequence
  Synthetic
accaaaaguuucaacauug

SEQ ID NO: 347578 - RNA, 20 nt, Artificial Sequence
  Synthetic
gaccaaaaguuucaacauug

SEQ ID NO: 347579 - RNA, 21 nt, Artificial Sequence
  Synthetic
agaccaaaaguuucaacauug

SEQ ID NO: 347580 - RNA, 22 nt, Artificial Sequence
  Synthetic
cagaccaaaaguuucaacauug

SEQ ID NO: 347581 - RNA, 23 nt, Artificial Sequence
  Synthetic
gcagaccaaaaguuucaacauug

SEQ ID NO: 347582 - RNA, 24 nt, Artificial Sequence
  Synthetic
ugcagaccaaaaguuucaacauug

SEQ ID NO: 347583 - RNA, 18 nt, Artificial Sequence
  Synthetic
augaugcugugaacauug

SEQ ID NO: 347584 - RNA, 19 nt, Artificial Sequence
  Synthetic
gaugaugcugugaacauug

SEQ ID NO: 347585 - RNA, 20 nt, Artificial Sequence
  Synthetic
ugaugaugcugugaacauug

SEQ ID NO: 347586 - RNA, 21 nt, Artificial Sequence
  Synthetic
gugaugaugcugugaacauug

SEQ ID NO: 347587 - RNA, 22 nt, Artificial Sequence
  Synthetic
ggugaugaugcugugaacauug

SEQ ID NO: 347588 - RNA, 23 nt, Artificial Sequence
  Synthetic
uggugaugaugcugugaacauug

SEQ ID NO: 347589 - RNA, 24 nt, Artificial Sequence
  Synthetic
uuggugaugaugcugugaacauug

SEQ ID NO: 347590 - RNA, 18 nt, Artificial Sequence
  Synthetic
aaaauauugcacacauug

SEQ ID NO: 347591 - RNA, 19 nt, Artificial Sequence
  Synthetic
uaaaauauugcacacauug

SEQ ID NO: 347592 - RNA, 20 nt, Artificial Sequence
  Synthetic
cuaaaauauugcacacauug

SEQ ID NO: 347593 - RNA, 21 nt, Artificial Sequence
  Synthetic
ccuaaaauauugcacacauug

SEQ ID NO: 347594 - RNA, 22 nt, Artificial Sequence
  Synthetic
uccuaaaauauugcacacauug

SEQ ID NO: 347595 - RNA, 23 nt, Artificial Sequence
  Synthetic
cuccuaaaauauugcacacauug

SEQ ID NO: 347596 - RNA, 24 nt, Artificial Sequence
  Synthetic
acuccuaaaauauugcacacauug

SEQ ID NO: 347597 - RNA, 18 nt, Artificial Sequence
  Synthetic
gaaggcccacccacauug

SEQ ID NO: 347598 - RNA, 19 nt, Artificial Sequence
  Synthetic
agaaggcccacccacauug

SEQ ID NO: 347599 - RNA, 20 nt, Artificial Sequence
  Synthetic
gagaaggcccacccacauug

SEQ ID NO: 347600 - RNA, 21 nt, Artificial Sequence
  Synthetic
ggagaaggcccacccacauug

SEQ ID NO: 347601 - RNA, 22 nt, Artificial Sequence
  Synthetic
uggagaaggcccacccacauug

SEQ ID NO: 347602 - RNA, 23 nt, Artificial Sequence
  Synthetic
uuggagaaggcccacccacauug

SEQ ID NO: 347603 - RNA, 24 nt, Artificial Sequence
  Synthetic
auuggagaaggcccacccacauug

SEQ ID NO: 347604 - RNA, 18 nt, Artificial Sequence
  Synthetic
cacaggaacuucacauug

SEQ ID NO: 347605 - RNA, 19 nt, Artificial Sequence
  Synthetic
ccacaggaacuucacauug

SEQ ID NO: 347606 - RNA, 20 nt, Artificial Sequence
  Synthetic
cccacaggaacuucacauug

SEQ ID NO: 347607 - RNA, 21 nt, Artificial Sequence
  Synthetic
ucccacaggaacuucacauug

SEQ ID NO: 347608 - RNA, 22 nt, Artificial Sequence
  Synthetic
gucccacaggaacuucacauug

SEQ ID NO: 347609 - RNA, 23 nt, Artificial Sequence
  Synthetic
ugucccacaggaacuucacauug

SEQ ID NO: 347610 - RNA, 24 nt, Artificial Sequence
  Synthetic
augucccacaggaacuucacauug

SEQ ID NO: 347611 - RNA, 18 nt, Artificial Sequence
  Synthetic
accaauuacaagacauug

SEQ ID NO: 347612 - RNA, 19 nt, Artificial Sequence
  Synthetic
aaccaauuacaagacauug

SEQ ID NO: 347613 - RNA, 20 nt, Artificial Sequence
  Synthetic
gaaccaauuacaagacauug

SEQ ID NO: 347614 - RNA, 21 nt, Artificial Sequence
  Synthetic
agaaccaauuacaagacauug

SEQ ID NO: 347615 - RNA, 22 nt, Artificial Sequence
  Synthetic
uagaaccaauuacaagacauug

SEQ ID NO: 347616 - RNA, 23 nt, Artificial Sequence
  Synthetic
uuagaaccaauuacaagacauug

SEQ ID NO: 347617 - RNA, 24 nt, Artificial Sequence
  Synthetic
auuagaaccaauuacaagacauug

SEQ ID NO: 347618 - RNA, 18 nt, Artificial Sequence
  Synthetic
uguuagaauuugacauug

SEQ ID NO: 347619 - RNA, 19 nt, Artificial Sequence
  Synthetic
auguuagaauuugacauug

SEQ ID NO: 347620 - RNA, 20 nt, Artificial Sequence
  Synthetic
uauguuagaauuugacauug

SEQ ID NO: 347621 - RNA, 21 nt, Artificial Sequence
  Synthetic
cuauguuagaauuugacauug

SEQ ID NO: 347622 - RNA, 22 nt, Artificial Sequence
  Synthetic
gcuauguuagaauuugacauug

SEQ ID NO: 347623 - RNA, 23 nt, Artificial Sequence
  Synthetic
cgcuauguuagaauuugacauug

SEQ ID NO: 347624 - RNA, 24 nt, Artificial Sequence
  Synthetic
acgcuauguuagaauuugacauug

SEQ ID NO: 347625 - RNA, 18 nt, Artificial Sequence
  Synthetic
gaaaacuguaauacauug

SEQ ID NO: 347626 - RNA, 19 nt, Artificial Sequence
  Synthetic
ugaaaacuguaauacauug

SEQ ID NO: 347627 - RNA, 20 nt, Artificial Sequence
  Synthetic
cugaaaacuguaauacauug

SEQ ID NO: 347628 - RNA, 21 nt, Artificial Sequence
  Synthetic
ucugaaaacuguaauacauug

SEQ ID NO: 347629 - RNA, 22 nt, Artificial Sequence
  Synthetic
cucugaaaacuguaauacauug

SEQ ID NO: 347630 - RNA, 23 nt, Artificial Sequence
  Synthetic
acucugaaaacuguaauacauug

SEQ ID NO: 347631 - RNA, 24 nt, Artificial Sequence
  Synthetic
uacucugaaaacuguaauacauug

SEQ ID NO: 347632 - RNA, 18 nt, Artificial Sequence
  Synthetic
acacaaaucacuacauug

SEQ ID NO: 347633 - RNA, 19 nt, Artificial Sequence
  Synthetic
uacacaaaucacuacauug

SEQ ID NO: 347634 - RNA, 20 nt, Artificial Sequence
  Synthetic
auacacaaaucacuacauug

SEQ ID NO: 347635 - RNA, 21 nt, Artificial Sequence
  Synthetic
uauacacaaaucacuacauug

SEQ ID NO: 347636 - RNA, 22 nt, Artificial Sequence
  Synthetic
uuauacacaaaucacuacauug

SEQ ID NO: 347637 - RNA, 23 nt, Artificial Sequence
  Synthetic
uuuauacacaaaucacuacauug

SEQ ID NO: 347638 - RNA, 24 nt, Artificial Sequence
  Synthetic
auuuauacacaaaucacuacauug

SEQ ID NO: 347639 - RNA, 18 nt, Artificial Sequence
  Synthetic
aaaaaauggccuacauug

SEQ ID NO: 347640 - RNA, 19 nt, Artificial Sequence
  Synthetic
gaaaaaauggccuacauug

SEQ ID NO: 347641 - RNA, 20 nt, Artificial Sequence
  Synthetic
agaaaaaauggccuacauug

SEQ ID NO: 347642 - RNA, 21 nt, Artificial Sequence
  Synthetic
aagaaaaaauggccuacauug

SEQ ID NO: 347643 - RNA, 22 nt, Artificial Sequence
  Synthetic
caagaaaaaauggccuacauug

SEQ ID NO: 347644 - RNA, 23 nt, Artificial Sequence
  Synthetic
gcaagaaaaaauggccuacauug

SEQ ID NO: 347645 - RNA, 24 nt, Artificial Sequence
  Synthetic
agcaagaaaaaauggccuacauug

SEQ ID NO: 347646 - RNA, 18 nt, Artificial Sequence
  Synthetic
agcaagcuugcuacauug

SEQ ID NO: 347647 - RNA, 19 nt, Artificial Sequence
  Synthetic
aagcaagcuugcuacauug

SEQ ID NO: 347648 - RNA, 20 nt, Artificial Sequence
  Synthetic
aaagcaagcuugcuacauug

SEQ ID NO: 347649 - RNA, 21 nt, Artificial Sequence
  Synthetic
uaaagcaagcuugcuacauug

SEQ ID NO: 347650 - RNA, 22 nt, Artificial Sequence
  Synthetic
guaaagcaagcuugcuacauug

SEQ ID NO: 347651 - RNA, 23 nt, Artificial Sequence
  Synthetic
gguaaagcaagcuugcuacauug

SEQ ID NO: 347652 - RNA, 24 nt, Artificial Sequence
  Synthetic
ugguaaagcaagcuugcuacauug

SEQ ID NO: 347653 - RNA, 18 nt, Artificial Sequence
  Synthetic
aauuguuuuucuacauug

SEQ ID NO: 347654 - RNA, 19 nt, Artificial Sequence
  Synthetic
gaauuguuuuucuacauug

SEQ ID NO: 347655 - RNA, 20 nt, Artificial Sequence
  Synthetic
ugaauuguuuuucuacauug

SEQ ID NO: 347656 - RNA, 21 nt, Artificial Sequence
  Synthetic
augaauuguuuuucuacauug

SEQ ID NO: 347657 - RNA, 22 nt, Artificial Sequence
  Synthetic
uaugaauuguuuuucuacauug

SEQ ID NO: 347658 - RNA, 23 nt, Artificial Sequence
  Synthetic
cuaugaauuguuuuucuacauug

SEQ ID NO: 347659 - RNA, 24 nt, Artificial Sequence
  Synthetic
ucuaugaauuguuuuucuacauug

SEQ ID NO: 347660 - RNA, 18 nt, Artificial Sequence
  Synthetic
gaauuacuucaaccauug

SEQ ID NO: 347661 - RNA, 19 nt, Artificial Sequence
  Synthetic
ugaauuacuucaaccauug

SEQ ID NO: 347662 - RNA, 20 nt, Artificial Sequence
  Synthetic
gugaauuacuucaaccauug

SEQ ID NO: 347663 - RNA, 21 nt, Artificial Sequence
  Synthetic
ugugaauuacuucaaccauug

SEQ ID NO: 347664 - RNA, 22 nt, Artificial Sequence
  Synthetic
gugugaauuacuucaaccauug

SEQ ID NO: 347665 - RNA, 23 nt, Artificial Sequence
  Synthetic
agugugaauuacuucaaccauug

SEQ ID NO: 347666 - RNA, 24 nt, Artificial Sequence
  Synthetic
gagugugaauuacuucaaccauug

SEQ ID NO: 347667 - RNA, 18 nt, Artificial Sequence
  Synthetic
aaacuaguucaaccauug

SEQ ID NO: 347668 - RNA, 19 nt, Artificial Sequence
  Synthetic
uaaacuaguucaaccauug

SEQ ID NO: 347669 - RNA, 20 nt, Artificial Sequence
  Synthetic
guaaacuaguucaaccauug

SEQ ID NO: 347670 - RNA, 21 nt, Artificial Sequence
  Synthetic
uguaaacuaguucaaccauug

SEQ ID NO: 347671 - RNA, 22 nt, Artificial Sequence
  Synthetic
cuguaaacuaguucaaccauug

SEQ ID NO: 347672 - RNA, 23 nt, Artificial Sequence
  Synthetic
acuguaaacuaguucaaccauug

SEQ ID NO: 347673 - RNA, 24 nt, Artificial Sequence
  Synthetic
gacuguaaacuaguucaaccauug

SEQ ID NO: 347674 - RNA, 18 nt, Artificial Sequence
  Synthetic
aaauuaguucaaccauug

SEQ ID NO: 347675 - RNA, 19 nt, Artificial Sequence
  Synthetic
uaaauuaguucaaccauug

SEQ ID NO: 347676 - RNA, 20 nt, Artificial Sequence
  Synthetic
guaaauuaguucaaccauug

SEQ ID NO: 347677 - RNA, 21 nt, Artificial Sequence
  Synthetic
uguaaauuaguucaaccauug

SEQ ID NO: 347678 - RNA, 22 nt, Artificial Sequence
  Synthetic
guguaaauuaguucaaccauug

SEQ ID NO: 347679 - RNA, 23 nt, Artificial Sequence
  Synthetic
aguguaaauuaguucaaccauug

SEQ ID NO: 347680 - RNA, 24 nt, Artificial Sequence
  Synthetic
gaguguaaauuaguucaaccauug

SEQ ID NO: 347681 - RNA, 18 nt, Artificial Sequence
  Synthetic
auaucugaucuaccauug

SEQ ID NO: 347682 - RNA, 19 nt, Artificial Sequence
  Synthetic
uauaucugaucuaccauug

SEQ ID NO: 347683 - RNA, 20 nt, Artificial Sequence
  Synthetic
cuauaucugaucuaccauug

SEQ ID NO: 347684 - RNA, 21 nt, Artificial Sequence
  Synthetic
ucuauaucugaucuaccauug

SEQ ID NO: 347685 - RNA, 22 nt, Artificial Sequence
  Synthetic
uucuauaucugaucuaccauug

SEQ ID NO: 347686 - RNA, 23 nt, Artificial Sequence
  Synthetic
uuucuauaucugaucuaccauug

SEQ ID NO: 347687 - RNA, 24 nt, Artificial Sequence
  Synthetic
uuuucuauaucugaucuaccauug

SEQ ID NO: 347688 - RNA, 18 nt, Artificial Sequence
  Synthetic
aaagccacugaagcauug

SEQ ID NO: 347689 - RNA, 19 nt, Artificial Sequence
  Synthetic
gaaagccacugaagcauug

SEQ ID NO: 347690 - RNA, 20 nt, Artificial Sequence
  Synthetic
ugaaagccacugaagcauug

SEQ ID NO: 347691 - RNA, 21 nt, Artificial Sequence
  Synthetic
uugaaagccacugaagcauug

SEQ ID NO: 347692 - RNA, 22 nt, Artificial Sequence
  Synthetic
auugaaagccacugaagcauug

SEQ ID NO: 347693 - RNA, 23 nt, Artificial Sequence
  Synthetic
aauugaaagccacugaagcauug

SEQ ID NO: 347694 - RNA, 24 nt, Artificial Sequence
  Synthetic
uaauugaaagccacugaagcauug

SEQ ID NO: 347695 - RNA, 18 nt, Artificial Sequence
  Synthetic
uauguuagucuagcauug

SEQ ID NO: 347696 - RNA, 19 nt, Artificial Sequence
  Synthetic
guauguuagucuagcauug

SEQ ID NO: 347697 - RNA, 20 nt, Artificial Sequence
  Synthetic
uguauguuagucuagcauug

SEQ ID NO: 347698 - RNA, 21 nt, Artificial Sequence
  Synthetic
uuguauguuagucuagcauug

SEQ ID NO: 347699 - RNA, 22 nt, Artificial Sequence
  Synthetic
auuguauguuagucuagcauug

SEQ ID NO: 347700 - RNA, 23 nt, Artificial Sequence
  Synthetic
aauuguauguuagucuagcauug

SEQ ID NO: 347701 - RNA, 24 nt, Artificial Sequence
  Synthetic
aaauuguauguuagucuagcauug

SEQ ID NO: 347702 - RNA, 18 nt, Artificial Sequence
  Synthetic
ucuauuaaaguagcauug

SEQ ID NO: 347703 - RNA, 19 nt, Artificial Sequence
  Synthetic
aucuauuaaaguagcauug

SEQ ID NO: 347704 - RNA, 20 nt, Artificial Sequence
  Synthetic
gaucuauuaaaguagcauug

SEQ ID NO: 347705 - RNA, 21 nt, Artificial Sequence
  Synthetic
ggaucuauuaaaguagcauug

SEQ ID NO: 347706 - RNA, 22 nt, Artificial Sequence
  Synthetic
uggaucuauuaaaguagcauug

SEQ ID NO: 347707 - RNA, 23 nt, Artificial Sequence
  Synthetic
uuggaucuauuaaaguagcauug

SEQ ID NO: 347708 - RNA, 24 nt, Artificial Sequence
  Synthetic
auuggaucuauuaaaguagcauug

SEQ ID NO: 347709 - RNA, 18 nt, Artificial Sequence
  Synthetic
uacaacaaauaugcauug

SEQ ID NO: 347710 - RNA, 19 nt, Artificial Sequence
  Synthetic
auacaacaaauaugcauug

SEQ ID NO: 347711 - RNA, 20 nt, Artificial Sequence
  Synthetic
uauacaacaaauaugcauug

SEQ ID NO: 347712 - RNA, 21 nt, Artificial Sequence
  Synthetic
guauacaacaaauaugcauug

SEQ ID NO: 347713 - RNA, 22 nt, Artificial Sequence
  Synthetic
aguauacaacaaauaugcauug

SEQ ID NO: 347714 - RNA, 23 nt, Artificial Sequence
  Synthetic
gaguauacaacaaauaugcauug

SEQ ID NO: 347715 - RNA, 24 nt, Artificial Sequence
  Synthetic
agaguauacaacaaauaugcauug

SEQ ID NO: 347716 - RNA, 18 nt, Artificial Sequence
  Synthetic
uuugcuuucacugcauug

SEQ ID NO: 347717 - RNA, 19 nt, Artificial Sequence
  Synthetic
auuugcuuucacugcauug

SEQ ID NO: 347718 - RNA, 20 nt, Artificial Sequence
  Synthetic
uauuugcuuucacugcauug

SEQ ID NO: 347719 - RNA, 21 nt, Artificial Sequence
  Synthetic
guauuugcuuucacugcauug

SEQ ID NO: 347720 - RNA, 22 nt, Artificial Sequence
  Synthetic
uguauuugcuuucacugcauug

SEQ ID NO: 347721 - RNA, 23 nt, Artificial Sequence
  Synthetic
cuguauuugcuuucacugcauug

SEQ ID NO: 347722 - RNA, 24 nt, Artificial Sequence
  Synthetic
ucuguauuugcuuucacugcauug

SEQ ID NO: 347723 - RNA, 18 nt, Artificial Sequence
  Synthetic
guacacaaucuugcauug

SEQ ID NO: 347724 - RNA, 19 nt, Artificial Sequence
  Synthetic
gguacacaaucuugcauug

SEQ ID NO: 347725 - RNA, 20 nt, Artificial Sequence
  Synthetic
ugguacacaaucuugcauug

SEQ ID NO: 347726 - RNA, 21 nt, Artificial Sequence
  Synthetic
cugguacacaaucuugcauug

SEQ ID NO: 347727 - RNA, 22 nt, Artificial Sequence
  Synthetic
ccugguacacaaucuugcauug

SEQ ID NO: 347728 - RNA, 23 nt, Artificial Sequence
  Synthetic
accugguacacaaucuugcauug

SEQ ID NO: 347729 - RNA, 24 nt, Artificial Sequence
  Synthetic
caccugguacacaaucuugcauug

SEQ ID NO: 347730 - RNA, 18 nt, Artificial Sequence
  Synthetic
caacaucacuaaucauug

SEQ ID NO: 347731 - RNA, 19 nt, Artificial Sequence
  Synthetic
ucaacaucacuaaucauug

SEQ ID NO: 347732 - RNA, 20 nt, Artificial Sequence
  Synthetic
cucaacaucacuaaucauug

SEQ ID NO: 347733 - RNA, 21 nt, Artificial Sequence
  Synthetic
gcucaacaucacuaaucauug

SEQ ID NO: 347734 - RNA, 22 nt, Artificial Sequence
  Synthetic
ugcucaacaucacuaaucauug

SEQ ID NO: 347735 - RNA, 23 nt, Artificial Sequence
  Synthetic
augcucaacaucacuaaucauug

SEQ ID NO: 347736 - RNA, 24 nt, Artificial Sequence
  Synthetic
aaugcucaacaucacuaaucauug

SEQ ID NO: 347737 - RNA, 18 nt, Artificial Sequence
  Synthetic
cuuucucaaggaucauug

SEQ ID NO: 347738 - RNA, 19 nt, Artificial Sequence
  Synthetic
gcuuucucaaggaucauug

SEQ ID NO: 347739 - RNA, 20 nt, Artificial Sequence
  Synthetic
ugcuuucucaaggaucauug

SEQ ID NO: 347740 - RNA, 21 nt, Artificial Sequence
  Synthetic
cugcuuucucaaggaucauug

SEQ ID NO: 347741 - RNA, 22 nt, Artificial Sequence
  Synthetic
ucugcuuucucaaggaucauug

SEQ ID NO: 347742 - RNA, 23 nt, Artificial Sequence
  Synthetic
uucugcuuucucaaggaucauug

SEQ ID NO: 347743 - RNA, 24 nt, Artificial Sequence
  Synthetic
uuucugcuuucucaaggaucauug

SEQ ID NO: 347744 - RNA, 18 nt, Artificial Sequence
  Synthetic
uauuaugcuugaucauug

SEQ ID NO: 347745 - RNA, 19 nt, Artificial Sequence
  Synthetic
uuauuaugcuugaucauug

SEQ ID NO: 347746 - RNA, 20 nt, Artificial Sequence
  Synthetic
uuuauuaugcuugaucauug

SEQ ID NO: 347747 - RNA, 21 nt, Artificial Sequence
  Synthetic
uuuuauuaugcuugaucauug

SEQ ID NO: 347748 - RNA, 22 nt, Artificial Sequence
  Synthetic
auuuuauuaugcuugaucauug

SEQ ID NO: 347749 - RNA, 23 nt, Artificial Sequence
  Synthetic
uauuuuauuaugcuugaucauug

SEQ ID NO: 347750 - RNA, 24 nt, Artificial Sequence
  Synthetic
guauuuuauuaugcuugaucauug

SEQ ID NO: 347751 - RNA, 18 nt, Artificial Sequence
  Synthetic
ucuucauacauaucauug

SEQ ID NO: 347752 - RNA, 19 nt, Artificial Sequence
  Synthetic
cucuucauacauaucauug

SEQ ID NO: 347753 - RNA, 20 nt, Artificial Sequence
  Synthetic
ucucuucauacauaucauug

SEQ ID NO: 347754 - RNA, 21 nt, Artificial Sequence
  Synthetic
uucucuucauacauaucauug

SEQ ID NO: 347755 - RNA, 22 nt, Artificial Sequence
  Synthetic
uuucucuucauacauaucauug

SEQ ID NO: 347756 - RNA, 23 nt, Artificial Sequence
  Synthetic
auuucucuucauacauaucauug

SEQ ID NO: 347757 - RNA, 24 nt, Artificial Sequence
  Synthetic
uauuucucuucauacauaucauug

SEQ ID NO: 347758 - RNA, 18 nt, Artificial Sequence
  Synthetic
uaauccaguauaucauug

SEQ ID NO: 347759 - RNA, 19 nt, Artificial Sequence
  Synthetic
uuaauccaguauaucauug

SEQ ID NO: 347760 - RNA, 20 nt, Artificial Sequence
  Synthetic
cuuaauccaguauaucauug

SEQ ID NO: 347761 - RNA, 21 nt, Artificial Sequence
  Synthetic
ucuuaauccaguauaucauug

SEQ ID NO: 347762 - RNA, 22 nt, Artificial Sequence
  Synthetic
uucuuaauccaguauaucauug

SEQ ID NO: 347763 - RNA, 23 nt, Artificial Sequence
  Synthetic
uuucuuaauccaguauaucauug

SEQ ID NO: 347764 - RNA, 24 nt, Artificial Sequence
  Synthetic
uuuucuuaauccaguauaucauug

SEQ ID NO: 347765 - RNA, 18 nt, Artificial Sequence
  Synthetic
aacacuuguauaucauug

SEQ ID NO: 347766 - RNA, 19 nt, Artificial Sequence
  Synthetic
uaacacuuguauaucauug

SEQ ID NO: 347767 - RNA, 20 nt, Artificial Sequence
  Synthetic
guaacacuuguauaucauug

SEQ ID NO: 347768 - RNA, 21 nt, Artificial Sequence
  Synthetic
gguaacacuuguauaucauug

SEQ ID NO: 347769 - RNA, 22 nt, Artificial Sequence
  Synthetic
agguaacacuuguauaucauug

SEQ ID NO: 347770 - RNA, 23 nt, Artificial Sequence
  Synthetic
aagguaacacuuguauaucauug

SEQ ID NO: 347771 - RNA, 24 nt, Artificial Sequence
  Synthetic
aaagguaacacuuguauaucauug

SEQ ID NO: 347772 - RNA, 18 nt, Artificial Sequence
  Synthetic
uuauccagucuaucauug

SEQ ID NO: 347773 - RNA, 19 nt, Artificial Sequence
  Synthetic
uuuauccagucuaucauug

SEQ ID NO: 347774 - RNA, 20 nt, Artificial Sequence
  Synthetic
cuuuauccagucuaucauug

SEQ ID NO: 347775 - RNA, 21 nt, Artificial Sequence
  Synthetic
ucuuuauccagucuaucauug

SEQ ID NO: 347776 - RNA, 22 nt, Artificial Sequence
  Synthetic
uucuuuauccagucuaucauug

SEQ ID NO: 347777 - RNA, 23 nt, Artificial Sequence
  Synthetic
uuucuuuauccagucuaucauug

SEQ ID NO: 347778 - RNA, 24 nt, Artificial Sequence
  Synthetic
uuuucuuuauccagucuaucauug

SEQ ID NO: 347779 - RNA, 18 nt, Artificial Sequence
  Synthetic
gaacaugucuucucauug

SEQ ID NO: 347780 - RNA, 19 nt, Artificial Sequence
  Synthetic
agaacaugucuucucauug

SEQ ID NO: 347781 - RNA, 20 nt, Artificial Sequence
  Synthetic
uagaacaugucuucucauug

SEQ ID NO: 347782 - RNA, 21 nt, Artificial Sequence
  Synthetic
auagaacaugucuucucauug

SEQ ID NO: 347783 - RNA, 22 nt, Artificial Sequence
  Synthetic
uauagaacaugucuucucauug

SEQ ID NO: 347784 - RNA, 23 nt, Artificial Sequence
  Synthetic
cuauagaacaugucuucucauug

SEQ ID NO: 347785 - RNA, 24 nt, Artificial Sequence
  Synthetic
ccuauagaacaugucuucucauug

SEQ ID NO: 347786 - RNA, 18 nt, Artificial Sequence
  Synthetic
cucagcuuguagucauug

SEQ ID NO: 347787 - RNA, 19 nt, Artificial Sequence
  Synthetic
ucucagcuuguagucauug

SEQ ID NO: 347788 - RNA, 20 nt, Artificial Sequence
  Synthetic
cucucagcuuguagucauug

SEQ ID NO: 347789 - RNA, 21 nt, Artificial Sequence
  Synthetic
gcucucagcuuguagucauug

SEQ ID NO: 347790 - RNA, 22 nt, Artificial Sequence
  Synthetic
ugcucucagcuuguagucauug

SEQ ID NO: 347791 - RNA, 23 nt, Artificial Sequence
  Synthetic
cugcucucagcuuguagucauug

SEQ ID NO: 347792 - RNA, 24 nt, Artificial Sequence
  Synthetic
ucugcucucagcuuguagucauug

SEQ ID NO: 347793 - RNA, 18 nt, Artificial Sequence
  Synthetic
agguuucuggggucauug

SEQ ID NO: 347794 - RNA, 19 nt, Artificial Sequence
  Synthetic
gagguuucuggggucauug

SEQ ID NO: 347795 - RNA, 20 nt, Artificial Sequence
  Synthetic
ugagguuucuggggucauug

SEQ ID NO: 347796 - RNA, 21 nt, Artificial Sequence
  Synthetic
cugagguuucuggggucauug

SEQ ID NO: 347797 - RNA, 22 nt, Artificial Sequence
  Synthetic
ucugagguuucuggggucauug

SEQ ID NO: 347798 - RNA, 23 nt, Artificial Sequence
  Synthetic
cucugagguuucuggggucauug

SEQ ID NO: 347799 - RNA, 24 nt, Artificial Sequence
  Synthetic
ccucugagguuucuggggucauug

SEQ ID NO: 347800 - RNA, 18 nt, Artificial Sequence
  Synthetic
augauaagaaugucauug

SEQ ID NO: 347801 - RNA, 19 nt, Artificial Sequence
  Synthetic
aaugauaagaaugucauug

SEQ ID NO: 347802 - RNA, 20 nt, Artificial Sequence
  Synthetic
aaaugauaagaaugucauug

SEQ ID NO: 347803 - RNA, 21 nt, Artificial Sequence
  Synthetic
caaaugauaagaaugucauug

SEQ ID NO: 347804 - RNA, 22 nt, Artificial Sequence
  Synthetic
ucaaaugauaagaaugucauug

SEQ ID NO: 347805 - RNA, 23 nt, Artificial Sequence
  Synthetic
uucaaaugauaagaaugucauug

SEQ ID NO: 347806 - RNA, 24 nt, Artificial Sequence
  Synthetic
cuucaaaugauaagaaugucauug

SEQ ID NO: 347807 - RNA, 18 nt, Artificial Sequence
  Synthetic
agaagcacauauucauug

SEQ ID NO: 347808 - RNA, 19 nt, Artificial Sequence
  Synthetic
aagaagcacauauucauug

SEQ ID NO: 347809 - RNA, 20 nt, Artificial Sequence
  Synthetic
aaagaagcacauauucauug

SEQ ID NO: 347810 - RNA, 21 nt, Artificial Sequence
  Synthetic
aaaagaagcacauauucauug

SEQ ID NO: 347811 - RNA, 22 nt, Artificial Sequence
  Synthetic
uaaaagaagcacauauucauug

SEQ ID NO: 347812 - RNA, 23 nt, Artificial Sequence
  Synthetic
uuaaaagaagcacauauucauug

SEQ ID NO: 347813 - RNA, 24 nt, Artificial Sequence
  Synthetic
uuuaaaagaagcacauauucauug

SEQ ID NO: 347814 - RNA, 18 nt, Artificial Sequence
  Synthetic
auggucuuuguuucauug

SEQ ID NO: 347815 - RNA, 19 nt, Artificial Sequence
  Synthetic
gauggucuuuguuucauug

SEQ ID NO: 347816 - RNA, 20 nt, Artificial Sequence
  Synthetic
ggauggucuuuguuucauug

SEQ ID NO: 347817 - RNA, 21 nt, Artificial Sequence
  Synthetic
uggauggucuuuguuucauug

SEQ ID NO: 347818 - RNA, 22 nt, Artificial Sequence
  Synthetic
auggauggucuuuguuucauug

SEQ ID NO: 347819 - RNA, 23 nt, Artificial Sequence
  Synthetic
aauggauggucuuuguuucauug

SEQ ID NO: 347820 - RNA, 24 nt, Artificial Sequence
  Synthetic
aaauggauggucuuuguuucauug

SEQ ID NO: 347821 - RNA, 18 nt, Artificial Sequence
  Synthetic
uauguaagauuuucauug

SEQ ID NO: 347822 - RNA, 19 nt, Artificial Sequence
  Synthetic
uuauguaagauuuucauug

SEQ ID NO: 347823 - RNA, 20 nt, Artificial Sequence
  Synthetic
auuauguaagauuuucauug

SEQ ID NO: 347824 - RNA, 21 nt, Artificial Sequence
  Synthetic
gauuauguaagauuuucauug

SEQ ID NO: 347825 - RNA, 22 nt, Artificial Sequence
  Synthetic
ugauuauguaagauuuucauug

SEQ ID NO: 347826 - RNA, 23 nt, Artificial Sequence
  Synthetic
augauuauguaagauuuucauug

SEQ ID NO: 347827 - RNA, 24 nt, Artificial Sequence
  Synthetic
aaugauuauguaagauuuucauug

SEQ ID NO: 347828 - RNA, 18 nt, Artificial Sequence
  Synthetic
cuguaacuuggaagauug

SEQ ID NO: 347829 - RNA, 19 nt, Artificial Sequence
  Synthetic
gcuguaacuuggaagauug

SEQ ID NO: 347830 - RNA, 20 nt, Artificial Sequence
  Synthetic
ugcuguaacuuggaagauug

SEQ ID NO: 347831 - RNA, 21 nt, Artificial Sequence
  Synthetic
cugcuguaacuuggaagauug

SEQ ID NO: 347832 - RNA, 22 nt, Artificial Sequence
  Synthetic
acugcuguaacuuggaagauug

SEQ ID NO: 347833 - RNA, 23 nt, Artificial Sequence
  Synthetic
aacugcuguaacuuggaagauug

SEQ ID NO: 347834 - RNA, 24 nt, Artificial Sequence
  Synthetic
gaacugcuguaacuuggaagauug

SEQ ID NO: 347835 - RNA, 18 nt, Artificial Sequence
  Synthetic
cagaaaugauuaagauug

SEQ ID NO: 347836 - RNA, 19 nt, Artificial Sequence
  Synthetic
ucagaaaugauuaagauug

SEQ ID NO: 347837 - RNA, 20 nt, Artificial Sequence
  Synthetic
gucagaaaugauuaagauug

SEQ ID NO: 347838 - RNA, 21 nt, Artificial Sequence
  Synthetic
agucagaaaugauuaagauug

SEQ ID NO: 347839 - RNA, 22 nt, Artificial Sequence
  Synthetic
aagucagaaaugauuaagauug

SEQ ID NO: 347840 - RNA, 23 nt, Artificial Sequence
  Synthetic
aaagucagaaaugauuaagauug

SEQ ID NO: 347841 - RNA, 24 nt, Artificial Sequence
  Synthetic
aaaagucagaaaugauuaagauug

SEQ ID NO: 347842 - RNA, 18 nt, Artificial Sequence
  Synthetic
cucagggaacacagauug

SEQ ID NO: 347843 - RNA, 19 nt, Artificial Sequence
  Synthetic
ucucagggaacacagauug

SEQ ID NO: 347844 - RNA, 20 nt, Artificial Sequence
  Synthetic
aucucagggaacacagauug

SEQ ID NO: 347845 - RNA, 21 nt, Artificial Sequence
  Synthetic
gaucucagggaacacagauug

SEQ ID NO: 347846 - RNA, 22 nt, Artificial Sequence
  Synthetic
ggaucucagggaacacagauug

SEQ ID NO: 347847 - RNA, 23 nt, Artificial Sequence
  Synthetic
aggaucucagggaacacagauug

SEQ ID NO: 347848 - RNA, 24 nt, Artificial Sequence
  Synthetic
aaggaucucagggaacacagauug

SEQ ID NO: 347849 - RNA, 18 nt, Artificial Sequence
  Synthetic
agaaaccuguacagauug

SEQ ID NO: 347850 - RNA, 19 nt, Artificial Sequence
  Synthetic
gagaaaccuguacagauug

SEQ ID NO: 347851 - RNA, 20 nt, Artificial Sequence
  Synthetic
agagaaaccuguacagauug

SEQ ID NO: 347852 - RNA, 21 nt, Artificial Sequence
  Synthetic
gagagaaaccuguacagauug

SEQ ID NO: 347853 - RNA, 22 nt, Artificial Sequence
  Synthetic
agagagaaaccuguacagauug

SEQ ID NO: 347854 - RNA, 23 nt, Artificial Sequence
  Synthetic
uagagagaaaccuguacagauug

SEQ ID NO: 347855 - RNA, 24 nt, Artificial Sequence
  Synthetic
guagagagaaaccuguacagauug

SEQ ID NO: 347856 - RNA, 18 nt, Artificial Sequence
  Synthetic
uugugaguguccagauug

SEQ ID NO: 347857 - RNA, 19 nt, Artificial Sequence
  Synthetic
guugugaguguccagauug

SEQ ID NO: 347858 - RNA, 20 nt, Artificial Sequence
  Synthetic
aguugugaguguccagauug

SEQ ID NO: 347859 - RNA, 21 nt, Artificial Sequence
  Synthetic
gaguugugaguguccagauug

SEQ ID NO: 347860 - RNA, 22 nt, Artificial Sequence
  Synthetic
ggaguugugaguguccagauug

SEQ ID NO: 347861 - RNA, 23 nt, Artificial Sequence
  Synthetic
gggaguugugaguguccagauug

SEQ ID NO: 347862 - RNA, 24 nt, Artificial Sequence
  Synthetic
ugggaguugugaguguccagauug

SEQ ID NO: 347863 - RNA, 18 nt, Artificial Sequence
  Synthetic
aaauuugauuucagauug

SEQ ID NO: 347864 - RNA, 19 nt, Artificial Sequence
  Synthetic
gaaauuugauuucagauug

SEQ ID NO: 347865 - RNA, 20 nt, Artificial Sequence
  Synthetic
ggaaauuugauuucagauug

SEQ ID NO: 347866 - RNA, 21 nt, Artificial Sequence
  Synthetic
gggaaauuugauuucagauug

SEQ ID NO: 347867 - RNA, 22 nt, Artificial Sequence
  Synthetic
agggaaauuugauuucagauug

SEQ ID NO: 347868 - RNA, 23 nt, Artificial Sequence
  Synthetic
aagggaaauuugauuucagauug

SEQ ID NO: 347869 - RNA, 24 nt, Artificial Sequence
  Synthetic
aaagggaaauuugauuucagauug

SEQ ID NO: 347870 - RNA, 18 nt, Artificial Sequence
  Synthetic
uugaaaacauagagauug

SEQ ID NO: 347871 - RNA, 19 nt, Artificial Sequence
  Synthetic
guugaaaacauagagauug

SEQ ID NO: 347872 - RNA, 20 nt, Artificial Sequence
  Synthetic
gguugaaaacauagagauug

SEQ ID NO: 347873 - RNA, 21 nt, Artificial Sequence
  Synthetic
ugguugaaaacauagagauug

SEQ ID NO: 347874 - RNA, 22 nt, Artificial Sequence
  Synthetic
augguugaaaacauagagauug

SEQ ID NO: 347875 - RNA, 23 nt, Artificial Sequence
  Synthetic
aaugguugaaaacauagagauug

SEQ ID NO: 347876 - RNA, 24 nt, Artificial Sequence
  Synthetic
aaaugguugaaaacauagagauug

SEQ ID NO: 347877 - RNA, 18 nt, Artificial Sequence
  Synthetic
uggaaaugauagagauug

SEQ ID NO: 347878 - RNA, 19 nt, Artificial Sequence
  Synthetic
cuggaaaugauagagauug

SEQ ID NO: 347879 - RNA, 20 nt, Artificial Sequence
  Synthetic
ucuggaaaugauagagauug

SEQ ID NO: 347880 - RNA, 21 nt, Artificial Sequence
  Synthetic
gucuggaaaugauagagauug

SEQ ID NO: 347881 - RNA, 22 nt, Artificial Sequence
  Synthetic
ugucuggaaaugauagagauug

SEQ ID NO: 347882 - RNA, 23 nt, Artificial Sequence
  Synthetic
augucuggaaaugauagagauug

SEQ ID NO: 347883 - RNA, 24 nt, Artificial Sequence
  Synthetic
gaugucuggaaaugauagagauug

SEQ ID NO: 347884 - RNA, 18 nt, Artificial Sequence
  Synthetic
gcuuuuacaaggagauug

SEQ ID NO: 347885 - RNA, 19 nt, Artificial Sequence
  Synthetic
ugcuuuuacaaggagauug

SEQ ID NO: 347886 - RNA, 20 nt, Artificial Sequence
  Synthetic
cugcuuuuacaaggagauug

SEQ ID NO: 347887 - RNA, 21 nt, Artificial Sequence
  Synthetic
gcugcuuuuacaaggagauug

SEQ ID NO: 347888 - RNA, 22 nt, Artificial Sequence
  Synthetic
agcugcuuuuacaaggagauug

SEQ ID NO: 347889 - RNA, 23 nt, Artificial Sequence
  Synthetic
uagcugcuuuuacaaggagauug

SEQ ID NO: 347890 - RNA, 24 nt, Artificial Sequence
  Synthetic
guagcugcuuuuacaaggagauug

SEQ ID NO: 347891 - RNA, 18 nt, Artificial Sequence
  Synthetic
ggcguuggcaggagauug

SEQ ID NO: 347892 - RNA, 19 nt, Artificial Sequence
  Synthetic
aggcguuggcaggagauug

SEQ ID NO: 347893 - RNA, 20 nt, Artificial Sequence
  Synthetic
gaggcguuggcaggagauug

SEQ ID NO: 347894 - RNA, 21 nt, Artificial Sequence
  Synthetic
ggaggcguuggcaggagauug

SEQ ID NO: 347895 - RNA, 22 nt, Artificial Sequence
  Synthetic
gggaggcguuggcaggagauug

SEQ ID NO: 347896 - RNA, 23 nt, Artificial Sequence
  Synthetic
ugggaggcguuggcaggagauug

SEQ ID NO: 347897 - RNA, 24 nt, Artificial Sequence
  Synthetic
gugggaggcguuggcaggagauug

SEQ ID NO: 347898 - RNA, 18 nt, Artificial Sequence
  Synthetic
agagcacaagggagauug

SEQ ID NO: 347899 - RNA, 19 nt, Artificial Sequence
  Synthetic
aagagcacaagggagauug

SEQ ID NO: 347900 - RNA, 20 nt, Artificial Sequence
  Synthetic
gaagagcacaagggagauug

SEQ ID NO: 347901 - RNA, 21 nt, Artificial Sequence
  Synthetic
agaagagcacaagggagauug

SEQ ID NO: 347902 - RNA, 22 nt, Artificial Sequence
  Synthetic
gagaagagcacaagggagauug

SEQ ID NO: 347903 - RNA, 23 nt, Artificial Sequence
  Synthetic
agagaagagcacaagggagauug

SEQ ID NO: 347904 - RNA, 24 nt, Artificial Sequence
  Synthetic
aagagaagagcacaagggagauug

SEQ ID NO: 347905 - RNA, 18 nt, Artificial Sequence
  Synthetic
ggggugggggugagauug

SEQ ID NO: 347906 - RNA, 19 nt, Artificial Sequence
  Synthetic
uggggugggggugagauug

SEQ ID NO: 347907 - RNA, 20 nt, Artificial Sequence
  Synthetic
guggggugggggugagauug

SEQ ID NO: 347908 - RNA, 21 nt, Artificial Sequence
  Synthetic
aguggggugggggugagauug

SEQ ID NO: 347909 - RNA, 22 nt, Artificial Sequence
  Synthetic
caguggggugggggugagauug

SEQ ID NO: 347910 - RNA, 23 nt, Artificial Sequence
  Synthetic
ucaguggggugggggugagauug

SEQ ID NO: 347911 - RNA, 24 nt, Artificial Sequence
  Synthetic
aucaguggggugggggugagauug

SEQ ID NO: 347912 - RNA, 18 nt, Artificial Sequence
  Synthetic
gccugccuuacuagauug

SEQ ID NO: 347913 - RNA, 19 nt, Artificial Sequence
  Synthetic
ggccugccuuacuagauug

SEQ ID NO: 347914 - RNA, 20 nt, Artificial Sequence
  Synthetic
uggccugccuuacuagauug

SEQ ID NO: 347915 - RNA, 21 nt, Artificial Sequence
  Synthetic
uuggccugccuuacuagauug

SEQ ID NO: 347916 - RNA, 22 nt, Artificial Sequence
  Synthetic
guuggccugccuuacuagauug

SEQ ID NO: 347917 - RNA, 23 nt, Artificial Sequence
  Synthetic
cguuggccugccuuacuagauug

SEQ ID NO: 347918 - RNA, 24 nt, Artificial Sequence
  Synthetic
acguuggccugccuuacuagauug

SEQ ID NO: 347919 - RNA, 18 nt, Artificial Sequence
  Synthetic
uuaucuacuugucgauug

SEQ ID NO: 347920 - RNA, 19 nt, Artificial Sequence
  Synthetic
uuuaucuacuugucgauug

SEQ ID NO: 347921 - RNA, 20 nt, Artificial Sequence
  Synthetic
cuuuaucuacuugucgauug

SEQ ID NO: 347922 - RNA, 21 nt, Artificial Sequence
  Synthetic
ucuuuaucuacuugucgauug

SEQ ID NO: 347923 - RNA, 22 nt, Artificial Sequence
  Synthetic
uucuuuaucuacuugucgauug

SEQ ID NO: 347924 - RNA, 23 nt, Artificial Sequence
  Synthetic
uuucuuuaucuacuugucgauug

SEQ ID NO: 347925 - RNA, 24 nt, Artificial Sequence
  Synthetic
guuucuuuaucuacuugucgauug

SEQ ID NO: 347926 - RNA, 18 nt, Artificial Sequence
  Synthetic
guaaaggcagcaggauug

SEQ ID NO: 347927 - RNA, 19 nt, Artificial Sequence
  Synthetic
aguaaaggcagcaggauug

SEQ ID NO: 347928 - RNA, 20 nt, Artificial Sequence
  Synthetic
gaguaaaggcagcaggauug

SEQ ID NO: 347929 - RNA, 21 nt, Artificial Sequence
  Synthetic
ggaguaaaggcagcaggauug

SEQ ID NO: 347930 - RNA, 22 nt, Artificial Sequence
  Synthetic
gggaguaaaggcagcaggauug

SEQ ID NO: 347931 - RNA, 23 nt, Artificial Sequence
  Synthetic
agggaguaaaggcagcaggauug

SEQ ID NO: 347932 - RNA, 24 nt, Artificial Sequence
  Synthetic
gagggaguaaaggcagcaggauug

SEQ ID NO: 347933 - RNA, 18 nt, Artificial Sequence
  Synthetic
gaguggguaucaggauug

SEQ ID NO: 347934 - RNA, 19 nt, Artificial Sequence
  Synthetic
ugaguggguaucaggauug

SEQ ID NO: 347935 - RNA, 20 nt, Artificial Sequence
  Synthetic
gugaguggguaucaggauug

SEQ ID NO: 347936 - RNA, 21 nt, Artificial Sequence
  Synthetic
ggugaguggguaucaggauug

SEQ ID NO: 347937 - RNA, 22 nt, Artificial Sequence
  Synthetic
gggugaguggguaucaggauug

SEQ ID NO: 347938 - RNA, 23 nt, Artificial Sequence
  Synthetic
ggggugaguggguaucaggauug

SEQ ID NO: 347939 - RNA, 24 nt, Artificial Sequence
  Synthetic
gggggugaguggguaucaggauug

SEQ ID NO: 347940 - RNA, 18 nt, Artificial Sequence
  Synthetic
uuuucuguuuuaggauug

SEQ ID NO: 347941 - RNA, 19 nt, Artificial Sequence
  Synthetic
cuuuucuguuuuaggauug

SEQ ID NO: 347942 - RNA, 20 nt, Artificial Sequence
  Synthetic
acuuuucuguuuuaggauug

SEQ ID NO: 347943 - RNA, 21 nt, Artificial Sequence
  Synthetic
uacuuuucuguuuuaggauug

SEQ ID NO: 347944 - RNA, 22 nt, Artificial Sequence
  Synthetic
uuacuuuucuguuuuaggauug

SEQ ID NO: 347945 - RNA, 23 nt, Artificial Sequence
  Synthetic
auuacuuuucuguuuuaggauug

SEQ ID NO: 347946 - RNA, 24 nt, Artificial Sequence
  Synthetic
cauuacuuuucuguuuuaggauug

SEQ ID NO: 347947 - RNA, 18 nt, Artificial Sequence
  Synthetic
acaccaguugggggauug

SEQ ID NO: 347948 - RNA, 19 nt, Artificial Sequence
  Synthetic
cacaccaguugggggauug

SEQ ID NO: 347949 - RNA, 20 nt, Artificial Sequence
  Synthetic
acacaccaguugggggauug

SEQ ID NO: 347950 - RNA, 21 nt, Artificial Sequence
  Synthetic
cacacaccaguugggggauug

SEQ ID NO: 347951 - RNA, 22 nt, Artificial Sequence
  Synthetic
ucacacaccaguugggggauug

SEQ ID NO: 347952 - RNA, 23 nt, Artificial Sequence
  Synthetic
aucacacaccaguugggggauug

SEQ ID NO: 347953 - RNA, 24 nt, Artificial Sequence
  Synthetic
caucacacaccaguugggggauug

SEQ ID NO: 347954 - RNA, 18 nt, Artificial Sequence
  Synthetic
ugauuugcuaauggauug

SEQ ID NO: 347955 - RNA, 19 nt, Artificial Sequence
  Synthetic
augauuugcuaauggauug

SEQ ID NO: 347956 - RNA, 20 nt, Artificial Sequence
  Synthetic
aaugauuugcuaauggauug

SEQ ID NO: 347957 - RNA, 21 nt, Artificial Sequence
  Synthetic
aaaugauuugcuaauggauug

SEQ ID NO: 347958 - RNA, 22 nt, Artificial Sequence
  Synthetic
uaaaugauuugcuaauggauug

SEQ ID NO: 347959 - RNA, 23 nt, Artificial Sequence
  Synthetic
uuaaaugauuugcuaauggauug

SEQ ID NO: 347960 - RNA, 24 nt, Artificial Sequence
  Synthetic
guuaaaugauuugcuaauggauug

SEQ ID NO: 347961 - RNA, 18 nt, Artificial Sequence
  Synthetic
aauacuaguaauggauug

SEQ ID NO: 347962 - RNA, 19 nt, Artificial Sequence
  Synthetic
aaauacuaguaauggauug

SEQ ID NO: 347963 - RNA, 20 nt, Artificial Sequence
  Synthetic
uaaauacuaguaauggauug

SEQ ID NO: 347964 - RNA, 21 nt, Artificial Sequence
  Synthetic
uuaaauacuaguaauggauug

SEQ ID NO: 347965 - RNA, 22 nt, Artificial Sequence
  Synthetic
uuuaaauacuaguaauggauug

SEQ ID NO: 347966 - RNA, 23 nt, Artificial Sequence
  Synthetic
uuuuaaauacuaguaauggauug

SEQ ID NO: 347967 - RNA, 24 nt, Artificial Sequence
  Synthetic
cuuuuaaauacuaguaauggauug

SEQ ID NO: 347968 - RNA, 18 nt, Artificial Sequence
  Synthetic
aaaauagaauuuggauug

SEQ ID NO: 347969 - RNA, 19 nt, Artificial Sequence
  Synthetic
uaaaauagaauuuggauug

SEQ ID NO: 347970 - RNA, 20 nt, Artificial Sequence
  Synthetic
guaaaauagaauuuggauug

SEQ ID NO: 347971 - RNA, 21 nt, Artificial Sequence
  Synthetic
aguaaaauagaauuuggauug

SEQ ID NO: 347972 - RNA, 22 nt, Artificial Sequence
  Synthetic
caguaaaauagaauuuggauug

SEQ ID NO: 347973 - RNA, 23 nt, Artificial Sequence
  Synthetic
ucaguaaaauagaauuuggauug

SEQ ID NO: 347974 - RNA, 24 nt, Artificial Sequence
  Synthetic
aucaguaaaauagaauuuggauug

SEQ ID NO: 347975 - RNA, 18 nt, Artificial Sequence
  Synthetic
gaagaaaauucaugauug

SEQ ID NO: 347976 - RNA, 19 nt, Artificial Sequence
  Synthetic
ugaagaaaauucaugauug

SEQ ID NO: 347977 - RNA, 20 nt, Artificial Sequence
  Synthetic
augaagaaaauucaugauug

SEQ ID NO: 347978 - RNA, 21 nt, Artificial Sequence
  Synthetic
caugaagaaaauucaugauug

SEQ ID NO: 347979 - RNA, 22 nt, Artificial Sequence
  Synthetic
ccaugaagaaaauucaugauug

SEQ ID NO: 347980 - RNA, 23 nt, Artificial Sequence
  Synthetic
gccaugaagaaaauucaugauug

SEQ ID NO: 347981 - RNA, 24 nt, Artificial Sequence
  Synthetic
ugccaugaagaaaauucaugauug

SEQ ID NO: 347982 - RNA, 18 nt, Artificial Sequence
  Synthetic
cauuaacucauaugauug

SEQ ID NO: 347983 - RNA, 19 nt, Artificial Sequence
  Synthetic
ccauuaacucauaugauug

SEQ ID NO: 347984 - RNA, 20 nt, Artificial Sequence
  Synthetic
gccauuaacucauaugauug

SEQ ID NO: 347985 - RNA, 21 nt, Artificial Sequence
  Synthetic
agccauuaacucauaugauug

SEQ ID NO: 347986 - RNA, 22 nt, Artificial Sequence
  Synthetic
aagccauuaacucauaugauug

SEQ ID NO: 347987 - RNA, 23 nt, Artificial Sequence
  Synthetic
uaagccauuaacucauaugauug

SEQ ID NO: 347988 - RNA, 24 nt, Artificial Sequence
  Synthetic
uuaagccauuaacucauaugauug

SEQ ID NO: 347989 - RNA, 18 nt, Artificial Sequence
  Synthetic
uaacuuccccagugauug

SEQ ID NO: 347990 - RNA, 19 nt, Artificial Sequence
  Synthetic
guaacuuccccagugauug

SEQ ID NO: 347991 - RNA, 20 nt, Artificial Sequence
  Synthetic
aguaacuuccccagugauug

SEQ ID NO: 347992 - RNA, 21 nt, Artificial Sequence
  Synthetic
aaguaacuuccccagugauug

SEQ ID NO: 347993 - RNA, 22 nt, Artificial Sequence
  Synthetic
gaaguaacuuccccagugauug

SEQ ID NO: 347994 - RNA, 23 nt, Artificial Sequence
  Synthetic
ggaaguaacuuccccagugauug

SEQ ID NO: 347995 - RNA, 24 nt, Artificial Sequence
  Synthetic
aggaaguaacuuccccagugauug

SEQ ID NO: 347996 - RNA, 18 nt, Artificial Sequence
  Synthetic
caugguuauuagugauug

SEQ ID NO: 347997 - RNA, 19 nt, Artificial Sequence
  Synthetic
ccaugguuauuagugauug

SEQ ID NO: 347998 - RNA, 20 nt, Artificial Sequence
  Synthetic
accaugguuauuagugauug

SEQ ID NO: 347999 - RNA, 21 nt, Artificial Sequence
  Synthetic
uaccaugguuauuagugauug

SEQ ID NO: 348000 - RNA, 22 nt, Artificial Sequence
  Synthetic
uuaccaugguuauuagugauug

SEQ ID NO: 348001 - RNA, 23 nt, Artificial Sequence
  Synthetic
cuuaccaugguuauuagugauug

SEQ ID NO: 348002 - RNA, 24 nt, Artificial Sequence
  Synthetic
ccuuaccaugguuauuagugauug

SEQ ID NO: 348003 - RNA, 18 nt, Artificial Sequence
  Synthetic
ggacuucaaaauugauug

SEQ ID NO: 348004 - RNA, 19 nt, Artificial Sequence
  Synthetic
aggacuucaaaauugauug

SEQ ID NO: 348005 - RNA, 20 nt, Artificial Sequence
  Synthetic
aaggacuucaaaauugauug

SEQ ID NO: 348006 - RNA, 21 nt, Artificial Sequence
  Synthetic
uaaggacuucaaaauugauug

SEQ ID NO: 348007 - RNA, 22 nt, Artificial Sequence
  Synthetic
uuaaggacuucaaaauugauug

SEQ ID NO: 348008 - RNA, 23 nt, Artificial Sequence
  Synthetic
cuuaaggacuucaaaauugauug

SEQ ID NO: 348009 - RNA, 24 nt, Artificial Sequence
  Synthetic
ucuuaaggacuucaaaauugauug

SEQ ID NO: 348010 - RNA, 18 nt, Artificial Sequence
  Synthetic
aauuuuuaaaacauauug

SEQ ID NO: 348011 - RNA, 19 nt, Artificial Sequence
  Synthetic
uaauuuuuaaaacauauug

SEQ ID NO: 348012 - RNA, 20 nt, Artificial Sequence
  Synthetic
uuaauuuuuaaaacauauug

SEQ ID NO: 348013 - RNA, 21 nt, Artificial Sequence
  Synthetic
uuuaauuuuuaaaacauauug

SEQ ID NO: 348014 - RNA, 22 nt, Artificial Sequence
  Synthetic
uuuuaauuuuuaaaacauauug

SEQ ID NO: 348015 - RNA, 23 nt, Artificial Sequence
  Synthetic
uuuuuaauuuuuaaaacauauug

SEQ ID NO: 348016 - RNA, 24 nt, Artificial Sequence
  Synthetic
auuuuuaauuuuuaaaacauauug

SEQ ID NO: 348017 - RNA, 18 nt, Artificial Sequence
  Synthetic
uuaagugugcacauauug

SEQ ID NO: 348018 - RNA, 19 nt, Artificial Sequence
  Synthetic
uuuaagugugcacauauug

SEQ ID NO: 348019 - RNA, 20 nt, Artificial Sequence
  Synthetic
uuuuaagugugcacauauug

SEQ ID NO: 348020 - RNA, 21 nt, Artificial Sequence
  Synthetic
guuuuaagugugcacauauug

SEQ ID NO: 348021 - RNA, 22 nt, Artificial Sequence
  Synthetic
aguuuuaagugugcacauauug

SEQ ID NO: 348022 - RNA, 23 nt, Artificial Sequence
  Synthetic
aaguuuuaagugugcacauauug

SEQ ID NO: 348023 - RNA, 24 nt, Artificial Sequence
  Synthetic
uaaguuuuaagugugcacauauug

SEQ ID NO: 348024 - RNA, 18 nt, Artificial Sequence
  Synthetic
cugagaagaaagauauug

SEQ ID NO: 348025 - RNA, 19 nt, Artificial Sequence
  Synthetic
ccugagaagaaagauauug

SEQ ID NO: 348026 - RNA, 20 nt, Artificial Sequence
  Synthetic
cccugagaagaaagauauug

SEQ ID NO: 348027 - RNA, 21 nt, Artificial Sequence
  Synthetic
acccugagaagaaagauauug

SEQ ID NO: 348028 - RNA, 22 nt, Artificial Sequence
  Synthetic
uacccugagaagaaagauauug

SEQ ID NO: 348029 - RNA, 23 nt, Artificial Sequence
  Synthetic
uuacccugagaagaaagauauug

SEQ ID NO: 348030 - RNA, 24 nt, Artificial Sequence
  Synthetic
auuacccugagaagaaagauauug

SEQ ID NO: 348031 - RNA, 18 nt, Artificial Sequence
  Synthetic
gguggugucaagauauug

SEQ ID NO: 348032 - RNA, 19 nt, Artificial Sequence
  Synthetic
ugguggugucaagauauug

SEQ ID NO: 348033 - RNA, 20 nt, Artificial Sequence
  Synthetic
cugguggugucaagauauug

SEQ ID NO: 348034 - RNA, 21 nt, Artificial Sequence
  Synthetic
ucugguggugucaagauauug

SEQ ID NO: 348035 - RNA, 22 nt, Artificial Sequence
  Synthetic
cucugguggugucaagauauug

SEQ ID NO: 348036 - RNA, 23 nt, Artificial Sequence
  Synthetic
ucucugguggugucaagauauug

SEQ ID NO: 348037 - RNA, 24 nt, Artificial Sequence
  Synthetic
uucucugguggugucaagauauug

SEQ ID NO: 348038 - RNA, 18 nt, Artificial Sequence
  Synthetic
gggcuucuuuagauauug

SEQ ID NO: 348039 - RNA, 19 nt, Artificial Sequence
  Synthetic
agggcuucuuuagauauug

SEQ ID NO: 348040 - RNA, 20 nt, Artificial Sequence
  Synthetic
cagggcuucuuuagauauug

SEQ ID NO: 348041 - RNA, 21 nt, Artificial Sequence
  Synthetic
gcagggcuucuuuagauauug

SEQ ID NO: 348042 - RNA, 22 nt, Artificial Sequence
  Synthetic
ugcagggcuucuuuagauauug

SEQ ID NO: 348043 - RNA, 23 nt, Artificial Sequence
  Synthetic
uugcagggcuucuuuagauauug

SEQ ID NO: 348044 - RNA, 24 nt, Artificial Sequence
  Synthetic
cuugcagggcuucuuuagauauug

SEQ ID NO: 348045 - RNA, 18 nt, Artificial Sequence
  Synthetic
ugaaggcaagauauauug

SEQ ID NO: 348046 - RNA, 19 nt, Artificial Sequence
  Synthetic
uugaaggcaagauauauug

SEQ ID NO: 348047 - RNA, 20 nt, Artificial Sequence
  Synthetic
cuugaaggcaagauauauug

SEQ ID NO: 348048 - RNA, 21 nt, Artificial Sequence
  Synthetic
ccuugaaggcaagauauauug

SEQ ID NO: 348049 - RNA, 22 nt, Artificial Sequence
  Synthetic
gccuugaaggcaagauauauug

SEQ ID NO: 348050 - RNA, 23 nt, Artificial Sequence
  Synthetic
ugccuugaaggcaagauauauug

SEQ ID NO: 348051 - RNA, 24 nt, Artificial Sequence
  Synthetic
gugccuugaaggcaagauauauug

SEQ ID NO: 348052 - RNA, 18 nt, Artificial Sequence
  Synthetic
aggaagguguauauauug

SEQ ID NO: 348053 - RNA, 19 nt, Artificial Sequence
  Synthetic
gaggaagguguauauauug

SEQ ID NO: 348054 - RNA, 20 nt, Artificial Sequence
  Synthetic
ugaggaagguguauauauug

SEQ ID NO: 348055 - RNA, 21 nt, Artificial Sequence
  Synthetic
augaggaagguguauauauug

SEQ ID NO: 348056 - RNA, 22 nt, Artificial Sequence
  Synthetic
caugaggaagguguauauauug

SEQ ID NO: 348057 - RNA, 23 nt, Artificial Sequence
  Synthetic
acaugaggaagguguauauauug

SEQ ID NO: 348058 - RNA, 24 nt, Artificial Sequence
  Synthetic
uacaugaggaagguguauauauug

SEQ ID NO: 348059 - RNA, 18 nt, Artificial Sequence
  Synthetic
caggaucagucuauauug

SEQ ID NO: 348060 - RNA, 19 nt, Artificial Sequence
  Synthetic
gcaggaucagucuauauug

SEQ ID NO: 348061 - RNA, 20 nt, Artificial Sequence
  Synthetic
agcaggaucagucuauauug

SEQ ID NO: 348062 - RNA, 21 nt, Artificial Sequence
  Synthetic
aagcaggaucagucuauauug

SEQ ID NO: 348063 - RNA, 22 nt, Artificial Sequence
  Synthetic
uaagcaggaucagucuauauug

SEQ ID NO: 348064 - RNA, 23 nt, Artificial Sequence
  Synthetic
auaagcaggaucagucuauauug

SEQ ID NO: 348065 - RNA, 24 nt, Artificial Sequence
  Synthetic
aauaagcaggaucagucuauauug

SEQ ID NO: 348066 - RNA, 18 nt, Artificial Sequence
  Synthetic
auucagguaauuauauug

SEQ ID NO: 348067 - RNA, 19 nt, Artificial Sequence
  Synthetic
uauucagguaauuauauug

SEQ ID NO: 348068 - RNA, 20 nt, Artificial Sequence
  Synthetic
guauucagguaauuauauug

SEQ ID NO: 348069 - RNA, 21 nt, Artificial Sequence
  Synthetic
uguauucagguaauuauauug

SEQ ID NO: 348070 - RNA, 22 nt, Artificial Sequence
  Synthetic
uuguauucagguaauuauauug

SEQ ID NO: 348071 - RNA, 23 nt, Artificial Sequence
  Synthetic
guuguauucagguaauuauauug

SEQ ID NO: 348072 - RNA, 24 nt, Artificial Sequence
  Synthetic
uguuguauucagguaauuauauug

SEQ ID NO: 348073 - RNA, 18 nt, Artificial Sequence
  Synthetic
aaucccauuuuuauauug

SEQ ID NO: 348074 - RNA, 19 nt, Artificial Sequence
  Synthetic
caaucccauuuuuauauug

SEQ ID NO: 348075 - RNA, 20 nt, Artificial Sequence
  Synthetic
acaaucccauuuuuauauug

SEQ ID NO: 348076 - RNA, 21 nt, Artificial Sequence
  Synthetic
gacaaucccauuuuuauauug

SEQ ID NO: 348077 - RNA, 22 nt, Artificial Sequence
  Synthetic
agacaaucccauuuuuauauug

SEQ ID NO: 348078 - RNA, 23 nt, Artificial Sequence
  Synthetic
aagacaaucccauuuuuauauug

SEQ ID NO: 348079 - RNA, 24 nt, Artificial Sequence
  Synthetic
caagacaaucccauuuuuauauug

SEQ ID NO: 348080 - RNA, 18 nt, Artificial Sequence
  Synthetic
gcaaagagaggucuauug

SEQ ID NO: 348081 - RNA, 19 nt, Artificial Sequence
  Synthetic
agcaaagagaggucuauug

SEQ ID NO: 348082 - RNA, 20 nt, Artificial Sequence
  Synthetic
gagcaaagagaggucuauug

SEQ ID NO: 348083 - RNA, 21 nt, Artificial Sequence
  Synthetic
agagcaaagagaggucuauug

SEQ ID NO: 348084 - RNA, 22 nt, Artificial Sequence
  Synthetic
cagagcaaagagaggucuauug

SEQ ID NO: 348085 - RNA, 23 nt, Artificial Sequence
  Synthetic
acagagcaaagagaggucuauug

SEQ ID NO: 348086 - RNA, 24 nt, Artificial Sequence
  Synthetic
cacagagcaaagagaggucuauug

SEQ ID NO: 348087 - RNA, 18 nt, Artificial Sequence
  Synthetic
uaacgucauauucuauug

SEQ ID NO: 348088 - RNA, 19 nt, Artificial Sequence
  Synthetic
uuaacgucauauucuauug

SEQ ID NO: 348089 - RNA, 20 nt, Artificial Sequence
  Synthetic
uuuaacgucauauucuauug

SEQ ID NO: 348090 - RNA, 21 nt, Artificial Sequence
  Synthetic
guuuaacgucauauucuauug

SEQ ID NO: 348091 - RNA, 22 nt, Artificial Sequence
  Synthetic
aguuuaacgucauauucuauug

SEQ ID NO: 348092 - RNA, 23 nt, Artificial Sequence
  Synthetic
uaguuuaacgucauauucuauug

SEQ ID NO: 348093 - RNA, 24 nt, Artificial Sequence
  Synthetic
auaguuuaacgucauauucuauug

SEQ ID NO: 348094 - RNA, 18 nt, Artificial Sequence
  Synthetic
aaaaugguaauaguauug

SEQ ID NO: 348095 - RNA, 19 nt, Artificial Sequence
  Synthetic
aaaaaugguaauaguauug

SEQ ID NO: 348096 - RNA, 20 nt, Artificial Sequence
  Synthetic
aaaaaaugguaauaguauug

SEQ ID NO: 348097 - RNA, 21 nt, Artificial Sequence
  Synthetic
gaaaaaaugguaauaguauug

SEQ ID NO: 348098 - RNA, 22 nt, Artificial Sequence
  Synthetic
ugaaaaaaugguaauaguauug

SEQ ID NO: 348099 - RNA, 23 nt, Artificial Sequence
  Synthetic
cugaaaaaaugguaauaguauug

SEQ ID NO: 348100 - RNA, 24 nt, Artificial Sequence
  Synthetic
ucugaaaaaaugguaauaguauug

SEQ ID NO: 348101 - RNA, 18 nt, Artificial Sequence
  Synthetic
ugauaucuuuacguauug

SEQ ID NO: 348102 - RNA, 19 nt, Artificial Sequence
  Synthetic
gugauaucuuuacguauug

SEQ ID NO: 348103 - RNA, 20 nt, Artificial Sequence
  Synthetic
ugugauaucuuuacguauug

SEQ ID NO: 348104 - RNA, 21 nt, Artificial Sequence
  Synthetic
augugauaucuuuacguauug

SEQ ID NO: 348105 - RNA, 22 nt, Artificial Sequence
  Synthetic
gaugugauaucuuuacguauug

SEQ ID NO: 348106 - RNA, 23 nt, Artificial Sequence
  Synthetic
ggaugugauaucuuuacguauug

SEQ ID NO: 348107 - RNA, 24 nt, Artificial Sequence
  Synthetic
gggaugugauaucuuuacguauug

SEQ ID NO: 348108 - RNA, 18 nt, Artificial Sequence
  Synthetic
ucaauaaauuagguauug

SEQ ID NO: 348109 - RNA, 19 nt, Artificial Sequence
  Synthetic
cucaauaaauuagguauug

SEQ ID NO: 348110 - RNA, 20 nt, Artificial Sequence
  Synthetic
ucucaauaaauuagguauug

SEQ ID NO: 348111 - RNA, 18 nt, Artificial Sequence
  Synthetic
ccuaguugguggguauug

SEQ ID NO: 348112 - RNA, 19 nt, Artificial Sequence
  Synthetic
cccuaguugguggguauug

SEQ ID NO: 348113 - RNA, 20 nt, Artificial Sequence
  Synthetic
ccccuaguugguggguauug

SEQ ID NO: 348114 - RNA, 21 nt, Artificial Sequence
  Synthetic
uccccuaguugguggguauug

SEQ ID NO: 348115 - RNA, 22 nt, Artificial Sequence
  Synthetic
cuccccuaguugguggguauug

SEQ ID NO: 348116 - RNA, 23 nt, Artificial Sequence
  Synthetic
gcuccccuaguugguggguauug

SEQ ID NO: 348117 - RNA, 24 nt, Artificial Sequence
  Synthetic
agcuccccuaguugguggguauug

SEQ ID NO: 348118 - RNA, 18 nt, Artificial Sequence
  Synthetic
cuauuaaugaauguauug

SEQ ID NO: 348119 - RNA, 19 nt, Artificial Sequence
  Synthetic
ucuauuaaugaauguauug

SEQ ID NO: 348120 - RNA, 20 nt, Artificial Sequence
  Synthetic
aucuauuaaugaauguauug

SEQ ID NO: 348121 - RNA, 21 nt, Artificial Sequence
  Synthetic
aaucuauuaaugaauguauug

SEQ ID NO: 348122 - RNA, 22 nt, Artificial Sequence
  Synthetic
caaucuauuaaugaauguauug

SEQ ID NO: 348123 - RNA, 23 nt, Artificial Sequence
  Synthetic
acaaucuauuaaugaauguauug

SEQ ID NO: 348124 - RNA, 24 nt, Artificial Sequence
  Synthetic
uacaaucuauuaaugaauguauug

SEQ ID NO: 348125 - RNA, 18 nt, Artificial Sequence
  Synthetic
gacaugcagccuguauug

SEQ ID NO: 348126 - RNA, 19 nt, Artificial Sequence
  Synthetic
cgacaugcagccuguauug

SEQ ID NO: 348127 - RNA, 20 nt, Artificial Sequence
  Synthetic
acgacaugcagccuguauug

SEQ ID NO: 348128 - RNA, 21 nt, Artificial Sequence
  Synthetic
cacgacaugcagccuguauug

SEQ ID NO: 348129 - RNA, 22 nt, Artificial Sequence
  Synthetic
acacgacaugcagccuguauug

SEQ ID NO: 348130 - RNA, 23 nt, Artificial Sequence
  Synthetic
gacacgacaugcagccuguauug

SEQ ID NO: 348131 - RNA, 24 nt, Artificial Sequence
  Synthetic
agacacgacaugcagccuguauug

SEQ ID NO: 348132 - RNA, 18 nt, Artificial Sequence
  Synthetic
uacaaaugaucuguauug

SEQ ID NO: 348133 - RNA, 19 nt, Artificial Sequence
  Synthetic
auacaaaugaucuguauug

SEQ ID NO: 348134 - RNA, 20 nt, Artificial Sequence
  Synthetic
aauacaaaugaucuguauug

SEQ ID NO: 348135 - RNA, 21 nt, Artificial Sequence
  Synthetic
aaauacaaaugaucuguauug

SEQ ID NO: 348136 - RNA, 22 nt, Artificial Sequence
  Synthetic
caaauacaaaugaucuguauug

SEQ ID NO: 348137 - RNA, 23 nt, Artificial Sequence
  Synthetic
ucaaauacaaaugaucuguauug

SEQ ID NO: 348138 - RNA, 24 nt, Artificial Sequence
  Synthetic
aucaaauacaaaugaucuguauug

SEQ ID NO: 348139 - RNA, 18 nt, Artificial Sequence
  Synthetic
ccuuaagauuaauuauug

SEQ ID NO: 348140 - RNA, 19 nt, Artificial Sequence
  Synthetic
accuuaagauuaauuauug

SEQ ID NO: 348141 - RNA, 20 nt, Artificial Sequence
  Synthetic
aaccuuaagauuaauuauug

SEQ ID NO: 348142 - RNA, 21 nt, Artificial Sequence
  Synthetic
gaaccuuaagauuaauuauug

SEQ ID NO: 348143 - RNA, 22 nt, Artificial Sequence
  Synthetic
ugaaccuuaagauuaauuauug

SEQ ID NO: 348144 - RNA, 23 nt, Artificial Sequence
  Synthetic
gugaaccuuaagauuaauuauug

SEQ ID NO: 348145 - RNA, 24 nt, Artificial Sequence
  Synthetic
agugaaccuuaagauuaauuauug

SEQ ID NO: 348146 - RNA, 18 nt, Artificial Sequence
  Synthetic
aggaugcaaugauuauug

SEQ ID NO: 348147 - RNA, 19 nt, Artificial Sequence
  Synthetic
uaggaugcaaugauuauug

SEQ ID NO: 348148 - RNA, 20 nt, Artificial Sequence
  Synthetic
uuaggaugcaaugauuauug

SEQ ID NO: 348149 - RNA, 21 nt, Artificial Sequence
  Synthetic
uuuaggaugcaaugauuauug

SEQ ID NO: 348150 - RNA, 22 nt, Artificial Sequence
  Synthetic
uuuuaggaugcaaugauuauug

SEQ ID NO: 348151 - RNA, 23 nt, Artificial Sequence
  Synthetic
cuuuuaggaugcaaugauuauug

SEQ ID NO: 348152 - RNA, 24 nt, Artificial Sequence
  Synthetic
gcuuuuaggaugcaaugauuauug

SEQ ID NO: 348153 - RNA, 18 nt, Artificial Sequence
  Synthetic
cuaaaauuaugauuauug

SEQ ID NO: 348154 - RNA, 19 nt, Artificial Sequence
  Synthetic
acuaaaauuaugauuauug

SEQ ID NO: 348155 - RNA, 20 nt, Artificial Sequence
  Synthetic
aacuaaaauuaugauuauug

SEQ ID NO: 348156 - RNA, 21 nt, Artificial Sequence
  Synthetic
aaacuaaaauuaugauuauug

SEQ ID NO: 348157 - RNA, 22 nt, Artificial Sequence
  Synthetic
caaacuaaaauuaugauuauug

SEQ ID NO: 348158 - RNA, 23 nt, Artificial Sequence
  Synthetic
acaaacuaaaauuaugauuauug

SEQ ID NO: 348159 - RNA, 24 nt, Artificial Sequence
  Synthetic
uacaaacuaaaauuaugauuauug

SEQ ID NO: 348160 - RNA, 18 nt, Artificial Sequence
  Synthetic
cugcugugucacuuauug

SEQ ID NO: 348161 - RNA, 19 nt, Artificial Sequence
  Synthetic
ucugcugugucacuuauug

SEQ ID NO: 348162 - RNA, 20 nt, Artificial Sequence
  Synthetic
gucugcugugucacuuauug

SEQ ID NO: 348163 - RNA, 21 nt, Artificial Sequence
  Synthetic
ugucugcugugucacuuauug

SEQ ID NO: 348164 - RNA, 22 nt, Artificial Sequence
  Synthetic
gugucugcugugucacuuauug

SEQ ID NO: 348165 - RNA, 23 nt, Artificial Sequence
  Synthetic
agugucugcugugucacuuauug

SEQ ID NO: 348166 - RNA, 24 nt, Artificial Sequence
  Synthetic
gagugucugcugugucacuuauug

SEQ ID NO: 348167 - RNA, 18 nt, Artificial Sequence
  Synthetic
agcaauuucagcuuauug

SEQ ID NO: 348168 - RNA, 19 nt, Artificial Sequence
  Synthetic
aagcaauuucagcuuauug

SEQ ID NO: 348169 - RNA, 20 nt, Artificial Sequence
  Synthetic
aaagcaauuucagcuuauug

SEQ ID NO: 348170 - RNA, 21 nt, Artificial Sequence
  Synthetic
uaaagcaauuucagcuuauug

SEQ ID NO: 348171 - RNA, 22 nt, Artificial Sequence
  Synthetic
cuaaagcaauuucagcuuauug

SEQ ID NO: 348172 - RNA, 23 nt, Artificial Sequence
  Synthetic
ucuaaagcaauuucagcuuauug

SEQ ID NO: 348173 - RNA, 24 nt, Artificial Sequence
  Synthetic
aucuaaagcaauuucagcuuauug

SEQ ID NO: 348174 - RNA, 18 nt, Artificial Sequence
  Synthetic
gguacuucacucuuauug

SEQ ID NO: 348175 - RNA, 19 nt, Artificial Sequence
  Synthetic
ugguacuucacucuuauug

SEQ ID NO: 348176 - RNA, 20 nt, Artificial Sequence
  Synthetic
uugguacuucacucuuauug

SEQ ID NO: 348177 - RNA, 21 nt, Artificial Sequence
  Synthetic
cuugguacuucacucuuauug

SEQ ID NO: 348178 - RNA, 22 nt, Artificial Sequence
  Synthetic
gcuugguacuucacucuuauug

SEQ ID NO: 348179 - RNA, 23 nt, Artificial Sequence
  Synthetic
ugcuugguacuucacucuuauug

SEQ ID NO: 348180 - RNA, 24 nt, Artificial Sequence
  Synthetic
cugcuugguacuucacucuuauug

SEQ ID NO: 348181 - RNA, 18 nt, Artificial Sequence
  Synthetic
ugcuacagggucuuauug

SEQ ID NO: 348182 - RNA, 19 nt, Artificial Sequence
  Synthetic
gugcuacagggucuuauug

SEQ ID NO: 348183 - RNA, 20 nt, Artificial Sequence
  Synthetic
ugugcuacagggucuuauug

SEQ ID NO: 348184 - RNA, 21 nt, Artificial Sequence
  Synthetic
augugcuacagggucuuauug

SEQ ID NO: 348185 - RNA, 22 nt, Artificial Sequence
  Synthetic
uaugugcuacagggucuuauug

SEQ ID NO: 348186 - RNA, 23 nt, Artificial Sequence
  Synthetic
auaugugcuacagggucuuauug

SEQ ID NO: 348187 - RNA, 24 nt, Artificial Sequence
  Synthetic
uauaugugcuacagggucuuauug

SEQ ID NO: 348188 - RNA, 18 nt, Artificial Sequence
  Synthetic
uacaagugauucuuauug

SEQ ID NO: 348189 - RNA, 19 nt, Artificial Sequence
  Synthetic
guacaagugauucuuauug

SEQ ID NO: 348190 - RNA, 20 nt, Artificial Sequence
  Synthetic
aguacaagugauucuuauug

SEQ ID NO: 348191 - RNA, 21 nt, Artificial Sequence
  Synthetic
uaguacaagugauucuuauug

SEQ ID NO: 348192 - RNA, 22 nt, Artificial Sequence
  Synthetic
uuaguacaagugauucuuauug

SEQ ID NO: 348193 - RNA, 23 nt, Artificial Sequence
  Synthetic
uuuaguacaagugauucuuauug

SEQ ID NO: 348194 - RNA, 24 nt, Artificial Sequence
  Synthetic
cuuuaguacaagugauucuuauug

SEQ ID NO: 348195 - RNA, 18 nt, Artificial Sequence
  Synthetic
uucuuacauauguuauug

SEQ ID NO: 348196 - RNA, 19 nt, Artificial Sequence
  Synthetic
uuucuuacauauguuauug

SEQ ID NO: 348197 - RNA, 20 nt, Artificial Sequence
  Synthetic
cuuucuuacauauguuauug

SEQ ID NO: 348198 - RNA, 21 nt, Artificial Sequence
  Synthetic
gcuuucuuacauauguuauug

SEQ ID NO: 348199 - RNA, 22 nt, Artificial Sequence
  Synthetic
agcuuucuuacauauguuauug

SEQ ID NO: 348200 - RNA, 23 nt, Artificial Sequence
  Synthetic
cagcuuucuuacauauguuauug

SEQ ID NO: 348201 - RNA, 24 nt, Artificial Sequence
  Synthetic
gcagcuuucuuacauauguuauug

SEQ ID NO: 348202 - RNA, 18 nt, Artificial Sequence
  Synthetic
ucuauugcauuguuauug

SEQ ID NO: 348203 - RNA, 19 nt, Artificial Sequence
  Synthetic
uucuauugcauuguuauug

SEQ ID NO: 348204 - RNA, 20 nt, Artificial Sequence
  Synthetic
uuucuauugcauuguuauug

SEQ ID NO: 348205 - RNA, 21 nt, Artificial Sequence
  Synthetic
guuucuauugcauuguuauug

SEQ ID NO: 348206 - RNA, 22 nt, Artificial Sequence
  Synthetic
uguuucuauugcauuguuauug

SEQ ID NO: 348207 - RNA, 23 nt, Artificial Sequence
  Synthetic
cuguuucuauugcauuguuauug

SEQ ID NO: 348208 - RNA, 24 nt, Artificial Sequence
  Synthetic
acuguuucuauugcauuguuauug

SEQ ID NO: 348209 - RNA, 18 nt, Artificial Sequence
  Synthetic
caauggcauaauuuauug

SEQ ID NO: 348210 - RNA, 19 nt, Artificial Sequence
  Synthetic
ucaauggcauaauuuauug

SEQ ID NO: 348211 - RNA, 20 nt, Artificial Sequence
  Synthetic
uucaauggcauaauuuauug

SEQ ID NO: 348212 - RNA, 21 nt, Artificial Sequence
  Synthetic
uuucaauggcauaauuuauug

SEQ ID NO: 348213 - RNA, 22 nt, Artificial Sequence
  Synthetic
guuucaauggcauaauuuauug

SEQ ID NO: 348214 - RNA, 23 nt, Artificial Sequence
  Synthetic
cguuucaauggcauaauuuauug

SEQ ID NO: 348215 - RNA, 24 nt, Artificial Sequence
  Synthetic
acguuucaauggcauaauuuauug

SEQ ID NO: 348216 - RNA, 18 nt, Artificial Sequence
  Synthetic
ucccaauaccauuuauug

SEQ ID NO: 348217 - RNA, 19 nt, Artificial Sequence
  Synthetic
uucccaauaccauuuauug

SEQ ID NO: 348218 - RNA, 20 nt, Artificial Sequence
  Synthetic
uuucccaauaccauuuauug

SEQ ID NO: 348219 - RNA, 21 nt, Artificial Sequence
  Synthetic
uuuucccaauaccauuuauug

SEQ ID NO: 348220 - RNA, 22 nt, Artificial Sequence
  Synthetic
guuuucccaauaccauuuauug

SEQ ID NO: 348221 - RNA, 23 nt, Artificial Sequence
  Synthetic
aguuuucccaauaccauuuauug

SEQ ID NO: 348222 - RNA, 24 nt, Artificial Sequence
  Synthetic
caguuuucccaauaccauuuauug

SEQ ID NO: 348223 - RNA, 18 nt, Artificial Sequence
  Synthetic
auaugaacccauuuauug

SEQ ID NO: 348224 - RNA, 19 nt, Artificial Sequence
  Synthetic
aauaugaacccauuuauug

SEQ ID NO: 348225 - RNA, 20 nt, Artificial Sequence
  Synthetic
aaauaugaacccauuuauug

SEQ ID NO: 348226 - RNA, 21 nt, Artificial Sequence
  Synthetic
gaaauaugaacccauuuauug

SEQ ID NO: 348227 - RNA, 22 nt, Artificial Sequence
  Synthetic
agaaauaugaacccauuuauug

SEQ ID NO: 348228 - RNA, 23 nt, Artificial Sequence
  Synthetic
gagaaauaugaacccauuuauug

SEQ ID NO: 348229 - RNA, 24 nt, Artificial Sequence
  Synthetic
agagaaauaugaacccauuuauug

SEQ ID NO: 348230 - RNA, 18 nt, Artificial Sequence
  Synthetic
ccccuguugcauuuauug

SEQ ID NO: 348231 - RNA, 19 nt, Artificial Sequence
  Synthetic
uccccuguugcauuuauug

SEQ ID NO: 348232 - RNA, 20 nt, Artificial Sequence
  Synthetic
auccccuguugcauuuauug

SEQ ID NO: 348233 - RNA, 21 nt, Artificial Sequence
  Synthetic
gauccccuguugcauuuauug

SEQ ID NO: 348234 - RNA, 22 nt, Artificial Sequence
  Synthetic
ggauccccuguugcauuuauug

SEQ ID NO: 348235 - RNA, 23 nt, Artificial Sequence
  Synthetic
gggauccccuguugcauuuauug

SEQ ID NO: 348236 - RNA, 24 nt, Artificial Sequence
  Synthetic
ugggauccccuguugcauuuauug

SEQ ID NO: 348237 - RNA, 18 nt, Artificial Sequence
  Synthetic
uuaaccguucauuuauug

SEQ ID NO: 348238 - RNA, 19 nt, Artificial Sequence
  Synthetic
uuuaaccguucauuuauug

SEQ ID NO: 348239 - RNA, 20 nt, Artificial Sequence
  Synthetic
cuuuaaccguucauuuauug

SEQ ID NO: 348240 - RNA, 21 nt, Artificial Sequence
  Synthetic
ucuuuaaccguucauuuauug

SEQ ID NO: 348241 - RNA, 22 nt, Artificial Sequence
  Synthetic
uucuuuaaccguucauuuauug

SEQ ID NO: 348242 - RNA, 23 nt, Artificial Sequence
  Synthetic
uuucuuuaaccguucauuuauug

SEQ ID NO: 348243 - RNA, 24 nt, Artificial Sequence
  Synthetic
auuucuuuaaccguucauuuauug

SEQ ID NO: 348244 - RNA, 18 nt, Artificial Sequence
  Synthetic
gggacaaguucuuuauug

SEQ ID NO: 348245 - RNA, 19 nt, Artificial Sequence
  Synthetic
ugggacaaguucuuuauug

SEQ ID NO: 348246 - RNA, 20 nt, Artificial Sequence
  Synthetic
cugggacaaguucuuuauug

SEQ ID NO: 348247 - RNA, 21 nt, Artificial Sequence
  Synthetic
gcugggacaaguucuuuauug

SEQ ID NO: 348248 - RNA, 22 nt, Artificial Sequence
  Synthetic
ugcugggacaaguucuuuauug

SEQ ID NO: 348249 - RNA, 23 nt, Artificial Sequence
  Synthetic
cugcugggacaaguucuuuauug

SEQ ID NO: 348250 - RNA, 24 nt, Artificial Sequence
  Synthetic
ccugcugggacaaguucuuuauug

SEQ ID NO: 348251 - RNA, 18 nt, Artificial Sequence
  Synthetic
cuaaaucgauguuuauug

SEQ ID NO: 348252 - RNA, 19 nt, Artificial Sequence
  Synthetic
ccuaaaucgauguuuauug

SEQ ID NO: 348253 - RNA, 20 nt, Artificial Sequence
  Synthetic
uccuaaaucgauguuuauug

SEQ ID NO: 348254 - RNA, 21 nt, Artificial Sequence
  Synthetic
auccuaaaucgauguuuauug

SEQ ID NO: 348255 - RNA, 22 nt, Artificial Sequence
  Synthetic
gauccuaaaucgauguuuauug

SEQ ID NO: 348256 - RNA, 23 nt, Artificial Sequence
  Synthetic
agauccuaaaucgauguuuauug

SEQ ID NO: 348257 - RNA, 24 nt, Artificial Sequence
  Synthetic
uagauccuaaaucgauguuuauug

SEQ ID NO: 348258 - RNA, 18 nt, Artificial Sequence
  Synthetic
cauguuaauauuuuauug

SEQ ID NO: 348259 - RNA, 19 nt, Artificial Sequence
  Synthetic
acauguuaauauuuuauug

SEQ ID NO: 348260 - RNA, 20 nt, Artificial Sequence
  Synthetic
uacauguuaauauuuuauug

SEQ ID NO: 348261 - RNA, 21 nt, Artificial Sequence
  Synthetic
auacauguuaauauuuuauug

SEQ ID NO: 348262 - RNA, 22 nt, Artificial Sequence
  Synthetic
aauacauguuaauauuuuauug

SEQ ID NO: 348263 - RNA, 23 nt, Artificial Sequence
  Synthetic
caauacauguuaauauuuuauug

SEQ ID NO: 348264 - RNA, 24 nt, Artificial Sequence
  Synthetic
ucaauacauguuaauauuuuauug

SEQ ID NO: 348265 - RNA, 18 nt, Artificial Sequence
  Synthetic
aaaagagauauuuuauug

SEQ ID NO: 348266 - RNA, 19 nt, Artificial Sequence
  Synthetic
gaaaagagauauuuuauug

SEQ ID NO: 348267 - RNA, 20 nt, Artificial Sequence
  Synthetic
ggaaaagagauauuuuauug

SEQ ID NO: 348268 - RNA, 21 nt, Artificial Sequence
  Synthetic
aggaaaagagauauuuuauug

SEQ ID NO: 348269 - RNA, 22 nt, Artificial Sequence
  Synthetic
aaggaaaagagauauuuuauug

SEQ ID NO: 348270 - RNA, 23 nt, Artificial Sequence
  Synthetic
uaaggaaaagagauauuuuauug

SEQ ID NO: 348271 - RNA, 24 nt, Artificial Sequence
  Synthetic
auaaggaaaagagauauuuuauug

SEQ ID NO: 348272 - RNA, 18 nt, Artificial Sequence
  Synthetic
aggugaucaaaaaacuug

SEQ ID NO: 348273 - RNA, 19 nt, Artificial Sequence
  Synthetic
aaggugaucaaaaaacuug

SEQ ID NO: 348274 - RNA, 20 nt, Artificial Sequence
  Synthetic
aaaggugaucaaaaaacuug

SEQ ID NO: 348275 - RNA, 21 nt, Artificial Sequence
  Synthetic
uaaaggugaucaaaaaacuug

SEQ ID NO: 348276 - RNA, 22 nt, Artificial Sequence
  Synthetic
uuaaaggugaucaaaaaacuug

SEQ ID NO: 348277 - RNA, 23 nt, Artificial Sequence
  Synthetic
guuaaaggugaucaaaaaacuug

SEQ ID NO: 348278 - RNA, 24 nt, Artificial Sequence
  Synthetic
uguuaaaggugaucaaaaaacuug

SEQ ID NO: 348279 - RNA, 18 nt, Artificial Sequence
  Synthetic
gaaguugaaagaaacuug

SEQ ID NO: 348280 - RNA, 19 nt, Artificial Sequence
  Synthetic
agaaguugaaagaaacuug

SEQ ID NO: 348281 - RNA, 20 nt, Artificial Sequence
  Synthetic
uagaaguugaaagaaacuug

SEQ ID NO: 348282 - RNA, 21 nt, Artificial Sequence
  Synthetic
auagaaguugaaagaaacuug

SEQ ID NO: 348283 - RNA, 22 nt, Artificial Sequence
  Synthetic
gauagaaguugaaagaaacuug

SEQ ID NO: 348284 - RNA, 23 nt, Artificial Sequence
  Synthetic
cgauagaaguugaaagaaacuug

SEQ ID NO: 348285 - RNA, 24 nt, Artificial Sequence
  Synthetic
ccgauagaaguugaaagaaacuug

SEQ ID NO: 348286 - RNA, 18 nt, Artificial Sequence
  Synthetic
agaaaauguugaaacuug

SEQ ID NO: 348287 - RNA, 19 nt, Artificial Sequence
  Synthetic
cagaaaauguugaaacuug

SEQ ID NO: 348288 - RNA, 20 nt, Artificial Sequence
  Synthetic
gcagaaaauguugaaacuug

SEQ ID NO: 348289 - RNA, 21 nt, Artificial Sequence
  Synthetic
agcagaaaauguugaaacuug

SEQ ID NO: 348290 - RNA, 22 nt, Artificial Sequence
  Synthetic
aagcagaaaauguugaaacuug

SEQ ID NO: 348291 - RNA, 23 nt, Artificial Sequence
  Synthetic
aaagcagaaaauguugaaacuug

SEQ ID NO: 348292 - RNA, 24 nt, Artificial Sequence
  Synthetic
caaagcagaaaauguugaaacuug

SEQ ID NO: 348293 - RNA, 18 nt, Artificial Sequence
  Synthetic
ucccaaugcauaaacuug

SEQ ID NO: 348294 - RNA, 19 nt, Artificial Sequence
  Synthetic
aucccaaugcauaaacuug

SEQ ID NO: 348295 - RNA, 20 nt, Artificial Sequence
  Synthetic
aaucccaaugcauaaacuug

SEQ ID NO: 348296 - RNA, 21 nt, Artificial Sequence
  Synthetic
uaaucccaaugcauaaacuug

SEQ ID NO: 348297 - RNA, 22 nt, Artificial Sequence
  Synthetic
cuaaucccaaugcauaaacuug

SEQ ID NO: 348298 - RNA, 23 nt, Artificial Sequence
  Synthetic
gcuaaucccaaugcauaaacuug

SEQ ID NO: 348299 - RNA, 24 nt, Artificial Sequence
  Synthetic
ugcuaaucccaaugcauaaacuug

SEQ ID NO: 348300 - RNA, 18 nt, Artificial Sequence
  Synthetic
caaagaacaguaaacuug

SEQ ID NO: 348301 - RNA, 19 nt, Artificial Sequence
  Synthetic
acaaagaacaguaaacuug

SEQ ID NO: 348302 - RNA, 20 nt, Artificial Sequence
  Synthetic
aacaaagaacaguaaacuug

SEQ ID NO: 348303 - RNA, 21 nt, Artificial Sequence
  Synthetic
gaacaaagaacaguaaacuug

SEQ ID NO: 348304 - RNA, 22 nt, Artificial Sequence
  Synthetic
ugaacaaagaacaguaaacuug

SEQ ID NO: 348305 - RNA, 23 nt, Artificial Sequence
  Synthetic
cugaacaaagaacaguaaacuug

SEQ ID NO: 348306 - RNA, 24 nt, Artificial Sequence
  Synthetic
ucugaacaaagaacaguaaacuug

SEQ ID NO: 348307 - RNA, 18 nt, Artificial Sequence
  Synthetic
aaugaauuuuuaaacuug

SEQ ID NO: 348308 - RNA, 19 nt, Artificial Sequence
  Synthetic
gaaugaauuuuuaaacuug

SEQ ID NO: 348309 - RNA, 20 nt, Artificial Sequence
  Synthetic
agaaugaauuuuuaaacuug

SEQ ID NO: 348310 - RNA, 21 nt, Artificial Sequence
  Synthetic
cagaaugaauuuuuaaacuug

SEQ ID NO: 348311 - RNA, 22 nt, Artificial Sequence
  Synthetic
ucagaaugaauuuuuaaacuug

SEQ ID NO: 348312 - RNA, 23 nt, Artificial Sequence
  Synthetic
uucagaaugaauuuuuaaacuug

SEQ ID NO: 348313 - RNA, 24 nt, Artificial Sequence
  Synthetic
cuucagaaugaauuuuuaaacuug

SEQ ID NO: 348314 - RNA, 18 nt, Artificial Sequence
  Synthetic
accagccuagccaacuug

SEQ ID NO: 348315 - RNA, 19 nt, Artificial Sequence
  Synthetic
gaccagccuagccaacuug

SEQ ID NO: 348316 - RNA, 20 nt, Artificial Sequence
  Synthetic
agaccagccuagccaacuug

SEQ ID NO: 348317 - RNA, 21 nt, Artificial Sequence
  Synthetic
aagaccagccuagccaacuug

SEQ ID NO: 348318 - RNA, 22 nt, Artificial Sequence
  Synthetic
caagaccagccuagccaacuug

SEQ ID NO: 348319 - RNA, 23 nt, Artificial Sequence
  Synthetic
ucaagaccagccuagccaacuug

SEQ ID NO: 348320 - RNA, 24 nt, Artificial Sequence
  Synthetic
uucaagaccagccuagccaacuug

SEQ ID NO: 348321 - RNA, 18 nt, Artificial Sequence
  Synthetic
ggcuuacacuccaacuug

SEQ ID NO: 348322 - RNA, 19 nt, Artificial Sequence
  Synthetic
uggcuuacacuccaacuug

SEQ ID NO: 348323 - RNA, 20 nt, Artificial Sequence
  Synthetic
cuggcuuacacuccaacuug

SEQ ID NO: 348324 - RNA, 21 nt, Artificial Sequence
  Synthetic
gcuggcuuacacuccaacuug

SEQ ID NO: 348325 - RNA, 22 nt, Artificial Sequence
  Synthetic
agcuggcuuacacuccaacuug

SEQ ID NO: 348326 - RNA, 23 nt, Artificial Sequence
  Synthetic
gagcuggcuuacacuccaacuug

SEQ ID NO: 348327 - RNA, 24 nt, Artificial Sequence
  Synthetic
agagcuggcuuacacuccaacuug

SEQ ID NO: 348328 - RNA, 18 nt, Artificial Sequence
  Synthetic
accagccugaucaacuug

SEQ ID NO: 348329 - RNA, 19 nt, Artificial Sequence
  Synthetic
gaccagccugaucaacuug

SEQ ID NO: 348330 - RNA, 20 nt, Artificial Sequence
  Synthetic
agaccagccugaucaacuug

SEQ ID NO: 348331 - RNA, 21 nt, Artificial Sequence
  Synthetic
gagaccagccugaucaacuug

SEQ ID NO: 348332 - RNA, 22 nt, Artificial Sequence
  Synthetic
ugagaccagccugaucaacuug

SEQ ID NO: 348333 - RNA, 23 nt, Artificial Sequence
  Synthetic
uugagaccagccugaucaacuug

SEQ ID NO: 348334 - RNA, 24 nt, Artificial Sequence
  Synthetic
uuugagaccagccugaucaacuug

SEQ ID NO: 348335 - RNA, 18 nt, Artificial Sequence
  Synthetic
accagccuggucaacuug

SEQ ID NO: 348336 - RNA, 19 nt, Artificial Sequence
  Synthetic
gaccagccuggucaacuug

SEQ ID NO: 348337 - RNA, 20 nt, Artificial Sequence
  Synthetic
agaccagccuggucaacuug

SEQ ID NO: 348338 - RNA, 21 nt, Artificial Sequence
  Synthetic
aagaccagccuggucaacuug

SEQ ID NO: 348339 - RNA, 22 nt, Artificial Sequence
  Synthetic
caagaccagccuggucaacuug

SEQ ID NO: 348340 - RNA, 23 nt, Artificial Sequence
  Synthetic
ucaagaccagccuggucaacuug

SEQ ID NO: 348341 - RNA, 24 nt, Artificial Sequence
  Synthetic
uucaagaccagccuggucaacuug

SEQ ID NO: 348342 - RNA, 18 nt, Artificial Sequence
  Synthetic
caggcaacugagaacuug

SEQ ID NO: 348343 - RNA, 19 nt, Artificial Sequence
  Synthetic
gcaggcaacugagaacuug

SEQ ID NO: 348344 - RNA, 20 nt, Artificial Sequence
  Synthetic
agcaggcaacugagaacuug

SEQ ID NO: 348345 - RNA, 21 nt, Artificial Sequence
  Synthetic
gagcaggcaacugagaacuug

SEQ ID NO: 348346 - RNA, 22 nt, Artificial Sequence
  Synthetic
ugagcaggcaacugagaacuug

SEQ ID NO: 348347 - RNA, 23 nt, Artificial Sequence
  Synthetic
uugagcaggcaacugagaacuug

SEQ ID NO: 348348 - RNA, 24 nt, Artificial Sequence
  Synthetic
cuugagcaggcaacugagaacuug

SEQ ID NO: 348349 - RNA, 18 nt, Artificial Sequence
  Synthetic
uaaaggaaagauaacuug

SEQ ID NO: 348350 - RNA, 19 nt, Artificial Sequence
  Synthetic
guaaaggaaagauaacuug

SEQ ID NO: 348351 - RNA, 20 nt, Artificial Sequence
  Synthetic
uguaaaggaaagauaacuug

SEQ ID NO: 348352 - RNA, 21 nt, Artificial Sequence
  Synthetic
auguaaaggaaagauaacuug

SEQ ID NO: 348353 - RNA, 22 nt, Artificial Sequence
  Synthetic
aauguaaaggaaagauaacuug

SEQ ID NO: 348354 - RNA, 23 nt, Artificial Sequence
  Synthetic
gaauguaaaggaaagauaacuug

SEQ ID NO: 348355 - RNA, 24 nt, Artificial Sequence
  Synthetic
agaauguaaaggaaagauaacuug

SEQ ID NO: 348356 - RNA, 18 nt, Artificial Sequence
  Synthetic
uuggguucaacuaacuug

SEQ ID NO: 348357 - RNA, 19 nt, Artificial Sequence
  Synthetic
uuuggguucaacuaacuug

SEQ ID NO: 348358 - RNA, 20 nt, Artificial Sequence
  Synthetic
cuuuggguucaacuaacuug

SEQ ID NO: 348359 - RNA, 21 nt, Artificial Sequence
  Synthetic
ucuuuggguucaacuaacuug

SEQ ID NO: 348360 - RNA, 22 nt, Artificial Sequence
  Synthetic
cucuuuggguucaacuaacuug

SEQ ID NO: 348361 - RNA, 23 nt, Artificial Sequence
  Synthetic
ucucuuuggguucaacuaacuug

SEQ ID NO: 348362 - RNA, 24 nt, Artificial Sequence
  Synthetic
cucucuuuggguucaacuaacuug

SEQ ID NO: 348363 - RNA, 18 nt, Artificial Sequence
  Synthetic
caucccuuccaacacuug

SEQ ID NO: 348364 - RNA, 19 nt, Artificial Sequence
  Synthetic
acaucccuuccaacacuug

SEQ ID NO: 348365 - RNA, 20 nt, Artificial Sequence
  Synthetic
gacaucccuuccaacacuug

SEQ ID NO: 348366 - RNA, 21 nt, Artificial Sequence
  Synthetic
ggacaucccuuccaacacuug

SEQ ID NO: 348367 - RNA, 22 nt, Artificial Sequence
  Synthetic
aggacaucccuuccaacacuug

SEQ ID NO: 348368 - RNA, 23 nt, Artificial Sequence
  Synthetic
caggacaucccuuccaacacuug

SEQ ID NO: 348369 - RNA, 24 nt, Artificial Sequence
  Synthetic
ccaggacaucccuuccaacacuug

SEQ ID NO: 348370 - RNA, 18 nt, Artificial Sequence
  Synthetic
uucuggagagaacacuug

SEQ ID NO: 348371 - RNA, 19 nt, Artificial Sequence
  Synthetic
auucuggagagaacacuug

SEQ ID NO: 348372 - RNA, 20 nt, Artificial Sequence
  Synthetic
uauucuggagagaacacuug

SEQ ID NO: 348373 - RNA, 21 nt, Artificial Sequence
  Synthetic
auauucuggagagaacacuug

SEQ ID NO: 348374 - RNA, 22 nt, Artificial Sequence
  Synthetic
cauauucuggagagaacacuug

SEQ ID NO: 348375 - RNA, 23 nt, Artificial Sequence
  Synthetic
ucauauucuggagagaacacuug

SEQ ID NO: 348376 - RNA, 24 nt, Artificial Sequence
  Synthetic
uucauauucuggagagaacacuug

SEQ ID NO: 348377 - RNA, 18 nt, Artificial Sequence
  Synthetic
aaaaauacuuaacacuug

SEQ ID NO: 348378 - RNA, 19 nt, Artificial Sequence
  Synthetic
gaaaaauacuuaacacuug

SEQ ID NO: 348379 - RNA, 20 nt, Artificial Sequence
  Synthetic
ugaaaaauacuuaacacuug

SEQ ID NO: 348380 - RNA, 21 nt, Artificial Sequence
  Synthetic
gugaaaaauacuuaacacuug

SEQ ID NO: 348381 - RNA, 22 nt, Artificial Sequence
  Synthetic
agugaaaaauacuuaacacuug

SEQ ID NO: 348382 - RNA, 23 nt, Artificial Sequence
  Synthetic
cagugaaaaauacuuaacacuug

SEQ ID NO: 348383 - RNA, 24 nt, Artificial Sequence
  Synthetic
acagugaaaaauacuuaacacuug

SEQ ID NO: 348384 - RNA, 18 nt, Artificial Sequence
  Synthetic
gauugagaaccacacuug

SEQ ID NO: 348385 - RNA, 19 nt, Artificial Sequence
  Synthetic
ugauugagaaccacacuug

SEQ ID NO: 348386 - RNA, 20 nt, Artificial Sequence
  Synthetic
cugauugagaaccacacuug

SEQ ID NO: 348387 - RNA, 21 nt, Artificial Sequence
  Synthetic
gcugauugagaaccacacuug

SEQ ID NO: 348388 - RNA, 22 nt, Artificial Sequence
  Synthetic
ugcugauugagaaccacacuug

SEQ ID NO: 348389 - RNA, 23 nt, Artificial Sequence
  Synthetic
uugcugauugagaaccacacuug

SEQ ID NO: 348390 - RNA, 24 nt, Artificial Sequence
  Synthetic
guugcugauugagaaccacacuug

SEQ ID NO: 348391 - RNA, 18 nt, Artificial Sequence
  Synthetic
gaguagcucucccacuug

SEQ ID NO: 348392 - RNA, 19 nt, Artificial Sequence
  Synthetic
ggaguagcucucccacuug

SEQ ID NO: 348393 - RNA, 20 nt, Artificial Sequence
  Synthetic
aggaguagcucucccacuug

SEQ ID NO: 348394 - RNA, 21 nt, Artificial Sequence
  Synthetic
uaggaguagcucucccacuug

SEQ ID NO: 348395 - RNA, 22 nt, Artificial Sequence
  Synthetic
guaggaguagcucucccacuug

SEQ ID NO: 348396 - RNA, 23 nt, Artificial Sequence
  Synthetic
uguaggaguagcucucccacuug

SEQ ID NO: 348397 - RNA, 24 nt, Artificial Sequence
  Synthetic
cuguaggaguagcucucccacuug

SEQ ID NO: 348398 - RNA, 18 nt, Artificial Sequence
  Synthetic
aaaacauguucccacuug

SEQ ID NO: 348399 - RNA, 19 nt, Artificial Sequence
  Synthetic
gaaaacauguucccacuug

SEQ ID NO: 348400 - RNA, 20 nt, Artificial Sequence
  Synthetic
agaaaacauguucccacuug

SEQ ID NO: 348401 - RNA, 21 nt, Artificial Sequence
  Synthetic
aagaaaacauguucccacuug

SEQ ID NO: 348402 - RNA, 22 nt, Artificial Sequence
  Synthetic
gaagaaaacauguucccacuug

SEQ ID NO: 348403 - RNA, 23 nt, Artificial Sequence
  Synthetic
ggaagaaaacauguucccacuug

SEQ ID NO: 348404 - RNA, 24 nt, Artificial Sequence
  Synthetic
uggaagaaaacauguucccacuug

SEQ ID NO: 348405 - RNA, 18 nt, Artificial Sequence
  Synthetic
aggcccuaccuccacuug

SEQ ID NO: 348406 - RNA, 19 nt, Artificial Sequence
  Synthetic
aaggcccuaccuccacuug

SEQ ID NO: 348407 - RNA, 20 nt, Artificial Sequence
  Synthetic
aaaggcccuaccuccacuug

SEQ ID NO: 348408 - RNA, 21 nt, Artificial Sequence
  Synthetic
uaaaggcccuaccuccacuug

SEQ ID NO: 348409 - RNA, 22 nt, Artificial Sequence
  Synthetic
uuaaaggcccuaccuccacuug

SEQ ID NO: 348410 - RNA, 23 nt, Artificial Sequence
  Synthetic
uuuaaaggcccuaccuccacuug

SEQ ID NO: 348411 - RNA, 24 nt, Artificial Sequence
  Synthetic
cuuuaaaggcccuaccuccacuug

SEQ ID NO: 348412 - RNA, 18 nt, Artificial Sequence
  Synthetic
cuguaaucccagcacuug

SEQ ID NO: 348413 - RNA, 19 nt, Artificial Sequence
  Synthetic
ccuguaaucccagcacuug

SEQ ID NO: 348414 - RNA, 20 nt, Artificial Sequence
  Synthetic
gccuguaaucccagcacuug

SEQ ID NO: 348415 - RNA, 21 nt, Artificial Sequence
  Synthetic
cgccuguaaucccagcacuug

SEQ ID NO: 348416 - RNA, 22 nt, Artificial Sequence
  Synthetic
acgccuguaaucccagcacuug

SEQ ID NO: 348417 - RNA, 23 nt, Artificial Sequence
  Synthetic
cacgccuguaaucccagcacuug

SEQ ID NO: 348418 - RNA, 24 nt, Artificial Sequence
  Synthetic
ucacgccuguaaucccagcacuug

SEQ ID NO: 348419 - RNA, 18 nt, Artificial Sequence
  Synthetic
acuuuuauacugcacuug

SEQ ID NO: 348420 - RNA, 19 nt, Artificial Sequence
  Synthetic
uacuuuuauacugcacuug

SEQ ID NO: 348421 - RNA, 20 nt, Artificial Sequence
  Synthetic
auacuuuuauacugcacuug

SEQ ID NO: 348422 - RNA, 21 nt, Artificial Sequence
  Synthetic
cauacuuuuauacugcacuug

SEQ ID NO: 348423 - RNA, 22 nt, Artificial Sequence
  Synthetic
ucauacuuuuauacugcacuug

SEQ ID NO: 348424 - RNA, 23 nt, Artificial Sequence
  Synthetic
uucauacuuuuauacugcacuug

SEQ ID NO: 348425 - RNA, 24 nt, Artificial Sequence
  Synthetic
uuucauacuuuuauacugcacuug

SEQ ID NO: 348426 - RNA, 18 nt, Artificial Sequence
  Synthetic
gccuccucucugcacuug

SEQ ID NO: 348427 - RNA, 19 nt, Artificial Sequence
  Synthetic
agccuccucucugcacuug

SEQ ID NO: 348428 - RNA, 20 nt, Artificial Sequence
  Synthetic
aagccuccucucugcacuug

SEQ ID NO: 348429 - RNA, 21 nt, Artificial Sequence
  Synthetic
gaagccuccucucugcacuug

SEQ ID NO: 348430 - RNA, 22 nt, Artificial Sequence
  Synthetic
agaagccuccucucugcacuug

SEQ ID NO: 348431 - RNA, 23 nt, Artificial Sequence
  Synthetic
uagaagccuccucucugcacuug

SEQ ID NO: 348432 - RNA, 24 nt, Artificial Sequence
  Synthetic
uuagaagccuccucucugcacuug

SEQ ID NO: 348433 - RNA, 18 nt, Artificial Sequence
  Synthetic
aggaaauuaaaucacuug

SEQ ID NO: 348434 - RNA, 19 nt, Artificial Sequence
  Synthetic
caggaaauuaaaucacuug

SEQ ID NO: 348435 - RNA, 20 nt, Artificial Sequence
  Synthetic
ucaggaaauuaaaucacuug

SEQ ID NO: 348436 - RNA, 21 nt, Artificial Sequence
  Synthetic
aucaggaaauuaaaucacuug

SEQ ID NO: 348437 - RNA, 22 nt, Artificial Sequence
  Synthetic
aaucaggaaauuaaaucacuug

SEQ ID NO: 348438 - RNA, 23 nt, Artificial Sequence
  Synthetic
aaaucaggaaauuaaaucacuug

SEQ ID NO: 348439 - RNA, 24 nt, Artificial Sequence
  Synthetic
gaaaucaggaaauuaaaucacuug

SEQ ID NO: 348440 - RNA, 18 nt, Artificial Sequence
  Synthetic
uuccauucucaucacuug

SEQ ID NO: 348441 - RNA, 19 nt, Artificial Sequence
  Synthetic
auuccauucucaucacuug

SEQ ID NO: 348442 - RNA, 20 nt, Artificial Sequence
  Synthetic
uauuccauucucaucacuug

SEQ ID NO: 348443 - RNA, 21 nt, Artificial Sequence
  Synthetic
cuauuccauucucaucacuug

SEQ ID NO: 348444 - RNA, 22 nt, Artificial Sequence
  Synthetic
ucuauuccauucucaucacuug

SEQ ID NO: 348445 - RNA, 23 nt, Artificial Sequence
  Synthetic
aucuauuccauucucaucacuug

SEQ ID NO: 348446 - RNA, 24 nt, Artificial Sequence
  Synthetic
uaucuauuccauucucaucacuug

SEQ ID NO: 348447 - RNA, 18 nt, Artificial Sequence
  Synthetic
aggugggcggaucacuug

SEQ ID NO: 348448 - RNA, 19 nt, Artificial Sequence
  Synthetic
gaggugggcggaucacuug

SEQ ID NO: 348449 - RNA, 20 nt, Artificial Sequence
  Synthetic
cgaggugggcggaucacuug

SEQ ID NO: 348450 - RNA, 21 nt, Artificial Sequence
  Synthetic
ccgaggugggcggaucacuug

SEQ ID NO: 348451 - RNA, 22 nt, Artificial Sequence
  Synthetic
gccgaggugggcggaucacuug

SEQ ID NO: 348452 - RNA, 23 nt, Artificial Sequence
  Synthetic
ggccgaggugggcggaucacuug

SEQ ID NO: 348453 - RNA, 24 nt, Artificial Sequence
  Synthetic
aggccgaggugggcggaucacuug

SEQ ID NO: 348454 - RNA, 18 nt, Artificial Sequence
  Synthetic
uuuucuaaaucucacuug

SEQ ID NO: 348455 - RNA, 19 nt, Artificial Sequence
  Synthetic
cuuuucuaaaucucacuug

SEQ ID NO: 348456 - RNA, 20 nt, Artificial Sequence
  Synthetic
ucuuuucuaaaucucacuug

SEQ ID NO: 348457 - RNA, 21 nt, Artificial Sequence
  Synthetic
uucuuuucuaaaucucacuug

SEQ ID NO: 348458 - RNA, 22 nt, Artificial Sequence
  Synthetic
cuucuuuucuaaaucucacuug

SEQ ID NO: 348459 - RNA, 23 nt, Artificial Sequence
  Synthetic
gcuucuuuucuaaaucucacuug

SEQ ID NO: 348460 - RNA, 24 nt, Artificial Sequence
  Synthetic
ggcuucuuuucuaaaucucacuug

SEQ ID NO: 348461 - RNA, 18 nt, Artificial Sequence
  Synthetic
ucauaacucugucacuug

SEQ ID NO: 348462 - RNA, 19 nt, Artificial Sequence
  Synthetic
uucauaacucugucacuug

SEQ ID NO: 348463 - RNA, 20 nt, Artificial Sequence
  Synthetic
cuucauaacucugucacuug

SEQ ID NO: 348464 - RNA, 21 nt, Artificial Sequence
  Synthetic
ucuucauaacucugucacuug

SEQ ID NO: 348465 - RNA, 22 nt, Artificial Sequence
  Synthetic
uucuucauaacucugucacuug

SEQ ID NO: 348466 - RNA, 23 nt, Artificial Sequence
  Synthetic
uuucuucauaacucugucacuug

SEQ ID NO: 348467 - RNA, 24 nt, Artificial Sequence
  Synthetic
cuuucuucauaacucugucacuug

SEQ ID NO: 348468 - RNA, 18 nt, Artificial Sequence
  Synthetic
ucuuucucugaagacuug

SEQ ID NO: 348469 - RNA, 19 nt, Artificial Sequence
  Synthetic
gucuuucucugaagacuug

SEQ ID NO: 348470 - RNA, 20 nt, Artificial Sequence
  Synthetic
ugucuuucucugaagacuug

SEQ ID NO: 348471 - RNA, 21 nt, Artificial Sequence
  Synthetic
uugucuuucucugaagacuug

SEQ ID NO: 348472 - RNA, 22 nt, Artificial Sequence
  Synthetic
cuugucuuucucugaagacuug

SEQ ID NO: 348473 - RNA, 23 nt, Artificial Sequence
  Synthetic
acuugucuuucucugaagacuug

SEQ ID NO: 348474 - RNA, 24 nt, Artificial Sequence
  Synthetic
aacuugucuuucucugaagacuug

SEQ ID NO: 348475 - RNA, 18 nt, Artificial Sequence
  Synthetic
ccaauuugaccagacuug

SEQ ID NO: 348476 - RNA, 19 nt, Artificial Sequence
  Synthetic
cccaauuugaccagacuug

SEQ ID NO: 348477 - RNA, 20 nt, Artificial Sequence
  Synthetic
ccccaauuugaccagacuug

SEQ ID NO: 348478 - RNA, 21 nt, Artificial Sequence
  Synthetic
cccccaauuugaccagacuug

SEQ ID NO: 348479 - RNA, 22 nt, Artificial Sequence
  Synthetic
ucccccaauuugaccagacuug

SEQ ID NO: 348480 - RNA, 23 nt, Artificial Sequence
  Synthetic
uucccccaauuugaccagacuug

SEQ ID NO: 348481 - RNA, 24 nt, Artificial Sequence
  Synthetic
cuucccccaauuugaccagacuug

SEQ ID NO: 348482 - RNA, 18 nt, Artificial Sequence
  Synthetic
aagcuacuagaggacuug

SEQ ID NO: 348483 - RNA, 19 nt, Artificial Sequence
  Synthetic
aaagcuacuagaggacuug

SEQ ID NO: 348484 - RNA, 20 nt, Artificial Sequence
  Synthetic
caaagcuacuagaggacuug

SEQ ID NO: 348485 - RNA, 21 nt, Artificial Sequence
  Synthetic
ucaaagcuacuagaggacuug

SEQ ID NO: 348486 - RNA, 22 nt, Artificial Sequence
  Synthetic
aucaaagcuacuagaggacuug

SEQ ID NO: 348487 - RNA, 23 nt, Artificial Sequence
  Synthetic
caucaaagcuacuagaggacuug

SEQ ID NO: 348488 - RNA, 24 nt, Artificial Sequence
  Synthetic
gcaucaaagcuacuagaggacuug

SEQ ID NO: 348489 - RNA, 18 nt, Artificial Sequence
  Synthetic
cucuggggaugggacuug

SEQ ID NO: 348490 - RNA, 19 nt, Artificial Sequence
  Synthetic
ucucuggggaugggacuug

SEQ ID NO: 348491 - RNA, 20 nt, Artificial Sequence
  Synthetic
aucucuggggaugggacuug

SEQ ID NO: 348492 - RNA, 21 nt, Artificial Sequence
  Synthetic
aaucucuggggaugggacuug

SEQ ID NO: 348493 - RNA, 22 nt, Artificial Sequence
  Synthetic
gaaucucuggggaugggacuug

SEQ ID NO: 348494 - RNA, 23 nt, Artificial Sequence
  Synthetic
agaaucucuggggaugggacuug

SEQ ID NO: 348495 - RNA, 24 nt, Artificial Sequence
  Synthetic
cagaaucucuggggaugggacuug

SEQ ID NO: 348496 - RNA, 18 nt, Artificial Sequence
  Synthetic
gacaaagaacaugacuug

SEQ ID NO: 348497 - RNA, 19 nt, Artificial Sequence
  Synthetic
ugacaaagaacaugacuug

SEQ ID NO: 348498 - RNA, 20 nt, Artificial Sequence
  Synthetic
augacaaagaacaugacuug

SEQ ID NO: 348499 - RNA, 21 nt, Artificial Sequence
  Synthetic
caugacaaagaacaugacuug

SEQ ID NO: 348500 - RNA, 22 nt, Artificial Sequence
  Synthetic
ucaugacaaagaacaugacuug

SEQ ID NO: 348501 - RNA, 23 nt, Artificial Sequence
  Synthetic
cucaugacaaagaacaugacuug

SEQ ID NO: 348502 - RNA, 24 nt, Artificial Sequence
  Synthetic
ucucaugacaaagaacaugacuug

SEQ ID NO: 348503 - RNA, 18 nt, Artificial Sequence
  Synthetic
ucccgacuuccugacuug

SEQ ID NO: 348504 - RNA, 19 nt, Artificial Sequence
  Synthetic
uucccgacuuccugacuug

SEQ ID NO: 348505 - RNA, 20 nt, Artificial Sequence
  Synthetic
auucccgacuuccugacuug

SEQ ID NO: 348506 - RNA, 21 nt, Artificial Sequence
  Synthetic
uauucccgacuuccugacuug

SEQ ID NO: 348507 - RNA, 22 nt, Artificial Sequence
  Synthetic
cuauucccgacuuccugacuug

SEQ ID NO: 348508 - RNA, 23 nt, Artificial Sequence
  Synthetic
ucuauucccgacuuccugacuug

SEQ ID NO: 348509 - RNA, 24 nt, Artificial Sequence
  Synthetic
uucuauucccgacuuccugacuug

SEQ ID NO: 348510 - RNA, 18 nt, Artificial Sequence
  Synthetic
ggaccacaagcugacuug

SEQ ID NO: 348511 - RNA, 19 nt, Artificial Sequence
  Synthetic
aggaccacaagcugacuug

SEQ ID NO: 348512 - RNA, 20 nt, Artificial Sequence
  Synthetic
gaggaccacaagcugacuug

SEQ ID NO: 348513 - RNA, 21 nt, Artificial Sequence
  Synthetic
ggaggaccacaagcugacuug

SEQ ID NO: 348514 - RNA, 22 nt, Artificial Sequence
  Synthetic
gggaggaccacaagcugacuug

SEQ ID NO: 348515 - RNA, 23 nt, Artificial Sequence
  Synthetic
ugggaggaccacaagcugacuug

SEQ ID NO: 348516 - RNA, 24 nt, Artificial Sequence
  Synthetic
uugggaggaccacaagcugacuug

SEQ ID NO: 348517 - RNA, 18 nt, Artificial Sequence
  Synthetic
agauucaagaaauacuug

SEQ ID NO: 348518 - RNA, 19 nt, Artificial Sequence
  Synthetic
cagauucaagaaauacuug

SEQ ID NO: 348519 - RNA, 20 nt, Artificial Sequence
  Synthetic
acagauucaagaaauacuug

SEQ ID NO: 348520 - RNA, 21 nt, Artificial Sequence
  Synthetic
gacagauucaagaaauacuug

SEQ ID NO: 348521 - RNA, 22 nt, Artificial Sequence
  Synthetic
ugacagauucaagaaauacuug

SEQ ID NO: 348522 - RNA, 23 nt, Artificial Sequence
  Synthetic
cugacagauucaagaaauacuug

SEQ ID NO: 348523 - RNA, 24 nt, Artificial Sequence
  Synthetic
ccugacagauucaagaaauacuug

SEQ ID NO: 348524 - RNA, 18 nt, Artificial Sequence
  Synthetic
uacuacuacucauacuug

SEQ ID NO: 348525 - RNA, 19 nt, Artificial Sequence
  Synthetic
cuacuacuacucauacuug

SEQ ID NO: 348526 - RNA, 20 nt, Artificial Sequence
  Synthetic
acuacuacuacucauacuug

SEQ ID NO: 348527 - RNA, 21 nt, Artificial Sequence
  Synthetic
aacuacuacuacucauacuug

SEQ ID NO: 348528 - RNA, 22 nt, Artificial Sequence
  Synthetic
caacuacuacuacucauacuug

SEQ ID NO: 348529 - RNA, 23 nt, Artificial Sequence
  Synthetic
acaacuacuacuacucauacuug

SEQ ID NO: 348530 - RNA, 24 nt, Artificial Sequence
  Synthetic
aacaacuacuacuacucauacuug

SEQ ID NO: 348531 - RNA, 18 nt, Artificial Sequence
  Synthetic
aguauggcuagauacuug

SEQ ID NO: 348532 - RNA, 19 nt, Artificial Sequence
  Synthetic
uaguauggcuagauacuug

SEQ ID NO: 348533 - RNA, 20 nt, Artificial Sequence
  Synthetic
cuaguauggcuagauacuug

SEQ ID NO: 348534 - RNA, 21 nt, Artificial Sequence
  Synthetic
ccuaguauggcuagauacuug

SEQ ID NO: 348535 - RNA, 22 nt, Artificial Sequence
  Synthetic
uccuaguauggcuagauacuug

SEQ ID NO: 348536 - RNA, 23 nt, Artificial Sequence
  Synthetic
uuccuaguauggcuagauacuug

SEQ ID NO: 348537 - RNA, 24 nt, Artificial Sequence
  Synthetic
uuuccuaguauggcuagauacuug

SEQ ID NO: 348538 - RNA, 18 nt, Artificial Sequence
  Synthetic
uauuuuucuugauacuug

SEQ ID NO: 348539 - RNA, 19 nt, Artificial Sequence
  Synthetic
auauuuuucuugauacuug

SEQ ID NO: 348540 - RNA, 20 nt, Artificial Sequence
  Synthetic
uauauuuuucuugauacuug

SEQ ID NO: 348541 - RNA, 21 nt, Artificial Sequence
  Synthetic
auauauuuuucuugauacuug

SEQ ID NO: 348542 - RNA, 22 nt, Artificial Sequence
  Synthetic
cauauauuuuucuugauacuug

SEQ ID NO: 348543 - RNA, 23 nt, Artificial Sequence
  Synthetic
acauauauuuuucuugauacuug

SEQ ID NO: 348544 - RNA, 24 nt, Artificial Sequence
  Synthetic
cacauauauuuuucuugauacuug

SEQ ID NO: 348545 - RNA, 18 nt, Artificial Sequence
  Synthetic
gucaacuuagccuacuug

SEQ ID NO: 348546 - RNA, 19 nt, Artificial Sequence
  Synthetic
agucaacuuagccuacuug

SEQ ID NO: 348547 - RNA, 20 nt, Artificial Sequence
  Synthetic
uagucaacuuagccuacuug

SEQ ID NO: 348548 - RNA, 21 nt, Artificial Sequence
  Synthetic
auagucaacuuagccuacuug

SEQ ID NO: 348549 - RNA, 22 nt, Artificial Sequence
  Synthetic
cauagucaacuuagccuacuug

SEQ ID NO: 348550 - RNA, 23 nt, Artificial Sequence
  Synthetic
gcauagucaacuuagccuacuug

SEQ ID NO: 348551 - RNA, 24 nt, Artificial Sequence
  Synthetic
ugcauagucaacuuagccuacuug

SEQ ID NO: 348552 - RNA, 18 nt, Artificial Sequence
  Synthetic
aacucucgaaaguacuug

SEQ ID NO: 348553 - RNA, 19 nt, Artificial Sequence
  Synthetic
caacucucgaaaguacuug

SEQ ID NO: 348554 - RNA, 20 nt, Artificial Sequence
  Synthetic
ucaacucucgaaaguacuug

SEQ ID NO: 348555 - RNA, 21 nt, Artificial Sequence
  Synthetic
gucaacucucgaaaguacuug

SEQ ID NO: 348556 - RNA, 22 nt, Artificial Sequence
  Synthetic
agucaacucucgaaaguacuug

SEQ ID NO: 348557 - RNA, 23 nt, Artificial Sequence
  Synthetic
cagucaacucucgaaaguacuug

SEQ ID NO: 348558 - RNA, 24 nt, Artificial Sequence
  Synthetic
acagucaacucucgaaaguacuug

SEQ ID NO: 348559 - RNA, 18 nt, Artificial Sequence
  Synthetic
ucuuagguucauuacuug

SEQ ID NO: 348560 - RNA, 19 nt, Artificial Sequence
  Synthetic
cucuuagguucauuacuug

SEQ ID NO: 348561 - RNA, 20 nt, Artificial Sequence
  Synthetic
ccucuuagguucauuacuug

SEQ ID NO: 348562 - RNA, 21 nt, Artificial Sequence
  Synthetic
cccucuuagguucauuacuug

SEQ ID NO: 348563 - RNA, 22 nt, Artificial Sequence
  Synthetic
ccccucuuagguucauuacuug

SEQ ID NO: 348564 - RNA, 23 nt, Artificial Sequence
  Synthetic
uccccucuuagguucauuacuug

SEQ ID NO: 348565 - RNA, 24 nt, Artificial Sequence
  Synthetic
cuccccucuuagguucauuacuug

SEQ ID NO: 348566 - RNA, 18 nt, Artificial Sequence
  Synthetic
cuuguuauggcuuacuug

SEQ ID NO: 348567 - RNA, 19 nt, Artificial Sequence
  Synthetic
acuuguuauggcuuacuug

SEQ ID NO: 348568 - RNA, 20 nt, Artificial Sequence
  Synthetic
cacuuguuauggcuuacuug

SEQ ID NO: 348569 - RNA, 21 nt, Artificial Sequence
  Synthetic
acacuuguuauggcuuacuug

SEQ ID NO: 348570 - RNA, 22 nt, Artificial Sequence
  Synthetic
aacacuuguuauggcuuacuug

SEQ ID NO: 348571 - RNA, 23 nt, Artificial Sequence
  Synthetic
aaacacuuguuauggcuuacuug

SEQ ID NO: 348572 - RNA, 24 nt, Artificial Sequence
  Synthetic
caaacacuuguuauggcuuacuug

SEQ ID NO: 348573 - RNA, 18 nt, Artificial Sequence
  Synthetic
cagaccuuuuguuacuug

SEQ ID NO: 348574 - RNA, 19 nt, Artificial Sequence
  Synthetic
acagaccuuuuguuacuug

SEQ ID NO: 348575 - RNA, 20 nt, Artificial Sequence
  Synthetic
cacagaccuuuuguuacuug

SEQ ID NO: 348576 - RNA, 21 nt, Artificial Sequence
  Synthetic
ucacagaccuuuuguuacuug

SEQ ID NO: 348577 - RNA, 22 nt, Artificial Sequence
  Synthetic
gucacagaccuuuuguuacuug

SEQ ID NO: 348578 - RNA, 23 nt, Artificial Sequence
  Synthetic
ugucacagaccuuuuguuacuug

SEQ ID NO: 348579 - RNA, 24 nt, Artificial Sequence
  Synthetic
gugucacagaccuuuuguuacuug

SEQ ID NO: 348580 - RNA, 18 nt, Artificial Sequence
  Synthetic
caccaccuccuuuacuug

SEQ ID NO: 348581 - RNA, 19 nt, Artificial Sequence
  Synthetic
gcaccaccuccuuuacuug

SEQ ID NO: 348582 - RNA, 20 nt, Artificial Sequence
  Synthetic
ugcaccaccuccuuuacuug

SEQ ID NO: 348583 - RNA, 21 nt, Artificial Sequence
  Synthetic
cugcaccaccuccuuuacuug

SEQ ID NO: 348584 - RNA, 22 nt, Artificial Sequence
  Synthetic
ucugcaccaccuccuuuacuug

SEQ ID NO: 348585 - RNA, 23 nt, Artificial Sequence
  Synthetic
cucugcaccaccuccuuuacuug

SEQ ID NO: 348586 - RNA, 24 nt, Artificial Sequence
  Synthetic
ccucugcaccaccuccuuuacuug

SEQ ID NO: 348587 - RNA, 18 nt, Artificial Sequence
  Synthetic
gugaguuaucuuuacuug

SEQ ID NO: 348588 - RNA, 19 nt, Artificial Sequence
  Synthetic
agugaguuaucuuuacuug

SEQ ID NO: 348589 - RNA, 20 nt, Artificial Sequence
  Synthetic
gagugaguuaucuuuacuug

SEQ ID NO: 348590 - RNA, 21 nt, Artificial Sequence
  Synthetic
ugagugaguuaucuuuacuug

SEQ ID NO: 348591 - RNA, 22 nt, Artificial Sequence
  Synthetic
cugagugaguuaucuuuacuug

SEQ ID NO: 348592 - RNA, 23 nt, Artificial Sequence
  Synthetic
acugagugaguuaucuuuacuug

SEQ ID NO: 348593 - RNA, 24 nt, Artificial Sequence
  Synthetic
uacugagugaguuaucuuuacuug

SEQ ID NO: 348594 - RNA, 18 nt, Artificial Sequence
  Synthetic
guuucaugcacaaccuug

SEQ ID NO: 348595 - RNA, 19 nt, Artificial Sequence
  Synthetic
gguuucaugcacaaccuug

SEQ ID NO: 348596 - RNA, 20 nt, Artificial Sequence
  Synthetic
ugguuucaugcacaaccuug

SEQ ID NO: 348597 - RNA, 21 nt, Artificial Sequence
  Synthetic
cugguuucaugcacaaccuug

SEQ ID NO: 348598 - RNA, 22 nt, Artificial Sequence
  Synthetic
ucugguuucaugcacaaccuug

SEQ ID NO: 348599 - RNA, 23 nt, Artificial Sequence
  Synthetic
uucugguuucaugcacaaccuug

SEQ ID NO: 348600 - RNA, 24 nt, Artificial Sequence
  Synthetic
guucugguuucaugcacaaccuug

SEQ ID NO: 348601 - RNA, 18 nt, Artificial Sequence
  Synthetic
gcuaccuucauaaccuug

SEQ ID NO: 348602 - RNA, 19 nt, Artificial Sequence
  Synthetic
ugcuaccuucauaaccuug

SEQ ID NO: 348603 - RNA, 20 nt, Artificial Sequence
  Synthetic
augcuaccuucauaaccuug

SEQ ID NO: 348604 - RNA, 21 nt, Artificial Sequence
  Synthetic
uaugcuaccuucauaaccuug

SEQ ID NO: 348605 - RNA, 22 nt, Artificial Sequence
  Synthetic
auaugcuaccuucauaaccuug

SEQ ID NO: 348606 - RNA, 23 nt, Artificial Sequence
  Synthetic
gauaugcuaccuucauaaccuug

SEQ ID NO: 348607 - RNA, 24 nt, Artificial Sequence
  Synthetic
ugauaugcuaccuucauaaccuug

SEQ ID NO: 348608 - RNA, 18 nt, Artificial Sequence
  Synthetic
uucacaagaaagaccuug

SEQ ID NO: 348609 - RNA, 19 nt, Artificial Sequence
  Synthetic
uuucacaagaaagaccuug

SEQ ID NO: 348610 - RNA, 20 nt, Artificial Sequence
  Synthetic
guuucacaagaaagaccuug

SEQ ID NO: 348611 - RNA, 21 nt, Artificial Sequence
  Synthetic
gguuucacaagaaagaccuug

SEQ ID NO: 348612 - RNA, 22 nt, Artificial Sequence
  Synthetic
cgguuucacaagaaagaccuug

SEQ ID NO: 348613 - RNA, 23 nt, Artificial Sequence
  Synthetic
acgguuucacaagaaagaccuug

SEQ ID NO: 348614 - RNA, 24 nt, Artificial Sequence
  Synthetic
aacgguuucacaagaaagaccuug

SEQ ID NO: 348615 - RNA, 18 nt, Artificial Sequence
  Synthetic
uuaaccaaucuuaccuug

SEQ ID NO: 348616 - RNA, 19 nt, Artificial Sequence
  Synthetic
uuuaaccaaucuuaccuug

SEQ ID NO: 348617 - RNA, 20 nt, Artificial Sequence
  Synthetic
uuuuaaccaaucuuaccuug

SEQ ID NO: 348618 - RNA, 21 nt, Artificial Sequence
  Synthetic
uuuuuaaccaaucuuaccuug

SEQ ID NO: 348619 - RNA, 22 nt, Artificial Sequence
  Synthetic
uuuuuuaaccaaucuuaccuug

SEQ ID NO: 348620 - RNA, 23 nt, Artificial Sequence
  Synthetic
uuuuuuuaaccaaucuuaccuug

SEQ ID NO: 348621 - RNA, 24 nt, Artificial Sequence
  Synthetic
uuuuuuuuaaccaaucuuaccuug

SEQ ID NO: 348622 - RNA, 18 nt, Artificial Sequence
  Synthetic
uaaaucauuuuuaccuug

SEQ ID NO: 348623 - RNA, 19 nt, Artificial Sequence
  Synthetic
uuaaaucauuuuuaccuug

SEQ ID NO: 348624 - RNA, 20 nt, Artificial Sequence
  Synthetic
cuuaaaucauuuuuaccuug

SEQ ID NO: 348625 - RNA, 21 nt, Artificial Sequence
  Synthetic
ucuuaaaucauuuuuaccuug

SEQ ID NO: 348626 - RNA, 22 nt, Artificial Sequence
  Synthetic
uucuuaaaucauuuuuaccuug

SEQ ID NO: 348627 - RNA, 23 nt, Artificial Sequence
  Synthetic
uuucuuaaaucauuuuuaccuug

SEQ ID NO: 348628 - RNA, 24 nt, Artificial Sequence
  Synthetic
uuuucuuaaaucauuuuuaccuug

SEQ ID NO: 348629 - RNA, 18 nt, Artificial Sequence
  Synthetic
gcucacaggauacccuug

SEQ ID NO: 348630 - RNA, 19 nt, Artificial Sequence
  Synthetic
agcucacaggauacccuug

SEQ ID NO: 348631 - RNA, 20 nt, Artificial Sequence
  Synthetic
cagcucacaggauacccuug

SEQ ID NO: 348632 - RNA, 21 nt, Artificial Sequence
  Synthetic
acagcucacaggauacccuug

SEQ ID NO: 348633 - RNA, 22 nt, Artificial Sequence
  Synthetic
cacagcucacaggauacccuug

SEQ ID NO: 348634 - RNA, 23 nt, Artificial Sequence
  Synthetic
ucacagcucacaggauacccuug

SEQ ID NO: 348635 - RNA, 24 nt, Artificial Sequence
  Synthetic
aucacagcucacaggauacccuug

SEQ ID NO: 348636 - RNA, 18 nt, Artificial Sequence
  Synthetic
gaagguugaguccccuug

SEQ ID NO: 348637 - RNA, 19 nt, Artificial Sequence
  Synthetic
agaagguugaguccccuug

SEQ ID NO: 348638 - RNA, 20 nt, Artificial Sequence
  Synthetic
aagaagguugaguccccuug

SEQ ID NO: 348639 - RNA, 21 nt, Artificial Sequence
  Synthetic
aaagaagguugaguccccuug

SEQ ID NO: 348640 - RNA, 22 nt, Artificial Sequence
  Synthetic
uaaagaagguugaguccccuug

SEQ ID NO: 348641 - RNA, 23 nt, Artificial Sequence
  Synthetic
guaaagaagguugaguccccuug

SEQ ID NO: 348642 - RNA, 24 nt, Artificial Sequence
  Synthetic
uguaaagaagguugaguccccuug

SEQ ID NO: 348643 - RNA, 18 nt, Artificial Sequence
  Synthetic
guuuagucuaaucccuug

SEQ ID NO: 348644 - RNA, 19 nt, Artificial Sequence
  Synthetic
gguuuagucuaaucccuug

SEQ ID NO: 348645 - RNA, 20 nt, Artificial Sequence
  Synthetic
ugguuuagucuaaucccuug

SEQ ID NO: 348646 - RNA, 21 nt, Artificial Sequence
  Synthetic
uugguuuagucuaaucccuug

SEQ ID NO: 348647 - RNA, 22 nt, Artificial Sequence
  Synthetic
uuugguuuagucuaaucccuug

SEQ ID NO: 348648 - RNA, 23 nt, Artificial Sequence
  Synthetic
auuugguuuagucuaaucccuug

SEQ ID NO: 348649 - RNA, 24 nt, Artificial Sequence
  Synthetic
gauuugguuuagucuaaucccuug

SEQ ID NO: 348650 - RNA, 18 nt, Artificial Sequence
  Synthetic
caucacaaaagucccuug

SEQ ID NO: 348651 - RNA, 19 nt, Artificial Sequence
  Synthetic
acaucacaaaagucccuug

SEQ ID NO: 348652 - RNA, 20 nt, Artificial Sequence
  Synthetic
uacaucacaaaagucccuug

SEQ ID NO: 348653 - RNA, 21 nt, Artificial Sequence
  Synthetic
auacaucacaaaagucccuug

SEQ ID NO: 348654 - RNA, 22 nt, Artificial Sequence
  Synthetic
uauacaucacaaaagucccuug

SEQ ID NO: 348655 - RNA, 23 nt, Artificial Sequence
  Synthetic
auauacaucacaaaagucccuug

SEQ ID NO: 348656 - RNA, 24 nt, Artificial Sequence
  Synthetic
uauauacaucacaaaagucccuug

SEQ ID NO: 348657 - RNA, 18 nt, Artificial Sequence
  Synthetic
auuuccaaaugucccuug

SEQ ID NO: 348658 - RNA, 19 nt, Artificial Sequence
  Synthetic
cauuuccaaaugucccuug

SEQ ID NO: 348659 - RNA, 20 nt, Artificial Sequence
  Synthetic
acauuuccaaaugucccuug

SEQ ID NO: 348660 - RNA, 21 nt, Artificial Sequence
  Synthetic
gacauuuccaaaugucccuug

SEQ ID NO: 348661 - RNA, 22 nt, Artificial Sequence
  Synthetic
agacauuuccaaaugucccuug

SEQ ID NO: 348662 - RNA, 23 nt, Artificial Sequence
  Synthetic
cagacauuuccaaaugucccuug

SEQ ID NO: 348663 - RNA, 24 nt, Artificial Sequence
  Synthetic
ccagacauuuccaaaugucccuug

SEQ ID NO: 348664 - RNA, 18 nt, Artificial Sequence
  Synthetic
gcuaugucuacagccuug

SEQ ID NO: 348665 - RNA, 19 nt, Artificial Sequence
  Synthetic
agcuaugucuacagccuug

SEQ ID NO: 348666 - RNA, 20 nt, Artificial Sequence
  Synthetic
aagcuaugucuacagccuug

SEQ ID NO: 348667 - RNA, 21 nt, Artificial Sequence
  Synthetic
aaagcuaugucuacagccuug

SEQ ID NO: 348668 - RNA, 22 nt, Artificial Sequence
  Synthetic
caaagcuaugucuacagccuug

SEQ ID NO: 348669 - RNA, 23 nt, Artificial Sequence
  Synthetic
acaaagcuaugucuacagccuug

SEQ ID NO: 348670 - RNA, 24 nt, Artificial Sequence
  Synthetic
cacaaagcuaugucuacagccuug

SEQ ID NO: 348671 - RNA, 18 nt, Artificial Sequence
  Synthetic
uuagccuuucaggccuug

SEQ ID NO: 348672 - RNA, 19 nt, Artificial Sequence
  Synthetic
cuuagccuuucaggccuug

SEQ ID NO: 348673 - RNA, 20 nt, Artificial Sequence
  Synthetic
ccuuagccuuucaggccuug

SEQ ID NO: 348674 - RNA, 21 nt, Artificial Sequence
  Synthetic
cccuuagccuuucaggccuug

SEQ ID NO: 348675 - RNA, 22 nt, Artificial Sequence
  Synthetic
ccccuuagccuuucaggccuug

SEQ ID NO: 348676 - RNA, 23 nt, Artificial Sequence
  Synthetic
uccccuuagccuuucaggccuug

SEQ ID NO: 348677 - RNA, 24 nt, Artificial Sequence
  Synthetic
cuccccuuagccuuucaggccuug

SEQ ID NO: 348678 - RNA, 18 nt, Artificial Sequence
  Synthetic
cccuguuuaaaugccuug

SEQ ID NO: 348679 - RNA, 19 nt, Artificial Sequence
  Synthetic
acccuguuuaaaugccuug

SEQ ID NO: 348680 - RNA, 20 nt, Artificial Sequence
  Synthetic
aacccuguuuaaaugccuug

SEQ ID NO: 348681 - RNA, 21 nt, Artificial Sequence
  Synthetic
gaacccuguuuaaaugccuug

SEQ ID NO: 348682 - RNA, 22 nt, Artificial Sequence
  Synthetic
agaacccuguuuaaaugccuug

SEQ ID NO: 348683 - RNA, 23 nt, Artificial Sequence
  Synthetic
cagaacccuguuuaaaugccuug

SEQ ID NO: 348684 - RNA, 24 nt, Artificial Sequence
  Synthetic
acagaacccuguuuaaaugccuug

SEQ ID NO: 348685 - RNA, 18 nt, Artificial Sequence
  Synthetic
auggagggucuugccuug

SEQ ID NO: 348686 - RNA, 19 nt, Artificial Sequence
  Synthetic
gauggagggucuugccuug

SEQ ID NO: 348687 - RNA, 20 nt, Artificial Sequence
  Synthetic
ugauggagggucuugccuug

SEQ ID NO: 348688 - RNA, 21 nt, Artificial Sequence
  Synthetic
cugauggagggucuugccuug

SEQ ID NO: 348689 - RNA, 22 nt, Artificial Sequence
  Synthetic
gcugauggagggucuugccuug

SEQ ID NO: 348690 - RNA, 23 nt, Artificial Sequence
  Synthetic
ugcugauggagggucuugccuug

SEQ ID NO: 348691 - RNA, 24 nt, Artificial Sequence
  Synthetic
uugcugauggagggucuugccuug

SEQ ID NO: 348692 - RNA, 18 nt, Artificial Sequence
  Synthetic
uagauucuugaauccuug

SEQ ID NO: 348693 - RNA, 19 nt, Artificial Sequence
  Synthetic
guagauucuugaauccuug

SEQ ID NO: 348694 - RNA, 20 nt, Artificial Sequence
  Synthetic
gguagauucuugaauccuug

SEQ ID NO: 348695 - RNA, 21 nt, Artificial Sequence
  Synthetic
ugguagauucuugaauccuug

SEQ ID NO: 348696 - RNA, 22 nt, Artificial Sequence
  Synthetic
augguagauucuugaauccuug

SEQ ID NO: 348697 - RNA, 23 nt, Artificial Sequence
  Synthetic
aaugguagauucuugaauccuug

SEQ ID NO: 348698 - RNA, 24 nt, Artificial Sequence
  Synthetic
caaugguagauucuugaauccuug

SEQ ID NO: 348699 - RNA, 18 nt, Artificial Sequence
  Synthetic
aaacauggaacauccuug

SEQ ID NO: 348700 - RNA, 19 nt, Artificial Sequence
  Synthetic
uaaacauggaacauccuug

SEQ ID NO: 348701 - RNA, 20 nt, Artificial Sequence
  Synthetic
uuaaacauggaacauccuug

SEQ ID NO: 348702 - RNA, 21 nt, Artificial Sequence
  Synthetic
auuaaacauggaacauccuug

SEQ ID NO: 348703 - RNA, 22 nt, Artificial Sequence
  Synthetic
uauuaaacauggaacauccuug

SEQ ID NO: 348704 - RNA, 23 nt, Artificial Sequence
  Synthetic
cuauuaaacauggaacauccuug

SEQ ID NO: 348705 - RNA, 24 nt, Artificial Sequence
  Synthetic
acuauuaaacauggaacauccuug

SEQ ID NO: 348706 - RNA, 18 nt, Artificial Sequence
  Synthetic
uuuagaccaauauccuug

SEQ ID NO: 348707 - RNA, 19 nt, Artificial Sequence
  Synthetic
uuuuagaccaauauccuug

SEQ ID NO: 348708 - RNA, 20 nt, Artificial Sequence
  Synthetic
auuuuagaccaauauccuug

SEQ ID NO: 348709 - RNA, 21 nt, Artificial Sequence
  Synthetic
aauuuuagaccaauauccuug

SEQ ID NO: 348710 - RNA, 22 nt, Artificial Sequence
  Synthetic
gaauuuuagaccaauauccuug

SEQ ID NO: 348711 - RNA, 23 nt, Artificial Sequence
  Synthetic
agaauuuuagaccaauauccuug

SEQ ID NO: 348712 - RNA, 24 nt, Artificial Sequence
  Synthetic
gagaauuuuagaccaauauccuug

SEQ ID NO: 348713 - RNA, 18 nt, Artificial Sequence
  Synthetic
ucauagcaguuauccuug

SEQ ID NO: 348714 - RNA, 19 nt, Artificial Sequence
  Synthetic
aucauagcaguuauccuug

SEQ ID NO: 348715 - RNA, 20 nt, Artificial Sequence
  Synthetic
aaucauagcaguuauccuug

SEQ ID NO: 348716 - RNA, 21 nt, Artificial Sequence
  Synthetic
uaaucauagcaguuauccuug

SEQ ID NO: 348717 - RNA, 22 nt, Artificial Sequence
  Synthetic
cuaaucauagcaguuauccuug

SEQ ID NO: 348718 - RNA, 23 nt, Artificial Sequence
  Synthetic
gcuaaucauagcaguuauccuug

SEQ ID NO: 348719 - RNA, 24 nt, Artificial Sequence
  Synthetic
ugcuaaucauagcaguuauccuug

SEQ ID NO: 348720 - RNA, 18 nt, Artificial Sequence
  Synthetic
uccaauccaaacuccuug

SEQ ID NO: 348721 - RNA, 19 nt, Artificial Sequence
  Synthetic
uuccaauccaaacuccuug

SEQ ID NO: 348722 - RNA, 20 nt, Artificial Sequence
  Synthetic
auuccaauccaaacuccuug

SEQ ID NO: 348723 - RNA, 21 nt, Artificial Sequence
  Synthetic
aauuccaauccaaacuccuug

SEQ ID NO: 348724 - RNA, 22 nt, Artificial Sequence
  Synthetic
caauuccaauccaaacuccuug

SEQ ID NO: 348725 - RNA, 23 nt, Artificial Sequence
  Synthetic
ccaauuccaauccaaacuccuug

SEQ ID NO: 348726 - RNA, 24 nt, Artificial Sequence
  Synthetic
uccaauuccaauccaaacuccuug

SEQ ID NO: 348727 - RNA, 18 nt, Artificial Sequence
  Synthetic
aucacugggaccuccuug

SEQ ID NO: 348728 - RNA, 19 nt, Artificial Sequence
  Synthetic
uaucacugggaccuccuug

SEQ ID NO: 348729 - RNA, 20 nt, Artificial Sequence
  Synthetic
auaucacugggaccuccuug

SEQ ID NO: 348730 - RNA, 21 nt, Artificial Sequence
  Synthetic
cauaucacugggaccuccuug

SEQ ID NO: 348731 - RNA, 22 nt, Artificial Sequence
  Synthetic
ucauaucacugggaccuccuug

SEQ ID NO: 348732 - RNA, 23 nt, Artificial Sequence
  Synthetic
aucauaucacugggaccuccuug

SEQ ID NO: 348733 - RNA, 24 nt, Artificial Sequence
  Synthetic
aaucauaucacugggaccuccuug

SEQ ID NO: 348734 - RNA, 18 nt, Artificial Sequence
  Synthetic
cuaaauauggccuccuug

SEQ ID NO: 348735 - RNA, 19 nt, Artificial Sequence
  Synthetic
ucuaaauauggccuccuug

SEQ ID NO: 348736 - RNA, 20 nt, Artificial Sequence
  Synthetic
aucuaaauauggccuccuug

SEQ ID NO: 348737 - RNA, 21 nt, Artificial Sequence
  Synthetic
aaucuaaauauggccuccuug

SEQ ID NO: 348738 - RNA, 22 nt, Artificial Sequence
  Synthetic
uaaucuaaauauggccuccuug

SEQ ID NO: 348739 - RNA, 23 nt, Artificial Sequence
  Synthetic
guaaucuaaauauggccuccuug

SEQ ID NO: 348740 - RNA, 24 nt, Artificial Sequence
  Synthetic
gguaaucuaaauauggccuccuug

SEQ ID NO: 348741 - RNA, 18 nt, Artificial Sequence
  Synthetic
gguuuguaguucuccuug

SEQ ID NO: 348742 - RNA, 19 nt, Artificial Sequence
  Synthetic
ugguuuguaguucuccuug

SEQ ID NO: 348743 - RNA, 20 nt, Artificial Sequence
  Synthetic
gugguuuguaguucuccuug

SEQ ID NO: 348744 - RNA, 21 nt, Artificial Sequence
  Synthetic
agugguuuguaguucuccuug

SEQ ID NO: 348745 - RNA, 22 nt, Artificial Sequence
  Synthetic
cagugguuuguaguucuccuug

SEQ ID NO: 348746 - RNA, 23 nt, Artificial Sequence
  Synthetic
acagugguuuguaguucuccuug

SEQ ID NO: 348747 - RNA, 24 nt, Artificial Sequence
  Synthetic
aacagugguuuguaguucuccuug

SEQ ID NO: 348748 - RNA, 23 nt, Artificial Sequence
  Synthetic
gcagugguuuguaguucuccuug

SEQ ID NO: 348749 - RNA, 24 nt, Artificial Sequence
  Synthetic
agcagugguuuguaguucuccuug

SEQ ID NO: 348750 - RNA, 18 nt, Artificial Sequence
  Synthetic
gaauuuauuauuuccuug

SEQ ID NO: 348751 - RNA, 19 nt, Artificial Sequence
  Synthetic
agaauuuauuauuuccuug

SEQ ID NO: 348752 - RNA, 20 nt, Artificial Sequence
  Synthetic
cagaauuuauuauuuccuug

SEQ ID NO: 348753 - RNA, 21 nt, Artificial Sequence
  Synthetic
ucagaauuuauuauuuccuug

SEQ ID NO: 348754 - RNA, 22 nt, Artificial Sequence
  Synthetic
cucagaauuuauuauuuccuug

SEQ ID NO: 348755 - RNA, 23 nt, Artificial Sequence
  Synthetic
ccucagaauuuauuauuuccuug

SEQ ID NO: 348756 - RNA, 24 nt, Artificial Sequence
  Synthetic
accucagaauuuauuauuuccuug

SEQ ID NO: 348757 - RNA, 18 nt, Artificial Sequence
  Synthetic
cauuuggaauuuuccuug

SEQ ID NO: 348758 - RNA, 19 nt, Artificial Sequence
  Synthetic
ucauuuggaauuuuccuug

SEQ ID NO: 348759 - RNA, 20 nt, Artificial Sequence
  Synthetic
uucauuuggaauuuuccuug

SEQ ID NO: 348760 - RNA, 21 nt, Artificial Sequence
  Synthetic
uuucauuuggaauuuuccuug

SEQ ID NO: 348761 - RNA, 22 nt, Artificial Sequence
  Synthetic
uuuucauuuggaauuuuccuug

SEQ ID NO: 348762 - RNA, 23 nt, Artificial Sequence
  Synthetic
uuuuucauuuggaauuuuccuug

SEQ ID NO: 348763 - RNA, 24 nt, Artificial Sequence
  Synthetic
uuuuuucauuuggaauuuuccuug

SEQ ID NO: 348764 - RNA, 18 nt, Artificial Sequence
  Synthetic
uuuugauuuuuuuccuug

SEQ ID NO: 348765 - RNA, 19 nt, Artificial Sequence
  Synthetic
uuuuugauuuuuuuccuug

SEQ ID NO: 348766 - RNA, 20 nt, Artificial Sequence
  Synthetic
cuuuuugauuuuuuuccuug

SEQ ID NO: 348767 - RNA, 21 nt, Artificial Sequence
  Synthetic
ccuuuuugauuuuuuuccuug

SEQ ID NO: 348768 - RNA, 22 nt, Artificial Sequence
  Synthetic
cccuuuuugauuuuuuuccuug

SEQ ID NO: 348769 - RNA, 23 nt, Artificial Sequence
  Synthetic
ccccuuuuugauuuuuuuccuug

SEQ ID NO: 348770 - RNA, 24 nt, Artificial Sequence
  Synthetic
accccuuuuugauuuuuuuccuug

SEQ ID NO: 348771 - RNA, 18 nt, Artificial Sequence
  Synthetic
caagcuccccuaagcuug

SEQ ID NO: 348772 - RNA, 19 nt, Artificial Sequence
  Synthetic
gcaagcuccccuaagcuug

SEQ ID NO: 348773 - RNA, 20 nt, Artificial Sequence
  Synthetic
ugcaagcuccccuaagcuug

SEQ ID NO: 348774 - RNA, 21 nt, Artificial Sequence
  Synthetic
cugcaagcuccccuaagcuug

SEQ ID NO: 348775 - RNA, 22 nt, Artificial Sequence
  Synthetic
ccugcaagcuccccuaagcuug

SEQ ID NO: 348776 - RNA, 23 nt, Artificial Sequence
  Synthetic
uccugcaagcuccccuaagcuug

SEQ ID NO: 348777 - RNA, 24 nt, Artificial Sequence
  Synthetic
uuccugcaagcuccccuaagcuug

SEQ ID NO: 348778 - RNA, 18 nt, Artificial Sequence
  Synthetic
caauuagauaacagcuug

SEQ ID NO: 348779 - RNA, 19 nt, Artificial Sequence
  Synthetic
acaauuagauaacagcuug

SEQ ID NO: 348780 - RNA, 20 nt, Artificial Sequence
  Synthetic
aacaauuagauaacagcuug

SEQ ID NO: 348781 - RNA, 21 nt, Artificial Sequence
  Synthetic
uaacaauuagauaacagcuug

SEQ ID NO: 348782 - RNA, 22 nt, Artificial Sequence
  Synthetic
auaacaauuagauaacagcuug

SEQ ID NO: 348783 - RNA, 23 nt, Artificial Sequence
  Synthetic
aauaacaauuagauaacagcuug

SEQ ID NO: 348784 - RNA, 24 nt, Artificial Sequence
  Synthetic
aaauaacaauuagauaacagcuug

SEQ ID NO: 348785 - RNA, 18 nt, Artificial Sequence
  Synthetic
ucagcaagcaucagcuug

SEQ ID NO: 348786 - RNA, 19 nt, Artificial Sequence
  Synthetic
gucagcaagcaucagcuug

SEQ ID NO: 348787 - RNA, 20 nt, Artificial Sequence
  Synthetic
agucagcaagcaucagcuug

SEQ ID NO: 348788 - RNA, 21 nt, Artificial Sequence
  Synthetic
cagucagcaagcaucagcuug

SEQ ID NO: 348789 - RNA, 22 nt, Artificial Sequence
  Synthetic
ucagucagcaagcaucagcuug

SEQ ID NO: 348790 - RNA, 23 nt, Artificial Sequence
  Synthetic
cucagucagcaagcaucagcuug

SEQ ID NO: 348791 - RNA, 24 nt, Artificial Sequence
  Synthetic
gcucagucagcaagcaucagcuug

SEQ ID NO: 348792 - RNA, 18 nt, Artificial Sequence
  Synthetic
uaccaugaauggagcuug

SEQ ID NO: 348793 - RNA, 19 nt, Artificial Sequence
  Synthetic
uuaccaugaauggagcuug

SEQ ID NO: 348794 - RNA, 20 nt, Artificial Sequence
  Synthetic
uuuaccaugaauggagcuug

SEQ ID NO: 348795 - RNA, 21 nt, Artificial Sequence
  Synthetic
auuuaccaugaauggagcuug

SEQ ID NO: 348796 - RNA, 22 nt, Artificial Sequence
  Synthetic
uauuuaccaugaauggagcuug

SEQ ID NO: 348797 - RNA, 23 nt, Artificial Sequence
  Synthetic
guauuuaccaugaauggagcuug

SEQ ID NO: 348798 - RNA, 24 nt, Artificial Sequence
  Synthetic
gguauuuaccaugaauggagcuug

SEQ ID NO: 348799 - RNA, 18 nt, Artificial Sequence
  Synthetic
ggaagacacuggagcuug

SEQ ID NO: 348800 - RNA, 19 nt, Artificial Sequence
  Synthetic
gggaagacacuggagcuug

SEQ ID NO: 348801 - RNA, 20 nt, Artificial Sequence
  Synthetic
ggggaagacacuggagcuug

SEQ ID NO: 348802 - RNA, 21 nt, Artificial Sequence
  Synthetic
uggggaagacacuggagcuug

SEQ ID NO: 348803 - RNA, 22 nt, Artificial Sequence
  Synthetic
auggggaagacacuggagcuug

SEQ ID NO: 348804 - RNA, 23 nt, Artificial Sequence
  Synthetic
gauggggaagacacuggagcuug

SEQ ID NO: 348805 - RNA, 24 nt, Artificial Sequence
  Synthetic
ggauggggaagacacuggagcuug

SEQ ID NO: 348806 - RNA, 18 nt, Artificial Sequence
  Synthetic
acucaugcuuugagcuug

SEQ ID NO: 348807 - RNA, 19 nt, Artificial Sequence
  Synthetic
uacucaugcuuugagcuug

SEQ ID NO: 348808 - RNA, 20 nt, Artificial Sequence
  Synthetic
uuacucaugcuuugagcuug

SEQ ID NO: 348809 - RNA, 21 nt, Artificial Sequence
  Synthetic
cuuacucaugcuuugagcuug

SEQ ID NO: 348810 - RNA, 22 nt, Artificial Sequence
  Synthetic
acuuacucaugcuuugagcuug

SEQ ID NO: 348811 - RNA, 23 nt, Artificial Sequence
  Synthetic
cacuuacucaugcuuugagcuug

SEQ ID NO: 348812 - RNA, 24 nt, Artificial Sequence
  Synthetic
ucacuuacucaugcuuugagcuug

SEQ ID NO: 348813 - RNA, 18 nt, Artificial Sequence
  Synthetic
uagaauguuucuagcuug

SEQ ID NO: 348814 - RNA, 19 nt, Artificial Sequence
  Synthetic
uuagaauguuucuagcuug

SEQ ID NO: 348815 - RNA, 20 nt, Artificial Sequence
  Synthetic
auuagaauguuucuagcuug

SEQ ID NO: 348816 - RNA, 21 nt, Artificial Sequence
  Synthetic
aauuagaauguuucuagcuug

SEQ ID NO: 348817 - RNA, 22 nt, Artificial Sequence
  Synthetic
uaauuagaauguuucuagcuug

SEQ ID NO: 348818 - RNA, 23 nt, Artificial Sequence
  Synthetic
guaauuagaauguuucuagcuug

SEQ ID NO: 348819 - RNA, 24 nt, Artificial Sequence
  Synthetic
aguaauuagaauguuucuagcuug

SEQ ID NO: 348820 - RNA, 18 nt, Artificial Sequence
  Synthetic
aaagucaaugguagcuug

SEQ ID NO: 348821 - RNA, 19 nt, Artificial Sequence
  Synthetic
gaaagucaaugguagcuug

SEQ ID NO: 348822 - RNA, 20 nt, Artificial Sequence
  Synthetic
agaaagucaaugguagcuug

SEQ ID NO: 348823 - RNA, 21 nt, Artificial Sequence
  Synthetic
aagaaagucaaugguagcuug

SEQ ID NO: 348824 - RNA, 22 nt, Artificial Sequence
  Synthetic
gaagaaagucaaugguagcuug

SEQ ID NO: 348825 - RNA, 23 nt, Artificial Sequence
  Synthetic
ugaagaaagucaaugguagcuug

SEQ ID NO: 348826 - RNA, 24 nt, Artificial Sequence
  Synthetic
gugaagaaagucaaugguagcuug

SEQ ID NO: 348827 - RNA, 18 nt, Artificial Sequence
  Synthetic
aaaggcauugguagcuug

SEQ ID NO: 348828 - RNA, 19 nt, Artificial Sequence
  Synthetic
gaaaggcauugguagcuug

SEQ ID NO: 348829 - RNA, 20 nt, Artificial Sequence
  Synthetic
agaaaggcauugguagcuug

SEQ ID NO: 348830 - RNA, 21 nt, Artificial Sequence
  Synthetic
aagaaaggcauugguagcuug

SEQ ID NO: 348831 - RNA, 22 nt, Artificial Sequence
  Synthetic
gaagaaaggcauugguagcuug

SEQ ID NO: 348832 - RNA, 23 nt, Artificial Sequence
  Synthetic
ugaagaaaggcauugguagcuug

SEQ ID NO: 348833 - RNA, 24 nt, Artificial Sequence
  Synthetic
gugaagaaaggcauugguagcuug

SEQ ID NO: 348834 - RNA, 18 nt, Artificial Sequence
  Synthetic
aaagucauugguagcuug

SEQ ID NO: 348835 - RNA, 19 nt, Artificial Sequence
  Synthetic
gaaagucauugguagcuug

SEQ ID NO: 348836 - RNA, 20 nt, Artificial Sequence
  Synthetic
agaaagucauugguagcuug

SEQ ID NO: 348837 - RNA, 21 nt, Artificial Sequence
  Synthetic
aagaaagucauugguagcuug

SEQ ID NO: 348838 - RNA, 22 nt, Artificial Sequence
  Synthetic
gaagaaagucauugguagcuug

SEQ ID NO: 348839 - RNA, 23 nt, Artificial Sequence
  Synthetic
ugaagaaagucauugguagcuug

SEQ ID NO: 348840 - RNA, 24 nt, Artificial Sequence
  Synthetic
gugaagaaagucauugguagcuug

SEQ ID NO: 348841 - RNA, 18 nt, Artificial Sequence
  Synthetic
ccuguaaauaggcgcuug

SEQ ID NO: 348842 - RNA, 19 nt, Artificial Sequence
  Synthetic
gccuguaaauaggcgcuug

SEQ ID NO: 348843 - RNA, 20 nt, Artificial Sequence
  Synthetic
ugccuguaaauaggcgcuug

SEQ ID NO: 348844 - RNA, 21 nt, Artificial Sequence
  Synthetic
gugccuguaaauaggcgcuug

SEQ ID NO: 348845 - RNA, 22 nt, Artificial Sequence
  Synthetic
ugugccuguaaauaggcgcuug

SEQ ID NO: 348846 - RNA, 23 nt, Artificial Sequence
  Synthetic
cugugccuguaaauaggcgcuug

SEQ ID NO: 348847 - RNA, 24 nt, Artificial Sequence
  Synthetic
ccugugccuguaaauaggcgcuug

SEQ ID NO: 348848 - RNA, 18 nt, Artificial Sequence
  Synthetic
agggguggguugcgcuug

SEQ ID NO: 348849 - RNA, 19 nt, Artificial Sequence
  Synthetic
uagggguggguugcgcuug

SEQ ID NO: 348850 - RNA, 20 nt, Artificial Sequence
  Synthetic
uuagggguggguugcgcuug

SEQ ID NO: 348851 - RNA, 21 nt, Artificial Sequence
  Synthetic
uuuagggguggguugcgcuug

SEQ ID NO: 348852 - RNA, 22 nt, Artificial Sequence
  Synthetic
guuuagggguggguugcgcuug

SEQ ID NO: 348853 - RNA, 23 nt, Artificial Sequence
  Synthetic
gguuuagggguggguugcgcuug

SEQ ID NO: 348854 - RNA, 24 nt, Artificial Sequence
  Synthetic
agguuuagggguggguugcgcuug

SEQ ID NO: 348855 - RNA, 18 nt, Artificial Sequence
  Synthetic
gguuuaaugcaaggcuug

SEQ ID NO: 348856 - RNA, 19 nt, Artificial Sequence
  Synthetic
agguuuaaugcaaggcuug

SEQ ID NO: 348857 - RNA, 20 nt, Artificial Sequence
  Synthetic
cagguuuaaugcaaggcuug

SEQ ID NO: 348858 - RNA, 21 nt, Artificial Sequence
  Synthetic
ccagguuuaaugcaaggcuug

SEQ ID NO: 348859 - RNA, 22 nt, Artificial Sequence
  Synthetic
uccagguuuaaugcaaggcuug

SEQ ID NO: 348860 - RNA, 23 nt, Artificial Sequence
  Synthetic
auccagguuuaaugcaaggcuug

SEQ ID NO: 348861 - RNA, 24 nt, Artificial Sequence
  Synthetic
aauccagguuuaaugcaaggcuug

SEQ ID NO: 348862 - RNA, 18 nt, Artificial Sequence
  Synthetic
cucagaacuuaaggcuug

SEQ ID NO: 348863 - RNA, 19 nt, Artificial Sequence
  Synthetic
ccucagaacuuaaggcuug

SEQ ID NO: 348864 - RNA, 20 nt, Artificial Sequence
  Synthetic
accucagaacuuaaggcuug

SEQ ID NO: 348865 - RNA, 21 nt, Artificial Sequence
  Synthetic
aaccucagaacuuaaggcuug

SEQ ID NO: 348866 - RNA, 22 nt, Artificial Sequence
  Synthetic
uaaccucagaacuuaaggcuug

SEQ ID NO: 348867 - RNA, 23 nt, Artificial Sequence
  Synthetic
cuaaccucagaacuuaaggcuug

SEQ ID NO: 348868 - RNA, 24 nt, Artificial Sequence
  Synthetic
ccuaaccucagaacuuaaggcuug

SEQ ID NO: 348869 - RNA, 18 nt, Artificial Sequence
  Synthetic
gcuuauuuuggaggcuug

SEQ ID NO: 348870 - RNA, 19 nt, Artificial Sequence
  Synthetic
ugcuuauuuuggaggcuug

SEQ ID NO: 348871 - RNA, 20 nt, Artificial Sequence
  Synthetic
augcuuauuuuggaggcuug

SEQ ID NO: 348872 - RNA, 21 nt, Artificial Sequence
  Synthetic
uaugcuuauuuuggaggcuug

SEQ ID NO: 348873 - RNA, 22 nt, Artificial Sequence
  Synthetic
uuaugcuuauuuuggaggcuug

SEQ ID NO: 348874 - RNA, 23 nt, Artificial Sequence
  Synthetic
uuuaugcuuauuuuggaggcuug

SEQ ID NO: 348875 - RNA, 24 nt, Artificial Sequence
  Synthetic
auuuaugcuuauuuuggaggcuug

SEQ ID NO: 348876 - RNA, 18 nt, Artificial Sequence
  Synthetic
cauuagaauguaggcuug

SEQ ID NO: 348877 - RNA, 19 nt, Artificial Sequence
  Synthetic
ucauuagaauguaggcuug

SEQ ID NO: 348878 - RNA, 20 nt, Artificial Sequence
  Synthetic
aucauuagaauguaggcuug

SEQ ID NO: 348879 - RNA, 21 nt, Artificial Sequence
  Synthetic
uaucauuagaauguaggcuug

SEQ ID NO: 348880 - RNA, 22 nt, Artificial Sequence
  Synthetic
cuaucauuagaauguaggcuug

SEQ ID NO: 348881 - RNA, 23 nt, Artificial Sequence
  Synthetic
gcuaucauuagaauguaggcuug

SEQ ID NO: 348882 - RNA, 24 nt, Artificial Sequence
  Synthetic
ugcuaucauuagaauguaggcuug

SEQ ID NO: 348883 - RNA, 18 nt, Artificial Sequence
  Synthetic
aaucaccuggagggcuug

SEQ ID NO: 348884 - RNA, 19 nt, Artificial Sequence
  Synthetic
gaaucaccuggagggcuug

SEQ ID NO: 348885 - RNA, 20 nt, Artificial Sequence
  Synthetic
agaaucaccuggagggcuug

SEQ ID NO: 348886 - RNA, 21 nt, Artificial Sequence
  Synthetic
cagaaucaccuggagggcuug

SEQ ID NO: 348887 - RNA, 22 nt, Artificial Sequence
  Synthetic
ucagaaucaccuggagggcuug

SEQ ID NO: 348888 - RNA, 23 nt, Artificial Sequence
  Synthetic
aucagaaucaccuggagggcuug

SEQ ID NO: 348889 - RNA, 24 nt, Artificial Sequence
  Synthetic
caucagaaucaccuggagggcuug

SEQ ID NO: 348890 - RNA, 18 nt, Artificial Sequence
  Synthetic
uuggaagggaauggcuug

SEQ ID NO: 348891 - RNA, 19 nt, Artificial Sequence
  Synthetic
guuggaagggaauggcuug

SEQ ID NO: 348892 - RNA, 20 nt, Artificial Sequence
  Synthetic
uguuggaagggaauggcuug

SEQ ID NO: 348893 - RNA, 21 nt, Artificial Sequence
  Synthetic
auguuggaagggaauggcuug

SEQ ID NO: 348894 - RNA, 22 nt, Artificial Sequence
  Synthetic
gauguuggaagggaauggcuug

SEQ ID NO: 348895 - RNA, 23 nt, Artificial Sequence
  Synthetic
agauguuggaagggaauggcuug

SEQ ID NO: 348896 - RNA, 24 nt, Artificial Sequence
  Synthetic
gagauguuggaagggaauggcuug

SEQ ID NO: 348897 - RNA, 18 nt, Artificial Sequence
  Synthetic
gcccuuuuccuuggcuug

SEQ ID NO: 348898 - RNA, 19 nt, Artificial Sequence
  Synthetic
agcccuuuuccuuggcuug

SEQ ID NO: 348899 - RNA, 20 nt, Artificial Sequence
  Synthetic
aagcccuuuuccuuggcuug

SEQ ID NO: 348900 - RNA, 21 nt, Artificial Sequence
  Synthetic
gaagcccuuuuccuuggcuug

SEQ ID NO: 348901 - RNA, 22 nt, Artificial Sequence
  Synthetic
ugaagcccuuuuccuuggcuug

SEQ ID NO: 348902 - RNA, 23 nt, Artificial Sequence
  Synthetic
uugaagcccuuuuccuuggcuug

SEQ ID NO: 348903 - RNA, 24 nt, Artificial Sequence
  Synthetic
uuugaagcccuuuuccuuggcuug

SEQ ID NO: 348904 - RNA, 18 nt, Artificial Sequence
  Synthetic
gaaagauaauuuggcuug

SEQ ID NO: 348905 - RNA, 19 nt, Artificial Sequence
  Synthetic
ugaaagauaauuuggcuug

SEQ ID NO: 348906 - RNA, 20 nt, Artificial Sequence
  Synthetic
gugaaagauaauuuggcuug

SEQ ID NO: 348907 - RNA, 21 nt, Artificial Sequence
  Synthetic
agugaaagauaauuuggcuug

SEQ ID NO: 348908 - RNA, 22 nt, Artificial Sequence
  Synthetic
aagugaaagauaauuuggcuug

SEQ ID NO: 348909 - RNA, 23 nt, Artificial Sequence
  Synthetic
aaagugaaagauaauuuggcuug

SEQ ID NO: 348910 - RNA, 24 nt, Artificial Sequence
  Synthetic
caaagugaaagauaauuuggcuug

SEQ ID NO: 348911 - RNA, 18 nt, Artificial Sequence
  Synthetic
acaaaggagaaaugcuug

SEQ ID NO: 348912 - RNA, 19 nt, Artificial Sequence
  Synthetic
cacaaaggagaaaugcuug

SEQ ID NO: 348913 - RNA, 20 nt, Artificial Sequence
  Synthetic
acacaaaggagaaaugcuug

SEQ ID NO: 348914 - RNA, 21 nt, Artificial Sequence
  Synthetic
aacacaaaggagaaaugcuug

SEQ ID NO: 348915 - RNA, 22 nt, Artificial Sequence
  Synthetic
uaacacaaaggagaaaugcuug

SEQ ID NO: 348916 - RNA, 23 nt, Artificial Sequence
  Synthetic
guaacacaaaggagaaaugcuug

SEQ ID NO: 348917 - RNA, 24 nt, Artificial Sequence
  Synthetic
uguaacacaaaggagaaaugcuug

SEQ ID NO: 348918 - RNA, 18 nt, Artificial Sequence
  Synthetic
aaguugucgagaugcuug

SEQ ID NO: 348919 - RNA, 19 nt, Artificial Sequence
  Synthetic
aaaguugucgagaugcuug

SEQ ID NO: 348920 - RNA, 20 nt, Artificial Sequence
  Synthetic
aaaaguugucgagaugcuug

SEQ ID NO: 348921 - RNA, 21 nt, Artificial Sequence
  Synthetic
aaaaaguugucgagaugcuug

SEQ ID NO: 348922 - RNA, 22 nt, Artificial Sequence
  Synthetic
uaaaaaguugucgagaugcuug

SEQ ID NO: 348923 - RNA, 23 nt, Artificial Sequence
  Synthetic
guaaaaaguugucgagaugcuug

SEQ ID NO: 348924 - RNA, 24 nt, Artificial Sequence
  Synthetic
uguaaaaaguugucgagaugcuug

SEQ ID NO: 348925 - RNA, 18 nt, Artificial Sequence
  Synthetic
gaaacaguggucugcuug

SEQ ID NO: 348926 - RNA, 19 nt, Artificial Sequence
  Synthetic
ggaaacaguggucugcuug

SEQ ID NO: 348927 - RNA, 20 nt, Artificial Sequence
  Synthetic
aggaaacaguggucugcuug

SEQ ID NO: 348928 - RNA, 21 nt, Artificial Sequence
  Synthetic
caggaaacaguggucugcuug

SEQ ID NO: 348929 - RNA, 22 nt, Artificial Sequence
  Synthetic
ucaggaaacaguggucugcuug

SEQ ID NO: 348930 - RNA, 23 nt, Artificial Sequence
  Synthetic
uucaggaaacaguggucugcuug

SEQ ID NO: 348931 - RNA, 24 nt, Artificial Sequence
  Synthetic
uuucaggaaacaguggucugcuug

SEQ ID NO: 348932 - RNA, 18 nt, Artificial Sequence
  Synthetic
ucauccagcuucugcuug

SEQ ID NO: 348933 - RNA, 19 nt, Artificial Sequence
  Synthetic
gucauccagcuucugcuug

SEQ ID NO: 348934 - RNA, 20 nt, Artificial Sequence
  Synthetic
agucauccagcuucugcuug

SEQ ID NO: 348935 - RNA, 21 nt, Artificial Sequence
  Synthetic
aagucauccagcuucugcuug

SEQ ID NO: 348936 - RNA, 22 nt, Artificial Sequence
  Synthetic
caagucauccagcuucugcuug

SEQ ID NO: 348937 - RNA, 23 nt, Artificial Sequence
  Synthetic
gcaagucauccagcuucugcuug

SEQ ID NO: 348938 - RNA, 24 nt, Artificial Sequence
  Synthetic
agcaagucauccagcuucugcuug

SEQ ID NO: 348939 - RNA, 18 nt, Artificial Sequence
  Synthetic
gcaacagaaaugugcuug

SEQ ID NO: 348940 - RNA, 19 nt, Artificial Sequence
  Synthetic
ggcaacagaaaugugcuug

SEQ ID NO: 348941 - RNA, 20 nt, Artificial Sequence
  Synthetic
uggcaacagaaaugugcuug

SEQ ID NO: 348942 - RNA, 21 nt, Artificial Sequence
  Synthetic
auggcaacagaaaugugcuug

SEQ ID NO: 348943 - RNA, 22 nt, Artificial Sequence
  Synthetic
uauggcaacagaaaugugcuug

SEQ ID NO: 348944 - RNA, 23 nt, Artificial Sequence
  Synthetic
cuauggcaacagaaaugugcuug

SEQ ID NO: 348945 - RNA, 24 nt, Artificial Sequence
  Synthetic
ucuauggcaacagaaaugugcuug

SEQ ID NO: 348946 - RNA, 18 nt, Artificial Sequence
  Synthetic
uuucugagugcuugcuug

SEQ ID NO: 348947 - RNA, 19 nt, Artificial Sequence
  Synthetic
guuucugagugcuugcuug

SEQ ID NO: 348948 - RNA, 20 nt, Artificial Sequence
  Synthetic
gguuucugagugcuugcuug

SEQ ID NO: 348949 - RNA, 21 nt, Artificial Sequence
  Synthetic
ggguuucugagugcuugcuug

SEQ ID NO: 348950 - RNA, 22 nt, Artificial Sequence
  Synthetic
uggguuucugagugcuugcuug

SEQ ID NO: 348951 - RNA, 23 nt, Artificial Sequence
  Synthetic
guggguuucugagugcuugcuug

SEQ ID NO: 348952 - RNA, 24 nt, Artificial Sequence
  Synthetic
aguggguuucugagugcuugcuug

SEQ ID NO: 348953 - RNA, 18 nt, Artificial Sequence
  Synthetic
uuccagguuuuuugcuug

SEQ ID NO: 348954 - RNA, 19 nt, Artificial Sequence
  Synthetic
uuuccagguuuuuugcuug

SEQ ID NO: 348955 - RNA, 20 nt, Artificial Sequence
  Synthetic
uuuuccagguuuuuugcuug

SEQ ID NO: 348956 - RNA, 21 nt, Artificial Sequence
  Synthetic
cuuuuccagguuuuuugcuug

SEQ ID NO: 348957 - RNA, 22 nt, Artificial Sequence
  Synthetic
ccuuuuccagguuuuuugcuug

SEQ ID NO: 348958 - RNA, 23 nt, Artificial Sequence
  Synthetic
cccuuuuccagguuuuuugcuug

SEQ ID NO: 348959 - RNA, 24 nt, Artificial Sequence
  Synthetic
ucccuuuuccagguuuuuugcuug

SEQ ID NO: 348960 - RNA, 18 nt, Artificial Sequence
  Synthetic
uggcaucugcaaaucuug

SEQ ID NO: 348961 - RNA, 19 nt, Artificial Sequence
  Synthetic
auggcaucugcaaaucuug

SEQ ID NO: 348962 - RNA, 20 nt, Artificial Sequence
  Synthetic
gauggcaucugcaaaucuug

SEQ ID NO: 348963 - RNA, 21 nt, Artificial Sequence
  Synthetic
ugauggcaucugcaaaucuug

SEQ ID NO: 348964 - RNA, 22 nt, Artificial Sequence
  Synthetic
augauggcaucugcaaaucuug

SEQ ID NO: 348965 - RNA, 23 nt, Artificial Sequence
  Synthetic
uaugauggcaucugcaaaucuug

SEQ ID NO: 348966 - RNA, 24 nt, Artificial Sequence
  Synthetic
guaugauggcaucugcaaaucuug

SEQ ID NO: 348967 - RNA, 18 nt, Artificial Sequence
  Synthetic
ucugccuaauaaaucuug

SEQ ID NO: 348968 - RNA, 19 nt, Artificial Sequence
  Synthetic
cucugccuaauaaaucuug

SEQ ID NO: 348969 - RNA, 20 nt, Artificial Sequence
  Synthetic
gcucugccuaauaaaucuug

SEQ ID NO: 348970 - RNA, 21 nt, Artificial Sequence
  Synthetic
ugcucugccuaauaaaucuug

SEQ ID NO: 348971 - RNA, 22 nt, Artificial Sequence
  Synthetic
cugcucugccuaauaaaucuug

SEQ ID NO: 348972 - RNA, 23 nt, Artificial Sequence
  Synthetic
acugcucugccuaauaaaucuug

SEQ ID NO: 348973 - RNA, 24 nt, Artificial Sequence
  Synthetic
cacugcucugccuaauaaaucuug

SEQ ID NO: 348974 - RNA, 18 nt, Artificial Sequence
  Synthetic
uuuguguagagcaucuug

SEQ ID NO: 348975 - RNA, 19 nt, Artificial Sequence
  Synthetic
auuuguguagagcaucuug

SEQ ID NO: 348976 - RNA, 20 nt, Artificial Sequence
  Synthetic
cauuuguguagagcaucuug

SEQ ID NO: 348977 - RNA, 21 nt, Artificial Sequence
  Synthetic
ccauuuguguagagcaucuug

SEQ ID NO: 348978 - RNA, 22 nt, Artificial Sequence
  Synthetic
accauuuguguagagcaucuug

SEQ ID NO: 348979 - RNA, 23 nt, Artificial Sequence
  Synthetic
aaccauuuguguagagcaucuug

SEQ ID NO: 348980 - RNA, 24 nt, Artificial Sequence
  Synthetic
aaaccauuuguguagagcaucuug

SEQ ID NO: 348981 - RNA, 18 nt, Artificial Sequence
  Synthetic
gccaaagguggcaucuug

SEQ ID NO: 348982 - RNA, 19 nt, Artificial Sequence
  Synthetic
agccaaagguggcaucuug

SEQ ID NO: 348983 - RNA, 20 nt, Artificial Sequence
  Synthetic
cagccaaagguggcaucuug

SEQ ID NO: 348984 - RNA, 21 nt, Artificial Sequence
  Synthetic
acagccaaagguggcaucuug

SEQ ID NO: 348985 - RNA, 22 nt, Artificial Sequence
  Synthetic
uacagccaaagguggcaucuug

SEQ ID NO: 348986 - RNA, 23 nt, Artificial Sequence
  Synthetic
auacagccaaagguggcaucuug

SEQ ID NO: 348987 - RNA, 24 nt, Artificial Sequence
  Synthetic
gauacagccaaagguggcaucuug

SEQ ID NO: 348988 - RNA, 18 nt, Artificial Sequence
  Synthetic
uuaaacaaccagaucuug

SEQ ID NO: 348989 - RNA, 19 nt, Artificial Sequence
  Synthetic
uuuaaacaaccagaucuug

SEQ ID NO: 348990 - RNA, 20 nt, Artificial Sequence
  Synthetic
uuuuaaacaaccagaucuug

SEQ ID NO: 348991 - RNA, 21 nt, Artificial Sequence
  Synthetic
cuuuuaaacaaccagaucuug

SEQ ID NO: 348992 - RNA, 22 nt, Artificial Sequence
  Synthetic
acuuuuaaacaaccagaucuug

SEQ ID NO: 348993 - RNA, 23 nt, Artificial Sequence
  Synthetic
uacuuuuaaacaaccagaucuug

SEQ ID NO: 348994 - RNA, 24 nt, Artificial Sequence
  Synthetic
cuacuuuuaaacaaccagaucuug

SEQ ID NO: 348995 - RNA, 18 nt, Artificial Sequence
  Synthetic
cuccagaagaggaucuug

SEQ ID NO: 348996 - RNA, 19 nt, Artificial Sequence
  Synthetic
acuccagaagaggaucuug

SEQ ID NO: 348997 - RNA, 20 nt, Artificial Sequence
  Synthetic
gacuccagaagaggaucuug

SEQ ID NO: 348998 - RNA, 21 nt, Artificial Sequence
  Synthetic
cgacuccagaagaggaucuug

SEQ ID NO: 348999 - RNA, 22 nt, Artificial Sequence
  Synthetic
ucgacuccagaagaggaucuug

SEQ ID NO: 349000 - RNA, 23 nt, Artificial Sequence
  Synthetic
aucgacuccagaagaggaucuug

SEQ ID NO: 349001 - RNA, 24 nt, Artificial Sequence
  Synthetic
caucgacuccagaagaggaucuug

SEQ ID NO: 349002 - RNA, 18 nt, Artificial Sequence
  Synthetic
uacuaaauguugaucuug

SEQ ID NO: 349003 - RNA, 19 nt, Artificial Sequence
  Synthetic
uuacuaaauguugaucuug

SEQ ID NO: 349004 - RNA, 20 nt, Artificial Sequence
  Synthetic
uuuacuaaauguugaucuug

SEQ ID NO: 349005 - RNA, 21 nt, Artificial Sequence
  Synthetic
auuuacuaaauguugaucuug

SEQ ID NO: 349006 - RNA, 22 nt, Artificial Sequence
  Synthetic
aauuuacuaaauguugaucuug

SEQ ID NO: 349007 - RNA, 23 nt, Artificial Sequence
  Synthetic
uaauuuacuaaauguugaucuug

SEQ ID NO: 349008 - RNA, 24 nt, Artificial Sequence
  Synthetic
cuaauuuacuaaauguugaucuug

SEQ ID NO: 349009 - RNA, 18 nt, Artificial Sequence
  Synthetic
uagcuuagggauaucuug

SEQ ID NO: 349010 - RNA, 19 nt, Artificial Sequence
  Synthetic
guagcuuagggauaucuug

SEQ ID NO: 349011 - RNA, 20 nt, Artificial Sequence
  Synthetic
uguagcuuagggauaucuug

SEQ ID NO: 349012 - RNA, 21 nt, Artificial Sequence
  Synthetic
cuguagcuuagggauaucuug

SEQ ID NO: 349013 - RNA, 22 nt, Artificial Sequence
  Synthetic
acuguagcuuagggauaucuug

SEQ ID NO: 349014 - RNA, 23 nt, Artificial Sequence
  Synthetic
uacuguagcuuagggauaucuug

SEQ ID NO: 349015 - RNA, 24 nt, Artificial Sequence
  Synthetic
uuacuguagcuuagggauaucuug

SEQ ID NO: 349016 - RNA, 18 nt, Artificial Sequence
  Synthetic
cauacugcagaacucuug

SEQ ID NO: 349017 - RNA, 19 nt, Artificial Sequence
  Synthetic
ucauacugcagaacucuug

SEQ ID NO: 349018 - RNA, 20 nt, Artificial Sequence
  Synthetic
cucauacugcagaacucuug

SEQ ID NO: 349019 - RNA, 21 nt, Artificial Sequence
  Synthetic
acucauacugcagaacucuug

SEQ ID NO: 349020 - RNA, 22 nt, Artificial Sequence
  Synthetic
uacucauacugcagaacucuug

SEQ ID NO: 349021 - RNA, 23 nt, Artificial Sequence
  Synthetic
cuacucauacugcagaacucuug

SEQ ID NO: 349022 - RNA, 24 nt, Artificial Sequence
  Synthetic
acuacucauacugcagaacucuug

SEQ ID NO: 349023 - RNA, 18 nt, Artificial Sequence
  Synthetic
cgcuuuaaugaacucuug

SEQ ID NO: 349024 - RNA, 19 nt, Artificial Sequence
  Synthetic
ucgcuuuaaugaacucuug

SEQ ID NO: 349025 - RNA, 20 nt, Artificial Sequence
  Synthetic
uucgcuuuaaugaacucuug

SEQ ID NO: 349026 - RNA, 21 nt, Artificial Sequence
  Synthetic
cuucgcuuuaaugaacucuug

SEQ ID NO: 349027 - RNA, 22 nt, Artificial Sequence
  Synthetic
gcuucgcuuuaaugaacucuug

SEQ ID NO: 349028 - RNA, 23 nt, Artificial Sequence
  Synthetic
agcuucgcuuuaaugaacucuug

SEQ ID NO: 349029 - RNA, 24 nt, Artificial Sequence
  Synthetic
uagcuucgcuuuaaugaacucuug

SEQ ID NO: 349030 - RNA, 18 nt, Artificial Sequence
  Synthetic
aaguauuggacacucuug

SEQ ID NO: 349031 - RNA, 19 nt, Artificial Sequence
  Synthetic
uaaguauuggacacucuug

SEQ ID NO: 349032 - RNA, 20 nt, Artificial Sequence
  Synthetic
guaaguauuggacacucuug

SEQ ID NO: 349033 - RNA, 21 nt, Artificial Sequence
  Synthetic
uguaaguauuggacacucuug

SEQ ID NO: 349034 - RNA, 22 nt, Artificial Sequence
  Synthetic
uuguaaguauuggacacucuug

SEQ ID NO: 349035 - RNA, 23 nt, Artificial Sequence
  Synthetic
guuguaaguauuggacacucuug

SEQ ID NO: 349036 - RNA, 24 nt, Artificial Sequence
  Synthetic
aguuguaaguauuggacacucuug

SEQ ID NO: 349037 - RNA, 18 nt, Artificial Sequence
  Synthetic
gaauaucaaugccucuug

SEQ ID NO: 349038 - RNA, 19 nt, Artificial Sequence
  Synthetic
agaauaucaaugccucuug

SEQ ID NO: 349039 - RNA, 20 nt, Artificial Sequence
  Synthetic
gagaauaucaaugccucuug

SEQ ID NO: 349040 - RNA, 21 nt, Artificial Sequence
  Synthetic
agagaauaucaaugccucuug

SEQ ID NO: 349041 - RNA, 22 nt, Artificial Sequence
  Synthetic
cagagaauaucaaugccucuug

SEQ ID NO: 349042 - RNA, 23 nt, Artificial Sequence
  Synthetic
acagagaauaucaaugccucuug

SEQ ID NO: 349043 - RNA, 24 nt, Artificial Sequence
  Synthetic
aacagagaauaucaaugccucuug

SEQ ID NO: 349044 - RNA, 18 nt, Artificial Sequence
  Synthetic
acuuguuauguccucuug

SEQ ID NO: 349045 - RNA, 19 nt, Artificial Sequence
  Synthetic
uacuuguuauguccucuug

SEQ ID NO: 349046 - RNA, 20 nt, Artificial Sequence
  Synthetic
auacuuguuauguccucuug

SEQ ID NO: 349047 - RNA, 21 nt, Artificial Sequence
  Synthetic
uauacuuguuauguccucuug

SEQ ID NO: 349048 - RNA, 22 nt, Artificial Sequence
  Synthetic
auauacuuguuauguccucuug

SEQ ID NO: 349049 - RNA, 23 nt, Artificial Sequence
  Synthetic
uauauacuuguuauguccucuug

SEQ ID NO: 349050 - RNA, 24 nt, Artificial Sequence
  Synthetic
uuauauacuuguuauguccucuug

SEQ ID NO: 349051 - RNA, 18 nt, Artificial Sequence
  Synthetic
uuuggcaacuagcucuug

SEQ ID NO: 349052 - RNA, 19 nt, Artificial Sequence
  Synthetic
auuuggcaacuagcucuug

SEQ ID NO: 349053 - RNA, 20 nt, Artificial Sequence
  Synthetic
uauuuggcaacuagcucuug

SEQ ID NO: 349054 - RNA, 21 nt, Artificial Sequence
  Synthetic
uuauuuggcaacuagcucuug

SEQ ID NO: 349055 - RNA, 22 nt, Artificial Sequence
  Synthetic
guuauuuggcaacuagcucuug

SEQ ID NO: 349056 - RNA, 23 nt, Artificial Sequence
  Synthetic
uguuauuuggcaacuagcucuug

SEQ ID NO: 349057 - RNA, 24 nt, Artificial Sequence
  Synthetic
cuguuauuuggcaacuagcucuug

SEQ ID NO: 349058 - RNA, 18 nt, Artificial Sequence
  Synthetic
uuuaacaagaggcucuug

SEQ ID NO: 349059 - RNA, 19 nt, Artificial Sequence
  Synthetic
guuuaacaagaggcucuug

SEQ ID NO: 349060 - RNA, 20 nt, Artificial Sequence
  Synthetic
uguuuaacaagaggcucuug

SEQ ID NO: 349061 - RNA, 21 nt, Artificial Sequence
  Synthetic
auguuuaacaagaggcucuug

SEQ ID NO: 349062 - RNA, 22 nt, Artificial Sequence
  Synthetic
aauguuuaacaagaggcucuug

SEQ ID NO: 349063 - RNA, 23 nt, Artificial Sequence
  Synthetic
aaauguuuaacaagaggcucuug

SEQ ID NO: 349064 - RNA, 24 nt, Artificial Sequence
  Synthetic
uaaauguuuaacaagaggcucuug

SEQ ID NO: 349065 - RNA, 18 nt, Artificial Sequence
  Synthetic
uuguaaauauggcucuug

SEQ ID NO: 349066 - RNA, 19 nt, Artificial Sequence
  Synthetic
guuguaaauauggcucuug

SEQ ID NO: 349067 - RNA, 20 nt, Artificial Sequence
  Synthetic
aguuguaaauauggcucuug

SEQ ID NO: 349068 - RNA, 21 nt, Artificial Sequence
  Synthetic
aaguuguaaauauggcucuug

SEQ ID NO: 349069 - RNA, 22 nt, Artificial Sequence
  Synthetic
aaaguuguaaauauggcucuug

SEQ ID NO: 349070 - RNA, 23 nt, Artificial Sequence
  Synthetic
caaaguuguaaauauggcucuug

SEQ ID NO: 349071 - RNA, 24 nt, Artificial Sequence
  Synthetic
ucaaaguuguaaauauggcucuug

SEQ ID NO: 349072 - RNA, 18 nt, Artificial Sequence
  Synthetic
uuguccauucaucucuug

SEQ ID NO: 349073 - RNA, 19 nt, Artificial Sequence
  Synthetic
uuuguccauucaucucuug

SEQ ID NO: 349074 - RNA, 20 nt, Artificial Sequence
  Synthetic
cuuuguccauucaucucuug

SEQ ID NO: 349075 - RNA, 21 nt, Artificial Sequence
  Synthetic
ucuuuguccauucaucucuug

SEQ ID NO: 349076 - RNA, 22 nt, Artificial Sequence
  Synthetic
uucuuuguccauucaucucuug

SEQ ID NO: 349077 - RNA, 23 nt, Artificial Sequence
  Synthetic
uuucuuuguccauucaucucuug

SEQ ID NO: 349078 - RNA, 24 nt, Artificial Sequence
  Synthetic
uuuucuuuguccauucaucucuug

SEQ ID NO: 349079 - RNA, 18 nt, Artificial Sequence
  Synthetic
uuauacaaaucucucuug

SEQ ID NO: 349080 - RNA, 19 nt, Artificial Sequence
  Synthetic
uuuauacaaaucucucuug

SEQ ID NO: 349081 - RNA, 20 nt, Artificial Sequence
  Synthetic
uuuuauacaaaucucucuug

SEQ ID NO: 349082 - RNA, 21 nt, Artificial Sequence
  Synthetic
auuuuauacaaaucucucuug

SEQ ID NO: 349083 - RNA, 22 nt, Artificial Sequence
  Synthetic
uauuuuauacaaaucucucuug

SEQ ID NO: 349084 - RNA, 23 nt, Artificial Sequence
  Synthetic
auauuuuauacaaaucucucuug

SEQ ID NO: 349085 - RNA, 24 nt, Artificial Sequence
  Synthetic
uauauuuuauacaaaucucucuug

SEQ ID NO: 349086 - RNA, 18 nt, Artificial Sequence
  Synthetic
uguuuaaaugaagucuug

SEQ ID NO: 349087 - RNA, 19 nt, Artificial Sequence
  Synthetic
uuguuuaaaugaagucuug

SEQ ID NO: 349088 - RNA, 20 nt, Artificial Sequence
  Synthetic
uuuguuuaaaugaagucuug

SEQ ID NO: 349089 - RNA, 21 nt, Artificial Sequence
  Synthetic
uuuuguuuaaaugaagucuug

SEQ ID NO: 349090 - RNA, 22 nt, Artificial Sequence
  Synthetic
guuuuguuuaaaugaagucuug

SEQ ID NO: 349091 - RNA, 23 nt, Artificial Sequence
  Synthetic
aguuuuguuuaaaugaagucuug

SEQ ID NO: 349092 - RNA, 24 nt, Artificial Sequence
  Synthetic
uaguuuuguuuaaaugaagucuug

SEQ ID NO: 349093 - RNA, 18 nt, Artificial Sequence
  Synthetic
acaggaaaaacagucuug

SEQ ID NO: 349094 - RNA, 19 nt, Artificial Sequence
  Synthetic
cacaggaaaaacagucuug

SEQ ID NO: 349095 - RNA, 20 nt, Artificial Sequence
  Synthetic
ucacaggaaaaacagucuug

SEQ ID NO: 349096 - RNA, 21 nt, Artificial Sequence
  Synthetic
uucacaggaaaaacagucuug

SEQ ID NO: 349097 - RNA, 22 nt, Artificial Sequence
  Synthetic
cuucacaggaaaaacagucuug

SEQ ID NO: 349098 - RNA, 23 nt, Artificial Sequence
  Synthetic
ccuucacaggaaaaacagucuug

SEQ ID NO: 349099 - RNA, 24 nt, Artificial Sequence
  Synthetic
accuucacaggaaaaacagucuug

SEQ ID NO: 349100 - RNA, 18 nt, Artificial Sequence
  Synthetic
aagagcuucacagucuug

SEQ ID NO: 349101 - RNA, 19 nt, Artificial Sequence
  Synthetic
gaagagcuucacagucuug

SEQ ID NO: 349102 - RNA, 20 nt, Artificial Sequence
  Synthetic
ugaagagcuucacagucuug

SEQ ID NO: 349103 - RNA, 21 nt, Artificial Sequence
  Synthetic
uugaagagcuucacagucuug

SEQ ID NO: 349104 - RNA, 22 nt, Artificial Sequence
  Synthetic
uuugaagagcuucacagucuug

SEQ ID NO: 349105 - RNA, 23 nt, Artificial Sequence
  Synthetic
cuuugaagagcuucacagucuug

SEQ ID NO: 349106 - RNA, 24 nt, Artificial Sequence
  Synthetic
gcuuugaagagcuucacagucuug

SEQ ID NO: 349107 - RNA, 18 nt, Artificial Sequence
  Synthetic
uuaguuuauggagucuug

SEQ ID NO: 349108 - RNA, 19 nt, Artificial Sequence
  Synthetic
uuuaguuuauggagucuug

SEQ ID NO: 349109 - RNA, 20 nt, Artificial Sequence
  Synthetic
cuuuaguuuauggagucuug

SEQ ID NO: 349110 - RNA, 21 nt, Artificial Sequence
  Synthetic
ucuuuaguuuauggagucuug

SEQ ID NO: 349111 - RNA, 22 nt, Artificial Sequence
  Synthetic
uucuuuaguuuauggagucuug

SEQ ID NO: 349112 - RNA, 23 nt, Artificial Sequence
  Synthetic
cuucuuuaguuuauggagucuug

SEQ ID NO: 349113 - RNA, 24 nt, Artificial Sequence
  Synthetic
ucuucuuuaguuuauggagucuug

SEQ ID NO: 349114 - RNA, 18 nt, Artificial Sequence
  Synthetic
uaugcaagaggggucuug

SEQ ID NO: 349115 - RNA, 19 nt, Artificial Sequence
  Synthetic
guaugcaagaggggucuug

SEQ ID NO: 349116 - RNA, 20 nt, Artificial Sequence
  Synthetic
uguaugcaagaggggucuug

SEQ ID NO: 349117 - RNA, 21 nt, Artificial Sequence
  Synthetic
uuguaugcaagaggggucuug

SEQ ID NO: 349118 - RNA, 22 nt, Artificial Sequence
  Synthetic
guuguaugcaagaggggucuug

SEQ ID NO: 349119 - RNA, 23 nt, Artificial Sequence
  Synthetic
uguuguaugcaagaggggucuug

SEQ ID NO: 349120 - RNA, 24 nt, Artificial Sequence
  Synthetic
uuguuguaugcaagaggggucuug

SEQ ID NO: 349121 - RNA, 18 nt, Artificial Sequence
  Synthetic
uugacuuacucugucuug

SEQ ID NO: 349122 - RNA, 19 nt, Artificial Sequence
  Synthetic
auugacuuacucugucuug

SEQ ID NO: 349123 - RNA, 20 nt, Artificial Sequence
  Synthetic
aauugacuuacucugucuug

SEQ ID NO: 349124 - RNA, 21 nt, Artificial Sequence
  Synthetic
gaauugacuuacucugucuug

SEQ ID NO: 349125 - RNA, 22 nt, Artificial Sequence
  Synthetic
agaauugacuuacucugucuug

SEQ ID NO: 349126 - RNA, 23 nt, Artificial Sequence
  Synthetic
uagaauugacuuacucugucuug

SEQ ID NO: 349127 - RNA, 24 nt, Artificial Sequence
  Synthetic
uuagaauugacuuacucugucuug

SEQ ID NO: 349128 - RNA, 18 nt, Artificial Sequence
  Synthetic
uucccccgaggugucuug

SEQ ID NO: 349129 - RNA, 19 nt, Artificial Sequence
  Synthetic
guucccccgaggugucuug

SEQ ID NO: 349130 - RNA, 20 nt, Artificial Sequence
  Synthetic
uguucccccgaggugucuug

SEQ ID NO: 349131 - RNA, 21 nt, Artificial Sequence
  Synthetic
cuguucccccgaggugucuug

SEQ ID NO: 349132 - RNA, 22 nt, Artificial Sequence
  Synthetic
gcuguucccccgaggugucuug

SEQ ID NO: 349133 - RNA, 23 nt, Artificial Sequence
  Synthetic
agcuguucccccgaggugucuug

SEQ ID NO: 349134 - RNA, 24 nt, Artificial Sequence
  Synthetic
aagcuguucccccgaggugucuug

SEQ ID NO: 349135 - RNA, 18 nt, Artificial Sequence
  Synthetic
ucauaacauggugucuug

SEQ ID NO: 349136 - RNA, 19 nt, Artificial Sequence
  Synthetic
uucauaacauggugucuug

SEQ ID NO: 349137 - RNA, 20 nt, Artificial Sequence
  Synthetic
auucauaacauggugucuug

SEQ ID NO: 349138 - RNA, 21 nt, Artificial Sequence
  Synthetic
uauucauaacauggugucuug

SEQ ID NO: 349139 - RNA, 22 nt, Artificial Sequence
  Synthetic
auauucauaacauggugucuug

SEQ ID NO: 349140 - RNA, 23 nt, Artificial Sequence
  Synthetic
gauauucauaacauggugucuug

SEQ ID NO: 349141 - RNA, 24 nt, Artificial Sequence
  Synthetic
ggauauucauaacauggugucuug

SEQ ID NO: 349142 - RNA, 18 nt, Artificial Sequence
  Synthetic
uuugugaauacauucuug

SEQ ID NO: 349143 - RNA, 19 nt, Artificial Sequence
  Synthetic
auuugugaauacauucuug

SEQ ID NO: 349144 - RNA, 20 nt, Artificial Sequence
  Synthetic
cauuugugaauacauucuug

SEQ ID NO: 349145 - RNA, 21 nt, Artificial Sequence
  Synthetic
acauuugugaauacauucuug

SEQ ID NO: 349146 - RNA, 22 nt, Artificial Sequence
  Synthetic
cacauuugugaauacauucuug

SEQ ID NO: 349147 - RNA, 23 nt, Artificial Sequence
  Synthetic
ccacauuugugaauacauucuug

SEQ ID NO: 349148 - RNA, 24 nt, Artificial Sequence
  Synthetic
accacauuugugaauacauucuug

SEQ ID NO: 349149 - RNA, 18 nt, Artificial Sequence
  Synthetic
cacaaacucucauucuug

SEQ ID NO: 349150 - RNA, 19 nt, Artificial Sequence
  Synthetic
ucacaaacucucauucuug

SEQ ID NO: 349151 - RNA, 20 nt, Artificial Sequence
  Synthetic
gucacaaacucucauucuug

SEQ ID NO: 349152 - RNA, 21 nt, Artificial Sequence
  Synthetic
ggucacaaacucucauucuug

SEQ ID NO: 349153 - RNA, 22 nt, Artificial Sequence
  Synthetic
aggucacaaacucucauucuug

SEQ ID NO: 349154 - RNA, 23 nt, Artificial Sequence
  Synthetic
aaggucacaaacucucauucuug

SEQ ID NO: 349155 - RNA, 24 nt, Artificial Sequence
  Synthetic
aaaggucacaaacucucauucuug

SEQ ID NO: 349156 - RNA, 18 nt, Artificial Sequence
  Synthetic
aaccucacaggauucuug

SEQ ID NO: 349157 - RNA, 19 nt, Artificial Sequence
  Synthetic
caaccucacaggauucuug

SEQ ID NO: 349158 - RNA, 20 nt, Artificial Sequence
  Synthetic
ccaaccucacaggauucuug

SEQ ID NO: 349159 - RNA, 21 nt, Artificial Sequence
  Synthetic
accaaccucacaggauucuug

SEQ ID NO: 349160 - RNA, 22 nt, Artificial Sequence
  Synthetic
aaccaaccucacaggauucuug

SEQ ID NO: 349161 - RNA, 23 nt, Artificial Sequence
  Synthetic
aaaccaaccucacaggauucuug

SEQ ID NO: 349162 - RNA, 24 nt, Artificial Sequence
  Synthetic
uaaaccaaccucacaggauucuug

SEQ ID NO: 349163 - RNA, 18 nt, Artificial Sequence
  Synthetic
gcuucaaagaacuucuug

SEQ ID NO: 349164 - RNA, 19 nt, Artificial Sequence
  Synthetic
ugcuucaaagaacuucuug

SEQ ID NO: 349165 - RNA, 20 nt, Artificial Sequence
  Synthetic
gugcuucaaagaacuucuug

SEQ ID NO: 349166 - RNA, 21 nt, Artificial Sequence
  Synthetic
ggugcuucaaagaacuucuug

SEQ ID NO: 349167 - RNA, 22 nt, Artificial Sequence
  Synthetic
uggugcuucaaagaacuucuug

SEQ ID NO: 349168 - RNA, 23 nt, Artificial Sequence
  Synthetic
uuggugcuucaaagaacuucuug

SEQ ID NO: 349169 - RNA, 24 nt, Artificial Sequence
  Synthetic
auuggugcuucaaagaacuucuug

SEQ ID NO: 349170 - RNA, 18 nt, Artificial Sequence
  Synthetic
uaaugggaccacuucuug

SEQ ID NO: 349171 - RNA, 19 nt, Artificial Sequence
  Synthetic
cuaaugggaccacuucuug

SEQ ID NO: 349172 - RNA, 20 nt, Artificial Sequence
  Synthetic
gcuaaugggaccacuucuug

SEQ ID NO: 349173 - RNA, 21 nt, Artificial Sequence
  Synthetic
ugcuaaugggaccacuucuug

SEQ ID NO: 349174 - RNA, 22 nt, Artificial Sequence
  Synthetic
augcuaaugggaccacuucuug

SEQ ID NO: 349175 - RNA, 23 nt, Artificial Sequence
  Synthetic
aaugcuaaugggaccacuucuug

SEQ ID NO: 349176 - RNA, 24 nt, Artificial Sequence
  Synthetic
caaugcuaaugggaccacuucuug

SEQ ID NO: 349177 - RNA, 18 nt, Artificial Sequence
  Synthetic
uuauucauauacuucuug

SEQ ID NO: 349178 - RNA, 19 nt, Artificial Sequence
  Synthetic
cuuauucauauacuucuug

SEQ ID NO: 349179 - RNA, 20 nt, Artificial Sequence
  Synthetic
ccuuauucauauacuucuug

SEQ ID NO: 349180 - RNA, 21 nt, Artificial Sequence
  Synthetic
cccuuauucauauacuucuug

SEQ ID NO: 349181 - RNA, 22 nt, Artificial Sequence
  Synthetic
ucccuuauucauauacuucuug

SEQ ID NO: 349182 - RNA, 23 nt, Artificial Sequence
  Synthetic
uucccuuauucauauacuucuug

SEQ ID NO: 349183 - RNA, 24 nt, Artificial Sequence
  Synthetic
auucccuuauucauauacuucuug

SEQ ID NO: 349184 - RNA, 18 nt, Artificial Sequence
  Synthetic
aauauauucaucuucuug

SEQ ID NO: 349185 - RNA, 19 nt, Artificial Sequence
  Synthetic
aaauauauucaucuucuug

SEQ ID NO: 349186 - RNA, 20 nt, Artificial Sequence
  Synthetic
gaaauauauucaucuucuug

SEQ ID NO: 349187 - RNA, 21 nt, Artificial Sequence
  Synthetic
agaaauauauucaucuucuug

SEQ ID NO: 349188 - RNA, 22 nt, Artificial Sequence
  Synthetic
uagaaauauauucaucuucuug

SEQ ID NO: 349189 - RNA, 23 nt, Artificial Sequence
  Synthetic
guagaaauauauucaucuucuug

SEQ ID NO: 349190 - RNA, 24 nt, Artificial Sequence
  Synthetic
aguagaaauauauucaucuucuug

SEQ ID NO: 349191 - RNA, 18 nt, Artificial Sequence
  Synthetic
guaguaaauaucuucuug

SEQ ID NO: 349192 - RNA, 19 nt, Artificial Sequence
  Synthetic
uguaguaaauaucuucuug

SEQ ID NO: 349193 - RNA, 20 nt, Artificial Sequence
  Synthetic
cuguaguaaauaucuucuug

SEQ ID NO: 349194 - RNA, 21 nt, Artificial Sequence
  Synthetic
acuguaguaaauaucuucuug

SEQ ID NO: 349195 - RNA, 22 nt, Artificial Sequence
  Synthetic
uacuguaguaaauaucuucuug

SEQ ID NO: 349196 - RNA, 23 nt, Artificial Sequence
  Synthetic
guacuguaguaaauaucuucuug

SEQ ID NO: 349197 - RNA, 24 nt, Artificial Sequence
  Synthetic
aguacuguaguaaauaucuucuug

SEQ ID NO: 349198 - RNA, 18 nt, Artificial Sequence
  Synthetic
gcaaaggaaacguucuug

SEQ ID NO: 349199 - RNA, 19 nt, Artificial Sequence
  Synthetic
ugcaaaggaaacguucuug

SEQ ID NO: 349200 - RNA, 20 nt, Artificial Sequence
  Synthetic
augcaaaggaaacguucuug

SEQ ID NO: 349201 - RNA, 21 nt, Artificial Sequence
  Synthetic
aaugcaaaggaaacguucuug

SEQ ID NO: 349202 - RNA, 22 nt, Artificial Sequence
  Synthetic
gaaugcaaaggaaacguucuug

SEQ ID NO: 349203 - RNA, 23 nt, Artificial Sequence
  Synthetic
ugaaugcaaaggaaacguucuug

SEQ ID NO: 349204 - RNA, 24 nt, Artificial Sequence
  Synthetic
gugaaugcaaaggaaacguucuug

SEQ ID NO: 349205 - RNA, 18 nt, Artificial Sequence
  Synthetic
gaauugugaagguucuug

SEQ ID NO: 349206 - RNA, 19 nt, Artificial Sequence
  Synthetic
ggaauugugaagguucuug

SEQ ID NO: 349207 - RNA, 20 nt, Artificial Sequence
  Synthetic
uggaauugugaagguucuug

SEQ ID NO: 349208 - RNA, 21 nt, Artificial Sequence
  Synthetic
guggaauugugaagguucuug

SEQ ID NO: 349209 - RNA, 22 nt, Artificial Sequence
  Synthetic
uguggaauugugaagguucuug

SEQ ID NO: 349210 - RNA, 23 nt, Artificial Sequence
  Synthetic
cuguggaauugugaagguucuug

SEQ ID NO: 349211 - RNA, 24 nt, Artificial Sequence
  Synthetic
ccuguggaauugugaagguucuug

SEQ ID NO: 349212 - RNA, 18 nt, Artificial Sequence
  Synthetic
caagcaacaauguucuug

SEQ ID NO: 349213 - RNA, 19 nt, Artificial Sequence
  Synthetic
acaagcaacaauguucuug

SEQ ID NO: 349214 - RNA, 20 nt, Artificial Sequence
  Synthetic
aacaagcaacaauguucuug

SEQ ID NO: 349215 - RNA, 21 nt, Artificial Sequence
  Synthetic
caacaagcaacaauguucuug

SEQ ID NO: 349216 - RNA, 22 nt, Artificial Sequence
  Synthetic
ucaacaagcaacaauguucuug

SEQ ID NO: 349217 - RNA, 23 nt, Artificial Sequence
  Synthetic
aucaacaagcaacaauguucuug

SEQ ID NO: 349218 - RNA, 24 nt, Artificial Sequence
  Synthetic
gaucaacaagcaacaauguucuug

SEQ ID NO: 349219 - RNA, 18 nt, Artificial Sequence
  Synthetic
ccucuuguucuguucuug

SEQ ID NO: 349220 - RNA, 19 nt, Artificial Sequence
  Synthetic
uccucuuguucuguucuug

SEQ ID NO: 349221 - RNA, 20 nt, Artificial Sequence
  Synthetic
uuccucuuguucuguucuug

SEQ ID NO: 349222 - RNA, 21 nt, Artificial Sequence
  Synthetic
uuuccucuuguucuguucuug

SEQ ID NO: 349223 - RNA, 22 nt, Artificial Sequence
  Synthetic
auuuccucuuguucuguucuug

SEQ ID NO: 349224 - RNA, 23 nt, Artificial Sequence
  Synthetic
uauuuccucuuguucuguucuug

SEQ ID NO: 349225 - RNA, 24 nt, Artificial Sequence
  Synthetic
uuauuuccucuuguucuguucuug

SEQ ID NO: 349226 - RNA, 18 nt, Artificial Sequence
  Synthetic
aagcauuuuaauuucuug

SEQ ID NO: 349227 - RNA, 19 nt, Artificial Sequence
  Synthetic
uaagcauuuuaauuucuug

SEQ ID NO: 349228 - RNA, 20 nt, Artificial Sequence
  Synthetic
uuaagcauuuuaauuucuug

SEQ ID NO: 349229 - RNA, 21 nt, Artificial Sequence
  Synthetic
cuuaagcauuuuaauuucuug

SEQ ID NO: 349230 - RNA, 22 nt, Artificial Sequence
  Synthetic
acuuaagcauuuuaauuucuug

SEQ ID NO: 349231 - RNA, 23 nt, Artificial Sequence
  Synthetic
cacuuaagcauuuuaauuucuug

SEQ ID NO: 349232 - RNA, 24 nt, Artificial Sequence
  Synthetic
ucacuuaagcauuuuaauuucuug

SEQ ID NO: 349233 - RNA, 18 nt, Artificial Sequence
  Synthetic
guuacucaugguuucuug

SEQ ID NO: 349234 - RNA, 19 nt, Artificial Sequence
  Synthetic
uguuacucaugguuucuug

SEQ ID NO: 349235 - RNA, 20 nt, Artificial Sequence
  Synthetic
auguuacucaugguuucuug

SEQ ID NO: 349236 - RNA, 21 nt, Artificial Sequence
  Synthetic
uauguuacucaugguuucuug

SEQ ID NO: 349237 - RNA, 22 nt, Artificial Sequence
  Synthetic
uuauguuacucaugguuucuug

SEQ ID NO: 349238 - RNA, 23 nt, Artificial Sequence
  Synthetic
uuuauguuacucaugguuucuug

SEQ ID NO: 349239 - RNA, 24 nt, Artificial Sequence
  Synthetic
cuuuauguuacucaugguuucuug

SEQ ID NO: 349240 - RNA, 18 nt, Artificial Sequence
  Synthetic
uagaguuguauuuucuug

SEQ ID NO: 349241 - RNA, 19 nt, Artificial Sequence
  Synthetic
auagaguuguauuuucuug

SEQ ID NO: 349242 - RNA, 20 nt, Artificial Sequence
  Synthetic
cauagaguuguauuuucuug

SEQ ID NO: 349243 - RNA, 21 nt, Artificial Sequence
  Synthetic
gcauagaguuguauuuucuug

SEQ ID NO: 349244 - RNA, 22 nt, Artificial Sequence
  Synthetic
agcauagaguuguauuuucuug

SEQ ID NO: 349245 - RNA, 23 nt, Artificial Sequence
  Synthetic
cagcauagaguuguauuuucuug

SEQ ID NO: 349246 - RNA, 24 nt, Artificial Sequence
  Synthetic
gcagcauagaguuguauuuucuug

SEQ ID NO: 349247 - RNA, 18 nt, Artificial Sequence
  Synthetic
aagcugucacuuuucuug

SEQ ID NO: 349248 - RNA, 19 nt, Artificial Sequence
  Synthetic
gaagcugucacuuuucuug

SEQ ID NO: 349249 - RNA, 20 nt, Artificial Sequence
  Synthetic
ugaagcugucacuuuucuug

SEQ ID NO: 349250 - RNA, 21 nt, Artificial Sequence
  Synthetic
uugaagcugucacuuuucuug

SEQ ID NO: 349251 - RNA, 22 nt, Artificial Sequence
  Synthetic
guugaagcugucacuuuucuug

SEQ ID NO: 349252 - RNA, 23 nt, Artificial Sequence
  Synthetic
uguugaagcugucacuuuucuug

SEQ ID NO: 349253 - RNA, 24 nt, Artificial Sequence
  Synthetic
uuguugaagcugucacuuuucuug

SEQ ID NO: 349254 - RNA, 18 nt, Artificial Sequence
  Synthetic
ucuuguacucuuuucuug

SEQ ID NO: 349255 - RNA, 19 nt, Artificial Sequence
  Synthetic
aucuuguacucuuuucuug

SEQ ID NO: 349256 - RNA, 20 nt, Artificial Sequence
  Synthetic
uaucuuguacucuuuucuug

SEQ ID NO: 349257 - RNA, 21 nt, Artificial Sequence
  Synthetic
auaucuuguacucuuuucuug

SEQ ID NO: 349258 - RNA, 22 nt, Artificial Sequence
  Synthetic
cauaucuuguacucuuuucuug

SEQ ID NO: 349259 - RNA, 23 nt, Artificial Sequence
  Synthetic
acauaucuuguacucuuuucuug

SEQ ID NO: 349260 - RNA, 24 nt, Artificial Sequence
  Synthetic
uacauaucuuguacucuuuucuug

SEQ ID NO: 349261 - RNA, 18 nt, Artificial Sequence
  Synthetic
uuucccuguaaaaaguug

SEQ ID NO: 349262 - RNA, 19 nt, Artificial Sequence
  Synthetic
uuuucccuguaaaaaguug

SEQ ID NO: 349263 - RNA, 20 nt, Artificial Sequence
  Synthetic
auuuucccuguaaaaaguug

SEQ ID NO: 349264 - RNA, 21 nt, Artificial Sequence
  Synthetic
cauuuucccuguaaaaaguug

SEQ ID NO: 349265 - RNA, 22 nt, Artificial Sequence
  Synthetic
gcauuuucccuguaaaaaguug

SEQ ID NO: 349266 - RNA, 23 nt, Artificial Sequence
  Synthetic
agcauuuucccuguaaaaaguug

SEQ ID NO: 349267 - RNA, 24 nt, Artificial Sequence
  Synthetic
aagcauuuucccuguaaaaaguug

SEQ ID NO: 349268 - RNA, 18 nt, Artificial Sequence
  Synthetic
ugacuucagcaaaaguug

SEQ ID NO: 349269 - RNA, 19 nt, Artificial Sequence
  Synthetic
augacuucagcaaaaguug

SEQ ID NO: 349270 - RNA, 20 nt, Artificial Sequence
  Synthetic
aaugacuucagcaaaaguug

SEQ ID NO: 349271 - RNA, 21 nt, Artificial Sequence
  Synthetic
gaaugacuucagcaaaaguug

SEQ ID NO: 349272 - RNA, 22 nt, Artificial Sequence
  Synthetic
agaaugacuucagcaaaaguug

SEQ ID NO: 349273 - RNA, 23 nt, Artificial Sequence
  Synthetic
cagaaugacuucagcaaaaguug

SEQ ID NO: 349274 - RNA, 24 nt, Artificial Sequence
  Synthetic
ucagaaugacuucagcaaaaguug

SEQ ID NO: 349275 - RNA, 18 nt, Artificial Sequence
  Synthetic
uuucaagccacaaaguug

SEQ ID NO: 349276 - RNA, 19 nt, Artificial Sequence
  Synthetic
auuucaagccacaaaguug

SEQ ID NO: 349277 - RNA, 20 nt, Artificial Sequence
  Synthetic
aauuucaagccacaaaguug

SEQ ID NO: 349278 - RNA, 21 nt, Artificial Sequence
  Synthetic
gaauuucaagccacaaaguug

SEQ ID NO: 349279 - RNA, 22 nt, Artificial Sequence
  Synthetic
agaauuucaagccacaaaguug

SEQ ID NO: 349280 - RNA, 23 nt, Artificial Sequence
  Synthetic
uagaauuucaagccacaaaguug

SEQ ID NO: 349281 - RNA, 24 nt, Artificial Sequence
  Synthetic
uuagaauuucaagccacaaaguug

SEQ ID NO: 349282 - RNA, 18 nt, Artificial Sequence
  Synthetic
ggcugccuuguaaaguug

SEQ ID NO: 349283 - RNA, 19 nt, Artificial Sequence
  Synthetic
aggcugccuuguaaaguug

SEQ ID NO: 349284 - RNA, 20 nt, Artificial Sequence
  Synthetic
caggcugccuuguaaaguug

SEQ ID NO: 349285 - RNA, 21 nt, Artificial Sequence
  Synthetic
acaggcugccuuguaaaguug

SEQ ID NO: 349286 - RNA, 22 nt, Artificial Sequence
  Synthetic
aacaggcugccuuguaaaguug

SEQ ID NO: 349287 - RNA, 23 nt, Artificial Sequence
  Synthetic
gaacaggcugccuuguaaaguug

SEQ ID NO: 349288 - RNA, 24 nt, Artificial Sequence
  Synthetic
ggaacaggcugccuuguaaaguug

SEQ ID NO: 349289 - RNA, 18 nt, Artificial Sequence
  Synthetic
cacauugaagucaaguug

SEQ ID NO: 349290 - RNA, 19 nt, Artificial Sequence
  Synthetic
ucacauugaagucaaguug

SEQ ID NO: 349291 - RNA, 20 nt, Artificial Sequence
  Synthetic
uucacauugaagucaaguug

SEQ ID NO: 349292 - RNA, 21 nt, Artificial Sequence
  Synthetic
guucacauugaagucaaguug

SEQ ID NO: 349293 - RNA, 22 nt, Artificial Sequence
  Synthetic
aguucacauugaagucaaguug

SEQ ID NO: 349294 - RNA, 23 nt, Artificial Sequence
  Synthetic
uaguucacauugaagucaaguug

SEQ ID NO: 349295 - RNA, 24 nt, Artificial Sequence
  Synthetic
guaguucacauugaagucaaguug

SEQ ID NO: 349296 - RNA, 18 nt, Artificial Sequence
  Synthetic
uauuccaacaugaaguug

SEQ ID NO: 349297 - RNA, 19 nt, Artificial Sequence
  Synthetic
uuauuccaacaugaaguug

SEQ ID NO: 349298 - RNA, 20 nt, Artificial Sequence
  Synthetic
uuuauuccaacaugaaguug

SEQ ID NO: 349299 - RNA, 21 nt, Artificial Sequence
  Synthetic
auuuauuccaacaugaaguug

SEQ ID NO: 349300 - RNA, 22 nt, Artificial Sequence
  Synthetic
uauuuauuccaacaugaaguug

SEQ ID NO: 349301 - RNA, 23 nt, Artificial Sequence
  Synthetic
uuauuuauuccaacaugaaguug

SEQ ID NO: 349302 - RNA, 24 nt, Artificial Sequence
  Synthetic
uuuauuuauuccaacaugaaguug

SEQ ID NO: 349303 - RNA, 18 nt, Artificial Sequence
  Synthetic
acucuugugaauaaguug

SEQ ID NO: 349304 - RNA, 19 nt, Artificial Sequence
  Synthetic
uacucuugugaauaaguug

SEQ ID NO: 349305 - RNA, 20 nt, Artificial Sequence
  Synthetic
auacucuugugaauaaguug

SEQ ID NO: 349306 - RNA, 21 nt, Artificial Sequence
  Synthetic
uauacucuugugaauaaguug

SEQ ID NO: 349307 - RNA, 22 nt, Artificial Sequence
  Synthetic
uuauacucuugugaauaaguug

SEQ ID NO: 349308 - RNA, 23 nt, Artificial Sequence
  Synthetic
guuauacucuugugaauaaguug

SEQ ID NO: 349309 - RNA, 24 nt, Artificial Sequence
  Synthetic
cguuauacucuugugaauaaguug

SEQ ID NO: 349310 - RNA, 18 nt, Artificial Sequence
  Synthetic
aaaucuagcaguaaguug

SEQ ID NO: 349311 - RNA, 19 nt, Artificial Sequence
  Synthetic
gaaaucuagcaguaaguug

SEQ ID NO: 349312 - RNA, 20 nt, Artificial Sequence
  Synthetic
ugaaaucuagcaguaaguug

SEQ ID NO: 349313 - RNA, 21 nt, Artificial Sequence
  Synthetic
cugaaaucuagcaguaaguug

SEQ ID NO: 349314 - RNA, 22 nt, Artificial Sequence
  Synthetic
ccugaaaucuagcaguaaguug

SEQ ID NO: 349315 - RNA, 23 nt, Artificial Sequence
  Synthetic
cccugaaaucuagcaguaaguug

SEQ ID NO: 349316 - RNA, 24 nt, Artificial Sequence
  Synthetic
ucccugaaaucuagcaguaaguug

SEQ ID NO: 349317 - RNA, 18 nt, Artificial Sequence
  Synthetic
gcaugggcuuguaaguug

SEQ ID NO: 349318 - RNA, 19 nt, Artificial Sequence
  Synthetic
ggcaugggcuuguaaguug

SEQ ID NO: 349319 - RNA, 20 nt, Artificial Sequence
  Synthetic
aggcaugggcuuguaaguug

SEQ ID NO: 349320 - RNA, 21 nt, Artificial Sequence
  Synthetic
gaggcaugggcuuguaaguug

SEQ ID NO: 349321 - RNA, 22 nt, Artificial Sequence
  Synthetic
agaggcaugggcuuguaaguug

SEQ ID NO: 349322 - RNA, 23 nt, Artificial Sequence
  Synthetic
gagaggcaugggcuuguaaguug

SEQ ID NO: 349323 - RNA, 24 nt, Artificial Sequence
  Synthetic
ggagaggcaugggcuuguaaguug

SEQ ID NO: 349324 - RNA, 18 nt, Artificial Sequence
  Synthetic
gaaguugcaguuaaguug

SEQ ID NO: 349325 - RNA, 19 nt, Artificial Sequence
  Synthetic
ugaaguugcaguuaaguug

SEQ ID NO: 349326 - RNA, 20 nt, Artificial Sequence
  Synthetic
uugaaguugcaguuaaguug

SEQ ID NO: 349327 - RNA, 21 nt, Artificial Sequence
  Synthetic
uuugaaguugcaguuaaguug

SEQ ID NO: 349328 - RNA, 22 nt, Artificial Sequence
  Synthetic
uuuugaaguugcaguuaaguug

SEQ ID NO: 349329 - RNA, 23 nt, Artificial Sequence
  Synthetic
auuuugaaguugcaguuaaguug

SEQ ID NO: 349330 - RNA, 24 nt, Artificial Sequence
  Synthetic
aauuuugaaguugcaguuaaguug

SEQ ID NO: 349331 - RNA, 18 nt, Artificial Sequence
  Synthetic
acagcuguauaacaguug

SEQ ID NO: 349332 - RNA, 19 nt, Artificial Sequence
  Synthetic
aacagcuguauaacaguug

SEQ ID NO: 349333 - RNA, 20 nt, Artificial Sequence
  Synthetic
caacagcuguauaacaguug

SEQ ID NO: 349334 - RNA, 21 nt, Artificial Sequence
  Synthetic
acaacagcuguauaacaguug

SEQ ID NO: 349335 - RNA, 22 nt, Artificial Sequence
  Synthetic
aacaacagcuguauaacaguug

SEQ ID NO: 349336 - RNA, 23 nt, Artificial Sequence
  Synthetic
uaacaacagcuguauaacaguug

SEQ ID NO: 349337 - RNA, 24 nt, Artificial Sequence
  Synthetic
guaacaacagcuguauaacaguug

SEQ ID NO: 349338 - RNA, 18 nt, Artificial Sequence
  Synthetic
uuagcuuaggcacaguug

SEQ ID NO: 349339 - RNA, 19 nt, Artificial Sequence
  Synthetic
cuuagcuuaggcacaguug

SEQ ID NO: 349340 - RNA, 20 nt, Artificial Sequence
  Synthetic
acuuagcuuaggcacaguug

SEQ ID NO: 349341 - RNA, 21 nt, Artificial Sequence
  Synthetic
cacuuagcuuaggcacaguug

SEQ ID NO: 349342 - RNA, 22 nt, Artificial Sequence
  Synthetic
gcacuuagcuuaggcacaguug

SEQ ID NO: 349343 - RNA, 23 nt, Artificial Sequence
  Synthetic
ggcacuuagcuuaggcacaguug

SEQ ID NO: 349344 - RNA, 24 nt, Artificial Sequence
  Synthetic
aggcacuuagcuuaggcacaguug

SEQ ID NO: 349345 - RNA, 18 nt, Artificial Sequence
  Synthetic
aucuccaagucacaguug

SEQ ID NO: 349346 - RNA, 19 nt, Artificial Sequence
  Synthetic
caucuccaagucacaguug

SEQ ID NO: 349347 - RNA, 20 nt, Artificial Sequence
  Synthetic
ucaucuccaagucacaguug

SEQ ID NO: 349348 - RNA, 21 nt, Artificial Sequence
  Synthetic
aucaucuccaagucacaguug

SEQ ID NO: 349349 - RNA, 22 nt, Artificial Sequence
  Synthetic
gaucaucuccaagucacaguug

SEQ ID NO: 349350 - RNA, 23 nt, Artificial Sequence
  Synthetic
ugaucaucuccaagucacaguug

SEQ ID NO: 349351 - RNA, 24 nt, Artificial Sequence
  Synthetic
augaucaucuccaagucacaguug

SEQ ID NO: 349352 - RNA, 18 nt, Artificial Sequence
  Synthetic
uggacuaagcagcaguug

SEQ ID NO: 349353 - RNA, 19 nt, Artificial Sequence
  Synthetic
auggacuaagcagcaguug

SEQ ID NO: 349354 - RNA, 20 nt, Artificial Sequence
  Synthetic
uauggacuaagcagcaguug

SEQ ID NO: 349355 - RNA, 21 nt, Artificial Sequence
  Synthetic
uuauggacuaagcagcaguug

SEQ ID NO: 349356 - RNA, 22 nt, Artificial Sequence
  Synthetic
uuuauggacuaagcagcaguug

SEQ ID NO: 349357 - RNA, 23 nt, Artificial Sequence
  Synthetic
guuuauggacuaagcagcaguug

SEQ ID NO: 349358 - RNA, 24 nt, Artificial Sequence
  Synthetic
cguuuauggacuaagcagcaguug

SEQ ID NO: 349359 - RNA, 18 nt, Artificial Sequence
  Synthetic
uauaaauucccgcaguug

SEQ ID NO: 349360 - RNA, 19 nt, Artificial Sequence
  Synthetic
uuauaaauucccgcaguug

SEQ ID NO: 349361 - RNA, 20 nt, Artificial Sequence
  Synthetic
auuauaaauucccgcaguug

SEQ ID NO: 349362 - RNA, 21 nt, Artificial Sequence
  Synthetic
gauuauaaauucccgcaguug

SEQ ID NO: 349363 - RNA, 22 nt, Artificial Sequence
  Synthetic
agauuauaaauucccgcaguug

SEQ ID NO: 349364 - RNA, 23 nt, Artificial Sequence
  Synthetic
aagauuauaaauucccgcaguug

SEQ ID NO: 349365 - RNA, 24 nt, Artificial Sequence
  Synthetic
gaagauuauaaauucccgcaguug

SEQ ID NO: 349366 - RNA, 18 nt, Artificial Sequence
  Synthetic
acagcuuucgcucaguug

SEQ ID NO: 349367 - RNA, 19 nt, Artificial Sequence
  Synthetic
cacagcuuucgcucaguug

SEQ ID NO: 349368 - RNA, 20 nt, Artificial Sequence
  Synthetic
ccacagcuuucgcucaguug

SEQ ID NO: 349369 - RNA, 21 nt, Artificial Sequence
  Synthetic
gccacagcuuucgcucaguug

SEQ ID NO: 349370 - RNA, 22 nt, Artificial Sequence
  Synthetic
ugccacagcuuucgcucaguug

SEQ ID NO: 349371 - RNA, 23 nt, Artificial Sequence
  Synthetic
gugccacagcuuucgcucaguug

SEQ ID NO: 349372 - RNA, 24 nt, Artificial Sequence
  Synthetic
ugugccacagcuuucgcucaguug

SEQ ID NO: 349373 - RNA, 18 nt, Artificial Sequence
  Synthetic
aaauaaaugucucaguug

SEQ ID NO: 349374 - RNA, 19 nt, Artificial Sequence
  Synthetic
aaaauaaaugucucaguug

SEQ ID NO: 349375 - RNA, 20 nt, Artificial Sequence
  Synthetic
caaaauaaaugucucaguug

SEQ ID NO: 349376 - RNA, 21 nt, Artificial Sequence
  Synthetic
ucaaaauaaaugucucaguug

SEQ ID NO: 349377 - RNA, 22 nt, Artificial Sequence
  Synthetic
gucaaaauaaaugucucaguug

SEQ ID NO: 349378 - RNA, 23 nt, Artificial Sequence
  Synthetic
agucaaaauaaaugucucaguug

SEQ ID NO: 349379 - RNA, 24 nt, Artificial Sequence
  Synthetic
aagucaaaauaaaugucucaguug

SEQ ID NO: 349380 - RNA, 18 nt, Artificial Sequence
  Synthetic
uauuacuccuuucaguug

SEQ ID NO: 349381 - RNA, 19 nt, Artificial Sequence
  Synthetic
uuauuacuccuuucaguug

SEQ ID NO: 349382 - RNA, 20 nt, Artificial Sequence
  Synthetic
cuuauuacuccuuucaguug

SEQ ID NO: 349383 - RNA, 21 nt, Artificial Sequence
  Synthetic
acuuauuacuccuuucaguug

SEQ ID NO: 349384 - RNA, 22 nt, Artificial Sequence
  Synthetic
aacuuauuacuccuuucaguug

SEQ ID NO: 349385 - RNA, 23 nt, Artificial Sequence
  Synthetic
gaacuuauuacuccuuucaguug

SEQ ID NO: 349386 - RNA, 24 nt, Artificial Sequence
  Synthetic
agaacuuauuacuccuuucaguug

SEQ ID NO: 349387 - RNA, 18 nt, Artificial Sequence
  Synthetic
gggagaggaaaagaguug

SEQ ID NO: 349388 - RNA, 19 nt, Artificial Sequence
  Synthetic
ggggagaggaaaagaguug

SEQ ID NO: 349389 - RNA, 20 nt, Artificial Sequence
  Synthetic
aggggagaggaaaagaguug

SEQ ID NO: 349390 - RNA, 21 nt, Artificial Sequence
  Synthetic
aaggggagaggaaaagaguug

SEQ ID NO: 349391 - RNA, 22 nt, Artificial Sequence
  Synthetic
uaaggggagaggaaaagaguug

SEQ ID NO: 349392 - RNA, 23 nt, Artificial Sequence
  Synthetic
auaaggggagaggaaaagaguug

SEQ ID NO: 349393 - RNA, 24 nt, Artificial Sequence
  Synthetic
cauaaggggagaggaaaagaguug

SEQ ID NO: 349394 - RNA, 18 nt, Artificial Sequence
  Synthetic
uuuuuuguugaagaguug

SEQ ID NO: 349395 - RNA, 19 nt, Artificial Sequence
  Synthetic
guuuuuuguugaagaguug

SEQ ID NO: 349396 - RNA, 20 nt, Artificial Sequence
  Synthetic
uguuuuuuguugaagaguug

SEQ ID NO: 349397 - RNA, 21 nt, Artificial Sequence
  Synthetic
auguuuuuuguugaagaguug

SEQ ID NO: 349398 - RNA, 22 nt, Artificial Sequence
  Synthetic
gauguuuuuuguugaagaguug

SEQ ID NO: 349399 - RNA, 23 nt, Artificial Sequence
  Synthetic
ugauguuuuuuguugaagaguug

SEQ ID NO: 349400 - RNA, 24 nt, Artificial Sequence
  Synthetic
uugauguuuuuuguugaagaguug

SEQ ID NO: 349401 - RNA, 18 nt, Artificial Sequence
  Synthetic
aauuaaaucuaagaguug

SEQ ID NO: 349402 - RNA, 19 nt, Artificial Sequence
  Synthetic
uaauuaaaucuaagaguug

SEQ ID NO: 349403 - RNA, 20 nt, Artificial Sequence
  Synthetic
guaauuaaaucuaagaguug

SEQ ID NO: 349404 - RNA, 21 nt, Artificial Sequence
  Synthetic
aguaauuaaaucuaagaguug

SEQ ID NO: 349405 - RNA, 22 nt, Artificial Sequence
  Synthetic
uaguaauuaaaucuaagaguug

SEQ ID NO: 349406 - RNA, 23 nt, Artificial Sequence
  Synthetic
guaguaauuaaaucuaagaguug

SEQ ID NO: 349407 - RNA, 24 nt, Artificial Sequence
  Synthetic
aguaguaauuaaaucuaagaguug

SEQ ID NO: 349408 - RNA, 18 nt, Artificial Sequence
  Synthetic
ccucaaccuccagaguug

SEQ ID NO: 349409 - RNA, 19 nt, Artificial Sequence
  Synthetic
gccucaaccuccagaguug

SEQ ID NO: 349410 - RNA, 20 nt, Artificial Sequence
  Synthetic
ugccucaaccuccagaguug

SEQ ID NO: 349411 - RNA, 21 nt, Artificial Sequence
  Synthetic
cugccucaaccuccagaguug

SEQ ID NO: 349412 - RNA, 22 nt, Artificial Sequence
  Synthetic
ccugccucaaccuccagaguug

SEQ ID NO: 349413 - RNA, 23 nt, Artificial Sequence
  Synthetic
uccugccucaaccuccagaguug

SEQ ID NO: 349414 - RNA, 24 nt, Artificial Sequence
  Synthetic
cuccugccucaaccuccagaguug

SEQ ID NO: 349415 - RNA, 18 nt, Artificial Sequence
  Synthetic
auuucaguuugggaguug

SEQ ID NO: 349416 - RNA, 19 nt, Artificial Sequence
  Synthetic
uauuucaguuugggaguug

SEQ ID NO: 349417 - RNA, 20 nt, Artificial Sequence
  Synthetic
uuauuucaguuugggaguug

SEQ ID NO: 349418 - RNA, 21 nt, Artificial Sequence
  Synthetic
auuauuucaguuugggaguug

SEQ ID NO: 349419 - RNA, 22 nt, Artificial Sequence
  Synthetic
cauuauuucaguuugggaguug

SEQ ID NO: 349420 - RNA, 23 nt, Artificial Sequence
  Synthetic
ucauuauuucaguuugggaguug

SEQ ID NO: 349421 - RNA, 24 nt, Artificial Sequence
  Synthetic
gucauuauuucaguuugggaguug

SEQ ID NO: 349422 - RNA, 18 nt, Artificial Sequence
  Synthetic
aguagcauuuuggaguug

SEQ ID NO: 349423 - RNA, 19 nt, Artificial Sequence
  Synthetic
aaguagcauuuuggaguug

SEQ ID NO: 349424 - RNA, 20 nt, Artificial Sequence
  Synthetic
gaaguagcauuuuggaguug

SEQ ID NO: 349425 - RNA, 21 nt, Artificial Sequence
  Synthetic
agaaguagcauuuuggaguug

SEQ ID NO: 349426 - RNA, 22 nt, Artificial Sequence
  Synthetic
uagaaguagcauuuuggaguug

SEQ ID NO: 349427 - RNA, 23 nt, Artificial Sequence
  Synthetic
auagaaguagcauuuuggaguug

SEQ ID NO: 349428 - RNA, 24 nt, Artificial Sequence
  Synthetic
cauagaaguagcauuuuggaguug

SEQ ID NO: 349429 - RNA, 18 nt, Artificial Sequence
  Synthetic
uugaggaugagugaguug

SEQ ID NO: 349430 - RNA, 19 nt, Artificial Sequence
  Synthetic
auugaggaugagugaguug

SEQ ID NO: 349431 - RNA, 20 nt, Artificial Sequence
  Synthetic
cauugaggaugagugaguug

SEQ ID NO: 349432 - RNA, 21 nt, Artificial Sequence
  Synthetic
acauugaggaugagugaguug

SEQ ID NO: 349433 - RNA, 22 nt, Artificial Sequence
  Synthetic
gacauugaggaugagugaguug

SEQ ID NO: 349434 - RNA, 23 nt, Artificial Sequence
  Synthetic
agacauugaggaugagugaguug

SEQ ID NO: 349435 - RNA, 24 nt, Artificial Sequence
  Synthetic
aagacauugaggaugagugaguug

SEQ ID NO: 349436 - RNA, 18 nt, Artificial Sequence
  Synthetic
uuucuugcuauugaguug

SEQ ID NO: 349437 - RNA, 19 nt, Artificial Sequence
  Synthetic
uuuucuugcuauugaguug

SEQ ID NO: 349438 - RNA, 20 nt, Artificial Sequence
  Synthetic
guuuucuugcuauugaguug

SEQ ID NO: 349439 - RNA, 21 nt, Artificial Sequence
  Synthetic
uguuuucuugcuauugaguug

SEQ ID NO: 349440 - RNA, 22 nt, Artificial Sequence
  Synthetic
uuguuuucuugcuauugaguug

SEQ ID NO: 349441 - RNA, 23 nt, Artificial Sequence
  Synthetic
uuuguuuucuugcuauugaguug

SEQ ID NO: 349442 - RNA, 24 nt, Artificial Sequence
  Synthetic
auuuguuuucuugcuauugaguug

SEQ ID NO: 349443 - RNA, 18 nt, Artificial Sequence
  Synthetic
gaucuggaaagcuaguug

SEQ ID NO: 349444 - RNA, 19 nt, Artificial Sequence
  Synthetic
ggaucuggaaagcuaguug

SEQ ID NO: 349445 - RNA, 20 nt, Artificial Sequence
  Synthetic
aggaucuggaaagcuaguug

SEQ ID NO: 349446 - RNA, 21 nt, Artificial Sequence
  Synthetic
aaggaucuggaaagcuaguug

SEQ ID NO: 349447 - RNA, 22 nt, Artificial Sequence
  Synthetic
caaggaucuggaaagcuaguug

SEQ ID NO: 349448 - RNA, 23 nt, Artificial Sequence
  Synthetic
ucaaggaucuggaaagcuaguug

SEQ ID NO: 349449 - RNA, 24 nt, Artificial Sequence
  Synthetic
gucaaggaucuggaaagcuaguug

SEQ ID NO: 349450 - RNA, 18 nt, Artificial Sequence
  Synthetic
caagaauuaagcuaguug

SEQ ID NO: 349451 - RNA, 19 nt, Artificial Sequence
  Synthetic
ucaagaauuaagcuaguug

SEQ ID NO: 349452 - RNA, 20 nt, Artificial Sequence
  Synthetic
uucaagaauuaagcuaguug

SEQ ID NO: 349453 - RNA, 21 nt, Artificial Sequence
  Synthetic
cuucaagaauuaagcuaguug

SEQ ID NO: 349454 - RNA, 22 nt, Artificial Sequence
  Synthetic
ucuucaagaauuaagcuaguug

SEQ ID NO: 349455 - RNA, 23 nt, Artificial Sequence
  Synthetic
cucuucaagaauuaagcuaguug

SEQ ID NO: 349456 - RNA, 24 nt, Artificial Sequence
  Synthetic
acucuucaagaauuaagcuaguug

SEQ ID NO: 349457 - RNA, 18 nt, Artificial Sequence
  Synthetic
ucuucauccugcuaguug

SEQ ID NO: 349458 - RNA, 19 nt, Artificial Sequence
  Synthetic
uucuucauccugcuaguug

SEQ ID NO: 349459 - RNA, 20 nt, Artificial Sequence
  Synthetic
uuucuucauccugcuaguug

SEQ ID NO: 349460 - RNA, 21 nt, Artificial Sequence
  Synthetic
uuuucuucauccugcuaguug

SEQ ID NO: 349461 - RNA, 22 nt, Artificial Sequence
  Synthetic
auuuucuucauccugcuaguug

SEQ ID NO: 349462 - RNA, 23 nt, Artificial Sequence
  Synthetic
cauuuucuucauccugcuaguug

SEQ ID NO: 349463 - RNA, 24 nt, Artificial Sequence
  Synthetic
gcauuuucuucauccugcuaguug

SEQ ID NO: 349464 - RNA, 18 nt, Artificial Sequence
  Synthetic
gguagaaaaaucuaguug

SEQ ID NO: 349465 - RNA, 19 nt, Artificial Sequence
  Synthetic
ggguagaaaaaucuaguug

SEQ ID NO: 349466 - RNA, 20 nt, Artificial Sequence
  Synthetic
gggguagaaaaaucuaguug

SEQ ID NO: 349467 - RNA, 21 nt, Artificial Sequence
  Synthetic
ugggguagaaaaaucuaguug

SEQ ID NO: 349468 - RNA, 22 nt, Artificial Sequence
  Synthetic
augggguagaaaaaucuaguug

SEQ ID NO: 349469 - RNA, 23 nt, Artificial Sequence
  Synthetic
caugggguagaaaaaucuaguug

SEQ ID NO: 349470 - RNA, 24 nt, Artificial Sequence
  Synthetic
ccaugggguagaaaaaucuaguug

SEQ ID NO: 349471 - RNA, 18 nt, Artificial Sequence
  Synthetic
uucagaauaaucuaguug

SEQ ID NO: 349472 - RNA, 19 nt, Artificial Sequence
  Synthetic
uuucagaauaaucuaguug

SEQ ID NO: 349473 - RNA, 20 nt, Artificial Sequence
  Synthetic
guuucagaauaaucuaguug

SEQ ID NO: 349474 - RNA, 21 nt, Artificial Sequence
  Synthetic
uguuucagaauaaucuaguug

SEQ ID NO: 349475 - RNA, 22 nt, Artificial Sequence
  Synthetic
uuguuucagaauaaucuaguug

SEQ ID NO: 349476 - RNA, 23 nt, Artificial Sequence
  Synthetic
uuuguuucagaauaaucuaguug

SEQ ID NO: 349477 - RNA, 24 nt, Artificial Sequence
  Synthetic
guuuguuucagaauaaucuaguug

SEQ ID NO: 349478 - RNA, 18 nt, Artificial Sequence
  Synthetic
gagccuagaguguaguug

SEQ ID NO: 349479 - RNA, 19 nt, Artificial Sequence
  Synthetic
agagccuagaguguaguug

SEQ ID NO: 349480 - RNA, 20 nt, Artificial Sequence
  Synthetic
uagagccuagaguguaguug

SEQ ID NO: 349481 - RNA, 21 nt, Artificial Sequence
  Synthetic
cuagagccuagaguguaguug

SEQ ID NO: 349482 - RNA, 22 nt, Artificial Sequence
  Synthetic
ucuagagccuagaguguaguug

SEQ ID NO: 349483 - RNA, 23 nt, Artificial Sequence
  Synthetic
cucuagagccuagaguguaguug

SEQ ID NO: 349484 - RNA, 24 nt, Artificial Sequence
  Synthetic
ccucuagagccuagaguguaguug

SEQ ID NO: 349485 - RNA, 18 nt, Artificial Sequence
  Synthetic
ggacaacaggauuaguug

SEQ ID NO: 349486 - RNA, 19 nt, Artificial Sequence
  Synthetic
uggacaacaggauuaguug

SEQ ID NO: 349487 - RNA, 20 nt, Artificial Sequence
  Synthetic
uuggacaacaggauuaguug

SEQ ID NO: 349488 - RNA, 21 nt, Artificial Sequence
  Synthetic
uuuggacaacaggauuaguug

SEQ ID NO: 349489 - RNA, 22 nt, Artificial Sequence
  Synthetic
auuuggacaacaggauuaguug

SEQ ID NO: 349490 - RNA, 23 nt, Artificial Sequence
  Synthetic
cauuuggacaacaggauuaguug

SEQ ID NO: 349491 - RNA, 24 nt, Artificial Sequence
  Synthetic
gcauuuggacaacaggauuaguug

SEQ ID NO: 349492 - RNA, 18 nt, Artificial Sequence
  Synthetic
uaaucccauuguacguug

SEQ ID NO: 349493 - RNA, 19 nt, Artificial Sequence
  Synthetic
auaaucccauuguacguug

SEQ ID NO: 349494 - RNA, 20 nt, Artificial Sequence
  Synthetic
aauaaucccauuguacguug

SEQ ID NO: 349495 - RNA, 21 nt, Artificial Sequence
  Synthetic
aaauaaucccauuguacguug

SEQ ID NO: 349496 - RNA, 22 nt, Artificial Sequence
  Synthetic
gaaauaaucccauuguacguug

SEQ ID NO: 349497 - RNA, 23 nt, Artificial Sequence
  Synthetic
ggaaauaaucccauuguacguug

SEQ ID NO: 349498 - RNA, 24 nt, Artificial Sequence
  Synthetic
aggaaauaaucccauuguacguug

SEQ ID NO: 349499 - RNA, 18 nt, Artificial Sequence
  Synthetic
cagauauaacucccguug

SEQ ID NO: 349500 - RNA, 19 nt, Artificial Sequence
  Synthetic
acagauauaacucccguug

SEQ ID NO: 349501 - RNA, 20 nt, Artificial Sequence
  Synthetic
gacagauauaacucccguug

SEQ ID NO: 349502 - RNA, 21 nt, Artificial Sequence
  Synthetic
ugacagauauaacucccguug

SEQ ID NO: 349503 - RNA, 22 nt, Artificial Sequence
  Synthetic
gugacagauauaacucccguug

SEQ ID NO: 349504 - RNA, 23 nt, Artificial Sequence
  Synthetic
ggugacagauauaacucccguug

SEQ ID NO: 349505 - RNA, 24 nt, Artificial Sequence
  Synthetic
aggugacagauauaacucccguug

SEQ ID NO: 349506 - RNA, 18 nt, Artificial Sequence
  Synthetic
cuagaccugaagccguug

SEQ ID NO: 349507 - RNA, 19 nt, Artificial Sequence
  Synthetic
ccuagaccugaagccguug

SEQ ID NO: 349508 - RNA, 20 nt, Artificial Sequence
  Synthetic
uccuagaccugaagccguug

SEQ ID NO: 349509 - RNA, 21 nt, Artificial Sequence
  Synthetic
cuccuagaccugaagccguug

SEQ ID NO: 349510 - RNA, 22 nt, Artificial Sequence
  Synthetic
ucuccuagaccugaagccguug

SEQ ID NO: 349511 - RNA, 23 nt, Artificial Sequence
  Synthetic
cucuccuagaccugaagccguug

SEQ ID NO: 349512 - RNA, 24 nt, Artificial Sequence
  Synthetic
ccucuccuagaccugaagccguug

SEQ ID NO: 349513 - RNA, 18 nt, Artificial Sequence
  Synthetic
cucuugcaauauccguug

SEQ ID NO: 349514 - RNA, 19 nt, Artificial Sequence
  Synthetic
ucucuugcaauauccguug

SEQ ID NO: 349515 - RNA, 20 nt, Artificial Sequence
  Synthetic
uucucuugcaauauccguug

SEQ ID NO: 349516 - RNA, 21 nt, Artificial Sequence
  Synthetic
uuucucuugcaauauccguug

SEQ ID NO: 349517 - RNA, 22 nt, Artificial Sequence
  Synthetic
uuuucucuugcaauauccguug

SEQ ID NO: 349518 - RNA, 23 nt, Artificial Sequence
  Synthetic
cuuuucucuugcaauauccguug

SEQ ID NO: 349519 - RNA, 24 nt, Artificial Sequence
  Synthetic
gcuuuucucuugcaauauccguug

SEQ ID NO: 349520 - RNA, 18 nt, Artificial Sequence
  Synthetic
augaguucauguccguug

SEQ ID NO: 349521 - RNA, 19 nt, Artificial Sequence
  Synthetic
gaugaguucauguccguug

SEQ ID NO: 349522 - RNA, 20 nt, Artificial Sequence
  Synthetic
ugaugaguucauguccguug

SEQ ID NO: 349523 - RNA, 21 nt, Artificial Sequence
  Synthetic
augaugaguucauguccguug

SEQ ID NO: 349524 - RNA, 22 nt, Artificial Sequence
  Synthetic
aaugaugaguucauguccguug

SEQ ID NO: 349525 - RNA, 23 nt, Artificial Sequence
  Synthetic
aaaugaugaguucauguccguug

SEQ ID NO: 349526 - RNA, 24 nt, Artificial Sequence
  Synthetic
aaaaugaugaguucauguccguug

SEQ ID NO: 349527 - RNA, 18 nt, Artificial Sequence
  Synthetic
gucuuuuuagccgcguug

SEQ ID NO: 349528 - RNA, 19 nt, Artificial Sequence
  Synthetic
ugucuuuuuagccgcguug

SEQ ID NO: 349529 - RNA, 20 nt, Artificial Sequence
  Synthetic
gugucuuuuuagccgcguug

SEQ ID NO: 349530 - RNA, 21 nt, Artificial Sequence
  Synthetic
ggugucuuuuuagccgcguug

SEQ ID NO: 349531 - RNA, 22 nt, Artificial Sequence
  Synthetic
aggugucuuuuuagccgcguug

SEQ ID NO: 349532 - RNA, 23 nt, Artificial Sequence
  Synthetic
aaggugucuuuuuagccgcguug

SEQ ID NO: 349533 - RNA, 24 nt, Artificial Sequence
  Synthetic
uaaggugucuuuuuagccgcguug

SEQ ID NO: 349534 - RNA, 18 nt, Artificial Sequence
  Synthetic
uuuuuuguauaaagguug

SEQ ID NO: 349535 - RNA, 19 nt, Artificial Sequence
  Synthetic
uuuuuuuguauaaagguug

SEQ ID NO: 349536 - RNA, 20 nt, Artificial Sequence
  Synthetic
uuuuuuuuguauaaagguug

SEQ ID NO: 349537 - RNA, 21 nt, Artificial Sequence
  Synthetic
uuuuuuuuuguauaaagguug

SEQ ID NO: 349538 - RNA, 22 nt, Artificial Sequence
  Synthetic
uuuuuuuuuuguauaaagguug

SEQ ID NO: 349539 - RNA, 23 nt, Artificial Sequence
  Synthetic
auuuuuuuuuuguauaaagguug

SEQ ID NO: 349540 - RNA, 24 nt, Artificial Sequence
  Synthetic
aauuuuuuuuuuguauaaagguug

SEQ ID NO: 349541 - RNA, 18 nt, Artificial Sequence
  Synthetic
gaagggccguaaagguug

SEQ ID NO: 349542 - RNA, 19 nt, Artificial Sequence
  Synthetic
ggaagggccguaaagguug

SEQ ID NO: 349543 - RNA, 20 nt, Artificial Sequence
  Synthetic
uggaagggccguaaagguug

SEQ ID NO: 349544 - RNA, 21 nt, Artificial Sequence
  Synthetic
auggaagggccguaaagguug

SEQ ID NO: 349545 - RNA, 22 nt, Artificial Sequence
  Synthetic
gauggaagggccguaaagguug

SEQ ID NO: 349546 - RNA, 23 nt, Artificial Sequence
  Synthetic
ggauggaagggccguaaagguug

SEQ ID NO: 349547 - RNA, 24 nt, Artificial Sequence
  Synthetic
aggauggaagggccguaaagguug

SEQ ID NO: 349548 - RNA, 18 nt, Artificial Sequence
  Synthetic
ucauugaagacaagguug

SEQ ID NO: 349549 - RNA, 19 nt, Artificial Sequence
  Synthetic
aucauugaagacaagguug

SEQ ID NO: 349550 - RNA, 20 nt, Artificial Sequence
  Synthetic
uaucauugaagacaagguug

SEQ ID NO: 349551 - RNA, 21 nt, Artificial Sequence
  Synthetic
auaucauugaagacaagguug

SEQ ID NO: 349552 - RNA, 22 nt, Artificial Sequence
  Synthetic
aauaucauugaagacaagguug

SEQ ID NO: 349553 - RNA, 23 nt, Artificial Sequence
  Synthetic
aaauaucauugaagacaagguug

SEQ ID NO: 349554 - RNA, 24 nt, Artificial Sequence
  Synthetic
aaaauaucauugaagacaagguug

SEQ ID NO: 349555 - RNA, 18 nt, Artificial Sequence
  Synthetic
cugagaaguccaagguug

SEQ ID NO: 349556 - RNA, 19 nt, Artificial Sequence
  Synthetic
gcugagaaguccaagguug

SEQ ID NO: 349557 - RNA, 20 nt, Artificial Sequence
  Synthetic
ggcugagaaguccaagguug

SEQ ID NO: 349558 - RNA, 21 nt, Artificial Sequence
  Synthetic
aggcugagaaguccaagguug

SEQ ID NO: 349559 - RNA, 22 nt, Artificial Sequence
  Synthetic
gaggcugagaaguccaagguug

SEQ ID NO: 349560 - RNA, 23 nt, Artificial Sequence
  Synthetic
ggaggcugagaaguccaagguug

SEQ ID NO: 349561 - RNA, 24 nt, Artificial Sequence
  Synthetic
cggaggcugagaaguccaagguug

SEQ ID NO: 349562 - RNA, 18 nt, Artificial Sequence
  Synthetic
auggcugugguaagguug

SEQ ID NO: 349563 - RNA, 19 nt, Artificial Sequence
  Synthetic
cauggcugugguaagguug

SEQ ID NO: 349564 - RNA, 20 nt, Artificial Sequence
  Synthetic
ucauggcugugguaagguug

SEQ ID NO: 349565 - RNA, 21 nt, Artificial Sequence
  Synthetic
aucauggcugugguaagguug

SEQ ID NO: 349566 - RNA, 22 nt, Artificial Sequence
  Synthetic
aaucauggcugugguaagguug

SEQ ID NO: 349567 - RNA, 23 nt, Artificial Sequence
  Synthetic
aaaucauggcugugguaagguug

SEQ ID NO: 349568 - RNA, 24 nt, Artificial Sequence
  Synthetic
aaaaucauggcugugguaagguug

SEQ ID NO: 349569 - RNA, 18 nt, Artificial Sequence
  Synthetic
ggauguaguuuaagguug

SEQ ID NO: 349570 - RNA, 19 nt, Artificial Sequence
  Synthetic
uggauguaguuuaagguug

SEQ ID NO: 349571 - RNA, 20 nt, Artificial Sequence
  Synthetic
cuggauguaguuuaagguug

SEQ ID NO: 349572 - RNA, 21 nt, Artificial Sequence
  Synthetic
gcuggauguaguuuaagguug

SEQ ID NO: 349573 - RNA, 22 nt, Artificial Sequence
  Synthetic
ggcuggauguaguuuaagguug

SEQ ID NO: 349574 - RNA, 23 nt, Artificial Sequence
  Synthetic
aggcuggauguaguuuaagguug

SEQ ID NO: 349575 - RNA, 24 nt, Artificial Sequence
  Synthetic
aaggcuggauguaguuuaagguug

SEQ ID NO: 349576 - RNA, 18 nt, Artificial Sequence
  Synthetic
ccaaauguaggcagguug

SEQ ID NO: 349577 - RNA, 19 nt, Artificial Sequence
  Synthetic
uccaaauguaggcagguug

SEQ ID NO: 349578 - RNA, 20 nt, Artificial Sequence
  Synthetic
uuccaaauguaggcagguug

SEQ ID NO: 349579 - RNA, 21 nt, Artificial Sequence
  Synthetic
uuuccaaauguaggcagguug

SEQ ID NO: 349580 - RNA, 22 nt, Artificial Sequence
  Synthetic
cuuuccaaauguaggcagguug

SEQ ID NO: 349581 - RNA, 23 nt, Artificial Sequence
  Synthetic
acuuuccaaauguaggcagguug

SEQ ID NO: 349582 - RNA, 24 nt, Artificial Sequence
  Synthetic
uacuuuccaaauguaggcagguug

SEQ ID NO: 349583 - RNA, 18 nt, Artificial Sequence
  Synthetic
uuguagaaacucagguug

SEQ ID NO: 349584 - RNA, 19 nt, Artificial Sequence
  Synthetic
cuuguagaaacucagguug

SEQ ID NO: 349585 - RNA, 20 nt, Artificial Sequence
  Synthetic
gcuuguagaaacucagguug

SEQ ID NO: 349586 - RNA, 21 nt, Artificial Sequence
  Synthetic
ggcuuguagaaacucagguug

SEQ ID NO: 349587 - RNA, 22 nt, Artificial Sequence
  Synthetic
gggcuuguagaaacucagguug

SEQ ID NO: 349588 - RNA, 23 nt, Artificial Sequence
  Synthetic
agggcuuguagaaacucagguug

SEQ ID NO: 349589 - RNA, 24 nt, Artificial Sequence
  Synthetic
gagggcuuguagaaacucagguug

SEQ ID NO: 349590 - RNA, 18 nt, Artificial Sequence
  Synthetic
ugcagguaaaagagguug

SEQ ID NO: 349591 - RNA, 19 nt, Artificial Sequence
  Synthetic
gugcagguaaaagagguug

SEQ ID NO: 349592 - RNA, 20 nt, Artificial Sequence
  Synthetic
ugugcagguaaaagagguug

SEQ ID NO: 349593 - RNA, 21 nt, Artificial Sequence
  Synthetic
augugcagguaaaagagguug

SEQ ID NO: 349594 - RNA, 22 nt, Artificial Sequence
  Synthetic
aaugugcagguaaaagagguug

SEQ ID NO: 349595 - RNA, 23 nt, Artificial Sequence
  Synthetic
gaaugugcagguaaaagagguug

SEQ ID NO: 349596 - RNA, 24 nt, Artificial Sequence
  Synthetic
agaaugugcagguaaaagagguug

SEQ ID NO: 349597 - RNA, 18 nt, Artificial Sequence
  Synthetic
aaguagaaggugagguug

SEQ ID NO: 349598 - RNA, 19 nt, Artificial Sequence
  Synthetic
aaaguagaaggugagguug

SEQ ID NO: 349599 - RNA, 20 nt, Artificial Sequence
  Synthetic
uaaaguagaaggugagguug

SEQ ID NO: 349600 - RNA, 21 nt, Artificial Sequence
  Synthetic
auaaaguagaaggugagguug

SEQ ID NO: 349601 - RNA, 22 nt, Artificial Sequence
  Synthetic
cauaaaguagaaggugagguug

SEQ ID NO: 349602 - RNA, 23 nt, Artificial Sequence
  Synthetic
gcauaaaguagaaggugagguug

SEQ ID NO: 349603 - RNA, 24 nt, Artificial Sequence
  Synthetic
agcauaaaguagaaggugagguug

SEQ ID NO: 349604 - RNA, 18 nt, Artificial Sequence
  Synthetic
uaagaaaucacuagguug

SEQ ID NO: 349605 - RNA, 19 nt, Artificial Sequence
  Synthetic
uuaagaaaucacuagguug

SEQ ID NO: 349606 - RNA, 20 nt, Artificial Sequence
  Synthetic
uuuaagaaaucacuagguug

SEQ ID NO: 349607 - RNA, 21 nt, Artificial Sequence
  Synthetic
cuuuaagaaaucacuagguug

SEQ ID NO: 349608 - RNA, 22 nt, Artificial Sequence
  Synthetic
ccuuuaagaaaucacuagguug

SEQ ID NO: 349609 - RNA, 23 nt, Artificial Sequence
  Synthetic
uccuuuaagaaaucacuagguug

SEQ ID NO: 349610 - RNA, 24 nt, Artificial Sequence
  Synthetic
cuccuuuaagaaaucacuagguug

SEQ ID NO: 349611 - RNA, 18 nt, Artificial Sequence
  Synthetic
augacuaaagcuagguug

SEQ ID NO: 349612 - RNA, 19 nt, Artificial Sequence
  Synthetic
uaugacuaaagcuagguug

SEQ ID NO: 349613 - RNA, 20 nt, Artificial Sequence
  Synthetic
uuaugacuaaagcuagguug

SEQ ID NO: 349614 - RNA, 21 nt, Artificial Sequence
  Synthetic
guuaugacuaaagcuagguug

SEQ ID NO: 349615 - RNA, 22 nt, Artificial Sequence
  Synthetic
uguuaugacuaaagcuagguug

SEQ ID NO: 349616 - RNA, 23 nt, Artificial Sequence
  Synthetic
uuguuaugacuaaagcuagguug

SEQ ID NO: 349617 - RNA, 24 nt, Artificial Sequence
  Synthetic
uuuguuaugacuaaagcuagguug

SEQ ID NO: 349618 - RNA, 18 nt, Artificial Sequence
  Synthetic
auuuccaaguguagguug

SEQ ID NO: 349619 - RNA, 19 nt, Artificial Sequence
  Synthetic
cauuuccaaguguagguug

SEQ ID NO: 349620 - RNA, 20 nt, Artificial Sequence
  Synthetic
ucauuuccaaguguagguug

SEQ ID NO: 349621 - RNA, 21 nt, Artificial Sequence
  Synthetic
gucauuuccaaguguagguug

SEQ ID NO: 349622 - RNA, 22 nt, Artificial Sequence
  Synthetic
ugucauuuccaaguguagguug

SEQ ID NO: 349623 - RNA, 23 nt, Artificial Sequence
  Synthetic
augucauuuccaaguguagguug

SEQ ID NO: 349624 - RNA, 24 nt, Artificial Sequence
  Synthetic
uaugucauuuccaaguguagguug

SEQ ID NO: 349625 - RNA, 18 nt, Artificial Sequence
  Synthetic
agaaaagcugcaggguug

SEQ ID NO: 349626 - RNA, 19 nt, Artificial Sequence
  Synthetic
cagaaaagcugcaggguug

SEQ ID NO: 349627 - RNA, 20 nt, Artificial Sequence
  Synthetic
ucagaaaagcugcaggguug

SEQ ID NO: 349628 - RNA, 21 nt, Artificial Sequence
  Synthetic
uucagaaaagcugcaggguug

SEQ ID NO: 349629 - RNA, 22 nt, Artificial Sequence
  Synthetic
cuucagaaaagcugcaggguug

SEQ ID NO: 349630 - RNA, 23 nt, Artificial Sequence
  Synthetic
ucuucagaaaagcugcaggguug

SEQ ID NO: 349631 - RNA, 24 nt, Artificial Sequence
  Synthetic
cucuucagaaaagcugcaggguug

SEQ ID NO: 349632 - RNA, 18 nt, Artificial Sequence
  Synthetic
cuguuggaaucaggguug

SEQ ID NO: 349633 - RNA, 19 nt, Artificial Sequence
  Synthetic
ucuguuggaaucaggguug

SEQ ID NO: 349634 - RNA, 20 nt, Artificial Sequence
  Synthetic
aucuguuggaaucaggguug

SEQ ID NO: 349635 - RNA, 21 nt, Artificial Sequence
  Synthetic
aaucuguuggaaucaggguug

SEQ ID NO: 349636 - RNA, 22 nt, Artificial Sequence
  Synthetic
caaucuguuggaaucaggguug

SEQ ID NO: 349637 - RNA, 23 nt, Artificial Sequence
  Synthetic
gcaaucuguuggaaucaggguug

SEQ ID NO: 349638 - RNA, 24 nt, Artificial Sequence
  Synthetic
ggcaaucuguuggaaucaggguug

SEQ ID NO: 349639 - RNA, 18 nt, Artificial Sequence
  Synthetic
cccuacccuagaggguug

SEQ ID NO: 349640 - RNA, 19 nt, Artificial Sequence
  Synthetic
ccccuacccuagaggguug

SEQ ID NO: 349641 - RNA, 20 nt, Artificial Sequence
  Synthetic
gccccuacccuagaggguug

SEQ ID NO: 349642 - RNA, 21 nt, Artificial Sequence
  Synthetic
agccccuacccuagaggguug

SEQ ID NO: 349643 - RNA, 22 nt, Artificial Sequence
  Synthetic
uagccccuacccuagaggguug

SEQ ID NO: 349644 - RNA, 23 nt, Artificial Sequence
  Synthetic
guagccccuacccuagaggguug

SEQ ID NO: 349645 - RNA, 24 nt, Artificial Sequence
  Synthetic
aguagccccuacccuagaggguug

SEQ ID NO: 349646 - RNA, 18 nt, Artificial Sequence
  Synthetic
uggagaaacugaggguug

SEQ ID NO: 349647 - RNA, 19 nt, Artificial Sequence
  Synthetic
auggagaaacugaggguug

SEQ ID NO: 349648 - RNA, 20 nt, Artificial Sequence
  Synthetic
gauggagaaacugaggguug

SEQ ID NO: 349649 - RNA, 21 nt, Artificial Sequence
  Synthetic
agauggagaaacugaggguug

SEQ ID NO: 349650 - RNA, 22 nt, Artificial Sequence
  Synthetic
aagauggagaaacugaggguug

SEQ ID NO: 349651 - RNA, 23 nt, Artificial Sequence
  Synthetic
caagauggagaaacugaggguug

SEQ ID NO: 349652 - RNA, 24 nt, Artificial Sequence
  Synthetic
ccaagauggagaaacugaggguug

SEQ ID NO: 349653 - RNA, 18 nt, Artificial Sequence
  Synthetic
guuugaagcugaggguug

SEQ ID NO: 349654 - RNA, 19 nt, Artificial Sequence
  Synthetic
aguuugaagcugaggguug

SEQ ID NO: 349655 - RNA, 20 nt, Artificial Sequence
  Synthetic
caguuugaagcugaggguug

SEQ ID NO: 349656 - RNA, 21 nt, Artificial Sequence
  Synthetic
acaguuugaagcugaggguug

SEQ ID NO: 349657 - RNA, 22 nt, Artificial Sequence
  Synthetic
aacaguuugaagcugaggguug

SEQ ID NO: 349658 - RNA, 23 nt, Artificial Sequence
  Synthetic
aaacaguuugaagcugaggguug

SEQ ID NO: 349659 - RNA, 24 nt, Artificial Sequence
  Synthetic
uaaacaguuugaagcugaggguug

SEQ ID NO: 349660 - RNA, 18 nt, Artificial Sequence
  Synthetic
uugggaaguugaggguug

SEQ ID NO: 349661 - RNA, 19 nt, Artificial Sequence
  Synthetic
cuugggaaguugaggguug

SEQ ID NO: 349662 - RNA, 20 nt, Artificial Sequence
  Synthetic
acuugggaaguugaggguug

SEQ ID NO: 349663 - RNA, 21 nt, Artificial Sequence
  Synthetic
uacuugggaaguugaggguug

SEQ ID NO: 349664 - RNA, 22 nt, Artificial Sequence
  Synthetic
uuacuugggaaguugaggguug

SEQ ID NO: 349665 - RNA, 23 nt, Artificial Sequence
  Synthetic
auuacuugggaaguugaggguug

SEQ ID NO: 349666 - RNA, 24 nt, Artificial Sequence
  Synthetic
uauuacuugggaaguugaggguug

SEQ ID NO: 349667 - RNA, 18 nt, Artificial Sequence
  Synthetic
aacauaugaaugggguug

SEQ ID NO: 349668 - RNA, 19 nt, Artificial Sequence
  Synthetic
caacauaugaaugggguug

SEQ ID NO: 349669 - RNA, 20 nt, Artificial Sequence
  Synthetic
ucaacauaugaaugggguug

SEQ ID NO: 349670 - RNA, 21 nt, Artificial Sequence
  Synthetic
uucaacauaugaaugggguug

SEQ ID NO: 349671 - RNA, 22 nt, Artificial Sequence
  Synthetic
cuucaacauaugaaugggguug

SEQ ID NO: 349672 - RNA, 23 nt, Artificial Sequence
  Synthetic
acuucaacauaugaaugggguug

SEQ ID NO: 349673 - RNA, 24 nt, Artificial Sequence
  Synthetic
aacuucaacauaugaaugggguug

SEQ ID NO: 349674 - RNA, 18 nt, Artificial Sequence
  Synthetic
aaaaaguacaugggguug

SEQ ID NO: 349675 - RNA, 19 nt, Artificial Sequence
  Synthetic
caaaaaguacaugggguug

SEQ ID NO: 349676 - RNA, 20 nt, Artificial Sequence
  Synthetic
ucaaaaaguacaugggguug

SEQ ID NO: 349677 - RNA, 21 nt, Artificial Sequence
  Synthetic
uucaaaaaguacaugggguug

SEQ ID NO: 349678 - RNA, 22 nt, Artificial Sequence
  Synthetic
uuucaaaaaguacaugggguug

SEQ ID NO: 349679 - RNA, 23 nt, Artificial Sequence
  Synthetic
auuucaaaaaguacaugggguug

SEQ ID NO: 349680 - RNA, 24 nt, Artificial Sequence
  Synthetic
uauuucaaaaaguacaugggguug

SEQ ID NO: 349681 - RNA, 18 nt, Artificial Sequence
  Synthetic
auguugaaagugggguug

SEQ ID NO: 349682 - RNA, 19 nt, Artificial Sequence
  Synthetic
aauguugaaagugggguug

SEQ ID NO: 349683 - RNA, 20 nt, Artificial Sequence
  Synthetic
caauguugaaagugggguug

SEQ ID NO: 349684 - RNA, 21 nt, Artificial Sequence
  Synthetic
ccaauguugaaagugggguug

SEQ ID NO: 349685 - RNA, 22 nt, Artificial Sequence
  Synthetic
cccaauguugaaagugggguug

SEQ ID NO: 349686 - RNA, 23 nt, Artificial Sequence
  Synthetic
gcccaauguugaaagugggguug

SEQ ID NO: 349687 - RNA, 24 nt, Artificial Sequence
  Synthetic
ugcccaauguugaaagugggguug

SEQ ID NO: 349688 - RNA, 18 nt, Artificial Sequence
  Synthetic
cacacaguggugggguug

SEQ ID NO: 349689 - RNA, 19 nt, Artificial Sequence
  Synthetic
gcacacaguggugggguug

SEQ ID NO: 349690 - RNA, 20 nt, Artificial Sequence
  Synthetic
cgcacacaguggugggguug

SEQ ID NO: 349691 - RNA, 21 nt, Artificial Sequence
  Synthetic
ccgcacacaguggugggguug

SEQ ID NO: 349692 - RNA, 22 nt, Artificial Sequence
  Synthetic
gccgcacacaguggugggguug

SEQ ID NO: 349693 - RNA, 23 nt, Artificial Sequence
  Synthetic
ugccgcacacaguggugggguug

SEQ ID NO: 349694 - RNA, 24 nt, Artificial Sequence
  Synthetic
augccgcacacaguggugggguug

SEQ ID NO: 349695 - RNA, 18 nt, Artificial Sequence
  Synthetic
cuucuggcaaguggguug

SEQ ID NO: 349696 - RNA, 19 nt, Artificial Sequence
  Synthetic
gcuucuggcaaguggguug

SEQ ID NO: 349697 - RNA, 20 nt, Artificial Sequence
  Synthetic
ugcuucuggcaaguggguug

SEQ ID NO: 349698 - RNA, 21 nt, Artificial Sequence
  Synthetic
augcuucuggcaaguggguug

SEQ ID NO: 349699 - RNA, 22 nt, Artificial Sequence
  Synthetic
aaugcuucuggcaaguggguug

SEQ ID NO: 349700 - RNA, 23 nt, Artificial Sequence
  Synthetic
caaugcuucuggcaaguggguug

SEQ ID NO: 349701 - RNA, 24 nt, Artificial Sequence
  Synthetic
ccaaugcuucuggcaaguggguug

SEQ ID NO: 349702 - RNA, 18 nt, Artificial Sequence
  Synthetic
cuucuauguucaugguug

SEQ ID NO: 349703 - RNA, 19 nt, Artificial Sequence
  Synthetic
ucuucuauguucaugguug

SEQ ID NO: 349704 - RNA, 20 nt, Artificial Sequence
  Synthetic
uucuucuauguucaugguug

SEQ ID NO: 349705 - RNA, 21 nt, Artificial Sequence
  Synthetic
auucuucuauguucaugguug

SEQ ID NO: 349706 - RNA, 22 nt, Artificial Sequence
  Synthetic
cauucuucuauguucaugguug

SEQ ID NO: 349707 - RNA, 23 nt, Artificial Sequence
  Synthetic
ucauucuucuauguucaugguug

SEQ ID NO: 349708 - RNA, 24 nt, Artificial Sequence
  Synthetic
aucauucuucuauguucaugguug

SEQ ID NO: 349709 - RNA, 18 nt, Artificial Sequence
  Synthetic
acauuucuuuccugguug

SEQ ID NO: 349710 - RNA, 19 nt, Artificial Sequence
  Synthetic
aacauuucuuuccugguug

SEQ ID NO: 349711 - RNA, 20 nt, Artificial Sequence
  Synthetic
aaacauuucuuuccugguug

SEQ ID NO: 349712 - RNA, 21 nt, Artificial Sequence
  Synthetic
gaaacauuucuuuccugguug

SEQ ID NO: 349713 - RNA, 22 nt, Artificial Sequence
  Synthetic
ugaaacauuucuuuccugguug

SEQ ID NO: 349714 - RNA, 23 nt, Artificial Sequence
  Synthetic
gugaaacauuucuuuccugguug

SEQ ID NO: 349715 - RNA, 24 nt, Artificial Sequence
  Synthetic
ugugaaacauuucuuuccugguug

SEQ ID NO: 349716 - RNA, 18 nt, Artificial Sequence
  Synthetic
gauagucacagcugguug

SEQ ID NO: 349717 - RNA, 19 nt, Artificial Sequence
  Synthetic
cgauagucacagcugguug

SEQ ID NO: 349718 - RNA, 20 nt, Artificial Sequence
  Synthetic
ccgauagucacagcugguug

SEQ ID NO: 349719 - RNA, 21 nt, Artificial Sequence
  Synthetic
accgauagucacagcugguug

SEQ ID NO: 349720 - RNA, 22 nt, Artificial Sequence
  Synthetic
caccgauagucacagcugguug

SEQ ID NO: 349721 - RNA, 23 nt, Artificial Sequence
  Synthetic
ucaccgauagucacagcugguug

SEQ ID NO: 349722 - RNA, 24 nt, Artificial Sequence
  Synthetic
uucaccgauagucacagcugguug

SEQ ID NO: 349723 - RNA, 18 nt, Artificial Sequence
  Synthetic
ucuuagcugaagugguug

SEQ ID NO: 349724 - RNA, 19 nt, Artificial Sequence
  Synthetic
gucuuagcugaagugguug

SEQ ID NO: 349725 - RNA, 20 nt, Artificial Sequence
  Synthetic
agucuuagcugaagugguug

SEQ ID NO: 349726 - RNA, 21 nt, Artificial Sequence
  Synthetic
gagucuuagcugaagugguug

SEQ ID NO: 349727 - RNA, 22 nt, Artificial Sequence
  Synthetic
agagucuuagcugaagugguug

SEQ ID NO: 349728 - RNA, 23 nt, Artificial Sequence
  Synthetic
aagagucuuagcugaagugguug

SEQ ID NO: 349729 - RNA, 24 nt, Artificial Sequence
  Synthetic
aaagagucuuagcugaagugguug

SEQ ID NO: 349730 - RNA, 18 nt, Artificial Sequence
  Synthetic
ucccagcaccauugguug

SEQ ID NO: 349731 - RNA, 19 nt, Artificial Sequence
  Synthetic
uucccagcaccauugguug

SEQ ID NO: 349732 - RNA, 20 nt, Artificial Sequence
  Synthetic
uuucccagcaccauugguug

SEQ ID NO: 349733 - RNA, 21 nt, Artificial Sequence
  Synthetic
uuuucccagcaccauugguug

SEQ ID NO: 349734 - RNA, 22 nt, Artificial Sequence
  Synthetic
guuuucccagcaccauugguug

SEQ ID NO: 349735 - RNA, 23 nt, Artificial Sequence
  Synthetic
aguuuucccagcaccauugguug

SEQ ID NO: 349736 - RNA, 24 nt, Artificial Sequence
  Synthetic
caguuuucccagcaccauugguug

SEQ ID NO: 349737 - RNA, 18 nt, Artificial Sequence
  Synthetic
acagcuggcuguugguug

SEQ ID NO: 349738 - RNA, 19 nt, Artificial Sequence
  Synthetic
gacagcuggcuguugguug

SEQ ID NO: 349739 - RNA, 20 nt, Artificial Sequence
  Synthetic
ugacagcuggcuguugguug

SEQ ID NO: 349740 - RNA, 21 nt, Artificial Sequence
  Synthetic
cugacagcuggcuguugguug

SEQ ID NO: 349741 - RNA, 22 nt, Artificial Sequence
  Synthetic
ucugacagcuggcuguugguug

SEQ ID NO: 349742 - RNA, 23 nt, Artificial Sequence
  Synthetic
aucugacagcuggcuguugguug

SEQ ID NO: 349743 - RNA, 24 nt, Artificial Sequence
  Synthetic
uaucugacagcuggcuguugguug

SEQ ID NO: 349744 - RNA, 18 nt, Artificial Sequence
  Synthetic
aagagauaagaaauguug

SEQ ID NO: 349745 - RNA, 19 nt, Artificial Sequence
  Synthetic
caagagauaagaaauguug

SEQ ID NO: 349746 - RNA, 20 nt, Artificial Sequence
  Synthetic
acaagagauaagaaauguug

SEQ ID NO: 349747 - RNA, 21 nt, Artificial Sequence
  Synthetic
aacaagagauaagaaauguug

SEQ ID NO: 349748 - RNA, 22 nt, Artificial Sequence
  Synthetic
aaacaagagauaagaaauguug

SEQ ID NO: 349749 - RNA, 23 nt, Artificial Sequence
  Synthetic
aaaacaagagauaagaaauguug

SEQ ID NO: 349750 - RNA, 24 nt, Artificial Sequence
  Synthetic
aaaaacaagagauaagaaauguug

SEQ ID NO: 349751 - RNA, 18 nt, Artificial Sequence
  Synthetic
ucauuggucgaaauguug

SEQ ID NO: 349752 - RNA, 19 nt, Artificial Sequence
  Synthetic
uucauuggucgaaauguug

SEQ ID NO: 349753 - RNA, 20 nt, Artificial Sequence
  Synthetic
uuucauuggucgaaauguug

SEQ ID NO: 349754 - RNA, 21 nt, Artificial Sequence
  Synthetic
auuucauuggucgaaauguug

SEQ ID NO: 349755 - RNA, 22 nt, Artificial Sequence
  Synthetic
uauuucauuggucgaaauguug

SEQ ID NO: 349756 - RNA, 23 nt, Artificial Sequence
  Synthetic
guauuucauuggucgaaauguug

SEQ ID NO: 349757 - RNA, 24 nt, Artificial Sequence
  Synthetic
gguauuucauuggucgaaauguug

SEQ ID NO: 349758 - RNA, 18 nt, Artificial Sequence
  Synthetic
ccuacuuagagaauguug

SEQ ID NO: 349759 - RNA, 19 nt, Artificial Sequence
  Synthetic
accuacuuagagaauguug

SEQ ID NO: 349760 - RNA, 20 nt, Artificial Sequence
  Synthetic
uaccuacuuagagaauguug

SEQ ID NO: 349761 - RNA, 21 nt, Artificial Sequence
  Synthetic
cuaccuacuuagagaauguug

SEQ ID NO: 349762 - RNA, 22 nt, Artificial Sequence
  Synthetic
ccuaccuacuuagagaauguug

SEQ ID NO: 349763 - RNA, 23 nt, Artificial Sequence
  Synthetic
cccuaccuacuuagagaauguug

SEQ ID NO: 349764 - RNA, 24 nt, Artificial Sequence
  Synthetic
gcccuaccuacuuagagaauguug

SEQ ID NO: 349765 - RNA, 18 nt, Artificial Sequence
  Synthetic
aguggcaggcccauguug

SEQ ID NO: 349766 - RNA, 19 nt, Artificial Sequence
  Synthetic
gaguggcaggcccauguug

SEQ ID NO: 349767 - RNA, 20 nt, Artificial Sequence
  Synthetic
agaguggcaggcccauguug

SEQ ID NO: 349768 - RNA, 21 nt, Artificial Sequence
  Synthetic
cagaguggcaggcccauguug

SEQ ID NO: 349769 - RNA, 22 nt, Artificial Sequence
  Synthetic
ccagaguggcaggcccauguug

SEQ ID NO: 349770 - RNA, 23 nt, Artificial Sequence
  Synthetic
accagaguggcaggcccauguug

SEQ ID NO: 349771 - RNA, 24 nt, Artificial Sequence
  Synthetic
gaccagaguggcaggcccauguug

SEQ ID NO: 349772 - RNA, 18 nt, Artificial Sequence
  Synthetic
guauccauucgcauguug

SEQ ID NO: 349773 - RNA, 19 nt, Artificial Sequence
  Synthetic
uguauccauucgcauguug

SEQ ID NO: 349774 - RNA, 20 nt, Artificial Sequence
  Synthetic
cuguauccauucgcauguug

SEQ ID NO: 349775 - RNA, 21 nt, Artificial Sequence
  Synthetic
ucuguauccauucgcauguug

SEQ ID NO: 349776 - RNA, 22 nt, Artificial Sequence
  Synthetic
uucuguauccauucgcauguug

SEQ ID NO: 349777 - RNA, 23 nt, Artificial Sequence
  Synthetic
uuucuguauccauucgcauguug

SEQ ID NO: 349778 - RNA, 24 nt, Artificial Sequence
  Synthetic
uuuucuguauccauucgcauguug

SEQ ID NO: 349779 - RNA, 18 nt, Artificial Sequence
  Synthetic
aauauucuuggcauguug

SEQ ID NO: 349780 - RNA, 19 nt, Artificial Sequence
  Synthetic
gaauauucuuggcauguug

SEQ ID NO: 349781 - RNA, 20 nt, Artificial Sequence
  Synthetic
ggaauauucuuggcauguug

SEQ ID NO: 349782 - RNA, 21 nt, Artificial Sequence
  Synthetic
aggaauauucuuggcauguug

SEQ ID NO: 349783 - RNA, 22 nt, Artificial Sequence
  Synthetic
caggaauauucuuggcauguug

SEQ ID NO: 349784 - RNA, 23 nt, Artificial Sequence
  Synthetic
gcaggaauauucuuggcauguug

SEQ ID NO: 349785 - RNA, 24 nt, Artificial Sequence
  Synthetic
agcaggaauauucuuggcauguug

SEQ ID NO: 349786 - RNA, 18 nt, Artificial Sequence
  Synthetic
auuuaaaaccagauguug

SEQ ID NO: 349787 - RNA, 19 nt, Artificial Sequence
  Synthetic
cauuuaaaaccagauguug

SEQ ID NO: 349788 - RNA, 20 nt, Artificial Sequence
  Synthetic
gcauuuaaaaccagauguug

SEQ ID NO: 349789 - RNA, 21 nt, Artificial Sequence
  Synthetic
agcauuuaaaaccagauguug

SEQ ID NO: 349790 - RNA, 22 nt, Artificial Sequence
  Synthetic
uagcauuuaaaaccagauguug

SEQ ID NO: 349791 - RNA, 23 nt, Artificial Sequence
  Synthetic
auagcauuuaaaaccagauguug

SEQ ID NO: 349792 - RNA, 24 nt, Artificial Sequence
  Synthetic
aauagcauuuaaaaccagauguug

SEQ ID NO: 349793 - RNA, 18 nt, Artificial Sequence
  Synthetic
ucccuaagagagauguug

SEQ ID NO: 349794 - RNA, 19 nt, Artificial Sequence
  Synthetic
cucccuaagagagauguug

SEQ ID NO: 349795 - RNA, 20 nt, Artificial Sequence
  Synthetic
ccucccuaagagagauguug

SEQ ID NO: 349796 - RNA, 21 nt, Artificial Sequence
  Synthetic
uccucccuaagagagauguug

SEQ ID NO: 349797 - RNA, 22 nt, Artificial Sequence
  Synthetic
uuccucccuaagagagauguug

SEQ ID NO: 349798 - RNA, 23 nt, Artificial Sequence
  Synthetic
auuccucccuaagagagauguug

SEQ ID NO: 349799 - RNA, 24 nt, Artificial Sequence
  Synthetic
cauuccucccuaagagagauguug

SEQ ID NO: 349800 - RNA, 18 nt, Artificial Sequence
  Synthetic
aaaacacaauagauguug

SEQ ID NO: 349801 - RNA, 19 nt, Artificial Sequence
  Synthetic
caaaacacaauagauguug

SEQ ID NO: 349802 - RNA, 20 nt, Artificial Sequence
  Synthetic
ucaaaacacaauagauguug

SEQ ID NO: 349803 - RNA, 21 nt, Artificial Sequence
  Synthetic
cucaaaacacaauagauguug

SEQ ID NO: 349804 - RNA, 22 nt, Artificial Sequence
  Synthetic
acucaaaacacaauagauguug

SEQ ID NO: 349805 - RNA, 23 nt, Artificial Sequence
  Synthetic
aacucaaaacacaauagauguug

SEQ ID NO: 349806 - RNA, 24 nt, Artificial Sequence
  Synthetic
aaacucaaaacacaauagauguug

SEQ ID NO: 349807 - RNA, 18 nt, Artificial Sequence
  Synthetic
caauacaguaugauguug

SEQ ID NO: 349808 - RNA, 19 nt, Artificial Sequence
  Synthetic
ucaauacaguaugauguug

SEQ ID NO: 349809 - RNA, 20 nt, Artificial Sequence
  Synthetic
aucaauacaguaugauguug

SEQ ID NO: 349810 - RNA, 21 nt, Artificial Sequence
  Synthetic
uaucaauacaguaugauguug

SEQ ID NO: 349811 - RNA, 22 nt, Artificial Sequence
  Synthetic
cuaucaauacaguaugauguug

SEQ ID NO: 349812 - RNA, 23 nt, Artificial Sequence
  Synthetic
gcuaucaauacaguaugauguug

SEQ ID NO: 349813 - RNA, 24 nt, Artificial Sequence
  Synthetic
ggcuaucaauacaguaugauguug

SEQ ID NO: 349814 - RNA, 18 nt, Artificial Sequence
  Synthetic
agauuuaauuugauguug

SEQ ID NO: 349815 - RNA, 19 nt, Artificial Sequence
  Synthetic
aagauuuaauuugauguug

SEQ ID NO: 349816 - RNA, 20 nt, Artificial Sequence
  Synthetic
aaagauuuaauuugauguug

SEQ ID NO: 349817 - RNA, 21 nt, Artificial Sequence
  Synthetic
aaaagauuuaauuugauguug

SEQ ID NO: 349818 - RNA, 22 nt, Artificial Sequence
  Synthetic
gaaaagauuuaauuugauguug

SEQ ID NO: 349819 - RNA, 23 nt, Artificial Sequence
  Synthetic
ugaaaagauuuaauuugauguug

SEQ ID NO: 349820 - RNA, 24 nt, Artificial Sequence
  Synthetic
gugaaaagauuuaauuugauguug

SEQ ID NO: 349821 - RNA, 18 nt, Artificial Sequence
  Synthetic
cuaguugucaauauguug

SEQ ID NO: 349822 - RNA, 19 nt, Artificial Sequence
  Synthetic
acuaguugucaauauguug

SEQ ID NO: 349823 - RNA, 20 nt, Artificial Sequence
  Synthetic
gacuaguugucaauauguug

SEQ ID NO: 349824 - RNA, 21 nt, Artificial Sequence
  Synthetic
ugacuaguugucaauauguug

SEQ ID NO: 349825 - RNA, 22 nt, Artificial Sequence
  Synthetic
augacuaguugucaauauguug

SEQ ID NO: 349826 - RNA, 23 nt, Artificial Sequence
  Synthetic
aaugacuaguugucaauauguug

SEQ ID NO: 349827 - RNA, 24 nt, Artificial Sequence
  Synthetic
aaaugacuaguugucaauauguug

SEQ ID NO: 349828 - RNA, 18 nt, Artificial Sequence
  Synthetic
ucguuaauucauauguug

SEQ ID NO: 349829 - RNA, 19 nt, Artificial Sequence
  Synthetic
cucguuaauucauauguug

SEQ ID NO: 349830 - RNA, 20 nt, Artificial Sequence
  Synthetic
ccucguuaauucauauguug

SEQ ID NO: 349831 - RNA, 21 nt, Artificial Sequence
  Synthetic
accucguuaauucauauguug

SEQ ID NO: 349832 - RNA, 22 nt, Artificial Sequence
  Synthetic
aaccucguuaauucauauguug

SEQ ID NO: 349833 - RNA, 23 nt, Artificial Sequence
  Synthetic
aaaccucguuaauucauauguug

SEQ ID NO: 349834 - RNA, 24 nt, Artificial Sequence
  Synthetic
aaaaccucguuaauucauauguug

SEQ ID NO: 349835 - RNA, 18 nt, Artificial Sequence
  Synthetic
cuguauccucguauguug

SEQ ID NO: 349836 - RNA, 19 nt, Artificial Sequence
  Synthetic
gcuguauccucguauguug

SEQ ID NO: 349837 - RNA, 20 nt, Artificial Sequence
  Synthetic
ugcuguauccucguauguug

SEQ ID NO: 349838 - RNA, 21 nt, Artificial Sequence
  Synthetic
uugcuguauccucguauguug

SEQ ID NO: 349839 - RNA, 22 nt, Artificial Sequence
  Synthetic
cuugcuguauccucguauguug

SEQ ID NO: 349840 - RNA, 23 nt, Artificial Sequence
  Synthetic
ucuugcuguauccucguauguug

SEQ ID NO: 349841 - RNA, 24 nt, Artificial Sequence
  Synthetic
uucuugcuguauccucguauguug

SEQ ID NO: 349842 - RNA, 18 nt, Artificial Sequence
  Synthetic
aacuagcuuuguauguug

SEQ ID NO: 349843 - RNA, 19 nt, Artificial Sequence
  Synthetic
gaacuagcuuuguauguug

SEQ ID NO: 349844 - RNA, 20 nt, Artificial Sequence
  Synthetic
ugaacuagcuuuguauguug

SEQ ID NO: 349845 - RNA, 21 nt, Artificial Sequence
  Synthetic
augaacuagcuuuguauguug

SEQ ID NO: 349846 - RNA, 22 nt, Artificial Sequence
  Synthetic
aaugaacuagcuuuguauguug

SEQ ID NO: 349847 - RNA, 23 nt, Artificial Sequence
  Synthetic
aaaugaacuagcuuuguauguug

SEQ ID NO: 349848 - RNA, 24 nt, Artificial Sequence
  Synthetic
aaaaugaacuagcuuuguauguug

SEQ ID NO: 349849 - RNA, 18 nt, Artificial Sequence
  Synthetic
cugaauauuuuuauguug

SEQ ID NO: 349850 - RNA, 19 nt, Artificial Sequence
  Synthetic
ucugaauauuuuuauguug

SEQ ID NO: 349851 - RNA, 20 nt, Artificial Sequence
  Synthetic
cucugaauauuuuuauguug

SEQ ID NO: 349852 - RNA, 21 nt, Artificial Sequence
  Synthetic
ccucugaauauuuuuauguug

SEQ ID NO: 349853 - RNA, 22 nt, Artificial Sequence
  Synthetic
gccucugaauauuuuuauguug

SEQ ID NO: 349854 - RNA, 23 nt, Artificial Sequence
  Synthetic
ugccucugaauauuuuuauguug

SEQ ID NO: 349855 - RNA, 24 nt, Artificial Sequence
  Synthetic
cugccucugaauauuuuuauguug

SEQ ID NO: 349856 - RNA, 18 nt, Artificial Sequence
  Synthetic
ucacaauaaaaacuguug

SEQ ID NO: 349857 - RNA, 19 nt, Artificial Sequence
  Synthetic
aucacaauaaaaacuguug

SEQ ID NO: 349858 - RNA, 20 nt, Artificial Sequence
  Synthetic
uaucacaauaaaaacuguug

SEQ ID NO: 349859 - RNA, 21 nt, Artificial Sequence
  Synthetic
cuaucacaauaaaaacuguug

SEQ ID NO: 349860 - RNA, 22 nt, Artificial Sequence
  Synthetic
gcuaucacaauaaaaacuguug

SEQ ID NO: 349861 - RNA, 23 nt, Artificial Sequence
  Synthetic
ggcuaucacaauaaaaacuguug

SEQ ID NO: 349862 - RNA, 24 nt, Artificial Sequence
  Synthetic
aggcuaucacaauaaaaacuguug

SEQ ID NO: 349863 - RNA, 18 nt, Artificial Sequence
  Synthetic
aguauuuuguaacuguug

SEQ ID NO: 349864 - RNA, 19 nt, Artificial Sequence
  Synthetic
aaguauuuuguaacuguug

SEQ ID NO: 349865 - RNA, 20 nt, Artificial Sequence
  Synthetic
caaguauuuuguaacuguug

SEQ ID NO: 349866 - RNA, 21 nt, Artificial Sequence
  Synthetic
acaaguauuuuguaacuguug

SEQ ID NO: 349867 - RNA, 22 nt, Artificial Sequence
  Synthetic
gacaaguauuuuguaacuguug

SEQ ID NO: 349868 - RNA, 23 nt, Artificial Sequence
  Synthetic
agacaaguauuuuguaacuguug

SEQ ID NO: 349869 - RNA, 24 nt, Artificial Sequence
  Synthetic
gagacaaguauuuuguaacuguug

SEQ ID NO: 349870 - RNA, 18 nt, Artificial Sequence
  Synthetic
uuacaugcaacacuguug

SEQ ID NO: 349871 - RNA, 19 nt, Artificial Sequence
  Synthetic
cuuacaugcaacacuguug

SEQ ID NO: 349872 - RNA, 20 nt, Artificial Sequence
  Synthetic
gcuuacaugcaacacuguug

SEQ ID NO: 349873 - RNA, 21 nt, Artificial Sequence
  Synthetic
ugcuuacaugcaacacuguug

SEQ ID NO: 349874 - RNA, 22 nt, Artificial Sequence
  Synthetic
augcuuacaugcaacacuguug

SEQ ID NO: 349875 - RNA, 23 nt, Artificial Sequence
  Synthetic
caugcuuacaugcaacacuguug

SEQ ID NO: 349876 - RNA, 24 nt, Artificial Sequence
  Synthetic
ccaugcuuacaugcaacacuguug

SEQ ID NO: 349877 - RNA, 18 nt, Artificial Sequence
  Synthetic
gaugcuuauacacuguug

SEQ ID NO: 349878 - RNA, 19 nt, Artificial Sequence
  Synthetic
ggaugcuuauacacuguug

SEQ ID NO: 349879 - RNA, 20 nt, Artificial Sequence
  Synthetic
gggaugcuuauacacuguug

SEQ ID NO: 349880 - RNA, 21 nt, Artificial Sequence
  Synthetic
ggggaugcuuauacacuguug

SEQ ID NO: 349881 - RNA, 22 nt, Artificial Sequence
  Synthetic
aggggaugcuuauacacuguug

SEQ ID NO: 349882 - RNA, 23 nt, Artificial Sequence
  Synthetic
aaggggaugcuuauacacuguug

SEQ ID NO: 349883 - RNA, 24 nt, Artificial Sequence
  Synthetic
caaggggaugcuuauacacuguug

SEQ ID NO: 349884 - RNA, 18 nt, Artificial Sequence
  Synthetic
aacacuucuacacuguug

SEQ ID NO: 349885 - RNA, 19 nt, Artificial Sequence
  Synthetic
gaacacuucuacacuguug

SEQ ID NO: 349886 - RNA, 20 nt, Artificial Sequence
  Synthetic
ggaacacuucuacacuguug

SEQ ID NO: 349887 - RNA, 21 nt, Artificial Sequence
  Synthetic
aggaacacuucuacacuguug

SEQ ID NO: 349888 - RNA, 22 nt, Artificial Sequence
  Synthetic
uaggaacacuucuacacuguug

SEQ ID NO: 349889 - RNA, 23 nt, Artificial Sequence
  Synthetic
auaggaacacuucuacacuguug

SEQ ID NO: 349890 - RNA, 24 nt, Artificial Sequence
  Synthetic
aauaggaacacuucuacacuguug

SEQ ID NO: 349891 - RNA, 18 nt, Artificial Sequence
  Synthetic
aacacucuuacacuguug

SEQ ID NO: 349892 - RNA, 19 nt, Artificial Sequence
  Synthetic
gaacacucuuacacuguug

SEQ ID NO: 349893 - RNA, 20 nt, Artificial Sequence
  Synthetic
ggaacacucuuacacuguug

SEQ ID NO: 349894 - RNA, 21 nt, Artificial Sequence
  Synthetic
aggaacacucuuacacuguug

SEQ ID NO: 349895 - RNA, 22 nt, Artificial Sequence
  Synthetic
uaggaacacucuuacacuguug

SEQ ID NO: 349896 - RNA, 23 nt, Artificial Sequence
  Synthetic
auaggaacacucuuacacuguug

SEQ ID NO: 349897 - RNA, 24 nt, Artificial Sequence
  Synthetic
aauaggaacacucuuacacuguug

SEQ ID NO: 349898 - RNA, 18 nt, Artificial Sequence
  Synthetic
aacacuuuuacacuguug

SEQ ID NO: 349899 - RNA, 19 nt, Artificial Sequence
  Synthetic
gaacacuuuuacacuguug

SEQ ID NO: 349900 - RNA, 20 nt, Artificial Sequence
  Synthetic
ggaacacuuuuacacuguug

SEQ ID NO: 349901 - RNA, 21 nt, Artificial Sequence
  Synthetic
aggaacacuuuuacacuguug

SEQ ID NO: 349902 - RNA, 22 nt, Artificial Sequence
  Synthetic
caggaacacuuuuacacuguug

SEQ ID NO: 349903 - RNA, 23 nt, Artificial Sequence
  Synthetic
acaggaacacuuuuacacuguug

SEQ ID NO: 349904 - RNA, 24 nt, Artificial Sequence
  Synthetic
aacaggaacacuuuuacacuguug

SEQ ID NO: 349905 - RNA, 22 nt, Artificial Sequence
  Synthetic
uaggaacacuuuuacacuguug

SEQ ID NO: 349906 - RNA, 23 nt, Artificial Sequence
  Synthetic
auaggaacacuuuuacacuguug

SEQ ID NO: 349907 - RNA, 24 nt, Artificial Sequence
  Synthetic
aauaggaacacuuuuacacuguug

SEQ ID NO: 349908 - RNA, 18 nt, Artificial Sequence
  Synthetic
aacgcuuuuacacuguug

SEQ ID NO: 349909 - RNA, 19 nt, Artificial Sequence
  Synthetic
gaacgcuuuuacacuguug

SEQ ID NO: 349910 - RNA, 20 nt, Artificial Sequence
  Synthetic
ggaacgcuuuuacacuguug

SEQ ID NO: 349911 - RNA, 21 nt, Artificial Sequence
  Synthetic
aggaacgcuuuuacacuguug

SEQ ID NO: 349912 - RNA, 22 nt, Artificial Sequence
  Synthetic
uaggaacgcuuuuacacuguug

SEQ ID NO: 349913 - RNA, 23 nt, Artificial Sequence
  Synthetic
auaggaacgcuuuuacacuguug

SEQ ID NO: 349914 - RNA, 24 nt, Artificial Sequence
  Synthetic
aauaggaacgcuuuuacacuguug

SEQ ID NO: 349915 - RNA, 18 nt, Artificial Sequence
  Synthetic
ugugcuuuuacacuguug

SEQ ID NO: 349916 - RNA, 19 nt, Artificial Sequence
  Synthetic
gugugcuuuuacacuguug

SEQ ID NO: 349917 - RNA, 20 nt, Artificial Sequence
  Synthetic
ggugugcuuuuacacuguug

SEQ ID NO: 349918 - RNA, 21 nt, Artificial Sequence
  Synthetic
aggugugcuuuuacacuguug

SEQ ID NO: 349919 - RNA, 22 nt, Artificial Sequence
  Synthetic
uaggugugcuuuuacacuguug

SEQ ID NO: 349920 - RNA, 23 nt, Artificial Sequence
  Synthetic
auaggugugcuuuuacacuguug

SEQ ID NO: 349921 - RNA, 24 nt, Artificial Sequence
  Synthetic
aauaggugugcuuuuacacuguug

SEQ ID NO: 349922 - RNA, 18 nt, Artificial Sequence
  Synthetic
cuguaacuagcacuguug

SEQ ID NO: 349923 - RNA, 19 nt, Artificial Sequence
  Synthetic
ucuguaacuagcacuguug

SEQ ID NO: 349924 - RNA, 20 nt, Artificial Sequence
  Synthetic
gucuguaacuagcacuguug

SEQ ID NO: 349925 - RNA, 21 nt, Artificial Sequence
  Synthetic
agucuguaacuagcacuguug

SEQ ID NO: 349926 - RNA, 22 nt, Artificial Sequence
  Synthetic
gagucuguaacuagcacuguug

SEQ ID NO: 349927 - RNA, 23 nt, Artificial Sequence
  Synthetic
ugagucuguaacuagcacuguug

SEQ ID NO: 349928 - RNA, 24 nt, Artificial Sequence
  Synthetic
uugagucuguaacuagcacuguug

SEQ ID NO: 349929 - RNA, 18 nt, Artificial Sequence
  Synthetic
cuagcugauagacuguug

SEQ ID NO: 349930 - RNA, 19 nt, Artificial Sequence
  Synthetic
ucuagcugauagacuguug

SEQ ID NO: 349931 - RNA, 20 nt, Artificial Sequence
  Synthetic
uucuagcugauagacuguug

SEQ ID NO: 349932 - RNA, 21 nt, Artificial Sequence
  Synthetic
uuucuagcugauagacuguug

SEQ ID NO: 349933 - RNA, 22 nt, Artificial Sequence
  Synthetic
auuucuagcugauagacuguug

SEQ ID NO: 349934 - RNA, 23 nt, Artificial Sequence
  Synthetic
cauuucuagcugauagacuguug

SEQ ID NO: 349935 - RNA, 24 nt, Artificial Sequence
  Synthetic
acauuucuagcugauagacuguug

SEQ ID NO: 349936 - RNA, 18 nt, Artificial Sequence
  Synthetic
aaagaaagaugccuguug

SEQ ID NO: 349937 - RNA, 19 nt, Artificial Sequence
  Synthetic
uaaagaaagaugccuguug

SEQ ID NO: 349938 - RNA, 20 nt, Artificial Sequence
  Synthetic
uuaaagaaagaugccuguug

SEQ ID NO: 349939 - RNA, 21 nt, Artificial Sequence
  Synthetic
cuuaaagaaagaugccuguug

SEQ ID NO: 349940 - RNA, 22 nt, Artificial Sequence
  Synthetic
ucuuaaagaaagaugccuguug

SEQ ID NO: 349941 - RNA, 23 nt, Artificial Sequence
  Synthetic
cucuuaaagaaagaugccuguug

SEQ ID NO: 349942 - RNA, 24 nt, Artificial Sequence
  Synthetic
ucucuuaaagaaagaugccuguug

SEQ ID NO: 349943 - RNA, 18 nt, Artificial Sequence
  Synthetic
uuguaucuuauccuguug

SEQ ID NO: 349944 - RNA, 19 nt, Artificial Sequence
  Synthetic
auuguaucuuauccuguug

SEQ ID NO: 349945 - RNA, 20 nt, Artificial Sequence
  Synthetic
cauuguaucuuauccuguug

SEQ ID NO: 349946 - RNA, 21 nt, Artificial Sequence
  Synthetic
ccauuguaucuuauccuguug

SEQ ID NO: 349947 - RNA, 22 nt, Artificial Sequence
  Synthetic
accauuguaucuuauccuguug

SEQ ID NO: 349948 - RNA, 23 nt, Artificial Sequence
  Synthetic
aaccauuguaucuuauccuguug

SEQ ID NO: 349949 - RNA, 24 nt, Artificial Sequence
  Synthetic
uaaccauuguaucuuauccuguug

SEQ ID NO: 349950 - RNA, 18 nt, Artificial Sequence
  Synthetic
gacacugcauagcuguug

SEQ ID NO: 349951 - RNA, 19 nt, Artificial Sequence
  Synthetic
ugacacugcauagcuguug

SEQ ID NO: 349952 - RNA, 20 nt, Artificial Sequence
  Synthetic
uugacacugcauagcuguug

SEQ ID NO: 349953 - RNA, 21 nt, Artificial Sequence
  Synthetic
cuugacacugcauagcuguug

SEQ ID NO: 349954 - RNA, 22 nt, Artificial Sequence
  Synthetic
ucuugacacugcauagcuguug

SEQ ID NO: 349955 - RNA, 23 nt, Artificial Sequence
  Synthetic
aucuugacacugcauagcuguug

SEQ ID NO: 349956 - RNA, 24 nt, Artificial Sequence
  Synthetic
caucuugacacugcauagcuguug

SEQ ID NO: 349957 - RNA, 18 nt, Artificial Sequence
  Synthetic
gaacauuauacgcuguug

SEQ ID NO: 349958 - RNA, 19 nt, Artificial Sequence
  Synthetic
ggaacauuauacgcuguug

SEQ ID NO: 349959 - RNA, 20 nt, Artificial Sequence
  Synthetic
gggaacauuauacgcuguug

SEQ ID NO: 349960 - RNA, 21 nt, Artificial Sequence
  Synthetic
agggaacauuauacgcuguug

SEQ ID NO: 349961 - RNA, 22 nt, Artificial Sequence
  Synthetic
aagggaacauuauacgcuguug

SEQ ID NO: 349962 - RNA, 23 nt, Artificial Sequence
  Synthetic
aaagggaacauuauacgcuguug

SEQ ID NO: 349963 - RNA, 24 nt, Artificial Sequence
  Synthetic
aaaagggaacauuauacgcuguug

SEQ ID NO: 349964 - RNA, 18 nt, Artificial Sequence
  Synthetic
acugaacccuggcuguug

SEQ ID NO: 349965 - RNA, 19 nt, Artificial Sequence
  Synthetic
uacugaacccuggcuguug

SEQ ID NO: 349966 - RNA, 20 nt, Artificial Sequence
  Synthetic
auacugaacccuggcuguug

SEQ ID NO: 349967 - RNA, 21 nt, Artificial Sequence
  Synthetic
aauacugaacccuggcuguug

SEQ ID NO: 349968 - RNA, 22 nt, Artificial Sequence
  Synthetic
uaauacugaacccuggcuguug

SEQ ID NO: 349969 - RNA, 23 nt, Artificial Sequence
  Synthetic
auaauacugaacccuggcuguug

SEQ ID NO: 349970 - RNA, 24 nt, Artificial Sequence
  Synthetic
aauaauacugaacccuggcuguug

SEQ ID NO: 349971 - RNA, 18 nt, Artificial Sequence
  Synthetic
uauuucuuaaugcuguug

SEQ ID NO: 349972 - RNA, 19 nt, Artificial Sequence
  Synthetic
guauuucuuaaugcuguug

SEQ ID NO: 349973 - RNA, 20 nt, Artificial Sequence
  Synthetic
uguauuucuuaaugcuguug

SEQ ID NO: 349974 - RNA, 21 nt, Artificial Sequence
  Synthetic
guguauuucuuaaugcuguug

SEQ ID NO: 349975 - RNA, 22 nt, Artificial Sequence
  Synthetic
uguguauuucuuaaugcuguug

SEQ ID NO: 349976 - RNA, 23 nt, Artificial Sequence
  Synthetic
uuguguauuucuuaaugcuguug

SEQ ID NO: 349977 - RNA, 24 nt, Artificial Sequence
  Synthetic
auuguguauuucuuaaugcuguug

SEQ ID NO: 349978 - RNA, 18 nt, Artificial Sequence
  Synthetic
acaggaauccaucuguug

SEQ ID NO: 349979 - RNA, 19 nt, Artificial Sequence
  Synthetic
uacaggaauccaucuguug

SEQ ID NO: 349980 - RNA, 20 nt, Artificial Sequence
  Synthetic
auacaggaauccaucuguug

SEQ ID NO: 349981 - RNA, 21 nt, Artificial Sequence
  Synthetic
aauacaggaauccaucuguug

SEQ ID NO: 349982 - RNA, 22 nt, Artificial Sequence
  Synthetic
uaauacaggaauccaucuguug

SEQ ID NO: 349983 - RNA, 23 nt, Artificial Sequence
  Synthetic
cuaauacaggaauccaucuguug

SEQ ID NO: 349984 - RNA, 24 nt, Artificial Sequence
  Synthetic
ucuaauacaggaauccaucuguug

SEQ ID NO: 349985 - RNA, 18 nt, Artificial Sequence
  Synthetic
gcagugugcacucuguug

SEQ ID NO: 349986 - RNA, 19 nt, Artificial Sequence
  Synthetic
agcagugugcacucuguug

SEQ ID NO: 349987 - RNA, 20 nt, Artificial Sequence
  Synthetic
aagcagugugcacucuguug

SEQ ID NO: 349988 - RNA, 21 nt, Artificial Sequence
  Synthetic
caagcagugugcacucuguug

SEQ ID NO: 349989 - RNA, 22 nt, Artificial Sequence
  Synthetic
acaagcagugugcacucuguug

SEQ ID NO: 349990 - RNA, 23 nt, Artificial Sequence
  Synthetic
cacaagcagugugcacucuguug

SEQ ID NO: 349991 - RNA, 24 nt, Artificial Sequence
  Synthetic
acacaagcagugugcacucuguug

SEQ ID NO: 349992 - RNA, 18 nt, Artificial Sequence
  Synthetic
uucagcagguuucuguug

SEQ ID NO: 349993 - RNA, 19 nt, Artificial Sequence
  Synthetic
uuucagcagguuucuguug

SEQ ID NO: 349994 - RNA, 20 nt, Artificial Sequence
  Synthetic
auuucagcagguuucuguug

SEQ ID NO: 349995 - RNA, 21 nt, Artificial Sequence
  Synthetic
cauuucagcagguuucuguug

SEQ ID NO: 349996 - RNA, 22 nt, Artificial Sequence
  Synthetic
ucauuucagcagguuucuguug

SEQ ID NO: 349997 - RNA, 23 nt, Artificial Sequence
  Synthetic
uucauuucagcagguuucuguug

SEQ ID NO: 349998 - RNA, 24 nt, Artificial Sequence
  Synthetic
guucauuucagcagguuucuguug

SEQ ID NO: 349999 - RNA, 18 nt, Artificial Sequence
  Synthetic
cauugauuuucaguguug

SEQ ID NO: 350000 - RNA, 19 nt, Artificial Sequence
  Synthetic
acauugauuuucaguguug

SEQ ID NO: 350001 - RNA, 20 nt, Artificial Sequence
  Synthetic
cacauugauuuucaguguug

SEQ ID NO: 350002 - RNA, 21 nt, Artificial Sequence
  Synthetic
gcacauugauuuucaguguug

SEQ ID NO: 350003 - RNA, 22 nt, Artificial Sequence
  Synthetic
ggcacauugauuuucaguguug

SEQ ID NO: 350004 - RNA, 23 nt, Artificial Sequence
  Synthetic
gggcacauugauuuucaguguug

SEQ ID NO: 350005 - RNA, 24 nt, Artificial Sequence
  Synthetic
agggcacauugauuuucaguguug

SEQ ID NO: 350006 - RNA, 18 nt, Artificial Sequence
  Synthetic
gauacaaaaagaguguug

SEQ ID NO: 350007 - RNA, 19 nt, Artificial Sequence
  Synthetic
agauacaaaaagaguguug

SEQ ID NO: 350008 - RNA, 20 nt, Artificial Sequence
  Synthetic
aagauacaaaaagaguguug

SEQ ID NO: 350009 - RNA, 21 nt, Artificial Sequence
  Synthetic
aaagauacaaaaagaguguug

SEQ ID NO: 350010 - RNA, 22 nt, Artificial Sequence
  Synthetic
gaaagauacaaaaagaguguug

SEQ ID NO: 350011 - RNA, 23 nt, Artificial Sequence
  Synthetic
ugaaagauacaaaaagaguguug

SEQ ID NO: 350012 - RNA, 24 nt, Artificial Sequence
  Synthetic
augaaagauacaaaaagaguguug

SEQ ID NO: 350013 - RNA, 18 nt, Artificial Sequence
  Synthetic
uuuugagugagaguguug

SEQ ID NO: 350014 - RNA, 19 nt, Artificial Sequence
  Synthetic
uuuuugagugagaguguug

SEQ ID NO: 350015 - RNA, 20 nt, Artificial Sequence
  Synthetic
uuuuuugagugagaguguug

SEQ ID NO: 350016 - RNA, 21 nt, Artificial Sequence
  Synthetic
uuuuuuugagugagaguguug

SEQ ID NO: 350017 - RNA, 22 nt, Artificial Sequence
  Synthetic
uuuuuuuugagugagaguguug

SEQ ID NO: 350018 - RNA, 23 nt, Artificial Sequence
  Synthetic
uuuuuuuuugagugagaguguug

SEQ ID NO: 350019 - RNA, 24 nt, Artificial Sequence
  Synthetic
auuuuuuuuugagugagaguguug

SEQ ID NO: 350020 - RNA, 18 nt, Artificial Sequence
  Synthetic
aacagguuuugaguguug

SEQ ID NO: 350021 - RNA, 19 nt, Artificial Sequence
  Synthetic
gaacagguuuugaguguug

SEQ ID NO: 350022 - RNA, 20 nt, Artificial Sequence
  Synthetic
agaacagguuuugaguguug

SEQ ID NO: 350023 - RNA, 21 nt, Artificial Sequence
  Synthetic
aagaacagguuuugaguguug

SEQ ID NO: 350024 - RNA, 22 nt, Artificial Sequence
  Synthetic
uaagaacagguuuugaguguug

SEQ ID NO: 350025 - RNA, 23 nt, Artificial Sequence
  Synthetic
guaagaacagguuuugaguguug

SEQ ID NO: 350026 - RNA, 24 nt, Artificial Sequence
  Synthetic
gguaagaacagguuuugaguguug

SEQ ID NO: 350027 - RNA, 18 nt, Artificial Sequence
  Synthetic
gucaagaaacugguguug

SEQ ID NO: 350028 - RNA, 19 nt, Artificial Sequence
  Synthetic
agucaagaaacugguguug

SEQ ID NO: 350029 - RNA, 20 nt, Artificial Sequence
  Synthetic
gagucaagaaacugguguug

SEQ ID NO: 350030 - RNA, 21 nt, Artificial Sequence
  Synthetic
ugagucaagaaacugguguug

SEQ ID NO: 350031 - RNA, 22 nt, Artificial Sequence
  Synthetic
uugagucaagaaacugguguug

SEQ ID NO: 350032 - RNA, 23 nt, Artificial Sequence
  Synthetic
auugagucaagaaacugguguug

SEQ ID NO: 350033 - RNA, 24 nt, Artificial Sequence
  Synthetic
aauugagucaagaaacugguguug

SEQ ID NO: 350034 - RNA, 18 nt, Artificial Sequence
  Synthetic
uguaauucccauguguug

SEQ ID NO: 350035 - RNA, 19 nt, Artificial Sequence
  Synthetic
cuguaauucccauguguug

SEQ ID NO: 350036 - RNA, 20 nt, Artificial Sequence
  Synthetic
ccuguaauucccauguguug

SEQ ID NO: 350037 - RNA, 21 nt, Artificial Sequence
  Synthetic
cccuguaauucccauguguug

SEQ ID NO: 350038 - RNA, 22 nt, Artificial Sequence
  Synthetic
ucccuguaauucccauguguug

SEQ ID NO: 350039 - RNA, 23 nt, Artificial Sequence
  Synthetic
aucccuguaauucccauguguug

SEQ ID NO: 350040 - RNA, 24 nt, Artificial Sequence
  Synthetic
aaucccuguaauucccauguguug

SEQ ID NO: 350041 - RNA, 18 nt, Artificial Sequence
  Synthetic
guguguguguguguguug

SEQ ID NO: 350042 - RNA, 19 nt, Artificial Sequence
  Synthetic
uguguguguguguguguug

SEQ ID NO: 350043 - RNA, 20 nt, Artificial Sequence
  Synthetic
guguguguguguguguguug

SEQ ID NO: 350044 - RNA, 21 nt, Artificial Sequence
  Synthetic
uguguguguguguguguguug

SEQ ID NO: 350045 - RNA, 22 nt, Artificial Sequence
  Synthetic
guguguguguguguguguguug

SEQ ID NO: 350046 - RNA, 23 nt, Artificial Sequence
  Synthetic
uguguguguguguguguguguug

SEQ ID NO: 350047 - RNA, 24 nt, Artificial Sequence
  Synthetic
guguguguguguguguguguguug

SEQ ID NO: 350048 - RNA, 18 nt, Artificial Sequence
  Synthetic
acuauuguguguguguug

SEQ ID NO: 350049 - RNA, 19 nt, Artificial Sequence
  Synthetic
uacuauuguguguguguug

SEQ ID NO: 350050 - RNA, 20 nt, Artificial Sequence
  Synthetic
uuacuauuguguguguguug

SEQ ID NO: 350051 - RNA, 21 nt, Artificial Sequence
  Synthetic
guuacuauuguguguguguug

SEQ ID NO: 350052 - RNA, 22 nt, Artificial Sequence
  Synthetic
aguuacuauuguguguguguug

SEQ ID NO: 350053 - RNA, 23 nt, Artificial Sequence
  Synthetic
uaguuacuauuguguguguguug

SEQ ID NO: 350054 - RNA, 24 nt, Artificial Sequence
  Synthetic
auaguuacuauuguguguguguug

SEQ ID NO: 350055 - RNA, 18 nt, Artificial Sequence
  Synthetic
cagcagccaucauuguug

SEQ ID NO: 350056 - RNA, 19 nt, Artificial Sequence
  Synthetic
ucagcagccaucauuguug

SEQ ID NO: 350057 - RNA, 20 nt, Artificial Sequence
  Synthetic
uucagcagccaucauuguug

SEQ ID NO: 350058 - RNA, 21 nt, Artificial Sequence
  Synthetic
uuucagcagccaucauuguug

SEQ ID NO: 350059 - RNA, 22 nt, Artificial Sequence
  Synthetic
auuucagcagccaucauuguug

SEQ ID NO: 350060 - RNA, 23 nt, Artificial Sequence
  Synthetic
gauuucagcagccaucauuguug

SEQ ID NO: 350061 - RNA, 24 nt, Artificial Sequence
  Synthetic
agauuucagcagccaucauuguug

SEQ ID NO: 350062 - RNA, 18 nt, Artificial Sequence
  Synthetic
cauaauuccuacuuguug

SEQ ID NO: 350063 - RNA, 19 nt, Artificial Sequence
  Synthetic
ccauaauuccuacuuguug

SEQ ID NO: 350064 - RNA, 20 nt, Artificial Sequence
  Synthetic
cccauaauuccuacuuguug

SEQ ID NO: 350065 - RNA, 21 nt, Artificial Sequence
  Synthetic
ucccauaauuccuacuuguug

SEQ ID NO: 350066 - RNA, 22 nt, Artificial Sequence
  Synthetic
cucccauaauuccuacuuguug

SEQ ID NO: 350067 - RNA, 23 nt, Artificial Sequence
  Synthetic
acucccauaauuccuacuuguug

SEQ ID NO: 350068 - RNA, 24 nt, Artificial Sequence
  Synthetic
uacucccauaauuccuacuuguug

SEQ ID NO: 350069 - RNA, 18 nt, Artificial Sequence
  Synthetic
aauauggccuccuuguug

SEQ ID NO: 350070 - RNA, 19 nt, Artificial Sequence
  Synthetic
aaauauggccuccuuguug

SEQ ID NO: 350071 - RNA, 20 nt, Artificial Sequence
  Synthetic
uaaauauggccuccuuguug

SEQ ID NO: 350072 - RNA, 21 nt, Artificial Sequence
  Synthetic
cuaaauauggccuccuuguug

SEQ ID NO: 350073 - RNA, 22 nt, Artificial Sequence
  Synthetic
ucuaaauauggccuccuuguug

SEQ ID NO: 350074 - RNA, 23 nt, Artificial Sequence
  Synthetic
aucuaaauauggccuccuuguug

SEQ ID NO: 350075 - RNA, 24 nt, Artificial Sequence
  Synthetic
aaucuaaauauggccuccuuguug

SEQ ID NO: 350076 - RNA, 18 nt, Artificial Sequence
  Synthetic
cauuuauuuuccuuguug

SEQ ID NO: 350077 - RNA, 19 nt, Artificial Sequence
  Synthetic
gcauuuauuuuccuuguug

SEQ ID NO: 350078 - RNA, 20 nt, Artificial Sequence
  Synthetic
ugcauuuauuuuccuuguug

SEQ ID NO: 350079 - RNA, 21 nt, Artificial Sequence
  Synthetic
cugcauuuauuuuccuuguug

SEQ ID NO: 350080 - RNA, 22 nt, Artificial Sequence
  Synthetic
ucugcauuuauuuuccuuguug

SEQ ID NO: 350081 - RNA, 23 nt, Artificial Sequence
  Synthetic
uucugcauuuauuuuccuuguug

SEQ ID NO: 350082 - RNA, 24 nt, Artificial Sequence
  Synthetic
auucugcauuuauuuuccuuguug

SEQ ID NO: 350083 - RNA, 18 nt, Artificial Sequence
  Synthetic
agcuagguagaguuguug

SEQ ID NO: 350084 - RNA, 19 nt, Artificial Sequence
  Synthetic
cagcuagguagaguuguug

SEQ ID NO: 350085 - RNA, 20 nt, Artificial Sequence
  Synthetic
ccagcuagguagaguuguug

SEQ ID NO: 350086 - RNA, 21 nt, Artificial Sequence
  Synthetic
cccagcuagguagaguuguug

SEQ ID NO: 350087 - RNA, 22 nt, Artificial Sequence
  Synthetic
acccagcuagguagaguuguug

SEQ ID NO: 350088 - RNA, 23 nt, Artificial Sequence
  Synthetic
uacccagcuagguagaguuguug

SEQ ID NO: 350089 - RNA, 24 nt, Artificial Sequence
  Synthetic
guacccagcuagguagaguuguug

SEQ ID NO: 350090 - RNA, 18 nt, Artificial Sequence
  Synthetic
uuuuaguaguaguuguug

SEQ ID NO: 350091 - RNA, 19 nt, Artificial Sequence
  Synthetic
auuuuaguaguaguuguug

SEQ ID NO: 350092 - RNA, 20 nt, Artificial Sequence
  Synthetic
gauuuuaguaguaguuguug

SEQ ID NO: 350093 - RNA, 21 nt, Artificial Sequence
  Synthetic
agauuuuaguaguaguuguug

SEQ ID NO: 350094 - RNA, 22 nt, Artificial Sequence
  Synthetic
cagauuuuaguaguaguuguug

SEQ ID NO: 350095 - RNA, 23 nt, Artificial Sequence
  Synthetic
ucagauuuuaguaguaguuguug

SEQ ID NO: 350096 - RNA, 24 nt, Artificial Sequence
  Synthetic
uucagauuuuaguaguaguuguug

SEQ ID NO: 350097 - RNA, 18 nt, Artificial Sequence
  Synthetic
gaccugaagccguuguug

SEQ ID NO: 350098 - RNA, 19 nt, Artificial Sequence
  Synthetic
agaccugaagccguuguug

SEQ ID NO: 350099 - RNA, 20 nt, Artificial Sequence
  Synthetic
uagaccugaagccguuguug

SEQ ID NO: 350100 - RNA, 21 nt, Artificial Sequence
  Synthetic
cuagaccugaagccguuguug

SEQ ID NO: 350101 - RNA, 22 nt, Artificial Sequence
  Synthetic
ccuagaccugaagccguuguug

SEQ ID NO: 350102 - RNA, 23 nt, Artificial Sequence
  Synthetic
uccuagaccugaagccguuguug

SEQ ID NO: 350103 - RNA, 24 nt, Artificial Sequence
  Synthetic
cuccuagaccugaagccguuguug

SEQ ID NO: 350104 - RNA, 18 nt, Artificial Sequence
  Synthetic
aaagcugcaggguuguug

SEQ ID NO: 350105 - RNA, 19 nt, Artificial Sequence
  Synthetic
aaaagcugcaggguuguug

SEQ ID NO: 350106 - RNA, 20 nt, Artificial Sequence
  Synthetic
gaaaagcugcaggguuguug

SEQ ID NO: 350107 - RNA, 21 nt, Artificial Sequence
  Synthetic
agaaaagcugcaggguuguug

SEQ ID NO: 350108 - RNA, 22 nt, Artificial Sequence
  Synthetic
cagaaaagcugcaggguuguug

SEQ ID NO: 350109 - RNA, 23 nt, Artificial Sequence
  Synthetic
ucagaaaagcugcaggguuguug

SEQ ID NO: 350110 - RNA, 24 nt, Artificial Sequence
  Synthetic
uucagaaaagcugcaggguuguug

SEQ ID NO: 350111 - RNA, 18 nt, Artificial Sequence
  Synthetic
agcagguuucuguuguug

SEQ ID NO: 350112 - RNA, 19 nt, Artificial Sequence
  Synthetic
cagcagguuucuguuguug

SEQ ID NO: 350113 - RNA, 20 nt, Artificial Sequence
  Synthetic
ucagcagguuucuguuguug

SEQ ID NO: 350114 - RNA, 21 nt, Artificial Sequence
  Synthetic
uucagcagguuucuguuguug

SEQ ID NO: 350115 - RNA, 22 nt, Artificial Sequence
  Synthetic
uuucagcagguuucuguuguug

SEQ ID NO: 350116 - RNA, 23 nt, Artificial Sequence
  Synthetic
auuucagcagguuucuguuguug

SEQ ID NO: 350117 - RNA, 24 nt, Artificial Sequence
  Synthetic
cauuucagcagguuucuguuguug

SEQ ID NO: 350118 - RNA, 18 nt, Artificial Sequence
  Synthetic
uuuccgcaccauuuguug

SEQ ID NO: 350119 - RNA, 19 nt, Artificial Sequence
  Synthetic
uuuuccgcaccauuuguug

SEQ ID NO: 350120 - RNA, 20 nt, Artificial Sequence
  Synthetic
uuuuuccgcaccauuuguug

SEQ ID NO: 350121 - RNA, 21 nt, Artificial Sequence
  Synthetic
guuuuuccgcaccauuuguug

SEQ ID NO: 350122 - RNA, 22 nt, Artificial Sequence
  Synthetic
aguuuuuccgcaccauuuguug

SEQ ID NO: 350123 - RNA, 23 nt, Artificial Sequence
  Synthetic
caguuuuuccgcaccauuuguug

SEQ ID NO: 350124 - RNA, 24 nt, Artificial Sequence
  Synthetic
ccaguuuuuccgcaccauuuguug

SEQ ID NO: 350125 - RNA, 18 nt, Artificial Sequence
  Synthetic
uuauccauucauuuguug

SEQ ID NO: 350126 - RNA, 19 nt, Artificial Sequence
  Synthetic
uuuauccauucauuuguug

SEQ ID NO: 350127 - RNA, 20 nt, Artificial Sequence
  Synthetic
cuuuauccauucauuuguug

SEQ ID NO: 350128 - RNA, 21 nt, Artificial Sequence
  Synthetic
ucuuuauccauucauuuguug

SEQ ID NO: 350129 - RNA, 22 nt, Artificial Sequence
  Synthetic
uucuuuauccauucauuuguug

SEQ ID NO: 350130 - RNA, 23 nt, Artificial Sequence
  Synthetic
uuucuuuauccauucauuuguug

SEQ ID NO: 350131 - RNA, 24 nt, Artificial Sequence
  Synthetic
uuuucuuuauccauucauuuguug

SEQ ID NO: 350132 - RNA, 18 nt, Artificial Sequence
  Synthetic
aauccaucaauuuuguug

SEQ ID NO: 350133 - RNA, 19 nt, Artificial Sequence
  Synthetic
aaauccaucaauuuuguug

SEQ ID NO: 350134 - RNA, 20 nt, Artificial Sequence
  Synthetic
aaaauccaucaauuuuguug

SEQ ID NO: 350135 - RNA, 21 nt, Artificial Sequence
  Synthetic
gaaaauccaucaauuuuguug

SEQ ID NO: 350136 - RNA, 22 nt, Artificial Sequence
  Synthetic
agaaaauccaucaauuuuguug

SEQ ID NO: 350137 - RNA, 23 nt, Artificial Sequence
  Synthetic
gagaaaauccaucaauuuuguug

SEQ ID NO: 350138 - RNA, 24 nt, Artificial Sequence
  Synthetic
agagaaaauccaucaauuuuguug

SEQ ID NO: 350139 - RNA, 18 nt, Artificial Sequence
  Synthetic
ggcaagaucauuuuguug

SEQ ID NO: 350140 - RNA, 19 nt, Artificial Sequence
  Synthetic
uggcaagaucauuuuguug

SEQ ID NO: 350141 - RNA, 20 nt, Artificial Sequence
  Synthetic
uuggcaagaucauuuuguug

SEQ ID NO: 350142 - RNA, 21 nt, Artificial Sequence
  Synthetic
auuggcaagaucauuuuguug

SEQ ID NO: 350143 - RNA, 22 nt, Artificial Sequence
  Synthetic
cauuggcaagaucauuuuguug

SEQ ID NO: 350144 - RNA, 23 nt, Artificial Sequence
  Synthetic
acauuggcaagaucauuuuguug

SEQ ID NO: 350145 - RNA, 24 nt, Artificial Sequence
  Synthetic
aacauuggcaagaucauuuuguug

SEQ ID NO: 350146 - RNA, 18 nt, Artificial Sequence
  Synthetic
acaaucccaguuuuguug

SEQ ID NO: 350147 - RNA, 19 nt, Artificial Sequence
  Synthetic
gacaaucccaguuuuguug

SEQ ID NO: 350148 - RNA, 20 nt, Artificial Sequence
  Synthetic
ugacaaucccaguuuuguug

SEQ ID NO: 350149 - RNA, 21 nt, Artificial Sequence
  Synthetic
gugacaaucccaguuuuguug

SEQ ID NO: 350150 - RNA, 22 nt, Artificial Sequence
  Synthetic
ggugacaaucccaguuuuguug

SEQ ID NO: 350151 - RNA, 23 nt, Artificial Sequence
  Synthetic
gggugacaaucccaguuuuguug

SEQ ID NO: 350152 - RNA, 24 nt, Artificial Sequence
  Synthetic
agggugacaaucccaguuuuguug

SEQ ID NO: 350153 - RNA, 18 nt, Artificial Sequence
  Synthetic
acccaaugggaaaauuug

SEQ ID NO: 350154 - RNA, 19 nt, Artificial Sequence
  Synthetic
cacccaaugggaaaauuug

SEQ ID NO: 350155 - RNA, 20 nt, Artificial Sequence
  Synthetic
acacccaaugggaaaauuug

SEQ ID NO: 350156 - RNA, 21 nt, Artificial Sequence
  Synthetic
cacacccaaugggaaaauuug

SEQ ID NO: 350157 - RNA, 22 nt, Artificial Sequence
  Synthetic
acacacccaaugggaaaauuug

SEQ ID NO: 350158 - RNA, 23 nt, Artificial Sequence
  Synthetic
cacacacccaaugggaaaauuug

SEQ ID NO: 350159 - RNA, 24 nt, Artificial Sequence
  Synthetic
ccacacacccaaugggaaaauuug

SEQ ID NO: 350160 - RNA, 18 nt, Artificial Sequence
  Synthetic
ugagaugcauaaaauuug

SEQ ID NO: 350161 - RNA, 19 nt, Artificial Sequence
  Synthetic
uugagaugcauaaaauuug

SEQ ID NO: 350162 - RNA, 20 nt, Artificial Sequence
  Synthetic
cuugagaugcauaaaauuug

SEQ ID NO: 350163 - RNA, 21 nt, Artificial Sequence
  Synthetic
gcuugagaugcauaaaauuug

SEQ ID NO: 350164 - RNA, 22 nt, Artificial Sequence
  Synthetic
ugcuugagaugcauaaaauuug

SEQ ID NO: 350165 - RNA, 23 nt, Artificial Sequence
  Synthetic
gugcuugagaugcauaaaauuug

SEQ ID NO: 350166 - RNA, 24 nt, Artificial Sequence
  Synthetic
agugcuugagaugcauaaaauuug

SEQ ID NO: 350167 - RNA, 18 nt, Artificial Sequence
  Synthetic
uggcuaauauaaaauuug

SEQ ID NO: 350168 - RNA, 19 nt, Artificial Sequence
  Synthetic
auggcuaauauaaaauuug

SEQ ID NO: 350169 - RNA, 20 nt, Artificial Sequence
  Synthetic
cauggcuaauauaaaauuug

SEQ ID NO: 350170 - RNA, 21 nt, Artificial Sequence
  Synthetic
ucauggcuaauauaaaauuug

SEQ ID NO: 350171 - RNA, 22 nt, Artificial Sequence
  Synthetic
uucauggcuaauauaaaauuug

SEQ ID NO: 350172 - RNA, 23 nt, Artificial Sequence
  Synthetic
uuucauggcuaauauaaaauuug

SEQ ID NO: 350173 - RNA, 24 nt, Artificial Sequence
  Synthetic
cuuucauggcuaauauaaaauuug

SEQ ID NO: 350174 - RNA, 18 nt, Artificial Sequence
  Synthetic
cuauuuucuucaaauuug

SEQ ID NO: 350175 - RNA, 19 nt, Artificial Sequence
  Synthetic
ucuauuuucuucaaauuug

SEQ ID NO: 350176 - RNA, 20 nt, Artificial Sequence
  Synthetic
uucuauuuucuucaaauuug

SEQ ID NO: 350177 - RNA, 21 nt, Artificial Sequence
  Synthetic
auucuauuuucuucaaauuug

SEQ ID NO: 350178 - RNA, 22 nt, Artificial Sequence
  Synthetic
uauucuauuuucuucaaauuug

SEQ ID NO: 350179 - RNA, 23 nt, Artificial Sequence
  Synthetic
auauucuauuuucuucaaauuug

SEQ ID NO: 350180 - RNA, 24 nt, Artificial Sequence
  Synthetic
gauauucuauuuucuucaaauuug

SEQ ID NO: 350181 - RNA, 18 nt, Artificial Sequence
  Synthetic
aaauagauaagaaauuug

SEQ ID NO: 350182 - RNA, 19 nt, Artificial Sequence
  Synthetic
gaaauagauaagaaauuug

SEQ ID NO: 350183 - RNA, 20 nt, Artificial Sequence
  Synthetic
ggaaauagauaagaaauuug

SEQ ID NO: 350184 - RNA, 21 nt, Artificial Sequence
  Synthetic
aggaaauagauaagaaauuug

SEQ ID NO: 350185 - RNA, 22 nt, Artificial Sequence
  Synthetic
aaggaaauagauaagaaauuug

SEQ ID NO: 350186 - RNA, 23 nt, Artificial Sequence
  Synthetic
uaaggaaauagauaagaaauuug

SEQ ID NO: 350187 - RNA, 24 nt, Artificial Sequence
  Synthetic
auaaggaaauagauaagaaauuug

SEQ ID NO: 350188 - RNA, 18 nt, Artificial Sequence
  Synthetic
uguacaauuagaaauuug

SEQ ID NO: 350189 - RNA, 19 nt, Artificial Sequence
  Synthetic
cuguacaauuagaaauuug

SEQ ID NO: 350190 - RNA, 20 nt, Artificial Sequence
  Synthetic
acuguacaauuagaaauuug

SEQ ID NO: 350191 - RNA, 21 nt, Artificial Sequence
  Synthetic
uacuguacaauuagaaauuug

SEQ ID NO: 350192 - RNA, 22 nt, Artificial Sequence
  Synthetic
guacuguacaauuagaaauuug

SEQ ID NO: 350193 - RNA, 23 nt, Artificial Sequence
  Synthetic
uguacuguacaauuagaaauuug

SEQ ID NO: 350194 - RNA, 24 nt, Artificial Sequence
  Synthetic
cuguacuguacaauuagaaauuug

SEQ ID NO: 350195 - RNA, 18 nt, Artificial Sequence
  Synthetic
uggcaacagggaaauuug

SEQ ID NO: 350196 - RNA, 19 nt, Artificial Sequence
  Synthetic
cuggcaacagggaaauuug

SEQ ID NO: 350197 - RNA, 20 nt, Artificial Sequence
  Synthetic
ucuggcaacagggaaauuug

SEQ ID NO: 350198 - RNA, 21 nt, Artificial Sequence
  Synthetic
uucuggcaacagggaaauuug

SEQ ID NO: 350199 - RNA, 22 nt, Artificial Sequence
  Synthetic
guucuggcaacagggaaauuug

SEQ ID NO: 350200 - RNA, 23 nt, Artificial Sequence
  Synthetic
uguucuggcaacagggaaauuug

SEQ ID NO: 350201 - RNA, 24 nt, Artificial Sequence
  Synthetic
cuguucuggcaacagggaaauuug

SEQ ID NO: 350202 - RNA, 18 nt, Artificial Sequence
  Synthetic
uccaacacaugaaauuug

SEQ ID NO: 350203 - RNA, 19 nt, Artificial Sequence
  Synthetic
uuccaacacaugaaauuug

SEQ ID NO: 350204 - RNA, 20 nt, Artificial Sequence
  Synthetic
uuuccaacacaugaaauuug

SEQ ID NO: 350205 - RNA, 21 nt, Artificial Sequence
  Synthetic
guuuccaacacaugaaauuug

SEQ ID NO: 350206 - RNA, 22 nt, Artificial Sequence
  Synthetic
aguuuccaacacaugaaauuug

SEQ ID NO: 350207 - RNA, 23 nt, Artificial Sequence
  Synthetic
aaguuuccaacacaugaaauuug

SEQ ID NO: 350208 - RNA, 24 nt, Artificial Sequence
  Synthetic
uaaguuuccaacacaugaaauuug

SEQ ID NO: 350209 - RNA, 18 nt, Artificial Sequence
  Synthetic
aaucacaucugaaauuug

SEQ ID NO: 350210 - RNA, 19 nt, Artificial Sequence
  Synthetic
uaaucacaucugaaauuug

SEQ ID NO: 350211 - RNA, 20 nt, Artificial Sequence
  Synthetic
uuaaucacaucugaaauuug

SEQ ID NO: 350212 - RNA, 21 nt, Artificial Sequence
  Synthetic
cuuaaucacaucugaaauuug

SEQ ID NO: 350213 - RNA, 22 nt, Artificial Sequence
  Synthetic
acuuaaucacaucugaaauuug

SEQ ID NO: 350214 - RNA, 23 nt, Artificial Sequence
  Synthetic
cacuuaaucacaucugaaauuug

SEQ ID NO: 350215 - RNA, 24 nt, Artificial Sequence
  Synthetic
acacuuaaucacaucugaaauuug

SEQ ID NO: 350216 - RNA, 18 nt, Artificial Sequence
  Synthetic
ucauaagugugaaauuug

SEQ ID NO: 350217 - RNA, 19 nt, Artificial Sequence
  Synthetic
cucauaagugugaaauuug

SEQ ID NO: 350218 - RNA, 20 nt, Artificial Sequence
  Synthetic
ucucauaagugugaaauuug

SEQ ID NO: 350219 - RNA, 21 nt, Artificial Sequence
  Synthetic
uucucauaagugugaaauuug

SEQ ID NO: 350220 - RNA, 22 nt, Artificial Sequence
  Synthetic
uuucucauaagugugaaauuug

SEQ ID NO: 350221 - RNA, 23 nt, Artificial Sequence
  Synthetic
auuucucauaagugugaaauuug

SEQ ID NO: 350222 - RNA, 24 nt, Artificial Sequence
  Synthetic
aauuucucauaagugugaaauuug

SEQ ID NO: 350223 - RNA, 18 nt, Artificial Sequence
  Synthetic
aaguagaagauaaauuug

SEQ ID NO: 350224 - RNA, 19 nt, Artificial Sequence
  Synthetic
aaaguagaagauaaauuug

SEQ ID NO: 350225 - RNA, 20 nt, Artificial Sequence
  Synthetic
aaaaguagaagauaaauuug

SEQ ID NO: 350226 - RNA, 21 nt, Artificial Sequence
  Synthetic
caaaaguagaagauaaauuug

SEQ ID NO: 350227 - RNA, 22 nt, Artificial Sequence
  Synthetic
ucaaaaguagaagauaaauuug

SEQ ID NO: 350228 - RNA, 23 nt, Artificial Sequence
  Synthetic
uucaaaaguagaagauaaauuug

SEQ ID NO: 350229 - RNA, 24 nt, Artificial Sequence
  Synthetic
guucaaaaguagaagauaaauuug

SEQ ID NO: 350230 - RNA, 18 nt, Artificial Sequence
  Synthetic
gaacauguaguaaauuug

SEQ ID NO: 350231 - RNA, 19 nt, Artificial Sequence
  Synthetic
ggaacauguaguaaauuug

SEQ ID NO: 350232 - RNA, 20 nt, Artificial Sequence
  Synthetic
gggaacauguaguaaauuug

SEQ ID NO: 350233 - RNA, 21 nt, Artificial Sequence
  Synthetic
ugggaacauguaguaaauuug

SEQ ID NO: 350234 - RNA, 22 nt, Artificial Sequence
  Synthetic
augggaacauguaguaaauuug

SEQ ID NO: 350235 - RNA, 23 nt, Artificial Sequence
  Synthetic
aaugggaacauguaguaaauuug

SEQ ID NO: 350236 - RNA, 24 nt, Artificial Sequence
  Synthetic
aaaugggaacauguaguaaauuug

SEQ ID NO: 350237 - RNA, 18 nt, Artificial Sequence
  Synthetic
uggguuuucuuaaauuug

SEQ ID NO: 350238 - RNA, 19 nt, Artificial Sequence
  Synthetic
auggguuuucuuaaauuug

SEQ ID NO: 350239 - RNA, 20 nt, Artificial Sequence
  Synthetic
gauggguuuucuuaaauuug

SEQ ID NO: 350240 - RNA, 21 nt, Artificial Sequence
  Synthetic
cgauggguuuucuuaaauuug

SEQ ID NO: 350241 - RNA, 22 nt, Artificial Sequence
  Synthetic
acgauggguuuucuuaaauuug

SEQ ID NO: 350242 - RNA, 23 nt, Artificial Sequence
  Synthetic
cacgauggguuuucuuaaauuug

SEQ ID NO: 350243 - RNA, 24 nt, Artificial Sequence
  Synthetic
acacgauggguuuucuuaaauuug

SEQ ID NO: 350244 - RNA, 18 nt, Artificial Sequence
  Synthetic
gugugacaguuaaauuug

SEQ ID NO: 350245 - RNA, 19 nt, Artificial Sequence
  Synthetic
ugugugacaguuaaauuug

SEQ ID NO: 350246 - RNA, 20 nt, Artificial Sequence
  Synthetic
uugugugacaguuaaauuug

SEQ ID NO: 350247 - RNA, 21 nt, Artificial Sequence
  Synthetic
uuugugugacaguuaaauuug

SEQ ID NO: 350248 - RNA, 22 nt, Artificial Sequence
  Synthetic
cuuugugugacaguuaaauuug

SEQ ID NO: 350249 - RNA, 23 nt, Artificial Sequence
  Synthetic
gcuuugugugacaguuaaauuug

SEQ ID NO: 350250 - RNA, 24 nt, Artificial Sequence
  Synthetic
agcuuugugugacaguuaaauuug

SEQ ID NO: 350251 - RNA, 18 nt, Artificial Sequence
  Synthetic
cuucaacauuuaaauuug

SEQ ID NO: 350252 - RNA, 19 nt, Artificial Sequence
  Synthetic
acuucaacauuuaaauuug

SEQ ID NO: 350253 - RNA, 20 nt, Artificial Sequence
  Synthetic
gacuucaacauuuaaauuug

SEQ ID NO: 350254 - RNA, 21 nt, Artificial Sequence
  Synthetic
ggacuucaacauuuaaauuug

SEQ ID NO: 350255 - RNA, 22 nt, Artificial Sequence
  Synthetic
aggacuucaacauuuaaauuug

SEQ ID NO: 350256 - RNA, 23 nt, Artificial Sequence
  Synthetic
uaggacuucaacauuuaaauuug

SEQ ID NO: 350257 - RNA, 24 nt, Artificial Sequence
  Synthetic
uuaggacuucaacauuuaaauuug

SEQ ID NO: 350258 - RNA, 18 nt, Artificial Sequence
  Synthetic
aaacauguaaacaauuug

SEQ ID NO: 350259 - RNA, 19 nt, Artificial Sequence
  Synthetic
caaacauguaaacaauuug

SEQ ID NO: 350260 - RNA, 20 nt, Artificial Sequence
  Synthetic
gcaaacauguaaacaauuug

SEQ ID NO: 350261 - RNA, 21 nt, Artificial Sequence
  Synthetic
ugcaaacauguaaacaauuug

SEQ ID NO: 350262 - RNA, 22 nt, Artificial Sequence
  Synthetic
gugcaaacauguaaacaauuug

SEQ ID NO: 350263 - RNA, 23 nt, Artificial Sequence
  Synthetic
agugcaaacauguaaacaauuug

SEQ ID NO: 350264 - RNA, 24 nt, Artificial Sequence
  Synthetic
aagugcaaacauguaaacaauuug

SEQ ID NO: 350265 - RNA, 18 nt, Artificial Sequence
  Synthetic
aauaggacuaacaauuug

SEQ ID NO: 350266 - RNA, 19 nt, Artificial Sequence
  Synthetic
aaauaggacuaacaauuug

SEQ ID NO: 350267 - RNA, 20 nt, Artificial Sequence
  Synthetic
caaauaggacuaacaauuug

SEQ ID NO: 350268 - RNA, 21 nt, Artificial Sequence
  Synthetic
ucaaauaggacuaacaauuug

SEQ ID NO: 350269 - RNA, 22 nt, Artificial Sequence
  Synthetic
uucaaauaggacuaacaauuug

SEQ ID NO: 350270 - RNA, 23 nt, Artificial Sequence
  Synthetic
auucaaauaggacuaacaauuug

SEQ ID NO: 350271 - RNA, 24 nt, Artificial Sequence
  Synthetic
cauucaaauaggacuaacaauuug

SEQ ID NO: 350272 - RNA, 18 nt, Artificial Sequence
  Synthetic
auuuuauuuaucaauuug

SEQ ID NO: 350273 - RNA, 19 nt, Artificial Sequence
  Synthetic
cauuuuauuuaucaauuug

SEQ ID NO: 350274 - RNA, 20 nt, Artificial Sequence
  Synthetic
ccauuuuauuuaucaauuug

SEQ ID NO: 350275 - RNA, 21 nt, Artificial Sequence
  Synthetic
uccauuuuauuuaucaauuug

SEQ ID NO: 350276 - RNA, 22 nt, Artificial Sequence
  Synthetic
uuccauuuuauuuaucaauuug

SEQ ID NO: 350277 - RNA, 23 nt, Artificial Sequence
  Synthetic
auuccauuuuauuuaucaauuug

SEQ ID NO: 350278 - RNA, 24 nt, Artificial Sequence
  Synthetic
aauuccauuuuauuuaucaauuug

SEQ ID NO: 350279 - RNA, 18 nt, Artificial Sequence
  Synthetic
gcuaaugucuagaauuug

SEQ ID NO: 350280 - RNA, 19 nt, Artificial Sequence
  Synthetic
agcuaaugucuagaauuug

SEQ ID NO: 350281 - RNA, 20 nt, Artificial Sequence
  Synthetic
gagcuaaugucuagaauuug

SEQ ID NO: 350282 - RNA, 21 nt, Artificial Sequence
  Synthetic
ggagcuaaugucuagaauuug

SEQ ID NO: 350283 - RNA, 22 nt, Artificial Sequence
  Synthetic
aggagcuaaugucuagaauuug

SEQ ID NO: 350284 - RNA, 23 nt, Artificial Sequence
  Synthetic
caggagcuaaugucuagaauuug

SEQ ID NO: 350285 - RNA, 24 nt, Artificial Sequence
  Synthetic
acaggagcuaaugucuagaauuug

SEQ ID NO: 350286 - RNA, 18 nt, Artificial Sequence
  Synthetic
uuucaacauaggaauuug

SEQ ID NO: 350287 - RNA, 19 nt, Artificial Sequence
  Synthetic
auuucaacauaggaauuug

SEQ ID NO: 350288 - RNA, 20 nt, Artificial Sequence
  Synthetic
gauuucaacauaggaauuug

SEQ ID NO: 350289 - RNA, 21 nt, Artificial Sequence
  Synthetic
ggauuucaacauaggaauuug

SEQ ID NO: 350290 - RNA, 22 nt, Artificial Sequence
  Synthetic
aggauuucaacauaggaauuug

SEQ ID NO: 350291 - RNA, 23 nt, Artificial Sequence
  Synthetic
uaggauuucaacauaggaauuug

SEQ ID NO: 350292 - RNA, 24 nt, Artificial Sequence
  Synthetic
uuaggauuucaacauaggaauuug

SEQ ID NO: 350293 - RNA, 18 nt, Artificial Sequence
  Synthetic
auugcagaguugaauuug

SEQ ID NO: 350294 - RNA, 19 nt, Artificial Sequence
  Synthetic
gauugcagaguugaauuug

SEQ ID NO: 350295 - RNA, 20 nt, Artificial Sequence
  Synthetic
cgauugcagaguugaauuug

SEQ ID NO: 350296 - RNA, 21 nt, Artificial Sequence
  Synthetic
acgauugcagaguugaauuug

SEQ ID NO: 350297 - RNA, 22 nt, Artificial Sequence
  Synthetic
aacgauugcagaguugaauuug

SEQ ID NO: 350298 - RNA, 23 nt, Artificial Sequence
  Synthetic
gaacgauugcagaguugaauuug

SEQ ID NO: 350299 - RNA, 24 nt, Artificial Sequence
  Synthetic
ugaacgauugcagaguugaauuug

SEQ ID NO: 350300 - RNA, 18 nt, Artificial Sequence
  Synthetic
gacaaacauuugaauuug

SEQ ID NO: 350301 - RNA, 19 nt, Artificial Sequence
  Synthetic
agacaaacauuugaauuug

SEQ ID NO: 350302 - RNA, 20 nt, Artificial Sequence
  Synthetic
aagacaaacauuugaauuug

SEQ ID NO: 350303 - RNA, 21 nt, Artificial Sequence
  Synthetic
caagacaaacauuugaauuug

SEQ ID NO: 350304 - RNA, 22 nt, Artificial Sequence
  Synthetic
gcaagacaaacauuugaauuug

SEQ ID NO: 350305 - RNA, 23 nt, Artificial Sequence
  Synthetic
agcaagacaaacauuugaauuug

SEQ ID NO: 350306 - RNA, 24 nt, Artificial Sequence
  Synthetic
uagcaagacaaacauuugaauuug

SEQ ID NO: 350307 - RNA, 18 nt, Artificial Sequence
  Synthetic
auugguauuacuaauuug

SEQ ID NO: 350308 - RNA, 19 nt, Artificial Sequence
  Synthetic
aauugguauuacuaauuug

SEQ ID NO: 350309 - RNA, 20 nt, Artificial Sequence
  Synthetic
uaauugguauuacuaauuug

SEQ ID NO: 350310 - RNA, 21 nt, Artificial Sequence
  Synthetic
uuaauugguauuacuaauuug

SEQ ID NO: 350311 - RNA, 22 nt, Artificial Sequence
  Synthetic
uuuaauugguauuacuaauuug

SEQ ID NO: 350312 - RNA, 23 nt, Artificial Sequence
  Synthetic
auuuaauugguauuacuaauuug

SEQ ID NO: 350313 - RNA, 24 nt, Artificial Sequence
  Synthetic
uauuuaauugguauuacuaauuug

SEQ ID NO: 350314 - RNA, 18 nt, Artificial Sequence
  Synthetic
gauuugaagccuaauuug

SEQ ID NO: 350315 - RNA, 19 nt, Artificial Sequence
  Synthetic
ggauuugaagccuaauuug

SEQ ID NO: 350316 - RNA, 20 nt, Artificial Sequence
  Synthetic
aggauuugaagccuaauuug

SEQ ID NO: 350317 - RNA, 21 nt, Artificial Sequence
  Synthetic
gaggauuugaagccuaauuug

SEQ ID NO: 350318 - RNA, 22 nt, Artificial Sequence
  Synthetic
ggaggauuugaagccuaauuug

SEQ ID NO: 350319 - RNA, 23 nt, Artificial Sequence
  Synthetic
uggaggauuugaagccuaauuug

SEQ ID NO: 350320 - RNA, 24 nt, Artificial Sequence
  Synthetic
cuggaggauuugaagccuaauuug

SEQ ID NO: 350321 - RNA, 18 nt, Artificial Sequence
  Synthetic
agaggagagaguaauuug

SEQ ID NO: 350322 - RNA, 19 nt, Artificial Sequence
  Synthetic
gagaggagagaguaauuug

SEQ ID NO: 350323 - RNA, 20 nt, Artificial Sequence
  Synthetic
ggagaggagagaguaauuug

SEQ ID NO: 350324 - RNA, 21 nt, Artificial Sequence
  Synthetic
uggagaggagagaguaauuug

SEQ ID NO: 350325 - RNA, 22 nt, Artificial Sequence
  Synthetic
guggagaggagagaguaauuug

SEQ ID NO: 350326 - RNA, 23 nt, Artificial Sequence
  Synthetic
aguggagaggagagaguaauuug

SEQ ID NO: 350327 - RNA, 24 nt, Artificial Sequence
  Synthetic
aaguggagaggagagaguaauuug

SEQ ID NO: 350328 - RNA, 18 nt, Artificial Sequence
  Synthetic
uuauggaucuuacauuug

SEQ ID NO: 350329 - RNA, 19 nt, Artificial Sequence
  Synthetic
uuuauggaucuuacauuug

SEQ ID NO: 350330 - RNA, 20 nt, Artificial Sequence
  Synthetic
cuuuauggaucuuacauuug

SEQ ID NO: 350331 - RNA, 21 nt, Artificial Sequence
  Synthetic
ucuuuauggaucuuacauuug

SEQ ID NO: 350332 - RNA, 22 nt, Artificial Sequence
  Synthetic
gucuuuauggaucuuacauuug

SEQ ID NO: 350333 - RNA, 23 nt, Artificial Sequence
  Synthetic
ugucuuuauggaucuuacauuug

SEQ ID NO: 350334 - RNA, 24 nt, Artificial Sequence
  Synthetic
uugucuuuauggaucuuacauuug

SEQ ID NO: 350335 - RNA, 18 nt, Artificial Sequence
  Synthetic
ucuguucuuuuacauuug

SEQ ID NO: 350336 - RNA, 19 nt, Artificial Sequence
  Synthetic
uucuguucuuuuacauuug

SEQ ID NO: 350337 - RNA, 20 nt, Artificial Sequence
  Synthetic
uuucuguucuuuuacauuug

SEQ ID NO: 350338 - RNA, 21 nt, Artificial Sequence
  Synthetic
auuucuguucuuuuacauuug

SEQ ID NO: 350339 - RNA, 22 nt, Artificial Sequence
  Synthetic
aauuucuguucuuuuacauuug

SEQ ID NO: 350340 - RNA, 23 nt, Artificial Sequence
  Synthetic
uaauuucuguucuuuuacauuug

SEQ ID NO: 350341 - RNA, 24 nt, Artificial Sequence
  Synthetic
auaauuucuguucuuuuacauuug

SEQ ID NO: 350342 - RNA, 18 nt, Artificial Sequence
  Synthetic
gaauucuuuuuacauuug

SEQ ID NO: 350343 - RNA, 19 nt, Artificial Sequence
  Synthetic
ugaauucuuuuuacauuug

SEQ ID NO: 350344 - RNA, 20 nt, Artificial Sequence
  Synthetic
uugaauucuuuuuacauuug

SEQ ID NO: 350345 - RNA, 21 nt, Artificial Sequence
  Synthetic
auugaauucuuuuuacauuug

SEQ ID NO: 350346 - RNA, 22 nt, Artificial Sequence
  Synthetic
uauugaauucuuuuuacauuug

SEQ ID NO: 350347 - RNA, 23 nt, Artificial Sequence
  Synthetic
uuauugaauucuuuuuacauuug

SEQ ID NO: 350348 - RNA, 24 nt, Artificial Sequence
  Synthetic
auuauugaauucuuuuuacauuug

SEQ ID NO: 350349 - RNA, 18 nt, Artificial Sequence
  Synthetic
guuuuuccgcaccauuug

SEQ ID NO: 350350 - RNA, 19 nt, Artificial Sequence
  Synthetic
aguuuuuccgcaccauuug

SEQ ID NO: 350351 - RNA, 20 nt, Artificial Sequence
  Synthetic
caguuuuuccgcaccauuug

SEQ ID NO: 350352 - RNA, 21 nt, Artificial Sequence
  Synthetic
ccaguuuuuccgcaccauuug

SEQ ID NO: 350353 - RNA, 22 nt, Artificial Sequence
  Synthetic
uccaguuuuuccgcaccauuug

SEQ ID NO: 350354 - RNA, 23 nt, Artificial Sequence
  Synthetic
auccaguuuuuccgcaccauuug

SEQ ID NO: 350355 - RNA, 24 nt, Artificial Sequence
  Synthetic
uauccaguuuuuccgcaccauuug

SEQ ID NO: 350356 - RNA, 18 nt, Artificial Sequence
  Synthetic
guaaaggaaaagcauuug

SEQ ID NO: 350357 - RNA, 19 nt, Artificial Sequence
  Synthetic
aguaaaggaaaagcauuug

SEQ ID NO: 350358 - RNA, 20 nt, Artificial Sequence
  Synthetic
aaguaaaggaaaagcauuug

SEQ ID NO: 350359 - RNA, 21 nt, Artificial Sequence
  Synthetic
aaaguaaaggaaaagcauuug

SEQ ID NO: 350360 - RNA, 22 nt, Artificial Sequence
  Synthetic
caaaguaaaggaaaagcauuug

SEQ ID NO: 350361 - RNA, 23 nt, Artificial Sequence
  Synthetic
gcaaaguaaaggaaaagcauuug

SEQ ID NO: 350362 - RNA, 24 nt, Artificial Sequence
  Synthetic
ggcaaaguaaaggaaaagcauuug

SEQ ID NO: 350363 - RNA, 18 nt, Artificial Sequence
  Synthetic
uuucuggagaagcauuug

SEQ ID NO: 350364 - RNA, 19 nt, Artificial Sequence
  Synthetic
uuuucuggagaagcauuug

SEQ ID NO: 350365 - RNA, 20 nt, Artificial Sequence
  Synthetic
cuuuucuggagaagcauuug

SEQ ID NO: 350366 - RNA, 21 nt, Artificial Sequence
  Synthetic
gcuuuucuggagaagcauuug

SEQ ID NO: 350367 - RNA, 22 nt, Artificial Sequence
  Synthetic
ugcuuuucuggagaagcauuug

SEQ ID NO: 350368 - RNA, 23 nt, Artificial Sequence
  Synthetic
uugcuuuucuggagaagcauuug

SEQ ID NO: 350369 - RNA, 24 nt, Artificial Sequence
  Synthetic
uuugcuuuucuggagaagcauuug

SEQ ID NO: 350370 - RNA, 18 nt, Artificial Sequence
  Synthetic
auccaucugaagcauuug

SEQ ID NO: 350371 - RNA, 19 nt, Artificial Sequence
  Synthetic
aauccaucugaagcauuug

SEQ ID NO: 350372 - RNA, 20 nt, Artificial Sequence
  Synthetic
uaauccaucugaagcauuug

SEQ ID NO: 350373 - RNA, 21 nt, Artificial Sequence
  Synthetic
uuaauccaucugaagcauuug

SEQ ID NO: 350374 - RNA, 22 nt, Artificial Sequence
  Synthetic
cuuaauccaucugaagcauuug

SEQ ID NO: 350375 - RNA, 23 nt, Artificial Sequence
  Synthetic
gcuuaauccaucugaagcauuug

SEQ ID NO: 350376 - RNA, 24 nt, Artificial Sequence
  Synthetic
ugcuuaauccaucugaagcauuug

SEQ ID NO: 350377 - RNA, 18 nt, Artificial Sequence
  Synthetic
ucuaaguaaacucauuug

SEQ ID NO: 350378 - RNA, 19 nt, Artificial Sequence
  Synthetic
uucuaaguaaacucauuug

SEQ ID NO: 350379 - RNA, 20 nt, Artificial Sequence
  Synthetic
uuucuaaguaaacucauuug

SEQ ID NO: 350380 - RNA, 21 nt, Artificial Sequence
  Synthetic
uuuucuaaguaaacucauuug

SEQ ID NO: 350381 - RNA, 22 nt, Artificial Sequence
  Synthetic
guuuucuaaguaaacucauuug

SEQ ID NO: 350382 - RNA, 23 nt, Artificial Sequence
  Synthetic
aguuuucuaaguaaacucauuug

SEQ ID NO: 350383 - RNA, 24 nt, Artificial Sequence
  Synthetic
gaguuuucuaaguaaacucauuug

SEQ ID NO: 350384 - RNA, 18 nt, Artificial Sequence
  Synthetic
cguaaaggagcucauuug

SEQ ID NO: 350385 - RNA, 19 nt, Artificial Sequence
  Synthetic
acguaaaggagcucauuug

SEQ ID NO: 350386 - RNA, 20 nt, Artificial Sequence
  Synthetic
cacguaaaggagcucauuug

SEQ ID NO: 350387 - RNA, 21 nt, Artificial Sequence
  Synthetic
gcacguaaaggagcucauuug

SEQ ID NO: 350388 - RNA, 22 nt, Artificial Sequence
  Synthetic
ggcacguaaaggagcucauuug

SEQ ID NO: 350389 - RNA, 23 nt, Artificial Sequence
  Synthetic
aggcacguaaaggagcucauuug

SEQ ID NO: 350390 - RNA, 24 nt, Artificial Sequence
  Synthetic
gaggcacguaaaggagcucauuug

SEQ ID NO: 350391 - RNA, 18 nt, Artificial Sequence
  Synthetic
cacuuuaaaucucauuug

SEQ ID NO: 350392 - RNA, 19 nt, Artificial Sequence
  Synthetic
acacuuuaaaucucauuug

SEQ ID NO: 350393 - RNA, 20 nt, Artificial Sequence
  Synthetic
uacacuuuaaaucucauuug

SEQ ID NO: 350394 - RNA, 21 nt, Artificial Sequence
  Synthetic
uuacacuuuaaaucucauuug

SEQ ID NO: 350395 - RNA, 22 nt, Artificial Sequence
  Synthetic
auuacacuuuaaaucucauuug

SEQ ID NO: 350396 - RNA, 23 nt, Artificial Sequence
  Synthetic
aauuacacuuuaaaucucauuug

SEQ ID NO: 350397 - RNA, 24 nt, Artificial Sequence
  Synthetic
uaauuacacuuuaaaucucauuug

SEQ ID NO: 350398 - RNA, 18 nt, Artificial Sequence
  Synthetic
gcuuuuucacuucauuug

SEQ ID NO: 350399 - RNA, 19 nt, Artificial Sequence
  Synthetic
ugcuuuuucacuucauuug

SEQ ID NO: 350400 - RNA, 20 nt, Artificial Sequence
  Synthetic
augcuuuuucacuucauuug

SEQ ID NO: 350401 - RNA, 21 nt, Artificial Sequence
  Synthetic
caugcuuuuucacuucauuug

SEQ ID NO: 350402 - RNA, 22 nt, Artificial Sequence
  Synthetic
gcaugcuuuuucacuucauuug

SEQ ID NO: 350403 - RNA, 23 nt, Artificial Sequence
  Synthetic
ggcaugcuuuuucacuucauuug

SEQ ID NO: 350404 - RNA, 24 nt, Artificial Sequence
  Synthetic
uggcaugcuuuuucacuucauuug

SEQ ID NO: 350405 - RNA, 18 nt, Artificial Sequence
  Synthetic
aauaaaaaaaaagauuug

SEQ ID NO: 350406 - RNA, 19 nt, Artificial Sequence
  Synthetic
aaauaaaaaaaaagauuug

SEQ ID NO: 350407 - RNA, 20 nt, Artificial Sequence
  Synthetic
aaaauaaaaaaaaagauuug

SEQ ID NO: 350408 - RNA, 21 nt, Artificial Sequence
  Synthetic
aaaaauaaaaaaaaagauuug

SEQ ID NO: 350409 - RNA, 22 nt, Artificial Sequence
  Synthetic
aaaaaauaaaaaaaaagauuug

SEQ ID NO: 350410 - RNA, 23 nt, Artificial Sequence
  Synthetic
uaaaaaauaaaaaaaaagauuug

SEQ ID NO: 350411 - RNA, 24 nt, Artificial Sequence
  Synthetic
auaaaaaauaaaaaaaaagauuug

SEQ ID NO: 350412 - RNA, 18 nt, Artificial Sequence
  Synthetic
gcaaauaaaggagauuug

SEQ ID NO: 350413 - RNA, 19 nt, Artificial Sequence
  Synthetic
agcaaauaaaggagauuug

SEQ ID NO: 350414 - RNA, 20 nt, Artificial Sequence
  Synthetic
gagcaaauaaaggagauuug

SEQ ID NO: 350415 - RNA, 21 nt, Artificial Sequence
  Synthetic
agagcaaauaaaggagauuug

SEQ ID NO: 350416 - RNA, 22 nt, Artificial Sequence
  Synthetic
uagagcaaauaaaggagauuug

SEQ ID NO: 350417 - RNA, 23 nt, Artificial Sequence
  Synthetic
auagagcaaauaaaggagauuug

SEQ ID NO: 350418 - RNA, 24 nt, Artificial Sequence
  Synthetic
gauagagcaaauaaaggagauuug

SEQ ID NO: 350419 - RNA, 18 nt, Artificial Sequence
  Synthetic
auuucaacaugagauuug

SEQ ID NO: 350420 - RNA, 19 nt, Artificial Sequence
  Synthetic
aauuucaacaugagauuug

SEQ ID NO: 350421 - RNA, 20 nt, Artificial Sequence
  Synthetic
aaauuucaacaugagauuug

SEQ ID NO: 350422 - RNA, 21 nt, Artificial Sequence
  Synthetic
caaauuucaacaugagauuug

SEQ ID NO: 350423 - RNA, 22 nt, Artificial Sequence
  Synthetic
ucaaauuucaacaugagauuug

SEQ ID NO: 350424 - RNA, 23 nt, Artificial Sequence
  Synthetic
aucaaauuucaacaugagauuug

SEQ ID NO: 350425 - RNA, 24 nt, Artificial Sequence
  Synthetic
gaucaaauuucaacaugagauuug

SEQ ID NO: 350426 - RNA, 18 nt, Artificial Sequence
  Synthetic
ggucaaguuggggauuug

SEQ ID NO: 350427 - RNA, 19 nt, Artificial Sequence
  Synthetic
aggucaaguuggggauuug

SEQ ID NO: 350428 - RNA, 20 nt, Artificial Sequence
  Synthetic
caggucaaguuggggauuug

SEQ ID NO: 350429 - RNA, 21 nt, Artificial Sequence
  Synthetic
acaggucaaguuggggauuug

SEQ ID NO: 350430 - RNA, 22 nt, Artificial Sequence
  Synthetic
gacaggucaaguuggggauuug

SEQ ID NO: 350431 - RNA, 23 nt, Artificial Sequence
  Synthetic
agacaggucaaguuggggauuug

SEQ ID NO: 350432 - RNA, 24 nt, Artificial Sequence
  Synthetic
uagacaggucaaguuggggauuug

SEQ ID NO: 350433 - RNA, 18 nt, Artificial Sequence
  Synthetic
auuucucccuuggauuug

SEQ ID NO: 350434 - RNA, 19 nt, Artificial Sequence
  Synthetic
cauuucucccuuggauuug

SEQ ID NO: 350435 - RNA, 20 nt, Artificial Sequence
  Synthetic
ccauuucucccuuggauuug

SEQ ID NO: 350436 - RNA, 21 nt, Artificial Sequence
  Synthetic
cccauuucucccuuggauuug

SEQ ID NO: 350437 - RNA, 22 nt, Artificial Sequence
  Synthetic
ucccauuucucccuuggauuug

SEQ ID NO: 350438 - RNA, 23 nt, Artificial Sequence
  Synthetic
uucccauuucucccuuggauuug

SEQ ID NO: 350439 - RNA, 24 nt, Artificial Sequence
  Synthetic
cuucccauuucucccuuggauuug

SEQ ID NO: 350440 - RNA, 18 nt, Artificial Sequence
  Synthetic
uuuuuaugcucugauuug

SEQ ID NO: 350441 - RNA, 19 nt, Artificial Sequence
  Synthetic
auuuuuaugcucugauuug

SEQ ID NO: 350442 - RNA, 20 nt, Artificial Sequence
  Synthetic
uauuuuuaugcucugauuug

SEQ ID NO: 350443 - RNA, 21 nt, Artificial Sequence
  Synthetic
guauuuuuaugcucugauuug

SEQ ID NO: 350444 - RNA, 22 nt, Artificial Sequence
  Synthetic
uguauuuuuaugcucugauuug

SEQ ID NO: 350445 - RNA, 23 nt, Artificial Sequence
  Synthetic
guguauuuuuaugcucugauuug

SEQ ID NO: 350446 - RNA, 24 nt, Artificial Sequence
  Synthetic
uguguauuuuuaugcucugauuug

SEQ ID NO: 350447 - RNA, 18 nt, Artificial Sequence
  Synthetic
uuccaacuaauugauuug

SEQ ID NO: 350448 - RNA, 19 nt, Artificial Sequence
  Synthetic
uuuccaacuaauugauuug

SEQ ID NO: 350449 - RNA, 20 nt, Artificial Sequence
  Synthetic
guuuccaacuaauugauuug

SEQ ID NO: 350450 - RNA, 21 nt, Artificial Sequence
  Synthetic
gguuuccaacuaauugauuug

SEQ ID NO: 350451 - RNA, 22 nt, Artificial Sequence
  Synthetic
agguuuccaacuaauugauuug

SEQ ID NO: 350452 - RNA, 23 nt, Artificial Sequence
  Synthetic
aagguuuccaacuaauugauuug

SEQ ID NO: 350453 - RNA, 24 nt, Artificial Sequence
  Synthetic
aaagguuuccaacuaauugauuug

SEQ ID NO: 350454 - RNA, 18 nt, Artificial Sequence
  Synthetic
caggagagucuugauuug

SEQ ID NO: 350455 - RNA, 19 nt, Artificial Sequence
  Synthetic
acaggagagucuugauuug

SEQ ID NO: 350456 - RNA, 20 nt, Artificial Sequence
  Synthetic
aacaggagagucuugauuug

SEQ ID NO: 350457 - RNA, 21 nt, Artificial Sequence
  Synthetic
caacaggagagucuugauuug

SEQ ID NO: 350458 - RNA, 22 nt, Artificial Sequence
  Synthetic
gcaacaggagagucuugauuug

SEQ ID NO: 350459 - RNA, 23 nt, Artificial Sequence
  Synthetic
agcaacaggagagucuugauuug

SEQ ID NO: 350460 - RNA, 24 nt, Artificial Sequence
  Synthetic
cagcaacaggagagucuugauuug

SEQ ID NO: 350461 - RNA, 18 nt, Artificial Sequence
  Synthetic
uuuuuuuuuuuugauuug

SEQ ID NO: 350462 - RNA, 19 nt, Artificial Sequence
  Synthetic
uuuuuuuuuuuuugauuug

SEQ ID NO: 350463 - RNA, 20 nt, Artificial Sequence
  Synthetic
uuuuuuuuuuuuuugauuug

SEQ ID NO: 350464 - RNA, 21 nt, Artificial Sequence
  Synthetic
uuuuuuuuuuuuuuugauuug

SEQ ID NO: 350465 - RNA, 22 nt, Artificial Sequence
  Synthetic
uuuuuuuuuuuuuuuugauuug

SEQ ID NO: 350466 - RNA, 23 nt, Artificial Sequence
  Synthetic
uuuuuuuuuuuuuuuuugauuug

SEQ ID NO: 350467 - RNA, 24 nt, Artificial Sequence
  Synthetic
uuuuuuuuuuuuuuuuuugauuug

SEQ ID NO: 350468 - RNA, 18 nt, Artificial Sequence
  Synthetic
cccuaaauuaaauauuug

SEQ ID NO: 350469 - RNA, 19 nt, Artificial Sequence
  Synthetic
acccuaaauuaaauauuug

SEQ ID NO: 350470 - RNA, 20 nt, Artificial Sequence
  Synthetic
uacccuaaauuaaauauuug

SEQ ID NO: 350471 - RNA, 21 nt, Artificial Sequence
  Synthetic
uuacccuaaauuaaauauuug

SEQ ID NO: 350472 - RNA, 22 nt, Artificial Sequence
  Synthetic
guuacccuaaauuaaauauuug

SEQ ID NO: 350473 - RNA, 23 nt, Artificial Sequence
  Synthetic
aguuacccuaaauuaaauauuug

SEQ ID NO: 350474 - RNA, 24 nt, Artificial Sequence
  Synthetic
uaguuacccuaaauuaaauauuug

SEQ ID NO: 350475 - RNA, 18 nt, Artificial Sequence
  Synthetic
aguuuacaucaauauuug

SEQ ID NO: 350476 - RNA, 19 nt, Artificial Sequence
  Synthetic
aaguuuacaucaauauuug

SEQ ID NO: 350477 - RNA, 20 nt, Artificial Sequence
  Synthetic
aaaguuuacaucaauauuug

SEQ ID NO: 350478 - RNA, 21 nt, Artificial Sequence
  Synthetic
aaaaguuuacaucaauauuug

SEQ ID NO: 350479 - RNA, 22 nt, Artificial Sequence
  Synthetic
uaaaaguuuacaucaauauuug

SEQ ID NO: 350480 - RNA, 23 nt, Artificial Sequence
  Synthetic
cuaaaaguuuacaucaauauuug

SEQ ID NO: 350481 - RNA, 24 nt, Artificial Sequence
  Synthetic
gcuaaaaguuuacaucaauauuug

SEQ ID NO: 350482 - RNA, 18 nt, Artificial Sequence
  Synthetic
gagagauguuaauauuug

SEQ ID NO: 350483 - RNA, 19 nt, Artificial Sequence
  Synthetic
ggagagauguuaauauuug

SEQ ID NO: 350484 - RNA, 20 nt, Artificial Sequence
  Synthetic
gggagagauguuaauauuug

SEQ ID NO: 350485 - RNA, 21 nt, Artificial Sequence
  Synthetic
ggggagagauguuaauauuug

SEQ ID NO: 350486 - RNA, 22 nt, Artificial Sequence
  Synthetic
gggggagagauguuaauauuug

SEQ ID NO: 350487 - RNA, 23 nt, Artificial Sequence
  Synthetic
ggggggagagauguuaauauuug

SEQ ID NO: 350488 - RNA, 24 nt, Artificial Sequence
  Synthetic
aggggggagagauguuaauauuug

SEQ ID NO: 350489 - RNA, 18 nt, Artificial Sequence
  Synthetic
acucagaaaacauauuug

SEQ ID NO: 350490 - RNA, 19 nt, Artificial Sequence
  Synthetic
aacucagaaaacauauuug

SEQ ID NO: 350491 - RNA, 20 nt, Artificial Sequence
  Synthetic
gaacucagaaaacauauuug

SEQ ID NO: 350492 - RNA, 21 nt, Artificial Sequence
  Synthetic
ugaacucagaaaacauauuug

SEQ ID NO: 350493 - RNA, 22 nt, Artificial Sequence
  Synthetic
uugaacucagaaaacauauuug

SEQ ID NO: 350494 - RNA, 23 nt, Artificial Sequence
  Synthetic
uuugaacucagaaaacauauuug

SEQ ID NO: 350495 - RNA, 24 nt, Artificial Sequence
  Synthetic
cuuugaacucagaaaacauauuug

SEQ ID NO: 350496 - RNA, 18 nt, Artificial Sequence
  Synthetic
uauccauuuacauauuug

SEQ ID NO: 350497 - RNA, 19 nt, Artificial Sequence
  Synthetic
uuauccauuuacauauuug

SEQ ID NO: 350498 - RNA, 20 nt, Artificial Sequence
  Synthetic
auuauccauuuacauauuug

SEQ ID NO: 350499 - RNA, 21 nt, Artificial Sequence
  Synthetic
aauuauccauuuacauauuug

SEQ ID NO: 350500 - RNA, 22 nt, Artificial Sequence
  Synthetic
aaauuauccauuuacauauuug

SEQ ID NO: 350501 - RNA, 23 nt, Artificial Sequence
  Synthetic
gaaauuauccauuuacauauuug

SEQ ID NO: 350502 - RNA, 24 nt, Artificial Sequence
  Synthetic
agaaauuauccauuuacauauuug

SEQ ID NO: 350503 - RNA, 18 nt, Artificial Sequence
  Synthetic
gauaaagcaccauauuug

SEQ ID NO: 350504 - RNA, 19 nt, Artificial Sequence
  Synthetic
agauaaagcaccauauuug

SEQ ID NO: 350505 - RNA, 20 nt, Artificial Sequence
  Synthetic
aagauaaagcaccauauuug

SEQ ID NO: 350506 - RNA, 21 nt, Artificial Sequence
  Synthetic
caagauaaagcaccauauuug

SEQ ID NO: 350507 - RNA, 22 nt, Artificial Sequence
  Synthetic
acaagauaaagcaccauauuug

SEQ ID NO: 350508 - RNA, 23 nt, Artificial Sequence
  Synthetic
aacaagauaaagcaccauauuug

SEQ ID NO: 350509 - RNA, 24 nt, Artificial Sequence
  Synthetic
aaacaagauaaagcaccauauuug

SEQ ID NO: 350510 - RNA, 18 nt, Artificial Sequence
  Synthetic
uuauuauauagauauuug

SEQ ID NO: 350511 - RNA, 19 nt, Artificial Sequence
  Synthetic
auuauuauauagauauuug

SEQ ID NO: 350512 - RNA, 20 nt, Artificial Sequence
  Synthetic
uauuauuauauagauauuug

SEQ ID NO: 350513 - RNA, 21 nt, Artificial Sequence
  Synthetic
cuauuauuauauagauauuug

SEQ ID NO: 350514 - RNA, 22 nt, Artificial Sequence
  Synthetic
gcuauuauuauauagauauuug

SEQ ID NO: 350515 - RNA, 23 nt, Artificial Sequence
  Synthetic
agcuauuauuauauagauauuug

SEQ ID NO: 350516 - RNA, 24 nt, Artificial Sequence
  Synthetic
aagcuauuauuauauagauauuug

SEQ ID NO: 350517 - RNA, 18 nt, Artificial Sequence
  Synthetic
aagcacaguaacuauuug

SEQ ID NO: 350518 - RNA, 19 nt, Artificial Sequence
  Synthetic
aaagcacaguaacuauuug

SEQ ID NO: 350519 - RNA, 20 nt, Artificial Sequence
  Synthetic
gaaagcacaguaacuauuug

SEQ ID NO: 350520 - RNA, 21 nt, Artificial Sequence
  Synthetic
ugaaagcacaguaacuauuug

SEQ ID NO: 350521 - RNA, 22 nt, Artificial Sequence
  Synthetic
uugaaagcacaguaacuauuug

SEQ ID NO: 350522 - RNA, 23 nt, Artificial Sequence
  Synthetic
cuugaaagcacaguaacuauuug

SEQ ID NO: 350523 - RNA, 24 nt, Artificial Sequence
  Synthetic
acuugaaagcacaguaacuauuug

SEQ ID NO: 350524 - RNA, 18 nt, Artificial Sequence
  Synthetic
auuuggccacucuauuug

SEQ ID NO: 350525 - RNA, 19 nt, Artificial Sequence
  Synthetic
gauuuggccacucuauuug

SEQ ID NO: 350526 - RNA, 20 nt, Artificial Sequence
  Synthetic
cgauuuggccacucuauuug

SEQ ID NO: 350527 - RNA, 21 nt, Artificial Sequence
  Synthetic
ucgauuuggccacucuauuug

SEQ ID NO: 350528 - RNA, 22 nt, Artificial Sequence
  Synthetic
uucgauuuggccacucuauuug

SEQ ID NO: 350529 - RNA, 23 nt, Artificial Sequence
  Synthetic
uuucgauuuggccacucuauuug

SEQ ID NO: 350530 - RNA, 24 nt, Artificial Sequence
  Synthetic
uuuucgauuuggccacucuauuug

SEQ ID NO: 350531 - RNA, 18 nt, Artificial Sequence
  Synthetic
gcccucaaugucuauuug

SEQ ID NO: 350532 - RNA, 19 nt, Artificial Sequence
  Synthetic
agcccucaaugucuauuug

SEQ ID NO: 350533 - RNA, 20 nt, Artificial Sequence
  Synthetic
gagcccucaaugucuauuug

SEQ ID NO: 350534 - RNA, 21 nt, Artificial Sequence
  Synthetic
ugagcccucaaugucuauuug

SEQ ID NO: 350535 - RNA, 22 nt, Artificial Sequence
  Synthetic
gugagcccucaaugucuauuug

SEQ ID NO: 350536 - RNA, 23 nt, Artificial Sequence
  Synthetic
agugagcccucaaugucuauuug

SEQ ID NO: 350537 - RNA, 24 nt, Artificial Sequence
  Synthetic
uagugagcccucaaugucuauuug

SEQ ID NO: 350538 - RNA, 18 nt, Artificial Sequence
  Synthetic
gucccugcugucuauuug

SEQ ID NO: 350539 - RNA, 19 nt, Artificial Sequence
  Synthetic
cgucccugcugucuauuug

SEQ ID NO: 350540 - RNA, 20 nt, Artificial Sequence
  Synthetic
ccgucccugcugucuauuug

SEQ ID NO: 350541 - RNA, 21 nt, Artificial Sequence
  Synthetic
gccgucccugcugucuauuug

SEQ ID NO: 350542 - RNA, 22 nt, Artificial Sequence
  Synthetic
ugccgucccugcugucuauuug

SEQ ID NO: 350543 - RNA, 23 nt, Artificial Sequence
  Synthetic
cugccgucccugcugucuauuug

SEQ ID NO: 350544 - RNA, 24 nt, Artificial Sequence
  Synthetic
acugccgucccugcugucuauuug

SEQ ID NO: 350545 - RNA, 18 nt, Artificial Sequence
  Synthetic
agcaguuuauucuauuug

SEQ ID NO: 350546 - RNA, 19 nt, Artificial Sequence
  Synthetic
aagcaguuuauucuauuug

SEQ ID NO: 350547 - RNA, 20 nt, Artificial Sequence
  Synthetic
aaagcaguuuauucuauuug

SEQ ID NO: 350548 - RNA, 21 nt, Artificial Sequence
  Synthetic
aaaagcaguuuauucuauuug

SEQ ID NO: 350549 - RNA, 22 nt, Artificial Sequence
  Synthetic
uaaaagcaguuuauucuauuug

SEQ ID NO: 350550 - RNA, 23 nt, Artificial Sequence
  Synthetic
guaaaagcaguuuauucuauuug

SEQ ID NO: 350551 - RNA, 24 nt, Artificial Sequence
  Synthetic
uguaaaagcaguuuauucuauuug

SEQ ID NO: 350552 - RNA, 18 nt, Artificial Sequence
  Synthetic
cugguuuucuuguauuug

SEQ ID NO: 350553 - RNA, 19 nt, Artificial Sequence
  Synthetic
ucugguuuucuuguauuug

SEQ ID NO: 350554 - RNA, 20 nt, Artificial Sequence
  Synthetic
uucugguuuucuuguauuug

SEQ ID NO: 350555 - RNA, 21 nt, Artificial Sequence
  Synthetic
uuucugguuuucuuguauuug

SEQ ID NO: 350556 - RNA, 22 nt, Artificial Sequence
  Synthetic
uuuucugguuuucuuguauuug

SEQ ID NO: 350557 - RNA, 23 nt, Artificial Sequence
  Synthetic
uuuuucugguuuucuuguauuug

SEQ ID NO: 350558 - RNA, 24 nt, Artificial Sequence
  Synthetic
uuuuuucugguuuucuuguauuug

SEQ ID NO: 350559 - RNA, 18 nt, Artificial Sequence
  Synthetic
aggcagaaaaauuauuug

SEQ ID NO: 350560 - RNA, 19 nt, Artificial Sequence
  Synthetic
gaggcagaaaaauuauuug

SEQ ID NO: 350561 - RNA, 20 nt, Artificial Sequence
  Synthetic
agaggcagaaaaauuauuug

SEQ ID NO: 350562 - RNA, 21 nt, Artificial Sequence
  Synthetic
aagaggcagaaaaauuauuug

SEQ ID NO: 350563 - RNA, 22 nt, Artificial Sequence
  Synthetic
aaagaggcagaaaaauuauuug

SEQ ID NO: 350564 - RNA, 23 nt, Artificial Sequence
  Synthetic
uaaagaggcagaaaaauuauuug

SEQ ID NO: 350565 - RNA, 24 nt, Artificial Sequence
  Synthetic
uuaaagaggcagaaaaauuauuug

SEQ ID NO: 350566 - RNA, 18 nt, Artificial Sequence
  Synthetic
ugucuuuaaaauuauuug

SEQ ID NO: 350567 - RNA, 19 nt, Artificial Sequence
  Synthetic
cugucuuuaaaauuauuug

SEQ ID NO: 350568 - RNA, 20 nt, Artificial Sequence
  Synthetic
ucugucuuuaaaauuauuug

SEQ ID NO: 350569 - RNA, 21 nt, Artificial Sequence
  Synthetic
cucugucuuuaaaauuauuug

SEQ ID NO: 350570 - RNA, 22 nt, Artificial Sequence
  Synthetic
ucucugucuuuaaaauuauuug

SEQ ID NO: 350571 - RNA, 23 nt, Artificial Sequence
  Synthetic
aucucugucuuuaaaauuauuug

SEQ ID NO: 350572 - RNA, 24 nt, Artificial Sequence
  Synthetic
caucucugucuuuaaaauuauuug

SEQ ID NO: 350573 - RNA, 18 nt, Artificial Sequence
  Synthetic
gauugaucagauuauuug

SEQ ID NO: 350574 - RNA, 19 nt, Artificial Sequence
  Synthetic
agauugaucagauuauuug

SEQ ID NO: 350575 - RNA, 20 nt, Artificial Sequence
  Synthetic
aagauugaucagauuauuug

SEQ ID NO: 350576 - RNA, 21 nt, Artificial Sequence
  Synthetic
aaagauugaucagauuauuug

SEQ ID NO: 350577 - RNA, 22 nt, Artificial Sequence
  Synthetic
aaaagauugaucagauuauuug

SEQ ID NO: 350578 - RNA, 23 nt, Artificial Sequence
  Synthetic
uaaaagauugaucagauuauuug

SEQ ID NO: 350579 - RNA, 24 nt, Artificial Sequence
  Synthetic
auaaaagauugaucagauuauuug

SEQ ID NO: 350580 - RNA, 18 nt, Artificial Sequence
  Synthetic
gaauuuauagauuauuug

SEQ ID NO: 350581 - RNA, 19 nt, Artificial Sequence
  Synthetic
ugaauuuauagauuauuug

SEQ ID NO: 350582 - RNA, 20 nt, Artificial Sequence
  Synthetic
uugaauuuauagauuauuug

SEQ ID NO: 350583 - RNA, 21 nt, Artificial Sequence
  Synthetic
auugaauuuauagauuauuug

SEQ ID NO: 350584 - RNA, 22 nt, Artificial Sequence
  Synthetic
cauugaauuuauagauuauuug

SEQ ID NO: 350585 - RNA, 23 nt, Artificial Sequence
  Synthetic
gcauugaauuuauagauuauuug

SEQ ID NO: 350586 - RNA, 24 nt, Artificial Sequence
  Synthetic
ugcauugaauuuauagauuauuug

SEQ ID NO: 350587 - RNA, 18 nt, Artificial Sequence
  Synthetic
aauguauucccuuauuug

SEQ ID NO: 350588 - RNA, 19 nt, Artificial Sequence
  Synthetic
uaauguauucccuuauuug

SEQ ID NO: 350589 - RNA, 20 nt, Artificial Sequence
  Synthetic
uuaauguauucccuuauuug

SEQ ID NO: 350590 - RNA, 21 nt, Artificial Sequence
  Synthetic
cuuaauguauucccuuauuug

SEQ ID NO: 350591 - RNA, 22 nt, Artificial Sequence
  Synthetic
ccuuaauguauucccuuauuug

SEQ ID NO: 350592 - RNA, 23 nt, Artificial Sequence
  Synthetic
uccuuaauguauucccuuauuug

SEQ ID NO: 350593 - RNA, 24 nt, Artificial Sequence
  Synthetic
cuccuuaauguauucccuuauuug

SEQ ID NO: 350594 - RNA, 18 nt, Artificial Sequence
  Synthetic
aacacuggaucuuauuug

SEQ ID NO: 350595 - RNA, 19 nt, Artificial Sequence
  Synthetic
uaacacuggaucuuauuug

SEQ ID NO: 350596 - RNA, 20 nt, Artificial Sequence
  Synthetic
uuaacacuggaucuuauuug

SEQ ID NO: 350597 - RNA, 21 nt, Artificial Sequence
  Synthetic
auuaacacuggaucuuauuug

SEQ ID NO: 350598 - RNA, 22 nt, Artificial Sequence
  Synthetic
gauuaacacuggaucuuauuug

SEQ ID NO: 350599 - RNA, 23 nt, Artificial Sequence
  Synthetic
ugauuaacacuggaucuuauuug

SEQ ID NO: 350600 - RNA, 24 nt, Artificial Sequence
  Synthetic
augauuaacacuggaucuuauuug

SEQ ID NO: 350601 - RNA, 18 nt, Artificial Sequence
  Synthetic
uuuaauuuaucuuauuug

SEQ ID NO: 350602 - RNA, 19 nt, Artificial Sequence
  Synthetic
auuuaauuuaucuuauuug

SEQ ID NO: 350603 - RNA, 20 nt, Artificial Sequence
  Synthetic
aauuuaauuuaucuuauuug

SEQ ID NO: 350604 - RNA, 21 nt, Artificial Sequence
  Synthetic
caauuuaauuuaucuuauuug

SEQ ID NO: 350605 - RNA, 22 nt, Artificial Sequence
  Synthetic
acaauuuaauuuaucuuauuug

SEQ ID NO: 350606 - RNA, 23 nt, Artificial Sequence
  Synthetic
aacaauuuaauuuaucuuauuug

SEQ ID NO: 350607 - RNA, 24 nt, Artificial Sequence
  Synthetic
gaacaauuuaauuuaucuuauuug

SEQ ID NO: 350608 - RNA, 18 nt, Artificial Sequence
  Synthetic
aaaucuuauauuuauuug

SEQ ID NO: 350609 - RNA, 19 nt, Artificial Sequence
  Synthetic
caaaucuuauauuuauuug

SEQ ID NO: 350610 - RNA, 20 nt, Artificial Sequence
  Synthetic
ccaaaucuuauauuuauuug

SEQ ID NO: 350611 - RNA, 21 nt, Artificial Sequence
  Synthetic
accaaaucuuauauuuauuug

SEQ ID NO: 350612 - RNA, 22 nt, Artificial Sequence
  Synthetic
caccaaaucuuauauuuauuug

SEQ ID NO: 350613 - RNA, 23 nt, Artificial Sequence
  Synthetic
acaccaaaucuuauauuuauuug

SEQ ID NO: 350614 - RNA, 24 nt, Artificial Sequence
  Synthetic
cacaccaaaucuuauauuuauuug

SEQ ID NO: 350615 - RNA, 18 nt, Artificial Sequence
  Synthetic
ugaauggcuguuuauuug

SEQ ID NO: 350616 - RNA, 19 nt, Artificial Sequence
  Synthetic
uugaauggcuguuuauuug

SEQ ID NO: 350617 - RNA, 20 nt, Artificial Sequence
  Synthetic
auugaauggcuguuuauuug

SEQ ID NO: 350618 - RNA, 21 nt, Artificial Sequence
  Synthetic
aauugaauggcuguuuauuug

SEQ ID NO: 350619 - RNA, 22 nt, Artificial Sequence
  Synthetic
uaauugaauggcuguuuauuug

SEQ ID NO: 350620 - RNA, 23 nt, Artificial Sequence
  Synthetic
auaauugaauggcuguuuauuug

SEQ ID NO: 350621 - RNA, 24 nt, Artificial Sequence
  Synthetic
cauaauugaauggcuguuuauuug

SEQ ID NO: 350622 - RNA, 18 nt, Artificial Sequence
  Synthetic
augcugauagaaacuuug

SEQ ID NO: 350623 - RNA, 19 nt, Artificial Sequence
  Synthetic
aaugcugauagaaacuuug

SEQ ID NO: 350624 - RNA, 20 nt, Artificial Sequence
  Synthetic
aaaugcugauagaaacuuug

SEQ ID NO: 350625 - RNA, 21 nt, Artificial Sequence
  Synthetic
caaaugcugauagaaacuuug

SEQ ID NO: 350626 - RNA, 22 nt, Artificial Sequence
  Synthetic
ucaaaugcugauagaaacuuug

SEQ ID NO: 350627 - RNA, 23 nt, Artificial Sequence
  Synthetic
uucaaaugcugauagaaacuuug

SEQ ID NO: 350628 - RNA, 24 nt, Artificial Sequence
  Synthetic
auucaaaugcugauagaaacuuug

SEQ ID NO: 350629 - RNA, 18 nt, Artificial Sequence
  Synthetic
accaguaaauaaacuuug

SEQ ID NO: 350630 - RNA, 19 nt, Artificial Sequence
  Synthetic
caccaguaaauaaacuuug

SEQ ID NO: 350631 - RNA, 20 nt, Artificial Sequence
  Synthetic
ccaccaguaaauaaacuuug

SEQ ID NO: 350632 - RNA, 21 nt, Artificial Sequence
  Synthetic
accaccaguaaauaaacuuug

SEQ ID NO: 350633 - RNA, 22 nt, Artificial Sequence
  Synthetic
aaccaccaguaaauaaacuuug

SEQ ID NO: 350634 - RNA, 23 nt, Artificial Sequence
  Synthetic
gaaccaccaguaaauaaacuuug

SEQ ID NO: 350635 - RNA, 24 nt, Artificial Sequence
  Synthetic
ggaaccaccaguaaauaaacuuug

SEQ ID NO: 350636 - RNA, 18 nt, Artificial Sequence
  Synthetic
ucaaauauuuaaacuuug

SEQ ID NO: 350637 - RNA, 19 nt, Artificial Sequence
  Synthetic
uucaaauauuuaaacuuug

SEQ ID NO: 350638 - RNA, 20 nt, Artificial Sequence
  Synthetic
auucaaauauuuaaacuuug

SEQ ID NO: 350639 - RNA, 21 nt, Artificial Sequence
  Synthetic
uauucaaauauuuaaacuuug

SEQ ID NO: 350640 - RNA, 22 nt, Artificial Sequence
  Synthetic
cuauucaaauauuuaaacuuug

SEQ ID NO: 350641 - RNA, 23 nt, Artificial Sequence
  Synthetic
acuauucaaauauuuaaacuuug

SEQ ID NO: 350642 - RNA, 24 nt, Artificial Sequence
  Synthetic
aacuauucaaauauuuaaacuuug

SEQ ID NO: 350643 - RNA, 18 nt, Artificial Sequence
  Synthetic
ucuuuugcagcaacuuug

SEQ ID NO: 350644 - RNA, 19 nt, Artificial Sequence
  Synthetic
gucuuuugcagcaacuuug

SEQ ID NO: 350645 - RNA, 20 nt, Artificial Sequence
  Synthetic
ugucuuuugcagcaacuuug

SEQ ID NO: 350646 - RNA, 21 nt, Artificial Sequence
  Synthetic
augucuuuugcagcaacuuug

SEQ ID NO: 350647 - RNA, 22 nt, Artificial Sequence
  Synthetic
aaugucuuuugcagcaacuuug

SEQ ID NO: 350648 - RNA, 23 nt, Artificial Sequence
  Synthetic
uaaugucuuuugcagcaacuuug

SEQ ID NO: 350649 - RNA, 24 nt, Artificial Sequence
  Synthetic
auaaugucuuuugcagcaacuuug

SEQ ID NO: 350650 - RNA, 18 nt, Artificial Sequence
  Synthetic
uacuuccuaauaacuuug

SEQ ID NO: 350651 - RNA, 19 nt, Artificial Sequence
  Synthetic
guacuuccuaauaacuuug

SEQ ID NO: 350652 - RNA, 20 nt, Artificial Sequence
  Synthetic
uguacuuccuaauaacuuug

SEQ ID NO: 350653 - RNA, 21 nt, Artificial Sequence
  Synthetic
auguacuuccuaauaacuuug

SEQ ID NO: 350654 - RNA, 22 nt, Artificial Sequence
  Synthetic
cauguacuuccuaauaacuuug

SEQ ID NO: 350655 - RNA, 23 nt, Artificial Sequence
  Synthetic
ccauguacuuccuaauaacuuug

SEQ ID NO: 350656 - RNA, 24 nt, Artificial Sequence
  Synthetic
cccauguacuuccuaauaacuuug

SEQ ID NO: 350657 - RNA, 18 nt, Artificial Sequence
  Synthetic
uaacuucacauaacuuug

SEQ ID NO: 350658 - RNA, 19 nt, Artificial Sequence
  Synthetic
auaacuucacauaacuuug

SEQ ID NO: 350659 - RNA, 20 nt, Artificial Sequence
  Synthetic
uauaacuucacauaacuuug

SEQ ID NO: 350660 - RNA, 21 nt, Artificial Sequence
  Synthetic
uuauaacuucacauaacuuug

SEQ ID NO: 350661 - RNA, 22 nt, Artificial Sequence
  Synthetic
cuuauaacuucacauaacuuug

SEQ ID NO: 350662 - RNA, 23 nt, Artificial Sequence
  Synthetic
acuuauaacuucacauaacuuug

SEQ ID NO: 350663 - RNA, 24 nt, Artificial Sequence
  Synthetic
aacuuauaacuucacauaacuuug

SEQ ID NO: 350664 - RNA, 18 nt, Artificial Sequence
  Synthetic
uguaaucccaacacuuug

SEQ ID NO: 350665 - RNA, 19 nt, Artificial Sequence
  Synthetic
cuguaaucccaacacuuug

SEQ ID NO: 350666 - RNA, 20 nt, Artificial Sequence
  Synthetic
ccuguaaucccaacacuuug

SEQ ID NO: 350667 - RNA, 21 nt, Artificial Sequence
  Synthetic
gccuguaaucccaacacuuug

SEQ ID NO: 350668 - RNA, 22 nt, Artificial Sequence
  Synthetic
cgccuguaaucccaacacuuug

SEQ ID NO: 350669 - RNA, 23 nt, Artificial Sequence
  Synthetic
acgccuguaaucccaacacuuug

SEQ ID NO: 350670 - RNA, 24 nt, Artificial Sequence
  Synthetic
cacgccuguaaucccaacacuuug

SEQ ID NO: 350671 - RNA, 18 nt, Artificial Sequence
  Synthetic
uuuaaagaauucacuuug

SEQ ID NO: 350672 - RNA, 19 nt, Artificial Sequence
  Synthetic
auuuaaagaauucacuuug

SEQ ID NO: 350673 - RNA, 20 nt, Artificial Sequence
  Synthetic
gauuuaaagaauucacuuug

SEQ ID NO: 350674 - RNA, 21 nt, Artificial Sequence
  Synthetic
agauuuaaagaauucacuuug

SEQ ID NO: 350675 - RNA, 22 nt, Artificial Sequence
  Synthetic
gagauuuaaagaauucacuuug

SEQ ID NO: 350676 - RNA, 23 nt, Artificial Sequence
  Synthetic
agagauuuaaagaauucacuuug

SEQ ID NO: 350677 - RNA, 24 nt, Artificial Sequence
  Synthetic
aagagauuuaaagaauucacuuug

SEQ ID NO: 350678 - RNA, 18 nt, Artificial Sequence
  Synthetic
aaaaggacugagacuuug

SEQ ID NO: 350679 - RNA, 19 nt, Artificial Sequence
  Synthetic
gaaaaggacugagacuuug

SEQ ID NO: 350680 - RNA, 20 nt, Artificial Sequence
  Synthetic
agaaaaggacugagacuuug

SEQ ID NO: 350681 - RNA, 21 nt, Artificial Sequence
  Synthetic
cagaaaaggacugagacuuug

SEQ ID NO: 350682 - RNA, 22 nt, Artificial Sequence
  Synthetic
ucagaaaaggacugagacuuug

SEQ ID NO: 350683 - RNA, 23 nt, Artificial Sequence
  Synthetic
cucagaaaaggacugagacuuug

SEQ ID NO: 350684 - RNA, 24 nt, Artificial Sequence
  Synthetic
gcucagaaaaggacugagacuuug

SEQ ID NO: 350685 - RNA, 18 nt, Artificial Sequence
  Synthetic
uuauauccugagacuuug

SEQ ID NO: 350686 - RNA, 19 nt, Artificial Sequence
  Synthetic
uuuauauccugagacuuug

SEQ ID NO: 350687 - RNA, 20 nt, Artificial Sequence
  Synthetic
uuuuauauccugagacuuug

SEQ ID NO: 350688 - RNA, 21 nt, Artificial Sequence
  Synthetic
auuuuauauccugagacuuug

SEQ ID NO: 350689 - RNA, 22 nt, Artificial Sequence
  Synthetic
gauuuuauauccugagacuuug

SEQ ID NO: 350690 - RNA, 23 nt, Artificial Sequence
  Synthetic
ugauuuuauauccugagacuuug

SEQ ID NO: 350691 - RNA, 24 nt, Artificial Sequence
  Synthetic
uugauuuuauauccugagacuuug

SEQ ID NO: 350692 - RNA, 18 nt, Artificial Sequence
  Synthetic
uuguauccugagacuuug

SEQ ID NO: 350693 - RNA, 19 nt, Artificial Sequence
  Synthetic
uuuguauccugagacuuug

SEQ ID NO: 350694 - RNA, 20 nt, Artificial Sequence
  Synthetic
uuuuguauccugagacuuug

SEQ ID NO: 350695 - RNA, 21 nt, Artificial Sequence
  Synthetic
auuuuguauccugagacuuug

SEQ ID NO: 350696 - RNA, 22 nt, Artificial Sequence
  Synthetic
gauuuuguauccugagacuuug

SEQ ID NO: 350697 - RNA, 23 nt, Artificial Sequence
  Synthetic
ugauuuuguauccugagacuuug

SEQ ID NO: 350698 - RNA, 24 nt, Artificial Sequence
  Synthetic
uugauuuuguauccugagacuuug

SEQ ID NO: 350699 - RNA, 18 nt, Artificial Sequence
  Synthetic
uaauacauugugacuuug

SEQ ID NO: 350700 - RNA, 19 nt, Artificial Sequence
  Synthetic
uuaauacauugugacuuug

SEQ ID NO: 350701 - RNA, 20 nt, Artificial Sequence
  Synthetic
auuaauacauugugacuuug

SEQ ID NO: 350702 - RNA, 21 nt, Artificial Sequence
  Synthetic
uauuaauacauugugacuuug

SEQ ID NO: 350703 - RNA, 22 nt, Artificial Sequence
  Synthetic
uuauuaauacauugugacuuug

SEQ ID NO: 350704 - RNA, 23 nt, Artificial Sequence
  Synthetic
uuuauuaauacauugugacuuug

SEQ ID NO: 350705 - RNA, 24 nt, Artificial Sequence
  Synthetic
uuuuauuaauacauugugacuuug

SEQ ID NO: 350706 - RNA, 18 nt, Artificial Sequence
  Synthetic
gaaaaggaaaauacuuug

SEQ ID NO: 350707 - RNA, 19 nt, Artificial Sequence
  Synthetic
agaaaaggaaaauacuuug

SEQ ID NO: 350708 - RNA, 20 nt, Artificial Sequence
  Synthetic
uagaaaaggaaaauacuuug

SEQ ID NO: 350709 - RNA, 21 nt, Artificial Sequence
  Synthetic
guagaaaaggaaaauacuuug

SEQ ID NO: 350710 - RNA, 22 nt, Artificial Sequence
  Synthetic
uguagaaaaggaaaauacuuug

SEQ ID NO: 350711 - RNA, 23 nt, Artificial Sequence
  Synthetic
uuguagaaaaggaaaauacuuug

SEQ ID NO: 350712 - RNA, 24 nt, Artificial Sequence
  Synthetic
uuuguagaaaaggaaaauacuuug

SEQ ID NO: 350713 - RNA, 18 nt, Artificial Sequence
  Synthetic
aauuuagauaauacuuug

SEQ ID NO: 350714 - RNA, 19 nt, Artificial Sequence
  Synthetic
aaauuuagauaauacuuug

SEQ ID NO: 350715 - RNA, 20 nt, Artificial Sequence
  Synthetic
gaaauuuagauaauacuuug

SEQ ID NO: 350716 - RNA, 21 nt, Artificial Sequence
  Synthetic
ggaaauuuagauaauacuuug

SEQ ID NO: 350717 - RNA, 22 nt, Artificial Sequence
  Synthetic
aggaaauuuagauaauacuuug

SEQ ID NO: 350718 - RNA, 23 nt, Artificial Sequence
  Synthetic
aaggaaauuuagauaauacuuug

SEQ ID NO: 350719 - RNA, 24 nt, Artificial Sequence
  Synthetic
gaaggaaauuuagauaauacuuug

SEQ ID NO: 350720 - RNA, 18 nt, Artificial Sequence
  Synthetic
uuguuuagugcuacuuug

SEQ ID NO: 350721 - RNA, 19 nt, Artificial Sequence
  Synthetic
cuuguuuagugcuacuuug

SEQ ID NO: 350722 - RNA, 20 nt, Artificial Sequence
  Synthetic
ccuuguuuagugcuacuuug

SEQ ID NO: 350723 - RNA, 21 nt, Artificial Sequence
  Synthetic
cccuuguuuagugcuacuuug

SEQ ID NO: 350724 - RNA, 22 nt, Artificial Sequence
  Synthetic
gcccuuguuuagugcuacuuug

SEQ ID NO: 350725 - RNA, 23 nt, Artificial Sequence
  Synthetic
agcccuuguuuagugcuacuuug

SEQ ID NO: 350726 - RNA, 24 nt, Artificial Sequence
  Synthetic
uagcccuuguuuagugcuacuuug

SEQ ID NO: 350727 - RNA, 18 nt, Artificial Sequence
  Synthetic
ugaccuagguguacuuug

SEQ ID NO: 350728 - RNA, 19 nt, Artificial Sequence
  Synthetic
gugaccuagguguacuuug

SEQ ID NO: 350729 - RNA, 20 nt, Artificial Sequence
  Synthetic
agugaccuagguguacuuug

SEQ ID NO: 350730 - RNA, 21 nt, Artificial Sequence
  Synthetic
cagugaccuagguguacuuug

SEQ ID NO: 350731 - RNA, 22 nt, Artificial Sequence
  Synthetic
acagugaccuagguguacuuug

SEQ ID NO: 350732 - RNA, 23 nt, Artificial Sequence
  Synthetic
cacagugaccuagguguacuuug

SEQ ID NO: 350733 - RNA, 24 nt, Artificial Sequence
  Synthetic
gcacagugaccuagguguacuuug

SEQ ID NO: 350734 - RNA, 18 nt, Artificial Sequence
  Synthetic
cuuuuucuuauuacuuug

SEQ ID NO: 350735 - RNA, 19 nt, Artificial Sequence
  Synthetic
ccuuuuucuuauuacuuug

SEQ ID NO: 350736 - RNA, 20 nt, Artificial Sequence
  Synthetic
gccuuuuucuuauuacuuug

SEQ ID NO: 350737 - RNA, 21 nt, Artificial Sequence
  Synthetic
ggccuuuuucuuauuacuuug

SEQ ID NO: 350738 - RNA, 22 nt, Artificial Sequence
  Synthetic
uggccuuuuucuuauuacuuug

SEQ ID NO: 350739 - RNA, 23 nt, Artificial Sequence
  Synthetic
uuggccuuuuucuuauuacuuug

SEQ ID NO: 350740 - RNA, 24 nt, Artificial Sequence
  Synthetic
guuggccuuuuucuuauuacuuug

SEQ ID NO: 350741 - RNA, 18 nt, Artificial Sequence
  Synthetic
ggaguaagauuaccuuug

SEQ ID NO: 350742 - RNA, 19 nt, Artificial Sequence
  Synthetic
uggaguaagauuaccuuug

SEQ ID NO: 350743 - RNA, 20 nt, Artificial Sequence
  Synthetic
auggaguaagauuaccuuug

SEQ ID NO: 350744 - RNA, 21 nt, Artificial Sequence
  Synthetic
gauggaguaagauuaccuuug

SEQ ID NO: 350745 - RNA, 22 nt, Artificial Sequence
  Synthetic
ggauggaguaagauuaccuuug

SEQ ID NO: 350746 - RNA, 23 nt, Artificial Sequence
  Synthetic
uggauggaguaagauuaccuuug

SEQ ID NO: 350747 - RNA, 24 nt, Artificial Sequence
  Synthetic
guggauggaguaagauuaccuuug

SEQ ID NO: 350748 - RNA, 18 nt, Artificial Sequence
  Synthetic
cacgccuaaaucccuuug

SEQ ID NO: 350749 - RNA, 19 nt, Artificial Sequence
  Synthetic
ccacgccuaaaucccuuug

SEQ ID NO: 350750 - RNA, 20 nt, Artificial Sequence
  Synthetic
cccacgccuaaaucccuuug

SEQ ID NO: 350751 - RNA, 21 nt, Artificial Sequence
  Synthetic
ucccacgccuaaaucccuuug

SEQ ID NO: 350752 - RNA, 22 nt, Artificial Sequence
  Synthetic
cucccacgccuaaaucccuuug

SEQ ID NO: 350753 - RNA, 23 nt, Artificial Sequence
  Synthetic
acucccacgccuaaaucccuuug

SEQ ID NO: 350754 - RNA, 24 nt, Artificial Sequence
  Synthetic
gacucccacgccuaaaucccuuug

SEQ ID NO: 350755 - RNA, 18 nt, Artificial Sequence
  Synthetic
gcauuauccaucccuuug

SEQ ID NO: 350756 - RNA, 19 nt, Artificial Sequence
  Synthetic
ggcauuauccaucccuuug

SEQ ID NO: 350757 - RNA, 20 nt, Artificial Sequence
  Synthetic
aggcauuauccaucccuuug

SEQ ID NO: 350758 - RNA, 21 nt, Artificial Sequence
  Synthetic
aaggcauuauccaucccuuug

SEQ ID NO: 350759 - RNA, 22 nt, Artificial Sequence
  Synthetic
aaaggcauuauccaucccuuug

SEQ ID NO: 350760 - RNA, 23 nt, Artificial Sequence
  Synthetic
caaaggcauuauccaucccuuug

SEQ ID NO: 350761 - RNA, 24 nt, Artificial Sequence
  Synthetic
acaaaggcauuauccaucccuuug

SEQ ID NO: 350762 - RNA, 18 nt, Artificial Sequence
  Synthetic
uuuuuaagucucccuuug

SEQ ID NO: 350763 - RNA, 19 nt, Artificial Sequence
  Synthetic
uuuuuuaagucucccuuug

SEQ ID NO: 350764 - RNA, 20 nt, Artificial Sequence
  Synthetic
uuuuuuuaagucucccuuug

SEQ ID NO: 350765 - RNA, 21 nt, Artificial Sequence
  Synthetic
uuuuuuuuaagucucccuuug

SEQ ID NO: 350766 - RNA, 22 nt, Artificial Sequence
  Synthetic
uuuuuuuuuaagucucccuuug

SEQ ID NO: 350767 - RNA, 23 nt, Artificial Sequence
  Synthetic
uuuuuuuuuuaagucucccuuug

SEQ ID NO: 350768 - RNA, 24 nt, Artificial Sequence
  Synthetic
uuuuuuuuuuuaagucucccuuug

SEQ ID NO: 350769 - RNA, 18 nt, Artificial Sequence
  Synthetic
uuuaagaaugucccuuug

SEQ ID NO: 350770 - RNA, 19 nt, Artificial Sequence
  Synthetic
auuuaagaaugucccuuug

SEQ ID NO: 350771 - RNA, 20 nt, Artificial Sequence
  Synthetic
uauuuaagaaugucccuuug

SEQ ID NO: 350772 - RNA, 21 nt, Artificial Sequence
  Synthetic
auauuuaagaaugucccuuug

SEQ ID NO: 350773 - RNA, 22 nt, Artificial Sequence
  Synthetic
aauauuuaagaaugucccuuug

SEQ ID NO: 350774 - RNA, 23 nt, Artificial Sequence
  Synthetic
uaauauuuaagaaugucccuuug

SEQ ID NO: 350775 - RNA, 24 nt, Artificial Sequence
  Synthetic
auaauauuuaagaaugucccuuug

SEQ ID NO: 350776 - RNA, 18 nt, Artificial Sequence
  Synthetic
guauuaaguaagccuuug

SEQ ID NO: 350777 - RNA, 19 nt, Artificial Sequence
  Synthetic
uguauuaaguaagccuuug

SEQ ID NO: 350778 - RNA, 20 nt, Artificial Sequence
  Synthetic
guguauuaaguaagccuuug

SEQ ID NO: 350779 - RNA, 21 nt, Artificial Sequence
  Synthetic
uguguauuaaguaagccuuug

SEQ ID NO: 350780 - RNA, 22 nt, Artificial Sequence
  Synthetic
auguguauuaaguaagccuuug

SEQ ID NO: 350781 - RNA, 23 nt, Artificial Sequence
  Synthetic
uauguguauuaaguaagccuuug

SEQ ID NO: 350782 - RNA, 24 nt, Artificial Sequence
  Synthetic
cuauguguauuaaguaagccuuug

SEQ ID NO: 350783 - RNA, 18 nt, Artificial Sequence
  Synthetic
augaguucacauccuuug

SEQ ID NO: 350784 - RNA, 19 nt, Artificial Sequence
  Synthetic
gaugaguucacauccuuug

SEQ ID NO: 350785 - RNA, 20 nt, Artificial Sequence
  Synthetic
ggaugaguucacauccuuug

SEQ ID NO: 350786 - RNA, 18 nt, Artificial Sequence
  Synthetic
cagaucugccauccuuug

SEQ ID NO: 350787 - RNA, 19 nt, Artificial Sequence
  Synthetic
acagaucugccauccuuug

SEQ ID NO: 350788 - RNA, 20 nt, Artificial Sequence
  Synthetic
cacagaucugccauccuuug

SEQ ID NO: 350789 - RNA, 21 nt, Artificial Sequence
  Synthetic
ucacagaucugccauccuuug

SEQ ID NO: 350790 - RNA, 22 nt, Artificial Sequence
  Synthetic
cucacagaucugccauccuuug

SEQ ID NO: 350791 - RNA, 23 nt, Artificial Sequence
  Synthetic
ucucacagaucugccauccuuug

SEQ ID NO: 350792 - RNA, 24 nt, Artificial Sequence
  Synthetic
gucucacagaucugccauccuuug

SEQ ID NO: 350793 - RNA, 18 nt, Artificial Sequence
  Synthetic
augaguucaaguccuuug

SEQ ID NO: 350794 - RNA, 19 nt, Artificial Sequence
  Synthetic
gaugaguucaaguccuuug

SEQ ID NO: 350795 - RNA, 20 nt, Artificial Sequence
  Synthetic
ggaugaguucaaguccuuug

SEQ ID NO: 350796 - RNA, 21 nt, Artificial Sequence
  Synthetic
aggaugaguucaaguccuuug

SEQ ID NO: 350797 - RNA, 22 nt, Artificial Sequence
  Synthetic
gaggaugaguucaaguccuuug

SEQ ID NO: 350798 - RNA, 23 nt, Artificial Sequence
  Synthetic
agaggaugaguucaaguccuuug

SEQ ID NO: 350799 - RNA, 24 nt, Artificial Sequence
  Synthetic
aagaggaugaguucaaguccuuug

SEQ ID NO: 350800 - RNA, 18 nt, Artificial Sequence
  Synthetic
augaguucacguccuuug

SEQ ID NO: 350801 - RNA, 19 nt, Artificial Sequence
  Synthetic
gaugaguucacguccuuug

SEQ ID NO: 350802 - RNA, 20 nt, Artificial Sequence
  Synthetic
ggaugaguucacguccuuug

SEQ ID NO: 350803 - RNA, 21 nt, Artificial Sequence
  Synthetic
aggaugaguucacguccuuug

SEQ ID NO: 350804 - RNA, 22 nt, Artificial Sequence
  Synthetic
aaggaugaguucacguccuuug

SEQ ID NO: 350805 - RNA, 23 nt, Artificial Sequence
  Synthetic
aaaggaugaguucacguccuuug

SEQ ID NO: 350806 - RNA, 24 nt, Artificial Sequence
  Synthetic
aaaaggaugaguucacguccuuug

SEQ ID NO: 350807 - RNA, 18 nt, Artificial Sequence
  Synthetic
acgaguucauguccuuug

SEQ ID NO: 350808 - RNA, 19 nt, Artificial Sequence
  Synthetic
aacgaguucauguccuuug

SEQ ID NO: 350809 - RNA, 20 nt, Artificial Sequence
  Synthetic
gaacgaguucauguccuuug

SEQ ID NO: 350810 - RNA, 21 nt, Artificial Sequence
  Synthetic
agaacgaguucauguccuuug

SEQ ID NO: 350811 - RNA, 22 nt, Artificial Sequence
  Synthetic
aagaacgaguucauguccuuug

SEQ ID NO: 350812 - RNA, 23 nt, Artificial Sequence
  Synthetic
aaagaacgaguucauguccuuug

SEQ ID NO: 350813 - RNA, 24 nt, Artificial Sequence
  Synthetic
aaaagaacgaguucauguccuuug

SEQ ID NO: 350814 - RNA, 18 nt, Artificial Sequence
  Synthetic
augaguucauguccuuug

SEQ ID NO: 350815 - RNA, 19 nt, Artificial Sequence
  Synthetic
gaugaguucauguccuuug

SEQ ID NO: 350816 - RNA, 20 nt, Artificial Sequence
  Synthetic
ggaugaguucauguccuuug

SEQ ID NO: 350817 - RNA, 21 nt, Artificial Sequence
  Synthetic
aggaugaguucauguccuuug

SEQ ID NO: 350818 - RNA, 22 nt, Artificial Sequence
  Synthetic
aaggaugaguucauguccuuug

SEQ ID NO: 350819 - RNA, 23 nt, Artificial Sequence
  Synthetic
aaaggaugaguucauguccuuug

SEQ ID NO: 350820 - RNA, 24 nt, Artificial Sequence
  Synthetic
aaaaggaugaguucauguccuuug

SEQ ID NO: 350821 - RNA, 20 nt, Artificial Sequence
  Synthetic
ugaugaguucauguccuuug

SEQ ID NO: 350822 - RNA, 18 nt, Artificial Sequence
  Synthetic
aaaacuagaauuccuuug

SEQ ID NO: 350823 - RNA, 19 nt, Artificial Sequence
  Synthetic
aaaaacuagaauuccuuug

SEQ ID NO: 350824 - RNA, 20 nt, Artificial Sequence
  Synthetic
uaaaaacuagaauuccuuug

SEQ ID NO: 350825 - RNA, 21 nt, Artificial Sequence
  Synthetic
auaaaaacuagaauuccuuug

SEQ ID NO: 350826 - RNA, 22 nt, Artificial Sequence
  Synthetic
uauaaaaacuagaauuccuuug

SEQ ID NO: 350827 - RNA, 23 nt, Artificial Sequence
  Synthetic
cuauaaaaacuagaauuccuuug

SEQ ID NO: 350828 - RNA, 24 nt, Artificial Sequence
  Synthetic
ccuauaaaaacuagaauuccuuug

SEQ ID NO: 350829 - RNA, 18 nt, Artificial Sequence
  Synthetic
auaauggacaaagcuuug

SEQ ID NO: 350830 - RNA, 19 nt, Artificial Sequence
  Synthetic
cauaauggacaaagcuuug

SEQ ID NO: 350831 - RNA, 20 nt, Artificial Sequence
  Synthetic
gcauaauggacaaagcuuug

SEQ ID NO: 350832 - RNA, 21 nt, Artificial Sequence
  Synthetic
agcauaauggacaaagcuuug

SEQ ID NO: 350833 - RNA, 22 nt, Artificial Sequence
  Synthetic
gagcauaauggacaaagcuuug

SEQ ID NO: 350834 - RNA, 23 nt, Artificial Sequence
  Synthetic
ggagcauaauggacaaagcuuug

SEQ ID NO: 350835 - RNA, 24 nt, Artificial Sequence
  Synthetic
gggagcauaauggacaaagcuuug

SEQ ID NO: 350836 - RNA, 18 nt, Artificial Sequence
  Synthetic
uaaucaaggaaagcuuug

SEQ ID NO: 350837 - RNA, 19 nt, Artificial Sequence
  Synthetic
uuaaucaaggaaagcuuug

SEQ ID NO: 350838 - RNA, 20 nt, Artificial Sequence
  Synthetic
auuaaucaaggaaagcuuug

SEQ ID NO: 350839 - RNA, 21 nt, Artificial Sequence
  Synthetic
aauuaaucaaggaaagcuuug

SEQ ID NO: 350840 - RNA, 22 nt, Artificial Sequence
  Synthetic
uaauuaaucaaggaaagcuuug

SEQ ID NO: 350841 - RNA, 23 nt, Artificial Sequence
  Synthetic
cuaauuaaucaaggaaagcuuug

SEQ ID NO: 350842 - RNA, 24 nt, Artificial Sequence
  Synthetic
ucuaauuaaucaaggaaagcuuug

SEQ ID NO: 350843 - RNA, 18 nt, Artificial Sequence
  Synthetic
aagggguaguaagcuuug

SEQ ID NO: 350844 - RNA, 19 nt, Artificial Sequence
  Synthetic
gaagggguaguaagcuuug

SEQ ID NO: 350845 - RNA, 20 nt, Artificial Sequence
  Synthetic
ggaagggguaguaagcuuug

SEQ ID NO: 350846 - RNA, 21 nt, Artificial Sequence
  Synthetic
aggaagggguaguaagcuuug

SEQ ID NO: 350847 - RNA, 22 nt, Artificial Sequence
  Synthetic
uaggaagggguaguaagcuuug

SEQ ID NO: 350848 - RNA, 23 nt, Artificial Sequence
  Synthetic
guaggaagggguaguaagcuuug

SEQ ID NO: 350849 - RNA, 24 nt, Artificial Sequence
  Synthetic
gguaggaagggguaguaagcuuug

SEQ ID NO: 350850 - RNA, 18 nt, Artificial Sequence
  Synthetic
auuguauuuagagcuuug

SEQ ID NO: 350851 - RNA, 19 nt, Artificial Sequence
  Synthetic
aauuguauuuagagcuuug

SEQ ID NO: 350852 - RNA, 20 nt, Artificial Sequence
  Synthetic
aaauuguauuuagagcuuug

SEQ ID NO: 350853 - RNA, 21 nt, Artificial Sequence
  Synthetic
uaaauuguauuuagagcuuug

SEQ ID NO: 350854 - RNA, 22 nt, Artificial Sequence
  Synthetic
cuaaauuguauuuagagcuuug

SEQ ID NO: 350855 - RNA, 23 nt, Artificial Sequence
  Synthetic
acuaaauuguauuuagagcuuug

SEQ ID NO: 350856 - RNA, 24 nt, Artificial Sequence
  Synthetic
uacuaaauuguauuuagagcuuug

SEQ ID NO: 350857 - RNA, 18 nt, Artificial Sequence
  Synthetic
caacuauuuggagcuuug

SEQ ID NO: 350858 - RNA, 19 nt, Artificial Sequence
  Synthetic
acaacuauuuggagcuuug

SEQ ID NO: 350859 - RNA, 20 nt, Artificial Sequence
  Synthetic
aacaacuauuuggagcuuug

SEQ ID NO: 350860 - RNA, 21 nt, Artificial Sequence
  Synthetic
aaacaacuauuuggagcuuug

SEQ ID NO: 350861 - RNA, 22 nt, Artificial Sequence
  Synthetic
caaacaacuauuuggagcuuug

SEQ ID NO: 350862 - RNA, 23 nt, Artificial Sequence
  Synthetic
ccaaacaacuauuuggagcuuug

SEQ ID NO: 350863 - RNA, 24 nt, Artificial Sequence
  Synthetic
accaaacaacuauuuggagcuuug

SEQ ID NO: 350864 - RNA, 18 nt, Artificial Sequence
  Synthetic
uucacaaaauuagcuuug

SEQ ID NO: 350865 - RNA, 19 nt, Artificial Sequence
  Synthetic
auucacaaaauuagcuuug

SEQ ID NO: 350866 - RNA, 20 nt, Artificial Sequence
  Synthetic
cauucacaaaauuagcuuug

SEQ ID NO: 350867 - RNA, 21 nt, Artificial Sequence
  Synthetic
acauucacaaaauuagcuuug

SEQ ID NO: 350868 - RNA, 22 nt, Artificial Sequence
  Synthetic
aacauucacaaaauuagcuuug

SEQ ID NO: 350869 - RNA, 23 nt, Artificial Sequence
  Synthetic
caacauucacaaaauuagcuuug

SEQ ID NO: 350870 - RNA, 24 nt, Artificial Sequence
  Synthetic
ucaacauucacaaaauuagcuuug

SEQ ID NO: 350871 - RNA, 18 nt, Artificial Sequence
  Synthetic
gcaggagucccggcuuug

SEQ ID NO: 350872 - RNA, 19 nt, Artificial Sequence
  Synthetic
ggcaggagucccggcuuug

SEQ ID NO: 350873 - RNA, 20 nt, Artificial Sequence
  Synthetic
uggcaggagucccggcuuug

SEQ ID NO: 350874 - RNA, 21 nt, Artificial Sequence
  Synthetic
cuggcaggagucccggcuuug

SEQ ID NO: 350875 - RNA, 22 nt, Artificial Sequence
  Synthetic
ucuggcaggagucccggcuuug

SEQ ID NO: 350876 - RNA, 23 nt, Artificial Sequence
  Synthetic
aucuggcaggagucccggcuuug

SEQ ID NO: 350877 - RNA, 24 nt, Artificial Sequence
  Synthetic
uaucuggcaggagucccggcuuug

SEQ ID NO: 350878 - RNA, 18 nt, Artificial Sequence
  Synthetic
gacucagucccugcuuug

SEQ ID NO: 350879 - RNA, 19 nt, Artificial Sequence
  Synthetic
agacucagucccugcuuug

SEQ ID NO: 350880 - RNA, 20 nt, Artificial Sequence
  Synthetic
uagacucagucccugcuuug

SEQ ID NO: 350881 - RNA, 21 nt, Artificial Sequence
  Synthetic
uuagacucagucccugcuuug

SEQ ID NO: 350882 - RNA, 22 nt, Artificial Sequence
  Synthetic
auuagacucagucccugcuuug

SEQ ID NO: 350883 - RNA, 23 nt, Artificial Sequence
  Synthetic
aauuagacucagucccugcuuug

SEQ ID NO: 350884 - RNA, 24 nt, Artificial Sequence
  Synthetic
gaauuagacucagucccugcuuug

SEQ ID NO: 350885 - RNA, 18 nt, Artificial Sequence
  Synthetic
cuaugugcuugugcuuug

SEQ ID NO: 350886 - RNA, 19 nt, Artificial Sequence
  Synthetic
ccuaugugcuugugcuuug

SEQ ID NO: 350887 - RNA, 20 nt, Artificial Sequence
  Synthetic
uccuaugugcuugugcuuug

SEQ ID NO: 350888 - RNA, 21 nt, Artificial Sequence
  Synthetic
guccuaugugcuugugcuuug

SEQ ID NO: 350889 - RNA, 22 nt, Artificial Sequence
  Synthetic
uguccuaugugcuugugcuuug

SEQ ID NO: 350890 - RNA, 23 nt, Artificial Sequence
  Synthetic
cuguccuaugugcuugugcuuug

SEQ ID NO: 350891 - RNA, 24 nt, Artificial Sequence
  Synthetic
ucuguccuaugugcuugugcuuug

SEQ ID NO: 350892 - RNA, 18 nt, Artificial Sequence
  Synthetic
auuguuucccuugcuuug

SEQ ID NO: 350893 - RNA, 19 nt, Artificial Sequence
  Synthetic
gauuguuucccuugcuuug

SEQ ID NO: 350894 - RNA, 20 nt, Artificial Sequence
  Synthetic
ugauuguuucccuugcuuug

SEQ ID NO: 350895 - RNA, 21 nt, Artificial Sequence
  Synthetic
uugauuguuucccuugcuuug

SEQ ID NO: 350896 - RNA, 22 nt, Artificial Sequence
  Synthetic
guugauuguuucccuugcuuug

SEQ ID NO: 350897 - RNA, 23 nt, Artificial Sequence
  Synthetic
uguugauuguuucccuugcuuug

SEQ ID NO: 350898 - RNA, 24 nt, Artificial Sequence
  Synthetic
cuguugauuguuucccuugcuuug

SEQ ID NO: 350899 - RNA, 18 nt, Artificial Sequence
  Synthetic
gaucaggacaaaucuuug

SEQ ID NO: 350900 - RNA, 19 nt, Artificial Sequence
  Synthetic
ugaucaggacaaaucuuug

SEQ ID NO: 350901 - RNA, 20 nt, Artificial Sequence
  Synthetic
uugaucaggacaaaucuuug

SEQ ID NO: 350902 - RNA, 21 nt, Artificial Sequence
  Synthetic
auugaucaggacaaaucuuug

SEQ ID NO: 350903 - RNA, 22 nt, Artificial Sequence
  Synthetic
gauugaucaggacaaaucuuug

SEQ ID NO: 350904 - RNA, 23 nt, Artificial Sequence
  Synthetic
agauugaucaggacaaaucuuug

SEQ ID NO: 350905 - RNA, 24 nt, Artificial Sequence
  Synthetic
aagauugaucaggacaaaucuuug

SEQ ID NO: 350906 - RNA, 18 nt, Artificial Sequence
  Synthetic
caagccagaagaucuuug

SEQ ID NO: 350907 - RNA, 19 nt, Artificial Sequence
  Synthetic
acaagccagaagaucuuug

SEQ ID NO: 350908 - RNA, 20 nt, Artificial Sequence
  Synthetic
uacaagccagaagaucuuug

SEQ ID NO: 350909 - RNA, 21 nt, Artificial Sequence
  Synthetic
uuacaagccagaagaucuuug

SEQ ID NO: 350910 - RNA, 22 nt, Artificial Sequence
  Synthetic
uuuacaagccagaagaucuuug

SEQ ID NO: 350911 - RNA, 23 nt, Artificial Sequence
  Synthetic
uuuuacaagccagaagaucuuug

SEQ ID NO: 350912 - RNA, 24 nt, Artificial Sequence
  Synthetic
guuuuacaagccagaagaucuuug

SEQ ID NO: 350913 - RNA, 18 nt, Artificial Sequence
  Synthetic
ucugguucuagaucuuug

SEQ ID NO: 350914 - RNA, 19 nt, Artificial Sequence
  Synthetic
uucugguucuagaucuuug

SEQ ID NO: 350915 - RNA, 20 nt, Artificial Sequence
  Synthetic
uuucugguucuagaucuuug

SEQ ID NO: 350916 - RNA, 21 nt, Artificial Sequence
  Synthetic
auuucugguucuagaucuuug

SEQ ID NO: 350917 - RNA, 22 nt, Artificial Sequence
  Synthetic
uauuucugguucuagaucuuug

SEQ ID NO: 350918 - RNA, 23 nt, Artificial Sequence
  Synthetic
guauuucugguucuagaucuuug

SEQ ID NO: 350919 - RNA, 24 nt, Artificial Sequence
  Synthetic
gguauuucugguucuagaucuuug

SEQ ID NO: 350920 - RNA, 18 nt, Artificial Sequence
  Synthetic
aggaaaucaguaucuuug

SEQ ID NO: 350921 - RNA, 19 nt, Artificial Sequence
  Synthetic
aaggaaaucaguaucuuug

SEQ ID NO: 350922 - RNA, 20 nt, Artificial Sequence
  Synthetic
aaaggaaaucaguaucuuug

SEQ ID NO: 350923 - RNA, 21 nt, Artificial Sequence
  Synthetic
aaaaggaaaucaguaucuuug

SEQ ID NO: 350924 - RNA, 22 nt, Artificial Sequence
  Synthetic
gaaaaggaaaucaguaucuuug

SEQ ID NO: 350925 - RNA, 23 nt, Artificial Sequence
  Synthetic
agaaaaggaaaucaguaucuuug

SEQ ID NO: 350926 - RNA, 24 nt, Artificial Sequence
  Synthetic
aagaaaaggaaaucaguaucuuug

SEQ ID NO: 350927 - RNA, 18 nt, Artificial Sequence
  Synthetic
agugcuuuaagcucuuug

SEQ ID NO: 350928 - RNA, 19 nt, Artificial Sequence
  Synthetic
aagugcuuuaagcucuuug

SEQ ID NO: 350929 - RNA, 20 nt, Artificial Sequence
  Synthetic
aaagugcuuuaagcucuuug

SEQ ID NO: 350930 - RNA, 21 nt, Artificial Sequence
  Synthetic
uaaagugcuuuaagcucuuug

SEQ ID NO: 350931 - RNA, 22 nt, Artificial Sequence
  Synthetic
auaaagugcuuuaagcucuuug

SEQ ID NO: 350932 - RNA, 23 nt, Artificial Sequence
  Synthetic
cauaaagugcuuuaagcucuuug

SEQ ID NO: 350933 - RNA, 24 nt, Artificial Sequence
  Synthetic
ccauaaagugcuuuaagcucuuug

SEQ ID NO: 350934 - RNA, 18 nt, Artificial Sequence
  Synthetic
cuugauaugaagucuuug

SEQ ID NO: 350935 - RNA, 19 nt, Artificial Sequence
  Synthetic
acuugauaugaagucuuug

SEQ ID NO: 350936 - RNA, 20 nt, Artificial Sequence
  Synthetic
uacuugauaugaagucuuug

SEQ ID NO: 350937 - RNA, 21 nt, Artificial Sequence
  Synthetic
auacuugauaugaagucuuug

SEQ ID NO: 350938 - RNA, 22 nt, Artificial Sequence
  Synthetic
cauacuugauaugaagucuuug

SEQ ID NO: 350939 - RNA, 23 nt, Artificial Sequence
  Synthetic
ccauacuugauaugaagucuuug

SEQ ID NO: 350940 - RNA, 24 nt, Artificial Sequence
  Synthetic
gccauacuugauaugaagucuuug

SEQ ID NO: 350941 - RNA, 18 nt, Artificial Sequence
  Synthetic
ucuuuuucuaagucuuug

SEQ ID NO: 350942 - RNA, 19 nt, Artificial Sequence
  Synthetic
uucuuuuucuaagucuuug

SEQ ID NO: 350943 - RNA, 20 nt, Artificial Sequence
  Synthetic
cuucuuuuucuaagucuuug

SEQ ID NO: 350944 - RNA, 21 nt, Artificial Sequence
  Synthetic
ccuucuuuuucuaagucuuug

SEQ ID NO: 350945 - RNA, 22 nt, Artificial Sequence
  Synthetic
uccuucuuuuucuaagucuuug

SEQ ID NO: 350946 - RNA, 23 nt, Artificial Sequence
  Synthetic
guccuucuuuuucuaagucuuug

SEQ ID NO: 350947 - RNA, 24 nt, Artificial Sequence
  Synthetic
uguccuucuuuuucuaagucuuug

SEQ ID NO: 350948 - RNA, 18 nt, Artificial Sequence
  Synthetic
aaauugcuguggucuuug

SEQ ID NO: 350949 - RNA, 19 nt, Artificial Sequence
  Synthetic
caaauugcuguggucuuug

SEQ ID NO: 350950 - RNA, 20 nt, Artificial Sequence
  Synthetic
gcaaauugcuguggucuuug

SEQ ID NO: 350951 - RNA, 21 nt, Artificial Sequence
  Synthetic
cgcaaauugcuguggucuuug

SEQ ID NO: 350952 - RNA, 22 nt, Artificial Sequence
  Synthetic
acgcaaauugcuguggucuuug

SEQ ID NO: 350953 - RNA, 23 nt, Artificial Sequence
  Synthetic
aacgcaaauugcuguggucuuug

SEQ ID NO: 350954 - RNA, 24 nt, Artificial Sequence
  Synthetic
aaacgcaaauugcuguggucuuug

SEQ ID NO: 350955 - RNA, 18 nt, Artificial Sequence
  Synthetic
uauggauggaugucuuug

SEQ ID NO: 350956 - RNA, 19 nt, Artificial Sequence
  Synthetic
guauggauggaugucuuug

SEQ ID NO: 350957 - RNA, 20 nt, Artificial Sequence
  Synthetic
uguauggauggaugucuuug

SEQ ID NO: 350958 - RNA, 21 nt, Artificial Sequence
  Synthetic
guguauggauggaugucuuug

SEQ ID NO: 350959 - RNA, 22 nt, Artificial Sequence
  Synthetic
aguguauggauggaugucuuug

SEQ ID NO: 350960 - RNA, 23 nt, Artificial Sequence
  Synthetic
caguguauggauggaugucuuug

SEQ ID NO: 350961 - RNA, 24 nt, Artificial Sequence
  Synthetic
ccaguguauggauggaugucuuug

SEQ ID NO: 350962 - RNA, 18 nt, Artificial Sequence
  Synthetic
acuggcuggcugucuuug

SEQ ID NO: 350963 - RNA, 19 nt, Artificial Sequence
  Synthetic
aacuggcuggcugucuuug

SEQ ID NO: 350964 - RNA, 20 nt, Artificial Sequence
  Synthetic
uaacuggcuggcugucuuug

SEQ ID NO: 350965 - RNA, 21 nt, Artificial Sequence
  Synthetic
cuaacuggcuggcugucuuug

SEQ ID NO: 350966 - RNA, 22 nt, Artificial Sequence
  Synthetic
ccuaacuggcuggcugucuuug

SEQ ID NO: 350967 - RNA, 23 nt, Artificial Sequence
  Synthetic
uccuaacuggcuggcugucuuug

SEQ ID NO: 350968 - RNA, 24 nt, Artificial Sequence
  Synthetic
auccuaacuggcuggcugucuuug

SEQ ID NO: 350969 - RNA, 18 nt, Artificial Sequence
  Synthetic
uucauauuauauucuuug

SEQ ID NO: 350970 - RNA, 19 nt, Artificial Sequence
  Synthetic
uuucauauuauauucuuug

SEQ ID NO: 350971 - RNA, 20 nt, Artificial Sequence
  Synthetic
auuucauauuauauucuuug

SEQ ID NO: 350972 - RNA, 21 nt, Artificial Sequence
  Synthetic
aauuucauauuauauucuuug

SEQ ID NO: 350973 - RNA, 22 nt, Artificial Sequence
  Synthetic
aaauuucauauuauauucuuug

SEQ ID NO: 350974 - RNA, 23 nt, Artificial Sequence
  Synthetic
aaaauuucauauuauauucuuug

SEQ ID NO: 350975 - RNA, 24 nt, Artificial Sequence
  Synthetic
aaaaauuucauauuauauucuuug

SEQ ID NO: 350976 - RNA, 18 nt, Artificial Sequence
  Synthetic
cauuuuacagcuucuuug

SEQ ID NO: 350977 - RNA, 19 nt, Artificial Sequence
  Synthetic
ucauuuuacagcuucuuug

SEQ ID NO: 350978 - RNA, 20 nt, Artificial Sequence
  Synthetic
aucauuuuacagcuucuuug

SEQ ID NO: 350979 - RNA, 21 nt, Artificial Sequence
  Synthetic
uaucauuuuacagcuucuuug

SEQ ID NO: 350980 - RNA, 22 nt, Artificial Sequence
  Synthetic
uuaucauuuuacagcuucuuug

SEQ ID NO: 350981 - RNA, 23 nt, Artificial Sequence
  Synthetic
auuaucauuuuacagcuucuuug

SEQ ID NO: 350982 - RNA, 24 nt, Artificial Sequence
  Synthetic
cauuaucauuuuacagcuucuuug

SEQ ID NO: 350983 - RNA, 18 nt, Artificial Sequence
  Synthetic
aacugacaggcuucuuug

SEQ ID NO: 350984 - RNA, 19 nt, Artificial Sequence
  Synthetic
aaacugacaggcuucuuug

SEQ ID NO: 350985 - RNA, 20 nt, Artificial Sequence
  Synthetic
aaaacugacaggcuucuuug

SEQ ID NO: 350986 - RNA, 21 nt, Artificial Sequence
  Synthetic
uaaaacugacaggcuucuuug

SEQ ID NO: 350987 - RNA, 22 nt, Artificial Sequence
  Synthetic
guaaaacugacaggcuucuuug

SEQ ID NO: 350988 - RNA, 23 nt, Artificial Sequence
  Synthetic
uguaaaacugacaggcuucuuug

SEQ ID NO: 350989 - RNA, 24 nt, Artificial Sequence
  Synthetic
uuguaaaacugacaggcuucuuug

SEQ ID NO: 350990 - RNA, 18 nt, Artificial Sequence
  Synthetic
auuucuauaucuucuuug

SEQ ID NO: 350991 - RNA, 19 nt, Artificial Sequence
  Synthetic
cauuucuauaucuucuuug

SEQ ID NO: 350992 - RNA, 20 nt, Artificial Sequence
  Synthetic
ucauuucuauaucuucuuug

SEQ ID NO: 350993 - RNA, 21 nt, Artificial Sequence
  Synthetic
cucauuucuauaucuucuuug

SEQ ID NO: 350994 - RNA, 22 nt, Artificial Sequence
  Synthetic
acucauuucuauaucuucuuug

SEQ ID NO: 350995 - RNA, 23 nt, Artificial Sequence
  Synthetic
uacucauuucuauaucuucuuug

SEQ ID NO: 350996 - RNA, 24 nt, Artificial Sequence
  Synthetic
auacucauuucuauaucuucuuug

SEQ ID NO: 350997 - RNA, 18 nt, Artificial Sequence
  Synthetic
auuuuaaugucuucuuug

SEQ ID NO: 350998 - RNA, 19 nt, Artificial Sequence
  Synthetic
cauuuuaaugucuucuuug

SEQ ID NO: 350999 - RNA, 20 nt, Artificial Sequence
  Synthetic
ucauuuuaaugucuucuuug

SEQ ID NO: 351000 - RNA, 21 nt, Artificial Sequence
  Synthetic
gucauuuuaaugucuucuuug

SEQ ID NO: 351001 - RNA, 22 nt, Artificial Sequence
  Synthetic
ggucauuuuaaugucuucuuug

SEQ ID NO: 351002 - RNA, 23 nt, Artificial Sequence
  Synthetic
uggucauuuuaaugucuucuuug

SEQ ID NO: 351003 - RNA, 24 nt, Artificial Sequence
  Synthetic
uuggucauuuuaaugucuucuuug

SEQ ID NO: 351004 - RNA, 18 nt, Artificial Sequence
  Synthetic
uuauuucuaaguucuuug

SEQ ID NO: 351005 - RNA, 19 nt, Artificial Sequence
  Synthetic
auuauuucuaaguucuuug

SEQ ID NO: 351006 - RNA, 20 nt, Artificial Sequence
  Synthetic
aauuauuucuaaguucuuug

SEQ ID NO: 351007 - RNA, 21 nt, Artificial Sequence
  Synthetic
gaauuauuucuaaguucuuug

SEQ ID NO: 351008 - RNA, 22 nt, Artificial Sequence
  Synthetic
agaauuauuucuaaguucuuug

SEQ ID NO: 351009 - RNA, 23 nt, Artificial Sequence
  Synthetic
gagaauuauuucuaaguucuuug

SEQ ID NO: 351010 - RNA, 24 nt, Artificial Sequence
  Synthetic
ugagaauuauuucuaaguucuuug

SEQ ID NO: 351011 - RNA, 18 nt, Artificial Sequence
  Synthetic
uagauaaaacuuucuuug

SEQ ID NO: 351012 - RNA, 19 nt, Artificial Sequence
  Synthetic
uuagauaaaacuuucuuug

SEQ ID NO: 351013 - RNA, 20 nt, Artificial Sequence
  Synthetic
auuagauaaaacuuucuuug

SEQ ID NO: 351014 - RNA, 21 nt, Artificial Sequence
  Synthetic
aauuagauaaaacuuucuuug

SEQ ID NO: 351015 - RNA, 22 nt, Artificial Sequence
  Synthetic
aaauuagauaaaacuuucuuug

SEQ ID NO: 351016 - RNA, 23 nt, Artificial Sequence
  Synthetic
gaaauuagauaaaacuuucuuug

SEQ ID NO: 351017 - RNA, 24 nt, Artificial Sequence
  Synthetic
ugaaauuagauaaaacuuucuuug

SEQ ID NO: 351018 - RNA, 18 nt, Artificial Sequence
  Synthetic
augugccagcuuucuuug

SEQ ID NO: 351019 - RNA, 19 nt, Artificial Sequence
  Synthetic
uaugugccagcuuucuuug

SEQ ID NO: 351020 - RNA, 20 nt, Artificial Sequence
  Synthetic
cuaugugccagcuuucuuug

SEQ ID NO: 351021 - RNA, 21 nt, Artificial Sequence
  Synthetic
ucuaugugccagcuuucuuug

SEQ ID NO: 351022 - RNA, 22 nt, Artificial Sequence
  Synthetic
uucuaugugccagcuuucuuug

SEQ ID NO: 351023 - RNA, 23 nt, Artificial Sequence
  Synthetic
cuucuaugugccagcuuucuuug

SEQ ID NO: 351024 - RNA, 24 nt, Artificial Sequence
  Synthetic
ccuucuaugugccagcuuucuuug

SEQ ID NO: 351025 - RNA, 18 nt, Artificial Sequence
  Synthetic
aacaagagucuuucuuug

SEQ ID NO: 351026 - RNA, 19 nt, Artificial Sequence
  Synthetic
gaacaagagucuuucuuug

SEQ ID NO: 351027 - RNA, 20 nt, Artificial Sequence
  Synthetic
agaacaagagucuuucuuug

SEQ ID NO: 351028 - RNA, 21 nt, Artificial Sequence
  Synthetic
uagaacaagagucuuucuuug

SEQ ID NO: 351029 - RNA, 22 nt, Artificial Sequence
  Synthetic
cuagaacaagagucuuucuuug

SEQ ID NO: 351030 - RNA, 23 nt, Artificial Sequence
  Synthetic
ucuagaacaagagucuuucuuug

SEQ ID NO: 351031 - RNA, 24 nt, Artificial Sequence
  Synthetic
aucuagaacaagagucuuucuuug

SEQ ID NO: 351032 - RNA, 18 nt, Artificial Sequence
  Synthetic
aauuuaagauuuucuuug

SEQ ID NO: 351033 - RNA, 19 nt, Artificial Sequence
  Synthetic
gaauuuaagauuuucuuug

SEQ ID NO: 351034 - RNA, 20 nt, Artificial Sequence
  Synthetic
ggaauuuaagauuuucuuug

SEQ ID NO: 351035 - RNA, 21 nt, Artificial Sequence
  Synthetic
aggaauuuaagauuuucuuug

SEQ ID NO: 351036 - RNA, 22 nt, Artificial Sequence
  Synthetic
gaggaauuuaagauuuucuuug

SEQ ID NO: 351037 - RNA, 23 nt, Artificial Sequence
  Synthetic
cgaggaauuuaagauuuucuuug

SEQ ID NO: 351038 - RNA, 24 nt, Artificial Sequence
  Synthetic
ucgaggaauuuaagauuuucuuug

SEQ ID NO: 351039 - RNA, 18 nt, Artificial Sequence
  Synthetic
guguauauauuuucuuug

SEQ ID NO: 351040 - RNA, 19 nt, Artificial Sequence
  Synthetic
uguguauauauuuucuuug

SEQ ID NO: 351041 - RNA, 20 nt, Artificial Sequence
  Synthetic
cuguguauauauuuucuuug

SEQ ID NO: 351042 - RNA, 21 nt, Artificial Sequence
  Synthetic
gcuguguauauauuuucuuug

SEQ ID NO: 351043 - RNA, 22 nt, Artificial Sequence
  Synthetic
ggcuguguauauauuuucuuug

SEQ ID NO: 351044 - RNA, 23 nt, Artificial Sequence
  Synthetic
uggcuguguauauauuuucuuug

SEQ ID NO: 351045 - RNA, 24 nt, Artificial Sequence
  Synthetic
uuggcuguguauauauuuucuuug

SEQ ID NO: 351046 - RNA, 18 nt, Artificial Sequence
  Synthetic
guccugggcuuuucuuug

SEQ ID NO: 351047 - RNA, 19 nt, Artificial Sequence
  Synthetic
gguccugggcuuuucuuug

SEQ ID NO: 351048 - RNA, 20 nt, Artificial Sequence
  Synthetic
ugguccugggcuuuucuuug

SEQ ID NO: 351049 - RNA, 21 nt, Artificial Sequence
  Synthetic
uugguccugggcuuuucuuug

SEQ ID NO: 351050 - RNA, 22 nt, Artificial Sequence
  Synthetic
uuugguccugggcuuuucuuug

SEQ ID NO: 351051 - RNA, 23 nt, Artificial Sequence
  Synthetic
auuugguccugggcuuuucuuug

SEQ ID NO: 351052 - RNA, 24 nt, Artificial Sequence
  Synthetic
cauuugguccugggcuuuucuuug

SEQ ID NO: 351053 - RNA, 18 nt, Artificial Sequence
  Synthetic
cacaaaguguuuucuuug

SEQ ID NO: 351054 - RNA, 19 nt, Artificial Sequence
  Synthetic
ucacaaaguguuuucuuug

SEQ ID NO: 351055 - RNA, 20 nt, Artificial Sequence
  Synthetic
cucacaaaguguuuucuuug

SEQ ID NO: 351056 - RNA, 21 nt, Artificial Sequence
  Synthetic
gcucacaaaguguuuucuuug

SEQ ID NO: 351057 - RNA, 22 nt, Artificial Sequence
  Synthetic
ggcucacaaaguguuuucuuug

SEQ ID NO: 351058 - RNA, 23 nt, Artificial Sequence
  Synthetic
aggcucacaaaguguuuucuuug

SEQ ID NO: 351059 - RNA, 24 nt, Artificial Sequence
  Synthetic
caggcucacaaaguguuuucuuug

SEQ ID NO: 351060 - RNA, 18 nt, Artificial Sequence
  Synthetic
agaagccuuuuuucuuug

SEQ ID NO: 351061 - RNA, 19 nt, Artificial Sequence
  Synthetic
cagaagccuuuuuucuuug

SEQ ID NO: 351062 - RNA, 20 nt, Artificial Sequence
  Synthetic
ucagaagccuuuuuucuuug

SEQ ID NO: 351063 - RNA, 21 nt, Artificial Sequence
  Synthetic
gucagaagccuuuuuucuuug

SEQ ID NO: 351064 - RNA, 22 nt, Artificial Sequence
  Synthetic
agucagaagccuuuuuucuuug

SEQ ID NO: 351065 - RNA, 23 nt, Artificial Sequence
  Synthetic
gagucagaagccuuuuuucuuug

SEQ ID NO: 351066 - RNA, 24 nt, Artificial Sequence
  Synthetic
ggagucagaagccuuuuuucuuug

SEQ ID NO: 351067 - RNA, 18 nt, Artificial Sequence
  Synthetic
agacccaauaaaaguuug

SEQ ID NO: 351068 - RNA, 19 nt, Artificial Sequence
  Synthetic
gagacccaauaaaaguuug

SEQ ID NO: 351069 - RNA, 20 nt, Artificial Sequence
  Synthetic
ugagacccaauaaaaguuug

SEQ ID NO: 351070 - RNA, 21 nt, Artificial Sequence
  Synthetic
augagacccaauaaaaguuug

SEQ ID NO: 351071 - RNA, 22 nt, Artificial Sequence
  Synthetic
gaugagacccaauaaaaguuug

SEQ ID NO: 351072 - RNA, 23 nt, Artificial Sequence
  Synthetic
ggaugagacccaauaaaaguuug

SEQ ID NO: 351073 - RNA, 24 nt, Artificial Sequence
  Synthetic
aggaugagacccaauaaaaguuug

SEQ ID NO: 351074 - RNA, 18 nt, Artificial Sequence
  Synthetic
ucauaucuuaaaaguuug

SEQ ID NO: 351075 - RNA, 19 nt, Artificial Sequence
  Synthetic
gucauaucuuaaaaguuug

SEQ ID NO: 351076 - RNA, 20 nt, Artificial Sequence
  Synthetic
ggucauaucuuaaaaguuug

SEQ ID NO: 351077 - RNA, 21 nt, Artificial Sequence
  Synthetic
aggucauaucuuaaaaguuug

SEQ ID NO: 351078 - RNA, 22 nt, Artificial Sequence
  Synthetic
aaggucauaucuuaaaaguuug

SEQ ID NO: 351079 - RNA, 23 nt, Artificial Sequence
  Synthetic
caaggucauaucuuaaaaguuug

SEQ ID NO: 351080 - RNA, 24 nt, Artificial Sequence
  Synthetic
ccaaggucauaucuuaaaaguuug

SEQ ID NO: 351081 - RNA, 18 nt, Artificial Sequence
  Synthetic
auauauaaugcaaguuug

SEQ ID NO: 351082 - RNA, 19 nt, Artificial Sequence
  Synthetic
uauauauaaugcaaguuug

SEQ ID NO: 351083 - RNA, 20 nt, Artificial Sequence
  Synthetic
auauauauaaugcaaguuug

SEQ ID NO: 351084 - RNA, 21 nt, Artificial Sequence
  Synthetic
aauauauauaaugcaaguuug

SEQ ID NO: 351085 - RNA, 22 nt, Artificial Sequence
  Synthetic
aaauauauauaaugcaaguuug

SEQ ID NO: 351086 - RNA, 23 nt, Artificial Sequence
  Synthetic
gaaauauauauaaugcaaguuug

SEQ ID NO: 351087 - RNA, 24 nt, Artificial Sequence
  Synthetic
agaaauauauauaaugcaaguuug

SEQ ID NO: 351088 - RNA, 18 nt, Artificial Sequence
  Synthetic
aacaaguuuucaaguuug

SEQ ID NO: 351089 - RNA, 19 nt, Artificial Sequence
  Synthetic
gaacaaguuuucaaguuug

SEQ ID NO: 351090 - RNA, 20 nt, Artificial Sequence
  Synthetic
ugaacaaguuuucaaguuug

SEQ ID NO: 351091 - RNA, 21 nt, Artificial Sequence
  Synthetic
uugaacaaguuuucaaguuug

SEQ ID NO: 351092 - RNA, 22 nt, Artificial Sequence
  Synthetic
guugaacaaguuuucaaguuug

SEQ ID NO: 351093 - RNA, 23 nt, Artificial Sequence
  Synthetic
gguugaacaaguuuucaaguuug

SEQ ID NO: 351094 - RNA, 24 nt, Artificial Sequence
  Synthetic
ugguugaacaaguuuucaaguuug

SEQ ID NO: 351095 - RNA, 18 nt, Artificial Sequence
  Synthetic
gcauuuuuuugaaguuug

SEQ ID NO: 351096 - RNA, 19 nt, Artificial Sequence
  Synthetic
ggcauuuuuuugaaguuug

SEQ ID NO: 351097 - RNA, 20 nt, Artificial Sequence
  Synthetic
uggcauuuuuuugaaguuug

SEQ ID NO: 351098 - RNA, 21 nt, Artificial Sequence
  Synthetic
uuggcauuuuuuugaaguuug

SEQ ID NO: 351099 - RNA, 22 nt, Artificial Sequence
  Synthetic
auuggcauuuuuuugaaguuug

SEQ ID NO: 351100 - RNA, 23 nt, Artificial Sequence
  Synthetic
uauuggcauuuuuuugaaguuug

SEQ ID NO: 351101 - RNA, 24 nt, Artificial Sequence
  Synthetic
guauuggcauuuuuuugaaguuug

SEQ ID NO: 351102 - RNA, 18 nt, Artificial Sequence
  Synthetic
guuguuaaacuaaguuug

SEQ ID NO: 351103 - RNA, 19 nt, Artificial Sequence
  Synthetic
uguuguuaaacuaaguuug

SEQ ID NO: 351104 - RNA, 20 nt, Artificial Sequence
  Synthetic
uuguuguuaaacuaaguuug

SEQ ID NO: 351105 - RNA, 21 nt, Artificial Sequence
  Synthetic
cuuguuguuaaacuaaguuug

SEQ ID NO: 351106 - RNA, 22 nt, Artificial Sequence
  Synthetic
acuuguuguuaaacuaaguuug

SEQ ID NO: 351107 - RNA, 23 nt, Artificial Sequence
  Synthetic
gacuuguuguuaaacuaaguuug

SEQ ID NO: 351108 - RNA, 24 nt, Artificial Sequence
  Synthetic
ggacuuguuguuaaacuaaguuug

SEQ ID NO: 351109 - RNA, 18 nt, Artificial Sequence
  Synthetic
gguaguuuuguaaguuug

SEQ ID NO: 351110 - RNA, 19 nt, Artificial Sequence
  Synthetic
ugguaguuuuguaaguuug

SEQ ID NO: 351111 - RNA, 20 nt, Artificial Sequence
  Synthetic
cugguaguuuuguaaguuug

SEQ ID NO: 351112 - RNA, 21 nt, Artificial Sequence
  Synthetic
acugguaguuuuguaaguuug

SEQ ID NO: 351113 - RNA, 22 nt, Artificial Sequence
  Synthetic
uacugguaguuuuguaaguuug

SEQ ID NO: 351114 - RNA, 23 nt, Artificial Sequence
  Synthetic
cuacugguaguuuuguaaguuug

SEQ ID NO: 351115 - RNA, 24 nt, Artificial Sequence
  Synthetic
gcuacugguaguuuuguaaguuug

SEQ ID NO: 351116 - RNA, 18 nt, Artificial Sequence
  Synthetic
uuccuguaauuaaguuug

SEQ ID NO: 351117 - RNA, 19 nt, Artificial Sequence
  Synthetic
cuuccuguaauuaaguuug

SEQ ID NO: 351118 - RNA, 20 nt, Artificial Sequence
  Synthetic
ucuuccuguaauuaaguuug

SEQ ID NO: 351119 - RNA, 21 nt, Artificial Sequence
  Synthetic
cucuuccuguaauuaaguuug

SEQ ID NO: 351120 - RNA, 22 nt, Artificial Sequence
  Synthetic
ucucuuccuguaauuaaguuug

SEQ ID NO: 351121 - RNA, 23 nt, Artificial Sequence
  Synthetic
aucucuuccuguaauuaaguuug

SEQ ID NO: 351122 - RNA, 24 nt, Artificial Sequence
  Synthetic
caucucuuccuguaauuaaguuug

SEQ ID NO: 351123 - RNA, 18 nt, Artificial Sequence
  Synthetic
cuuaaguuuuuaaguuug

SEQ ID NO: 351124 - RNA, 19 nt, Artificial Sequence
  Synthetic
ccuuaaguuuuuaaguuug

SEQ ID NO: 351125 - RNA, 20 nt, Artificial Sequence
  Synthetic
gccuuaaguuuuuaaguuug

SEQ ID NO: 351126 - RNA, 21 nt, Artificial Sequence
  Synthetic
ugccuuaaguuuuuaaguuug

SEQ ID NO: 351127 - RNA, 22 nt, Artificial Sequence
  Synthetic
gugccuuaaguuuuuaaguuug

SEQ ID NO: 351128 - RNA, 23 nt, Artificial Sequence
  Synthetic
agugccuuaaguuuuuaaguuug

SEQ ID NO: 351129 - RNA, 24 nt, Artificial Sequence
  Synthetic
uagugccuuaaguuuuuaaguuug

SEQ ID NO: 351130 - RNA, 18 nt, Artificial Sequence
  Synthetic
acagguuggaacaguuug

SEQ ID NO: 351131 - RNA, 19 nt, Artificial Sequence
  Synthetic
cacagguuggaacaguuug

SEQ ID NO: 351132 - RNA, 20 nt, Artificial Sequence
  Synthetic
gcacagguuggaacaguuug

SEQ ID NO: 351133 - RNA, 21 nt, Artificial Sequence
  Synthetic
ggcacagguuggaacaguuug

SEQ ID NO: 351134 - RNA, 22 nt, Artificial Sequence
  Synthetic
aggcacagguuggaacaguuug

SEQ ID NO: 351135 - RNA, 23 nt, Artificial Sequence
  Synthetic
gaggcacagguuggaacaguuug

SEQ ID NO: 351136 - RNA, 24 nt, Artificial Sequence
  Synthetic
agaggcacagguuggaacaguuug

SEQ ID NO: 351137 - RNA, 18 nt, Artificial Sequence
  Synthetic
uuauuugccuacaguuug

SEQ ID NO: 351138 - RNA, 19 nt, Artificial Sequence
  Synthetic
auuauuugccuacaguuug

SEQ ID NO: 351139 - RNA, 20 nt, Artificial Sequence
  Synthetic
aauuauuugccuacaguuug

SEQ ID NO: 351140 - RNA, 21 nt, Artificial Sequence
  Synthetic
gaauuauuugccuacaguuug

SEQ ID NO: 351141 - RNA, 22 nt, Artificial Sequence
  Synthetic
agaauuauuugccuacaguuug

SEQ ID NO: 351142 - RNA, 23 nt, Artificial Sequence
  Synthetic
aagaauuauuugccuacaguuug

SEQ ID NO: 351143 - RNA, 24 nt, Artificial Sequence
  Synthetic
gaagaauuauuugccuacaguuug

SEQ ID NO: 351144 - RNA, 18 nt, Artificial Sequence
  Synthetic
gucuuagagugcaguuug

SEQ ID NO: 351145 - RNA, 19 nt, Artificial Sequence
  Synthetic
agucuuagagugcaguuug

SEQ ID NO: 351146 - RNA, 20 nt, Artificial Sequence
  Synthetic
cagucuuagagugcaguuug

SEQ ID NO: 351147 - RNA, 21 nt, Artificial Sequence
  Synthetic
ucagucuuagagugcaguuug

SEQ ID NO: 351148 - RNA, 22 nt, Artificial Sequence
  Synthetic
aucagucuuagagugcaguuug

SEQ ID NO: 351149 - RNA, 23 nt, Artificial Sequence
  Synthetic
uaucagucuuagagugcaguuug

SEQ ID NO: 351150 - RNA, 24 nt, Artificial Sequence
  Synthetic
auaucagucuuagagugcaguuug

SEQ ID NO: 351151 - RNA, 18 nt, Artificial Sequence
  Synthetic
gcaugucaugggaguuug

SEQ ID NO: 351152 - RNA, 19 nt, Artificial Sequence
  Synthetic
ugcaugucaugggaguuug

SEQ ID NO: 351153 - RNA, 20 nt, Artificial Sequence
  Synthetic
uugcaugucaugggaguuug

SEQ ID NO: 351154 - RNA, 21 nt, Artificial Sequence
  Synthetic
auugcaugucaugggaguuug

SEQ ID NO: 351155 - RNA, 22 nt, Artificial Sequence
  Synthetic
aauugcaugucaugggaguuug

SEQ ID NO: 351156 - RNA, 23 nt, Artificial Sequence
  Synthetic
aaauugcaugucaugggaguuug

SEQ ID NO: 351157 - RNA, 24 nt, Artificial Sequence
  Synthetic
uaaauugcaugucaugggaguuug

SEQ ID NO: 351158 - RNA, 18 nt, Artificial Sequence
  Synthetic
agaguugaugggaguuug

SEQ ID NO: 351159 - RNA, 19 nt, Artificial Sequence
  Synthetic
aagaguugaugggaguuug

SEQ ID NO: 351160 - RNA, 20 nt, Artificial Sequence
  Synthetic
gaagaguugaugggaguuug

SEQ ID NO: 351161 - RNA, 21 nt, Artificial Sequence
  Synthetic
ugaagaguugaugggaguuug

SEQ ID NO: 351162 - RNA, 22 nt, Artificial Sequence
  Synthetic
uugaagaguugaugggaguuug

SEQ ID NO: 351163 - RNA, 23 nt, Artificial Sequence
  Synthetic
guugaagaguugaugggaguuug

SEQ ID NO: 351164 - RNA, 24 nt, Artificial Sequence
  Synthetic
uguugaagaguugaugggaguuug

SEQ ID NO: 351165 - RNA, 18 nt, Artificial Sequence
  Synthetic
aaaaucugcaauaguuug

SEQ ID NO: 351166 - RNA, 19 nt, Artificial Sequence
  Synthetic
gaaaaucugcaauaguuug

SEQ ID NO: 351167 - RNA, 20 nt, Artificial Sequence
  Synthetic
agaaaaucugcaauaguuug

SEQ ID NO: 351168 - RNA, 21 nt, Artificial Sequence
  Synthetic
uagaaaaucugcaauaguuug

SEQ ID NO: 351169 - RNA, 22 nt, Artificial Sequence
  Synthetic
auagaaaaucugcaauaguuug

SEQ ID NO: 351170 - RNA, 23 nt, Artificial Sequence
  Synthetic
gauagaaaaucugcaauaguuug

SEQ ID NO: 351171 - RNA, 24 nt, Artificial Sequence
  Synthetic
agauagaaaaucugcaauaguuug

SEQ ID NO: 351172 - RNA, 18 nt, Artificial Sequence
  Synthetic
auauggacucauaguuug

SEQ ID NO: 351173 - RNA, 19 nt, Artificial Sequence
  Synthetic
uauauggacucauaguuug

SEQ ID NO: 351174 - RNA, 20 nt, Artificial Sequence
  Synthetic
auauauggacucauaguuug

SEQ ID NO: 351175 - RNA, 21 nt, Artificial Sequence
  Synthetic
uauauauggacucauaguuug

SEQ ID NO: 351176 - RNA, 22 nt, Artificial Sequence
  Synthetic
auauauauggacucauaguuug

SEQ ID NO: 351177 - RNA, 23 nt, Artificial Sequence
  Synthetic
uauauauauggacucauaguuug

SEQ ID NO: 351178 - RNA, 24 nt, Artificial Sequence
  Synthetic
cuauauauauggacucauaguuug

SEQ ID NO: 351179 - RNA, 18 nt, Artificial Sequence
  Synthetic
uguccuugcgauaguuug

SEQ ID NO: 351180 - RNA, 19 nt, Artificial Sequence
  Synthetic
uuguccuugcgauaguuug

SEQ ID NO: 351181 - RNA, 20 nt, Artificial Sequence
  Synthetic
uuuguccuugcgauaguuug

SEQ ID NO: 351182 - RNA, 21 nt, Artificial Sequence
  Synthetic
uuuuguccuugcgauaguuug

SEQ ID NO: 351183 - RNA, 22 nt, Artificial Sequence
  Synthetic
uuuuuguccuugcgauaguuug

SEQ ID NO: 351184 - RNA, 23 nt, Artificial Sequence
  Synthetic
uuuuuuguccuugcgauaguuug

SEQ ID NO: 351185 - RNA, 24 nt, Artificial Sequence
  Synthetic
guuuuuuguccuugcgauaguuug

SEQ ID NO: 351186 - RNA, 18 nt, Artificial Sequence
  Synthetic
uguccuugugauaguuug

SEQ ID NO: 351187 - RNA, 19 nt, Artificial Sequence
  Synthetic
cuguccuugugauaguuug

SEQ ID NO: 351188 - RNA, 20 nt, Artificial Sequence
  Synthetic
ucuguccuugugauaguuug

SEQ ID NO: 351189 - RNA, 21 nt, Artificial Sequence
  Synthetic
uucuguccuugugauaguuug

SEQ ID NO: 351190 - RNA, 22 nt, Artificial Sequence
  Synthetic
uuucuguccuugugauaguuug

SEQ ID NO: 351191 - RNA, 23 nt, Artificial Sequence
  Synthetic
uuuucuguccuugugauaguuug

SEQ ID NO: 351192 - RNA, 24 nt, Artificial Sequence
  Synthetic
guuuucuguccuugugauaguuug

SEQ ID NO: 351193 - RNA, 18 nt, Artificial Sequence
  Synthetic
guauuacaacuuaguuug

SEQ ID NO: 351194 - RNA, 19 nt, Artificial Sequence
  Synthetic
gguauuacaacuuaguuug

SEQ ID NO: 351195 - RNA, 20 nt, Artificial Sequence
  Synthetic
ugguauuacaacuuaguuug

SEQ ID NO: 351196 - RNA, 21 nt, Artificial Sequence
  Synthetic
augguauuacaacuuaguuug

SEQ ID NO: 351197 - RNA, 22 nt, Artificial Sequence
  Synthetic
caugguauuacaacuuaguuug

SEQ ID NO: 351198 - RNA, 23 nt, Artificial Sequence
  Synthetic
ucaugguauuacaacuuaguuug

SEQ ID NO: 351199 - RNA, 24 nt, Artificial Sequence
  Synthetic
aucaugguauuacaacuuaguuug

SEQ ID NO: 351200 - RNA, 18 nt, Artificial Sequence
  Synthetic
cuuauuauucuuaguuug

SEQ ID NO: 351201 - RNA, 19 nt, Artificial Sequence
  Synthetic
ucuuauuauucuuaguuug

SEQ ID NO: 351202 - RNA, 20 nt, Artificial Sequence
  Synthetic
cucuuauuauucuuaguuug

SEQ ID NO: 351203 - RNA, 21 nt, Artificial Sequence
  Synthetic
acucuuauuauucuuaguuug

SEQ ID NO: 351204 - RNA, 22 nt, Artificial Sequence
  Synthetic
uacucuuauuauucuuaguuug

SEQ ID NO: 351205 - RNA, 23 nt, Artificial Sequence
  Synthetic
guacucuuauuauucuuaguuug

SEQ ID NO: 351206 - RNA, 24 nt, Artificial Sequence
  Synthetic
aguacucuuauuauucuuaguuug

SEQ ID NO: 351207 - RNA, 18 nt, Artificial Sequence
  Synthetic
gguuccucuguuaguuug

SEQ ID NO: 351208 - RNA, 19 nt, Artificial Sequence
  Synthetic
cgguuccucuguuaguuug

SEQ ID NO: 351209 - RNA, 20 nt, Artificial Sequence
  Synthetic
ucgguuccucuguuaguuug

SEQ ID NO: 351210 - RNA, 21 nt, Artificial Sequence
  Synthetic
uucgguuccucuguuaguuug

SEQ ID NO: 351211 - RNA, 22 nt, Artificial Sequence
  Synthetic
uuucgguuccucuguuaguuug

SEQ ID NO: 351212 - RNA, 23 nt, Artificial Sequence
  Synthetic
uuuucgguuccucuguuaguuug

SEQ ID NO: 351213 - RNA, 24 nt, Artificial Sequence
  Synthetic
guuuucgguuccucuguuaguuug

SEQ ID NO: 351214 - RNA, 18 nt, Artificial Sequence
  Synthetic
uguuccuguguuaguuug

SEQ ID NO: 351215 - RNA, 19 nt, Artificial Sequence
  Synthetic
cuguuccuguguuaguuug

SEQ ID NO: 351216 - RNA, 20 nt, Artificial Sequence
  Synthetic
ucuguuccuguguuaguuug

SEQ ID NO: 351217 - RNA, 18 nt, Artificial Sequence
  Synthetic
aggauaccuuuuaguuug

SEQ ID NO: 351218 - RNA, 19 nt, Artificial Sequence
  Synthetic
uaggauaccuuuuaguuug

SEQ ID NO: 351219 - RNA, 20 nt, Artificial Sequence
  Synthetic
cuaggauaccuuuuaguuug

SEQ ID NO: 351220 - RNA, 21 nt, Artificial Sequence
  Synthetic
ucuaggauaccuuuuaguuug

SEQ ID NO: 351221 - RNA, 22 nt, Artificial Sequence
  Synthetic
aucuaggauaccuuuuaguuug

SEQ ID NO: 351222 - RNA, 23 nt, Artificial Sequence
  Synthetic
aaucuaggauaccuuuuaguuug

SEQ ID NO: 351223 - RNA, 24 nt, Artificial Sequence
  Synthetic
uaaucuaggauaccuuuuaguuug

SEQ ID NO: 351224 - RNA, 18 nt, Artificial Sequence
  Synthetic
gguuuaauggugcguuug

SEQ ID NO: 351225 - RNA, 19 nt, Artificial Sequence
  Synthetic
agguuuaauggugcguuug

SEQ ID NO: 351226 - RNA, 20 nt, Artificial Sequence
  Synthetic
cagguuuaauggugcguuug

SEQ ID NO: 351227 - RNA, 21 nt, Artificial Sequence
  Synthetic
acagguuuaauggugcguuug

SEQ ID NO: 351228 - RNA, 22 nt, Artificial Sequence
  Synthetic
uacagguuuaauggugcguuug

SEQ ID NO: 351229 - RNA, 23 nt, Artificial Sequence
  Synthetic
guacagguuuaauggugcguuug

SEQ ID NO: 351230 - RNA, 24 nt, Artificial Sequence
  Synthetic
uguacagguuuaauggugcguuug

SEQ ID NO: 351231 - RNA, 18 nt, Artificial Sequence
  Synthetic
cauauaauccaagguuug

SEQ ID NO: 351232 - RNA, 19 nt, Artificial Sequence
  Synthetic
acauauaauccaagguuug

SEQ ID NO: 351233 - RNA, 20 nt, Artificial Sequence
  Synthetic
cacauauaauccaagguuug

SEQ ID NO: 351234 - RNA, 21 nt, Artificial Sequence
  Synthetic
ucacauauaauccaagguuug

SEQ ID NO: 351235 - RNA, 22 nt, Artificial Sequence
  Synthetic
uucacauauaauccaagguuug

SEQ ID NO: 351236 - RNA, 23 nt, Artificial Sequence
  Synthetic
auucacauauaauccaagguuug

SEQ ID NO: 351237 - RNA, 24 nt, Artificial Sequence
  Synthetic
uauucacauauaauccaagguuug

SEQ ID NO: 351238 - RNA, 18 nt, Artificial Sequence
  Synthetic
uugugugcauaagguuug

SEQ ID NO: 351239 - RNA, 19 nt, Artificial Sequence
  Synthetic
guugugugcauaagguuug

SEQ ID NO: 351240 - RNA, 20 nt, Artificial Sequence
  Synthetic
aguugugugcauaagguuug

SEQ ID NO: 351241 - RNA, 21 nt, Artificial Sequence
  Synthetic
gaguugugugcauaagguuug

SEQ ID NO: 351242 - RNA, 22 nt, Artificial Sequence
  Synthetic
agaguugugugcauaagguuug

SEQ ID NO: 351243 - RNA, 23 nt, Artificial Sequence
  Synthetic
gagaguugugugcauaagguuug

SEQ ID NO: 351244 - RNA, 24 nt, Artificial Sequence
  Synthetic
agagaguugugugcauaagguuug

SEQ ID NO: 351245 - RNA, 18 nt, Artificial Sequence
  Synthetic
ggagcagguacggguuug

SEQ ID NO: 351246 - RNA, 19 nt, Artificial Sequence
  Synthetic
uggagcagguacggguuug

SEQ ID NO: 351247 - RNA, 20 nt, Artificial Sequence
  Synthetic
auggagcagguacggguuug

SEQ ID NO: 351248 - RNA, 21 nt, Artificial Sequence
  Synthetic
gauggagcagguacggguuug

SEQ ID NO: 351249 - RNA, 22 nt, Artificial Sequence
  Synthetic
agauggagcagguacggguuug

SEQ ID NO: 351250 - RNA, 23 nt, Artificial Sequence
  Synthetic
gagauggagcagguacggguuug

SEQ ID NO: 351251 - RNA, 24 nt, Artificial Sequence
  Synthetic
agagauggagcagguacggguuug

SEQ ID NO: 351252 - RNA, 18 nt, Artificial Sequence
  Synthetic
uuagaagguggggguuug

SEQ ID NO: 351253 - RNA, 19 nt, Artificial Sequence
  Synthetic
auuagaagguggggguuug

SEQ ID NO: 351254 - RNA, 20 nt, Artificial Sequence
  Synthetic
uauuagaagguggggguuug

SEQ ID NO: 351255 - RNA, 21 nt, Artificial Sequence
  Synthetic
guauuagaagguggggguuug

SEQ ID NO: 351256 - RNA, 22 nt, Artificial Sequence
  Synthetic
gguauuagaagguggggguuug

SEQ ID NO: 351257 - RNA, 23 nt, Artificial Sequence
  Synthetic
ugguauuagaagguggggguuug

SEQ ID NO: 351258 - RNA, 24 nt, Artificial Sequence
  Synthetic
augguauuagaagguggggguuug

SEQ ID NO: 351259 - RNA, 18 nt, Artificial Sequence
  Synthetic
ucuuuacagcaugguuug

SEQ ID NO: 351260 - RNA, 19 nt, Artificial Sequence
  Synthetic
cucuuuacagcaugguuug

SEQ ID NO: 351261 - RNA, 20 nt, Artificial Sequence
  Synthetic
ucucuuuacagcaugguuug

SEQ ID NO: 351262 - RNA, 21 nt, Artificial Sequence
  Synthetic
aucucuuuacagcaugguuug

SEQ ID NO: 351263 - RNA, 22 nt, Artificial Sequence
  Synthetic
caucucuuuacagcaugguuug

SEQ ID NO: 351264 - RNA, 23 nt, Artificial Sequence
  Synthetic
acaucucuuuacagcaugguuug

SEQ ID NO: 351265 - RNA, 24 nt, Artificial Sequence
  Synthetic
cacaucucuuuacagcaugguuug

SEQ ID NO: 351266 - RNA, 18 nt, Artificial Sequence
  Synthetic
uggguaaguuaugguuug

SEQ ID NO: 351267 - RNA, 19 nt, Artificial Sequence
  Synthetic
uuggguaaguuaugguuug

SEQ ID NO: 351268 - RNA, 20 nt, Artificial Sequence
  Synthetic
cuuggguaaguuaugguuug

SEQ ID NO: 351269 - RNA, 21 nt, Artificial Sequence
  Synthetic
acuuggguaaguuaugguuug

SEQ ID NO: 351270 - RNA, 22 nt, Artificial Sequence
  Synthetic
gacuuggguaaguuaugguuug

SEQ ID NO: 351271 - RNA, 23 nt, Artificial Sequence
  Synthetic
ugacuuggguaaguuaugguuug

SEQ ID NO: 351272 - RNA, 24 nt, Artificial Sequence
  Synthetic
augacuuggguaaguuaugguuug

SEQ ID NO: 351273 - RNA, 18 nt, Artificial Sequence
  Synthetic
ugaaaauguuaugguuug

SEQ ID NO: 351274 - RNA, 19 nt, Artificial Sequence
  Synthetic
uugaaaauguuaugguuug

SEQ ID NO: 351275 - RNA, 20 nt, Artificial Sequence
  Synthetic
cuugaaaauguuaugguuug

SEQ ID NO: 351276 - RNA, 21 nt, Artificial Sequence
  Synthetic
ucuugaaaauguuaugguuug

SEQ ID NO: 351277 - RNA, 22 nt, Artificial Sequence
  Synthetic
uucuugaaaauguuaugguuug

SEQ ID NO: 351278 - RNA, 23 nt, Artificial Sequence
  Synthetic
guucuugaaaauguuaugguuug

SEQ ID NO: 351279 - RNA, 24 nt, Artificial Sequence
  Synthetic
aguucuugaaaauguuaugguuug

SEQ ID NO: 351280 - RNA, 18 nt, Artificial Sequence
  Synthetic
uucauguaaacugguuug

SEQ ID NO: 351281 - RNA, 19 nt, Artificial Sequence
  Synthetic
cuucauguaaacugguuug

SEQ ID NO: 351282 - RNA, 20 nt, Artificial Sequence
  Synthetic
ucuucauguaaacugguuug

SEQ ID NO: 351283 - RNA, 21 nt, Artificial Sequence
  Synthetic
uucuucauguaaacugguuug

SEQ ID NO: 351284 - RNA, 22 nt, Artificial Sequence
  Synthetic
guucuucauguaaacugguuug

SEQ ID NO: 351285 - RNA, 23 nt, Artificial Sequence
  Synthetic
uguucuucauguaaacugguuug

SEQ ID NO: 351286 - RNA, 24 nt, Artificial Sequence
  Synthetic
uuguucuucauguaaacugguuug

SEQ ID NO: 351287 - RNA, 18 nt, Artificial Sequence
  Synthetic
aauauauaccuugguuug

SEQ ID NO: 351288 - RNA, 19 nt, Artificial Sequence
  Synthetic
caauauauaccuugguuug

SEQ ID NO: 351289 - RNA, 20 nt, Artificial Sequence
  Synthetic
ucaauauauaccuugguuug

SEQ ID NO: 351290 - RNA, 21 nt, Artificial Sequence
  Synthetic
gucaauauauaccuugguuug

SEQ ID NO: 351291 - RNA, 22 nt, Artificial Sequence
  Synthetic
agucaauauauaccuugguuug

SEQ ID NO: 351292 - RNA, 23 nt, Artificial Sequence
  Synthetic
cagucaauauauaccuugguuug

SEQ ID NO: 351293 - RNA, 24 nt, Artificial Sequence
  Synthetic
ccagucaauauauaccuugguuug

SEQ ID NO: 351294 - RNA, 18 nt, Artificial Sequence
  Synthetic
uauucucuuuuugguuug

SEQ ID NO: 351295 - RNA, 19 nt, Artificial Sequence
  Synthetic
uuauucucuuuuugguuug

SEQ ID NO: 351296 - RNA, 20 nt, Artificial Sequence
  Synthetic
uuuauucucuuuuugguuug

SEQ ID NO: 351297 - RNA, 21 nt, Artificial Sequence
  Synthetic
uuuuauucucuuuuugguuug

SEQ ID NO: 351298 - RNA, 22 nt, Artificial Sequence
  Synthetic
uuuuuauucucuuuuugguuug

SEQ ID NO: 351299 - RNA, 23 nt, Artificial Sequence
  Synthetic
uuuuuuauucucuuuuugguuug

SEQ ID NO: 351300 - RNA, 24 nt, Artificial Sequence
  Synthetic
guuuuuuauucucuuuuugguuug

SEQ ID NO: 351301 - RNA, 18 nt, Artificial Sequence
  Synthetic
ccagagacaaaauguuug

SEQ ID NO: 351302 - RNA, 19 nt, Artificial Sequence
  Synthetic
gccagagacaaaauguuug

SEQ ID NO: 351303 - RNA, 20 nt, Artificial Sequence
  Synthetic
ugccagagacaaaauguuug

SEQ ID NO: 351304 - RNA, 21 nt, Artificial Sequence
  Synthetic
cugccagagacaaaauguuug

SEQ ID NO: 351305 - RNA, 22 nt, Artificial Sequence
  Synthetic
ccugccagagacaaaauguuug

SEQ ID NO: 351306 - RNA, 23 nt, Artificial Sequence
  Synthetic
cccugccagagacaaaauguuug

SEQ ID NO: 351307 - RNA, 24 nt, Artificial Sequence
  Synthetic
ucccugccagagacaaaauguuug

SEQ ID NO: 351308 - RNA, 18 nt, Artificial Sequence
  Synthetic
guugucuucaaauguuug

SEQ ID NO: 351309 - RNA, 19 nt, Artificial Sequence
  Synthetic
aguugucuucaaauguuug

SEQ ID NO: 351310 - RNA, 20 nt, Artificial Sequence
  Synthetic
uaguugucuucaaauguuug

SEQ ID NO: 351311 - RNA, 21 nt, Artificial Sequence
  Synthetic
auaguugucuucaaauguuug

SEQ ID NO: 351312 - RNA, 22 nt, Artificial Sequence
  Synthetic
gauaguugucuucaaauguuug

SEQ ID NO: 351313 - RNA, 23 nt, Artificial Sequence
  Synthetic
ugauaguugucuucaaauguuug

SEQ ID NO: 351314 - RNA, 24 nt, Artificial Sequence
  Synthetic
augauaguugucuucaaauguuug

SEQ ID NO: 351315 - RNA, 18 nt, Artificial Sequence
  Synthetic
gcaugucaaacauguuug

SEQ ID NO: 351316 - RNA, 19 nt, Artificial Sequence
  Synthetic
ugcaugucaaacauguuug

SEQ ID NO: 351317 - RNA, 20 nt, Artificial Sequence
  Synthetic
augcaugucaaacauguuug

SEQ ID NO: 351318 - RNA, 21 nt, Artificial Sequence
  Synthetic
gaugcaugucaaacauguuug

SEQ ID NO: 351319 - RNA, 22 nt, Artificial Sequence
  Synthetic
agaugcaugucaaacauguuug

SEQ ID NO: 351320 - RNA, 23 nt, Artificial Sequence
  Synthetic
gagaugcaugucaaacauguuug

SEQ ID NO: 351321 - RNA, 24 nt, Artificial Sequence
  Synthetic
agagaugcaugucaaacauguuug

SEQ ID NO: 351322 - RNA, 18 nt, Artificial Sequence
  Synthetic
accuuauugggcuguuug

SEQ ID NO: 351323 - RNA, 19 nt, Artificial Sequence
  Synthetic
aaccuuauugggcuguuug

SEQ ID NO: 351324 - RNA, 20 nt, Artificial Sequence
  Synthetic
gaaccuuauugggcuguuug

SEQ ID NO: 351325 - RNA, 21 nt, Artificial Sequence
  Synthetic
ggaaccuuauugggcuguuug

SEQ ID NO: 351326 - RNA, 22 nt, Artificial Sequence
  Synthetic
uggaaccuuauugggcuguuug

SEQ ID NO: 351327 - RNA, 23 nt, Artificial Sequence
  Synthetic
auggaaccuuauugggcuguuug

SEQ ID NO: 351328 - RNA, 24 nt, Artificial Sequence
  Synthetic
aauggaaccuuauugggcuguuug

SEQ ID NO: 351329 - RNA, 18 nt, Artificial Sequence
  Synthetic
caguuggcccauuguuug

SEQ ID NO: 351330 - RNA, 19 nt, Artificial Sequence
  Synthetic
acaguuggcccauuguuug

SEQ ID NO: 351331 - RNA, 20 nt, Artificial Sequence
  Synthetic
uacaguuggcccauuguuug

SEQ ID NO: 351332 - RNA, 21 nt, Artificial Sequence
  Synthetic
uuacaguuggcccauuguuug

SEQ ID NO: 351333 - RNA, 22 nt, Artificial Sequence
  Synthetic
auuacaguuggcccauuguuug

SEQ ID NO: 351334 - RNA, 23 nt, Artificial Sequence
  Synthetic
aauuacaguuggcccauuguuug

SEQ ID NO: 351335 - RNA, 24 nt, Artificial Sequence
  Synthetic
aaauuacaguuggcccauuguuug

SEQ ID NO: 351336 - RNA, 18 nt, Artificial Sequence
  Synthetic
uuuuaaaacauuuguuug

SEQ ID NO: 351337 - RNA, 19 nt, Artificial Sequence
  Synthetic
uuuuuaaaacauuuguuug

SEQ ID NO: 351338 - RNA, 20 nt, Artificial Sequence
  Synthetic
auuuuuaaaacauuuguuug

SEQ ID NO: 351339 - RNA, 21 nt, Artificial Sequence
  Synthetic
aauuuuuaaaacauuuguuug

SEQ ID NO: 351340 - RNA, 22 nt, Artificial Sequence
  Synthetic
uaauuuuuaaaacauuuguuug

SEQ ID NO: 351341 - RNA, 23 nt, Artificial Sequence
  Synthetic
cuaauuuuuaaaacauuuguuug

SEQ ID NO: 351342 - RNA, 24 nt, Artificial Sequence
  Synthetic
gcuaauuuuuaaaacauuuguuug

SEQ ID NO: 351343 - RNA, 18 nt, Artificial Sequence
  Synthetic
auuuuuaagauuuguuug

SEQ ID NO: 351344 - RNA, 19 nt, Artificial Sequence
  Synthetic
aauuuuuaagauuuguuug

SEQ ID NO: 351345 - RNA, 20 nt, Artificial Sequence
  Synthetic
uaauuuuuaagauuuguuug

SEQ ID NO: 351346 - RNA, 21 nt, Artificial Sequence
  Synthetic
uuaauuuuuaagauuuguuug

SEQ ID NO: 351347 - RNA, 22 nt, Artificial Sequence
  Synthetic
uuuaauuuuuaagauuuguuug

SEQ ID NO: 351348 - RNA, 23 nt, Artificial Sequence
  Synthetic
uuuuaauuuuuaagauuuguuug

SEQ ID NO: 351349 - RNA, 24 nt, Artificial Sequence
  Synthetic
cuuuuaauuuuuaagauuuguuug

SEQ ID NO: 351350 - RNA, 18 nt, Artificial Sequence
  Synthetic
gagaaggacuuuuguuug

SEQ ID NO: 351351 - RNA, 19 nt, Artificial Sequence
  Synthetic
agagaaggacuuuuguuug

SEQ ID NO: 351352 - RNA, 20 nt, Artificial Sequence
  Synthetic
cagagaaggacuuuuguuug

SEQ ID NO: 351353 - RNA, 21 nt, Artificial Sequence
  Synthetic
ccagagaaggacuuuuguuug

SEQ ID NO: 351354 - RNA, 22 nt, Artificial Sequence
  Synthetic
gccagagaaggacuuuuguuug

SEQ ID NO: 351355 - RNA, 23 nt, Artificial Sequence
  Synthetic
agccagagaaggacuuuuguuug

SEQ ID NO: 351356 - RNA, 24 nt, Artificial Sequence
  Synthetic
aagccagagaaggacuuuuguuug

SEQ ID NO: 351357 - RNA, 18 nt, Artificial Sequence
  Synthetic
uuuggggucaaaauuuug

SEQ ID NO: 351358 - RNA, 19 nt, Artificial Sequence
  Synthetic
uuuuggggucaaaauuuug

SEQ ID NO: 351359 - RNA, 20 nt, Artificial Sequence
  Synthetic
cuuuuggggucaaaauuuug

SEQ ID NO: 351360 - RNA, 21 nt, Artificial Sequence
  Synthetic
gcuuuuggggucaaaauuuug

SEQ ID NO: 351361 - RNA, 22 nt, Artificial Sequence
  Synthetic
ggcuuuuggggucaaaauuuug

SEQ ID NO: 351362 - RNA, 23 nt, Artificial Sequence
  Synthetic
aggcuuuuggggucaaaauuuug

SEQ ID NO: 351363 - RNA, 24 nt, Artificial Sequence
  Synthetic
uaggcuuuuggggucaaaauuuug

SEQ ID NO: 351364 - RNA, 18 nt, Artificial Sequence
  Synthetic
uacaacaaauaaauuuug

SEQ ID NO: 351365 - RNA, 19 nt, Artificial Sequence
  Synthetic
auacaacaaauaaauuuug

SEQ ID NO: 351366 - RNA, 20 nt, Artificial Sequence
  Synthetic
aauacaacaaauaaauuuug

SEQ ID NO: 351367 - RNA, 21 nt, Artificial Sequence
  Synthetic
aaauacaacaaauaaauuuug

SEQ ID NO: 351368 - RNA, 22 nt, Artificial Sequence
  Synthetic
aaaauacaacaaauaaauuuug

SEQ ID NO: 351369 - RNA, 23 nt, Artificial Sequence
  Synthetic
gaaaauacaacaaauaaauuuug

SEQ ID NO: 351370 - RNA, 24 nt, Artificial Sequence
  Synthetic
agaaaauacaacaaauaaauuuug

SEQ ID NO: 351371 - RNA, 18 nt, Artificial Sequence
  Synthetic
guaucacauuaaauuuug

SEQ ID NO: 351372 - RNA, 19 nt, Artificial Sequence
  Synthetic
uguaucacauuaaauuuug

SEQ ID NO: 351373 - RNA, 20 nt, Artificial Sequence
  Synthetic
uuguaucacauuaaauuuug

SEQ ID NO: 351374 - RNA, 21 nt, Artificial Sequence
  Synthetic
cuuguaucacauuaaauuuug

SEQ ID NO: 351375 - RNA, 22 nt, Artificial Sequence
  Synthetic
gcuuguaucacauuaaauuuug

SEQ ID NO: 351376 - RNA, 23 nt, Artificial Sequence
  Synthetic
ggcuuguaucacauuaaauuuug

SEQ ID NO: 351377 - RNA, 24 nt, Artificial Sequence
  Synthetic
uggcuuguaucacauuaaauuuug

SEQ ID NO: 351378 - RNA, 18 nt, Artificial Sequence
  Synthetic
gcugugaauacaauuuug

SEQ ID NO: 351379 - RNA, 19 nt, Artificial Sequence
  Synthetic
cgcugugaauacaauuuug

SEQ ID NO: 351380 - RNA, 20 nt, Artificial Sequence
  Synthetic
ucgcugugaauacaauuuug

SEQ ID NO: 351381 - RNA, 21 nt, Artificial Sequence
  Synthetic
uucgcugugaauacaauuuug

SEQ ID NO: 351382 - RNA, 22 nt, Artificial Sequence
  Synthetic
uuucgcugugaauacaauuuug

SEQ ID NO: 351383 - RNA, 23 nt, Artificial Sequence
  Synthetic
cuuucgcugugaauacaauuuug

SEQ ID NO: 351384 - RNA, 24 nt, Artificial Sequence
  Synthetic
acuuucgcugugaauacaauuuug

SEQ ID NO: 351385 - RNA, 18 nt, Artificial Sequence
  Synthetic
uccagagacagaauuuug

SEQ ID NO: 351386 - RNA, 19 nt, Artificial Sequence
  Synthetic
auccagagacagaauuuug

SEQ ID NO: 351387 - RNA, 20 nt, Artificial Sequence
  Synthetic
gauccagagacagaauuuug

SEQ ID NO: 351388 - RNA, 21 nt, Artificial Sequence
  Synthetic
ugauccagagacagaauuuug

SEQ ID NO: 351389 - RNA, 22 nt, Artificial Sequence
  Synthetic
uugauccagagacagaauuuug

SEQ ID NO: 351390 - RNA, 23 nt, Artificial Sequence
  Synthetic
auugauccagagacagaauuuug

SEQ ID NO: 351391 - RNA, 24 nt, Artificial Sequence
  Synthetic
gauugauccagagacagaauuuug

SEQ ID NO: 351392 - RNA, 18 nt, Artificial Sequence
  Synthetic
aauuccuauuucauuuug

SEQ ID NO: 351393 - RNA, 19 nt, Artificial Sequence
  Synthetic
uaauuccuauuucauuuug

SEQ ID NO: 351394 - RNA, 20 nt, Artificial Sequence
  Synthetic
uuaauuccuauuucauuuug

SEQ ID NO: 351395 - RNA, 21 nt, Artificial Sequence
  Synthetic
auuaauuccuauuucauuuug

SEQ ID NO: 351396 - RNA, 22 nt, Artificial Sequence
  Synthetic
gauuaauuccuauuucauuuug

SEQ ID NO: 351397 - RNA, 23 nt, Artificial Sequence
  Synthetic
ggauuaauuccuauuucauuuug

SEQ ID NO: 351398 - RNA, 24 nt, Artificial Sequence
  Synthetic
aggauuaauuccuauuucauuuug

SEQ ID NO: 351399 - RNA, 18 nt, Artificial Sequence
  Synthetic
aggcauauucagauuuug

SEQ ID NO: 351400 - RNA, 19 nt, Artificial Sequence
  Synthetic
aaggcauauucagauuuug

SEQ ID NO: 351401 - RNA, 20 nt, Artificial Sequence
  Synthetic
gaaggcauauucagauuuug

SEQ ID NO: 351402 - RNA, 21 nt, Artificial Sequence
  Synthetic
ugaaggcauauucagauuuug

SEQ ID NO: 351403 - RNA, 22 nt, Artificial Sequence
  Synthetic
gugaaggcauauucagauuuug

SEQ ID NO: 351404 - RNA, 23 nt, Artificial Sequence
  Synthetic
agugaaggcauauucagauuuug

SEQ ID NO: 351405 - RNA, 24 nt, Artificial Sequence
  Synthetic
uagugaaggcauauucagauuuug

SEQ ID NO: 351406 - RNA, 18 nt, Artificial Sequence
  Synthetic
acuuggaaggugauuuug

SEQ ID NO: 351407 - RNA, 19 nt, Artificial Sequence
  Synthetic
cacuuggaaggugauuuug

SEQ ID NO: 351408 - RNA, 20 nt, Artificial Sequence
  Synthetic
ucacuuggaaggugauuuug

SEQ ID NO: 351409 - RNA, 21 nt, Artificial Sequence
  Synthetic
cucacuuggaaggugauuuug

SEQ ID NO: 351410 - RNA, 22 nt, Artificial Sequence
  Synthetic
ccucacuuggaaggugauuuug

SEQ ID NO: 351411 - RNA, 23 nt, Artificial Sequence
  Synthetic
accucacuuggaaggugauuuug

SEQ ID NO: 351412 - RNA, 24 nt, Artificial Sequence
  Synthetic
uaccucacuuggaaggugauuuug

SEQ ID NO: 351413 - RNA, 18 nt, Artificial Sequence
  Synthetic
auuauauaguugauuuug

SEQ ID NO: 351414 - RNA, 19 nt, Artificial Sequence
  Synthetic
gauuauauaguugauuuug

SEQ ID NO: 351415 - RNA, 20 nt, Artificial Sequence
  Synthetic
ugauuauauaguugauuuug

SEQ ID NO: 351416 - RNA, 21 nt, Artificial Sequence
  Synthetic
gugauuauauaguugauuuug

SEQ ID NO: 351417 - RNA, 22 nt, Artificial Sequence
  Synthetic
ugugauuauauaguugauuuug

SEQ ID NO: 351418 - RNA, 23 nt, Artificial Sequence
  Synthetic
uugugauuauauaguugauuuug

SEQ ID NO: 351419 - RNA, 24 nt, Artificial Sequence
  Synthetic
auugugauuauauaguugauuuug

SEQ ID NO: 351420 - RNA, 18 nt, Artificial Sequence
  Synthetic
aaugucuuuuauauuuug

SEQ ID NO: 351421 - RNA, 19 nt, Artificial Sequence
  Synthetic
aaaugucuuuuauauuuug

SEQ ID NO: 351422 - RNA, 20 nt, Artificial Sequence
  Synthetic
aaaaugucuuuuauauuuug

SEQ ID NO: 351423 - RNA, 21 nt, Artificial Sequence
  Synthetic
aaaaaugucuuuuauauuuug

SEQ ID NO: 351424 - RNA, 22 nt, Artificial Sequence
  Synthetic
caaaaaugucuuuuauauuuug

SEQ ID NO: 351425 - RNA, 23 nt, Artificial Sequence
  Synthetic
ucaaaaaugucuuuuauauuuug

SEQ ID NO: 351426 - RNA, 24 nt, Artificial Sequence
  Synthetic
uucaaaaaugucuuuuauauuuug

SEQ ID NO: 351427 - RNA, 18 nt, Artificial Sequence
  Synthetic
cuuuaaacaauuauuuug

SEQ ID NO: 351428 - RNA, 19 nt, Artificial Sequence
  Synthetic
acuuuaaacaauuauuuug

SEQ ID NO: 351429 - RNA, 20 nt, Artificial Sequence
  Synthetic
aacuuuaaacaauuauuuug

SEQ ID NO: 351430 - RNA, 21 nt, Artificial Sequence
  Synthetic
uaacuuuaaacaauuauuuug

SEQ ID NO: 351431 - RNA, 22 nt, Artificial Sequence
  Synthetic
cuaacuuuaaacaauuauuuug

SEQ ID NO: 351432 - RNA, 23 nt, Artificial Sequence
  Synthetic
gcuaacuuuaaacaauuauuuug

SEQ ID NO: 351433 - RNA, 24 nt, Artificial Sequence
  Synthetic
ggcuaacuuuaaacaauuauuuug

SEQ ID NO: 351434 - RNA, 18 nt, Artificial Sequence
  Synthetic
cuucuuuguguuauuuug

SEQ ID NO: 351435 - RNA, 19 nt, Artificial Sequence
  Synthetic
acuucuuuguguuauuuug

SEQ ID NO: 351436 - RNA, 20 nt, Artificial Sequence
  Synthetic
gacuucuuuguguuauuuug

SEQ ID NO: 351437 - RNA, 21 nt, Artificial Sequence
  Synthetic
ggacuucuuuguguuauuuug

SEQ ID NO: 351438 - RNA, 22 nt, Artificial Sequence
  Synthetic
uggacuucuuuguguuauuuug

SEQ ID NO: 351439 - RNA, 23 nt, Artificial Sequence
  Synthetic
uuggacuucuuuguguuauuuug

SEQ ID NO: 351440 - RNA, 24 nt, Artificial Sequence
  Synthetic
uuuggacuucuuuguguuauuuug

SEQ ID NO: 351441 - RNA, 18 nt, Artificial Sequence
  Synthetic
uuauuuuauuuuauuuug

SEQ ID NO: 351442 - RNA, 19 nt, Artificial Sequence
  Synthetic
uuuauuuuauuuuauuuug

SEQ ID NO: 351443 - RNA, 20 nt, Artificial Sequence
  Synthetic
uuuuauuuuauuuuauuuug

SEQ ID NO: 351444 - RNA, 21 nt, Artificial Sequence
  Synthetic
auuuuauuuuauuuuauuuug

SEQ ID NO: 351445 - RNA, 22 nt, Artificial Sequence
  Synthetic
cauuuuauuuuauuuuauuuug

SEQ ID NO: 351446 - RNA, 23 nt, Artificial Sequence
  Synthetic
ucauuuuauuuuauuuuauuuug

SEQ ID NO: 351447 - RNA, 24 nt, Artificial Sequence
  Synthetic
uucauuuuauuuuauuuuauuuug

SEQ ID NO: 351448 - RNA, 18 nt, Artificial Sequence
  Synthetic
guuuuuaacaaacuuuug

SEQ ID NO: 351449 - RNA, 19 nt, Artificial Sequence
  Synthetic
uguuuuuaacaaacuuuug

SEQ ID NO: 351450 - RNA, 20 nt, Artificial Sequence
  Synthetic
uuguuuuuaacaaacuuuug

SEQ ID NO: 351451 - RNA, 21 nt, Artificial Sequence
  Synthetic
auuguuuuuaacaaacuuuug

SEQ ID NO: 351452 - RNA, 22 nt, Artificial Sequence
  Synthetic
aauuguuuuuaacaaacuuuug

SEQ ID NO: 351453 - RNA, 23 nt, Artificial Sequence
  Synthetic
aaauuguuuuuaacaaacuuuug

SEQ ID NO: 351454 - RNA, 24 nt, Artificial Sequence
  Synthetic
gaaauuguuuuuaacaaacuuuug

SEQ ID NO: 351455 - RNA, 18 nt, Artificial Sequence
  Synthetic
acugccccauaacuuuug

SEQ ID NO: 351456 - RNA, 19 nt, Artificial Sequence
  Synthetic
aacugccccauaacuuuug

SEQ ID NO: 351457 - RNA, 20 nt, Artificial Sequence
  Synthetic
gaacugccccauaacuuuug

SEQ ID NO: 351458 - RNA, 21 nt, Artificial Sequence
  Synthetic
agaacugccccauaacuuuug

SEQ ID NO: 351459 - RNA, 22 nt, Artificial Sequence
  Synthetic
uagaacugccccauaacuuuug

SEQ ID NO: 351460 - RNA, 23 nt, Artificial Sequence
  Synthetic
uuagaacugccccauaacuuuug

SEQ ID NO: 351461 - RNA, 24 nt, Artificial Sequence
  Synthetic
guuagaacugccccauaacuuuug

SEQ ID NO: 351462 - RNA, 18 nt, Artificial Sequence
  Synthetic
aaugauaucagacuuuug

SEQ ID NO: 351463 - RNA, 19 nt, Artificial Sequence
  Synthetic
caaugauaucagacuuuug

SEQ ID NO: 351464 - RNA, 20 nt, Artificial Sequence
  Synthetic
ccaaugauaucagacuuuug

SEQ ID NO: 351465 - RNA, 21 nt, Artificial Sequence
  Synthetic
gccaaugauaucagacuuuug

SEQ ID NO: 351466 - RNA, 22 nt, Artificial Sequence
  Synthetic
agccaaugauaucagacuuuug

SEQ ID NO: 351467 - RNA, 23 nt, Artificial Sequence
  Synthetic
aagccaaugauaucagacuuuug

SEQ ID NO: 351468 - RNA, 24 nt, Artificial Sequence
  Synthetic
caagccaaugauaucagacuuuug

SEQ ID NO: 351469 - RNA, 18 nt, Artificial Sequence
  Synthetic
uaaacuuugagacuuuug

SEQ ID NO: 351470 - RNA, 19 nt, Artificial Sequence
  Synthetic
guaaacuuugagacuuuug

SEQ ID NO: 351471 - RNA, 20 nt, Artificial Sequence
  Synthetic
aguaaacuuugagacuuuug

SEQ ID NO: 351472 - RNA, 21 nt, Artificial Sequence
  Synthetic
uaguaaacuuugagacuuuug

SEQ ID NO: 351473 - RNA, 22 nt, Artificial Sequence
  Synthetic
cuaguaaacuuugagacuuuug

SEQ ID NO: 351474 - RNA, 23 nt, Artificial Sequence
  Synthetic
acuaguaaacuuugagacuuuug

SEQ ID NO: 351475 - RNA, 24 nt, Artificial Sequence
  Synthetic
aacuaguaaacuuugagacuuuug

SEQ ID NO: 351476 - RNA, 18 nt, Artificial Sequence
  Synthetic
ucugcaaacuuacuuuug

SEQ ID NO: 351477 - RNA, 19 nt, Artificial Sequence
  Synthetic
aucugcaaacuuacuuuug

SEQ ID NO: 351478 - RNA, 20 nt, Artificial Sequence
  Synthetic
caucugcaaacuuacuuuug

SEQ ID NO: 351479 - RNA, 21 nt, Artificial Sequence
  Synthetic
acaucugcaaacuuacuuuug

SEQ ID NO: 351480 - RNA, 22 nt, Artificial Sequence
  Synthetic
cacaucugcaaacuuacuuuug

SEQ ID NO: 351481 - RNA, 23 nt, Artificial Sequence
  Synthetic
ccacaucugcaaacuuacuuuug

SEQ ID NO: 351482 - RNA, 24 nt, Artificial Sequence
  Synthetic
cccacaucugcaaacuuacuuuug

SEQ ID NO: 351483 - RNA, 18 nt, Artificial Sequence
  Synthetic
agggguuuuaaccuuuug

SEQ ID NO: 351484 - RNA, 19 nt, Artificial Sequence
  Synthetic
uagggguuuuaaccuuuug

SEQ ID NO: 351485 - RNA, 20 nt, Artificial Sequence
  Synthetic
guagggguuuuaaccuuuug

SEQ ID NO: 351486 - RNA, 21 nt, Artificial Sequence
  Synthetic
aguagggguuuuaaccuuuug

SEQ ID NO: 351487 - RNA, 22 nt, Artificial Sequence
  Synthetic
caguagggguuuuaaccuuuug

SEQ ID NO: 351488 - RNA, 23 nt, Artificial Sequence
  Synthetic
acaguagggguuuuaaccuuuug

SEQ ID NO: 351489 - RNA, 24 nt, Artificial Sequence
  Synthetic
aacaguagggguuuuaaccuuuug

SEQ ID NO: 351490 - RNA, 18 nt, Artificial Sequence
  Synthetic
auucaggaaagccuuuug

SEQ ID NO: 351491 - RNA, 19 nt, Artificial Sequence
  Synthetic
uauucaggaaagccuuuug

SEQ ID NO: 351492 - RNA, 20 nt, Artificial Sequence
  Synthetic
auauucaggaaagccuuuug

SEQ ID NO: 351493 - RNA, 21 nt, Artificial Sequence
  Synthetic
aauauucaggaaagccuuuug

SEQ ID NO: 351494 - RNA, 22 nt, Artificial Sequence
  Synthetic
aaauauucaggaaagccuuuug

SEQ ID NO: 351495 - RNA, 23 nt, Artificial Sequence
  Synthetic
caaauauucaggaaagccuuuug

SEQ ID NO: 351496 - RNA, 24 nt, Artificial Sequence
  Synthetic
acaaauauucaggaaagccuuuug

SEQ ID NO: 351497 - RNA, 18 nt, Artificial Sequence
  Synthetic
auacagucacgccuuuug

SEQ ID NO: 351498 - RNA, 19 nt, Artificial Sequence
  Synthetic
cauacagucacgccuuuug

SEQ ID NO: 351499 - RNA, 20 nt, Artificial Sequence
  Synthetic
gcauacagucacgccuuuug

SEQ ID NO: 351500 - RNA, 21 nt, Artificial Sequence
  Synthetic
agcauacagucacgccuuuug

SEQ ID NO: 351501 - RNA, 22 nt, Artificial Sequence
  Synthetic
aagcauacagucacgccuuuug

SEQ ID NO: 351502 - RNA, 23 nt, Artificial Sequence
  Synthetic
aaagcauacagucacgccuuuug

SEQ ID NO: 351503 - RNA, 24 nt, Artificial Sequence
  Synthetic
aaaagcauacagucacgccuuuug

SEQ ID NO: 351504 - RNA, 18 nt, Artificial Sequence
  Synthetic
uuaucuauucuccuuuug

SEQ ID NO: 351505 - RNA, 19 nt, Artificial Sequence
  Synthetic
uuuaucuauucuccuuuug

SEQ ID NO: 351506 - RNA, 20 nt, Artificial Sequence
  Synthetic
auuuaucuauucuccuuuug

SEQ ID NO: 351507 - RNA, 21 nt, Artificial Sequence
  Synthetic
uauuuaucuauucuccuuuug

SEQ ID NO: 351508 - RNA, 22 nt, Artificial Sequence
  Synthetic
uuauuuaucuauucuccuuuug

SEQ ID NO: 351509 - RNA, 23 nt, Artificial Sequence
  Synthetic
uuuauuuaucuauucuccuuuug

SEQ ID NO: 351510 - RNA, 24 nt, Artificial Sequence
  Synthetic
auuuauuuaucuauucuccuuuug

SEQ ID NO: 351511 - RNA, 18 nt, Artificial Sequence
  Synthetic
auuuagaauuuccuuuug

SEQ ID NO: 351512 - RNA, 19 nt, Artificial Sequence
  Synthetic
uauuuagaauuuccuuuug

SEQ ID NO: 351513 - RNA, 20 nt, Artificial Sequence
  Synthetic
auauuuagaauuuccuuuug

SEQ ID NO: 351514 - RNA, 21 nt, Artificial Sequence
  Synthetic
uauauuuagaauuuccuuuug

SEQ ID NO: 351515 - RNA, 22 nt, Artificial Sequence
  Synthetic
guauauuuagaauuuccuuuug

SEQ ID NO: 351516 - RNA, 23 nt, Artificial Sequence
  Synthetic
uguauauuuagaauuuccuuuug

SEQ ID NO: 351517 - RNA, 24 nt, Artificial Sequence
  Synthetic
auguauauuuagaauuuccuuuug

SEQ ID NO: 351518 - RNA, 18 nt, Artificial Sequence
  Synthetic
gggaagggaaagcuuuug

SEQ ID NO: 351519 - RNA, 19 nt, Artificial Sequence
  Synthetic
ugggaagggaaagcuuuug

SEQ ID NO: 351520 - RNA, 20 nt, Artificial Sequence
  Synthetic
gugggaagggaaagcuuuug

SEQ ID NO: 351521 - RNA, 21 nt, Artificial Sequence
  Synthetic
ggugggaagggaaagcuuuug

SEQ ID NO: 351522 - RNA, 22 nt, Artificial Sequence
  Synthetic
uggugggaagggaaagcuuuug

SEQ ID NO: 351523 - RNA, 23 nt, Artificial Sequence
  Synthetic
cuggugggaagggaaagcuuuug

SEQ ID NO: 351524 - RNA, 24 nt, Artificial Sequence
  Synthetic
ccuggugggaagggaaagcuuuug

SEQ ID NO: 351525 - RNA, 18 nt, Artificial Sequence
  Synthetic
uuuaaauccaagcuuuug

SEQ ID NO: 351526 - RNA, 19 nt, Artificial Sequence
  Synthetic
uuuuaaauccaagcuuuug

SEQ ID NO: 351527 - RNA, 20 nt, Artificial Sequence
  Synthetic
auuuuaaauccaagcuuuug

SEQ ID NO: 351528 - RNA, 21 nt, Artificial Sequence
  Synthetic
uauuuuaaauccaagcuuuug

SEQ ID NO: 351529 - RNA, 22 nt, Artificial Sequence
  Synthetic
auauuuuaaauccaagcuuuug

SEQ ID NO: 351530 - RNA, 23 nt, Artificial Sequence
  Synthetic
uauauuuuaaauccaagcuuuug

SEQ ID NO: 351531 - RNA, 24 nt, Artificial Sequence
  Synthetic
uuauauuuuaaauccaagcuuuug

SEQ ID NO: 351532 - RNA, 18 nt, Artificial Sequence
  Synthetic
ucaaagagagagcuuuug

SEQ ID NO: 351533 - RNA, 19 nt, Artificial Sequence
  Synthetic
gucaaagagagagcuuuug

SEQ ID NO: 351534 - RNA, 20 nt, Artificial Sequence
  Synthetic
agucaaagagagagcuuuug

SEQ ID NO: 351535 - RNA, 21 nt, Artificial Sequence
  Synthetic
cagucaaagagagagcuuuug

SEQ ID NO: 351536 - RNA, 22 nt, Artificial Sequence
  Synthetic
gcagucaaagagagagcuuuug

SEQ ID NO: 351537 - RNA, 23 nt, Artificial Sequence
  Synthetic
agcagucaaagagagagcuuuug

SEQ ID NO: 351538 - RNA, 24 nt, Artificial Sequence
  Synthetic
cagcagucaaagagagagcuuuug

SEQ ID NO: 351539 - RNA, 18 nt, Artificial Sequence
  Synthetic
ugaguauucuagcuuuug

SEQ ID NO: 351540 - RNA, 19 nt, Artificial Sequence
  Synthetic
gugaguauucuagcuuuug

SEQ ID NO: 351541 - RNA, 20 nt, Artificial Sequence
  Synthetic
ugugaguauucuagcuuuug

SEQ ID NO: 351542 - RNA, 21 nt, Artificial Sequence
  Synthetic
gugugaguauucuagcuuuug

SEQ ID NO: 351543 - RNA, 22 nt, Artificial Sequence
  Synthetic
ugugugaguauucuagcuuuug

SEQ ID NO: 351544 - RNA, 23 nt, Artificial Sequence
  Synthetic
augugugaguauucuagcuuuug

SEQ ID NO: 351545 - RNA, 24 nt, Artificial Sequence
  Synthetic
uaugugugaguauucuagcuuuug

SEQ ID NO: 351546 - RNA, 18 nt, Artificial Sequence
  Synthetic
aggucuguguagcuuuug

SEQ ID NO: 351547 - RNA, 19 nt, Artificial Sequence
  Synthetic
caggucuguguagcuuuug

SEQ ID NO: 351548 - RNA, 20 nt, Artificial Sequence
  Synthetic
ccaggucuguguagcuuuug

SEQ ID NO: 351549 - RNA, 21 nt, Artificial Sequence
  Synthetic
cccaggucuguguagcuuuug

SEQ ID NO: 351550 - RNA, 22 nt, Artificial Sequence
  Synthetic
ucccaggucuguguagcuuuug

SEQ ID NO: 351551 - RNA, 23 nt, Artificial Sequence
  Synthetic
uucccaggucuguguagcuuuug

SEQ ID NO: 351552 - RNA, 24 nt, Artificial Sequence
  Synthetic
cuucccaggucuguguagcuuuug

SEQ ID NO: 351553 - RNA, 18 nt, Artificial Sequence
  Synthetic
cccgccaaauggcuuuug

SEQ ID NO: 351554 - RNA, 19 nt, Artificial Sequence
  Synthetic
acccgccaaauggcuuuug

SEQ ID NO: 351555 - RNA, 20 nt, Artificial Sequence
  Synthetic
uacccgccaaauggcuuuug

SEQ ID NO: 351556 - RNA, 21 nt, Artificial Sequence
  Synthetic
cuacccgccaaauggcuuuug

SEQ ID NO: 351557 - RNA, 22 nt, Artificial Sequence
  Synthetic
ucuacccgccaaauggcuuuug

SEQ ID NO: 351558 - RNA, 23 nt, Artificial Sequence
  Synthetic
cucuacccgccaaauggcuuuug

SEQ ID NO: 351559 - RNA, 24 nt, Artificial Sequence
  Synthetic
ccucuacccgccaaauggcuuuug

SEQ ID NO: 351560 - RNA, 18 nt, Artificial Sequence
  Synthetic
uuggauaaugaucuuuug

SEQ ID NO: 351561 - RNA, 19 nt, Artificial Sequence
  Synthetic
guuggauaaugaucuuuug

SEQ ID NO: 351562 - RNA, 20 nt, Artificial Sequence
  Synthetic
gguuggauaaugaucuuuug

SEQ ID NO: 351563 - RNA, 21 nt, Artificial Sequence
  Synthetic
ugguuggauaaugaucuuuug

SEQ ID NO: 351564 - RNA, 22 nt, Artificial Sequence
  Synthetic
augguuggauaaugaucuuuug

SEQ ID NO: 351565 - RNA, 23 nt, Artificial Sequence
  Synthetic
gaugguuggauaaugaucuuuug

SEQ ID NO: 351566 - RNA, 24 nt, Artificial Sequence
  Synthetic
agaugguuggauaaugaucuuuug

SEQ ID NO: 351567 - RNA, 18 nt, Artificial Sequence
  Synthetic
cuuuaauaaacucuuuug

SEQ ID NO: 351568 - RNA, 19 nt, Artificial Sequence
  Synthetic
gcuuuaauaaacucuuuug

SEQ ID NO: 351569 - RNA, 20 nt, Artificial Sequence
  Synthetic
agcuuuaauaaacucuuuug

SEQ ID NO: 351570 - RNA, 21 nt, Artificial Sequence
  Synthetic
aagcuuuaauaaacucuuuug

SEQ ID NO: 351571 - RNA, 22 nt, Artificial Sequence
  Synthetic
uaagcuuuaauaaacucuuuug

SEQ ID NO: 351572 - RNA, 23 nt, Artificial Sequence
  Synthetic
auaagcuuuaauaaacucuuuug

SEQ ID NO: 351573 - RNA, 24 nt, Artificial Sequence
  Synthetic
aauaagcuuuaauaaacucuuuug

SEQ ID NO: 351574 - RNA, 18 nt, Artificial Sequence
  Synthetic
cuguagcaaccucuuuug

SEQ ID NO: 351575 - RNA, 19 nt, Artificial Sequence
  Synthetic
ucuguagcaaccucuuuug

SEQ ID NO: 351576 - RNA, 20 nt, Artificial Sequence
  Synthetic
cucuguagcaaccucuuuug

SEQ ID NO: 351577 - RNA, 21 nt, Artificial Sequence
  Synthetic
acucuguagcaaccucuuuug

SEQ ID NO: 351578 - RNA, 22 nt, Artificial Sequence
  Synthetic
aacucuguagcaaccucuuuug

SEQ ID NO: 351579 - RNA, 23 nt, Artificial Sequence
  Synthetic
gaacucuguagcaaccucuuuug

SEQ ID NO: 351580 - RNA, 24 nt, Artificial Sequence
  Synthetic
ggaacucuguagcaaccucuuuug

SEQ ID NO: 351581 - RNA, 18 nt, Artificial Sequence
  Synthetic
ugaucuccaccucuuuug

SEQ ID NO: 351582 - RNA, 19 nt, Artificial Sequence
  Synthetic
augaucuccaccucuuuug

SEQ ID NO: 351583 - RNA, 20 nt, Artificial Sequence
  Synthetic
gaugaucuccaccucuuuug

SEQ ID NO: 351584 - RNA, 21 nt, Artificial Sequence
  Synthetic
ggaugaucuccaccucuuuug

SEQ ID NO: 351585 - RNA, 22 nt, Artificial Sequence
  Synthetic
uggaugaucuccaccucuuuug

SEQ ID NO: 351586 - RNA, 23 nt, Artificial Sequence
  Synthetic
cuggaugaucuccaccucuuuug

SEQ ID NO: 351587 - RNA, 24 nt, Artificial Sequence
  Synthetic
gcuggaugaucuccaccucuuuug

SEQ ID NO: 351588 - RNA, 18 nt, Artificial Sequence
  Synthetic
acucacuuuucucuuuug

SEQ ID NO: 351589 - RNA, 19 nt, Artificial Sequence
  Synthetic
aacucacuuuucucuuuug

SEQ ID NO: 351590 - RNA, 20 nt, Artificial Sequence
  Synthetic
uaacucacuuuucucuuuug

SEQ ID NO: 351591 - RNA, 21 nt, Artificial Sequence
  Synthetic
uuaacucacuuuucucuuuug

SEQ ID NO: 351592 - RNA, 22 nt, Artificial Sequence
  Synthetic
auuaacucacuuuucucuuuug

SEQ ID NO: 351593 - RNA, 23 nt, Artificial Sequence
  Synthetic
aauuaacucacuuuucucuuuug

SEQ ID NO: 351594 - RNA, 24 nt, Artificial Sequence
  Synthetic
aaauuaacucacuuuucucuuuug

SEQ ID NO: 351595 - RNA, 18 nt, Artificial Sequence
  Synthetic
ucaaagagaagucuuuug

SEQ ID NO: 351596 - RNA, 19 nt, Artificial Sequence
  Synthetic
cucaaagagaagucuuuug

SEQ ID NO: 351597 - RNA, 20 nt, Artificial Sequence
  Synthetic
ucucaaagagaagucuuuug

SEQ ID NO: 351598 - RNA, 21 nt, Artificial Sequence
  Synthetic
uucucaaagagaagucuuuug

SEQ ID NO: 351599 - RNA, 22 nt, Artificial Sequence
  Synthetic
cuucucaaagagaagucuuuug

SEQ ID NO: 351600 - RNA, 23 nt, Artificial Sequence
  Synthetic
gcuucucaaagagaagucuuuug

SEQ ID NO: 351601 - RNA, 24 nt, Artificial Sequence
  Synthetic
ugcuucucaaagagaagucuuuug

SEQ ID NO: 351602 - RNA, 18 nt, Artificial Sequence
  Synthetic
auggcuuuuauucuuuug

SEQ ID NO: 351603 - RNA, 19 nt, Artificial Sequence
  Synthetic
uauggcuuuuauucuuuug

SEQ ID NO: 351604 - RNA, 20 nt, Artificial Sequence
  Synthetic
uuauggcuuuuauucuuuug

SEQ ID NO: 351605 - RNA, 21 nt, Artificial Sequence
  Synthetic
uuuauggcuuuuauucuuuug

SEQ ID NO: 351606 - RNA, 22 nt, Artificial Sequence
  Synthetic
auuuauggcuuuuauucuuuug

SEQ ID NO: 351607 - RNA, 23 nt, Artificial Sequence
  Synthetic
aauuuauggcuuuuauucuuuug

SEQ ID NO: 351608 - RNA, 24 nt, Artificial Sequence
  Synthetic
uaauuuauggcuuuuauucuuuug

SEQ ID NO: 351609 - RNA, 18 nt, Artificial Sequence
  Synthetic
gugacaaucccaguuuug

SEQ ID NO: 351610 - RNA, 19 nt, Artificial Sequence
  Synthetic
ggugacaaucccaguuuug

SEQ ID NO: 351611 - RNA, 20 nt, Artificial Sequence
  Synthetic
gggugacaaucccaguuuug

SEQ ID NO: 351612 - RNA, 21 nt, Artificial Sequence
  Synthetic
agggugacaaucccaguuuug

SEQ ID NO: 351613 - RNA, 22 nt, Artificial Sequence
  Synthetic
aagggugacaaucccaguuuug

SEQ ID NO: 351614 - RNA, 23 nt, Artificial Sequence
  Synthetic
aaagggugacaaucccaguuuug

SEQ ID NO: 351615 - RNA, 24 nt, Artificial Sequence
  Synthetic
gaaagggugacaaucccaguuuug

SEQ ID NO: 351616 - RNA, 18 nt, Artificial Sequence
  Synthetic
auuucaacaucaguuuug

SEQ ID NO: 351617 - RNA, 19 nt, Artificial Sequence
  Synthetic
aauuucaacaucaguuuug

SEQ ID NO: 351618 - RNA, 20 nt, Artificial Sequence
  Synthetic
aaauuucaacaucaguuuug

SEQ ID NO: 351619 - RNA, 21 nt, Artificial Sequence
  Synthetic
uaaauuucaacaucaguuuug

SEQ ID NO: 351620 - RNA, 22 nt, Artificial Sequence
  Synthetic
uuaaauuucaacaucaguuuug

SEQ ID NO: 351621 - RNA, 23 nt, Artificial Sequence
  Synthetic
auuaaauuucaacaucaguuuug

SEQ ID NO: 351622 - RNA, 24 nt, Artificial Sequence
  Synthetic
aauuaaauuucaacaucaguuuug

SEQ ID NO: 351623 - RNA, 18 nt, Artificial Sequence
  Synthetic
uauugaaugggaguuuug

SEQ ID NO: 351624 - RNA, 19 nt, Artificial Sequence
  Synthetic
guauugaaugggaguuuug

SEQ ID NO: 351625 - RNA, 20 nt, Artificial Sequence
  Synthetic
gguauugaaugggaguuuug

SEQ ID NO: 351626 - RNA, 21 nt, Artificial Sequence
  Synthetic
ugguauugaaugggaguuuug

SEQ ID NO: 351627 - RNA, 22 nt, Artificial Sequence
  Synthetic
augguauugaaugggaguuuug

SEQ ID NO: 351628 - RNA, 23 nt, Artificial Sequence
  Synthetic
aaugguauugaaugggaguuuug

SEQ ID NO: 351629 - RNA, 24 nt, Artificial Sequence
  Synthetic
gaaugguauugaaugggaguuuug

SEQ ID NO: 351630 - RNA, 18 nt, Artificial Sequence
  Synthetic
uuuagagaaugaguuuug

SEQ ID NO: 351631 - RNA, 19 nt, Artificial Sequence
  Synthetic
uuuuagagaaugaguuuug

SEQ ID NO: 351632 - RNA, 20 nt, Artificial Sequence
  Synthetic
uuuuuagagaaugaguuuug

SEQ ID NO: 351633 - RNA, 21 nt, Artificial Sequence
  Synthetic
uuuuuuagagaaugaguuuug

SEQ ID NO: 351634 - RNA, 22 nt, Artificial Sequence
  Synthetic
guuuuuuagagaaugaguuuug

SEQ ID NO: 351635 - RNA, 23 nt, Artificial Sequence
  Synthetic
uguuuuuuagagaaugaguuuug

SEQ ID NO: 351636 - RNA, 24 nt, Artificial Sequence
  Synthetic
uuguuuuuuagagaaugaguuuug

SEQ ID NO: 351637 - RNA, 18 nt, Artificial Sequence
  Synthetic
uggagcagugauguuuug

SEQ ID NO: 351638 - RNA, 19 nt, Artificial Sequence
  Synthetic
cuggagcagugauguuuug

SEQ ID NO: 351639 - RNA, 20 nt, Artificial Sequence
  Synthetic
ucuggagcagugauguuuug

SEQ ID NO: 351640 - RNA, 21 nt, Artificial Sequence
  Synthetic
uucuggagcagugauguuuug

SEQ ID NO: 351641 - RNA, 22 nt, Artificial Sequence
  Synthetic
auucuggagcagugauguuuug

SEQ ID NO: 351642 - RNA, 23 nt, Artificial Sequence
  Synthetic
uauucuggagcagugauguuuug

SEQ ID NO: 351643 - RNA, 24 nt, Artificial Sequence
  Synthetic
uuauucuggagcagugauguuuug

SEQ ID NO: 351644 - RNA, 18 nt, Artificial Sequence
  Synthetic
acacugucauauguuuug

SEQ ID NO: 351645 - RNA, 19 nt, Artificial Sequence
  Synthetic
aacacugucauauguuuug

SEQ ID NO: 351646 - RNA, 20 nt, Artificial Sequence
  Synthetic
caacacugucauauguuuug

SEQ ID NO: 351647 - RNA, 21 nt, Artificial Sequence
  Synthetic
ucaacacugucauauguuuug

SEQ ID NO: 351648 - RNA, 22 nt, Artificial Sequence
  Synthetic
aucaacacugucauauguuuug

SEQ ID NO: 351649 - RNA, 23 nt, Artificial Sequence
  Synthetic
aaucaacacugucauauguuuug

SEQ ID NO: 351650 - RNA, 24 nt, Artificial Sequence
  Synthetic
aaaucaacacugucauauguuuug

SEQ ID NO: 351651 - RNA, 18 nt, Artificial Sequence
  Synthetic
auagugagauauguuuug

SEQ ID NO: 351652 - RNA, 19 nt, Artificial Sequence
  Synthetic
uauagugagauauguuuug

SEQ ID NO: 351653 - RNA, 20 nt, Artificial Sequence
  Synthetic
uuauagugagauauguuuug

SEQ ID NO: 351654 - RNA, 21 nt, Artificial Sequence
  Synthetic
uuuauagugagauauguuuug

SEQ ID NO: 351655 - RNA, 22 nt, Artificial Sequence
  Synthetic
uuuuauagugagauauguuuug

SEQ ID NO: 351656 - RNA, 23 nt, Artificial Sequence
  Synthetic
uuuuuauagugagauauguuuug

SEQ ID NO: 351657 - RNA, 24 nt, Artificial Sequence
  Synthetic
guuuuuauagugagauauguuuug

SEQ ID NO: 351658 - RNA, 18 nt, Artificial Sequence
  Synthetic
uucuauuuuuauguuuug

SEQ ID NO: 351659 - RNA, 19 nt, Artificial Sequence
  Synthetic
auucuauuuuuauguuuug

SEQ ID NO: 351660 - RNA, 20 nt, Artificial Sequence
  Synthetic
aauucuauuuuuauguuuug

SEQ ID NO: 351661 - RNA, 21 nt, Artificial Sequence
  Synthetic
uaauucuauuuuuauguuuug

SEQ ID NO: 351662 - RNA, 22 nt, Artificial Sequence
  Synthetic
auaauucuauuuuuauguuuug

SEQ ID NO: 351663 - RNA, 23 nt, Artificial Sequence
  Synthetic
gauaauucuauuuuuauguuuug

SEQ ID NO: 351664 - RNA, 24 nt, Artificial Sequence
  Synthetic
ugauaauucuauuuuuauguuuug

SEQ ID NO: 351665 - RNA, 18 nt, Artificial Sequence
  Synthetic
uaauugugauguguuuug

SEQ ID NO: 351666 - RNA, 19 nt, Artificial Sequence
  Synthetic
uuaauugugauguguuuug

SEQ ID NO: 351667 - RNA, 20 nt, Artificial Sequence
  Synthetic
auuaauugugauguguuuug

SEQ ID NO: 351668 - RNA, 21 nt, Artificial Sequence
  Synthetic
gauuaauugugauguguuuug

SEQ ID NO: 351669 - RNA, 22 nt, Artificial Sequence
  Synthetic
ugauuaauugugauguguuuug

SEQ ID NO: 351670 - RNA, 23 nt, Artificial Sequence
  Synthetic
gugauuaauugugauguguuuug

SEQ ID NO: 351671 - RNA, 24 nt, Artificial Sequence
  Synthetic
ugugauuaauugugauguguuuug

SEQ ID NO: 351672 - RNA, 18 nt, Artificial Sequence
  Synthetic
uuauaaaugauuguuuug

SEQ ID NO: 351673 - RNA, 19 nt, Artificial Sequence
  Synthetic
auuauaaaugauuguuuug

SEQ ID NO: 351674 - RNA, 20 nt, Artificial Sequence
  Synthetic
aauuauaaaugauuguuuug

SEQ ID NO: 351675 - RNA, 21 nt, Artificial Sequence
  Synthetic
caauuauaaaugauuguuuug

SEQ ID NO: 351676 - RNA, 22 nt, Artificial Sequence
  Synthetic
gcaauuauaaaugauuguuuug

SEQ ID NO: 351677 - RNA, 23 nt, Artificial Sequence
  Synthetic
agcaauuauaaaugauuguuuug

SEQ ID NO: 351678 - RNA, 24 nt, Artificial Sequence
  Synthetic
aagcaauuauaaaugauuguuuug

SEQ ID NO: 351679 - RNA, 18 nt, Artificial Sequence
  Synthetic
cauuuagcuguuguuuug

SEQ ID NO: 351680 - RNA, 19 nt, Artificial Sequence
  Synthetic
ccauuuagcuguuguuuug

SEQ ID NO: 351681 - RNA, 20 nt, Artificial Sequence
  Synthetic
uccauuuagcuguuguuuug

SEQ ID NO: 351682 - RNA, 21 nt, Artificial Sequence
  Synthetic
cuccauuuagcuguuguuuug

SEQ ID NO: 351683 - RNA, 22 nt, Artificial Sequence
  Synthetic
ucuccauuuagcuguuguuuug

SEQ ID NO: 351684 - RNA, 23 nt, Artificial Sequence
  Synthetic
aucuccauuuagcuguuguuuug

SEQ ID NO: 351685 - RNA, 24 nt, Artificial Sequence
  Synthetic
aaucuccauuuagcuguuguuuug

SEQ ID NO: 351686 - RNA, 18 nt, Artificial Sequence
  Synthetic
ucuguguccuuuguuuug

SEQ ID NO: 351687 - RNA, 19 nt, Artificial Sequence
  Synthetic
gucuguguccuuuguuuug

SEQ ID NO: 351688 - RNA, 20 nt, Artificial Sequence
  Synthetic
agucuguguccuuuguuuug

SEQ ID NO: 351689 - RNA, 21 nt, Artificial Sequence
  Synthetic
cagucuguguccuuuguuuug

SEQ ID NO: 351690 - RNA, 22 nt, Artificial Sequence
  Synthetic
ccagucuguguccuuuguuuug

SEQ ID NO: 351691 - RNA, 23 nt, Artificial Sequence
  Synthetic
uccagucuguguccuuuguuuug

SEQ ID NO: 351692 - RNA, 24 nt, Artificial Sequence
  Synthetic
guccagucuguguccuuuguuuug

SEQ ID NO: 351693 - RNA, 18 nt, Artificial Sequence
  Synthetic
agguaagauuuuguuuug

SEQ ID NO: 351694 - RNA, 19 nt, Artificial Sequence
  Synthetic
aagguaagauuuuguuuug

SEQ ID NO: 351695 - RNA, 20 nt, Artificial Sequence
  Synthetic
caagguaagauuuuguuuug

SEQ ID NO: 351696 - RNA, 21 nt, Artificial Sequence
  Synthetic
gcaagguaagauuuuguuuug

SEQ ID NO: 351697 - RNA, 22 nt, Artificial Sequence
  Synthetic
ggcaagguaagauuuuguuuug

SEQ ID NO: 351698 - RNA, 23 nt, Artificial Sequence
  Synthetic
aggcaagguaagauuuuguuuug

SEQ ID NO: 351699 - RNA, 24 nt, Artificial Sequence
  Synthetic
uaggcaagguaagauuuuguuuug

SEQ ID NO: 351700 - RNA, 18 nt, Artificial Sequence
  Synthetic
uuguuuuguuuuguuuug

SEQ ID NO: 351701 - RNA, 19 nt, Artificial Sequence
  Synthetic
uuuguuuuguuuuguuuug

SEQ ID NO: 351702 - RNA, 20 nt, Artificial Sequence
  Synthetic
uuuuguuuuguuuuguuuug

SEQ ID NO: 351703 - RNA, 21 nt, Artificial Sequence
  Synthetic
guuuuguuuuguuuuguuuug

SEQ ID NO: 351704 - RNA, 22 nt, Artificial Sequence
  Synthetic
uguuuuguuuuguuuuguuuug

SEQ ID NO: 351705 - RNA, 23 nt, Artificial Sequence
  Synthetic
uuguuuuguuuuguuuuguuuug

SEQ ID NO: 351706 - RNA, 24 nt, Artificial Sequence
  Synthetic
uuuguuuuguuuuguuuuguuuug

SEQ ID NO: 351707 - RNA, 18 nt, Artificial Sequence
  Synthetic
uuaaaacauuaauuuuug

SEQ ID NO: 351708 - RNA, 19 nt, Artificial Sequence
  Synthetic
auuaaaacauuaauuuuug

SEQ ID NO: 351709 - RNA, 20 nt, Artificial Sequence
  Synthetic
uauuaaaacauuaauuuuug

SEQ ID NO: 351710 - RNA, 21 nt, Artificial Sequence
  Synthetic
cuauuaaaacauuaauuuuug

SEQ ID NO: 351711 - RNA, 22 nt, Artificial Sequence
  Synthetic
acuauuaaaacauuaauuuuug

SEQ ID NO: 351712 - RNA, 23 nt, Artificial Sequence
  Synthetic
uacuauuaaaacauuaauuuuug

SEQ ID NO: 351713 - RNA, 24 nt, Artificial Sequence
  Synthetic
auacuauuaaaacauuaauuuuug

SEQ ID NO: 351714 - RNA, 18 nt, Artificial Sequence
  Synthetic
acgugaugaacauuuuug

SEQ ID NO: 351715 - RNA, 19 nt, Artificial Sequence
  Synthetic
aacgugaugaacauuuuug

SEQ ID NO: 351716 - RNA, 20 nt, Artificial Sequence
  Synthetic
uaacgugaugaacauuuuug

SEQ ID NO: 351717 - RNA, 21 nt, Artificial Sequence
  Synthetic
auaacgugaugaacauuuuug

SEQ ID NO: 351718 - RNA, 22 nt, Artificial Sequence
  Synthetic
aauaacgugaugaacauuuuug

SEQ ID NO: 351719 - RNA, 23 nt, Artificial Sequence
  Synthetic
aaauaacgugaugaacauuuuug

SEQ ID NO: 351720 - RNA, 24 nt, Artificial Sequence
  Synthetic
aaaauaacgugaugaacauuuuug

SEQ ID NO: 351721 - RNA, 18 nt, Artificial Sequence
  Synthetic
uuugaugaucuauuuuug

SEQ ID NO: 351722 - RNA, 19 nt, Artificial Sequence
  Synthetic
uuuugaugaucuauuuuug

SEQ ID NO: 351723 - RNA, 20 nt, Artificial Sequence
  Synthetic
uuuuugaugaucuauuuuug

SEQ ID NO: 351724 - RNA, 21 nt, Artificial Sequence
  Synthetic
uuuuuugaugaucuauuuuug

SEQ ID NO: 351725 - RNA, 22 nt, Artificial Sequence
  Synthetic
auuuuuugaugaucuauuuuug

SEQ ID NO: 351726 - RNA, 23 nt, Artificial Sequence
  Synthetic
uauuuuuugaugaucuauuuuug

SEQ ID NO: 351727 - RNA, 24 nt, Artificial Sequence
  Synthetic
uuauuuuuugaugaucuauuuuug

SEQ ID NO: 351728 - RNA, 18 nt, Artificial Sequence
  Synthetic
uccuucacccacuuuuug

SEQ ID NO: 351729 - RNA, 19 nt, Artificial Sequence
  Synthetic
guccuucacccacuuuuug

SEQ ID NO: 351730 - RNA, 20 nt, Artificial Sequence
  Synthetic
uguccuucacccacuuuuug

SEQ ID NO: 351731 - RNA, 21 nt, Artificial Sequence
  Synthetic
auguccuucacccacuuuuug

SEQ ID NO: 351732 - RNA, 22 nt, Artificial Sequence
  Synthetic
cauguccuucacccacuuuuug

SEQ ID NO: 351733 - RNA, 23 nt, Artificial Sequence
  Synthetic
ucauguccuucacccacuuuuug

SEQ ID NO: 351734 - RNA, 24 nt, Artificial Sequence
  Synthetic
uucauguccuucacccacuuuuug

SEQ ID NO: 351735 - RNA, 19 nt, Artificial Sequence
  Synthetic
auccuucgcccacuuuuug

SEQ ID NO: 351736 - RNA, 20 nt, Artificial Sequence
  Synthetic
uauccuucgcccacuuuuug

SEQ ID NO: 351737 - RNA, 21 nt, Artificial Sequence
  Synthetic
auauccuucgcccacuuuuug

SEQ ID NO: 351738 - RNA, 22 nt, Artificial Sequence
  Synthetic
cauauccuucgcccacuuuuug

SEQ ID NO: 351739 - RNA, 23 nt, Artificial Sequence
  Synthetic
ucauauccuucgcccacuuuuug

SEQ ID NO: 351740 - RNA, 24 nt, Artificial Sequence
  Synthetic
uucauauccuucgcccacuuuuug

SEQ ID NO: 351741 - RNA, 18 nt, Artificial Sequence
  Synthetic
uuuuaugaagacuuuuug

SEQ ID NO: 351742 - RNA, 19 nt, Artificial Sequence
  Synthetic
uuuuuaugaagacuuuuug

SEQ ID NO: 351743 - RNA, 20 nt, Artificial Sequence
  Synthetic
auuuuuaugaagacuuuuug

SEQ ID NO: 351744 - RNA, 21 nt, Artificial Sequence
  Synthetic
aauuuuuaugaagacuuuuug

SEQ ID NO: 351745 - RNA, 22 nt, Artificial Sequence
  Synthetic
uaauuuuuaugaagacuuuuug

SEQ ID NO: 351746 - RNA, 23 nt, Artificial Sequence
  Synthetic
cuaauuuuuaugaagacuuuuug

SEQ ID NO: 351747 - RNA, 24 nt, Artificial Sequence
  Synthetic
ucuaauuuuuaugaagacuuuuug

SEQ ID NO: 351748 - RNA, 18 nt, Artificial Sequence
  Synthetic
uagaaaugagacuuuuug

SEQ ID NO: 351749 - RNA, 19 nt, Artificial Sequence
  Synthetic
uuagaaaugagacuuuuug

SEQ ID NO: 351750 - RNA, 20 nt, Artificial Sequence
  Synthetic
auuagaaaugagacuuuuug

SEQ ID NO: 351751 - RNA, 21 nt, Artificial Sequence
  Synthetic
uauuagaaaugagacuuuuug

SEQ ID NO: 351752 - RNA, 22 nt, Artificial Sequence
  Synthetic
uuauuagaaaugagacuuuuug

SEQ ID NO: 351753 - RNA, 23 nt, Artificial Sequence
  Synthetic
guuauuagaaaugagacuuuuug

SEQ ID NO: 351754 - RNA, 24 nt, Artificial Sequence
  Synthetic
uguuauuagaaaugagacuuuuug

SEQ ID NO: 351755 - RNA, 18 nt, Artificial Sequence
  Synthetic
ccgucucccuccuuuuug

SEQ ID NO: 351756 - RNA, 19 nt, Artificial Sequence
  Synthetic
accgucucccuccuuuuug

SEQ ID NO: 351757 - RNA, 20 nt, Artificial Sequence
  Synthetic
uaccgucucccuccuuuuug

SEQ ID NO: 351758 - RNA, 21 nt, Artificial Sequence
  Synthetic
cuaccgucucccuccuuuuug

SEQ ID NO: 351759 - RNA, 22 nt, Artificial Sequence
  Synthetic
ccuaccgucucccuccuuuuug

SEQ ID NO: 351760 - RNA, 23 nt, Artificial Sequence
  Synthetic
accuaccgucucccuccuuuuug

SEQ ID NO: 351761 - RNA, 24 nt, Artificial Sequence
  Synthetic
uaccuaccgucucccuccuuuuug

SEQ ID NO: 351762 - RNA, 18 nt, Artificial Sequence
  Synthetic
acuauuucucucuuuuug

SEQ ID NO: 351763 - RNA, 19 nt, Artificial Sequence
  Synthetic
aacuauuucucucuuuuug

SEQ ID NO: 351764 - RNA, 20 nt, Artificial Sequence
  Synthetic
caacuauuucucucuuuuug

SEQ ID NO: 351765 - RNA, 21 nt, Artificial Sequence
  Synthetic
ccaacuauuucucucuuuuug

SEQ ID NO: 351766 - RNA, 22 nt, Artificial Sequence
  Synthetic
accaacuauuucucucuuuuug

SEQ ID NO: 351767 - RNA, 23 nt, Artificial Sequence
  Synthetic
aaccaacuauuucucucuuuuug

SEQ ID NO: 351768 - RNA, 24 nt, Artificial Sequence
  Synthetic
gaaccaacuauuucucucuuuuug

SEQ ID NO: 351769 - RNA, 18 nt, Artificial Sequence
  Synthetic
uauuucugcagguuuuug

SEQ ID NO: 351770 - RNA, 19 nt, Artificial Sequence
  Synthetic
auauuucugcagguuuuug

SEQ ID NO: 351771 - RNA, 20 nt, Artificial Sequence
  Synthetic
aauauuucugcagguuuuug

SEQ ID NO: 351772 - RNA, 21 nt, Artificial Sequence
  Synthetic
aaauauuucugcagguuuuug

SEQ ID NO: 351773 - RNA, 22 nt, Artificial Sequence
  Synthetic
uaaauauuucugcagguuuuug

SEQ ID NO: 351774 - RNA, 23 nt, Artificial Sequence
  Synthetic
auaaauauuucugcagguuuuug

SEQ ID NO: 351775 - RNA, 24 nt, Artificial Sequence
  Synthetic
uauaaauauuucugcagguuuuug

SEQ ID NO: 351776 - RNA, 18 nt, Artificial Sequence
  Synthetic
ggagaggagugguuuuug

SEQ ID NO: 351777 - RNA, 19 nt, Artificial Sequence
  Synthetic
aggagaggagugguuuuug

SEQ ID NO: 351778 - RNA, 20 nt, Artificial Sequence
  Synthetic
gaggagaggagugguuuuug

SEQ ID NO: 351779 - RNA, 21 nt, Artificial Sequence
  Synthetic
agaggagaggagugguuuuug

SEQ ID NO: 351780 - RNA, 22 nt, Artificial Sequence
  Synthetic
gagaggagaggagugguuuuug

SEQ ID NO: 351781 - RNA, 23 nt, Artificial Sequence
  Synthetic
agagaggagaggagugguuuuug

SEQ ID NO: 351782 - RNA, 24 nt, Artificial Sequence
  Synthetic
aagagaggagaggagugguuuuug

SEQ ID NO: 351783 - RNA, 18 nt, Artificial Sequence
  Synthetic
aaaggcacuguguuuuug

SEQ ID NO: 351784 - RNA, 19 nt, Artificial Sequence
  Synthetic
aaaaggcacuguguuuuug

SEQ ID NO: 351785 - RNA, 20 nt, Artificial Sequence
  Synthetic
aaaaaggcacuguguuuuug

SEQ ID NO: 351786 - RNA, 21 nt, Artificial Sequence
  Synthetic
gaaaaaggcacuguguuuuug

SEQ ID NO: 351787 - RNA, 22 nt, Artificial Sequence
  Synthetic
agaaaaaggcacuguguuuuug

SEQ ID NO: 351788 - RNA, 23 nt, Artificial Sequence
  Synthetic
aagaaaaaggcacuguguuuuug

SEQ ID NO: 351789 - RNA, 24 nt, Artificial Sequence
  Synthetic
gaagaaaaaggcacuguguuuuug

SEQ ID NO: 351790 - RNA, 18 nt, Artificial Sequence
  Synthetic
acauaaucauuguuuuug

SEQ ID NO: 351791 - RNA, 19 nt, Artificial Sequence
  Synthetic
gacauaaucauuguuuuug

SEQ ID NO: 351792 - RNA, 20 nt, Artificial Sequence
  Synthetic
ugacauaaucauuguuuuug

SEQ ID NO: 351793 - RNA, 21 nt, Artificial Sequence
  Synthetic
gugacauaaucauuguuuuug

SEQ ID NO: 351794 - RNA, 22 nt, Artificial Sequence
  Synthetic
agugacauaaucauuguuuuug

SEQ ID NO: 351795 - RNA, 23 nt, Artificial Sequence
  Synthetic
uagugacauaaucauuguuuuug

SEQ ID NO: 351796 - RNA, 24 nt, Artificial Sequence
  Synthetic
guagugacauaaucauuguuuuug

SEQ ID NO: 351797 - RNA, 18 nt, Artificial Sequence
  Synthetic
cauaugaccacuuuuuug

SEQ ID NO: 351798 - RNA, 19 nt, Artificial Sequence
  Synthetic
acauaugaccacuuuuuug

SEQ ID NO: 351799 - RNA, 20 nt, Artificial Sequence
  Synthetic
cacauaugaccacuuuuuug

SEQ ID NO: 351800 - RNA, 21 nt, Artificial Sequence
  Synthetic
acacauaugaccacuuuuuug

SEQ ID NO: 351801 - RNA, 22 nt, Artificial Sequence
  Synthetic
cacacauaugaccacuuuuuug

SEQ ID NO: 351802 - RNA, 23 nt, Artificial Sequence
  Synthetic
acacacauaugaccacuuuuuug

SEQ ID NO: 351803 - RNA, 24 nt, Artificial Sequence
  Synthetic
aacacacauaugaccacuuuuuug

SEQ ID NO: 351804 - RNA, 18 nt, Artificial Sequence
  Synthetic
ccuucauugacuuuuuug

SEQ ID NO: 351805 - RNA, 19 nt, Artificial Sequence
  Synthetic
accuucauugacuuuuuug

SEQ ID NO: 351806 - RNA, 20 nt, Artificial Sequence
  Synthetic
uaccuucauugacuuuuuug

SEQ ID NO: 351807 - RNA, 21 nt, Artificial Sequence
  Synthetic
cuaccuucauugacuuuuuug

SEQ ID NO: 351808 - RNA, 22 nt, Artificial Sequence
  Synthetic
ccuaccuucauugacuuuuuug

SEQ ID NO: 351809 - RNA, 23 nt, Artificial Sequence
  Synthetic
uccuaccuucauugacuuuuuug

SEQ ID NO: 351810 - RNA, 24 nt, Artificial Sequence
  Synthetic
uuccuaccuucauugacuuuuuug

SEQ ID NO: 351811 - RNA, 18 nt, Artificial Sequence
  Synthetic
ucuauuuuuacuuuuuug

SEQ ID NO: 351812 - RNA, 19 nt, Artificial Sequence
  Synthetic
cucuauuuuuacuuuuuug

SEQ ID NO: 351813 - RNA, 20 nt, Artificial Sequence
  Synthetic
gcucuauuuuuacuuuuuug

SEQ ID NO: 351814 - RNA, 21 nt, Artificial Sequence
  Synthetic
agcucuauuuuuacuuuuuug

SEQ ID NO: 351815 - RNA, 22 nt, Artificial Sequence
  Synthetic
aagcucuauuuuuacuuuuuug

SEQ ID NO: 351816 - RNA, 23 nt, Artificial Sequence
  Synthetic
gaagcucuauuuuuacuuuuuug

SEQ ID NO: 351817 - RNA, 24 nt, Artificial Sequence
  Synthetic
ggaagcucuauuuuuacuuuuuug

SEQ ID NO: 351818 - RNA, 18 nt, Artificial Sequence
  Synthetic
ucuauuuuuaguuuuuug

SEQ ID NO: 351819 - RNA, 19 nt, Artificial Sequence
  Synthetic
cucuauuuuuaguuuuuug

SEQ ID NO: 351820 - RNA, 20 nt, Artificial Sequence
  Synthetic
gcucuauuuuuaguuuuuug

SEQ ID NO: 351821 - RNA, 21 nt, Artificial Sequence
  Synthetic
agcucuauuuuuaguuuuuug

SEQ ID NO: 351822 - RNA, 22 nt, Artificial Sequence
  Synthetic
uagcucuauuuuuaguuuuuug

SEQ ID NO: 351823 - RNA, 23 nt, Artificial Sequence
  Synthetic
guagcucuauuuuuaguuuuuug

SEQ ID NO: 351824 - RNA, 24 nt, Artificial Sequence
  Synthetic
gguagcucuauuuuuaguuuuuug

SEQ ID NO: 351825 - RNA, 18 nt, Artificial Sequence
  Synthetic
cucuauugauguuuuuug

SEQ ID NO: 351826 - RNA, 19 nt, Artificial Sequence
  Synthetic
acucuauugauguuuuuug

SEQ ID NO: 351827 - RNA, 20 nt, Artificial Sequence
  Synthetic
aacucuauugauguuuuuug

SEQ ID NO: 351828 - RNA, 21 nt, Artificial Sequence
  Synthetic
gaacucuauugauguuuuuug

SEQ ID NO: 351829 - RNA, 22 nt, Artificial Sequence
  Synthetic
ugaacucuauugauguuuuuug

SEQ ID NO: 351830 - RNA, 23 nt, Artificial Sequence
  Synthetic
gugaacucuauugauguuuuuug

SEQ ID NO: 351831 - RNA, 24 nt, Artificial Sequence
  Synthetic
ugugaacucuauugauguuuuuug

SEQ ID NO: 351832 - RNA, 18 nt, Artificial Sequence
  Synthetic
uaaugacccuguuuuuug

SEQ ID NO: 351833 - RNA, 19 nt, Artificial Sequence
  Synthetic
auaaugacccuguuuuuug

SEQ ID NO: 351834 - RNA, 20 nt, Artificial Sequence
  Synthetic
aauaaugacccuguuuuuug

SEQ ID NO: 351835 - RNA, 21 nt, Artificial Sequence
  Synthetic
aaauaaugacccuguuuuuug

SEQ ID NO: 351836 - RNA, 22 nt, Artificial Sequence
  Synthetic
aaaauaaugacccuguuuuuug

SEQ ID NO: 351837 - RNA, 23 nt, Artificial Sequence
  Synthetic
caaaauaaugacccuguuuuuug

SEQ ID NO: 351838 - RNA, 24 nt, Artificial Sequence
  Synthetic
acaaaauaaugacccuguuuuuug

SEQ ID NO: 351839 - RNA, 18 nt, Artificial Sequence
  Synthetic
uucuguuuuuguuuuuug

SEQ ID NO: 351840 - RNA, 19 nt, Artificial Sequence
  Synthetic
uuucuguuuuuguuuuuug

SEQ ID NO: 351841 - RNA, 20 nt, Artificial Sequence
  Synthetic
guuucuguuuuuguuuuuug

SEQ ID NO: 351842 - RNA, 21 nt, Artificial Sequence
  Synthetic
uguuucuguuuuuguuuuuug

SEQ ID NO: 351843 - RNA, 22 nt, Artificial Sequence
  Synthetic
guguuucuguuuuuguuuuuug

SEQ ID NO: 351844 - RNA, 23 nt, Artificial Sequence
  Synthetic
uguguuucuguuuuuguuuuuug

SEQ ID NO: 351845 - RNA, 24 nt, Artificial Sequence
  Synthetic
uuguguuucuguuuuuguuuuuug

SEQ ID NO: 351846 - RNA, 18 nt, Artificial Sequence
  Synthetic
ucaauuagaauuuuuuug

SEQ ID NO: 351847 - RNA, 19 nt, Artificial Sequence
  Synthetic
gucaauuagaauuuuuuug

SEQ ID NO: 351848 - RNA, 20 nt, Artificial Sequence
  Synthetic
ggucaauuagaauuuuuuug

SEQ ID NO: 351849 - RNA, 21 nt, Artificial Sequence
  Synthetic
aggucaauuagaauuuuuuug

SEQ ID NO: 351850 - RNA, 22 nt, Artificial Sequence
  Synthetic
caggucaauuagaauuuuuuug

SEQ ID NO: 351851 - RNA, 23 nt, Artificial Sequence
  Synthetic
acaggucaauuagaauuuuuuug

SEQ ID NO: 351852 - RNA, 24 nt, Artificial Sequence
  Synthetic
cacaggucaauuagaauuuuuuug

SEQ ID NO: 351853 - RNA, 18 nt, Artificial Sequence
  Synthetic
auuuuuuguauuuuuuug

SEQ ID NO: 351854 - RNA, 19 nt, Artificial Sequence
  Synthetic
aauuuuuuguauuuuuuug

SEQ ID NO: 351855 - RNA, 20 nt, Artificial Sequence
  Synthetic
uaauuuuuuguauuuuuuug

SEQ ID NO: 351856 - RNA, 21 nt, Artificial Sequence
  Synthetic
cuaauuuuuuguauuuuuuug

SEQ ID NO: 351857 - RNA, 22 nt, Artificial Sequence
  Synthetic
gcuaauuuuuuguauuuuuuug

SEQ ID NO: 351858 - RNA, 23 nt, Artificial Sequence
  Synthetic
agcuaauuuuuuguauuuuuuug

SEQ ID NO: 351859 - RNA, 24 nt, Artificial Sequence
  Synthetic
cagcuaauuuuuuguauuuuuuug

SEQ ID NO: 351860 - RNA, 18 nt, Artificial Sequence
  Synthetic
auauuuuuuauuuuuuug

SEQ ID NO: 351861 - RNA, 19 nt, Artificial Sequence
  Synthetic
uauauuuuuuauuuuuuug

SEQ ID NO: 351862 - RNA, 20 nt, Artificial Sequence
  Synthetic
uuauauuuuuuauuuuuuug

SEQ ID NO: 351863 - RNA, 21 nt, Artificial Sequence
  Synthetic
guuauauuuuuuauuuuuuug

SEQ ID NO: 351864 - RNA, 22 nt, Artificial Sequence
  Synthetic
aguuauauuuuuuauuuuuuug

SEQ ID NO: 351865 - RNA, 23 nt, Artificial Sequence
  Synthetic
uaguuauauuuuuuauuuuuuug

SEQ ID NO: 351866 - RNA, 24 nt, Artificial Sequence
  Synthetic
guaguuauauuuuuuauuuuuuug

SEQ ID NO: 351867 - RNA, 18 nt, Artificial Sequence
  Synthetic
uuuugcccauuuuuuuug

SEQ ID NO: 351868 - RNA, 19 nt, Artificial Sequence
  Synthetic
cuuuugcccauuuuuuuug

SEQ ID NO: 351869 - RNA, 20 nt, Artificial Sequence
  Synthetic
ucuuuugcccauuuuuuuug

SEQ ID NO: 351870 - RNA, 21 nt, Artificial Sequence
  Synthetic
gucuuuugcccauuuuuuuug

SEQ ID NO: 351871 - RNA, 22 nt, Artificial Sequence
  Synthetic
ugucuuuugcccauuuuuuuug

SEQ ID NO: 351872 - RNA, 23 nt, Artificial Sequence
  Synthetic
augucuuuugcccauuuuuuuug

SEQ ID NO: 351873 - RNA, 24 nt, Artificial Sequence
  Synthetic
uaugucuuuugcccauuuuuuuug

SEQ ID NO: 351874 - RNA, 18 nt, Artificial Sequence
  Synthetic
uuuuuuguuuuuuuuuug

SEQ ID NO: 351875 - RNA, 19 nt, Artificial Sequence
  Synthetic
uuuuuuuguuuuuuuuuug

SEQ ID NO: 351876 - RNA, 20 nt, Artificial Sequence
  Synthetic
uuuuuuuuguuuuuuuuuug

SEQ ID NO: 351877 - RNA, 21 nt, Artificial Sequence
  Synthetic
guuuuuuuuguuuuuuuuuug

SEQ ID NO: 351878 - RNA, 22 nt, Artificial Sequence
  Synthetic
uguuuuuuuuguuuuuuuuuug

SEQ ID NO: 351879 - RNA, 23 nt, Artificial Sequence
  Synthetic
uuguuuuuuuuguuuuuuuuuug

SEQ ID NO: 351880 - RNA, 24 nt, Artificial Sequence
  Synthetic
uuuguuuuuuuuguuuuuuuuuug

SEQ ID NO: 351881 - RNA, 18 nt, Artificial Sequence
  Synthetic
aacaaaaaaaaaaaaaau

SEQ ID NO: 351882 - RNA, 19 nt, Artificial Sequence
  Synthetic
aaacaaaaaaaaaaaaaau

SEQ ID NO: 351883 - RNA, 20 nt, Artificial Sequence
  Synthetic
uaaacaaaaaaaaaaaaaau

SEQ ID NO: 351884 - RNA, 21 nt, Artificial Sequence
  Synthetic
guaaacaaaaaaaaaaaaaau

SEQ ID NO: 351885 - RNA, 22 nt, Artificial Sequence
  Synthetic
aguaaacaaaaaaaaaaaaaau

SEQ ID NO: 351886 - RNA, 23 nt, Artificial Sequence
  Synthetic
aaguaaacaaaaaaaaaaaaaau

SEQ ID NO: 351887 - RNA, 24 nt, Artificial Sequence
  Synthetic
aaaguaaacaaaaaaaaaaaaaau

SEQ ID NO: 351888 - RNA, 18 nt, Artificial Sequence
  Synthetic
acccuaucaaaaaaaaau

SEQ ID NO: 351889 - RNA, 19 nt, Artificial Sequence
  Synthetic
gacccuaucaaaaaaaaau

SEQ ID NO: 351890 - RNA, 20 nt, Artificial Sequence
  Synthetic
agacccuaucaaaaaaaaau

SEQ ID NO: 351891 - RNA, 21 nt, Artificial Sequence
  Synthetic
gagacccuaucaaaaaaaaau

SEQ ID NO: 351892 - RNA, 22 nt, Artificial Sequence
  Synthetic
ugagacccuaucaaaaaaaaau

SEQ ID NO: 351893 - RNA, 23 nt, Artificial Sequence
  Synthetic
gugagacccuaucaaaaaaaaau

SEQ ID NO: 351894 - RNA, 24 nt, Artificial Sequence
  Synthetic
agugagacccuaucaaaaaaaaau

SEQ ID NO: 351895 - RNA, 18 nt, Artificial Sequence
  Synthetic
agaugcugaaaaaaaaau

SEQ ID NO: 351896 - RNA, 19 nt, Artificial Sequence
  Synthetic
uagaugcugaaaaaaaaau

SEQ ID NO: 351897 - RNA, 20 nt, Artificial Sequence
  Synthetic
auagaugcugaaaaaaaaau

SEQ ID NO: 351898 - RNA, 21 nt, Artificial Sequence
  Synthetic
cauagaugcugaaaaaaaaau

SEQ ID NO: 351899 - RNA, 22 nt, Artificial Sequence
  Synthetic
acauagaugcugaaaaaaaaau

SEQ ID NO: 351900 - RNA, 23 nt, Artificial Sequence
  Synthetic
aacauagaugcugaaaaaaaaau

SEQ ID NO: 351901 - RNA, 24 nt, Artificial Sequence
  Synthetic
aaacauagaugcugaaaaaaaaau

SEQ ID NO: 351902 - RNA, 18 nt, Artificial Sequence
  Synthetic
auagaaaggaaaaaaaau

SEQ ID NO: 351903 - RNA, 19 nt, Artificial Sequence
  Synthetic
aauagaaaggaaaaaaaau

SEQ ID NO: 351904 - RNA, 20 nt, Artificial Sequence
  Synthetic
caauagaaaggaaaaaaaau

SEQ ID NO: 351905 - RNA, 21 nt, Artificial Sequence
  Synthetic
gcaauagaaaggaaaaaaaau

SEQ ID NO: 351906 - RNA, 22 nt, Artificial Sequence
  Synthetic
agcaauagaaaggaaaaaaaau

SEQ ID NO: 351907 - RNA, 23 nt, Artificial Sequence
  Synthetic
cagcaauagaaaggaaaaaaaau

SEQ ID NO: 351908 - RNA, 24 nt, Artificial Sequence
  Synthetic
ccagcaauagaaaggaaaaaaaau

SEQ ID NO: 351909 - RNA, 18 nt, Artificial Sequence
  Synthetic
aaaaaagaagaaaaaaau

SEQ ID NO: 351910 - RNA, 19 nt, Artificial Sequence
  Synthetic
caaaaaagaagaaaaaaau

SEQ ID NO: 351911 - RNA, 20 nt, Artificial Sequence
  Synthetic
acaaaaaagaagaaaaaaau

SEQ ID NO: 351912 - RNA, 21 nt, Artificial Sequence
  Synthetic
cacaaaaaagaagaaaaaaau

SEQ ID NO: 351913 - RNA, 22 nt, Artificial Sequence
  Synthetic
ucacaaaaaagaagaaaaaaau

SEQ ID NO: 351914 - RNA, 23 nt, Artificial Sequence
  Synthetic
aucacaaaaaagaagaaaaaaau

SEQ ID NO: 351915 - RNA, 24 nt, Artificial Sequence
  Synthetic
aaucacaaaaaagaagaaaaaaau

SEQ ID NO: 351916 - RNA, 18 nt, Artificial Sequence
  Synthetic
uuauuauaagaaaaaaau

SEQ ID NO: 351917 - RNA, 19 nt, Artificial Sequence
  Synthetic
guuauuauaagaaaaaaau

SEQ ID NO: 351918 - RNA, 20 nt, Artificial Sequence
  Synthetic
gguuauuauaagaaaaaaau

SEQ ID NO: 351919 - RNA, 21 nt, Artificial Sequence
  Synthetic
ugguuauuauaagaaaaaaau

SEQ ID NO: 351920 - RNA, 22 nt, Artificial Sequence
  Synthetic
gugguuauuauaagaaaaaaau

SEQ ID NO: 351921 - RNA, 23 nt, Artificial Sequence
  Synthetic
ugugguuauuauaagaaaaaaau

SEQ ID NO: 351922 - RNA, 24 nt, Artificial Sequence
  Synthetic
gugugguuauuauaagaaaaaaau

SEQ ID NO: 351923 - RNA, 18 nt, Artificial Sequence
  Synthetic
uuaacuucagaaaaaaau

SEQ ID NO: 351924 - RNA, 19 nt, Artificial Sequence
  Synthetic
cuuaacuucagaaaaaaau

SEQ ID NO: 351925 - RNA, 20 nt, Artificial Sequence
  Synthetic
ucuuaacuucagaaaaaaau

SEQ ID NO: 351926 - RNA, 21 nt, Artificial Sequence
  Synthetic
cucuuaacuucagaaaaaaau

SEQ ID NO: 351927 - RNA, 22 nt, Artificial Sequence
  Synthetic
gcucuuaacuucagaaaaaaau

SEQ ID NO: 351928 - RNA, 23 nt, Artificial Sequence
  Synthetic
ugcucuuaacuucagaaaaaaau

SEQ ID NO: 351929 - RNA, 24 nt, Artificial Sequence
  Synthetic
uugcucuuaacuucagaaaaaaau

SEQ ID NO: 351930 - RNA, 18 nt, Artificial Sequence
  Synthetic
ccacaaagagaaaaaaau

SEQ ID NO: 351931 - RNA, 19 nt, Artificial Sequence
  Synthetic
accacaaagagaaaaaaau

SEQ ID NO: 351932 - RNA, 20 nt, Artificial Sequence
  Synthetic
uaccacaaagagaaaaaaau

SEQ ID NO: 351933 - RNA, 21 nt, Artificial Sequence
  Synthetic
uuaccacaaagagaaaaaaau

SEQ ID NO: 351934 - RNA, 22 nt, Artificial Sequence
  Synthetic
uuuaccacaaagagaaaaaaau

SEQ ID NO: 351935 - RNA, 23 nt, Artificial Sequence
  Synthetic
auuuaccacaaagagaaaaaaau

SEQ ID NO: 351936 - RNA, 24 nt, Artificial Sequence
  Synthetic
uauuuaccacaaagagaaaaaaau

SEQ ID NO: 351937 - RNA, 18 nt, Artificial Sequence
  Synthetic
uccuagagagaaaaaaau

SEQ ID NO: 351938 - RNA, 19 nt, Artificial Sequence
  Synthetic
uuccuagagagaaaaaaau

SEQ ID NO: 351939 - RNA, 20 nt, Artificial Sequence
  Synthetic
guuccuagagagaaaaaaau

SEQ ID NO: 351940 - RNA, 21 nt, Artificial Sequence
  Synthetic
cguuccuagagagaaaaaaau

SEQ ID NO: 351941 - RNA, 22 nt, Artificial Sequence
  Synthetic
gcguuccuagagagaaaaaaau

SEQ ID NO: 351942 - RNA, 23 nt, Artificial Sequence
  Synthetic
agcguuccuagagagaaaaaaau

SEQ ID NO: 351943 - RNA, 24 nt, Artificial Sequence
  Synthetic
aagcguuccuagagagaaaaaaau

SEQ ID NO: 351944 - RNA, 18 nt, Artificial Sequence
  Synthetic
uauucuuuagaaaaaaau

SEQ ID NO: 351945 - RNA, 19 nt, Artificial Sequence
  Synthetic
auauucuuuagaaaaaaau

SEQ ID NO: 351946 - RNA, 20 nt, Artificial Sequence
  Synthetic
aauauucuuuagaaaaaaau

SEQ ID NO: 351947 - RNA, 21 nt, Artificial Sequence
  Synthetic
gaauauucuuuagaaaaaaau

SEQ ID NO: 351948 - RNA, 22 nt, Artificial Sequence
  Synthetic
agaauauucuuuagaaaaaaau

SEQ ID NO: 351949 - RNA, 23 nt, Artificial Sequence
  Synthetic
aagaauauucuuuagaaaaaaau

SEQ ID NO: 351950 - RNA, 24 nt, Artificial Sequence
  Synthetic
uaagaauauucuuuagaaaaaaau

SEQ ID NO: 351951 - RNA, 18 nt, Artificial Sequence
  Synthetic
agaaaccucuaaaaaaau

SEQ ID NO: 351952 - RNA, 19 nt, Artificial Sequence
  Synthetic
aagaaaccucuaaaaaaau

SEQ ID NO: 351953 - RNA, 20 nt, Artificial Sequence
  Synthetic
aaagaaaccucuaaaaaaau

SEQ ID NO: 351954 - RNA, 21 nt, Artificial Sequence
  Synthetic
aaaagaaaccucuaaaaaaau

SEQ ID NO: 351955 - RNA, 22 nt, Artificial Sequence
  Synthetic
aaaaagaaaccucuaaaaaaau

SEQ ID NO: 351956 - RNA, 23 nt, Artificial Sequence
  Synthetic
aaaaaagaaaccucuaaaaaaau

SEQ ID NO: 351957 - RNA, 24 nt, Artificial Sequence
  Synthetic
aaaaaaagaaaccucuaaaaaaau

SEQ ID NO: 351958 - RNA, 18 nt, Artificial Sequence
  Synthetic
aauucccauuaaaaaaau

SEQ ID NO: 351959 - RNA, 19 nt, Artificial Sequence
  Synthetic
gaauucccauuaaaaaaau

SEQ ID NO: 351960 - RNA, 20 nt, Artificial Sequence
  Synthetic
agaauucccauuaaaaaaau

SEQ ID NO: 351961 - RNA, 21 nt, Artificial Sequence
  Synthetic
gagaauucccauuaaaaaaau

SEQ ID NO: 351962 - RNA, 22 nt, Artificial Sequence
  Synthetic
ugagaauucccauuaaaaaaau

SEQ ID NO: 351963 - RNA, 23 nt, Artificial Sequence
  Synthetic
uugagaauucccauuaaaaaaau

SEQ ID NO: 351964 - RNA, 24 nt, Artificial Sequence
  Synthetic
guugagaauucccauuaaaaaaau

SEQ ID NO: 351965 - RNA, 18 nt, Artificial Sequence
  Synthetic
ucauaagguuaaaaaaau

SEQ ID NO: 351966 - RNA, 19 nt, Artificial Sequence
  Synthetic
uucauaagguuaaaaaaau

SEQ ID NO: 351967 - RNA, 20 nt, Artificial Sequence
  Synthetic
auucauaagguuaaaaaaau

SEQ ID NO: 351968 - RNA, 21 nt, Artificial Sequence
  Synthetic
cauucauaagguuaaaaaaau

SEQ ID NO: 351969 - RNA, 22 nt, Artificial Sequence
  Synthetic
acauucauaagguuaaaaaaau

SEQ ID NO: 351970 - RNA, 23 nt, Artificial Sequence
  Synthetic
aacauucauaagguuaaaaaaau

SEQ ID NO: 351971 - RNA, 24 nt, Artificial Sequence
  Synthetic
aaacauucauaagguuaaaaaaau

SEQ ID NO: 351972 - RNA, 18 nt, Artificial Sequence
  Synthetic
uaagagacuacaaaaaau

SEQ ID NO: 351973 - RNA, 19 nt, Artificial Sequence
  Synthetic
guaagagacuacaaaaaau

SEQ ID NO: 351974 - RNA, 20 nt, Artificial Sequence
  Synthetic
aguaagagacuacaaaaaau

SEQ ID NO: 351975 - RNA, 21 nt, Artificial Sequence
  Synthetic
gaguaagagacuacaaaaaau

SEQ ID NO: 351976 - RNA, 22 nt, Artificial Sequence
  Synthetic
agaguaagagacuacaaaaaau

SEQ ID NO: 351977 - RNA, 23 nt, Artificial Sequence
  Synthetic
gagaguaagagacuacaaaaaau

SEQ ID NO: 351978 - RNA, 24 nt, Artificial Sequence
  Synthetic
agagaguaagagacuacaaaaaau

SEQ ID NO: 351979 - RNA, 18 nt, Artificial Sequence
  Synthetic
agcuuuuguacaaaaaau

SEQ ID NO: 351980 - RNA, 19 nt, Artificial Sequence
  Synthetic
aagcuuuuguacaaaaaau

SEQ ID NO: 351981 - RNA, 20 nt, Artificial Sequence
  Synthetic
caagcuuuuguacaaaaaau

SEQ ID NO: 351982 - RNA, 21 nt, Artificial Sequence
  Synthetic
gcaagcuuuuguacaaaaaau

SEQ ID NO: 351983 - RNA, 22 nt, Artificial Sequence
  Synthetic
agcaagcuuuuguacaaaaaau

SEQ ID NO: 351984 - RNA, 23 nt, Artificial Sequence
  Synthetic
gagcaagcuuuuguacaaaaaau

SEQ ID NO: 351985 - RNA, 24 nt, Artificial Sequence
  Synthetic
ggagcaagcuuuuguacaaaaaau

SEQ ID NO: 351986 - RNA, 18 nt, Artificial Sequence
  Synthetic
uuuaaauauccaaaaaau

SEQ ID NO: 351987 - RNA, 19 nt, Artificial Sequence
  Synthetic
uuuuaaauauccaaaaaau

SEQ ID NO: 351988 - RNA, 20 nt, Artificial Sequence
  Synthetic
uuuuuaaauauccaaaaaau

SEQ ID NO: 351989 - RNA, 21 nt, Artificial Sequence
  Synthetic
uuuuuuaaauauccaaaaaau

SEQ ID NO: 351990 - RNA, 22 nt, Artificial Sequence
  Synthetic
auuuuuuaaauauccaaaaaau

SEQ ID NO: 351991 - RNA, 23 nt, Artificial Sequence
  Synthetic
uauuuuuuaaauauccaaaaaau

SEQ ID NO: 351992 - RNA, 24 nt, Artificial Sequence
  Synthetic
auauuuuuuaaauauccaaaaaau

SEQ ID NO: 351993 - RNA, 18 nt, Artificial Sequence
  Synthetic
agagagagaagaaaaaau

SEQ ID NO: 351994 - RNA, 19 nt, Artificial Sequence
  Synthetic
aagagagagaagaaaaaau

SEQ ID NO: 351995 - RNA, 20 nt, Artificial Sequence
  Synthetic
gaagagagagaagaaaaaau

SEQ ID NO: 351996 - RNA, 21 nt, Artificial Sequence
  Synthetic
ugaagagagagaagaaaaaau

SEQ ID NO: 351997 - RNA, 22 nt, Artificial Sequence
  Synthetic
uugaagagagagaagaaaaaau

SEQ ID NO: 351998 - RNA, 23 nt, Artificial Sequence
  Synthetic
auugaagagagagaagaaaaaau

SEQ ID NO: 351999 - RNA, 24 nt, Artificial Sequence
  Synthetic
gauugaagagagagaagaaaaaau

SEQ ID NO: 352000 - RNA, 18 nt, Artificial Sequence
  Synthetic
aauugaguucuaaaaaau

SEQ ID NO: 352001 - RNA, 19 nt, Artificial Sequence
  Synthetic
gaauugaguucuaaaaaau

SEQ ID NO: 352002 - RNA, 20 nt, Artificial Sequence
  Synthetic
ugaauugaguucuaaaaaau

SEQ ID NO: 352003 - RNA, 21 nt, Artificial Sequence
  Synthetic
uugaauugaguucuaaaaaau

SEQ ID NO: 352004 - RNA, 22 nt, Artificial Sequence
  Synthetic
cuugaauugaguucuaaaaaau

SEQ ID NO: 352005 - RNA, 23 nt, Artificial Sequence
  Synthetic
ccuugaauugaguucuaaaaaau

SEQ ID NO: 352006 - RNA, 24 nt, Artificial Sequence
  Synthetic
uccuugaauugaguucuaaaaaau

SEQ ID NO: 352007 - RNA, 18 nt, Artificial Sequence
  Synthetic
ggauaugaaguaaaaaau

SEQ ID NO: 352008 - RNA, 19 nt, Artificial Sequence
  Synthetic
gggauaugaaguaaaaaau

SEQ ID NO: 352009 - RNA, 20 nt, Artificial Sequence
  Synthetic
agggauaugaaguaaaaaau

SEQ ID NO: 352010 - RNA, 21 nt, Artificial Sequence
  Synthetic
uagggauaugaaguaaaaaau

SEQ ID NO: 352011 - RNA, 22 nt, Artificial Sequence
  Synthetic
uuagggauaugaaguaaaaaau

SEQ ID NO: 352012 - RNA, 23 nt, Artificial Sequence
  Synthetic
uuuagggauaugaaguaaaaaau

SEQ ID NO: 352013 - RNA, 24 nt, Artificial Sequence
  Synthetic
auuuagggauaugaaguaaaaaau

SEQ ID NO: 352014 - RNA, 18 nt, Artificial Sequence
  Synthetic
uaaaguaguuuaaaaaau

SEQ ID NO: 352015 - RNA, 19 nt, Artificial Sequence
  Synthetic
auaaaguaguuuaaaaaau

SEQ ID NO: 352016 - RNA, 20 nt, Artificial Sequence
  Synthetic
aauaaaguaguuuaaaaaau

SEQ ID NO: 352017 - RNA, 21 nt, Artificial Sequence
  Synthetic
caauaaaguaguuuaaaaaau

SEQ ID NO: 352018 - RNA, 22 nt, Artificial Sequence
  Synthetic
ucaauaaaguaguuuaaaaaau

SEQ ID NO: 352019 - RNA, 23 nt, Artificial Sequence
  Synthetic
cucaauaaaguaguuuaaaaaau

SEQ ID NO: 352020 - RNA, 24 nt, Artificial Sequence
  Synthetic
ccucaauaaaguaguuuaaaaaau

SEQ ID NO: 352021 - RNA, 18 nt, Artificial Sequence
  Synthetic
gacagcacacacaaaaau

SEQ ID NO: 352022 - RNA, 19 nt, Artificial Sequence
  Synthetic
agacagcacacacaaaaau

SEQ ID NO: 352023 - RNA, 20 nt, Artificial Sequence
  Synthetic
uagacagcacacacaaaaau

SEQ ID NO: 352024 - RNA, 21 nt, Artificial Sequence
  Synthetic
guagacagcacacacaaaaau

SEQ ID NO: 352025 - RNA, 22 nt, Artificial Sequence
  Synthetic
uguagacagcacacacaaaaau

SEQ ID NO: 352026 - RNA, 23 nt, Artificial Sequence
  Synthetic
guguagacagcacacacaaaaau

SEQ ID NO: 352027 - RNA, 24 nt, Artificial Sequence
  Synthetic
uguguagacagcacacacaaaaau

SEQ ID NO: 352028 - RNA, 18 nt, Artificial Sequence
  Synthetic
aucuauacagacaaaaau

SEQ ID NO: 352029 - RNA, 19 nt, Artificial Sequence
  Synthetic
caucuauacagacaaaaau

SEQ ID NO: 352030 - RNA, 20 nt, Artificial Sequence
  Synthetic
acaucuauacagacaaaaau

SEQ ID NO: 352031 - RNA, 21 nt, Artificial Sequence
  Synthetic
uacaucuauacagacaaaaau

SEQ ID NO: 352032 - RNA, 22 nt, Artificial Sequence
  Synthetic
uuacaucuauacagacaaaaau

SEQ ID NO: 352033 - RNA, 23 nt, Artificial Sequence
  Synthetic
uuuacaucuauacagacaaaaau

SEQ ID NO: 352034 - RNA, 24 nt, Artificial Sequence
  Synthetic
auuuacaucuauacagacaaaaau

SEQ ID NO: 352035 - RNA, 18 nt, Artificial Sequence
  Synthetic
aauuuuuaggacaaaaau

SEQ ID NO: 352036 - RNA, 19 nt, Artificial Sequence
  Synthetic
gaauuuuuaggacaaaaau

SEQ ID NO: 352037 - RNA, 20 nt, Artificial Sequence
  Synthetic
ugaauuuuuaggacaaaaau

SEQ ID NO: 352038 - RNA, 21 nt, Artificial Sequence
  Synthetic
gugaauuuuuaggacaaaaau

SEQ ID NO: 352039 - RNA, 22 nt, Artificial Sequence
  Synthetic
ugugaauuuuuaggacaaaaau

SEQ ID NO: 352040 - RNA, 23 nt, Artificial Sequence
  Synthetic
augugaauuuuuaggacaaaaau

SEQ ID NO: 352041 - RNA, 24 nt, Artificial Sequence
  Synthetic
aaugugaauuuuuaggacaaaaau

SEQ ID NO: 352042 - RNA, 18 nt, Artificial Sequence
  Synthetic
uugccacaauacaaaaau

SEQ ID NO: 352043 - RNA, 19 nt, Artificial Sequence
  Synthetic
uuugccacaauacaaaaau

SEQ ID NO: 352044 - RNA, 20 nt, Artificial Sequence
  Synthetic
uuuugccacaauacaaaaau

SEQ ID NO: 352045 - RNA, 21 nt, Artificial Sequence
  Synthetic
auuuugccacaauacaaaaau

SEQ ID NO: 352046 - RNA, 22 nt, Artificial Sequence
  Synthetic
uauuuugccacaauacaaaaau

SEQ ID NO: 352047 - RNA, 23 nt, Artificial Sequence
  Synthetic
auauuuugccacaauacaaaaau

SEQ ID NO: 352048 - RNA, 24 nt, Artificial Sequence
  Synthetic
uauauuuugccacaauacaaaaau

SEQ ID NO: 352049 - RNA, 18 nt, Artificial Sequence
  Synthetic
uaaccuguuaccaaaaau

SEQ ID NO: 352050 - RNA, 19 nt, Artificial Sequence
  Synthetic
auaaccuguuaccaaaaau

SEQ ID NO: 352051 - RNA, 20 nt, Artificial Sequence
  Synthetic
aauaaccuguuaccaaaaau

SEQ ID NO: 352052 - RNA, 21 nt, Artificial Sequence
  Synthetic
uaauaaccuguuaccaaaaau

SEQ ID NO: 352053 - RNA, 22 nt, Artificial Sequence
  Synthetic
uuaauaaccuguuaccaaaaau

SEQ ID NO: 352054 - RNA, 23 nt, Artificial Sequence
  Synthetic
uuuaauaaccuguuaccaaaaau

SEQ ID NO: 352055 - RNA, 24 nt, Artificial Sequence
  Synthetic
uuuuaauaaccuguuaccaaaaau

SEQ ID NO: 352056 - RNA, 18 nt, Artificial Sequence
  Synthetic
guggaaaagcccaaaaau

SEQ ID NO: 352057 - RNA, 19 nt, Artificial Sequence
  Synthetic
aguggaaaagcccaaaaau

SEQ ID NO: 352058 - RNA, 20 nt, Artificial Sequence
  Synthetic
uaguggaaaagcccaaaaau

SEQ ID NO: 352059 - RNA, 21 nt, Artificial Sequence
  Synthetic
uuaguggaaaagcccaaaaau

SEQ ID NO: 352060 - RNA, 22 nt, Artificial Sequence
  Synthetic
uuuaguggaaaagcccaaaaau

SEQ ID NO: 352061 - RNA, 23 nt, Artificial Sequence
  Synthetic
cuuuaguggaaaagcccaaaaau

SEQ ID NO: 352062 - RNA, 24 nt, Artificial Sequence
  Synthetic
ucuuuaguggaaaagcccaaaaau

SEQ ID NO: 352063 - RNA, 18 nt, Artificial Sequence
  Synthetic
acagacuucuccaaaaau

SEQ ID NO: 352064 - RNA, 19 nt, Artificial Sequence
  Synthetic
gacagacuucuccaaaaau

SEQ ID NO: 352065 - RNA, 20 nt, Artificial Sequence
  Synthetic
ugacagacuucuccaaaaau

SEQ ID NO: 352066 - RNA, 21 nt, Artificial Sequence
  Synthetic
uugacagacuucuccaaaaau

SEQ ID NO: 352067 - RNA, 22 nt, Artificial Sequence
  Synthetic
uuugacagacuucuccaaaaau

SEQ ID NO: 352068 - RNA, 23 nt, Artificial Sequence
  Synthetic
uuuugacagacuucuccaaaaau

SEQ ID NO: 352069 - RNA, 24 nt, Artificial Sequence
  Synthetic
uuuuugacagacuucuccaaaaau

SEQ ID NO: 352070 - RNA, 18 nt, Artificial Sequence
  Synthetic
guggcaauugucaaaaau

SEQ ID NO: 352071 - RNA, 19 nt, Artificial Sequence
  Synthetic
aguggcaauugucaaaaau

SEQ ID NO: 352072 - RNA, 20 nt, Artificial Sequence
  Synthetic
gaguggcaauugucaaaaau

SEQ ID NO: 352073 - RNA, 21 nt, Artificial Sequence
  Synthetic
cgaguggcaauugucaaaaau

SEQ ID NO: 352074 - RNA, 22 nt, Artificial Sequence
  Synthetic
ccgaguggcaauugucaaaaau

SEQ ID NO: 352075 - RNA, 23 nt, Artificial Sequence
  Synthetic
uccgaguggcaauugucaaaaau

SEQ ID NO: 352076 - RNA, 24 nt, Artificial Sequence
  Synthetic
uuccgaguggcaauugucaaaaau

SEQ ID NO: 352077 - RNA, 18 nt, Artificial Sequence
  Synthetic
uuaaagagaaagaaaaau

SEQ ID NO: 352078 - RNA, 19 nt, Artificial Sequence
  Synthetic
auuaaagagaaagaaaaau

SEQ ID NO: 352079 - RNA, 20 nt, Artificial Sequence
  Synthetic
uauuaaagagaaagaaaaau

SEQ ID NO: 352080 - RNA, 21 nt, Artificial Sequence
  Synthetic
auauuaaagagaaagaaaaau

SEQ ID NO: 352081 - RNA, 22 nt, Artificial Sequence
  Synthetic
cauauuaaagagaaagaaaaau

SEQ ID NO: 352082 - RNA, 23 nt, Artificial Sequence
  Synthetic
gcauauuaaagagaaagaaaaau

SEQ ID NO: 352083 - RNA, 24 nt, Artificial Sequence
  Synthetic
ggcauauuaaagagaaagaaaaau

SEQ ID NO: 352084 - RNA, 18 nt, Artificial Sequence
  Synthetic
ucagcuaagaagaaaaau

SEQ ID NO: 352085 - RNA, 19 nt, Artificial Sequence
  Synthetic
uucagcuaagaagaaaaau

SEQ ID NO: 352086 - RNA, 20 nt, Artificial Sequence
  Synthetic
auucagcuaagaagaaaaau

SEQ ID NO: 352087 - RNA, 21 nt, Artificial Sequence
  Synthetic
aauucagcuaagaagaaaaau

SEQ ID NO: 352088 - RNA, 22 nt, Artificial Sequence
  Synthetic
aaauucagcuaagaagaaaaau

SEQ ID NO: 352089 - RNA, 23 nt, Artificial Sequence
  Synthetic
caaauucagcuaagaagaaaaau

SEQ ID NO: 352090 - RNA, 24 nt, Artificial Sequence
  Synthetic
acaaauucagcuaagaagaaaaau

SEQ ID NO: 352091 - RNA, 18 nt, Artificial Sequence
  Synthetic
ugcuacaugaagaaaaau

SEQ ID NO: 352092 - RNA, 19 nt, Artificial Sequence
  Synthetic
gugcuacaugaagaaaaau

SEQ ID NO: 352093 - RNA, 20 nt, Artificial Sequence
  Synthetic
ugugcuacaugaagaaaaau

SEQ ID NO: 352094 - RNA, 21 nt, Artificial Sequence
  Synthetic
uugugcuacaugaagaaaaau

SEQ ID NO: 352095 - RNA, 22 nt, Artificial Sequence
  Synthetic
uuugugcuacaugaagaaaaau

SEQ ID NO: 352096 - RNA, 23 nt, Artificial Sequence
  Synthetic
auuugugcuacaugaagaaaaau

SEQ ID NO: 352097 - RNA, 24 nt, Artificial Sequence
  Synthetic
cauuugugcuacaugaagaaaaau

SEQ ID NO: 352098 - RNA, 18 nt, Artificial Sequence
  Synthetic
cugguuagucagaaaaau

SEQ ID NO: 352099 - RNA, 19 nt, Artificial Sequence
  Synthetic
gcugguuagucagaaaaau

SEQ ID NO: 352100 - RNA, 20 nt, Artificial Sequence
  Synthetic
ggcugguuagucagaaaaau

SEQ ID NO: 352101 - RNA, 21 nt, Artificial Sequence
  Synthetic
aggcugguuagucagaaaaau

SEQ ID NO: 352102 - RNA, 22 nt, Artificial Sequence
  Synthetic
aaggcugguuagucagaaaaau

SEQ ID NO: 352103 - RNA, 23 nt, Artificial Sequence
  Synthetic
aaaggcugguuagucagaaaaau

SEQ ID NO: 352104 - RNA, 24 nt, Artificial Sequence
  Synthetic
aaaaggcugguuagucagaaaaau

SEQ ID NO: 352105 - RNA, 18 nt, Artificial Sequence
  Synthetic
aggaaaaaggagaaaaau

SEQ ID NO: 352106 - RNA, 19 nt, Artificial Sequence
  Synthetic
aaggaaaaaggagaaaaau

SEQ ID NO: 352107 - RNA, 20 nt, Artificial Sequence
  Synthetic
aaaggaaaaaggagaaaaau

SEQ ID NO: 352108 - RNA, 21 nt, Artificial Sequence
  Synthetic
aaaaggaaaaaggagaaaaau

SEQ ID NO: 352109 - RNA, 22 nt, Artificial Sequence
  Synthetic
aaaaaggaaaaaggagaaaaau

SEQ ID NO: 352110 - RNA, 23 nt, Artificial Sequence
  Synthetic
uaaaaaggaaaaaggagaaaaau

SEQ ID NO: 352111 - RNA, 24 nt, Artificial Sequence
  Synthetic
guaaaaaggaaaaaggagaaaaau

SEQ ID NO: 352112 - RNA, 18 nt, Artificial Sequence
  Synthetic
uguguggaggagaaaaau

SEQ ID NO: 352113 - RNA, 19 nt, Artificial Sequence
  Synthetic
cuguguggaggagaaaaau

SEQ ID NO: 352114 - RNA, 20 nt, Artificial Sequence
  Synthetic
ucuguguggaggagaaaaau

SEQ ID NO: 352115 - RNA, 21 nt, Artificial Sequence
  Synthetic
uucuguguggaggagaaaaau

SEQ ID NO: 352116 - RNA, 22 nt, Artificial Sequence
  Synthetic
auucuguguggaggagaaaaau

SEQ ID NO: 352117 - RNA, 23 nt, Artificial Sequence
  Synthetic
gauucuguguggaggagaaaaau

SEQ ID NO: 352118 - RNA, 24 nt, Artificial Sequence
  Synthetic
ugauucuguguggaggagaaaaau

SEQ ID NO: 352119 - RNA, 18 nt, Artificial Sequence
  Synthetic
ggagagagggagaaaaau

SEQ ID NO: 352120 - RNA, 19 nt, Artificial Sequence
  Synthetic
gggagagagggagaaaaau

SEQ ID NO: 352121 - RNA, 20 nt, Artificial Sequence
  Synthetic
agggagagagggagaaaaau

SEQ ID NO: 352122 - RNA, 21 nt, Artificial Sequence
  Synthetic
gagggagagagggagaaaaau

SEQ ID NO: 352123 - RNA, 22 nt, Artificial Sequence
  Synthetic
ggagggagagagggagaaaaau

SEQ ID NO: 352124 - RNA, 23 nt, Artificial Sequence
  Synthetic
gggagggagagagggagaaaaau

SEQ ID NO: 352125 - RNA, 24 nt, Artificial Sequence
  Synthetic
agggagggagagagggagaaaaau

SEQ ID NO: 352126 - RNA, 18 nt, Artificial Sequence
  Synthetic
ggauggugggagaaaaau

SEQ ID NO: 352127 - RNA, 19 nt, Artificial Sequence
  Synthetic
aggauggugggagaaaaau

SEQ ID NO: 352128 - RNA, 20 nt, Artificial Sequence
  Synthetic
caggauggugggagaaaaau

SEQ ID NO: 352129 - RNA, 21 nt, Artificial Sequence
  Synthetic
ucaggauggugggagaaaaau

SEQ ID NO: 352130 - RNA, 22 nt, Artificial Sequence
  Synthetic
gucaggauggugggagaaaaau

SEQ ID NO: 352131 - RNA, 23 nt, Artificial Sequence
  Synthetic
agucaggauggugggagaaaaau

SEQ ID NO: 352132 - RNA, 24 nt, Artificial Sequence
  Synthetic
aagucaggauggugggagaaaaau

SEQ ID NO: 352133 - RNA, 18 nt, Artificial Sequence
  Synthetic
auaauccaauagaaaaau

SEQ ID NO: 352134 - RNA, 19 nt, Artificial Sequence
  Synthetic
gauaauccaauagaaaaau

SEQ ID NO: 352135 - RNA, 20 nt, Artificial Sequence
  Synthetic
agauaauccaauagaaaaau

SEQ ID NO: 352136 - RNA, 21 nt, Artificial Sequence
  Synthetic
cagauaauccaauagaaaaau

SEQ ID NO: 352137 - RNA, 22 nt, Artificial Sequence
  Synthetic
acagauaauccaauagaaaaau

SEQ ID NO: 352138 - RNA, 23 nt, Artificial Sequence
  Synthetic
aacagauaauccaauagaaaaau

SEQ ID NO: 352139 - RNA, 24 nt, Artificial Sequence
  Synthetic
gaacagauaauccaauagaaaaau

SEQ ID NO: 352140 - RNA, 18 nt, Artificial Sequence
  Synthetic
caaaauuuagggaaaaau

SEQ ID NO: 352141 - RNA, 19 nt, Artificial Sequence
  Synthetic
ucaaaauuuagggaaaaau

SEQ ID NO: 352142 - RNA, 20 nt, Artificial Sequence
  Synthetic
aucaaaauuuagggaaaaau

SEQ ID NO: 352143 - RNA, 21 nt, Artificial Sequence
  Synthetic
uaucaaaauuuagggaaaaau

SEQ ID NO: 352144 - RNA, 22 nt, Artificial Sequence
  Synthetic
cuaucaaaauuuagggaaaaau

SEQ ID NO: 352145 - RNA, 23 nt, Artificial Sequence
  Synthetic
acuaucaaaauuuagggaaaaau

SEQ ID NO: 352146 - RNA, 24 nt, Artificial Sequence
  Synthetic
aacuaucaaaauuuagggaaaaau

SEQ ID NO: 352147 - RNA, 18 nt, Artificial Sequence
  Synthetic
ggcaagauaaugaaaaau

SEQ ID NO: 352148 - RNA, 19 nt, Artificial Sequence
  Synthetic
aggcaagauaaugaaaaau

SEQ ID NO: 352149 - RNA, 20 nt, Artificial Sequence
  Synthetic
uaggcaagauaaugaaaaau

SEQ ID NO: 352150 - RNA, 21 nt, Artificial Sequence
  Synthetic
auaggcaagauaaugaaaaau

SEQ ID NO: 352151 - RNA, 22 nt, Artificial Sequence
  Synthetic
cauaggcaagauaaugaaaaau

SEQ ID NO: 352152 - RNA, 23 nt, Artificial Sequence
  Synthetic
ucauaggcaagauaaugaaaaau

SEQ ID NO: 352153 - RNA, 24 nt, Artificial Sequence
  Synthetic
aucauaggcaagauaaugaaaaau

SEQ ID NO: 352154 - RNA, 18 nt, Artificial Sequence
  Synthetic
augaaagguaugaaaaau

SEQ ID NO: 352155 - RNA, 19 nt, Artificial Sequence
  Synthetic
gaugaaagguaugaaaaau

SEQ ID NO: 352156 - RNA, 20 nt, Artificial Sequence
  Synthetic
ggaugaaagguaugaaaaau

SEQ ID NO: 352157 - RNA, 21 nt, Artificial Sequence
  Synthetic
aggaugaaagguaugaaaaau

SEQ ID NO: 352158 - RNA, 22 nt, Artificial Sequence
  Synthetic
caggaugaaagguaugaaaaau

SEQ ID NO: 352159 - RNA, 23 nt, Artificial Sequence
  Synthetic
acaggaugaaagguaugaaaaau

SEQ ID NO: 352160 - RNA, 24 nt, Artificial Sequence
  Synthetic
aacaggaugaaagguaugaaaaau

SEQ ID NO: 352161 - RNA, 18 nt, Artificial Sequence
  Synthetic
uuccugcaagugaaaaau

SEQ ID NO: 352162 - RNA, 19 nt, Artificial Sequence
  Synthetic
cuuccugcaagugaaaaau

SEQ ID NO: 352163 - RNA, 20 nt, Artificial Sequence
  Synthetic
acuuccugcaagugaaaaau

SEQ ID NO: 352164 - RNA, 21 nt, Artificial Sequence
  Synthetic
uacuuccugcaagugaaaaau

SEQ ID NO: 352165 - RNA, 22 nt, Artificial Sequence
  Synthetic
cuacuuccugcaagugaaaaau

SEQ ID NO: 352166 - RNA, 23 nt, Artificial Sequence
  Synthetic
ucuacuuccugcaagugaaaaau

SEQ ID NO: 352167 - RNA, 24 nt, Artificial Sequence
  Synthetic
uucuacuuccugcaagugaaaaau

SEQ ID NO: 352168 - RNA, 18 nt, Artificial Sequence
  Synthetic
uaucuguaagugaaaaau

SEQ ID NO: 352169 - RNA, 19 nt, Artificial Sequence
  Synthetic
guaucuguaagugaaaaau

SEQ ID NO: 352170 - RNA, 20 nt, Artificial Sequence
  Synthetic
gguaucuguaagugaaaaau

SEQ ID NO: 352171 - RNA, 21 nt, Artificial Sequence
  Synthetic
agguaucuguaagugaaaaau

SEQ ID NO: 352172 - RNA, 22 nt, Artificial Sequence
  Synthetic
gagguaucuguaagugaaaaau

SEQ ID NO: 352173 - RNA, 23 nt, Artificial Sequence
  Synthetic
ugagguaucuguaagugaaaaau

SEQ ID NO: 352174 - RNA, 24 nt, Artificial Sequence
  Synthetic
uugagguaucuguaagugaaaaau

SEQ ID NO: 352175 - RNA, 18 nt, Artificial Sequence
  Synthetic
ugauaugaugugaaaaau

SEQ ID NO: 352176 - RNA, 19 nt, Artificial Sequence
  Synthetic
uugauaugaugugaaaaau

SEQ ID NO: 352177 - RNA, 20 nt, Artificial Sequence
  Synthetic
guugauaugaugugaaaaau

SEQ ID NO: 352178 - RNA, 21 nt, Artificial Sequence
  Synthetic
gguugauaugaugugaaaaau

SEQ ID NO: 352179 - RNA, 22 nt, Artificial Sequence
  Synthetic
ugguugauaugaugugaaaaau

SEQ ID NO: 352180 - RNA, 23 nt, Artificial Sequence
  Synthetic
cugguugauaugaugugaaaaau

SEQ ID NO: 352181 - RNA, 24 nt, Artificial Sequence
  Synthetic
acugguugauaugaugugaaaaau

SEQ ID NO: 352182 - RNA, 18 nt, Artificial Sequence
  Synthetic
aaaaagucuuugaaaaau

SEQ ID NO: 352183 - RNA, 19 nt, Artificial Sequence
  Synthetic
aaaaaagucuuugaaaaau

SEQ ID NO: 352184 - RNA, 20 nt, Artificial Sequence
  Synthetic
aaaaaaagucuuugaaaaau

SEQ ID NO: 352185 - RNA, 21 nt, Artificial Sequence
  Synthetic
aaaaaaaagucuuugaaaaau

SEQ ID NO: 352186 - RNA, 22 nt, Artificial Sequence
  Synthetic
aaaaaaaaagucuuugaaaaau

SEQ ID NO: 352187 - RNA, 23 nt, Artificial Sequence
  Synthetic
aaaaaaaaaagucuuugaaaaau

SEQ ID NO: 352188 - RNA, 24 nt, Artificial Sequence
  Synthetic
aaaaaaaaaaagucuuugaaaaau

SEQ ID NO: 352189 - RNA, 18 nt, Artificial Sequence
  Synthetic
gaauuagcaaauaaaaau

SEQ ID NO: 352190 - RNA, 19 nt, Artificial Sequence
  Synthetic
agaauuagcaaauaaaaau

SEQ ID NO: 352191 - RNA, 20 nt, Artificial Sequence
  Synthetic
aagaauuagcaaauaaaaau

SEQ ID NO: 352192 - RNA, 21 nt, Artificial Sequence
  Synthetic
caagaauuagcaaauaaaaau

SEQ ID NO: 352193 - RNA, 22 nt, Artificial Sequence
  Synthetic
ccaagaauuagcaaauaaaaau

SEQ ID NO: 352194 - RNA, 23 nt, Artificial Sequence
  Synthetic
cccaagaauuagcaaauaaaaau

SEQ ID NO: 352195 - RNA, 24 nt, Artificial Sequence
  Synthetic
ucccaagaauuagcaaauaaaaau

SEQ ID NO: 352196 - RNA, 18 nt, Artificial Sequence
  Synthetic
aaucguuucaauaaaaau

SEQ ID NO: 352197 - RNA, 19 nt, Artificial Sequence
  Synthetic
gaaucguuucaauaaaaau

SEQ ID NO: 352198 - RNA, 20 nt, Artificial Sequence
  Synthetic
agaaucguuucaauaaaaau

SEQ ID NO: 352199 - RNA, 21 nt, Artificial Sequence
  Synthetic
cagaaucguuucaauaaaaau

SEQ ID NO: 352200 - RNA, 22 nt, Artificial Sequence
  Synthetic
ccagaaucguuucaauaaaaau

SEQ ID NO: 352201 - RNA, 23 nt, Artificial Sequence
  Synthetic
cccagaaucguuucaauaaaaau

SEQ ID NO: 352202 - RNA, 24 nt, Artificial Sequence
  Synthetic
gcccagaaucguuucaauaaaaau

SEQ ID NO: 352203 - RNA, 18 nt, Artificial Sequence
  Synthetic
uggguaguuaauaaaaau

SEQ ID NO: 352204 - RNA, 19 nt, Artificial Sequence
  Synthetic
uuggguaguuaauaaaaau

SEQ ID NO: 352205 - RNA, 20 nt, Artificial Sequence
  Synthetic
uuuggguaguuaauaaaaau

SEQ ID NO: 352206 - RNA, 21 nt, Artificial Sequence
  Synthetic
uuuuggguaguuaauaaaaau

SEQ ID NO: 352207 - RNA, 22 nt, Artificial Sequence
  Synthetic
auuuuggguaguuaauaaaaau

SEQ ID NO: 352208 - RNA, 23 nt, Artificial Sequence
  Synthetic
aauuuuggguaguuaauaaaaau

SEQ ID NO: 352209 - RNA, 24 nt, Artificial Sequence
  Synthetic
aaauuuuggguaguuaauaaaaau

SEQ ID NO: 352210 - RNA, 18 nt, Artificial Sequence
  Synthetic
uuuggacuccauaaaaau

SEQ ID NO: 352211 - RNA, 19 nt, Artificial Sequence
  Synthetic
cuuuggacuccauaaaaau

SEQ ID NO: 352212 - RNA, 20 nt, Artificial Sequence
  Synthetic
acuuuggacuccauaaaaau

SEQ ID NO: 352213 - RNA, 21 nt, Artificial Sequence
  Synthetic
aacuuuggacuccauaaaaau

SEQ ID NO: 352214 - RNA, 22 nt, Artificial Sequence
  Synthetic
gaacuuuggacuccauaaaaau

SEQ ID NO: 352215 - RNA, 23 nt, Artificial Sequence
  Synthetic
agaacuuuggacuccauaaaaau

SEQ ID NO: 352216 - RNA, 24 nt, Artificial Sequence
  Synthetic
uagaacuuuggacuccauaaaaau

SEQ ID NO: 352217 - RNA, 18 nt, Artificial Sequence
  Synthetic
uuucugaugcauaaaaau

SEQ ID NO: 352218 - RNA, 19 nt, Artificial Sequence
  Synthetic
uuuucugaugcauaaaaau

SEQ ID NO: 352219 - RNA, 20 nt, Artificial Sequence
  Synthetic
guuuucugaugcauaaaaau

SEQ ID NO: 352220 - RNA, 21 nt, Artificial Sequence
  Synthetic
aguuuucugaugcauaaaaau

SEQ ID NO: 352221 - RNA, 22 nt, Artificial Sequence
  Synthetic
aaguuuucugaugcauaaaaau

SEQ ID NO: 352222 - RNA, 23 nt, Artificial Sequence
  Synthetic
caaguuuucugaugcauaaaaau

SEQ ID NO: 352223 - RNA, 24 nt, Artificial Sequence
  Synthetic
ucaaguuuucugaugcauaaaaau

SEQ ID NO: 352224 - RNA, 18 nt, Artificial Sequence
  Synthetic
cccaucucuacuaaaaau

SEQ ID NO: 352225 - RNA, 19 nt, Artificial Sequence
  Synthetic
ccccaucucuacuaaaaau

SEQ ID NO: 352226 - RNA, 20 nt, Artificial Sequence
  Synthetic
accccaucucuacuaaaaau

SEQ ID NO: 352227 - RNA, 21 nt, Artificial Sequence
  Synthetic
aaccccaucucuacuaaaaau

SEQ ID NO: 352228 - RNA, 22 nt, Artificial Sequence
  Synthetic
aaaccccaucucuacuaaaaau

SEQ ID NO: 352229 - RNA, 23 nt, Artificial Sequence
  Synthetic
gaaaccccaucucuacuaaaaau

SEQ ID NO: 352230 - RNA, 24 nt, Artificial Sequence
  Synthetic
cgaaaccccaucucuacuaaaaau

SEQ ID NO: 352231 - RNA, 18 nt, Artificial Sequence
  Synthetic
ccugucucuacuaaaaau

SEQ ID NO: 352232 - RNA, 19 nt, Artificial Sequence
  Synthetic
cccugucucuacuaaaaau

SEQ ID NO: 352233 - RNA, 20 nt, Artificial Sequence
  Synthetic
acccugucucuacuaaaaau

SEQ ID NO: 352234 - RNA, 21 nt, Artificial Sequence
  Synthetic
aacccugucucuacuaaaaau

SEQ ID NO: 352235 - RNA, 22 nt, Artificial Sequence
  Synthetic
aaacccugucucuacuaaaaau

SEQ ID NO: 352236 - RNA, 23 nt, Artificial Sequence
  Synthetic
gaaacccugucucuacuaaaaau

SEQ ID NO: 352237 - RNA, 24 nt, Artificial Sequence
  Synthetic
ugaaacccugucucuacuaaaaau

SEQ ID NO: 352238 - RNA, 18 nt, Artificial Sequence
  Synthetic
auggcgaucauuaaaaau

SEQ ID NO: 352239 - RNA, 19 nt, Artificial Sequence
  Synthetic
aauggcgaucauuaaaaau

SEQ ID NO: 352240 - RNA, 20 nt, Artificial Sequence
  Synthetic
gaauggcgaucauuaaaaau

SEQ ID NO: 352241 - RNA, 21 nt, Artificial Sequence
  Synthetic
agaauggcgaucauuaaaaau

SEQ ID NO: 352242 - RNA, 22 nt, Artificial Sequence
  Synthetic
uagaauggcgaucauuaaaaau

SEQ ID NO: 352243 - RNA, 23 nt, Artificial Sequence
  Synthetic
uuagaauggcgaucauuaaaaau

SEQ ID NO: 352244 - RNA, 24 nt, Artificial Sequence
  Synthetic
guuagaauggcgaucauuaaaaau

SEQ ID NO: 352245 - RNA, 18 nt, Artificial Sequence
  Synthetic
aaaagagcucuuaaaaau

SEQ ID NO: 352246 - RNA, 19 nt, Artificial Sequence
  Synthetic
gaaaagagcucuuaaaaau

SEQ ID NO: 352247 - RNA, 20 nt, Artificial Sequence
  Synthetic
ugaaaagagcucuuaaaaau

SEQ ID NO: 352248 - RNA, 21 nt, Artificial Sequence
  Synthetic
gugaaaagagcucuuaaaaau

SEQ ID NO: 352249 - RNA, 22 nt, Artificial Sequence
  Synthetic
ugugaaaagagcucuuaaaaau

SEQ ID NO: 352250 - RNA, 23 nt, Artificial Sequence
  Synthetic
augugaaaagagcucuuaaaaau

SEQ ID NO: 352251 - RNA, 24 nt, Artificial Sequence
  Synthetic
aaugugaaaagagcucuuaaaaau

SEQ ID NO: 352252 - RNA, 18 nt, Artificial Sequence
  Synthetic
acuggccauguuaaaaau

SEQ ID NO: 352253 - RNA, 19 nt, Artificial Sequence
  Synthetic
gacuggccauguuaaaaau

SEQ ID NO: 352254 - RNA, 20 nt, Artificial Sequence
  Synthetic
ggacuggccauguuaaaaau

SEQ ID NO: 352255 - RNA, 21 nt, Artificial Sequence
  Synthetic
uggacuggccauguuaaaaau

SEQ ID NO: 352256 - RNA, 22 nt, Artificial Sequence
  Synthetic
auggacuggccauguuaaaaau

SEQ ID NO: 352257 - RNA, 23 nt, Artificial Sequence
  Synthetic
aauggacuggccauguuaaaaau

SEQ ID NO: 352258 - RNA, 24 nt, Artificial Sequence
  Synthetic
uaauggacuggccauguuaaaaau

SEQ ID NO: 352259 - RNA, 18 nt, Artificial Sequence
  Synthetic
uugcugaauuuuaaaaau

SEQ ID NO: 352260 - RNA, 19 nt, Artificial Sequence
  Synthetic
uuugcugaauuuuaaaaau

SEQ ID NO: 352261 - RNA, 20 nt, Artificial Sequence
  Synthetic
guuugcugaauuuuaaaaau

SEQ ID NO: 352262 - RNA, 21 nt, Artificial Sequence
  Synthetic
uguuugcugaauuuuaaaaau

SEQ ID NO: 352263 - RNA, 22 nt, Artificial Sequence
  Synthetic
cuguuugcugaauuuuaaaaau

SEQ ID NO: 352264 - RNA, 23 nt, Artificial Sequence
  Synthetic
ucuguuugcugaauuuuaaaaau

SEQ ID NO: 352265 - RNA, 24 nt, Artificial Sequence
  Synthetic
aucuguuugcugaauuuuaaaaau

SEQ ID NO: 352266 - RNA, 18 nt, Artificial Sequence
  Synthetic
aaagcugaaaaacaaaau

SEQ ID NO: 352267 - RNA, 19 nt, Artificial Sequence
  Synthetic
caaagcugaaaaacaaaau

SEQ ID NO: 352268 - RNA, 20 nt, Artificial Sequence
  Synthetic
gcaaagcugaaaaacaaaau

SEQ ID NO: 352269 - RNA, 21 nt, Artificial Sequence
  Synthetic
agcaaagcugaaaaacaaaau

SEQ ID NO: 352270 - RNA, 22 nt, Artificial Sequence
  Synthetic
aagcaaagcugaaaaacaaaau

SEQ ID NO: 352271 - RNA, 23 nt, Artificial Sequence
  Synthetic
gaagcaaagcugaaaaacaaaau

SEQ ID NO: 352272 - RNA, 24 nt, Artificial Sequence
  Synthetic
ugaagcaaagcugaaaaacaaaau

SEQ ID NO: 352273 - RNA, 18 nt, Artificial Sequence
  Synthetic
ugaaugucagaacaaaau

SEQ ID NO: 352274 - RNA, 19 nt, Artificial Sequence
  Synthetic
cugaaugucagaacaaaau

SEQ ID NO: 352275 - RNA, 20 nt, Artificial Sequence
  Synthetic
ucugaaugucagaacaaaau

SEQ ID NO: 352276 - RNA, 21 nt, Artificial Sequence
  Synthetic
uucugaaugucagaacaaaau

SEQ ID NO: 352277 - RNA, 22 nt, Artificial Sequence
  Synthetic
auucugaaugucagaacaaaau

SEQ ID NO: 352278 - RNA, 23 nt, Artificial Sequence
  Synthetic
uauucugaaugucagaacaaaau

SEQ ID NO: 352279 - RNA, 24 nt, Artificial Sequence
  Synthetic
auauucugaaugucagaacaaaau

SEQ ID NO: 352280 - RNA, 18 nt, Artificial Sequence
  Synthetic
uuacuuacauaacaaaau

SEQ ID NO: 352281 - RNA, 19 nt, Artificial Sequence
  Synthetic
uuuacuuacauaacaaaau

SEQ ID NO: 352282 - RNA, 20 nt, Artificial Sequence
  Synthetic
cuuuacuuacauaacaaaau

SEQ ID NO: 352283 - RNA, 21 nt, Artificial Sequence
  Synthetic
acuuuacuuacauaacaaaau

SEQ ID NO: 352284 - RNA, 22 nt, Artificial Sequence
  Synthetic
gacuuuacuuacauaacaaaau

SEQ ID NO: 352285 - RNA, 23 nt, Artificial Sequence
  Synthetic
ggacuuuacuuacauaacaaaau

SEQ ID NO: 352286 - RNA, 24 nt, Artificial Sequence
  Synthetic
aggacuuuacuuacauaacaaaau

SEQ ID NO: 352287 - RNA, 18 nt, Artificial Sequence
  Synthetic
aaaauugaguaacaaaau

SEQ ID NO: 352288 - RNA, 19 nt, Artificial Sequence
  Synthetic
aaaaauugaguaacaaaau

SEQ ID NO: 352289 - RNA, 20 nt, Artificial Sequence
  Synthetic
aaaaaauugaguaacaaaau

SEQ ID NO: 352290 - RNA, 21 nt, Artificial Sequence
  Synthetic
aaaaaaauugaguaacaaaau

SEQ ID NO: 352291 - RNA, 22 nt, Artificial Sequence
  Synthetic
gaaaaaaauugaguaacaaaau

SEQ ID NO: 352292 - RNA, 23 nt, Artificial Sequence
  Synthetic
ggaaaaaaauugaguaacaaaau

SEQ ID NO: 352293 - RNA, 24 nt, Artificial Sequence
  Synthetic
gggaaaaaaauugaguaacaaaau

SEQ ID NO: 352294 - RNA, 18 nt, Artificial Sequence
  Synthetic
aacaguuagugacaaaau

SEQ ID NO: 352295 - RNA, 19 nt, Artificial Sequence
  Synthetic
uaacaguuagugacaaaau

SEQ ID NO: 352296 - RNA, 20 nt, Artificial Sequence
  Synthetic
auaacaguuagugacaaaau

SEQ ID NO: 352297 - RNA, 21 nt, Artificial Sequence
  Synthetic
cauaacaguuagugacaaaau

SEQ ID NO: 352298 - RNA, 22 nt, Artificial Sequence
  Synthetic
ucauaacaguuagugacaaaau

SEQ ID NO: 352299 - RNA, 23 nt, Artificial Sequence
  Synthetic
uucauaacaguuagugacaaaau

SEQ ID NO: 352300 - RNA, 24 nt, Artificial Sequence
  Synthetic
auucauaacaguuagugacaaaau

SEQ ID NO: 352301 - RNA, 18 nt, Artificial Sequence
  Synthetic
gauuaauaaauacaaaau

SEQ ID NO: 352302 - RNA, 19 nt, Artificial Sequence
  Synthetic
ggauuaauaaauacaaaau

SEQ ID NO: 352303 - RNA, 20 nt, Artificial Sequence
  Synthetic
aggauuaauaaauacaaaau

SEQ ID NO: 352304 - RNA, 21 nt, Artificial Sequence
  Synthetic
aaggauuaauaaauacaaaau

SEQ ID NO: 352305 - RNA, 22 nt, Artificial Sequence
  Synthetic
gaaggauuaauaaauacaaaau

SEQ ID NO: 352306 - RNA, 23 nt, Artificial Sequence
  Synthetic
agaaggauuaauaaauacaaaau

SEQ ID NO: 352307 - RNA, 24 nt, Artificial Sequence
  Synthetic
aagaaggauuaauaaauacaaaau

SEQ ID NO: 352308 - RNA, 18 nt, Artificial Sequence
  Synthetic
acaggcaaccuacaaaau

SEQ ID NO: 352309 - RNA, 19 nt, Artificial Sequence
  Synthetic
aacaggcaaccuacaaaau

SEQ ID NO: 352310 - RNA, 20 nt, Artificial Sequence
  Synthetic
gaacaggcaaccuacaaaau

SEQ ID NO: 352311 - RNA, 18 nt, Artificial Sequence
  Synthetic
uugucaucuuuacaaaau

SEQ ID NO: 352312 - RNA, 19 nt, Artificial Sequence
  Synthetic
uuugucaucuuuacaaaau

SEQ ID NO: 352313 - RNA, 20 nt, Artificial Sequence
  Synthetic
uuuugucaucuuuacaaaau

SEQ ID NO: 352314 - RNA, 21 nt, Artificial Sequence
  Synthetic
uuuuugucaucuuuacaaaau

SEQ ID NO: 352315 - RNA, 22 nt, Artificial Sequence
  Synthetic
auuuuugucaucuuuacaaaau

SEQ ID NO: 352316 - RNA, 23 nt, Artificial Sequence
  Synthetic
gauuuuugucaucuuuacaaaau

SEQ ID NO: 352317 - RNA, 24 nt, Artificial Sequence
  Synthetic
agauuuuugucaucuuuacaaaau

SEQ ID NO: 352318 - RNA, 18 nt, Artificial Sequence
  Synthetic
aauuuaagggcccaaaau

SEQ ID NO: 352319 - RNA, 19 nt, Artificial Sequence
  Synthetic
aaauuuaagggcccaaaau

SEQ ID NO: 352320 - RNA, 20 nt, Artificial Sequence
  Synthetic
gaaauuuaagggcccaaaau

SEQ ID NO: 352321 - RNA, 21 nt, Artificial Sequence
  Synthetic
cgaaauuuaagggcccaaaau

SEQ ID NO: 352322 - RNA, 22 nt, Artificial Sequence
  Synthetic
ucgaaauuuaagggcccaaaau

SEQ ID NO: 352323 - RNA, 23 nt, Artificial Sequence
  Synthetic
uucgaaauuuaagggcccaaaau

SEQ ID NO: 352324 - RNA, 24 nt, Artificial Sequence
  Synthetic
uuucgaaauuuaagggcccaaaau

SEQ ID NO: 352325 - RNA, 18 nt, Artificial Sequence
  Synthetic
uagcaugucagccaaaau

SEQ ID NO: 352326 - RNA, 19 nt, Artificial Sequence
  Synthetic
auagcaugucagccaaaau

SEQ ID NO: 352327 - RNA, 20 nt, Artificial Sequence
  Synthetic
aauagcaugucagccaaaau

SEQ ID NO: 352328 - RNA, 21 nt, Artificial Sequence
  Synthetic
aaauagcaugucagccaaaau

SEQ ID NO: 352329 - RNA, 22 nt, Artificial Sequence
  Synthetic
caaauagcaugucagccaaaau

SEQ ID NO: 352330 - RNA, 23 nt, Artificial Sequence
  Synthetic
gcaaauagcaugucagccaaaau

SEQ ID NO: 352331 - RNA, 24 nt, Artificial Sequence
  Synthetic
ggcaaauagcaugucagccaaaau

SEQ ID NO: 352332 - RNA, 18 nt, Artificial Sequence
  Synthetic
aaacugauagagcaaaau

SEQ ID NO: 352333 - RNA, 19 nt, Artificial Sequence
  Synthetic
aaaacugauagagcaaaau

SEQ ID NO: 352334 - RNA, 20 nt, Artificial Sequence
  Synthetic
caaaacugauagagcaaaau

SEQ ID NO: 352335 - RNA, 21 nt, Artificial Sequence
  Synthetic
acaaaacugauagagcaaaau

SEQ ID NO: 352336 - RNA, 22 nt, Artificial Sequence
  Synthetic
cacaaaacugauagagcaaaau

SEQ ID NO: 352337 - RNA, 23 nt, Artificial Sequence
  Synthetic
ucacaaaacugauagagcaaaau

SEQ ID NO: 352338 - RNA, 24 nt, Artificial Sequence
  Synthetic
cucacaaaacugauagagcaaaau

SEQ ID NO: 352339 - RNA, 18 nt, Artificial Sequence
  Synthetic
uaggcauaugggcaaaau

SEQ ID NO: 352340 - RNA, 19 nt, Artificial Sequence
  Synthetic
uuaggcauaugggcaaaau

SEQ ID NO: 352341 - RNA, 20 nt, Artificial Sequence
  Synthetic
guuaggcauaugggcaaaau

SEQ ID NO: 352342 - RNA, 21 nt, Artificial Sequence
  Synthetic
aguuaggcauaugggcaaaau

SEQ ID NO: 352343 - RNA, 22 nt, Artificial Sequence
  Synthetic
gaguuaggcauaugggcaaaau

SEQ ID NO: 352344 - RNA, 23 nt, Artificial Sequence
  Synthetic
ugaguuaggcauaugggcaaaau

SEQ ID NO: 352345 - RNA, 24 nt, Artificial Sequence
  Synthetic
gugaguuaggcauaugggcaaaau

SEQ ID NO: 352346 - RNA, 18 nt, Artificial Sequence
  Synthetic
cucagaauuuggcaaaau

SEQ ID NO: 352347 - RNA, 19 nt, Artificial Sequence
  Synthetic
acucagaauuuggcaaaau

SEQ ID NO: 352348 - RNA, 20 nt, Artificial Sequence
  Synthetic
cacucagaauuuggcaaaau

SEQ ID NO: 352349 - RNA, 21 nt, Artificial Sequence
  Synthetic
gcacucagaauuuggcaaaau

SEQ ID NO: 352350 - RNA, 22 nt, Artificial Sequence
  Synthetic
agcacucagaauuuggcaaaau

SEQ ID NO: 352351 - RNA, 23 nt, Artificial Sequence
  Synthetic
uagcacucagaauuuggcaaaau

SEQ ID NO: 352352 - RNA, 24 nt, Artificial Sequence
  Synthetic
guagcacucagaauuuggcaaaau

SEQ ID NO: 352353 - RNA, 18 nt, Artificial Sequence
  Synthetic
aucuuuaggaugcaaaau

SEQ ID NO: 352354 - RNA, 19 nt, Artificial Sequence
  Synthetic
uaucuuuaggaugcaaaau

SEQ ID NO: 352355 - RNA, 20 nt, Artificial Sequence
  Synthetic
guaucuuuaggaugcaaaau

SEQ ID NO: 352356 - RNA, 21 nt, Artificial Sequence
  Synthetic
aguaucuuuaggaugcaaaau

SEQ ID NO: 352357 - RNA, 22 nt, Artificial Sequence
  Synthetic
uaguaucuuuaggaugcaaaau

SEQ ID NO: 352358 - RNA, 23 nt, Artificial Sequence
  Synthetic
auaguaucuuuaggaugcaaaau

SEQ ID NO: 352359 - RNA, 24 nt, Artificial Sequence
  Synthetic
gauaguaucuuuaggaugcaaaau

SEQ ID NO: 352360 - RNA, 18 nt, Artificial Sequence
  Synthetic
ccuguguuagugcaaaau

SEQ ID NO: 352361 - RNA, 19 nt, Artificial Sequence
  Synthetic
uccuguguuagugcaaaau

SEQ ID NO: 352362 - RNA, 20 nt, Artificial Sequence
  Synthetic
uuccuguguuagugcaaaau

SEQ ID NO: 352363 - RNA, 21 nt, Artificial Sequence
  Synthetic
uuuccuguguuagugcaaaau

SEQ ID NO: 352364 - RNA, 22 nt, Artificial Sequence
  Synthetic
uuuuccuguguuagugcaaaau

SEQ ID NO: 352365 - RNA, 23 nt, Artificial Sequence
  Synthetic
auuuuccuguguuagugcaaaau

SEQ ID NO: 352366 - RNA, 24 nt, Artificial Sequence
  Synthetic
cauuuuccuguguuagugcaaaau

SEQ ID NO: 352367 - RNA, 18 nt, Artificial Sequence
  Synthetic
caaguucagaaucaaaau

SEQ ID NO: 352368 - RNA, 19 nt, Artificial Sequence
  Synthetic
ccaaguucagaaucaaaau

SEQ ID NO: 352369 - RNA, 20 nt, Artificial Sequence
  Synthetic
gccaaguucagaaucaaaau

SEQ ID NO: 352370 - RNA, 21 nt, Artificial Sequence
  Synthetic
ggccaaguucagaaucaaaau

SEQ ID NO: 352371 - RNA, 22 nt, Artificial Sequence
  Synthetic
uggccaaguucagaaucaaaau

SEQ ID NO: 352372 - RNA, 23 nt, Artificial Sequence
  Synthetic
auggccaaguucagaaucaaaau

SEQ ID NO: 352373 - RNA, 24 nt, Artificial Sequence
  Synthetic
uauggccaaguucagaaucaaaau

SEQ ID NO: 352374 - RNA, 18 nt, Artificial Sequence
  Synthetic
gggaauuuucaucaaaau

SEQ ID NO: 352375 - RNA, 19 nt, Artificial Sequence
  Synthetic
ggggaauuuucaucaaaau

SEQ ID NO: 352376 - RNA, 20 nt, Artificial Sequence
  Synthetic
uggggaauuuucaucaaaau

SEQ ID NO: 352377 - RNA, 21 nt, Artificial Sequence
  Synthetic
uuggggaauuuucaucaaaau

SEQ ID NO: 352378 - RNA, 22 nt, Artificial Sequence
  Synthetic
auuggggaauuuucaucaaaau

SEQ ID NO: 352379 - RNA, 23 nt, Artificial Sequence
  Synthetic
aauuggggaauuuucaucaaaau

SEQ ID NO: 352380 - RNA, 24 nt, Artificial Sequence
  Synthetic
aaauuggggaauuuucaucaaaau

SEQ ID NO: 352381 - RNA, 18 nt, Artificial Sequence
  Synthetic
gagugagcagaucaaaau

SEQ ID NO: 352382 - RNA, 19 nt, Artificial Sequence
  Synthetic
agagugagcagaucaaaau

SEQ ID NO: 352383 - RNA, 20 nt, Artificial Sequence
  Synthetic
cagagugagcagaucaaaau

SEQ ID NO: 352384 - RNA, 21 nt, Artificial Sequence
  Synthetic
ccagagugagcagaucaaaau

SEQ ID NO: 352385 - RNA, 22 nt, Artificial Sequence
  Synthetic
accagagugagcagaucaaaau

SEQ ID NO: 352386 - RNA, 23 nt, Artificial Sequence
  Synthetic
uaccagagugagcagaucaaaau

SEQ ID NO: 352387 - RNA, 24 nt, Artificial Sequence
  Synthetic
cuaccagagugagcagaucaaaau

SEQ ID NO: 352388 - RNA, 18 nt, Artificial Sequence
  Synthetic
agauagucagaucaaaau

SEQ ID NO: 352389 - RNA, 19 nt, Artificial Sequence
  Synthetic
cagauagucagaucaaaau

SEQ ID NO: 352390 - RNA, 20 nt, Artificial Sequence
  Synthetic
acagauagucagaucaaaau

SEQ ID NO: 352391 - RNA, 21 nt, Artificial Sequence
  Synthetic
aacagauagucagaucaaaau

SEQ ID NO: 352392 - RNA, 22 nt, Artificial Sequence
  Synthetic
gaacagauagucagaucaaaau

SEQ ID NO: 352393 - RNA, 23 nt, Artificial Sequence
  Synthetic
cgaacagauagucagaucaaaau

SEQ ID NO: 352394 - RNA, 24 nt, Artificial Sequence
  Synthetic
gcgaacagauagucagaucaaaau

SEQ ID NO: 352395 - RNA, 18 nt, Artificial Sequence
  Synthetic
cucccaaagucucaaaau

SEQ ID NO: 352396 - RNA, 19 nt, Artificial Sequence
  Synthetic
ccucccaaagucucaaaau

SEQ ID NO: 352397 - RNA, 20 nt, Artificial Sequence
  Synthetic
uccucccaaagucucaaaau

SEQ ID NO: 352398 - RNA, 21 nt, Artificial Sequence
  Synthetic
cuccucccaaagucucaaaau

SEQ ID NO: 352399 - RNA, 22 nt, Artificial Sequence
  Synthetic
ucuccucccaaagucucaaaau

SEQ ID NO: 352400 - RNA, 23 nt, Artificial Sequence
  Synthetic
cucuccucccaaagucucaaaau

SEQ ID NO: 352401 - RNA, 24 nt, Artificial Sequence
  Synthetic
ccucuccucccaaagucucaaaau

SEQ ID NO: 352402 - RNA, 18 nt, Artificial Sequence
  Synthetic
ugcaaugguucucaaaau

SEQ ID NO: 352403 - RNA, 19 nt, Artificial Sequence
  Synthetic
uugcaaugguucucaaaau

SEQ ID NO: 352404 - RNA, 20 nt, Artificial Sequence
  Synthetic
auugcaaugguucucaaaau

SEQ ID NO: 352405 - RNA, 21 nt, Artificial Sequence
  Synthetic
uauugcaaugguucucaaaau

SEQ ID NO: 352406 - RNA, 22 nt, Artificial Sequence
  Synthetic
cuauugcaaugguucucaaaau

SEQ ID NO: 352407 - RNA, 23 nt, Artificial Sequence
  Synthetic
ucuauugcaaugguucucaaaau

SEQ ID NO: 352408 - RNA, 24 nt, Artificial Sequence
  Synthetic
gucuauugcaaugguucucaaaau

SEQ ID NO: 352409 - RNA, 18 nt, Artificial Sequence
  Synthetic
aaauggaaaagucaaaau

SEQ ID NO: 352410 - RNA, 19 nt, Artificial Sequence
  Synthetic
gaaauggaaaagucaaaau

SEQ ID NO: 352411 - RNA, 20 nt, Artificial Sequence
  Synthetic
agaaauggaaaagucaaaau

SEQ ID NO: 352412 - RNA, 21 nt, Artificial Sequence
  Synthetic
uagaaauggaaaagucaaaau

SEQ ID NO: 352413 - RNA, 22 nt, Artificial Sequence
  Synthetic
guagaaauggaaaagucaaaau

SEQ ID NO: 352414 - RNA, 23 nt, Artificial Sequence
  Synthetic
uguagaaauggaaaagucaaaau

SEQ ID NO: 352415 - RNA, 24 nt, Artificial Sequence
  Synthetic
guguagaaauggaaaagucaaaau

SEQ ID NO: 352416 - RNA, 18 nt, Artificial Sequence
  Synthetic
ugaaaggaaugucaaaau

SEQ ID NO: 352417 - RNA, 19 nt, Artificial Sequence
  Synthetic
uugaaaggaaugucaaaau

SEQ ID NO: 352418 - RNA, 20 nt, Artificial Sequence
  Synthetic
uuugaaaggaaugucaaaau

SEQ ID NO: 352419 - RNA, 21 nt, Artificial Sequence
  Synthetic
uuuugaaaggaaugucaaaau

SEQ ID NO: 352420 - RNA, 22 nt, Artificial Sequence
  Synthetic
auuuugaaaggaaugucaaaau

SEQ ID NO: 352421 - RNA, 23 nt, Artificial Sequence
  Synthetic
aauuuugaaaggaaugucaaaau

SEQ ID NO: 352422 - RNA, 24 nt, Artificial Sequence
  Synthetic
uaauuuugaaaggaaugucaaaau

SEQ ID NO: 352423 - RNA, 18 nt, Artificial Sequence
  Synthetic
ucuuauucaugucaaaau

SEQ ID NO: 352424 - RNA, 19 nt, Artificial Sequence
  Synthetic
uucuuauucaugucaaaau

SEQ ID NO: 352425 - RNA, 20 nt, Artificial Sequence
  Synthetic
auucuuauucaugucaaaau

SEQ ID NO: 352426 - RNA, 21 nt, Artificial Sequence
  Synthetic
gauucuuauucaugucaaaau

SEQ ID NO: 352427 - RNA, 22 nt, Artificial Sequence
  Synthetic
ugauucuuauucaugucaaaau

SEQ ID NO: 352428 - RNA, 23 nt, Artificial Sequence
  Synthetic
gugauucuuauucaugucaaaau

SEQ ID NO: 352429 - RNA, 24 nt, Artificial Sequence
  Synthetic
agugauucuuauucaugucaaaau

SEQ ID NO: 352430 - RNA, 18 nt, Artificial Sequence
  Synthetic
aaaccaggaugucaaaau

SEQ ID NO: 352431 - RNA, 19 nt, Artificial Sequence
  Synthetic
aaaaccaggaugucaaaau

SEQ ID NO: 352432 - RNA, 20 nt, Artificial Sequence
  Synthetic
caaaaccaggaugucaaaau

SEQ ID NO: 352433 - RNA, 21 nt, Artificial Sequence
  Synthetic
acaaaaccaggaugucaaaau

SEQ ID NO: 352434 - RNA, 22 nt, Artificial Sequence
  Synthetic
cacaaaaccaggaugucaaaau

SEQ ID NO: 352435 - RNA, 23 nt, Artificial Sequence
  Synthetic
ucacaaaaccaggaugucaaaau

SEQ ID NO: 352436 - RNA, 24 nt, Artificial Sequence
  Synthetic
cucacaaaaccaggaugucaaaau

SEQ ID NO: 352437 - RNA, 18 nt, Artificial Sequence
  Synthetic
aaccccaaaauucaaaau

SEQ ID NO: 352438 - RNA, 19 nt, Artificial Sequence
  Synthetic
aaaccccaaaauucaaaau

SEQ ID NO: 352439 - RNA, 20 nt, Artificial Sequence
  Synthetic
caaaccccaaaauucaaaau

SEQ ID NO: 352440 - RNA, 21 nt, Artificial Sequence
  Synthetic
ccaaaccccaaaauucaaaau

SEQ ID NO: 352441 - RNA, 22 nt, Artificial Sequence
  Synthetic
cccaaaccccaaaauucaaaau

SEQ ID NO: 352442 - RNA, 23 nt, Artificial Sequence
  Synthetic
ucccaaaccccaaaauucaaaau

SEQ ID NO: 352443 - RNA, 24 nt, Artificial Sequence
  Synthetic
aucccaaaccccaaaauucaaaau

SEQ ID NO: 352444 - RNA, 18 nt, Artificial Sequence
  Synthetic
aagaucaaaauucaaaau

SEQ ID NO: 352445 - RNA, 19 nt, Artificial Sequence
  Synthetic
aaagaucaaaauucaaaau

SEQ ID NO: 352446 - RNA, 20 nt, Artificial Sequence
  Synthetic
aaaagaucaaaauucaaaau

SEQ ID NO: 352447 - RNA, 21 nt, Artificial Sequence
  Synthetic
gaaaagaucaaaauucaaaau

SEQ ID NO: 352448 - RNA, 22 nt, Artificial Sequence
  Synthetic
agaaaagaucaaaauucaaaau

SEQ ID NO: 352449 - RNA, 23 nt, Artificial Sequence
  Synthetic
uagaaaagaucaaaauucaaaau

SEQ ID NO: 352450 - RNA, 24 nt, Artificial Sequence
  Synthetic
cuagaaaagaucaaaauucaaaau

SEQ ID NO: 352451 - RNA, 18 nt, Artificial Sequence
  Synthetic
uucuucauaauucaaaau

SEQ ID NO: 352452 - RNA, 19 nt, Artificial Sequence
  Synthetic
uuucuucauaauucaaaau

SEQ ID NO: 352453 - RNA, 20 nt, Artificial Sequence
  Synthetic
cuuucuucauaauucaaaau

SEQ ID NO: 352454 - RNA, 21 nt, Artificial Sequence
  Synthetic
ucuuucuucauaauucaaaau

SEQ ID NO: 352455 - RNA, 22 nt, Artificial Sequence
  Synthetic
uucuuucuucauaauucaaaau

SEQ ID NO: 352456 - RNA, 23 nt, Artificial Sequence
  Synthetic
uuucuuucuucauaauucaaaau

SEQ ID NO: 352457 - RNA, 24 nt, Artificial Sequence
  Synthetic
guuucuuucuucauaauucaaaau

SEQ ID NO: 352458 - RNA, 18 nt, Artificial Sequence
  Synthetic
uuaccagauauucaaaau

SEQ ID NO: 352459 - RNA, 19 nt, Artificial Sequence
  Synthetic
uuuaccagauauucaaaau

SEQ ID NO: 352460 - RNA, 20 nt, Artificial Sequence
  Synthetic
uuuuaccagauauucaaaau

SEQ ID NO: 352461 - RNA, 21 nt, Artificial Sequence
  Synthetic
auuuuaccagauauucaaaau

SEQ ID NO: 352462 - RNA, 22 nt, Artificial Sequence
  Synthetic
aauuuuaccagauauucaaaau

SEQ ID NO: 352463 - RNA, 23 nt, Artificial Sequence
  Synthetic
aaauuuuaccagauauucaaaau

SEQ ID NO: 352464 - RNA, 24 nt, Artificial Sequence
  Synthetic
aaaauuuuaccagauauucaaaau

SEQ ID NO: 352465 - RNA, 18 nt, Artificial Sequence
  Synthetic
ccuugauuaguucaaaau

SEQ ID NO: 352466 - RNA, 19 nt, Artificial Sequence
  Synthetic
cccuugauuaguucaaaau

SEQ ID NO: 352467 - RNA, 20 nt, Artificial Sequence
  Synthetic
gcccuugauuaguucaaaau

SEQ ID NO: 352468 - RNA, 21 nt, Artificial Sequence
  Synthetic
ugcccuugauuaguucaaaau

SEQ ID NO: 352469 - RNA, 22 nt, Artificial Sequence
  Synthetic
cugcccuugauuaguucaaaau

SEQ ID NO: 352470 - RNA, 23 nt, Artificial Sequence
  Synthetic
gcugcccuugauuaguucaaaau

SEQ ID NO: 352471 - RNA, 24 nt, Artificial Sequence
  Synthetic
agcugcccuugauuaguucaaaau

SEQ ID NO: 352472 - RNA, 18 nt, Artificial Sequence
  Synthetic
ucaacuuugacagaaaau

SEQ ID NO: 352473 - RNA, 19 nt, Artificial Sequence
  Synthetic
aucaacuuugacagaaaau

SEQ ID NO: 352474 - RNA, 20 nt, Artificial Sequence
  Synthetic
uaucaacuuugacagaaaau

SEQ ID NO: 352475 - RNA, 21 nt, Artificial Sequence
  Synthetic
auaucaacuuugacagaaaau

SEQ ID NO: 352476 - RNA, 22 nt, Artificial Sequence
  Synthetic
cauaucaacuuugacagaaaau

SEQ ID NO: 352477 - RNA, 23 nt, Artificial Sequence
  Synthetic
acauaucaacuuugacagaaaau

SEQ ID NO: 352478 - RNA, 24 nt, Artificial Sequence
  Synthetic
uacauaucaacuuugacagaaaau

SEQ ID NO: 352479 - RNA, 18 nt, Artificial Sequence
  Synthetic
aagguauaagcagaaaau

SEQ ID NO: 352480 - RNA, 19 nt, Artificial Sequence
  Synthetic
gaagguauaagcagaaaau

SEQ ID NO: 352481 - RNA, 20 nt, Artificial Sequence
  Synthetic
agaagguauaagcagaaaau

SEQ ID NO: 352482 - RNA, 21 nt, Artificial Sequence
  Synthetic
aagaagguauaagcagaaaau

SEQ ID NO: 352483 - RNA, 22 nt, Artificial Sequence
  Synthetic
uaagaagguauaagcagaaaau

SEQ ID NO: 352484 - RNA, 23 nt, Artificial Sequence
  Synthetic
guaagaagguauaagcagaaaau

SEQ ID NO: 352485 - RNA, 24 nt, Artificial Sequence
  Synthetic
gguaagaagguauaagcagaaaau

SEQ ID NO: 352486 - RNA, 18 nt, Artificial Sequence
  Synthetic
uggaggugagcagaaaau

SEQ ID NO: 352487 - RNA, 19 nt, Artificial Sequence
  Synthetic
guggaggugagcagaaaau

SEQ ID NO: 352488 - RNA, 20 nt, Artificial Sequence
  Synthetic
gguggaggugagcagaaaau

SEQ ID NO: 352489 - RNA, 21 nt, Artificial Sequence
  Synthetic
agguggaggugagcagaaaau

SEQ ID NO: 352490 - RNA, 22 nt, Artificial Sequence
  Synthetic
gagguggaggugagcagaaaau

SEQ ID NO: 352491 - RNA, 23 nt, Artificial Sequence
  Synthetic
ggagguggaggugagcagaaaau

SEQ ID NO: 352492 - RNA, 24 nt, Artificial Sequence
  Synthetic
gggagguggaggugagcagaaaau

SEQ ID NO: 352493 - RNA, 18 nt, Artificial Sequence
  Synthetic
guagaucucagagaaaau

SEQ ID NO: 352494 - RNA, 19 nt, Artificial Sequence
  Synthetic
uguagaucucagagaaaau

SEQ ID NO: 352495 - RNA, 20 nt, Artificial Sequence
  Synthetic
cuguagaucucagagaaaau

SEQ ID NO: 352496 - RNA, 21 nt, Artificial Sequence
  Synthetic
ccuguagaucucagagaaaau

SEQ ID NO: 352497 - RNA, 22 nt, Artificial Sequence
  Synthetic
uccuguagaucucagagaaaau

SEQ ID NO: 352498 - RNA, 23 nt, Artificial Sequence
  Synthetic
uuccuguagaucucagagaaaau

SEQ ID NO: 352499 - RNA, 24 nt, Artificial Sequence
  Synthetic
auuccuguagaucucagagaaaau

SEQ ID NO: 352500 - RNA, 18 nt, Artificial Sequence
  Synthetic
aacacuguuggagaaaau

SEQ ID NO: 352501 - RNA, 19 nt, Artificial Sequence
  Synthetic
caacacuguuggagaaaau

SEQ ID NO: 352502 - RNA, 20 nt, Artificial Sequence
  Synthetic
gcaacacuguuggagaaaau

SEQ ID NO: 352503 - RNA, 21 nt, Artificial Sequence
  Synthetic
ugcaacacuguuggagaaaau

SEQ ID NO: 352504 - RNA, 22 nt, Artificial Sequence
  Synthetic
augcaacacuguuggagaaaau

SEQ ID NO: 352505 - RNA, 23 nt, Artificial Sequence
  Synthetic
caugcaacacuguuggagaaaau

SEQ ID NO: 352506 - RNA, 24 nt, Artificial Sequence
  Synthetic
acaugcaacacuguuggagaaaau

SEQ ID NO: 352507 - RNA, 18 nt, Artificial Sequence
  Synthetic
uuuaaauuuggagaaaau

SEQ ID NO: 352508 - RNA, 19 nt, Artificial Sequence
  Synthetic
auuuaaauuuggagaaaau

SEQ ID NO: 352509 - RNA, 20 nt, Artificial Sequence
  Synthetic
cauuuaaauuuggagaaaau

SEQ ID NO: 352510 - RNA, 21 nt, Artificial Sequence
  Synthetic
acauuuaaauuuggagaaaau

SEQ ID NO: 352511 - RNA, 22 nt, Artificial Sequence
  Synthetic
aacauuuaaauuuggagaaaau

SEQ ID NO: 352512 - RNA, 23 nt, Artificial Sequence
  Synthetic
caacauuuaaauuuggagaaaau

SEQ ID NO: 352513 - RNA, 24 nt, Artificial Sequence
  Synthetic
ucaacauuuaaauuuggagaaaau

SEQ ID NO: 352514 - RNA, 18 nt, Artificial Sequence
  Synthetic
uaaaggaaaugagaaaau

SEQ ID NO: 352515 - RNA, 19 nt, Artificial Sequence
  Synthetic
uuaaaggaaaugagaaaau

SEQ ID NO: 352516 - RNA, 20 nt, Artificial Sequence
  Synthetic
guuaaaggaaaugagaaaau

SEQ ID NO: 352517 - RNA, 21 nt, Artificial Sequence
  Synthetic
uguuaaaggaaaugagaaaau

SEQ ID NO: 352518 - RNA, 22 nt, Artificial Sequence
  Synthetic
auguuaaaggaaaugagaaaau

SEQ ID NO: 352519 - RNA, 23 nt, Artificial Sequence
  Synthetic
gauguuaaaggaaaugagaaaau

SEQ ID NO: 352520 - RNA, 24 nt, Artificial Sequence
  Synthetic
agauguuaaaggaaaugagaaaau

SEQ ID NO: 352521 - RNA, 18 nt, Artificial Sequence
  Synthetic
aguuugggaguagaaaau

SEQ ID NO: 352522 - RNA, 19 nt, Artificial Sequence
  Synthetic
aaguuugggaguagaaaau

SEQ ID NO: 352523 - RNA, 20 nt, Artificial Sequence
  Synthetic
gaaguuugggaguagaaaau

SEQ ID NO: 352524 - RNA, 21 nt, Artificial Sequence
  Synthetic
ggaaguuugggaguagaaaau

SEQ ID NO: 352525 - RNA, 22 nt, Artificial Sequence
  Synthetic
aggaaguuugggaguagaaaau

SEQ ID NO: 352526 - RNA, 23 nt, Artificial Sequence
  Synthetic
aaggaaguuugggaguagaaaau

SEQ ID NO: 352527 - RNA, 24 nt, Artificial Sequence
  Synthetic
uaaggaaguuugggaguagaaaau

SEQ ID NO: 352528 - RNA, 18 nt, Artificial Sequence
  Synthetic
cgcugagaaaccgaaaau

SEQ ID NO: 352529 - RNA, 19 nt, Artificial Sequence
  Synthetic
gcgcugagaaaccgaaaau

SEQ ID NO: 352530 - RNA, 20 nt, Artificial Sequence
  Synthetic
agcgcugagaaaccgaaaau

SEQ ID NO: 352531 - RNA, 21 nt, Artificial Sequence
  Synthetic
gagcgcugagaaaccgaaaau

SEQ ID NO: 352532 - RNA, 22 nt, Artificial Sequence
  Synthetic
agagcgcugagaaaccgaaaau

SEQ ID NO: 352533 - RNA, 23 nt, Artificial Sequence
  Synthetic
gagagcgcugagaaaccgaaaau

SEQ ID NO: 352534 - RNA, 24 nt, Artificial Sequence
  Synthetic
agagagcgcugagaaaccgaaaau

SEQ ID NO: 352535 - RNA, 18 nt, Artificial Sequence
  Synthetic
acagugcagaaggaaaau

SEQ ID NO: 352536 - RNA, 19 nt, Artificial Sequence
  Synthetic
gacagugcagaaggaaaau

SEQ ID NO: 352537 - RNA, 20 nt, Artificial Sequence
  Synthetic
ggacagugcagaaggaaaau

SEQ ID NO: 352538 - RNA, 21 nt, Artificial Sequence
  Synthetic
gggacagugcagaaggaaaau

SEQ ID NO: 352539 - RNA, 22 nt, Artificial Sequence
  Synthetic
ugggacagugcagaaggaaaau

SEQ ID NO: 352540 - RNA, 23 nt, Artificial Sequence
  Synthetic
cugggacagugcagaaggaaaau

SEQ ID NO: 352541 - RNA, 24 nt, Artificial Sequence
  Synthetic
gcugggacagugcagaaggaaaau

SEQ ID NO: 352542 - RNA, 18 nt, Artificial Sequence
  Synthetic
agaagaugacaggaaaau

SEQ ID NO: 352543 - RNA, 19 nt, Artificial Sequence
  Synthetic
uagaagaugacaggaaaau

SEQ ID NO: 352544 - RNA, 20 nt, Artificial Sequence
  Synthetic
cuagaagaugacaggaaaau

SEQ ID NO: 352545 - RNA, 21 nt, Artificial Sequence
  Synthetic
gcuagaagaugacaggaaaau

SEQ ID NO: 352546 - RNA, 22 nt, Artificial Sequence
  Synthetic
ggcuagaagaugacaggaaaau

SEQ ID NO: 352547 - RNA, 23 nt, Artificial Sequence
  Synthetic
gggcuagaagaugacaggaaaau

SEQ ID NO: 352548 - RNA, 24 nt, Artificial Sequence
  Synthetic
agggcuagaagaugacaggaaaau

SEQ ID NO: 352549 - RNA, 18 nt, Artificial Sequence
  Synthetic
uaagcauaagaggaaaau

SEQ ID NO: 352550 - RNA, 19 nt, Artificial Sequence
  Synthetic
auaagcauaagaggaaaau

SEQ ID NO: 352551 - RNA, 20 nt, Artificial Sequence
  Synthetic
cauaagcauaagaggaaaau

SEQ ID NO: 352552 - RNA, 21 nt, Artificial Sequence
  Synthetic
gcauaagcauaagaggaaaau

SEQ ID NO: 352553 - RNA, 22 nt, Artificial Sequence
  Synthetic
agcauaagcauaagaggaaaau

SEQ ID NO: 352554 - RNA, 23 nt, Artificial Sequence
  Synthetic
uagcauaagcauaagaggaaaau

SEQ ID NO: 352555 - RNA, 24 nt, Artificial Sequence
  Synthetic
uuagcauaagcauaagaggaaaau

SEQ ID NO: 352556 - RNA, 18 nt, Artificial Sequence
  Synthetic
uucaguaagccggaaaau

SEQ ID NO: 352557 - RNA, 19 nt, Artificial Sequence
  Synthetic
uuucaguaagccggaaaau

SEQ ID NO: 352558 - RNA, 20 nt, Artificial Sequence
  Synthetic
uuuucaguaagccggaaaau

SEQ ID NO: 352559 - RNA, 21 nt, Artificial Sequence
  Synthetic
auuuucaguaagccggaaaau

SEQ ID NO: 352560 - RNA, 22 nt, Artificial Sequence
  Synthetic
cauuuucaguaagccggaaaau

SEQ ID NO: 352561 - RNA, 23 nt, Artificial Sequence
  Synthetic
ucauuuucaguaagccggaaaau

SEQ ID NO: 352562 - RNA, 24 nt, Artificial Sequence
  Synthetic
aucauuuucaguaagccggaaaau

SEQ ID NO: 352563 - RNA, 18 nt, Artificial Sequence
  Synthetic
aauggaagaagggaaaau

SEQ ID NO: 352564 - RNA, 19 nt, Artificial Sequence
  Synthetic
aaauggaagaagggaaaau

SEQ ID NO: 352565 - RNA, 20 nt, Artificial Sequence
  Synthetic
aaaauggaagaagggaaaau

SEQ ID NO: 352566 - RNA, 21 nt, Artificial Sequence
  Synthetic
uaaaauggaagaagggaaaau

SEQ ID NO: 352567 - RNA, 22 nt, Artificial Sequence
  Synthetic
uuaaaauggaagaagggaaaau

SEQ ID NO: 352568 - RNA, 23 nt, Artificial Sequence
  Synthetic
uuuaaaauggaagaagggaaaau

SEQ ID NO: 352569 - RNA, 24 nt, Artificial Sequence
  Synthetic
cuuuaaaauggaagaagggaaaau

SEQ ID NO: 352570 - RNA, 18 nt, Artificial Sequence
  Synthetic
uucaagaaaugggaaaau

SEQ ID NO: 352571 - RNA, 19 nt, Artificial Sequence
  Synthetic
uuucaagaaaugggaaaau

SEQ ID NO: 352572 - RNA, 20 nt, Artificial Sequence
  Synthetic
uuuucaagaaaugggaaaau

SEQ ID NO: 352573 - RNA, 21 nt, Artificial Sequence
  Synthetic
cuuuucaagaaaugggaaaau

SEQ ID NO: 352574 - RNA, 22 nt, Artificial Sequence
  Synthetic
ucuuuucaagaaaugggaaaau

SEQ ID NO: 352575 - RNA, 23 nt, Artificial Sequence
  Synthetic
uucuuuucaagaaaugggaaaau

SEQ ID NO: 352576 - RNA, 24 nt, Artificial Sequence
  Synthetic
guucuuuucaagaaaugggaaaau

SEQ ID NO: 352577 - RNA, 18 nt, Artificial Sequence
  Synthetic
agacuugcaugggaaaau

SEQ ID NO: 352578 - RNA, 19 nt, Artificial Sequence
  Synthetic
aagacuugcaugggaaaau

SEQ ID NO: 352579 - RNA, 20 nt, Artificial Sequence
  Synthetic
aaagacuugcaugggaaaau

SEQ ID NO: 352580 - RNA, 21 nt, Artificial Sequence
  Synthetic
caaagacuugcaugggaaaau

SEQ ID NO: 352581 - RNA, 22 nt, Artificial Sequence
  Synthetic
ucaaagacuugcaugggaaaau

SEQ ID NO: 352582 - RNA, 23 nt, Artificial Sequence
  Synthetic
aucaaagacuugcaugggaaaau

SEQ ID NO: 352583 - RNA, 24 nt, Artificial Sequence
  Synthetic
uaucaaagacuugcaugggaaaau

SEQ ID NO: 352584 - RNA, 18 nt, Artificial Sequence
  Synthetic
aggaaaaugugggaaaau

SEQ ID NO: 352585 - RNA, 19 nt, Artificial Sequence
  Synthetic
caggaaaaugugggaaaau

SEQ ID NO: 352586 - RNA, 20 nt, Artificial Sequence
  Synthetic
acaggaaaaugugggaaaau

SEQ ID NO: 352587 - RNA, 21 nt, Artificial Sequence
  Synthetic
gacaggaaaaugugggaaaau

SEQ ID NO: 352588 - RNA, 22 nt, Artificial Sequence
  Synthetic
ugacaggaaaaugugggaaaau

SEQ ID NO: 352589 - RNA, 23 nt, Artificial Sequence
  Synthetic
augacaggaaaaugugggaaaau

SEQ ID NO: 352590 - RNA, 24 nt, Artificial Sequence
  Synthetic
gaugacaggaaaaugugggaaaau

SEQ ID NO: 352591 - RNA, 18 nt, Artificial Sequence
  Synthetic
gccaaaagcauggaaaau

SEQ ID NO: 352592 - RNA, 19 nt, Artificial Sequence
  Synthetic
agccaaaagcauggaaaau

SEQ ID NO: 352593 - RNA, 20 nt, Artificial Sequence
  Synthetic
uagccaaaagcauggaaaau

SEQ ID NO: 352594 - RNA, 21 nt, Artificial Sequence
  Synthetic
auagccaaaagcauggaaaau

SEQ ID NO: 352595 - RNA, 22 nt, Artificial Sequence
  Synthetic
aauagccaaaagcauggaaaau

SEQ ID NO: 352596 - RNA, 23 nt, Artificial Sequence
  Synthetic
aaauagccaaaagcauggaaaau

SEQ ID NO: 352597 - RNA, 24 nt, Artificial Sequence
  Synthetic
uaaauagccaaaagcauggaaaau

SEQ ID NO: 352598 - RNA, 18 nt, Artificial Sequence
  Synthetic
uuuuccauucuggaaaau

SEQ ID NO: 352599 - RNA, 19 nt, Artificial Sequence
  Synthetic
auuuuccauucuggaaaau

SEQ ID NO: 352600 - RNA, 20 nt, Artificial Sequence
  Synthetic
aauuuuccauucuggaaaau

SEQ ID NO: 352601 - RNA, 21 nt, Artificial Sequence
  Synthetic
uaauuuuccauucuggaaaau

SEQ ID NO: 352602 - RNA, 22 nt, Artificial Sequence
  Synthetic
uuaauuuuccauucuggaaaau

SEQ ID NO: 352603 - RNA, 23 nt, Artificial Sequence
  Synthetic
cuuaauuuuccauucuggaaaau

SEQ ID NO: 352604 - RNA, 24 nt, Artificial Sequence
  Synthetic
acuuaauuuuccauucuggaaaau

SEQ ID NO: 352605 - RNA, 18 nt, Artificial Sequence
  Synthetic
gauuuagggguggaaaau

SEQ ID NO: 352606 - RNA, 19 nt, Artificial Sequence
  Synthetic
ggauuuagggguggaaaau

SEQ ID NO: 352607 - RNA, 20 nt, Artificial Sequence
  Synthetic
uggauuuagggguggaaaau

SEQ ID NO: 352608 - RNA, 21 nt, Artificial Sequence
  Synthetic
guggauuuagggguggaaaau

SEQ ID NO: 352609 - RNA, 22 nt, Artificial Sequence
  Synthetic
uguggauuuagggguggaaaau

SEQ ID NO: 352610 - RNA, 23 nt, Artificial Sequence
  Synthetic
cuguggauuuagggguggaaaau

SEQ ID NO: 352611 - RNA, 24 nt, Artificial Sequence
  Synthetic
gcuguggauuuagggguggaaaau

SEQ ID NO: 352612 - RNA, 18 nt, Artificial Sequence
  Synthetic
uacucuaaaaaugaaaau

SEQ ID NO: 352613 - RNA, 19 nt, Artificial Sequence
  Synthetic
guacucuaaaaaugaaaau

SEQ ID NO: 352614 - RNA, 20 nt, Artificial Sequence
  Synthetic
aguacucuaaaaaugaaaau

SEQ ID NO: 352615 - RNA, 21 nt, Artificial Sequence
  Synthetic
aaguacucuaaaaaugaaaau

SEQ ID NO: 352616 - RNA, 22 nt, Artificial Sequence
  Synthetic
aaaguacucuaaaaaugaaaau

SEQ ID NO: 352617 - RNA, 23 nt, Artificial Sequence
  Synthetic
uaaaguacucuaaaaaugaaaau

SEQ ID NO: 352618 - RNA, 24 nt, Artificial Sequence
  Synthetic
auaaaguacucuaaaaaugaaaau

SEQ ID NO: 352619 - RNA, 18 nt, Artificial Sequence
  Synthetic
uguuuucuaaaugaaaau

SEQ ID NO: 352620 - RNA, 19 nt, Artificial Sequence
  Synthetic
uuguuuucuaaaugaaaau

SEQ ID NO: 352621 - RNA, 20 nt, Artificial Sequence
  Synthetic
auuguuuucuaaaugaaaau

SEQ ID NO: 352622 - RNA, 21 nt, Artificial Sequence
  Synthetic
aauuguuuucuaaaugaaaau

SEQ ID NO: 352623 - RNA, 22 nt, Artificial Sequence
  Synthetic
caauuguuuucuaaaugaaaau

SEQ ID NO: 352624 - RNA, 23 nt, Artificial Sequence
  Synthetic
acaauuguuuucuaaaugaaaau

SEQ ID NO: 352625 - RNA, 24 nt, Artificial Sequence
  Synthetic
uacaauuguuuucuaaaugaaaau

SEQ ID NO: 352626 - RNA, 18 nt, Artificial Sequence
  Synthetic
uuaaaaaagaaugaaaau

SEQ ID NO: 352627 - RNA, 19 nt, Artificial Sequence
  Synthetic
auuaaaaaagaaugaaaau

SEQ ID NO: 352628 - RNA, 20 nt, Artificial Sequence
  Synthetic
cauuaaaaaagaaugaaaau

SEQ ID NO: 352629 - RNA, 21 nt, Artificial Sequence
  Synthetic
ucauuaaaaaagaaugaaaau

SEQ ID NO: 352630 - RNA, 22 nt, Artificial Sequence
  Synthetic
gucauuaaaaaagaaugaaaau

SEQ ID NO: 352631 - RNA, 23 nt, Artificial Sequence
  Synthetic
cgucauuaaaaaagaaugaaaau

SEQ ID NO: 352632 - RNA, 24 nt, Artificial Sequence
  Synthetic
ucgucauuaaaaaagaaugaaaau

SEQ ID NO: 352633 - RNA, 18 nt, Artificial Sequence
  Synthetic
ccaaauacacaugaaaau

SEQ ID NO: 352634 - RNA, 19 nt, Artificial Sequence
  Synthetic
gccaaauacacaugaaaau

SEQ ID NO: 352635 - RNA, 20 nt, Artificial Sequence
  Synthetic
ggccaaauacacaugaaaau

SEQ ID NO: 352636 - RNA, 21 nt, Artificial Sequence
  Synthetic
gggccaaauacacaugaaaau

SEQ ID NO: 352637 - RNA, 22 nt, Artificial Sequence
  Synthetic
agggccaaauacacaugaaaau

SEQ ID NO: 352638 - RNA, 23 nt, Artificial Sequence
  Synthetic
gagggccaaauacacaugaaaau

SEQ ID NO: 352639 - RNA, 24 nt, Artificial Sequence
  Synthetic
ugagggccaaauacacaugaaaau

SEQ ID NO: 352640 - RNA, 18 nt, Artificial Sequence
  Synthetic
uuguaaauccaugaaaau

SEQ ID NO: 352641 - RNA, 19 nt, Artificial Sequence
  Synthetic
auuguaaauccaugaaaau

SEQ ID NO: 352642 - RNA, 20 nt, Artificial Sequence
  Synthetic
aauuguaaauccaugaaaau

SEQ ID NO: 352643 - RNA, 21 nt, Artificial Sequence
  Synthetic
gaauuguaaauccaugaaaau

SEQ ID NO: 352644 - RNA, 22 nt, Artificial Sequence
  Synthetic
agaauuguaaauccaugaaaau

SEQ ID NO: 352645 - RNA, 23 nt, Artificial Sequence
  Synthetic
gagaauuguaaauccaugaaaau

SEQ ID NO: 352646 - RNA, 24 nt, Artificial Sequence
  Synthetic
agagaauuguaaauccaugaaaau

SEQ ID NO: 352647 - RNA, 18 nt, Artificial Sequence
  Synthetic
agucaaugagaugaaaau

SEQ ID NO: 352648 - RNA, 19 nt, Artificial Sequence
  Synthetic
aagucaaugagaugaaaau

SEQ ID NO: 352649 - RNA, 20 nt, Artificial Sequence
  Synthetic
caagucaaugagaugaaaau

SEQ ID NO: 352650 - RNA, 21 nt, Artificial Sequence
  Synthetic
ucaagucaaugagaugaaaau

SEQ ID NO: 352651 - RNA, 22 nt, Artificial Sequence
  Synthetic
aucaagucaaugagaugaaaau

SEQ ID NO: 352652 - RNA, 23 nt, Artificial Sequence
  Synthetic
uaucaagucaaugagaugaaaau

SEQ ID NO: 352653 - RNA, 24 nt, Artificial Sequence
  Synthetic
auaucaagucaaugagaugaaaau

SEQ ID NO: 352654 - RNA, 18 nt, Artificial Sequence
  Synthetic
uuuagcuaauaugaaaau

SEQ ID NO: 352655 - RNA, 19 nt, Artificial Sequence
  Synthetic
cuuuagcuaauaugaaaau

SEQ ID NO: 352656 - RNA, 20 nt, Artificial Sequence
  Synthetic
ccuuuagcuaauaugaaaau

SEQ ID NO: 352657 - RNA, 21 nt, Artificial Sequence
  Synthetic
accuuuagcuaauaugaaaau

SEQ ID NO: 352658 - RNA, 22 nt, Artificial Sequence
  Synthetic
aaccuuuagcuaauaugaaaau

SEQ ID NO: 352659 - RNA, 23 nt, Artificial Sequence
  Synthetic
uaaccuuuagcuaauaugaaaau

SEQ ID NO: 352660 - RNA, 24 nt, Artificial Sequence
  Synthetic
uuaaccuuuagcuaauaugaaaau

SEQ ID NO: 352661 - RNA, 18 nt, Artificial Sequence
  Synthetic
agagagcgauaugaaaau

SEQ ID NO: 352662 - RNA, 19 nt, Artificial Sequence
  Synthetic
gagagagcgauaugaaaau

SEQ ID NO: 352663 - RNA, 20 nt, Artificial Sequence
  Synthetic
agagagagcgauaugaaaau

SEQ ID NO: 352664 - RNA, 21 nt, Artificial Sequence
  Synthetic
uagagagagcgauaugaaaau

SEQ ID NO: 352665 - RNA, 22 nt, Artificial Sequence
  Synthetic
auagagagagcgauaugaaaau

SEQ ID NO: 352666 - RNA, 23 nt, Artificial Sequence
  Synthetic
cauagagagagcgauaugaaaau

SEQ ID NO: 352667 - RNA, 24 nt, Artificial Sequence
  Synthetic
ucauagagagagcgauaugaaaau

SEQ ID NO: 352668 - RNA, 18 nt, Artificial Sequence
  Synthetic
ucucuaaauacugaaaau

SEQ ID NO: 352669 - RNA, 19 nt, Artificial Sequence
  Synthetic
uucucuaaauacugaaaau

SEQ ID NO: 352670 - RNA, 20 nt, Artificial Sequence
  Synthetic
uuucucuaaauacugaaaau

SEQ ID NO: 352671 - RNA, 21 nt, Artificial Sequence
  Synthetic
auuucucuaaauacugaaaau

SEQ ID NO: 352672 - RNA, 22 nt, Artificial Sequence
  Synthetic
gauuucucuaaauacugaaaau

SEQ ID NO: 352673 - RNA, 23 nt, Artificial Sequence
  Synthetic
ugauuucucuaaauacugaaaau

SEQ ID NO: 352674 - RNA, 24 nt, Artificial Sequence
  Synthetic
augauuucucuaaauacugaaaau

SEQ ID NO: 352675 - RNA, 18 nt, Artificial Sequence
  Synthetic
uauucauuuacugaaaau

SEQ ID NO: 352676 - RNA, 19 nt, Artificial Sequence
  Synthetic
auauucauuuacugaaaau

SEQ ID NO: 352677 - RNA, 20 nt, Artificial Sequence
  Synthetic
cauauucauuuacugaaaau

SEQ ID NO: 352678 - RNA, 21 nt, Artificial Sequence
  Synthetic
ucauauucauuuacugaaaau

SEQ ID NO: 352679 - RNA, 22 nt, Artificial Sequence
  Synthetic
uucauauucauuuacugaaaau

SEQ ID NO: 352680 - RNA, 23 nt, Artificial Sequence
  Synthetic
auucauauucauuuacugaaaau

SEQ ID NO: 352681 - RNA, 24 nt, Artificial Sequence
  Synthetic
aauucauauucauuuacugaaaau

SEQ ID NO: 352682 - RNA, 18 nt, Artificial Sequence
  Synthetic
cccagucaaccugaaaau

SEQ ID NO: 352683 - RNA, 19 nt, Artificial Sequence
  Synthetic
acccagucaaccugaaaau

SEQ ID NO: 352684 - RNA, 20 nt, Artificial Sequence
  Synthetic
aacccagucaaccugaaaau

SEQ ID NO: 352685 - RNA, 21 nt, Artificial Sequence
  Synthetic
aaacccagucaaccugaaaau

SEQ ID NO: 352686 - RNA, 22 nt, Artificial Sequence
  Synthetic
aaaacccagucaaccugaaaau

SEQ ID NO: 352687 - RNA, 23 nt, Artificial Sequence
  Synthetic
uaaaacccagucaaccugaaaau

SEQ ID NO: 352688 - RNA, 24 nt, Artificial Sequence
  Synthetic
auaaaacccagucaaccugaaaau

SEQ ID NO: 352689 - RNA, 18 nt, Artificial Sequence
  Synthetic
guaaauauaccugaaaau

SEQ ID NO: 352690 - RNA, 19 nt, Artificial Sequence
  Synthetic
uguaaauauaccugaaaau

SEQ ID NO: 352691 - RNA, 20 nt, Artificial Sequence
  Synthetic
cuguaaauauaccugaaaau

SEQ ID NO: 352692 - RNA, 21 nt, Artificial Sequence
  Synthetic
gcuguaaauauaccugaaaau

SEQ ID NO: 352693 - RNA, 22 nt, Artificial Sequence
  Synthetic
ugcuguaaauauaccugaaaau

SEQ ID NO: 352694 - RNA, 23 nt, Artificial Sequence
  Synthetic
uugcuguaaauauaccugaaaau

SEQ ID NO: 352695 - RNA, 24 nt, Artificial Sequence
  Synthetic
auugcuguaaauauaccugaaaau

SEQ ID NO: 352696 - RNA, 18 nt, Artificial Sequence
  Synthetic
agucccuucagugaaaau

SEQ ID NO: 352697 - RNA, 19 nt, Artificial Sequence
  Synthetic
aagucccuucagugaaaau

SEQ ID NO: 352698 - RNA, 20 nt, Artificial Sequence
  Synthetic
caagucccuucagugaaaau

SEQ ID NO: 352699 - RNA, 21 nt, Artificial Sequence
  Synthetic
ucaagucccuucagugaaaau

SEQ ID NO: 352700 - RNA, 22 nt, Artificial Sequence
  Synthetic
uucaagucccuucagugaaaau

SEQ ID NO: 352701 - RNA, 23 nt, Artificial Sequence
  Synthetic
uuucaagucccuucagugaaaau

SEQ ID NO: 352702 - RNA, 24 nt, Artificial Sequence
  Synthetic
cuuucaagucccuucagugaaaau

SEQ ID NO: 352703 - RNA, 18 nt, Artificial Sequence
  Synthetic
gaugagagaauugaaaau

SEQ ID NO: 352704 - RNA, 19 nt, Artificial Sequence
  Synthetic
ugaugagagaauugaaaau

SEQ ID NO: 352705 - RNA, 20 nt, Artificial Sequence
  Synthetic
augaugagagaauugaaaau

SEQ ID NO: 352706 - RNA, 21 nt, Artificial Sequence
  Synthetic
aaugaugagagaauugaaaau

SEQ ID NO: 352707 - RNA, 22 nt, Artificial Sequence
  Synthetic
gaaugaugagagaauugaaaau

SEQ ID NO: 352708 - RNA, 23 nt, Artificial Sequence
  Synthetic
ggaaugaugagagaauugaaaau

SEQ ID NO: 352709 - RNA, 24 nt, Artificial Sequence
  Synthetic
uggaaugaugagagaauugaaaau

SEQ ID NO: 352710 - RNA, 18 nt, Artificial Sequence
  Synthetic
uaaauuugcuuugaaaau

SEQ ID NO: 352711 - RNA, 19 nt, Artificial Sequence
  Synthetic
cuaaauuugcuuugaaaau

SEQ ID NO: 352712 - RNA, 20 nt, Artificial Sequence
  Synthetic
ucuaaauuugcuuugaaaau

SEQ ID NO: 352713 - RNA, 21 nt, Artificial Sequence
  Synthetic
aucuaaauuugcuuugaaaau

SEQ ID NO: 352714 - RNA, 22 nt, Artificial Sequence
  Synthetic
aaucuaaauuugcuuugaaaau

SEQ ID NO: 352715 - RNA, 23 nt, Artificial Sequence
  Synthetic
caaucuaaauuugcuuugaaaau

SEQ ID NO: 352716 - RNA, 24 nt, Artificial Sequence
  Synthetic
ccaaucuaaauuugcuuugaaaau

SEQ ID NO: 352717 - RNA, 18 nt, Artificial Sequence
  Synthetic
aauguugaaaaauaaaau

SEQ ID NO: 352718 - RNA, 19 nt, Artificial Sequence
  Synthetic
aaauguugaaaaauaaaau

SEQ ID NO: 352719 - RNA, 20 nt, Artificial Sequence
  Synthetic
gaaauguugaaaaauaaaau

SEQ ID NO: 352720 - RNA, 21 nt, Artificial Sequence
  Synthetic
ggaaauguugaaaaauaaaau

SEQ ID NO: 352721 - RNA, 22 nt, Artificial Sequence
  Synthetic
aggaaauguugaaaaauaaaau

SEQ ID NO: 352722 - RNA, 23 nt, Artificial Sequence
  Synthetic
aaggaaauguugaaaaauaaaau

SEQ ID NO: 352723 - RNA, 24 nt, Artificial Sequence
  Synthetic
aaaggaaauguugaaaaauaaaau

SEQ ID NO: 352724 - RNA, 18 nt, Artificial Sequence
  Synthetic
aauaaaauaaaauaaaau

SEQ ID NO: 352725 - RNA, 19 nt, Artificial Sequence
  Synthetic
aaauaaaauaaaauaaaau

SEQ ID NO: 352726 - RNA, 20 nt, Artificial Sequence
  Synthetic
aaaauaaaauaaaauaaaau

SEQ ID NO: 352727 - RNA, 21 nt, Artificial Sequence
  Synthetic
uaaaauaaaauaaaauaaaau

SEQ ID NO: 352728 - RNA, 22 nt, Artificial Sequence
  Synthetic
uuaaaauaaaauaaaauaaaau

SEQ ID NO: 352729 - RNA, 23 nt, Artificial Sequence
  Synthetic
auuaaaauaaaauaaaauaaaau

SEQ ID NO: 352730 - RNA, 24 nt, Artificial Sequence
  Synthetic
aauuaaaauaaaauaaaauaaaau

SEQ ID NO: 352731 - RNA, 18 nt, Artificial Sequence
  Synthetic
gaagaaaagaaauaaaau

SEQ ID NO: 352732 - RNA, 19 nt, Artificial Sequence
  Synthetic
ugaagaaaagaaauaaaau

SEQ ID NO: 352733 - RNA, 20 nt, Artificial Sequence
  Synthetic
uugaagaaaagaaauaaaau

SEQ ID NO: 352734 - RNA, 21 nt, Artificial Sequence
  Synthetic
auugaagaaaagaaauaaaau

SEQ ID NO: 352735 - RNA, 22 nt, Artificial Sequence
  Synthetic
aauugaagaaaagaaauaaaau

SEQ ID NO: 352736 - RNA, 23 nt, Artificial Sequence
  Synthetic
gaauugaagaaaagaaauaaaau

SEQ ID NO: 352737 - RNA, 24 nt, Artificial Sequence
  Synthetic
agaauugaagaaaagaaauaaaau

SEQ ID NO: 352738 - RNA, 18 nt, Artificial Sequence
  Synthetic
gcccaguagaaauaaaau

SEQ ID NO: 352739 - RNA, 19 nt, Artificial Sequence
  Synthetic
ugcccaguagaaauaaaau

SEQ ID NO: 352740 - RNA, 20 nt, Artificial Sequence
  Synthetic
cugcccaguagaaauaaaau

SEQ ID NO: 352741 - RNA, 21 nt, Artificial Sequence
  Synthetic
ucugcccaguagaaauaaaau

SEQ ID NO: 352742 - RNA, 22 nt, Artificial Sequence
  Synthetic
cucugcccaguagaaauaaaau

SEQ ID NO: 352743 - RNA, 23 nt, Artificial Sequence
  Synthetic
gcucugcccaguagaaauaaaau

SEQ ID NO: 352744 - RNA, 24 nt, Artificial Sequence
  Synthetic
agcucugcccaguagaaauaaaau

SEQ ID NO: 352745 - RNA, 18 nt, Artificial Sequence
  Synthetic
auuugaaauaaauaaaau

SEQ ID NO: 352746 - RNA, 19 nt, Artificial Sequence
  Synthetic
uauuugaaauaaauaaaau

SEQ ID NO: 352747 - RNA, 20 nt, Artificial Sequence
  Synthetic
uuauuugaaauaaauaaaau

SEQ ID NO: 352748 - RNA, 21 nt, Artificial Sequence
  Synthetic
auuauuugaaauaaauaaaau

SEQ ID NO: 352749 - RNA, 22 nt, Artificial Sequence
  Synthetic
aauuauuugaaauaaauaaaau

SEQ ID NO: 352750 - RNA, 23 nt, Artificial Sequence
  Synthetic
aaauuauuugaaauaaauaaaau

SEQ ID NO: 352751 - RNA, 24 nt, Artificial Sequence
  Synthetic
uaaauuauuugaaauaaauaaaau

SEQ ID NO: 352752 - RNA, 18 nt, Artificial Sequence
  Synthetic
uagugacuacaauaaaau

SEQ ID NO: 352753 - RNA, 19 nt, Artificial Sequence
  Synthetic
uuagugacuacaauaaaau

SEQ ID NO: 352754 - RNA, 20 nt, Artificial Sequence
  Synthetic
uuuagugacuacaauaaaau

SEQ ID NO: 352755 - RNA, 21 nt, Artificial Sequence
  Synthetic
uuuuagugacuacaauaaaau

SEQ ID NO: 352756 - RNA, 22 nt, Artificial Sequence
  Synthetic
auuuuagugacuacaauaaaau

SEQ ID NO: 352757 - RNA, 23 nt, Artificial Sequence
  Synthetic
aauuuuagugacuacaauaaaau

SEQ ID NO: 352758 - RNA, 24 nt, Artificial Sequence
  Synthetic
aaauuuuagugacuacaauaaaau

SEQ ID NO: 352759 - RNA, 18 nt, Artificial Sequence
  Synthetic
auuugagaagaauaaaau

SEQ ID NO: 352760 - RNA, 19 nt, Artificial Sequence
  Synthetic
cauuugagaagaauaaaau

SEQ ID NO: 352761 - RNA, 20 nt, Artificial Sequence
  Synthetic
ucauuugagaagaauaaaau

SEQ ID NO: 352762 - RNA, 21 nt, Artificial Sequence
  Synthetic
uucauuugagaagaauaaaau

SEQ ID NO: 352763 - RNA, 22 nt, Artificial Sequence
  Synthetic
uuucauuugagaagaauaaaau

SEQ ID NO: 352764 - RNA, 23 nt, Artificial Sequence
  Synthetic
uuuucauuugagaagaauaaaau

SEQ ID NO: 352765 - RNA, 24 nt, Artificial Sequence
  Synthetic
auuuucauuugagaagaauaaaau

SEQ ID NO: 352766 - RNA, 18 nt, Artificial Sequence
  Synthetic
ucauuuugagaauaaaau

SEQ ID NO: 352767 - RNA, 19 nt, Artificial Sequence
  Synthetic
cucauuuugagaauaaaau

SEQ ID NO: 352768 - RNA, 20 nt, Artificial Sequence
  Synthetic
acucauuuugagaauaaaau

SEQ ID NO: 352769 - RNA, 21 nt, Artificial Sequence
  Synthetic
aacucauuuugagaauaaaau

SEQ ID NO: 352770 - RNA, 22 nt, Artificial Sequence
  Synthetic
caacucauuuugagaauaaaau

SEQ ID NO: 352771 - RNA, 23 nt, Artificial Sequence
  Synthetic
gcaacucauuuugagaauaaaau

SEQ ID NO: 352772 - RNA, 24 nt, Artificial Sequence
  Synthetic
agcaacucauuuugagaauaaaau

SEQ ID NO: 352773 - RNA, 18 nt, Artificial Sequence
  Synthetic
agaauccuagaauaaaau

SEQ ID NO: 352774 - RNA, 19 nt, Artificial Sequence
  Synthetic
aagaauccuagaauaaaau

SEQ ID NO: 352775 - RNA, 20 nt, Artificial Sequence
  Synthetic
uaagaauccuagaauaaaau

SEQ ID NO: 352776 - RNA, 21 nt, Artificial Sequence
  Synthetic
auaagaauccuagaauaaaau

SEQ ID NO: 352777 - RNA, 22 nt, Artificial Sequence
  Synthetic
uauaagaauccuagaauaaaau

SEQ ID NO: 352778 - RNA, 23 nt, Artificial Sequence
  Synthetic
cuauaagaauccuagaauaaaau

SEQ ID NO: 352779 - RNA, 24 nt, Artificial Sequence
  Synthetic
gcuauaagaauccuagaauaaaau

SEQ ID NO: 352780 - RNA, 18 nt, Artificial Sequence
  Synthetic
uucaagcauccauaaaau

SEQ ID NO: 352781 - RNA, 19 nt, Artificial Sequence
  Synthetic
guucaagcauccauaaaau

SEQ ID NO: 352782 - RNA, 20 nt, Artificial Sequence
  Synthetic
uguucaagcauccauaaaau

SEQ ID NO: 352783 - RNA, 21 nt, Artificial Sequence
  Synthetic
auguucaagcauccauaaaau

SEQ ID NO: 352784 - RNA, 22 nt, Artificial Sequence
  Synthetic
gauguucaagcauccauaaaau

SEQ ID NO: 352785 - RNA, 23 nt, Artificial Sequence
  Synthetic
agauguucaagcauccauaaaau

SEQ ID NO: 352786 - RNA, 24 nt, Artificial Sequence
  Synthetic
aagauguucaagcauccauaaaau

SEQ ID NO: 352787 - RNA, 18 nt, Artificial Sequence
  Synthetic
gcauaaaaugcauaaaau

SEQ ID NO: 352788 - RNA, 19 nt, Artificial Sequence
  Synthetic
ugcauaaaaugcauaaaau

SEQ ID NO: 352789 - RNA, 20 nt, Artificial Sequence
  Synthetic
uugcauaaaaugcauaaaau

SEQ ID NO: 352790 - RNA, 21 nt, Artificial Sequence
  Synthetic
cuugcauaaaaugcauaaaau

SEQ ID NO: 352791 - RNA, 22 nt, Artificial Sequence
  Synthetic
ccuugcauaaaaugcauaaaau

SEQ ID NO: 352792 - RNA, 23 nt, Artificial Sequence
  Synthetic
accuugcauaaaaugcauaaaau

SEQ ID NO: 352793 - RNA, 24 nt, Artificial Sequence
  Synthetic
aaccuugcauaaaaugcauaaaau

SEQ ID NO: 352794 - RNA, 18 nt, Artificial Sequence
  Synthetic
ugaggagucagauaaaau

SEQ ID NO: 352795 - RNA, 19 nt, Artificial Sequence
  Synthetic
uugaggagucagauaaaau

SEQ ID NO: 352796 - RNA, 20 nt, Artificial Sequence
  Synthetic
cuugaggagucagauaaaau

SEQ ID NO: 352797 - RNA, 21 nt, Artificial Sequence
  Synthetic
acuugaggagucagauaaaau

SEQ ID NO: 352798 - RNA, 22 nt, Artificial Sequence
  Synthetic
gacuugaggagucagauaaaau

SEQ ID NO: 352799 - RNA, 23 nt, Artificial Sequence
  Synthetic
agacuugaggagucagauaaaau

SEQ ID NO: 352800 - RNA, 24 nt, Artificial Sequence
  Synthetic
uagacuugaggagucagauaaaau

SEQ ID NO: 352801 - RNA, 18 nt, Artificial Sequence
  Synthetic
gcaacuaagggauaaaau

SEQ ID NO: 352802 - RNA, 19 nt, Artificial Sequence
  Synthetic
ggcaacuaagggauaaaau

SEQ ID NO: 352803 - RNA, 20 nt, Artificial Sequence
  Synthetic
gggcaacuaagggauaaaau

SEQ ID NO: 352804 - RNA, 21 nt, Artificial Sequence
  Synthetic
ugggcaacuaagggauaaaau

SEQ ID NO: 352805 - RNA, 22 nt, Artificial Sequence
  Synthetic
augggcaacuaagggauaaaau

SEQ ID NO: 352806 - RNA, 23 nt, Artificial Sequence
  Synthetic
caugggcaacuaagggauaaaau

SEQ ID NO: 352807 - RNA, 24 nt, Artificial Sequence
  Synthetic
ucaugggcaacuaagggauaaaau

SEQ ID NO: 352808 - RNA, 18 nt, Artificial Sequence
  Synthetic
ccuaagauccuauaaaau

SEQ ID NO: 352809 - RNA, 19 nt, Artificial Sequence
  Synthetic
uccuaagauccuauaaaau

SEQ ID NO: 352810 - RNA, 20 nt, Artificial Sequence
  Synthetic
uuccuaagauccuauaaaau

SEQ ID NO: 352811 - RNA, 21 nt, Artificial Sequence
  Synthetic
uuuccuaagauccuauaaaau

SEQ ID NO: 352812 - RNA, 22 nt, Artificial Sequence
  Synthetic
guuuccuaagauccuauaaaau

SEQ ID NO: 352813 - RNA, 23 nt, Artificial Sequence
  Synthetic
gguuuccuaagauccuauaaaau

SEQ ID NO: 352814 - RNA, 24 nt, Artificial Sequence
  Synthetic
agguuuccuaagauccuauaaaau

SEQ ID NO: 352815 - RNA, 18 nt, Artificial Sequence
  Synthetic
ccuuaauguaacuaaaau

SEQ ID NO: 352816 - RNA, 19 nt, Artificial Sequence
  Synthetic
gccuuaauguaacuaaaau

SEQ ID NO: 352817 - RNA, 20 nt, Artificial Sequence
  Synthetic
ugccuuaauguaacuaaaau

SEQ ID NO: 352818 - RNA, 21 nt, Artificial Sequence
  Synthetic
uugccuuaauguaacuaaaau

SEQ ID NO: 352819 - RNA, 22 nt, Artificial Sequence
  Synthetic
uuugccuuaauguaacuaaaau

SEQ ID NO: 352820 - RNA, 23 nt, Artificial Sequence
  Synthetic
uuuugccuuaauguaacuaaaau

SEQ ID NO: 352821 - RNA, 24 nt, Artificial Sequence
  Synthetic
uuuuugccuuaauguaacuaaaau

SEQ ID NO: 352822 - RNA, 18 nt, Artificial Sequence
  Synthetic
ucacacauagccuaaaau

SEQ ID NO: 352823 - RNA, 19 nt, Artificial Sequence
  Synthetic
uucacacauagccuaaaau

SEQ ID NO: 352824 - RNA, 20 nt, Artificial Sequence
  Synthetic
auucacacauagccuaaaau

SEQ ID NO: 352825 - RNA, 21 nt, Artificial Sequence
  Synthetic
uauucacacauagccuaaaau

SEQ ID NO: 352826 - RNA, 22 nt, Artificial Sequence
  Synthetic
auauucacacauagccuaaaau

SEQ ID NO: 352827 - RNA, 23 nt, Artificial Sequence
  Synthetic
gauauucacacauagccuaaaau

SEQ ID NO: 352828 - RNA, 24 nt, Artificial Sequence
  Synthetic
ggauauucacacauagccuaaaau

SEQ ID NO: 352829 - RNA, 18 nt, Artificial Sequence
  Synthetic
gucaguugaugcuaaaau

SEQ ID NO: 352830 - RNA, 19 nt, Artificial Sequence
  Synthetic
ggucaguugaugcuaaaau

SEQ ID NO: 352831 - RNA, 20 nt, Artificial Sequence
  Synthetic
uggucaguugaugcuaaaau

SEQ ID NO: 352832 - RNA, 21 nt, Artificial Sequence
  Synthetic
uuggucaguugaugcuaaaau

SEQ ID NO: 352833 - RNA, 22 nt, Artificial Sequence
  Synthetic
uuuggucaguugaugcuaaaau

SEQ ID NO: 352834 - RNA, 23 nt, Artificial Sequence
  Synthetic
cuuuggucaguugaugcuaaaau

SEQ ID NO: 352835 - RNA, 24 nt, Artificial Sequence
  Synthetic
gcuuuggucaguugaugcuaaaau

SEQ ID NO: 352836 - RNA, 18 nt, Artificial Sequence
  Synthetic
cagcacugaaucuaaaau

SEQ ID NO: 352837 - RNA, 19 nt, Artificial Sequence
  Synthetic
acagcacugaaucuaaaau

SEQ ID NO: 352838 - RNA, 20 nt, Artificial Sequence
  Synthetic
aacagcacugaaucuaaaau

SEQ ID NO: 352839 - RNA, 21 nt, Artificial Sequence
  Synthetic
uaacagcacugaaucuaaaau

SEQ ID NO: 352840 - RNA, 22 nt, Artificial Sequence
  Synthetic
guaacagcacugaaucuaaaau

SEQ ID NO: 352841 - RNA, 23 nt, Artificial Sequence
  Synthetic
aguaacagcacugaaucuaaaau

SEQ ID NO: 352842 - RNA, 24 nt, Artificial Sequence
  Synthetic
uaguaacagcacugaaucuaaaau

SEQ ID NO: 352843 - RNA, 18 nt, Artificial Sequence
  Synthetic
uucacucacaucuaaaau

SEQ ID NO: 352844 - RNA, 19 nt, Artificial Sequence
  Synthetic
cuucacucacaucuaaaau

SEQ ID NO: 352845 - RNA, 20 nt, Artificial Sequence
  Synthetic
ucuucacucacaucuaaaau

SEQ ID NO: 352846 - RNA, 21 nt, Artificial Sequence
  Synthetic
aucuucacucacaucuaaaau

SEQ ID NO: 352847 - RNA, 22 nt, Artificial Sequence
  Synthetic
caucuucacucacaucuaaaau

SEQ ID NO: 352848 - RNA, 23 nt, Artificial Sequence
  Synthetic
acaucuucacucacaucuaaaau

SEQ ID NO: 352849 - RNA, 24 nt, Artificial Sequence
  Synthetic
aacaucuucacucacaucuaaaau

SEQ ID NO: 352850 - RNA, 18 nt, Artificial Sequence
  Synthetic
uuugaaaugcucuaaaau

SEQ ID NO: 352851 - RNA, 19 nt, Artificial Sequence
  Synthetic
auuugaaaugcucuaaaau

SEQ ID NO: 352852 - RNA, 20 nt, Artificial Sequence
  Synthetic
aauuugaaaugcucuaaaau

SEQ ID NO: 352853 - RNA, 21 nt, Artificial Sequence
  Synthetic
aaauuugaaaugcucuaaaau

SEQ ID NO: 352854 - RNA, 22 nt, Artificial Sequence
  Synthetic
gaaauuugaaaugcucuaaaau

SEQ ID NO: 352855 - RNA, 23 nt, Artificial Sequence
  Synthetic
ugaaauuugaaaugcucuaaaau

SEQ ID NO: 352856 - RNA, 24 nt, Artificial Sequence
  Synthetic
cugaaauuugaaaugcucuaaaau

SEQ ID NO: 352857 - RNA, 18 nt, Artificial Sequence
  Synthetic
aaaaaugguaaguaaaau

SEQ ID NO: 352858 - RNA, 19 nt, Artificial Sequence
  Synthetic
gaaaaaugguaaguaaaau

SEQ ID NO: 352859 - RNA, 20 nt, Artificial Sequence
  Synthetic
ugaaaaaugguaaguaaaau

SEQ ID NO: 352860 - RNA, 21 nt, Artificial Sequence
  Synthetic
uugaaaaaugguaaguaaaau

SEQ ID NO: 352861 - RNA, 22 nt, Artificial Sequence
  Synthetic
auugaaaaaugguaaguaaaau

SEQ ID NO: 352862 - RNA, 23 nt, Artificial Sequence
  Synthetic
cauugaaaaaugguaaguaaaau

SEQ ID NO: 352863 - RNA, 24 nt, Artificial Sequence
  Synthetic
ucauugaaaaaugguaaguaaaau

SEQ ID NO: 352864 - RNA, 18 nt, Artificial Sequence
  Synthetic
aaaauuacacaguaaaau

SEQ ID NO: 352865 - RNA, 19 nt, Artificial Sequence
  Synthetic
uaaaauuacacaguaaaau

SEQ ID NO: 352866 - RNA, 20 nt, Artificial Sequence
  Synthetic
auaaaauuacacaguaaaau

SEQ ID NO: 352867 - RNA, 21 nt, Artificial Sequence
  Synthetic
uauaaaauuacacaguaaaau

SEQ ID NO: 352868 - RNA, 22 nt, Artificial Sequence
  Synthetic
cuauaaaauuacacaguaaaau

SEQ ID NO: 352869 - RNA, 23 nt, Artificial Sequence
  Synthetic
gcuauaaaauuacacaguaaaau

SEQ ID NO: 352870 - RNA, 24 nt, Artificial Sequence
  Synthetic
agcuauaaaauuacacaguaaaau

SEQ ID NO: 352871 - RNA, 18 nt, Artificial Sequence
  Synthetic
gaucaucuggaguaaaau

SEQ ID NO: 352872 - RNA, 19 nt, Artificial Sequence
  Synthetic
agaucaucuggaguaaaau

SEQ ID NO: 352873 - RNA, 20 nt, Artificial Sequence
  Synthetic
aagaucaucuggaguaaaau

SEQ ID NO: 352874 - RNA, 21 nt, Artificial Sequence
  Synthetic
gaagaucaucuggaguaaaau

SEQ ID NO: 352875 - RNA, 22 nt, Artificial Sequence
  Synthetic
ugaagaucaucuggaguaaaau

SEQ ID NO: 352876 - RNA, 23 nt, Artificial Sequence
  Synthetic
cugaagaucaucuggaguaaaau

SEQ ID NO: 352877 - RNA, 24 nt, Artificial Sequence
  Synthetic
ucugaagaucaucuggaguaaaau

SEQ ID NO: 352878 - RNA, 18 nt, Artificial Sequence
  Synthetic
uuucuuuacuaguaaaau

SEQ ID NO: 352879 - RNA, 19 nt, Artificial Sequence
  Synthetic
uuuucuuuacuaguaaaau

SEQ ID NO: 352880 - RNA, 20 nt, Artificial Sequence
  Synthetic
auuuucuuuacuaguaaaau

SEQ ID NO: 352881 - RNA, 21 nt, Artificial Sequence
  Synthetic
cauuuucuuuacuaguaaaau

SEQ ID NO: 352882 - RNA, 22 nt, Artificial Sequence
  Synthetic
ucauuuucuuuacuaguaaaau

SEQ ID NO: 352883 - RNA, 23 nt, Artificial Sequence
  Synthetic
uucauuuucuuuacuaguaaaau

SEQ ID NO: 352884 - RNA, 24 nt, Artificial Sequence
  Synthetic
auucauuuucuuuacuaguaaaau

SEQ ID NO: 352885 - RNA, 18 nt, Artificial Sequence
  Synthetic
gaaaaugugagguaaaau

SEQ ID NO: 352886 - RNA, 19 nt, Artificial Sequence
  Synthetic
agaaaaugugagguaaaau

SEQ ID NO: 352887 - RNA, 20 nt, Artificial Sequence
  Synthetic
cagaaaaugugagguaaaau

SEQ ID NO: 352888 - RNA, 21 nt, Artificial Sequence
  Synthetic
gcagaaaaugugagguaaaau

SEQ ID NO: 352889 - RNA, 22 nt, Artificial Sequence
  Synthetic
agcagaaaaugugagguaaaau

SEQ ID NO: 352890 - RNA, 23 nt, Artificial Sequence
  Synthetic
gagcagaaaaugugagguaaaau

SEQ ID NO: 352891 - RNA, 24 nt, Artificial Sequence
  Synthetic
ugagcagaaaaugugagguaaaau

SEQ ID NO: 352892 - RNA, 18 nt, Artificial Sequence
  Synthetic
aaagaagaaggguaaaau

SEQ ID NO: 352893 - RNA, 19 nt, Artificial Sequence
  Synthetic
aaaagaagaaggguaaaau

SEQ ID NO: 352894 - RNA, 20 nt, Artificial Sequence
  Synthetic
aaaaagaagaaggguaaaau

SEQ ID NO: 352895 - RNA, 21 nt, Artificial Sequence
  Synthetic
aaaaaagaagaaggguaaaau

SEQ ID NO: 352896 - RNA, 22 nt, Artificial Sequence
  Synthetic
aaaaaaagaagaaggguaaaau

SEQ ID NO: 352897 - RNA, 23 nt, Artificial Sequence
  Synthetic
aaaaaaaagaagaaggguaaaau

SEQ ID NO: 352898 - RNA, 24 nt, Artificial Sequence
  Synthetic
gaaaaaaaagaagaaggguaaaau

SEQ ID NO: 352899 - RNA, 18 nt, Artificial Sequence
  Synthetic
ccuuuugggauguaaaau

SEQ ID NO: 352900 - RNA, 19 nt, Artificial Sequence
  Synthetic
uccuuuugggauguaaaau

SEQ ID NO: 352901 - RNA, 20 nt, Artificial Sequence
  Synthetic
guccuuuugggauguaaaau

SEQ ID NO: 352902 - RNA, 21 nt, Artificial Sequence
  Synthetic
aguccuuuugggauguaaaau

SEQ ID NO: 352903 - RNA, 22 nt, Artificial Sequence
  Synthetic
caguccuuuugggauguaaaau

SEQ ID NO: 352904 - RNA, 23 nt, Artificial Sequence
  Synthetic
acaguccuuuugggauguaaaau

SEQ ID NO: 352905 - RNA, 24 nt, Artificial Sequence
  Synthetic
cacaguccuuuugggauguaaaau

SEQ ID NO: 352906 - RNA, 18 nt, Artificial Sequence
  Synthetic
uuucgucaacuguaaaau

SEQ ID NO: 352907 - RNA, 19 nt, Artificial Sequence
  Synthetic
auuucgucaacuguaaaau

SEQ ID NO: 352908 - RNA, 20 nt, Artificial Sequence
  Synthetic
uauuucgucaacuguaaaau

SEQ ID NO: 352909 - RNA, 21 nt, Artificial Sequence
  Synthetic
cuauuucgucaacuguaaaau

SEQ ID NO: 352910 - RNA, 22 nt, Artificial Sequence
  Synthetic
ucuauuucgucaacuguaaaau

SEQ ID NO: 352911 - RNA, 23 nt, Artificial Sequence
  Synthetic
uucuauuucgucaacuguaaaau

SEQ ID NO: 352912 - RNA, 24 nt, Artificial Sequence
  Synthetic
cuucuauuucgucaacuguaaaau

SEQ ID NO: 352913 - RNA, 18 nt, Artificial Sequence
  Synthetic
ugcccucgccuguaaaau

SEQ ID NO: 352914 - RNA, 19 nt, Artificial Sequence
  Synthetic
gugcccucgccuguaaaau

SEQ ID NO: 352915 - RNA, 20 nt, Artificial Sequence
  Synthetic
ugugcccucgccuguaaaau

SEQ ID NO: 352916 - RNA, 21 nt, Artificial Sequence
  Synthetic
uugugcccucgccuguaaaau

SEQ ID NO: 352917 - RNA, 22 nt, Artificial Sequence
  Synthetic
uuugugcccucgccuguaaaau

SEQ ID NO: 352918 - RNA, 23 nt, Artificial Sequence
  Synthetic
cuuugugcccucgccuguaaaau

SEQ ID NO: 352919 - RNA, 24 nt, Artificial Sequence
  Synthetic
ucuuugugcccucgccuguaaaau

SEQ ID NO: 352920 - RNA, 18 nt, Artificial Sequence
  Synthetic
uugucucaucuguaaaau

SEQ ID NO: 352921 - RNA, 19 nt, Artificial Sequence
  Synthetic
guugucucaucuguaaaau

SEQ ID NO: 352922 - RNA, 20 nt, Artificial Sequence
  Synthetic
gguugucucaucuguaaaau

SEQ ID NO: 352923 - RNA, 21 nt, Artificial Sequence
  Synthetic
ugguugucucaucuguaaaau

SEQ ID NO: 352924 - RNA, 22 nt, Artificial Sequence
  Synthetic
uugguugucucaucuguaaaau

SEQ ID NO: 352925 - RNA, 23 nt, Artificial Sequence
  Synthetic
cuugguugucucaucuguaaaau

SEQ ID NO: 352926 - RNA, 24 nt, Artificial Sequence
  Synthetic
ucuugguugucucaucuguaaaau

SEQ ID NO: 352927 - RNA, 18 nt, Artificial Sequence
  Synthetic
auguaaaugaauuaaaau

SEQ ID NO: 352928 - RNA, 19 nt, Artificial Sequence
  Synthetic
uauguaaaugaauuaaaau

SEQ ID NO: 352929 - RNA, 20 nt, Artificial Sequence
  Synthetic
guauguaaaugaauuaaaau

SEQ ID NO: 352930 - RNA, 21 nt, Artificial Sequence
  Synthetic
aguauguaaaugaauuaaaau

SEQ ID NO: 352931 - RNA, 22 nt, Artificial Sequence
  Synthetic
aaguauguaaaugaauuaaaau

SEQ ID NO: 352932 - RNA, 23 nt, Artificial Sequence
  Synthetic
uaaguauguaaaugaauuaaaau

SEQ ID NO: 352933 - RNA, 24 nt, Artificial Sequence
  Synthetic
auaaguauguaaaugaauuaaaau

SEQ ID NO: 352934 - RNA, 18 nt, Artificial Sequence
  Synthetic
uuuggugcuaauuaaaau

SEQ ID NO: 352935 - RNA, 19 nt, Artificial Sequence
  Synthetic
auuuggugcuaauuaaaau

SEQ ID NO: 352936 - RNA, 20 nt, Artificial Sequence
  Synthetic
aauuuggugcuaauuaaaau

SEQ ID NO: 352937 - RNA, 21 nt, Artificial Sequence
  Synthetic
caauuuggugcuaauuaaaau

SEQ ID NO: 352938 - RNA, 22 nt, Artificial Sequence
  Synthetic
acaauuuggugcuaauuaaaau

SEQ ID NO: 352939 - RNA, 23 nt, Artificial Sequence
  Synthetic
uacaauuuggugcuaauuaaaau

SEQ ID NO: 352940 - RNA, 24 nt, Artificial Sequence
  Synthetic
cuacaauuuggugcuaauuaaaau

SEQ ID NO: 352941 - RNA, 18 nt, Artificial Sequence
  Synthetic
aacaggagccauuaaaau

SEQ ID NO: 352942 - RNA, 19 nt, Artificial Sequence
  Synthetic
uaacaggagccauuaaaau

SEQ ID NO: 352943 - RNA, 20 nt, Artificial Sequence
  Synthetic
uuaacaggagccauuaaaau

SEQ ID NO: 352944 - RNA, 21 nt, Artificial Sequence
  Synthetic
guuaacaggagccauuaaaau

SEQ ID NO: 352945 - RNA, 22 nt, Artificial Sequence
  Synthetic
gguuaacaggagccauuaaaau

SEQ ID NO: 352946 - RNA, 23 nt, Artificial Sequence
  Synthetic
ugguuaacaggagccauuaaaau

SEQ ID NO: 352947 - RNA, 24 nt, Artificial Sequence
  Synthetic
uugguuaacaggagccauuaaaau

SEQ ID NO: 352948 - RNA, 18 nt, Artificial Sequence
  Synthetic
auuuucaaagauuaaaau

SEQ ID NO: 352949 - RNA, 19 nt, Artificial Sequence
  Synthetic
uauuuucaaagauuaaaau

SEQ ID NO: 352950 - RNA, 20 nt, Artificial Sequence
  Synthetic
cuauuuucaaagauuaaaau

SEQ ID NO: 352951 - RNA, 21 nt, Artificial Sequence
  Synthetic
gcuauuuucaaagauuaaaau

SEQ ID NO: 352952 - RNA, 22 nt, Artificial Sequence
  Synthetic
ggcuauuuucaaagauuaaaau

SEQ ID NO: 352953 - RNA, 23 nt, Artificial Sequence
  Synthetic
aggcuauuuucaaagauuaaaau

SEQ ID NO: 352954 - RNA, 24 nt, Artificial Sequence
  Synthetic
uaggcuauuuucaaagauuaaaau

SEQ ID NO: 352955 - RNA, 18 nt, Artificial Sequence
  Synthetic
agagacucagauuaaaau

SEQ ID NO: 352956 - RNA, 19 nt, Artificial Sequence
  Synthetic
cagagacucagauuaaaau

SEQ ID NO: 352957 - RNA, 20 nt, Artificial Sequence
  Synthetic
ccagagacucagauuaaaau

SEQ ID NO: 352958 - RNA, 21 nt, Artificial Sequence
  Synthetic
cccagagacucagauuaaaau

SEQ ID NO: 352959 - RNA, 22 nt, Artificial Sequence
  Synthetic
ccccagagacucagauuaaaau

SEQ ID NO: 352960 - RNA, 23 nt, Artificial Sequence
  Synthetic
uccccagagacucagauuaaaau

SEQ ID NO: 352961 - RNA, 24 nt, Artificial Sequence
  Synthetic
cuccccagagacucagauuaaaau

SEQ ID NO: 352962 - RNA, 18 nt, Artificial Sequence
  Synthetic
uguuacuaauauuaaaau

SEQ ID NO: 352963 - RNA, 19 nt, Artificial Sequence
  Synthetic
uuguuacuaauauuaaaau

SEQ ID NO: 352964 - RNA, 20 nt, Artificial Sequence
  Synthetic
auuguuacuaauauuaaaau

SEQ ID NO: 352965 - RNA, 21 nt, Artificial Sequence
  Synthetic
aauuguuacuaauauuaaaau

SEQ ID NO: 352966 - RNA, 22 nt, Artificial Sequence
  Synthetic
gaauuguuacuaauauuaaaau

SEQ ID NO: 352967 - RNA, 23 nt, Artificial Sequence
  Synthetic
agaauuguuacuaauauuaaaau

SEQ ID NO: 352968 - RNA, 24 nt, Artificial Sequence
  Synthetic
uagaauuguuacuaauauuaaaau

SEQ ID NO: 352969 - RNA, 18 nt, Artificial Sequence
  Synthetic
uucuaugcauauuaaaau

SEQ ID NO: 352970 - RNA, 19 nt, Artificial Sequence
  Synthetic
uuucuaugcauauuaaaau

SEQ ID NO: 352971 - RNA, 20 nt, Artificial Sequence
  Synthetic
auuucuaugcauauuaaaau

SEQ ID NO: 352972 - RNA, 21 nt, Artificial Sequence
  Synthetic
uauuucuaugcauauuaaaau

SEQ ID NO: 352973 - RNA, 22 nt, Artificial Sequence
  Synthetic
uuauuucuaugcauauuaaaau

SEQ ID NO: 352974 - RNA, 23 nt, Artificial Sequence
  Synthetic
guuauuucuaugcauauuaaaau

SEQ ID NO: 352975 - RNA, 24 nt, Artificial Sequence
  Synthetic
aguuauuucuaugcauauuaaaau

SEQ ID NO: 352976 - RNA, 18 nt, Artificial Sequence
  Synthetic
ucucagcuauauuaaaau

SEQ ID NO: 352977 - RNA, 19 nt, Artificial Sequence
  Synthetic
uucucagcuauauuaaaau

SEQ ID NO: 352978 - RNA, 20 nt, Artificial Sequence
  Synthetic
cuucucagcuauauuaaaau

SEQ ID NO: 352979 - RNA, 21 nt, Artificial Sequence
  Synthetic
acuucucagcuauauuaaaau

SEQ ID NO: 352980 - RNA, 22 nt, Artificial Sequence
  Synthetic
uacuucucagcuauauuaaaau

SEQ ID NO: 352981 - RNA, 23 nt, Artificial Sequence
  Synthetic
uuacuucucagcuauauuaaaau

SEQ ID NO: 352982 - RNA, 24 nt, Artificial Sequence
  Synthetic
cuuacuucucagcuauauuaaaau

SEQ ID NO: 352983 - RNA, 18 nt, Artificial Sequence
  Synthetic
caaacuuuuuauuaaaau

SEQ ID NO: 352984 - RNA, 19 nt, Artificial Sequence
  Synthetic
ccaaacuuuuuauuaaaau

SEQ ID NO: 352985 - RNA, 20 nt, Artificial Sequence
  Synthetic
uccaaacuuuuuauuaaaau

SEQ ID NO: 352986 - RNA, 21 nt, Artificial Sequence
  Synthetic
uuccaaacuuuuuauuaaaau

SEQ ID NO: 352987 - RNA, 22 nt, Artificial Sequence
  Synthetic
uuuccaaacuuuuuauuaaaau

SEQ ID NO: 352988 - RNA, 23 nt, Artificial Sequence
  Synthetic
cuuuccaaacuuuuuauuaaaau

SEQ ID NO: 352989 - RNA, 24 nt, Artificial Sequence
  Synthetic
gcuuuccaaacuuuuuauuaaaau

SEQ ID NO: 352990 - RNA, 18 nt, Artificial Sequence
  Synthetic
aauuauaaaacuuaaaau

SEQ ID NO: 352991 - RNA, 19 nt, Artificial Sequence
  Synthetic
uaauuauaaaacuuaaaau

SEQ ID NO: 352992 - RNA, 20 nt, Artificial Sequence
  Synthetic
guaauuauaaaacuuaaaau

SEQ ID NO: 352993 - RNA, 21 nt, Artificial Sequence
  Synthetic
aguaauuauaaaacuuaaaau

SEQ ID NO: 352994 - RNA, 22 nt, Artificial Sequence
  Synthetic
aaguaauuauaaaacuuaaaau

SEQ ID NO: 352995 - RNA, 23 nt, Artificial Sequence
  Synthetic
uaaguaauuauaaaacuuaaaau

SEQ ID NO: 352996 - RNA, 24 nt, Artificial Sequence
  Synthetic
guaaguaauuauaaaacuuaaaau

SEQ ID NO: 352997 - RNA, 18 nt, Artificial Sequence
  Synthetic
cacuguucuacuuaaaau

SEQ ID NO: 352998 - RNA, 19 nt, Artificial Sequence
  Synthetic
ucacuguucuacuuaaaau

SEQ ID NO: 352999 - RNA, 20 nt, Artificial Sequence
  Synthetic
aucacuguucuacuuaaaau

SEQ ID NO: 353000 - RNA, 21 nt, Artificial Sequence
  Synthetic
uaucacuguucuacuuaaaau

SEQ ID NO: 353001 - RNA, 22 nt, Artificial Sequence
  Synthetic
uuaucacuguucuacuuaaaau

SEQ ID NO: 353002 - RNA, 23 nt, Artificial Sequence
  Synthetic
uuuaucacuguucuacuuaaaau

SEQ ID NO: 353003 - RNA, 24 nt, Artificial Sequence
  Synthetic
cuuuaucacuguucuacuuaaaau

SEQ ID NO: 353004 - RNA, 18 nt, Artificial Sequence
  Synthetic
uguuauaacucuuaaaau

SEQ ID NO: 353005 - RNA, 19 nt, Artificial Sequence
  Synthetic
cuguuauaacucuuaaaau

SEQ ID NO: 353006 - RNA, 20 nt, Artificial Sequence
  Synthetic
acuguuauaacucuuaaaau

SEQ ID NO: 353007 - RNA, 21 nt, Artificial Sequence
  Synthetic
cacuguuauaacucuuaaaau

SEQ ID NO: 353008 - RNA, 22 nt, Artificial Sequence
  Synthetic
acacuguuauaacucuuaaaau

SEQ ID NO: 353009 - RNA, 23 nt, Artificial Sequence
  Synthetic
aacacuguuauaacucuuaaaau

SEQ ID NO: 353010 - RNA, 24 nt, Artificial Sequence
  Synthetic
caacacuguuauaacucuuaaaau

SEQ ID NO: 353011 - RNA, 18 nt, Artificial Sequence
  Synthetic
aaauccaggucuuaaaau

SEQ ID NO: 353012 - RNA, 19 nt, Artificial Sequence
  Synthetic
caaauccaggucuuaaaau

SEQ ID NO: 353013 - RNA, 20 nt, Artificial Sequence
  Synthetic
acaaauccaggucuuaaaau

SEQ ID NO: 353014 - RNA, 21 nt, Artificial Sequence
  Synthetic
gacaaauccaggucuuaaaau

SEQ ID NO: 353015 - RNA, 22 nt, Artificial Sequence
  Synthetic
ggacaaauccaggucuuaaaau

SEQ ID NO: 353016 - RNA, 23 nt, Artificial Sequence
  Synthetic
uggacaaauccaggucuuaaaau

SEQ ID NO: 353017 - RNA, 24 nt, Artificial Sequence
  Synthetic
uuggacaaauccaggucuuaaaau

SEQ ID NO: 353018 - RNA, 18 nt, Artificial Sequence
  Synthetic
aucaagaacaguuaaaau

SEQ ID NO: 353019 - RNA, 19 nt, Artificial Sequence
  Synthetic
aaucaagaacaguuaaaau

SEQ ID NO: 353020 - RNA, 20 nt, Artificial Sequence
  Synthetic
aaaucaagaacaguuaaaau

SEQ ID NO: 353021 - RNA, 21 nt, Artificial Sequence
  Synthetic
uaaaucaagaacaguuaaaau

SEQ ID NO: 353022 - RNA, 22 nt, Artificial Sequence
  Synthetic
auaaaucaagaacaguuaaaau

SEQ ID NO: 353023 - RNA, 23 nt, Artificial Sequence
  Synthetic
uauaaaucaagaacaguuaaaau

SEQ ID NO: 353024 - RNA, 24 nt, Artificial Sequence
  Synthetic
auauaaaucaagaacaguuaaaau

SEQ ID NO: 353025 - RNA, 18 nt, Artificial Sequence
  Synthetic
ugaauggcagguuaaaau

SEQ ID NO: 353026 - RNA, 19 nt, Artificial Sequence
  Synthetic
gugaauggcagguuaaaau

SEQ ID NO: 353027 - RNA, 20 nt, Artificial Sequence
  Synthetic
agugaauggcagguuaaaau

SEQ ID NO: 353028 - RNA, 21 nt, Artificial Sequence
  Synthetic
aagugaauggcagguuaaaau

SEQ ID NO: 353029 - RNA, 22 nt, Artificial Sequence
  Synthetic
caagugaauggcagguuaaaau

SEQ ID NO: 353030 - RNA, 23 nt, Artificial Sequence
  Synthetic
ccaagugaauggcagguuaaaau

SEQ ID NO: 353031 - RNA, 24 nt, Artificial Sequence
  Synthetic
cccaagugaauggcagguuaaaau

SEQ ID NO: 353032 - RNA, 18 nt, Artificial Sequence
  Synthetic
uugaaaauagguuaaaau

SEQ ID NO: 353033 - RNA, 19 nt, Artificial Sequence
  Synthetic
cuugaaaauagguuaaaau

SEQ ID NO: 353034 - RNA, 20 nt, Artificial Sequence
  Synthetic
ccuugaaaauagguuaaaau

SEQ ID NO: 353035 - RNA, 21 nt, Artificial Sequence
  Synthetic
accuugaaaauagguuaaaau

SEQ ID NO: 353036 - RNA, 22 nt, Artificial Sequence
  Synthetic
aaccuugaaaauagguuaaaau

SEQ ID NO: 353037 - RNA, 23 nt, Artificial Sequence
  Synthetic
uaaccuugaaaauagguuaaaau

SEQ ID NO: 353038 - RNA, 24 nt, Artificial Sequence
  Synthetic
uuaaccuugaaaauagguuaaaau

SEQ ID NO: 353039 - RNA, 18 nt, Artificial Sequence
  Synthetic
uggacugugauuuaaaau

SEQ ID NO: 353040 - RNA, 19 nt, Artificial Sequence
  Synthetic
guggacugugauuuaaaau

SEQ ID NO: 353041 - RNA, 20 nt, Artificial Sequence
  Synthetic
uguggacugugauuuaaaau

SEQ ID NO: 353042 - RNA, 21 nt, Artificial Sequence
  Synthetic
cuguggacugugauuuaaaau

SEQ ID NO: 353043 - RNA, 22 nt, Artificial Sequence
  Synthetic
acuguggacugugauuuaaaau

SEQ ID NO: 353044 - RNA, 23 nt, Artificial Sequence
  Synthetic
aacuguggacugugauuuaaaau

SEQ ID NO: 353045 - RNA, 24 nt, Artificial Sequence
  Synthetic
gaacuguggacugugauuuaaaau

SEQ ID NO: 353046 - RNA, 18 nt, Artificial Sequence
  Synthetic
caucaagcuauuuaaaau

SEQ ID NO: 353047 - RNA, 19 nt, Artificial Sequence
  Synthetic
ucaucaagcuauuuaaaau

SEQ ID NO: 353048 - RNA, 20 nt, Artificial Sequence
  Synthetic
cucaucaagcuauuuaaaau

SEQ ID NO: 353049 - RNA, 21 nt, Artificial Sequence
  Synthetic
ccucaucaagcuauuuaaaau

SEQ ID NO: 353050 - RNA, 22 nt, Artificial Sequence
  Synthetic
gccucaucaagcuauuuaaaau

SEQ ID NO: 353051 - RNA, 23 nt, Artificial Sequence
  Synthetic
agccucaucaagcuauuuaaaau

SEQ ID NO: 353052 - RNA, 24 nt, Artificial Sequence
  Synthetic
uagccucaucaagcuauuuaaaau

SEQ ID NO: 353053 - RNA, 18 nt, Artificial Sequence
  Synthetic
cuaaaaaaacuuuaaaau

SEQ ID NO: 353054 - RNA, 19 nt, Artificial Sequence
  Synthetic
gcuaaaaaaacuuuaaaau

SEQ ID NO: 353055 - RNA, 20 nt, Artificial Sequence
  Synthetic
agcuaaaaaaacuuuaaaau

SEQ ID NO: 353056 - RNA, 21 nt, Artificial Sequence
  Synthetic
aagcuaaaaaaacuuuaaaau

SEQ ID NO: 353057 - RNA, 22 nt, Artificial Sequence
  Synthetic
aaagcuaaaaaaacuuuaaaau

SEQ ID NO: 353058 - RNA, 23 nt, Artificial Sequence
  Synthetic
uaaagcuaaaaaaacuuuaaaau

SEQ ID NO: 353059 - RNA, 24 nt, Artificial Sequence
  Synthetic
cuaaagcuaaaaaaacuuuaaaau

SEQ ID NO: 353060 - RNA, 18 nt, Artificial Sequence
  Synthetic
cuugaucaccaaacaaau

SEQ ID NO: 353061 - RNA, 19 nt, Artificial Sequence
  Synthetic
ucuugaucaccaaacaaau

SEQ ID NO: 353062 - RNA, 20 nt, Artificial Sequence
  Synthetic
cucuugaucaccaaacaaau

SEQ ID NO: 353063 - RNA, 21 nt, Artificial Sequence
  Synthetic
gcucuugaucaccaaacaaau

SEQ ID NO: 353064 - RNA, 22 nt, Artificial Sequence
  Synthetic
agcucuugaucaccaaacaaau

SEQ ID NO: 353065 - RNA, 23 nt, Artificial Sequence
  Synthetic
uagcucuugaucaccaaacaaau

SEQ ID NO: 353066 - RNA, 24 nt, Artificial Sequence
  Synthetic
guagcucuugaucaccaaacaaau

SEQ ID NO: 353067 - RNA, 18 nt, Artificial Sequence
  Synthetic
uagcucucccaaacaaau

SEQ ID NO: 353068 - RNA, 19 nt, Artificial Sequence
  Synthetic
guagcucucccaaacaaau

SEQ ID NO: 353069 - RNA, 20 nt, Artificial Sequence
  Synthetic
cguagcucucccaaacaaau

SEQ ID NO: 353070 - RNA, 21 nt, Artificial Sequence
  Synthetic
acguagcucucccaaacaaau

SEQ ID NO: 353071 - RNA, 22 nt, Artificial Sequence
  Synthetic
aacguagcucucccaaacaaau

SEQ ID NO: 353072 - RNA, 23 nt, Artificial Sequence
  Synthetic
aaacguagcucucccaaacaaau

SEQ ID NO: 353073 - RNA, 24 nt, Artificial Sequence
  Synthetic
aaaacguagcucucccaaacaaau

SEQ ID NO: 353074 - RNA, 18 nt, Artificial Sequence
  Synthetic
guaaaugcagaaacaaau

SEQ ID NO: 353075 - RNA, 19 nt, Artificial Sequence
  Synthetic
gguaaaugcagaaacaaau

SEQ ID NO: 353076 - RNA, 20 nt, Artificial Sequence
  Synthetic
ggguaaaugcagaaacaaau

SEQ ID NO: 353077 - RNA, 21 nt, Artificial Sequence
  Synthetic
cggguaaaugcagaaacaaau

SEQ ID NO: 353078 - RNA, 22 nt, Artificial Sequence
  Synthetic
ccggguaaaugcagaaacaaau

SEQ ID NO: 353079 - RNA, 23 nt, Artificial Sequence
  Synthetic
gccggguaaaugcagaaacaaau

SEQ ID NO: 353080 - RNA, 24 nt, Artificial Sequence
  Synthetic
agccggguaaaugcagaaacaaau

SEQ ID NO: 353081 - RNA, 18 nt, Artificial Sequence
  Synthetic
guaauucaauaaacaaau

SEQ ID NO: 353082 - RNA, 19 nt, Artificial Sequence
  Synthetic
cguaauucaauaaacaaau

SEQ ID NO: 353083 - RNA, 20 nt, Artificial Sequence
  Synthetic
gcguaauucaauaaacaaau

SEQ ID NO: 353084 - RNA, 21 nt, Artificial Sequence
  Synthetic
ggcguaauucaauaaacaaau

SEQ ID NO: 353085 - RNA, 22 nt, Artificial Sequence
  Synthetic
uggcguaauucaauaaacaaau

SEQ ID NO: 353086 - RNA, 23 nt, Artificial Sequence
  Synthetic
auggcguaauucaauaaacaaau

SEQ ID NO: 353087 - RNA, 24 nt, Artificial Sequence
  Synthetic
uauggcguaauucaauaaacaaau

SEQ ID NO: 353088 - RNA, 18 nt, Artificial Sequence
  Synthetic
uucccuuauucaacaaau

SEQ ID NO: 353089 - RNA, 19 nt, Artificial Sequence
  Synthetic
uuucccuuauucaacaaau

SEQ ID NO: 353090 - RNA, 20 nt, Artificial Sequence
  Synthetic
guuucccuuauucaacaaau

SEQ ID NO: 353091 - RNA, 21 nt, Artificial Sequence
  Synthetic
aguuucccuuauucaacaaau

SEQ ID NO: 353092 - RNA, 22 nt, Artificial Sequence
  Synthetic
uaguuucccuuauucaacaaau

SEQ ID NO: 353093 - RNA, 23 nt, Artificial Sequence
  Synthetic
auaguuucccuuauucaacaaau

SEQ ID NO: 353094 - RNA, 24 nt, Artificial Sequence
  Synthetic
aauaguuucccuuauucaacaaau

SEQ ID NO: 353095 - RNA, 18 nt, Artificial Sequence
  Synthetic
cgacaggguagaacaaau

SEQ ID NO: 353096 - RNA, 19 nt, Artificial Sequence
  Synthetic
acgacaggguagaacaaau

SEQ ID NO: 353097 - RNA, 20 nt, Artificial Sequence
  Synthetic
gacgacaggguagaacaaau

SEQ ID NO: 353098 - RNA, 21 nt, Artificial Sequence
  Synthetic
ugacgacaggguagaacaaau

SEQ ID NO: 353099 - RNA, 22 nt, Artificial Sequence
  Synthetic
gugacgacaggguagaacaaau

SEQ ID NO: 353100 - RNA, 23 nt, Artificial Sequence
  Synthetic
agugacgacaggguagaacaaau

SEQ ID NO: 353101 - RNA, 24 nt, Artificial Sequence
  Synthetic
uagugacgacaggguagaacaaau

SEQ ID NO: 353102 - RNA, 18 nt, Artificial Sequence
  Synthetic
acucuugaaggaacaaau

SEQ ID NO: 353103 - RNA, 19 nt, Artificial Sequence
  Synthetic
cacucuugaaggaacaaau

SEQ ID NO: 353104 - RNA, 20 nt, Artificial Sequence
  Synthetic
acacucuugaaggaacaaau

SEQ ID NO: 353105 - RNA, 21 nt, Artificial Sequence
  Synthetic
gacacucuugaaggaacaaau

SEQ ID NO: 353106 - RNA, 22 nt, Artificial Sequence
  Synthetic
ggacacucuugaaggaacaaau

SEQ ID NO: 353107 - RNA, 23 nt, Artificial Sequence
  Synthetic
uggacacucuugaaggaacaaau

SEQ ID NO: 353108 - RNA, 24 nt, Artificial Sequence
  Synthetic
uuggacacucuugaaggaacaaau

SEQ ID NO: 353109 - RNA, 18 nt, Artificial Sequence
  Synthetic
augauaaacaacacaaau

SEQ ID NO: 353110 - RNA, 19 nt, Artificial Sequence
  Synthetic
caugauaaacaacacaaau

SEQ ID NO: 353111 - RNA, 20 nt, Artificial Sequence
  Synthetic
acaugauaaacaacacaaau

SEQ ID NO: 353112 - RNA, 21 nt, Artificial Sequence
  Synthetic
aacaugauaaacaacacaaau

SEQ ID NO: 353113 - RNA, 22 nt, Artificial Sequence
  Synthetic
caacaugauaaacaacacaaau

SEQ ID NO: 353114 - RNA, 23 nt, Artificial Sequence
  Synthetic
gcaacaugauaaacaacacaaau

SEQ ID NO: 353115 - RNA, 24 nt, Artificial Sequence
  Synthetic
ugcaacaugauaaacaacacaaau

SEQ ID NO: 353116 - RNA, 18 nt, Artificial Sequence
  Synthetic
aucuccucuaccacaaau

SEQ ID NO: 353117 - RNA, 19 nt, Artificial Sequence
  Synthetic
aaucuccucuaccacaaau

SEQ ID NO: 353118 - RNA, 20 nt, Artificial Sequence
  Synthetic
aaaucuccucuaccacaaau

SEQ ID NO: 353119 - RNA, 21 nt, Artificial Sequence
  Synthetic
uaaaucuccucuaccacaaau

SEQ ID NO: 353120 - RNA, 22 nt, Artificial Sequence
  Synthetic
guaaaucuccucuaccacaaau

SEQ ID NO: 353121 - RNA, 23 nt, Artificial Sequence
  Synthetic
uguaaaucuccucuaccacaaau

SEQ ID NO: 353122 - RNA, 24 nt, Artificial Sequence
  Synthetic
uuguaaaucuccucuaccacaaau

SEQ ID NO: 353123 - RNA, 18 nt, Artificial Sequence
  Synthetic
cugguuaaauccacaaau

SEQ ID NO: 353124 - RNA, 19 nt, Artificial Sequence
  Synthetic
acugguuaaauccacaaau

SEQ ID NO: 353125 - RNA, 20 nt, Artificial Sequence
  Synthetic
gacugguuaaauccacaaau

SEQ ID NO: 353126 - RNA, 21 nt, Artificial Sequence
  Synthetic
ugacugguuaaauccacaaau

SEQ ID NO: 353127 - RNA, 22 nt, Artificial Sequence
  Synthetic
augacugguuaaauccacaaau

SEQ ID NO: 353128 - RNA, 23 nt, Artificial Sequence
  Synthetic
gaugacugguuaaauccacaaau

SEQ ID NO: 353129 - RNA, 24 nt, Artificial Sequence
  Synthetic
cgaugacugguuaaauccacaaau

SEQ ID NO: 353130 - RNA, 18 nt, Artificial Sequence
  Synthetic
aaugagagcaucacaaau

SEQ ID NO: 353131 - RNA, 19 nt, Artificial Sequence
  Synthetic
aaaugagagcaucacaaau

SEQ ID NO: 353132 - RNA, 20 nt, Artificial Sequence
  Synthetic
aaaaugagagcaucacaaau

SEQ ID NO: 353133 - RNA, 21 nt, Artificial Sequence
  Synthetic
uaaaaugagagcaucacaaau

SEQ ID NO: 353134 - RNA, 22 nt, Artificial Sequence
  Synthetic
cuaaaaugagagcaucacaaau

SEQ ID NO: 353135 - RNA, 23 nt, Artificial Sequence
  Synthetic
acuaaaaugagagcaucacaaau

SEQ ID NO: 353136 - RNA, 24 nt, Artificial Sequence
  Synthetic
aacuaaaaugagagcaucacaaau

SEQ ID NO: 353137 - RNA, 18 nt, Artificial Sequence
  Synthetic
cuguaaacuaucacaaau

SEQ ID NO: 353138 - RNA, 19 nt, Artificial Sequence
  Synthetic
acuguaaacuaucacaaau

SEQ ID NO: 353139 - RNA, 20 nt, Artificial Sequence
  Synthetic
cacuguaaacuaucacaaau

SEQ ID NO: 353140 - RNA, 21 nt, Artificial Sequence
  Synthetic
ccacuguaaacuaucacaaau

SEQ ID NO: 353141 - RNA, 22 nt, Artificial Sequence
  Synthetic
accacuguaaacuaucacaaau

SEQ ID NO: 353142 - RNA, 23 nt, Artificial Sequence
  Synthetic
uaccacuguaaacuaucacaaau

SEQ ID NO: 353143 - RNA, 24 nt, Artificial Sequence
  Synthetic
guaccacuguaaacuaucacaaau

SEQ ID NO: 353144 - RNA, 18 nt, Artificial Sequence
  Synthetic
ugcuuacugcucacaaau

SEQ ID NO: 353145 - RNA, 19 nt, Artificial Sequence
  Synthetic
augcuuacugcucacaaau

SEQ ID NO: 353146 - RNA, 20 nt, Artificial Sequence
  Synthetic
caugcuuacugcucacaaau

SEQ ID NO: 353147 - RNA, 21 nt, Artificial Sequence
  Synthetic
acaugcuuacugcucacaaau

SEQ ID NO: 353148 - RNA, 22 nt, Artificial Sequence
  Synthetic
cacaugcuuacugcucacaaau

SEQ ID NO: 353149 - RNA, 23 nt, Artificial Sequence
  Synthetic
acacaugcuuacugcucacaaau

SEQ ID NO: 353150 - RNA, 24 nt, Artificial Sequence
  Synthetic
aacacaugcuuacugcucacaaau

SEQ ID NO: 353151 - RNA, 18 nt, Artificial Sequence
  Synthetic
auuuauucucucacaaau

SEQ ID NO: 353152 - RNA, 19 nt, Artificial Sequence
  Synthetic
cauuuauucucucacaaau

SEQ ID NO: 353153 - RNA, 20 nt, Artificial Sequence
  Synthetic
acauuuauucucucacaaau

SEQ ID NO: 353154 - RNA, 21 nt, Artificial Sequence
  Synthetic
gacauuuauucucucacaaau

SEQ ID NO: 353155 - RNA, 22 nt, Artificial Sequence
  Synthetic
agacauuuauucucucacaaau

SEQ ID NO: 353156 - RNA, 23 nt, Artificial Sequence
  Synthetic
uagacauuuauucucucacaaau

SEQ ID NO: 353157 - RNA, 24 nt, Artificial Sequence
  Synthetic
auagacauuuauucucucacaaau

SEQ ID NO: 353158 - RNA, 18 nt, Artificial Sequence
  Synthetic
uuuuuuaaugucacaaau

SEQ ID NO: 353159 - RNA, 19 nt, Artificial Sequence
  Synthetic
uuuuuuuaaugucacaaau

SEQ ID NO: 353160 - RNA, 20 nt, Artificial Sequence
  Synthetic
auuuuuuuaaugucacaaau

SEQ ID NO: 353161 - RNA, 21 nt, Artificial Sequence
  Synthetic
uauuuuuuuaaugucacaaau

SEQ ID NO: 353162 - RNA, 22 nt, Artificial Sequence
  Synthetic
cuauuuuuuuaaugucacaaau

SEQ ID NO: 353163 - RNA, 23 nt, Artificial Sequence
  Synthetic
gcuauuuuuuuaaugucacaaau

SEQ ID NO: 353164 - RNA, 24 nt, Artificial Sequence
  Synthetic
ugcuauuuuuuuaaugucacaaau

SEQ ID NO: 353165 - RNA, 18 nt, Artificial Sequence
  Synthetic
uuuuucguugucacaaau

SEQ ID NO: 353166 - RNA, 19 nt, Artificial Sequence
  Synthetic
cuuuuucguugucacaaau

SEQ ID NO: 353167 - RNA, 20 nt, Artificial Sequence
  Synthetic
ccuuuuucguugucacaaau

SEQ ID NO: 353168 - RNA, 21 nt, Artificial Sequence
  Synthetic
accuuuuucguugucacaaau

SEQ ID NO: 353169 - RNA, 22 nt, Artificial Sequence
  Synthetic
gaccuuuuucguugucacaaau

SEQ ID NO: 353170 - RNA, 23 nt, Artificial Sequence
  Synthetic
agaccuuuuucguugucacaaau

SEQ ID NO: 353171 - RNA, 24 nt, Artificial Sequence
  Synthetic
gagaccuuuuucguugucacaaau

SEQ ID NO: 353172 - RNA, 18 nt, Artificial Sequence
  Synthetic
uucuaaucauucacaaau

SEQ ID NO: 353173 - RNA, 19 nt, Artificial Sequence
  Synthetic
uuucuaaucauucacaaau

SEQ ID NO: 353174 - RNA, 20 nt, Artificial Sequence
  Synthetic
auuucuaaucauucacaaau

SEQ ID NO: 353175 - RNA, 21 nt, Artificial Sequence
  Synthetic
uauuucuaaucauucacaaau

SEQ ID NO: 353176 - RNA, 22 nt, Artificial Sequence
  Synthetic
guauuucuaaucauucacaaau

SEQ ID NO: 353177 - RNA, 23 nt, Artificial Sequence
  Synthetic
uguauuucuaaucauucacaaau

SEQ ID NO: 353178 - RNA, 24 nt, Artificial Sequence
  Synthetic
auguauuucuaaucauucacaaau

SEQ ID NO: 353179 - RNA, 18 nt, Artificial Sequence
  Synthetic
uaugccuauuucacaaau

SEQ ID NO: 353180 - RNA, 19 nt, Artificial Sequence
  Synthetic
uuaugccuauuucacaaau

SEQ ID NO: 353181 - RNA, 20 nt, Artificial Sequence
  Synthetic
auuaugccuauuucacaaau

SEQ ID NO: 353182 - RNA, 21 nt, Artificial Sequence
  Synthetic
uauuaugccuauuucacaaau

SEQ ID NO: 353183 - RNA, 22 nt, Artificial Sequence
  Synthetic
auauuaugccuauuucacaaau

SEQ ID NO: 353184 - RNA, 23 nt, Artificial Sequence
  Synthetic
uauauuaugccuauuucacaaau

SEQ ID NO: 353185 - RNA, 24 nt, Artificial Sequence
  Synthetic
auauauuaugccuauuucacaaau

SEQ ID NO: 353186 - RNA, 18 nt, Artificial Sequence
  Synthetic
aauuauugaaagacaaau

SEQ ID NO: 353187 - RNA, 19 nt, Artificial Sequence
  Synthetic
aaauuauugaaagacaaau

SEQ ID NO: 353188 - RNA, 20 nt, Artificial Sequence
  Synthetic
gaaauuauugaaagacaaau

SEQ ID NO: 353189 - RNA, 21 nt, Artificial Sequence
  Synthetic
ugaaauuauugaaagacaaau

SEQ ID NO: 353190 - RNA, 22 nt, Artificial Sequence
  Synthetic
uugaaauuauugaaagacaaau

SEQ ID NO: 353191 - RNA, 23 nt, Artificial Sequence
  Synthetic
uuugaaauuauugaaagacaaau

SEQ ID NO: 353192 - RNA, 24 nt, Artificial Sequence
  Synthetic
auuugaaauuauugaaagacaaau

SEQ ID NO: 353193 - RNA, 18 nt, Artificial Sequence
  Synthetic
ugaggcacagagacaaau

SEQ ID NO: 353194 - RNA, 19 nt, Artificial Sequence
  Synthetic
uugaggcacagagacaaau

SEQ ID NO: 353195 - RNA, 20 nt, Artificial Sequence
  Synthetic
guugaggcacagagacaaau

SEQ ID NO: 353196 - RNA, 21 nt, Artificial Sequence
  Synthetic
aguugaggcacagagacaaau

SEQ ID NO: 353197 - RNA, 22 nt, Artificial Sequence
  Synthetic
gaguugaggcacagagacaaau

SEQ ID NO: 353198 - RNA, 23 nt, Artificial Sequence
  Synthetic
agaguugaggcacagagacaaau

SEQ ID NO: 353199 - RNA, 24 nt, Artificial Sequence
  Synthetic
gagaguugaggcacagagacaaau

SEQ ID NO: 353200 - RNA, 18 nt, Artificial Sequence
  Synthetic
ugaaauacuuagacaaau

SEQ ID NO: 353201 - RNA, 19 nt, Artificial Sequence
  Synthetic
gugaaauacuuagacaaau

SEQ ID NO: 353202 - RNA, 20 nt, Artificial Sequence
  Synthetic
ugugaaauacuuagacaaau

SEQ ID NO: 353203 - RNA, 21 nt, Artificial Sequence
  Synthetic
augugaaauacuuagacaaau

SEQ ID NO: 353204 - RNA, 22 nt, Artificial Sequence
  Synthetic
caugugaaauacuuagacaaau

SEQ ID NO: 353205 - RNA, 23 nt, Artificial Sequence
  Synthetic
acaugugaaauacuuagacaaau

SEQ ID NO: 353206 - RNA, 24 nt, Artificial Sequence
  Synthetic
uacaugugaaauacuuagacaaau

SEQ ID NO: 353207 - RNA, 18 nt, Artificial Sequence
  Synthetic
uuaaggaagucuacaaau

SEQ ID NO: 353208 - RNA, 19 nt, Artificial Sequence
  Synthetic
auuaaggaagucuacaaau

SEQ ID NO: 353209 - RNA, 20 nt, Artificial Sequence
  Synthetic
gauuaaggaagucuacaaau

SEQ ID NO: 353210 - RNA, 21 nt, Artificial Sequence
  Synthetic
ggauuaaggaagucuacaaau

SEQ ID NO: 353211 - RNA, 22 nt, Artificial Sequence
  Synthetic
uggauuaaggaagucuacaaau

SEQ ID NO: 353212 - RNA, 23 nt, Artificial Sequence
  Synthetic
auggauuaaggaagucuacaaau

SEQ ID NO: 353213 - RNA, 24 nt, Artificial Sequence
  Synthetic
gauggauuaaggaagucuacaaau

SEQ ID NO: 353214 - RNA, 18 nt, Artificial Sequence
  Synthetic
aauauacccauuacaaau

SEQ ID NO: 353215 - RNA, 19 nt, Artificial Sequence
  Synthetic
aaauauacccauuacaaau

SEQ ID NO: 353216 - RNA, 20 nt, Artificial Sequence
  Synthetic
uaaauauacccauuacaaau

SEQ ID NO: 353217 - RNA, 21 nt, Artificial Sequence
  Synthetic
guaaauauacccauuacaaau

SEQ ID NO: 353218 - RNA, 22 nt, Artificial Sequence
  Synthetic
gguaaauauacccauuacaaau

SEQ ID NO: 353219 - RNA, 23 nt, Artificial Sequence
  Synthetic
ggguaaauauacccauuacaaau

SEQ ID NO: 353220 - RNA, 24 nt, Artificial Sequence
  Synthetic
uggguaaauauacccauuacaaau

SEQ ID NO: 353221 - RNA, 18 nt, Artificial Sequence
  Synthetic
caaucacagcuuacaaau

SEQ ID NO: 353222 - RNA, 19 nt, Artificial Sequence
  Synthetic
gcaaucacagcuuacaaau

SEQ ID NO: 353223 - RNA, 20 nt, Artificial Sequence
  Synthetic
agcaaucacagcuuacaaau

SEQ ID NO: 353224 - RNA, 21 nt, Artificial Sequence
  Synthetic
gagcaaucacagcuuacaaau

SEQ ID NO: 353225 - RNA, 22 nt, Artificial Sequence
  Synthetic
ugagcaaucacagcuuacaaau

SEQ ID NO: 353226 - RNA, 23 nt, Artificial Sequence
  Synthetic
cugagcaaucacagcuuacaaau

SEQ ID NO: 353227 - RNA, 24 nt, Artificial Sequence
  Synthetic
ucugagcaaucacagcuuacaaau

SEQ ID NO: 353228 - RNA, 18 nt, Artificial Sequence
  Synthetic
ugcccacauuuuacaaau

SEQ ID NO: 353229 - RNA, 19 nt, Artificial Sequence
  Synthetic
augcccacauuuuacaaau

SEQ ID NO: 353230 - RNA, 20 nt, Artificial Sequence
  Synthetic
aaugcccacauuuuacaaau

SEQ ID NO: 353231 - RNA, 21 nt, Artificial Sequence
  Synthetic
aaaugcccacauuuuacaaau

SEQ ID NO: 353232 - RNA, 22 nt, Artificial Sequence
  Synthetic
caaaugcccacauuuuacaaau

SEQ ID NO: 353233 - RNA, 23 nt, Artificial Sequence
  Synthetic
gcaaaugcccacauuuuacaaau

SEQ ID NO: 353234 - RNA, 24 nt, Artificial Sequence
  Synthetic
agcaaaugcccacauuuuacaaau

SEQ ID NO: 353235 - RNA, 18 nt, Artificial Sequence
  Synthetic
aacagacaaacaccaaau

SEQ ID NO: 353236 - RNA, 19 nt, Artificial Sequence
  Synthetic
aaacagacaaacaccaaau

SEQ ID NO: 353237 - RNA, 20 nt, Artificial Sequence
  Synthetic
uaaacagacaaacaccaaau

SEQ ID NO: 353238 - RNA, 21 nt, Artificial Sequence
  Synthetic
guaaacagacaaacaccaaau

SEQ ID NO: 353239 - RNA, 22 nt, Artificial Sequence
  Synthetic
aguaaacagacaaacaccaaau

SEQ ID NO: 353240 - RNA, 23 nt, Artificial Sequence
  Synthetic
gaguaaacagacaaacaccaaau

SEQ ID NO: 353241 - RNA, 24 nt, Artificial Sequence
  Synthetic
agaguaaacagacaaacaccaaau

SEQ ID NO: 353242 - RNA, 18 nt, Artificial Sequence
  Synthetic
auccucauuucaccaaau

SEQ ID NO: 353243 - RNA, 19 nt, Artificial Sequence
  Synthetic
uauccucauuucaccaaau

SEQ ID NO: 353244 - RNA, 20 nt, Artificial Sequence
  Synthetic
uuauccucauuucaccaaau

SEQ ID NO: 353245 - RNA, 21 nt, Artificial Sequence
  Synthetic
auuauccucauuucaccaaau

SEQ ID NO: 353246 - RNA, 22 nt, Artificial Sequence
  Synthetic
cauuauccucauuucaccaaau

SEQ ID NO: 353247 - RNA, 23 nt, Artificial Sequence
  Synthetic
ucauuauccucauuucaccaaau

SEQ ID NO: 353248 - RNA, 24 nt, Artificial Sequence
  Synthetic
cucauuauccucauuucaccaaau

SEQ ID NO: 353249 - RNA, 18 nt, Artificial Sequence
  Synthetic
ucggaccccauaccaaau

SEQ ID NO: 353250 - RNA, 19 nt, Artificial Sequence
  Synthetic
cucggaccccauaccaaau

SEQ ID NO: 353251 - RNA, 20 nt, Artificial Sequence
  Synthetic
ucucggaccccauaccaaau

SEQ ID NO: 353252 - RNA, 21 nt, Artificial Sequence
  Synthetic
gucucggaccccauaccaaau

SEQ ID NO: 353253 - RNA, 22 nt, Artificial Sequence
  Synthetic
agucucggaccccauaccaaau

SEQ ID NO: 353254 - RNA, 23 nt, Artificial Sequence
  Synthetic
aagucucggaccccauaccaaau

SEQ ID NO: 353255 - RNA, 24 nt, Artificial Sequence
  Synthetic
aaagucucggaccccauaccaaau

SEQ ID NO: 353256 - RNA, 18 nt, Artificial Sequence
  Synthetic
gaaugaaacuacccaaau

SEQ ID NO: 353257 - RNA, 19 nt, Artificial Sequence
  Synthetic
agaaugaaacuacccaaau

SEQ ID NO: 353258 - RNA, 20 nt, Artificial Sequence
  Synthetic
cagaaugaaacuacccaaau

SEQ ID NO: 353259 - RNA, 21 nt, Artificial Sequence
  Synthetic
ccagaaugaaacuacccaaau

SEQ ID NO: 353260 - RNA, 22 nt, Artificial Sequence
  Synthetic
uccagaaugaaacuacccaaau

SEQ ID NO: 353261 - RNA, 23 nt, Artificial Sequence
  Synthetic
cuccagaaugaaacuacccaaau

SEQ ID NO: 353262 - RNA, 24 nt, Artificial Sequence
  Synthetic
acuccagaaugaaacuacccaaau

SEQ ID NO: 353263 - RNA, 18 nt, Artificial Sequence
  Synthetic
uagaguagaggcccaaau

SEQ ID NO: 353264 - RNA, 19 nt, Artificial Sequence
  Synthetic
auagaguagaggcccaaau

SEQ ID NO: 353265 - RNA, 20 nt, Artificial Sequence
  Synthetic
aauagaguagaggcccaaau

SEQ ID NO: 353266 - RNA, 21 nt, Artificial Sequence
  Synthetic
aaauagaguagaggcccaaau

SEQ ID NO: 353267 - RNA, 22 nt, Artificial Sequence
  Synthetic
gaaauagaguagaggcccaaau

SEQ ID NO: 353268 - RNA, 23 nt, Artificial Sequence
  Synthetic
ggaaauagaguagaggcccaaau

SEQ ID NO: 353269 - RNA, 24 nt, Artificial Sequence
  Synthetic
aggaaauagaguagaggcccaaau

SEQ ID NO: 353270 - RNA, 18 nt, Artificial Sequence
  Synthetic
aagugaucaugcccaaau

SEQ ID NO: 353271 - RNA, 19 nt, Artificial Sequence
  Synthetic
aaagugaucaugcccaaau

SEQ ID NO: 353272 - RNA, 20 nt, Artificial Sequence
  Synthetic
aaaagugaucaugcccaaau

SEQ ID NO: 353273 - RNA, 21 nt, Artificial Sequence
  Synthetic
caaaagugaucaugcccaaau

SEQ ID NO: 353274 - RNA, 22 nt, Artificial Sequence
  Synthetic
ucaaaagugaucaugcccaaau

SEQ ID NO: 353275 - RNA, 23 nt, Artificial Sequence
  Synthetic
gucaaaagugaucaugcccaaau

SEQ ID NO: 353276 - RNA, 24 nt, Artificial Sequence
  Synthetic
cgucaaaagugaucaugcccaaau

SEQ ID NO: 353277 - RNA, 18 nt, Artificial Sequence
  Synthetic
ugcauuuucuagccaaau

SEQ ID NO: 353278 - RNA, 19 nt, Artificial Sequence
  Synthetic
uugcauuuucuagccaaau

SEQ ID NO: 353279 - RNA, 20 nt, Artificial Sequence
  Synthetic
auugcauuuucuagccaaau

SEQ ID NO: 353280 - RNA, 21 nt, Artificial Sequence
  Synthetic
cauugcauuuucuagccaaau

SEQ ID NO: 353281 - RNA, 22 nt, Artificial Sequence
  Synthetic
gcauugcauuuucuagccaaau

SEQ ID NO: 353282 - RNA, 23 nt, Artificial Sequence
  Synthetic
ugcauugcauuuucuagccaaau

SEQ ID NO: 353283 - RNA, 24 nt, Artificial Sequence
  Synthetic
uugcauugcauuuucuagccaaau

SEQ ID NO: 353284 - RNA, 18 nt, Artificial Sequence
  Synthetic
uaguccauguauccaaau

SEQ ID NO: 353285 - RNA, 19 nt, Artificial Sequence
  Synthetic
cuaguccauguauccaaau

SEQ ID NO: 353286 - RNA, 20 nt, Artificial Sequence
  Synthetic
ccuaguccauguauccaaau

SEQ ID NO: 353287 - RNA, 21 nt, Artificial Sequence
  Synthetic
gccuaguccauguauccaaau

SEQ ID NO: 353288 - RNA, 22 nt, Artificial Sequence
  Synthetic
agccuaguccauguauccaaau

SEQ ID NO: 353289 - RNA, 23 nt, Artificial Sequence
  Synthetic
aagccuaguccauguauccaaau

SEQ ID NO: 353290 - RNA, 24 nt, Artificial Sequence
  Synthetic
aaagccuaguccauguauccaaau

SEQ ID NO: 353291 - RNA, 18 nt, Artificial Sequence
  Synthetic
accaaaaacauuccaaau

SEQ ID NO: 353292 - RNA, 19 nt, Artificial Sequence
  Synthetic
aaccaaaaacauuccaaau

SEQ ID NO: 353293 - RNA, 20 nt, Artificial Sequence
  Synthetic
caaccaaaaacauuccaaau

SEQ ID NO: 353294 - RNA, 21 nt, Artificial Sequence
  Synthetic
ccaaccaaaaacauuccaaau

SEQ ID NO: 353295 - RNA, 22 nt, Artificial Sequence
  Synthetic
accaaccaaaaacauuccaaau

SEQ ID NO: 353296 - RNA, 23 nt, Artificial Sequence
  Synthetic
caccaaccaaaaacauuccaaau

SEQ ID NO: 353297 - RNA, 24 nt, Artificial Sequence
  Synthetic
acaccaaccaaaaacauuccaaau

SEQ ID NO: 353298 - RNA, 18 nt, Artificial Sequence
  Synthetic
uuaguccucuuuccaaau

SEQ ID NO: 353299 - RNA, 19 nt, Artificial Sequence
  Synthetic
guuaguccucuuuccaaau

SEQ ID NO: 353300 - RNA, 20 nt, Artificial Sequence
  Synthetic
aguuaguccucuuuccaaau

SEQ ID NO: 353301 - RNA, 21 nt, Artificial Sequence
  Synthetic
aaguuaguccucuuuccaaau

SEQ ID NO: 353302 - RNA, 22 nt, Artificial Sequence
  Synthetic
aaaguuaguccucuuuccaaau

SEQ ID NO: 353303 - RNA, 23 nt, Artificial Sequence
  Synthetic
gaaaguuaguccucuuuccaaau

SEQ ID NO: 353304 - RNA, 24 nt, Artificial Sequence
  Synthetic
agaaaguuaguccucuuuccaaau

SEQ ID NO: 353305 - RNA, 18 nt, Artificial Sequence
  Synthetic
uuaacguauuuuccaaau

SEQ ID NO: 353306 - RNA, 19 nt, Artificial Sequence
  Synthetic
uuuaacguauuuuccaaau

SEQ ID NO: 353307 - RNA, 20 nt, Artificial Sequence
  Synthetic
uuuuaacguauuuuccaaau

SEQ ID NO: 353308 - RNA, 21 nt, Artificial Sequence
  Synthetic
uuuuuaacguauuuuccaaau

SEQ ID NO: 353309 - RNA, 22 nt, Artificial Sequence
  Synthetic
auuuuuaacguauuuuccaaau

SEQ ID NO: 353310 - RNA, 23 nt, Artificial Sequence
  Synthetic
aauuuuuaacguauuuuccaaau

SEQ ID NO: 353311 - RNA, 24 nt, Artificial Sequence
  Synthetic
gaauuuuuaacguauuuuccaaau

SEQ ID NO: 353312 - RNA, 18 nt, Artificial Sequence
  Synthetic
ucaaauauuaaagcaaau

SEQ ID NO: 353313 - RNA, 19 nt, Artificial Sequence
  Synthetic
aucaaauauuaaagcaaau

SEQ ID NO: 353314 - RNA, 20 nt, Artificial Sequence
  Synthetic
uaucaaauauuaaagcaaau

SEQ ID NO: 353315 - RNA, 21 nt, Artificial Sequence
  Synthetic
guaucaaauauuaaagcaaau

SEQ ID NO: 353316 - RNA, 22 nt, Artificial Sequence
  Synthetic
aguaucaaauauuaaagcaaau

SEQ ID NO: 353317 - RNA, 23 nt, Artificial Sequence
  Synthetic
caguaucaaauauuaaagcaaau

SEQ ID NO: 353318 - RNA, 24 nt, Artificial Sequence
  Synthetic
acaguaucaaauauuaaagcaaau

SEQ ID NO: 353319 - RNA, 18 nt, Artificial Sequence
  Synthetic
gucagugcugaagcaaau

SEQ ID NO: 353320 - RNA, 19 nt, Artificial Sequence
  Synthetic
ugucagugcugaagcaaau

SEQ ID NO: 353321 - RNA, 20 nt, Artificial Sequence
  Synthetic
cugucagugcugaagcaaau

SEQ ID NO: 353322 - RNA, 21 nt, Artificial Sequence
  Synthetic
acugucagugcugaagcaaau

SEQ ID NO: 353323 - RNA, 22 nt, Artificial Sequence
  Synthetic
aacugucagugcugaagcaaau

SEQ ID NO: 353324 - RNA, 23 nt, Artificial Sequence
  Synthetic
aaacugucagugcugaagcaaau

SEQ ID NO: 353325 - RNA, 24 nt, Artificial Sequence
  Synthetic
aaaacugucagugcugaagcaaau

SEQ ID NO: 353326 - RNA, 18 nt, Artificial Sequence
  Synthetic
uugggaaacugagcaaau

SEQ ID NO: 353327 - RNA, 19 nt, Artificial Sequence
  Synthetic
auugggaaacugagcaaau

SEQ ID NO: 353328 - RNA, 20 nt, Artificial Sequence
  Synthetic
gauugggaaacugagcaaau

SEQ ID NO: 353329 - RNA, 21 nt, Artificial Sequence
  Synthetic
cgauugggaaacugagcaaau

SEQ ID NO: 353330 - RNA, 22 nt, Artificial Sequence
  Synthetic
ccgauugggaaacugagcaaau

SEQ ID NO: 353331 - RNA, 23 nt, Artificial Sequence
  Synthetic
uccgauugggaaacugagcaaau

SEQ ID NO: 353332 - RNA, 24 nt, Artificial Sequence
  Synthetic
cuccgauugggaaacugagcaaau

SEQ ID NO: 353333 - RNA, 18 nt, Artificial Sequence
  Synthetic
ugguaguggugagcaaau

SEQ ID NO: 353334 - RNA, 19 nt, Artificial Sequence
  Synthetic
gugguaguggugagcaaau

SEQ ID NO: 353335 - RNA, 20 nt, Artificial Sequence
  Synthetic
agugguaguggugagcaaau

SEQ ID NO: 353336 - RNA, 21 nt, Artificial Sequence
  Synthetic
gagugguaguggugagcaaau

SEQ ID NO: 353337 - RNA, 22 nt, Artificial Sequence
  Synthetic
ugagugguaguggugagcaaau

SEQ ID NO: 353338 - RNA, 23 nt, Artificial Sequence
  Synthetic
gugagugguaguggugagcaaau

SEQ ID NO: 353339 - RNA, 24 nt, Artificial Sequence
  Synthetic
agugagugguaguggugagcaaau

SEQ ID NO: 353340 - RNA, 18 nt, Artificial Sequence
  Synthetic
ugaaaacugguagcaaau

SEQ ID NO: 353341 - RNA, 19 nt, Artificial Sequence
  Synthetic
augaaaacugguagcaaau

SEQ ID NO: 353342 - RNA, 20 nt, Artificial Sequence
  Synthetic
aaugaaaacugguagcaaau

SEQ ID NO: 353343 - RNA, 21 nt, Artificial Sequence
  Synthetic
uaaugaaaacugguagcaaau

SEQ ID NO: 353344 - RNA, 22 nt, Artificial Sequence
  Synthetic
auaaugaaaacugguagcaaau

SEQ ID NO: 353345 - RNA, 23 nt, Artificial Sequence
  Synthetic
aauaaugaaaacugguagcaaau

SEQ ID NO: 353346 - RNA, 24 nt, Artificial Sequence
  Synthetic
uaauaaugaaaacugguagcaaau

SEQ ID NO: 353347 - RNA, 18 nt, Artificial Sequence
  Synthetic
cucugguaguuagcaaau

SEQ ID NO: 353348 - RNA, 19 nt, Artificial Sequence
  Synthetic
acucugguaguuagcaaau

SEQ ID NO: 353349 - RNA, 20 nt, Artificial Sequence
  Synthetic
gacucugguaguuagcaaau

SEQ ID NO: 353350 - RNA, 21 nt, Artificial Sequence
  Synthetic
ggacucugguaguuagcaaau

SEQ ID NO: 353351 - RNA, 22 nt, Artificial Sequence
  Synthetic
aggacucugguaguuagcaaau

SEQ ID NO: 353352 - RNA, 23 nt, Artificial Sequence
  Synthetic
gaggacucugguaguuagcaaau

SEQ ID NO: 353353 - RNA, 24 nt, Artificial Sequence
  Synthetic
agaggacucugguaguuagcaaau

SEQ ID NO: 353354 - RNA, 18 nt, Artificial Sequence
  Synthetic
acaguggacaaggcaaau

SEQ ID NO: 353355 - RNA, 19 nt, Artificial Sequence
  Synthetic
cacaguggacaaggcaaau

SEQ ID NO: 353356 - RNA, 20 nt, Artificial Sequence
  Synthetic
ucacaguggacaaggcaaau

SEQ ID NO: 353357 - RNA, 21 nt, Artificial Sequence
  Synthetic
aucacaguggacaaggcaaau

SEQ ID NO: 353358 - RNA, 22 nt, Artificial Sequence
  Synthetic
caucacaguggacaaggcaaau

SEQ ID NO: 353359 - RNA, 23 nt, Artificial Sequence
  Synthetic
acaucacaguggacaaggcaaau

SEQ ID NO: 353360 - RNA, 24 nt, Artificial Sequence
  Synthetic
cacaucacaguggacaaggcaaau

SEQ ID NO: 353361 - RNA, 18 nt, Artificial Sequence
  Synthetic
uaaaacuucaaggcaaau

SEQ ID NO: 353362 - RNA, 19 nt, Artificial Sequence
  Synthetic
auaaaacuucaaggcaaau

SEQ ID NO: 353363 - RNA, 20 nt, Artificial Sequence
  Synthetic
cauaaaacuucaaggcaaau

SEQ ID NO: 353364 - RNA, 21 nt, Artificial Sequence
  Synthetic
acauaaaacuucaaggcaaau

SEQ ID NO: 353365 - RNA, 22 nt, Artificial Sequence
  Synthetic
aacauaaaacuucaaggcaaau

SEQ ID NO: 353366 - RNA, 23 nt, Artificial Sequence
  Synthetic
gaacauaaaacuucaaggcaaau

SEQ ID NO: 353367 - RNA, 24 nt, Artificial Sequence
  Synthetic
ggaacauaaaacuucaaggcaaau

SEQ ID NO: 353368 - RNA, 18 nt, Artificial Sequence
  Synthetic
gaaacaacaguggcaaau

SEQ ID NO: 353369 - RNA, 19 nt, Artificial Sequence
  Synthetic
ggaaacaacaguggcaaau

SEQ ID NO: 353370 - RNA, 20 nt, Artificial Sequence
  Synthetic
aggaaacaacaguggcaaau

SEQ ID NO: 353371 - RNA, 21 nt, Artificial Sequence
  Synthetic
aaggaaacaacaguggcaaau

SEQ ID NO: 353372 - RNA, 22 nt, Artificial Sequence
  Synthetic
uaaggaaacaacaguggcaaau

SEQ ID NO: 353373 - RNA, 23 nt, Artificial Sequence
  Synthetic
auaaggaaacaacaguggcaaau

SEQ ID NO: 353374 - RNA, 24 nt, Artificial Sequence
  Synthetic
aauaaggaaacaacaguggcaaau

SEQ ID NO: 353375 - RNA, 18 nt, Artificial Sequence
  Synthetic
ggcagccaguaugcaaau

SEQ ID NO: 353376 - RNA, 19 nt, Artificial Sequence
  Synthetic
uggcagccaguaugcaaau

SEQ ID NO: 353377 - RNA, 20 nt, Artificial Sequence
  Synthetic
guggcagccaguaugcaaau

SEQ ID NO: 353378 - RNA, 21 nt, Artificial Sequence
  Synthetic
gguggcagccaguaugcaaau

SEQ ID NO: 353379 - RNA, 22 nt, Artificial Sequence
  Synthetic
agguggcagccaguaugcaaau

SEQ ID NO: 353380 - RNA, 23 nt, Artificial Sequence
  Synthetic
uagguggcagccaguaugcaaau

SEQ ID NO: 353381 - RNA, 24 nt, Artificial Sequence
  Synthetic
auagguggcagccaguaugcaaau

SEQ ID NO: 353382 - RNA, 18 nt, Artificial Sequence
  Synthetic
auacuuauguaugcaaau

SEQ ID NO: 353383 - RNA, 19 nt, Artificial Sequence
  Synthetic
uauacuuauguaugcaaau

SEQ ID NO: 353384 - RNA, 20 nt, Artificial Sequence
  Synthetic
cuauacuuauguaugcaaau

SEQ ID NO: 353385 - RNA, 21 nt, Artificial Sequence
  Synthetic
ccuauacuuauguaugcaaau

SEQ ID NO: 353386 - RNA, 22 nt, Artificial Sequence
  Synthetic
cccuauacuuauguaugcaaau

SEQ ID NO: 353387 - RNA, 23 nt, Artificial Sequence
  Synthetic
ucccuauacuuauguaugcaaau

SEQ ID NO: 353388 - RNA, 24 nt, Artificial Sequence
  Synthetic
uucccuauacuuauguaugcaaau

SEQ ID NO: 353389 - RNA, 18 nt, Artificial Sequence
  Synthetic
agugagguuuaugcaaau

SEQ ID NO: 353390 - RNA, 19 nt, Artificial Sequence
  Synthetic
cagugagguuuaugcaaau

SEQ ID NO: 353391 - RNA, 20 nt, Artificial Sequence
  Synthetic
gcagugagguuuaugcaaau

SEQ ID NO: 353392 - RNA, 21 nt, Artificial Sequence
  Synthetic
ggcagugagguuuaugcaaau

SEQ ID NO: 353393 - RNA, 22 nt, Artificial Sequence
  Synthetic
uggcagugagguuuaugcaaau

SEQ ID NO: 353394 - RNA, 23 nt, Artificial Sequence
  Synthetic
uuggcagugagguuuaugcaaau

SEQ ID NO: 353395 - RNA, 24 nt, Artificial Sequence
  Synthetic
uuuggcagugagguuuaugcaaau

SEQ ID NO: 353396 - RNA, 18 nt, Artificial Sequence
  Synthetic
caguuuugcuuugcaaau

SEQ ID NO: 353397 - RNA, 19 nt, Artificial Sequence
  Synthetic
ucaguuuugcuuugcaaau

SEQ ID NO: 353398 - RNA, 20 nt, Artificial Sequence
  Synthetic
uucaguuuugcuuugcaaau

SEQ ID NO: 353399 - RNA, 21 nt, Artificial Sequence
  Synthetic
uuucaguuuugcuuugcaaau

SEQ ID NO: 353400 - RNA, 22 nt, Artificial Sequence
  Synthetic
uuuucaguuuugcuuugcaaau

SEQ ID NO: 353401 - RNA, 23 nt, Artificial Sequence
  Synthetic
uuuuucaguuuugcuuugcaaau

SEQ ID NO: 353402 - RNA, 24 nt, Artificial Sequence
  Synthetic
auuuuucaguuuugcuuugcaaau

SEQ ID NO: 353403 - RNA, 18 nt, Artificial Sequence
  Synthetic
auccauagaaaaucaaau

SEQ ID NO: 353404 - RNA, 19 nt, Artificial Sequence
  Synthetic
aauccauagaaaaucaaau

SEQ ID NO: 353405 - RNA, 20 nt, Artificial Sequence
  Synthetic
uaauccauagaaaaucaaau

SEQ ID NO: 353406 - RNA, 21 nt, Artificial Sequence
  Synthetic
uuaauccauagaaaaucaaau

SEQ ID NO: 353407 - RNA, 22 nt, Artificial Sequence
  Synthetic
uuuaauccauagaaaaucaaau

SEQ ID NO: 353408 - RNA, 23 nt, Artificial Sequence
  Synthetic
uuuuaauccauagaaaaucaaau

SEQ ID NO: 353409 - RNA, 24 nt, Artificial Sequence
  Synthetic
cuuuuaauccauagaaaaucaaau

SEQ ID NO: 353410 - RNA, 18 nt, Artificial Sequence
  Synthetic
ugugucuugaaaucaaau

SEQ ID NO: 353411 - RNA, 19 nt, Artificial Sequence
  Synthetic
cugugucuugaaaucaaau

SEQ ID NO: 353412 - RNA, 20 nt, Artificial Sequence
  Synthetic
acugugucuugaaaucaaau

SEQ ID NO: 353413 - RNA, 21 nt, Artificial Sequence
  Synthetic
gacugugucuugaaaucaaau

SEQ ID NO: 353414 - RNA, 22 nt, Artificial Sequence
  Synthetic
ugacugugucuugaaaucaaau

SEQ ID NO: 353415 - RNA, 23 nt, Artificial Sequence
  Synthetic
uugacugugucuugaaaucaaau

SEQ ID NO: 353416 - RNA, 24 nt, Artificial Sequence
  Synthetic
cuugacugugucuugaaaucaaau

SEQ ID NO: 353417 - RNA, 18 nt, Artificial Sequence
  Synthetic
accacaguacaaucaaau

SEQ ID NO: 353418 - RNA, 19 nt, Artificial Sequence
  Synthetic
gaccacaguacaaucaaau

SEQ ID NO: 353419 - RNA, 20 nt, Artificial Sequence
  Synthetic
agaccacaguacaaucaaau

SEQ ID NO: 353420 - RNA, 21 nt, Artificial Sequence
  Synthetic
cagaccacaguacaaucaaau

SEQ ID NO: 353421 - RNA, 22 nt, Artificial Sequence
  Synthetic
ucagaccacaguacaaucaaau

SEQ ID NO: 353422 - RNA, 23 nt, Artificial Sequence
  Synthetic
cucagaccacaguacaaucaaau

SEQ ID NO: 353423 - RNA, 24 nt, Artificial Sequence
  Synthetic
ucucagaccacaguacaaucaaau

SEQ ID NO: 353424 - RNA, 18 nt, Artificial Sequence
  Synthetic
auuuuggccuaaucaaau

SEQ ID NO: 353425 - RNA, 19 nt, Artificial Sequence
  Synthetic
cauuuuggccuaaucaaau

SEQ ID NO: 353426 - RNA, 20 nt, Artificial Sequence
  Synthetic
gcauuuuggccuaaucaaau

SEQ ID NO: 353427 - RNA, 21 nt, Artificial Sequence
  Synthetic
ugcauuuuggccuaaucaaau

SEQ ID NO: 353428 - RNA, 22 nt, Artificial Sequence
  Synthetic
cugcauuuuggccuaaucaaau

SEQ ID NO: 353429 - RNA, 23 nt, Artificial Sequence
  Synthetic
ucugcauuuuggccuaaucaaau

SEQ ID NO: 353430 - RNA, 24 nt, Artificial Sequence
  Synthetic
cucugcauuuuggccuaaucaaau

SEQ ID NO: 353431 - RNA, 18 nt, Artificial Sequence
  Synthetic
aauugcuauaacucaaau

SEQ ID NO: 353432 - RNA, 19 nt, Artificial Sequence
  Synthetic
aaauugcuauaacucaaau

SEQ ID NO: 353433 - RNA, 20 nt, Artificial Sequence
  Synthetic
aaaauugcuauaacucaaau

SEQ ID NO: 353434 - RNA, 21 nt, Artificial Sequence
  Synthetic
aaaaauugcuauaacucaaau

SEQ ID NO: 353435 - RNA, 22 nt, Artificial Sequence
  Synthetic
aaaaaauugcuauaacucaaau

SEQ ID NO: 353436 - RNA, 23 nt, Artificial Sequence
  Synthetic
uaaaaaauugcuauaacucaaau

SEQ ID NO: 353437 - RNA, 24 nt, Artificial Sequence
  Synthetic
uuaaaaaauugcuauaacucaaau

SEQ ID NO: 353438 - RNA, 18 nt, Artificial Sequence
  Synthetic
cauaauccaugcucaaau

SEQ ID NO: 353439 - RNA, 19 nt, Artificial Sequence
  Synthetic
acauaauccaugcucaaau

SEQ ID NO: 353440 - RNA, 20 nt, Artificial Sequence
  Synthetic
aacauaauccaugcucaaau

SEQ ID NO: 353441 - RNA, 21 nt, Artificial Sequence
  Synthetic
aaacauaauccaugcucaaau

SEQ ID NO: 353442 - RNA, 22 nt, Artificial Sequence
  Synthetic
aaaacauaauccaugcucaaau

SEQ ID NO: 353443 - RNA, 23 nt, Artificial Sequence
  Synthetic
aaaaacauaauccaugcucaaau

SEQ ID NO: 353444 - RNA, 24 nt, Artificial Sequence
  Synthetic
aaaaaacauaauccaugcucaaau

SEQ ID NO: 353445 - RNA, 18 nt, Artificial Sequence
  Synthetic
uguuuucaucucucaaau

SEQ ID NO: 353446 - RNA, 19 nt, Artificial Sequence
  Synthetic
auguuuucaucucucaaau

SEQ ID NO: 353447 - RNA, 20 nt, Artificial Sequence
  Synthetic
aauguuuucaucucucaaau

SEQ ID NO: 353448 - RNA, 21 nt, Artificial Sequence
  Synthetic
gaauguuuucaucucucaaau

SEQ ID NO: 353449 - RNA, 22 nt, Artificial Sequence
  Synthetic
agaauguuuucaucucucaaau

SEQ ID NO: 353450 - RNA, 23 nt, Artificial Sequence
  Synthetic
uagaauguuuucaucucucaaau

SEQ ID NO: 353451 - RNA, 24 nt, Artificial Sequence
  Synthetic
cuagaauguuuucaucucucaaau

SEQ ID NO: 353452 - RNA, 18 nt, Artificial Sequence
  Synthetic
cacucccuuuucucaaau

SEQ ID NO: 353453 - RNA, 19 nt, Artificial Sequence
  Synthetic
acacucccuuuucucaaau

SEQ ID NO: 353454 - RNA, 20 nt, Artificial Sequence
  Synthetic
uacacucccuuuucucaaau

SEQ ID NO: 353455 - RNA, 21 nt, Artificial Sequence
  Synthetic
auacacucccuuuucucaaau

SEQ ID NO: 353456 - RNA, 22 nt, Artificial Sequence
  Synthetic
aauacacucccuuuucucaaau

SEQ ID NO: 353457 - RNA, 23 nt, Artificial Sequence
  Synthetic
aaauacacucccuuuucucaaau

SEQ ID NO: 353458 - RNA, 24 nt, Artificial Sequence
  Synthetic
aaaauacacucccuuuucucaaau

SEQ ID NO: 353459 - RNA, 18 nt, Artificial Sequence
  Synthetic
cauugcaauaauucaaau

SEQ ID NO: 353460 - RNA, 19 nt, Artificial Sequence
  Synthetic
ucauugcaauaauucaaau

SEQ ID NO: 353461 - RNA, 20 nt, Artificial Sequence
  Synthetic
gucauugcaauaauucaaau

SEQ ID NO: 353462 - RNA, 21 nt, Artificial Sequence
  Synthetic
agucauugcaauaauucaaau

SEQ ID NO: 353463 - RNA, 22 nt, Artificial Sequence
  Synthetic
gagucauugcaauaauucaaau

SEQ ID NO: 353464 - RNA, 23 nt, Artificial Sequence
  Synthetic
ggagucauugcaauaauucaaau

SEQ ID NO: 353465 - RNA, 24 nt, Artificial Sequence
  Synthetic
gggagucauugcaauaauucaaau

SEQ ID NO: 353466 - RNA, 18 nt, Artificial Sequence
  Synthetic
gaagacugucauucaaau

SEQ ID NO: 353467 - RNA, 19 nt, Artificial Sequence
  Synthetic
ggaagacugucauucaaau

SEQ ID NO: 353468 - RNA, 20 nt, Artificial Sequence
  Synthetic
aggaagacugucauucaaau

SEQ ID NO: 353469 - RNA, 21 nt, Artificial Sequence
  Synthetic
uaggaagacugucauucaaau

SEQ ID NO: 353470 - RNA, 22 nt, Artificial Sequence
  Synthetic
uuaggaagacugucauucaaau

SEQ ID NO: 353471 - RNA, 23 nt, Artificial Sequence
  Synthetic
guuaggaagacugucauucaaau

SEQ ID NO: 353472 - RNA, 24 nt, Artificial Sequence
  Synthetic
aguuaggaagacugucauucaaau

SEQ ID NO: 353473 - RNA, 18 nt, Artificial Sequence
  Synthetic
cugaacugggauucaaau

SEQ ID NO: 353474 - RNA, 19 nt, Artificial Sequence
  Synthetic
acugaacugggauucaaau

SEQ ID NO: 353475 - RNA, 20 nt, Artificial Sequence
  Synthetic
aacugaacugggauucaaau

SEQ ID NO: 353476 - RNA, 21 nt, Artificial Sequence
  Synthetic
aaacugaacugggauucaaau

SEQ ID NO: 353477 - RNA, 22 nt, Artificial Sequence
  Synthetic
aaaacugaacugggauucaaau

SEQ ID NO: 353478 - RNA, 23 nt, Artificial Sequence
  Synthetic
aaaaacugaacugggauucaaau

SEQ ID NO: 353479 - RNA, 24 nt, Artificial Sequence
  Synthetic
gaaaaacugaacugggauucaaau

SEQ ID NO: 353480 - RNA, 18 nt, Artificial Sequence
  Synthetic
aauaaaggguauucaaau

SEQ ID NO: 353481 - RNA, 19 nt, Artificial Sequence
  Synthetic
aaauaaaggguauucaaau

SEQ ID NO: 353482 - RNA, 20 nt, Artificial Sequence
  Synthetic
gaaauaaaggguauucaaau

SEQ ID NO: 353483 - RNA, 21 nt, Artificial Sequence
  Synthetic
agaaauaaaggguauucaaau

SEQ ID NO: 353484 - RNA, 22 nt, Artificial Sequence
  Synthetic
aagaaauaaaggguauucaaau

SEQ ID NO: 353485 - RNA, 23 nt, Artificial Sequence
  Synthetic
aaagaaauaaaggguauucaaau

SEQ ID NO: 353486 - RNA, 24 nt, Artificial Sequence
  Synthetic
gaaagaaauaaaggguauucaaau

SEQ ID NO: 353487 - RNA, 18 nt, Artificial Sequence
  Synthetic
aagcucauuauuucaaau

SEQ ID NO: 353488 - RNA, 19 nt, Artificial Sequence
  Synthetic
uaagcucauuauuucaaau

SEQ ID NO: 353489 - RNA, 20 nt, Artificial Sequence
  Synthetic
auaagcucauuauuucaaau

SEQ ID NO: 353490 - RNA, 21 nt, Artificial Sequence
  Synthetic
gauaagcucauuauuucaaau

SEQ ID NO: 353491 - RNA, 22 nt, Artificial Sequence
  Synthetic
agauaagcucauuauuucaaau

SEQ ID NO: 353492 - RNA, 23 nt, Artificial Sequence
  Synthetic
cagauaagcucauuauuucaaau

SEQ ID NO: 353493 - RNA, 24 nt, Artificial Sequence
  Synthetic
acagauaagcucauuauuucaaau

SEQ ID NO: 353494 - RNA, 18 nt, Artificial Sequence
  Synthetic
uaaauaaagcuuucaaau

SEQ ID NO: 353495 - RNA, 19 nt, Artificial Sequence
  Synthetic
auaaauaaagcuuucaaau

SEQ ID NO: 353496 - RNA, 20 nt, Artificial Sequence
  Synthetic
cauaaauaaagcuuucaaau

SEQ ID NO: 353497 - RNA, 21 nt, Artificial Sequence
  Synthetic
ucauaaauaaagcuuucaaau

SEQ ID NO: 353498 - RNA, 22 nt, Artificial Sequence
  Synthetic
aucauaaauaaagcuuucaaau

SEQ ID NO: 353499 - RNA, 23 nt, Artificial Sequence
  Synthetic
caucauaaauaaagcuuucaaau

SEQ ID NO: 353500 - RNA, 24 nt, Artificial Sequence
  Synthetic
gcaucauaaauaaagcuuucaaau

SEQ ID NO: 353501 - RNA, 18 nt, Artificial Sequence
  Synthetic
acauucugaguuucaaau

SEQ ID NO: 353502 - RNA, 19 nt, Artificial Sequence
  Synthetic
aacauucugaguuucaaau

SEQ ID NO: 353503 - RNA, 20 nt, Artificial Sequence
  Synthetic
caacauucugaguuucaaau

SEQ ID NO: 353504 - RNA, 21 nt, Artificial Sequence
  Synthetic
ccaacauucugaguuucaaau

SEQ ID NO: 353505 - RNA, 22 nt, Artificial Sequence
  Synthetic
uccaacauucugaguuucaaau

SEQ ID NO: 353506 - RNA, 23 nt, Artificial Sequence
  Synthetic
uuccaacauucugaguuucaaau

SEQ ID NO: 353507 - RNA, 24 nt, Artificial Sequence
  Synthetic
guuccaacauucugaguuucaaau

SEQ ID NO: 353508 - RNA, 18 nt, Artificial Sequence
  Synthetic
gggagacauuuuucaaau

SEQ ID NO: 353509 - RNA, 19 nt, Artificial Sequence
  Synthetic
agggagacauuuuucaaau

SEQ ID NO: 353510 - RNA, 20 nt, Artificial Sequence
  Synthetic
aagggagacauuuuucaaau

SEQ ID NO: 353511 - RNA, 21 nt, Artificial Sequence
  Synthetic
aaagggagacauuuuucaaau

SEQ ID NO: 353512 - RNA, 22 nt, Artificial Sequence
  Synthetic
aaaagggagacauuuuucaaau

SEQ ID NO: 353513 - RNA, 23 nt, Artificial Sequence
  Synthetic
aaaaagggagacauuuuucaaau

SEQ ID NO: 353514 - RNA, 24 nt, Artificial Sequence
  Synthetic
uaaaaagggagacauuuuucaaau

SEQ ID NO: 353515 - RNA, 18 nt, Artificial Sequence
  Synthetic
aguaaaagaaaaagaaau

SEQ ID NO: 353516 - RNA, 19 nt, Artificial Sequence
  Synthetic
aaguaaaagaaaaagaaau

SEQ ID NO: 353517 - RNA, 20 nt, Artificial Sequence
  Synthetic
aaaguaaaagaaaaagaaau

SEQ ID NO: 353518 - RNA, 21 nt, Artificial Sequence
  Synthetic
aaaaguaaaagaaaaagaaau

SEQ ID NO: 353519 - RNA, 22 nt, Artificial Sequence
  Synthetic
aaaaaguaaaagaaaaagaaau

SEQ ID NO: 353520 - RNA, 23 nt, Artificial Sequence
  Synthetic
aaaaaaguaaaagaaaaagaaau

SEQ ID NO: 353521 - RNA, 24 nt, Artificial Sequence
  Synthetic
gaaaaaaguaaaagaaaaagaaau

SEQ ID NO: 353522 - RNA, 18 nt, Artificial Sequence
  Synthetic
cuuacacauaaaagaaau

SEQ ID NO: 353523 - RNA, 19 nt, Artificial Sequence
  Synthetic
ucuuacacauaaaagaaau

SEQ ID NO: 353524 - RNA, 20 nt, Artificial Sequence
  Synthetic
uucuuacacauaaaagaaau

SEQ ID NO: 353525 - RNA, 21 nt, Artificial Sequence
  Synthetic
guucuuacacauaaaagaaau

SEQ ID NO: 353526 - RNA, 22 nt, Artificial Sequence
  Synthetic
aguucuuacacauaaaagaaau

SEQ ID NO: 353527 - RNA, 23 nt, Artificial Sequence
  Synthetic
aaguucuuacacauaaaagaaau

SEQ ID NO: 353528 - RNA, 24 nt, Artificial Sequence
  Synthetic
uaaguucuuacacauaaaagaaau

SEQ ID NO: 353529 - RNA, 18 nt, Artificial Sequence
  Synthetic
caggucuaagaaagaaau

SEQ ID NO: 353530 - RNA, 19 nt, Artificial Sequence
  Synthetic
acaggucuaagaaagaaau

SEQ ID NO: 353531 - RNA, 20 nt, Artificial Sequence
  Synthetic
uacaggucuaagaaagaaau

SEQ ID NO: 353532 - RNA, 21 nt, Artificial Sequence
  Synthetic
auacaggucuaagaaagaaau

SEQ ID NO: 353533 - RNA, 22 nt, Artificial Sequence
  Synthetic
gauacaggucuaagaaagaaau

SEQ ID NO: 353534 - RNA, 23 nt, Artificial Sequence
  Synthetic
agauacaggucuaagaaagaaau

SEQ ID NO: 353535 - RNA, 24 nt, Artificial Sequence
  Synthetic
gagauacaggucuaagaaagaaau

SEQ ID NO: 353536 - RNA, 18 nt, Artificial Sequence
  Synthetic
gaauguaagacaagaaau

SEQ ID NO: 353537 - RNA, 19 nt, Artificial Sequence
  Synthetic
agaauguaagacaagaaau

SEQ ID NO: 353538 - RNA, 20 nt, Artificial Sequence
  Synthetic
cagaauguaagacaagaaau

SEQ ID NO: 353539 - RNA, 21 nt, Artificial Sequence
  Synthetic
acagaauguaagacaagaaau

SEQ ID NO: 353540 - RNA, 22 nt, Artificial Sequence
  Synthetic
aacagaauguaagacaagaaau

SEQ ID NO: 353541 - RNA, 23 nt, Artificial Sequence
  Synthetic
gaacagaauguaagacaagaaau

SEQ ID NO: 353542 - RNA, 24 nt, Artificial Sequence
  Synthetic
agaacagaauguaagacaagaaau

SEQ ID NO: 353543 - RNA, 18 nt, Artificial Sequence
  Synthetic
acaaagccuucaagaaau

SEQ ID NO: 353544 - RNA, 19 nt, Artificial Sequence
  Synthetic
aacaaagccuucaagaaau

SEQ ID NO: 353545 - RNA, 20 nt, Artificial Sequence
  Synthetic
aaacaaagccuucaagaaau

SEQ ID NO: 353546 - RNA, 21 nt, Artificial Sequence
  Synthetic
caaacaaagccuucaagaaau

SEQ ID NO: 353547 - RNA, 22 nt, Artificial Sequence
  Synthetic
acaaacaaagccuucaagaaau

SEQ ID NO: 353548 - RNA, 23 nt, Artificial Sequence
  Synthetic
aacaaacaaagccuucaagaaau

SEQ ID NO: 353549 - RNA, 24 nt, Artificial Sequence
  Synthetic
gaacaaacaaagccuucaagaaau

SEQ ID NO: 353550 - RNA, 18 nt, Artificial Sequence
  Synthetic
aauagaguuucaagaaau

SEQ ID NO: 353551 - RNA, 19 nt, Artificial Sequence
  Synthetic
caauagaguuucaagaaau

SEQ ID NO: 353552 - RNA, 20 nt, Artificial Sequence
  Synthetic
acaauagaguuucaagaaau

SEQ ID NO: 353553 - RNA, 21 nt, Artificial Sequence
  Synthetic
aacaauagaguuucaagaaau

SEQ ID NO: 353554 - RNA, 22 nt, Artificial Sequence
  Synthetic
gaacaauagaguuucaagaaau

SEQ ID NO: 353555 - RNA, 23 nt, Artificial Sequence
  Synthetic
agaacaauagaguuucaagaaau

SEQ ID NO: 353556 - RNA, 24 nt, Artificial Sequence
  Synthetic
uagaacaauagaguuucaagaaau

SEQ ID NO: 353557 - RNA, 18 nt, Artificial Sequence
  Synthetic
aaguucuuuucaagaaau

SEQ ID NO: 353558 - RNA, 19 nt, Artificial Sequence
  Synthetic
aaaguucuuuucaagaaau

SEQ ID NO: 353559 - RNA, 20 nt, Artificial Sequence
  Synthetic
aaaaguucuuuucaagaaau

SEQ ID NO: 353560 - RNA, 21 nt, Artificial Sequence
  Synthetic
uaaaaguucuuuucaagaaau

SEQ ID NO: 353561 - RNA, 22 nt, Artificial Sequence
  Synthetic
guaaaaguucuuuucaagaaau

SEQ ID NO: 353562 - RNA, 23 nt, Artificial Sequence
  Synthetic
gguaaaaguucuuuucaagaaau

SEQ ID NO: 353563 - RNA, 24 nt, Artificial Sequence
  Synthetic
ugguaaaaguucuuuucaagaaau

SEQ ID NO: 353564 - RNA, 18 nt, Artificial Sequence
  Synthetic
augggacaaagaagaaau

SEQ ID NO: 353565 - RNA, 19 nt, Artificial Sequence
  Synthetic
aaugggacaaagaagaaau

SEQ ID NO: 353566 - RNA, 20 nt, Artificial Sequence
  Synthetic
caaugggacaaagaagaaau

SEQ ID NO: 353567 - RNA, 21 nt, Artificial Sequence
  Synthetic
ccaaugggacaaagaagaaau

SEQ ID NO: 353568 - RNA, 22 nt, Artificial Sequence
  Synthetic
gccaaugggacaaagaagaaau

SEQ ID NO: 353569 - RNA, 23 nt, Artificial Sequence
  Synthetic
agccaaugggacaaagaagaaau

SEQ ID NO: 353570 - RNA, 24 nt, Artificial Sequence
  Synthetic
uagccaaugggacaaagaagaaau

SEQ ID NO: 353571 - RNA, 18 nt, Artificial Sequence
  Synthetic
auccugacucuaagaaau

SEQ ID NO: 353572 - RNA, 19 nt, Artificial Sequence
  Synthetic
uauccugacucuaagaaau

SEQ ID NO: 353573 - RNA, 20 nt, Artificial Sequence
  Synthetic
guauccugacucuaagaaau

SEQ ID NO: 353574 - RNA, 21 nt, Artificial Sequence
  Synthetic
cguauccugacucuaagaaau

SEQ ID NO: 353575 - RNA, 22 nt, Artificial Sequence
  Synthetic
gcguauccugacucuaagaaau

SEQ ID NO: 353576 - RNA, 23 nt, Artificial Sequence
  Synthetic
agcguauccugacucuaagaaau

SEQ ID NO: 353577 - RNA, 24 nt, Artificial Sequence
  Synthetic
aagcguauccugacucuaagaaau

SEQ ID NO: 353578 - RNA, 18 nt, Artificial Sequence
  Synthetic
auuaagaugguaagaaau

SEQ ID NO: 353579 - RNA, 19 nt, Artificial Sequence
  Synthetic
aauuaagaugguaagaaau

SEQ ID NO: 353580 - RNA, 20 nt, Artificial Sequence
  Synthetic
aaauuaagaugguaagaaau

SEQ ID NO: 353581 - RNA, 21 nt, Artificial Sequence
  Synthetic
caaauuaagaugguaagaaau

SEQ ID NO: 353582 - RNA, 22 nt, Artificial Sequence
  Synthetic
ccaaauuaagaugguaagaaau

SEQ ID NO: 353583 - RNA, 23 nt, Artificial Sequence
  Synthetic
uccaaauuaagaugguaagaaau

SEQ ID NO: 353584 - RNA, 24 nt, Artificial Sequence
  Synthetic
auccaaauuaagaugguaagaaau

SEQ ID NO: 353585 - RNA, 18 nt, Artificial Sequence
  Synthetic
uaccaacccuacagaaau

SEQ ID NO: 353586 - RNA, 19 nt, Artificial Sequence
  Synthetic
cuaccaacccuacagaaau

SEQ ID NO: 353587 - RNA, 20 nt, Artificial Sequence
  Synthetic
acuaccaacccuacagaaau

SEQ ID NO: 353588 - RNA, 21 nt, Artificial Sequence
  Synthetic
uacuaccaacccuacagaaau

SEQ ID NO: 353589 - RNA, 22 nt, Artificial Sequence
  Synthetic
uuacuaccaacccuacagaaau

SEQ ID NO: 353590 - RNA, 23 nt, Artificial Sequence
  Synthetic
auuacuaccaacccuacagaaau

SEQ ID NO: 353591 - RNA, 24 nt, Artificial Sequence
  Synthetic
aauuacuaccaacccuacagaaau

SEQ ID NO: 353592 - RNA, 18 nt, Artificial Sequence
  Synthetic
aagaguuugaccagaaau

SEQ ID NO: 353593 - RNA, 19 nt, Artificial Sequence
  Synthetic
gaagaguuugaccagaaau

SEQ ID NO: 353594 - RNA, 20 nt, Artificial Sequence
  Synthetic
ugaagaguuugaccagaaau

SEQ ID NO: 353595 - RNA, 21 nt, Artificial Sequence
  Synthetic
augaagaguuugaccagaaau

SEQ ID NO: 353596 - RNA, 22 nt, Artificial Sequence
  Synthetic
aaugaagaguuugaccagaaau

SEQ ID NO: 353597 - RNA, 23 nt, Artificial Sequence
  Synthetic
aaaugaagaguuugaccagaaau

SEQ ID NO: 353598 - RNA, 24 nt, Artificial Sequence
  Synthetic
gaaaugaagaguuugaccagaaau

SEQ ID NO: 353599 - RNA, 18 nt, Artificial Sequence
  Synthetic
acauauaaagccagaaau

SEQ ID NO: 353600 - RNA, 19 nt, Artificial Sequence
  Synthetic
aacauauaaagccagaaau

SEQ ID NO: 353601 - RNA, 20 nt, Artificial Sequence
  Synthetic
uaacauauaaagccagaaau

SEQ ID NO: 353602 - RNA, 21 nt, Artificial Sequence
  Synthetic
auaacauauaaagccagaaau

SEQ ID NO: 353603 - RNA, 22 nt, Artificial Sequence
  Synthetic
gauaacauauaaagccagaaau

SEQ ID NO: 353604 - RNA, 23 nt, Artificial Sequence
  Synthetic
ugauaacauauaaagccagaaau

SEQ ID NO: 353605 - RNA, 24 nt, Artificial Sequence
  Synthetic
augauaacauauaaagccagaaau

SEQ ID NO: 353606 - RNA, 18 nt, Artificial Sequence
  Synthetic
caaagagauuccagaaau

SEQ ID NO: 353607 - RNA, 19 nt, Artificial Sequence
  Synthetic
acaaagagauuccagaaau

SEQ ID NO: 353608 - RNA, 20 nt, Artificial Sequence
  Synthetic
gacaaagagauuccagaaau

SEQ ID NO: 353609 - RNA, 21 nt, Artificial Sequence
  Synthetic
ugacaaagagauuccagaaau

SEQ ID NO: 353610 - RNA, 22 nt, Artificial Sequence
  Synthetic
gugacaaagagauuccagaaau

SEQ ID NO: 353611 - RNA, 23 nt, Artificial Sequence
  Synthetic
agugacaaagagauuccagaaau

SEQ ID NO: 353612 - RNA, 24 nt, Artificial Sequence
  Synthetic
uagugacaaagagauuccagaaau

SEQ ID NO: 353613 - RNA, 18 nt, Artificial Sequence
  Synthetic
acugcuccuuccagaaau

SEQ ID NO: 353614 - RNA, 19 nt, Artificial Sequence
  Synthetic
aacugcuccuuccagaaau

SEQ ID NO: 353615 - RNA, 20 nt, Artificial Sequence
  Synthetic
uaacugcuccuuccagaaau

SEQ ID NO: 353616 - RNA, 21 nt, Artificial Sequence
  Synthetic
auaacugcuccuuccagaaau

SEQ ID NO: 353617 - RNA, 22 nt, Artificial Sequence
  Synthetic
cauaacugcuccuuccagaaau

SEQ ID NO: 353618 - RNA, 23 nt, Artificial Sequence
  Synthetic
ucauaacugcuccuuccagaaau

SEQ ID NO: 353619 - RNA, 24 nt, Artificial Sequence
  Synthetic
uucauaacugcuccuuccagaaau

SEQ ID NO: 353620 - RNA, 18 nt, Artificial Sequence
  Synthetic
ucagaauuuggcagaaau

SEQ ID NO: 353621 - RNA, 19 nt, Artificial Sequence
  Synthetic
cucagaauuuggcagaaau

SEQ ID NO: 353622 - RNA, 20 nt, Artificial Sequence
  Synthetic
ccucagaauuuggcagaaau

SEQ ID NO: 353623 - RNA, 21 nt, Artificial Sequence
  Synthetic
cccucagaauuuggcagaaau

SEQ ID NO: 353624 - RNA, 22 nt, Artificial Sequence
  Synthetic
ucccucagaauuuggcagaaau

SEQ ID NO: 353625 - RNA, 23 nt, Artificial Sequence
  Synthetic
gucccucagaauuuggcagaaau

SEQ ID NO: 353626 - RNA, 24 nt, Artificial Sequence
  Synthetic
agucccucagaauuuggcagaaau

SEQ ID NO: 353627 - RNA, 18 nt, Artificial Sequence
  Synthetic
uuggcccacugcagaaau

SEQ ID NO: 353628 - RNA, 19 nt, Artificial Sequence
  Synthetic
auuggcccacugcagaaau

SEQ ID NO: 353629 - RNA, 20 nt, Artificial Sequence
  Synthetic
cauuggcccacugcagaaau

SEQ ID NO: 353630 - RNA, 21 nt, Artificial Sequence
  Synthetic
ucauuggcccacugcagaaau

SEQ ID NO: 353631 - RNA, 22 nt, Artificial Sequence
  Synthetic
uucauuggcccacugcagaaau

SEQ ID NO: 353632 - RNA, 23 nt, Artificial Sequence
  Synthetic
uuucauuggcccacugcagaaau

SEQ ID NO: 353633 - RNA, 24 nt, Artificial Sequence
  Synthetic
guuucauuggcccacugcagaaau

SEQ ID NO: 353634 - RNA, 18 nt, Artificial Sequence
  Synthetic
auaaaguaagucagaaau

SEQ ID NO: 353635 - RNA, 19 nt, Artificial Sequence
  Synthetic
uauaaaguaagucagaaau

SEQ ID NO: 353636 - RNA, 20 nt, Artificial Sequence
  Synthetic
guauaaaguaagucagaaau

SEQ ID NO: 353637 - RNA, 21 nt, Artificial Sequence
  Synthetic
uguauaaaguaagucagaaau

SEQ ID NO: 353638 - RNA, 22 nt, Artificial Sequence
  Synthetic
uuguauaaaguaagucagaaau

SEQ ID NO: 353639 - RNA, 23 nt, Artificial Sequence
  Synthetic
guuguauaaaguaagucagaaau

SEQ ID NO: 353640 - RNA, 24 nt, Artificial Sequence
  Synthetic
uguuguauaaaguaagucagaaau

SEQ ID NO: 353641 - RNA, 18 nt, Artificial Sequence
  Synthetic
ucuagagagaagagaaau

SEQ ID NO: 353642 - RNA, 19 nt, Artificial Sequence
  Synthetic
cucuagagagaagagaaau

SEQ ID NO: 353643 - RNA, 20 nt, Artificial Sequence
  Synthetic
ccucuagagagaagagaaau

SEQ ID NO: 353644 - RNA, 21 nt, Artificial Sequence
  Synthetic
accucuagagagaagagaaau

SEQ ID NO: 353645 - RNA, 22 nt, Artificial Sequence
  Synthetic
uaccucuagagagaagagaaau

SEQ ID NO: 353646 - RNA, 23 nt, Artificial Sequence
  Synthetic
auaccucuagagagaagagaaau

SEQ ID NO: 353647 - RNA, 24 nt, Artificial Sequence
  Synthetic
aauaccucuagagagaagagaaau

SEQ ID NO: 353648 - RNA, 18 nt, Artificial Sequence
  Synthetic
ggaggcuauaagagaaau

SEQ ID NO: 353649 - RNA, 19 nt, Artificial Sequence
  Synthetic
uggaggcuauaagagaaau

SEQ ID NO: 353650 - RNA, 20 nt, Artificial Sequence
  Synthetic
guggaggcuauaagagaaau

SEQ ID NO: 353651 - RNA, 21 nt, Artificial Sequence
  Synthetic
cguggaggcuauaagagaaau

SEQ ID NO: 353652 - RNA, 22 nt, Artificial Sequence
  Synthetic
acguggaggcuauaagagaaau

SEQ ID NO: 353653 - RNA, 23 nt, Artificial Sequence
  Synthetic
uacguggaggcuauaagagaaau

SEQ ID NO: 353654 - RNA, 24 nt, Artificial Sequence
  Synthetic
uuacguggaggcuauaagagaaau

SEQ ID NO: 353655 - RNA, 18 nt, Artificial Sequence
  Synthetic
guguugguuaagagaaau

SEQ ID NO: 353656 - RNA, 19 nt, Artificial Sequence
  Synthetic
uguguugguuaagagaaau

SEQ ID NO: 353657 - RNA, 20 nt, Artificial Sequence
  Synthetic
guguguugguuaagagaaau

SEQ ID NO: 353658 - RNA, 21 nt, Artificial Sequence
  Synthetic
gguguguugguuaagagaaau

SEQ ID NO: 353659 - RNA, 22 nt, Artificial Sequence
  Synthetic
agguguguugguuaagagaaau

SEQ ID NO: 353660 - RNA, 23 nt, Artificial Sequence
  Synthetic
aagguguguugguuaagagaaau

SEQ ID NO: 353661 - RNA, 24 nt, Artificial Sequence
  Synthetic
caagguguguugguuaagagaaau

SEQ ID NO: 353662 - RNA, 18 nt, Artificial Sequence
  Synthetic
cucaauaagcagagaaau

SEQ ID NO: 353663 - RNA, 19 nt, Artificial Sequence
  Synthetic
ccucaauaagcagagaaau

SEQ ID NO: 353664 - RNA, 20 nt, Artificial Sequence
  Synthetic
uccucaauaagcagagaaau

SEQ ID NO: 353665 - RNA, 21 nt, Artificial Sequence
  Synthetic
uuccucaauaagcagagaaau

SEQ ID NO: 353666 - RNA, 22 nt, Artificial Sequence
  Synthetic
uuuccucaauaagcagagaaau

SEQ ID NO: 353667 - RNA, 23 nt, Artificial Sequence
  Synthetic
auuuccucaauaagcagagaaau

SEQ ID NO: 353668 - RNA, 24 nt, Artificial Sequence
  Synthetic
gauuuccucaauaagcagagaaau

SEQ ID NO: 353669 - RNA, 18 nt, Artificial Sequence
  Synthetic
uucuaaacagagagaaau

SEQ ID NO: 353670 - RNA, 19 nt, Artificial Sequence
  Synthetic
auucuaaacagagagaaau

SEQ ID NO: 353671 - RNA, 20 nt, Artificial Sequence
  Synthetic
aauucuaaacagagagaaau

SEQ ID NO: 353672 - RNA, 21 nt, Artificial Sequence
  Synthetic
aaauucuaaacagagagaaau

SEQ ID NO: 353673 - RNA, 22 nt, Artificial Sequence
  Synthetic
aaaauucuaaacagagagaaau

SEQ ID NO: 353674 - RNA, 23 nt, Artificial Sequence
  Synthetic
aaaaauucuaaacagagagaaau

SEQ ID NO: 353675 - RNA, 24 nt, Artificial Sequence
  Synthetic
caaaaauucuaaacagagagaaau

SEQ ID NO: 353676 - RNA, 18 nt, Artificial Sequence
  Synthetic
agagacagagagagaaau

SEQ ID NO: 353677 - RNA, 19 nt, Artificial Sequence
  Synthetic
gagagacagagagagaaau

SEQ ID NO: 353678 - RNA, 20 nt, Artificial Sequence
  Synthetic
agagagacagagagagaaau

SEQ ID NO: 353679 - RNA, 21 nt, Artificial Sequence
  Synthetic
gagagagacagagagagaaau

SEQ ID NO: 353680 - RNA, 22 nt, Artificial Sequence
  Synthetic
agagagagacagagagagaaau

SEQ ID NO: 353681 - RNA, 23 nt, Artificial Sequence
  Synthetic
gagagagagacagagagagaaau

SEQ ID NO: 353682 - RNA, 24 nt, Artificial Sequence
  Synthetic
agagagagagacagagagagaaau

SEQ ID NO: 353683 - RNA, 18 nt, Artificial Sequence
  Synthetic
ugaggaugcaggagaaau

SEQ ID NO: 353684 - RNA, 19 nt, Artificial Sequence
  Synthetic
uugaggaugcaggagaaau

SEQ ID NO: 353685 - RNA, 20 nt, Artificial Sequence
  Synthetic
guugaggaugcaggagaaau

SEQ ID NO: 353686 - RNA, 21 nt, Artificial Sequence
  Synthetic
gguugaggaugcaggagaaau

SEQ ID NO: 353687 - RNA, 22 nt, Artificial Sequence
  Synthetic
agguugaggaugcaggagaaau

SEQ ID NO: 353688 - RNA, 23 nt, Artificial Sequence
  Synthetic
gagguugaggaugcaggagaaau

SEQ ID NO: 353689 - RNA, 24 nt, Artificial Sequence
  Synthetic
agagguugaggaugcaggagaaau

SEQ ID NO: 353690 - RNA, 18 nt, Artificial Sequence
  Synthetic
gagaggauggggagaaau

SEQ ID NO: 353691 - RNA, 19 nt, Artificial Sequence
  Synthetic
ggagaggauggggagaaau

SEQ ID NO: 353692 - RNA, 20 nt, Artificial Sequence
  Synthetic
uggagaggauggggagaaau

SEQ ID NO: 353693 - RNA, 21 nt, Artificial Sequence
  Synthetic
cuggagaggauggggagaaau

SEQ ID NO: 353694 - RNA, 22 nt, Artificial Sequence
  Synthetic
gcuggagaggauggggagaaau

SEQ ID NO: 353695 - RNA, 23 nt, Artificial Sequence
  Synthetic
ugcuggagaggauggggagaaau

SEQ ID NO: 353696 - RNA, 24 nt, Artificial Sequence
  Synthetic
gugcuggagaggauggggagaaau

SEQ ID NO: 353697 - RNA, 18 nt, Artificial Sequence
  Synthetic
gagaggauguggagaaau

SEQ ID NO: 353698 - RNA, 19 nt, Artificial Sequence
  Synthetic
ggagaggauguggagaaau

SEQ ID NO: 353699 - RNA, 20 nt, Artificial Sequence
  Synthetic
uggagaggauguggagaaau

SEQ ID NO: 353700 - RNA, 21 nt, Artificial Sequence
  Synthetic
cuggagaggauguggagaaau

SEQ ID NO: 353701 - RNA, 22 nt, Artificial Sequence
  Synthetic
gcuggagaggauguggagaaau

SEQ ID NO: 353702 - RNA, 23 nt, Artificial Sequence
  Synthetic
ugcuggagaggauguggagaaau

SEQ ID NO: 353703 - RNA, 24 nt, Artificial Sequence
  Synthetic
augcuggagaggauguggagaaau

SEQ ID NO: 353704 - RNA, 24 nt, Artificial Sequence
  Synthetic
gugcuggagaggauguggagaaau

SEQ ID NO: 353705 - RNA, 18 nt, Artificial Sequence
  Synthetic
uacuucuauaugagaaau

SEQ ID NO: 353706 - RNA, 19 nt, Artificial Sequence
  Synthetic
uuacuucuauaugagaaau

SEQ ID NO: 353707 - RNA, 20 nt, Artificial Sequence
  Synthetic
auuacuucuauaugagaaau

SEQ ID NO: 353708 - RNA, 21 nt, Artificial Sequence
  Synthetic
uauuacuucuauaugagaaau

SEQ ID NO: 353709 - RNA, 22 nt, Artificial Sequence
  Synthetic
cuauuacuucuauaugagaaau

SEQ ID NO: 353710 - RNA, 23 nt, Artificial Sequence
  Synthetic
acuauuacuucuauaugagaaau

SEQ ID NO: 353711 - RNA, 24 nt, Artificial Sequence
  Synthetic
cacuauuacuucuauaugagaaau

SEQ ID NO: 353712 - RNA, 18 nt, Artificial Sequence
  Synthetic
agugaaguuaugagaaau

SEQ ID NO: 353713 - RNA, 19 nt, Artificial Sequence
  Synthetic
aagugaaguuaugagaaau

SEQ ID NO: 353714 - RNA, 20 nt, Artificial Sequence
  Synthetic
uaagugaaguuaugagaaau

SEQ ID NO: 353715 - RNA, 21 nt, Artificial Sequence
  Synthetic
auaagugaaguuaugagaaau

SEQ ID NO: 353716 - RNA, 22 nt, Artificial Sequence
  Synthetic
aauaagugaaguuaugagaaau

SEQ ID NO: 353717 - RNA, 23 nt, Artificial Sequence
  Synthetic
caauaagugaaguuaugagaaau

SEQ ID NO: 353718 - RNA, 24 nt, Artificial Sequence
  Synthetic
gcaauaagugaaguuaugagaaau

SEQ ID NO: 353719 - RNA, 18 nt, Artificial Sequence
  Synthetic
guuucuugccugagaaau

SEQ ID NO: 353720 - RNA, 19 nt, Artificial Sequence
  Synthetic
aguuucuugccugagaaau

SEQ ID NO: 353721 - RNA, 20 nt, Artificial Sequence
  Synthetic
caguuucuugccugagaaau

SEQ ID NO: 353722 - RNA, 21 nt, Artificial Sequence
  Synthetic
ucaguuucuugccugagaaau

SEQ ID NO: 353723 - RNA, 22 nt, Artificial Sequence
  Synthetic
aucaguuucuugccugagaaau

SEQ ID NO: 353724 - RNA, 23 nt, Artificial Sequence
  Synthetic
gaucaguuucuugccugagaaau

SEQ ID NO: 353725 - RNA, 24 nt, Artificial Sequence
  Synthetic
ugaucaguuucuugccugagaaau

SEQ ID NO: 353726 - RNA, 18 nt, Artificial Sequence
  Synthetic
guaaaauagaauagaaau

SEQ ID NO: 353727 - RNA, 19 nt, Artificial Sequence
  Synthetic
aguaaaauagaauagaaau

SEQ ID NO: 353728 - RNA, 20 nt, Artificial Sequence
  Synthetic
uaguaaaauagaauagaaau

SEQ ID NO: 353729 - RNA, 21 nt, Artificial Sequence
  Synthetic
uuaguaaaauagaauagaaau

SEQ ID NO: 353730 - RNA, 22 nt, Artificial Sequence
  Synthetic
auuaguaaaauagaauagaaau

SEQ ID NO: 353731 - RNA, 23 nt, Artificial Sequence
  Synthetic
aauuaguaaaauagaauagaaau

SEQ ID NO: 353732 - RNA, 24 nt, Artificial Sequence
  Synthetic
aaauuaguaaaauagaauagaaau

SEQ ID NO: 353733 - RNA, 18 nt, Artificial Sequence
  Synthetic
guguugucccauagaaau

SEQ ID NO: 353734 - RNA, 19 nt, Artificial Sequence
  Synthetic
aguguugucccauagaaau

SEQ ID NO: 353735 - RNA, 20 nt, Artificial Sequence
  Synthetic
caguguugucccauagaaau

SEQ ID NO: 353736 - RNA, 21 nt, Artificial Sequence
  Synthetic
acaguguugucccauagaaau

SEQ ID NO: 353737 - RNA, 22 nt, Artificial Sequence
  Synthetic
aacaguguugucccauagaaau

SEQ ID NO: 353738 - RNA, 23 nt, Artificial Sequence
  Synthetic
gaacaguguugucccauagaaau

SEQ ID NO: 353739 - RNA, 24 nt, Artificial Sequence
  Synthetic
agaacaguguugucccauagaaau

SEQ ID NO: 353740 - RNA, 18 nt, Artificial Sequence
  Synthetic
uugggaaguccuagaaau

SEQ ID NO: 353741 - RNA, 19 nt, Artificial Sequence
  Synthetic
cuugggaaguccuagaaau

SEQ ID NO: 353742 - RNA, 20 nt, Artificial Sequence
  Synthetic
acuugggaaguccuagaaau

SEQ ID NO: 353743 - RNA, 21 nt, Artificial Sequence
  Synthetic
aacuugggaaguccuagaaau

SEQ ID NO: 353744 - RNA, 22 nt, Artificial Sequence
  Synthetic
gaacuugggaaguccuagaaau

SEQ ID NO: 353745 - RNA, 23 nt, Artificial Sequence
  Synthetic
agaacuugggaaguccuagaaau

SEQ ID NO: 353746 - RNA, 24 nt, Artificial Sequence
  Synthetic
uagaacuugggaaguccuagaaau

SEQ ID NO: 353747 - RNA, 18 nt, Artificial Sequence
  Synthetic
uuuuaagauauuagaaau

SEQ ID NO: 353748 - RNA, 19 nt, Artificial Sequence
  Synthetic
auuuuaagauauuagaaau

SEQ ID NO: 353749 - RNA, 20 nt, Artificial Sequence
  Synthetic
aauuuuaagauauuagaaau

SEQ ID NO: 353750 - RNA, 21 nt, Artificial Sequence
  Synthetic
aaauuuuaagauauuagaaau

SEQ ID NO: 353751 - RNA, 22 nt, Artificial Sequence
  Synthetic
gaaauuuuaagauauuagaaau

SEQ ID NO: 353752 - RNA, 23 nt, Artificial Sequence
  Synthetic
ugaaauuuuaagauauuagaaau

SEQ ID NO: 353753 - RNA, 24 nt, Artificial Sequence
  Synthetic
cugaaauuuuaagauauuagaaau

SEQ ID NO: 353754 - RNA, 18 nt, Artificial Sequence
  Synthetic
aaaauuaauguuagaaau

SEQ ID NO: 353755 - RNA, 19 nt, Artificial Sequence
  Synthetic
gaaaauuaauguuagaaau

SEQ ID NO: 353756 - RNA, 20 nt, Artificial Sequence
  Synthetic
ugaaaauuaauguuagaaau

SEQ ID NO: 353757 - RNA, 21 nt, Artificial Sequence
  Synthetic
uugaaaauuaauguuagaaau

SEQ ID NO: 353758 - RNA, 22 nt, Artificial Sequence
  Synthetic
uuugaaaauuaauguuagaaau

SEQ ID NO: 353759 - RNA, 23 nt, Artificial Sequence
  Synthetic
auuugaaaauuaauguuagaaau

SEQ ID NO: 353760 - RNA, 24 nt, Artificial Sequence
  Synthetic
aauuugaaaauuaauguuagaaau

SEQ ID NO: 353761 - RNA, 18 nt, Artificial Sequence
  Synthetic
agagaggcuguuagaaau

SEQ ID NO: 353762 - RNA, 19 nt, Artificial Sequence
  Synthetic
cagagaggcuguuagaaau

SEQ ID NO: 353763 - RNA, 20 nt, Artificial Sequence
  Synthetic
ucagagaggcuguuagaaau

SEQ ID NO: 353764 - RNA, 21 nt, Artificial Sequence
  Synthetic
cucagagaggcuguuagaaau

SEQ ID NO: 353765 - RNA, 22 nt, Artificial Sequence
  Synthetic
ucucagagaggcuguuagaaau

SEQ ID NO: 353766 - RNA, 23 nt, Artificial Sequence
  Synthetic
gucucagagaggcuguuagaaau

SEQ ID NO: 353767 - RNA, 24 nt, Artificial Sequence
  Synthetic
agucucagagaggcuguuagaaau

SEQ ID NO: 353768 - RNA, 18 nt, Artificial Sequence
  Synthetic
uuuaaguuguuuagaaau

SEQ ID NO: 353769 - RNA, 19 nt, Artificial Sequence
  Synthetic
uuuuaaguuguuuagaaau

SEQ ID NO: 353770 - RNA, 20 nt, Artificial Sequence
  Synthetic
uuuuuaaguuguuuagaaau

SEQ ID NO: 353771 - RNA, 21 nt, Artificial Sequence
  Synthetic
guuuuuaaguuguuuagaaau

SEQ ID NO: 353772 - RNA, 22 nt, Artificial Sequence
  Synthetic
gguuuuuaaguuguuuagaaau

SEQ ID NO: 353773 - RNA, 23 nt, Artificial Sequence
  Synthetic
ugguuuuuaaguuguuuagaaau

SEQ ID NO: 353774 - RNA, 24 nt, Artificial Sequence
  Synthetic
gugguuuuuaaguuguuuagaaau

SEQ ID NO: 353775 - RNA, 18 nt, Artificial Sequence
  Synthetic
acucguuggccucgaaau

SEQ ID NO: 353776 - RNA, 19 nt, Artificial Sequence
  Synthetic
aacucguuggccucgaaau

SEQ ID NO: 353777 - RNA, 20 nt, Artificial Sequence
  Synthetic
aaacucguuggccucgaaau

SEQ ID NO: 353778 - RNA, 21 nt, Artificial Sequence
  Synthetic
caaacucguuggccucgaaau

SEQ ID NO: 353779 - RNA, 22 nt, Artificial Sequence
  Synthetic
ccaaacucguuggccucgaaau

SEQ ID NO: 353780 - RNA, 23 nt, Artificial Sequence
  Synthetic
cccaaacucguuggccucgaaau

SEQ ID NO: 353781 - RNA, 24 nt, Artificial Sequence
  Synthetic
acccaaacucguuggccucgaaau

SEQ ID NO: 353782 - RNA, 18 nt, Artificial Sequence
  Synthetic
aaaaaaaaaaaaggaaau

SEQ ID NO: 353783 - RNA, 19 nt, Artificial Sequence
  Synthetic
aaaaaaaaaaaaaggaaau

SEQ ID NO: 353784 - RNA, 20 nt, Artificial Sequence
  Synthetic
aaaaaaaaaaaaaaggaaau

SEQ ID NO: 353785 - RNA, 21 nt, Artificial Sequence
  Synthetic
aaaaaaaaaaaaaaaggaaau

SEQ ID NO: 353786 - RNA, 22 nt, Artificial Sequence
  Synthetic
aaaaaaaaaaaaaaaaggaaau

SEQ ID NO: 353787 - RNA, 23 nt, Artificial Sequence
  Synthetic
gaaaaaaaaaaaaaaaaggaaau

SEQ ID NO: 353788 - RNA, 24 nt, Artificial Sequence
  Synthetic
ggaaaaaaaaaaaaaaaaggaaau

SEQ ID NO: 353789 - RNA, 18 nt, Artificial Sequence
  Synthetic
auuaaaaaaaaaggaaau

SEQ ID NO: 353790 - RNA, 19 nt, Artificial Sequence
  Synthetic
uauuaaaaaaaaaggaaau

SEQ ID NO: 353791 - RNA, 20 nt, Artificial Sequence
  Synthetic
auauuaaaaaaaaaggaaau

SEQ ID NO: 353792 - RNA, 21 nt, Artificial Sequence
  Synthetic
uauauuaaaaaaaaaggaaau

SEQ ID NO: 353793 - RNA, 22 nt, Artificial Sequence
  Synthetic
auauauuaaaaaaaaaggaaau

SEQ ID NO: 353794 - RNA, 23 nt, Artificial Sequence
  Synthetic
cauauauuaaaaaaaaaggaaau

SEQ ID NO: 353795 - RNA, 24 nt, Artificial Sequence
  Synthetic
ucauauauuaaaaaaaaaggaaau

SEQ ID NO: 353796 - RNA, 18 nt, Artificial Sequence
  Synthetic
cuagauguuaaaggaaau

SEQ ID NO: 353797 - RNA, 19 nt, Artificial Sequence
  Synthetic
acuagauguuaaaggaaau

SEQ ID NO: 353798 - RNA, 20 nt, Artificial Sequence
  Synthetic
aacuagauguuaaaggaaau

SEQ ID NO: 353799 - RNA, 21 nt, Artificial Sequence
  Synthetic
aaacuagauguuaaaggaaau

SEQ ID NO: 353800 - RNA, 22 nt, Artificial Sequence
  Synthetic
aaaacuagauguuaaaggaaau

SEQ ID NO: 353801 - RNA, 23 nt, Artificial Sequence
  Synthetic
uaaaacuagauguuaaaggaaau

SEQ ID NO: 353802 - RNA, 24 nt, Artificial Sequence
  Synthetic
auaaaacuagauguuaaaggaaau

SEQ ID NO: 353803 - RNA, 18 nt, Artificial Sequence
  Synthetic
accacugcucaaggaaau

SEQ ID NO: 353804 - RNA, 19 nt, Artificial Sequence
  Synthetic
aaccacugcucaaggaaau

SEQ ID NO: 353805 - RNA, 20 nt, Artificial Sequence
  Synthetic
aaaccacugcucaaggaaau

SEQ ID NO: 353806 - RNA, 21 nt, Artificial Sequence
  Synthetic
caaaccacugcucaaggaaau

SEQ ID NO: 353807 - RNA, 22 nt, Artificial Sequence
  Synthetic
acaaaccacugcucaaggaaau

SEQ ID NO: 353808 - RNA, 23 nt, Artificial Sequence
  Synthetic
uacaaaccacugcucaaggaaau

SEQ ID NO: 353809 - RNA, 24 nt, Artificial Sequence
  Synthetic
cuacaaaccacugcucaaggaaau

SEQ ID NO: 353810 - RNA, 18 nt, Artificial Sequence
  Synthetic
aauucaacagaaggaaau

SEQ ID NO: 353811 - RNA, 19 nt, Artificial Sequence
  Synthetic
gaauucaacagaaggaaau

SEQ ID NO: 353812 - RNA, 20 nt, Artificial Sequence
  Synthetic
ggaauucaacagaaggaaau

SEQ ID NO: 353813 - RNA, 21 nt, Artificial Sequence
  Synthetic
uggaauucaacagaaggaaau

SEQ ID NO: 353814 - RNA, 22 nt, Artificial Sequence
  Synthetic
uuggaauucaacagaaggaaau

SEQ ID NO: 353815 - RNA, 23 nt, Artificial Sequence
  Synthetic
auuggaauucaacagaaggaaau

SEQ ID NO: 353816 - RNA, 24 nt, Artificial Sequence
  Synthetic
aauuggaauucaacagaaggaaau

SEQ ID NO: 353817 - RNA, 18 nt, Artificial Sequence
  Synthetic
auaucugcagaaggaaau

SEQ ID NO: 353818 - RNA, 19 nt, Artificial Sequence
  Synthetic
aauaucugcagaaggaaau

SEQ ID NO: 353819 - RNA, 20 nt, Artificial Sequence
  Synthetic
aaauaucugcagaaggaaau

SEQ ID NO: 353820 - RNA, 21 nt, Artificial Sequence
  Synthetic
aaaauaucugcagaaggaaau

SEQ ID NO: 353821 - RNA, 22 nt, Artificial Sequence
  Synthetic
aaaaauaucugcagaaggaaau

SEQ ID NO: 353822 - RNA, 23 nt, Artificial Sequence
  Synthetic
caaaaauaucugcagaaggaaau

SEQ ID NO: 353823 - RNA, 24 nt, Artificial Sequence
  Synthetic
acaaaaauaucugcagaaggaaau

SEQ ID NO: 353824 - RNA, 18 nt, Artificial Sequence
  Synthetic
gaaaauaaggaaggaaau

SEQ ID NO: 353825 - RNA, 19 nt, Artificial Sequence
  Synthetic
ggaaaauaaggaaggaaau

SEQ ID NO: 353826 - RNA, 20 nt, Artificial Sequence
  Synthetic
aggaaaauaaggaaggaaau

SEQ ID NO: 353827 - RNA, 21 nt, Artificial Sequence
  Synthetic
gaggaaaauaaggaaggaaau

SEQ ID NO: 353828 - RNA, 22 nt, Artificial Sequence
  Synthetic
agaggaaaauaaggaaggaaau

SEQ ID NO: 353829 - RNA, 23 nt, Artificial Sequence
  Synthetic
aagaggaaaauaaggaaggaaau

SEQ ID NO: 353830 - RNA, 24 nt, Artificial Sequence
  Synthetic
uaagaggaaaauaaggaaggaaau

SEQ ID NO: 353831 - RNA, 18 nt, Artificial Sequence
  Synthetic
uuuauacaugaaggaaau

SEQ ID NO: 353832 - RNA, 19 nt, Artificial Sequence
  Synthetic
uuuuauacaugaaggaaau

SEQ ID NO: 353833 - RNA, 20 nt, Artificial Sequence
  Synthetic
auuuuauacaugaaggaaau

SEQ ID NO: 353834 - RNA, 21 nt, Artificial Sequence
  Synthetic
aauuuuauacaugaaggaaau

SEQ ID NO: 353835 - RNA, 22 nt, Artificial Sequence
  Synthetic
aaauuuuauacaugaaggaaau

SEQ ID NO: 353836 - RNA, 23 nt, Artificial Sequence
  Synthetic
caaauuuuauacaugaaggaaau

SEQ ID NO: 353837 - RNA, 24 nt, Artificial Sequence
  Synthetic
ccaaauuuuauacaugaaggaaau

SEQ ID NO: 353838 - RNA, 18 nt, Artificial Sequence
  Synthetic
aguauuauuccaggaaau

SEQ ID NO: 353839 - RNA, 19 nt, Artificial Sequence
  Synthetic
aaguauuauuccaggaaau

SEQ ID NO: 353840 - RNA, 20 nt, Artificial Sequence
  Synthetic
caaguauuauuccaggaaau

SEQ ID NO: 353841 - RNA, 21 nt, Artificial Sequence
  Synthetic
acaaguauuauuccaggaaau

SEQ ID NO: 353842 - RNA, 22 nt, Artificial Sequence
  Synthetic
gacaaguauuauuccaggaaau

SEQ ID NO: 353843 - RNA, 23 nt, Artificial Sequence
  Synthetic
ugacaaguauuauuccaggaaau

SEQ ID NO: 353844 - RNA, 24 nt, Artificial Sequence
  Synthetic
gugacaaguauuauuccaggaaau

SEQ ID NO: 353845 - RNA, 18 nt, Artificial Sequence
  Synthetic
cauucaaauucaggaaau

SEQ ID NO: 353846 - RNA, 19 nt, Artificial Sequence
  Synthetic
acauucaaauucaggaaau

SEQ ID NO: 353847 - RNA, 20 nt, Artificial Sequence
  Synthetic
aacauucaaauucaggaaau

SEQ ID NO: 353848 - RNA, 21 nt, Artificial Sequence
  Synthetic
caacauucaaauucaggaaau

SEQ ID NO: 353849 - RNA, 22 nt, Artificial Sequence
  Synthetic
ccaacauucaaauucaggaaau

SEQ ID NO: 353850 - RNA, 23 nt, Artificial Sequence
  Synthetic
gccaacauucaaauucaggaaau

SEQ ID NO: 353851 - RNA, 24 nt, Artificial Sequence
  Synthetic
ggccaacauucaaauucaggaaau

SEQ ID NO: 353852 - RNA, 18 nt, Artificial Sequence
  Synthetic
uugaggaugugaggaaau

SEQ ID NO: 353853 - RNA, 19 nt, Artificial Sequence
  Synthetic
guugaggaugugaggaaau

SEQ ID NO: 353854 - RNA, 20 nt, Artificial Sequence
  Synthetic
uguugaggaugugaggaaau

SEQ ID NO: 353855 - RNA, 21 nt, Artificial Sequence
  Synthetic
uuguugaggaugugaggaaau

SEQ ID NO: 353856 - RNA, 22 nt, Artificial Sequence
  Synthetic
guuguugaggaugugaggaaau

SEQ ID NO: 353857 - RNA, 23 nt, Artificial Sequence
  Synthetic
uguuguugaggaugugaggaaau

SEQ ID NO: 353858 - RNA, 24 nt, Artificial Sequence
  Synthetic
auguuguugaggaugugaggaaau

SEQ ID NO: 353859 - RNA, 18 nt, Artificial Sequence
  Synthetic
cuuggugauauaggaaau

SEQ ID NO: 353860 - RNA, 19 nt, Artificial Sequence
  Synthetic
acuuggugauauaggaaau

SEQ ID NO: 353861 - RNA, 20 nt, Artificial Sequence
  Synthetic
uacuuggugauauaggaaau

SEQ ID NO: 353862 - RNA, 21 nt, Artificial Sequence
  Synthetic
guacuuggugauauaggaaau

SEQ ID NO: 353863 - RNA, 22 nt, Artificial Sequence
  Synthetic
uguacuuggugauauaggaaau

SEQ ID NO: 353864 - RNA, 23 nt, Artificial Sequence
  Synthetic
cuguacuuggugauauaggaaau

SEQ ID NO: 353865 - RNA, 24 nt, Artificial Sequence
  Synthetic
gcuguacuuggugauauaggaaau

SEQ ID NO: 353866 - RNA, 18 nt, Artificial Sequence
  Synthetic
auuauaauuguaggaaau

SEQ ID NO: 353867 - RNA, 19 nt, Artificial Sequence
  Synthetic
aauuauaauuguaggaaau

SEQ ID NO: 353868 - RNA, 20 nt, Artificial Sequence
  Synthetic
aaauuauaauuguaggaaau

SEQ ID NO: 353869 - RNA, 21 nt, Artificial Sequence
  Synthetic
aaaauuauaauuguaggaaau

SEQ ID NO: 353870 - RNA, 22 nt, Artificial Sequence
  Synthetic
aaaaauuauaauuguaggaaau

SEQ ID NO: 353871 - RNA, 23 nt, Artificial Sequence
  Synthetic
caaaaauuauaauuguaggaaau

SEQ ID NO: 353872 - RNA, 24 nt, Artificial Sequence
  Synthetic
acaaaaauuauaauuguaggaaau

SEQ ID NO: 353873 - RNA, 18 nt, Artificial Sequence
  Synthetic
agcuacugcuuaggaaau

SEQ ID NO: 353874 - RNA, 19 nt, Artificial Sequence
  Synthetic
aagcuacugcuuaggaaau

SEQ ID NO: 353875 - RNA, 20 nt, Artificial Sequence
  Synthetic
uaagcuacugcuuaggaaau

SEQ ID NO: 353876 - RNA, 21 nt, Artificial Sequence
  Synthetic
uuaagcuacugcuuaggaaau

SEQ ID NO: 353877 - RNA, 22 nt, Artificial Sequence
  Synthetic
uuuaagcuacugcuuaggaaau

SEQ ID NO: 353878 - RNA, 23 nt, Artificial Sequence
  Synthetic
auuuaagcuacugcuuaggaaau

SEQ ID NO: 353879 - RNA, 24 nt, Artificial Sequence
  Synthetic
gauuuaagcuacugcuuaggaaau

SEQ ID NO: 353880 - RNA, 18 nt, Artificial Sequence
  Synthetic
uucuuuggggagggaaau

SEQ ID NO: 353881 - RNA, 19 nt, Artificial Sequence
  Synthetic
uuucuuuggggagggaaau

SEQ ID NO: 353882 - RNA, 20 nt, Artificial Sequence
  Synthetic
uuuucuuuggggagggaaau

SEQ ID NO: 353883 - RNA, 21 nt, Artificial Sequence
  Synthetic
auuuucuuuggggagggaaau

SEQ ID NO: 353884 - RNA, 22 nt, Artificial Sequence
  Synthetic
gauuuucuuuggggagggaaau

SEQ ID NO: 353885 - RNA, 23 nt, Artificial Sequence
  Synthetic
agauuuucuuuggggagggaaau

SEQ ID NO: 353886 - RNA, 24 nt, Artificial Sequence
  Synthetic
aagauuuucuuuggggagggaaau

SEQ ID NO: 353887 - RNA, 18 nt, Artificial Sequence
  Synthetic
gugugugagaggggaaau

SEQ ID NO: 353888 - RNA, 19 nt, Artificial Sequence
  Synthetic
ugugugugagaggggaaau

SEQ ID NO: 353889 - RNA, 20 nt, Artificial Sequence
  Synthetic
augugugugagaggggaaau

SEQ ID NO: 353890 - RNA, 21 nt, Artificial Sequence
  Synthetic
aaugugugugagaggggaaau

SEQ ID NO: 353891 - RNA, 22 nt, Artificial Sequence
  Synthetic
aaaugugugugagaggggaaau

SEQ ID NO: 353892 - RNA, 23 nt, Artificial Sequence
  Synthetic
caaaugugugugagaggggaaau

SEQ ID NO: 353893 - RNA, 24 nt, Artificial Sequence
  Synthetic
acaaaugugugugagaggggaaau

SEQ ID NO: 353894 - RNA, 18 nt, Artificial Sequence
  Synthetic
aaagguggagggggaaau

SEQ ID NO: 353895 - RNA, 19 nt, Artificial Sequence
  Synthetic
gaaagguggagggggaaau

SEQ ID NO: 353896 - RNA, 20 nt, Artificial Sequence
  Synthetic
agaaagguggagggggaaau

SEQ ID NO: 353897 - RNA, 21 nt, Artificial Sequence
  Synthetic
gagaaagguggagggggaaau

SEQ ID NO: 353898 - RNA, 22 nt, Artificial Sequence
  Synthetic
ggagaaagguggagggggaaau

SEQ ID NO: 353899 - RNA, 23 nt, Artificial Sequence
  Synthetic
gggagaaagguggagggggaaau

SEQ ID NO: 353900 - RNA, 24 nt, Artificial Sequence
  Synthetic
agggagaaagguggagggggaaau

SEQ ID NO: 353901 - RNA, 18 nt, Artificial Sequence
  Synthetic
acaaaguuggugggaaau

SEQ ID NO: 353902 - RNA, 19 nt, Artificial Sequence
  Synthetic
cacaaaguuggugggaaau

SEQ ID NO: 353903 - RNA, 20 nt, Artificial Sequence
  Synthetic
ccacaaaguuggugggaaau

SEQ ID NO: 353904 - RNA, 21 nt, Artificial Sequence
  Synthetic
gccacaaaguuggugggaaau

SEQ ID NO: 353905 - RNA, 22 nt, Artificial Sequence
  Synthetic
agccacaaaguuggugggaaau

SEQ ID NO: 353906 - RNA, 23 nt, Artificial Sequence
  Synthetic
aagccacaaaguuggugggaaau

SEQ ID NO: 353907 - RNA, 24 nt, Artificial Sequence
  Synthetic
caagccacaaaguuggugggaaau

SEQ ID NO: 353908 - RNA, 18 nt, Artificial Sequence
  Synthetic
ccaguauaaaauggaaau

SEQ ID NO: 353909 - RNA, 19 nt, Artificial Sequence
  Synthetic
gccaguauaaaauggaaau

SEQ ID NO: 353910 - RNA, 20 nt, Artificial Sequence
  Synthetic
agccaguauaaaauggaaau

SEQ ID NO: 353911 - RNA, 21 nt, Artificial Sequence
  Synthetic
aagccaguauaaaauggaaau

SEQ ID NO: 353912 - RNA, 22 nt, Artificial Sequence
  Synthetic
caagccaguauaaaauggaaau

SEQ ID NO: 353913 - RNA, 23 nt, Artificial Sequence
  Synthetic
ccaagccaguauaaaauggaaau

SEQ ID NO: 353914 - RNA, 24 nt, Artificial Sequence
  Synthetic
uccaagccaguauaaaauggaaau

SEQ ID NO: 353915 - RNA, 18 nt, Artificial Sequence
  Synthetic
auaauauuauauggaaau

SEQ ID NO: 353916 - RNA, 19 nt, Artificial Sequence
  Synthetic
cauaauauuauauggaaau

SEQ ID NO: 353917 - RNA, 20 nt, Artificial Sequence
  Synthetic
ucauaauauuauauggaaau

SEQ ID NO: 353918 - RNA, 21 nt, Artificial Sequence
  Synthetic
aucauaauauuauauggaaau

SEQ ID NO: 353919 - RNA, 22 nt, Artificial Sequence
  Synthetic
caucauaauauuauauggaaau

SEQ ID NO: 353920 - RNA, 23 nt, Artificial Sequence
  Synthetic
acaucauaauauuauauggaaau

SEQ ID NO: 353921 - RNA, 24 nt, Artificial Sequence
  Synthetic
cacaucauaauauuauauggaaau

SEQ ID NO: 353922 - RNA, 18 nt, Artificial Sequence
  Synthetic
aaguagggagguggaaau

SEQ ID NO: 353923 - RNA, 19 nt, Artificial Sequence
  Synthetic
gaaguagggagguggaaau

SEQ ID NO: 353924 - RNA, 20 nt, Artificial Sequence
  Synthetic
agaaguagggagguggaaau

SEQ ID NO: 353925 - RNA, 21 nt, Artificial Sequence
  Synthetic
gagaaguagggagguggaaau

SEQ ID NO: 353926 - RNA, 22 nt, Artificial Sequence
  Synthetic
ugagaaguagggagguggaaau

SEQ ID NO: 353927 - RNA, 23 nt, Artificial Sequence
  Synthetic
uugagaaguagggagguggaaau

SEQ ID NO: 353928 - RNA, 24 nt, Artificial Sequence
  Synthetic
guugagaaguagggagguggaaau

SEQ ID NO: 353929 - RNA, 18 nt, Artificial Sequence
  Synthetic
cuagagaucuguggaaau

SEQ ID NO: 353930 - RNA, 19 nt, Artificial Sequence
  Synthetic
ccuagagaucuguggaaau

SEQ ID NO: 353931 - RNA, 20 nt, Artificial Sequence
  Synthetic
gccuagagaucuguggaaau

SEQ ID NO: 353932 - RNA, 21 nt, Artificial Sequence
  Synthetic
ggccuagagaucuguggaaau

SEQ ID NO: 353933 - RNA, 22 nt, Artificial Sequence
  Synthetic
uggccuagagaucuguggaaau

SEQ ID NO: 353934 - RNA, 23 nt, Artificial Sequence
  Synthetic
cuggccuagagaucuguggaaau

SEQ ID NO: 353935 - RNA, 24 nt, Artificial Sequence
  Synthetic
ccuggccuagagaucuguggaaau

SEQ ID NO: 353936 - RNA, 18 nt, Artificial Sequence
  Synthetic
caaaacccaaaaugaaau

SEQ ID NO: 353937 - RNA, 19 nt, Artificial Sequence
  Synthetic
ucaaaacccaaaaugaaau

SEQ ID NO: 353938 - RNA, 20 nt, Artificial Sequence
  Synthetic
cucaaaacccaaaaugaaau

SEQ ID NO: 353939 - RNA, 21 nt, Artificial Sequence
  Synthetic
ucucaaaacccaaaaugaaau

SEQ ID NO: 353940 - RNA, 22 nt, Artificial Sequence
  Synthetic
uucucaaaacccaaaaugaaau

SEQ ID NO: 353941 - RNA, 23 nt, Artificial Sequence
  Synthetic
guucucaaaacccaaaaugaaau

SEQ ID NO: 353942 - RNA, 24 nt, Artificial Sequence
  Synthetic
aguucucaaaacccaaaaugaaau

SEQ ID NO: 353943 - RNA, 18 nt, Artificial Sequence
  Synthetic
aauaaacuuaaaugaaau

SEQ ID NO: 353944 - RNA, 19 nt, Artificial Sequence
  Synthetic
uaauaaacuuaaaugaaau

SEQ ID NO: 353945 - RNA, 20 nt, Artificial Sequence
  Synthetic
auaauaaacuuaaaugaaau

SEQ ID NO: 353946 - RNA, 21 nt, Artificial Sequence
  Synthetic
cauaauaaacuuaaaugaaau

SEQ ID NO: 353947 - RNA, 22 nt, Artificial Sequence
  Synthetic
gcauaauaaacuuaaaugaaau

SEQ ID NO: 353948 - RNA, 23 nt, Artificial Sequence
  Synthetic
agcauaauaaacuuaaaugaaau

SEQ ID NO: 353949 - RNA, 24 nt, Artificial Sequence
  Synthetic
uagcauaauaaacuuaaaugaaau

SEQ ID NO: 353950 - RNA, 18 nt, Artificial Sequence
  Synthetic
guuuccaacacaugaaau

SEQ ID NO: 353951 - RNA, 19 nt, Artificial Sequence
  Synthetic
aguuuccaacacaugaaau

SEQ ID NO: 353952 - RNA, 20 nt, Artificial Sequence
  Synthetic
aaguuuccaacacaugaaau

SEQ ID NO: 353953 - RNA, 21 nt, Artificial Sequence
  Synthetic
uaaguuuccaacacaugaaau

SEQ ID NO: 353954 - RNA, 22 nt, Artificial Sequence
  Synthetic
uuaaguuuccaacacaugaaau

SEQ ID NO: 353955 - RNA, 23 nt, Artificial Sequence
  Synthetic
auuaaguuuccaacacaugaaau

SEQ ID NO: 353956 - RNA, 24 nt, Artificial Sequence
  Synthetic
gauuaaguuuccaacacaugaaau

SEQ ID NO: 353957 - RNA, 18 nt, Artificial Sequence
  Synthetic
uaaagaggcacaugaaau

SEQ ID NO: 353958 - RNA, 19 nt, Artificial Sequence
  Synthetic
auaaagaggcacaugaaau

SEQ ID NO: 353959 - RNA, 20 nt, Artificial Sequence
  Synthetic
uauaaagaggcacaugaaau

SEQ ID NO: 353960 - RNA, 21 nt, Artificial Sequence
  Synthetic
auauaaagaggcacaugaaau

SEQ ID NO: 353961 - RNA, 22 nt, Artificial Sequence
  Synthetic
cauauaaagaggcacaugaaau

SEQ ID NO: 353962 - RNA, 23 nt, Artificial Sequence
  Synthetic
gcauauaaagaggcacaugaaau

SEQ ID NO: 353963 - RNA, 24 nt, Artificial Sequence
  Synthetic
agcauauaaagaggcacaugaaau

SEQ ID NO: 353964 - RNA, 18 nt, Artificial Sequence
  Synthetic
cauucugcuacaugaaau

SEQ ID NO: 353965 - RNA, 19 nt, Artificial Sequence
  Synthetic
acauucugcuacaugaaau

SEQ ID NO: 353966 - RNA, 20 nt, Artificial Sequence
  Synthetic
uacauucugcuacaugaaau

SEQ ID NO: 353967 - RNA, 21 nt, Artificial Sequence
  Synthetic
auacauucugcuacaugaaau

SEQ ID NO: 353968 - RNA, 22 nt, Artificial Sequence
  Synthetic
gauacauucugcuacaugaaau

SEQ ID NO: 353969 - RNA, 23 nt, Artificial Sequence
  Synthetic
ggauacauucugcuacaugaaau

SEQ ID NO: 353970 - RNA, 24 nt, Artificial Sequence
  Synthetic
gggauacauucugcuacaugaaau

SEQ ID NO: 353971 - RNA, 18 nt, Artificial Sequence
  Synthetic
aggagggaaagaugaaau

SEQ ID NO: 353972 - RNA, 19 nt, Artificial Sequence
  Synthetic
aaggagggaaagaugaaau

SEQ ID NO: 353973 - RNA, 20 nt, Artificial Sequence
  Synthetic
caaggagggaaagaugaaau

SEQ ID NO: 353974 - RNA, 21 nt, Artificial Sequence
  Synthetic
ccaaggagggaaagaugaaau

SEQ ID NO: 353975 - RNA, 22 nt, Artificial Sequence
  Synthetic
gccaaggagggaaagaugaaau

SEQ ID NO: 353976 - RNA, 23 nt, Artificial Sequence
  Synthetic
ugccaaggagggaaagaugaaau

SEQ ID NO: 353977 - RNA, 24 nt, Artificial Sequence
  Synthetic
cugccaaggagggaaagaugaaau

SEQ ID NO: 353978 - RNA, 18 nt, Artificial Sequence
  Synthetic
uagggacauggaugaaau

SEQ ID NO: 353979 - RNA, 19 nt, Artificial Sequence
  Synthetic
guagggacauggaugaaau

SEQ ID NO: 353980 - RNA, 20 nt, Artificial Sequence
  Synthetic
uguagggacauggaugaaau

SEQ ID NO: 353981 - RNA, 21 nt, Artificial Sequence
  Synthetic
uuguagggacauggaugaaau

SEQ ID NO: 353982 - RNA, 22 nt, Artificial Sequence
  Synthetic
guuguagggacauggaugaaau

SEQ ID NO: 353983 - RNA, 23 nt, Artificial Sequence
  Synthetic
cguuguagggacauggaugaaau

SEQ ID NO: 353984 - RNA, 24 nt, Artificial Sequence
  Synthetic
ccguuguagggacauggaugaaau

SEQ ID NO: 353985 - RNA, 22 nt, Artificial Sequence
  Synthetic
uuuguagggacauggaugaaau

SEQ ID NO: 353986 - RNA, 23 nt, Artificial Sequence
  Synthetic
cuuuguagggacauggaugaaau

SEQ ID NO: 353987 - RNA, 24 nt, Artificial Sequence
  Synthetic
ccuuuguagggacauggaugaaau

SEQ ID NO: 353988 - RNA, 18 nt, Artificial Sequence
  Synthetic
uuguucuuacuaugaaau

SEQ ID NO: 353989 - RNA, 19 nt, Artificial Sequence
  Synthetic
auuguucuuacuaugaaau

SEQ ID NO: 353990 - RNA, 20 nt, Artificial Sequence
  Synthetic
uauuguucuuacuaugaaau

SEQ ID NO: 353991 - RNA, 21 nt, Artificial Sequence
  Synthetic
uuauuguucuuacuaugaaau

SEQ ID NO: 353992 - RNA, 22 nt, Artificial Sequence
  Synthetic
uuuauuguucuuacuaugaaau

SEQ ID NO: 353993 - RNA, 23 nt, Artificial Sequence
  Synthetic
uuuuauuguucuuacuaugaaau

SEQ ID NO: 353994 - RNA, 24 nt, Artificial Sequence
  Synthetic
cuuuuauuguucuuacuaugaaau

SEQ ID NO: 353995 - RNA, 18 nt, Artificial Sequence
  Synthetic
uauuucuagguaugaaau

SEQ ID NO: 353996 - RNA, 19 nt, Artificial Sequence
  Synthetic
uuauuucuagguaugaaau

SEQ ID NO: 353997 - RNA, 20 nt, Artificial Sequence
  Synthetic
cuuauuucuagguaugaaau

SEQ ID NO: 353998 - RNA, 21 nt, Artificial Sequence
  Synthetic
gcuuauuucuagguaugaaau

SEQ ID NO: 353999 - RNA, 22 nt, Artificial Sequence
  Synthetic
agcuuauuucuagguaugaaau

SEQ ID NO: 354000 - RNA, 23 nt, Artificial Sequence
  Synthetic
gagcuuauuucuagguaugaaau

SEQ ID NO: 354001 - RNA, 24 nt, Artificial Sequence
  Synthetic
ugagcuuauuucuagguaugaaau

SEQ ID NO: 354002 - RNA, 18 nt, Artificial Sequence
  Synthetic
auugccauuuacugaaau

SEQ ID NO: 354003 - RNA, 19 nt, Artificial Sequence
  Synthetic
aauugccauuuacugaaau

SEQ ID NO: 354004 - RNA, 20 nt, Artificial Sequence
  Synthetic
uaauugccauuuacugaaau

SEQ ID NO: 354005 - RNA, 21 nt, Artificial Sequence
  Synthetic
guaauugccauuuacugaaau

SEQ ID NO: 354006 - RNA, 22 nt, Artificial Sequence
  Synthetic
aguaauugccauuuacugaaau

SEQ ID NO: 354007 - RNA, 23 nt, Artificial Sequence
  Synthetic
caguaauugccauuuacugaaau

SEQ ID NO: 354008 - RNA, 24 nt, Artificial Sequence
  Synthetic
ucaguaauugccauuuacugaaau

SEQ ID NO: 354009 - RNA, 18 nt, Artificial Sequence
  Synthetic
uauuccaaaaccugaaau

SEQ ID NO: 354010 - RNA, 19 nt, Artificial Sequence
  Synthetic
auauuccaaaaccugaaau

SEQ ID NO: 354011 - RNA, 20 nt, Artificial Sequence
  Synthetic
aauauuccaaaaccugaaau

SEQ ID NO: 354012 - RNA, 21 nt, Artificial Sequence
  Synthetic
aaauauuccaaaaccugaaau

SEQ ID NO: 354013 - RNA, 22 nt, Artificial Sequence
  Synthetic
caaauauuccaaaaccugaaau

SEQ ID NO: 354014 - RNA, 23 nt, Artificial Sequence
  Synthetic
gcaaauauuccaaaaccugaaau

SEQ ID NO: 354015 - RNA, 24 nt, Artificial Sequence
  Synthetic
ugcaaauauuccaaaaccugaaau

SEQ ID NO: 354016 - RNA, 18 nt, Artificial Sequence
  Synthetic
ucagauaagggcugaaau

SEQ ID NO: 354017 - RNA, 19 nt, Artificial Sequence
  Synthetic
cucagauaagggcugaaau

SEQ ID NO: 354018 - RNA, 20 nt, Artificial Sequence
  Synthetic
ccucagauaagggcugaaau

SEQ ID NO: 354019 - RNA, 21 nt, Artificial Sequence
  Synthetic
accucagauaagggcugaaau

SEQ ID NO: 354020 - RNA, 22 nt, Artificial Sequence
  Synthetic
uaccucagauaagggcugaaau

SEQ ID NO: 354021 - RNA, 23 nt, Artificial Sequence
  Synthetic
auaccucagauaagggcugaaau

SEQ ID NO: 354022 - RNA, 24 nt, Artificial Sequence
  Synthetic
uauaccucagauaagggcugaaau

SEQ ID NO: 354023 - RNA, 18 nt, Artificial Sequence
  Synthetic
aguagcucaugcugaaau

SEQ ID NO: 354024 - RNA, 19 nt, Artificial Sequence
  Synthetic
caguagcucaugcugaaau

SEQ ID NO: 354025 - RNA, 20 nt, Artificial Sequence
  Synthetic
ucaguagcucaugcugaaau

SEQ ID NO: 354026 - RNA, 21 nt, Artificial Sequence
  Synthetic
cucaguagcucaugcugaaau

SEQ ID NO: 354027 - RNA, 22 nt, Artificial Sequence
  Synthetic
acucaguagcucaugcugaaau

SEQ ID NO: 354028 - RNA, 23 nt, Artificial Sequence
  Synthetic
uacucaguagcucaugcugaaau

SEQ ID NO: 354029 - RNA, 24 nt, Artificial Sequence
  Synthetic
guacucaguagcucaugcugaaau

SEQ ID NO: 354030 - RNA, 18 nt, Artificial Sequence
  Synthetic
auuaaaaaaaucugaaau

SEQ ID NO: 354031 - RNA, 19 nt, Artificial Sequence
  Synthetic
cauuaaaaaaaucugaaau

SEQ ID NO: 354032 - RNA, 20 nt, Artificial Sequence
  Synthetic
ccauuaaaaaaaucugaaau

SEQ ID NO: 354033 - RNA, 21 nt, Artificial Sequence
  Synthetic
cccauuaaaaaaaucugaaau

SEQ ID NO: 354034 - RNA, 22 nt, Artificial Sequence
  Synthetic
ucccauuaaaaaaaucugaaau

SEQ ID NO: 354035 - RNA, 23 nt, Artificial Sequence
  Synthetic
uucccauuaaaaaaaucugaaau

SEQ ID NO: 354036 - RNA, 24 nt, Artificial Sequence
  Synthetic
auucccauuaaaaaaaucugaaau

SEQ ID NO: 354037 - RNA, 18 nt, Artificial Sequence
  Synthetic
agagagaugaucugaaau

SEQ ID NO: 354038 - RNA, 19 nt, Artificial Sequence
  Synthetic
gagagagaugaucugaaau

SEQ ID NO: 354039 - RNA, 20 nt, Artificial Sequence
  Synthetic
ugagagagaugaucugaaau

SEQ ID NO: 354040 - RNA, 21 nt, Artificial Sequence
  Synthetic
uugagagagaugaucugaaau

SEQ ID NO: 354041 - RNA, 22 nt, Artificial Sequence
  Synthetic
cuugagagagaugaucugaaau

SEQ ID NO: 354042 - RNA, 23 nt, Artificial Sequence
  Synthetic
acuugagagagaugaucugaaau

SEQ ID NO: 354043 - RNA, 24 nt, Artificial Sequence
  Synthetic
aacuugagagagaugaucugaaau

SEQ ID NO: 354044 - RNA, 18 nt, Artificial Sequence
  Synthetic
aaaugagaacucugaaau

SEQ ID NO: 354045 - RNA, 19 nt, Artificial Sequence
  Synthetic
caaaugagaacucugaaau

SEQ ID NO: 354046 - RNA, 20 nt, Artificial Sequence
  Synthetic
acaaaugagaacucugaaau

SEQ ID NO: 354047 - RNA, 21 nt, Artificial Sequence
  Synthetic
cacaaaugagaacucugaaau

SEQ ID NO: 354048 - RNA, 22 nt, Artificial Sequence
  Synthetic
ucacaaaugagaacucugaaau

SEQ ID NO: 354049 - RNA, 23 nt, Artificial Sequence
  Synthetic
uucacaaaugagaacucugaaau

SEQ ID NO: 354050 - RNA, 24 nt, Artificial Sequence
  Synthetic
uuucacaaaugagaacucugaaau

SEQ ID NO: 354051 - RNA, 18 nt, Artificial Sequence
  Synthetic
cccuuucagcucugaaau

SEQ ID NO: 354052 - RNA, 19 nt, Artificial Sequence
  Synthetic
gcccuuucagcucugaaau

SEQ ID NO: 354053 - RNA, 20 nt, Artificial Sequence
  Synthetic
ggcccuuucagcucugaaau

SEQ ID NO: 354054 - RNA, 21 nt, Artificial Sequence
  Synthetic
uggcccuuucagcucugaaau

SEQ ID NO: 354055 - RNA, 22 nt, Artificial Sequence
  Synthetic
auggcccuuucagcucugaaau

SEQ ID NO: 354056 - RNA, 23 nt, Artificial Sequence
  Synthetic
uauggcccuuucagcucugaaau

SEQ ID NO: 354057 - RNA, 24 nt, Artificial Sequence
  Synthetic
uuauggcccuuucagcucugaaau

SEQ ID NO: 354058 - RNA, 18 nt, Artificial Sequence
  Synthetic
uucaauaccucgugaaau

SEQ ID NO: 354059 - RNA, 19 nt, Artificial Sequence
  Synthetic
auucaauaccucgugaaau

SEQ ID NO: 354060 - RNA, 20 nt, Artificial Sequence
  Synthetic
uauucaauaccucgugaaau

SEQ ID NO: 354061 - RNA, 21 nt, Artificial Sequence
  Synthetic
uuauucaauaccucgugaaau

SEQ ID NO: 354062 - RNA, 22 nt, Artificial Sequence
  Synthetic
uuuauucaauaccucgugaaau

SEQ ID NO: 354063 - RNA, 23 nt, Artificial Sequence
  Synthetic
uuuuauucaauaccucgugaaau

SEQ ID NO: 354064 - RNA, 24 nt, Artificial Sequence
  Synthetic
auuuuauucaauaccucgugaaau

SEQ ID NO: 354065 - RNA, 18 nt, Artificial Sequence
  Synthetic
uaggcacaugggugaaau

SEQ ID NO: 354066 - RNA, 19 nt, Artificial Sequence
  Synthetic
guaggcacaugggugaaau

SEQ ID NO: 354067 - RNA, 20 nt, Artificial Sequence
  Synthetic
uguaggcacaugggugaaau

SEQ ID NO: 354068 - RNA, 21 nt, Artificial Sequence
  Synthetic
uuguaggcacaugggugaaau

SEQ ID NO: 354069 - RNA, 22 nt, Artificial Sequence
  Synthetic
uuuguaggcacaugggugaaau

SEQ ID NO: 354070 - RNA, 23 nt, Artificial Sequence
  Synthetic
cuuuguaggcacaugggugaaau

SEQ ID NO: 354071 - RNA, 24 nt, Artificial Sequence
  Synthetic
ccuuuguaggcacaugggugaaau

SEQ ID NO: 354072 - RNA, 18 nt, Artificial Sequence
  Synthetic
acauaacuuuugugaaau

SEQ ID NO: 354073 - RNA, 19 nt, Artificial Sequence
  Synthetic
gacauaacuuuugugaaau

SEQ ID NO: 354074 - RNA, 20 nt, Artificial Sequence
  Synthetic
ugacauaacuuuugugaaau

SEQ ID NO: 354075 - RNA, 21 nt, Artificial Sequence
  Synthetic
augacauaacuuuugugaaau

SEQ ID NO: 354076 - RNA, 22 nt, Artificial Sequence
  Synthetic
aaugacauaacuuuugugaaau

SEQ ID NO: 354077 - RNA, 23 nt, Artificial Sequence
  Synthetic
aaaugacauaacuuuugugaaau

SEQ ID NO: 354078 - RNA, 24 nt, Artificial Sequence
  Synthetic
caaaugacauaacuuuugugaaau

SEQ ID NO: 354079 - RNA, 18 nt, Artificial Sequence
  Synthetic
cagggaaggaauugaaau

SEQ ID NO: 354080 - RNA, 19 nt, Artificial Sequence
  Synthetic
ccagggaaggaauugaaau

SEQ ID NO: 354081 - RNA, 20 nt, Artificial Sequence
  Synthetic
accagggaaggaauugaaau

SEQ ID NO: 354082 - RNA, 21 nt, Artificial Sequence
  Synthetic
aaccagggaaggaauugaaau

SEQ ID NO: 354083 - RNA, 22 nt, Artificial Sequence
  Synthetic
caaccagggaaggaauugaaau

SEQ ID NO: 354084 - RNA, 23 nt, Artificial Sequence
  Synthetic
gcaaccagggaaggaauugaaau

SEQ ID NO: 354085 - RNA, 24 nt, Artificial Sequence
  Synthetic
ugcaaccagggaaggaauugaaau

SEQ ID NO: 354086 - RNA, 18 nt, Artificial Sequence
  Synthetic
uuucaccgauauugaaau

SEQ ID NO: 354087 - RNA, 19 nt, Artificial Sequence
  Synthetic
uuuucaccgauauugaaau

SEQ ID NO: 354088 - RNA, 20 nt, Artificial Sequence
  Synthetic
uuuuucaccgauauugaaau

SEQ ID NO: 354089 - RNA, 21 nt, Artificial Sequence
  Synthetic
uuuuuucaccgauauugaaau

SEQ ID NO: 354090 - RNA, 22 nt, Artificial Sequence
  Synthetic
uuuuuuucaccgauauugaaau

SEQ ID NO: 354091 - RNA, 23 nt, Artificial Sequence
  Synthetic
auuuuuuucaccgauauugaaau

SEQ ID NO: 354092 - RNA, 24 nt, Artificial Sequence
  Synthetic
cauuuuuuucaccgauauugaaau

SEQ ID NO: 354093 - RNA, 18 nt, Artificial Sequence
  Synthetic
ucuguucuugcuugaaau

SEQ ID NO: 354094 - RNA, 19 nt, Artificial Sequence
  Synthetic
uucuguucuugcuugaaau

SEQ ID NO: 354095 - RNA, 20 nt, Artificial Sequence
  Synthetic
cuucuguucuugcuugaaau

SEQ ID NO: 354096 - RNA, 21 nt, Artificial Sequence
  Synthetic
gcuucuguucuugcuugaaau

SEQ ID NO: 354097 - RNA, 22 nt, Artificial Sequence
  Synthetic
ugcuucuguucuugcuugaaau

SEQ ID NO: 354098 - RNA, 23 nt, Artificial Sequence
  Synthetic
cugcuucuguucuugcuugaaau

SEQ ID NO: 354099 - RNA, 24 nt, Artificial Sequence
  Synthetic
ucugcuucuguucuugcuugaaau

SEQ ID NO: 354100 - RNA, 18 nt, Artificial Sequence
  Synthetic
guuagaggacuuugaaau

SEQ ID NO: 354101 - RNA, 19 nt, Artificial Sequence
  Synthetic
aguuagaggacuuugaaau

SEQ ID NO: 354102 - RNA, 20 nt, Artificial Sequence
  Synthetic
aaguuagaggacuuugaaau

SEQ ID NO: 354103 - RNA, 21 nt, Artificial Sequence
  Synthetic
aaaguuagaggacuuugaaau

SEQ ID NO: 354104 - RNA, 22 nt, Artificial Sequence
  Synthetic
aaaaguuagaggacuuugaaau

SEQ ID NO: 354105 - RNA, 23 nt, Artificial Sequence
  Synthetic
aaaaaguuagaggacuuugaaau

SEQ ID NO: 354106 - RNA, 24 nt, Artificial Sequence
  Synthetic
aaaaaaguuagaggacuuugaaau

SEQ ID NO: 354107 - RNA, 18 nt, Artificial Sequence
  Synthetic
cuggaaauauuuugaaau

SEQ ID NO: 354108 - RNA, 19 nt, Artificial Sequence
  Synthetic
ucuggaaauauuuugaaau

SEQ ID NO: 354109 - RNA, 20 nt, Artificial Sequence
  Synthetic
uucuggaaauauuuugaaau

SEQ ID NO: 354110 - RNA, 21 nt, Artificial Sequence
  Synthetic
auucuggaaauauuuugaaau

SEQ ID NO: 354111 - RNA, 22 nt, Artificial Sequence
  Synthetic
gauucuggaaauauuuugaaau

SEQ ID NO: 354112 - RNA, 23 nt, Artificial Sequence
  Synthetic
agauucuggaaauauuuugaaau

SEQ ID NO: 354113 - RNA, 24 nt, Artificial Sequence
  Synthetic
cagauucuggaaauauuuugaaau

SEQ ID NO: 354114 - RNA, 18 nt, Artificial Sequence
  Synthetic
ugccauuucuuuugaaau

SEQ ID NO: 354115 - RNA, 19 nt, Artificial Sequence
  Synthetic
cugccauuucuuuugaaau

SEQ ID NO: 354116 - RNA, 20 nt, Artificial Sequence
  Synthetic
acugccauuucuuuugaaau

SEQ ID NO: 354117 - RNA, 21 nt, Artificial Sequence
  Synthetic
cacugccauuucuuuugaaau

SEQ ID NO: 354118 - RNA, 22 nt, Artificial Sequence
  Synthetic
acacugccauuucuuuugaaau

SEQ ID NO: 354119 - RNA, 23 nt, Artificial Sequence
  Synthetic
aacacugccauuucuuuugaaau

SEQ ID NO: 354120 - RNA, 24 nt, Artificial Sequence
  Synthetic
uaacacugccauuucuuuugaaau

SEQ ID NO: 354121 - RNA, 18 nt, Artificial Sequence
  Synthetic
gguuaaaucaaaauaaau

SEQ ID NO: 354122 - RNA, 19 nt, Artificial Sequence
  Synthetic
ggguuaaaucaaaauaaau

SEQ ID NO: 354123 - RNA, 20 nt, Artificial Sequence
  Synthetic
uggguuaaaucaaaauaaau

SEQ ID NO: 354124 - RNA, 21 nt, Artificial Sequence
  Synthetic
uuggguuaaaucaaaauaaau

SEQ ID NO: 354125 - RNA, 22 nt, Artificial Sequence
  Synthetic
uuuggguuaaaucaaaauaaau

SEQ ID NO: 354126 - RNA, 23 nt, Artificial Sequence
  Synthetic
auuuggguuaaaucaaaauaaau

SEQ ID NO: 354127 - RNA, 24 nt, Artificial Sequence
  Synthetic
aauuuggguuaaaucaaaauaaau

SEQ ID NO: 354128 - RNA, 18 nt, Artificial Sequence
  Synthetic
uggccuuguaaaauaaau

SEQ ID NO: 354129 - RNA, 19 nt, Artificial Sequence
  Synthetic
cuggccuuguaaaauaaau

SEQ ID NO: 354130 - RNA, 20 nt, Artificial Sequence
  Synthetic
gcuggccuuguaaaauaaau

SEQ ID NO: 354131 - RNA, 21 nt, Artificial Sequence
  Synthetic
ugcuggccuuguaaaauaaau

SEQ ID NO: 354132 - RNA, 22 nt, Artificial Sequence
  Synthetic
uugcuggccuuguaaaauaaau

SEQ ID NO: 354133 - RNA, 23 nt, Artificial Sequence
  Synthetic
auugcuggccuuguaaaauaaau

SEQ ID NO: 354134 - RNA, 24 nt, Artificial Sequence
  Synthetic
uauugcuggccuuguaaaauaaau

SEQ ID NO: 354135 - RNA, 18 nt, Artificial Sequence
  Synthetic
uaccugccacaaauaaau

SEQ ID NO: 354136 - RNA, 19 nt, Artificial Sequence
  Synthetic
uuaccugccacaaauaaau

SEQ ID NO: 354137 - RNA, 20 nt, Artificial Sequence
  Synthetic
uuuaccugccacaaauaaau

SEQ ID NO: 354138 - RNA, 21 nt, Artificial Sequence
  Synthetic
uuuuaccugccacaaauaaau

SEQ ID NO: 354139 - RNA, 22 nt, Artificial Sequence
  Synthetic
uuuuuaccugccacaaauaaau

SEQ ID NO: 354140 - RNA, 23 nt, Artificial Sequence
  Synthetic
auuuuuaccugccacaaauaaau

SEQ ID NO: 354141 - RNA, 24 nt, Artificial Sequence
  Synthetic
gauuuuuaccugccacaaauaaau

SEQ ID NO: 354142 - RNA, 18 nt, Artificial Sequence
  Synthetic
gacaaaaaucaaauaaau

SEQ ID NO: 354143 - RNA, 19 nt, Artificial Sequence
  Synthetic
ggacaaaaaucaaauaaau

SEQ ID NO: 354144 - RNA, 20 nt, Artificial Sequence
  Synthetic
uggacaaaaaucaaauaaau

SEQ ID NO: 354145 - RNA, 21 nt, Artificial Sequence
  Synthetic
uuggacaaaaaucaaauaaau

SEQ ID NO: 354146 - RNA, 22 nt, Artificial Sequence
  Synthetic
guuggacaaaaaucaaauaaau

SEQ ID NO: 354147 - RNA, 23 nt, Artificial Sequence
  Synthetic
gguuggacaaaaaucaaauaaau

SEQ ID NO: 354148 - RNA, 24 nt, Artificial Sequence
  Synthetic
ugguuggacaaaaaucaaauaaau

SEQ ID NO: 354149 - RNA, 18 nt, Artificial Sequence
  Synthetic
aaaaaauaagaaauaaau

SEQ ID NO: 354150 - RNA, 19 nt, Artificial Sequence
  Synthetic
aaaaaaauaagaaauaaau

SEQ ID NO: 354151 - RNA, 20 nt, Artificial Sequence
  Synthetic
aaaaaaaauaagaaauaaau

SEQ ID NO: 354152 - RNA, 21 nt, Artificial Sequence
  Synthetic
aaaaaaaaauaagaaauaaau

SEQ ID NO: 354153 - RNA, 22 nt, Artificial Sequence
  Synthetic
caaaaaaaaauaagaaauaaau

SEQ ID NO: 354154 - RNA, 23 nt, Artificial Sequence
  Synthetic
ucaaaaaaaaauaagaaauaaau

SEQ ID NO: 354155 - RNA, 24 nt, Artificial Sequence
  Synthetic
aucaaaaaaaaauaagaaauaaau

SEQ ID NO: 354156 - RNA, 18 nt, Artificial Sequence
  Synthetic
uaaauaaggagaauaaau

SEQ ID NO: 354157 - RNA, 19 nt, Artificial Sequence
  Synthetic
auaaauaaggagaauaaau

SEQ ID NO: 354158 - RNA, 20 nt, Artificial Sequence
  Synthetic
cauaaauaaggagaauaaau

SEQ ID NO: 354159 - RNA, 21 nt, Artificial Sequence
  Synthetic
acauaaauaaggagaauaaau

SEQ ID NO: 354160 - RNA, 22 nt, Artificial Sequence
  Synthetic
uacauaaauaaggagaauaaau

SEQ ID NO: 354161 - RNA, 23 nt, Artificial Sequence
  Synthetic
auacauaaauaaggagaauaaau

SEQ ID NO: 354162 - RNA, 24 nt, Artificial Sequence
  Synthetic
aauacauaaauaaggagaauaaau

SEQ ID NO: 354163 - RNA, 18 nt, Artificial Sequence
  Synthetic
cacacucaaggaauaaau

SEQ ID NO: 354164 - RNA, 19 nt, Artificial Sequence
  Synthetic
gcacacucaaggaauaaau

SEQ ID NO: 354165 - RNA, 20 nt, Artificial Sequence
  Synthetic
ugcacacucaaggaauaaau

SEQ ID NO: 354166 - RNA, 21 nt, Artificial Sequence
  Synthetic
augcacacucaaggaauaaau

SEQ ID NO: 354167 - RNA, 22 nt, Artificial Sequence
  Synthetic
gaugcacacucaaggaauaaau

SEQ ID NO: 354168 - RNA, 23 nt, Artificial Sequence
  Synthetic
ggaugcacacucaaggaauaaau

SEQ ID NO: 354169 - RNA, 24 nt, Artificial Sequence
  Synthetic
gggaugcacacucaaggaauaaau

SEQ ID NO: 354170 - RNA, 18 nt, Artificial Sequence
  Synthetic
ucuuauaagggaauaaau

SEQ ID NO: 354171 - RNA, 19 nt, Artificial Sequence
  Synthetic
aucuuauaagggaauaaau

SEQ ID NO: 354172 - RNA, 20 nt, Artificial Sequence
  Synthetic
gaucuuauaagggaauaaau

SEQ ID NO: 354173 - RNA, 21 nt, Artificial Sequence
  Synthetic
ggaucuuauaagggaauaaau

SEQ ID NO: 354174 - RNA, 22 nt, Artificial Sequence
  Synthetic
aggaucuuauaagggaauaaau

SEQ ID NO: 354175 - RNA, 23 nt, Artificial Sequence
  Synthetic
gaggaucuuauaagggaauaaau

SEQ ID NO: 354176 - RNA, 24 nt, Artificial Sequence
  Synthetic
ugaggaucuuauaagggaauaaau

SEQ ID NO: 354177 - RNA, 18 nt, Artificial Sequence
  Synthetic
uaaacuaagauaauaaau

SEQ ID NO: 354178 - RNA, 19 nt, Artificial Sequence
  Synthetic
auaaacuaagauaauaaau

SEQ ID NO: 354179 - RNA, 20 nt, Artificial Sequence
  Synthetic
gauaaacuaagauaauaaau

SEQ ID NO: 354180 - RNA, 21 nt, Artificial Sequence
  Synthetic
agauaaacuaagauaauaaau

SEQ ID NO: 354181 - RNA, 22 nt, Artificial Sequence
  Synthetic
aagauaaacuaagauaauaaau

SEQ ID NO: 354182 - RNA, 23 nt, Artificial Sequence
  Synthetic
gaagauaaacuaagauaauaaau

SEQ ID NO: 354183 - RNA, 24 nt, Artificial Sequence
  Synthetic
ugaagauaaacuaagauaauaaau

SEQ ID NO: 354184 - RNA, 18 nt, Artificial Sequence
  Synthetic
uaaauaagcaacauaaau

SEQ ID NO: 354185 - RNA, 19 nt, Artificial Sequence
  Synthetic
uuaaauaagcaacauaaau

SEQ ID NO: 354186 - RNA, 20 nt, Artificial Sequence
  Synthetic
uuuaaauaagcaacauaaau

SEQ ID NO: 354187 - RNA, 21 nt, Artificial Sequence
  Synthetic
uuuuaaauaagcaacauaaau

SEQ ID NO: 354188 - RNA, 22 nt, Artificial Sequence
  Synthetic
uuuuuaaauaagcaacauaaau

SEQ ID NO: 354189 - RNA, 23 nt, Artificial Sequence
  Synthetic
uuuuuuaaauaagcaacauaaau

SEQ ID NO: 354190 - RNA, 24 nt, Artificial Sequence
  Synthetic
auuuuuuaaauaagcaacauaaau

SEQ ID NO: 354191 - RNA, 18 nt, Artificial Sequence
  Synthetic
ucucaaaaauacauaaau

SEQ ID NO: 354192 - RNA, 19 nt, Artificial Sequence
  Synthetic
gucucaaaaauacauaaau

SEQ ID NO: 354193 - RNA, 20 nt, Artificial Sequence
  Synthetic
ugucucaaaaauacauaaau

SEQ ID NO: 354194 - RNA, 21 nt, Artificial Sequence
  Synthetic
cugucucaaaaauacauaaau

SEQ ID NO: 354195 - RNA, 22 nt, Artificial Sequence
  Synthetic
ucugucucaaaaauacauaaau

SEQ ID NO: 354196 - RNA, 23 nt, Artificial Sequence
  Synthetic
cucugucucaaaaauacauaaau

SEQ ID NO: 354197 - RNA, 24 nt, Artificial Sequence
  Synthetic
acucugucucaaaaauacauaaau

SEQ ID NO: 354198 - RNA, 18 nt, Artificial Sequence
  Synthetic
cugagacagaccauaaau

SEQ ID NO: 354199 - RNA, 19 nt, Artificial Sequence
  Synthetic
gcugagacagaccauaaau

SEQ ID NO: 354200 - RNA, 20 nt, Artificial Sequence
  Synthetic
agcugagacagaccauaaau

SEQ ID NO: 354201 - RNA, 21 nt, Artificial Sequence
  Synthetic
aagcugagacagaccauaaau

SEQ ID NO: 354202 - RNA, 22 nt, Artificial Sequence
  Synthetic
aaagcugagacagaccauaaau

SEQ ID NO: 354203 - RNA, 23 nt, Artificial Sequence
  Synthetic
gaaagcugagacagaccauaaau

SEQ ID NO: 354204 - RNA, 24 nt, Artificial Sequence
  Synthetic
ggaaagcugagacagaccauaaau

SEQ ID NO: 354205 - RNA, 18 nt, Artificial Sequence
  Synthetic
uggauauaaagcauaaau

SEQ ID NO: 354206 - RNA, 19 nt, Artificial Sequence
  Synthetic
uuggauauaaagcauaaau

SEQ ID NO: 354207 - RNA, 20 nt, Artificial Sequence
  Synthetic
cuuggauauaaagcauaaau

SEQ ID NO: 354208 - RNA, 21 nt, Artificial Sequence
  Synthetic
acuuggauauaaagcauaaau

SEQ ID NO: 354209 - RNA, 22 nt, Artificial Sequence
  Synthetic
aacuuggauauaaagcauaaau

SEQ ID NO: 354210 - RNA, 23 nt, Artificial Sequence
  Synthetic
uaacuuggauauaaagcauaaau

SEQ ID NO: 354211 - RNA, 24 nt, Artificial Sequence
  Synthetic
auaacuuggauauaaagcauaaau

SEQ ID NO: 354212 - RNA, 18 nt, Artificial Sequence
  Synthetic
aauguaauuggcauaaau

SEQ ID NO: 354213 - RNA, 19 nt, Artificial Sequence
  Synthetic
aaauguaauuggcauaaau

SEQ ID NO: 354214 - RNA, 20 nt, Artificial Sequence
  Synthetic
uaaauguaauuggcauaaau

SEQ ID NO: 354215 - RNA, 21 nt, Artificial Sequence
  Synthetic
cuaaauguaauuggcauaaau

SEQ ID NO: 354216 - RNA, 22 nt, Artificial Sequence
  Synthetic
ucuaaauguaauuggcauaaau

SEQ ID NO: 354217 - RNA, 23 nt, Artificial Sequence
  Synthetic
uucuaaauguaauuggcauaaau

SEQ ID NO: 354218 - RNA, 24 nt, Artificial Sequence
  Synthetic
uuucuaaauguaauuggcauaaau

SEQ ID NO: 354219 - RNA, 18 nt, Artificial Sequence
  Synthetic
gauuaaauggucauaaau

SEQ ID NO: 354220 - RNA, 19 nt, Artificial Sequence
  Synthetic
agauuaaauggucauaaau

SEQ ID NO: 354221 - RNA, 20 nt, Artificial Sequence
  Synthetic
uagauuaaauggucauaaau

SEQ ID NO: 354222 - RNA, 21 nt, Artificial Sequence
  Synthetic
auagauuaaauggucauaaau

SEQ ID NO: 354223 - RNA, 22 nt, Artificial Sequence
  Synthetic
aauagauuaaauggucauaaau

SEQ ID NO: 354224 - RNA, 23 nt, Artificial Sequence
  Synthetic
aaauagauuaaauggucauaaau

SEQ ID NO: 354225 - RNA, 24 nt, Artificial Sequence
  Synthetic
aaaauagauuaaauggucauaaau

SEQ ID NO: 354226 - RNA, 18 nt, Artificial Sequence
  Synthetic
auuugggaguucauaaau

SEQ ID NO: 354227 - RNA, 19 nt, Artificial Sequence
  Synthetic
aauuugggaguucauaaau

SEQ ID NO: 354228 - RNA, 20 nt, Artificial Sequence
  Synthetic
aaauuugggaguucauaaau

SEQ ID NO: 354229 - RNA, 21 nt, Artificial Sequence
  Synthetic
uaaauuugggaguucauaaau

SEQ ID NO: 354230 - RNA, 22 nt, Artificial Sequence
  Synthetic
guaaauuugggaguucauaaau

SEQ ID NO: 354231 - RNA, 23 nt, Artificial Sequence
  Synthetic
uguaaauuugggaguucauaaau

SEQ ID NO: 354232 - RNA, 24 nt, Artificial Sequence
  Synthetic
auguaaauuugggaguucauaaau

SEQ ID NO: 354233 - RNA, 18 nt, Artificial Sequence
  Synthetic
caaaaguagaagauaaau

SEQ ID NO: 354234 - RNA, 19 nt, Artificial Sequence
  Synthetic
ucaaaaguagaagauaaau

SEQ ID NO: 354235 - RNA, 20 nt, Artificial Sequence
  Synthetic
uucaaaaguagaagauaaau

SEQ ID NO: 354236 - RNA, 21 nt, Artificial Sequence
  Synthetic
guucaaaaguagaagauaaau

SEQ ID NO: 354237 - RNA, 22 nt, Artificial Sequence
  Synthetic
aguucaaaaguagaagauaaau

SEQ ID NO: 354238 - RNA, 23 nt, Artificial Sequence
  Synthetic
aaguucaaaaguagaagauaaau

SEQ ID NO: 354239 - RNA, 24 nt, Artificial Sequence
  Synthetic
aaaguucaaaaguagaagauaaau

SEQ ID NO: 354240 - RNA, 18 nt, Artificial Sequence
  Synthetic
aaaauauuggggauaaau

SEQ ID NO: 354241 - RNA, 19 nt, Artificial Sequence
  Synthetic
caaaauauuggggauaaau

SEQ ID NO: 354242 - RNA, 20 nt, Artificial Sequence
  Synthetic
acaaaauauuggggauaaau

SEQ ID NO: 354243 - RNA, 21 nt, Artificial Sequence
  Synthetic
aacaaaauauuggggauaaau

SEQ ID NO: 354244 - RNA, 22 nt, Artificial Sequence
  Synthetic
aaacaaaauauuggggauaaau

SEQ ID NO: 354245 - RNA, 23 nt, Artificial Sequence
  Synthetic
caaacaaaauauuggggauaaau

SEQ ID NO: 354246 - RNA, 24 nt, Artificial Sequence
  Synthetic
acaaacaaaauauuggggauaaau

SEQ ID NO: 354247 - RNA, 18 nt, Artificial Sequence
  Synthetic
aaugacugcuggauaaau

SEQ ID NO: 354248 - RNA, 19 nt, Artificial Sequence
  Synthetic
gaaugacugcuggauaaau

SEQ ID NO: 354249 - RNA, 20 nt, Artificial Sequence
  Synthetic
ugaaugacugcuggauaaau

SEQ ID NO: 354250 - RNA, 21 nt, Artificial Sequence
  Synthetic
cugaaugacugcuggauaaau

SEQ ID NO: 354251 - RNA, 22 nt, Artificial Sequence
  Synthetic
ccugaaugacugcuggauaaau

SEQ ID NO: 354252 - RNA, 23 nt, Artificial Sequence
  Synthetic
uccugaaugacugcuggauaaau

SEQ ID NO: 354253 - RNA, 24 nt, Artificial Sequence
  Synthetic
cuccugaaugacugcuggauaaau

SEQ ID NO: 354254 - RNA, 18 nt, Artificial Sequence
  Synthetic
uuucucaucuggauaaau

SEQ ID NO: 354255 - RNA, 19 nt, Artificial Sequence
  Synthetic
uuuucucaucuggauaaau

SEQ ID NO: 354256 - RNA, 20 nt, Artificial Sequence
  Synthetic
uuuuucucaucuggauaaau

SEQ ID NO: 354257 - RNA, 21 nt, Artificial Sequence
  Synthetic
auuuuucucaucuggauaaau

SEQ ID NO: 354258 - RNA, 22 nt, Artificial Sequence
  Synthetic
uauuuuucucaucuggauaaau

SEQ ID NO: 354259 - RNA, 23 nt, Artificial Sequence
  Synthetic
uuauuuuucucaucuggauaaau

SEQ ID NO: 354260 - RNA, 24 nt, Artificial Sequence
  Synthetic
uuuauuuuucucaucuggauaaau

SEQ ID NO: 354261 - RNA, 18 nt, Artificial Sequence
  Synthetic
auaccaucaaauauaaau

SEQ ID NO: 354262 - RNA, 19 nt, Artificial Sequence
  Synthetic
aauaccaucaaauauaaau

SEQ ID NO: 354263 - RNA, 20 nt, Artificial Sequence
  Synthetic
gaauaccaucaaauauaaau

SEQ ID NO: 354264 - RNA, 21 nt, Artificial Sequence
  Synthetic
ggaauaccaucaaauauaaau

SEQ ID NO: 354265 - RNA, 22 nt, Artificial Sequence
  Synthetic
uggaauaccaucaaauauaaau

SEQ ID NO: 354266 - RNA, 23 nt, Artificial Sequence
  Synthetic
auggaauaccaucaaauauaaau

SEQ ID NO: 354267 - RNA, 24 nt, Artificial Sequence
  Synthetic
cauggaauaccaucaaauauaaau

SEQ ID NO: 354268 - RNA, 18 nt, Artificial Sequence
  Synthetic
aagauuuccaauauaaau

SEQ ID NO: 354269 - RNA, 19 nt, Artificial Sequence
  Synthetic
caagauuuccaauauaaau

SEQ ID NO: 354270 - RNA, 20 nt, Artificial Sequence
  Synthetic
ccaagauuuccaauauaaau

SEQ ID NO: 354271 - RNA, 21 nt, Artificial Sequence
  Synthetic
gccaagauuuccaauauaaau

SEQ ID NO: 354272 - RNA, 22 nt, Artificial Sequence
  Synthetic
ggccaagauuuccaauauaaau

SEQ ID NO: 354273 - RNA, 23 nt, Artificial Sequence
  Synthetic
uggccaagauuuccaauauaaau

SEQ ID NO: 354274 - RNA, 24 nt, Artificial Sequence
  Synthetic
cuggccaagauuuccaauauaaau

SEQ ID NO: 354275 - RNA, 18 nt, Artificial Sequence
  Synthetic
ugucuggaacauauaaau

SEQ ID NO: 354276 - RNA, 19 nt, Artificial Sequence
  Synthetic
cugucuggaacauauaaau

SEQ ID NO: 354277 - RNA, 20 nt, Artificial Sequence
  Synthetic
acugucuggaacauauaaau

SEQ ID NO: 354278 - RNA, 21 nt, Artificial Sequence
  Synthetic
uacugucuggaacauauaaau

SEQ ID NO: 354279 - RNA, 22 nt, Artificial Sequence
  Synthetic
cuacugucuggaacauauaaau

SEQ ID NO: 354280 - RNA, 23 nt, Artificial Sequence
  Synthetic
ucuacugucuggaacauauaaau

SEQ ID NO: 354281 - RNA, 24 nt, Artificial Sequence
  Synthetic
uucuacugucuggaacauauaaau

SEQ ID NO: 354282 - RNA, 18 nt, Artificial Sequence
  Synthetic
uguacccaaacuauaaau

SEQ ID NO: 354283 - RNA, 19 nt, Artificial Sequence
  Synthetic
auguacccaaacuauaaau

SEQ ID NO: 354284 - RNA, 20 nt, Artificial Sequence
  Synthetic
cauguacccaaacuauaaau

SEQ ID NO: 354285 - RNA, 21 nt, Artificial Sequence
  Synthetic
ucauguacccaaacuauaaau

SEQ ID NO: 354286 - RNA, 22 nt, Artificial Sequence
  Synthetic
uucauguacccaaacuauaaau

SEQ ID NO: 354287 - RNA, 23 nt, Artificial Sequence
  Synthetic
auucauguacccaaacuauaaau

SEQ ID NO: 354288 - RNA, 24 nt, Artificial Sequence
  Synthetic
uauucauguacccaaacuauaaau

SEQ ID NO: 354289 - RNA, 18 nt, Artificial Sequence
  Synthetic
ugacaccaucguauaaau

SEQ ID NO: 354290 - RNA, 19 nt, Artificial Sequence
  Synthetic
gugacaccaucguauaaau

SEQ ID NO: 354291 - RNA, 20 nt, Artificial Sequence
  Synthetic
agugacaccaucguauaaau

SEQ ID NO: 354292 - RNA, 21 nt, Artificial Sequence
  Synthetic
aagugacaccaucguauaaau

SEQ ID NO: 354293 - RNA, 22 nt, Artificial Sequence
  Synthetic
uaagugacaccaucguauaaau

SEQ ID NO: 354294 - RNA, 23 nt, Artificial Sequence
  Synthetic
uuaagugacaccaucguauaaau

SEQ ID NO: 354295 - RNA, 24 nt, Artificial Sequence
  Synthetic
cuuaagugacaccaucguauaaau

SEQ ID NO: 354296 - RNA, 18 nt, Artificial Sequence
  Synthetic
ggaaguagagguauaaau

SEQ ID NO: 354297 - RNA, 19 nt, Artificial Sequence
  Synthetic
aggaaguagagguauaaau

SEQ ID NO: 354298 - RNA, 20 nt, Artificial Sequence
  Synthetic
gaggaaguagagguauaaau

SEQ ID NO: 354299 - RNA, 21 nt, Artificial Sequence
  Synthetic
ugaggaaguagagguauaaau

SEQ ID NO: 354300 - RNA, 22 nt, Artificial Sequence
  Synthetic
augaggaaguagagguauaaau

SEQ ID NO: 354301 - RNA, 23 nt, Artificial Sequence
  Synthetic
aaugaggaaguagagguauaaau

SEQ ID NO: 354302 - RNA, 24 nt, Artificial Sequence
  Synthetic
aaaugaggaaguagagguauaaau

SEQ ID NO: 354303 - RNA, 18 nt, Artificial Sequence
  Synthetic
guauguguguguauaaau

SEQ ID NO: 354304 - RNA, 19 nt, Artificial Sequence
  Synthetic
uguauguguguguauaaau

SEQ ID NO: 354305 - RNA, 20 nt, Artificial Sequence
  Synthetic
guguauguguguguauaaau

SEQ ID NO: 354306 - RNA, 21 nt, Artificial Sequence
  Synthetic
cguguauguguguguauaaau

SEQ ID NO: 354307 - RNA, 22 nt, Artificial Sequence
  Synthetic
gcguguauguguguguauaaau

SEQ ID NO: 354308 - RNA, 23 nt, Artificial Sequence
  Synthetic
ugcguguauguguguguauaaau

SEQ ID NO: 354309 - RNA, 24 nt, Artificial Sequence
  Synthetic
gugcguguauguguguguauaaau

SEQ ID NO: 354310 - RNA, 18 nt, Artificial Sequence
  Synthetic
uagcucccacuuauaaau

SEQ ID NO: 354311 - RNA, 19 nt, Artificial Sequence
  Synthetic
uuagcucccacuuauaaau

SEQ ID NO: 354312 - RNA, 20 nt, Artificial Sequence
  Synthetic
uuuagcucccacuuauaaau

SEQ ID NO: 354313 - RNA, 21 nt, Artificial Sequence
  Synthetic
auuuagcucccacuuauaaau

SEQ ID NO: 354314 - RNA, 22 nt, Artificial Sequence
  Synthetic
cauuuagcucccacuuauaaau

SEQ ID NO: 354315 - RNA, 23 nt, Artificial Sequence
  Synthetic
ucauuuagcucccacuuauaaau

SEQ ID NO: 354316 - RNA, 24 nt, Artificial Sequence
  Synthetic
aucauuuagcucccacuuauaaau

SEQ ID NO: 354317 - RNA, 18 nt, Artificial Sequence
  Synthetic
ccagucuuaguuauaaau

SEQ ID NO: 354318 - RNA, 19 nt, Artificial Sequence
  Synthetic
uccagucuuaguuauaaau

SEQ ID NO: 354319 - RNA, 20 nt, Artificial Sequence
  Synthetic
auccagucuuaguuauaaau

SEQ ID NO: 354320 - RNA, 21 nt, Artificial Sequence
  Synthetic
gauccagucuuaguuauaaau

SEQ ID NO: 354321 - RNA, 22 nt, Artificial Sequence
  Synthetic
agauccagucuuaguuauaaau

SEQ ID NO: 354322 - RNA, 23 nt, Artificial Sequence
  Synthetic
aagauccagucuuaguuauaaau

SEQ ID NO: 354323 - RNA, 24 nt, Artificial Sequence
  Synthetic
caagauccagucuuaguuauaaau

SEQ ID NO: 354324 - RNA, 18 nt, Artificial Sequence
  Synthetic
aucccaaguaaacuaaau

SEQ ID NO: 354325 - RNA, 19 nt, Artificial Sequence
  Synthetic
uaucccaaguaaacuaaau

SEQ ID NO: 354326 - RNA, 20 nt, Artificial Sequence
  Synthetic
uuaucccaaguaaacuaaau

SEQ ID NO: 354327 - RNA, 21 nt, Artificial Sequence
  Synthetic
auuaucccaaguaaacuaaau

SEQ ID NO: 354328 - RNA, 22 nt, Artificial Sequence
  Synthetic
aauuaucccaaguaaacuaaau

SEQ ID NO: 354329 - RNA, 23 nt, Artificial Sequence
  Synthetic
aaauuaucccaaguaaacuaaau

SEQ ID NO: 354330 - RNA, 24 nt, Artificial Sequence
  Synthetic
aaaauuaucccaaguaaacuaaau

SEQ ID NO: 354331 - RNA, 18 nt, Artificial Sequence
  Synthetic
uaacaaugucaacuaaau

SEQ ID NO: 354332 - RNA, 19 nt, Artificial Sequence
  Synthetic
auaacaaugucaacuaaau

SEQ ID NO: 354333 - RNA, 20 nt, Artificial Sequence
  Synthetic
gauaacaaugucaacuaaau

SEQ ID NO: 354334 - RNA, 21 nt, Artificial Sequence
  Synthetic
agauaacaaugucaacuaaau

SEQ ID NO: 354335 - RNA, 22 nt, Artificial Sequence
  Synthetic
uagauaacaaugucaacuaaau

SEQ ID NO: 354336 - RNA, 23 nt, Artificial Sequence
  Synthetic
cuagauaacaaugucaacuaaau

SEQ ID NO: 354337 - RNA, 24 nt, Artificial Sequence
  Synthetic
ucuagauaacaaugucaacuaaau

SEQ ID NO: 354338 - RNA, 18 nt, Artificial Sequence
  Synthetic
augaaggaagcacuaaau

SEQ ID NO: 354339 - RNA, 19 nt, Artificial Sequence
  Synthetic
aaugaaggaagcacuaaau

SEQ ID NO: 354340 - RNA, 20 nt, Artificial Sequence
  Synthetic
uaaugaaggaagcacuaaau

SEQ ID NO: 354341 - RNA, 21 nt, Artificial Sequence
  Synthetic
cuaaugaaggaagcacuaaau

SEQ ID NO: 354342 - RNA, 22 nt, Artificial Sequence
  Synthetic
ucuaaugaaggaagcacuaaau

SEQ ID NO: 354343 - RNA, 23 nt, Artificial Sequence
  Synthetic
uucuaaugaaggaagcacuaaau

SEQ ID NO: 354344 - RNA, 24 nt, Artificial Sequence
  Synthetic
cuucuaaugaaggaagcacuaaau

SEQ ID NO: 354345 - RNA, 18 nt, Artificial Sequence
  Synthetic
uaggagggacaccuaaau

SEQ ID NO: 354346 - RNA, 19 nt, Artificial Sequence
  Synthetic
guaggagggacaccuaaau

SEQ ID NO: 354347 - RNA, 20 nt, Artificial Sequence
  Synthetic
gguaggagggacaccuaaau

SEQ ID NO: 354348 - RNA, 21 nt, Artificial Sequence
  Synthetic
ggguaggagggacaccuaaau

SEQ ID NO: 354349 - RNA, 22 nt, Artificial Sequence
  Synthetic
uggguaggagggacaccuaaau

SEQ ID NO: 354350 - RNA, 23 nt, Artificial Sequence
  Synthetic
auggguaggagggacaccuaaau

SEQ ID NO: 354351 - RNA, 24 nt, Artificial Sequence
  Synthetic
cauggguaggagggacaccuaaau

SEQ ID NO: 354352 - RNA, 18 nt, Artificial Sequence
  Synthetic
cauauuuuuucccuaaau

SEQ ID NO: 354353 - RNA, 19 nt, Artificial Sequence
  Synthetic
ccauauuuuuucccuaaau

SEQ ID NO: 354354 - RNA, 20 nt, Artificial Sequence
  Synthetic
cccauauuuuuucccuaaau

SEQ ID NO: 354355 - RNA, 21 nt, Artificial Sequence
  Synthetic
ucccauauuuuuucccuaaau

SEQ ID NO: 354356 - RNA, 22 nt, Artificial Sequence
  Synthetic
aucccauauuuuuucccuaaau

SEQ ID NO: 354357 - RNA, 23 nt, Artificial Sequence
  Synthetic
aaucccauauuuuuucccuaaau

SEQ ID NO: 354358 - RNA, 24 nt, Artificial Sequence
  Synthetic
uaaucccauauuuuuucccuaaau

SEQ ID NO: 354359 - RNA, 18 nt, Artificial Sequence
  Synthetic
ggaugcccaaugcuaaau

SEQ ID NO: 354360 - RNA, 19 nt, Artificial Sequence
  Synthetic
aggaugcccaaugcuaaau

SEQ ID NO: 354361 - RNA, 20 nt, Artificial Sequence
  Synthetic
caggaugcccaaugcuaaau

SEQ ID NO: 354362 - RNA, 21 nt, Artificial Sequence
  Synthetic
ccaggaugcccaaugcuaaau

SEQ ID NO: 354363 - RNA, 22 nt, Artificial Sequence
  Synthetic
uccaggaugcccaaugcuaaau

SEQ ID NO: 354364 - RNA, 23 nt, Artificial Sequence
  Synthetic
guccaggaugcccaaugcuaaau

SEQ ID NO: 354365 - RNA, 24 nt, Artificial Sequence
  Synthetic
gguccaggaugcccaaugcuaaau

SEQ ID NO: 354366 - RNA, 18 nt, Artificial Sequence
  Synthetic
auuaauaacaugcuaaau

SEQ ID NO: 354367 - RNA, 19 nt, Artificial Sequence
  Synthetic
gauuaauaacaugcuaaau

SEQ ID NO: 354368 - RNA, 20 nt, Artificial Sequence
  Synthetic
agauuaauaacaugcuaaau

SEQ ID NO: 354369 - RNA, 21 nt, Artificial Sequence
  Synthetic
aagauuaauaacaugcuaaau

SEQ ID NO: 354370 - RNA, 22 nt, Artificial Sequence
  Synthetic
gaagauuaauaacaugcuaaau

SEQ ID NO: 354371 - RNA, 23 nt, Artificial Sequence
  Synthetic
agaagauuaauaacaugcuaaau

SEQ ID NO: 354372 - RNA, 24 nt, Artificial Sequence
  Synthetic
uagaagauuaauaacaugcuaaau

SEQ ID NO: 354373 - RNA, 18 nt, Artificial Sequence
  Synthetic
uaccuuuauaugcuaaau

SEQ ID NO: 354374 - RNA, 19 nt, Artificial Sequence
  Synthetic
uuaccuuuauaugcuaaau

SEQ ID NO: 354375 - RNA, 20 nt, Artificial Sequence
  Synthetic
guuaccuuuauaugcuaaau

SEQ ID NO: 354376 - RNA, 21 nt, Artificial Sequence
  Synthetic
aguuaccuuuauaugcuaaau

SEQ ID NO: 354377 - RNA, 22 nt, Artificial Sequence
  Synthetic
aaguuaccuuuauaugcuaaau

SEQ ID NO: 354378 - RNA, 23 nt, Artificial Sequence
  Synthetic
aaaguuaccuuuauaugcuaaau

SEQ ID NO: 354379 - RNA, 24 nt, Artificial Sequence
  Synthetic
aaaaguuaccuuuauaugcuaaau

SEQ ID NO: 354380 - RNA, 18 nt, Artificial Sequence
  Synthetic
auuucucauaaucuaaau

SEQ ID NO: 354381 - RNA, 19 nt, Artificial Sequence
  Synthetic
cauuucucauaaucuaaau

SEQ ID NO: 354382 - RNA, 20 nt, Artificial Sequence
  Synthetic
acauuucucauaaucuaaau

SEQ ID NO: 354383 - RNA, 21 nt, Artificial Sequence
  Synthetic
gacauuucucauaaucuaaau

SEQ ID NO: 354384 - RNA, 22 nt, Artificial Sequence
  Synthetic
ugacauuucucauaaucuaaau

SEQ ID NO: 354385 - RNA, 23 nt, Artificial Sequence
  Synthetic
gugacauuucucauaaucuaaau

SEQ ID NO: 354386 - RNA, 24 nt, Artificial Sequence
  Synthetic
ugugacauuucucauaaucuaaau

SEQ ID NO: 354387 - RNA, 18 nt, Artificial Sequence
  Synthetic
agacauccugcucuaaau

SEQ ID NO: 354388 - RNA, 19 nt, Artificial Sequence
  Synthetic
cagacauccugcucuaaau

SEQ ID NO: 354389 - RNA, 20 nt, Artificial Sequence
  Synthetic
ucagacauccugcucuaaau

SEQ ID NO: 354390 - RNA, 21 nt, Artificial Sequence
  Synthetic
uucagacauccugcucuaaau

SEQ ID NO: 354391 - RNA, 22 nt, Artificial Sequence
  Synthetic
uuucagacauccugcucuaaau

SEQ ID NO: 354392 - RNA, 23 nt, Artificial Sequence
  Synthetic
guuucagacauccugcucuaaau

SEQ ID NO: 354393 - RNA, 24 nt, Artificial Sequence
  Synthetic
aguuucagacauccugcucuaaau

SEQ ID NO: 354394 - RNA, 18 nt, Artificial Sequence
  Synthetic
uugaugucccaaguaaau

SEQ ID NO: 354395 - RNA, 19 nt, Artificial Sequence
  Synthetic
uuugaugucccaaguaaau

SEQ ID NO: 354396 - RNA, 20 nt, Artificial Sequence
  Synthetic
uuuugaugucccaaguaaau

SEQ ID NO: 354397 - RNA, 21 nt, Artificial Sequence
  Synthetic
uuuuugaugucccaaguaaau

SEQ ID NO: 354398 - RNA, 22 nt, Artificial Sequence
  Synthetic
auuuuugaugucccaaguaaau

SEQ ID NO: 354399 - RNA, 23 nt, Artificial Sequence
  Synthetic
aauuuuugaugucccaaguaaau

SEQ ID NO: 354400 - RNA, 24 nt, Artificial Sequence
  Synthetic
uaauuuuugaugucccaaguaaau

SEQ ID NO: 354401 - RNA, 18 nt, Artificial Sequence
  Synthetic
caaauaaaucaaguaaau

SEQ ID NO: 354402 - RNA, 19 nt, Artificial Sequence
  Synthetic
gcaaauaaaucaaguaaau

SEQ ID NO: 354403 - RNA, 20 nt, Artificial Sequence
  Synthetic
ugcaaauaaaucaaguaaau

SEQ ID NO: 354404 - RNA, 21 nt, Artificial Sequence
  Synthetic
cugcaaauaaaucaaguaaau

SEQ ID NO: 354405 - RNA, 22 nt, Artificial Sequence
  Synthetic
gcugcaaauaaaucaaguaaau

SEQ ID NO: 354406 - RNA, 23 nt, Artificial Sequence
  Synthetic
ugcugcaaauaaaucaaguaaau

SEQ ID NO: 354407 - RNA, 24 nt, Artificial Sequence
  Synthetic
uugcugcaaauaaaucaaguaaau

SEQ ID NO: 354408 - RNA, 18 nt, Artificial Sequence
  Synthetic
agccugccugaaguaaau

SEQ ID NO: 354409 - RNA, 19 nt, Artificial Sequence
  Synthetic
gagccugccugaaguaaau

SEQ ID NO: 354410 - RNA, 20 nt, Artificial Sequence
  Synthetic
agagccugccugaaguaaau

SEQ ID NO: 354411 - RNA, 21 nt, Artificial Sequence
  Synthetic
aagagccugccugaaguaaau

SEQ ID NO: 354412 - RNA, 22 nt, Artificial Sequence
  Synthetic
uaagagccugccugaaguaaau

SEQ ID NO: 354413 - RNA, 23 nt, Artificial Sequence
  Synthetic
uuaagagccugccugaaguaaau

SEQ ID NO: 354414 - RNA, 24 nt, Artificial Sequence
  Synthetic
uuuaagagccugccugaaguaaau

SEQ ID NO: 354415 - RNA, 18 nt, Artificial Sequence
  Synthetic
uguccuuauuaaguaaau

SEQ ID NO: 354416 - RNA, 19 nt, Artificial Sequence
  Synthetic
uuguccuuauuaaguaaau

SEQ ID NO: 354417 - RNA, 20 nt, Artificial Sequence
  Synthetic
auuguccuuauuaaguaaau

SEQ ID NO: 354418 - RNA, 21 nt, Artificial Sequence
  Synthetic
uauuguccuuauuaaguaaau

SEQ ID NO: 354419 - RNA, 22 nt, Artificial Sequence
  Synthetic
auauuguccuuauuaaguaaau

SEQ ID NO: 354420 - RNA, 23 nt, Artificial Sequence
  Synthetic
gauauuguccuuauuaaguaaau

SEQ ID NO: 354421 - RNA, 24 nt, Artificial Sequence
  Synthetic
agauauuguccuuauuaaguaaau

SEQ ID NO: 354422 - RNA, 18 nt, Artificial Sequence
  Synthetic
aaaaaaaaaucaguaaau

SEQ ID NO: 354423 - RNA, 19 nt, Artificial Sequence
  Synthetic
aaaaaaaaaaucaguaaau

SEQ ID NO: 354424 - RNA, 20 nt, Artificial Sequence
  Synthetic
aaaaaaaaaaaucaguaaau

SEQ ID NO: 354425 - RNA, 21 nt, Artificial Sequence
  Synthetic
aaaaaaaaaaaaucaguaaau

SEQ ID NO: 354426 - RNA, 22 nt, Artificial Sequence
  Synthetic
aaaaaaaaaaaaaucaguaaau

SEQ ID NO: 354427 - RNA, 23 nt, Artificial Sequence
  Synthetic
gaaaaaaaaaaaaaucaguaaau

SEQ ID NO: 354428 - RNA, 24 nt, Artificial Sequence
  Synthetic
agaaaaaaaaaaaaaucaguaaau

SEQ ID NO: 354429 - RNA, 18 nt, Artificial Sequence
  Synthetic
ugugacaggucaguaaau

SEQ ID NO: 354430 - RNA, 19 nt, Artificial Sequence
  Synthetic
cugugacaggucaguaaau

SEQ ID NO: 354431 - RNA, 20 nt, Artificial Sequence
  Synthetic
ucugugacaggucaguaaau

SEQ ID NO: 354432 - RNA, 21 nt, Artificial Sequence
  Synthetic
aucugugacaggucaguaaau

SEQ ID NO: 354433 - RNA, 22 nt, Artificial Sequence
  Synthetic
uaucugugacaggucaguaaau

SEQ ID NO: 354434 - RNA, 23 nt, Artificial Sequence
  Synthetic
auaucugugacaggucaguaaau

SEQ ID NO: 354435 - RNA, 24 nt, Artificial Sequence
  Synthetic
cauaucugugacaggucaguaaau

SEQ ID NO: 354436 - RNA, 18 nt, Artificial Sequence
  Synthetic
guuguugucugaguaaau

SEQ ID NO: 354437 - RNA, 19 nt, Artificial Sequence
  Synthetic
aguuguugucugaguaaau

SEQ ID NO: 354438 - RNA, 20 nt, Artificial Sequence
  Synthetic
aaguuguugucugaguaaau

SEQ ID NO: 354439 - RNA, 21 nt, Artificial Sequence
  Synthetic
aaaguuguugucugaguaaau

SEQ ID NO: 354440 - RNA, 22 nt, Artificial Sequence
  Synthetic
aaaaguuguugucugaguaaau

SEQ ID NO: 354441 - RNA, 23 nt, Artificial Sequence
  Synthetic
uaaaaguuguugucugaguaaau

SEQ ID NO: 354442 - RNA, 24 nt, Artificial Sequence
  Synthetic
guaaaaguuguugucugaguaaau

SEQ ID NO: 354443 - RNA, 18 nt, Artificial Sequence
  Synthetic
augccugggugaguaaau

SEQ ID NO: 354444 - RNA, 19 nt, Artificial Sequence
  Synthetic
aaugccugggugaguaaau

SEQ ID NO: 354445 - RNA, 20 nt, Artificial Sequence
  Synthetic
aaaugccugggugaguaaau

SEQ ID NO: 354446 - RNA, 21 nt, Artificial Sequence
  Synthetic
caaaugccugggugaguaaau

SEQ ID NO: 354447 - RNA, 22 nt, Artificial Sequence
  Synthetic
ccaaaugccugggugaguaaau

SEQ ID NO: 354448 - RNA, 23 nt, Artificial Sequence
  Synthetic
uccaaaugccugggugaguaaau

SEQ ID NO: 354449 - RNA, 24 nt, Artificial Sequence
  Synthetic
auccaaaugccugggugaguaaau

SEQ ID NO: 354450 - RNA, 18 nt, Artificial Sequence
  Synthetic
uuauuagauugaguaaau

SEQ ID NO: 354451 - RNA, 19 nt, Artificial Sequence
  Synthetic
auuauuagauugaguaaau

SEQ ID NO: 354452 - RNA, 20 nt, Artificial Sequence
  Synthetic
aauuauuagauugaguaaau

SEQ ID NO: 354453 - RNA, 21 nt, Artificial Sequence
  Synthetic
aaauuauuagauugaguaaau

SEQ ID NO: 354454 - RNA, 22 nt, Artificial Sequence
  Synthetic
aaaauuauuagauugaguaaau

SEQ ID NO: 354455 - RNA, 23 nt, Artificial Sequence
  Synthetic
aaaaauuauuagauugaguaaau

SEQ ID NO: 354456 - RNA, 24 nt, Artificial Sequence
  Synthetic
uaaaaauuauuagauugaguaaau

SEQ ID NO: 354457 - RNA, 18 nt, Artificial Sequence
  Synthetic
gcaaaaauaauaguaaau

SEQ ID NO: 354458 - RNA, 19 nt, Artificial Sequence
  Synthetic
ugcaaaaauaauaguaaau

SEQ ID NO: 354459 - RNA, 20 nt, Artificial Sequence
  Synthetic
augcaaaaauaauaguaaau

SEQ ID NO: 354460 - RNA, 21 nt, Artificial Sequence
  Synthetic
caugcaaaaauaauaguaaau

SEQ ID NO: 354461 - RNA, 22 nt, Artificial Sequence
  Synthetic
acaugcaaaaauaauaguaaau

SEQ ID NO: 354462 - RNA, 23 nt, Artificial Sequence
  Synthetic
uacaugcaaaaauaauaguaaau

SEQ ID NO: 354463 - RNA, 24 nt, Artificial Sequence
  Synthetic
guacaugcaaaaauaauaguaaau

SEQ ID NO: 354464 - RNA, 18 nt, Artificial Sequence
  Synthetic
uucaaugagguaguaaau

SEQ ID NO: 354465 - RNA, 19 nt, Artificial Sequence
  Synthetic
auucaaugagguaguaaau

SEQ ID NO: 354466 - RNA, 20 nt, Artificial Sequence
  Synthetic
aauucaaugagguaguaaau

SEQ ID NO: 354467 - RNA, 21 nt, Artificial Sequence
  Synthetic
aaauucaaugagguaguaaau

SEQ ID NO: 354468 - RNA, 22 nt, Artificial Sequence
  Synthetic
aaaauucaaugagguaguaaau

SEQ ID NO: 354469 - RNA, 23 nt, Artificial Sequence
  Synthetic
gaaaauucaaugagguaguaaau

SEQ ID NO: 354470 - RNA, 24 nt, Artificial Sequence
  Synthetic
ugaaaauucaaugagguaguaaau

SEQ ID NO: 354471 - RNA, 18 nt, Artificial Sequence
  Synthetic
ugggaacauguaguaaau

SEQ ID NO: 354472 - RNA, 19 nt, Artificial Sequence
  Synthetic
augggaacauguaguaaau

SEQ ID NO: 354473 - RNA, 20 nt, Artificial Sequence
  Synthetic
aaugggaacauguaguaaau

SEQ ID NO: 354474 - RNA, 21 nt, Artificial Sequence
  Synthetic
aaaugggaacauguaguaaau

SEQ ID NO: 354475 - RNA, 22 nt, Artificial Sequence
  Synthetic
aaaaugggaacauguaguaaau

SEQ ID NO: 354476 - RNA, 23 nt, Artificial Sequence
  Synthetic
aaaaaugggaacauguaguaaau

SEQ ID NO: 354477 - RNA, 24 nt, Artificial Sequence
  Synthetic
uaaaaaugggaacauguaguaaau

SEQ ID NO: 354478 - RNA, 18 nt, Artificial Sequence
  Synthetic
guuuuagacuuaguaaau

SEQ ID NO: 354479 - RNA, 19 nt, Artificial Sequence
  Synthetic
aguuuuagacuuaguaaau

SEQ ID NO: 354480 - RNA, 20 nt, Artificial Sequence
  Synthetic
gaguuuuagacuuaguaaau

SEQ ID NO: 354481 - RNA, 21 nt, Artificial Sequence
  Synthetic
ugaguuuuagacuuaguaaau

SEQ ID NO: 354482 - RNA, 22 nt, Artificial Sequence
  Synthetic
uugaguuuuagacuuaguaaau

SEQ ID NO: 354483 - RNA, 23 nt, Artificial Sequence
  Synthetic
cuugaguuuuagacuuaguaaau

SEQ ID NO: 354484 - RNA, 24 nt, Artificial Sequence
  Synthetic
acuugaguuuuagacuuaguaaau

SEQ ID NO: 354485 - RNA, 18 nt, Artificial Sequence
  Synthetic
uucuggagguucguaaau

SEQ ID NO: 354486 - RNA, 19 nt, Artificial Sequence
  Synthetic
cuucuggagguucguaaau

SEQ ID NO: 354487 - RNA, 20 nt, Artificial Sequence
  Synthetic
acuucuggagguucguaaau

SEQ ID NO: 354488 - RNA, 21 nt, Artificial Sequence
  Synthetic
cacuucuggagguucguaaau

SEQ ID NO: 354489 - RNA, 22 nt, Artificial Sequence
  Synthetic
acacuucuggagguucguaaau

SEQ ID NO: 354490 - RNA, 23 nt, Artificial Sequence
  Synthetic
gacacuucuggagguucguaaau

SEQ ID NO: 354491 - RNA, 24 nt, Artificial Sequence
  Synthetic
ugacacuucuggagguucguaaau

SEQ ID NO: 354492 - RNA, 18 nt, Artificial Sequence
  Synthetic
agaugcaugaagguaaau

SEQ ID NO: 354493 - RNA, 19 nt, Artificial Sequence
  Synthetic
aagaugcaugaagguaaau

SEQ ID NO: 354494 - RNA, 20 nt, Artificial Sequence
  Synthetic
aaagaugcaugaagguaaau

SEQ ID NO: 354495 - RNA, 21 nt, Artificial Sequence
  Synthetic
aaaagaugcaugaagguaaau

SEQ ID NO: 354496 - RNA, 22 nt, Artificial Sequence
  Synthetic
aaaaagaugcaugaagguaaau

SEQ ID NO: 354497 - RNA, 23 nt, Artificial Sequence
  Synthetic
uaaaaagaugcaugaagguaaau

SEQ ID NO: 354498 - RNA, 24 nt, Artificial Sequence
  Synthetic
uuaaaaagaugcaugaagguaaau

SEQ ID NO: 354499 - RNA, 18 nt, Artificial Sequence
  Synthetic
auccuuuuaaauguaaau

SEQ ID NO: 354500 - RNA, 19 nt, Artificial Sequence
  Synthetic
uauccuuuuaaauguaaau

SEQ ID NO: 354501 - RNA, 20 nt, Artificial Sequence
  Synthetic
auauccuuuuaaauguaaau

SEQ ID NO: 354502 - RNA, 21 nt, Artificial Sequence
  Synthetic
aauauccuuuuaaauguaaau

SEQ ID NO: 354503 - RNA, 22 nt, Artificial Sequence
  Synthetic
uaauauccuuuuaaauguaaau

SEQ ID NO: 354504 - RNA, 23 nt, Artificial Sequence
  Synthetic
cuaauauccuuuuaaauguaaau

SEQ ID NO: 354505 - RNA, 24 nt, Artificial Sequence
  Synthetic
ucuaauauccuuuuaaauguaaau

SEQ ID NO: 354506 - RNA, 18 nt, Artificial Sequence
  Synthetic
ucaguaacagauguaaau

SEQ ID NO: 354507 - RNA, 19 nt, Artificial Sequence
  Synthetic
aucaguaacagauguaaau

SEQ ID NO: 354508 - RNA, 20 nt, Artificial Sequence
  Synthetic
aaucaguaacagauguaaau

SEQ ID NO: 354509 - RNA, 21 nt, Artificial Sequence
  Synthetic
aaaucaguaacagauguaaau

SEQ ID NO: 354510 - RNA, 22 nt, Artificial Sequence
  Synthetic
aaaaucaguaacagauguaaau

SEQ ID NO: 354511 - RNA, 23 nt, Artificial Sequence
  Synthetic
aaaaaucaguaacagauguaaau

SEQ ID NO: 354512 - RNA, 24 nt, Artificial Sequence
  Synthetic
uaaaaaucaguaacagauguaaau

SEQ ID NO: 354513 - RNA, 18 nt, Artificial Sequence
  Synthetic
ccaccucucucuguaaau

SEQ ID NO: 354514 - RNA, 19 nt, Artificial Sequence
  Synthetic
cccaccucucucuguaaau

SEQ ID NO: 354515 - RNA, 20 nt, Artificial Sequence
  Synthetic
gcccaccucucucuguaaau

SEQ ID NO: 354516 - RNA, 21 nt, Artificial Sequence
  Synthetic
agcccaccucucucuguaaau

SEQ ID NO: 354517 - RNA, 22 nt, Artificial Sequence
  Synthetic
aagcccaccucucucuguaaau

SEQ ID NO: 354518 - RNA, 23 nt, Artificial Sequence
  Synthetic
caagcccaccucucucuguaaau

SEQ ID NO: 354519 - RNA, 24 nt, Artificial Sequence
  Synthetic
ccaagcccaccucucucuguaaau

SEQ ID NO: 354520 - RNA, 18 nt, Artificial Sequence
  Synthetic
auuguuuucucuguaaau

SEQ ID NO: 354521 - RNA, 19 nt, Artificial Sequence
  Synthetic
aauuguuuucucuguaaau

SEQ ID NO: 354522 - RNA, 20 nt, Artificial Sequence
  Synthetic
aaauuguuuucucuguaaau

SEQ ID NO: 354523 - RNA, 21 nt, Artificial Sequence
  Synthetic
aaaauuguuuucucuguaaau

SEQ ID NO: 354524 - RNA, 22 nt, Artificial Sequence
  Synthetic
uaaaauuguuuucucuguaaau

SEQ ID NO: 354525 - RNA, 23 nt, Artificial Sequence
  Synthetic
auaaaauuguuuucucuguaaau

SEQ ID NO: 354526 - RNA, 24 nt, Artificial Sequence
  Synthetic
uauaaaauuguuuucucuguaaau

SEQ ID NO: 354527 - RNA, 18 nt, Artificial Sequence
  Synthetic
gagauagaaauuguaaau

SEQ ID NO: 354528 - RNA, 19 nt, Artificial Sequence
  Synthetic
agagauagaaauuguaaau

SEQ ID NO: 354529 - RNA, 20 nt, Artificial Sequence
  Synthetic
aagagauagaaauuguaaau

SEQ ID NO: 354530 - RNA, 21 nt, Artificial Sequence
  Synthetic
aaagagauagaaauuguaaau

SEQ ID NO: 354531 - RNA, 22 nt, Artificial Sequence
  Synthetic
uaaagagauagaaauuguaaau

SEQ ID NO: 354532 - RNA, 23 nt, Artificial Sequence
  Synthetic
auaaagagauagaaauuguaaau

SEQ ID NO: 354533 - RNA, 24 nt, Artificial Sequence
  Synthetic
aauaaagagauagaaauuguaaau

SEQ ID NO: 354534 - RNA, 18 nt, Artificial Sequence
  Synthetic
agaacauacuuuguaaau

SEQ ID NO: 354535 - RNA, 19 nt, Artificial Sequence
  Synthetic
aagaacauacuuuguaaau

SEQ ID NO: 354536 - RNA, 20 nt, Artificial Sequence
  Synthetic
caagaacauacuuuguaaau

SEQ ID NO: 354537 - RNA, 21 nt, Artificial Sequence
  Synthetic
ucaagaacauacuuuguaaau

SEQ ID NO: 354538 - RNA, 22 nt, Artificial Sequence
  Synthetic
uucaagaacauacuuuguaaau

SEQ ID NO: 354539 - RNA, 23 nt, Artificial Sequence
  Synthetic
uuucaagaacauacuuuguaaau

SEQ ID NO: 354540 - RNA, 24 nt, Artificial Sequence
  Synthetic
auuucaagaacauacuuuguaaau

SEQ ID NO: 354541 - RNA, 18 nt, Artificial Sequence
  Synthetic
guugcgccaaaauuaaau

SEQ ID NO: 354542 - RNA, 19 nt, Artificial Sequence
  Synthetic
uguugcgccaaaauuaaau

SEQ ID NO: 354543 - RNA, 20 nt, Artificial Sequence
  Synthetic
guguugcgccaaaauuaaau

SEQ ID NO: 354544 - RNA, 21 nt, Artificial Sequence
  Synthetic
aguguugcgccaaaauuaaau

SEQ ID NO: 354545 - RNA, 22 nt, Artificial Sequence
  Synthetic
uaguguugcgccaaaauuaaau

SEQ ID NO: 354546 - RNA, 23 nt, Artificial Sequence
  Synthetic
guaguguugcgccaaaauuaaau

SEQ ID NO: 354547 - RNA, 24 nt, Artificial Sequence
  Synthetic
uguaguguugcgccaaaauuaaau

SEQ ID NO: 354548 - RNA, 18 nt, Artificial Sequence
  Synthetic
accauguuauaauuaaau

SEQ ID NO: 354549 - RNA, 19 nt, Artificial Sequence
  Synthetic
gaccauguuauaauuaaau

SEQ ID NO: 354550 - RNA, 20 nt, Artificial Sequence
  Synthetic
agaccauguuauaauuaaau

SEQ ID NO: 354551 - RNA, 21 nt, Artificial Sequence
  Synthetic
cagaccauguuauaauuaaau

SEQ ID NO: 354552 - RNA, 22 nt, Artificial Sequence
  Synthetic
acagaccauguuauaauuaaau

SEQ ID NO: 354553 - RNA, 23 nt, Artificial Sequence
  Synthetic
aacagaccauguuauaauuaaau

SEQ ID NO: 354554 - RNA, 24 nt, Artificial Sequence
  Synthetic
uaacagaccauguuauaauuaaau

SEQ ID NO: 354555 - RNA, 18 nt, Artificial Sequence
  Synthetic
gauacaaaggcauuaaau

SEQ ID NO: 354556 - RNA, 19 nt, Artificial Sequence
  Synthetic
ugauacaaaggcauuaaau

SEQ ID NO: 354557 - RNA, 20 nt, Artificial Sequence
  Synthetic
uugauacaaaggcauuaaau

SEQ ID NO: 354558 - RNA, 21 nt, Artificial Sequence
  Synthetic
guugauacaaaggcauuaaau

SEQ ID NO: 354559 - RNA, 22 nt, Artificial Sequence
  Synthetic
gguugauacaaaggcauuaaau

SEQ ID NO: 354560 - RNA, 23 nt, Artificial Sequence
  Synthetic
ugguugauacaaaggcauuaaau

SEQ ID NO: 354561 - RNA, 24 nt, Artificial Sequence
  Synthetic
gugguugauacaaaggcauuaaau

SEQ ID NO: 354562 - RNA, 18 nt, Artificial Sequence
  Synthetic
auauugugaagauuaaau

SEQ ID NO: 354563 - RNA, 19 nt, Artificial Sequence
  Synthetic
aauauugugaagauuaaau

SEQ ID NO: 354564 - RNA, 20 nt, Artificial Sequence
  Synthetic
uaauauugugaagauuaaau

SEQ ID NO: 354565 - RNA, 21 nt, Artificial Sequence
  Synthetic
uuaauauugugaagauuaaau

SEQ ID NO: 354566 - RNA, 22 nt, Artificial Sequence
  Synthetic
auuaauauugugaagauuaaau

SEQ ID NO: 354567 - RNA, 23 nt, Artificial Sequence
  Synthetic
gauuaauauugugaagauuaaau

SEQ ID NO: 354568 - RNA, 24 nt, Artificial Sequence
  Synthetic
agauuaauauugugaagauuaaau

SEQ ID NO: 354569 - RNA, 18 nt, Artificial Sequence
  Synthetic
aaaccaaaaugauuaaau

SEQ ID NO: 354570 - RNA, 19 nt, Artificial Sequence
  Synthetic
caaaccaaaaugauuaaau

SEQ ID NO: 354571 - RNA, 20 nt, Artificial Sequence
  Synthetic
acaaaccaaaaugauuaaau

SEQ ID NO: 354572 - RNA, 21 nt, Artificial Sequence
  Synthetic
aacaaaccaaaaugauuaaau

SEQ ID NO: 354573 - RNA, 22 nt, Artificial Sequence
  Synthetic
aaacaaaccaaaaugauuaaau

SEQ ID NO: 354574 - RNA, 23 nt, Artificial Sequence
  Synthetic
uaaacaaaccaaaaugauuaaau

SEQ ID NO: 354575 - RNA, 24 nt, Artificial Sequence
  Synthetic
uuaaacaaaccaaaaugauuaaau

SEQ ID NO: 354576 - RNA, 18 nt, Artificial Sequence
  Synthetic
uaugaaaauauauuaaau

SEQ ID NO: 354577 - RNA, 19 nt, Artificial Sequence
  Synthetic
auaugaaaauauauuaaau

SEQ ID NO: 354578 - RNA, 20 nt, Artificial Sequence
  Synthetic
cauaugaaaauauauuaaau

SEQ ID NO: 354579 - RNA, 21 nt, Artificial Sequence
  Synthetic
acauaugaaaauauauuaaau

SEQ ID NO: 354580 - RNA, 22 nt, Artificial Sequence
  Synthetic
aacauaugaaaauauauuaaau

SEQ ID NO: 354581 - RNA, 23 nt, Artificial Sequence
  Synthetic
caacauaugaaaauauauuaaau

SEQ ID NO: 354582 - RNA, 24 nt, Artificial Sequence
  Synthetic
acaacauaugaaaauauauuaaau

SEQ ID NO: 354583 - RNA, 18 nt, Artificial Sequence
  Synthetic
cacauauauauauuaaau

SEQ ID NO: 354584 - RNA, 19 nt, Artificial Sequence
  Synthetic
gcacauauauauauuaaau

SEQ ID NO: 354585 - RNA, 20 nt, Artificial Sequence
  Synthetic
agcacauauauauauuaaau

SEQ ID NO: 354586 - RNA, 21 nt, Artificial Sequence
  Synthetic
cagcacauauauauauuaaau

SEQ ID NO: 354587 - RNA, 22 nt, Artificial Sequence
  Synthetic
ucagcacauauauauauuaaau

SEQ ID NO: 354588 - RNA, 23 nt, Artificial Sequence
  Synthetic
aucagcacauauauauauuaaau

SEQ ID NO: 354589 - RNA, 24 nt, Artificial Sequence
  Synthetic
aaucagcacauauauauauuaaau

SEQ ID NO: 354590 - RNA, 18 nt, Artificial Sequence
  Synthetic
uaaaaauguguauuaaau

SEQ ID NO: 354591 - RNA, 19 nt, Artificial Sequence
  Synthetic
cuaaaaauguguauuaaau

SEQ ID NO: 354592 - RNA, 20 nt, Artificial Sequence
  Synthetic
ccuaaaaauguguauuaaau

SEQ ID NO: 354593 - RNA, 21 nt, Artificial Sequence
  Synthetic
gccuaaaaauguguauuaaau

SEQ ID NO: 354594 - RNA, 22 nt, Artificial Sequence
  Synthetic
agccuaaaaauguguauuaaau

SEQ ID NO: 354595 - RNA, 23 nt, Artificial Sequence
  Synthetic
aagccuaaaaauguguauuaaau

SEQ ID NO: 354596 - RNA, 24 nt, Artificial Sequence
  Synthetic
caagccuaaaaauguguauuaaau

SEQ ID NO: 354597 - RNA, 18 nt, Artificial Sequence
  Synthetic
caacaccauuuauuaaau

SEQ ID NO: 354598 - RNA, 19 nt, Artificial Sequence
  Synthetic
ccaacaccauuuauuaaau

SEQ ID NO: 354599 - RNA, 20 nt, Artificial Sequence
  Synthetic
cccaacaccauuuauuaaau

SEQ ID NO: 354600 - RNA, 21 nt, Artificial Sequence
  Synthetic
ucccaacaccauuuauuaaau

SEQ ID NO: 354601 - RNA, 22 nt, Artificial Sequence
  Synthetic
uucccaacaccauuuauuaaau

SEQ ID NO: 354602 - RNA, 23 nt, Artificial Sequence
  Synthetic
uuucccaacaccauuuauuaaau

SEQ ID NO: 354603 - RNA, 24 nt, Artificial Sequence
  Synthetic
uuuucccaacaccauuuauuaaau

SEQ ID NO: 354604 - RNA, 18 nt, Artificial Sequence
  Synthetic
cgacaccauuuauuaaau

SEQ ID NO: 354605 - RNA, 19 nt, Artificial Sequence
  Synthetic
ccgacaccauuuauuaaau

SEQ ID NO: 354606 - RNA, 20 nt, Artificial Sequence
  Synthetic
cccgacaccauuuauuaaau

SEQ ID NO: 354607 - RNA, 21 nt, Artificial Sequence
  Synthetic
ucccgacaccauuuauuaaau

SEQ ID NO: 354608 - RNA, 22 nt, Artificial Sequence
  Synthetic
uucccgacaccauuuauuaaau

SEQ ID NO: 354609 - RNA, 23 nt, Artificial Sequence
  Synthetic
uuucccgacaccauuuauuaaau

SEQ ID NO: 354610 - RNA, 24 nt, Artificial Sequence
  Synthetic
uuuucccgacaccauuuauuaaau

SEQ ID NO: 354611 - RNA, 18 nt, Artificial Sequence
  Synthetic
cagcaccauuuauuaaau

SEQ ID NO: 354612 - RNA, 19 nt, Artificial Sequence
  Synthetic
ccagcaccauuuauuaaau

SEQ ID NO: 354613 - RNA, 20 nt, Artificial Sequence
  Synthetic
cccagcaccauuuauuaaau

SEQ ID NO: 354614 - RNA, 21 nt, Artificial Sequence
  Synthetic
ucccagcaccauuuauuaaau

SEQ ID NO: 354615 - RNA, 22 nt, Artificial Sequence
  Synthetic
uucccagcaccauuuauuaaau

SEQ ID NO: 354616 - RNA, 23 nt, Artificial Sequence
  Synthetic
uuucccagcaccauuuauuaaau

SEQ ID NO: 354617 - RNA, 24 nt, Artificial Sequence
  Synthetic
uuuucccagcaccauuuauuaaau

SEQ ID NO: 354618 - RNA, 18 nt, Artificial Sequence
  Synthetic
cagcaccguuuauuaaau

SEQ ID NO: 354619 - RNA, 19 nt, Artificial Sequence
  Synthetic
ccagcaccguuuauuaaau

SEQ ID NO: 354620 - RNA, 20 nt, Artificial Sequence
  Synthetic
cccagcaccguuuauuaaau

SEQ ID NO: 354621 - RNA, 21 nt, Artificial Sequence
  Synthetic
ucccagcaccguuuauuaaau

SEQ ID NO: 354622 - RNA, 22 nt, Artificial Sequence
  Synthetic
uucccagcaccguuuauuaaau

SEQ ID NO: 354623 - RNA, 23 nt, Artificial Sequence
  Synthetic
uuucccagcaccguuuauuaaau

SEQ ID NO: 354624 - RNA, 24 nt, Artificial Sequence
  Synthetic
uuuucccagcaccguuuauuaaau

SEQ ID NO: 354625 - RNA, 18 nt, Artificial Sequence
  Synthetic
ucuugugcccacuuaaau

SEQ ID NO: 354626 - RNA, 19 nt, Artificial Sequence
  Synthetic
uucuugugcccacuuaaau

SEQ ID NO: 354627 - RNA, 20 nt, Artificial Sequence
  Synthetic
guucuugugcccacuuaaau

SEQ ID NO: 354628 - RNA, 21 nt, Artificial Sequence
  Synthetic
aguucuugugcccacuuaaau

SEQ ID NO: 354629 - RNA, 22 nt, Artificial Sequence
  Synthetic
uaguucuugugcccacuuaaau

SEQ ID NO: 354630 - RNA, 23 nt, Artificial Sequence
  Synthetic
guaguucuugugcccacuuaaau

SEQ ID NO: 354631 - RNA, 24 nt, Artificial Sequence
  Synthetic
gguaguucuugugcccacuuaaau

SEQ ID NO: 354632 - RNA, 18 nt, Artificial Sequence
  Synthetic
aaacaauggaaguuaaau

SEQ ID NO: 354633 - RNA, 19 nt, Artificial Sequence
  Synthetic
gaaacaauggaaguuaaau

SEQ ID NO: 354634 - RNA, 20 nt, Artificial Sequence
  Synthetic
agaaacaauggaaguuaaau

SEQ ID NO: 354635 - RNA, 21 nt, Artificial Sequence
  Synthetic
cagaaacaauggaaguuaaau

SEQ ID NO: 354636 - RNA, 22 nt, Artificial Sequence
  Synthetic
gcagaaacaauggaaguuaaau

SEQ ID NO: 354637 - RNA, 23 nt, Artificial Sequence
  Synthetic
ugcagaaacaauggaaguuaaau

SEQ ID NO: 354638 - RNA, 24 nt, Artificial Sequence
  Synthetic
gugcagaaacaauggaaguuaaau

SEQ ID NO: 354639 - RNA, 18 nt, Artificial Sequence
  Synthetic
uuugugugacaguuaaau

SEQ ID NO: 354640 - RNA, 19 nt, Artificial Sequence
  Synthetic
cuuugugugacaguuaaau

SEQ ID NO: 354641 - RNA, 20 nt, Artificial Sequence
  Synthetic
gcuuugugugacaguuaaau

SEQ ID NO: 354642 - RNA, 21 nt, Artificial Sequence
  Synthetic
agcuuugugugacaguuaaau

SEQ ID NO: 354643 - RNA, 22 nt, Artificial Sequence
  Synthetic
gagcuuugugugacaguuaaau

SEQ ID NO: 354644 - RNA, 23 nt, Artificial Sequence
  Synthetic
ugagcuuugugugacaguuaaau

SEQ ID NO: 354645 - RNA, 24 nt, Artificial Sequence
  Synthetic
cugagcuuugugugacaguuaaau

SEQ ID NO: 354646 - RNA, 18 nt, Artificial Sequence
  Synthetic
accccaaaccaguuaaau

SEQ ID NO: 354647 - RNA, 19 nt, Artificial Sequence
  Synthetic
caccccaaaccaguuaaau

SEQ ID NO: 354648 - RNA, 20 nt, Artificial Sequence
  Synthetic
ccaccccaaaccaguuaaau

SEQ ID NO: 354649 - RNA, 21 nt, Artificial Sequence
  Synthetic
uccaccccaaaccaguuaaau

SEQ ID NO: 354650 - RNA, 22 nt, Artificial Sequence
  Synthetic
cuccaccccaaaccaguuaaau

SEQ ID NO: 354651 - RNA, 23 nt, Artificial Sequence
  Synthetic
acuccaccccaaaccaguuaaau

SEQ ID NO: 354652 - RNA, 24 nt, Artificial Sequence
  Synthetic
gacuccaccccaaaccaguuaaau

SEQ ID NO: 354653 - RNA, 18 nt, Artificial Sequence
  Synthetic
aaagcuuuucaguuaaau

SEQ ID NO: 354654 - RNA, 19 nt, Artificial Sequence
  Synthetic
gaaagcuuuucaguuaaau

SEQ ID NO: 354655 - RNA, 20 nt, Artificial Sequence
  Synthetic
ugaaagcuuuucaguuaaau

SEQ ID NO: 354656 - RNA, 21 nt, Artificial Sequence
  Synthetic
cugaaagcuuuucaguuaaau

SEQ ID NO: 354657 - RNA, 22 nt, Artificial Sequence
  Synthetic
ucugaaagcuuuucaguuaaau

SEQ ID NO: 354658 - RNA, 23 nt, Artificial Sequence
  Synthetic
aucugaaagcuuuucaguuaaau

SEQ ID NO: 354659 - RNA, 24 nt, Artificial Sequence
  Synthetic
uaucugaaagcuuuucaguuaaau

SEQ ID NO: 354660 - RNA, 18 nt, Artificial Sequence
  Synthetic
cacugaugauaguuaaau

SEQ ID NO: 354661 - RNA, 19 nt, Artificial Sequence
  Synthetic
gcacugaugauaguuaaau

SEQ ID NO: 354662 - RNA, 20 nt, Artificial Sequence
  Synthetic
agcacugaugauaguuaaau

SEQ ID NO: 354663 - RNA, 21 nt, Artificial Sequence
  Synthetic
gagcacugaugauaguuaaau

SEQ ID NO: 354664 - RNA, 22 nt, Artificial Sequence
  Synthetic
agagcacugaugauaguuaaau

SEQ ID NO: 354665 - RNA, 23 nt, Artificial Sequence
  Synthetic
aagagcacugaugauaguuaaau

SEQ ID NO: 354666 - RNA, 24 nt, Artificial Sequence
  Synthetic
caagagcacugaugauaguuaaau

SEQ ID NO: 354667 - RNA, 18 nt, Artificial Sequence
  Synthetic
augaucaaguaguuaaau

SEQ ID NO: 354668 - RNA, 19 nt, Artificial Sequence
  Synthetic
uaugaucaaguaguuaaau

SEQ ID NO: 354669 - RNA, 20 nt, Artificial Sequence
  Synthetic
guaugaucaaguaguuaaau

SEQ ID NO: 354670 - RNA, 21 nt, Artificial Sequence
  Synthetic
uguaugaucaaguaguuaaau

SEQ ID NO: 354671 - RNA, 22 nt, Artificial Sequence
  Synthetic
uuguaugaucaaguaguuaaau

SEQ ID NO: 354672 - RNA, 23 nt, Artificial Sequence
  Synthetic
guuguaugaucaaguaguuaaau

SEQ ID NO: 354673 - RNA, 24 nt, Artificial Sequence
  Synthetic
aguuguaugaucaaguaguuaaau

SEQ ID NO: 354674 - RNA, 18 nt, Artificial Sequence
  Synthetic
ggugguggaacguuaaau

SEQ ID NO: 354675 - RNA, 19 nt, Artificial Sequence
  Synthetic
aggugguggaacguuaaau

SEQ ID NO: 354676 - RNA, 20 nt, Artificial Sequence
  Synthetic
aaggugguggaacguuaaau

SEQ ID NO: 354677 - RNA, 21 nt, Artificial Sequence
  Synthetic
uaaggugguggaacguuaaau

SEQ ID NO: 354678 - RNA, 22 nt, Artificial Sequence
  Synthetic
auaaggugguggaacguuaaau

SEQ ID NO: 354679 - RNA, 23 nt, Artificial Sequence
  Synthetic
aauaaggugguggaacguuaaau

SEQ ID NO: 354680 - RNA, 24 nt, Artificial Sequence
  Synthetic
gaauaaggugguggaacguuaaau

SEQ ID NO: 354681 - RNA, 18 nt, Artificial Sequence
  Synthetic
cuuaaacugagguuaaau

SEQ ID NO: 354682 - RNA, 19 nt, Artificial Sequence
  Synthetic
ccuuaaacugagguuaaau

SEQ ID NO: 354683 - RNA, 20 nt, Artificial Sequence
  Synthetic
uccuuaaacugagguuaaau

SEQ ID NO: 354684 - RNA, 21 nt, Artificial Sequence
  Synthetic
cuccuuaaacugagguuaaau

SEQ ID NO: 354685 - RNA, 22 nt, Artificial Sequence
  Synthetic
acuccuuaaacugagguuaaau

SEQ ID NO: 354686 - RNA, 23 nt, Artificial Sequence
  Synthetic
aacuccuuaaacugagguuaaau

SEQ ID NO: 354687 - RNA, 24 nt, Artificial Sequence
  Synthetic
caacuccuuaaacugagguuaaau

SEQ ID NO: 354688 - RNA, 18 nt, Artificial Sequence
  Synthetic
cauaaaucuggguuaaau

SEQ ID NO: 354689 - RNA, 19 nt, Artificial Sequence
  Synthetic
ucauaaaucuggguuaaau

SEQ ID NO: 354690 - RNA, 20 nt, Artificial Sequence
  Synthetic
uucauaaaucuggguuaaau

SEQ ID NO: 354691 - RNA, 21 nt, Artificial Sequence
  Synthetic
cuucauaaaucuggguuaaau

SEQ ID NO: 354692 - RNA, 22 nt, Artificial Sequence
  Synthetic
ccuucauaaaucuggguuaaau

SEQ ID NO: 354693 - RNA, 23 nt, Artificial Sequence
  Synthetic
uccuucauaaaucuggguuaaau

SEQ ID NO: 354694 - RNA, 24 nt, Artificial Sequence
  Synthetic
auccuucauaaaucuggguuaaau

SEQ ID NO: 354695 - RNA, 18 nt, Artificial Sequence
  Synthetic
uaaaaucugguguuaaau

SEQ ID NO: 354696 - RNA, 19 nt, Artificial Sequence
  Synthetic
auaaaaucugguguuaaau

SEQ ID NO: 354697 - RNA, 20 nt, Artificial Sequence
  Synthetic
aauaaaaucugguguuaaau

SEQ ID NO: 354698 - RNA, 21 nt, Artificial Sequence
  Synthetic
caauaaaaucugguguuaaau

SEQ ID NO: 354699 - RNA, 22 nt, Artificial Sequence
  Synthetic
ccaauaaaaucugguguuaaau

SEQ ID NO: 354700 - RNA, 23 nt, Artificial Sequence
  Synthetic
uccaauaaaaucugguguuaaau

SEQ ID NO: 354701 - RNA, 24 nt, Artificial Sequence
  Synthetic
auccaauaaaaucugguguuaaau

SEQ ID NO: 354702 - RNA, 18 nt, Artificial Sequence
  Synthetic
cuauuuuucaauuuaaau

SEQ ID NO: 354703 - RNA, 19 nt, Artificial Sequence
  Synthetic
ccuauuuuucaauuuaaau

SEQ ID NO: 354704 - RNA, 20 nt, Artificial Sequence
  Synthetic
uccuauuuuucaauuuaaau

SEQ ID NO: 354705 - RNA, 21 nt, Artificial Sequence
  Synthetic
uuccuauuuuucaauuuaaau

SEQ ID NO: 354706 - RNA, 22 nt, Artificial Sequence
  Synthetic
uuuccuauuuuucaauuuaaau

SEQ ID NO: 354707 - RNA, 23 nt, Artificial Sequence
  Synthetic
uuuuccuauuuuucaauuuaaau

SEQ ID NO: 354708 - RNA, 24 nt, Artificial Sequence
  Synthetic
cuuuuccuauuuuucaauuuaaau

SEQ ID NO: 354709 - RNA, 18 nt, Artificial Sequence
  Synthetic
aucagagugaauuuaaau

SEQ ID NO: 354710 - RNA, 19 nt, Artificial Sequence
  Synthetic
caucagagugaauuuaaau

SEQ ID NO: 354711 - RNA, 20 nt, Artificial Sequence
  Synthetic
acaucagagugaauuuaaau

SEQ ID NO: 354712 - RNA, 21 nt, Artificial Sequence
  Synthetic
gacaucagagugaauuuaaau

SEQ ID NO: 354713 - RNA, 22 nt, Artificial Sequence
  Synthetic
agacaucagagugaauuuaaau

SEQ ID NO: 354714 - RNA, 23 nt, Artificial Sequence
  Synthetic
aagacaucagagugaauuuaaau

SEQ ID NO: 354715 - RNA, 24 nt, Artificial Sequence
  Synthetic
uaagacaucagagugaauuuaaau

SEQ ID NO: 354716 - RNA, 18 nt, Artificial Sequence
  Synthetic
ggacuucaacauuuaaau

SEQ ID NO: 354717 - RNA, 19 nt, Artificial Sequence
  Synthetic
aggacuucaacauuuaaau

SEQ ID NO: 354718 - RNA, 20 nt, Artificial Sequence
  Synthetic
uaggacuucaacauuuaaau

SEQ ID NO: 354719 - RNA, 21 nt, Artificial Sequence
  Synthetic
uuaggacuucaacauuuaaau

SEQ ID NO: 354720 - RNA, 22 nt, Artificial Sequence
  Synthetic
guuaggacuucaacauuuaaau

SEQ ID NO: 354721 - RNA, 23 nt, Artificial Sequence
  Synthetic
gguuaggacuucaacauuuaaau

SEQ ID NO: 354722 - RNA, 24 nt, Artificial Sequence
  Synthetic
ggguuaggacuucaacauuuaaau

SEQ ID NO: 354723 - RNA, 18 nt, Artificial Sequence
  Synthetic
uaaacaguuacuuuaaau

SEQ ID NO: 354724 - RNA, 19 nt, Artificial Sequence
  Synthetic
auaaacaguuacuuuaaau

SEQ ID NO: 354725 - RNA, 20 nt, Artificial Sequence
  Synthetic
aauaaacaguuacuuuaaau

SEQ ID NO: 354726 - RNA, 21 nt, Artificial Sequence
  Synthetic
uaauaaacaguuacuuuaaau

SEQ ID NO: 354727 - RNA, 22 nt, Artificial Sequence
  Synthetic
uuaauaaacaguuacuuuaaau

SEQ ID NO: 354728 - RNA, 23 nt, Artificial Sequence
  Synthetic
auuaauaaacaguuacuuuaaau

SEQ ID NO: 354729 - RNA, 24 nt, Artificial Sequence
  Synthetic
aauuaauaaacaguuacuuuaaau

SEQ ID NO: 354730 - RNA, 18 nt, Artificial Sequence
  Synthetic
gagcaaguagcuuuaaau

SEQ ID NO: 354731 - RNA, 19 nt, Artificial Sequence
  Synthetic
agagcaaguagcuuuaaau

SEQ ID NO: 354732 - RNA, 20 nt, Artificial Sequence
  Synthetic
aagagcaaguagcuuuaaau

SEQ ID NO: 354733 - RNA, 21 nt, Artificial Sequence
  Synthetic
gaagagcaaguagcuuuaaau

SEQ ID NO: 354734 - RNA, 22 nt, Artificial Sequence
  Synthetic
agaagagcaaguagcuuuaaau

SEQ ID NO: 354735 - RNA, 23 nt, Artificial Sequence
  Synthetic
uagaagagcaaguagcuuuaaau

SEQ ID NO: 354736 - RNA, 24 nt, Artificial Sequence
  Synthetic
uuagaagagcaaguagcuuuaaau

SEQ ID NO: 354737 - RNA, 18 nt, Artificial Sequence
  Synthetic
gaaaagcaaauuuuaaau

SEQ ID NO: 354738 - RNA, 19 nt, Artificial Sequence
  Synthetic
ugaaaagcaaauuuuaaau

SEQ ID NO: 354739 - RNA, 20 nt, Artificial Sequence
  Synthetic
cugaaaagcaaauuuuaaau

SEQ ID NO: 354740 - RNA, 21 nt, Artificial Sequence
  Synthetic
gcugaaaagcaaauuuuaaau

SEQ ID NO: 354741 - RNA, 22 nt, Artificial Sequence
  Synthetic
agcugaaaagcaaauuuuaaau

SEQ ID NO: 354742 - RNA, 23 nt, Artificial Sequence
  Synthetic
uagcugaaaagcaaauuuuaaau

SEQ ID NO: 354743 - RNA, 24 nt, Artificial Sequence
  Synthetic
cuagcugaaaagcaaauuuuaaau

SEQ ID NO: 354744 - RNA, 18 nt, Artificial Sequence
  Synthetic
uucaagggaauuuuaaau

SEQ ID NO: 354745 - RNA, 19 nt, Artificial Sequence
  Synthetic
auucaagggaauuuuaaau

SEQ ID NO: 354746 - RNA, 20 nt, Artificial Sequence
  Synthetic
uauucaagggaauuuuaaau

SEQ ID NO: 354747 - RNA, 21 nt, Artificial Sequence
  Synthetic
cuauucaagggaauuuuaaau

SEQ ID NO: 354748 - RNA, 22 nt, Artificial Sequence
  Synthetic
ccuauucaagggaauuuuaaau

SEQ ID NO: 354749 - RNA, 23 nt, Artificial Sequence
  Synthetic
uccuauucaagggaauuuuaaau

SEQ ID NO: 354750 - RNA, 24 nt, Artificial Sequence
  Synthetic
uuccuauucaagggaauuuuaaau

SEQ ID NO: 354751 - RNA, 18 nt, Artificial Sequence
  Synthetic
cagauauuuauuuuaaau

SEQ ID NO: 354752 - RNA, 19 nt, Artificial Sequence
  Synthetic
ucagauauuuauuuuaaau

SEQ ID NO: 354753 - RNA, 20 nt, Artificial Sequence
  Synthetic
aucagauauuuauuuuaaau

SEQ ID NO: 354754 - RNA, 21 nt, Artificial Sequence
  Synthetic
uaucagauauuuauuuuaaau

SEQ ID NO: 354755 - RNA, 22 nt, Artificial Sequence
  Synthetic
auaucagauauuuauuuuaaau

SEQ ID NO: 354756 - RNA, 23 nt, Artificial Sequence
  Synthetic
aauaucagauauuuauuuuaaau

SEQ ID NO: 354757 - RNA, 24 nt, Artificial Sequence
  Synthetic
aaauaucagauauuuauuuuaaau

SEQ ID NO: 354758 - RNA, 18 nt, Artificial Sequence
  Synthetic
agaggaggaguuuuaaau

SEQ ID NO: 354759 - RNA, 19 nt, Artificial Sequence
  Synthetic
uagaggaggaguuuuaaau

SEQ ID NO: 354760 - RNA, 20 nt, Artificial Sequence
  Synthetic
cuagaggaggaguuuuaaau

SEQ ID NO: 354761 - RNA, 21 nt, Artificial Sequence
  Synthetic
acuagaggaggaguuuuaaau

SEQ ID NO: 354762 - RNA, 22 nt, Artificial Sequence
  Synthetic
aacuagaggaggaguuuuaaau

SEQ ID NO: 354763 - RNA, 23 nt, Artificial Sequence
  Synthetic
aaacuagaggaggaguuuuaaau

SEQ ID NO: 354764 - RNA, 24 nt, Artificial Sequence
  Synthetic
aaaacuagaggaggaguuuuaaau

SEQ ID NO: 354765 - RNA, 18 nt, Artificial Sequence
  Synthetic
aaggaucuacaaaacaau

SEQ ID NO: 354766 - RNA, 19 nt, Artificial Sequence
  Synthetic
aaaggaucuacaaaacaau

SEQ ID NO: 354767 - RNA, 20 nt, Artificial Sequence
  Synthetic
caaaggaucuacaaaacaau

SEQ ID NO: 354768 - RNA, 21 nt, Artificial Sequence
  Synthetic
acaaaggaucuacaaaacaau

SEQ ID NO: 354769 - RNA, 22 nt, Artificial Sequence
  Synthetic
aacaaaggaucuacaaaacaau

SEQ ID NO: 354770 - RNA, 23 nt, Artificial Sequence
  Synthetic
gaacaaaggaucuacaaaacaau

SEQ ID NO: 354771 - RNA, 24 nt, Artificial Sequence
  Synthetic
agaacaaaggaucuacaaaacaau

SEQ ID NO: 354772 - RNA, 18 nt, Artificial Sequence
  Synthetic
gcuuucagugaaaacaau

SEQ ID NO: 354773 - RNA, 19 nt, Artificial Sequence
  Synthetic
agcuuucagugaaaacaau

SEQ ID NO: 354774 - RNA, 20 nt, Artificial Sequence
  Synthetic
aagcuuucagugaaaacaau

SEQ ID NO: 354775 - RNA, 21 nt, Artificial Sequence
  Synthetic
gaagcuuucagugaaaacaau

SEQ ID NO: 354776 - RNA, 22 nt, Artificial Sequence
  Synthetic
ggaagcuuucagugaaaacaau

SEQ ID NO: 354777 - RNA, 23 nt, Artificial Sequence
  Synthetic
aggaagcuuucagugaaaacaau

SEQ ID NO: 354778 - RNA, 24 nt, Artificial Sequence
  Synthetic
caggaagcuuucagugaaaacaau

SEQ ID NO: 354779 - RNA, 18 nt, Artificial Sequence
  Synthetic
aguugacccucaaacaau

SEQ ID NO: 354780 - RNA, 19 nt, Artificial Sequence
  Synthetic
caguugacccucaaacaau

SEQ ID NO: 354781 - RNA, 20 nt, Artificial Sequence
  Synthetic
acaguugacccucaaacaau

SEQ ID NO: 354782 - RNA, 21 nt, Artificial Sequence
  Synthetic
uacaguugacccucaaacaau

SEQ ID NO: 354783 - RNA, 22 nt, Artificial Sequence
  Synthetic
auacaguugacccucaaacaau

SEQ ID NO: 354784 - RNA, 23 nt, Artificial Sequence
  Synthetic
uauacaguugacccucaaacaau

SEQ ID NO: 354785 - RNA, 24 nt, Artificial Sequence
  Synthetic
uuauacaguugacccucaaacaau

SEQ ID NO: 354786 - RNA, 18 nt, Artificial Sequence
  Synthetic
uugagaggaagaaacaau

SEQ ID NO: 354787 - RNA, 19 nt, Artificial Sequence
  Synthetic
uuugagaggaagaaacaau

SEQ ID NO: 354788 - RNA, 20 nt, Artificial Sequence
  Synthetic
uuuugagaggaagaaacaau

SEQ ID NO: 354789 - RNA, 21 nt, Artificial Sequence
  Synthetic
uuuuugagaggaagaaacaau

SEQ ID NO: 354790 - RNA, 22 nt, Artificial Sequence
  Synthetic
auuuuugagaggaagaaacaau

SEQ ID NO: 354791 - RNA, 23 nt, Artificial Sequence
  Synthetic
uauuuuugagaggaagaaacaau

SEQ ID NO: 354792 - RNA, 24 nt, Artificial Sequence
  Synthetic
auauuuuugagaggaagaaacaau

SEQ ID NO: 354793 - RNA, 18 nt, Artificial Sequence
  Synthetic
gaaaugaaaugaaacaau

SEQ ID NO: 354794 - RNA, 19 nt, Artificial Sequence
  Synthetic
cgaaaugaaaugaaacaau

SEQ ID NO: 354795 - RNA, 20 nt, Artificial Sequence
  Synthetic
ucgaaaugaaaugaaacaau

SEQ ID NO: 354796 - RNA, 21 nt, Artificial Sequence
  Synthetic
gucgaaaugaaaugaaacaau

SEQ ID NO: 354797 - RNA, 22 nt, Artificial Sequence
  Synthetic
agucgaaaugaaaugaaacaau

SEQ ID NO: 354798 - RNA, 23 nt, Artificial Sequence
  Synthetic
aagucgaaaugaaaugaaacaau

SEQ ID NO: 354799 - RNA, 24 nt, Artificial Sequence
  Synthetic
uaagucgaaaugaaaugaaacaau

SEQ ID NO: 354800 - RNA, 18 nt, Artificial Sequence
  Synthetic
gacauuguacuaaacaau

SEQ ID NO: 354801 - RNA, 19 nt, Artificial Sequence
  Synthetic
agacauuguacuaaacaau

SEQ ID NO: 354802 - RNA, 20 nt, Artificial Sequence
  Synthetic
cagacauuguacuaaacaau

SEQ ID NO: 354803 - RNA, 21 nt, Artificial Sequence
  Synthetic
ucagacauuguacuaaacaau

SEQ ID NO: 354804 - RNA, 22 nt, Artificial Sequence
  Synthetic
aucagacauuguacuaaacaau

SEQ ID NO: 354805 - RNA, 23 nt, Artificial Sequence
  Synthetic
caucagacauuguacuaaacaau

SEQ ID NO: 354806 - RNA, 24 nt, Artificial Sequence
  Synthetic
gcaucagacauuguacuaaacaau

SEQ ID NO: 354807 - RNA, 18 nt, Artificial Sequence
  Synthetic
gaaacuauucuaaacaau

SEQ ID NO: 354808 - RNA, 19 nt, Artificial Sequence
  Synthetic
ugaaacuauucuaaacaau

SEQ ID NO: 354809 - RNA, 20 nt, Artificial Sequence
  Synthetic
cugaaacuauucuaaacaau

SEQ ID NO: 354810 - RNA, 21 nt, Artificial Sequence
  Synthetic
ucugaaacuauucuaaacaau

SEQ ID NO: 354811 - RNA, 22 nt, Artificial Sequence
  Synthetic
uucugaaacuauucuaaacaau

SEQ ID NO: 354812 - RNA, 23 nt, Artificial Sequence
  Synthetic
cuucugaaacuauucuaaacaau

SEQ ID NO: 354813 - RNA, 24 nt, Artificial Sequence
  Synthetic
ccuucugaaacuauucuaaacaau

SEQ ID NO: 354814 - RNA, 18 nt, Artificial Sequence
  Synthetic
ggacccaaagacaacaau

SEQ ID NO: 354815 - RNA, 19 nt, Artificial Sequence
  Synthetic
gggacccaaagacaacaau

SEQ ID NO: 354816 - RNA, 20 nt, Artificial Sequence
  Synthetic
ggggacccaaagacaacaau

SEQ ID NO: 354817 - RNA, 21 nt, Artificial Sequence
  Synthetic
aggggacccaaagacaacaau

SEQ ID NO: 354818 - RNA, 22 nt, Artificial Sequence
  Synthetic
caggggacccaaagacaacaau

SEQ ID NO: 354819 - RNA, 23 nt, Artificial Sequence
  Synthetic
ucaggggacccaaagacaacaau

SEQ ID NO: 354820 - RNA, 24 nt, Artificial Sequence
  Synthetic
uucaggggacccaaagacaacaau

SEQ ID NO: 354821 - RNA, 18 nt, Artificial Sequence
  Synthetic
gaacagugcuacaacaau

SEQ ID NO: 354822 - RNA, 19 nt, Artificial Sequence
  Synthetic
ugaacagugcuacaacaau

SEQ ID NO: 354823 - RNA, 20 nt, Artificial Sequence
  Synthetic
gugaacagugcuacaacaau

SEQ ID NO: 354824 - RNA, 21 nt, Artificial Sequence
  Synthetic
ugugaacagugcuacaacaau

SEQ ID NO: 354825 - RNA, 22 nt, Artificial Sequence
  Synthetic
uugugaacagugcuacaacaau

SEQ ID NO: 354826 - RNA, 23 nt, Artificial Sequence
  Synthetic
guugugaacagugcuacaacaau

SEQ ID NO: 354827 - RNA, 24 nt, Artificial Sequence
  Synthetic
uguugugaacagugcuacaacaau

SEQ ID NO: 354828 - RNA, 18 nt, Artificial Sequence
  Synthetic
uuaauuucaggcaacaau

SEQ ID NO: 354829 - RNA, 19 nt, Artificial Sequence
  Synthetic
cuuaauuucaggcaacaau

SEQ ID NO: 354830 - RNA, 20 nt, Artificial Sequence
  Synthetic
ucuuaauuucaggcaacaau

SEQ ID NO: 354831 - RNA, 21 nt, Artificial Sequence
  Synthetic
uucuuaauuucaggcaacaau

SEQ ID NO: 354832 - RNA, 22 nt, Artificial Sequence
  Synthetic
uuucuuaauuucaggcaacaau

SEQ ID NO: 354833 - RNA, 23 nt, Artificial Sequence
  Synthetic
uuuucuuaauuucaggcaacaau

SEQ ID NO: 354834 - RNA, 24 nt, Artificial Sequence
  Synthetic
cuuuucuuaauuucaggcaacaau

SEQ ID NO: 354835 - RNA, 18 nt, Artificial Sequence
  Synthetic
aagugggagcugaacaau

SEQ ID NO: 354836 - RNA, 19 nt, Artificial Sequence
  Synthetic
aaagugggagcugaacaau

SEQ ID NO: 354837 - RNA, 20 nt, Artificial Sequence
  Synthetic
aaaagugggagcugaacaau

SEQ ID NO: 354838 - RNA, 21 nt, Artificial Sequence
  Synthetic
uaaaagugggagcugaacaau

SEQ ID NO: 354839 - RNA, 22 nt, Artificial Sequence
  Synthetic
uuaaaagugggagcugaacaau

SEQ ID NO: 354840 - RNA, 23 nt, Artificial Sequence
  Synthetic
cuuaaaagugggagcugaacaau

SEQ ID NO: 354841 - RNA, 24 nt, Artificial Sequence
  Synthetic
acuuaaaagugggagcugaacaau

SEQ ID NO: 354842 - RNA, 18 nt, Artificial Sequence
  Synthetic
aggugggaauugaacaau

SEQ ID NO: 354843 - RNA, 19 nt, Artificial Sequence
  Synthetic
caggugggaauugaacaau

SEQ ID NO: 354844 - RNA, 20 nt, Artificial Sequence
  Synthetic
acaggugggaauugaacaau

SEQ ID NO: 354845 - RNA, 21 nt, Artificial Sequence
  Synthetic
cacaggugggaauugaacaau

SEQ ID NO: 354846 - RNA, 22 nt, Artificial Sequence
  Synthetic
ucacaggugggaauugaacaau

SEQ ID NO: 354847 - RNA, 23 nt, Artificial Sequence
  Synthetic
cucacaggugggaauugaacaau

SEQ ID NO: 354848 - RNA, 24 nt, Artificial Sequence
  Synthetic
acucacaggugggaauugaacaau

SEQ ID NO: 354849 - RNA, 19 nt, Artificial Sequence
  Synthetic
uaggugggaauugaacaau

SEQ ID NO: 354850 - RNA, 20 nt, Artificial Sequence
  Synthetic
auaggugggaauugaacaau

SEQ ID NO: 354851 - RNA, 21 nt, Artificial Sequence
  Synthetic
cauaggugggaauugaacaau

SEQ ID NO: 354852 - RNA, 22 nt, Artificial Sequence
  Synthetic
ucauaggugggaauugaacaau

SEQ ID NO: 354853 - RNA, 23 nt, Artificial Sequence
  Synthetic
cucauaggugggaauugaacaau

SEQ ID NO: 354854 - RNA, 24 nt, Artificial Sequence
  Synthetic
acucauaggugggaauugaacaau

SEQ ID NO: 354855 - RNA, 23 nt, Artificial Sequence
  Synthetic
uucauaggugggaauugaacaau

SEQ ID NO: 354856 - RNA, 24 nt, Artificial Sequence
  Synthetic
auucauaggugggaauugaacaau

SEQ ID NO: 354857 - RNA, 18 nt, Artificial Sequence
  Synthetic
cugaaaugugauaacaau

SEQ ID NO: 354858 - RNA, 19 nt, Artificial Sequence
  Synthetic
acugaaaugugauaacaau

SEQ ID NO: 354859 - RNA, 20 nt, Artificial Sequence
  Synthetic
cacugaaaugugauaacaau

SEQ ID NO: 354860 - RNA, 21 nt, Artificial Sequence
  Synthetic
ucacugaaaugugauaacaau

SEQ ID NO: 354861 - RNA, 22 nt, Artificial Sequence
  Synthetic
cucacugaaaugugauaacaau

SEQ ID NO: 354862 - RNA, 23 nt, Artificial Sequence
  Synthetic
ucucacugaaaugugauaacaau

SEQ ID NO: 354863 - RNA, 24 nt, Artificial Sequence
  Synthetic
aucucacugaaaugugauaacaau

SEQ ID NO: 354864 - RNA, 18 nt, Artificial Sequence
  Synthetic
ggccaguuuacuaacaau

SEQ ID NO: 354865 - RNA, 19 nt, Artificial Sequence
  Synthetic
uggccaguuuacuaacaau

SEQ ID NO: 354866 - RNA, 20 nt, Artificial Sequence
  Synthetic
cuggccaguuuacuaacaau

SEQ ID NO: 354867 - RNA, 21 nt, Artificial Sequence
  Synthetic
gcuggccaguuuacuaacaau

SEQ ID NO: 354868 - RNA, 22 nt, Artificial Sequence
  Synthetic
ugcuggccaguuuacuaacaau

SEQ ID NO: 354869 - RNA, 23 nt, Artificial Sequence
  Synthetic
cugcuggccaguuuacuaacaau

SEQ ID NO: 354870 - RNA, 24 nt, Artificial Sequence
  Synthetic
acugcuggccaguuuacuaacaau

SEQ ID NO: 354871 - RNA, 18 nt, Artificial Sequence
  Synthetic
aaauguaaaucuaacaau

SEQ ID NO: 354872 - RNA, 19 nt, Artificial Sequence
  Synthetic
uaaauguaaaucuaacaau

SEQ ID NO: 354873 - RNA, 20 nt, Artificial Sequence
  Synthetic
guaaauguaaaucuaacaau

SEQ ID NO: 354874 - RNA, 21 nt, Artificial Sequence
  Synthetic
uguaaauguaaaucuaacaau

SEQ ID NO: 354875 - RNA, 22 nt, Artificial Sequence
  Synthetic
guguaaauguaaaucuaacaau

SEQ ID NO: 354876 - RNA, 23 nt, Artificial Sequence
  Synthetic
gguguaaauguaaaucuaacaau

SEQ ID NO: 354877 - RNA, 24 nt, Artificial Sequence
  Synthetic
ugguguaaauguaaaucuaacaau

SEQ ID NO: 354878 - RNA, 18 nt, Artificial Sequence
  Synthetic
ucauucuaccguaacaau

SEQ ID NO: 354879 - RNA, 19 nt, Artificial Sequence
  Synthetic
aucauucuaccguaacaau

SEQ ID NO: 354880 - RNA, 20 nt, Artificial Sequence
  Synthetic
uaucauucuaccguaacaau

SEQ ID NO: 354881 - RNA, 21 nt, Artificial Sequence
  Synthetic
cuaucauucuaccguaacaau

SEQ ID NO: 354882 - RNA, 22 nt, Artificial Sequence
  Synthetic
ucuaucauucuaccguaacaau

SEQ ID NO: 354883 - RNA, 23 nt, Artificial Sequence
  Synthetic
uucuaucauucuaccguaacaau

SEQ ID NO: 354884 - RNA, 24 nt, Artificial Sequence
  Synthetic
auucuaucauucuaccguaacaau

SEQ ID NO: 354885 - RNA, 18 nt, Artificial Sequence
  Synthetic
gcacuuuuaucacacaau

SEQ ID NO: 354886 - RNA, 19 nt, Artificial Sequence
  Synthetic
ugcacuuuuaucacacaau

SEQ ID NO: 354887 - RNA, 20 nt, Artificial Sequence
  Synthetic
uugcacuuuuaucacacaau

SEQ ID NO: 354888 - RNA, 21 nt, Artificial Sequence
  Synthetic
uuugcacuuuuaucacacaau

SEQ ID NO: 354889 - RNA, 22 nt, Artificial Sequence
  Synthetic
cuuugcacuuuuaucacacaau

SEQ ID NO: 354890 - RNA, 23 nt, Artificial Sequence
  Synthetic
ucuuugcacuuuuaucacacaau

SEQ ID NO: 354891 - RNA, 24 nt, Artificial Sequence
  Synthetic
cucuuugcacuuuuaucacacaau

SEQ ID NO: 354892 - RNA, 18 nt, Artificial Sequence
  Synthetic
aaccgaaaaauacacaau

SEQ ID NO: 354893 - RNA, 19 nt, Artificial Sequence
  Synthetic
uaaccgaaaaauacacaau

SEQ ID NO: 354894 - RNA, 20 nt, Artificial Sequence
  Synthetic
guaaccgaaaaauacacaau

SEQ ID NO: 354895 - RNA, 21 nt, Artificial Sequence
  Synthetic
aguaaccgaaaaauacacaau

SEQ ID NO: 354896 - RNA, 22 nt, Artificial Sequence
  Synthetic
aaguaaccgaaaaauacacaau

SEQ ID NO: 354897 - RNA, 23 nt, Artificial Sequence
  Synthetic
aaaguaaccgaaaaauacacaau

SEQ ID NO: 354898 - RNA, 24 nt, Artificial Sequence
  Synthetic
aaaaguaaccgaaaaauacacaau

SEQ ID NO: 354899 - RNA, 18 nt, Artificial Sequence
  Synthetic
uuguccaagauacacaau

SEQ ID NO: 354900 - RNA, 19 nt, Artificial Sequence
  Synthetic
auuguccaagauacacaau

SEQ ID NO: 354901 - RNA, 20 nt, Artificial Sequence
  Synthetic
gauuguccaagauacacaau

SEQ ID NO: 354902 - RNA, 21 nt, Artificial Sequence
  Synthetic
ggauuguccaagauacacaau

SEQ ID NO: 354903 - RNA, 22 nt, Artificial Sequence
  Synthetic
uggauuguccaagauacacaau

SEQ ID NO: 354904 - RNA, 23 nt, Artificial Sequence
  Synthetic
auggauuguccaagauacacaau

SEQ ID NO: 354905 - RNA, 24 nt, Artificial Sequence
  Synthetic
cauggauuguccaagauacacaau

SEQ ID NO: 354906 - RNA, 18 nt, Artificial Sequence
  Synthetic
caacuuggcugccacaau

SEQ ID NO: 354907 - RNA, 19 nt, Artificial Sequence
  Synthetic
ucaacuuggcugccacaau

SEQ ID NO: 354908 - RNA, 20 nt, Artificial Sequence
  Synthetic
cucaacuuggcugccacaau

SEQ ID NO: 354909 - RNA, 21 nt, Artificial Sequence
  Synthetic
acucaacuuggcugccacaau

SEQ ID NO: 354910 - RNA, 22 nt, Artificial Sequence
  Synthetic
cacucaacuuggcugccacaau

SEQ ID NO: 354911 - RNA, 23 nt, Artificial Sequence
  Synthetic
ccacucaacuuggcugccacaau

SEQ ID NO: 354912 - RNA, 24 nt, Artificial Sequence
  Synthetic
cccacucaacuuggcugccacaau

SEQ ID NO: 354913 - RNA, 18 nt, Artificial Sequence
  Synthetic
gacaauaaaaaucacaau

SEQ ID NO: 354914 - RNA, 19 nt, Artificial Sequence
  Synthetic
ugacaauaaaaaucacaau

SEQ ID NO: 354915 - RNA, 20 nt, Artificial Sequence
  Synthetic
cugacaauaaaaaucacaau

SEQ ID NO: 354916 - RNA, 21 nt, Artificial Sequence
  Synthetic
ccugacaauaaaaaucacaau

SEQ ID NO: 354917 - RNA, 22 nt, Artificial Sequence
  Synthetic
gccugacaauaaaaaucacaau

SEQ ID NO: 354918 - RNA, 23 nt, Artificial Sequence
  Synthetic
ugccugacaauaaaaaucacaau

SEQ ID NO: 354919 - RNA, 24 nt, Artificial Sequence
  Synthetic
uugccugacaauaaaaaucacaau

SEQ ID NO: 354920 - RNA, 18 nt, Artificial Sequence
  Synthetic
uuagcuuguaaagacaau

SEQ ID NO: 354921 - RNA, 19 nt, Artificial Sequence
  Synthetic
auuagcuuguaaagacaau

SEQ ID NO: 354922 - RNA, 20 nt, Artificial Sequence
  Synthetic
uauuagcuuguaaagacaau

SEQ ID NO: 354923 - RNA, 21 nt, Artificial Sequence
  Synthetic
auauuagcuuguaaagacaau

SEQ ID NO: 354924 - RNA, 22 nt, Artificial Sequence
  Synthetic
aauauuagcuuguaaagacaau

SEQ ID NO: 354925 - RNA, 23 nt, Artificial Sequence
  Synthetic
uaauauuagcuuguaaagacaau

SEQ ID NO: 354926 - RNA, 24 nt, Artificial Sequence
  Synthetic
guaauauuagcuuguaaagacaau

SEQ ID NO: 354927 - RNA, 18 nt, Artificial Sequence
  Synthetic
guuaagcgccaagacaau

SEQ ID NO: 354928 - RNA, 19 nt, Artificial Sequence
  Synthetic
uguuaagcgccaagacaau

SEQ ID NO: 354929 - RNA, 20 nt, Artificial Sequence
  Synthetic
auguuaagcgccaagacaau

SEQ ID NO: 354930 - RNA, 21 nt, Artificial Sequence
  Synthetic
aauguuaagcgccaagacaau

SEQ ID NO: 354931 - RNA, 22 nt, Artificial Sequence
  Synthetic
aaauguuaagcgccaagacaau

SEQ ID NO: 354932 - RNA, 23 nt, Artificial Sequence
  Synthetic
caaauguuaagcgccaagacaau

SEQ ID NO: 354933 - RNA, 24 nt, Artificial Sequence
  Synthetic
ccaaauguuaagcgccaagacaau

SEQ ID NO: 354934 - RNA, 18 nt, Artificial Sequence
  Synthetic
auucaaguccaagacaau

SEQ ID NO: 354935 - RNA, 19 nt, Artificial Sequence
  Synthetic
gauucaaguccaagacaau

SEQ ID NO: 354936 - RNA, 20 nt, Artificial Sequence
  Synthetic
agauucaaguccaagacaau

SEQ ID NO: 354937 - RNA, 21 nt, Artificial Sequence
  Synthetic
gagauucaaguccaagacaau

SEQ ID NO: 354938 - RNA, 22 nt, Artificial Sequence
  Synthetic
ugagauucaaguccaagacaau

SEQ ID NO: 354939 - RNA, 23 nt, Artificial Sequence
  Synthetic
augagauucaaguccaagacaau

SEQ ID NO: 354940 - RNA, 24 nt, Artificial Sequence
  Synthetic
aaugagauucaaguccaagacaau

SEQ ID NO: 354941 - RNA, 18 nt, Artificial Sequence
  Synthetic
ugaaacauuucagacaau

SEQ ID NO: 354942 - RNA, 19 nt, Artificial Sequence
  Synthetic
augaaacauuucagacaau

SEQ ID NO: 354943 - RNA, 20 nt, Artificial Sequence
  Synthetic
uaugaaacauuucagacaau

SEQ ID NO: 354944 - RNA, 21 nt, Artificial Sequence
  Synthetic
auaugaaacauuucagacaau

SEQ ID NO: 354945 - RNA, 22 nt, Artificial Sequence
  Synthetic
aauaugaaacauuucagacaau

SEQ ID NO: 354946 - RNA, 23 nt, Artificial Sequence
  Synthetic
gaauaugaaacauuucagacaau

SEQ ID NO: 354947 - RNA, 24 nt, Artificial Sequence
  Synthetic
agaauaugaaacauuucagacaau

SEQ ID NO: 354948 - RNA, 18 nt, Artificial Sequence
  Synthetic
aggugacuccuagacaau

SEQ ID NO: 354949 - RNA, 19 nt, Artificial Sequence
  Synthetic
gaggugacuccuagacaau

SEQ ID NO: 354950 - RNA, 20 nt, Artificial Sequence
  Synthetic
ugaggugacuccuagacaau

SEQ ID NO: 354951 - RNA, 21 nt, Artificial Sequence
  Synthetic
uugaggugacuccuagacaau

SEQ ID NO: 354952 - RNA, 22 nt, Artificial Sequence
  Synthetic
auugaggugacuccuagacaau

SEQ ID NO: 354953 - RNA, 23 nt, Artificial Sequence
  Synthetic
uauugaggugacuccuagacaau

SEQ ID NO: 354954 - RNA, 24 nt, Artificial Sequence
  Synthetic
cuauugaggugacuccuagacaau

SEQ ID NO: 354955 - RNA, 18 nt, Artificial Sequence
  Synthetic
gguguuagcuaggacaau

SEQ ID NO: 354956 - RNA, 19 nt, Artificial Sequence
  Synthetic
ggguguuagcuaggacaau

SEQ ID NO: 354957 - RNA, 20 nt, Artificial Sequence
  Synthetic
aggguguuagcuaggacaau

SEQ ID NO: 354958 - RNA, 21 nt, Artificial Sequence
  Synthetic
caggguguuagcuaggacaau

SEQ ID NO: 354959 - RNA, 22 nt, Artificial Sequence
  Synthetic
ccaggguguuagcuaggacaau

SEQ ID NO: 354960 - RNA, 23 nt, Artificial Sequence
  Synthetic
uccaggguguuagcuaggacaau

SEQ ID NO: 354961 - RNA, 24 nt, Artificial Sequence
  Synthetic
auccaggguguuagcuaggacaau

SEQ ID NO: 354962 - RNA, 18 nt, Artificial Sequence
  Synthetic
cagagucugacugacaau

SEQ ID NO: 354963 - RNA, 19 nt, Artificial Sequence
  Synthetic
ucagagucugacugacaau

SEQ ID NO: 354964 - RNA, 20 nt, Artificial Sequence
  Synthetic
gucagagucugacugacaau

SEQ ID NO: 354965 - RNA, 21 nt, Artificial Sequence
  Synthetic
ugucagagucugacugacaau

SEQ ID NO: 354966 - RNA, 22 nt, Artificial Sequence
  Synthetic
uugucagagucugacugacaau

SEQ ID NO: 354967 - RNA, 23 nt, Artificial Sequence
  Synthetic
uuugucagagucugacugacaau

SEQ ID NO: 354968 - RNA, 24 nt, Artificial Sequence
  Synthetic
auuugucagagucugacugacaau

SEQ ID NO: 354969 - RNA, 18 nt, Artificial Sequence
  Synthetic
aaagaaaaucuugacaau

SEQ ID NO: 354970 - RNA, 19 nt, Artificial Sequence
  Synthetic
gaaagaaaaucuugacaau

SEQ ID NO: 354971 - RNA, 20 nt, Artificial Sequence
  Synthetic
agaaagaaaaucuugacaau

SEQ ID NO: 354972 - RNA, 21 nt, Artificial Sequence
  Synthetic
uagaaagaaaaucuugacaau

SEQ ID NO: 354973 - RNA, 22 nt, Artificial Sequence
  Synthetic
auagaaagaaaaucuugacaau

SEQ ID NO: 354974 - RNA, 23 nt, Artificial Sequence
  Synthetic
uauagaaagaaaaucuugacaau

SEQ ID NO: 354975 - RNA, 24 nt, Artificial Sequence
  Synthetic
uuauagaaagaaaaucuugacaau

SEQ ID NO: 354976 - RNA, 18 nt, Artificial Sequence
  Synthetic
aauagcaggaaauacaau

SEQ ID NO: 354977 - RNA, 19 nt, Artificial Sequence
  Synthetic
uaauagcaggaaauacaau

SEQ ID NO: 354978 - RNA, 20 nt, Artificial Sequence
  Synthetic
auaauagcaggaaauacaau

SEQ ID NO: 354979 - RNA, 21 nt, Artificial Sequence
  Synthetic
aauaauagcaggaaauacaau

SEQ ID NO: 354980 - RNA, 22 nt, Artificial Sequence
  Synthetic
caauaauagcaggaaauacaau

SEQ ID NO: 354981 - RNA, 23 nt, Artificial Sequence
  Synthetic
acaauaauagcaggaaauacaau

SEQ ID NO: 354982 - RNA, 24 nt, Artificial Sequence
  Synthetic
cacaauaauagcaggaaauacaau

SEQ ID NO: 354983 - RNA, 18 nt, Artificial Sequence
  Synthetic
uuauucugaacauacaau

SEQ ID NO: 354984 - RNA, 19 nt, Artificial Sequence
  Synthetic
uuuauucugaacauacaau

SEQ ID NO: 354985 - RNA, 20 nt, Artificial Sequence
  Synthetic
uuuuauucugaacauacaau

SEQ ID NO: 354986 - RNA, 21 nt, Artificial Sequence
  Synthetic
cuuuuauucugaacauacaau

SEQ ID NO: 354987 - RNA, 22 nt, Artificial Sequence
  Synthetic
ucuuuuauucugaacauacaau

SEQ ID NO: 354988 - RNA, 23 nt, Artificial Sequence
  Synthetic
uucuuuuauucugaacauacaau

SEQ ID NO: 354989 - RNA, 24 nt, Artificial Sequence
  Synthetic
uuucuuuuauucugaacauacaau

SEQ ID NO: 354990 - RNA, 18 nt, Artificial Sequence
  Synthetic
augugguacacauacaau

SEQ ID NO: 354991 - RNA, 19 nt, Artificial Sequence
  Synthetic
aaugugguacacauacaau

SEQ ID NO: 354992 - RNA, 20 nt, Artificial Sequence
  Synthetic
aaaugugguacacauacaau

SEQ ID NO: 354993 - RNA, 21 nt, Artificial Sequence
  Synthetic
aaaaugugguacacauacaau

SEQ ID NO: 354994 - RNA, 22 nt, Artificial Sequence
  Synthetic
gaaaaugugguacacauacaau

SEQ ID NO: 354995 - RNA, 23 nt, Artificial Sequence
  Synthetic
agaaaaugugguacacauacaau

SEQ ID NO: 354996 - RNA, 24 nt, Artificial Sequence
  Synthetic
aagaaaaugugguacacauacaau

SEQ ID NO: 354997 - RNA, 18 nt, Artificial Sequence
  Synthetic
gcaauauaaaccuacaau

SEQ ID NO: 354998 - RNA, 19 nt, Artificial Sequence
  Synthetic
ugcaauauaaaccuacaau

SEQ ID NO: 354999 - RNA, 20 nt, Artificial Sequence
  Synthetic
uugcaauauaaaccuacaau

SEQ ID NO: 355000 - RNA, 21 nt, Artificial Sequence
  Synthetic
auugcaauauaaaccuacaau

SEQ ID NO: 355001 - RNA, 22 nt, Artificial Sequence
  Synthetic
aauugcaauauaaaccuacaau

SEQ ID NO: 355002 - RNA, 23 nt, Artificial Sequence
  Synthetic
aaauugcaauauaaaccuacaau

SEQ ID NO: 355003 - RNA, 24 nt, Artificial Sequence
  Synthetic
uaaauugcaauauaaaccuacaau

SEQ ID NO: 355004 - RNA, 18 nt, Artificial Sequence
  Synthetic
uaaaagaagcccuacaau

SEQ ID NO: 355005 - RNA, 19 nt, Artificial Sequence
  Synthetic
uuaaaagaagcccuacaau

SEQ ID NO: 355006 - RNA, 20 nt, Artificial Sequence
  Synthetic
auuaaaagaagcccuacaau

SEQ ID NO: 355007 - RNA, 21 nt, Artificial Sequence
  Synthetic
gauuaaaagaagcccuacaau

SEQ ID NO: 355008 - RNA, 22 nt, Artificial Sequence
  Synthetic
ggauuaaaagaagcccuacaau

SEQ ID NO: 355009 - RNA, 23 nt, Artificial Sequence
  Synthetic
uggauuaaaagaagcccuacaau

SEQ ID NO: 355010 - RNA, 24 nt, Artificial Sequence
  Synthetic
uuggauuaaaagaagcccuacaau

SEQ ID NO: 355011 - RNA, 18 nt, Artificial Sequence
  Synthetic
auuucuguauucuacaau

SEQ ID NO: 355012 - RNA, 19 nt, Artificial Sequence
  Synthetic
aauuucuguauucuacaau

SEQ ID NO: 355013 - RNA, 20 nt, Artificial Sequence
  Synthetic
uaauuucuguauucuacaau

SEQ ID NO: 355014 - RNA, 21 nt, Artificial Sequence
  Synthetic
auaauuucuguauucuacaau

SEQ ID NO: 355015 - RNA, 22 nt, Artificial Sequence
  Synthetic
uauaauuucuguauucuacaau

SEQ ID NO: 355016 - RNA, 23 nt, Artificial Sequence
  Synthetic
auauaauuucuguauucuacaau

SEQ ID NO: 355017 - RNA, 24 nt, Artificial Sequence
  Synthetic
aauauaauuucuguauucuacaau

SEQ ID NO: 355018 - RNA, 18 nt, Artificial Sequence
  Synthetic
gauacuguacuguacaau

SEQ ID NO: 355019 - RNA, 19 nt, Artificial Sequence
  Synthetic
cgauacuguacuguacaau

SEQ ID NO: 355020 - RNA, 20 nt, Artificial Sequence
  Synthetic
acgauacuguacuguacaau

SEQ ID NO: 355021 - RNA, 21 nt, Artificial Sequence
  Synthetic
aacgauacuguacuguacaau

SEQ ID NO: 355022 - RNA, 22 nt, Artificial Sequence
  Synthetic
uaacgauacuguacuguacaau

SEQ ID NO: 355023 - RNA, 23 nt, Artificial Sequence
  Synthetic
uuaacgauacuguacuguacaau

SEQ ID NO: 355024 - RNA, 24 nt, Artificial Sequence
  Synthetic
guuaacgauacuguacuguacaau

SEQ ID NO: 355025 - RNA, 18 nt, Artificial Sequence
  Synthetic
aaauagcaccuguacaau

SEQ ID NO: 355026 - RNA, 19 nt, Artificial Sequence
  Synthetic
aaaauagcaccuguacaau

SEQ ID NO: 355027 - RNA, 20 nt, Artificial Sequence
  Synthetic
aaaaauagcaccuguacaau

SEQ ID NO: 355028 - RNA, 21 nt, Artificial Sequence
  Synthetic
aaaaaauagcaccuguacaau

SEQ ID NO: 355029 - RNA, 22 nt, Artificial Sequence
  Synthetic
gaaaaaauagcaccuguacaau

SEQ ID NO: 355030 - RNA, 23 nt, Artificial Sequence
  Synthetic
ugaaaaaauagcaccuguacaau

SEQ ID NO: 355031 - RNA, 24 nt, Artificial Sequence
  Synthetic
cugaaaaaauagcaccuguacaau

SEQ ID NO: 355032 - RNA, 18 nt, Artificial Sequence
  Synthetic
ugccucuaaguguacaau

SEQ ID NO: 355033 - RNA, 19 nt, Artificial Sequence
  Synthetic
uugccucuaaguguacaau

SEQ ID NO: 355034 - RNA, 20 nt, Artificial Sequence
  Synthetic
cuugccucuaaguguacaau

SEQ ID NO: 355035 - RNA, 21 nt, Artificial Sequence
  Synthetic
ccuugccucuaaguguacaau

SEQ ID NO: 355036 - RNA, 22 nt, Artificial Sequence
  Synthetic
gccuugccucuaaguguacaau

SEQ ID NO: 355037 - RNA, 23 nt, Artificial Sequence
  Synthetic
ggccuugccucuaaguguacaau

SEQ ID NO: 355038 - RNA, 24 nt, Artificial Sequence
  Synthetic
aggccuugccucuaaguguacaau

SEQ ID NO: 355039 - RNA, 18 nt, Artificial Sequence
  Synthetic
auggugauuuauuacaau

SEQ ID NO: 355040 - RNA, 19 nt, Artificial Sequence
  Synthetic
uauggugauuuauuacaau

SEQ ID NO: 355041 - RNA, 20 nt, Artificial Sequence
  Synthetic
auauggugauuuauuacaau

SEQ ID NO: 355042 - RNA, 21 nt, Artificial Sequence
  Synthetic
aauauggugauuuauuacaau

SEQ ID NO: 355043 - RNA, 22 nt, Artificial Sequence
  Synthetic
aaauauggugauuuauuacaau

SEQ ID NO: 355044 - RNA, 23 nt, Artificial Sequence
  Synthetic
aaaauauggugauuuauuacaau

SEQ ID NO: 355045 - RNA, 24 nt, Artificial Sequence
  Synthetic
gaaaauauggugauuuauuacaau

SEQ ID NO: 355046 - RNA, 18 nt, Artificial Sequence
  Synthetic
guugacuguacuuacaau

SEQ ID NO: 355047 - RNA, 19 nt, Artificial Sequence
  Synthetic
uguugacuguacuuacaau

SEQ ID NO: 355048 - RNA, 20 nt, Artificial Sequence
  Synthetic
uuguugacuguacuuacaau

SEQ ID NO: 355049 - RNA, 21 nt, Artificial Sequence
  Synthetic
auuguugacuguacuuacaau

SEQ ID NO: 355050 - RNA, 22 nt, Artificial Sequence
  Synthetic
cauuguugacuguacuuacaau

SEQ ID NO: 355051 - RNA, 23 nt, Artificial Sequence
  Synthetic
ucauuguugacuguacuuacaau

SEQ ID NO: 355052 - RNA, 24 nt, Artificial Sequence
  Synthetic
aucauuguugacuguacuuacaau

SEQ ID NO: 355053 - RNA, 18 nt, Artificial Sequence
  Synthetic
uuaaaauagguuuacaau

SEQ ID NO: 355054 - RNA, 19 nt, Artificial Sequence
  Synthetic
auuaaaauagguuuacaau

SEQ ID NO: 355055 - RNA, 20 nt, Artificial Sequence
  Synthetic
cauuaaaauagguuuacaau

SEQ ID NO: 355056 - RNA, 21 nt, Artificial Sequence
  Synthetic
ccauuaaaauagguuuacaau

SEQ ID NO: 355057 - RNA, 22 nt, Artificial Sequence
  Synthetic
gccauuaaaauagguuuacaau

SEQ ID NO: 355058 - RNA, 23 nt, Artificial Sequence
  Synthetic
agccauuaaaauagguuuacaau

SEQ ID NO: 355059 - RNA, 24 nt, Artificial Sequence
  Synthetic
gagccauuaaaauagguuuacaau

SEQ ID NO: 355060 - RNA, 18 nt, Artificial Sequence
  Synthetic
ugucucauguuuuacaau

SEQ ID NO: 355061 - RNA, 19 nt, Artificial Sequence
  Synthetic
gugucucauguuuuacaau

SEQ ID NO: 355062 - RNA, 20 nt, Artificial Sequence
  Synthetic
ugugucucauguuuuacaau

SEQ ID NO: 355063 - RNA, 21 nt, Artificial Sequence
  Synthetic
gugugucucauguuuuacaau

SEQ ID NO: 355064 - RNA, 22 nt, Artificial Sequence
  Synthetic
ugugugucucauguuuuacaau

SEQ ID NO: 355065 - RNA, 23 nt, Artificial Sequence
  Synthetic
cugugugucucauguuuuacaau

SEQ ID NO: 355066 - RNA, 24 nt, Artificial Sequence
  Synthetic
ccugugugucucauguuuuacaau

SEQ ID NO: 355067 - RNA, 18 nt, Artificial Sequence
  Synthetic
gaaauuuuucaaaccaau

SEQ ID NO: 355068 - RNA, 19 nt, Artificial Sequence
  Synthetic
ugaaauuuuucaaaccaau

SEQ ID NO: 355069 - RNA, 20 nt, Artificial Sequence
  Synthetic
uugaaauuuuucaaaccaau

SEQ ID NO: 355070 - RNA, 21 nt, Artificial Sequence
  Synthetic
uuugaaauuuuucaaaccaau

SEQ ID NO: 355071 - RNA, 22 nt, Artificial Sequence
  Synthetic
cuuugaaauuuuucaaaccaau

SEQ ID NO: 355072 - RNA, 23 nt, Artificial Sequence
  Synthetic
ccuuugaaauuuuucaaaccaau

SEQ ID NO: 355073 - RNA, 24 nt, Artificial Sequence
  Synthetic
uccuuugaaauuuuucaaaccaau

SEQ ID NO: 355074 - RNA, 18 nt, Artificial Sequence
  Synthetic
gagcaagacucaaccaau

SEQ ID NO: 355075 - RNA, 19 nt, Artificial Sequence
  Synthetic
ggagcaagacucaaccaau

SEQ ID NO: 355076 - RNA, 20 nt, Artificial Sequence
  Synthetic
aggagcaagacucaaccaau

SEQ ID NO: 355077 - RNA, 21 nt, Artificial Sequence
  Synthetic
caggagcaagacucaaccaau

SEQ ID NO: 355078 - RNA, 22 nt, Artificial Sequence
  Synthetic
acaggagcaagacucaaccaau

SEQ ID NO: 355079 - RNA, 23 nt, Artificial Sequence
  Synthetic
aacaggagcaagacucaaccaau

SEQ ID NO: 355080 - RNA, 24 nt, Artificial Sequence
  Synthetic
uaacaggagcaagacucaaccaau

SEQ ID NO: 355081 - RNA, 18 nt, Artificial Sequence
  Synthetic
caccaaagauuaaccaau

SEQ ID NO: 355082 - RNA, 19 nt, Artificial Sequence
  Synthetic
ccaccaaagauuaaccaau

SEQ ID NO: 355083 - RNA, 20 nt, Artificial Sequence
  Synthetic
cccaccaaagauuaaccaau

SEQ ID NO: 355084 - RNA, 21 nt, Artificial Sequence
  Synthetic
ucccaccaaagauuaaccaau

SEQ ID NO: 355085 - RNA, 22 nt, Artificial Sequence
  Synthetic
aucccaccaaagauuaaccaau

SEQ ID NO: 355086 - RNA, 23 nt, Artificial Sequence
  Synthetic
aaucccaccaaagauuaaccaau

SEQ ID NO: 355087 - RNA, 24 nt, Artificial Sequence
  Synthetic
aaaucccaccaaagauuaaccaau

SEQ ID NO: 355088 - RNA, 18 nt, Artificial Sequence
  Synthetic
aaguaccuauaacccaau

SEQ ID NO: 355089 - RNA, 19 nt, Artificial Sequence
  Synthetic
gaaguaccuauaacccaau

SEQ ID NO: 355090 - RNA, 20 nt, Artificial Sequence
  Synthetic
ugaaguaccuauaacccaau

SEQ ID NO: 355091 - RNA, 21 nt, Artificial Sequence
  Synthetic
cugaaguaccuauaacccaau

SEQ ID NO: 355092 - RNA, 22 nt, Artificial Sequence
  Synthetic
ucugaaguaccuauaacccaau

SEQ ID NO: 355093 - RNA, 23 nt, Artificial Sequence
  Synthetic
aucugaaguaccuauaacccaau

SEQ ID NO: 355094 - RNA, 24 nt, Artificial Sequence
  Synthetic
uaucugaaguaccuauaacccaau

SEQ ID NO: 355095 - RNA, 18 nt, Artificial Sequence
  Synthetic
ucacuccacacacccaau

SEQ ID NO: 355096 - RNA, 19 nt, Artificial Sequence
  Synthetic
cucacuccacacacccaau

SEQ ID NO: 355097 - RNA, 20 nt, Artificial Sequence
  Synthetic
ucucacuccacacacccaau

SEQ ID NO: 355098 - RNA, 21 nt, Artificial Sequence
  Synthetic
aucucacuccacacacccaau

SEQ ID NO: 355099 - RNA, 22 nt, Artificial Sequence
  Synthetic
uaucucacuccacacacccaau

SEQ ID NO: 355100 - RNA, 23 nt, Artificial Sequence
  Synthetic
guaucucacuccacacacccaau

SEQ ID NO: 355101 - RNA, 24 nt, Artificial Sequence
  Synthetic
aguaucucacuccacacacccaau

SEQ ID NO: 355102 - RNA, 18 nt, Artificial Sequence
  Synthetic
cauauauuucuacccaau

SEQ ID NO: 355103 - RNA, 19 nt, Artificial Sequence
  Synthetic
gcauauauuucuacccaau

SEQ ID NO: 355104 - RNA, 20 nt, Artificial Sequence
  Synthetic
agcauauauuucuacccaau

SEQ ID NO: 355105 - RNA, 21 nt, Artificial Sequence
  Synthetic
aagcauauauuucuacccaau

SEQ ID NO: 355106 - RNA, 22 nt, Artificial Sequence
  Synthetic
aaagcauauauuucuacccaau

SEQ ID NO: 355107 - RNA, 23 nt, Artificial Sequence
  Synthetic
aaaagcauauauuucuacccaau

SEQ ID NO: 355108 - RNA, 24 nt, Artificial Sequence
  Synthetic
gaaaagcauauauuucuacccaau

SEQ ID NO: 355109 - RNA, 18 nt, Artificial Sequence
  Synthetic
guuacuuuauuucccaau

SEQ ID NO: 355110 - RNA, 19 nt, Artificial Sequence
  Synthetic
uguuacuuuauuucccaau

SEQ ID NO: 355111 - RNA, 20 nt, Artificial Sequence
  Synthetic
uuguuacuuuauuucccaau

SEQ ID NO: 355112 - RNA, 21 nt, Artificial Sequence
  Synthetic
uuuguuacuuuauuucccaau

SEQ ID NO: 355113 - RNA, 22 nt, Artificial Sequence
  Synthetic
cuuuguuacuuuauuucccaau

SEQ ID NO: 355114 - RNA, 23 nt, Artificial Sequence
  Synthetic
ucuuuguuacuuuauuucccaau

SEQ ID NO: 355115 - RNA, 24 nt, Artificial Sequence
  Synthetic
aucuuuguuacuuuauuucccaau

SEQ ID NO: 355116 - RNA, 18 nt, Artificial Sequence
  Synthetic
gagcuucacuuucccaau

SEQ ID NO: 355117 - RNA, 19 nt, Artificial Sequence
  Synthetic
agagcuucacuuucccaau

SEQ ID NO: 355118 - RNA, 20 nt, Artificial Sequence
  Synthetic
gagagcuucacuuucccaau

SEQ ID NO: 355119 - RNA, 21 nt, Artificial Sequence
  Synthetic
ggagagcuucacuuucccaau

SEQ ID NO: 355120 - RNA, 22 nt, Artificial Sequence
  Synthetic
aggagagcuucacuuucccaau

SEQ ID NO: 355121 - RNA, 23 nt, Artificial Sequence
  Synthetic
gaggagagcuucacuuucccaau

SEQ ID NO: 355122 - RNA, 24 nt, Artificial Sequence
  Synthetic
ugaggagagcuucacuuucccaau

SEQ ID NO: 355123 - RNA, 18 nt, Artificial Sequence
  Synthetic
ucuaauagagacgccaau

SEQ ID NO: 355124 - RNA, 19 nt, Artificial Sequence
  Synthetic
cucuaauagagacgccaau

SEQ ID NO: 355125 - RNA, 20 nt, Artificial Sequence
  Synthetic
ccucuaauagagacgccaau

SEQ ID NO: 355126 - RNA, 21 nt, Artificial Sequence
  Synthetic
uccucuaauagagacgccaau

SEQ ID NO: 355127 - RNA, 22 nt, Artificial Sequence
  Synthetic
guccucuaauagagacgccaau

SEQ ID NO: 355128 - RNA, 23 nt, Artificial Sequence
  Synthetic
aguccucuaauagagacgccaau

SEQ ID NO: 355129 - RNA, 24 nt, Artificial Sequence
  Synthetic
uaguccucuaauagagacgccaau

SEQ ID NO: 355130 - RNA, 18 nt, Artificial Sequence
  Synthetic
ugagacaaauuggccaau

SEQ ID NO: 355131 - RNA, 19 nt, Artificial Sequence
  Synthetic
uugagacaaauuggccaau

SEQ ID NO: 355132 - RNA, 20 nt, Artificial Sequence
  Synthetic
guugagacaaauuggccaau

SEQ ID NO: 355133 - RNA, 21 nt, Artificial Sequence
  Synthetic
gguugagacaaauuggccaau

SEQ ID NO: 355134 - RNA, 22 nt, Artificial Sequence
  Synthetic
ggguugagacaaauuggccaau

SEQ ID NO: 355135 - RNA, 23 nt, Artificial Sequence
  Synthetic
gggguugagacaaauuggccaau

SEQ ID NO: 355136 - RNA, 24 nt, Artificial Sequence
  Synthetic
ugggguugagacaaauuggccaau

SEQ ID NO: 355137 - RNA, 18 nt, Artificial Sequence
  Synthetic
caugugaugaaugccaau

SEQ ID NO: 355138 - RNA, 19 nt, Artificial Sequence
  Synthetic
ucaugugaugaaugccaau

SEQ ID NO: 355139 - RNA, 20 nt, Artificial Sequence
  Synthetic
uucaugugaugaaugccaau

SEQ ID NO: 355140 - RNA, 21 nt, Artificial Sequence
  Synthetic
cuucaugugaugaaugccaau

SEQ ID NO: 355141 - RNA, 22 nt, Artificial Sequence
  Synthetic
acuucaugugaugaaugccaau

SEQ ID NO: 355142 - RNA, 23 nt, Artificial Sequence
  Synthetic
cacuucaugugaugaaugccaau

SEQ ID NO: 355143 - RNA, 24 nt, Artificial Sequence
  Synthetic
acacuucaugugaugaaugccaau

SEQ ID NO: 355144 - RNA, 18 nt, Artificial Sequence
  Synthetic
caacuuucaugugccaau

SEQ ID NO: 355145 - RNA, 19 nt, Artificial Sequence
  Synthetic
acaacuuucaugugccaau

SEQ ID NO: 355146 - RNA, 20 nt, Artificial Sequence
  Synthetic
uacaacuuucaugugccaau

SEQ ID NO: 355147 - RNA, 21 nt, Artificial Sequence
  Synthetic
auacaacuuucaugugccaau

SEQ ID NO: 355148 - RNA, 22 nt, Artificial Sequence
  Synthetic
uauacaacuuucaugugccaau

SEQ ID NO: 355149 - RNA, 23 nt, Artificial Sequence
  Synthetic
auauacaacuuucaugugccaau

SEQ ID NO: 355150 - RNA, 24 nt, Artificial Sequence
  Synthetic
gauauacaacuuucaugugccaau

SEQ ID NO: 355151 - RNA, 18 nt, Artificial Sequence
  Synthetic
cugcagcauuuugccaau

SEQ ID NO: 355152 - RNA, 19 nt, Artificial Sequence
  Synthetic
ccugcagcauuuugccaau

SEQ ID NO: 355153 - RNA, 20 nt, Artificial Sequence
  Synthetic
accugcagcauuuugccaau

SEQ ID NO: 355154 - RNA, 21 nt, Artificial Sequence
  Synthetic
aaccugcagcauuuugccaau

SEQ ID NO: 355155 - RNA, 22 nt, Artificial Sequence
  Synthetic
aaaccugcagcauuuugccaau

SEQ ID NO: 355156 - RNA, 23 nt, Artificial Sequence
  Synthetic
aaaaccugcagcauuuugccaau

SEQ ID NO: 355157 - RNA, 24 nt, Artificial Sequence
  Synthetic
gaaaaccugcagcauuuugccaau

SEQ ID NO: 355158 - RNA, 18 nt, Artificial Sequence
  Synthetic
auauagaacugauccaau

SEQ ID NO: 355159 - RNA, 19 nt, Artificial Sequence
  Synthetic
uauauagaacugauccaau

SEQ ID NO: 355160 - RNA, 20 nt, Artificial Sequence
  Synthetic
cuauauagaacugauccaau

SEQ ID NO: 355161 - RNA, 21 nt, Artificial Sequence
  Synthetic
acuauauagaacugauccaau

SEQ ID NO: 355162 - RNA, 22 nt, Artificial Sequence
  Synthetic
aacuauauagaacugauccaau

SEQ ID NO: 355163 - RNA, 23 nt, Artificial Sequence
  Synthetic
aaacuauauagaacugauccaau

SEQ ID NO: 355164 - RNA, 24 nt, Artificial Sequence
  Synthetic
aaaacuauauagaacugauccaau

SEQ ID NO: 355165 - RNA, 18 nt, Artificial Sequence
  Synthetic
gccucaguuuuauccaau

SEQ ID NO: 355166 - RNA, 19 nt, Artificial Sequence
  Synthetic
ugccucaguuuuauccaau

SEQ ID NO: 355167 - RNA, 20 nt, Artificial Sequence
  Synthetic
augccucaguuuuauccaau

SEQ ID NO: 355168 - RNA, 21 nt, Artificial Sequence
  Synthetic
caugccucaguuuuauccaau

SEQ ID NO: 355169 - RNA, 22 nt, Artificial Sequence
  Synthetic
ucaugccucaguuuuauccaau

SEQ ID NO: 355170 - RNA, 23 nt, Artificial Sequence
  Synthetic
uucaugccucaguuuuauccaau

SEQ ID NO: 355171 - RNA, 24 nt, Artificial Sequence
  Synthetic
auucaugccucaguuuuauccaau

SEQ ID NO: 355172 - RNA, 18 nt, Artificial Sequence
  Synthetic
gagcagauauucuccaau

SEQ ID NO: 355173 - RNA, 19 nt, Artificial Sequence
  Synthetic
agagcagauauucuccaau

SEQ ID NO: 355174 - RNA, 20 nt, Artificial Sequence
  Synthetic
gagagcagauauucuccaau

SEQ ID NO: 355175 - RNA, 21 nt, Artificial Sequence
  Synthetic
ugagagcagauauucuccaau

SEQ ID NO: 355176 - RNA, 22 nt, Artificial Sequence
  Synthetic
augagagcagauauucuccaau

SEQ ID NO: 355177 - RNA, 23 nt, Artificial Sequence
  Synthetic
uaugagagcagauauucuccaau

SEQ ID NO: 355178 - RNA, 24 nt, Artificial Sequence
  Synthetic
auaugagagcagauauucuccaau

SEQ ID NO: 355179 - RNA, 18 nt, Artificial Sequence
  Synthetic
aggucaauauguuccaau

SEQ ID NO: 355180 - RNA, 19 nt, Artificial Sequence
  Synthetic
caggucaauauguuccaau

SEQ ID NO: 355181 - RNA, 20 nt, Artificial Sequence
  Synthetic
ucaggucaauauguuccaau

SEQ ID NO: 355182 - RNA, 21 nt, Artificial Sequence
  Synthetic
gucaggucaauauguuccaau

SEQ ID NO: 355183 - RNA, 22 nt, Artificial Sequence
  Synthetic
ugucaggucaauauguuccaau

SEQ ID NO: 355184 - RNA, 23 nt, Artificial Sequence
  Synthetic
uugucaggucaauauguuccaau

SEQ ID NO: 355185 - RNA, 24 nt, Artificial Sequence
  Synthetic
guugucaggucaauauguuccaau

SEQ ID NO: 355186 - RNA, 18 nt, Artificial Sequence
  Synthetic
acaucaguguuuuccaau

SEQ ID NO: 355187 - RNA, 19 nt, Artificial Sequence
  Synthetic
aacaucaguguuuuccaau

SEQ ID NO: 355188 - RNA, 20 nt, Artificial Sequence
  Synthetic
aaacaucaguguuuuccaau

SEQ ID NO: 355189 - RNA, 21 nt, Artificial Sequence
  Synthetic
gaaacaucaguguuuuccaau

SEQ ID NO: 355190 - RNA, 22 nt, Artificial Sequence
  Synthetic
agaaacaucaguguuuuccaau

SEQ ID NO: 355191 - RNA, 23 nt, Artificial Sequence
  Synthetic
uagaaacaucaguguuuuccaau

SEQ ID NO: 355192 - RNA, 24 nt, Artificial Sequence
  Synthetic
uuagaaacaucaguguuuuccaau

SEQ ID NO: 355193 - RNA, 18 nt, Artificial Sequence
  Synthetic
cugagaaaaacaagcaau

SEQ ID NO: 355194 - RNA, 19 nt, Artificial Sequence
  Synthetic
ccugagaaaaacaagcaau

SEQ ID NO: 355195 - RNA, 20 nt, Artificial Sequence
  Synthetic
accugagaaaaacaagcaau

SEQ ID NO: 355196 - RNA, 21 nt, Artificial Sequence
  Synthetic
aaccugagaaaaacaagcaau

SEQ ID NO: 355197 - RNA, 22 nt, Artificial Sequence
  Synthetic
aaaccugagaaaaacaagcaau

SEQ ID NO: 355198 - RNA, 23 nt, Artificial Sequence
  Synthetic
caaaccugagaaaaacaagcaau

SEQ ID NO: 355199 - RNA, 24 nt, Artificial Sequence
  Synthetic
acaaaccugagaaaaacaagcaau

SEQ ID NO: 355200 - RNA, 18 nt, Artificial Sequence
  Synthetic
cugaggaaaacaagcaau

SEQ ID NO: 355201 - RNA, 19 nt, Artificial Sequence
  Synthetic
ccugaggaaaacaagcaau

SEQ ID NO: 355202 - RNA, 20 nt, Artificial Sequence
  Synthetic
accugaggaaaacaagcaau

SEQ ID NO: 355203 - RNA, 21 nt, Artificial Sequence
  Synthetic
aaccugaggaaaacaagcaau

SEQ ID NO: 355204 - RNA, 22 nt, Artificial Sequence
  Synthetic
aaaccugaggaaaacaagcaau

SEQ ID NO: 355205 - RNA, 23 nt, Artificial Sequence
  Synthetic
caaaccugaggaaaacaagcaau

SEQ ID NO: 355206 - RNA, 24 nt, Artificial Sequence
  Synthetic
acaaaccugaggaaaacaagcaau

SEQ ID NO: 355207 - RNA, 18 nt, Artificial Sequence
  Synthetic
aauugucacagaagcaau

SEQ ID NO: 355208 - RNA, 19 nt, Artificial Sequence
  Synthetic
aaauugucacagaagcaau

SEQ ID NO: 355209 - RNA, 20 nt, Artificial Sequence
  Synthetic
aaaauugucacagaagcaau

SEQ ID NO: 355210 - RNA, 21 nt, Artificial Sequence
  Synthetic
gaaaauugucacagaagcaau

SEQ ID NO: 355211 - RNA, 22 nt, Artificial Sequence
  Synthetic
ggaaaauugucacagaagcaau

SEQ ID NO: 355212 - RNA, 23 nt, Artificial Sequence
  Synthetic
uggaaaauugucacagaagcaau

SEQ ID NO: 355213 - RNA, 24 nt, Artificial Sequence
  Synthetic
auggaaaauugucacagaagcaau

SEQ ID NO: 355214 - RNA, 18 nt, Artificial Sequence
  Synthetic
caucauucuggaagcaau

SEQ ID NO: 355215 - RNA, 19 nt, Artificial Sequence
  Synthetic
ccaucauucuggaagcaau

SEQ ID NO: 355216 - RNA, 20 nt, Artificial Sequence
  Synthetic
accaucauucuggaagcaau

SEQ ID NO: 355217 - RNA, 21 nt, Artificial Sequence
  Synthetic
caccaucauucuggaagcaau

SEQ ID NO: 355218 - RNA, 22 nt, Artificial Sequence
  Synthetic
gcaccaucauucuggaagcaau

SEQ ID NO: 355219 - RNA, 23 nt, Artificial Sequence
  Synthetic
cgcaccaucauucuggaagcaau

SEQ ID NO: 355220 - RNA, 24 nt, Artificial Sequence
  Synthetic
gcgcaccaucauucuggaagcaau

SEQ ID NO: 355221 - RNA, 18 nt, Artificial Sequence
  Synthetic
uauauuuuaauaagcaau

SEQ ID NO: 355222 - RNA, 19 nt, Artificial Sequence
  Synthetic
uuauauuuuaauaagcaau

SEQ ID NO: 355223 - RNA, 20 nt, Artificial Sequence
  Synthetic
guuauauuuuaauaagcaau

SEQ ID NO: 355224 - RNA, 21 nt, Artificial Sequence
  Synthetic
uguuauauuuuaauaagcaau

SEQ ID NO: 355225 - RNA, 22 nt, Artificial Sequence
  Synthetic
uuguuauauuuuaauaagcaau

SEQ ID NO: 355226 - RNA, 23 nt, Artificial Sequence
  Synthetic
auuguuauauuuuaauaagcaau

SEQ ID NO: 355227 - RNA, 24 nt, Artificial Sequence
  Synthetic
cauuguuauauuuuaauaagcaau

SEQ ID NO: 355228 - RNA, 18 nt, Artificial Sequence
  Synthetic
gugagaauauacagcaau

SEQ ID NO: 355229 - RNA, 19 nt, Artificial Sequence
  Synthetic
ggugagaauauacagcaau

SEQ ID NO: 355230 - RNA, 20 nt, Artificial Sequence
  Synthetic
uggugagaauauacagcaau

SEQ ID NO: 355231 - RNA, 21 nt, Artificial Sequence
  Synthetic
guggugagaauauacagcaau

SEQ ID NO: 355232 - RNA, 22 nt, Artificial Sequence
  Synthetic
gguggugagaauauacagcaau

SEQ ID NO: 355233 - RNA, 23 nt, Artificial Sequence
  Synthetic
ugguggugagaauauacagcaau

SEQ ID NO: 355234 - RNA, 24 nt, Artificial Sequence
  Synthetic
gugguggugagaauauacagcaau

SEQ ID NO: 355235 - RNA, 18 nt, Artificial Sequence
  Synthetic
gacuguaaucccagcaau

SEQ ID NO: 355236 - RNA, 19 nt, Artificial Sequence
  Synthetic
cgacuguaaucccagcaau

SEQ ID NO: 355237 - RNA, 20 nt, Artificial Sequence
  Synthetic
acgacuguaaucccagcaau

SEQ ID NO: 355238 - RNA, 21 nt, Artificial Sequence
  Synthetic
cacgacuguaaucccagcaau

SEQ ID NO: 355239 - RNA, 22 nt, Artificial Sequence
  Synthetic
ucacgacuguaaucccagcaau

SEQ ID NO: 355240 - RNA, 23 nt, Artificial Sequence
  Synthetic
cucacgacuguaaucccagcaau

SEQ ID NO: 355241 - RNA, 24 nt, Artificial Sequence
  Synthetic
gcucacgacuguaaucccagcaau

SEQ ID NO: 355242 - RNA, 18 nt, Artificial Sequence
  Synthetic
gccuguaaucccagcaau

SEQ ID NO: 355243 - RNA, 19 nt, Artificial Sequence
  Synthetic
cgccuguaaucccagcaau

SEQ ID NO: 355244 - RNA, 20 nt, Artificial Sequence
  Synthetic
ucgccuguaaucccagcaau

SEQ ID NO: 355245 - RNA, 21 nt, Artificial Sequence
  Synthetic
cucgccuguaaucccagcaau

SEQ ID NO: 355246 - RNA, 22 nt, Artificial Sequence
  Synthetic
ucucgccuguaaucccagcaau

SEQ ID NO: 355247 - RNA, 23 nt, Artificial Sequence
  Synthetic
cucucgccuguaaucccagcaau

SEQ ID NO: 355248 - RNA, 24 nt, Artificial Sequence
  Synthetic
gcucucgccuguaaucccagcaau

SEQ ID NO: 355249 - RNA, 18 nt, Artificial Sequence
  Synthetic
agaagugaaaagagcaau

SEQ ID NO: 355250 - RNA, 19 nt, Artificial Sequence
  Synthetic
gagaagugaaaagagcaau

SEQ ID NO: 355251 - RNA, 20 nt, Artificial Sequence
  Synthetic
ugagaagugaaaagagcaau

SEQ ID NO: 355252 - RNA, 21 nt, Artificial Sequence
  Synthetic
augagaagugaaaagagcaau

SEQ ID NO: 355253 - RNA, 22 nt, Artificial Sequence
  Synthetic
aaugagaagugaaaagagcaau

SEQ ID NO: 355254 - RNA, 23 nt, Artificial Sequence
  Synthetic
aaaugagaagugaaaagagcaau

SEQ ID NO: 355255 - RNA, 24 nt, Artificial Sequence
  Synthetic
uaaaugagaagugaaaagagcaau

SEQ ID NO: 355256 - RNA, 18 nt, Artificial Sequence
  Synthetic
gaucuggacaagagcaau

SEQ ID NO: 355257 - RNA, 19 nt, Artificial Sequence
  Synthetic
ugaucuggacaagagcaau

SEQ ID NO: 355258 - RNA, 20 nt, Artificial Sequence
  Synthetic
gugaucuggacaagagcaau

SEQ ID NO: 355259 - RNA, 21 nt, Artificial Sequence
  Synthetic
ggugaucuggacaagagcaau

SEQ ID NO: 355260 - RNA, 22 nt, Artificial Sequence
  Synthetic
uggugaucuggacaagagcaau

SEQ ID NO: 355261 - RNA, 23 nt, Artificial Sequence
  Synthetic
uuggugaucuggacaagagcaau

SEQ ID NO: 355262 - RNA, 24 nt, Artificial Sequence
  Synthetic
uuuggugaucuggacaagagcaau

SEQ ID NO: 355263 - RNA, 18 nt, Artificial Sequence
  Synthetic
acacucuguaagagcaau

SEQ ID NO: 355264 - RNA, 19 nt, Artificial Sequence
  Synthetic
aacacucuguaagagcaau

SEQ ID NO: 355265 - RNA, 20 nt, Artificial Sequence
  Synthetic
gaacacucuguaagagcaau

SEQ ID NO: 355266 - RNA, 21 nt, Artificial Sequence
  Synthetic
agaacacucuguaagagcaau

SEQ ID NO: 355267 - RNA, 22 nt, Artificial Sequence
  Synthetic
cagaacacucuguaagagcaau

SEQ ID NO: 355268 - RNA, 23 nt, Artificial Sequence
  Synthetic
acagaacacucuguaagagcaau

SEQ ID NO: 355269 - RNA, 24 nt, Artificial Sequence
  Synthetic
uacagaacacucuguaagagcaau

SEQ ID NO: 355270 - RNA, 18 nt, Artificial Sequence
  Synthetic
acuugauaaaggagcaau

SEQ ID NO: 355271 - RNA, 19 nt, Artificial Sequence
  Synthetic
uacuugauaaaggagcaau

SEQ ID NO: 355272 - RNA, 20 nt, Artificial Sequence
  Synthetic
guacuugauaaaggagcaau

SEQ ID NO: 355273 - RNA, 21 nt, Artificial Sequence
  Synthetic
aguacuugauaaaggagcaau

SEQ ID NO: 355274 - RNA, 22 nt, Artificial Sequence
  Synthetic
aaguacuugauaaaggagcaau

SEQ ID NO: 355275 - RNA, 23 nt, Artificial Sequence
  Synthetic
caaguacuugauaaaggagcaau

SEQ ID NO: 355276 - RNA, 24 nt, Artificial Sequence
  Synthetic
ccaaguacuugauaaaggagcaau

SEQ ID NO: 355277 - RNA, 18 nt, Artificial Sequence
  Synthetic
caacuacgaaugagcaau

SEQ ID NO: 355278 - RNA, 19 nt, Artificial Sequence
  Synthetic
acaacuacgaaugagcaau

SEQ ID NO: 355279 - RNA, 20 nt, Artificial Sequence
  Synthetic
aacaacuacgaaugagcaau

SEQ ID NO: 355280 - RNA, 21 nt, Artificial Sequence
  Synthetic
aaacaacuacgaaugagcaau

SEQ ID NO: 355281 - RNA, 22 nt, Artificial Sequence
  Synthetic
aaaacaacuacgaaugagcaau

SEQ ID NO: 355282 - RNA, 23 nt, Artificial Sequence
  Synthetic
gaaaacaacuacgaaugagcaau

SEQ ID NO: 355283 - RNA, 24 nt, Artificial Sequence
  Synthetic
ggaaaacaacuacgaaugagcaau

SEQ ID NO: 355284 - RNA, 18 nt, Artificial Sequence
  Synthetic
ugaauuauucugagcaau

SEQ ID NO: 355285 - RNA, 19 nt, Artificial Sequence
  Synthetic
gugaauuauucugagcaau

SEQ ID NO: 355286 - RNA, 20 nt, Artificial Sequence
  Synthetic
ggugaauuauucugagcaau

SEQ ID NO: 355287 - RNA, 21 nt, Artificial Sequence
  Synthetic
aggugaauuauucugagcaau

SEQ ID NO: 355288 - RNA, 22 nt, Artificial Sequence
  Synthetic
caggugaauuauucugagcaau

SEQ ID NO: 355289 - RNA, 23 nt, Artificial Sequence
  Synthetic
gcaggugaauuauucugagcaau

SEQ ID NO: 355290 - RNA, 24 nt, Artificial Sequence
  Synthetic
agcaggugaauuauucugagcaau

SEQ ID NO: 355291 - RNA, 18 nt, Artificial Sequence
  Synthetic
aggcgggaauugagcaau

SEQ ID NO: 355292 - RNA, 19 nt, Artificial Sequence
  Synthetic
caggcgggaauugagcaau

SEQ ID NO: 355293 - RNA, 20 nt, Artificial Sequence
  Synthetic
acaggcgggaauugagcaau

SEQ ID NO: 355294 - RNA, 21 nt, Artificial Sequence
  Synthetic
cacaggcgggaauugagcaau

SEQ ID NO: 355295 - RNA, 22 nt, Artificial Sequence
  Synthetic
ucacaggcgggaauugagcaau

SEQ ID NO: 355296 - RNA, 23 nt, Artificial Sequence
  Synthetic
cucacaggcgggaauugagcaau

SEQ ID NO: 355297 - RNA, 24 nt, Artificial Sequence
  Synthetic
acucacaggcgggaauugagcaau

SEQ ID NO: 355298 - RNA, 18 nt, Artificial Sequence
  Synthetic
aauugggaguugagcaau

SEQ ID NO: 355299 - RNA, 19 nt, Artificial Sequence
  Synthetic
uaauugggaguugagcaau

SEQ ID NO: 355300 - RNA, 20 nt, Artificial Sequence
  Synthetic
auaauugggaguugagcaau

SEQ ID NO: 355301 - RNA, 21 nt, Artificial Sequence
  Synthetic
cauaauugggaguugagcaau

SEQ ID NO: 355302 - RNA, 22 nt, Artificial Sequence
  Synthetic
ucauaauugggaguugagcaau

SEQ ID NO: 355303 - RNA, 23 nt, Artificial Sequence
  Synthetic
cucauaauugggaguugagcaau

SEQ ID NO: 355304 - RNA, 24 nt, Artificial Sequence
  Synthetic
acucauaauugggaguugagcaau

SEQ ID NO: 355305 - RNA, 18 nt, Artificial Sequence
  Synthetic
ucuagaauagaaggcaau

SEQ ID NO: 355306 - RNA, 19 nt, Artificial Sequence
  Synthetic
cucuagaauagaaggcaau

SEQ ID NO: 355307 - RNA, 20 nt, Artificial Sequence
  Synthetic
ccucuagaauagaaggcaau

SEQ ID NO: 355308 - RNA, 21 nt, Artificial Sequence
  Synthetic
uccucuagaauagaaggcaau

SEQ ID NO: 355309 - RNA, 22 nt, Artificial Sequence
  Synthetic
cuccucuagaauagaaggcaau

SEQ ID NO: 355310 - RNA, 23 nt, Artificial Sequence
  Synthetic
gcuccucuagaauagaaggcaau

SEQ ID NO: 355311 - RNA, 24 nt, Artificial Sequence
  Synthetic
ggcuccucuagaauagaaggcaau

SEQ ID NO: 355312 - RNA, 18 nt, Artificial Sequence
  Synthetic
cugaauacuucaggcaau

SEQ ID NO: 355313 - RNA, 19 nt, Artificial Sequence
  Synthetic
acugaauacuucaggcaau

SEQ ID NO: 355314 - RNA, 20 nt, Artificial Sequence
  Synthetic
uacugaauacuucaggcaau

SEQ ID NO: 355315 - RNA, 21 nt, Artificial Sequence
  Synthetic
guacugaauacuucaggcaau

SEQ ID NO: 355316 - RNA, 22 nt, Artificial Sequence
  Synthetic
uguacugaauacuucaggcaau

SEQ ID NO: 355317 - RNA, 23 nt, Artificial Sequence
  Synthetic
cuguacugaauacuucaggcaau

SEQ ID NO: 355318 - RNA, 24 nt, Artificial Sequence
  Synthetic
acuguacugaauacuucaggcaau

SEQ ID NO: 355319 - RNA, 18 nt, Artificial Sequence
  Synthetic
aucaaacuuauaggcaau

SEQ ID NO: 355320 - RNA, 19 nt, Artificial Sequence
  Synthetic
gaucaaacuuauaggcaau

SEQ ID NO: 355321 - RNA, 20 nt, Artificial Sequence
  Synthetic
ggaucaaacuuauaggcaau

SEQ ID NO: 355322 - RNA, 21 nt, Artificial Sequence
  Synthetic
aggaucaaacuuauaggcaau

SEQ ID NO: 355323 - RNA, 22 nt, Artificial Sequence
  Synthetic
caggaucaaacuuauaggcaau

SEQ ID NO: 355324 - RNA, 23 nt, Artificial Sequence
  Synthetic
ccaggaucaaacuuauaggcaau

SEQ ID NO: 355325 - RNA, 24 nt, Artificial Sequence
  Synthetic
accaggaucaaacuuauaggcaau

SEQ ID NO: 355326 - RNA, 18 nt, Artificial Sequence
  Synthetic
caaagcuuucuaggcaau

SEQ ID NO: 355327 - RNA, 19 nt, Artificial Sequence
  Synthetic
gcaaagcuuucuaggcaau

SEQ ID NO: 355328 - RNA, 20 nt, Artificial Sequence
  Synthetic
ugcaaagcuuucuaggcaau

SEQ ID NO: 355329 - RNA, 21 nt, Artificial Sequence
  Synthetic
augcaaagcuuucuaggcaau

SEQ ID NO: 355330 - RNA, 22 nt, Artificial Sequence
  Synthetic
uaugcaaagcuuucuaggcaau

SEQ ID NO: 355331 - RNA, 23 nt, Artificial Sequence
  Synthetic
auaugcaaagcuuucuaggcaau

SEQ ID NO: 355332 - RNA, 24 nt, Artificial Sequence
  Synthetic
cauaugcaaagcuuucuaggcaau

SEQ ID NO: 355333 - RNA, 18 nt, Artificial Sequence
  Synthetic
uccagggggcagggcaau

SEQ ID NO: 355334 - RNA, 19 nt, Artificial Sequence
  Synthetic
uuccagggggcagggcaau

SEQ ID NO: 355335 - RNA, 20 nt, Artificial Sequence
  Synthetic
guuccagggggcagggcaau

SEQ ID NO: 355336 - RNA, 21 nt, Artificial Sequence
  Synthetic
uguuccagggggcagggcaau

SEQ ID NO: 355337 - RNA, 22 nt, Artificial Sequence
  Synthetic
cuguuccagggggcagggcaau

SEQ ID NO: 355338 - RNA, 23 nt, Artificial Sequence
  Synthetic
acuguuccagggggcagggcaau

SEQ ID NO: 355339 - RNA, 24 nt, Artificial Sequence
  Synthetic
cacuguuccagggggcagggcaau

SEQ ID NO: 355340 - RNA, 18 nt, Artificial Sequence
  Synthetic
acauguuuaaauggcaau

SEQ ID NO: 355341 - RNA, 19 nt, Artificial Sequence
  Synthetic
cacauguuuaaauggcaau

SEQ ID NO: 355342 - RNA, 20 nt, Artificial Sequence
  Synthetic
acacauguuuaaauggcaau

SEQ ID NO: 355343 - RNA, 21 nt, Artificial Sequence
  Synthetic
uacacauguuuaaauggcaau

SEQ ID NO: 355344 - RNA, 22 nt, Artificial Sequence
  Synthetic
uuacacauguuuaaauggcaau

SEQ ID NO: 355345 - RNA, 23 nt, Artificial Sequence
  Synthetic
cuuacacauguuuaaauggcaau

SEQ ID NO: 355346 - RNA, 24 nt, Artificial Sequence
  Synthetic
acuuacacauguuuaaauggcaau

SEQ ID NO: 355347 - RNA, 18 nt, Artificial Sequence
  Synthetic
uuuaaggugaguggcaau

SEQ ID NO: 355348 - RNA, 19 nt, Artificial Sequence
  Synthetic
auuuaaggugaguggcaau

SEQ ID NO: 355349 - RNA, 20 nt, Artificial Sequence
  Synthetic
gauuuaaggugaguggcaau

SEQ ID NO: 355350 - RNA, 21 nt, Artificial Sequence
  Synthetic
agauuuaaggugaguggcaau

SEQ ID NO: 355351 - RNA, 22 nt, Artificial Sequence
  Synthetic
gagauuuaaggugaguggcaau

SEQ ID NO: 355352 - RNA, 23 nt, Artificial Sequence
  Synthetic
ugagauuuaaggugaguggcaau

SEQ ID NO: 355353 - RNA, 24 nt, Artificial Sequence
  Synthetic
cugagauuuaaggugaguggcaau

SEQ ID NO: 355354 - RNA, 18 nt, Artificial Sequence
  Synthetic
accuggaucuguggcaau

SEQ ID NO: 355355 - RNA, 19 nt, Artificial Sequence
  Synthetic
caccuggaucuguggcaau

SEQ ID NO: 355356 - RNA, 20 nt, Artificial Sequence
  Synthetic
ccaccuggaucuguggcaau

SEQ ID NO: 355357 - RNA, 21 nt, Artificial Sequence
  Synthetic
uccaccuggaucuguggcaau

SEQ ID NO: 355358 - RNA, 22 nt, Artificial Sequence
  Synthetic
cuccaccuggaucuguggcaau

SEQ ID NO: 355359 - RNA, 23 nt, Artificial Sequence
  Synthetic
gcuccaccuggaucuguggcaau

SEQ ID NO: 355360 - RNA, 24 nt, Artificial Sequence
  Synthetic
agcuccaccuggaucuguggcaau

SEQ ID NO: 355361 - RNA, 18 nt, Artificial Sequence
  Synthetic
ucaagagaguguggcaau

SEQ ID NO: 355362 - RNA, 19 nt, Artificial Sequence
  Synthetic
aucaagagaguguggcaau

SEQ ID NO: 355363 - RNA, 20 nt, Artificial Sequence
  Synthetic
aaucaagagaguguggcaau

SEQ ID NO: 355364 - RNA, 21 nt, Artificial Sequence
  Synthetic
gaaucaagagaguguggcaau

SEQ ID NO: 355365 - RNA, 22 nt, Artificial Sequence
  Synthetic
ggaaucaagagaguguggcaau

SEQ ID NO: 355366 - RNA, 23 nt, Artificial Sequence
  Synthetic
gggaaucaagagaguguggcaau

SEQ ID NO: 355367 - RNA, 24 nt, Artificial Sequence
  Synthetic
ggggaaucaagagaguguggcaau

SEQ ID NO: 355368 - RNA, 18 nt, Artificial Sequence
  Synthetic
caggauugucuuggcaau

SEQ ID NO: 355369 - RNA, 19 nt, Artificial Sequence
  Synthetic
ucaggauugucuuggcaau

SEQ ID NO: 355370 - RNA, 20 nt, Artificial Sequence
  Synthetic
cucaggauugucuuggcaau

SEQ ID NO: 355371 - RNA, 21 nt, Artificial Sequence
  Synthetic
gcucaggauugucuuggcaau

SEQ ID NO: 355372 - RNA, 22 nt, Artificial Sequence
  Synthetic
ggcucaggauugucuuggcaau

SEQ ID NO: 355373 - RNA, 23 nt, Artificial Sequence
  Synthetic
uggcucaggauugucuuggcaau

SEQ ID NO: 355374 - RNA, 24 nt, Artificial Sequence
  Synthetic
uuggcucaggauugucuuggcaau

SEQ ID NO: 355375 - RNA, 18 nt, Artificial Sequence
  Synthetic
agaaacaaacaaugcaau

SEQ ID NO: 355376 - RNA, 19 nt, Artificial Sequence
  Synthetic
aagaaacaaacaaugcaau

SEQ ID NO: 355377 - RNA, 20 nt, Artificial Sequence
  Synthetic
caagaaacaaacaaugcaau

SEQ ID NO: 355378 - RNA, 21 nt, Artificial Sequence
  Synthetic
acaagaaacaaacaaugcaau

SEQ ID NO: 355379 - RNA, 22 nt, Artificial Sequence
  Synthetic
aacaagaaacaaacaaugcaau

SEQ ID NO: 355380 - RNA, 23 nt, Artificial Sequence
  Synthetic
aaacaagaaacaaacaaugcaau

SEQ ID NO: 355381 - RNA, 24 nt, Artificial Sequence
  Synthetic
aaaacaagaaacaaacaaugcaau

SEQ ID NO: 355382 - RNA, 18 nt, Artificial Sequence
  Synthetic
ugccaacaaagaugcaau

SEQ ID NO: 355383 - RNA, 19 nt, Artificial Sequence
  Synthetic
gugccaacaaagaugcaau

SEQ ID NO: 355384 - RNA, 20 nt, Artificial Sequence
  Synthetic
ugugccaacaaagaugcaau

SEQ ID NO: 355385 - RNA, 21 nt, Artificial Sequence
  Synthetic
gugugccaacaaagaugcaau

SEQ ID NO: 355386 - RNA, 22 nt, Artificial Sequence
  Synthetic
ugugugccaacaaagaugcaau

SEQ ID NO: 355387 - RNA, 23 nt, Artificial Sequence
  Synthetic
gugugugccaacaaagaugcaau

SEQ ID NO: 355388 - RNA, 24 nt, Artificial Sequence
  Synthetic
ugugugugccaacaaagaugcaau

SEQ ID NO: 355389 - RNA, 18 nt, Artificial Sequence
  Synthetic
uuuuuuagaugaugcaau

SEQ ID NO: 355390 - RNA, 19 nt, Artificial Sequence
  Synthetic
auuuuuuagaugaugcaau

SEQ ID NO: 355391 - RNA, 20 nt, Artificial Sequence
  Synthetic
aauuuuuuagaugaugcaau

SEQ ID NO: 355392 - RNA, 21 nt, Artificial Sequence
  Synthetic
caauuuuuuagaugaugcaau

SEQ ID NO: 355393 - RNA, 22 nt, Artificial Sequence
  Synthetic
gcaauuuuuuagaugaugcaau

SEQ ID NO: 355394 - RNA, 23 nt, Artificial Sequence
  Synthetic
agcaauuuuuuagaugaugcaau

SEQ ID NO: 355395 - RNA, 24 nt, Artificial Sequence
  Synthetic
aagcaauuuuuuagaugaugcaau

SEQ ID NO: 355396 - RNA, 18 nt, Artificial Sequence
  Synthetic
ggcaccggcaacugcaau

SEQ ID NO: 355397 - RNA, 19 nt, Artificial Sequence
  Synthetic
cggcaccggcaacugcaau

SEQ ID NO: 355398 - RNA, 20 nt, Artificial Sequence
  Synthetic
gcggcaccggcaacugcaau

SEQ ID NO: 355399 - RNA, 21 nt, Artificial Sequence
  Synthetic
agcggcaccggcaacugcaau

SEQ ID NO: 355400 - RNA, 22 nt, Artificial Sequence
  Synthetic
cagcggcaccggcaacugcaau

SEQ ID NO: 355401 - RNA, 23 nt, Artificial Sequence
  Synthetic
ccagcggcaccggcaacugcaau

SEQ ID NO: 355402 - RNA, 24 nt, Artificial Sequence
  Synthetic
accagcggcaccggcaacugcaau

SEQ ID NO: 355403 - RNA, 18 nt, Artificial Sequence
  Synthetic
ugagagccuaccugcaau

SEQ ID NO: 355404 - RNA, 19 nt, Artificial Sequence
  Synthetic
cugagagccuaccugcaau

SEQ ID NO: 355405 - RNA, 20 nt, Artificial Sequence
  Synthetic
ccugagagccuaccugcaau

SEQ ID NO: 355406 - RNA, 21 nt, Artificial Sequence
  Synthetic
uccugagagccuaccugcaau

SEQ ID NO: 355407 - RNA, 22 nt, Artificial Sequence
  Synthetic
cuccugagagccuaccugcaau

SEQ ID NO: 355408 - RNA, 23 nt, Artificial Sequence
  Synthetic
ucuccugagagccuaccugcaau

SEQ ID NO: 355409 - RNA, 24 nt, Artificial Sequence
  Synthetic
uucuccugagagccuaccugcaau

SEQ ID NO: 355410 - RNA, 18 nt, Artificial Sequence
  Synthetic
ugucaacuuuugugcaau

SEQ ID NO: 355411 - RNA, 19 nt, Artificial Sequence
  Synthetic
cugucaacuuuugugcaau

SEQ ID NO: 355412 - RNA, 20 nt, Artificial Sequence
  Synthetic
acugucaacuuuugugcaau

SEQ ID NO: 355413 - RNA, 21 nt, Artificial Sequence
  Synthetic
cacugucaacuuuugugcaau

SEQ ID NO: 355414 - RNA, 22 nt, Artificial Sequence
  Synthetic
ucacugucaacuuuugugcaau

SEQ ID NO: 355415 - RNA, 23 nt, Artificial Sequence
  Synthetic
aucacugucaacuuuugugcaau

SEQ ID NO: 355416 - RNA, 24 nt, Artificial Sequence
  Synthetic
caucacugucaacuuuugugcaau

SEQ ID NO: 355417 - RNA, 18 nt, Artificial Sequence
  Synthetic
auauagaugaauugcaau

SEQ ID NO: 355418 - RNA, 19 nt, Artificial Sequence
  Synthetic
uauauagaugaauugcaau

SEQ ID NO: 355419 - RNA, 20 nt, Artificial Sequence
  Synthetic
auauauagaugaauugcaau

SEQ ID NO: 355420 - RNA, 21 nt, Artificial Sequence
  Synthetic
aauauauagaugaauugcaau

SEQ ID NO: 355421 - RNA, 22 nt, Artificial Sequence
  Synthetic
aaauauauagaugaauugcaau

SEQ ID NO: 355422 - RNA, 23 nt, Artificial Sequence
  Synthetic
aaaauauauagaugaauugcaau

SEQ ID NO: 355423 - RNA, 24 nt, Artificial Sequence
  Synthetic
aaaaauauauagaugaauugcaau

SEQ ID NO: 355424 - RNA, 18 nt, Artificial Sequence
  Synthetic
aucauaauacauugcaau

SEQ ID NO: 355425 - RNA, 19 nt, Artificial Sequence
  Synthetic
aaucauaauacauugcaau

SEQ ID NO: 355426 - RNA, 20 nt, Artificial Sequence
  Synthetic
aaaucauaauacauugcaau

SEQ ID NO: 355427 - RNA, 21 nt, Artificial Sequence
  Synthetic
caaaucauaauacauugcaau

SEQ ID NO: 355428 - RNA, 22 nt, Artificial Sequence
  Synthetic
ccaaaucauaauacauugcaau

SEQ ID NO: 355429 - RNA, 23 nt, Artificial Sequence
  Synthetic
accaaaucauaauacauugcaau

SEQ ID NO: 355430 - RNA, 24 nt, Artificial Sequence
  Synthetic
caccaaaucauaauacauugcaau

SEQ ID NO: 355431 - RNA, 18 nt, Artificial Sequence
  Synthetic
cauggauaccauugcaau

SEQ ID NO: 355432 - RNA, 19 nt, Artificial Sequence
  Synthetic
ccauggauaccauugcaau

SEQ ID NO: 355433 - RNA, 20 nt, Artificial Sequence
  Synthetic
accauggauaccauugcaau

SEQ ID NO: 355434 - RNA, 21 nt, Artificial Sequence
  Synthetic
uaccauggauaccauugcaau

SEQ ID NO: 355435 - RNA, 22 nt, Artificial Sequence
  Synthetic
cuaccauggauaccauugcaau

SEQ ID NO: 355436 - RNA, 23 nt, Artificial Sequence
  Synthetic
ucuaccauggauaccauugcaau

SEQ ID NO: 355437 - RNA, 24 nt, Artificial Sequence
  Synthetic
aucuaccauggauaccauugcaau

SEQ ID NO: 355438 - RNA, 18 nt, Artificial Sequence
  Synthetic
accauuggguuuugcaau

SEQ ID NO: 355439 - RNA, 19 nt, Artificial Sequence
  Synthetic
gaccauuggguuuugcaau

SEQ ID NO: 355440 - RNA, 20 nt, Artificial Sequence
  Synthetic
agaccauuggguuuugcaau

SEQ ID NO: 355441 - RNA, 21 nt, Artificial Sequence
  Synthetic
uagaccauuggguuuugcaau

SEQ ID NO: 355442 - RNA, 22 nt, Artificial Sequence
  Synthetic
auagaccauuggguuuugcaau

SEQ ID NO: 355443 - RNA, 23 nt, Artificial Sequence
  Synthetic
aauagaccauuggguuuugcaau

SEQ ID NO: 355444 - RNA, 24 nt, Artificial Sequence
  Synthetic
gaauagaccauuggguuuugcaau

SEQ ID NO: 355445 - RNA, 18 nt, Artificial Sequence
  Synthetic
ucaggauacaaaaucaau

SEQ ID NO: 355446 - RNA, 19 nt, Artificial Sequence
  Synthetic
cucaggauacaaaaucaau

SEQ ID NO: 355447 - RNA, 20 nt, Artificial Sequence
  Synthetic
ucucaggauacaaaaucaau

SEQ ID NO: 355448 - RNA, 21 nt, Artificial Sequence
  Synthetic
gucucaggauacaaaaucaau

SEQ ID NO: 355449 - RNA, 22 nt, Artificial Sequence
  Synthetic
agucucaggauacaaaaucaau

SEQ ID NO: 355450 - RNA, 23 nt, Artificial Sequence
  Synthetic
aagucucaggauacaaaaucaau

SEQ ID NO: 355451 - RNA, 24 nt, Artificial Sequence
  Synthetic
aaagucucaggauacaaaaucaau

SEQ ID NO: 355452 - RNA, 18 nt, Artificial Sequence
  Synthetic
accaagcuagaaaucaau

SEQ ID NO: 355453 - RNA, 19 nt, Artificial Sequence
  Synthetic
aaccaagcuagaaaucaau

SEQ ID NO: 355454 - RNA, 20 nt, Artificial Sequence
  Synthetic
aaaccaagcuagaaaucaau

SEQ ID NO: 355455 - RNA, 21 nt, Artificial Sequence
  Synthetic
gaaaccaagcuagaaaucaau

SEQ ID NO: 355456 - RNA, 22 nt, Artificial Sequence
  Synthetic
ugaaaccaagcuagaaaucaau

SEQ ID NO: 355457 - RNA, 23 nt, Artificial Sequence
  Synthetic
augaaaccaagcuagaaaucaau

SEQ ID NO: 355458 - RNA, 24 nt, Artificial Sequence
  Synthetic
aaugaaaccaagcuagaaaucaau

SEQ ID NO: 355459 - RNA, 18 nt, Artificial Sequence
  Synthetic
auaccucauggaaucaau

SEQ ID NO: 355460 - RNA, 19 nt, Artificial Sequence
  Synthetic
gauaccucauggaaucaau

SEQ ID NO: 355461 - RNA, 20 nt, Artificial Sequence
  Synthetic
agauaccucauggaaucaau

SEQ ID NO: 355462 - RNA, 21 nt, Artificial Sequence
  Synthetic
cagauaccucauggaaucaau

SEQ ID NO: 355463 - RNA, 22 nt, Artificial Sequence
  Synthetic
ucagauaccucauggaaucaau

SEQ ID NO: 355464 - RNA, 23 nt, Artificial Sequence
  Synthetic
aucagauaccucauggaaucaau

SEQ ID NO: 355465 - RNA, 24 nt, Artificial Sequence
  Synthetic
uaucagauaccucauggaaucaau

SEQ ID NO: 355466 - RNA, 18 nt, Artificial Sequence
  Synthetic
uuugucuguauaaucaau

SEQ ID NO: 355467 - RNA, 19 nt, Artificial Sequence
  Synthetic
uuuugucuguauaaucaau

SEQ ID NO: 355468 - RNA, 20 nt, Artificial Sequence
  Synthetic
auuuugucuguauaaucaau

SEQ ID NO: 355469 - RNA, 21 nt, Artificial Sequence
  Synthetic
uauuuugucuguauaaucaau

SEQ ID NO: 355470 - RNA, 22 nt, Artificial Sequence
  Synthetic
auauuuugucuguauaaucaau

SEQ ID NO: 355471 - RNA, 23 nt, Artificial Sequence
  Synthetic
aauauuuugucuguauaaucaau

SEQ ID NO: 355472 - RNA, 24 nt, Artificial Sequence
  Synthetic
caauauuuugucuguauaaucaau

SEQ ID NO: 355473 - RNA, 18 nt, Artificial Sequence
  Synthetic
ucccugaugaacaucaau

SEQ ID NO: 355474 - RNA, 19 nt, Artificial Sequence
  Synthetic
aucccugaugaacaucaau

SEQ ID NO: 355475 - RNA, 20 nt, Artificial Sequence
  Synthetic
uaucccugaugaacaucaau

SEQ ID NO: 355476 - RNA, 21 nt, Artificial Sequence
  Synthetic
auaucccugaugaacaucaau

SEQ ID NO: 355477 - RNA, 22 nt, Artificial Sequence
  Synthetic
aauaucccugaugaacaucaau

SEQ ID NO: 355478 - RNA, 23 nt, Artificial Sequence
  Synthetic
caauaucccugaugaacaucaau

SEQ ID NO: 355479 - RNA, 24 nt, Artificial Sequence
  Synthetic
ccaauaucccugaugaacaucaau

SEQ ID NO: 355480 - RNA, 18 nt, Artificial Sequence
  Synthetic
ugggauacauacaucaau

SEQ ID NO: 355481 - RNA, 19 nt, Artificial Sequence
  Synthetic
uugggauacauacaucaau

SEQ ID NO: 355482 - RNA, 20 nt, Artificial Sequence
  Synthetic
uuugggauacauacaucaau

SEQ ID NO: 355483 - RNA, 21 nt, Artificial Sequence
  Synthetic
auuugggauacauacaucaau

SEQ ID NO: 355484 - RNA, 22 nt, Artificial Sequence
  Synthetic
cauuugggauacauacaucaau

SEQ ID NO: 355485 - RNA, 23 nt, Artificial Sequence
  Synthetic
acauuugggauacauacaucaau

SEQ ID NO: 355486 - RNA, 24 nt, Artificial Sequence
  Synthetic
gacauuugggauacauacaucaau

SEQ ID NO: 355487 - RNA, 18 nt, Artificial Sequence
  Synthetic
uauauuuagaagaucaau

SEQ ID NO: 355488 - RNA, 19 nt, Artificial Sequence
  Synthetic
auauauuuagaagaucaau

SEQ ID NO: 355489 - RNA, 20 nt, Artificial Sequence
  Synthetic
uauauauuuagaagaucaau

SEQ ID NO: 355490 - RNA, 21 nt, Artificial Sequence
  Synthetic
auauauauuuagaagaucaau

SEQ ID NO: 355491 - RNA, 22 nt, Artificial Sequence
  Synthetic
cauauauauuuagaagaucaau

SEQ ID NO: 355492 - RNA, 23 nt, Artificial Sequence
  Synthetic
ucauauauauuuagaagaucaau

SEQ ID NO: 355493 - RNA, 24 nt, Artificial Sequence
  Synthetic
uucauauauauuuagaagaucaau

SEQ ID NO: 355494 - RNA, 18 nt, Artificial Sequence
  Synthetic
uaauggauaccuaucaau

SEQ ID NO: 355495 - RNA, 19 nt, Artificial Sequence
  Synthetic
cuaauggauaccuaucaau

SEQ ID NO: 355496 - RNA, 20 nt, Artificial Sequence
  Synthetic
ucuaauggauaccuaucaau

SEQ ID NO: 355497 - RNA, 21 nt, Artificial Sequence
  Synthetic
gucuaauggauaccuaucaau

SEQ ID NO: 355498 - RNA, 22 nt, Artificial Sequence
  Synthetic
ugucuaauggauaccuaucaau

SEQ ID NO: 355499 - RNA, 23 nt, Artificial Sequence
  Synthetic
cugucuaauggauaccuaucaau

SEQ ID NO: 355500 - RNA, 24 nt, Artificial Sequence
  Synthetic
gcugucuaauggauaccuaucaau

SEQ ID NO: 355501 - RNA, 18 nt, Artificial Sequence
  Synthetic
guuuaguugccuaucaau

SEQ ID NO: 355502 - RNA, 19 nt, Artificial Sequence
  Synthetic
aguuuaguugccuaucaau

SEQ ID NO: 355503 - RNA, 20 nt, Artificial Sequence
  Synthetic
uaguuuaguugccuaucaau

SEQ ID NO: 355504 - RNA, 21 nt, Artificial Sequence
  Synthetic
auaguuuaguugccuaucaau

SEQ ID NO: 355505 - RNA, 22 nt, Artificial Sequence
  Synthetic
uauaguuuaguugccuaucaau

SEQ ID NO: 355506 - RNA, 23 nt, Artificial Sequence
  Synthetic
auauaguuuaguugccuaucaau

SEQ ID NO: 355507 - RNA, 24 nt, Artificial Sequence
  Synthetic
cauauaguuuaguugccuaucaau

SEQ ID NO: 355508 - RNA, 18 nt, Artificial Sequence
  Synthetic
uccauuuuauuuaucaau

SEQ ID NO: 355509 - RNA, 19 nt, Artificial Sequence
  Synthetic
uuccauuuuauuuaucaau

SEQ ID NO: 355510 - RNA, 20 nt, Artificial Sequence
  Synthetic
auuccauuuuauuuaucaau

SEQ ID NO: 355511 - RNA, 21 nt, Artificial Sequence
  Synthetic
aauuccauuuuauuuaucaau

SEQ ID NO: 355512 - RNA, 22 nt, Artificial Sequence
  Synthetic
aaauuccauuuuauuuaucaau

SEQ ID NO: 355513 - RNA, 23 nt, Artificial Sequence
  Synthetic
gaaauuccauuuuauuuaucaau

SEQ ID NO: 355514 - RNA, 24 nt, Artificial Sequence
  Synthetic
ggaaauuccauuuuauuuaucaau

SEQ ID NO: 355515 - RNA, 18 nt, Artificial Sequence
  Synthetic
aguuuuguuuuuaucaau

SEQ ID NO: 355516 - RNA, 19 nt, Artificial Sequence
  Synthetic
gaguuuuguuuuuaucaau

SEQ ID NO: 355517 - RNA, 20 nt, Artificial Sequence
  Synthetic
ugaguuuuguuuuuaucaau

SEQ ID NO: 355518 - RNA, 21 nt, Artificial Sequence
  Synthetic
augaguuuuguuuuuaucaau

SEQ ID NO: 355519 - RNA, 22 nt, Artificial Sequence
  Synthetic
uaugaguuuuguuuuuaucaau

SEQ ID NO: 355520 - RNA, 23 nt, Artificial Sequence
  Synthetic
uuaugaguuuuguuuuuaucaau

SEQ ID NO: 355521 - RNA, 24 nt, Artificial Sequence
  Synthetic
auuaugaguuuuguuuuuaucaau

SEQ ID NO: 355522 - RNA, 18 nt, Artificial Sequence
  Synthetic
uaaauucaccuacucaau

SEQ ID NO: 355523 - RNA, 19 nt, Artificial Sequence
  Synthetic
uuaaauucaccuacucaau

SEQ ID NO: 355524 - RNA, 20 nt, Artificial Sequence
  Synthetic
guuaaauucaccuacucaau

SEQ ID NO: 355525 - RNA, 21 nt, Artificial Sequence
  Synthetic
aguuaaauucaccuacucaau

SEQ ID NO: 355526 - RNA, 22 nt, Artificial Sequence
  Synthetic
aaguuaaauucaccuacucaau

SEQ ID NO: 355527 - RNA, 23 nt, Artificial Sequence
  Synthetic
caaguuaaauucaccuacucaau

SEQ ID NO: 355528 - RNA, 24 nt, Artificial Sequence
  Synthetic
acaaguuaaauucaccuacucaau

SEQ ID NO: 355529 - RNA, 18 nt, Artificial Sequence
  Synthetic
gugagugauuuacucaau

SEQ ID NO: 355530 - RNA, 19 nt, Artificial Sequence
  Synthetic
agugagugauuuacucaau

SEQ ID NO: 355531 - RNA, 20 nt, Artificial Sequence
  Synthetic
uagugagugauuuacucaau

SEQ ID NO: 355532 - RNA, 21 nt, Artificial Sequence
  Synthetic
uuagugagugauuuacucaau

SEQ ID NO: 355533 - RNA, 22 nt, Artificial Sequence
  Synthetic
cuuagugagugauuuacucaau

SEQ ID NO: 355534 - RNA, 23 nt, Artificial Sequence
  Synthetic
ucuuagugagugauuuacucaau

SEQ ID NO: 355535 - RNA, 24 nt, Artificial Sequence
  Synthetic
aucuuagugagugauuuacucaau

SEQ ID NO: 355536 - RNA, 18 nt, Artificial Sequence
  Synthetic
aggauuuuugcccucaau

SEQ ID NO: 355537 - RNA, 19 nt, Artificial Sequence
  Synthetic
uaggauuuuugcccucaau

SEQ ID NO: 355538 - RNA, 20 nt, Artificial Sequence
  Synthetic
auaggauuuuugcccucaau

SEQ ID NO: 355539 - RNA, 21 nt, Artificial Sequence
  Synthetic
gauaggauuuuugcccucaau

SEQ ID NO: 355540 - RNA, 22 nt, Artificial Sequence
  Synthetic
agauaggauuuuugcccucaau

SEQ ID NO: 355541 - RNA, 23 nt, Artificial Sequence
  Synthetic
gagauaggauuuuugcccucaau

SEQ ID NO: 355542 - RNA, 24 nt, Artificial Sequence
  Synthetic
ggagauaggauuuuugcccucaau

SEQ ID NO: 355543 - RNA, 18 nt, Artificial Sequence
  Synthetic
cuguaaaagaugcucaau

SEQ ID NO: 355544 - RNA, 19 nt, Artificial Sequence
  Synthetic
ucuguaaaagaugcucaau

SEQ ID NO: 355545 - RNA, 20 nt, Artificial Sequence
  Synthetic
uucuguaaaagaugcucaau

SEQ ID NO: 355546 - RNA, 21 nt, Artificial Sequence
  Synthetic
cuucuguaaaagaugcucaau

SEQ ID NO: 355547 - RNA, 22 nt, Artificial Sequence
  Synthetic
ucuucuguaaaagaugcucaau

SEQ ID NO: 355548 - RNA, 23 nt, Artificial Sequence
  Synthetic
cucuucuguaaaagaugcucaau

SEQ ID NO: 355549 - RNA, 24 nt, Artificial Sequence
  Synthetic
gcucuucuguaaaagaugcucaau

SEQ ID NO: 355550 - RNA, 18 nt, Artificial Sequence
  Synthetic
guauugguuuugcucaau

SEQ ID NO: 355551 - RNA, 19 nt, Artificial Sequence
  Synthetic
uguauugguuuugcucaau

SEQ ID NO: 355552 - RNA, 20 nt, Artificial Sequence
  Synthetic
cuguauugguuuugcucaau

SEQ ID NO: 355553 - RNA, 21 nt, Artificial Sequence
  Synthetic
ccuguauugguuuugcucaau

SEQ ID NO: 355554 - RNA, 22 nt, Artificial Sequence
  Synthetic
cccuguauugguuuugcucaau

SEQ ID NO: 355555 - RNA, 23 nt, Artificial Sequence
  Synthetic
gcccuguauugguuuugcucaau

SEQ ID NO: 355556 - RNA, 24 nt, Artificial Sequence
  Synthetic
ggcccuguauugguuuugcucaau

SEQ ID NO: 355557 - RNA, 18 nt, Artificial Sequence
  Synthetic
auugcaucccaucucaau

SEQ ID NO: 355558 - RNA, 19 nt, Artificial Sequence
  Synthetic
aauugcaucccaucucaau

SEQ ID NO: 355559 - RNA, 20 nt, Artificial Sequence
  Synthetic
caauugcaucccaucucaau

SEQ ID NO: 355560 - RNA, 21 nt, Artificial Sequence
  Synthetic
ucaauugcaucccaucucaau

SEQ ID NO: 355561 - RNA, 22 nt, Artificial Sequence
  Synthetic
uucaauugcaucccaucucaau

SEQ ID NO: 355562 - RNA, 23 nt, Artificial Sequence
  Synthetic
uuucaauugcaucccaucucaau

SEQ ID NO: 355563 - RNA, 24 nt, Artificial Sequence
  Synthetic
cuuucaauugcaucccaucucaau

SEQ ID NO: 355564 - RNA, 18 nt, Artificial Sequence
  Synthetic
aagcacucuuaucucaau

SEQ ID NO: 355565 - RNA, 19 nt, Artificial Sequence
  Synthetic
aaagcacucuuaucucaau

SEQ ID NO: 355566 - RNA, 20 nt, Artificial Sequence
  Synthetic
caaagcacucuuaucucaau

SEQ ID NO: 355567 - RNA, 21 nt, Artificial Sequence
  Synthetic
acaaagcacucuuaucucaau

SEQ ID NO: 355568 - RNA, 22 nt, Artificial Sequence
  Synthetic
aacaaagcacucuuaucucaau

SEQ ID NO: 355569 - RNA, 23 nt, Artificial Sequence
  Synthetic
aaacaaagcacucuuaucucaau

SEQ ID NO: 355570 - RNA, 24 nt, Artificial Sequence
  Synthetic
uaaacaaagcacucuuaucucaau

SEQ ID NO: 355571 - RNA, 18 nt, Artificial Sequence
  Synthetic
aaguguucuuaucucaau

SEQ ID NO: 355572 - RNA, 19 nt, Artificial Sequence
  Synthetic
uaaguguucuuaucucaau

SEQ ID NO: 355573 - RNA, 20 nt, Artificial Sequence
  Synthetic
uuaaguguucuuaucucaau

SEQ ID NO: 355574 - RNA, 21 nt, Artificial Sequence
  Synthetic
auuaaguguucuuaucucaau

SEQ ID NO: 355575 - RNA, 22 nt, Artificial Sequence
  Synthetic
uauuaaguguucuuaucucaau

SEQ ID NO: 355576 - RNA, 23 nt, Artificial Sequence
  Synthetic
auauuaaguguucuuaucucaau

SEQ ID NO: 355577 - RNA, 24 nt, Artificial Sequence
  Synthetic
cauauuaaguguucuuaucucaau

SEQ ID NO: 355578 - RNA, 18 nt, Artificial Sequence
  Synthetic
auuuuucugacucucaau

SEQ ID NO: 355579 - RNA, 19 nt, Artificial Sequence
  Synthetic
cauuuuucugacucucaau

SEQ ID NO: 355580 - RNA, 20 nt, Artificial Sequence
  Synthetic
ucauuuuucugacucucaau

SEQ ID NO: 355581 - RNA, 21 nt, Artificial Sequence
  Synthetic
uucauuuuucugacucucaau

SEQ ID NO: 355582 - RNA, 22 nt, Artificial Sequence
  Synthetic
uuucauuuuucugacucucaau

SEQ ID NO: 355583 - RNA, 23 nt, Artificial Sequence
  Synthetic
auuucauuuuucugacucucaau

SEQ ID NO: 355584 - RNA, 24 nt, Artificial Sequence
  Synthetic
uauuucauuuuucugacucucaau

SEQ ID NO: 355585 - RNA, 18 nt, Artificial Sequence
  Synthetic
aggucuguauuucucaau

SEQ ID NO: 355586 - RNA, 19 nt, Artificial Sequence
  Synthetic
caggucuguauuucucaau

SEQ ID NO: 355587 - RNA, 20 nt, Artificial Sequence
  Synthetic
ccaggucuguauuucucaau

SEQ ID NO: 355588 - RNA, 21 nt, Artificial Sequence
  Synthetic
accaggucuguauuucucaau

SEQ ID NO: 355589 - RNA, 22 nt, Artificial Sequence
  Synthetic
aaccaggucuguauuucucaau

SEQ ID NO: 355590 - RNA, 23 nt, Artificial Sequence
  Synthetic
aaaccaggucuguauuucucaau

SEQ ID NO: 355591 - RNA, 24 nt, Artificial Sequence
  Synthetic
caaaccaggucuguauuucucaau

SEQ ID NO: 355592 - RNA, 18 nt, Artificial Sequence
  Synthetic
cucacuauuuuucucaau

SEQ ID NO: 355593 - RNA, 19 nt, Artificial Sequence
  Synthetic
ucucacuauuuuucucaau

SEQ ID NO: 355594 - RNA, 20 nt, Artificial Sequence
  Synthetic
gucucacuauuuuucucaau

SEQ ID NO: 355595 - RNA, 21 nt, Artificial Sequence
  Synthetic
ugucucacuauuuuucucaau

SEQ ID NO: 355596 - RNA, 22 nt, Artificial Sequence
  Synthetic
uugucucacuauuuuucucaau

SEQ ID NO: 355597 - RNA, 23 nt, Artificial Sequence
  Synthetic
uuugucucacuauuuuucucaau

SEQ ID NO: 355598 - RNA, 24 nt, Artificial Sequence
  Synthetic
uuuugucucacuauuuuucucaau

SEQ ID NO: 355599 - RNA, 18 nt, Artificial Sequence
  Synthetic
gucaagcccaaagucaau

SEQ ID NO: 355600 - RNA, 19 nt, Artificial Sequence
  Synthetic
agucaagcccaaagucaau

SEQ ID NO: 355601 - RNA, 20 nt, Artificial Sequence
  Synthetic
cagucaagcccaaagucaau

SEQ ID NO: 355602 - RNA, 21 nt, Artificial Sequence
  Synthetic
acagucaagcccaaagucaau

SEQ ID NO: 355603 - RNA, 22 nt, Artificial Sequence
  Synthetic
cacagucaagcccaaagucaau

SEQ ID NO: 355604 - RNA, 23 nt, Artificial Sequence
  Synthetic
acacagucaagcccaaagucaau

SEQ ID NO: 355605 - RNA, 24 nt, Artificial Sequence
  Synthetic
uacacagucaagcccaaagucaau

SEQ ID NO: 355606 - RNA, 18 nt, Artificial Sequence
  Synthetic
augaacaauaaagucaau

SEQ ID NO: 355607 - RNA, 19 nt, Artificial Sequence
  Synthetic
uaugaacaauaaagucaau

SEQ ID NO: 355608 - RNA, 20 nt, Artificial Sequence
  Synthetic
uuaugaacaauaaagucaau

SEQ ID NO: 355609 - RNA, 21 nt, Artificial Sequence
  Synthetic
auuaugaacaauaaagucaau

SEQ ID NO: 355610 - RNA, 22 nt, Artificial Sequence
  Synthetic
uauuaugaacaauaaagucaau

SEQ ID NO: 355611 - RNA, 23 nt, Artificial Sequence
  Synthetic
cuauuaugaacaauaaagucaau

SEQ ID NO: 355612 - RNA, 24 nt, Artificial Sequence
  Synthetic
ucuauuaugaacaauaaagucaau

SEQ ID NO: 355613 - RNA, 18 nt, Artificial Sequence
  Synthetic
uuaaauauaacagucaau

SEQ ID NO: 355614 - RNA, 19 nt, Artificial Sequence
  Synthetic
uuuaaauauaacagucaau

SEQ ID NO: 355615 - RNA, 20 nt, Artificial Sequence
  Synthetic
uuuuaaauauaacagucaau

SEQ ID NO: 355616 - RNA, 21 nt, Artificial Sequence
  Synthetic
auuuuaaauauaacagucaau

SEQ ID NO: 355617 - RNA, 22 nt, Artificial Sequence
  Synthetic
uauuuuaaauauaacagucaau

SEQ ID NO: 355618 - RNA, 23 nt, Artificial Sequence
  Synthetic
uuauuuuaaauauaacagucaau

SEQ ID NO: 355619 - RNA, 24 nt, Artificial Sequence
  Synthetic
auuauuuuaaauauaacagucaau

SEQ ID NO: 355620 - RNA, 18 nt, Artificial Sequence
  Synthetic
uuagaaaagggagucaau

SEQ ID NO: 355621 - RNA, 19 nt, Artificial Sequence
  Synthetic
uuuagaaaagggagucaau

SEQ ID NO: 355622 - RNA, 20 nt, Artificial Sequence
  Synthetic
guuuagaaaagggagucaau

SEQ ID NO: 355623 - RNA, 21 nt, Artificial Sequence
  Synthetic
aguuuagaaaagggagucaau

SEQ ID NO: 355624 - RNA, 22 nt, Artificial Sequence
  Synthetic
aaguuuagaaaagggagucaau

SEQ ID NO: 355625 - RNA, 23 nt, Artificial Sequence
  Synthetic
aaaguuuagaaaagggagucaau

SEQ ID NO: 355626 - RNA, 24 nt, Artificial Sequence
  Synthetic
aaaaguuuagaaaagggagucaau

SEQ ID NO: 355627 - RNA, 18 nt, Artificial Sequence
  Synthetic
caggcccccauugucaau

SEQ ID NO: 355628 - RNA, 19 nt, Artificial Sequence
  Synthetic
acaggcccccauugucaau

SEQ ID NO: 355629 - RNA, 20 nt, Artificial Sequence
  Synthetic
cacaggcccccauugucaau

SEQ ID NO: 355630 - RNA, 21 nt, Artificial Sequence
  Synthetic
ccacaggcccccauugucaau

SEQ ID NO: 355631 - RNA, 22 nt, Artificial Sequence
  Synthetic
gccacaggcccccauugucaau

SEQ ID NO: 355632 - RNA, 23 nt, Artificial Sequence
  Synthetic
agccacaggcccccauugucaau

SEQ ID NO: 355633 - RNA, 24 nt, Artificial Sequence
  Synthetic
uagccacaggcccccauugucaau

SEQ ID NO: 355634 - RNA, 18 nt, Artificial Sequence
  Synthetic
cggacaaauguugucaau

SEQ ID NO: 355635 - RNA, 19 nt, Artificial Sequence
  Synthetic
ucggacaaauguugucaau

SEQ ID NO: 355636 - RNA, 20 nt, Artificial Sequence
  Synthetic
aucggacaaauguugucaau

SEQ ID NO: 355637 - RNA, 21 nt, Artificial Sequence
  Synthetic
aaucggacaaauguugucaau

SEQ ID NO: 355638 - RNA, 22 nt, Artificial Sequence
  Synthetic
uaaucggacaaauguugucaau

SEQ ID NO: 355639 - RNA, 23 nt, Artificial Sequence
  Synthetic
auaaucggacaaauguugucaau

SEQ ID NO: 355640 - RNA, 24 nt, Artificial Sequence
  Synthetic
uauaaucggacaaauguugucaau

SEQ ID NO: 355641 - RNA, 18 nt, Artificial Sequence
  Synthetic
uuuuuuuuuuuugucaau

SEQ ID NO: 355642 - RNA, 19 nt, Artificial Sequence
  Synthetic
guuuuuuuuuuuugucaau

SEQ ID NO: 355643 - RNA, 20 nt, Artificial Sequence
  Synthetic
gguuuuuuuuuuuugucaau

SEQ ID NO: 355644 - RNA, 21 nt, Artificial Sequence
  Synthetic
ugguuuuuuuuuuuugucaau

SEQ ID NO: 355645 - RNA, 22 nt, Artificial Sequence
  Synthetic
augguuuuuuuuuuuugucaau

SEQ ID NO: 355646 - RNA, 23 nt, Artificial Sequence
  Synthetic
uaugguuuuuuuuuuuugucaau

SEQ ID NO: 355647 - RNA, 24 nt, Artificial Sequence
  Synthetic
uuaugguuuuuuuuuuuugucaau

SEQ ID NO: 355648 - RNA, 18 nt, Artificial Sequence
  Synthetic
agcgaggagaaauucaau

SEQ ID NO: 355649 - RNA, 19 nt, Artificial Sequence
  Synthetic
cagcgaggagaaauucaau

SEQ ID NO: 355650 - RNA, 20 nt, Artificial Sequence
  Synthetic
acagcgaggagaaauucaau

SEQ ID NO: 355651 - RNA, 21 nt, Artificial Sequence
  Synthetic
gacagcgaggagaaauucaau

SEQ ID NO: 355652 - RNA, 22 nt, Artificial Sequence
  Synthetic
ggacagcgaggagaaauucaau

SEQ ID NO: 355653 - RNA, 23 nt, Artificial Sequence
  Synthetic
gggacagcgaggagaaauucaau

SEQ ID NO: 355654 - RNA, 24 nt, Artificial Sequence
  Synthetic
ugggacagcgaggagaaauucaau

SEQ ID NO: 355655 - RNA, 18 nt, Artificial Sequence
  Synthetic
agaguaauuuaauucaau

SEQ ID NO: 355656 - RNA, 19 nt, Artificial Sequence
  Synthetic
cagaguaauuuaauucaau

SEQ ID NO: 355657 - RNA, 20 nt, Artificial Sequence
  Synthetic
gcagaguaauuuaauucaau

SEQ ID NO: 355658 - RNA, 21 nt, Artificial Sequence
  Synthetic
agcagaguaauuuaauucaau

SEQ ID NO: 355659 - RNA, 22 nt, Artificial Sequence
  Synthetic
uagcagaguaauuuaauucaau

SEQ ID NO: 355660 - RNA, 23 nt, Artificial Sequence
  Synthetic
uuagcagaguaauuuaauucaau

SEQ ID NO: 355661 - RNA, 24 nt, Artificial Sequence
  Synthetic
uuuagcagaguaauuuaauucaau

SEQ ID NO: 355662 - RNA, 18 nt, Artificial Sequence
  Synthetic
uuaacacaagcauucaau

SEQ ID NO: 355663 - RNA, 19 nt, Artificial Sequence
  Synthetic
uuuaacacaagcauucaau

SEQ ID NO: 355664 - RNA, 20 nt, Artificial Sequence
  Synthetic
uuuuaacacaagcauucaau

SEQ ID NO: 355665 - RNA, 21 nt, Artificial Sequence
  Synthetic
guuuuaacacaagcauucaau

SEQ ID NO: 355666 - RNA, 22 nt, Artificial Sequence
  Synthetic
gguuuuaacacaagcauucaau

SEQ ID NO: 355667 - RNA, 23 nt, Artificial Sequence
  Synthetic
agguuuuaacacaagcauucaau

SEQ ID NO: 355668 - RNA, 24 nt, Artificial Sequence
  Synthetic
gagguuuuaacacaagcauucaau

SEQ ID NO: 355669 - RNA, 18 nt, Artificial Sequence
  Synthetic
agaaucuucggauucaau

SEQ ID NO: 355670 - RNA, 19 nt, Artificial Sequence
  Synthetic
uagaaucuucggauucaau

SEQ ID NO: 355671 - RNA, 20 nt, Artificial Sequence
  Synthetic
cuagaaucuucggauucaau

SEQ ID NO: 355672 - RNA, 21 nt, Artificial Sequence
  Synthetic
acuagaaucuucggauucaau

SEQ ID NO: 355673 - RNA, 22 nt, Artificial Sequence
  Synthetic
aacuagaaucuucggauucaau

SEQ ID NO: 355674 - RNA, 23 nt, Artificial Sequence
  Synthetic
caacuagaaucuucggauucaau

SEQ ID NO: 355675 - RNA, 24 nt, Artificial Sequence
  Synthetic
acaacuagaaucuucggauucaau

SEQ ID NO: 355676 - RNA, 18 nt, Artificial Sequence
  Synthetic
ucuagauuuauauucaau

SEQ ID NO: 355677 - RNA, 19 nt, Artificial Sequence
  Synthetic
uucuagauuuauauucaau

SEQ ID NO: 355678 - RNA, 20 nt, Artificial Sequence
  Synthetic
uuucuagauuuauauucaau

SEQ ID NO: 355679 - RNA, 21 nt, Artificial Sequence
  Synthetic
cuuucuagauuuauauucaau

SEQ ID NO: 355680 - RNA, 22 nt, Artificial Sequence
  Synthetic
ccuuucuagauuuauauucaau

SEQ ID NO: 355681 - RNA, 23 nt, Artificial Sequence
  Synthetic
accuuucuagauuuauauucaau

SEQ ID NO: 355682 - RNA, 24 nt, Artificial Sequence
  Synthetic
gaccuuucuagauuuauauucaau

SEQ ID NO: 355683 - RNA, 18 nt, Artificial Sequence
  Synthetic
aaauaaaggguauucaau

SEQ ID NO: 355684 - RNA, 19 nt, Artificial Sequence
  Synthetic
gaaauaaaggguauucaau

SEQ ID NO: 355685 - RNA, 20 nt, Artificial Sequence
  Synthetic
ggaaauaaaggguauucaau

SEQ ID NO: 355686 - RNA, 18 nt, Artificial Sequence
  Synthetic
ccaaauuauuuauucaau

SEQ ID NO: 355687 - RNA, 19 nt, Artificial Sequence
  Synthetic
accaaauuauuuauucaau

SEQ ID NO: 355688 - RNA, 20 nt, Artificial Sequence
  Synthetic
gaccaaauuauuuauucaau

SEQ ID NO: 355689 - RNA, 21 nt, Artificial Sequence
  Synthetic
ugaccaaauuauuuauucaau

SEQ ID NO: 355690 - RNA, 22 nt, Artificial Sequence
  Synthetic
cugaccaaauuauuuauucaau

SEQ ID NO: 355691 - RNA, 23 nt, Artificial Sequence
  Synthetic
ccugaccaaauuauuuauucaau

SEQ ID NO: 355692 - RNA, 24 nt, Artificial Sequence
  Synthetic
uccugaccaaauuauuuauucaau

SEQ ID NO: 355693 - RNA, 18 nt, Artificial Sequence
  Synthetic
cugguugagagcuucaau

SEQ ID NO: 355694 - RNA, 19 nt, Artificial Sequence
  Synthetic
ccugguugagagcuucaau

SEQ ID NO: 355695 - RNA, 20 nt, Artificial Sequence
  Synthetic
uccugguugagagcuucaau

SEQ ID NO: 355696 - RNA, 21 nt, Artificial Sequence
  Synthetic
uuccugguugagagcuucaau

SEQ ID NO: 355697 - RNA, 22 nt, Artificial Sequence
  Synthetic
guuccugguugagagcuucaau

SEQ ID NO: 355698 - RNA, 23 nt, Artificial Sequence
  Synthetic
aguuccugguugagagcuucaau

SEQ ID NO: 355699 - RNA, 24 nt, Artificial Sequence
  Synthetic
gaguuccugguugagagcuucaau

SEQ ID NO: 355700 - RNA, 18 nt, Artificial Sequence
  Synthetic
gucacaacacucuucaau

SEQ ID NO: 355701 - RNA, 19 nt, Artificial Sequence
  Synthetic
ugucacaacacucuucaau

SEQ ID NO: 355702 - RNA, 20 nt, Artificial Sequence
  Synthetic
augucacaacacucuucaau

SEQ ID NO: 355703 - RNA, 21 nt, Artificial Sequence
  Synthetic
aaugucacaacacucuucaau

SEQ ID NO: 355704 - RNA, 22 nt, Artificial Sequence
  Synthetic
aaaugucacaacacucuucaau

SEQ ID NO: 355705 - RNA, 23 nt, Artificial Sequence
  Synthetic
aaaaugucacaacacucuucaau

SEQ ID NO: 355706 - RNA, 24 nt, Artificial Sequence
  Synthetic
aaaaaugucacaacacucuucaau

SEQ ID NO: 355707 - RNA, 18 nt, Artificial Sequence
  Synthetic
uauucaacacucuucaau

SEQ ID NO: 355708 - RNA, 19 nt, Artificial Sequence
  Synthetic
auauucaacacucuucaau

SEQ ID NO: 355709 - RNA, 20 nt, Artificial Sequence
  Synthetic
aauauucaacacucuucaau

SEQ ID NO: 355710 - RNA, 21 nt, Artificial Sequence
  Synthetic
caauauucaacacucuucaau

SEQ ID NO: 355711 - RNA, 22 nt, Artificial Sequence
  Synthetic
ccaauauucaacacucuucaau

SEQ ID NO: 355712 - RNA, 23 nt, Artificial Sequence
  Synthetic
gccaauauucaacacucuucaau

SEQ ID NO: 355713 - RNA, 24 nt, Artificial Sequence
  Synthetic
ugccaauauucaacacucuucaau

SEQ ID NO: 355714 - RNA, 18 nt, Artificial Sequence
  Synthetic
acagccguuuucuucaau

SEQ ID NO: 355715 - RNA, 19 nt, Artificial Sequence
  Synthetic
aacagccguuuucuucaau

SEQ ID NO: 355716 - RNA, 20 nt, Artificial Sequence
  Synthetic
aaacagccguuuucuucaau

SEQ ID NO: 355717 - RNA, 21 nt, Artificial Sequence
  Synthetic
aaaacagccguuuucuucaau

SEQ ID NO: 355718 - RNA, 22 nt, Artificial Sequence
  Synthetic
caaaacagccguuuucuucaau

SEQ ID NO: 355719 - RNA, 23 nt, Artificial Sequence
  Synthetic
ccaaaacagccguuuucuucaau

SEQ ID NO: 355720 - RNA, 24 nt, Artificial Sequence
  Synthetic
gccaaaacagccguuuucuucaau

SEQ ID NO: 355721 - RNA, 18 nt, Artificial Sequence
  Synthetic
uaucuuguaauguucaau

SEQ ID NO: 355722 - RNA, 19 nt, Artificial Sequence
  Synthetic
uuaucuuguaauguucaau

SEQ ID NO: 355723 - RNA, 20 nt, Artificial Sequence
  Synthetic
uuuaucuuguaauguucaau

SEQ ID NO: 355724 - RNA, 21 nt, Artificial Sequence
  Synthetic
auuuaucuuguaauguucaau

SEQ ID NO: 355725 - RNA, 22 nt, Artificial Sequence
  Synthetic
aauuuaucuuguaauguucaau

SEQ ID NO: 355726 - RNA, 23 nt, Artificial Sequence
  Synthetic
uaauuuaucuuguaauguucaau

SEQ ID NO: 355727 - RNA, 24 nt, Artificial Sequence
  Synthetic
uuaauuuaucuuguaauguucaau

SEQ ID NO: 355728 - RNA, 18 nt, Artificial Sequence
  Synthetic
uacggaagugguuucaau

SEQ ID NO: 355729 - RNA, 19 nt, Artificial Sequence
  Synthetic
uuacggaagugguuucaau

SEQ ID NO: 355730 - RNA, 20 nt, Artificial Sequence
  Synthetic
guuacggaagugguuucaau

SEQ ID NO: 355731 - RNA, 21 nt, Artificial Sequence
  Synthetic
aguuacggaagugguuucaau

SEQ ID NO: 355732 - RNA, 22 nt, Artificial Sequence
  Synthetic
gaguuacggaagugguuucaau

SEQ ID NO: 355733 - RNA, 23 nt, Artificial Sequence
  Synthetic
agaguuacggaagugguuucaau

SEQ ID NO: 355734 - RNA, 24 nt, Artificial Sequence
  Synthetic
cagaguuacggaagugguuucaau

SEQ ID NO: 355735 - RNA, 18 nt, Artificial Sequence
  Synthetic
ccuugacagauuuucaau

SEQ ID NO: 355736 - RNA, 19 nt, Artificial Sequence
  Synthetic
gccuugacagauuuucaau

SEQ ID NO: 355737 - RNA, 20 nt, Artificial Sequence
  Synthetic
ugccuugacagauuuucaau

SEQ ID NO: 355738 - RNA, 21 nt, Artificial Sequence
  Synthetic
cugccuugacagauuuucaau

SEQ ID NO: 355739 - RNA, 22 nt, Artificial Sequence
  Synthetic
ccugccuugacagauuuucaau

SEQ ID NO: 355740 - RNA, 23 nt, Artificial Sequence
  Synthetic
accugccuugacagauuuucaau

SEQ ID NO: 355741 - RNA, 24 nt, Artificial Sequence
  Synthetic
gaccugccuugacagauuuucaau

SEQ ID NO: 355742 - RNA, 18 nt, Artificial Sequence
  Synthetic
caaugggacaaaaagaau

SEQ ID NO: 355743 - RNA, 19 nt, Artificial Sequence
  Synthetic
ucaaugggacaaaaagaau

SEQ ID NO: 355744 - RNA, 20 nt, Artificial Sequence
  Synthetic
uucaaugggacaaaaagaau

SEQ ID NO: 355745 - RNA, 21 nt, Artificial Sequence
  Synthetic
auucaaugggacaaaaagaau

SEQ ID NO: 355746 - RNA, 22 nt, Artificial Sequence
  Synthetic
aauucaaugggacaaaaagaau

SEQ ID NO: 355747 - RNA, 23 nt, Artificial Sequence
  Synthetic
caauucaaugggacaaaaagaau

SEQ ID NO: 355748 - RNA, 24 nt, Artificial Sequence
  Synthetic
acaauucaaugggacaaaaagaau

SEQ ID NO: 355749 - RNA, 18 nt, Artificial Sequence
  Synthetic
cauacguucaaaaagaau

SEQ ID NO: 355750 - RNA, 19 nt, Artificial Sequence
  Synthetic
ucauacguucaaaaagaau

SEQ ID NO: 355751 - RNA, 20 nt, Artificial Sequence
  Synthetic
uucauacguucaaaaagaau

SEQ ID NO: 355752 - RNA, 21 nt, Artificial Sequence
  Synthetic
uuucauacguucaaaaagaau

SEQ ID NO: 355753 - RNA, 22 nt, Artificial Sequence
  Synthetic
cuuucauacguucaaaaagaau

SEQ ID NO: 355754 - RNA, 23 nt, Artificial Sequence
  Synthetic
ccuuucauacguucaaaaagaau

SEQ ID NO: 355755 - RNA, 24 nt, Artificial Sequence
  Synthetic
accuuucauacguucaaaaagaau

SEQ ID NO: 355756 - RNA, 18 nt, Artificial Sequence
  Synthetic
uacaaaaggaaaaagaau

SEQ ID NO: 355757 - RNA, 19 nt, Artificial Sequence
  Synthetic
uuacaaaaggaaaaagaau

SEQ ID NO: 355758 - RNA, 20 nt, Artificial Sequence
  Synthetic
cuuacaaaaggaaaaagaau

SEQ ID NO: 355759 - RNA, 21 nt, Artificial Sequence
  Synthetic
acuuacaaaaggaaaaagaau

SEQ ID NO: 355760 - RNA, 22 nt, Artificial Sequence
  Synthetic
aacuuacaaaaggaaaaagaau

SEQ ID NO: 355761 - RNA, 23 nt, Artificial Sequence
  Synthetic
aaacuuacaaaaggaaaaagaau

SEQ ID NO: 355762 - RNA, 24 nt, Artificial Sequence
  Synthetic
aaaacuuacaaaaggaaaaagaau

SEQ ID NO: 355763 - RNA, 18 nt, Artificial Sequence
  Synthetic
cgguggucaccaaagaau

SEQ ID NO: 355764 - RNA, 19 nt, Artificial Sequence
  Synthetic
acgguggucaccaaagaau

SEQ ID NO: 355765 - RNA, 20 nt, Artificial Sequence
  Synthetic
gacgguggucaccaaagaau

SEQ ID NO: 355766 - RNA, 21 nt, Artificial Sequence
  Synthetic
ggacgguggucaccaaagaau

SEQ ID NO: 355767 - RNA, 22 nt, Artificial Sequence
  Synthetic
uggacgguggucaccaaagaau

SEQ ID NO: 355768 - RNA, 23 nt, Artificial Sequence
  Synthetic
auggacgguggucaccaaagaau

SEQ ID NO: 355769 - RNA, 24 nt, Artificial Sequence
  Synthetic
aauggacgguggucaccaaagaau

SEQ ID NO: 355770 - RNA, 18 nt, Artificial Sequence
  Synthetic
agaaaugacccaaagaau

SEQ ID NO: 355771 - RNA, 19 nt, Artificial Sequence
  Synthetic
cagaaaugacccaaagaau

SEQ ID NO: 355772 - RNA, 20 nt, Artificial Sequence
  Synthetic
ucagaaaugacccaaagaau

SEQ ID NO: 355773 - RNA, 21 nt, Artificial Sequence
  Synthetic
uucagaaaugacccaaagaau

SEQ ID NO: 355774 - RNA, 22 nt, Artificial Sequence
  Synthetic
cuucagaaaugacccaaagaau

SEQ ID NO: 355775 - RNA, 23 nt, Artificial Sequence
  Synthetic
ccuucagaaaugacccaaagaau

SEQ ID NO: 355776 - RNA, 24 nt, Artificial Sequence
  Synthetic
gccuucagaaaugacccaaagaau

SEQ ID NO: 355777 - RNA, 18 nt, Artificial Sequence
  Synthetic
uauucuugcccaaagaau

SEQ ID NO: 355778 - RNA, 19 nt, Artificial Sequence
  Synthetic
auauucuugcccaaagaau

SEQ ID NO: 355779 - RNA, 20 nt, Artificial Sequence
  Synthetic
uauauucuugcccaaagaau

SEQ ID NO: 355780 - RNA, 21 nt, Artificial Sequence
  Synthetic
uuauauucuugcccaaagaau

SEQ ID NO: 355781 - RNA, 22 nt, Artificial Sequence
  Synthetic
guuauauucuugcccaaagaau

SEQ ID NO: 355782 - RNA, 23 nt, Artificial Sequence
  Synthetic
uguuauauucuugcccaaagaau

SEQ ID NO: 355783 - RNA, 24 nt, Artificial Sequence
  Synthetic
auguuauauucuugcccaaagaau

SEQ ID NO: 355784 - RNA, 18 nt, Artificial Sequence
  Synthetic
uucagagauugaaagaau

SEQ ID NO: 355785 - RNA, 19 nt, Artificial Sequence
  Synthetic
auucagagauugaaagaau

SEQ ID NO: 355786 - RNA, 20 nt, Artificial Sequence
  Synthetic
cauucagagauugaaagaau

SEQ ID NO: 355787 - RNA, 21 nt, Artificial Sequence
  Synthetic
acauucagagauugaaagaau

SEQ ID NO: 355788 - RNA, 22 nt, Artificial Sequence
  Synthetic
aacauucagagauugaaagaau

SEQ ID NO: 355789 - RNA, 23 nt, Artificial Sequence
  Synthetic
uaacauucagagauugaaagaau

SEQ ID NO: 355790 - RNA, 24 nt, Artificial Sequence
  Synthetic
uuaacauucagagauugaaagaau

SEQ ID NO: 355791 - RNA, 18 nt, Artificial Sequence
  Synthetic
uuugcucuuauaaagaau

SEQ ID NO: 355792 - RNA, 19 nt, Artificial Sequence
  Synthetic
uuuugcucuuauaaagaau

SEQ ID NO: 355793 - RNA, 20 nt, Artificial Sequence
  Synthetic
uuuuugcucuuauaaagaau

SEQ ID NO: 355794 - RNA, 21 nt, Artificial Sequence
  Synthetic
uuuuuugcucuuauaaagaau

SEQ ID NO: 355795 - RNA, 22 nt, Artificial Sequence
  Synthetic
auuuuuugcucuuauaaagaau

SEQ ID NO: 355796 - RNA, 23 nt, Artificial Sequence
  Synthetic
uauuuuuugcucuuauaaagaau

SEQ ID NO: 355797 - RNA, 24 nt, Artificial Sequence
  Synthetic
uuauuuuuugcucuuauaaagaau

SEQ ID NO: 355798 - RNA, 18 nt, Artificial Sequence
  Synthetic
cagggagagguaaagaau

SEQ ID NO: 355799 - RNA, 19 nt, Artificial Sequence
  Synthetic
acagggagagguaaagaau

SEQ ID NO: 355800 - RNA, 20 nt, Artificial Sequence
  Synthetic
uacagggagagguaaagaau

SEQ ID NO: 355801 - RNA, 21 nt, Artificial Sequence
  Synthetic
auacagggagagguaaagaau

SEQ ID NO: 355802 - RNA, 22 nt, Artificial Sequence
  Synthetic
gauacagggagagguaaagaau

SEQ ID NO: 355803 - RNA, 23 nt, Artificial Sequence
  Synthetic
ggauacagggagagguaaagaau

SEQ ID NO: 355804 - RNA, 24 nt, Artificial Sequence
  Synthetic
uggauacagggagagguaaagaau

SEQ ID NO: 355805 - RNA, 18 nt, Artificial Sequence
  Synthetic
caccagaaaaacaagaau

SEQ ID NO: 355806 - RNA, 19 nt, Artificial Sequence
  Synthetic
ccaccagaaaaacaagaau

SEQ ID NO: 355807 - RNA, 20 nt, Artificial Sequence
  Synthetic
accaccagaaaaacaagaau

SEQ ID NO: 355808 - RNA, 21 nt, Artificial Sequence
  Synthetic
caccaccagaaaaacaagaau

SEQ ID NO: 355809 - RNA, 22 nt, Artificial Sequence
  Synthetic
acaccaccagaaaaacaagaau

SEQ ID NO: 355810 - RNA, 23 nt, Artificial Sequence
  Synthetic
aacaccaccagaaaaacaagaau

SEQ ID NO: 355811 - RNA, 24 nt, Artificial Sequence
  Synthetic
gaacaccaccagaaaaacaagaau

SEQ ID NO: 355812 - RNA, 18 nt, Artificial Sequence
  Synthetic
aauuccuuauacaagaau

SEQ ID NO: 355813 - RNA, 19 nt, Artificial Sequence
  Synthetic
uaauuccuuauacaagaau

SEQ ID NO: 355814 - RNA, 20 nt, Artificial Sequence
  Synthetic
uuaauuccuuauacaagaau

SEQ ID NO: 355815 - RNA, 21 nt, Artificial Sequence
  Synthetic
uuuaauuccuuauacaagaau

SEQ ID NO: 355816 - RNA, 22 nt, Artificial Sequence
  Synthetic
uuuuaauuccuuauacaagaau

SEQ ID NO: 355817 - RNA, 23 nt, Artificial Sequence
  Synthetic
cuuuuaauuccuuauacaagaau

SEQ ID NO: 355818 - RNA, 24 nt, Artificial Sequence
  Synthetic
ucuuuuaauuccuuauacaagaau

SEQ ID NO: 355819 - RNA, 18 nt, Artificial Sequence
  Synthetic
auauagaauaccaagaau

SEQ ID NO: 355820 - RNA, 19 nt, Artificial Sequence
  Synthetic
aauauagaauaccaagaau

SEQ ID NO: 355821 - RNA, 20 nt, Artificial Sequence
  Synthetic
caauauagaauaccaagaau

SEQ ID NO: 355822 - RNA, 21 nt, Artificial Sequence
  Synthetic
ccaauauagaauaccaagaau

SEQ ID NO: 355823 - RNA, 22 nt, Artificial Sequence
  Synthetic
uccaauauagaauaccaagaau

SEQ ID NO: 355824 - RNA, 23 nt, Artificial Sequence
  Synthetic
auccaauauagaauaccaagaau

SEQ ID NO: 355825 - RNA, 24 nt, Artificial Sequence
  Synthetic
cauccaauauagaauaccaagaau

SEQ ID NO: 355826 - RNA, 18 nt, Artificial Sequence
  Synthetic
gcauuaugggucaagaau

SEQ ID NO: 355827 - RNA, 19 nt, Artificial Sequence
  Synthetic
ugcauuaugggucaagaau

SEQ ID NO: 355828 - RNA, 20 nt, Artificial Sequence
  Synthetic
uugcauuaugggucaagaau

SEQ ID NO: 355829 - RNA, 21 nt, Artificial Sequence
  Synthetic
auugcauuaugggucaagaau

SEQ ID NO: 355830 - RNA, 22 nt, Artificial Sequence
  Synthetic
cauugcauuaugggucaagaau

SEQ ID NO: 355831 - RNA, 23 nt, Artificial Sequence
  Synthetic
acauugcauuaugggucaagaau

SEQ ID NO: 355832 - RNA, 24 nt, Artificial Sequence
  Synthetic
cacauugcauuaugggucaagaau

SEQ ID NO: 355833 - RNA, 18 nt, Artificial Sequence
  Synthetic
accaccaaguucaagaau

SEQ ID NO: 355834 - RNA, 19 nt, Artificial Sequence
  Synthetic
uaccaccaaguucaagaau

SEQ ID NO: 355835 - RNA, 20 nt, Artificial Sequence
  Synthetic
cuaccaccaaguucaagaau

SEQ ID NO: 355836 - RNA, 21 nt, Artificial Sequence
  Synthetic
acuaccaccaaguucaagaau

SEQ ID NO: 355837 - RNA, 22 nt, Artificial Sequence
  Synthetic
uacuaccaccaaguucaagaau

SEQ ID NO: 355838 - RNA, 23 nt, Artificial Sequence
  Synthetic
cuacuaccaccaaguucaagaau

SEQ ID NO: 355839 - RNA, 24 nt, Artificial Sequence
  Synthetic
gcuacuaccaccaaguucaagaau

SEQ ID NO: 355840 - RNA, 18 nt, Artificial Sequence
  Synthetic
uacauaucaaagaagaau

SEQ ID NO: 355841 - RNA, 19 nt, Artificial Sequence
  Synthetic
cuacauaucaaagaagaau

SEQ ID NO: 355842 - RNA, 20 nt, Artificial Sequence
  Synthetic
acuacauaucaaagaagaau

SEQ ID NO: 355843 - RNA, 21 nt, Artificial Sequence
  Synthetic
aacuacauaucaaagaagaau

SEQ ID NO: 355844 - RNA, 22 nt, Artificial Sequence
  Synthetic
aaacuacauaucaaagaagaau

SEQ ID NO: 355845 - RNA, 23 nt, Artificial Sequence
  Synthetic
aaaacuacauaucaaagaagaau

SEQ ID NO: 355846 - RNA, 24 nt, Artificial Sequence
  Synthetic
gaaaacuacauaucaaagaagaau

SEQ ID NO: 355847 - RNA, 18 nt, Artificial Sequence
  Synthetic
guaacuagccagaagaau

SEQ ID NO: 355848 - RNA, 19 nt, Artificial Sequence
  Synthetic
aguaacuagccagaagaau

SEQ ID NO: 355849 - RNA, 20 nt, Artificial Sequence
  Synthetic
gaguaacuagccagaagaau

SEQ ID NO: 355850 - RNA, 21 nt, Artificial Sequence
  Synthetic
agaguaacuagccagaagaau

SEQ ID NO: 355851 - RNA, 22 nt, Artificial Sequence
  Synthetic
aagaguaacuagccagaagaau

SEQ ID NO: 355852 - RNA, 23 nt, Artificial Sequence
  Synthetic
aaagaguaacuagccagaagaau

SEQ ID NO: 355853 - RNA, 24 nt, Artificial Sequence
  Synthetic
caaagaguaacuagccagaagaau

SEQ ID NO: 355854 - RNA, 18 nt, Artificial Sequence
  Synthetic
aaaaagaaagagaagaau

SEQ ID NO: 355855 - RNA, 19 nt, Artificial Sequence
  Synthetic
aaaaaagaaagagaagaau

SEQ ID NO: 355856 - RNA, 20 nt, Artificial Sequence
  Synthetic
gaaaaaagaaagagaagaau

SEQ ID NO: 355857 - RNA, 21 nt, Artificial Sequence
  Synthetic
agaaaaaagaaagagaagaau

SEQ ID NO: 355858 - RNA, 22 nt, Artificial Sequence
  Synthetic
aagaaaaaagaaagagaagaau

SEQ ID NO: 355859 - RNA, 23 nt, Artificial Sequence
  Synthetic
uaagaaaaaagaaagagaagaau

SEQ ID NO: 355860 - RNA, 24 nt, Artificial Sequence
  Synthetic
guaagaaaaaagaaagagaagaau

SEQ ID NO: 355861 - RNA, 18 nt, Artificial Sequence
  Synthetic
aguagaucagagaagaau

SEQ ID NO: 355862 - RNA, 19 nt, Artificial Sequence
  Synthetic
gaguagaucagagaagaau

SEQ ID NO: 355863 - RNA, 20 nt, Artificial Sequence
  Synthetic
ugaguagaucagagaagaau

SEQ ID NO: 355864 - RNA, 21 nt, Artificial Sequence
  Synthetic
augaguagaucagagaagaau

SEQ ID NO: 355865 - RNA, 22 nt, Artificial Sequence
  Synthetic
aaugaguagaucagagaagaau

SEQ ID NO: 355866 - RNA, 23 nt, Artificial Sequence
  Synthetic
aaaugaguagaucagagaagaau

SEQ ID NO: 355867 - RNA, 24 nt, Artificial Sequence
  Synthetic
uaaaugaguagaucagagaagaau

SEQ ID NO: 355868 - RNA, 18 nt, Artificial Sequence
  Synthetic
gcagagcuagagaagaau

SEQ ID NO: 355869 - RNA, 19 nt, Artificial Sequence
  Synthetic
ggcagagcuagagaagaau

SEQ ID NO: 355870 - RNA, 20 nt, Artificial Sequence
  Synthetic
aggcagagcuagagaagaau

SEQ ID NO: 355871 - RNA, 21 nt, Artificial Sequence
  Synthetic
aaggcagagcuagagaagaau

SEQ ID NO: 355872 - RNA, 22 nt, Artificial Sequence
  Synthetic
uaaggcagagcuagagaagaau

SEQ ID NO: 355873 - RNA, 23 nt, Artificial Sequence
  Synthetic
cuaaggcagagcuagagaagaau

SEQ ID NO: 355874 - RNA, 24 nt, Artificial Sequence
  Synthetic
gcuaaggcagagcuagagaagaau

SEQ ID NO: 355875 - RNA, 18 nt, Artificial Sequence
  Synthetic
uugaauuaugagaagaau

SEQ ID NO: 355876 - RNA, 19 nt, Artificial Sequence
  Synthetic
uuugaauuaugagaagaau

SEQ ID NO: 355877 - RNA, 20 nt, Artificial Sequence
  Synthetic
uuuugaauuaugagaagaau

SEQ ID NO: 355878 - RNA, 21 nt, Artificial Sequence
  Synthetic
uuuuugaauuaugagaagaau

SEQ ID NO: 355879 - RNA, 22 nt, Artificial Sequence
  Synthetic
cuuuuugaauuaugagaagaau

SEQ ID NO: 355880 - RNA, 23 nt, Artificial Sequence
  Synthetic
acuuuuugaauuaugagaagaau

SEQ ID NO: 355881 - RNA, 24 nt, Artificial Sequence
  Synthetic
cacuuuuugaauuaugagaagaau

SEQ ID NO: 355882 - RNA, 18 nt, Artificial Sequence
  Synthetic
cuaauaccugagaagaau

SEQ ID NO: 355883 - RNA, 19 nt, Artificial Sequence
  Synthetic
acuaauaccugagaagaau

SEQ ID NO: 355884 - RNA, 20 nt, Artificial Sequence
  Synthetic
aacuaauaccugagaagaau

SEQ ID NO: 355885 - RNA, 21 nt, Artificial Sequence
  Synthetic
aaacuaauaccugagaagaau

SEQ ID NO: 355886 - RNA, 22 nt, Artificial Sequence
  Synthetic
uaaacuaauaccugagaagaau

SEQ ID NO: 355887 - RNA, 23 nt, Artificial Sequence
  Synthetic
auaaacuaauaccugagaagaau

SEQ ID NO: 355888 - RNA, 24 nt, Artificial Sequence
  Synthetic
uauaaacuaauaccugagaagaau

SEQ ID NO: 355889 - RNA, 18 nt, Artificial Sequence
  Synthetic
agaauacuagggaagaau

SEQ ID NO: 355890 - RNA, 19 nt, Artificial Sequence
  Synthetic
uagaauacuagggaagaau

SEQ ID NO: 355891 - RNA, 20 nt, Artificial Sequence
  Synthetic
guagaauacuagggaagaau

SEQ ID NO: 355892 - RNA, 21 nt, Artificial Sequence
  Synthetic
uguagaauacuagggaagaau

SEQ ID NO: 355893 - RNA, 22 nt, Artificial Sequence
  Synthetic
auguagaauacuagggaagaau

SEQ ID NO: 355894 - RNA, 23 nt, Artificial Sequence
  Synthetic
gauguagaauacuagggaagaau

SEQ ID NO: 355895 - RNA, 24 nt, Artificial Sequence
  Synthetic
ggauguagaauacuagggaagaau

SEQ ID NO: 355896 - RNA, 18 nt, Artificial Sequence
  Synthetic
cugagcaauuggaagaau

SEQ ID NO: 355897 - RNA, 19 nt, Artificial Sequence
  Synthetic
ucugagcaauuggaagaau

SEQ ID NO: 355898 - RNA, 20 nt, Artificial Sequence
  Synthetic
uucugagcaauuggaagaau

SEQ ID NO: 355899 - RNA, 21 nt, Artificial Sequence
  Synthetic
auucugagcaauuggaagaau

SEQ ID NO: 355900 - RNA, 22 nt, Artificial Sequence
  Synthetic
uauucugagcaauuggaagaau

SEQ ID NO: 355901 - RNA, 23 nt, Artificial Sequence
  Synthetic
uuauucugagcaauuggaagaau

SEQ ID NO: 355902 - RNA, 24 nt, Artificial Sequence
  Synthetic
auuauucugagcaauuggaagaau

SEQ ID NO: 355903 - RNA, 18 nt, Artificial Sequence
  Synthetic
agcuaauaaaugaagaau

SEQ ID NO: 355904 - RNA, 19 nt, Artificial Sequence
  Synthetic
aagcuaauaaaugaagaau

SEQ ID NO: 355905 - RNA, 20 nt, Artificial Sequence
  Synthetic
aaagcuaauaaaugaagaau

SEQ ID NO: 355906 - RNA, 21 nt, Artificial Sequence
  Synthetic
uaaagcuaauaaaugaagaau

SEQ ID NO: 355907 - RNA, 22 nt, Artificial Sequence
  Synthetic
auaaagcuaauaaaugaagaau

SEQ ID NO: 355908 - RNA, 23 nt, Artificial Sequence
  Synthetic
cauaaagcuaauaaaugaagaau

SEQ ID NO: 355909 - RNA, 24 nt, Artificial Sequence
  Synthetic
ucauaaagcuaauaaaugaagaau

SEQ ID NO: 355910 - RNA, 18 nt, Artificial Sequence
  Synthetic
gaagcauggaugaagaau

SEQ ID NO: 355911 - RNA, 19 nt, Artificial Sequence
  Synthetic
ugaagcauggaugaagaau

SEQ ID NO: 355912 - RNA, 20 nt, Artificial Sequence
  Synthetic
cugaagcauggaugaagaau

SEQ ID NO: 355913 - RNA, 21 nt, Artificial Sequence
  Synthetic
acugaagcauggaugaagaau

SEQ ID NO: 355914 - RNA, 22 nt, Artificial Sequence
  Synthetic
cacugaagcauggaugaagaau

SEQ ID NO: 355915 - RNA, 23 nt, Artificial Sequence
  Synthetic
gcacugaagcauggaugaagaau

SEQ ID NO: 355916 - RNA, 24 nt, Artificial Sequence
  Synthetic
ugcacugaagcauggaugaagaau

SEQ ID NO: 355917 - RNA, 18 nt, Artificial Sequence
  Synthetic
uuaauuuuucugaagaau

SEQ ID NO: 355918 - RNA, 19 nt, Artificial Sequence
  Synthetic
uuuaauuuuucugaagaau

SEQ ID NO: 355919 - RNA, 20 nt, Artificial Sequence
  Synthetic
cuuuaauuuuucugaagaau

SEQ ID NO: 355920 - RNA, 21 nt, Artificial Sequence
  Synthetic
ucuuuaauuuuucugaagaau

SEQ ID NO: 355921 - RNA, 22 nt, Artificial Sequence
  Synthetic
cucuuuaauuuuucugaagaau

SEQ ID NO: 355922 - RNA, 23 nt, Artificial Sequence
  Synthetic
ucucuuuaauuuuucugaagaau

SEQ ID NO: 355923 - RNA, 24 nt, Artificial Sequence
  Synthetic
uucucuuuaauuuuucugaagaau

SEQ ID NO: 355924 - RNA, 18 nt, Artificial Sequence
  Synthetic
aaggugccugugaagaau

SEQ ID NO: 355925 - RNA, 19 nt, Artificial Sequence
  Synthetic
gaaggugccugugaagaau

SEQ ID NO: 355926 - RNA, 20 nt, Artificial Sequence
  Synthetic
ugaaggugccugugaagaau

SEQ ID NO: 355927 - RNA, 21 nt, Artificial Sequence
  Synthetic
uugaaggugccugugaagaau

SEQ ID NO: 355928 - RNA, 22 nt, Artificial Sequence
  Synthetic
guugaaggugccugugaagaau

SEQ ID NO: 355929 - RNA, 23 nt, Artificial Sequence
  Synthetic
uguugaaggugccugugaagaau

SEQ ID NO: 355930 - RNA, 24 nt, Artificial Sequence
  Synthetic
auguugaaggugccugugaagaau

SEQ ID NO: 355931 - RNA, 18 nt, Artificial Sequence
  Synthetic
uaugggugauugaagaau

SEQ ID NO: 355932 - RNA, 19 nt, Artificial Sequence
  Synthetic
uuaugggugauugaagaau

SEQ ID NO: 355933 - RNA, 20 nt, Artificial Sequence
  Synthetic
uuuaugggugauugaagaau

SEQ ID NO: 355934 - RNA, 21 nt, Artificial Sequence
  Synthetic
auuuaugggugauugaagaau

SEQ ID NO: 355935 - RNA, 22 nt, Artificial Sequence
  Synthetic
uauuuaugggugauugaagaau

SEQ ID NO: 355936 - RNA, 23 nt, Artificial Sequence
  Synthetic
cuauuuaugggugauugaagaau

SEQ ID NO: 355937 - RNA, 24 nt, Artificial Sequence
  Synthetic
acuauuuaugggugauugaagaau

SEQ ID NO: 355938 - RNA, 18 nt, Artificial Sequence
  Synthetic
aaugcacagaauaagaau

SEQ ID NO: 355939 - RNA, 19 nt, Artificial Sequence
  Synthetic
aaaugcacagaauaagaau

SEQ ID NO: 355940 - RNA, 20 nt, Artificial Sequence
  Synthetic
caaaugcacagaauaagaau

SEQ ID NO: 355941 - RNA, 21 nt, Artificial Sequence
  Synthetic
ucaaaugcacagaauaagaau

SEQ ID NO: 355942 - RNA, 22 nt, Artificial Sequence
  Synthetic
cucaaaugcacagaauaagaau

SEQ ID NO: 355943 - RNA, 23 nt, Artificial Sequence
  Synthetic
ucucaaaugcacagaauaagaau

SEQ ID NO: 355944 - RNA, 24 nt, Artificial Sequence
  Synthetic
gucucaaaugcacagaauaagaau

SEQ ID NO: 355945 - RNA, 18 nt, Artificial Sequence
  Synthetic
agaaaaccccauaagaau

SEQ ID NO: 355946 - RNA, 19 nt, Artificial Sequence
  Synthetic
aagaaaaccccauaagaau

SEQ ID NO: 355947 - RNA, 20 nt, Artificial Sequence
  Synthetic
caagaaaaccccauaagaau

SEQ ID NO: 355948 - RNA, 21 nt, Artificial Sequence
  Synthetic
gcaagaaaaccccauaagaau

SEQ ID NO: 355949 - RNA, 22 nt, Artificial Sequence
  Synthetic
agcaagaaaaccccauaagaau

SEQ ID NO: 355950 - RNA, 23 nt, Artificial Sequence
  Synthetic
aagcaagaaaaccccauaagaau

SEQ ID NO: 355951 - RNA, 24 nt, Artificial Sequence
  Synthetic
aaagcaagaaaaccccauaagaau

SEQ ID NO: 355952 - RNA, 18 nt, Artificial Sequence
  Synthetic
uaaaaaaaugauaagaau

SEQ ID NO: 355953 - RNA, 19 nt, Artificial Sequence
  Synthetic
auaaaaaaaugauaagaau

SEQ ID NO: 355954 - RNA, 20 nt, Artificial Sequence
  Synthetic
cauaaaaaaaugauaagaau

SEQ ID NO: 355955 - RNA, 21 nt, Artificial Sequence
  Synthetic
ccauaaaaaaaugauaagaau

SEQ ID NO: 355956 - RNA, 22 nt, Artificial Sequence
  Synthetic
accauaaaaaaaugauaagaau

SEQ ID NO: 355957 - RNA, 23 nt, Artificial Sequence
  Synthetic
caccauaaaaaaaugauaagaau

SEQ ID NO: 355958 - RNA, 24 nt, Artificial Sequence
  Synthetic
ucaccauaaaaaaaugauaagaau

SEQ ID NO: 355959 - RNA, 18 nt, Artificial Sequence
  Synthetic
agcuaucuuacuaagaau

SEQ ID NO: 355960 - RNA, 19 nt, Artificial Sequence
  Synthetic
aagcuaucuuacuaagaau

SEQ ID NO: 355961 - RNA, 20 nt, Artificial Sequence
  Synthetic
gaagcuaucuuacuaagaau

SEQ ID NO: 355962 - RNA, 21 nt, Artificial Sequence
  Synthetic
ugaagcuaucuuacuaagaau

SEQ ID NO: 355963 - RNA, 22 nt, Artificial Sequence
  Synthetic
augaagcuaucuuacuaagaau

SEQ ID NO: 355964 - RNA, 23 nt, Artificial Sequence
  Synthetic
aaugaagcuaucuuacuaagaau

SEQ ID NO: 355965 - RNA, 24 nt, Artificial Sequence
  Synthetic
gaaugaagcuaucuuacuaagaau

SEQ ID NO: 355966 - RNA, 18 nt, Artificial Sequence
  Synthetic
ugaauggguucuaagaau

SEQ ID NO: 355967 - RNA, 19 nt, Artificial Sequence
  Synthetic
augaauggguucuaagaau

SEQ ID NO: 355968 - RNA, 20 nt, Artificial Sequence
  Synthetic
caugaauggguucuaagaau

SEQ ID NO: 355969 - RNA, 21 nt, Artificial Sequence
  Synthetic
ucaugaauggguucuaagaau

SEQ ID NO: 355970 - RNA, 22 nt, Artificial Sequence
  Synthetic
cucaugaauggguucuaagaau

SEQ ID NO: 355971 - RNA, 23 nt, Artificial Sequence
  Synthetic
gcucaugaauggguucuaagaau

SEQ ID NO: 355972 - RNA, 24 nt, Artificial Sequence
  Synthetic
agcucaugaauggguucuaagaau

SEQ ID NO: 355973 - RNA, 18 nt, Artificial Sequence
  Synthetic
ccuuaugaccuuaagaau

SEQ ID NO: 355974 - RNA, 19 nt, Artificial Sequence
  Synthetic
uccuuaugaccuuaagaau

SEQ ID NO: 355975 - RNA, 20 nt, Artificial Sequence
  Synthetic
uuccuuaugaccuuaagaau

SEQ ID NO: 355976 - RNA, 21 nt, Artificial Sequence
  Synthetic
cuuccuuaugaccuuaagaau

SEQ ID NO: 355977 - RNA, 22 nt, Artificial Sequence
  Synthetic
acuuccuuaugaccuuaagaau

SEQ ID NO: 355978 - RNA, 23 nt, Artificial Sequence
  Synthetic
uacuuccuuaugaccuuaagaau

SEQ ID NO: 355979 - RNA, 24 nt, Artificial Sequence
  Synthetic
guacuuccuuaugaccuuaagaau

SEQ ID NO: 355980 - RNA, 18 nt, Artificial Sequence
  Synthetic
agacugaaauuuaagaau

SEQ ID NO: 355981 - RNA, 19 nt, Artificial Sequence
  Synthetic
uagacugaaauuuaagaau

SEQ ID NO: 355982 - RNA, 20 nt, Artificial Sequence
  Synthetic
uuagacugaaauuuaagaau

SEQ ID NO: 355983 - RNA, 21 nt, Artificial Sequence
  Synthetic
auuagacugaaauuuaagaau

SEQ ID NO: 355984 - RNA, 22 nt, Artificial Sequence
  Synthetic
uauuagacugaaauuuaagaau

SEQ ID NO: 355985 - RNA, 23 nt, Artificial Sequence
  Synthetic
cuauuagacugaaauuuaagaau

SEQ ID NO: 355986 - RNA, 24 nt, Artificial Sequence
  Synthetic
ucuauuagacugaaauuuaagaau

SEQ ID NO: 355987 - RNA, 18 nt, Artificial Sequence
  Synthetic
cagaagguuuuuaagaau

SEQ ID NO: 355988 - RNA, 19 nt, Artificial Sequence
  Synthetic
gcagaagguuuuuaagaau

SEQ ID NO: 355989 - RNA, 20 nt, Artificial Sequence
  Synthetic
agcagaagguuuuuaagaau

SEQ ID NO: 355990 - RNA, 21 nt, Artificial Sequence
  Synthetic
aagcagaagguuuuuaagaau

SEQ ID NO: 355991 - RNA, 22 nt, Artificial Sequence
  Synthetic
aaagcagaagguuuuuaagaau

SEQ ID NO: 355992 - RNA, 23 nt, Artificial Sequence
  Synthetic
gaaagcagaagguuuuuaagaau

SEQ ID NO: 355993 - RNA, 24 nt, Artificial Sequence
  Synthetic
agaaagcagaagguuuuuaagaau

SEQ ID NO: 355994 - RNA, 18 nt, Artificial Sequence
  Synthetic
uuguuagacacacagaau

SEQ ID NO: 355995 - RNA, 19 nt, Artificial Sequence
  Synthetic
uuuguuagacacacagaau

SEQ ID NO: 355996 - RNA, 20 nt, Artificial Sequence
  Synthetic
auuuguuagacacacagaau

SEQ ID NO: 355997 - RNA, 21 nt, Artificial Sequence
  Synthetic
uauuuguuagacacacagaau

SEQ ID NO: 355998 - RNA, 22 nt, Artificial Sequence
  Synthetic
guauuuguuagacacacagaau

SEQ ID NO: 355999 - RNA, 23 nt, Artificial Sequence
  Synthetic
gguauuuguuagacacacagaau

SEQ ID NO: 356000 - RNA, 24 nt, Artificial Sequence
  Synthetic
ggguauuuguuagacacacagaau

SEQ ID NO: 356001 - RNA, 18 nt, Artificial Sequence
  Synthetic
auccuugacccacagaau

SEQ ID NO: 356002 - RNA, 19 nt, Artificial Sequence
  Synthetic
aauccuugacccacagaau

SEQ ID NO: 356003 - RNA, 20 nt, Artificial Sequence
  Synthetic
aaauccuugacccacagaau

SEQ ID NO: 356004 - RNA, 21 nt, Artificial Sequence
  Synthetic
caaauccuugacccacagaau

SEQ ID NO: 356005 - RNA, 22 nt, Artificial Sequence
  Synthetic
ccaaauccuugacccacagaau

SEQ ID NO: 356006 - RNA, 23 nt, Artificial Sequence
  Synthetic
uccaaauccuugacccacagaau

SEQ ID NO: 356007 - RNA, 24 nt, Artificial Sequence
  Synthetic
auccaaauccuugacccacagaau

SEQ ID NO: 356008 - RNA, 18 nt, Artificial Sequence
  Synthetic
ugccuuucuucacagaau

SEQ ID NO: 356009 - RNA, 19 nt, Artificial Sequence
  Synthetic
augccuuucuucacagaau

SEQ ID NO: 356010 - RNA, 20 nt, Artificial Sequence
  Synthetic
aaugccuuucuucacagaau

SEQ ID NO: 356011 - RNA, 21 nt, Artificial Sequence
  Synthetic
caaugccuuucuucacagaau

SEQ ID NO: 356012 - RNA, 22 nt, Artificial Sequence
  Synthetic
ccaaugccuuucuucacagaau

SEQ ID NO: 356013 - RNA, 23 nt, Artificial Sequence
  Synthetic
accaaugccuuucuucacagaau

SEQ ID NO: 356014 - RNA, 24 nt, Artificial Sequence
  Synthetic
uaccaaugccuuucuucacagaau

SEQ ID NO: 356015 - RNA, 18 nt, Artificial Sequence
  Synthetic
cauugacgcagacagaau

SEQ ID NO: 356016 - RNA, 19 nt, Artificial Sequence
  Synthetic
acauugacgcagacagaau

SEQ ID NO: 356017 - RNA, 20 nt, Artificial Sequence
  Synthetic
uacauugacgcagacagaau

SEQ ID NO: 356018 - RNA, 21 nt, Artificial Sequence
  Synthetic
auacauugacgcagacagaau

SEQ ID NO: 356019 - RNA, 22 nt, Artificial Sequence
  Synthetic
aauacauugacgcagacagaau

SEQ ID NO: 356020 - RNA, 23 nt, Artificial Sequence
  Synthetic
aaauacauugacgcagacagaau

SEQ ID NO: 356021 - RNA, 24 nt, Artificial Sequence
  Synthetic
aaaauacauugacgcagacagaau

SEQ ID NO: 356022 - RNA, 18 nt, Artificial Sequence
  Synthetic
acaagcaaccuacagaau

SEQ ID NO: 356023 - RNA, 19 nt, Artificial Sequence
  Synthetic
aacaagcaaccuacagaau

SEQ ID NO: 356024 - RNA, 20 nt, Artificial Sequence
  Synthetic
gaacaagcaaccuacagaau

SEQ ID NO: 356025 - RNA, 21 nt, Artificial Sequence
  Synthetic
ugaacaagcaaccuacagaau

SEQ ID NO: 356026 - RNA, 22 nt, Artificial Sequence
  Synthetic
gugaacaagcaaccuacagaau

SEQ ID NO: 356027 - RNA, 23 nt, Artificial Sequence
  Synthetic
agugaacaagcaaccuacagaau

SEQ ID NO: 356028 - RNA, 24 nt, Artificial Sequence
  Synthetic
gagugaacaagcaaccuacagaau

SEQ ID NO: 356029 - RNA, 18 nt, Artificial Sequence
  Synthetic
uagcaugagaaccagaau

SEQ ID NO: 356030 - RNA, 19 nt, Artificial Sequence
  Synthetic
auagcaugagaaccagaau

SEQ ID NO: 356031 - RNA, 20 nt, Artificial Sequence
  Synthetic
aauagcaugagaaccagaau

SEQ ID NO: 356032 - RNA, 21 nt, Artificial Sequence
  Synthetic
aaauagcaugagaaccagaau

SEQ ID NO: 356033 - RNA, 22 nt, Artificial Sequence
  Synthetic
gaaauagcaugagaaccagaau

SEQ ID NO: 356034 - RNA, 23 nt, Artificial Sequence
  Synthetic
agaaauagcaugagaaccagaau

SEQ ID NO: 356035 - RNA, 24 nt, Artificial Sequence
  Synthetic
uagaaauagcaugagaaccagaau

SEQ ID NO: 356036 - RNA, 18 nt, Artificial Sequence
  Synthetic
uguuuaauuuaccagaau

SEQ ID NO: 356037 - RNA, 19 nt, Artificial Sequence
  Synthetic
cuguuuaauuuaccagaau

SEQ ID NO: 356038 - RNA, 20 nt, Artificial Sequence
  Synthetic
ucuguuuaauuuaccagaau

SEQ ID NO: 356039 - RNA, 21 nt, Artificial Sequence
  Synthetic
cucuguuuaauuuaccagaau

SEQ ID NO: 356040 - RNA, 22 nt, Artificial Sequence
  Synthetic
acucuguuuaauuuaccagaau

SEQ ID NO: 356041 - RNA, 23 nt, Artificial Sequence
  Synthetic
uacucuguuuaauuuaccagaau

SEQ ID NO: 356042 - RNA, 24 nt, Artificial Sequence
  Synthetic
uuacucuguuuaauuuaccagaau

SEQ ID NO: 356043 - RNA, 18 nt, Artificial Sequence
  Synthetic
auaaaaaucucccagaau

SEQ ID NO: 356044 - RNA, 19 nt, Artificial Sequence
  Synthetic
uauaaaaaucucccagaau

SEQ ID NO: 356045 - RNA, 20 nt, Artificial Sequence
  Synthetic
auauaaaaaucucccagaau

SEQ ID NO: 356046 - RNA, 21 nt, Artificial Sequence
  Synthetic
aauauaaaaaucucccagaau

SEQ ID NO: 356047 - RNA, 22 nt, Artificial Sequence
  Synthetic
aaauauaaaaaucucccagaau

SEQ ID NO: 356048 - RNA, 23 nt, Artificial Sequence
  Synthetic
aaaauauaaaaaucucccagaau

SEQ ID NO: 356049 - RNA, 24 nt, Artificial Sequence
  Synthetic
uaaaauauaaaaaucucccagaau

SEQ ID NO: 356050 - RNA, 18 nt, Artificial Sequence
  Synthetic
uccagggaacuccagaau

SEQ ID NO: 356051 - RNA, 19 nt, Artificial Sequence
  Synthetic
uuccagggaacuccagaau

SEQ ID NO: 356052 - RNA, 20 nt, Artificial Sequence
  Synthetic
guuccagggaacuccagaau

SEQ ID NO: 356053 - RNA, 21 nt, Artificial Sequence
  Synthetic
uguuccagggaacuccagaau

SEQ ID NO: 356054 - RNA, 22 nt, Artificial Sequence
  Synthetic
auguuccagggaacuccagaau

SEQ ID NO: 356055 - RNA, 23 nt, Artificial Sequence
  Synthetic
cauguuccagggaacuccagaau

SEQ ID NO: 356056 - RNA, 24 nt, Artificial Sequence
  Synthetic
acauguuccagggaacuccagaau

SEQ ID NO: 356057 - RNA, 18 nt, Artificial Sequence
  Synthetic
uuugacccuuuccagaau

SEQ ID NO: 356058 - RNA, 19 nt, Artificial Sequence
  Synthetic
uuuugacccuuuccagaau

SEQ ID NO: 356059 - RNA, 20 nt, Artificial Sequence
  Synthetic
cuuuugacccuuuccagaau

SEQ ID NO: 356060 - RNA, 21 nt, Artificial Sequence
  Synthetic
acuuuugacccuuuccagaau

SEQ ID NO: 356061 - RNA, 22 nt, Artificial Sequence
  Synthetic
uacuuuugacccuuuccagaau

SEQ ID NO: 356062 - RNA, 23 nt, Artificial Sequence
  Synthetic
uuacuuuugacccuuuccagaau

SEQ ID NO: 356063 - RNA, 24 nt, Artificial Sequence
  Synthetic
guuacuuuugacccuuuccagaau

SEQ ID NO: 356064 - RNA, 18 nt, Artificial Sequence
  Synthetic
ucuugagcccagcagaau

SEQ ID NO: 356065 - RNA, 19 nt, Artificial Sequence
  Synthetic
uucuugagcccagcagaau

SEQ ID NO: 356066 - RNA, 20 nt, Artificial Sequence
  Synthetic
auucuugagcccagcagaau

SEQ ID NO: 356067 - RNA, 21 nt, Artificial Sequence
  Synthetic
gauucuugagcccagcagaau

SEQ ID NO: 356068 - RNA, 22 nt, Artificial Sequence
  Synthetic
agauucuugagcccagcagaau

SEQ ID NO: 356069 - RNA, 23 nt, Artificial Sequence
  Synthetic
uagauucuugagcccagcagaau

SEQ ID NO: 356070 - RNA, 24 nt, Artificial Sequence
  Synthetic
auagauucuugagcccagcagaau

SEQ ID NO: 356071 - RNA, 18 nt, Artificial Sequence
  Synthetic
ugugucugucagcagaau

SEQ ID NO: 356072 - RNA, 19 nt, Artificial Sequence
  Synthetic
augugucugucagcagaau

SEQ ID NO: 356073 - RNA, 20 nt, Artificial Sequence
  Synthetic
caugugucugucagcagaau

SEQ ID NO: 356074 - RNA, 21 nt, Artificial Sequence
  Synthetic
gcaugugucugucagcagaau

SEQ ID NO: 356075 - RNA, 22 nt, Artificial Sequence
  Synthetic
agcaugugucugucagcagaau

SEQ ID NO: 356076 - RNA, 23 nt, Artificial Sequence
  Synthetic
aagcaugugucugucagcagaau

SEQ ID NO: 356077 - RNA, 24 nt, Artificial Sequence
  Synthetic
aaagcaugugucugucagcagaau

SEQ ID NO: 356078 - RNA, 18 nt, Artificial Sequence
  Synthetic
gcuguuuaguggcagaau

SEQ ID NO: 356079 - RNA, 19 nt, Artificial Sequence
  Synthetic
agcuguuuaguggcagaau

SEQ ID NO: 356080 - RNA, 20 nt, Artificial Sequence
  Synthetic
cagcuguuuaguggcagaau

SEQ ID NO: 356081 - RNA, 21 nt, Artificial Sequence
  Synthetic
ccagcuguuuaguggcagaau

SEQ ID NO: 356082 - RNA, 22 nt, Artificial Sequence
  Synthetic
accagcuguuuaguggcagaau

SEQ ID NO: 356083 - RNA, 23 nt, Artificial Sequence
  Synthetic
gaccagcuguuuaguggcagaau

SEQ ID NO: 356084 - RNA, 24 nt, Artificial Sequence
  Synthetic
ugaccagcuguuuaguggcagaau

SEQ ID NO: 356085 - RNA, 18 nt, Artificial Sequence
  Synthetic
uucccauuuuggcagaau

SEQ ID NO: 356086 - RNA, 19 nt, Artificial Sequence
  Synthetic
cuucccauuuuggcagaau

SEQ ID NO: 356087 - RNA, 20 nt, Artificial Sequence
  Synthetic
ucuucccauuuuggcagaau

SEQ ID NO: 356088 - RNA, 21 nt, Artificial Sequence
  Synthetic
uucuucccauuuuggcagaau

SEQ ID NO: 356089 - RNA, 22 nt, Artificial Sequence
  Synthetic
uuucuucccauuuuggcagaau

SEQ ID NO: 356090 - RNA, 23 nt, Artificial Sequence
  Synthetic
cuuucuucccauuuuggcagaau

SEQ ID NO: 356091 - RNA, 24 nt, Artificial Sequence
  Synthetic
gcuuucuucccauuuuggcagaau

SEQ ID NO: 356092 - RNA, 18 nt, Artificial Sequence
  Synthetic
cgucauugaaugcagaau

SEQ ID NO: 356093 - RNA, 19 nt, Artificial Sequence
  Synthetic
acgucauugaaugcagaau

SEQ ID NO: 356094 - RNA, 20 nt, Artificial Sequence
  Synthetic
gacgucauugaaugcagaau

SEQ ID NO: 356095 - RNA, 21 nt, Artificial Sequence
  Synthetic
ugacgucauugaaugcagaau

SEQ ID NO: 356096 - RNA, 22 nt, Artificial Sequence
  Synthetic
gugacgucauugaaugcagaau

SEQ ID NO: 356097 - RNA, 23 nt, Artificial Sequence
  Synthetic
ugugacgucauugaaugcagaau

SEQ ID NO: 356098 - RNA, 24 nt, Artificial Sequence
  Synthetic
gugugacgucauugaaugcagaau

SEQ ID NO: 356099 - RNA, 18 nt, Artificial Sequence
  Synthetic
ccuaagaucaugcagaau

SEQ ID NO: 356100 - RNA, 19 nt, Artificial Sequence
  Synthetic
cccuaagaucaugcagaau

SEQ ID NO: 356101 - RNA, 20 nt, Artificial Sequence
  Synthetic
ccccuaagaucaugcagaau

SEQ ID NO: 356102 - RNA, 21 nt, Artificial Sequence
  Synthetic
cccccuaagaucaugcagaau

SEQ ID NO: 356103 - RNA, 22 nt, Artificial Sequence
  Synthetic
ucccccuaagaucaugcagaau

SEQ ID NO: 356104 - RNA, 23 nt, Artificial Sequence
  Synthetic
gucccccuaagaucaugcagaau

SEQ ID NO: 356105 - RNA, 24 nt, Artificial Sequence
  Synthetic
ggucccccuaagaucaugcagaau

SEQ ID NO: 356106 - RNA, 18 nt, Artificial Sequence
  Synthetic
aaaaguugaaaucagaau

SEQ ID NO: 356107 - RNA, 19 nt, Artificial Sequence
  Synthetic
uaaaaguugaaaucagaau

SEQ ID NO: 356108 - RNA, 20 nt, Artificial Sequence
  Synthetic
auaaaaguugaaaucagaau

SEQ ID NO: 356109 - RNA, 21 nt, Artificial Sequence
  Synthetic
aauaaaaguugaaaucagaau

SEQ ID NO: 356110 - RNA, 22 nt, Artificial Sequence
  Synthetic
aaauaaaaguugaaaucagaau

SEQ ID NO: 356111 - RNA, 23 nt, Artificial Sequence
  Synthetic
aaaauaaaaguugaaaucagaau

SEQ ID NO: 356112 - RNA, 24 nt, Artificial Sequence
  Synthetic
aaaaauaaaaguugaaaucagaau

SEQ ID NO: 356113 - RNA, 18 nt, Artificial Sequence
  Synthetic
aagaaggaacaucagaau

SEQ ID NO: 356114 - RNA, 19 nt, Artificial Sequence
  Synthetic
uaagaaggaacaucagaau

SEQ ID NO: 356115 - RNA, 20 nt, Artificial Sequence
  Synthetic
auaagaaggaacaucagaau

SEQ ID NO: 356116 - RNA, 21 nt, Artificial Sequence
  Synthetic
cauaagaaggaacaucagaau

SEQ ID NO: 356117 - RNA, 22 nt, Artificial Sequence
  Synthetic
gcauaagaaggaacaucagaau

SEQ ID NO: 356118 - RNA, 23 nt, Artificial Sequence
  Synthetic
ggcauaagaaggaacaucagaau

SEQ ID NO: 356119 - RNA, 24 nt, Artificial Sequence
  Synthetic
gggcauaagaaggaacaucagaau

SEQ ID NO: 356120 - RNA, 18 nt, Artificial Sequence
  Synthetic
uguggcugggaucagaau

SEQ ID NO: 356121 - RNA, 19 nt, Artificial Sequence
  Synthetic
cuguggcugggaucagaau

SEQ ID NO: 356122 - RNA, 20 nt, Artificial Sequence
  Synthetic
acuguggcugggaucagaau

SEQ ID NO: 356123 - RNA, 21 nt, Artificial Sequence
  Synthetic
gacuguggcugggaucagaau

SEQ ID NO: 356124 - RNA, 22 nt, Artificial Sequence
  Synthetic
ugacuguggcugggaucagaau

SEQ ID NO: 356125 - RNA, 23 nt, Artificial Sequence
  Synthetic
augacuguggcugggaucagaau

SEQ ID NO: 356126 - RNA, 24 nt, Artificial Sequence
  Synthetic
gaugacuguggcugggaucagaau

SEQ ID NO: 356127 - RNA, 18 nt, Artificial Sequence
  Synthetic
cacguccgugaucagaau

SEQ ID NO: 356128 - RNA, 19 nt, Artificial Sequence
  Synthetic
ccacguccgugaucagaau

SEQ ID NO: 356129 - RNA, 20 nt, Artificial Sequence
  Synthetic
accacguccgugaucagaau

SEQ ID NO: 356130 - RNA, 21 nt, Artificial Sequence
  Synthetic
aaccacguccgugaucagaau

SEQ ID NO: 356131 - RNA, 22 nt, Artificial Sequence
  Synthetic
caaccacguccgugaucagaau

SEQ ID NO: 356132 - RNA, 23 nt, Artificial Sequence
  Synthetic
acaaccacguccgugaucagaau

SEQ ID NO: 356133 - RNA, 24 nt, Artificial Sequence
  Synthetic
uacaaccacguccgugaucagaau

SEQ ID NO: 356134 - RNA, 18 nt, Artificial Sequence
  Synthetic
ucagacaguacucagaau

SEQ ID NO: 356135 - RNA, 19 nt, Artificial Sequence
  Synthetic
aucagacaguacucagaau

SEQ ID NO: 356136 - RNA, 20 nt, Artificial Sequence
  Synthetic
aaucagacaguacucagaau

SEQ ID NO: 356137 - RNA, 21 nt, Artificial Sequence
  Synthetic
gaaucagacaguacucagaau

SEQ ID NO: 356138 - RNA, 22 nt, Artificial Sequence
  Synthetic
ugaaucagacaguacucagaau

SEQ ID NO: 356139 - RNA, 23 nt, Artificial Sequence
  Synthetic
augaaucagacaguacucagaau

SEQ ID NO: 356140 - RNA, 24 nt, Artificial Sequence
  Synthetic
caugaaucagacaguacucagaau

SEQ ID NO: 356141 - RNA, 18 nt, Artificial Sequence
  Synthetic
auuguugugucucagaau

SEQ ID NO: 356142 - RNA, 19 nt, Artificial Sequence
  Synthetic
uauuguugugucucagaau

SEQ ID NO: 356143 - RNA, 20 nt, Artificial Sequence
  Synthetic
auauuguugugucucagaau

SEQ ID NO: 356144 - RNA, 21 nt, Artificial Sequence
  Synthetic
aauauuguugugucucagaau

SEQ ID NO: 356145 - RNA, 22 nt, Artificial Sequence
  Synthetic
caauauuguugugucucagaau

SEQ ID NO: 356146 - RNA, 23 nt, Artificial Sequence
  Synthetic
ucaauauuguugugucucagaau

SEQ ID NO: 356147 - RNA, 24 nt, Artificial Sequence
  Synthetic
uucaauauuguugugucucagaau

SEQ ID NO: 356148 - RNA, 18 nt, Artificial Sequence
  Synthetic
ugauucuaaggucagaau

SEQ ID NO: 356149 - RNA, 19 nt, Artificial Sequence
  Synthetic
uugauucuaaggucagaau

SEQ ID NO: 356150 - RNA, 20 nt, Artificial Sequence
  Synthetic
auugauucuaaggucagaau

SEQ ID NO: 356151 - RNA, 21 nt, Artificial Sequence
  Synthetic
aauugauucuaaggucagaau

SEQ ID NO: 356152 - RNA, 22 nt, Artificial Sequence
  Synthetic
caauugauucuaaggucagaau

SEQ ID NO: 356153 - RNA, 23 nt, Artificial Sequence
  Synthetic
acaauugauucuaaggucagaau

SEQ ID NO: 356154 - RNA, 24 nt, Artificial Sequence
  Synthetic
cacaauugauucuaaggucagaau

SEQ ID NO: 356155 - RNA, 18 nt, Artificial Sequence
  Synthetic
agauccaaaauucagaau

SEQ ID NO: 356156 - RNA, 19 nt, Artificial Sequence
  Synthetic
aagauccaaaauucagaau

SEQ ID NO: 356157 - RNA, 20 nt, Artificial Sequence
  Synthetic
aaagauccaaaauucagaau

SEQ ID NO: 356158 - RNA, 21 nt, Artificial Sequence
  Synthetic
uaaagauccaaaauucagaau

SEQ ID NO: 356159 - RNA, 22 nt, Artificial Sequence
  Synthetic
uuaaagauccaaaauucagaau

SEQ ID NO: 356160 - RNA, 23 nt, Artificial Sequence
  Synthetic
auuaaagauccaaaauucagaau

SEQ ID NO: 356161 - RNA, 24 nt, Artificial Sequence
  Synthetic
uauuaaagauccaaaauucagaau

SEQ ID NO: 356162 - RNA, 18 nt, Artificial Sequence
  Synthetic
gacaugagauuucagaau

SEQ ID NO: 356163 - RNA, 19 nt, Artificial Sequence
  Synthetic
ugacaugagauuucagaau

SEQ ID NO: 356164 - RNA, 20 nt, Artificial Sequence
  Synthetic
gugacaugagauuucagaau

SEQ ID NO: 356165 - RNA, 21 nt, Artificial Sequence
  Synthetic
ggugacaugagauuucagaau

SEQ ID NO: 356166 - RNA, 22 nt, Artificial Sequence
  Synthetic
aggugacaugagauuucagaau

SEQ ID NO: 356167 - RNA, 23 nt, Artificial Sequence
  Synthetic
aaggugacaugagauuucagaau

SEQ ID NO: 356168 - RNA, 24 nt, Artificial Sequence
  Synthetic
caaggugacaugagauuucagaau

SEQ ID NO: 356169 - RNA, 18 nt, Artificial Sequence
  Synthetic
ugcuugaaguuucagaau

SEQ ID NO: 356170 - RNA, 19 nt, Artificial Sequence
  Synthetic
uugcuugaaguuucagaau

SEQ ID NO: 356171 - RNA, 20 nt, Artificial Sequence
  Synthetic
guugcuugaaguuucagaau

SEQ ID NO: 356172 - RNA, 21 nt, Artificial Sequence
  Synthetic
gguugcuugaaguuucagaau

SEQ ID NO: 356173 - RNA, 22 nt, Artificial Sequence
  Synthetic
ugguugcuugaaguuucagaau

SEQ ID NO: 356174 - RNA, 23 nt, Artificial Sequence
  Synthetic
uugguugcuugaaguuucagaau

SEQ ID NO: 356175 - RNA, 24 nt, Artificial Sequence
  Synthetic
auugguugcuugaaguuucagaau

SEQ ID NO: 356176 - RNA, 18 nt, Artificial Sequence
  Synthetic
aaaaucuggaaagagaau

SEQ ID NO: 356177 - RNA, 19 nt, Artificial Sequence
  Synthetic
uaaaaucuggaaagagaau

SEQ ID NO: 356178 - RNA, 20 nt, Artificial Sequence
  Synthetic
uuaaaaucuggaaagagaau

SEQ ID NO: 356179 - RNA, 21 nt, Artificial Sequence
  Synthetic
cuuaaaaucuggaaagagaau

SEQ ID NO: 356180 - RNA, 22 nt, Artificial Sequence
  Synthetic
acuuaaaaucuggaaagagaau

SEQ ID NO: 356181 - RNA, 23 nt, Artificial Sequence
  Synthetic
aacuuaaaaucuggaaagagaau

SEQ ID NO: 356182 - RNA, 24 nt, Artificial Sequence
  Synthetic
aaacuuaaaaucuggaaagagaau

SEQ ID NO: 356183 - RNA, 18 nt, Artificial Sequence
  Synthetic
cuggaggaagaagagaau

SEQ ID NO: 356184 - RNA, 19 nt, Artificial Sequence
  Synthetic
gcuggaggaagaagagaau

SEQ ID NO: 356185 - RNA, 20 nt, Artificial Sequence
  Synthetic
agcuggaggaagaagagaau

SEQ ID NO: 356186 - RNA, 21 nt, Artificial Sequence
  Synthetic
gagcuggaggaagaagagaau

SEQ ID NO: 356187 - RNA, 22 nt, Artificial Sequence
  Synthetic
ggagcuggaggaagaagagaau

SEQ ID NO: 356188 - RNA, 23 nt, Artificial Sequence
  Synthetic
aggagcuggaggaagaagagaau

SEQ ID NO: 356189 - RNA, 24 nt, Artificial Sequence
  Synthetic
caggagcuggaggaagaagagaau

SEQ ID NO: 356190 - RNA, 18 nt, Artificial Sequence
  Synthetic
uaagagagguaagagaau

SEQ ID NO: 356191 - RNA, 19 nt, Artificial Sequence
  Synthetic
uuaagagagguaagagaau

SEQ ID NO: 356192 - RNA, 20 nt, Artificial Sequence
  Synthetic
uuuaagagagguaagagaau

SEQ ID NO: 356193 - RNA, 21 nt, Artificial Sequence
  Synthetic
uuuuaagagagguaagagaau

SEQ ID NO: 356194 - RNA, 22 nt, Artificial Sequence
  Synthetic
uuuuuaagagagguaagagaau

SEQ ID NO: 356195 - RNA, 23 nt, Artificial Sequence
  Synthetic
auuuuuaagagagguaagagaau

SEQ ID NO: 356196 - RNA, 24 nt, Artificial Sequence
  Synthetic
uauuuuuaagagagguaagagaau

SEQ ID NO: 356197 - RNA, 18 nt, Artificial Sequence
  Synthetic
gauacacacagagagaau

SEQ ID NO: 356198 - RNA, 19 nt, Artificial Sequence
  Synthetic
agauacacacagagagaau

SEQ ID NO: 356199 - RNA, 20 nt, Artificial Sequence
  Synthetic
cagauacacacagagagaau

SEQ ID NO: 356200 - RNA, 21 nt, Artificial Sequence
  Synthetic
acagauacacacagagagaau

SEQ ID NO: 356201 - RNA, 22 nt, Artificial Sequence
  Synthetic
cacagauacacacagagagaau

SEQ ID NO: 356202 - RNA, 23 nt, Artificial Sequence
  Synthetic
acacagauacacacagagagaau

SEQ ID NO: 356203 - RNA, 24 nt, Artificial Sequence
  Synthetic
cacacagauacacacagagagaau

SEQ ID NO: 356204 - RNA, 18 nt, Artificial Sequence
  Synthetic
gagagagagagagagaau

SEQ ID NO: 356205 - RNA, 19 nt, Artificial Sequence
  Synthetic
agagagagagagagagaau

SEQ ID NO: 356206 - RNA, 20 nt, Artificial Sequence
  Synthetic
gagagagagagagagagaau

SEQ ID NO: 356207 - RNA, 21 nt, Artificial Sequence
  Synthetic
agagagagagagagagagaau

SEQ ID NO: 356208 - RNA, 22 nt, Artificial Sequence
  Synthetic
gagagagagagagagagagaau

SEQ ID NO: 356209 - RNA, 23 nt, Artificial Sequence
  Synthetic
agagagagagagagagagagaau

SEQ ID NO: 356210 - RNA, 24 nt, Artificial Sequence
  Synthetic
gagagagagagagagagagagaau

SEQ ID NO: 356211 - RNA, 18 nt, Artificial Sequence
  Synthetic
aaccugugaguagagaau

SEQ ID NO: 356212 - RNA, 19 nt, Artificial Sequence
  Synthetic
aaaccugugaguagagaau

SEQ ID NO: 356213 - RNA, 20 nt, Artificial Sequence
  Synthetic
caaaccugugaguagagaau

SEQ ID NO: 356214 - RNA, 21 nt, Artificial Sequence
  Synthetic
gcaaaccugugaguagagaau

SEQ ID NO: 356215 - RNA, 22 nt, Artificial Sequence
  Synthetic
agcaaaccugugaguagagaau

SEQ ID NO: 356216 - RNA, 23 nt, Artificial Sequence
  Synthetic
uagcaaaccugugaguagagaau

SEQ ID NO: 356217 - RNA, 24 nt, Artificial Sequence
  Synthetic
uuagcaaaccugugaguagagaau

SEQ ID NO: 356218 - RNA, 18 nt, Artificial Sequence
  Synthetic
uaggggaaaagcgagaau

SEQ ID NO: 356219 - RNA, 19 nt, Artificial Sequence
  Synthetic
guaggggaaaagcgagaau

SEQ ID NO: 356220 - RNA, 20 nt, Artificial Sequence
  Synthetic
aguaggggaaaagcgagaau

SEQ ID NO: 356221 - RNA, 21 nt, Artificial Sequence
  Synthetic
aaguaggggaaaagcgagaau

SEQ ID NO: 356222 - RNA, 22 nt, Artificial Sequence
  Synthetic
gaaguaggggaaaagcgagaau

SEQ ID NO: 356223 - RNA, 23 nt, Artificial Sequence
  Synthetic
ggaaguaggggaaaagcgagaau

SEQ ID NO: 356224 - RNA, 24 nt, Artificial Sequence
  Synthetic
gggaaguaggggaaaagcgagaau

SEQ ID NO: 356225 - RNA, 18 nt, Artificial Sequence
  Synthetic
uucaguuccaaggagaau

SEQ ID NO: 356226 - RNA, 19 nt, Artificial Sequence
  Synthetic
auucaguuccaaggagaau

SEQ ID NO: 356227 - RNA, 20 nt, Artificial Sequence
  Synthetic
cauucaguuccaaggagaau

SEQ ID NO: 356228 - RNA, 21 nt, Artificial Sequence
  Synthetic
ucauucaguuccaaggagaau

SEQ ID NO: 356229 - RNA, 22 nt, Artificial Sequence
  Synthetic
cucauucaguuccaaggagaau

SEQ ID NO: 356230 - RNA, 23 nt, Artificial Sequence
  Synthetic
acucauucaguuccaaggagaau

SEQ ID NO: 356231 - RNA, 24 nt, Artificial Sequence
  Synthetic
aacucauucaguuccaaggagaau

SEQ ID NO: 356232 - RNA, 18 nt, Artificial Sequence
  Synthetic
gguucaugucaggagaau

SEQ ID NO: 356233 - RNA, 19 nt, Artificial Sequence
  Synthetic
ugguucaugucaggagaau

SEQ ID NO: 356234 - RNA, 20 nt, Artificial Sequence
  Synthetic
augguucaugucaggagaau

SEQ ID NO: 356235 - RNA, 21 nt, Artificial Sequence
  Synthetic
uaugguucaugucaggagaau

SEQ ID NO: 356236 - RNA, 22 nt, Artificial Sequence
  Synthetic
auaugguucaugucaggagaau

SEQ ID NO: 356237 - RNA, 23 nt, Artificial Sequence
  Synthetic
uauaugguucaugucaggagaau

SEQ ID NO: 356238 - RNA, 24 nt, Artificial Sequence
  Synthetic
auauaugguucaugucaggagaau

SEQ ID NO: 356239 - RNA, 18 nt, Artificial Sequence
  Synthetic
cuauuaauucaggagaau

SEQ ID NO: 356240 - RNA, 19 nt, Artificial Sequence
  Synthetic
acuauuaauucaggagaau

SEQ ID NO: 356241 - RNA, 20 nt, Artificial Sequence
  Synthetic
aacuauuaauucaggagaau

SEQ ID NO: 356242 - RNA, 21 nt, Artificial Sequence
  Synthetic
caacuauuaauucaggagaau

SEQ ID NO: 356243 - RNA, 22 nt, Artificial Sequence
  Synthetic
gcaacuauuaauucaggagaau

SEQ ID NO: 356244 - RNA, 23 nt, Artificial Sequence
  Synthetic
agcaacuauuaauucaggagaau

SEQ ID NO: 356245 - RNA, 24 nt, Artificial Sequence
  Synthetic
uagcaacuauuaauucaggagaau

SEQ ID NO: 356246 - RNA, 18 nt, Artificial Sequence
  Synthetic
aguaaauaagaggagaau

SEQ ID NO: 356247 - RNA, 19 nt, Artificial Sequence
  Synthetic
gaguaaauaagaggagaau

SEQ ID NO: 356248 - RNA, 20 nt, Artificial Sequence
  Synthetic
ugaguaaauaagaggagaau

SEQ ID NO: 356249 - RNA, 21 nt, Artificial Sequence
  Synthetic
gugaguaaauaagaggagaau

SEQ ID NO: 356250 - RNA, 22 nt, Artificial Sequence
  Synthetic
ggugaguaaauaagaggagaau

SEQ ID NO: 356251 - RNA, 23 nt, Artificial Sequence
  Synthetic
gggugaguaaauaagaggagaau

SEQ ID NO: 356252 - RNA, 24 nt, Artificial Sequence
  Synthetic
ugggugaguaaauaagaggagaau

SEQ ID NO: 356253 - RNA, 18 nt, Artificial Sequence
  Synthetic
acugaauaagaggagaau

SEQ ID NO: 356254 - RNA, 19 nt, Artificial Sequence
  Synthetic
aacugaauaagaggagaau

SEQ ID NO: 356255 - RNA, 20 nt, Artificial Sequence
  Synthetic
aaacugaauaagaggagaau

SEQ ID NO: 356256 - RNA, 21 nt, Artificial Sequence
  Synthetic
gaaacugaauaagaggagaau

SEQ ID NO: 356257 - RNA, 22 nt, Artificial Sequence
  Synthetic
ggaaacugaauaagaggagaau

SEQ ID NO: 356258 - RNA, 23 nt, Artificial Sequence
  Synthetic
aggaaacugaauaagaggagaau

SEQ ID NO: 356259 - RNA, 24 nt, Artificial Sequence
  Synthetic
gaggaaacugaauaagaggagaau

SEQ ID NO: 356260 - RNA, 18 nt, Artificial Sequence
  Synthetic
gaaggacagagggagaau

SEQ ID NO: 356261 - RNA, 19 nt, Artificial Sequence
  Synthetic
ggaaggacagagggagaau

SEQ ID NO: 356262 - RNA, 20 nt, Artificial Sequence
  Synthetic
aggaaggacagagggagaau

SEQ ID NO: 356263 - RNA, 21 nt, Artificial Sequence
  Synthetic
caggaaggacagagggagaau

SEQ ID NO: 356264 - RNA, 22 nt, Artificial Sequence
  Synthetic
acaggaaggacagagggagaau

SEQ ID NO: 356265 - RNA, 23 nt, Artificial Sequence
  Synthetic
aacaggaaggacagagggagaau

SEQ ID NO: 356266 - RNA, 24 nt, Artificial Sequence
  Synthetic
gaacaggaaggacagagggagaau

SEQ ID NO: 356267 - RNA, 18 nt, Artificial Sequence
  Synthetic
auuuagccccgggagaau

SEQ ID NO: 356268 - RNA, 19 nt, Artificial Sequence
  Synthetic
uauuuagccccgggagaau

SEQ ID NO: 356269 - RNA, 20 nt, Artificial Sequence
  Synthetic
auauuuagccccgggagaau

SEQ ID NO: 356270 - RNA, 21 nt, Artificial Sequence
  Synthetic
cauauuuagccccgggagaau

SEQ ID NO: 356271 - RNA, 22 nt, Artificial Sequence
  Synthetic
ucauauuuagccccgggagaau

SEQ ID NO: 356272 - RNA, 23 nt, Artificial Sequence
  Synthetic
aucauauuuagccccgggagaau

SEQ ID NO: 356273 - RNA, 24 nt, Artificial Sequence
  Synthetic
gaucauauuuagccccgggagaau

SEQ ID NO: 356274 - RNA, 18 nt, Artificial Sequence
  Synthetic
ggcucuuaaugggagaau

SEQ ID NO: 356275 - RNA, 19 nt, Artificial Sequence
  Synthetic
uggcucuuaaugggagaau

SEQ ID NO: 356276 - RNA, 20 nt, Artificial Sequence
  Synthetic
auggcucuuaaugggagaau

SEQ ID NO: 356277 - RNA, 21 nt, Artificial Sequence
  Synthetic
uauggcucuuaaugggagaau

SEQ ID NO: 356278 - RNA, 22 nt, Artificial Sequence
  Synthetic
cuauggcucuuaaugggagaau

SEQ ID NO: 356279 - RNA, 23 nt, Artificial Sequence
  Synthetic
acuauggcucuuaaugggagaau

SEQ ID NO: 356280 - RNA, 24 nt, Artificial Sequence
  Synthetic
gacuauggcucuuaaugggagaau

SEQ ID NO: 356281 - RNA, 18 nt, Artificial Sequence
  Synthetic
aacuggagaugggagaau

SEQ ID NO: 356282 - RNA, 19 nt, Artificial Sequence
  Synthetic
gaacuggagaugggagaau

SEQ ID NO: 356283 - RNA, 20 nt, Artificial Sequence
  Synthetic
agaacuggagaugggagaau

SEQ ID NO: 356284 - RNA, 21 nt, Artificial Sequence
  Synthetic
gagaacuggagaugggagaau

SEQ ID NO: 356285 - RNA, 22 nt, Artificial Sequence
  Synthetic
agagaacuggagaugggagaau

SEQ ID NO: 356286 - RNA, 23 nt, Artificial Sequence
  Synthetic
gagagaacuggagaugggagaau

SEQ ID NO: 356287 - RNA, 24 nt, Artificial Sequence
  Synthetic
agagagaacuggagaugggagaau

SEQ ID NO: 356288 - RNA, 18 nt, Artificial Sequence
  Synthetic
gcaacauccuuggagaau

SEQ ID NO: 356289 - RNA, 19 nt, Artificial Sequence
  Synthetic
ugcaacauccuuggagaau

SEQ ID NO: 356290 - RNA, 20 nt, Artificial Sequence
  Synthetic
gugcaacauccuuggagaau

SEQ ID NO: 356291 - RNA, 21 nt, Artificial Sequence
  Synthetic
agugcaacauccuuggagaau

SEQ ID NO: 356292 - RNA, 22 nt, Artificial Sequence
  Synthetic
cagugcaacauccuuggagaau

SEQ ID NO: 356293 - RNA, 23 nt, Artificial Sequence
  Synthetic
ccagugcaacauccuuggagaau

SEQ ID NO: 356294 - RNA, 24 nt, Artificial Sequence
  Synthetic
gccagugcaacauccuuggagaau

SEQ ID NO: 356295 - RNA, 18 nt, Artificial Sequence
  Synthetic
cuucacuaaaaugagaau

SEQ ID NO: 356296 - RNA, 19 nt, Artificial Sequence
  Synthetic
ccuucacuaaaaugagaau

SEQ ID NO: 356297 - RNA, 20 nt, Artificial Sequence
  Synthetic
accuucacuaaaaugagaau

SEQ ID NO: 356298 - RNA, 21 nt, Artificial Sequence
  Synthetic
aaccuucacuaaaaugagaau

SEQ ID NO: 356299 - RNA, 22 nt, Artificial Sequence
  Synthetic
uaaccuucacuaaaaugagaau

SEQ ID NO: 356300 - RNA, 23 nt, Artificial Sequence
  Synthetic
uuaaccuucacuaaaaugagaau

SEQ ID NO: 356301 - RNA, 24 nt, Artificial Sequence
  Synthetic
uuuaaccuucacuaaaaugagaau

SEQ ID NO: 356302 - RNA, 18 nt, Artificial Sequence
  Synthetic
aauggugaggaugagaau

SEQ ID NO: 356303 - RNA, 19 nt, Artificial Sequence
  Synthetic
caauggugaggaugagaau

SEQ ID NO: 356304 - RNA, 20 nt, Artificial Sequence
  Synthetic
gcaauggugaggaugagaau

SEQ ID NO: 356305 - RNA, 21 nt, Artificial Sequence
  Synthetic
agcaauggugaggaugagaau

SEQ ID NO: 356306 - RNA, 22 nt, Artificial Sequence
  Synthetic
uagcaauggugaggaugagaau

SEQ ID NO: 356307 - RNA, 23 nt, Artificial Sequence
  Synthetic
auagcaauggugaggaugagaau

SEQ ID NO: 356308 - RNA, 24 nt, Artificial Sequence
  Synthetic
aauagcaauggugaggaugagaau

SEQ ID NO: 356309 - RNA, 18 nt, Artificial Sequence
  Synthetic
cuuuugacuuaugagaau

SEQ ID NO: 356310 - RNA, 19 nt, Artificial Sequence
  Synthetic
ccuuuugacuuaugagaau

SEQ ID NO: 356311 - RNA, 20 nt, Artificial Sequence
  Synthetic
accuuuugacuuaugagaau

SEQ ID NO: 356312 - RNA, 21 nt, Artificial Sequence
  Synthetic
uaccuuuugacuuaugagaau

SEQ ID NO: 356313 - RNA, 22 nt, Artificial Sequence
  Synthetic
guaccuuuugacuuaugagaau

SEQ ID NO: 356314 - RNA, 23 nt, Artificial Sequence
  Synthetic
uguaccuuuugacuuaugagaau

SEQ ID NO: 356315 - RNA, 24 nt, Artificial Sequence
  Synthetic
uuguaccuuuugacuuaugagaau

SEQ ID NO: 356316 - RNA, 18 nt, Artificial Sequence
  Synthetic
agaugagaaacugagaau

SEQ ID NO: 356317 - RNA, 19 nt, Artificial Sequence
  Synthetic
cagaugagaaacugagaau

SEQ ID NO: 356318 - RNA, 20 nt, Artificial Sequence
  Synthetic
gcagaugagaaacugagaau

SEQ ID NO: 356319 - RNA, 21 nt, Artificial Sequence
  Synthetic
ugcagaugagaaacugagaau

SEQ ID NO: 356320 - RNA, 22 nt, Artificial Sequence
  Synthetic
uugcagaugagaaacugagaau

SEQ ID NO: 356321 - RNA, 23 nt, Artificial Sequence
  Synthetic
auugcagaugagaaacugagaau

SEQ ID NO: 356322 - RNA, 24 nt, Artificial Sequence
  Synthetic
uauugcagaugagaaacugagaau

SEQ ID NO: 356323 - RNA, 18 nt, Artificial Sequence
  Synthetic
gugugguagugugagaau

SEQ ID NO: 356324 - RNA, 19 nt, Artificial Sequence
  Synthetic
agugugguagugugagaau

SEQ ID NO: 356325 - RNA, 20 nt, Artificial Sequence
  Synthetic
cagugugguagugugagaau

SEQ ID NO: 356326 - RNA, 21 nt, Artificial Sequence
  Synthetic
ucagugugguagugugagaau

SEQ ID NO: 356327 - RNA, 22 nt, Artificial Sequence
  Synthetic
gucagugugguagugugagaau

SEQ ID NO: 356328 - RNA, 23 nt, Artificial Sequence
  Synthetic
agucagugugguagugugagaau

SEQ ID NO: 356329 - RNA, 24 nt, Artificial Sequence
  Synthetic
uagucagugugguagugugagaau

SEQ ID NO: 356330 - RNA, 18 nt, Artificial Sequence
  Synthetic
uaaaugcagauugagaau

SEQ ID NO: 356331 - RNA, 19 nt, Artificial Sequence
  Synthetic
guaaaugcagauugagaau

SEQ ID NO: 356332 - RNA, 20 nt, Artificial Sequence
  Synthetic
gguaaaugcagauugagaau

SEQ ID NO: 356333 - RNA, 21 nt, Artificial Sequence
  Synthetic
agguaaaugcagauugagaau

SEQ ID NO: 356334 - RNA, 22 nt, Artificial Sequence
  Synthetic
gagguaaaugcagauugagaau

SEQ ID NO: 356335 - RNA, 23 nt, Artificial Sequence
  Synthetic
ugagguaaaugcagauugagaau

SEQ ID NO: 356336 - RNA, 24 nt, Artificial Sequence
  Synthetic
cugagguaaaugcagauugagaau

SEQ ID NO: 356337 - RNA, 18 nt, Artificial Sequence
  Synthetic
aucugacaucaauagaau

SEQ ID NO: 356338 - RNA, 19 nt, Artificial Sequence
  Synthetic
aaucugacaucaauagaau

SEQ ID NO: 356339 - RNA, 20 nt, Artificial Sequence
  Synthetic
aaaucugacaucaauagaau

SEQ ID NO: 356340 - RNA, 21 nt, Artificial Sequence
  Synthetic
caaaucugacaucaauagaau

SEQ ID NO: 356341 - RNA, 22 nt, Artificial Sequence
  Synthetic
ccaaaucugacaucaauagaau

SEQ ID NO: 356342 - RNA, 23 nt, Artificial Sequence
  Synthetic
gccaaaucugacaucaauagaau

SEQ ID NO: 356343 - RNA, 24 nt, Artificial Sequence
  Synthetic
ugccaaaucugacaucaauagaau

SEQ ID NO: 356344 - RNA, 18 nt, Artificial Sequence
  Synthetic
aaaaacucauaauagaau

SEQ ID NO: 356345 - RNA, 19 nt, Artificial Sequence
  Synthetic
gaaaaacucauaauagaau

SEQ ID NO: 356346 - RNA, 20 nt, Artificial Sequence
  Synthetic
ugaaaaacucauaauagaau

SEQ ID NO: 356347 - RNA, 21 nt, Artificial Sequence
  Synthetic
cugaaaaacucauaauagaau

SEQ ID NO: 356348 - RNA, 22 nt, Artificial Sequence
  Synthetic
ucugaaaaacucauaauagaau

SEQ ID NO: 356349 - RNA, 23 nt, Artificial Sequence
  Synthetic
cucugaaaaacucauaauagaau

SEQ ID NO: 356350 - RNA, 24 nt, Artificial Sequence
  Synthetic
ccucugaaaaacucauaauagaau

SEQ ID NO: 356351 - RNA, 18 nt, Artificial Sequence
  Synthetic
acuuccagauaauagaau

SEQ ID NO: 356352 - RNA, 19 nt, Artificial Sequence
  Synthetic
uacuuccagauaauagaau

SEQ ID NO: 356353 - RNA, 20 nt, Artificial Sequence
  Synthetic
uuacuuccagauaauagaau

SEQ ID NO: 356354 - RNA, 21 nt, Artificial Sequence
  Synthetic
cuuacuuccagauaauagaau

SEQ ID NO: 356355 - RNA, 22 nt, Artificial Sequence
  Synthetic
acuuacuuccagauaauagaau

SEQ ID NO: 356356 - RNA, 23 nt, Artificial Sequence
  Synthetic
aacuuacuuccagauaauagaau

SEQ ID NO: 356357 - RNA, 24 nt, Artificial Sequence
  Synthetic
uaacuuacuuccagauaauagaau

SEQ ID NO: 356358 - RNA, 18 nt, Artificial Sequence
  Synthetic
ugcuuccacagauagaau

SEQ ID NO: 356359 - RNA, 19 nt, Artificial Sequence
  Synthetic
augcuuccacagauagaau

SEQ ID NO: 356360 - RNA, 20 nt, Artificial Sequence
  Synthetic
aaugcuuccacagauagaau

SEQ ID NO: 356361 - RNA, 21 nt, Artificial Sequence
  Synthetic
aaaugcuuccacagauagaau

SEQ ID NO: 356362 - RNA, 22 nt, Artificial Sequence
  Synthetic
gaaaugcuuccacagauagaau

SEQ ID NO: 356363 - RNA, 23 nt, Artificial Sequence
  Synthetic
ugaaaugcuuccacagauagaau

SEQ ID NO: 356364 - RNA, 24 nt, Artificial Sequence
  Synthetic
augaaaugcuuccacagauagaau

SEQ ID NO: 356365 - RNA, 18 nt, Artificial Sequence
  Synthetic
acuuaagauagauagaau

SEQ ID NO: 356366 - RNA, 19 nt, Artificial Sequence
  Synthetic
aacuuaagauagauagaau

SEQ ID NO: 356367 - RNA, 20 nt, Artificial Sequence
  Synthetic
gaacuuaagauagauagaau

SEQ ID NO: 356368 - RNA, 21 nt, Artificial Sequence
  Synthetic
agaacuuaagauagauagaau

SEQ ID NO: 356369 - RNA, 22 nt, Artificial Sequence
  Synthetic
uagaacuuaagauagauagaau

SEQ ID NO: 356370 - RNA, 23 nt, Artificial Sequence
  Synthetic
auagaacuuaagauagauagaau

SEQ ID NO: 356371 - RNA, 24 nt, Artificial Sequence
  Synthetic
gauagaacuuaagauagauagaau

SEQ ID NO: 356372 - RNA, 18 nt, Artificial Sequence
  Synthetic
uguucaaagugauagaau

SEQ ID NO: 356373 - RNA, 19 nt, Artificial Sequence
  Synthetic
uuguucaaagugauagaau

SEQ ID NO: 356374 - RNA, 20 nt, Artificial Sequence
  Synthetic
auuguucaaagugauagaau

SEQ ID NO: 356375 - RNA, 21 nt, Artificial Sequence
  Synthetic
uauuguucaaagugauagaau

SEQ ID NO: 356376 - RNA, 22 nt, Artificial Sequence
  Synthetic
uuauuguucaaagugauagaau

SEQ ID NO: 356377 - RNA, 23 nt, Artificial Sequence
  Synthetic
auuauuguucaaagugauagaau

SEQ ID NO: 356378 - RNA, 24 nt, Artificial Sequence
  Synthetic
gauuauuguucaaagugauagaau

SEQ ID NO: 356379 - RNA, 18 nt, Artificial Sequence
  Synthetic
ccaagacagugauagaau

SEQ ID NO: 356380 - RNA, 19 nt, Artificial Sequence
  Synthetic
uccaagacagugauagaau

SEQ ID NO: 356381 - RNA, 20 nt, Artificial Sequence
  Synthetic
auccaagacagugauagaau

SEQ ID NO: 356382 - RNA, 21 nt, Artificial Sequence
  Synthetic
cauccaagacagugauagaau

SEQ ID NO: 356383 - RNA, 22 nt, Artificial Sequence
  Synthetic
acauccaagacagugauagaau

SEQ ID NO: 356384 - RNA, 23 nt, Artificial Sequence
  Synthetic
aacauccaagacagugauagaau

SEQ ID NO: 356385 - RNA, 24 nt, Artificial Sequence
  Synthetic
uaacauccaagacagugauagaau

SEQ ID NO: 356386 - RNA, 18 nt, Artificial Sequence
  Synthetic
cguggccacauauagaau

SEQ ID NO: 356387 - RNA, 19 nt, Artificial Sequence
  Synthetic
gcguggccacauauagaau

SEQ ID NO: 356388 - RNA, 20 nt, Artificial Sequence
  Synthetic
ugcguggccacauauagaau

SEQ ID NO: 356389 - RNA, 21 nt, Artificial Sequence
  Synthetic
uugcguggccacauauagaau

SEQ ID NO: 356390 - RNA, 22 nt, Artificial Sequence
  Synthetic
guugcguggccacauauagaau

SEQ ID NO: 356391 - RNA, 23 nt, Artificial Sequence
  Synthetic
uguugcguggccacauauagaau

SEQ ID NO: 356392 - RNA, 24 nt, Artificial Sequence
  Synthetic
guguugcguggccacauauagaau

SEQ ID NO: 356393 - RNA, 18 nt, Artificial Sequence
  Synthetic
aagugcucauuauagaau

SEQ ID NO: 356394 - RNA, 19 nt, Artificial Sequence
  Synthetic
uaagugcucauuauagaau

SEQ ID NO: 356395 - RNA, 20 nt, Artificial Sequence
  Synthetic
auaagugcucauuauagaau

SEQ ID NO: 356396 - RNA, 21 nt, Artificial Sequence
  Synthetic
aauaagugcucauuauagaau

SEQ ID NO: 356397 - RNA, 22 nt, Artificial Sequence
  Synthetic
uaauaagugcucauuauagaau

SEQ ID NO: 356398 - RNA, 23 nt, Artificial Sequence
  Synthetic
guaauaagugcucauuauagaau

SEQ ID NO: 356399 - RNA, 24 nt, Artificial Sequence
  Synthetic
gguaauaagugcucauuauagaau

SEQ ID NO: 356400 - RNA, 18 nt, Artificial Sequence
  Synthetic
uaucuuuucuuauagaau

SEQ ID NO: 356401 - RNA, 19 nt, Artificial Sequence
  Synthetic
uuaucuuuucuuauagaau

SEQ ID NO: 356402 - RNA, 20 nt, Artificial Sequence
  Synthetic
cuuaucuuuucuuauagaau

SEQ ID NO: 356403 - RNA, 21 nt, Artificial Sequence
  Synthetic
acuuaucuuuucuuauagaau

SEQ ID NO: 356404 - RNA, 22 nt, Artificial Sequence
  Synthetic
aacuuaucuuuucuuauagaau

SEQ ID NO: 356405 - RNA, 23 nt, Artificial Sequence
  Synthetic
aaacuuaucuuuucuuauagaau

SEQ ID NO: 356406 - RNA, 24 nt, Artificial Sequence
  Synthetic
aaaacuuaucuuuucuuauagaau

SEQ ID NO: 356407 - RNA, 18 nt, Artificial Sequence
  Synthetic
cuacuuauagacuagaau

SEQ ID NO: 356408 - RNA, 19 nt, Artificial Sequence
  Synthetic
gcuacuuauagacuagaau

SEQ ID NO: 356409 - RNA, 20 nt, Artificial Sequence
  Synthetic
ugcuacuuauagacuagaau

SEQ ID NO: 356410 - RNA, 21 nt, Artificial Sequence
  Synthetic
gugcuacuuauagacuagaau

SEQ ID NO: 356411 - RNA, 22 nt, Artificial Sequence
  Synthetic
ugugcuacuuauagacuagaau

SEQ ID NO: 356412 - RNA, 23 nt, Artificial Sequence
  Synthetic
cugugcuacuuauagacuagaau

SEQ ID NO: 356413 - RNA, 24 nt, Artificial Sequence
  Synthetic
gcugugcuacuuauagacuagaau

SEQ ID NO: 356414 - RNA, 18 nt, Artificial Sequence
  Synthetic
uuucccuuauccuagaau

SEQ ID NO: 356415 - RNA, 19 nt, Artificial Sequence
  Synthetic
uuuucccuuauccuagaau

SEQ ID NO: 356416 - RNA, 20 nt, Artificial Sequence
  Synthetic
cuuuucccuuauccuagaau

SEQ ID NO: 356417 - RNA, 21 nt, Artificial Sequence
  Synthetic
acuuuucccuuauccuagaau

SEQ ID NO: 356418 - RNA, 22 nt, Artificial Sequence
  Synthetic
aacuuuucccuuauccuagaau

SEQ ID NO: 356419 - RNA, 23 nt, Artificial Sequence
  Synthetic
aaacuuuucccuuauccuagaau

SEQ ID NO: 356420 - RNA, 24 nt, Artificial Sequence
  Synthetic
uaaacuuuucccuuauccuagaau

SEQ ID NO: 356421 - RNA, 18 nt, Artificial Sequence
  Synthetic
auuuggcuaagcuagaau

SEQ ID NO: 356422 - RNA, 19 nt, Artificial Sequence
  Synthetic
gauuuggcuaagcuagaau

SEQ ID NO: 356423 - RNA, 20 nt, Artificial Sequence
  Synthetic
ugauuuggcuaagcuagaau

SEQ ID NO: 356424 - RNA, 21 nt, Artificial Sequence
  Synthetic
augauuuggcuaagcuagaau

SEQ ID NO: 356425 - RNA, 22 nt, Artificial Sequence
  Synthetic
uaugauuuggcuaagcuagaau

SEQ ID NO: 356426 - RNA, 23 nt, Artificial Sequence
  Synthetic
uuaugauuuggcuaagcuagaau

SEQ ID NO: 356427 - RNA, 24 nt, Artificial Sequence
  Synthetic
cuuaugauuuggcuaagcuagaau

SEQ ID NO: 356428 - RNA, 18 nt, Artificial Sequence
  Synthetic
aacacaucaggcuagaau

SEQ ID NO: 356429 - RNA, 19 nt, Artificial Sequence
  Synthetic
aaacacaucaggcuagaau

SEQ ID NO: 356430 - RNA, 20 nt, Artificial Sequence
  Synthetic
aaaacacaucaggcuagaau

SEQ ID NO: 356431 - RNA, 21 nt, Artificial Sequence
  Synthetic
aaaaacacaucaggcuagaau

SEQ ID NO: 356432 - RNA, 22 nt, Artificial Sequence
  Synthetic
aaaaaacacaucaggcuagaau

SEQ ID NO: 356433 - RNA, 23 nt, Artificial Sequence
  Synthetic
gaaaaaacacaucaggcuagaau

SEQ ID NO: 356434 - RNA, 24 nt, Artificial Sequence
  Synthetic
ggaaaaaacacaucaggcuagaau

SEQ ID NO: 356435 - RNA, 18 nt, Artificial Sequence
  Synthetic
ggagcuaaugucuagaau

SEQ ID NO: 356436 - RNA, 19 nt, Artificial Sequence
  Synthetic
aggagcuaaugucuagaau

SEQ ID NO: 356437 - RNA, 20 nt, Artificial Sequence
  Synthetic
caggagcuaaugucuagaau

SEQ ID NO: 356438 - RNA, 21 nt, Artificial Sequence
  Synthetic
acaggagcuaaugucuagaau

SEQ ID NO: 356439 - RNA, 22 nt, Artificial Sequence
  Synthetic
aacaggagcuaaugucuagaau

SEQ ID NO: 356440 - RNA, 23 nt, Artificial Sequence
  Synthetic
aaacaggagcuaaugucuagaau

SEQ ID NO: 356441 - RNA, 24 nt, Artificial Sequence
  Synthetic
aaaacaggagcuaaugucuagaau

SEQ ID NO: 356442 - RNA, 18 nt, Artificial Sequence
  Synthetic
acaagaauugucuagaau

SEQ ID NO: 356443 - RNA, 19 nt, Artificial Sequence
  Synthetic
uacaagaauugucuagaau

SEQ ID NO: 356444 - RNA, 20 nt, Artificial Sequence
  Synthetic
guacaagaauugucuagaau

SEQ ID NO: 356445 - RNA, 21 nt, Artificial Sequence
  Synthetic
aguacaagaauugucuagaau

SEQ ID NO: 356446 - RNA, 22 nt, Artificial Sequence
  Synthetic
caguacaagaauugucuagaau

SEQ ID NO: 356447 - RNA, 23 nt, Artificial Sequence
  Synthetic
ucaguacaagaauugucuagaau

SEQ ID NO: 356448 - RNA, 24 nt, Artificial Sequence
  Synthetic
uucaguacaagaauugucuagaau

SEQ ID NO: 356449 - RNA, 18 nt, Artificial Sequence
  Synthetic
aaaugaaaauucuagaau

SEQ ID NO: 356450 - RNA, 19 nt, Artificial Sequence
  Synthetic
caaaugaaaauucuagaau

SEQ ID NO: 356451 - RNA, 20 nt, Artificial Sequence
  Synthetic
ccaaaugaaaauucuagaau

SEQ ID NO: 356452 - RNA, 21 nt, Artificial Sequence
  Synthetic
accaaaugaaaauucuagaau

SEQ ID NO: 356453 - RNA, 22 nt, Artificial Sequence
  Synthetic
aaccaaaugaaaauucuagaau

SEQ ID NO: 356454 - RNA, 23 nt, Artificial Sequence
  Synthetic
gaaccaaaugaaaauucuagaau

SEQ ID NO: 356455 - RNA, 24 nt, Artificial Sequence
  Synthetic
agaaccaaaugaaaauucuagaau

SEQ ID NO: 356456 - RNA, 18 nt, Artificial Sequence
  Synthetic
ggaaggaaagaguagaau

SEQ ID NO: 356457 - RNA, 19 nt, Artificial Sequence
  Synthetic
gggaaggaaagaguagaau

SEQ ID NO: 356458 - RNA, 20 nt, Artificial Sequence
  Synthetic
agggaaggaaagaguagaau

SEQ ID NO: 356459 - RNA, 21 nt, Artificial Sequence
  Synthetic
gagggaaggaaagaguagaau

SEQ ID NO: 356460 - RNA, 22 nt, Artificial Sequence
  Synthetic
agagggaaggaaagaguagaau

SEQ ID NO: 356461 - RNA, 23 nt, Artificial Sequence
  Synthetic
aagagggaaggaaagaguagaau

SEQ ID NO: 356462 - RNA, 24 nt, Artificial Sequence
  Synthetic
gaagagggaaggaaagaguagaau

SEQ ID NO: 356463 - RNA, 18 nt, Artificial Sequence
  Synthetic
uuguuguuggcguagaau

SEQ ID NO: 356464 - RNA, 19 nt, Artificial Sequence
  Synthetic
guuguuguuggcguagaau

SEQ ID NO: 356465 - RNA, 20 nt, Artificial Sequence
  Synthetic
uguuguuguuggcguagaau

SEQ ID NO: 356466 - RNA, 21 nt, Artificial Sequence
  Synthetic
uuguuguuguuggcguagaau

SEQ ID NO: 356467 - RNA, 22 nt, Artificial Sequence
  Synthetic
uuuguuguuguuggcguagaau

SEQ ID NO: 356468 - RNA, 23 nt, Artificial Sequence
  Synthetic
guuuguuguuguuggcguagaau

SEQ ID NO: 356469 - RNA, 24 nt, Artificial Sequence
  Synthetic
gguuuguuguuguuggcguagaau

SEQ ID NO: 356470 - RNA, 18 nt, Artificial Sequence
  Synthetic
uaggaucauggguagaau

SEQ ID NO: 356471 - RNA, 19 nt, Artificial Sequence
  Synthetic
auaggaucauggguagaau

SEQ ID NO: 356472 - RNA, 20 nt, Artificial Sequence
  Synthetic
cauaggaucauggguagaau

SEQ ID NO: 356473 - RNA, 21 nt, Artificial Sequence
  Synthetic
ucauaggaucauggguagaau

SEQ ID NO: 356474 - RNA, 22 nt, Artificial Sequence
  Synthetic
uucauaggaucauggguagaau

SEQ ID NO: 356475 - RNA, 23 nt, Artificial Sequence
  Synthetic
cuucauaggaucauggguagaau

SEQ ID NO: 356476 - RNA, 24 nt, Artificial Sequence
  Synthetic
acuucauaggaucauggguagaau

SEQ ID NO: 356477 - RNA, 18 nt, Artificial Sequence
  Synthetic
uucugagcuugguagaau

SEQ ID NO: 356478 - RNA, 19 nt, Artificial Sequence
  Synthetic
uuucugagcuugguagaau

SEQ ID NO: 356479 - RNA, 20 nt, Artificial Sequence
  Synthetic
guuucugagcuugguagaau

SEQ ID NO: 356480 - RNA, 21 nt, Artificial Sequence
  Synthetic
gguuucugagcuugguagaau

SEQ ID NO: 356481 - RNA, 22 nt, Artificial Sequence
  Synthetic
ugguuucugagcuugguagaau

SEQ ID NO: 356482 - RNA, 23 nt, Artificial Sequence
  Synthetic
uugguuucugagcuugguagaau

SEQ ID NO: 356483 - RNA, 24 nt, Artificial Sequence
  Synthetic
guugguuucugagcuugguagaau

SEQ ID NO: 356484 - RNA, 18 nt, Artificial Sequence
  Synthetic
aucggcaugauguagaau

SEQ ID NO: 356485 - RNA, 19 nt, Artificial Sequence
  Synthetic
aaucggcaugauguagaau

SEQ ID NO: 356486 - RNA, 20 nt, Artificial Sequence
  Synthetic
caaucggcaugauguagaau

SEQ ID NO: 356487 - RNA, 21 nt, Artificial Sequence
  Synthetic
acaaucggcaugauguagaau

SEQ ID NO: 356488 - RNA, 22 nt, Artificial Sequence
  Synthetic
cacaaucggcaugauguagaau

SEQ ID NO: 356489 - RNA, 23 nt, Artificial Sequence
  Synthetic
acacaaucggcaugauguagaau

SEQ ID NO: 356490 - RNA, 24 nt, Artificial Sequence
  Synthetic
cacacaaucggcaugauguagaau

SEQ ID NO: 356491 - RNA, 18 nt, Artificial Sequence
  Synthetic
ccaguugcaaauuagaau

SEQ ID NO: 356492 - RNA, 19 nt, Artificial Sequence
  Synthetic
gccaguugcaaauuagaau

SEQ ID NO: 356493 - RNA, 20 nt, Artificial Sequence
  Synthetic
ugccaguugcaaauuagaau

SEQ ID NO: 356494 - RNA, 21 nt, Artificial Sequence
  Synthetic
augccaguugcaaauuagaau

SEQ ID NO: 356495 - RNA, 22 nt, Artificial Sequence
  Synthetic
aaugccaguugcaaauuagaau

SEQ ID NO: 356496 - RNA, 23 nt, Artificial Sequence
  Synthetic
aaaugccaguugcaaauuagaau

SEQ ID NO: 356497 - RNA, 24 nt, Artificial Sequence
  Synthetic
uaaaugccaguugcaaauuagaau

SEQ ID NO: 356498 - RNA, 18 nt, Artificial Sequence
  Synthetic
uucauacucuauuagaau

SEQ ID NO: 356499 - RNA, 19 nt, Artificial Sequence
  Synthetic
guucauacucuauuagaau

SEQ ID NO: 356500 - RNA, 20 nt, Artificial Sequence
  Synthetic
uguucauacucuauuagaau

SEQ ID NO: 356501 - RNA, 21 nt, Artificial Sequence
  Synthetic
auguucauacucuauuagaau

SEQ ID NO: 356502 - RNA, 22 nt, Artificial Sequence
  Synthetic
cauguucauacucuauuagaau

SEQ ID NO: 356503 - RNA, 23 nt, Artificial Sequence
  Synthetic
ccauguucauacucuauuagaau

SEQ ID NO: 356504 - RNA, 24 nt, Artificial Sequence
  Synthetic
cccauguucauacucuauuagaau

SEQ ID NO: 356505 - RNA, 18 nt, Artificial Sequence
  Synthetic
gcucaaugaaguuagaau

SEQ ID NO: 356506 - RNA, 19 nt, Artificial Sequence
  Synthetic
agcucaaugaaguuagaau

SEQ ID NO: 356507 - RNA, 20 nt, Artificial Sequence
  Synthetic
uagcucaaugaaguuagaau

SEQ ID NO: 356508 - RNA, 21 nt, Artificial Sequence
  Synthetic
auagcucaaugaaguuagaau

SEQ ID NO: 356509 - RNA, 22 nt, Artificial Sequence
  Synthetic
cauagcucaaugaaguuagaau

SEQ ID NO: 356510 - RNA, 23 nt, Artificial Sequence
  Synthetic
acauagcucaaugaaguuagaau

SEQ ID NO: 356511 - RNA, 24 nt, Artificial Sequence
  Synthetic
aacauagcucaaugaaguuagaau

SEQ ID NO: 356512 - RNA, 18 nt, Artificial Sequence
  Synthetic
aggaauaaguguuagaau

SEQ ID NO: 356513 - RNA, 19 nt, Artificial Sequence
  Synthetic
aaggaauaaguguuagaau

SEQ ID NO: 356514 - RNA, 20 nt, Artificial Sequence
  Synthetic
uaaggaauaaguguuagaau

SEQ ID NO: 356515 - RNA, 21 nt, Artificial Sequence
  Synthetic
guaaggaauaaguguuagaau

SEQ ID NO: 356516 - RNA, 22 nt, Artificial Sequence
  Synthetic
aguaaggaauaaguguuagaau

SEQ ID NO: 356517 - RNA, 23 nt, Artificial Sequence
  Synthetic
aaguaaggaauaaguguuagaau

SEQ ID NO: 356518 - RNA, 24 nt, Artificial Sequence
  Synthetic
aaaguaaggaauaaguguuagaau

SEQ ID NO: 356519 - RNA, 18 nt, Artificial Sequence
  Synthetic
ggaugguaacuuuagaau

SEQ ID NO: 356520 - RNA, 19 nt, Artificial Sequence
  Synthetic
aggaugguaacuuuagaau

SEQ ID NO: 356521 - RNA, 20 nt, Artificial Sequence
  Synthetic
aaggaugguaacuuuagaau

SEQ ID NO: 356522 - RNA, 21 nt, Artificial Sequence
  Synthetic
caaggaugguaacuuuagaau

SEQ ID NO: 356523 - RNA, 22 nt, Artificial Sequence
  Synthetic
ucaaggaugguaacuuuagaau

SEQ ID NO: 356524 - RNA, 23 nt, Artificial Sequence
  Synthetic
cucaaggaugguaacuuuagaau

SEQ ID NO: 356525 - RNA, 24 nt, Artificial Sequence
  Synthetic
acucaaggaugguaacuuuagaau

SEQ ID NO: 356526 - RNA, 18 nt, Artificial Sequence
  Synthetic
gguuagaaguuuuagaau

SEQ ID NO: 356527 - RNA, 19 nt, Artificial Sequence
  Synthetic
ugguuagaaguuuuagaau

SEQ ID NO: 356528 - RNA, 20 nt, Artificial Sequence
  Synthetic
augguuagaaguuuuagaau

SEQ ID NO: 356529 - RNA, 21 nt, Artificial Sequence
  Synthetic
caugguuagaaguuuuagaau

SEQ ID NO: 356530 - RNA, 22 nt, Artificial Sequence
  Synthetic
ucaugguuagaaguuuuagaau

SEQ ID NO: 356531 - RNA, 23 nt, Artificial Sequence
  Synthetic
cucaugguuagaaguuuuagaau

SEQ ID NO: 356532 - RNA, 24 nt, Artificial Sequence
  Synthetic
ucucaugguuagaaguuuuagaau

SEQ ID NO: 356533 - RNA, 18 nt, Artificial Sequence
  Synthetic
cuauuaauauaaacgaau

SEQ ID NO: 356534 - RNA, 19 nt, Artificial Sequence
  Synthetic
gcuauuaauauaaacgaau

SEQ ID NO: 356535 - RNA, 20 nt, Artificial Sequence
  Synthetic
ugcuauuaauauaaacgaau

SEQ ID NO: 356536 - RNA, 21 nt, Artificial Sequence
  Synthetic
gugcuauuaauauaaacgaau

SEQ ID NO: 356537 - RNA, 22 nt, Artificial Sequence
  Synthetic
agugcuauuaauauaaacgaau

SEQ ID NO: 356538 - RNA, 23 nt, Artificial Sequence
  Synthetic
aagugcuauuaauauaaacgaau

SEQ ID NO: 356539 - RNA, 24 nt, Artificial Sequence
  Synthetic
aaagugcuauuaauauaaacgaau

SEQ ID NO: 356540 - RNA, 18 nt, Artificial Sequence
  Synthetic
uccauuuugaacucgaau

SEQ ID NO: 356541 - RNA, 19 nt, Artificial Sequence
  Synthetic
auccauuuugaacucgaau

SEQ ID NO: 356542 - RNA, 20 nt, Artificial Sequence
  Synthetic
aauccauuuugaacucgaau

SEQ ID NO: 356543 - RNA, 21 nt, Artificial Sequence
  Synthetic
caauccauuuugaacucgaau

SEQ ID NO: 356544 - RNA, 22 nt, Artificial Sequence
  Synthetic
acaauccauuuugaacucgaau

SEQ ID NO: 356545 - RNA, 23 nt, Artificial Sequence
  Synthetic
uacaauccauuuugaacucgaau

SEQ ID NO: 356546 - RNA, 24 nt, Artificial Sequence
  Synthetic
uuacaauccauuuugaacucgaau

SEQ ID NO: 356547 - RNA, 18 nt, Artificial Sequence
  Synthetic
aauuauuuuuauucgaau

SEQ ID NO: 356548 - RNA, 19 nt, Artificial Sequence
  Synthetic
aaauuauuuuuauucgaau

SEQ ID NO: 356549 - RNA, 20 nt, Artificial Sequence
  Synthetic
uaaauuauuuuuauucgaau

SEQ ID NO: 356550 - RNA, 21 nt, Artificial Sequence
  Synthetic
cuaaauuauuuuuauucgaau

SEQ ID NO: 356551 - RNA, 22 nt, Artificial Sequence
  Synthetic
ucuaaauuauuuuuauucgaau

SEQ ID NO: 356552 - RNA, 23 nt, Artificial Sequence
  Synthetic
gucuaaauuauuuuuauucgaau

SEQ ID NO: 356553 - RNA, 24 nt, Artificial Sequence
  Synthetic
ugucuaaauuauuuuuauucgaau

SEQ ID NO: 356554 - RNA, 18 nt, Artificial Sequence
  Synthetic
uaucauagaguuucgaau

SEQ ID NO: 356555 - RNA, 19 nt, Artificial Sequence
  Synthetic
auaucauagaguuucgaau

SEQ ID NO: 356556 - RNA, 20 nt, Artificial Sequence
  Synthetic
cauaucauagaguuucgaau

SEQ ID NO: 356557 - RNA, 21 nt, Artificial Sequence
  Synthetic
ccauaucauagaguuucgaau

SEQ ID NO: 356558 - RNA, 22 nt, Artificial Sequence
  Synthetic
accauaucauagaguuucgaau

SEQ ID NO: 356559 - RNA, 23 nt, Artificial Sequence
  Synthetic
aaccauaucauagaguuucgaau

SEQ ID NO: 356560 - RNA, 24 nt, Artificial Sequence
  Synthetic
aaaccauaucauagaguuucgaau

SEQ ID NO: 356561 - RNA, 18 nt, Artificial Sequence
  Synthetic
ugaagacaugaaaggaau

SEQ ID NO: 356562 - RNA, 19 nt, Artificial Sequence
  Synthetic
augaagacaugaaaggaau

SEQ ID NO: 356563 - RNA, 20 nt, Artificial Sequence
  Synthetic
gaugaagacaugaaaggaau

SEQ ID NO: 356564 - RNA, 21 nt, Artificial Sequence
  Synthetic
agaugaagacaugaaaggaau

SEQ ID NO: 356565 - RNA, 22 nt, Artificial Sequence
  Synthetic
gagaugaagacaugaaaggaau

SEQ ID NO: 356566 - RNA, 23 nt, Artificial Sequence
  Synthetic
ggagaugaagacaugaaaggaau

SEQ ID NO: 356567 - RNA, 24 nt, Artificial Sequence
  Synthetic
uggagaugaagacaugaaaggaau

SEQ ID NO: 356568 - RNA, 18 nt, Artificial Sequence
  Synthetic
uauucccuggcaaggaau

SEQ ID NO: 356569 - RNA, 19 nt, Artificial Sequence
  Synthetic
uuauucccuggcaaggaau

SEQ ID NO: 356570 - RNA, 20 nt, Artificial Sequence
  Synthetic
uuuauucccuggcaaggaau

SEQ ID NO: 356571 - RNA, 21 nt, Artificial Sequence
  Synthetic
guuuauucccuggcaaggaau

SEQ ID NO: 356572 - RNA, 22 nt, Artificial Sequence
  Synthetic
aguuuauucccuggcaaggaau

SEQ ID NO: 356573 - RNA, 23 nt, Artificial Sequence
  Synthetic
caguuuauucccuggcaaggaau

SEQ ID NO: 356574 - RNA, 24 nt, Artificial Sequence
  Synthetic
gcaguuuauucccuggcaaggaau

SEQ ID NO: 356575 - RNA, 18 nt, Artificial Sequence
  Synthetic
gguuuacauuuaaggaau

SEQ ID NO: 356576 - RNA, 19 nt, Artificial Sequence
  Synthetic
ugguuuacauuuaaggaau

SEQ ID NO: 356577 - RNA, 20 nt, Artificial Sequence
  Synthetic
uugguuuacauuuaaggaau

SEQ ID NO: 356578 - RNA, 21 nt, Artificial Sequence
  Synthetic
guugguuuacauuuaaggaau

SEQ ID NO: 356579 - RNA, 22 nt, Artificial Sequence
  Synthetic
aguugguuuacauuuaaggaau

SEQ ID NO: 356580 - RNA, 23 nt, Artificial Sequence
  Synthetic
aaguugguuuacauuuaaggaau

SEQ ID NO: 356581 - RNA, 24 nt, Artificial Sequence
  Synthetic
gaaguugguuuacauuuaaggaau

SEQ ID NO: 356582 - RNA, 18 nt, Artificial Sequence
  Synthetic
ucuguugaacacaggaau

SEQ ID NO: 356583 - RNA, 19 nt, Artificial Sequence
  Synthetic
cucuguugaacacaggaau

SEQ ID NO: 356584 - RNA, 20 nt, Artificial Sequence
  Synthetic
acucuguugaacacaggaau

SEQ ID NO: 356585 - RNA, 21 nt, Artificial Sequence
  Synthetic
uacucuguugaacacaggaau

SEQ ID NO: 356586 - RNA, 22 nt, Artificial Sequence
  Synthetic
cuacucuguugaacacaggaau

SEQ ID NO: 356587 - RNA, 23 nt, Artificial Sequence
  Synthetic
gcuacucuguugaacacaggaau

SEQ ID NO: 356588 - RNA, 24 nt, Artificial Sequence
  Synthetic
ugcuacucuguugaacacaggaau

SEQ ID NO: 356589 - RNA, 18 nt, Artificial Sequence
  Synthetic
uuaaaauauuacaggaau

SEQ ID NO: 356590 - RNA, 19 nt, Artificial Sequence
  Synthetic
uuuaaaauauuacaggaau

SEQ ID NO: 356591 - RNA, 20 nt, Artificial Sequence
  Synthetic
uuuuaaaauauuacaggaau

SEQ ID NO: 356592 - RNA, 21 nt, Artificial Sequence
  Synthetic
uuuuuaaaauauuacaggaau

SEQ ID NO: 356593 - RNA, 22 nt, Artificial Sequence
  Synthetic
cuuuuuaaaauauuacaggaau

SEQ ID NO: 356594 - RNA, 23 nt, Artificial Sequence
  Synthetic
ucuuuuuaaaauauuacaggaau

SEQ ID NO: 356595 - RNA, 24 nt, Artificial Sequence
  Synthetic
aucuuuuuaaaauauuacaggaau

SEQ ID NO: 356596 - RNA, 18 nt, Artificial Sequence
  Synthetic
aauuagaaaaccaggaau

SEQ ID NO: 356597 - RNA, 19 nt, Artificial Sequence
  Synthetic
gaauuagaaaaccaggaau

SEQ ID NO: 356598 - RNA, 20 nt, Artificial Sequence
  Synthetic
ugaauuagaaaaccaggaau

SEQ ID NO: 356599 - RNA, 21 nt, Artificial Sequence
  Synthetic
gugaauuagaaaaccaggaau

SEQ ID NO: 356600 - RNA, 22 nt, Artificial Sequence
  Synthetic
agugaauuagaaaaccaggaau

SEQ ID NO: 356601 - RNA, 23 nt, Artificial Sequence
  Synthetic
cagugaauuagaaaaccaggaau

SEQ ID NO: 356602 - RNA, 24 nt, Artificial Sequence
  Synthetic
acagugaauuagaaaaccaggaau

SEQ ID NO: 356603 - RNA, 18 nt, Artificial Sequence
  Synthetic
ggaaaggcugccaggaau

SEQ ID NO: 356604 - RNA, 19 nt, Artificial Sequence
  Synthetic
gggaaaggcugccaggaau

SEQ ID NO: 356605 - RNA, 20 nt, Artificial Sequence
  Synthetic
agggaaaggcugccaggaau

SEQ ID NO: 356606 - RNA, 21 nt, Artificial Sequence
  Synthetic
cagggaaaggcugccaggaau

SEQ ID NO: 356607 - RNA, 22 nt, Artificial Sequence
  Synthetic
acagggaaaggcugccaggaau

SEQ ID NO: 356608 - RNA, 23 nt, Artificial Sequence
  Synthetic
cacagggaaaggcugccaggaau

SEQ ID NO: 356609 - RNA, 24 nt, Artificial Sequence
  Synthetic
acacagggaaaggcugccaggaau

SEQ ID NO: 356610 - RNA, 18 nt, Artificial Sequence
  Synthetic
auaugugugcucaggaau

SEQ ID NO: 356611 - RNA, 19 nt, Artificial Sequence
  Synthetic
aauaugugugcucaggaau

SEQ ID NO: 356612 - RNA, 20 nt, Artificial Sequence
  Synthetic
uaauaugugugcucaggaau

SEQ ID NO: 356613 - RNA, 21 nt, Artificial Sequence
  Synthetic
uuaauaugugugcucaggaau

SEQ ID NO: 356614 - RNA, 22 nt, Artificial Sequence
  Synthetic
auuaauaugugugcucaggaau

SEQ ID NO: 356615 - RNA, 23 nt, Artificial Sequence
  Synthetic
gauuaauaugugugcucaggaau

SEQ ID NO: 356616 - RNA, 24 nt, Artificial Sequence
  Synthetic
ggauuaauaugugugcucaggaau

SEQ ID NO: 356617 - RNA, 18 nt, Artificial Sequence
  Synthetic
ucaggauuggggaggaau

SEQ ID NO: 356618 - RNA, 19 nt, Artificial Sequence
  Synthetic
aucaggauuggggaggaau

SEQ ID NO: 356619 - RNA, 20 nt, Artificial Sequence
  Synthetic
uaucaggauuggggaggaau

SEQ ID NO: 356620 - RNA, 21 nt, Artificial Sequence
  Synthetic
guaucaggauuggggaggaau

SEQ ID NO: 356621 - RNA, 22 nt, Artificial Sequence
  Synthetic
gguaucaggauuggggaggaau

SEQ ID NO: 356622 - RNA, 23 nt, Artificial Sequence
  Synthetic
ggguaucaggauuggggaggaau

SEQ ID NO: 356623 - RNA, 24 nt, Artificial Sequence
  Synthetic
uggguaucaggauuggggaggaau

SEQ ID NO: 356624 - RNA, 18 nt, Artificial Sequence
  Synthetic
ccagcugagaugaggaau

SEQ ID NO: 356625 - RNA, 19 nt, Artificial Sequence
  Synthetic
accagcugagaugaggaau

SEQ ID NO: 356626 - RNA, 20 nt, Artificial Sequence
  Synthetic
uaccagcugagaugaggaau

SEQ ID NO: 356627 - RNA, 21 nt, Artificial Sequence
  Synthetic
uuaccagcugagaugaggaau

SEQ ID NO: 356628 - RNA, 22 nt, Artificial Sequence
  Synthetic
cuuaccagcugagaugaggaau

SEQ ID NO: 356629 - RNA, 23 nt, Artificial Sequence
  Synthetic
ucuuaccagcugagaugaggaau

SEQ ID NO: 356630 - RNA, 24 nt, Artificial Sequence
  Synthetic
uucuuaccagcugagaugaggaau

SEQ ID NO: 356631 - RNA, 18 nt, Artificial Sequence
  Synthetic
uuucuacuucugaggaau

SEQ ID NO: 356632 - RNA, 19 nt, Artificial Sequence
  Synthetic
auuucuacuucugaggaau

SEQ ID NO: 356633 - RNA, 20 nt, Artificial Sequence
  Synthetic
aauuucuacuucugaggaau

SEQ ID NO: 356634 - RNA, 21 nt, Artificial Sequence
  Synthetic
uaauuucuacuucugaggaau

SEQ ID NO: 356635 - RNA, 22 nt, Artificial Sequence
  Synthetic
uuaauuucuacuucugaggaau

SEQ ID NO: 356636 - RNA, 23 nt, Artificial Sequence
  Synthetic
cuuaauuucuacuucugaggaau

SEQ ID NO: 356637 - RNA, 24 nt, Artificial Sequence
  Synthetic
ucuuaauuucuacuucugaggaau

SEQ ID NO: 356638 - RNA, 18 nt, Artificial Sequence
  Synthetic
uaucuauuuaauaggaau

SEQ ID NO: 356639 - RNA, 19 nt, Artificial Sequence
  Synthetic
uuaucuauuuaauaggaau

SEQ ID NO: 356640 - RNA, 20 nt, Artificial Sequence
  Synthetic
cuuaucuauuuaauaggaau

SEQ ID NO: 356641 - RNA, 21 nt, Artificial Sequence
  Synthetic
acuuaucuauuuaauaggaau

SEQ ID NO: 356642 - RNA, 22 nt, Artificial Sequence
  Synthetic
aacuuaucuauuuaauaggaau

SEQ ID NO: 356643 - RNA, 23 nt, Artificial Sequence
  Synthetic
caacuuaucuauuuaauaggaau

SEQ ID NO: 356644 - RNA, 24 nt, Artificial Sequence
  Synthetic
ucaacuuaucuauuuaauaggaau

SEQ ID NO: 356645 - RNA, 18 nt, Artificial Sequence
  Synthetic
ggauuucaacauaggaau

SEQ ID NO: 356646 - RNA, 19 nt, Artificial Sequence
  Synthetic
aggauuucaacauaggaau

SEQ ID NO: 356647 - RNA, 20 nt, Artificial Sequence
  Synthetic
uaggauuucaacauaggaau

SEQ ID NO: 356648 - RNA, 21 nt, Artificial Sequence
  Synthetic
uuaggauuucaacauaggaau

SEQ ID NO: 356649 - RNA, 22 nt, Artificial Sequence
  Synthetic
uuuaggauuucaacauaggaau

SEQ ID NO: 356650 - RNA, 23 nt, Artificial Sequence
  Synthetic
uuuuaggauuucaacauaggaau

SEQ ID NO: 356651 - RNA, 24 nt, Artificial Sequence
  Synthetic
uuuuuaggauuucaacauaggaau

SEQ ID NO: 356652 - RNA, 18 nt, Artificial Sequence
  Synthetic
caggagaaagauaggaau

SEQ ID NO: 356653 - RNA, 19 nt, Artificial Sequence
  Synthetic
ccaggagaaagauaggaau

SEQ ID NO: 356654 - RNA, 20 nt, Artificial Sequence
  Synthetic
uccaggagaaagauaggaau

SEQ ID NO: 356655 - RNA, 21 nt, Artificial Sequence
  Synthetic
guccaggagaaagauaggaau

SEQ ID NO: 356656 - RNA, 22 nt, Artificial Sequence
  Synthetic
gguccaggagaaagauaggaau

SEQ ID NO: 356657 - RNA, 23 nt, Artificial Sequence
  Synthetic
agguccaggagaaagauaggaau

SEQ ID NO: 356658 - RNA, 24 nt, Artificial Sequence
  Synthetic
cagguccaggagaaagauaggaau

SEQ ID NO: 356659 - RNA, 18 nt, Artificial Sequence
  Synthetic
ugucugagagguaggaau

SEQ ID NO: 356660 - RNA, 19 nt, Artificial Sequence
  Synthetic
gugucugagagguaggaau

SEQ ID NO: 356661 - RNA, 20 nt, Artificial Sequence
  Synthetic
ugugucugagagguaggaau

SEQ ID NO: 356662 - RNA, 21 nt, Artificial Sequence
  Synthetic
uugugucugagagguaggaau

SEQ ID NO: 356663 - RNA, 22 nt, Artificial Sequence
  Synthetic
uuugugucugagagguaggaau

SEQ ID NO: 356664 - RNA, 23 nt, Artificial Sequence
  Synthetic
auuugugucugagagguaggaau

SEQ ID NO: 356665 - RNA, 24 nt, Artificial Sequence
  Synthetic
aauuugugucugagagguaggaau

SEQ ID NO: 356666 - RNA, 18 nt, Artificial Sequence
  Synthetic
cauauagcuaaagggaau

SEQ ID NO: 356667 - RNA, 19 nt, Artificial Sequence
  Synthetic
ucauauagcuaaagggaau

SEQ ID NO: 356668 - RNA, 20 nt, Artificial Sequence
  Synthetic
gucauauagcuaaagggaau

SEQ ID NO: 356669 - RNA, 21 nt, Artificial Sequence
  Synthetic
agucauauagcuaaagggaau

SEQ ID NO: 356670 - RNA, 22 nt, Artificial Sequence
  Synthetic
aagucauauagcuaaagggaau

SEQ ID NO: 356671 - RNA, 23 nt, Artificial Sequence
  Synthetic
aaagucauauagcuaaagggaau

SEQ ID NO: 356672 - RNA, 24 nt, Artificial Sequence
  Synthetic
caaagucauauagcuaaagggaau

SEQ ID NO: 356673 - RNA, 18 nt, Artificial Sequence
  Synthetic
cauuaaauuuaagggaau

SEQ ID NO: 356674 - RNA, 19 nt, Artificial Sequence
  Synthetic
acauuaaauuuaagggaau

SEQ ID NO: 356675 - RNA, 20 nt, Artificial Sequence
  Synthetic
cacauuaaauuuaagggaau

SEQ ID NO: 356676 - RNA, 21 nt, Artificial Sequence
  Synthetic
acacauuaaauuuaagggaau

SEQ ID NO: 356677 - RNA, 22 nt, Artificial Sequence
  Synthetic
gacacauuaaauuuaagggaau

SEQ ID NO: 356678 - RNA, 23 nt, Artificial Sequence
  Synthetic
ggacacauuaaauuuaagggaau

SEQ ID NO: 356679 - RNA, 24 nt, Artificial Sequence
  Synthetic
gggacacauuaaauuuaagggaau

SEQ ID NO: 356680 - RNA, 18 nt, Artificial Sequence
  Synthetic
accuaacugcgagggaau

SEQ ID NO: 356681 - RNA, 19 nt, Artificial Sequence
  Synthetic
caccuaacugcgagggaau

SEQ ID NO: 356682 - RNA, 20 nt, Artificial Sequence
  Synthetic
acaccuaacugcgagggaau

SEQ ID NO: 356683 - RNA, 21 nt, Artificial Sequence
  Synthetic
cacaccuaacugcgagggaau

SEQ ID NO: 356684 - RNA, 22 nt, Artificial Sequence
  Synthetic
ucacaccuaacugcgagggaau

SEQ ID NO: 356685 - RNA, 23 nt, Artificial Sequence
  Synthetic
gucacaccuaacugcgagggaau

SEQ ID NO: 356686 - RNA, 24 nt, Artificial Sequence
  Synthetic
ggucacaccuaacugcgagggaau

SEQ ID NO: 356687 - RNA, 18 nt, Artificial Sequence
  Synthetic
gccuuuaugugagggaau

SEQ ID NO: 356688 - RNA, 19 nt, Artificial Sequence
  Synthetic
ugccuuuaugugagggaau

SEQ ID NO: 356689 - RNA, 20 nt, Artificial Sequence
  Synthetic
cugccuuuaugugagggaau

SEQ ID NO: 356690 - RNA, 21 nt, Artificial Sequence
  Synthetic
ccugccuuuaugugagggaau

SEQ ID NO: 356691 - RNA, 22 nt, Artificial Sequence
  Synthetic
gccugccuuuaugugagggaau

SEQ ID NO: 356692 - RNA, 23 nt, Artificial Sequence
  Synthetic
ugccugccuuuaugugagggaau

SEQ ID NO: 356693 - RNA, 24 nt, Artificial Sequence
  Synthetic
augccugccuuuaugugagggaau

SEQ ID NO: 356694 - RNA, 18 nt, Artificial Sequence
  Synthetic
uuuuucuaauuagggaau

SEQ ID NO: 356695 - RNA, 19 nt, Artificial Sequence
  Synthetic
guuuuucuaauuagggaau

SEQ ID NO: 356696 - RNA, 20 nt, Artificial Sequence
  Synthetic
uguuuuucuaauuagggaau

SEQ ID NO: 356697 - RNA, 21 nt, Artificial Sequence
  Synthetic
auguuuuucuaauuagggaau

SEQ ID NO: 356698 - RNA, 22 nt, Artificial Sequence
  Synthetic
uauguuuuucuaauuagggaau

SEQ ID NO: 356699 - RNA, 23 nt, Artificial Sequence
  Synthetic
auauguuuuucuaauuagggaau

SEQ ID NO: 356700 - RNA, 24 nt, Artificial Sequence
  Synthetic
uauauguuuuucuaauuagggaau

SEQ ID NO: 356701 - RNA, 18 nt, Artificial Sequence
  Synthetic
gucagauugaaugggaau

SEQ ID NO: 356702 - RNA, 19 nt, Artificial Sequence
  Synthetic
cgucagauugaaugggaau

SEQ ID NO: 356703 - RNA, 20 nt, Artificial Sequence
  Synthetic
acgucagauugaaugggaau

SEQ ID NO: 356704 - RNA, 21 nt, Artificial Sequence
  Synthetic
uacgucagauugaaugggaau

SEQ ID NO: 356705 - RNA, 22 nt, Artificial Sequence
  Synthetic
uuacgucagauugaaugggaau

SEQ ID NO: 356706 - RNA, 23 nt, Artificial Sequence
  Synthetic
uuuacgucagauugaaugggaau

SEQ ID NO: 356707 - RNA, 24 nt, Artificial Sequence
  Synthetic
uuuuacgucagauugaaugggaau

SEQ ID NO: 356708 - RNA, 18 nt, Artificial Sequence
  Synthetic
cugggcucccuugggaau

SEQ ID NO: 356709 - RNA, 19 nt, Artificial Sequence
  Synthetic
acugggcucccuugggaau

SEQ ID NO: 356710 - RNA, 20 nt, Artificial Sequence
  Synthetic
gacugggcucccuugggaau

SEQ ID NO: 356711 - RNA, 21 nt, Artificial Sequence
  Synthetic
ugacugggcucccuugggaau

SEQ ID NO: 356712 - RNA, 22 nt, Artificial Sequence
  Synthetic
cugacugggcucccuugggaau

SEQ ID NO: 356713 - RNA, 23 nt, Artificial Sequence
  Synthetic
ucugacugggcucccuugggaau

SEQ ID NO: 356714 - RNA, 24 nt, Artificial Sequence
  Synthetic
cucugacugggcucccuugggaau

SEQ ID NO: 356715 - RNA, 18 nt, Artificial Sequence
  Synthetic
uuguggugaguugggaau

SEQ ID NO: 356716 - RNA, 19 nt, Artificial Sequence
  Synthetic
auuguggugaguugggaau

SEQ ID NO: 356717 - RNA, 20 nt, Artificial Sequence
  Synthetic
uauuguggugaguugggaau

SEQ ID NO: 356718 - RNA, 21 nt, Artificial Sequence
  Synthetic
uuauuguggugaguugggaau

SEQ ID NO: 356719 - RNA, 22 nt, Artificial Sequence
  Synthetic
cuuauuguggugaguugggaau

SEQ ID NO: 356720 - RNA, 23 nt, Artificial Sequence
  Synthetic
ucuuauuguggugaguugggaau

SEQ ID NO: 356721 - RNA, 24 nt, Artificial Sequence
  Synthetic
gucuuauuguggugaguugggaau

SEQ ID NO: 356722 - RNA, 18 nt, Artificial Sequence
  Synthetic
aaaccugacuuugggaau

SEQ ID NO: 356723 - RNA, 19 nt, Artificial Sequence
  Synthetic
aaaaccugacuuugggaau

SEQ ID NO: 356724 - RNA, 20 nt, Artificial Sequence
  Synthetic
gaaaaccugacuuugggaau

SEQ ID NO: 356725 - RNA, 21 nt, Artificial Sequence
  Synthetic
ggaaaaccugacuuugggaau

SEQ ID NO: 356726 - RNA, 22 nt, Artificial Sequence
  Synthetic
gggaaaaccugacuuugggaau

SEQ ID NO: 356727 - RNA, 23 nt, Artificial Sequence
  Synthetic
ugggaaaaccugacuuugggaau

SEQ ID NO: 356728 - RNA, 24 nt, Artificial Sequence
  Synthetic
uugggaaaaccugacuuugggaau

SEQ ID NO: 356729 - RNA, 18 nt, Artificial Sequence
  Synthetic
cauucuuggcaauggaau

SEQ ID NO: 356730 - RNA, 19 nt, Artificial Sequence
  Synthetic
acauucuuggcaauggaau

SEQ ID NO: 356731 - RNA, 20 nt, Artificial Sequence
  Synthetic
cacauucuuggcaauggaau

SEQ ID NO: 356732 - RNA, 21 nt, Artificial Sequence
  Synthetic
acacauucuuggcaauggaau

SEQ ID NO: 356733 - RNA, 22 nt, Artificial Sequence
  Synthetic
aacacauucuuggcaauggaau

SEQ ID NO: 356734 - RNA, 23 nt, Artificial Sequence
  Synthetic
caacacauucuuggcaauggaau

SEQ ID NO: 356735 - RNA, 24 nt, Artificial Sequence
  Synthetic
acaacacauucuuggcaauggaau

SEQ ID NO: 356736 - RNA, 18 nt, Artificial Sequence
  Synthetic
ccucucaaggcauggaau

SEQ ID NO: 356737 - RNA, 19 nt, Artificial Sequence
  Synthetic
cccucucaaggcauggaau

SEQ ID NO: 356738 - RNA, 20 nt, Artificial Sequence
  Synthetic
acccucucaaggcauggaau

SEQ ID NO: 356739 - RNA, 21 nt, Artificial Sequence
  Synthetic
uacccucucaaggcauggaau

SEQ ID NO: 356740 - RNA, 22 nt, Artificial Sequence
  Synthetic
uuacccucucaaggcauggaau

SEQ ID NO: 356741 - RNA, 23 nt, Artificial Sequence
  Synthetic
cuuacccucucaaggcauggaau

SEQ ID NO: 356742 - RNA, 24 nt, Artificial Sequence
  Synthetic
ucuuacccucucaaggcauggaau

SEQ ID NO: 356743 - RNA, 18 nt, Artificial Sequence
  Synthetic
ugccacugaguauggaau

SEQ ID NO: 356744 - RNA, 19 nt, Artificial Sequence
  Synthetic
augccacugaguauggaau

SEQ ID NO: 356745 - RNA, 20 nt, Artificial Sequence
  Synthetic
aaugccacugaguauggaau

SEQ ID NO: 356746 - RNA, 21 nt, Artificial Sequence
  Synthetic
uaaugccacugaguauggaau

SEQ ID NO: 356747 - RNA, 22 nt, Artificial Sequence
  Synthetic
auaaugccacugaguauggaau

SEQ ID NO: 356748 - RNA, 23 nt, Artificial Sequence
  Synthetic
cauaaugccacugaguauggaau

SEQ ID NO: 356749 - RNA, 24 nt, Artificial Sequence
  Synthetic
acauaaugccacugaguauggaau

SEQ ID NO: 356750 - RNA, 18 nt, Artificial Sequence
  Synthetic
acaguuucuguauggaau

SEQ ID NO: 356751 - RNA, 19 nt, Artificial Sequence
  Synthetic
aacaguuucuguauggaau

SEQ ID NO: 356752 - RNA, 20 nt, Artificial Sequence
  Synthetic
aaacaguuucuguauggaau

SEQ ID NO: 356753 - RNA, 21 nt, Artificial Sequence
  Synthetic
caaacaguuucuguauggaau

SEQ ID NO: 356754 - RNA, 22 nt, Artificial Sequence
  Synthetic
gcaaacaguuucuguauggaau

SEQ ID NO: 356755 - RNA, 23 nt, Artificial Sequence
  Synthetic
agcaaacaguuucuguauggaau

SEQ ID NO: 356756 - RNA, 24 nt, Artificial Sequence
  Synthetic
uagcaaacaguuucuguauggaau

SEQ ID NO: 356757 - RNA, 18 nt, Artificial Sequence
  Synthetic
ugugaauauaacuggaau

SEQ ID NO: 356758 - RNA, 19 nt, Artificial Sequence
  Synthetic
gugugaauauaacuggaau

SEQ ID NO: 356759 - RNA, 20 nt, Artificial Sequence
  Synthetic
ggugugaauauaacuggaau

SEQ ID NO: 356760 - RNA, 21 nt, Artificial Sequence
  Synthetic
aggugugaauauaacuggaau

SEQ ID NO: 356761 - RNA, 22 nt, Artificial Sequence
  Synthetic
gaggugugaauauaacuggaau

SEQ ID NO: 356762 - RNA, 23 nt, Artificial Sequence
  Synthetic
ugaggugugaauauaacuggaau

SEQ ID NO: 356763 - RNA, 24 nt, Artificial Sequence
  Synthetic
uugaggugugaauauaacuggaau

SEQ ID NO: 356764 - RNA, 18 nt, Artificial Sequence
  Synthetic
uucaacaaagacuggaau

SEQ ID NO: 356765 - RNA, 19 nt, Artificial Sequence
  Synthetic
auucaacaaagacuggaau

SEQ ID NO: 356766 - RNA, 20 nt, Artificial Sequence
  Synthetic
uauucaacaaagacuggaau

SEQ ID NO: 356767 - RNA, 21 nt, Artificial Sequence
  Synthetic
auauucaacaaagacuggaau

SEQ ID NO: 356768 - RNA, 22 nt, Artificial Sequence
  Synthetic
cauauucaacaaagacuggaau

SEQ ID NO: 356769 - RNA, 23 nt, Artificial Sequence
  Synthetic
ucauauucaacaaagacuggaau

SEQ ID NO: 356770 - RNA, 24 nt, Artificial Sequence
  Synthetic
uucauauucaacaaagacuggaau

SEQ ID NO: 356771 - RNA, 18 nt, Artificial Sequence
  Synthetic
ggaacuagggccuggaau

SEQ ID NO: 356772 - RNA, 19 nt, Artificial Sequence
  Synthetic
aggaacuagggccuggaau

SEQ ID NO: 356773 - RNA, 20 nt, Artificial Sequence
  Synthetic
caggaacuagggccuggaau

SEQ ID NO: 356774 - RNA, 21 nt, Artificial Sequence
  Synthetic
ccaggaacuagggccuggaau

SEQ ID NO: 356775 - RNA, 22 nt, Artificial Sequence
  Synthetic
uccaggaacuagggccuggaau

SEQ ID NO: 356776 - RNA, 23 nt, Artificial Sequence
  Synthetic
auccaggaacuagggccuggaau

SEQ ID NO: 356777 - RNA, 24 nt, Artificial Sequence
  Synthetic
uauccaggaacuagggccuggaau

SEQ ID NO: 356778 - RNA, 18 nt, Artificial Sequence
  Synthetic
aaggacugaagguggaau

SEQ ID NO: 356779 - RNA, 19 nt, Artificial Sequence
  Synthetic
gaaggacugaagguggaau

SEQ ID NO: 356780 - RNA, 20 nt, Artificial Sequence
  Synthetic
ugaaggacugaagguggaau

SEQ ID NO: 356781 - RNA, 21 nt, Artificial Sequence
  Synthetic
cugaaggacugaagguggaau

SEQ ID NO: 356782 - RNA, 22 nt, Artificial Sequence
  Synthetic
ccugaaggacugaagguggaau

SEQ ID NO: 356783 - RNA, 23 nt, Artificial Sequence
  Synthetic
cccugaaggacugaagguggaau

SEQ ID NO: 356784 - RNA, 24 nt, Artificial Sequence
  Synthetic
ucccugaaggacugaagguggaau

SEQ ID NO: 356785 - RNA, 18 nt, Artificial Sequence
  Synthetic
accuugagaggguggaau

SEQ ID NO: 356786 - RNA, 19 nt, Artificial Sequence
  Synthetic
caccuugagaggguggaau

SEQ ID NO: 356787 - RNA, 20 nt, Artificial Sequence
  Synthetic
gcaccuugagaggguggaau

SEQ ID NO: 356788 - RNA, 21 nt, Artificial Sequence
  Synthetic
ugcaccuugagaggguggaau

SEQ ID NO: 356789 - RNA, 22 nt, Artificial Sequence
  Synthetic
augcaccuugagaggguggaau

SEQ ID NO: 356790 - RNA, 23 nt, Artificial Sequence
  Synthetic
uaugcaccuugagaggguggaau

SEQ ID NO: 356791 - RNA, 24 nt, Artificial Sequence
  Synthetic
uuaugcaccuugagaggguggaau

SEQ ID NO: 356792 - RNA, 18 nt, Artificial Sequence
  Synthetic
aagaaggaaguguggaau

SEQ ID NO: 356793 - RNA, 19 nt, Artificial Sequence
  Synthetic
uaagaaggaaguguggaau

SEQ ID NO: 356794 - RNA, 20 nt, Artificial Sequence
  Synthetic
auaagaaggaaguguggaau

SEQ ID NO: 356795 - RNA, 21 nt, Artificial Sequence
  Synthetic
gauaagaaggaaguguggaau

SEQ ID NO: 356796 - RNA, 22 nt, Artificial Sequence
  Synthetic
agauaagaaggaaguguggaau

SEQ ID NO: 356797 - RNA, 23 nt, Artificial Sequence
  Synthetic
cagauaagaaggaaguguggaau

SEQ ID NO: 356798 - RNA, 24 nt, Artificial Sequence
  Synthetic
ucagauaagaaggaaguguggaau

SEQ ID NO: 356799 - RNA, 18 nt, Artificial Sequence
  Synthetic
uuuuaaaugguguggaau

SEQ ID NO: 356800 - RNA, 19 nt, Artificial Sequence
  Synthetic
auuuuaaaugguguggaau

SEQ ID NO: 356801 - RNA, 20 nt, Artificial Sequence
  Synthetic
aauuuuaaaugguguggaau

SEQ ID NO: 356802 - RNA, 21 nt, Artificial Sequence
  Synthetic
aaauuuuaaaugguguggaau

SEQ ID NO: 356803 - RNA, 22 nt, Artificial Sequence
  Synthetic
uaaauuuuaaaugguguggaau

SEQ ID NO: 356804 - RNA, 23 nt, Artificial Sequence
  Synthetic
auaaauuuuaaaugguguggaau

SEQ ID NO: 356805 - RNA, 24 nt, Artificial Sequence
  Synthetic
uauaaauuuuaaaugguguggaau

SEQ ID NO: 356806 - RNA, 18 nt, Artificial Sequence
  Synthetic
gcgaaggcaaauuggaau

SEQ ID NO: 356807 - RNA, 19 nt, Artificial Sequence
  Synthetic
agcgaaggcaaauuggaau

SEQ ID NO: 356808 - RNA, 20 nt, Artificial Sequence
  Synthetic
aagcgaaggcaaauuggaau

SEQ ID NO: 356809 - RNA, 21 nt, Artificial Sequence
  Synthetic
aaagcgaaggcaaauuggaau

SEQ ID NO: 356810 - RNA, 22 nt, Artificial Sequence
  Synthetic
gaaagcgaaggcaaauuggaau

SEQ ID NO: 356811 - RNA, 23 nt, Artificial Sequence
  Synthetic
cgaaagcgaaggcaaauuggaau

SEQ ID NO: 356812 - RNA, 24 nt, Artificial Sequence
  Synthetic
acgaaagcgaaggcaaauuggaau

SEQ ID NO: 356813 - RNA, 18 nt, Artificial Sequence
  Synthetic
auuuaauaauauuggaau

SEQ ID NO: 356814 - RNA, 19 nt, Artificial Sequence
  Synthetic
uauuuaauaauauuggaau

SEQ ID NO: 356815 - RNA, 20 nt, Artificial Sequence
  Synthetic
guauuuaauaauauuggaau

SEQ ID NO: 356816 - RNA, 21 nt, Artificial Sequence
  Synthetic
gguauuuaauaauauuggaau

SEQ ID NO: 356817 - RNA, 22 nt, Artificial Sequence
  Synthetic
ggguauuuaauaauauuggaau

SEQ ID NO: 356818 - RNA, 23 nt, Artificial Sequence
  Synthetic
gggguauuuaauaauauuggaau

SEQ ID NO: 356819 - RNA, 24 nt, Artificial Sequence
  Synthetic
agggguauuuaauaauauuggaau

SEQ ID NO: 356820 - RNA, 18 nt, Artificial Sequence
  Synthetic
aacaaaaauucuuggaau

SEQ ID NO: 356821 - RNA, 19 nt, Artificial Sequence
  Synthetic
aaacaaaaauucuuggaau

SEQ ID NO: 356822 - RNA, 20 nt, Artificial Sequence
  Synthetic
aaaacaaaaauucuuggaau

SEQ ID NO: 356823 - RNA, 21 nt, Artificial Sequence
  Synthetic
aaaaacaaaaauucuuggaau

SEQ ID NO: 356824 - RNA, 22 nt, Artificial Sequence
  Synthetic
uaaaaacaaaaauucuuggaau

SEQ ID NO: 356825 - RNA, 23 nt, Artificial Sequence
  Synthetic
guaaaaacaaaaauucuuggaau

SEQ ID NO: 356826 - RNA, 24 nt, Artificial Sequence
  Synthetic
uguaaaaacaaaaauucuuggaau

SEQ ID NO: 356827 - RNA, 18 nt, Artificial Sequence
  Synthetic
agaaaagcacuuuggaau

SEQ ID NO: 356828 - RNA, 19 nt, Artificial Sequence
  Synthetic
cagaaaagcacuuuggaau

SEQ ID NO: 356829 - RNA, 20 nt, Artificial Sequence
  Synthetic
ucagaaaagcacuuuggaau

SEQ ID NO: 356830 - RNA, 21 nt, Artificial Sequence
  Synthetic
cucagaaaagcacuuuggaau

SEQ ID NO: 356831 - RNA, 22 nt, Artificial Sequence
  Synthetic
acucagaaaagcacuuuggaau

SEQ ID NO: 356832 - RNA, 23 nt, Artificial Sequence
  Synthetic
cacucagaaaagcacuuuggaau

SEQ ID NO: 356833 - RNA, 24 nt, Artificial Sequence
  Synthetic
ucacucagaaaagcacuuuggaau

SEQ ID NO: 356834 - RNA, 18 nt, Artificial Sequence
  Synthetic
agacuugagaaaaugaau

SEQ ID NO: 356835 - RNA, 19 nt, Artificial Sequence
  Synthetic
uagacuugagaaaaugaau

SEQ ID NO: 356836 - RNA, 20 nt, Artificial Sequence
  Synthetic
cuagacuugagaaaaugaau

SEQ ID NO: 356837 - RNA, 21 nt, Artificial Sequence
  Synthetic
acuagacuugagaaaaugaau

SEQ ID NO: 356838 - RNA, 22 nt, Artificial Sequence
  Synthetic
aacuagacuugagaaaaugaau

SEQ ID NO: 356839 - RNA, 23 nt, Artificial Sequence
  Synthetic
gaacuagacuugagaaaaugaau

SEQ ID NO: 356840 - RNA, 24 nt, Artificial Sequence
  Synthetic
agaacuagacuugagaaaaugaau

SEQ ID NO: 356841 - RNA, 18 nt, Artificial Sequence
  Synthetic
uagaccaaucaaaugaau

SEQ ID NO: 356842 - RNA, 19 nt, Artificial Sequence
  Synthetic
guagaccaaucaaaugaau

SEQ ID NO: 356843 - RNA, 20 nt, Artificial Sequence
  Synthetic
gguagaccaaucaaaugaau

SEQ ID NO: 356844 - RNA, 21 nt, Artificial Sequence
  Synthetic
agguagaccaaucaaaugaau

SEQ ID NO: 356845 - RNA, 22 nt, Artificial Sequence
  Synthetic
cagguagaccaaucaaaugaau

SEQ ID NO: 356846 - RNA, 23 nt, Artificial Sequence
  Synthetic
ccagguagaccaaucaaaugaau

SEQ ID NO: 356847 - RNA, 24 nt, Artificial Sequence
  Synthetic
uccagguagaccaaucaaaugaau

SEQ ID NO: 356848 - RNA, 18 nt, Artificial Sequence
  Synthetic
gaaaucguagaaaugaau

SEQ ID NO: 356849 - RNA, 19 nt, Artificial Sequence
  Synthetic
ugaaaucguagaaaugaau

SEQ ID NO: 356850 - RNA, 20 nt, Artificial Sequence
  Synthetic
augaaaucguagaaaugaau

SEQ ID NO: 356851 - RNA, 21 nt, Artificial Sequence
  Synthetic
caugaaaucguagaaaugaau

SEQ ID NO: 356852 - RNA, 22 nt, Artificial Sequence
  Synthetic
gcaugaaaucguagaaaugaau

SEQ ID NO: 356853 - RNA, 23 nt, Artificial Sequence
  Synthetic
agcaugaaaucguagaaaugaau

SEQ ID NO: 356854 - RNA, 24 nt, Artificial Sequence
  Synthetic
cagcaugaaaucguagaaaugaau

SEQ ID NO: 356855 - RNA, 18 nt, Artificial Sequence
  Synthetic
ccaaauaaggaaaugaau

SEQ ID NO: 356856 - RNA, 19 nt, Artificial Sequence
  Synthetic
uccaaauaaggaaaugaau

SEQ ID NO: 356857 - RNA, 20 nt, Artificial Sequence
  Synthetic
uuccaaauaaggaaaugaau

SEQ ID NO: 356858 - RNA, 21 nt, Artificial Sequence
  Synthetic
uuuccaaauaaggaaaugaau

SEQ ID NO: 356859 - RNA, 22 nt, Artificial Sequence
  Synthetic
cuuuccaaauaaggaaaugaau

SEQ ID NO: 356860 - RNA, 23 nt, Artificial Sequence
  Synthetic
ucuuuccaaauaaggaaaugaau

SEQ ID NO: 356861 - RNA, 24 nt, Artificial Sequence
  Synthetic
cucuuuccaaauaaggaaaugaau

SEQ ID NO: 356862 - RNA, 18 nt, Artificial Sequence
  Synthetic
auuaauaaggaaaugaau

SEQ ID NO: 356863 - RNA, 19 nt, Artificial Sequence
  Synthetic
cauuaauaaggaaaugaau

SEQ ID NO: 356864 - RNA, 20 nt, Artificial Sequence
  Synthetic
gcauuaauaaggaaaugaau

SEQ ID NO: 356865 - RNA, 21 nt, Artificial Sequence
  Synthetic
agcauuaauaaggaaaugaau

SEQ ID NO: 356866 - RNA, 22 nt, Artificial Sequence
  Synthetic
gagcauuaauaaggaaaugaau

SEQ ID NO: 356867 - RNA, 23 nt, Artificial Sequence
  Synthetic
ugagcauuaauaaggaaaugaau

SEQ ID NO: 356868 - RNA, 24 nt, Artificial Sequence
  Synthetic
gugagcauuaauaaggaaaugaau

SEQ ID NO: 356869 - RNA, 18 nt, Artificial Sequence
  Synthetic
gaaugaaauccaaugaau

SEQ ID NO: 356870 - RNA, 19 nt, Artificial Sequence
  Synthetic
agaaugaaauccaaugaau

SEQ ID NO: 356871 - RNA, 20 nt, Artificial Sequence
  Synthetic
gagaaugaaauccaaugaau

SEQ ID NO: 356872 - RNA, 21 nt, Artificial Sequence
  Synthetic
agagaaugaaauccaaugaau

SEQ ID NO: 356873 - RNA, 22 nt, Artificial Sequence
  Synthetic
uagagaaugaaauccaaugaau

SEQ ID NO: 356874 - RNA, 23 nt, Artificial Sequence
  Synthetic
cuagagaaugaaauccaaugaau

SEQ ID NO: 356875 - RNA, 24 nt, Artificial Sequence
  Synthetic
ccuagagaaugaaauccaaugaau

SEQ ID NO: 356876 - RNA, 18 nt, Artificial Sequence
  Synthetic
gugguuaggagaaugaau

SEQ ID NO: 356877 - RNA, 19 nt, Artificial Sequence
  Synthetic
agugguuaggagaaugaau

SEQ ID NO: 356878 - RNA, 20 nt, Artificial Sequence
  Synthetic
uagugguuaggagaaugaau

SEQ ID NO: 356879 - RNA, 21 nt, Artificial Sequence
  Synthetic
guagugguuaggagaaugaau

SEQ ID NO: 356880 - RNA, 22 nt, Artificial Sequence
  Synthetic
gguagugguuaggagaaugaau

SEQ ID NO: 356881 - RNA, 23 nt, Artificial Sequence
  Synthetic
ugguagugguuaggagaaugaau

SEQ ID NO: 356882 - RNA, 24 nt, Artificial Sequence
  Synthetic
cugguagugguuaggagaaugaau

SEQ ID NO: 356883 - RNA, 18 nt, Artificial Sequence
  Synthetic
aaaauuauuagaaugaau

SEQ ID NO: 356884 - RNA, 19 nt, Artificial Sequence
  Synthetic
aaaaauuauuagaaugaau

SEQ ID NO: 356885 - RNA, 20 nt, Artificial Sequence
  Synthetic
uaaaaauuauuagaaugaau

SEQ ID NO: 356886 - RNA, 21 nt, Artificial Sequence
  Synthetic
cuaaaaauuauuagaaugaau

SEQ ID NO: 356887 - RNA, 22 nt, Artificial Sequence
  Synthetic
ucuaaaaauuauuagaaugaau

SEQ ID NO: 356888 - RNA, 23 nt, Artificial Sequence
  Synthetic
uucuaaaaauuauuagaaugaau

SEQ ID NO: 356889 - RNA, 24 nt, Artificial Sequence
  Synthetic
cuucuaaaaauuauuagaaugaau

SEQ ID NO: 356890 - RNA, 18 nt, Artificial Sequence
  Synthetic
ugaauuacaggaaugaau

SEQ ID NO: 356891 - RNA, 19 nt, Artificial Sequence
  Synthetic
cugaauuacaggaaugaau

SEQ ID NO: 356892 - RNA, 20 nt, Artificial Sequence
  Synthetic
gcugaauuacaggaaugaau

SEQ ID NO: 356893 - RNA, 21 nt, Artificial Sequence
  Synthetic
ugcugaauuacaggaaugaau

SEQ ID NO: 356894 - RNA, 22 nt, Artificial Sequence
  Synthetic
gugcugaauuacaggaaugaau

SEQ ID NO: 356895 - RNA, 23 nt, Artificial Sequence
  Synthetic
ggugcugaauuacaggaaugaau

SEQ ID NO: 356896 - RNA, 24 nt, Artificial Sequence
  Synthetic
aggugcugaauuacaggaaugaau

SEQ ID NO: 356897 - RNA, 18 nt, Artificial Sequence
  Synthetic
cauuaccugggaaugaau

SEQ ID NO: 356898 - RNA, 19 nt, Artificial Sequence
  Synthetic
ccauuaccugggaaugaau

SEQ ID NO: 356899 - RNA, 20 nt, Artificial Sequence
  Synthetic
cccauuaccugggaaugaau

SEQ ID NO: 356900 - RNA, 21 nt, Artificial Sequence
  Synthetic
ccccauuaccugggaaugaau

SEQ ID NO: 356901 - RNA, 22 nt, Artificial Sequence
  Synthetic
uccccauuaccugggaaugaau

SEQ ID NO: 356902 - RNA, 23 nt, Artificial Sequence
  Synthetic
auccccauuaccugggaaugaau

SEQ ID NO: 356903 - RNA, 24 nt, Artificial Sequence
  Synthetic
aauccccauuaccugggaaugaau

SEQ ID NO: 356904 - RNA, 18 nt, Artificial Sequence
  Synthetic
aaagacaaaugaaugaau

SEQ ID NO: 356905 - RNA, 19 nt, Artificial Sequence
  Synthetic
uaaagacaaaugaaugaau

SEQ ID NO: 356906 - RNA, 20 nt, Artificial Sequence
  Synthetic
auaaagacaaaugaaugaau

SEQ ID NO: 356907 - RNA, 21 nt, Artificial Sequence
  Synthetic
aauaaagacaaaugaaugaau

SEQ ID NO: 356908 - RNA, 22 nt, Artificial Sequence
  Synthetic
aaauaaagacaaaugaaugaau

SEQ ID NO: 356909 - RNA, 23 nt, Artificial Sequence
  Synthetic
gaaauaaagacaaaugaaugaau

SEQ ID NO: 356910 - RNA, 24 nt, Artificial Sequence
  Synthetic
agaaauaaagacaaaugaaugaau

SEQ ID NO: 356911 - RNA, 18 nt, Artificial Sequence
  Synthetic
gauugacuaauaaugaau

SEQ ID NO: 356912 - RNA, 19 nt, Artificial Sequence
  Synthetic
ugauugacuaauaaugaau

SEQ ID NO: 356913 - RNA, 20 nt, Artificial Sequence
  Synthetic
uugauugacuaauaaugaau

SEQ ID NO: 356914 - RNA, 21 nt, Artificial Sequence
  Synthetic
guugauugacuaauaaugaau

SEQ ID NO: 356915 - RNA, 22 nt, Artificial Sequence
  Synthetic
uguugauugacuaauaaugaau

SEQ ID NO: 356916 - RNA, 23 nt, Artificial Sequence
  Synthetic
uuguugauugacuaauaaugaau

SEQ ID NO: 356917 - RNA, 24 nt, Artificial Sequence
  Synthetic
uuuguugauugacuaauaaugaau

SEQ ID NO: 356918 - RNA, 18 nt, Artificial Sequence
  Synthetic
uuaauucucauaaugaau

SEQ ID NO: 356919 - RNA, 19 nt, Artificial Sequence
  Synthetic
auuaauucucauaaugaau

SEQ ID NO: 356920 - RNA, 20 nt, Artificial Sequence
  Synthetic
uauuaauucucauaaugaau

SEQ ID NO: 356921 - RNA, 21 nt, Artificial Sequence
  Synthetic
cuauuaauucucauaaugaau

SEQ ID NO: 356922 - RNA, 22 nt, Artificial Sequence
  Synthetic
ucuauuaauucucauaaugaau

SEQ ID NO: 356923 - RNA, 23 nt, Artificial Sequence
  Synthetic
cucuauuaauucucauaaugaau

SEQ ID NO: 356924 - RNA, 24 nt, Artificial Sequence
  Synthetic
acucuauuaauucucauaaugaau

SEQ ID NO: 356925 - RNA, 18 nt, Artificial Sequence
  Synthetic
aggagaaggguaaugaau

SEQ ID NO: 356926 - RNA, 19 nt, Artificial Sequence
  Synthetic
gaggagaaggguaaugaau

SEQ ID NO: 356927 - RNA, 20 nt, Artificial Sequence
  Synthetic
ugaggagaaggguaaugaau

SEQ ID NO: 356928 - RNA, 21 nt, Artificial Sequence
  Synthetic
gugaggagaaggguaaugaau

SEQ ID NO: 356929 - RNA, 22 nt, Artificial Sequence
  Synthetic
ugugaggagaaggguaaugaau

SEQ ID NO: 356930 - RNA, 23 nt, Artificial Sequence
  Synthetic
gugugaggagaaggguaaugaau

SEQ ID NO: 356931 - RNA, 24 nt, Artificial Sequence
  Synthetic
ugugugaggagaaggguaaugaau

SEQ ID NO: 356932 - RNA, 18 nt, Artificial Sequence
  Synthetic
cauauccucuccaugaau

SEQ ID NO: 356933 - RNA, 19 nt, Artificial Sequence
  Synthetic
ucauauccucuccaugaau

SEQ ID NO: 356934 - RNA, 20 nt, Artificial Sequence
  Synthetic
aucauauccucuccaugaau

SEQ ID NO: 356935 - RNA, 21 nt, Artificial Sequence
  Synthetic
aaucauauccucuccaugaau

SEQ ID NO: 356936 - RNA, 22 nt, Artificial Sequence
  Synthetic
uaaucauauccucuccaugaau

SEQ ID NO: 356937 - RNA, 23 nt, Artificial Sequence
  Synthetic
cuaaucauauccucuccaugaau

SEQ ID NO: 356938 - RNA, 24 nt, Artificial Sequence
  Synthetic
ucuaaucauauccucuccaugaau

SEQ ID NO: 356939 - RNA, 18 nt, Artificial Sequence
  Synthetic
auggcaaguuccaugaau

SEQ ID NO: 356940 - RNA, 19 nt, Artificial Sequence
  Synthetic
aauggcaaguuccaugaau

SEQ ID NO: 356941 - RNA, 20 nt, Artificial Sequence
  Synthetic
aaauggcaaguuccaugaau

SEQ ID NO: 356942 - RNA, 21 nt, Artificial Sequence
  Synthetic
caaauggcaaguuccaugaau

SEQ ID NO: 356943 - RNA, 22 nt, Artificial Sequence
  Synthetic
ucaaauggcaaguuccaugaau

SEQ ID NO: 356944 - RNA, 23 nt, Artificial Sequence
  Synthetic
aucaaauggcaaguuccaugaau

SEQ ID NO: 356945 - RNA, 24 nt, Artificial Sequence
  Synthetic
uaucaaauggcaaguuccaugaau

SEQ ID NO: 356946 - RNA, 18 nt, Artificial Sequence
  Synthetic
caggaggauggcaugaau

SEQ ID NO: 356947 - RNA, 19 nt, Artificial Sequence
  Synthetic
gcaggaggauggcaugaau

SEQ ID NO: 356948 - RNA, 20 nt, Artificial Sequence
  Synthetic
ggcaggaggauggcaugaau

SEQ ID NO: 356949 - RNA, 21 nt, Artificial Sequence
  Synthetic
aggcaggaggauggcaugaau

SEQ ID NO: 356950 - RNA, 22 nt, Artificial Sequence
  Synthetic
gaggcaggaggauggcaugaau

SEQ ID NO: 356951 - RNA, 23 nt, Artificial Sequence
  Synthetic
ugaggcaggaggauggcaugaau

SEQ ID NO: 356952 - RNA, 24 nt, Artificial Sequence
  Synthetic
cugaggcaggaggauggcaugaau

SEQ ID NO: 356953 - RNA, 18 nt, Artificial Sequence
  Synthetic
uauuccauguucaugaau

SEQ ID NO: 356954 - RNA, 19 nt, Artificial Sequence
  Synthetic
auauuccauguucaugaau

SEQ ID NO: 356955 - RNA, 20 nt, Artificial Sequence
  Synthetic
cauauuccauguucaugaau

SEQ ID NO: 356956 - RNA, 21 nt, Artificial Sequence
  Synthetic
ccauauuccauguucaugaau

SEQ ID NO: 356957 - RNA, 22 nt, Artificial Sequence
  Synthetic
accauauuccauguucaugaau

SEQ ID NO: 356958 - RNA, 23 nt, Artificial Sequence
  Synthetic
gaccauauuccauguucaugaau

SEQ ID NO: 356959 - RNA, 24 nt, Artificial Sequence
  Synthetic
ggaccauauuccauguucaugaau

SEQ ID NO: 356960 - RNA, 18 nt, Artificial Sequence
  Synthetic
agccugauuuucaugaau

SEQ ID NO: 356961 - RNA, 19 nt, Artificial Sequence
  Synthetic
aagccugauuuucaugaau

SEQ ID NO: 356962 - RNA, 20 nt, Artificial Sequence
  Synthetic
gaagccugauuuucaugaau

SEQ ID NO: 356963 - RNA, 21 nt, Artificial Sequence
  Synthetic
agaagccugauuuucaugaau

SEQ ID NO: 356964 - RNA, 22 nt, Artificial Sequence
  Synthetic
cagaagccugauuuucaugaau

SEQ ID NO: 356965 - RNA, 23 nt, Artificial Sequence
  Synthetic
gcagaagccugauuuucaugaau

SEQ ID NO: 356966 - RNA, 24 nt, Artificial Sequence
  Synthetic
ggcagaagccugauuuucaugaau

SEQ ID NO: 356967 - RNA, 18 nt, Artificial Sequence
  Synthetic
aggugguaaaagaugaau

SEQ ID NO: 356968 - RNA, 19 nt, Artificial Sequence
  Synthetic
gaggugguaaaagaugaau

SEQ ID NO: 356969 - RNA, 20 nt, Artificial Sequence
  Synthetic
ugaggugguaaaagaugaau

SEQ ID NO: 356970 - RNA, 21 nt, Artificial Sequence
  Synthetic
gugaggugguaaaagaugaau

SEQ ID NO: 356971 - RNA, 22 nt, Artificial Sequence
  Synthetic
agugaggugguaaaagaugaau

SEQ ID NO: 356972 - RNA, 23 nt, Artificial Sequence
  Synthetic
aagugaggugguaaaagaugaau

SEQ ID NO: 356973 - RNA, 24 nt, Artificial Sequence
  Synthetic
aaagugaggugguaaaagaugaau

SEQ ID NO: 356974 - RNA, 18 nt, Artificial Sequence
  Synthetic
cagaaggcagagaugaau

SEQ ID NO: 356975 - RNA, 19 nt, Artificial Sequence
  Synthetic
gcagaaggcagagaugaau

SEQ ID NO: 356976 - RNA, 20 nt, Artificial Sequence
  Synthetic
ugcagaaggcagagaugaau

SEQ ID NO: 356977 - RNA, 21 nt, Artificial Sequence
  Synthetic
cugcagaaggcagagaugaau

SEQ ID NO: 356978 - RNA, 22 nt, Artificial Sequence
  Synthetic
acugcagaaggcagagaugaau

SEQ ID NO: 356979 - RNA, 23 nt, Artificial Sequence
  Synthetic
uacugcagaaggcagagaugaau

SEQ ID NO: 356980 - RNA, 24 nt, Artificial Sequence
  Synthetic
cuacugcagaaggcagagaugaau

SEQ ID NO: 356981 - RNA, 18 nt, Artificial Sequence
  Synthetic
ggaugagcauagaugaau

SEQ ID NO: 356982 - RNA, 19 nt, Artificial Sequence
  Synthetic
uggaugagcauagaugaau

SEQ ID NO: 356983 - RNA, 20 nt, Artificial Sequence
  Synthetic
auggaugagcauagaugaau

SEQ ID NO: 356984 - RNA, 21 nt, Artificial Sequence
  Synthetic
aauggaugagcauagaugaau

SEQ ID NO: 356985 - RNA, 22 nt, Artificial Sequence
  Synthetic
caauggaugagcauagaugaau

SEQ ID NO: 356986 - RNA, 23 nt, Artificial Sequence
  Synthetic
ucaauggaugagcauagaugaau

SEQ ID NO: 356987 - RNA, 24 nt, Artificial Sequence
  Synthetic
uucaauggaugagcauagaugaau

SEQ ID NO: 356988 - RNA, 18 nt, Artificial Sequence
  Synthetic
cagaauagauagaugaau

SEQ ID NO: 356989 - RNA, 19 nt, Artificial Sequence
  Synthetic
acagaauagauagaugaau

SEQ ID NO: 356990 - RNA, 20 nt, Artificial Sequence
  Synthetic
gacagaauagauagaugaau

SEQ ID NO: 356991 - RNA, 21 nt, Artificial Sequence
  Synthetic
agacagaauagauagaugaau

SEQ ID NO: 356992 - RNA, 22 nt, Artificial Sequence
  Synthetic
uagacagaauagauagaugaau

SEQ ID NO: 356993 - RNA, 23 nt, Artificial Sequence
  Synthetic
guagacagaauagauagaugaau

SEQ ID NO: 356994 - RNA, 24 nt, Artificial Sequence
  Synthetic
gguagacagaauagauagaugaau

SEQ ID NO: 356995 - RNA, 18 nt, Artificial Sequence
  Synthetic
guagggacauggaugaau

SEQ ID NO: 356996 - RNA, 19 nt, Artificial Sequence
  Synthetic
uguagggacauggaugaau

SEQ ID NO: 356997 - RNA, 20 nt, Artificial Sequence
  Synthetic
uuguagggacauggaugaau

SEQ ID NO: 356998 - RNA, 21 nt, Artificial Sequence
  Synthetic
uuuguagggacauggaugaau

SEQ ID NO: 356999 - RNA, 22 nt, Artificial Sequence
  Synthetic
cuuuguagggacauggaugaau

SEQ ID NO: 357000 - RNA, 23 nt, Artificial Sequence
  Synthetic
acuuuguagggacauggaugaau

SEQ ID NO: 357001 - RNA, 24 nt, Artificial Sequence
  Synthetic
uacuuuguagggacauggaugaau

SEQ ID NO: 357002 - RNA, 18 nt, Artificial Sequence
  Synthetic
gaauuacaguugaugaau

SEQ ID NO: 357003 - RNA, 19 nt, Artificial Sequence
  Synthetic
ugaauuacaguugaugaau

SEQ ID NO: 357004 - RNA, 20 nt, Artificial Sequence
  Synthetic
augaauuacaguugaugaau

SEQ ID NO: 357005 - RNA, 21 nt, Artificial Sequence
  Synthetic
gaugaauuacaguugaugaau

SEQ ID NO: 357006 - RNA, 22 nt, Artificial Sequence
  Synthetic
ugaugaauuacaguugaugaau

SEQ ID NO: 357007 - RNA, 23 nt, Artificial Sequence
  Synthetic
cugaugaauuacaguugaugaau

SEQ ID NO: 357008 - RNA, 24 nt, Artificial Sequence
  Synthetic
ccugaugaauuacaguugaugaau

SEQ ID NO: 357009 - RNA, 18 nt, Artificial Sequence
  Synthetic
gaucagaaguauaugaau

SEQ ID NO: 357010 - RNA, 19 nt, Artificial Sequence
  Synthetic
agaucagaaguauaugaau

SEQ ID NO: 357011 - RNA, 20 nt, Artificial Sequence
  Synthetic
gagaucagaaguauaugaau

SEQ ID NO: 357012 - RNA, 21 nt, Artificial Sequence
  Synthetic
ugagaucagaaguauaugaau

SEQ ID NO: 357013 - RNA, 22 nt, Artificial Sequence
  Synthetic
cugagaucagaaguauaugaau

SEQ ID NO: 357014 - RNA, 23 nt, Artificial Sequence
  Synthetic
acugagaucagaaguauaugaau

SEQ ID NO: 357015 - RNA, 24 nt, Artificial Sequence
  Synthetic
aacugagaucagaaguauaugaau

SEQ ID NO: 357016 - RNA, 18 nt, Artificial Sequence
  Synthetic
auuucucaucuuaugaau

SEQ ID NO: 357017 - RNA, 19 nt, Artificial Sequence
  Synthetic
aauuucucaucuuaugaau

SEQ ID NO: 357018 - RNA, 20 nt, Artificial Sequence
  Synthetic
aaauuucucaucuuaugaau

SEQ ID NO: 357019 - RNA, 21 nt, Artificial Sequence
  Synthetic
caaauuucucaucuuaugaau

SEQ ID NO: 357020 - RNA, 22 nt, Artificial Sequence
  Synthetic
gcaaauuucucaucuuaugaau

SEQ ID NO: 357021 - RNA, 23 nt, Artificial Sequence
  Synthetic
ugcaaauuucucaucuuaugaau

SEQ ID NO: 357022 - RNA, 24 nt, Artificial Sequence
  Synthetic
gugcaaauuucucaucuuaugaau

SEQ ID NO: 357023 - RNA, 18 nt, Artificial Sequence
  Synthetic
cucccaugguuuaugaau

SEQ ID NO: 357024 - RNA, 19 nt, Artificial Sequence
  Synthetic
ccucccaugguuuaugaau

SEQ ID NO: 357025 - RNA, 20 nt, Artificial Sequence
  Synthetic
cccucccaugguuuaugaau

SEQ ID NO: 357026 - RNA, 21 nt, Artificial Sequence
  Synthetic
ccccucccaugguuuaugaau

SEQ ID NO: 357027 - RNA, 22 nt, Artificial Sequence
  Synthetic
gccccucccaugguuuaugaau

SEQ ID NO: 357028 - RNA, 23 nt, Artificial Sequence
  Synthetic
ggccccucccaugguuuaugaau

SEQ ID NO: 357029 - RNA, 24 nt, Artificial Sequence
  Synthetic
aggccccucccaugguuuaugaau

SEQ ID NO: 357030 - RNA, 18 nt, Artificial Sequence
  Synthetic
aaagcaguaaaacugaau

SEQ ID NO: 357031 - RNA, 19 nt, Artificial Sequence
  Synthetic
gaaagcaguaaaacugaau

SEQ ID NO: 357032 - RNA, 20 nt, Artificial Sequence
  Synthetic
ugaaagcaguaaaacugaau

SEQ ID NO: 357033 - RNA, 21 nt, Artificial Sequence
  Synthetic
uugaaagcaguaaaacugaau

SEQ ID NO: 357034 - RNA, 22 nt, Artificial Sequence
  Synthetic
auugaaagcaguaaaacugaau

SEQ ID NO: 357035 - RNA, 23 nt, Artificial Sequence
  Synthetic
uauugaaagcaguaaaacugaau

SEQ ID NO: 357036 - RNA, 24 nt, Artificial Sequence
  Synthetic
auauugaaagcaguaaaacugaau

SEQ ID NO: 357037 - RNA, 18 nt, Artificial Sequence
  Synthetic
caguugaggaaacugaau

SEQ ID NO: 357038 - RNA, 19 nt, Artificial Sequence
  Synthetic
gcaguugaggaaacugaau

SEQ ID NO: 357039 - RNA, 20 nt, Artificial Sequence
  Synthetic
cgcaguugaggaaacugaau

SEQ ID NO: 357040 - RNA, 21 nt, Artificial Sequence
  Synthetic
ccgcaguugaggaaacugaau

SEQ ID NO: 357041 - RNA, 22 nt, Artificial Sequence
  Synthetic
cccgcaguugaggaaacugaau

SEQ ID NO: 357042 - RNA, 23 nt, Artificial Sequence
  Synthetic
ucccgcaguugaggaaacugaau

SEQ ID NO: 357043 - RNA, 24 nt, Artificial Sequence
  Synthetic
uucccgcaguugaggaaacugaau

SEQ ID NO: 357044 - RNA, 18 nt, Artificial Sequence
  Synthetic
cuucaucagucacugaau

SEQ ID NO: 357045 - RNA, 19 nt, Artificial Sequence
  Synthetic
ccuucaucagucacugaau

SEQ ID NO: 357046 - RNA, 20 nt, Artificial Sequence
  Synthetic
accuucaucagucacugaau

SEQ ID NO: 357047 - RNA, 21 nt, Artificial Sequence
  Synthetic
caccuucaucagucacugaau

SEQ ID NO: 357048 - RNA, 22 nt, Artificial Sequence
  Synthetic
ucaccuucaucagucacugaau

SEQ ID NO: 357049 - RNA, 23 nt, Artificial Sequence
  Synthetic
uucaccuucaucagucacugaau

SEQ ID NO: 357050 - RNA, 24 nt, Artificial Sequence
  Synthetic
uuucaccuucaucagucacugaau

SEQ ID NO: 357051 - RNA, 18 nt, Artificial Sequence
  Synthetic
auugaaugaauacugaau

SEQ ID NO: 357052 - RNA, 19 nt, Artificial Sequence
  Synthetic
cauugaaugaauacugaau

SEQ ID NO: 357053 - RNA, 20 nt, Artificial Sequence
  Synthetic
ucauugaaugaauacugaau

SEQ ID NO: 357054 - RNA, 21 nt, Artificial Sequence
  Synthetic
uucauugaaugaauacugaau

SEQ ID NO: 357055 - RNA, 22 nt, Artificial Sequence
  Synthetic
guucauugaaugaauacugaau

SEQ ID NO: 357056 - RNA, 23 nt, Artificial Sequence
  Synthetic
uguucauugaaugaauacugaau

SEQ ID NO: 357057 - RNA, 24 nt, Artificial Sequence
  Synthetic
auguucauugaaugaauacugaau

SEQ ID NO: 357058 - RNA, 18 nt, Artificial Sequence
  Synthetic
cccuggacuagccugaau

SEQ ID NO: 357059 - RNA, 19 nt, Artificial Sequence
  Synthetic
ucccuggacuagccugaau

SEQ ID NO: 357060 - RNA, 20 nt, Artificial Sequence
  Synthetic
cucccuggacuagccugaau

SEQ ID NO: 357061 - RNA, 21 nt, Artificial Sequence
  Synthetic
ucucccuggacuagccugaau

SEQ ID NO: 357062 - RNA, 22 nt, Artificial Sequence
  Synthetic
gucucccuggacuagccugaau

SEQ ID NO: 357063 - RNA, 23 nt, Artificial Sequence
  Synthetic
agucucccuggacuagccugaau

SEQ ID NO: 357064 - RNA, 24 nt, Artificial Sequence
  Synthetic
gagucucccuggacuagccugaau

SEQ ID NO: 357065 - RNA, 18 nt, Artificial Sequence
  Synthetic
aaaauaauaauccugaau

SEQ ID NO: 357066 - RNA, 19 nt, Artificial Sequence
  Synthetic
aaaaauaauaauccugaau

SEQ ID NO: 357067 - RNA, 20 nt, Artificial Sequence
  Synthetic
aaaaaauaauaauccugaau

SEQ ID NO: 357068 - RNA, 21 nt, Artificial Sequence
  Synthetic
gaaaaaauaauaauccugaau

SEQ ID NO: 357069 - RNA, 22 nt, Artificial Sequence
  Synthetic
ugaaaaaauaauaauccugaau

SEQ ID NO: 357070 - RNA, 23 nt, Artificial Sequence
  Synthetic
uugaaaaaauaauaauccugaau

SEQ ID NO: 357071 - RNA, 24 nt, Artificial Sequence
  Synthetic
auugaaaaaauaauaauccugaau

SEQ ID NO: 357072 - RNA, 18 nt, Artificial Sequence
  Synthetic
aacuuguuguuccugaau

SEQ ID NO: 357073 - RNA, 19 nt, Artificial Sequence
  Synthetic
uaacuuguuguuccugaau

SEQ ID NO: 357074 - RNA, 20 nt, Artificial Sequence
  Synthetic
uuaacuuguuguuccugaau

SEQ ID NO: 357075 - RNA, 21 nt, Artificial Sequence
  Synthetic
cuuaacuuguuguuccugaau

SEQ ID NO: 357076 - RNA, 22 nt, Artificial Sequence
  Synthetic
acuuaacuuguuguuccugaau

SEQ ID NO: 357077 - RNA, 23 nt, Artificial Sequence
  Synthetic
uacuuaacuuguuguuccugaau

SEQ ID NO: 357078 - RNA, 24 nt, Artificial Sequence
  Synthetic
auacuuaacuuguuguuccugaau

SEQ ID NO: 357079 - RNA, 18 nt, Artificial Sequence
  Synthetic
ucucuguauuuccugaau

SEQ ID NO: 357080 - RNA, 19 nt, Artificial Sequence
  Synthetic
uucucuguauuuccugaau

SEQ ID NO: 357081 - RNA, 20 nt, Artificial Sequence
  Synthetic
guucucuguauuuccugaau

SEQ ID NO: 357082 - RNA, 21 nt, Artificial Sequence
  Synthetic
cguucucuguauuuccugaau

SEQ ID NO: 357083 - RNA, 22 nt, Artificial Sequence
  Synthetic
gcguucucuguauuuccugaau

SEQ ID NO: 357084 - RNA, 23 nt, Artificial Sequence
  Synthetic
ggcguucucuguauuuccugaau

SEQ ID NO: 357085 - RNA, 24 nt, Artificial Sequence
  Synthetic
uggcguucucuguauuuccugaau

SEQ ID NO: 357086 - RNA, 18 nt, Artificial Sequence
  Synthetic
aacguauauuagcugaau

SEQ ID NO: 357087 - RNA, 19 nt, Artificial Sequence
  Synthetic
caacguauauuagcugaau

SEQ ID NO: 357088 - RNA, 20 nt, Artificial Sequence
  Synthetic
ucaacguauauuagcugaau

SEQ ID NO: 357089 - RNA, 21 nt, Artificial Sequence
  Synthetic
cucaacguauauuagcugaau

SEQ ID NO: 357090 - RNA, 22 nt, Artificial Sequence
  Synthetic
acucaacguauauuagcugaau

SEQ ID NO: 357091 - RNA, 23 nt, Artificial Sequence
  Synthetic
cacucaacguauauuagcugaau

SEQ ID NO: 357092 - RNA, 24 nt, Artificial Sequence
  Synthetic
gcacucaacguauauuagcugaau

SEQ ID NO: 357093 - RNA, 18 nt, Artificial Sequence
  Synthetic
cuggcaagauggcugaau

SEQ ID NO: 357094 - RNA, 19 nt, Artificial Sequence
  Synthetic
gcuggcaagauggcugaau

SEQ ID NO: 357095 - RNA, 20 nt, Artificial Sequence
  Synthetic
ggcuggcaagauggcugaau

SEQ ID NO: 357096 - RNA, 21 nt, Artificial Sequence
  Synthetic
uggcuggcaagauggcugaau

SEQ ID NO: 357097 - RNA, 22 nt, Artificial Sequence
  Synthetic
guggcuggcaagauggcugaau

SEQ ID NO: 357098 - RNA, 23 nt, Artificial Sequence
  Synthetic
aguggcuggcaagauggcugaau

SEQ ID NO: 357099 - RNA, 24 nt, Artificial Sequence
  Synthetic
aaguggcuggcaagauggcugaau

SEQ ID NO: 357100 - RNA, 18 nt, Artificial Sequence
  Synthetic
uucucuugcuugcugaau

SEQ ID NO: 357101 - RNA, 19 nt, Artificial Sequence
  Synthetic
cuucucuugcuugcugaau

SEQ ID NO: 357102 - RNA, 20 nt, Artificial Sequence
  Synthetic
ccuucucuugcuugcugaau

SEQ ID NO: 357103 - RNA, 21 nt, Artificial Sequence
  Synthetic
cccuucucuugcuugcugaau

SEQ ID NO: 357104 - RNA, 22 nt, Artificial Sequence
  Synthetic
ucccuucucuugcuugcugaau

SEQ ID NO: 357105 - RNA, 23 nt, Artificial Sequence
  Synthetic
cucccuucucuugcuugcugaau

SEQ ID NO: 357106 - RNA, 24 nt, Artificial Sequence
  Synthetic
ucucccuucucuugcuugcugaau

SEQ ID NO: 357107 - RNA, 18 nt, Artificial Sequence
  Synthetic
guauagauuccucugaau

SEQ ID NO: 357108 - RNA, 19 nt, Artificial Sequence
  Synthetic
uguauagauuccucugaau

SEQ ID NO: 357109 - RNA, 20 nt, Artificial Sequence
  Synthetic
cuguauagauuccucugaau

SEQ ID NO: 357110 - RNA, 21 nt, Artificial Sequence
  Synthetic
gcuguauagauuccucugaau

SEQ ID NO: 357111 - RNA, 22 nt, Artificial Sequence
  Synthetic
ugcuguauagauuccucugaau

SEQ ID NO: 357112 - RNA, 23 nt, Artificial Sequence
  Synthetic
uugcuguauagauuccucugaau

SEQ ID NO: 357113 - RNA, 24 nt, Artificial Sequence
  Synthetic
uuugcuguauagauuccucugaau

SEQ ID NO: 357114 - RNA, 18 nt, Artificial Sequence
  Synthetic
uaaaugaaacuucugaau

SEQ ID NO: 357115 - RNA, 19 nt, Artificial Sequence
  Synthetic
uuaaaugaaacuucugaau

SEQ ID NO: 357116 - RNA, 20 nt, Artificial Sequence
  Synthetic
cuuaaaugaaacuucugaau

SEQ ID NO: 357117 - RNA, 21 nt, Artificial Sequence
  Synthetic
ucuuaaaugaaacuucugaau

SEQ ID NO: 357118 - RNA, 22 nt, Artificial Sequence
  Synthetic
uucuuaaaugaaacuucugaau

SEQ ID NO: 357119 - RNA, 23 nt, Artificial Sequence
  Synthetic
uuucuuaaaugaaacuucugaau

SEQ ID NO: 357120 - RNA, 24 nt, Artificial Sequence
  Synthetic
guuucuuaaaugaaacuucugaau

SEQ ID NO: 357121 - RNA, 18 nt, Artificial Sequence
  Synthetic
cugaaguaacuucugaau

SEQ ID NO: 357122 - RNA, 19 nt, Artificial Sequence
  Synthetic
ucugaaguaacuucugaau

SEQ ID NO: 357123 - RNA, 20 nt, Artificial Sequence
  Synthetic
gucugaaguaacuucugaau

SEQ ID NO: 357124 - RNA, 21 nt, Artificial Sequence
  Synthetic
ugucugaaguaacuucugaau

SEQ ID NO: 357125 - RNA, 22 nt, Artificial Sequence
  Synthetic
cugucugaaguaacuucugaau

SEQ ID NO: 357126 - RNA, 23 nt, Artificial Sequence
  Synthetic
ucugucugaaguaacuucugaau

SEQ ID NO: 357127 - RNA, 24 nt, Artificial Sequence
  Synthetic
aucugucugaaguaacuucugaau

SEQ ID NO: 357128 - RNA, 18 nt, Artificial Sequence
  Synthetic
gcaugagggguucugaau

SEQ ID NO: 357129 - RNA, 19 nt, Artificial Sequence
  Synthetic
agcaugagggguucugaau

SEQ ID NO: 357130 - RNA, 20 nt, Artificial Sequence
  Synthetic
gagcaugagggguucugaau

SEQ ID NO: 357131 - RNA, 21 nt, Artificial Sequence
  Synthetic
ugagcaugagggguucugaau

SEQ ID NO: 357132 - RNA, 22 nt, Artificial Sequence
  Synthetic
augagcaugagggguucugaau

SEQ ID NO: 357133 - RNA, 23 nt, Artificial Sequence
  Synthetic
aaugagcaugagggguucugaau

SEQ ID NO: 357134 - RNA, 24 nt, Artificial Sequence
  Synthetic
gaaugagcaugagggguucugaau

SEQ ID NO: 357135 - RNA, 18 nt, Artificial Sequence
  Synthetic
cacugaaauguucugaau

SEQ ID NO: 357136 - RNA, 19 nt, Artificial Sequence
  Synthetic
ccacugaaauguucugaau

SEQ ID NO: 357137 - RNA, 20 nt, Artificial Sequence
  Synthetic
accacugaaauguucugaau

SEQ ID NO: 357138 - RNA, 21 nt, Artificial Sequence
  Synthetic
caccacugaaauguucugaau

SEQ ID NO: 357139 - RNA, 22 nt, Artificial Sequence
  Synthetic
ucaccacugaaauguucugaau

SEQ ID NO: 357140 - RNA, 23 nt, Artificial Sequence
  Synthetic
uucaccacugaaauguucugaau

SEQ ID NO: 357141 - RNA, 24 nt, Artificial Sequence
  Synthetic
cuucaccacugaaauguucugaau

SEQ ID NO: 357142 - RNA, 18 nt, Artificial Sequence
  Synthetic
uugucuugcacagugaau

SEQ ID NO: 357143 - RNA, 19 nt, Artificial Sequence
  Synthetic
uuugucuugcacagugaau

SEQ ID NO: 357144 - RNA, 20 nt, Artificial Sequence
  Synthetic
auuugucuugcacagugaau

SEQ ID NO: 357145 - RNA, 21 nt, Artificial Sequence
  Synthetic
aauuugucuugcacagugaau

SEQ ID NO: 357146 - RNA, 22 nt, Artificial Sequence
  Synthetic
aaauuugucuugcacagugaau

SEQ ID NO: 357147 - RNA, 23 nt, Artificial Sequence
  Synthetic
aaaauuugucuugcacagugaau

SEQ ID NO: 357148 - RNA, 24 nt, Artificial Sequence
  Synthetic
uaaaauuugucuugcacagugaau

SEQ ID NO: 357149 - RNA, 18 nt, Artificial Sequence
  Synthetic
gagagagaaagagugaau

SEQ ID NO: 357150 - RNA, 19 nt, Artificial Sequence
  Synthetic
agagagagaaagagugaau

SEQ ID NO: 357151 - RNA, 20 nt, Artificial Sequence
  Synthetic
gagagagagaaagagugaau

SEQ ID NO: 357152 - RNA, 21 nt, Artificial Sequence
  Synthetic
agagagagagaaagagugaau

SEQ ID NO: 357153 - RNA, 22 nt, Artificial Sequence
  Synthetic
gagagagagagaaagagugaau

SEQ ID NO: 357154 - RNA, 23 nt, Artificial Sequence
  Synthetic
ggagagagagagaaagagugaau

SEQ ID NO: 357155 - RNA, 24 nt, Artificial Sequence
  Synthetic
aggagagagagagaaagagugaau

SEQ ID NO: 357156 - RNA, 18 nt, Artificial Sequence
  Synthetic
caaccaguaguagugaau

SEQ ID NO: 357157 - RNA, 19 nt, Artificial Sequence
  Synthetic
acaaccaguaguagugaau

SEQ ID NO: 357158 - RNA, 20 nt, Artificial Sequence
  Synthetic
cacaaccaguaguagugaau

SEQ ID NO: 357159 - RNA, 21 nt, Artificial Sequence
  Synthetic
acacaaccaguaguagugaau

SEQ ID NO: 357160 - RNA, 22 nt, Artificial Sequence
  Synthetic
cacacaaccaguaguagugaau

SEQ ID NO: 357161 - RNA, 23 nt, Artificial Sequence
  Synthetic
ucacacaaccaguaguagugaau

SEQ ID NO: 357162 - RNA, 24 nt, Artificial Sequence
  Synthetic
aucacacaaccaguaguagugaau

SEQ ID NO: 357163 - RNA, 18 nt, Artificial Sequence
  Synthetic
auagcaacuaacgugaau

SEQ ID NO: 357164 - RNA, 19 nt, Artificial Sequence
  Synthetic
uauagcaacuaacgugaau

SEQ ID NO: 357165 - RNA, 20 nt, Artificial Sequence
  Synthetic
uuauagcaacuaacgugaau

SEQ ID NO: 357166 - RNA, 21 nt, Artificial Sequence
  Synthetic
guuauagcaacuaacgugaau

SEQ ID NO: 357167 - RNA, 22 nt, Artificial Sequence
  Synthetic
gguuauagcaacuaacgugaau

SEQ ID NO: 357168 - RNA, 23 nt, Artificial Sequence
  Synthetic
ggguuauagcaacuaacgugaau

SEQ ID NO: 357169 - RNA, 24 nt, Artificial Sequence
  Synthetic
gggguuauagcaacuaacgugaau

SEQ ID NO: 357170 - RNA, 18 nt, Artificial Sequence
  Synthetic
uuaaccauuuaggugaau

SEQ ID NO: 357171 - RNA, 19 nt, Artificial Sequence
  Synthetic
uuuaaccauuuaggugaau

SEQ ID NO: 357172 - RNA, 20 nt, Artificial Sequence
  Synthetic
uuuuaaccauuuaggugaau

SEQ ID NO: 357173 - RNA, 21 nt, Artificial Sequence
  Synthetic
cuuuuaaccauuuaggugaau

SEQ ID NO: 357174 - RNA, 22 nt, Artificial Sequence
  Synthetic
ccuuuuaaccauuuaggugaau

SEQ ID NO: 357175 - RNA, 23 nt, Artificial Sequence
  Synthetic
uccuuuuaaccauuuaggugaau

SEQ ID NO: 357176 - RNA, 24 nt, Artificial Sequence
  Synthetic
auccuuuuaaccauuuaggugaau

SEQ ID NO: 357177 - RNA, 18 nt, Artificial Sequence
  Synthetic
aauaaaaauugggugaau

SEQ ID NO: 357178 - RNA, 19 nt, Artificial Sequence
  Synthetic
aaauaaaaauugggugaau

SEQ ID NO: 357179 - RNA, 20 nt, Artificial Sequence
  Synthetic
aaaauaaaaauugggugaau

SEQ ID NO: 357180 - RNA, 21 nt, Artificial Sequence
  Synthetic
aaaaauaaaaauugggugaau

SEQ ID NO: 357181 - RNA, 22 nt, Artificial Sequence
  Synthetic
uaaaaauaaaaauugggugaau

SEQ ID NO: 357182 - RNA, 23 nt, Artificial Sequence
  Synthetic
auaaaaauaaaaauugggugaau

SEQ ID NO: 357183 - RNA, 24 nt, Artificial Sequence
  Synthetic
cauaaaaauaaaaauugggugaau

SEQ ID NO: 357184 - RNA, 18 nt, Artificial Sequence
  Synthetic
uguuaacaaauggugaau

SEQ ID NO: 357185 - RNA, 19 nt, Artificial Sequence
  Synthetic
auguuaacaaauggugaau

SEQ ID NO: 357186 - RNA, 20 nt, Artificial Sequence
  Synthetic
aauguuaacaaauggugaau

SEQ ID NO: 357187 - RNA, 21 nt, Artificial Sequence
  Synthetic
aaauguuaacaaauggugaau

SEQ ID NO: 357188 - RNA, 22 nt, Artificial Sequence
  Synthetic
aaaauguuaacaaauggugaau

SEQ ID NO: 357189 - RNA, 23 nt, Artificial Sequence
  Synthetic
caaaauguuaacaaauggugaau

SEQ ID NO: 357190 - RNA, 24 nt, Artificial Sequence
  Synthetic
gcaaaauguuaacaaauggugaau

SEQ ID NO: 357191 - RNA, 18 nt, Artificial Sequence
  Synthetic
uuauuggagacugugaau

SEQ ID NO: 357192 - RNA, 19 nt, Artificial Sequence
  Synthetic
cuuauuggagacugugaau

SEQ ID NO: 357193 - RNA, 20 nt, Artificial Sequence
  Synthetic
acuuauuggagacugugaau

SEQ ID NO: 357194 - RNA, 21 nt, Artificial Sequence
  Synthetic
aacuuauuggagacugugaau

SEQ ID NO: 357195 - RNA, 22 nt, Artificial Sequence
  Synthetic
uaacuuauuggagacugugaau

SEQ ID NO: 357196 - RNA, 23 nt, Artificial Sequence
  Synthetic
uuaacuuauuggagacugugaau

SEQ ID NO: 357197 - RNA, 24 nt, Artificial Sequence
  Synthetic
uuuaacuuauuggagacugugaau

SEQ ID NO: 357198 - RNA, 18 nt, Artificial Sequence
  Synthetic
guagaaauaauugugaau

SEQ ID NO: 357199 - RNA, 19 nt, Artificial Sequence
  Synthetic
aguagaaauaauugugaau

SEQ ID NO: 357200 - RNA, 20 nt, Artificial Sequence
  Synthetic
uaguagaaauaauugugaau

SEQ ID NO: 357201 - RNA, 21 nt, Artificial Sequence
  Synthetic
auaguagaaauaauugugaau

SEQ ID NO: 357202 - RNA, 22 nt, Artificial Sequence
  Synthetic
aauaguagaaauaauugugaau

SEQ ID NO: 357203 - RNA, 23 nt, Artificial Sequence
  Synthetic
aaauaguagaaauaauugugaau

SEQ ID NO: 357204 - RNA, 24 nt, Artificial Sequence
  Synthetic
uaaauaguagaaauaauugugaau

SEQ ID NO: 357205 - RNA, 18 nt, Artificial Sequence
  Synthetic
gauugaaauuuugugaau

SEQ ID NO: 357206 - RNA, 19 nt, Artificial Sequence
  Synthetic
ugauugaaauuuugugaau

SEQ ID NO: 357207 - RNA, 20 nt, Artificial Sequence
  Synthetic
uugauugaaauuuugugaau

SEQ ID NO: 357208 - RNA, 21 nt, Artificial Sequence
  Synthetic
auugauugaaauuuugugaau

SEQ ID NO: 357209 - RNA, 22 nt, Artificial Sequence
  Synthetic
uauugauugaaauuuugugaau

SEQ ID NO: 357210 - RNA, 23 nt, Artificial Sequence
  Synthetic
auauugauugaaauuuugugaau

SEQ ID NO: 357211 - RNA, 24 nt, Artificial Sequence
  Synthetic
gauauugauugaaauuuugugaau

SEQ ID NO: 357212 - RNA, 18 nt, Artificial Sequence
  Synthetic
gcccagagguaauugaau

SEQ ID NO: 357213 - RNA, 19 nt, Artificial Sequence
  Synthetic
agcccagagguaauugaau

SEQ ID NO: 357214 - RNA, 20 nt, Artificial Sequence
  Synthetic
gagcccagagguaauugaau

SEQ ID NO: 357215 - RNA, 21 nt, Artificial Sequence
  Synthetic
ggagcccagagguaauugaau

SEQ ID NO: 357216 - RNA, 22 nt, Artificial Sequence
  Synthetic
aggagcccagagguaauugaau

SEQ ID NO: 357217 - RNA, 23 nt, Artificial Sequence
  Synthetic
caggagcccagagguaauugaau

SEQ ID NO: 357218 - RNA, 24 nt, Artificial Sequence
  Synthetic
ccaggagcccagagguaauugaau

SEQ ID NO: 357219 - RNA, 18 nt, Artificial Sequence
  Synthetic
gugauuuaccuauugaau

SEQ ID NO: 357220 - RNA, 19 nt, Artificial Sequence
  Synthetic
ugugauuuaccuauugaau

SEQ ID NO: 357221 - RNA, 20 nt, Artificial Sequence
  Synthetic
cugugauuuaccuauugaau

SEQ ID NO: 357222 - RNA, 21 nt, Artificial Sequence
  Synthetic
ucugugauuuaccuauugaau

SEQ ID NO: 357223 - RNA, 22 nt, Artificial Sequence
  Synthetic
gucugugauuuaccuauugaau

SEQ ID NO: 357224 - RNA, 23 nt, Artificial Sequence
  Synthetic
ggucugugauuuaccuauugaau

SEQ ID NO: 357225 - RNA, 24 nt, Artificial Sequence
  Synthetic
aggucugugauuuaccuauugaau

SEQ ID NO: 357226 - RNA, 18 nt, Artificial Sequence
  Synthetic
agacauccccuauugaau

SEQ ID NO: 357227 - RNA, 19 nt, Artificial Sequence
  Synthetic
aagacauccccuauugaau

SEQ ID NO: 357228 - RNA, 20 nt, Artificial Sequence
  Synthetic
uaagacauccccuauugaau

SEQ ID NO: 357229 - RNA, 21 nt, Artificial Sequence
  Synthetic
cuaagacauccccuauugaau

SEQ ID NO: 357230 - RNA, 22 nt, Artificial Sequence
  Synthetic
ccuaagacauccccuauugaau

SEQ ID NO: 357231 - RNA, 23 nt, Artificial Sequence
  Synthetic
uccuaagacauccccuauugaau

SEQ ID NO: 357232 - RNA, 24 nt, Artificial Sequence
  Synthetic
guccuaagacauccccuauugaau

SEQ ID NO: 357233 - RNA, 18 nt, Artificial Sequence
  Synthetic
ucaauagauguauugaau

SEQ ID NO: 357234 - RNA, 19 nt, Artificial Sequence
  Synthetic
uucaauagauguauugaau

SEQ ID NO: 357235 - RNA, 20 nt, Artificial Sequence
  Synthetic
uuucaauagauguauugaau

SEQ ID NO: 357236 - RNA, 21 nt, Artificial Sequence
  Synthetic
guuucaauagauguauugaau

SEQ ID NO: 357237 - RNA, 22 nt, Artificial Sequence
  Synthetic
gguuucaauagauguauugaau

SEQ ID NO: 357238 - RNA, 23 nt, Artificial Sequence
  Synthetic
ugguuucaauagauguauugaau

SEQ ID NO: 357239 - RNA, 24 nt, Artificial Sequence
  Synthetic
augguuucaauagauguauugaau

SEQ ID NO: 357240 - RNA, 18 nt, Artificial Sequence
  Synthetic
uauuuuucuuuauugaau

SEQ ID NO: 357241 - RNA, 19 nt, Artificial Sequence
  Synthetic
auauuuuucuuuauugaau

SEQ ID NO: 357242 - RNA, 20 nt, Artificial Sequence
  Synthetic
uauauuuuucuuuauugaau

SEQ ID NO: 357243 - RNA, 21 nt, Artificial Sequence
  Synthetic
uuauauuuuucuuuauugaau

SEQ ID NO: 357244 - RNA, 22 nt, Artificial Sequence
  Synthetic
cuuauauuuuucuuuauugaau

SEQ ID NO: 357245 - RNA, 23 nt, Artificial Sequence
  Synthetic
acuuauauuuuucuuuauugaau

SEQ ID NO: 357246 - RNA, 24 nt, Artificial Sequence
  Synthetic
uacuuauauuuuucuuuauugaau

SEQ ID NO: 357247 - RNA, 18 nt, Artificial Sequence
  Synthetic
gaaagggcaaacuugaau

SEQ ID NO: 357248 - RNA, 19 nt, Artificial Sequence
  Synthetic
agaaagggcaaacuugaau

SEQ ID NO: 357249 - RNA, 20 nt, Artificial Sequence
  Synthetic
gagaaagggcaaacuugaau

SEQ ID NO: 357250 - RNA, 21 nt, Artificial Sequence
  Synthetic
ggagaaagggcaaacuugaau

SEQ ID NO: 357251 - RNA, 22 nt, Artificial Sequence
  Synthetic
uggagaaagggcaaacuugaau

SEQ ID NO: 357252 - RNA, 23 nt, Artificial Sequence
  Synthetic
guggagaaagggcaaacuugaau

SEQ ID NO: 357253 - RNA, 24 nt, Artificial Sequence
  Synthetic
gguggagaaagggcaaacuugaau

SEQ ID NO: 357254 - RNA, 18 nt, Artificial Sequence
  Synthetic
augauaauuuacuugaau

SEQ ID NO: 357255 - RNA, 19 nt, Artificial Sequence
  Synthetic
aaugauaauuuacuugaau

SEQ ID NO: 357256 - RNA, 20 nt, Artificial Sequence
  Synthetic
aaaugauaauuuacuugaau

SEQ ID NO: 357257 - RNA, 21 nt, Artificial Sequence
  Synthetic
aaaaugauaauuuacuugaau

SEQ ID NO: 357258 - RNA, 22 nt, Artificial Sequence
  Synthetic
caaaaugauaauuuacuugaau

SEQ ID NO: 357259 - RNA, 23 nt, Artificial Sequence
  Synthetic
gcaaaaugauaauuuacuugaau

SEQ ID NO: 357260 - RNA, 24 nt, Artificial Sequence
  Synthetic
ggcaaaaugauaauuuacuugaau

SEQ ID NO: 357261 - RNA, 18 nt, Artificial Sequence
  Synthetic
agccugaggagcuugaau

SEQ ID NO: 357262 - RNA, 19 nt, Artificial Sequence
  Synthetic
uagccugaggagcuugaau

SEQ ID NO: 357263 - RNA, 20 nt, Artificial Sequence
  Synthetic
uuagccugaggagcuugaau

SEQ ID NO: 357264 - RNA, 21 nt, Artificial Sequence
  Synthetic
guuagccugaggagcuugaau

SEQ ID NO: 357265 - RNA, 22 nt, Artificial Sequence
  Synthetic
uguuagccugaggagcuugaau

SEQ ID NO: 357266 - RNA, 23 nt, Artificial Sequence
  Synthetic
uuguuagccugaggagcuugaau

SEQ ID NO: 357267 - RNA, 24 nt, Artificial Sequence
  Synthetic
guuguuagccugaggagcuugaau

SEQ ID NO: 357268 - RNA, 18 nt, Artificial Sequence
  Synthetic
uaguauaaagucuugaau

SEQ ID NO: 357269 - RNA, 19 nt, Artificial Sequence
  Synthetic
auaguauaaagucuugaau

SEQ ID NO: 357270 - RNA, 20 nt, Artificial Sequence
  Synthetic
gauaguauaaagucuugaau

SEQ ID NO: 357271 - RNA, 21 nt, Artificial Sequence
  Synthetic
agauaguauaaagucuugaau

SEQ ID NO: 357272 - RNA, 22 nt, Artificial Sequence
  Synthetic
gagauaguauaaagucuugaau

SEQ ID NO: 357273 - RNA, 23 nt, Artificial Sequence
  Synthetic
agagauaguauaaagucuugaau

SEQ ID NO: 357274 - RNA, 24 nt, Artificial Sequence
  Synthetic
aagagauaguauaaagucuugaau

SEQ ID NO: 357275 - RNA, 18 nt, Artificial Sequence
  Synthetic
acgauugcagaguugaau

SEQ ID NO: 357276 - RNA, 19 nt, Artificial Sequence
  Synthetic
aacgauugcagaguugaau

SEQ ID NO: 357277 - RNA, 20 nt, Artificial Sequence
  Synthetic
gaacgauugcagaguugaau

SEQ ID NO: 357278 - RNA, 21 nt, Artificial Sequence
  Synthetic
ugaacgauugcagaguugaau

SEQ ID NO: 357279 - RNA, 22 nt, Artificial Sequence
  Synthetic
uugaacgauugcagaguugaau

SEQ ID NO: 357280 - RNA, 23 nt, Artificial Sequence
  Synthetic
guugaacgauugcagaguugaau

SEQ ID NO: 357281 - RNA, 24 nt, Artificial Sequence
  Synthetic
aguugaacgauugcagaguugaau

SEQ ID NO: 357282 - RNA, 18 nt, Artificial Sequence
  Synthetic
uuguuccugggguugaau

SEQ ID NO: 357283 - RNA, 19 nt, Artificial Sequence
  Synthetic
auuguuccugggguugaau

SEQ ID NO: 357284 - RNA, 20 nt, Artificial Sequence
  Synthetic
aauuguuccugggguugaau

SEQ ID NO: 357285 - RNA, 21 nt, Artificial Sequence
  Synthetic
caauuguuccugggguugaau

SEQ ID NO: 357286 - RNA, 22 nt, Artificial Sequence
  Synthetic
gcaauuguuccugggguugaau

SEQ ID NO: 357287 - RNA, 23 nt, Artificial Sequence
  Synthetic
cgcaauuguuccugggguugaau

SEQ ID NO: 357288 - RNA, 24 nt, Artificial Sequence
  Synthetic
gcgcaauuguuccugggguugaau

SEQ ID NO: 357289 - RNA, 18 nt, Artificial Sequence
  Synthetic
guugauaaaaguuugaau

SEQ ID NO: 357290 - RNA, 19 nt, Artificial Sequence
  Synthetic
aguugauaaaaguuugaau

SEQ ID NO: 357291 - RNA, 20 nt, Artificial Sequence
  Synthetic
caguugauaaaaguuugaau

SEQ ID NO: 357292 - RNA, 21 nt, Artificial Sequence
  Synthetic
ucaguugauaaaaguuugaau

SEQ ID NO: 357293 - RNA, 22 nt, Artificial Sequence
  Synthetic
gucaguugauaaaaguuugaau

SEQ ID NO: 357294 - RNA, 23 nt, Artificial Sequence
  Synthetic
ugucaguugauaaaaguuugaau

SEQ ID NO: 357295 - RNA, 24 nt, Artificial Sequence
  Synthetic
augucaguugauaaaaguuugaau

SEQ ID NO: 357296 - RNA, 18 nt, Artificial Sequence
  Synthetic
uaaaccuagaguuugaau

SEQ ID NO: 357297 - RNA, 19 nt, Artificial Sequence
  Synthetic
guaaaccuagaguuugaau

SEQ ID NO: 357298 - RNA, 20 nt, Artificial Sequence
  Synthetic
gguaaaccuagaguuugaau

SEQ ID NO: 357299 - RNA, 21 nt, Artificial Sequence
  Synthetic
ugguaaaccuagaguuugaau

SEQ ID NO: 357300 - RNA, 22 nt, Artificial Sequence
  Synthetic
uugguaaaccuagaguuugaau

SEQ ID NO: 357301 - RNA, 23 nt, Artificial Sequence
  Synthetic
cuugguaaaccuagaguuugaau

SEQ ID NO: 357302 - RNA, 24 nt, Artificial Sequence
  Synthetic
gcuugguaaaccuagaguuugaau

SEQ ID NO: 357303 - RNA, 18 nt, Artificial Sequence
  Synthetic
agcauaauggguuugaau

SEQ ID NO: 357304 - RNA, 19 nt, Artificial Sequence
  Synthetic
cagcauaauggguuugaau

SEQ ID NO: 357305 - RNA, 20 nt, Artificial Sequence
  Synthetic
gcagcauaauggguuugaau

SEQ ID NO: 357306 - RNA, 21 nt, Artificial Sequence
  Synthetic
agcagcauaauggguuugaau

SEQ ID NO: 357307 - RNA, 22 nt, Artificial Sequence
  Synthetic
uagcagcauaauggguuugaau

SEQ ID NO: 357308 - RNA, 23 nt, Artificial Sequence
  Synthetic
guagcagcauaauggguuugaau

SEQ ID NO: 357309 - RNA, 24 nt, Artificial Sequence
  Synthetic
aguagcagcauaauggguuugaau

SEQ ID NO: 357310 - RNA, 18 nt, Artificial Sequence
  Synthetic
gucugaggaaaaaauaau

SEQ ID NO: 357311 - RNA, 19 nt, Artificial Sequence
  Synthetic
agucugaggaaaaaauaau

SEQ ID NO: 357312 - RNA, 20 nt, Artificial Sequence
  Synthetic
gagucugaggaaaaaauaau

SEQ ID NO: 357313 - RNA, 21 nt, Artificial Sequence
  Synthetic
agagucugaggaaaaaauaau

SEQ ID NO: 357314 - RNA, 22 nt, Artificial Sequence
  Synthetic
gagagucugaggaaaaaauaau

SEQ ID NO: 357315 - RNA, 23 nt, Artificial Sequence
  Synthetic
agagagucugaggaaaaaauaau

SEQ ID NO: 357316 - RNA, 24 nt, Artificial Sequence
  Synthetic
gagagagucugaggaaaaaauaau

SEQ ID NO: 357317 - RNA, 18 nt, Artificial Sequence
  Synthetic
cacauuuauaaaaauaau

SEQ ID NO: 357318 - RNA, 19 nt, Artificial Sequence
  Synthetic
ucacauuuauaaaaauaau

SEQ ID NO: 357319 - RNA, 20 nt, Artificial Sequence
  Synthetic
cucacauuuauaaaaauaau

SEQ ID NO: 357320 - RNA, 21 nt, Artificial Sequence
  Synthetic
ccucacauuuauaaaaauaau

SEQ ID NO: 357321 - RNA, 22 nt, Artificial Sequence
  Synthetic
cccucacauuuauaaaaauaau

SEQ ID NO: 357322 - RNA, 23 nt, Artificial Sequence
  Synthetic
ccccucacauuuauaaaaauaau

SEQ ID NO: 357323 - RNA, 24 nt, Artificial Sequence
  Synthetic
cccccucacauuuauaaaaauaau

SEQ ID NO: 357324 - RNA, 18 nt, Artificial Sequence
  Synthetic
gacauaucucaaaauaau

SEQ ID NO: 357325 - RNA, 19 nt, Artificial Sequence
  Synthetic
ggacauaucucaaaauaau

SEQ ID NO: 357326 - RNA, 20 nt, Artificial Sequence
  Synthetic
gggacauaucucaaaauaau

SEQ ID NO: 357327 - RNA, 21 nt, Artificial Sequence
  Synthetic
ugggacauaucucaaaauaau

SEQ ID NO: 357328 - RNA, 22 nt, Artificial Sequence
  Synthetic
augggacauaucucaaaauaau

SEQ ID NO: 357329 - RNA, 23 nt, Artificial Sequence
  Synthetic
gaugggacauaucucaaaauaau

SEQ ID NO: 357330 - RNA, 24 nt, Artificial Sequence
  Synthetic
ugaugggacauaucucaaaauaau

SEQ ID NO: 357331 - RNA, 18 nt, Artificial Sequence
  Synthetic
aacguaucucaaaauaau

SEQ ID NO: 357332 - RNA, 19 nt, Artificial Sequence
  Synthetic
gaacguaucucaaaauaau

SEQ ID NO: 357333 - RNA, 20 nt, Artificial Sequence
  Synthetic
ggaacguaucucaaaauaau

SEQ ID NO: 357334 - RNA, 21 nt, Artificial Sequence
  Synthetic
uggaacguaucucaaaauaau

SEQ ID NO: 357335 - RNA, 22 nt, Artificial Sequence
  Synthetic
auggaacguaucucaaaauaau

SEQ ID NO: 357336 - RNA, 23 nt, Artificial Sequence
  Synthetic
gauggaacguaucucaaaauaau

SEQ ID NO: 357337 - RNA, 24 nt, Artificial Sequence
  Synthetic
ugauggaacguaucucaaaauaau

SEQ ID NO: 357338 - RNA, 18 nt, Artificial Sequence
  Synthetic
uauuauuacgaaaauaau

SEQ ID NO: 357339 - RNA, 19 nt, Artificial Sequence
  Synthetic
guauuauuacgaaaauaau

SEQ ID NO: 357340 - RNA, 20 nt, Artificial Sequence
  Synthetic
aguauuauuacgaaaauaau

SEQ ID NO: 357341 - RNA, 21 nt, Artificial Sequence
  Synthetic
uaguauuauuacgaaaauaau

SEQ ID NO: 357342 - RNA, 22 nt, Artificial Sequence
  Synthetic
uuaguauuauuacgaaaauaau

SEQ ID NO: 357343 - RNA, 23 nt, Artificial Sequence
  Synthetic
cuuaguauuauuacgaaaauaau

SEQ ID NO: 357344 - RNA, 24 nt, Artificial Sequence
  Synthetic
ucuuaguauuauuacgaaaauaau

SEQ ID NO: 357345 - RNA, 18 nt, Artificial Sequence
  Synthetic
ugaagaaaugaaaauaau

SEQ ID NO: 357346 - RNA, 19 nt, Artificial Sequence
  Synthetic
cugaagaaaugaaaauaau

SEQ ID NO: 357347 - RNA, 20 nt, Artificial Sequence
  Synthetic
ucugaagaaaugaaaauaau

SEQ ID NO: 357348 - RNA, 21 nt, Artificial Sequence
  Synthetic
gucugaagaaaugaaaauaau

SEQ ID NO: 357349 - RNA, 22 nt, Artificial Sequence
  Synthetic
agucugaagaaaugaaaauaau

SEQ ID NO: 357350 - RNA, 23 nt, Artificial Sequence
  Synthetic
aagucugaagaaaugaaaauaau

SEQ ID NO: 357351 - RNA, 24 nt, Artificial Sequence
  Synthetic
aaagucugaagaaaugaaaauaau

SEQ ID NO: 357352 - RNA, 18 nt, Artificial Sequence
  Synthetic
uuaguaaaauaaaauaau

SEQ ID NO: 357353 - RNA, 19 nt, Artificial Sequence
  Synthetic
auuaguaaaauaaaauaau

SEQ ID NO: 357354 - RNA, 20 nt, Artificial Sequence
  Synthetic
aauuaguaaaauaaaauaau

SEQ ID NO: 357355 - RNA, 21 nt, Artificial Sequence
  Synthetic
uaauuaguaaaauaaaauaau

SEQ ID NO: 357356 - RNA, 22 nt, Artificial Sequence
  Synthetic
guaauuaguaaaauaaaauaau

SEQ ID NO: 357357 - RNA, 23 nt, Artificial Sequence
  Synthetic
aguaauuaguaaaauaaaauaau

SEQ ID NO: 357358 - RNA, 24 nt, Artificial Sequence
  Synthetic
caguaauuaguaaaauaaaauaau

SEQ ID NO: 357359 - RNA, 18 nt, Artificial Sequence
  Synthetic
caccaauauagaaauaau

SEQ ID NO: 357360 - RNA, 19 nt, Artificial Sequence
  Synthetic
ucaccaauauagaaauaau

SEQ ID NO: 357361 - RNA, 20 nt, Artificial Sequence
  Synthetic
aucaccaauauagaaauaau

SEQ ID NO: 357362 - RNA, 21 nt, Artificial Sequence
  Synthetic
uaucaccaauauagaaauaau

SEQ ID NO: 357363 - RNA, 22 nt, Artificial Sequence
  Synthetic
cuaucaccaauauagaaauaau

SEQ ID NO: 357364 - RNA, 23 nt, Artificial Sequence
  Synthetic
acuaucaccaauauagaaauaau

SEQ ID NO: 357365 - RNA, 24 nt, Artificial Sequence
  Synthetic
uacuaucaccaauauagaaauaau

SEQ ID NO: 357366 - RNA, 18 nt, Artificial Sequence
  Synthetic
cuuuagaaaauaaauaau

SEQ ID NO: 357367 - RNA, 19 nt, Artificial Sequence
  Synthetic
acuuuagaaaauaaauaau

SEQ ID NO: 357368 - RNA, 20 nt, Artificial Sequence
  Synthetic
aacuuuagaaaauaaauaau

SEQ ID NO: 357369 - RNA, 21 nt, Artificial Sequence
  Synthetic
uaacuuuagaaaauaaauaau

SEQ ID NO: 357370 - RNA, 22 nt, Artificial Sequence
  Synthetic
cuaacuuuagaaaauaaauaau

SEQ ID NO: 357371 - RNA, 23 nt, Artificial Sequence
  Synthetic
ucuaacuuuagaaaauaaauaau

SEQ ID NO: 357372 - RNA, 24 nt, Artificial Sequence
  Synthetic
uucuaacuuuagaaaauaaauaau

SEQ ID NO: 357373 - RNA, 18 nt, Artificial Sequence
  Synthetic
cucaaauaaauaaauaau

SEQ ID NO: 357374 - RNA, 19 nt, Artificial Sequence
  Synthetic
ucucaaauaaauaaauaau

SEQ ID NO: 357375 - RNA, 20 nt, Artificial Sequence
  Synthetic
gucucaaauaaauaaauaau

SEQ ID NO: 357376 - RNA, 21 nt, Artificial Sequence
  Synthetic
cgucucaaauaaauaaauaau

SEQ ID NO: 357377 - RNA, 22 nt, Artificial Sequence
  Synthetic
ccgucucaaauaaauaaauaau

SEQ ID NO: 357378 - RNA, 23 nt, Artificial Sequence
  Synthetic
uccgucucaaauaaauaaauaau

SEQ ID NO: 357379 - RNA, 24 nt, Artificial Sequence
  Synthetic
cuccgucucaaauaaauaaauaau

SEQ ID NO: 357380 - RNA, 18 nt, Artificial Sequence
  Synthetic
aauaugcuaguaaauaau

SEQ ID NO: 357381 - RNA, 19 nt, Artificial Sequence
  Synthetic
aaauaugcuaguaaauaau

SEQ ID NO: 357382 - RNA, 20 nt, Artificial Sequence
  Synthetic
aaaauaugcuaguaaauaau

SEQ ID NO: 357383 - RNA, 21 nt, Artificial Sequence
  Synthetic
aaaaauaugcuaguaaauaau

SEQ ID NO: 357384 - RNA, 22 nt, Artificial Sequence
  Synthetic
aaaaaauaugcuaguaaauaau

SEQ ID NO: 357385 - RNA, 23 nt, Artificial Sequence
  Synthetic
aaaaaaauaugcuaguaaauaau

SEQ ID NO: 357386 - RNA, 24 nt, Artificial Sequence
  Synthetic
gaaaaaaauaugcuaguaaauaau

SEQ ID NO: 357387 - RNA, 18 nt, Artificial Sequence
  Synthetic
uccagaaauguaaauaau

SEQ ID NO: 357388 - RNA, 19 nt, Artificial Sequence
  Synthetic
uuccagaaauguaaauaau

SEQ ID NO: 357389 - RNA, 20 nt, Artificial Sequence
  Synthetic
cuuccagaaauguaaauaau

SEQ ID NO: 357390 - RNA, 21 nt, Artificial Sequence
  Synthetic
gcuuccagaaauguaaauaau

SEQ ID NO: 357391 - RNA, 22 nt, Artificial Sequence
  Synthetic
ugcuuccagaaauguaaauaau

SEQ ID NO: 357392 - RNA, 23 nt, Artificial Sequence
  Synthetic
uugcuuccagaaauguaaauaau

SEQ ID NO: 357393 - RNA, 24 nt, Artificial Sequence
  Synthetic
uuugcuuccagaaauguaaauaau

SEQ ID NO: 357394 - RNA, 18 nt, Artificial Sequence
  Synthetic
uuuaggaacuacaauaau

SEQ ID NO: 357395 - RNA, 19 nt, Artificial Sequence
  Synthetic
auuuaggaacuacaauaau

SEQ ID NO: 357396 - RNA, 20 nt, Artificial Sequence
  Synthetic
cauuuaggaacuacaauaau

SEQ ID NO: 357397 - RNA, 21 nt, Artificial Sequence
  Synthetic
acauuuaggaacuacaauaau

SEQ ID NO: 357398 - RNA, 22 nt, Artificial Sequence
  Synthetic
uacauuuaggaacuacaauaau

SEQ ID NO: 357399 - RNA, 23 nt, Artificial Sequence
  Synthetic
uuacauuuaggaacuacaauaau

SEQ ID NO: 357400 - RNA, 24 nt, Artificial Sequence
  Synthetic
auuacauuuaggaacuacaauaau

SEQ ID NO: 357401 - RNA, 18 nt, Artificial Sequence
  Synthetic
ugucucugcaucaauaau

SEQ ID NO: 357402 - RNA, 19 nt, Artificial Sequence
  Synthetic
augucucugcaucaauaau

SEQ ID NO: 357403 - RNA, 20 nt, Artificial Sequence
  Synthetic
aaugucucugcaucaauaau

SEQ ID NO: 357404 - RNA, 21 nt, Artificial Sequence
  Synthetic
aaaugucucugcaucaauaau

SEQ ID NO: 357405 - RNA, 22 nt, Artificial Sequence
  Synthetic
uaaaugucucugcaucaauaau

SEQ ID NO: 357406 - RNA, 23 nt, Artificial Sequence
  Synthetic
auaaaugucucugcaucaauaau

SEQ ID NO: 357407 - RNA, 24 nt, Artificial Sequence
  Synthetic
aauaaaugucucugcaucaauaau

SEQ ID NO: 357408 - RNA, 18 nt, Artificial Sequence
  Synthetic
acagguuuaaagaauaau

SEQ ID NO: 357409 - RNA, 19 nt, Artificial Sequence
  Synthetic
cacagguuuaaagaauaau

SEQ ID NO: 357410 - RNA, 20 nt, Artificial Sequence
  Synthetic
gcacagguuuaaagaauaau

SEQ ID NO: 357411 - RNA, 21 nt, Artificial Sequence
  Synthetic
agcacagguuuaaagaauaau

SEQ ID NO: 357412 - RNA, 22 nt, Artificial Sequence
  Synthetic
cagcacagguuuaaagaauaau

SEQ ID NO: 357413 - RNA, 23 nt, Artificial Sequence
  Synthetic
acagcacagguuuaaagaauaau

SEQ ID NO: 357414 - RNA, 24 nt, Artificial Sequence
  Synthetic
gacagcacagguuuaaagaauaau

SEQ ID NO: 357415 - RNA, 18 nt, Artificial Sequence
  Synthetic
gaguugaaguagaauaau

SEQ ID NO: 357416 - RNA, 19 nt, Artificial Sequence
  Synthetic
ugaguugaaguagaauaau

SEQ ID NO: 357417 - RNA, 20 nt, Artificial Sequence
  Synthetic
cugaguugaaguagaauaau

SEQ ID NO: 357418 - RNA, 21 nt, Artificial Sequence
  Synthetic
gcugaguugaaguagaauaau

SEQ ID NO: 357419 - RNA, 22 nt, Artificial Sequence
  Synthetic
ugcugaguugaaguagaauaau

SEQ ID NO: 357420 - RNA, 23 nt, Artificial Sequence
  Synthetic
uugcugaguugaaguagaauaau

SEQ ID NO: 357421 - RNA, 24 nt, Artificial Sequence
  Synthetic
auugcugaguugaaguagaauaau

SEQ ID NO: 357422 - RNA, 18 nt, Artificial Sequence
  Synthetic
acaggcagcaggaauaau

SEQ ID NO: 357423 - RNA, 19 nt, Artificial Sequence
  Synthetic
cacaggcagcaggaauaau

SEQ ID NO: 357424 - RNA, 20 nt, Artificial Sequence
  Synthetic
ccacaggcagcaggaauaau

SEQ ID NO: 357425 - RNA, 21 nt, Artificial Sequence
  Synthetic
uccacaggcagcaggaauaau

SEQ ID NO: 357426 - RNA, 22 nt, Artificial Sequence
  Synthetic
guccacaggcagcaggaauaau

SEQ ID NO: 357427 - RNA, 23 nt, Artificial Sequence
  Synthetic
aguccacaggcagcaggaauaau

SEQ ID NO: 357428 - RNA, 24 nt, Artificial Sequence
  Synthetic
caguccacaggcagcaggaauaau

SEQ ID NO: 357429 - RNA, 18 nt, Artificial Sequence
  Synthetic
uuuccagcacauaauaau

SEQ ID NO: 357430 - RNA, 19 nt, Artificial Sequence
  Synthetic
uuuuccagcacauaauaau

SEQ ID NO: 357431 - RNA, 20 nt, Artificial Sequence
  Synthetic
auuuuccagcacauaauaau

SEQ ID NO: 357432 - RNA, 21 nt, Artificial Sequence
  Synthetic
gauuuuccagcacauaauaau

SEQ ID NO: 357433 - RNA, 22 nt, Artificial Sequence
  Synthetic
cgauuuuccagcacauaauaau

SEQ ID NO: 357434 - RNA, 23 nt, Artificial Sequence
  Synthetic
ccgauuuuccagcacauaauaau

SEQ ID NO: 357435 - RNA, 24 nt, Artificial Sequence
  Synthetic
uccgauuuuccagcacauaauaau

SEQ ID NO: 357436 - RNA, 18 nt, Artificial Sequence
  Synthetic
caggggaauuauaauaau

SEQ ID NO: 357437 - RNA, 19 nt, Artificial Sequence
  Synthetic
acaggggaauuauaauaau

SEQ ID NO: 357438 - RNA, 20 nt, Artificial Sequence
  Synthetic
gacaggggaauuauaauaau

SEQ ID NO: 357439 - RNA, 21 nt, Artificial Sequence
  Synthetic
ugacaggggaauuauaauaau

SEQ ID NO: 357440 - RNA, 22 nt, Artificial Sequence
  Synthetic
cugacaggggaauuauaauaau

SEQ ID NO: 357441 - RNA, 23 nt, Artificial Sequence
  Synthetic
ucugacaggggaauuauaauaau

SEQ ID NO: 357442 - RNA, 24 nt, Artificial Sequence
  Synthetic
uucugacaggggaauuauaauaau

SEQ ID NO: 357443 - RNA, 18 nt, Artificial Sequence
  Synthetic
ucuguuguaucuaauaau

SEQ ID NO: 357444 - RNA, 19 nt, Artificial Sequence
  Synthetic
uucuguuguaucuaauaau

SEQ ID NO: 357445 - RNA, 20 nt, Artificial Sequence
  Synthetic
cuucuguuguaucuaauaau

SEQ ID NO: 357446 - RNA, 21 nt, Artificial Sequence
  Synthetic
ucuucuguuguaucuaauaau

SEQ ID NO: 357447 - RNA, 22 nt, Artificial Sequence
  Synthetic
aucuucuguuguaucuaauaau

SEQ ID NO: 357448 - RNA, 23 nt, Artificial Sequence
  Synthetic
uaucuucuguuguaucuaauaau

SEQ ID NO: 357449 - RNA, 24 nt, Artificial Sequence
  Synthetic
cuaucuucuguuguaucuaauaau

SEQ ID NO: 357450 - RNA, 18 nt, Artificial Sequence
  Synthetic
ccuuaucucaguaauaau

SEQ ID NO: 357451 - RNA, 19 nt, Artificial Sequence
  Synthetic
uccuuaucucaguaauaau

SEQ ID NO: 357452 - RNA, 20 nt, Artificial Sequence
  Synthetic
guccuuaucucaguaauaau

SEQ ID NO: 357453 - RNA, 21 nt, Artificial Sequence
  Synthetic
aguccuuaucucaguaauaau

SEQ ID NO: 357454 - RNA, 22 nt, Artificial Sequence
  Synthetic
gaguccuuaucucaguaauaau

SEQ ID NO: 357455 - RNA, 23 nt, Artificial Sequence
  Synthetic
agaguccuuaucucaguaauaau

SEQ ID NO: 357456 - RNA, 24 nt, Artificial Sequence
  Synthetic
gagaguccuuaucucaguaauaau

SEQ ID NO: 357457 - RNA, 18 nt, Artificial Sequence
  Synthetic
auucaguucuguaauaau

SEQ ID NO: 357458 - RNA, 19 nt, Artificial Sequence
  Synthetic
gauucaguucuguaauaau

SEQ ID NO: 357459 - RNA, 20 nt, Artificial Sequence
  Synthetic
agauucaguucuguaauaau

SEQ ID NO: 357460 - RNA, 21 nt, Artificial Sequence
  Synthetic
uagauucaguucuguaauaau

SEQ ID NO: 357461 - RNA, 22 nt, Artificial Sequence
  Synthetic
auagauucaguucuguaauaau

SEQ ID NO: 357462 - RNA, 23 nt, Artificial Sequence
  Synthetic
cauagauucaguucuguaauaau

SEQ ID NO: 357463 - RNA, 24 nt, Artificial Sequence
  Synthetic
ucauagauucaguucuguaauaau

SEQ ID NO: 357464 - RNA, 18 nt, Artificial Sequence
  Synthetic
ugauuagcuauuaauaau

SEQ ID NO: 357465 - RNA, 19 nt, Artificial Sequence
  Synthetic
augauuagcuauuaauaau

SEQ ID NO: 357466 - RNA, 20 nt, Artificial Sequence
  Synthetic
aaugauuagcuauuaauaau

SEQ ID NO: 357467 - RNA, 21 nt, Artificial Sequence
  Synthetic
uaaugauuagcuauuaauaau

SEQ ID NO: 357468 - RNA, 22 nt, Artificial Sequence
  Synthetic
auaaugauuagcuauuaauaau

SEQ ID NO: 357469 - RNA, 23 nt, Artificial Sequence
  Synthetic
aauaaugauuagcuauuaauaau

SEQ ID NO: 357470 - RNA, 24 nt, Artificial Sequence
  Synthetic
gaauaaugauuagcuauuaauaau

SEQ ID NO: 357471 - RNA, 18 nt, Artificial Sequence
  Synthetic
gauggagcaaaacauaau

SEQ ID NO: 357472 - RNA, 19 nt, Artificial Sequence
  Synthetic
agauggagcaaaacauaau

SEQ ID NO: 357473 - RNA, 20 nt, Artificial Sequence
  Synthetic
uagauggagcaaaacauaau

SEQ ID NO: 357474 - RNA, 21 nt, Artificial Sequence
  Synthetic
uuagauggagcaaaacauaau

SEQ ID NO: 357475 - RNA, 22 nt, Artificial Sequence
  Synthetic
auuagauggagcaaaacauaau

SEQ ID NO: 357476 - RNA, 23 nt, Artificial Sequence
  Synthetic
gauuagauggagcaaaacauaau

SEQ ID NO: 357477 - RNA, 24 nt, Artificial Sequence
  Synthetic
ggauuagauggagcaaaacauaau

SEQ ID NO: 357478 - RNA, 18 nt, Artificial Sequence
  Synthetic
uaaaauugaccacauaau

SEQ ID NO: 357479 - RNA, 19 nt, Artificial Sequence
  Synthetic
auaaaauugaccacauaau

SEQ ID NO: 357480 - RNA, 20 nt, Artificial Sequence
  Synthetic
uauaaaauugaccacauaau

SEQ ID NO: 357481 - RNA, 21 nt, Artificial Sequence
  Synthetic
uuauaaaauugaccacauaau

SEQ ID NO: 357482 - RNA, 22 nt, Artificial Sequence
  Synthetic
auuauaaaauugaccacauaau

SEQ ID NO: 357483 - RNA, 23 nt, Artificial Sequence
  Synthetic
uauuauaaaauugaccacauaau

SEQ ID NO: 357484 - RNA, 24 nt, Artificial Sequence
  Synthetic
uuauuauaaaauugaccacauaau

SEQ ID NO: 357485 - RNA, 18 nt, Artificial Sequence
  Synthetic
ugacuuucuucacauaau

SEQ ID NO: 357486 - RNA, 19 nt, Artificial Sequence
  Synthetic
uugacuuucuucacauaau

SEQ ID NO: 357487 - RNA, 20 nt, Artificial Sequence
  Synthetic
auugacuuucuucacauaau

SEQ ID NO: 357488 - RNA, 21 nt, Artificial Sequence
  Synthetic
cauugacuuucuucacauaau

SEQ ID NO: 357489 - RNA, 22 nt, Artificial Sequence
  Synthetic
ccauugacuuucuucacauaau

SEQ ID NO: 357490 - RNA, 23 nt, Artificial Sequence
  Synthetic
accauugacuuucuucacauaau

SEQ ID NO: 357491 - RNA, 24 nt, Artificial Sequence
  Synthetic
uaccauugacuuucuucacauaau

SEQ ID NO: 357492 - RNA, 18 nt, Artificial Sequence
  Synthetic
gauuuuguucgacauaau

SEQ ID NO: 357493 - RNA, 19 nt, Artificial Sequence
  Synthetic
ggauuuuguucgacauaau

SEQ ID NO: 357494 - RNA, 20 nt, Artificial Sequence
  Synthetic
gggauuuuguucgacauaau

SEQ ID NO: 357495 - RNA, 21 nt, Artificial Sequence
  Synthetic
ggggauuuuguucgacauaau

SEQ ID NO: 357496 - RNA, 22 nt, Artificial Sequence
  Synthetic
uggggauuuuguucgacauaau

SEQ ID NO: 357497 - RNA, 23 nt, Artificial Sequence
  Synthetic
uuggggauuuuguucgacauaau

SEQ ID NO: 357498 - RNA, 24 nt, Artificial Sequence
  Synthetic
uuuggggauuuuguucgacauaau

SEQ ID NO: 357499 - RNA, 18 nt, Artificial Sequence
  Synthetic
caaagcaccugacauaau

SEQ ID NO: 357500 - RNA, 19 nt, Artificial Sequence
  Synthetic
gcaaagcaccugacauaau

SEQ ID NO: 357501 - RNA, 20 nt, Artificial Sequence
  Synthetic
agcaaagcaccugacauaau

SEQ ID NO: 357502 - RNA, 21 nt, Artificial Sequence
  Synthetic
uagcaaagcaccugacauaau

SEQ ID NO: 357503 - RNA, 22 nt, Artificial Sequence
  Synthetic
guagcaaagcaccugacauaau

SEQ ID NO: 357504 - RNA, 23 nt, Artificial Sequence
  Synthetic
aguagcaaagcaccugacauaau

SEQ ID NO: 357505 - RNA, 24 nt, Artificial Sequence
  Synthetic
aaguagcaaagcaccugacauaau

SEQ ID NO: 357506 - RNA, 18 nt, Artificial Sequence
  Synthetic
gccuuguaaauacauaau

SEQ ID NO: 357507 - RNA, 19 nt, Artificial Sequence
  Synthetic
agccuuguaaauacauaau

SEQ ID NO: 357508 - RNA, 20 nt, Artificial Sequence
  Synthetic
cagccuuguaaauacauaau

SEQ ID NO: 357509 - RNA, 21 nt, Artificial Sequence
  Synthetic
acagccuuguaaauacauaau

SEQ ID NO: 357510 - RNA, 22 nt, Artificial Sequence
  Synthetic
aacagccuuguaaauacauaau

SEQ ID NO: 357511 - RNA, 23 nt, Artificial Sequence
  Synthetic
aaacagccuuguaaauacauaau

SEQ ID NO: 357512 - RNA, 24 nt, Artificial Sequence
  Synthetic
caaacagccuuguaaauacauaau

SEQ ID NO: 357513 - RNA, 18 nt, Artificial Sequence
  Synthetic
auuaucuuccuacauaau

SEQ ID NO: 357514 - RNA, 19 nt, Artificial Sequence
  Synthetic
aauuaucuuccuacauaau

SEQ ID NO: 357515 - RNA, 20 nt, Artificial Sequence
  Synthetic
aaauuaucuuccuacauaau

SEQ ID NO: 357516 - RNA, 21 nt, Artificial Sequence
  Synthetic
aaaauuaucuuccuacauaau

SEQ ID NO: 357517 - RNA, 22 nt, Artificial Sequence
  Synthetic
uaaaauuaucuuccuacauaau

SEQ ID NO: 357518 - RNA, 23 nt, Artificial Sequence
  Synthetic
uuaaaauuaucuuccuacauaau

SEQ ID NO: 357519 - RNA, 24 nt, Artificial Sequence
  Synthetic
auuaaaauuaucuuccuacauaau

SEQ ID NO: 357520 - RNA, 18 nt, Artificial Sequence
  Synthetic
auuagugauuuacauaau

SEQ ID NO: 357521 - RNA, 19 nt, Artificial Sequence
  Synthetic
uauuagugauuuacauaau

SEQ ID NO: 357522 - RNA, 20 nt, Artificial Sequence
  Synthetic
guauuagugauuuacauaau

SEQ ID NO: 357523 - RNA, 21 nt, Artificial Sequence
  Synthetic
aguauuagugauuuacauaau

SEQ ID NO: 357524 - RNA, 22 nt, Artificial Sequence
  Synthetic
aaguauuagugauuuacauaau

SEQ ID NO: 357525 - RNA, 23 nt, Artificial Sequence
  Synthetic
uaaguauuagugauuuacauaau

SEQ ID NO: 357526 - RNA, 24 nt, Artificial Sequence
  Synthetic
auaaguauuagugauuuacauaau

SEQ ID NO: 357527 - RNA, 18 nt, Artificial Sequence
  Synthetic
aauuuuuuuuuccauaau

SEQ ID NO: 357528 - RNA, 19 nt, Artificial Sequence
  Synthetic
caauuuuuuuuuccauaau

SEQ ID NO: 357529 - RNA, 20 nt, Artificial Sequence
  Synthetic
gcaauuuuuuuuuccauaau

SEQ ID NO: 357530 - RNA, 21 nt, Artificial Sequence
  Synthetic
ugcaauuuuuuuuuccauaau

SEQ ID NO: 357531 - RNA, 22 nt, Artificial Sequence
  Synthetic
cugcaauuuuuuuuuccauaau

SEQ ID NO: 357532 - RNA, 23 nt, Artificial Sequence
  Synthetic
ccugcaauuuuuuuuuccauaau

SEQ ID NO: 357533 - RNA, 24 nt, Artificial Sequence
  Synthetic
accugcaauuuuuuuuuccauaau

SEQ ID NO: 357534 - RNA, 18 nt, Artificial Sequence
  Synthetic
auuacacacaugcauaau

SEQ ID NO: 357535 - RNA, 19 nt, Artificial Sequence
  Synthetic
cauuacacacaugcauaau

SEQ ID NO: 357536 - RNA, 20 nt, Artificial Sequence
  Synthetic
gcauuacacacaugcauaau

SEQ ID NO: 357537 - RNA, 21 nt, Artificial Sequence
  Synthetic
ugcauuacacacaugcauaau

SEQ ID NO: 357538 - RNA, 22 nt, Artificial Sequence
  Synthetic
uugcauuacacacaugcauaau

SEQ ID NO: 357539 - RNA, 23 nt, Artificial Sequence
  Synthetic
cuugcauuacacacaugcauaau

SEQ ID NO: 357540 - RNA, 24 nt, Artificial Sequence
  Synthetic
gcuugcauuacacacaugcauaau

SEQ ID NO: 357541 - RNA, 18 nt, Artificial Sequence
  Synthetic
gagggacagaugcauaau

SEQ ID NO: 357542 - RNA, 19 nt, Artificial Sequence
  Synthetic
agagggacagaugcauaau

SEQ ID NO: 357543 - RNA, 20 nt, Artificial Sequence
  Synthetic
uagagggacagaugcauaau

SEQ ID NO: 357544 - RNA, 21 nt, Artificial Sequence
  Synthetic
cuagagggacagaugcauaau

SEQ ID NO: 357545 - RNA, 22 nt, Artificial Sequence
  Synthetic
gcuagagggacagaugcauaau

SEQ ID NO: 357546 - RNA, 23 nt, Artificial Sequence
  Synthetic
agcuagagggacagaugcauaau

SEQ ID NO: 357547 - RNA, 24 nt, Artificial Sequence
  Synthetic
aagcuagagggacagaugcauaau

SEQ ID NO: 357548 - RNA, 18 nt, Artificial Sequence
  Synthetic
acaagaaggcugcauaau

SEQ ID NO: 357549 - RNA, 19 nt, Artificial Sequence
  Synthetic
cacaagaaggcugcauaau

SEQ ID NO: 357550 - RNA, 20 nt, Artificial Sequence
  Synthetic
ucacaagaaggcugcauaau

SEQ ID NO: 357551 - RNA, 21 nt, Artificial Sequence
  Synthetic
cucacaagaaggcugcauaau

SEQ ID NO: 357552 - RNA, 22 nt, Artificial Sequence
  Synthetic
acucacaagaaggcugcauaau

SEQ ID NO: 357553 - RNA, 23 nt, Artificial Sequence
  Synthetic
uacucacaagaaggcugcauaau

SEQ ID NO: 357554 - RNA, 24 nt, Artificial Sequence
  Synthetic
auacucacaagaaggcugcauaau

SEQ ID NO: 357555 - RNA, 18 nt, Artificial Sequence
  Synthetic
cauuuucucacucauaau

SEQ ID NO: 357556 - RNA, 19 nt, Artificial Sequence
  Synthetic
gcauuuucucacucauaau

SEQ ID NO: 357557 - RNA, 20 nt, Artificial Sequence
  Synthetic
cgcauuuucucacucauaau

SEQ ID NO: 357558 - RNA, 21 nt, Artificial Sequence
  Synthetic
ccgcauuuucucacucauaau

SEQ ID NO: 357559 - RNA, 22 nt, Artificial Sequence
  Synthetic
accgcauuuucucacucauaau

SEQ ID NO: 357560 - RNA, 23 nt, Artificial Sequence
  Synthetic
caccgcauuuucucacucauaau

SEQ ID NO: 357561 - RNA, 24 nt, Artificial Sequence
  Synthetic
acaccgcauuuucucacucauaau

SEQ ID NO: 357562 - RNA, 18 nt, Artificial Sequence
  Synthetic
aagguugugagucauaau

SEQ ID NO: 357563 - RNA, 19 nt, Artificial Sequence
  Synthetic
uaagguugugagucauaau

SEQ ID NO: 357564 - RNA, 20 nt, Artificial Sequence
  Synthetic
auaagguugugagucauaau

SEQ ID NO: 357565 - RNA, 21 nt, Artificial Sequence
  Synthetic
aauaagguugugagucauaau

SEQ ID NO: 357566 - RNA, 22 nt, Artificial Sequence
  Synthetic
aaauaagguugugagucauaau

SEQ ID NO: 357567 - RNA, 23 nt, Artificial Sequence
  Synthetic
caaauaagguugugagucauaau

SEQ ID NO: 357568 - RNA, 24 nt, Artificial Sequence
  Synthetic
ucaaauaagguugugagucauaau

SEQ ID NO: 357569 - RNA, 18 nt, Artificial Sequence
  Synthetic
guugagaggugucauaau

SEQ ID NO: 357570 - RNA, 19 nt, Artificial Sequence
  Synthetic
uguugagaggugucauaau

SEQ ID NO: 357571 - RNA, 20 nt, Artificial Sequence
  Synthetic
auguugagaggugucauaau

SEQ ID NO: 357572 - RNA, 21 nt, Artificial Sequence
  Synthetic
aauguugagaggugucauaau

SEQ ID NO: 357573 - RNA, 22 nt, Artificial Sequence
  Synthetic
caauguugagaggugucauaau

SEQ ID NO: 357574 - RNA, 23 nt, Artificial Sequence
  Synthetic
gcaauguugagaggugucauaau

SEQ ID NO: 357575 - RNA, 24 nt, Artificial Sequence
  Synthetic
ggcaauguugagaggugucauaau

SEQ ID NO: 357576 - RNA, 18 nt, Artificial Sequence
  Synthetic
uauauccuaauucauaau

SEQ ID NO: 357577 - RNA, 19 nt, Artificial Sequence
  Synthetic
uuauauccuaauucauaau

SEQ ID NO: 357578 - RNA, 20 nt, Artificial Sequence
  Synthetic
auuauauccuaauucauaau

SEQ ID NO: 357579 - RNA, 21 nt, Artificial Sequence
  Synthetic
uauuauauccuaauucauaau

SEQ ID NO: 357580 - RNA, 22 nt, Artificial Sequence
  Synthetic
uuauuauauccuaauucauaau

SEQ ID NO: 357581 - RNA, 23 nt, Artificial Sequence
  Synthetic
cuuauuauauccuaauucauaau

SEQ ID NO: 357582 - RNA, 24 nt, Artificial Sequence
  Synthetic
acuuauuauauccuaauucauaau

SEQ ID NO: 357583 - RNA, 18 nt, Artificial Sequence
  Synthetic
aacuucccuguucauaau

SEQ ID NO: 357584 - RNA, 19 nt, Artificial Sequence
  Synthetic
aaacuucccuguucauaau

SEQ ID NO: 357585 - RNA, 20 nt, Artificial Sequence
  Synthetic
aaaacuucccuguucauaau

SEQ ID NO: 357586 - RNA, 21 nt, Artificial Sequence
  Synthetic
aaaaacuucccuguucauaau

SEQ ID NO: 357587 - RNA, 22 nt, Artificial Sequence
  Synthetic
gaaaaacuucccuguucauaau

SEQ ID NO: 357588 - RNA, 23 nt, Artificial Sequence
  Synthetic
ggaaaaacuucccuguucauaau

SEQ ID NO: 357589 - RNA, 24 nt, Artificial Sequence
  Synthetic
aggaaaaacuucccuguucauaau

SEQ ID NO: 357590 - RNA, 18 nt, Artificial Sequence
  Synthetic
gaaauuauuguucauaau

SEQ ID NO: 357591 - RNA, 19 nt, Artificial Sequence
  Synthetic
ugaaauuauuguucauaau

SEQ ID NO: 357592 - RNA, 20 nt, Artificial Sequence
  Synthetic
uugaaauuauuguucauaau

SEQ ID NO: 357593 - RNA, 21 nt, Artificial Sequence
  Synthetic
auugaaauuauuguucauaau

SEQ ID NO: 357594 - RNA, 22 nt, Artificial Sequence
  Synthetic
uauugaaauuauuguucauaau

SEQ ID NO: 357595 - RNA, 23 nt, Artificial Sequence
  Synthetic
guauugaaauuauuguucauaau

SEQ ID NO: 357596 - RNA, 24 nt, Artificial Sequence
  Synthetic
gguauugaaauuauuguucauaau

SEQ ID NO: 357597 - RNA, 18 nt, Artificial Sequence
  Synthetic
ugguguaaauaagauaau

SEQ ID NO: 357598 - RNA, 19 nt, Artificial Sequence
  Synthetic
augguguaaauaagauaau

SEQ ID NO: 357599 - RNA, 20 nt, Artificial Sequence
  Synthetic
aaugguguaaauaagauaau

SEQ ID NO: 357600 - RNA, 21 nt, Artificial Sequence
  Synthetic
uaaugguguaaauaagauaau

SEQ ID NO: 357601 - RNA, 22 nt, Artificial Sequence
  Synthetic
uuaaugguguaaauaagauaau

SEQ ID NO: 357602 - RNA, 23 nt, Artificial Sequence
  Synthetic
auuaaugguguaaauaagauaau

SEQ ID NO: 357603 - RNA, 24 nt, Artificial Sequence
  Synthetic
aauuaaugguguaaauaagauaau

SEQ ID NO: 357604 - RNA, 18 nt, Artificial Sequence
  Synthetic
uccgguggcccagauaau

SEQ ID NO: 357605 - RNA, 19 nt, Artificial Sequence
  Synthetic
uuccgguggcccagauaau

SEQ ID NO: 357606 - RNA, 20 nt, Artificial Sequence
  Synthetic
uuuccgguggcccagauaau

SEQ ID NO: 357607 - RNA, 21 nt, Artificial Sequence
  Synthetic
uuuuccgguggcccagauaau

SEQ ID NO: 357608 - RNA, 22 nt, Artificial Sequence
  Synthetic
uuuuuccgguggcccagauaau

SEQ ID NO: 357609 - RNA, 23 nt, Artificial Sequence
  Synthetic
uuuuuuccgguggcccagauaau

SEQ ID NO: 357610 - RNA, 24 nt, Artificial Sequence
  Synthetic
auuuuuuccgguggcccagauaau

SEQ ID NO: 357611 - RNA, 18 nt, Artificial Sequence
  Synthetic
aagcagaggccagauaau

SEQ ID NO: 357612 - RNA, 19 nt, Artificial Sequence
  Synthetic
uaagcagaggccagauaau

SEQ ID NO: 357613 - RNA, 20 nt, Artificial Sequence
  Synthetic
auaagcagaggccagauaau

SEQ ID NO: 357614 - RNA, 21 nt, Artificial Sequence
  Synthetic
uauaagcagaggccagauaau

SEQ ID NO: 357615 - RNA, 22 nt, Artificial Sequence
  Synthetic
guauaagcagaggccagauaau

SEQ ID NO: 357616 - RNA, 23 nt, Artificial Sequence
  Synthetic
aguauaagcagaggccagauaau

SEQ ID NO: 357617 - RNA, 24 nt, Artificial Sequence
  Synthetic
aaguauaagcagaggccagauaau

SEQ ID NO: 357618 - RNA, 18 nt, Artificial Sequence
  Synthetic
uuaagauguucagauaau

SEQ ID NO: 357619 - RNA, 19 nt, Artificial Sequence
  Synthetic
cuuaagauguucagauaau

SEQ ID NO: 357620 - RNA, 20 nt, Artificial Sequence
  Synthetic
acuuaagauguucagauaau

SEQ ID NO: 357621 - RNA, 21 nt, Artificial Sequence
  Synthetic
aacuuaagauguucagauaau

SEQ ID NO: 357622 - RNA, 22 nt, Artificial Sequence
  Synthetic
aaacuuaagauguucagauaau

SEQ ID NO: 357623 - RNA, 23 nt, Artificial Sequence
  Synthetic
caaacuuaagauguucagauaau

SEQ ID NO: 357624 - RNA, 24 nt, Artificial Sequence
  Synthetic
acaaacuuaagauguucagauaau

SEQ ID NO: 357625 - RNA, 18 nt, Artificial Sequence
  Synthetic
aucuauguuucagauaau

SEQ ID NO: 357626 - RNA, 19 nt, Artificial Sequence
  Synthetic
aaucuauguuucagauaau

SEQ ID NO: 357627 - RNA, 20 nt, Artificial Sequence
  Synthetic
uaaucuauguuucagauaau

SEQ ID NO: 357628 - RNA, 21 nt, Artificial Sequence
  Synthetic
uuaaucuauguuucagauaau

SEQ ID NO: 357629 - RNA, 22 nt, Artificial Sequence
  Synthetic
auuaaucuauguuucagauaau

SEQ ID NO: 357630 - RNA, 23 nt, Artificial Sequence
  Synthetic
aauuaaucuauguuucagauaau

SEQ ID NO: 357631 - RNA, 24 nt, Artificial Sequence
  Synthetic
caauuaaucuauguuucagauaau

SEQ ID NO: 357632 - RNA, 18 nt, Artificial Sequence
  Synthetic
uuccucugaauagauaau

SEQ ID NO: 357633 - RNA, 19 nt, Artificial Sequence
  Synthetic
uuuccucugaauagauaau

SEQ ID NO: 357634 - RNA, 20 nt, Artificial Sequence
  Synthetic
auuuccucugaauagauaau

SEQ ID NO: 357635 - RNA, 21 nt, Artificial Sequence
  Synthetic
uauuuccucugaauagauaau

SEQ ID NO: 357636 - RNA, 22 nt, Artificial Sequence
  Synthetic
auauuuccucugaauagauaau

SEQ ID NO: 357637 - RNA, 23 nt, Artificial Sequence
  Synthetic
cauauuuccucugaauagauaau

SEQ ID NO: 357638 - RNA, 24 nt, Artificial Sequence
  Synthetic
gcauauuuccucugaauagauaau

SEQ ID NO: 357639 - RNA, 18 nt, Artificial Sequence
  Synthetic
cacguaaggaaggauaau

SEQ ID NO: 357640 - RNA, 19 nt, Artificial Sequence
  Synthetic
gcacguaaggaaggauaau

SEQ ID NO: 357641 - RNA, 20 nt, Artificial Sequence
  Synthetic
agcacguaaggaaggauaau

SEQ ID NO: 357642 - RNA, 21 nt, Artificial Sequence
  Synthetic
aagcacguaaggaaggauaau

SEQ ID NO: 357643 - RNA, 22 nt, Artificial Sequence
  Synthetic
uaagcacguaaggaaggauaau

SEQ ID NO: 357644 - RNA, 23 nt, Artificial Sequence
  Synthetic
auaagcacguaaggaaggauaau

SEQ ID NO: 357645 - RNA, 24 nt, Artificial Sequence
  Synthetic
gauaagcacguaaggaaggauaau

SEQ ID NO: 357646 - RNA, 18 nt, Artificial Sequence
  Synthetic
gcaagcaaaagggauaau

SEQ ID NO: 357647 - RNA, 19 nt, Artificial Sequence
  Synthetic
agcaagcaaaagggauaau

SEQ ID NO: 357648 - RNA, 20 nt, Artificial Sequence
  Synthetic
uagcaagcaaaagggauaau

SEQ ID NO: 357649 - RNA, 21 nt, Artificial Sequence
  Synthetic
auagcaagcaaaagggauaau

SEQ ID NO: 357650 - RNA, 22 nt, Artificial Sequence
  Synthetic
cauagcaagcaaaagggauaau

SEQ ID NO: 357651 - RNA, 23 nt, Artificial Sequence
  Synthetic
ucauagcaagcaaaagggauaau

SEQ ID NO: 357652 - RNA, 24 nt, Artificial Sequence
  Synthetic
uucauagcaagcaaaagggauaau

SEQ ID NO: 357653 - RNA, 18 nt, Artificial Sequence
  Synthetic
ggaacagugauggauaau

SEQ ID NO: 357654 - RNA, 19 nt, Artificial Sequence
  Synthetic
aggaacagugauggauaau

SEQ ID NO: 357655 - RNA, 20 nt, Artificial Sequence
  Synthetic
uaggaacagugauggauaau

SEQ ID NO: 357656 - RNA, 21 nt, Artificial Sequence
  Synthetic
auaggaacagugauggauaau

SEQ ID NO: 357657 - RNA, 22 nt, Artificial Sequence
  Synthetic
cauaggaacagugauggauaau

SEQ ID NO: 357658 - RNA, 23 nt, Artificial Sequence
  Synthetic
gcauaggaacagugauggauaau

SEQ ID NO: 357659 - RNA, 24 nt, Artificial Sequence
  Synthetic
agcauaggaacagugauggauaau

SEQ ID NO: 357660 - RNA, 18 nt, Artificial Sequence
  Synthetic
guacaauguacugauaau

SEQ ID NO: 357661 - RNA, 19 nt, Artificial Sequence
  Synthetic
uguacaauguacugauaau

SEQ ID NO: 357662 - RNA, 20 nt, Artificial Sequence
  Synthetic
uuguacaauguacugauaau

SEQ ID NO: 357663 - RNA, 21 nt, Artificial Sequence
  Synthetic
auuguacaauguacugauaau

SEQ ID NO: 357664 - RNA, 22 nt, Artificial Sequence
  Synthetic
uauuguacaauguacugauaau

SEQ ID NO: 357665 - RNA, 23 nt, Artificial Sequence
  Synthetic
auauuguacaauguacugauaau

SEQ ID NO: 357666 - RNA, 24 nt, Artificial Sequence
  Synthetic
gauauuguacaauguacugauaau

SEQ ID NO: 357667 - RNA, 18 nt, Artificial Sequence
  Synthetic
ucauuucaugcugauaau

SEQ ID NO: 357668 - RNA, 19 nt, Artificial Sequence
  Synthetic
uucauuucaugcugauaau

SEQ ID NO: 357669 - RNA, 20 nt, Artificial Sequence
  Synthetic
uuucauuucaugcugauaau

SEQ ID NO: 357670 - RNA, 21 nt, Artificial Sequence
  Synthetic
cuuucauuucaugcugauaau

SEQ ID NO: 357671 - RNA, 22 nt, Artificial Sequence
  Synthetic
ucuuucauuucaugcugauaau

SEQ ID NO: 357672 - RNA, 23 nt, Artificial Sequence
  Synthetic
cucuuucauuucaugcugauaau

SEQ ID NO: 357673 - RNA, 24 nt, Artificial Sequence
  Synthetic
ccucuuucauuucaugcugauaau

SEQ ID NO: 357674 - RNA, 18 nt, Artificial Sequence
  Synthetic
gaggaaauuaaauauaau

SEQ ID NO: 357675 - RNA, 19 nt, Artificial Sequence
  Synthetic
agaggaaauuaaauauaau

SEQ ID NO: 357676 - RNA, 20 nt, Artificial Sequence
  Synthetic
aagaggaaauuaaauauaau

SEQ ID NO: 357677 - RNA, 21 nt, Artificial Sequence
  Synthetic
aaagaggaaauuaaauauaau

SEQ ID NO: 357678 - RNA, 22 nt, Artificial Sequence
  Synthetic
caaagaggaaauuaaauauaau

SEQ ID NO: 357679 - RNA, 23 nt, Artificial Sequence
  Synthetic
ucaaagaggaaauuaaauauaau

SEQ ID NO: 357680 - RNA, 24 nt, Artificial Sequence
  Synthetic
uucaaagaggaaauuaaauauaau

SEQ ID NO: 357681 - RNA, 18 nt, Artificial Sequence
  Synthetic
aucggguuagcauauaau

SEQ ID NO: 357682 - RNA, 19 nt, Artificial Sequence
  Synthetic
uaucggguuagcauauaau

SEQ ID NO: 357683 - RNA, 20 nt, Artificial Sequence
  Synthetic
uuaucggguuagcauauaau

SEQ ID NO: 357684 - RNA, 21 nt, Artificial Sequence
  Synthetic
guuaucggguuagcauauaau

SEQ ID NO: 357685 - RNA, 22 nt, Artificial Sequence
  Synthetic
aguuaucggguuagcauauaau

SEQ ID NO: 357686 - RNA, 23 nt, Artificial Sequence
  Synthetic
gaguuaucggguuagcauauaau

SEQ ID NO: 357687 - RNA, 24 nt, Artificial Sequence
  Synthetic
ggaguuaucggguuagcauauaau

SEQ ID NO: 357688 - RNA, 18 nt, Artificial Sequence
  Synthetic
ugaaccacgugauauaau

SEQ ID NO: 357689 - RNA, 19 nt, Artificial Sequence
  Synthetic
cugaaccacgugauauaau

SEQ ID NO: 357690 - RNA, 20 nt, Artificial Sequence
  Synthetic
ccugaaccacgugauauaau

SEQ ID NO: 357691 - RNA, 21 nt, Artificial Sequence
  Synthetic
uccugaaccacgugauauaau

SEQ ID NO: 357692 - RNA, 22 nt, Artificial Sequence
  Synthetic
guccugaaccacgugauauaau

SEQ ID NO: 357693 - RNA, 23 nt, Artificial Sequence
  Synthetic
gguccugaaccacgugauauaau

SEQ ID NO: 357694 - RNA, 24 nt, Artificial Sequence
  Synthetic
agguccugaaccacgugauauaau

SEQ ID NO: 357695 - RNA, 18 nt, Artificial Sequence
  Synthetic
uagagugggugauauaau

SEQ ID NO: 357696 - RNA, 19 nt, Artificial Sequence
  Synthetic
uuagagugggugauauaau

SEQ ID NO: 357697 - RNA, 20 nt, Artificial Sequence
  Synthetic
guuagagugggugauauaau

SEQ ID NO: 357698 - RNA, 21 nt, Artificial Sequence
  Synthetic
gguuagagugggugauauaau

SEQ ID NO: 357699 - RNA, 22 nt, Artificial Sequence
  Synthetic
agguuagagugggugauauaau

SEQ ID NO: 357700 - RNA, 23 nt, Artificial Sequence
  Synthetic
aagguuagagugggugauauaau

SEQ ID NO: 357701 - RNA, 24 nt, Artificial Sequence
  Synthetic
aaagguuagagugggugauauaau

SEQ ID NO: 357702 - RNA, 18 nt, Artificial Sequence
  Synthetic
cuugucaugauauauaau

SEQ ID NO: 357703 - RNA, 19 nt, Artificial Sequence
  Synthetic
acuugucaugauauauaau

SEQ ID NO: 357704 - RNA, 20 nt, Artificial Sequence
  Synthetic
uacuugucaugauauauaau

SEQ ID NO: 357705 - RNA, 21 nt, Artificial Sequence
  Synthetic
guacuugucaugauauauaau

SEQ ID NO: 357706 - RNA, 22 nt, Artificial Sequence
  Synthetic
gguacuugucaugauauauaau

SEQ ID NO: 357707 - RNA, 23 nt, Artificial Sequence
  Synthetic
agguacuugucaugauauauaau

SEQ ID NO: 357708 - RNA, 24 nt, Artificial Sequence
  Synthetic
gagguacuugucaugauauauaau

SEQ ID NO: 357709 - RNA, 18 nt, Artificial Sequence
  Synthetic
guuuuuaagaccuauaau

SEQ ID NO: 357710 - RNA, 19 nt, Artificial Sequence
  Synthetic
gguuuuuaagaccuauaau

SEQ ID NO: 357711 - RNA, 20 nt, Artificial Sequence
  Synthetic
agguuuuuaagaccuauaau

SEQ ID NO: 357712 - RNA, 21 nt, Artificial Sequence
  Synthetic
gagguuuuuaagaccuauaau

SEQ ID NO: 357713 - RNA, 22 nt, Artificial Sequence
  Synthetic
ggagguuuuuaagaccuauaau

SEQ ID NO: 357714 - RNA, 23 nt, Artificial Sequence
  Synthetic
aggagguuuuuaagaccuauaau

SEQ ID NO: 357715 - RNA, 24 nt, Artificial Sequence
  Synthetic
caggagguuuuuaagaccuauaau

SEQ ID NO: 357716 - RNA, 18 nt, Artificial Sequence
  Synthetic
agaagaguccccuauaau

SEQ ID NO: 357717 - RNA, 19 nt, Artificial Sequence
  Synthetic
uagaagaguccccuauaau

SEQ ID NO: 357718 - RNA, 20 nt, Artificial Sequence
  Synthetic
guagaagaguccccuauaau

SEQ ID NO: 357719 - RNA, 21 nt, Artificial Sequence
  Synthetic
aguagaagaguccccuauaau

SEQ ID NO: 357720 - RNA, 22 nt, Artificial Sequence
  Synthetic
caguagaagaguccccuauaau

SEQ ID NO: 357721 - RNA, 23 nt, Artificial Sequence
  Synthetic
acaguagaagaguccccuauaau

SEQ ID NO: 357722 - RNA, 24 nt, Artificial Sequence
  Synthetic
cacaguagaagaguccccuauaau

SEQ ID NO: 357723 - RNA, 18 nt, Artificial Sequence
  Synthetic
ucacuaccacaguauaau

SEQ ID NO: 357724 - RNA, 19 nt, Artificial Sequence
  Synthetic
uucacuaccacaguauaau

SEQ ID NO: 357725 - RNA, 20 nt, Artificial Sequence
  Synthetic
guucacuaccacaguauaau

SEQ ID NO: 357726 - RNA, 21 nt, Artificial Sequence
  Synthetic
cguucacuaccacaguauaau

SEQ ID NO: 357727 - RNA, 22 nt, Artificial Sequence
  Synthetic
acguucacuaccacaguauaau

SEQ ID NO: 357728 - RNA, 23 nt, Artificial Sequence
  Synthetic
cacguucacuaccacaguauaau

SEQ ID NO: 357729 - RNA, 24 nt, Artificial Sequence
  Synthetic
ccacguucacuaccacaguauaau

SEQ ID NO: 357730 - RNA, 18 nt, Artificial Sequence
  Synthetic
auaauucagugguauaau

SEQ ID NO: 357731 - RNA, 19 nt, Artificial Sequence
  Synthetic
aauaauucagugguauaau

SEQ ID NO: 357732 - RNA, 20 nt, Artificial Sequence
  Synthetic
gaauaauucagugguauaau

SEQ ID NO: 357733 - RNA, 21 nt, Artificial Sequence
  Synthetic
ugaauaauucagugguauaau

SEQ ID NO: 357734 - RNA, 22 nt, Artificial Sequence
  Synthetic
cugaauaauucagugguauaau

SEQ ID NO: 357735 - RNA, 23 nt, Artificial Sequence
  Synthetic
ucugaauaauucagugguauaau

SEQ ID NO: 357736 - RNA, 24 nt, Artificial Sequence
  Synthetic
aucugaauaauucagugguauaau

SEQ ID NO: 357737 - RNA, 18 nt, Artificial Sequence
  Synthetic
gugggccauauguauaau

SEQ ID NO: 357738 - RNA, 19 nt, Artificial Sequence
  Synthetic
ugugggccauauguauaau

SEQ ID NO: 357739 - RNA, 20 nt, Artificial Sequence
  Synthetic
augugggccauauguauaau

SEQ ID NO: 357740 - RNA, 21 nt, Artificial Sequence
  Synthetic
gaugugggccauauguauaau

SEQ ID NO: 357741 - RNA, 22 nt, Artificial Sequence
  Synthetic
ggaugugggccauauguauaau

SEQ ID NO: 357742 - RNA, 23 nt, Artificial Sequence
  Synthetic
aggaugugggccauauguauaau

SEQ ID NO: 357743 - RNA, 24 nt, Artificial Sequence
  Synthetic
gaggaugugggccauauguauaau

SEQ ID NO: 357744 - RNA, 18 nt, Artificial Sequence
  Synthetic
aauaaauagcuguauaau

SEQ ID NO: 357745 - RNA, 19 nt, Artificial Sequence
  Synthetic
caauaaauagcuguauaau

SEQ ID NO: 357746 - RNA, 20 nt, Artificial Sequence
  Synthetic
ccaauaaauagcuguauaau

SEQ ID NO: 357747 - RNA, 21 nt, Artificial Sequence
  Synthetic
uccaauaaauagcuguauaau

SEQ ID NO: 357748 - RNA, 22 nt, Artificial Sequence
  Synthetic
uuccaauaaauagcuguauaau

SEQ ID NO: 357749 - RNA, 23 nt, Artificial Sequence
  Synthetic
uuuccaauaaauagcuguauaau

SEQ ID NO: 357750 - RNA, 24 nt, Artificial Sequence
  Synthetic
guuuccaauaaauagcuguauaau

SEQ ID NO: 357751 - RNA, 18 nt, Artificial Sequence
  Synthetic
cuaauuuuuuuguauaau

SEQ ID NO: 357752 - RNA, 19 nt, Artificial Sequence
  Synthetic
ccuaauuuuuuuguauaau

SEQ ID NO: 357753 - RNA, 20 nt, Artificial Sequence
  Synthetic
accuaauuuuuuuguauaau

SEQ ID NO: 357754 - RNA, 21 nt, Artificial Sequence
  Synthetic
aaccuaauuuuuuuguauaau

SEQ ID NO: 357755 - RNA, 22 nt, Artificial Sequence
  Synthetic
aaaccuaauuuuuuuguauaau

SEQ ID NO: 357756 - RNA, 23 nt, Artificial Sequence
  Synthetic
caaaccuaauuuuuuuguauaau

SEQ ID NO: 357757 - RNA, 24 nt, Artificial Sequence
  Synthetic
ccaaaccuaauuuuuuuguauaau

SEQ ID NO: 357758 - RNA, 18 nt, Artificial Sequence
  Synthetic
ugauauaauuauuauaau

SEQ ID NO: 357759 - RNA, 19 nt, Artificial Sequence
  Synthetic
cugauauaauuauuauaau

SEQ ID NO: 357760 - RNA, 20 nt, Artificial Sequence
  Synthetic
ccugauauaauuauuauaau

SEQ ID NO: 357761 - RNA, 21 nt, Artificial Sequence
  Synthetic
accugauauaauuauuauaau

SEQ ID NO: 357762 - RNA, 22 nt, Artificial Sequence
  Synthetic
uaccugauauaauuauuauaau

SEQ ID NO: 357763 - RNA, 23 nt, Artificial Sequence
  Synthetic
cuaccugauauaauuauuauaau

SEQ ID NO: 357764 - RNA, 24 nt, Artificial Sequence
  Synthetic
ucuaccugauauaauuauuauaau

SEQ ID NO: 357765 - RNA, 18 nt, Artificial Sequence
  Synthetic
gcugguauuuauuauaau

SEQ ID NO: 357766 - RNA, 19 nt, Artificial Sequence
  Synthetic
ugcugguauuuauuauaau

SEQ ID NO: 357767 - RNA, 20 nt, Artificial Sequence
  Synthetic
cugcugguauuuauuauaau

SEQ ID NO: 357768 - RNA, 21 nt, Artificial Sequence
  Synthetic
gcugcugguauuuauuauaau

SEQ ID NO: 357769 - RNA, 22 nt, Artificial Sequence
  Synthetic
ugcugcugguauuuauuauaau

SEQ ID NO: 357770 - RNA, 23 nt, Artificial Sequence
  Synthetic
uugcugcugguauuuauuauaau

SEQ ID NO: 357771 - RNA, 24 nt, Artificial Sequence
  Synthetic
uuugcugcugguauuuauuauaau

SEQ ID NO: 357772 - RNA, 18 nt, Artificial Sequence
  Synthetic
aaacccccagcuuauaau

SEQ ID NO: 357773 - RNA, 19 nt, Artificial Sequence
  Synthetic
caaacccccagcuuauaau

SEQ ID NO: 357774 - RNA, 20 nt, Artificial Sequence
  Synthetic
ucaaacccccagcuuauaau

SEQ ID NO: 357775 - RNA, 21 nt, Artificial Sequence
  Synthetic
cucaaacccccagcuuauaau

SEQ ID NO: 357776 - RNA, 22 nt, Artificial Sequence
  Synthetic
ucucaaacccccagcuuauaau

SEQ ID NO: 357777 - RNA, 23 nt, Artificial Sequence
  Synthetic
uucucaaacccccagcuuauaau

SEQ ID NO: 357778 - RNA, 24 nt, Artificial Sequence
  Synthetic
auucucaaacccccagcuuauaau

SEQ ID NO: 357779 - RNA, 18 nt, Artificial Sequence
  Synthetic
uuauaggauucuuauaau

SEQ ID NO: 357780 - RNA, 19 nt, Artificial Sequence
  Synthetic
cuuauaggauucuuauaau

SEQ ID NO: 357781 - RNA, 20 nt, Artificial Sequence
  Synthetic
ucuuauaggauucuuauaau

SEQ ID NO: 357782 - RNA, 21 nt, Artificial Sequence
  Synthetic
uucuuauaggauucuuauaau

SEQ ID NO: 357783 - RNA, 22 nt, Artificial Sequence
  Synthetic
uuucuuauaggauucuuauaau

SEQ ID NO: 357784 - RNA, 23 nt, Artificial Sequence
  Synthetic
cuuucuuauaggauucuuauaau

SEQ ID NO: 357785 - RNA, 24 nt, Artificial Sequence
  Synthetic
gcuuucuuauaggauucuuauaau

SEQ ID NO: 357786 - RNA, 18 nt, Artificial Sequence
  Synthetic
uucaagugaguuuauaau

SEQ ID NO: 357787 - RNA, 19 nt, Artificial Sequence
  Synthetic
uuucaagugaguuuauaau

SEQ ID NO: 357788 - RNA, 20 nt, Artificial Sequence
  Synthetic
cuuucaagugaguuuauaau

SEQ ID NO: 357789 - RNA, 21 nt, Artificial Sequence
  Synthetic
ucuuucaagugaguuuauaau

SEQ ID NO: 357790 - RNA, 22 nt, Artificial Sequence
  Synthetic
aucuuucaagugaguuuauaau

SEQ ID NO: 357791 - RNA, 23 nt, Artificial Sequence
  Synthetic
aaucuuucaagugaguuuauaau

SEQ ID NO: 357792 - RNA, 24 nt, Artificial Sequence
  Synthetic
aaaucuuucaagugaguuuauaau

SEQ ID NO: 357793 - RNA, 18 nt, Artificial Sequence
  Synthetic
ugagacacauuuuauaau

SEQ ID NO: 357794 - RNA, 19 nt, Artificial Sequence
  Synthetic
uugagacacauuuuauaau

SEQ ID NO: 357795 - RNA, 20 nt, Artificial Sequence
  Synthetic
uuugagacacauuuuauaau

SEQ ID NO: 357796 - RNA, 21 nt, Artificial Sequence
  Synthetic
cuuugagacacauuuuauaau

SEQ ID NO: 357797 - RNA, 22 nt, Artificial Sequence
  Synthetic
ccuuugagacacauuuuauaau

SEQ ID NO: 357798 - RNA, 23 nt, Artificial Sequence
  Synthetic
uccuuugagacacauuuuauaau

SEQ ID NO: 357799 - RNA, 24 nt, Artificial Sequence
  Synthetic
guccuuugagacacauuuuauaau

SEQ ID NO: 357800 - RNA, 18 nt, Artificial Sequence
  Synthetic
ggcaaccccaccacuaau

SEQ ID NO: 357801 - RNA, 19 nt, Artificial Sequence
  Synthetic
uggcaaccccaccacuaau

SEQ ID NO: 357802 - RNA, 20 nt, Artificial Sequence
  Synthetic
uuggcaaccccaccacuaau

SEQ ID NO: 357803 - RNA, 21 nt, Artificial Sequence
  Synthetic
cuuggcaaccccaccacuaau

SEQ ID NO: 357804 - RNA, 22 nt, Artificial Sequence
  Synthetic
ccuuggcaaccccaccacuaau

SEQ ID NO: 357805 - RNA, 23 nt, Artificial Sequence
  Synthetic
uccuuggcaaccccaccacuaau

SEQ ID NO: 357806 - RNA, 24 nt, Artificial Sequence
  Synthetic
uuccuuggcaaccccaccacuaau

SEQ ID NO: 357807 - RNA, 18 nt, Artificial Sequence
  Synthetic
caggaggggaccacuaau

SEQ ID NO: 357808 - RNA, 19 nt, Artificial Sequence
  Synthetic
ccaggaggggaccacuaau

SEQ ID NO: 357809 - RNA, 20 nt, Artificial Sequence
  Synthetic
cccaggaggggaccacuaau

SEQ ID NO: 357810 - RNA, 21 nt, Artificial Sequence
  Synthetic
gcccaggaggggaccacuaau

SEQ ID NO: 357811 - RNA, 22 nt, Artificial Sequence
  Synthetic
ugcccaggaggggaccacuaau

SEQ ID NO: 357812 - RNA, 23 nt, Artificial Sequence
  Synthetic
cugcccaggaggggaccacuaau

SEQ ID NO: 357813 - RNA, 24 nt, Artificial Sequence
  Synthetic
ucugcccaggaggggaccacuaau

SEQ ID NO: 357814 - RNA, 18 nt, Artificial Sequence
  Synthetic
gugguuuuccugacuaau

SEQ ID NO: 357815 - RNA, 19 nt, Artificial Sequence
  Synthetic
ggugguuuuccugacuaau

SEQ ID NO: 357816 - RNA, 20 nt, Artificial Sequence
  Synthetic
gggugguuuuccugacuaau

SEQ ID NO: 357817 - RNA, 21 nt, Artificial Sequence
  Synthetic
agggugguuuuccugacuaau

SEQ ID NO: 357818 - RNA, 22 nt, Artificial Sequence
  Synthetic
aagggugguuuuccugacuaau

SEQ ID NO: 357819 - RNA, 23 nt, Artificial Sequence
  Synthetic
caagggugguuuuccugacuaau

SEQ ID NO: 357820 - RNA, 24 nt, Artificial Sequence
  Synthetic
ccaagggugguuuuccugacuaau

SEQ ID NO: 357821 - RNA, 18 nt, Artificial Sequence
  Synthetic
uugcauagcccuacuaau

SEQ ID NO: 357822 - RNA, 19 nt, Artificial Sequence
  Synthetic
uuugcauagcccuacuaau

SEQ ID NO: 357823 - RNA, 20 nt, Artificial Sequence
  Synthetic
auuugcauagcccuacuaau

SEQ ID NO: 357824 - RNA, 21 nt, Artificial Sequence
  Synthetic
cauuugcauagcccuacuaau

SEQ ID NO: 357825 - RNA, 22 nt, Artificial Sequence
  Synthetic
ucauuugcauagcccuacuaau

SEQ ID NO: 357826 - RNA, 23 nt, Artificial Sequence
  Synthetic
cucauuugcauagcccuacuaau

SEQ ID NO: 357827 - RNA, 24 nt, Artificial Sequence
  Synthetic
ccucauuugcauagcccuacuaau

SEQ ID NO: 357828 - RNA, 18 nt, Artificial Sequence
  Synthetic
augcuuaguaguacuaau

SEQ ID NO: 357829 - RNA, 19 nt, Artificial Sequence
  Synthetic
uaugcuuaguaguacuaau

SEQ ID NO: 357830 - RNA, 20 nt, Artificial Sequence
  Synthetic
guaugcuuaguaguacuaau

SEQ ID NO: 357831 - RNA, 21 nt, Artificial Sequence
  Synthetic
aguaugcuuaguaguacuaau

SEQ ID NO: 357832 - RNA, 22 nt, Artificial Sequence
  Synthetic
gaguaugcuuaguaguacuaau

SEQ ID NO: 357833 - RNA, 23 nt, Artificial Sequence
  Synthetic
ugaguaugcuuaguaguacuaau

SEQ ID NO: 357834 - RNA, 24 nt, Artificial Sequence
  Synthetic
uugaguaugcuuaguaguacuaau

SEQ ID NO: 357835 - RNA, 18 nt, Artificial Sequence
  Synthetic
uuaauugguauuacuaau

SEQ ID NO: 357836 - RNA, 19 nt, Artificial Sequence
  Synthetic
uuuaauugguauuacuaau

SEQ ID NO: 357837 - RNA, 20 nt, Artificial Sequence
  Synthetic
auuuaauugguauuacuaau

SEQ ID NO: 357838 - RNA, 21 nt, Artificial Sequence
  Synthetic
uauuuaauugguauuacuaau

SEQ ID NO: 357839 - RNA, 22 nt, Artificial Sequence
  Synthetic
uuauuuaauugguauuacuaau

SEQ ID NO: 357840 - RNA, 23 nt, Artificial Sequence
  Synthetic
auuauuuaauugguauuacuaau

SEQ ID NO: 357841 - RNA, 24 nt, Artificial Sequence
  Synthetic
aauuauuuaauugguauuacuaau

SEQ ID NO: 357842 - RNA, 18 nt, Artificial Sequence
  Synthetic
ggucagcauuaaccuaau

SEQ ID NO: 357843 - RNA, 19 nt, Artificial Sequence
  Synthetic
cggucagcauuaaccuaau

SEQ ID NO: 357844 - RNA, 20 nt, Artificial Sequence
  Synthetic
ucggucagcauuaaccuaau

SEQ ID NO: 357845 - RNA, 21 nt, Artificial Sequence
  Synthetic
uucggucagcauuaaccuaau

SEQ ID NO: 357846 - RNA, 22 nt, Artificial Sequence
  Synthetic
uuucggucagcauuaaccuaau

SEQ ID NO: 357847 - RNA, 23 nt, Artificial Sequence
  Synthetic
cuuucggucagcauuaaccuaau

SEQ ID NO: 357848 - RNA, 24 nt, Artificial Sequence
  Synthetic
ucuuucggucagcauuaaccuaau

SEQ ID NO: 357849 - RNA, 18 nt, Artificial Sequence
  Synthetic
uuaaaagcaauaccuaau

SEQ ID NO: 357850 - RNA, 19 nt, Artificial Sequence
  Synthetic
uuuaaaagcaauaccuaau

SEQ ID NO: 357851 - RNA, 20 nt, Artificial Sequence
  Synthetic
uuuuaaaagcaauaccuaau

SEQ ID NO: 357852 - RNA, 21 nt, Artificial Sequence
  Synthetic
uuuuuaaaagcaauaccuaau

SEQ ID NO: 357853 - RNA, 22 nt, Artificial Sequence
  Synthetic
auuuuuaaaagcaauaccuaau

SEQ ID NO: 357854 - RNA, 23 nt, Artificial Sequence
  Synthetic
aauuuuuaaaagcaauaccuaau

SEQ ID NO: 357855 - RNA, 24 nt, Artificial Sequence
  Synthetic
aaauuuuuaaaagcaauaccuaau

SEQ ID NO: 357856 - RNA, 18 nt, Artificial Sequence
  Synthetic
uauauuggccucccuaau

SEQ ID NO: 357857 - RNA, 19 nt, Artificial Sequence
  Synthetic
auauauuggccucccuaau

SEQ ID NO: 357858 - RNA, 20 nt, Artificial Sequence
  Synthetic
cauauauuggccucccuaau

SEQ ID NO: 357859 - RNA, 21 nt, Artificial Sequence
  Synthetic
ucauauauuggccucccuaau

SEQ ID NO: 357860 - RNA, 22 nt, Artificial Sequence
  Synthetic
uucauauauuggccucccuaau

SEQ ID NO: 357861 - RNA, 23 nt, Artificial Sequence
  Synthetic
cuucauauauuggccucccuaau

SEQ ID NO: 357862 - RNA, 24 nt, Artificial Sequence
  Synthetic
ucuucauauauuggccucccuaau

SEQ ID NO: 357863 - RNA, 18 nt, Artificial Sequence
  Synthetic
aaucuuauguagccuaau

SEQ ID NO: 357864 - RNA, 19 nt, Artificial Sequence
  Synthetic
caaucuuauguagccuaau

SEQ ID NO: 357865 - RNA, 20 nt, Artificial Sequence
  Synthetic
ccaaucuuauguagccuaau

SEQ ID NO: 357866 - RNA, 21 nt, Artificial Sequence
  Synthetic
cccaaucuuauguagccuaau

SEQ ID NO: 357867 - RNA, 22 nt, Artificial Sequence
  Synthetic
ucccaaucuuauguagccuaau

SEQ ID NO: 357868 - RNA, 23 nt, Artificial Sequence
  Synthetic
gucccaaucuuauguagccuaau

SEQ ID NO: 357869 - RNA, 24 nt, Artificial Sequence
  Synthetic
agucccaaucuuauguagccuaau

SEQ ID NO: 357870 - RNA, 18 nt, Artificial Sequence
  Synthetic
guccuacagacuccuaau

SEQ ID NO: 357871 - RNA, 19 nt, Artificial Sequence
  Synthetic
gguccuacagacuccuaau

SEQ ID NO: 357872 - RNA, 20 nt, Artificial Sequence
  Synthetic
ugguccuacagacuccuaau

SEQ ID NO: 357873 - RNA, 21 nt, Artificial Sequence
  Synthetic
uugguccuacagacuccuaau

SEQ ID NO: 357874 - RNA, 22 nt, Artificial Sequence
  Synthetic
cuugguccuacagacuccuaau

SEQ ID NO: 357875 - RNA, 23 nt, Artificial Sequence
  Synthetic
gcuugguccuacagacuccuaau

SEQ ID NO: 357876 - RNA, 24 nt, Artificial Sequence
  Synthetic
ggcuugguccuacagacuccuaau

SEQ ID NO: 357877 - RNA, 18 nt, Artificial Sequence
  Synthetic
uacagccauacuccuaau

SEQ ID NO: 357878 - RNA, 19 nt, Artificial Sequence
  Synthetic
uuacagccauacuccuaau

SEQ ID NO: 357879 - RNA, 20 nt, Artificial Sequence
  Synthetic
cuuacagccauacuccuaau

SEQ ID NO: 357880 - RNA, 21 nt, Artificial Sequence
  Synthetic
ccuuacagccauacuccuaau

SEQ ID NO: 357881 - RNA, 22 nt, Artificial Sequence
  Synthetic
gccuuacagccauacuccuaau

SEQ ID NO: 357882 - RNA, 23 nt, Artificial Sequence
  Synthetic
agccuuacagccauacuccuaau

SEQ ID NO: 357883 - RNA, 24 nt, Artificial Sequence
  Synthetic
uagccuuacagccauacuccuaau

SEQ ID NO: 357884 - RNA, 18 nt, Artificial Sequence
  Synthetic
uagauugcccuuccuaau

SEQ ID NO: 357885 - RNA, 19 nt, Artificial Sequence
  Synthetic
guagauugcccuuccuaau

SEQ ID NO: 357886 - RNA, 20 nt, Artificial Sequence
  Synthetic
aguagauugcccuuccuaau

SEQ ID NO: 357887 - RNA, 21 nt, Artificial Sequence
  Synthetic
aaguagauugcccuuccuaau

SEQ ID NO: 357888 - RNA, 22 nt, Artificial Sequence
  Synthetic
aaaguagauugcccuuccuaau

SEQ ID NO: 357889 - RNA, 23 nt, Artificial Sequence
  Synthetic
uaaaguagauugcccuuccuaau

SEQ ID NO: 357890 - RNA, 24 nt, Artificial Sequence
  Synthetic
guaaaguagauugcccuuccuaau

SEQ ID NO: 357891 - RNA, 18 nt, Artificial Sequence
  Synthetic
agcuaugaugaagcuaau

SEQ ID NO: 357892 - RNA, 19 nt, Artificial Sequence
  Synthetic
cagcuaugaugaagcuaau

SEQ ID NO: 357893 - RNA, 20 nt, Artificial Sequence
  Synthetic
acagcuaugaugaagcuaau

SEQ ID NO: 357894 - RNA, 21 nt, Artificial Sequence
  Synthetic
uacagcuaugaugaagcuaau

SEQ ID NO: 357895 - RNA, 22 nt, Artificial Sequence
  Synthetic
cuacagcuaugaugaagcuaau

SEQ ID NO: 357896 - RNA, 23 nt, Artificial Sequence
  Synthetic
ucuacagcuaugaugaagcuaau

SEQ ID NO: 357897 - RNA, 24 nt, Artificial Sequence
  Synthetic
gucuacagcuaugaugaagcuaau

SEQ ID NO: 357898 - RNA, 18 nt, Artificial Sequence
  Synthetic
uaagaauuugcagcuaau

SEQ ID NO: 357899 - RNA, 19 nt, Artificial Sequence
  Synthetic
guaagaauuugcagcuaau

SEQ ID NO: 357900 - RNA, 20 nt, Artificial Sequence
  Synthetic
uguaagaauuugcagcuaau

SEQ ID NO: 357901 - RNA, 21 nt, Artificial Sequence
  Synthetic
uuguaagaauuugcagcuaau

SEQ ID NO: 357902 - RNA, 22 nt, Artificial Sequence
  Synthetic
guuguaagaauuugcagcuaau

SEQ ID NO: 357903 - RNA, 23 nt, Artificial Sequence
  Synthetic
uguuguaagaauuugcagcuaau

SEQ ID NO: 357904 - RNA, 24 nt, Artificial Sequence
  Synthetic
uuguuguaagaauuugcagcuaau

SEQ ID NO: 357905 - RNA, 18 nt, Artificial Sequence
  Synthetic
cugcaauuuucagcuaau

SEQ ID NO: 357906 - RNA, 19 nt, Artificial Sequence
  Synthetic
gcugcaauuuucagcuaau

SEQ ID NO: 357907 - RNA, 20 nt, Artificial Sequence
  Synthetic
ggcugcaauuuucagcuaau

SEQ ID NO: 357908 - RNA, 21 nt, Artificial Sequence
  Synthetic
gggcugcaauuuucagcuaau

SEQ ID NO: 357909 - RNA, 22 nt, Artificial Sequence
  Synthetic
ugggcugcaauuuucagcuaau

SEQ ID NO: 357910 - RNA, 23 nt, Artificial Sequence
  Synthetic
cugggcugcaauuuucagcuaau

SEQ ID NO: 357911 - RNA, 24 nt, Artificial Sequence
  Synthetic
gcugggcugcaauuuucagcuaau

SEQ ID NO: 357912 - RNA, 18 nt, Artificial Sequence
  Synthetic
aaauccaguagagcuaau

SEQ ID NO: 357913 - RNA, 19 nt, Artificial Sequence
  Synthetic
caaauccaguagagcuaau

SEQ ID NO: 357914 - RNA, 20 nt, Artificial Sequence
  Synthetic
gcaaauccaguagagcuaau

SEQ ID NO: 357915 - RNA, 21 nt, Artificial Sequence
  Synthetic
ggcaaauccaguagagcuaau

SEQ ID NO: 357916 - RNA, 22 nt, Artificial Sequence
  Synthetic
uggcaaauccaguagagcuaau

SEQ ID NO: 357917 - RNA, 23 nt, Artificial Sequence
  Synthetic
guggcaaauccaguagagcuaau

SEQ ID NO: 357918 - RNA, 24 nt, Artificial Sequence
  Synthetic
aguggcaaauccaguagagcuaau

SEQ ID NO: 357919 - RNA, 18 nt, Artificial Sequence
  Synthetic
uaggaggcacgagcuaau

SEQ ID NO: 357920 - RNA, 19 nt, Artificial Sequence
  Synthetic
guaggaggcacgagcuaau

SEQ ID NO: 357921 - RNA, 20 nt, Artificial Sequence
  Synthetic
gguaggaggcacgagcuaau

SEQ ID NO: 357922 - RNA, 21 nt, Artificial Sequence
  Synthetic
agguaggaggcacgagcuaau

SEQ ID NO: 357923 - RNA, 22 nt, Artificial Sequence
  Synthetic
aagguaggaggcacgagcuaau

SEQ ID NO: 357924 - RNA, 23 nt, Artificial Sequence
  Synthetic
caagguaggaggcacgagcuaau

SEQ ID NO: 357925 - RNA, 24 nt, Artificial Sequence
  Synthetic
acaagguaggaggcacgagcuaau

SEQ ID NO: 357926 - RNA, 18 nt, Artificial Sequence
  Synthetic
cuuuaaccuuuagcuaau

SEQ ID NO: 357927 - RNA, 19 nt, Artificial Sequence
  Synthetic
acuuuaaccuuuagcuaau

SEQ ID NO: 357928 - RNA, 20 nt, Artificial Sequence
  Synthetic
gacuuuaaccuuuagcuaau

SEQ ID NO: 357929 - RNA, 21 nt, Artificial Sequence
  Synthetic
ugacuuuaaccuuuagcuaau

SEQ ID NO: 357930 - RNA, 22 nt, Artificial Sequence
  Synthetic
uugacuuuaaccuuuagcuaau

SEQ ID NO: 357931 - RNA, 23 nt, Artificial Sequence
  Synthetic
uuugacuuuaaccuuuagcuaau

SEQ ID NO: 357932 - RNA, 24 nt, Artificial Sequence
  Synthetic
guuugacuuuaaccuuuagcuaau

SEQ ID NO: 357933 - RNA, 18 nt, Artificial Sequence
  Synthetic
ccacagugucuggcuaau

SEQ ID NO: 357934 - RNA, 19 nt, Artificial Sequence
  Synthetic
uccacagugucuggcuaau

SEQ ID NO: 357935 - RNA, 20 nt, Artificial Sequence
  Synthetic
uuccacagugucuggcuaau

SEQ ID NO: 357936 - RNA, 21 nt, Artificial Sequence
  Synthetic
cuuccacagugucuggcuaau

SEQ ID NO: 357937 - RNA, 22 nt, Artificial Sequence
  Synthetic
ccuuccacagugucuggcuaau

SEQ ID NO: 357938 - RNA, 23 nt, Artificial Sequence
  Synthetic
accuuccacagugucuggcuaau

SEQ ID NO: 357939 - RNA, 24 nt, Artificial Sequence
  Synthetic
caccuuccacagugucuggcuaau

SEQ ID NO: 357940 - RNA, 18 nt, Artificial Sequence
  Synthetic
caucauuauguggcuaau

SEQ ID NO: 357941 - RNA, 19 nt, Artificial Sequence
  Synthetic
ucaucauuauguggcuaau

SEQ ID NO: 357942 - RNA, 20 nt, Artificial Sequence
  Synthetic
uucaucauuauguggcuaau

SEQ ID NO: 357943 - RNA, 21 nt, Artificial Sequence
  Synthetic
uuucaucauuauguggcuaau

SEQ ID NO: 357944 - RNA, 22 nt, Artificial Sequence
  Synthetic
uuuucaucauuauguggcuaau

SEQ ID NO: 357945 - RNA, 23 nt, Artificial Sequence
  Synthetic
guuuucaucauuauguggcuaau

SEQ ID NO: 357946 - RNA, 24 nt, Artificial Sequence
  Synthetic
aguuuucaucauuauguggcuaau

SEQ ID NO: 357947 - RNA, 18 nt, Artificial Sequence
  Synthetic
ucuuaucaguaugcuaau

SEQ ID NO: 357948 - RNA, 19 nt, Artificial Sequence
  Synthetic
uucuuaucaguaugcuaau

SEQ ID NO: 357949 - RNA, 20 nt, Artificial Sequence
  Synthetic
uuucuuaucaguaugcuaau

SEQ ID NO: 357950 - RNA, 21 nt, Artificial Sequence
  Synthetic
cuuucuuaucaguaugcuaau

SEQ ID NO: 357951 - RNA, 22 nt, Artificial Sequence
  Synthetic
ccuuucuuaucaguaugcuaau

SEQ ID NO: 357952 - RNA, 23 nt, Artificial Sequence
  Synthetic
accuuucuuaucaguaugcuaau

SEQ ID NO: 357953 - RNA, 24 nt, Artificial Sequence
  Synthetic
uaccuuucuuaucaguaugcuaau

SEQ ID NO: 357954 - RNA, 18 nt, Artificial Sequence
  Synthetic
uucaacgacagugcuaau

SEQ ID NO: 357955 - RNA, 19 nt, Artificial Sequence
  Synthetic
auucaacgacagugcuaau

SEQ ID NO: 357956 - RNA, 20 nt, Artificial Sequence
  Synthetic
aauucaacgacagugcuaau

SEQ ID NO: 357957 - RNA, 21 nt, Artificial Sequence
  Synthetic
uaauucaacgacagugcuaau

SEQ ID NO: 357958 - RNA, 22 nt, Artificial Sequence
  Synthetic
cuaauucaacgacagugcuaau

SEQ ID NO: 357959 - RNA, 23 nt, Artificial Sequence
  Synthetic
ccuaauucaacgacagugcuaau

SEQ ID NO: 357960 - RNA, 24 nt, Artificial Sequence
  Synthetic
gccuaauucaacgacagugcuaau

SEQ ID NO: 357961 - RNA, 18 nt, Artificial Sequence
  Synthetic
ccacccaugauugcuaau

SEQ ID NO: 357962 - RNA, 19 nt, Artificial Sequence
  Synthetic
uccacccaugauugcuaau

SEQ ID NO: 357963 - RNA, 20 nt, Artificial Sequence
  Synthetic
uuccacccaugauugcuaau

SEQ ID NO: 357964 - RNA, 21 nt, Artificial Sequence
  Synthetic
uuuccacccaugauugcuaau

SEQ ID NO: 357965 - RNA, 22 nt, Artificial Sequence
  Synthetic
guuuccacccaugauugcuaau

SEQ ID NO: 357966 - RNA, 23 nt, Artificial Sequence
  Synthetic
uguuuccacccaugauugcuaau

SEQ ID NO: 357967 - RNA, 24 nt, Artificial Sequence
  Synthetic
auguuuccacccaugauugcuaau

SEQ ID NO: 357968 - RNA, 18 nt, Artificial Sequence
  Synthetic
agauacagaaacucuaau

SEQ ID NO: 357969 - RNA, 19 nt, Artificial Sequence
  Synthetic
aagauacagaaacucuaau

SEQ ID NO: 357970 - RNA, 20 nt, Artificial Sequence
  Synthetic
caagauacagaaacucuaau

SEQ ID NO: 357971 - RNA, 21 nt, Artificial Sequence
  Synthetic
gcaagauacagaaacucuaau

SEQ ID NO: 357972 - RNA, 22 nt, Artificial Sequence
  Synthetic
agcaagauacagaaacucuaau

SEQ ID NO: 357973 - RNA, 23 nt, Artificial Sequence
  Synthetic
aagcaagauacagaaacucuaau

SEQ ID NO: 357974 - RNA, 24 nt, Artificial Sequence
  Synthetic
gaagcaagauacagaaacucuaau

SEQ ID NO: 357975 - RNA, 18 nt, Artificial Sequence
  Synthetic
aacagaaauggcucuaau

SEQ ID NO: 357976 - RNA, 19 nt, Artificial Sequence
  Synthetic
gaacagaaauggcucuaau

SEQ ID NO: 357977 - RNA, 20 nt, Artificial Sequence
  Synthetic
ugaacagaaauggcucuaau

SEQ ID NO: 357978 - RNA, 21 nt, Artificial Sequence
  Synthetic
cugaacagaaauggcucuaau

SEQ ID NO: 357979 - RNA, 22 nt, Artificial Sequence
  Synthetic
ucugaacagaaauggcucuaau

SEQ ID NO: 357980 - RNA, 23 nt, Artificial Sequence
  Synthetic
uucugaacagaaauggcucuaau

SEQ ID NO: 357981 - RNA, 24 nt, Artificial Sequence
  Synthetic
uuucugaacagaaauggcucuaau

SEQ ID NO: 357982 - RNA, 18 nt, Artificial Sequence
  Synthetic
cucaucuucuucucuaau

SEQ ID NO: 357983 - RNA, 19 nt, Artificial Sequence
  Synthetic
acucaucuucuucucuaau

SEQ ID NO: 357984 - RNA, 20 nt, Artificial Sequence
  Synthetic
uacucaucuucuucucuaau

SEQ ID NO: 357985 - RNA, 21 nt, Artificial Sequence
  Synthetic
cuacucaucuucuucucuaau

SEQ ID NO: 357986 - RNA, 22 nt, Artificial Sequence
  Synthetic
ucuacucaucuucuucucuaau

SEQ ID NO: 357987 - RNA, 23 nt, Artificial Sequence
  Synthetic
uucuacucaucuucuucucuaau

SEQ ID NO: 357988 - RNA, 24 nt, Artificial Sequence
  Synthetic
auucuacucaucuucuucucuaau

SEQ ID NO: 357989 - RNA, 18 nt, Artificial Sequence
  Synthetic
aauuuagcaaauucuaau

SEQ ID NO: 357990 - RNA, 19 nt, Artificial Sequence
  Synthetic
uaauuuagcaaauucuaau

SEQ ID NO: 357991 - RNA, 20 nt, Artificial Sequence
  Synthetic
auaauuuagcaaauucuaau

SEQ ID NO: 357992 - RNA, 21 nt, Artificial Sequence
  Synthetic
aauaauuuagcaaauucuaau

SEQ ID NO: 357993 - RNA, 22 nt, Artificial Sequence
  Synthetic
aaauaauuuagcaaauucuaau

SEQ ID NO: 357994 - RNA, 23 nt, Artificial Sequence
  Synthetic
uaaauaauuuagcaaauucuaau

SEQ ID NO: 357995 - RNA, 24 nt, Artificial Sequence
  Synthetic
guaaauaauuuagcaaauucuaau

SEQ ID NO: 357996 - RNA, 18 nt, Artificial Sequence
  Synthetic
gguauguuucauucuaau

SEQ ID NO: 357997 - RNA, 19 nt, Artificial Sequence
  Synthetic
ugguauguuucauucuaau

SEQ ID NO: 357998 - RNA, 20 nt, Artificial Sequence
  Synthetic
cugguauguuucauucuaau

SEQ ID NO: 357999 - RNA, 21 nt, Artificial Sequence
  Synthetic
acugguauguuucauucuaau

SEQ ID NO: 358000 - RNA, 22 nt, Artificial Sequence
  Synthetic
aacugguauguuucauucuaau

SEQ ID NO: 358001 - RNA, 23 nt, Artificial Sequence
  Synthetic
gaacugguauguuucauucuaau

SEQ ID NO: 358002 - RNA, 24 nt, Artificial Sequence
  Synthetic
agaacugguauguuucauucuaau

SEQ ID NO: 358003 - RNA, 18 nt, Artificial Sequence
  Synthetic
aaaucaaaauauucuaau

SEQ ID NO: 358004 - RNA, 19 nt, Artificial Sequence
  Synthetic
aaaaucaaaauauucuaau

SEQ ID NO: 358005 - RNA, 20 nt, Artificial Sequence
  Synthetic
gaaaaucaaaauauucuaau

SEQ ID NO: 358006 - RNA, 21 nt, Artificial Sequence
  Synthetic
ugaaaaucaaaauauucuaau

SEQ ID NO: 358007 - RNA, 22 nt, Artificial Sequence
  Synthetic
augaaaaucaaaauauucuaau

SEQ ID NO: 358008 - RNA, 23 nt, Artificial Sequence
  Synthetic
aaugaaaaucaaaauauucuaau

SEQ ID NO: 358009 - RNA, 24 nt, Artificial Sequence
  Synthetic
aaaugaaaaucaaaauauucuaau

SEQ ID NO: 358010 - RNA, 18 nt, Artificial Sequence
  Synthetic
uacccuuaagcuucuaau

SEQ ID NO: 358011 - RNA, 19 nt, Artificial Sequence
  Synthetic
uuacccuuaagcuucuaau

SEQ ID NO: 358012 - RNA, 20 nt, Artificial Sequence
  Synthetic
uuuacccuuaagcuucuaau

SEQ ID NO: 358013 - RNA, 21 nt, Artificial Sequence
  Synthetic
uuuuacccuuaagcuucuaau

SEQ ID NO: 358014 - RNA, 22 nt, Artificial Sequence
  Synthetic
guuuuacccuuaagcuucuaau

SEQ ID NO: 358015 - RNA, 23 nt, Artificial Sequence
  Synthetic
cguuuuacccuuaagcuucuaau

SEQ ID NO: 358016 - RNA, 24 nt, Artificial Sequence
  Synthetic
ccguuuuacccuuaagcuucuaau

SEQ ID NO: 358017 - RNA, 18 nt, Artificial Sequence
  Synthetic
cucaaaagagcuucuaau

SEQ ID NO: 358018 - RNA, 19 nt, Artificial Sequence
  Synthetic
acucaaaagagcuucuaau

SEQ ID NO: 358019 - RNA, 20 nt, Artificial Sequence
  Synthetic
gacucaaaagagcuucuaau

SEQ ID NO: 358020 - RNA, 21 nt, Artificial Sequence
  Synthetic
agacucaaaagagcuucuaau

SEQ ID NO: 358021 - RNA, 22 nt, Artificial Sequence
  Synthetic
gagacucaaaagagcuucuaau

SEQ ID NO: 358022 - RNA, 23 nt, Artificial Sequence
  Synthetic
agagacucaaaagagcuucuaau

SEQ ID NO: 358023 - RNA, 24 nt, Artificial Sequence
  Synthetic
gagagacucaaaagagcuucuaau

SEQ ID NO: 358024 - RNA, 18 nt, Artificial Sequence
  Synthetic
ccuguaacuucuucuaau

SEQ ID NO: 358025 - RNA, 19 nt, Artificial Sequence
  Synthetic
accuguaacuucuucuaau

SEQ ID NO: 358026 - RNA, 20 nt, Artificial Sequence
  Synthetic
aaccuguaacuucuucuaau

SEQ ID NO: 358027 - RNA, 21 nt, Artificial Sequence
  Synthetic
aaaccuguaacuucuucuaau

SEQ ID NO: 358028 - RNA, 22 nt, Artificial Sequence
  Synthetic
aaaaccuguaacuucuucuaau

SEQ ID NO: 358029 - RNA, 23 nt, Artificial Sequence
  Synthetic
caaaaccuguaacuucuucuaau

SEQ ID NO: 358030 - RNA, 24 nt, Artificial Sequence
  Synthetic
ccaaaaccuguaacuucuucuaau

SEQ ID NO: 358031 - RNA, 18 nt, Artificial Sequence
  Synthetic
gauauauguuuuucuaau

SEQ ID NO: 358032 - RNA, 19 nt, Artificial Sequence
  Synthetic
ggauauauguuuuucuaau

SEQ ID NO: 358033 - RNA, 20 nt, Artificial Sequence
  Synthetic
uggauauauguuuuucuaau

SEQ ID NO: 358034 - RNA, 21 nt, Artificial Sequence
  Synthetic
cuggauauauguuuuucuaau

SEQ ID NO: 358035 - RNA, 22 nt, Artificial Sequence
  Synthetic
ccuggauauauguuuuucuaau

SEQ ID NO: 358036 - RNA, 23 nt, Artificial Sequence
  Synthetic
accuggauauauguuuuucuaau

SEQ ID NO: 358037 - RNA, 24 nt, Artificial Sequence
  Synthetic
gaccuggauauauguuuuucuaau

SEQ ID NO: 358038 - RNA, 18 nt, Artificial Sequence
  Synthetic
uuuaauuagaaaaguaau

SEQ ID NO: 358039 - RNA, 19 nt, Artificial Sequence
  Synthetic
uuuuaauuagaaaaguaau

SEQ ID NO: 358040 - RNA, 20 nt, Artificial Sequence
  Synthetic
auuuuaauuagaaaaguaau

SEQ ID NO: 358041 - RNA, 21 nt, Artificial Sequence
  Synthetic
uauuuuaauuagaaaaguaau

SEQ ID NO: 358042 - RNA, 22 nt, Artificial Sequence
  Synthetic
cuauuuuaauuagaaaaguaau

SEQ ID NO: 358043 - RNA, 23 nt, Artificial Sequence
  Synthetic
acuauuuuaauuagaaaaguaau

SEQ ID NO: 358044 - RNA, 24 nt, Artificial Sequence
  Synthetic
uacuauuuuaauuagaaaaguaau

SEQ ID NO: 358045 - RNA, 18 nt, Artificial Sequence
  Synthetic
gaaauccaccgaaguaau

SEQ ID NO: 358046 - RNA, 19 nt, Artificial Sequence
  Synthetic
agaaauccaccgaaguaau

SEQ ID NO: 358047 - RNA, 20 nt, Artificial Sequence
  Synthetic
uagaaauccaccgaaguaau

SEQ ID NO: 358048 - RNA, 21 nt, Artificial Sequence
  Synthetic
uuagaaauccaccgaaguaau

SEQ ID NO: 358049 - RNA, 22 nt, Artificial Sequence
  Synthetic
uuuagaaauccaccgaaguaau

SEQ ID NO: 358050 - RNA, 23 nt, Artificial Sequence
  Synthetic
uuuuagaaauccaccgaaguaau

SEQ ID NO: 358051 - RNA, 24 nt, Artificial Sequence
  Synthetic
uuuuuagaaauccaccgaaguaau

SEQ ID NO: 358052 - RNA, 18 nt, Artificial Sequence
  Synthetic
acccucacucuaaguaau

SEQ ID NO: 358053 - RNA, 19 nt, Artificial Sequence
  Synthetic
gacccucacucuaaguaau

SEQ ID NO: 358054 - RNA, 20 nt, Artificial Sequence
  Synthetic
agacccucacucuaaguaau

SEQ ID NO: 358055 - RNA, 21 nt, Artificial Sequence
  Synthetic
gagacccucacucuaaguaau

SEQ ID NO: 358056 - RNA, 22 nt, Artificial Sequence
  Synthetic
ugagacccucacucuaaguaau

SEQ ID NO: 358057 - RNA, 23 nt, Artificial Sequence
  Synthetic
uugagacccucacucuaaguaau

SEQ ID NO: 358058 - RNA, 24 nt, Artificial Sequence
  Synthetic
uuugagacccucacucuaaguaau

SEQ ID NO: 358059 - RNA, 18 nt, Artificial Sequence
  Synthetic
gacagugguuuaaguaau

SEQ ID NO: 358060 - RNA, 19 nt, Artificial Sequence
  Synthetic
agacagugguuuaaguaau

SEQ ID NO: 358061 - RNA, 20 nt, Artificial Sequence
  Synthetic
cagacagugguuuaaguaau

SEQ ID NO: 358062 - RNA, 21 nt, Artificial Sequence
  Synthetic
ucagacagugguuuaaguaau

SEQ ID NO: 358063 - RNA, 22 nt, Artificial Sequence
  Synthetic
uucagacagugguuuaaguaau

SEQ ID NO: 358064 - RNA, 23 nt, Artificial Sequence
  Synthetic
auucagacagugguuuaaguaau

SEQ ID NO: 358065 - RNA, 24 nt, Artificial Sequence
  Synthetic
cauucagacagugguuuaaguaau

SEQ ID NO: 358066 - RNA, 18 nt, Artificial Sequence
  Synthetic
uuuauuuaauacaguaau

SEQ ID NO: 358067 - RNA, 19 nt, Artificial Sequence
  Synthetic
uuuuauuuaauacaguaau

SEQ ID NO: 358068 - RNA, 20 nt, Artificial Sequence
  Synthetic
guuuuauuuaauacaguaau

SEQ ID NO: 358069 - RNA, 21 nt, Artificial Sequence
  Synthetic
gguuuuauuuaauacaguaau

SEQ ID NO: 358070 - RNA, 22 nt, Artificial Sequence
  Synthetic
agguuuuauuuaauacaguaau

SEQ ID NO: 358071 - RNA, 23 nt, Artificial Sequence
  Synthetic
uagguuuuauuuaauacaguaau

SEQ ID NO: 358072 - RNA, 24 nt, Artificial Sequence
  Synthetic
guagguuuuauuuaauacaguaau

SEQ ID NO: 358073 - RNA, 18 nt, Artificial Sequence
  Synthetic
uacaguauaggcaguaau

SEQ ID NO: 358074 - RNA, 19 nt, Artificial Sequence
  Synthetic
guacaguauaggcaguaau

SEQ ID NO: 358075 - RNA, 20 nt, Artificial Sequence
  Synthetic
aguacaguauaggcaguaau

SEQ ID NO: 358076 - RNA, 21 nt, Artificial Sequence
  Synthetic
aaguacaguauaggcaguaau

SEQ ID NO: 358077 - RNA, 22 nt, Artificial Sequence
  Synthetic
gaaguacaguauaggcaguaau

SEQ ID NO: 358078 - RNA, 23 nt, Artificial Sequence
  Synthetic
agaaguacaguauaggcaguaau

SEQ ID NO: 358079 - RNA, 24 nt, Artificial Sequence
  Synthetic
gagaaguacaguauaggcaguaau

SEQ ID NO: 358080 - RNA, 18 nt, Artificial Sequence
  Synthetic
uugcuugcuaucaguaau

SEQ ID NO: 358081 - RNA, 19 nt, Artificial Sequence
  Synthetic
uuugcuugcuaucaguaau

SEQ ID NO: 358082 - RNA, 20 nt, Artificial Sequence
  Synthetic
auuugcuugcuaucaguaau

SEQ ID NO: 358083 - RNA, 21 nt, Artificial Sequence
  Synthetic
uauuugcuugcuaucaguaau

SEQ ID NO: 358084 - RNA, 22 nt, Artificial Sequence
  Synthetic
uuauuugcuugcuaucaguaau

SEQ ID NO: 358085 - RNA, 23 nt, Artificial Sequence
  Synthetic
uuuauuugcuugcuaucaguaau

SEQ ID NO: 358086 - RNA, 24 nt, Artificial Sequence
  Synthetic
uuuuauuugcuugcuaucaguaau

SEQ ID NO: 358087 - RNA, 18 nt, Artificial Sequence
  Synthetic
uggagaggagagaguaau

SEQ ID NO: 358088 - RNA, 19 nt, Artificial Sequence
  Synthetic
guggagaggagagaguaau

SEQ ID NO: 358089 - RNA, 20 nt, Artificial Sequence
  Synthetic
aguggagaggagagaguaau

SEQ ID NO: 358090 - RNA, 21 nt, Artificial Sequence
  Synthetic
aaguggagaggagagaguaau

SEQ ID NO: 358091 - RNA, 22 nt, Artificial Sequence
  Synthetic
aaaguggagaggagagaguaau

SEQ ID NO: 358092 - RNA, 23 nt, Artificial Sequence
  Synthetic
gaaaguggagaggagagaguaau

SEQ ID NO: 358093 - RNA, 24 nt, Artificial Sequence
  Synthetic
agaaaguggagaggagagaguaau

SEQ ID NO: 358094 - RNA, 18 nt, Artificial Sequence
  Synthetic
auuugaguagauaguaau

SEQ ID NO: 358095 - RNA, 19 nt, Artificial Sequence
  Synthetic
cauuugaguagauaguaau

SEQ ID NO: 358096 - RNA, 20 nt, Artificial Sequence
  Synthetic
acauuugaguagauaguaau

SEQ ID NO: 358097 - RNA, 21 nt, Artificial Sequence
  Synthetic
aacauuugaguagauaguaau

SEQ ID NO: 358098 - RNA, 22 nt, Artificial Sequence
  Synthetic
gaacauuugaguagauaguaau

SEQ ID NO: 358099 - RNA, 23 nt, Artificial Sequence
  Synthetic
agaacauuugaguagauaguaau

SEQ ID NO: 358100 - RNA, 24 nt, Artificial Sequence
  Synthetic
cagaacauuugaguagauaguaau

SEQ ID NO: 358101 - RNA, 18 nt, Artificial Sequence
  Synthetic
aggagcucauauaguaau

SEQ ID NO: 358102 - RNA, 19 nt, Artificial Sequence
  Synthetic
aaggagcucauauaguaau

SEQ ID NO: 358103 - RNA, 20 nt, Artificial Sequence
  Synthetic
caaggagcucauauaguaau

SEQ ID NO: 358104 - RNA, 21 nt, Artificial Sequence
  Synthetic
ucaaggagcucauauaguaau

SEQ ID NO: 358105 - RNA, 22 nt, Artificial Sequence
  Synthetic
uucaaggagcucauauaguaau

SEQ ID NO: 358106 - RNA, 23 nt, Artificial Sequence
  Synthetic
uuucaaggagcucauauaguaau

SEQ ID NO: 358107 - RNA, 24 nt, Artificial Sequence
  Synthetic
cuuucaaggagcucauauaguaau

SEQ ID NO: 358108 - RNA, 18 nt, Artificial Sequence
  Synthetic
guaugagauuauaguaau

SEQ ID NO: 358109 - RNA, 19 nt, Artificial Sequence
  Synthetic
aguaugagauuauaguaau

SEQ ID NO: 358110 - RNA, 20 nt, Artificial Sequence
  Synthetic
caguaugagauuauaguaau

SEQ ID NO: 358111 - RNA, 21 nt, Artificial Sequence
  Synthetic
gcaguaugagauuauaguaau

SEQ ID NO: 358112 - RNA, 22 nt, Artificial Sequence
  Synthetic
ggcaguaugagauuauaguaau

SEQ ID NO: 358113 - RNA, 23 nt, Artificial Sequence
  Synthetic
gggcaguaugagauuauaguaau

SEQ ID NO: 358114 - RNA, 24 nt, Artificial Sequence
  Synthetic
ugggcaguaugagauuauaguaau

SEQ ID NO: 358115 - RNA, 18 nt, Artificial Sequence
  Synthetic
auuauuacagagcguaau

SEQ ID NO: 358116 - RNA, 19 nt, Artificial Sequence
  Synthetic
cauuauuacagagcguaau

SEQ ID NO: 358117 - RNA, 20 nt, Artificial Sequence
  Synthetic
gcauuauuacagagcguaau

SEQ ID NO: 358118 - RNA, 21 nt, Artificial Sequence
  Synthetic
ugcauuauuacagagcguaau

SEQ ID NO: 358119 - RNA, 22 nt, Artificial Sequence
  Synthetic
uugcauuauuacagagcguaau

SEQ ID NO: 358120 - RNA, 23 nt, Artificial Sequence
  Synthetic
auugcauuauuacagagcguaau

SEQ ID NO: 358121 - RNA, 24 nt, Artificial Sequence
  Synthetic
uauugcauuauuacagagcguaau

SEQ ID NO: 358122 - RNA, 18 nt, Artificial Sequence
  Synthetic
agagaauuagaagguaau

SEQ ID NO: 358123 - RNA, 19 nt, Artificial Sequence
  Synthetic
uagagaauuagaagguaau

SEQ ID NO: 358124 - RNA, 20 nt, Artificial Sequence
  Synthetic
guagagaauuagaagguaau

SEQ ID NO: 358125 - RNA, 21 nt, Artificial Sequence
  Synthetic
aguagagaauuagaagguaau

SEQ ID NO: 358126 - RNA, 22 nt, Artificial Sequence
  Synthetic
gaguagagaauuagaagguaau

SEQ ID NO: 358127 - RNA, 23 nt, Artificial Sequence
  Synthetic
ugaguagagaauuagaagguaau

SEQ ID NO: 358128 - RNA, 24 nt, Artificial Sequence
  Synthetic
gugaguagagaauuagaagguaau

SEQ ID NO: 358129 - RNA, 18 nt, Artificial Sequence
  Synthetic
gcagaacgauaagguaau

SEQ ID NO: 358130 - RNA, 19 nt, Artificial Sequence
  Synthetic
ugcagaacgauaagguaau

SEQ ID NO: 358131 - RNA, 20 nt, Artificial Sequence
  Synthetic
gugcagaacgauaagguaau

SEQ ID NO: 358132 - RNA, 21 nt, Artificial Sequence
  Synthetic
ugugcagaacgauaagguaau

SEQ ID NO: 358133 - RNA, 22 nt, Artificial Sequence
  Synthetic
uugugcagaacgauaagguaau

SEQ ID NO: 358134 - RNA, 23 nt, Artificial Sequence
  Synthetic
auugugcagaacgauaagguaau

SEQ ID NO: 358135 - RNA, 24 nt, Artificial Sequence
  Synthetic
aauugugcagaacgauaagguaau

SEQ ID NO: 358136 - RNA, 18 nt, Artificial Sequence
  Synthetic
agguaucuauaagguaau

SEQ ID NO: 358137 - RNA, 19 nt, Artificial Sequence
  Synthetic
aagguaucuauaagguaau

SEQ ID NO: 358138 - RNA, 20 nt, Artificial Sequence
  Synthetic
uaagguaucuauaagguaau

SEQ ID NO: 358139 - RNA, 21 nt, Artificial Sequence
  Synthetic
cuaagguaucuauaagguaau

SEQ ID NO: 358140 - RNA, 22 nt, Artificial Sequence
  Synthetic
acuaagguaucuauaagguaau

SEQ ID NO: 358141 - RNA, 23 nt, Artificial Sequence
  Synthetic
aacuaagguaucuauaagguaau

SEQ ID NO: 358142 - RNA, 24 nt, Artificial Sequence
  Synthetic
gaacuaagguaucuauaagguaau

SEQ ID NO: 358143 - RNA, 18 nt, Artificial Sequence
  Synthetic
aaaacacuuuaagguaau

SEQ ID NO: 358144 - RNA, 19 nt, Artificial Sequence
  Synthetic
aaaaacacuuuaagguaau

SEQ ID NO: 358145 - RNA, 20 nt, Artificial Sequence
  Synthetic
gaaaaacacuuuaagguaau

SEQ ID NO: 358146 - RNA, 21 nt, Artificial Sequence
  Synthetic
ggaaaaacacuuuaagguaau

SEQ ID NO: 358147 - RNA, 22 nt, Artificial Sequence
  Synthetic
uggaaaaacacuuuaagguaau

SEQ ID NO: 358148 - RNA, 23 nt, Artificial Sequence
  Synthetic
uuggaaaaacacuuuaagguaau

SEQ ID NO: 358149 - RNA, 24 nt, Artificial Sequence
  Synthetic
uuuggaaaaacacuuuaagguaau

SEQ ID NO: 358150 - RNA, 18 nt, Artificial Sequence
  Synthetic
auagaaggacacgguaau

SEQ ID NO: 358151 - RNA, 19 nt, Artificial Sequence
  Synthetic
gauagaaggacacgguaau

SEQ ID NO: 358152 - RNA, 20 nt, Artificial Sequence
  Synthetic
ugauagaaggacacgguaau

SEQ ID NO: 358153 - RNA, 21 nt, Artificial Sequence
  Synthetic
augauagaaggacacgguaau

SEQ ID NO: 358154 - RNA, 22 nt, Artificial Sequence
  Synthetic
gaugauagaaggacacgguaau

SEQ ID NO: 358155 - RNA, 23 nt, Artificial Sequence
  Synthetic
ugaugauagaaggacacgguaau

SEQ ID NO: 358156 - RNA, 24 nt, Artificial Sequence
  Synthetic
gugaugauagaaggacacgguaau

SEQ ID NO: 358157 - RNA, 18 nt, Artificial Sequence
  Synthetic
agaggcugccacgguaau

SEQ ID NO: 358158 - RNA, 19 nt, Artificial Sequence
  Synthetic
aagaggcugccacgguaau

SEQ ID NO: 358159 - RNA, 20 nt, Artificial Sequence
  Synthetic
uaagaggcugccacgguaau

SEQ ID NO: 358160 - RNA, 21 nt, Artificial Sequence
  Synthetic
auaagaggcugccacgguaau

SEQ ID NO: 358161 - RNA, 22 nt, Artificial Sequence
  Synthetic
aauaagaggcugccacgguaau

SEQ ID NO: 358162 - RNA, 23 nt, Artificial Sequence
  Synthetic
aaauaagaggcugccacgguaau

SEQ ID NO: 358163 - RNA, 24 nt, Artificial Sequence
  Synthetic
gaaauaagaggcugccacgguaau

SEQ ID NO: 358164 - RNA, 18 nt, Artificial Sequence
  Synthetic
uuuaauuucugugguaau

SEQ ID NO: 358165 - RNA, 19 nt, Artificial Sequence
  Synthetic
uuuuaauuucugugguaau

SEQ ID NO: 358166 - RNA, 20 nt, Artificial Sequence
  Synthetic
cuuuuaauuucugugguaau

SEQ ID NO: 358167 - RNA, 21 nt, Artificial Sequence
  Synthetic
ucuuuuaauuucugugguaau

SEQ ID NO: 358168 - RNA, 22 nt, Artificial Sequence
  Synthetic
uucuuuuaauuucugugguaau

SEQ ID NO: 358169 - RNA, 23 nt, Artificial Sequence
  Synthetic
uuucuuuuaauuucugugguaau

SEQ ID NO: 358170 - RNA, 24 nt, Artificial Sequence
  Synthetic
uuuucuuuuaauuucugugguaau

SEQ ID NO: 358171 - RNA, 18 nt, Artificial Sequence
  Synthetic
ugguuuuagugugguaau

SEQ ID NO: 358172 - RNA, 19 nt, Artificial Sequence
  Synthetic
augguuuuagugugguaau

SEQ ID NO: 358173 - RNA, 20 nt, Artificial Sequence
  Synthetic
uaugguuuuagugugguaau

SEQ ID NO: 358174 - RNA, 21 nt, Artificial Sequence
  Synthetic
auaugguuuuagugugguaau

SEQ ID NO: 358175 - RNA, 22 nt, Artificial Sequence
  Synthetic
aauaugguuuuagugugguaau

SEQ ID NO: 358176 - RNA, 23 nt, Artificial Sequence
  Synthetic
caauaugguuuuagugugguaau

SEQ ID NO: 358177 - RNA, 24 nt, Artificial Sequence
  Synthetic
ucaauaugguuuuagugugguaau

SEQ ID NO: 358178 - RNA, 18 nt, Artificial Sequence
  Synthetic
caacuaagaacauguaau

SEQ ID NO: 358179 - RNA, 19 nt, Artificial Sequence
  Synthetic
gcaacuaagaacauguaau

SEQ ID NO: 358180 - RNA, 20 nt, Artificial Sequence
  Synthetic
agcaacuaagaacauguaau

SEQ ID NO: 358181 - RNA, 21 nt, Artificial Sequence
  Synthetic
aagcaacuaagaacauguaau

SEQ ID NO: 358182 - RNA, 22 nt, Artificial Sequence
  Synthetic
aaagcaacuaagaacauguaau

SEQ ID NO: 358183 - RNA, 23 nt, Artificial Sequence
  Synthetic
uaaagcaacuaagaacauguaau

SEQ ID NO: 358184 - RNA, 24 nt, Artificial Sequence
  Synthetic
uuaaagcaacuaagaacauguaau

SEQ ID NO: 358185 - RNA, 18 nt, Artificial Sequence
  Synthetic
uugauauaggcauguaau

SEQ ID NO: 358186 - RNA, 19 nt, Artificial Sequence
  Synthetic
uuugauauaggcauguaau

SEQ ID NO: 358187 - RNA, 20 nt, Artificial Sequence
  Synthetic
uuuugauauaggcauguaau

SEQ ID NO: 358188 - RNA, 21 nt, Artificial Sequence
  Synthetic
guuuugauauaggcauguaau

SEQ ID NO: 358189 - RNA, 22 nt, Artificial Sequence
  Synthetic
uguuuugauauaggcauguaau

SEQ ID NO: 358190 - RNA, 23 nt, Artificial Sequence
  Synthetic
guguuuugauauaggcauguaau

SEQ ID NO: 358191 - RNA, 24 nt, Artificial Sequence
  Synthetic
gguguuuugauauaggcauguaau

SEQ ID NO: 358192 - RNA, 18 nt, Artificial Sequence
  Synthetic
uuguucuucaacuguaau

SEQ ID NO: 358193 - RNA, 19 nt, Artificial Sequence
  Synthetic
uuuguucuucaacuguaau

SEQ ID NO: 358194 - RNA, 20 nt, Artificial Sequence
  Synthetic
uuuuguucuucaacuguaau

SEQ ID NO: 358195 - RNA, 21 nt, Artificial Sequence
  Synthetic
auuuuguucuucaacuguaau

SEQ ID NO: 358196 - RNA, 22 nt, Artificial Sequence
  Synthetic
uauuuuguucuucaacuguaau

SEQ ID NO: 358197 - RNA, 23 nt, Artificial Sequence
  Synthetic
cuauuuuguucuucaacuguaau

SEQ ID NO: 358198 - RNA, 24 nt, Artificial Sequence
  Synthetic
gcuauuuuguucuucaacuguaau

SEQ ID NO: 358199 - RNA, 18 nt, Artificial Sequence
  Synthetic
agaagaaacaccuguaau

SEQ ID NO: 358200 - RNA, 19 nt, Artificial Sequence
  Synthetic
uagaagaaacaccuguaau

SEQ ID NO: 358201 - RNA, 20 nt, Artificial Sequence
  Synthetic
guagaagaaacaccuguaau

SEQ ID NO: 358202 - RNA, 21 nt, Artificial Sequence
  Synthetic
gguagaagaaacaccuguaau

SEQ ID NO: 358203 - RNA, 22 nt, Artificial Sequence
  Synthetic
agguagaagaaacaccuguaau

SEQ ID NO: 358204 - RNA, 23 nt, Artificial Sequence
  Synthetic
uagguagaagaaacaccuguaau

SEQ ID NO: 358205 - RNA, 24 nt, Artificial Sequence
  Synthetic
guagguagaagaaacaccuguaau

SEQ ID NO: 358206 - RNA, 18 nt, Artificial Sequence
  Synthetic
uagggauuuggcuguaau

SEQ ID NO: 358207 - RNA, 19 nt, Artificial Sequence
  Synthetic
cuagggauuuggcuguaau

SEQ ID NO: 358208 - RNA, 20 nt, Artificial Sequence
  Synthetic
gcuagggauuuggcuguaau

SEQ ID NO: 358209 - RNA, 21 nt, Artificial Sequence
  Synthetic
agcuagggauuuggcuguaau

SEQ ID NO: 358210 - RNA, 22 nt, Artificial Sequence
  Synthetic
cagcuagggauuuggcuguaau

SEQ ID NO: 358211 - RNA, 23 nt, Artificial Sequence
  Synthetic
acagcuagggauuuggcuguaau

SEQ ID NO: 358212 - RNA, 24 nt, Artificial Sequence
  Synthetic
uacagcuagggauuuggcuguaau

SEQ ID NO: 358213 - RNA, 18 nt, Artificial Sequence
  Synthetic
ccaagaguuaucuguaau

SEQ ID NO: 358214 - RNA, 19 nt, Artificial Sequence
  Synthetic
gccaagaguuaucuguaau

SEQ ID NO: 358215 - RNA, 20 nt, Artificial Sequence
  Synthetic
ggccaagaguuaucuguaau

SEQ ID NO: 358216 - RNA, 21 nt, Artificial Sequence
  Synthetic
uggccaagaguuaucuguaau

SEQ ID NO: 358217 - RNA, 22 nt, Artificial Sequence
  Synthetic
cuggccaagaguuaucuguaau

SEQ ID NO: 358218 - RNA, 23 nt, Artificial Sequence
  Synthetic
ccuggccaagaguuaucuguaau

SEQ ID NO: 358219 - RNA, 24 nt, Artificial Sequence
  Synthetic
gccuggccaagaguuaucuguaau

SEQ ID NO: 358220 - RNA, 18 nt, Artificial Sequence
  Synthetic
caacaaugccucuguaau

SEQ ID NO: 358221 - RNA, 19 nt, Artificial Sequence
  Synthetic
acaacaaugccucuguaau

SEQ ID NO: 358222 - RNA, 20 nt, Artificial Sequence
  Synthetic
aacaacaaugccucuguaau

SEQ ID NO: 358223 - RNA, 21 nt, Artificial Sequence
  Synthetic
aaacaacaaugccucuguaau

SEQ ID NO: 358224 - RNA, 22 nt, Artificial Sequence
  Synthetic
aaaacaacaaugccucuguaau

SEQ ID NO: 358225 - RNA, 23 nt, Artificial Sequence
  Synthetic
aaaaacaacaaugccucuguaau

SEQ ID NO: 358226 - RNA, 24 nt, Artificial Sequence
  Synthetic
aaaaaacaacaaugccucuguaau

SEQ ID NO: 358227 - RNA, 18 nt, Artificial Sequence
  Synthetic
cauuuucuccucuguaau

SEQ ID NO: 358228 - RNA, 19 nt, Artificial Sequence
  Synthetic
ccauuuucuccucuguaau

SEQ ID NO: 358229 - RNA, 20 nt, Artificial Sequence
  Synthetic
accauuuucuccucuguaau

SEQ ID NO: 358230 - RNA, 21 nt, Artificial Sequence
  Synthetic
caccauuuucuccucuguaau

SEQ ID NO: 358231 - RNA, 22 nt, Artificial Sequence
  Synthetic
ccaccauuuucuccucuguaau

SEQ ID NO: 358232 - RNA, 23 nt, Artificial Sequence
  Synthetic
gccaccauuuucuccucuguaau

SEQ ID NO: 358233 - RNA, 24 nt, Artificial Sequence
  Synthetic
ugccaccauuuucuccucuguaau

SEQ ID NO: 358234 - RNA, 18 nt, Artificial Sequence
  Synthetic
uauuuaauagucuguaau

SEQ ID NO: 358235 - RNA, 19 nt, Artificial Sequence
  Synthetic
uuauuuaauagucuguaau

SEQ ID NO: 358236 - RNA, 20 nt, Artificial Sequence
  Synthetic
uuuauuuaauagucuguaau

SEQ ID NO: 358237 - RNA, 21 nt, Artificial Sequence
  Synthetic
cuuuauuuaauagucuguaau

SEQ ID NO: 358238 - RNA, 22 nt, Artificial Sequence
  Synthetic
ucuuuauuuaauagucuguaau

SEQ ID NO: 358239 - RNA, 23 nt, Artificial Sequence
  Synthetic
aucuuuauuuaauagucuguaau

SEQ ID NO: 358240 - RNA, 24 nt, Artificial Sequence
  Synthetic
uaucuuuauuuaauagucuguaau

SEQ ID NO: 358241 - RNA, 18 nt, Artificial Sequence
  Synthetic
caguguauuuucuguaau

SEQ ID NO: 358242 - RNA, 19 nt, Artificial Sequence
  Synthetic
gcaguguauuuucuguaau

SEQ ID NO: 358243 - RNA, 20 nt, Artificial Sequence
  Synthetic
agcaguguauuuucuguaau

SEQ ID NO: 358244 - RNA, 21 nt, Artificial Sequence
  Synthetic
uagcaguguauuuucuguaau

SEQ ID NO: 358245 - RNA, 22 nt, Artificial Sequence
  Synthetic
auagcaguguauuuucuguaau

SEQ ID NO: 358246 - RNA, 23 nt, Artificial Sequence
  Synthetic
aauagcaguguauuuucuguaau

SEQ ID NO: 358247 - RNA, 24 nt, Artificial Sequence
  Synthetic
gaauagcaguguauuuucuguaau

SEQ ID NO: 358248 - RNA, 18 nt, Artificial Sequence
  Synthetic
gcaagucucaaguguaau

SEQ ID NO: 358249 - RNA, 19 nt, Artificial Sequence
  Synthetic
agcaagucucaaguguaau

SEQ ID NO: 358250 - RNA, 20 nt, Artificial Sequence
  Synthetic
gagcaagucucaaguguaau

SEQ ID NO: 358251 - RNA, 21 nt, Artificial Sequence
  Synthetic
agagcaagucucaaguguaau

SEQ ID NO: 358252 - RNA, 22 nt, Artificial Sequence
  Synthetic
gagagcaagucucaaguguaau

SEQ ID NO: 358253 - RNA, 23 nt, Artificial Sequence
  Synthetic
agagagcaagucucaaguguaau

SEQ ID NO: 358254 - RNA, 24 nt, Artificial Sequence
  Synthetic
gagagagcaagucucaaguguaau

SEQ ID NO: 358255 - RNA, 18 nt, Artificial Sequence
  Synthetic
ggguaggcuguguguaau

SEQ ID NO: 358256 - RNA, 19 nt, Artificial Sequence
  Synthetic
gggguaggcuguguguaau

SEQ ID NO: 358257 - RNA, 20 nt, Artificial Sequence
  Synthetic
cgggguaggcuguguguaau

SEQ ID NO: 358258 - RNA, 21 nt, Artificial Sequence
  Synthetic
gcgggguaggcuguguguaau

SEQ ID NO: 358259 - RNA, 22 nt, Artificial Sequence
  Synthetic
agcgggguaggcuguguguaau

SEQ ID NO: 358260 - RNA, 23 nt, Artificial Sequence
  Synthetic
uagcgggguaggcuguguguaau

SEQ ID NO: 358261 - RNA, 24 nt, Artificial Sequence
  Synthetic
auagcgggguaggcuguguguaau

SEQ ID NO: 358262 - RNA, 18 nt, Artificial Sequence
  Synthetic
cccauagguaauuguaau

SEQ ID NO: 358263 - RNA, 19 nt, Artificial Sequence
  Synthetic
gcccauagguaauuguaau

SEQ ID NO: 358264 - RNA, 20 nt, Artificial Sequence
  Synthetic
ugcccauagguaauuguaau

SEQ ID NO: 358265 - RNA, 21 nt, Artificial Sequence
  Synthetic
uugcccauagguaauuguaau

SEQ ID NO: 358266 - RNA, 22 nt, Artificial Sequence
  Synthetic
guugcccauagguaauuguaau

SEQ ID NO: 358267 - RNA, 23 nt, Artificial Sequence
  Synthetic
uguugcccauagguaauuguaau

SEQ ID NO: 358268 - RNA, 24 nt, Artificial Sequence
  Synthetic
cuguugcccauagguaauuguaau

SEQ ID NO: 358269 - RNA, 18 nt, Artificial Sequence
  Synthetic
acaacaugaccuuguaau

SEQ ID NO: 358270 - RNA, 19 nt, Artificial Sequence
  Synthetic
gacaacaugaccuuguaau

SEQ ID NO: 358271 - RNA, 20 nt, Artificial Sequence
  Synthetic
agacaacaugaccuuguaau

SEQ ID NO: 358272 - RNA, 21 nt, Artificial Sequence
  Synthetic
cagacaacaugaccuuguaau

SEQ ID NO: 358273 - RNA, 22 nt, Artificial Sequence
  Synthetic
gcagacaacaugaccuuguaau

SEQ ID NO: 358274 - RNA, 23 nt, Artificial Sequence
  Synthetic
ugcagacaacaugaccuuguaau

SEQ ID NO: 358275 - RNA, 24 nt, Artificial Sequence
  Synthetic
uugcagacaacaugaccuuguaau

SEQ ID NO: 358276 - RNA, 18 nt, Artificial Sequence
  Synthetic
uucuaccuuccuuguaau

SEQ ID NO: 358277 - RNA, 19 nt, Artificial Sequence
  Synthetic
auucuaccuuccuuguaau

SEQ ID NO: 358278 - RNA, 20 nt, Artificial Sequence
  Synthetic
uauucuaccuuccuuguaau

SEQ ID NO: 358279 - RNA, 21 nt, Artificial Sequence
  Synthetic
auauucuaccuuccuuguaau

SEQ ID NO: 358280 - RNA, 22 nt, Artificial Sequence
  Synthetic
aauauucuaccuuccuuguaau

SEQ ID NO: 358281 - RNA, 23 nt, Artificial Sequence
  Synthetic
aaauauucuaccuuccuuguaau

SEQ ID NO: 358282 - RNA, 24 nt, Artificial Sequence
  Synthetic
caaauauucuaccuuccuuguaau

SEQ ID NO: 358283 - RNA, 18 nt, Artificial Sequence
  Synthetic
agaaaaguaaguuguaau

SEQ ID NO: 358284 - RNA, 19 nt, Artificial Sequence
  Synthetic
gagaaaaguaaguuguaau

SEQ ID NO: 358285 - RNA, 20 nt, Artificial Sequence
  Synthetic
ugagaaaaguaaguuguaau

SEQ ID NO: 358286 - RNA, 21 nt, Artificial Sequence
  Synthetic
augagaaaaguaaguuguaau

SEQ ID NO: 358287 - RNA, 22 nt, Artificial Sequence
  Synthetic
gaugagaaaaguaaguuguaau

SEQ ID NO: 358288 - RNA, 23 nt, Artificial Sequence
  Synthetic
agaugagaaaaguaaguuguaau

SEQ ID NO: 358289 - RNA, 24 nt, Artificial Sequence
  Synthetic
gagaugagaaaaguaaguuguaau

SEQ ID NO: 358290 - RNA, 18 nt, Artificial Sequence
  Synthetic
aaugugauuauuuguaau

SEQ ID NO: 358291 - RNA, 19 nt, Artificial Sequence
  Synthetic
caaugugauuauuuguaau

SEQ ID NO: 358292 - RNA, 20 nt, Artificial Sequence
  Synthetic
ucaaugugauuauuuguaau

SEQ ID NO: 358293 - RNA, 21 nt, Artificial Sequence
  Synthetic
gucaaugugauuauuuguaau

SEQ ID NO: 358294 - RNA, 22 nt, Artificial Sequence
  Synthetic
ugucaaugugauuauuuguaau

SEQ ID NO: 358295 - RNA, 23 nt, Artificial Sequence
  Synthetic
augucaaugugauuauuuguaau

SEQ ID NO: 358296 - RNA, 24 nt, Artificial Sequence
  Synthetic
aaugucaaugugauuauuuguaau

SEQ ID NO: 358297 - RNA, 18 nt, Artificial Sequence
  Synthetic
aguuuuuguaaaauuaau

SEQ ID NO: 358298 - RNA, 19 nt, Artificial Sequence
  Synthetic
aaguuuuuguaaaauuaau

SEQ ID NO: 358299 - RNA, 20 nt, Artificial Sequence
  Synthetic
caaguuuuuguaaaauuaau

SEQ ID NO: 358300 - RNA, 21 nt, Artificial Sequence
  Synthetic
acaaguuuuuguaaaauuaau

SEQ ID NO: 358301 - RNA, 22 nt, Artificial Sequence
  Synthetic
aacaaguuuuuguaaaauuaau

SEQ ID NO: 358302 - RNA, 23 nt, Artificial Sequence
  Synthetic
aaacaaguuuuuguaaaauuaau

SEQ ID NO: 358303 - RNA, 24 nt, Artificial Sequence
  Synthetic
gaaacaaguuuuuguaaaauuaau

SEQ ID NO: 358304 - RNA, 18 nt, Artificial Sequence
  Synthetic
uugaaucuguaaauuaau

SEQ ID NO: 358305 - RNA, 19 nt, Artificial Sequence
  Synthetic
auugaaucuguaaauuaau

SEQ ID NO: 358306 - RNA, 20 nt, Artificial Sequence
  Synthetic
cauugaaucuguaaauuaau

SEQ ID NO: 358307 - RNA, 21 nt, Artificial Sequence
  Synthetic
gcauugaaucuguaaauuaau

SEQ ID NO: 358308 - RNA, 22 nt, Artificial Sequence
  Synthetic
agcauugaaucuguaaauuaau

SEQ ID NO: 358309 - RNA, 23 nt, Artificial Sequence
  Synthetic
uagcauugaaucuguaaauuaau

SEQ ID NO: 358310 - RNA, 24 nt, Artificial Sequence
  Synthetic
auagcauugaaucuguaaauuaau

SEQ ID NO: 358311 - RNA, 18 nt, Artificial Sequence
  Synthetic
caggugggaggaauuaau

SEQ ID NO: 358312 - RNA, 19 nt, Artificial Sequence
  Synthetic
ucaggugggaggaauuaau

SEQ ID NO: 358313 - RNA, 20 nt, Artificial Sequence
  Synthetic
aucaggugggaggaauuaau

SEQ ID NO: 358314 - RNA, 21 nt, Artificial Sequence
  Synthetic
aaucaggugggaggaauuaau

SEQ ID NO: 358315 - RNA, 22 nt, Artificial Sequence
  Synthetic
aaaucaggugggaggaauuaau

SEQ ID NO: 358316 - RNA, 23 nt, Artificial Sequence
  Synthetic
caaaucaggugggaggaauuaau

SEQ ID NO: 358317 - RNA, 24 nt, Artificial Sequence
  Synthetic
acaaaucaggugggaggaauuaau

SEQ ID NO: 358318 - RNA, 18 nt, Artificial Sequence
  Synthetic
uaaacguauauaauuaau

SEQ ID NO: 358319 - RNA, 19 nt, Artificial Sequence
  Synthetic
auaaacguauauaauuaau

SEQ ID NO: 358320 - RNA, 20 nt, Artificial Sequence
  Synthetic
uauaaacguauauaauuaau

SEQ ID NO: 358321 - RNA, 21 nt, Artificial Sequence
  Synthetic
uuauaaacguauauaauuaau

SEQ ID NO: 358322 - RNA, 22 nt, Artificial Sequence
  Synthetic
auuauaaacguauauaauuaau

SEQ ID NO: 358323 - RNA, 23 nt, Artificial Sequence
  Synthetic
aauuauaaacguauauaauuaau

SEQ ID NO: 358324 - RNA, 24 nt, Artificial Sequence
  Synthetic
caauuauaaacguauauaauuaau

SEQ ID NO: 358325 - RNA, 18 nt, Artificial Sequence
  Synthetic
gcuucugugagcauuaau

SEQ ID NO: 358326 - RNA, 19 nt, Artificial Sequence
  Synthetic
ugcuucugugagcauuaau

SEQ ID NO: 358327 - RNA, 20 nt, Artificial Sequence
  Synthetic
augcuucugugagcauuaau

SEQ ID NO: 358328 - RNA, 21 nt, Artificial Sequence
  Synthetic
uaugcuucugugagcauuaau

SEQ ID NO: 358329 - RNA, 22 nt, Artificial Sequence
  Synthetic
cuaugcuucugugagcauuaau

SEQ ID NO: 358330 - RNA, 23 nt, Artificial Sequence
  Synthetic
acuaugcuucugugagcauuaau

SEQ ID NO: 358331 - RNA, 24 nt, Artificial Sequence
  Synthetic
aacuaugcuucugugagcauuaau

SEQ ID NO: 358332 - RNA, 18 nt, Artificial Sequence
  Synthetic
uauaaaccaaagauuaau

SEQ ID NO: 358333 - RNA, 19 nt, Artificial Sequence
  Synthetic
uuauaaaccaaagauuaau

SEQ ID NO: 358334 - RNA, 20 nt, Artificial Sequence
  Synthetic
uuuauaaaccaaagauuaau

SEQ ID NO: 358335 - RNA, 21 nt, Artificial Sequence
  Synthetic
uuuuauaaaccaaagauuaau

SEQ ID NO: 358336 - RNA, 22 nt, Artificial Sequence
  Synthetic
auuuuauaaaccaaagauuaau

SEQ ID NO: 358337 - RNA, 23 nt, Artificial Sequence
  Synthetic
uauuuuauaaaccaaagauuaau

SEQ ID NO: 358338 - RNA, 24 nt, Artificial Sequence
  Synthetic
uuauuuuauaaaccaaagauuaau

SEQ ID NO: 358339 - RNA, 18 nt, Artificial Sequence
  Synthetic
uauauaugugcgauuaau

SEQ ID NO: 358340 - RNA, 19 nt, Artificial Sequence
  Synthetic
cuauauaugugcgauuaau

SEQ ID NO: 358341 - RNA, 20 nt, Artificial Sequence
  Synthetic
ccuauauaugugcgauuaau

SEQ ID NO: 358342 - RNA, 21 nt, Artificial Sequence
  Synthetic
cccuauauaugugcgauuaau

SEQ ID NO: 358343 - RNA, 22 nt, Artificial Sequence
  Synthetic
ucccuauauaugugcgauuaau

SEQ ID NO: 358344 - RNA, 23 nt, Artificial Sequence
  Synthetic
uucccuauauaugugcgauuaau

SEQ ID NO: 358345 - RNA, 24 nt, Artificial Sequence
  Synthetic
uuucccuauauaugugcgauuaau

SEQ ID NO: 358346 - RNA, 18 nt, Artificial Sequence
  Synthetic
ugcaucuggaggauuaau

SEQ ID NO: 358347 - RNA, 19 nt, Artificial Sequence
  Synthetic
augcaucuggaggauuaau

SEQ ID NO: 358348 - RNA, 20 nt, Artificial Sequence
  Synthetic
uaugcaucuggaggauuaau

SEQ ID NO: 358349 - RNA, 21 nt, Artificial Sequence
  Synthetic
cuaugcaucuggaggauuaau

SEQ ID NO: 358350 - RNA, 22 nt, Artificial Sequence
  Synthetic
acuaugcaucuggaggauuaau

SEQ ID NO: 358351 - RNA, 23 nt, Artificial Sequence
  Synthetic
aacuaugcaucuggaggauuaau

SEQ ID NO: 358352 - RNA, 24 nt, Artificial Sequence
  Synthetic
gaacuaugcaucuggaggauuaau

SEQ ID NO: 358353 - RNA, 18 nt, Artificial Sequence
  Synthetic
gaaagauaguugauuaau

SEQ ID NO: 358354 - RNA, 19 nt, Artificial Sequence
  Synthetic
ugaaagauaguugauuaau

SEQ ID NO: 358355 - RNA, 20 nt, Artificial Sequence
  Synthetic
uugaaagauaguugauuaau

SEQ ID NO: 358356 - RNA, 21 nt, Artificial Sequence
  Synthetic
uuugaaagauaguugauuaau

SEQ ID NO: 358357 - RNA, 22 nt, Artificial Sequence
  Synthetic
uuuugaaagauaguugauuaau

SEQ ID NO: 358358 - RNA, 23 nt, Artificial Sequence
  Synthetic
auuuugaaagauaguugauuaau

SEQ ID NO: 358359 - RNA, 24 nt, Artificial Sequence
  Synthetic
cauuuugaaagauaguugauuaau

SEQ ID NO: 358360 - RNA, 18 nt, Artificial Sequence
  Synthetic
agagcuaaauauauuaau

SEQ ID NO: 358361 - RNA, 19 nt, Artificial Sequence
  Synthetic
uagagcuaaauauauuaau

SEQ ID NO: 358362 - RNA, 20 nt, Artificial Sequence
  Synthetic
auagagcuaaauauauuaau

SEQ ID NO: 358363 - RNA, 21 nt, Artificial Sequence
  Synthetic
cauagagcuaaauauauuaau

SEQ ID NO: 358364 - RNA, 22 nt, Artificial Sequence
  Synthetic
ucauagagcuaaauauauuaau

SEQ ID NO: 358365 - RNA, 23 nt, Artificial Sequence
  Synthetic
aucauagagcuaaauauauuaau

SEQ ID NO: 358366 - RNA, 24 nt, Artificial Sequence
  Synthetic
aaucauagagcuaaauauauuaau

SEQ ID NO: 358367 - RNA, 18 nt, Artificial Sequence
  Synthetic
uuuagcugauauauuaau

SEQ ID NO: 358368 - RNA, 19 nt, Artificial Sequence
  Synthetic
uuuuagcugauauauuaau

SEQ ID NO: 358369 - RNA, 20 nt, Artificial Sequence
  Synthetic
auuuuagcugauauauuaau

SEQ ID NO: 358370 - RNA, 21 nt, Artificial Sequence
  Synthetic
aauuuuagcugauauauuaau

SEQ ID NO: 358371 - RNA, 22 nt, Artificial Sequence
  Synthetic
aaauuuuagcugauauauuaau

SEQ ID NO: 358372 - RNA, 23 nt, Artificial Sequence
  Synthetic
aaaauuuuagcugauauauuaau

SEQ ID NO: 358373 - RNA, 24 nt, Artificial Sequence
  Synthetic
caaaauuuuagcugauauauuaau

SEQ ID NO: 358374 - RNA, 18 nt, Artificial Sequence
  Synthetic
gguaguagcauuauuaau

SEQ ID NO: 358375 - RNA, 19 nt, Artificial Sequence
  Synthetic
agguaguagcauuauuaau

SEQ ID NO: 358376 - RNA, 20 nt, Artificial Sequence
  Synthetic
uagguaguagcauuauuaau

SEQ ID NO: 358377 - RNA, 21 nt, Artificial Sequence
  Synthetic
uuagguaguagcauuauuaau

SEQ ID NO: 358378 - RNA, 22 nt, Artificial Sequence
  Synthetic
uuuagguaguagcauuauuaau

SEQ ID NO: 358379 - RNA, 23 nt, Artificial Sequence
  Synthetic
auuuagguaguagcauuauuaau

SEQ ID NO: 358380 - RNA, 24 nt, Artificial Sequence
  Synthetic
aauuuagguaguagcauuauuaau

SEQ ID NO: 358381 - RNA, 18 nt, Artificial Sequence
  Synthetic
ggcuuccuauuuauuaau

SEQ ID NO: 358382 - RNA, 19 nt, Artificial Sequence
  Synthetic
uggcuuccuauuuauuaau

SEQ ID NO: 358383 - RNA, 20 nt, Artificial Sequence
  Synthetic
guggcuuccuauuuauuaau

SEQ ID NO: 358384 - RNA, 21 nt, Artificial Sequence
  Synthetic
uguggcuuccuauuuauuaau

SEQ ID NO: 358385 - RNA, 22 nt, Artificial Sequence
  Synthetic
auguggcuuccuauuuauuaau

SEQ ID NO: 358386 - RNA, 23 nt, Artificial Sequence
  Synthetic
uauguggcuuccuauuuauuaau

SEQ ID NO: 358387 - RNA, 24 nt, Artificial Sequence
  Synthetic
uuauguggcuuccuauuuauuaau

SEQ ID NO: 358388 - RNA, 18 nt, Artificial Sequence
  Synthetic
uaaccaggaucacuuaau

SEQ ID NO: 358389 - RNA, 19 nt, Artificial Sequence
  Synthetic
auaaccaggaucacuuaau

SEQ ID NO: 358390 - RNA, 20 nt, Artificial Sequence
  Synthetic
uauaaccaggaucacuuaau

SEQ ID NO: 358391 - RNA, 21 nt, Artificial Sequence
  Synthetic
cuauaaccaggaucacuuaau

SEQ ID NO: 358392 - RNA, 22 nt, Artificial Sequence
  Synthetic
ucuauaaccaggaucacuuaau

SEQ ID NO: 358393 - RNA, 23 nt, Artificial Sequence
  Synthetic
uucuauaaccaggaucacuuaau

SEQ ID NO: 358394 - RNA, 24 nt, Artificial Sequence
  Synthetic
guucuauaaccaggaucacuuaau

SEQ ID NO: 358395 - RNA, 18 nt, Artificial Sequence
  Synthetic
uuuagcuguugacuuaau

SEQ ID NO: 358396 - RNA, 19 nt, Artificial Sequence
  Synthetic
auuuagcuguugacuuaau

SEQ ID NO: 358397 - RNA, 20 nt, Artificial Sequence
  Synthetic
uauuuagcuguugacuuaau

SEQ ID NO: 358398 - RNA, 21 nt, Artificial Sequence
  Synthetic
auauuuagcuguugacuuaau

SEQ ID NO: 358399 - RNA, 22 nt, Artificial Sequence
  Synthetic
aauauuuagcuguugacuuaau

SEQ ID NO: 358400 - RNA, 23 nt, Artificial Sequence
  Synthetic
aaauauuuagcuguugacuuaau

SEQ ID NO: 358401 - RNA, 24 nt, Artificial Sequence
  Synthetic
gaaauauuuagcuguugacuuaau

SEQ ID NO: 358402 - RNA, 18 nt, Artificial Sequence
  Synthetic
uuuaaucauguacuuaau

SEQ ID NO: 358403 - RNA, 19 nt, Artificial Sequence
  Synthetic
auuuaaucauguacuuaau

SEQ ID NO: 358404 - RNA, 20 nt, Artificial Sequence
  Synthetic
uauuuaaucauguacuuaau

SEQ ID NO: 358405 - RNA, 21 nt, Artificial Sequence
  Synthetic
auauuuaaucauguacuuaau

SEQ ID NO: 358406 - RNA, 22 nt, Artificial Sequence
  Synthetic
uauauuuaaucauguacuuaau

SEQ ID NO: 358407 - RNA, 23 nt, Artificial Sequence
  Synthetic
guauauuuaaucauguacuuaau

SEQ ID NO: 358408 - RNA, 24 nt, Artificial Sequence
  Synthetic
aguauauuuaaucauguacuuaau

SEQ ID NO: 358409 - RNA, 18 nt, Artificial Sequence
  Synthetic
gagaacuccugccuuaau

SEQ ID NO: 358410 - RNA, 19 nt, Artificial Sequence
  Synthetic
agagaacuccugccuuaau

SEQ ID NO: 358411 - RNA, 20 nt, Artificial Sequence
  Synthetic
gagagaacuccugccuuaau

SEQ ID NO: 358412 - RNA, 21 nt, Artificial Sequence
  Synthetic
ugagagaacuccugccuuaau

SEQ ID NO: 358413 - RNA, 22 nt, Artificial Sequence
  Synthetic
augagagaacuccugccuuaau

SEQ ID NO: 358414 - RNA, 23 nt, Artificial Sequence
  Synthetic
aaugagagaacuccugccuuaau

SEQ ID NO: 358415 - RNA, 24 nt, Artificial Sequence
  Synthetic
aaaugagagaacuccugccuuaau

SEQ ID NO: 358416 - RNA, 18 nt, Artificial Sequence
  Synthetic
gauuuccucuuccuuaau

SEQ ID NO: 358417 - RNA, 19 nt, Artificial Sequence
  Synthetic
ugauuuccucuuccuuaau

SEQ ID NO: 358418 - RNA, 20 nt, Artificial Sequence
  Synthetic
uugauuuccucuuccuuaau

SEQ ID NO: 358419 - RNA, 21 nt, Artificial Sequence
  Synthetic
uuugauuuccucuuccuuaau

SEQ ID NO: 358420 - RNA, 22 nt, Artificial Sequence
  Synthetic
cuuugauuuccucuuccuuaau

SEQ ID NO: 358421 - RNA, 23 nt, Artificial Sequence
  Synthetic
gcuuugauuuccucuuccuuaau

SEQ ID NO: 358422 - RNA, 24 nt, Artificial Sequence
  Synthetic
agcuuugauuuccucuuccuuaau

SEQ ID NO: 358423 - RNA, 18 nt, Artificial Sequence
  Synthetic
cauauagacaugcuuaau

SEQ ID NO: 358424 - RNA, 19 nt, Artificial Sequence
  Synthetic
gcauauagacaugcuuaau

SEQ ID NO: 358425 - RNA, 20 nt, Artificial Sequence
  Synthetic
ugcauauagacaugcuuaau

SEQ ID NO: 358426 - RNA, 21 nt, Artificial Sequence
  Synthetic
uugcauauagacaugcuuaau

SEQ ID NO: 358427 - RNA, 22 nt, Artificial Sequence
  Synthetic
auugcauauagacaugcuuaau

SEQ ID NO: 358428 - RNA, 23 nt, Artificial Sequence
  Synthetic
aauugcauauagacaugcuuaau

SEQ ID NO: 358429 - RNA, 24 nt, Artificial Sequence
  Synthetic
aaauugcauauagacaugcuuaau

SEQ ID NO: 358430 - RNA, 18 nt, Artificial Sequence
  Synthetic
cagacuauggcucuuaau

SEQ ID NO: 358431 - RNA, 19 nt, Artificial Sequence
  Synthetic
acagacuauggcucuuaau

SEQ ID NO: 358432 - RNA, 20 nt, Artificial Sequence
  Synthetic
aacagacuauggcucuuaau

SEQ ID NO: 358433 - RNA, 21 nt, Artificial Sequence
  Synthetic
aaacagacuauggcucuuaau

SEQ ID NO: 358434 - RNA, 22 nt, Artificial Sequence
  Synthetic
gaaacagacuauggcucuuaau

SEQ ID NO: 358435 - RNA, 23 nt, Artificial Sequence
  Synthetic
agaaacagacuauggcucuuaau

SEQ ID NO: 358436 - RNA, 24 nt, Artificial Sequence
  Synthetic
gagaaacagacuauggcucuuaau

SEQ ID NO: 358437 - RNA, 18 nt, Artificial Sequence
  Synthetic
auuuaauaaucucuuaau

SEQ ID NO: 358438 - RNA, 19 nt, Artificial Sequence
  Synthetic
gauuuaauaaucucuuaau

SEQ ID NO: 358439 - RNA, 20 nt, Artificial Sequence
  Synthetic
ggauuuaauaaucucuuaau

SEQ ID NO: 358440 - RNA, 21 nt, Artificial Sequence
  Synthetic
gggauuuaauaaucucuuaau

SEQ ID NO: 358441 - RNA, 22 nt, Artificial Sequence
  Synthetic
agggauuuaauaaucucuuaau

SEQ ID NO: 358442 - RNA, 23 nt, Artificial Sequence
  Synthetic
uagggauuuaauaaucucuuaau

SEQ ID NO: 358443 - RNA, 24 nt, Artificial Sequence
  Synthetic
auagggauuuaauaaucucuuaau

SEQ ID NO: 358444 - RNA, 18 nt, Artificial Sequence
  Synthetic
uuuguuuugcuucuuaau

SEQ ID NO: 358445 - RNA, 19 nt, Artificial Sequence
  Synthetic
cuuuguuuugcuucuuaau

SEQ ID NO: 358446 - RNA, 20 nt, Artificial Sequence
  Synthetic
acuuuguuuugcuucuuaau

SEQ ID NO: 358447 - RNA, 21 nt, Artificial Sequence
  Synthetic
uacuuuguuuugcuucuuaau

SEQ ID NO: 358448 - RNA, 22 nt, Artificial Sequence
  Synthetic
uuacuuuguuuugcuucuuaau

SEQ ID NO: 358449 - RNA, 23 nt, Artificial Sequence
  Synthetic
uuuacuuuguuuugcuucuuaau

SEQ ID NO: 358450 - RNA, 24 nt, Artificial Sequence
  Synthetic
uuuuacuuuguuuugcuucuuaau

SEQ ID NO: 358451 - RNA, 18 nt, Artificial Sequence
  Synthetic
gacuugcaggaaguuaau

SEQ ID NO: 358452 - RNA, 19 nt, Artificial Sequence
  Synthetic
ugacuugcaggaaguuaau

SEQ ID NO: 358453 - RNA, 20 nt, Artificial Sequence
  Synthetic
cugacuugcaggaaguuaau

SEQ ID NO: 358454 - RNA, 21 nt, Artificial Sequence
  Synthetic
ccugacuugcaggaaguuaau

SEQ ID NO: 358455 - RNA, 22 nt, Artificial Sequence
  Synthetic
uccugacuugcaggaaguuaau

SEQ ID NO: 358456 - RNA, 23 nt, Artificial Sequence
  Synthetic
uuccugacuugcaggaaguuaau

SEQ ID NO: 358457 - RNA, 24 nt, Artificial Sequence
  Synthetic
cuuccugacuugcaggaaguuaau

SEQ ID NO: 358458 - RNA, 18 nt, Artificial Sequence
  Synthetic
agcccacagaagguuaau

SEQ ID NO: 358459 - RNA, 19 nt, Artificial Sequence
  Synthetic
gagcccacagaagguuaau

SEQ ID NO: 358460 - RNA, 20 nt, Artificial Sequence
  Synthetic
ggagcccacagaagguuaau

SEQ ID NO: 358461 - RNA, 21 nt, Artificial Sequence
  Synthetic
cggagcccacagaagguuaau

SEQ ID NO: 358462 - RNA, 22 nt, Artificial Sequence
  Synthetic
gcggagcccacagaagguuaau

SEQ ID NO: 358463 - RNA, 23 nt, Artificial Sequence
  Synthetic
ugcggagcccacagaagguuaau

SEQ ID NO: 358464 - RNA, 24 nt, Artificial Sequence
  Synthetic
gugcggagcccacagaagguuaau

SEQ ID NO: 358465 - RNA, 18 nt, Artificial Sequence
  Synthetic
acuuagcaucagguuaau

SEQ ID NO: 358466 - RNA, 19 nt, Artificial Sequence
  Synthetic
gacuuagcaucagguuaau

SEQ ID NO: 358467 - RNA, 20 nt, Artificial Sequence
  Synthetic
ggacuuagcaucagguuaau

SEQ ID NO: 358468 - RNA, 21 nt, Artificial Sequence
  Synthetic
uggacuuagcaucagguuaau

SEQ ID NO: 358469 - RNA, 22 nt, Artificial Sequence
  Synthetic
cuggacuuagcaucagguuaau

SEQ ID NO: 358470 - RNA, 23 nt, Artificial Sequence
  Synthetic
ucuggacuuagcaucagguuaau

SEQ ID NO: 358471 - RNA, 24 nt, Artificial Sequence
  Synthetic
uucuggacuuagcaucagguuaau

SEQ ID NO: 358472 - RNA, 18 nt, Artificial Sequence
  Synthetic
uauuucgaucagguuaau

SEQ ID NO: 358473 - RNA, 19 nt, Artificial Sequence
  Synthetic
guauuucgaucagguuaau

SEQ ID NO: 358474 - RNA, 20 nt, Artificial Sequence
  Synthetic
aguauuucgaucagguuaau

SEQ ID NO: 358475 - RNA, 21 nt, Artificial Sequence
  Synthetic
gaguauuucgaucagguuaau

SEQ ID NO: 358476 - RNA, 22 nt, Artificial Sequence
  Synthetic
agaguauuucgaucagguuaau

SEQ ID NO: 358477 - RNA, 23 nt, Artificial Sequence
  Synthetic
aagaguauuucgaucagguuaau

SEQ ID NO: 358478 - RNA, 24 nt, Artificial Sequence
  Synthetic
uaagaguauuucgaucagguuaau

SEQ ID NO: 358479 - RNA, 18 nt, Artificial Sequence
  Synthetic
agagagauacggguuaau

SEQ ID NO: 358480 - RNA, 19 nt, Artificial Sequence
  Synthetic
aagagagauacggguuaau

SEQ ID NO: 358481 - RNA, 20 nt, Artificial Sequence
  Synthetic
gaagagagauacggguuaau

SEQ ID NO: 358482 - RNA, 21 nt, Artificial Sequence
  Synthetic
ggaagagagauacggguuaau

SEQ ID NO: 358483 - RNA, 22 nt, Artificial Sequence
  Synthetic
aggaagagagauacggguuaau

SEQ ID NO: 358484 - RNA, 23 nt, Artificial Sequence
  Synthetic
gaggaagagagauacggguuaau

SEQ ID NO: 358485 - RNA, 24 nt, Artificial Sequence
  Synthetic
ggaggaagagagauacggguuaau

SEQ ID NO: 358486 - RNA, 18 nt, Artificial Sequence
  Synthetic
aaaauuugaaauguuaau

SEQ ID NO: 358487 - RNA, 19 nt, Artificial Sequence
  Synthetic
aaaaauuugaaauguuaau

SEQ ID NO: 358488 - RNA, 20 nt, Artificial Sequence
  Synthetic
gaaaaauuugaaauguuaau

SEQ ID NO: 358489 - RNA, 21 nt, Artificial Sequence
  Synthetic
agaaaaauuugaaauguuaau

SEQ ID NO: 358490 - RNA, 22 nt, Artificial Sequence
  Synthetic
gagaaaaauuugaaauguuaau

SEQ ID NO: 358491 - RNA, 23 nt, Artificial Sequence
  Synthetic
ggagaaaaauuugaaauguuaau

SEQ ID NO: 358492 - RNA, 24 nt, Artificial Sequence
  Synthetic
gggagaaaaauuugaaauguuaau

SEQ ID NO: 358493 - RNA, 18 nt, Artificial Sequence
  Synthetic
aauugauguuauguuaau

SEQ ID NO: 358494 - RNA, 19 nt, Artificial Sequence
  Synthetic
aaauugauguuauguuaau

SEQ ID NO: 358495 - RNA, 20 nt, Artificial Sequence
  Synthetic
aaaauugauguuauguuaau

SEQ ID NO: 358496 - RNA, 21 nt, Artificial Sequence
  Synthetic
aaaaauugauguuauguuaau

SEQ ID NO: 358497 - RNA, 22 nt, Artificial Sequence
  Synthetic
gaaaaauugauguuauguuaau

SEQ ID NO: 358498 - RNA, 23 nt, Artificial Sequence
  Synthetic
agaaaaauugauguuauguuaau

SEQ ID NO: 358499 - RNA, 24 nt, Artificial Sequence
  Synthetic
aagaaaaauugauguuauguuaau

SEQ ID NO: 358500 - RNA, 18 nt, Artificial Sequence
  Synthetic
uuuaugguuuauguuaau

SEQ ID NO: 358501 - RNA, 19 nt, Artificial Sequence
  Synthetic
uuuuaugguuuauguuaau

SEQ ID NO: 358502 - RNA, 20 nt, Artificial Sequence
  Synthetic
auuuuaugguuuauguuaau

SEQ ID NO: 358503 - RNA, 21 nt, Artificial Sequence
  Synthetic
cauuuuaugguuuauguuaau

SEQ ID NO: 358504 - RNA, 22 nt, Artificial Sequence
  Synthetic
acauuuuaugguuuauguuaau

SEQ ID NO: 358505 - RNA, 23 nt, Artificial Sequence
  Synthetic
gacauuuuaugguuuauguuaau

SEQ ID NO: 358506 - RNA, 24 nt, Artificial Sequence
  Synthetic
ugacauuuuaugguuuauguuaau

SEQ ID NO: 358507 - RNA, 18 nt, Artificial Sequence
  Synthetic
ucucauagaauuguuaau

SEQ ID NO: 358508 - RNA, 19 nt, Artificial Sequence
  Synthetic
cucucauagaauuguuaau

SEQ ID NO: 358509 - RNA, 20 nt, Artificial Sequence
  Synthetic
ucucucauagaauuguuaau

SEQ ID NO: 358510 - RNA, 21 nt, Artificial Sequence
  Synthetic
uucucucauagaauuguuaau

SEQ ID NO: 358511 - RNA, 22 nt, Artificial Sequence
  Synthetic
auucucucauagaauuguuaau

SEQ ID NO: 358512 - RNA, 23 nt, Artificial Sequence
  Synthetic
uauucucucauagaauuguuaau

SEQ ID NO: 358513 - RNA, 24 nt, Artificial Sequence
  Synthetic
auauucucucauagaauuguuaau

SEQ ID NO: 358514 - RNA, 18 nt, Artificial Sequence
  Synthetic
gaaacaucacuuguuaau

SEQ ID NO: 358515 - RNA, 19 nt, Artificial Sequence
  Synthetic
ggaaacaucacuuguuaau

SEQ ID NO: 358516 - RNA, 20 nt, Artificial Sequence
  Synthetic
uggaaacaucacuuguuaau

SEQ ID NO: 358517 - RNA, 21 nt, Artificial Sequence
  Synthetic
uuggaaacaucacuuguuaau

SEQ ID NO: 358518 - RNA, 22 nt, Artificial Sequence
  Synthetic
cuuggaaacaucacuuguuaau

SEQ ID NO: 358519 - RNA, 23 nt, Artificial Sequence
  Synthetic
ucuuggaaacaucacuuguuaau

SEQ ID NO: 358520 - RNA, 24 nt, Artificial Sequence
  Synthetic
gucuuggaaacaucacuuguuaau

SEQ ID NO: 358521 - RNA, 18 nt, Artificial Sequence
  Synthetic
caauacacauuuguuaau

SEQ ID NO: 358522 - RNA, 19 nt, Artificial Sequence
  Synthetic
ccaauacacauuuguuaau

SEQ ID NO: 358523 - RNA, 20 nt, Artificial Sequence
  Synthetic
cccaauacacauuuguuaau

SEQ ID NO: 358524 - RNA, 21 nt, Artificial Sequence
  Synthetic
ucccaauacacauuuguuaau

SEQ ID NO: 358525 - RNA, 22 nt, Artificial Sequence
  Synthetic
cucccaauacacauuuguuaau

SEQ ID NO: 358526 - RNA, 23 nt, Artificial Sequence
  Synthetic
gcucccaauacacauuuguuaau

SEQ ID NO: 358527 - RNA, 24 nt, Artificial Sequence
  Synthetic
agcucccaauacacauuuguuaau

SEQ ID NO: 358528 - RNA, 18 nt, Artificial Sequence
  Synthetic
ugcuucuuaaaauuuaau

SEQ ID NO: 358529 - RNA, 19 nt, Artificial Sequence
  Synthetic
augcuucuuaaaauuuaau

SEQ ID NO: 358530 - RNA, 20 nt, Artificial Sequence
  Synthetic
caugcuucuuaaaauuuaau

SEQ ID NO: 358531 - RNA, 21 nt, Artificial Sequence
  Synthetic
ccaugcuucuuaaaauuuaau

SEQ ID NO: 358532 - RNA, 22 nt, Artificial Sequence
  Synthetic
gccaugcuucuuaaaauuuaau

SEQ ID NO: 358533 - RNA, 23 nt, Artificial Sequence
  Synthetic
agccaugcuucuuaaaauuuaau

SEQ ID NO: 358534 - RNA, 24 nt, Artificial Sequence
  Synthetic
gagccaugcuucuuaaaauuuaau

SEQ ID NO: 358535 - RNA, 18 nt, Artificial Sequence
  Synthetic
uggggauuacaauuuaau

SEQ ID NO: 358536 - RNA, 19 nt, Artificial Sequence
  Synthetic
uuggggauuacaauuuaau

SEQ ID NO: 358537 - RNA, 20 nt, Artificial Sequence
  Synthetic
auuggggauuacaauuuaau

SEQ ID NO: 358538 - RNA, 21 nt, Artificial Sequence
  Synthetic
cauuggggauuacaauuuaau

SEQ ID NO: 358539 - RNA, 22 nt, Artificial Sequence
  Synthetic
acauuggggauuacaauuuaau

SEQ ID NO: 358540 - RNA, 23 nt, Artificial Sequence
  Synthetic
aacauuggggauuacaauuuaau

SEQ ID NO: 358541 - RNA, 24 nt, Artificial Sequence
  Synthetic
caacauuggggauuacaauuuaau

SEQ ID NO: 358542 - RNA, 18 nt, Artificial Sequence
  Synthetic
auacuguuauaauuuaau

SEQ ID NO: 358543 - RNA, 19 nt, Artificial Sequence
  Synthetic
aauacuguuauaauuuaau

SEQ ID NO: 358544 - RNA, 20 nt, Artificial Sequence
  Synthetic
gaauacuguuauaauuuaau

SEQ ID NO: 358545 - RNA, 21 nt, Artificial Sequence
  Synthetic
ugaauacuguuauaauuuaau

SEQ ID NO: 358546 - RNA, 22 nt, Artificial Sequence
  Synthetic
cugaauacuguuauaauuuaau

SEQ ID NO: 358547 - RNA, 23 nt, Artificial Sequence
  Synthetic
ucugaauacuguuauaauuuaau

SEQ ID NO: 358548 - RNA, 24 nt, Artificial Sequence
  Synthetic
uucugaauacuguuauaauuuaau

SEQ ID NO: 358549 - RNA, 18 nt, Artificial Sequence
  Synthetic
uuaguaaugccauuuaau

SEQ ID NO: 358550 - RNA, 19 nt, Artificial Sequence
  Synthetic
auuaguaaugccauuuaau

SEQ ID NO: 358551 - RNA, 20 nt, Artificial Sequence
  Synthetic
uauuaguaaugccauuuaau

SEQ ID NO: 358552 - RNA, 21 nt, Artificial Sequence
  Synthetic
uuauuaguaaugccauuuaau

SEQ ID NO: 358553 - RNA, 22 nt, Artificial Sequence
  Synthetic
auuauuaguaaugccauuuaau

SEQ ID NO: 358554 - RNA, 23 nt, Artificial Sequence
  Synthetic
cauuauuaguaaugccauuuaau

SEQ ID NO: 358555 - RNA, 24 nt, Artificial Sequence
  Synthetic
ccauuauuaguaaugccauuuaau

SEQ ID NO: 358556 - RNA, 18 nt, Artificial Sequence
  Synthetic
cacuccuauccauuuaau

SEQ ID NO: 358557 - RNA, 19 nt, Artificial Sequence
  Synthetic
acacuccuauccauuuaau

SEQ ID NO: 358558 - RNA, 20 nt, Artificial Sequence
  Synthetic
uacacuccuauccauuuaau

SEQ ID NO: 358559 - RNA, 21 nt, Artificial Sequence
  Synthetic
auacacuccuauccauuuaau

SEQ ID NO: 358560 - RNA, 22 nt, Artificial Sequence
  Synthetic
cauacacuccuauccauuuaau

SEQ ID NO: 358561 - RNA, 23 nt, Artificial Sequence
  Synthetic
acauacacuccuauccauuuaau

SEQ ID NO: 358562 - RNA, 24 nt, Artificial Sequence
  Synthetic
gacauacacuccuauccauuuaau

SEQ ID NO: 358563 - RNA, 18 nt, Artificial Sequence
  Synthetic
aucaaaggugcauuuaau

SEQ ID NO: 358564 - RNA, 19 nt, Artificial Sequence
  Synthetic
uaucaaaggugcauuuaau

SEQ ID NO: 358565 - RNA, 20 nt, Artificial Sequence
  Synthetic
cuaucaaaggugcauuuaau

SEQ ID NO: 358566 - RNA, 21 nt, Artificial Sequence
  Synthetic
ucuaucaaaggugcauuuaau

SEQ ID NO: 358567 - RNA, 22 nt, Artificial Sequence
  Synthetic
aucuaucaaaggugcauuuaau

SEQ ID NO: 358568 - RNA, 23 nt, Artificial Sequence
  Synthetic
gaucuaucaaaggugcauuuaau

SEQ ID NO: 358569 - RNA, 24 nt, Artificial Sequence
  Synthetic
ugaucuaucaaaggugcauuuaau

SEQ ID NO: 358570 - RNA, 18 nt, Artificial Sequence
  Synthetic
auaauuuguagauuuaau

SEQ ID NO: 358571 - RNA, 19 nt, Artificial Sequence
  Synthetic
aauaauuuguagauuuaau

SEQ ID NO: 358572 - RNA, 20 nt, Artificial Sequence
  Synthetic
aaauaauuuguagauuuaau

SEQ ID NO: 358573 - RNA, 21 nt, Artificial Sequence
  Synthetic
aaaauaauuuguagauuuaau

SEQ ID NO: 358574 - RNA, 22 nt, Artificial Sequence
  Synthetic
caaaauaauuuguagauuuaau

SEQ ID NO: 358575 - RNA, 23 nt, Artificial Sequence
  Synthetic
gcaaaauaauuuguagauuuaau

SEQ ID NO: 358576 - RNA, 24 nt, Artificial Sequence
  Synthetic
cgcaaaauaauuuguagauuuaau

SEQ ID NO: 358577 - RNA, 18 nt, Artificial Sequence
  Synthetic
agauugcauggauuuaau

SEQ ID NO: 358578 - RNA, 19 nt, Artificial Sequence
  Synthetic
uagauugcauggauuuaau

SEQ ID NO: 358579 - RNA, 20 nt, Artificial Sequence
  Synthetic
uuagauugcauggauuuaau

SEQ ID NO: 358580 - RNA, 21 nt, Artificial Sequence
  Synthetic
uuuagauugcauggauuuaau

SEQ ID NO: 358581 - RNA, 22 nt, Artificial Sequence
  Synthetic
auuuagauugcauggauuuaau

SEQ ID NO: 358582 - RNA, 23 nt, Artificial Sequence
  Synthetic
uauuuagauugcauggauuuaau

SEQ ID NO: 358583 - RNA, 24 nt, Artificial Sequence
  Synthetic
uuauuuagauugcauggauuuaau

SEQ ID NO: 358584 - RNA, 18 nt, Artificial Sequence
  Synthetic
uguuuucguauauuuaau

SEQ ID NO: 358585 - RNA, 19 nt, Artificial Sequence
  Synthetic
auguuuucguauauuuaau

SEQ ID NO: 358586 - RNA, 20 nt, Artificial Sequence
  Synthetic
aauguuuucguauauuuaau

SEQ ID NO: 358587 - RNA, 21 nt, Artificial Sequence
  Synthetic
uaauguuuucguauauuuaau

SEQ ID NO: 358588 - RNA, 22 nt, Artificial Sequence
  Synthetic
uuaauguuuucguauauuuaau

SEQ ID NO: 358589 - RNA, 23 nt, Artificial Sequence
  Synthetic
auuaauguuuucguauauuuaau

SEQ ID NO: 358590 - RNA, 24 nt, Artificial Sequence
  Synthetic
uauuaauguuuucguauauuuaau

SEQ ID NO: 358591 - RNA, 18 nt, Artificial Sequence
  Synthetic
uaaagccauuuauuuaau

SEQ ID NO: 358592 - RNA, 19 nt, Artificial Sequence
  Synthetic
auaaagccauuuauuuaau

SEQ ID NO: 358593 - RNA, 20 nt, Artificial Sequence
  Synthetic
cauaaagccauuuauuuaau

SEQ ID NO: 358594 - RNA, 21 nt, Artificial Sequence
  Synthetic
gcauaaagccauuuauuuaau

SEQ ID NO: 358595 - RNA, 22 nt, Artificial Sequence
  Synthetic
agcauaaagccauuuauuuaau

SEQ ID NO: 358596 - RNA, 23 nt, Artificial Sequence
  Synthetic
aagcauaaagccauuuauuuaau

SEQ ID NO: 358597 - RNA, 24 nt, Artificial Sequence
  Synthetic
aaagcauaaagccauuuauuuaau

SEQ ID NO: 358598 - RNA, 18 nt, Artificial Sequence
  Synthetic
auauaacaaaccuuuaau

SEQ ID NO: 358599 - RNA, 19 nt, Artificial Sequence
  Synthetic
uauauaacaaaccuuuaau

SEQ ID NO: 358600 - RNA, 20 nt, Artificial Sequence
  Synthetic
auauauaacaaaccuuuaau

SEQ ID NO: 358601 - RNA, 21 nt, Artificial Sequence
  Synthetic
cauauauaacaaaccuuuaau

SEQ ID NO: 358602 - RNA, 22 nt, Artificial Sequence
  Synthetic
acauauauaacaaaccuuuaau

SEQ ID NO: 358603 - RNA, 23 nt, Artificial Sequence
  Synthetic
aacauauauaacaaaccuuuaau

SEQ ID NO: 358604 - RNA, 24 nt, Artificial Sequence
  Synthetic
caacauauauaacaaaccuuuaau

SEQ ID NO: 358605 - RNA, 18 nt, Artificial Sequence
  Synthetic
aagagguacaaguuuaau

SEQ ID NO: 358606 - RNA, 19 nt, Artificial Sequence
  Synthetic
aaagagguacaaguuuaau

SEQ ID NO: 358607 - RNA, 20 nt, Artificial Sequence
  Synthetic
caaagagguacaaguuuaau

SEQ ID NO: 358608 - RNA, 21 nt, Artificial Sequence
  Synthetic
ccaaagagguacaaguuuaau

SEQ ID NO: 358609 - RNA, 22 nt, Artificial Sequence
  Synthetic
gccaaagagguacaaguuuaau

SEQ ID NO: 358610 - RNA, 23 nt, Artificial Sequence
  Synthetic
agccaaagagguacaaguuuaau

SEQ ID NO: 358611 - RNA, 24 nt, Artificial Sequence
  Synthetic
gagccaaagagguacaaguuuaau

SEQ ID NO: 358612 - RNA, 18 nt, Artificial Sequence
  Synthetic
augauauccauguuuaau

SEQ ID NO: 358613 - RNA, 19 nt, Artificial Sequence
  Synthetic
aaugauauccauguuuaau

SEQ ID NO: 358614 - RNA, 20 nt, Artificial Sequence
  Synthetic
aaaugauauccauguuuaau

SEQ ID NO: 358615 - RNA, 21 nt, Artificial Sequence
  Synthetic
caaaugauauccauguuuaau

SEQ ID NO: 358616 - RNA, 22 nt, Artificial Sequence
  Synthetic
ccaaaugauauccauguuuaau

SEQ ID NO: 358617 - RNA, 23 nt, Artificial Sequence
  Synthetic
uccaaaugauauccauguuuaau

SEQ ID NO: 358618 - RNA, 24 nt, Artificial Sequence
  Synthetic
auccaaaugauauccauguuuaau

SEQ ID NO: 358619 - RNA, 18 nt, Artificial Sequence
  Synthetic
acaaaauagauguuuaau

SEQ ID NO: 358620 - RNA, 19 nt, Artificial Sequence
  Synthetic
gacaaaauagauguuuaau

SEQ ID NO: 358621 - RNA, 20 nt, Artificial Sequence
  Synthetic
agacaaaauagauguuuaau

SEQ ID NO: 358622 - RNA, 21 nt, Artificial Sequence
  Synthetic
aagacaaaauagauguuuaau

SEQ ID NO: 358623 - RNA, 22 nt, Artificial Sequence
  Synthetic
aaagacaaaauagauguuuaau

SEQ ID NO: 358624 - RNA, 23 nt, Artificial Sequence
  Synthetic
gaaagacaaaauagauguuuaau

SEQ ID NO: 358625 - RNA, 24 nt, Artificial Sequence
  Synthetic
ugaaagacaaaauagauguuuaau

SEQ ID NO: 358626 - RNA, 18 nt, Artificial Sequence
  Synthetic
ugauuuauacauuuuaau

SEQ ID NO: 358627 - RNA, 19 nt, Artificial Sequence
  Synthetic
gugauuuauacauuuuaau

SEQ ID NO: 358628 - RNA, 20 nt, Artificial Sequence
  Synthetic
ggugauuuauacauuuuaau

SEQ ID NO: 358629 - RNA, 21 nt, Artificial Sequence
  Synthetic
uggugauuuauacauuuuaau

SEQ ID NO: 358630 - RNA, 22 nt, Artificial Sequence
  Synthetic
auggugauuuauacauuuuaau

SEQ ID NO: 358631 - RNA, 23 nt, Artificial Sequence
  Synthetic
cauggugauuuauacauuuuaau

SEQ ID NO: 358632 - RNA, 24 nt, Artificial Sequence
  Synthetic
ccauggugauuuauacauuuuaau

SEQ ID NO: 358633 - RNA, 18 nt, Artificial Sequence
  Synthetic
uaucguaacuauuuuaau

SEQ ID NO: 358634 - RNA, 19 nt, Artificial Sequence
  Synthetic
uuaucguaacuauuuuaau

SEQ ID NO: 358635 - RNA, 20 nt, Artificial Sequence
  Synthetic
uuuaucguaacuauuuuaau

SEQ ID NO: 358636 - RNA, 21 nt, Artificial Sequence
  Synthetic
uuuuaucguaacuauuuuaau

SEQ ID NO: 358637 - RNA, 22 nt, Artificial Sequence
  Synthetic
auuuuaucguaacuauuuuaau

SEQ ID NO: 358638 - RNA, 23 nt, Artificial Sequence
  Synthetic
aauuuuaucguaacuauuuuaau

SEQ ID NO: 358639 - RNA, 24 nt, Artificial Sequence
  Synthetic
aaauuuuaucguaacuauuuuaau

SEQ ID NO: 358640 - RNA, 18 nt, Artificial Sequence
  Synthetic
uuuugauacuauuuuaau

SEQ ID NO: 358641 - RNA, 19 nt, Artificial Sequence
  Synthetic
cuuuugauacuauuuuaau

SEQ ID NO: 358642 - RNA, 20 nt, Artificial Sequence
  Synthetic
gcuuuugauacuauuuuaau

SEQ ID NO: 358643 - RNA, 21 nt, Artificial Sequence
  Synthetic
ugcuuuugauacuauuuuaau

SEQ ID NO: 358644 - RNA, 22 nt, Artificial Sequence
  Synthetic
uugcuuuugauacuauuuuaau

SEQ ID NO: 358645 - RNA, 23 nt, Artificial Sequence
  Synthetic
uuugcuuuugauacuauuuuaau

SEQ ID NO: 358646 - RNA, 24 nt, Artificial Sequence
  Synthetic
cuuugcuuuugauacuauuuuaau

SEQ ID NO: 358647 - RNA, 18 nt, Artificial Sequence
  Synthetic
uuggcaucguauuuuaau

SEQ ID NO: 358648 - RNA, 19 nt, Artificial Sequence
  Synthetic
uuuggcaucguauuuuaau

SEQ ID NO: 358649 - RNA, 20 nt, Artificial Sequence
  Synthetic
auuuggcaucguauuuuaau

SEQ ID NO: 358650 - RNA, 21 nt, Artificial Sequence
  Synthetic
uauuuggcaucguauuuuaau

SEQ ID NO: 358651 - RNA, 22 nt, Artificial Sequence
  Synthetic
auauuuggcaucguauuuuaau

SEQ ID NO: 358652 - RNA, 23 nt, Artificial Sequence
  Synthetic
uauauuuggcaucguauuuuaau

SEQ ID NO: 358653 - RNA, 24 nt, Artificial Sequence
  Synthetic
uuauauuuggcaucguauuuuaau

SEQ ID NO: 358654 - RNA, 18 nt, Artificial Sequence
  Synthetic
cauugaacuuauuuuaau

SEQ ID NO: 358655 - RNA, 19 nt, Artificial Sequence
  Synthetic
ucauugaacuuauuuuaau

SEQ ID NO: 358656 - RNA, 20 nt, Artificial Sequence
  Synthetic
gucauugaacuuauuuuaau

SEQ ID NO: 358657 - RNA, 21 nt, Artificial Sequence
  Synthetic
ugucauugaacuuauuuuaau

SEQ ID NO: 358658 - RNA, 22 nt, Artificial Sequence
  Synthetic
uugucauugaacuuauuuuaau

SEQ ID NO: 358659 - RNA, 23 nt, Artificial Sequence
  Synthetic
uuugucauugaacuuauuuuaau

SEQ ID NO: 358660 - RNA, 24 nt, Artificial Sequence
  Synthetic
uuuugucauugaacuuauuuuaau

SEQ ID NO: 358661 - RNA, 18 nt, Artificial Sequence
  Synthetic
gguaaaagcacuuuuaau

SEQ ID NO: 358662 - RNA, 19 nt, Artificial Sequence
  Synthetic
agguaaaagcacuuuuaau

SEQ ID NO: 358663 - RNA, 20 nt, Artificial Sequence
  Synthetic
uagguaaaagcacuuuuaau

SEQ ID NO: 358664 - RNA, 21 nt, Artificial Sequence
  Synthetic
auagguaaaagcacuuuuaau

SEQ ID NO: 358665 - RNA, 22 nt, Artificial Sequence
  Synthetic
gauagguaaaagcacuuuuaau

SEQ ID NO: 358666 - RNA, 23 nt, Artificial Sequence
  Synthetic
ugauagguaaaagcacuuuuaau

SEQ ID NO: 358667 - RNA, 24 nt, Artificial Sequence
  Synthetic
cugauagguaaaagcacuuuuaau

SEQ ID NO: 358668 - RNA, 18 nt, Artificial Sequence
  Synthetic
uuuaagaaaaguuuuaau

SEQ ID NO: 358669 - RNA, 19 nt, Artificial Sequence
  Synthetic
uuuuaagaaaaguuuuaau

SEQ ID NO: 358670 - RNA, 20 nt, Artificial Sequence
  Synthetic
auuuuaagaaaaguuuuaau

SEQ ID NO: 358671 - RNA, 21 nt, Artificial Sequence
  Synthetic
uauuuuaagaaaaguuuuaau

SEQ ID NO: 358672 - RNA, 22 nt, Artificial Sequence
  Synthetic
cuauuuuaagaaaaguuuuaau

SEQ ID NO: 358673 - RNA, 23 nt, Artificial Sequence
  Synthetic
gcuauuuuaagaaaaguuuuaau

SEQ ID NO: 358674 - RNA, 24 nt, Artificial Sequence
  Synthetic
ggcuauuuuaagaaaaguuuuaau

SEQ ID NO: 358675 - RNA, 18 nt, Artificial Sequence
  Synthetic
aaguugggaaguuuuaau

SEQ ID NO: 358676 - RNA, 19 nt, Artificial Sequence
  Synthetic
aaaguugggaaguuuuaau

SEQ ID NO: 358677 - RNA, 20 nt, Artificial Sequence
  Synthetic
uaaaguugggaaguuuuaau

SEQ ID NO: 358678 - RNA, 21 nt, Artificial Sequence
  Synthetic
cuaaaguugggaaguuuuaau

SEQ ID NO: 358679 - RNA, 22 nt, Artificial Sequence
  Synthetic
ccuaaaguugggaaguuuuaau

SEQ ID NO: 358680 - RNA, 23 nt, Artificial Sequence
  Synthetic
accuaaaguugggaaguuuuaau

SEQ ID NO: 358681 - RNA, 24 nt, Artificial Sequence
  Synthetic
aaccuaaaguugggaaguuuuaau

SEQ ID NO: 358682 - RNA, 18 nt, Artificial Sequence
  Synthetic
guacaaaauaguuuuaau

SEQ ID NO: 358683 - RNA, 19 nt, Artificial Sequence
  Synthetic
uguacaaaauaguuuuaau

SEQ ID NO: 358684 - RNA, 20 nt, Artificial Sequence
  Synthetic
auguacaaaauaguuuuaau

SEQ ID NO: 358685 - RNA, 21 nt, Artificial Sequence
  Synthetic
uauguacaaaauaguuuuaau

SEQ ID NO: 358686 - RNA, 22 nt, Artificial Sequence
  Synthetic
uuauguacaaaauaguuuuaau

SEQ ID NO: 358687 - RNA, 23 nt, Artificial Sequence
  Synthetic
auuauguacaaaauaguuuuaau

SEQ ID NO: 358688 - RNA, 24 nt, Artificial Sequence
  Synthetic
cauuauguacaaaauaguuuuaau

SEQ ID NO: 358689 - RNA, 18 nt, Artificial Sequence
  Synthetic
gauucaucauguuuuaau

SEQ ID NO: 358690 - RNA, 19 nt, Artificial Sequence
  Synthetic
ggauucaucauguuuuaau

SEQ ID NO: 358691 - RNA, 20 nt, Artificial Sequence
  Synthetic
uggauucaucauguuuuaau

SEQ ID NO: 358692 - RNA, 21 nt, Artificial Sequence
  Synthetic
auggauucaucauguuuuaau

SEQ ID NO: 358693 - RNA, 22 nt, Artificial Sequence
  Synthetic
aauggauucaucauguuuuaau

SEQ ID NO: 358694 - RNA, 23 nt, Artificial Sequence
  Synthetic
uaauggauucaucauguuuuaau

SEQ ID NO: 358695 - RNA, 24 nt, Artificial Sequence
  Synthetic
auaauggauucaucauguuuuaau

SEQ ID NO: 358696 - RNA, 18 nt, Artificial Sequence
  Synthetic
uuuuuguucauuuuuaau

SEQ ID NO: 358697 - RNA, 19 nt, Artificial Sequence
  Synthetic
uuuuuuguucauuuuuaau

SEQ ID NO: 358698 - RNA, 20 nt, Artificial Sequence
  Synthetic
uuuuuuuguucauuuuuaau

SEQ ID NO: 358699 - RNA, 21 nt, Artificial Sequence
  Synthetic
cuuuuuuuguucauuuuuaau

SEQ ID NO: 358700 - RNA, 22 nt, Artificial Sequence
  Synthetic
ccuuuuuuuguucauuuuuaau

SEQ ID NO: 358701 - RNA, 23 nt, Artificial Sequence
  Synthetic
uccuuuuuuuguucauuuuuaau

SEQ ID NO: 358702 - RNA, 24 nt, Artificial Sequence
  Synthetic
uuccuuuuuuuguucauuuuuaau

SEQ ID NO: 358703 - RNA, 18 nt, Artificial Sequence
  Synthetic
aacggccuuauuuuuaau

SEQ ID NO: 358704 - RNA, 19 nt, Artificial Sequence
  Synthetic
gaacggccuuauuuuuaau

SEQ ID NO: 358705 - RNA, 20 nt, Artificial Sequence
  Synthetic
ggaacggccuuauuuuuaau

SEQ ID NO: 358706 - RNA, 21 nt, Artificial Sequence
  Synthetic
uggaacggccuuauuuuuaau

SEQ ID NO: 358707 - RNA, 22 nt, Artificial Sequence
  Synthetic
guggaacggccuuauuuuuaau

SEQ ID NO: 358708 - RNA, 23 nt, Artificial Sequence
  Synthetic
aguggaacggccuuauuuuuaau

SEQ ID NO: 358709 - RNA, 24 nt, Artificial Sequence
  Synthetic
aaguggaacggccuuauuuuuaau

SEQ ID NO: 358710 - RNA, 18 nt, Artificial Sequence
  Synthetic
ugacucuaguuuuuuaau

SEQ ID NO: 358711 - RNA, 19 nt, Artificial Sequence
  Synthetic
gugacucuaguuuuuuaau

SEQ ID NO: 358712 - RNA, 20 nt, Artificial Sequence
  Synthetic
cgugacucuaguuuuuuaau

SEQ ID NO: 358713 - RNA, 21 nt, Artificial Sequence
  Synthetic
ucgugacucuaguuuuuuaau

SEQ ID NO: 358714 - RNA, 22 nt, Artificial Sequence
  Synthetic
uucgugacucuaguuuuuuaau

SEQ ID NO: 358715 - RNA, 23 nt, Artificial Sequence
  Synthetic
uuucgugacucuaguuuuuuaau

SEQ ID NO: 358716 - RNA, 24 nt, Artificial Sequence
  Synthetic
cuuucgugacucuaguuuuuuaau

SEQ ID NO: 358717 - RNA, 18 nt, Artificial Sequence
  Synthetic
aucauuuuuuuuuuuaau

SEQ ID NO: 358718 - RNA, 19 nt, Artificial Sequence
  Synthetic
caucauuuuuuuuuuuaau

SEQ ID NO: 358719 - RNA, 20 nt, Artificial Sequence
  Synthetic
ccaucauuuuuuuuuuuaau

SEQ ID NO: 358720 - RNA, 21 nt, Artificial Sequence
  Synthetic
cccaucauuuuuuuuuuuaau

SEQ ID NO: 358721 - RNA, 22 nt, Artificial Sequence
  Synthetic
ccccaucauuuuuuuuuuuaau

SEQ ID NO: 358722 - RNA, 23 nt, Artificial Sequence
  Synthetic
uccccaucauuuuuuuuuuuaau

SEQ ID NO: 358723 - RNA, 24 nt, Artificial Sequence
  Synthetic
guccccaucauuuuuuuuuuuaau

SEQ ID NO: 358724 - RNA, 18 nt, Artificial Sequence
  Synthetic
cuuuucaauaaaaaacau

SEQ ID NO: 358725 - RNA, 19 nt, Artificial Sequence
  Synthetic
ucuuuucaauaaaaaacau

SEQ ID NO: 358726 - RNA, 20 nt, Artificial Sequence
  Synthetic
aucuuuucaauaaaaaacau

SEQ ID NO: 358727 - RNA, 21 nt, Artificial Sequence
  Synthetic
uaucuuuucaauaaaaaacau

SEQ ID NO: 358728 - RNA, 22 nt, Artificial Sequence
  Synthetic
uuaucuuuucaauaaaaaacau

SEQ ID NO: 358729 - RNA, 23 nt, Artificial Sequence
  Synthetic
uuuaucuuuucaauaaaaaacau

SEQ ID NO: 358730 - RNA, 24 nt, Artificial Sequence
  Synthetic
guuuaucuuuucaauaaaaaacau

SEQ ID NO: 358731 - RNA, 18 nt, Artificial Sequence
  Synthetic
cuguaaaguccaaaacau

SEQ ID NO: 358732 - RNA, 19 nt, Artificial Sequence
  Synthetic
gcuguaaaguccaaaacau

SEQ ID NO: 358733 - RNA, 20 nt, Artificial Sequence
  Synthetic
agcuguaaaguccaaaacau

SEQ ID NO: 358734 - RNA, 21 nt, Artificial Sequence
  Synthetic
cagcuguaaaguccaaaacau

SEQ ID NO: 358735 - RNA, 22 nt, Artificial Sequence
  Synthetic
ucagcuguaaaguccaaaacau

SEQ ID NO: 358736 - RNA, 23 nt, Artificial Sequence
  Synthetic
uucagcuguaaaguccaaaacau

SEQ ID NO: 358737 - RNA, 24 nt, Artificial Sequence
  Synthetic
auucagcuguaaaguccaaaacau

SEQ ID NO: 358738 - RNA, 18 nt, Artificial Sequence
  Synthetic
gaaauacaauuaaaacau

SEQ ID NO: 358739 - RNA, 19 nt, Artificial Sequence
  Synthetic
agaaauacaauuaaaacau

SEQ ID NO: 358740 - RNA, 20 nt, Artificial Sequence
  Synthetic
cagaaauacaauuaaaacau

SEQ ID NO: 358741 - RNA, 21 nt, Artificial Sequence
  Synthetic
ucagaaauacaauuaaaacau

SEQ ID NO: 358742 - RNA, 22 nt, Artificial Sequence
  Synthetic
aucagaaauacaauuaaaacau

SEQ ID NO: 358743 - RNA, 23 nt, Artificial Sequence
  Synthetic
aaucagaaauacaauuaaaacau

SEQ ID NO: 358744 - RNA, 24 nt, Artificial Sequence
  Synthetic
aaaucagaaauacaauuaaaacau

SEQ ID NO: 358745 - RNA, 18 nt, Artificial Sequence
  Synthetic
aacagaacauuaaaacau

SEQ ID NO: 358746 - RNA, 19 nt, Artificial Sequence
  Synthetic
aaacagaacauuaaaacau

SEQ ID NO: 358747 - RNA, 20 nt, Artificial Sequence
  Synthetic
caaacagaacauuaaaacau

SEQ ID NO: 358748 - RNA, 21 nt, Artificial Sequence
  Synthetic
gcaaacagaacauuaaaacau

SEQ ID NO: 358749 - RNA, 22 nt, Artificial Sequence
  Synthetic
agcaaacagaacauuaaaacau

SEQ ID NO: 358750 - RNA, 23 nt, Artificial Sequence
  Synthetic
uagcaaacagaacauuaaaacau

SEQ ID NO: 358751 - RNA, 24 nt, Artificial Sequence
  Synthetic
uuagcaaacagaacauuaaaacau

SEQ ID NO: 358752 - RNA, 18 nt, Artificial Sequence
  Synthetic
gaaugaggauuaaaacau

SEQ ID NO: 358753 - RNA, 19 nt, Artificial Sequence
  Synthetic
agaaugaggauuaaaacau

SEQ ID NO: 358754 - RNA, 20 nt, Artificial Sequence
  Synthetic
gagaaugaggauuaaaacau

SEQ ID NO: 358755 - RNA, 21 nt, Artificial Sequence
  Synthetic
agagaaugaggauuaaaacau

SEQ ID NO: 358756 - RNA, 22 nt, Artificial Sequence
  Synthetic
aagagaaugaggauuaaaacau

SEQ ID NO: 358757 - RNA, 23 nt, Artificial Sequence
  Synthetic
gaagagaaugaggauuaaaacau

SEQ ID NO: 358758 - RNA, 24 nt, Artificial Sequence
  Synthetic
agaagagaaugaggauuaaaacau

SEQ ID NO: 358759 - RNA, 18 nt, Artificial Sequence
  Synthetic
ucccaauugaccaaacau

SEQ ID NO: 358760 - RNA, 19 nt, Artificial Sequence
  Synthetic
uucccaauugaccaaacau

SEQ ID NO: 358761 - RNA, 20 nt, Artificial Sequence
  Synthetic
uuucccaauugaccaaacau

SEQ ID NO: 358762 - RNA, 21 nt, Artificial Sequence
  Synthetic
guuucccaauugaccaaacau

SEQ ID NO: 358763 - RNA, 22 nt, Artificial Sequence
  Synthetic
uguuucccaauugaccaaacau

SEQ ID NO: 358764 - RNA, 23 nt, Artificial Sequence
  Synthetic
cuguuucccaauugaccaaacau

SEQ ID NO: 358765 - RNA, 24 nt, Artificial Sequence
  Synthetic
gcuguuucccaauugaccaaacau

SEQ ID NO: 358766 - RNA, 18 nt, Artificial Sequence
  Synthetic
cugcuugaucagaaacau

SEQ ID NO: 358767 - RNA, 19 nt, Artificial Sequence
  Synthetic
ccugcuugaucagaaacau

SEQ ID NO: 358768 - RNA, 20 nt, Artificial Sequence
  Synthetic
accugcuugaucagaaacau

SEQ ID NO: 358769 - RNA, 21 nt, Artificial Sequence
  Synthetic
gaccugcuugaucagaaacau

SEQ ID NO: 358770 - RNA, 22 nt, Artificial Sequence
  Synthetic
agaccugcuugaucagaaacau

SEQ ID NO: 358771 - RNA, 23 nt, Artificial Sequence
  Synthetic
cagaccugcuugaucagaaacau

SEQ ID NO: 358772 - RNA, 24 nt, Artificial Sequence
  Synthetic
ucagaccugcuugaucagaaacau

SEQ ID NO: 358773 - RNA, 18 nt, Artificial Sequence
  Synthetic
gaaagcccuuagaaacau

SEQ ID NO: 358774 - RNA, 19 nt, Artificial Sequence
  Synthetic
agaaagcccuuagaaacau

SEQ ID NO: 358775 - RNA, 20 nt, Artificial Sequence
  Synthetic
gagaaagcccuuagaaacau

SEQ ID NO: 358776 - RNA, 21 nt, Artificial Sequence
  Synthetic
ugagaaagcccuuagaaacau

SEQ ID NO: 358777 - RNA, 22 nt, Artificial Sequence
  Synthetic
augagaaagcccuuagaaacau

SEQ ID NO: 358778 - RNA, 23 nt, Artificial Sequence
  Synthetic
aaugagaaagcccuuagaaacau

SEQ ID NO: 358779 - RNA, 24 nt, Artificial Sequence
  Synthetic
aaaugagaaagcccuuagaaacau

SEQ ID NO: 358780 - RNA, 18 nt, Artificial Sequence
  Synthetic
agugaggcuuagaaacau

SEQ ID NO: 358781 - RNA, 19 nt, Artificial Sequence
  Synthetic
gagugaggcuuagaaacau

SEQ ID NO: 358782 - RNA, 20 nt, Artificial Sequence
  Synthetic
ggagugaggcuuagaaacau

SEQ ID NO: 358783 - RNA, 21 nt, Artificial Sequence
  Synthetic
uggagugaggcuuagaaacau

SEQ ID NO: 358784 - RNA, 22 nt, Artificial Sequence
  Synthetic
auggagugaggcuuagaaacau

SEQ ID NO: 358785 - RNA, 23 nt, Artificial Sequence
  Synthetic
aauggagugaggcuuagaaacau

SEQ ID NO: 358786 - RNA, 24 nt, Artificial Sequence
  Synthetic
uaauggagugaggcuuagaaacau

SEQ ID NO: 358787 - RNA, 18 nt, Artificial Sequence
  Synthetic
guagggggaaggaaacau

SEQ ID NO: 358788 - RNA, 19 nt, Artificial Sequence
  Synthetic
gguagggggaaggaaacau

SEQ ID NO: 358789 - RNA, 20 nt, Artificial Sequence
  Synthetic
agguagggggaaggaaacau

SEQ ID NO: 358790 - RNA, 21 nt, Artificial Sequence
  Synthetic
cagguagggggaaggaaacau

SEQ ID NO: 358791 - RNA, 22 nt, Artificial Sequence
  Synthetic
ucagguagggggaaggaaacau

SEQ ID NO: 358792 - RNA, 23 nt, Artificial Sequence
  Synthetic
gucagguagggggaaggaaacau

SEQ ID NO: 358793 - RNA, 24 nt, Artificial Sequence
  Synthetic
ggucagguagggggaaggaaacau

SEQ ID NO: 358794 - RNA, 18 nt, Artificial Sequence
  Synthetic
auuauuaagaggaaacau

SEQ ID NO: 358795 - RNA, 19 nt, Artificial Sequence
  Synthetic
aauuauuaagaggaaacau

SEQ ID NO: 358796 - RNA, 20 nt, Artificial Sequence
  Synthetic
aaauuauuaagaggaaacau

SEQ ID NO: 358797 - RNA, 21 nt, Artificial Sequence
  Synthetic
aaaauuauuaagaggaaacau

SEQ ID NO: 358798 - RNA, 22 nt, Artificial Sequence
  Synthetic
gaaaauuauuaagaggaaacau

SEQ ID NO: 358799 - RNA, 23 nt, Artificial Sequence
  Synthetic
ggaaaauuauuaagaggaaacau

SEQ ID NO: 358800 - RNA, 24 nt, Artificial Sequence
  Synthetic
uggaaaauuauuaagaggaaacau

SEQ ID NO: 358801 - RNA, 18 nt, Artificial Sequence
  Synthetic
ccaugaccuuggaaacau

SEQ ID NO: 358802 - RNA, 19 nt, Artificial Sequence
  Synthetic
accaugaccuuggaaacau

SEQ ID NO: 358803 - RNA, 20 nt, Artificial Sequence
  Synthetic
gaccaugaccuuggaaacau

SEQ ID NO: 358804 - RNA, 21 nt, Artificial Sequence
  Synthetic
ggaccaugaccuuggaaacau

SEQ ID NO: 358805 - RNA, 22 nt, Artificial Sequence
  Synthetic
uggaccaugaccuuggaaacau

SEQ ID NO: 358806 - RNA, 23 nt, Artificial Sequence
  Synthetic
guggaccaugaccuuggaaacau

SEQ ID NO: 358807 - RNA, 24 nt, Artificial Sequence
  Synthetic
uguggaccaugaccuuggaaacau

SEQ ID NO: 358808 - RNA, 18 nt, Artificial Sequence
  Synthetic
uggacaucaaugaaacau

SEQ ID NO: 358809 - RNA, 19 nt, Artificial Sequence
  Synthetic
cuggacaucaaugaaacau

SEQ ID NO: 358810 - RNA, 20 nt, Artificial Sequence
  Synthetic
gcuggacaucaaugaaacau

SEQ ID NO: 358811 - RNA, 21 nt, Artificial Sequence
  Synthetic
ugcuggacaucaaugaaacau

SEQ ID NO: 358812 - RNA, 22 nt, Artificial Sequence
  Synthetic
augcuggacaucaaugaaacau

SEQ ID NO: 358813 - RNA, 23 nt, Artificial Sequence
  Synthetic
aaugcuggacaucaaugaaacau

SEQ ID NO: 358814 - RNA, 24 nt, Artificial Sequence
  Synthetic
aaaugcuggacaucaaugaaacau

SEQ ID NO: 358815 - RNA, 18 nt, Artificial Sequence
  Synthetic
aaauauauuaauaaacau

SEQ ID NO: 358816 - RNA, 19 nt, Artificial Sequence
  Synthetic
caaauauauuaauaaacau

SEQ ID NO: 358817 - RNA, 20 nt, Artificial Sequence
  Synthetic
ucaaauauauuaauaaacau

SEQ ID NO: 358818 - RNA, 21 nt, Artificial Sequence
  Synthetic
gucaaauauauuaauaaacau

SEQ ID NO: 358819 - RNA, 22 nt, Artificial Sequence
  Synthetic
ugucaaauauauuaauaaacau

SEQ ID NO: 358820 - RNA, 23 nt, Artificial Sequence
  Synthetic
uugucaaauauauuaauaaacau

SEQ ID NO: 358821 - RNA, 24 nt, Artificial Sequence
  Synthetic
guugucaaauauauuaauaaacau

SEQ ID NO: 358822 - RNA, 18 nt, Artificial Sequence
  Synthetic
guaauguuuuauaaacau

SEQ ID NO: 358823 - RNA, 19 nt, Artificial Sequence
  Synthetic
gguaauguuuuauaaacau

SEQ ID NO: 358824 - RNA, 20 nt, Artificial Sequence
  Synthetic
ugguaauguuuuauaaacau

SEQ ID NO: 358825 - RNA, 21 nt, Artificial Sequence
  Synthetic
gugguaauguuuuauaaacau

SEQ ID NO: 358826 - RNA, 22 nt, Artificial Sequence
  Synthetic
agugguaauguuuuauaaacau

SEQ ID NO: 358827 - RNA, 23 nt, Artificial Sequence
  Synthetic
aagugguaauguuuuauaaacau

SEQ ID NO: 358828 - RNA, 24 nt, Artificial Sequence
  Synthetic
aaagugguaauguuuuauaaacau

SEQ ID NO: 358829 - RNA, 18 nt, Artificial Sequence
  Synthetic
uagugccgcaguaaacau

SEQ ID NO: 358830 - RNA, 19 nt, Artificial Sequence
  Synthetic
auagugccgcaguaaacau

SEQ ID NO: 358831 - RNA, 20 nt, Artificial Sequence
  Synthetic
aauagugccgcaguaaacau

SEQ ID NO: 358832 - RNA, 21 nt, Artificial Sequence
  Synthetic
aaauagugccgcaguaaacau

SEQ ID NO: 358833 - RNA, 22 nt, Artificial Sequence
  Synthetic
caaauagugccgcaguaaacau

SEQ ID NO: 358834 - RNA, 23 nt, Artificial Sequence
  Synthetic
gcaaauagugccgcaguaaacau

SEQ ID NO: 358835 - RNA, 24 nt, Artificial Sequence
  Synthetic
ugcaaauagugccgcaguaaacau

SEQ ID NO: 358836 - RNA, 18 nt, Artificial Sequence
  Synthetic
cucaccaccuguaaacau

SEQ ID NO: 358837 - RNA, 19 nt, Artificial Sequence
  Synthetic
ccucaccaccuguaaacau

SEQ ID NO: 358838 - RNA, 20 nt, Artificial Sequence
  Synthetic
uccucaccaccuguaaacau

SEQ ID NO: 358839 - RNA, 21 nt, Artificial Sequence
  Synthetic
guccucaccaccuguaaacau

SEQ ID NO: 358840 - RNA, 22 nt, Artificial Sequence
  Synthetic
aguccucaccaccuguaaacau

SEQ ID NO: 358841 - RNA, 23 nt, Artificial Sequence
  Synthetic
aaguccucaccaccuguaaacau

SEQ ID NO: 358842 - RNA, 24 nt, Artificial Sequence
  Synthetic
aaaguccucaccaccuguaaacau

SEQ ID NO: 358843 - RNA, 18 nt, Artificial Sequence
  Synthetic
uugaaaaaagaacaacau

SEQ ID NO: 358844 - RNA, 19 nt, Artificial Sequence
  Synthetic
cuugaaaaaagaacaacau

SEQ ID NO: 358845 - RNA, 20 nt, Artificial Sequence
  Synthetic
ccuugaaaaaagaacaacau

SEQ ID NO: 358846 - RNA, 21 nt, Artificial Sequence
  Synthetic
accuugaaaaaagaacaacau

SEQ ID NO: 358847 - RNA, 22 nt, Artificial Sequence
  Synthetic
aaccuugaaaaaagaacaacau

SEQ ID NO: 358848 - RNA, 23 nt, Artificial Sequence
  Synthetic
caaccuugaaaaaagaacaacau

SEQ ID NO: 358849 - RNA, 24 nt, Artificial Sequence
  Synthetic
acaaccuugaaaaaagaacaacau

SEQ ID NO: 358850 - RNA, 18 nt, Artificial Sequence
  Synthetic
aauacacagggacaacau

SEQ ID NO: 358851 - RNA, 19 nt, Artificial Sequence
  Synthetic
caauacacagggacaacau

SEQ ID NO: 358852 - RNA, 20 nt, Artificial Sequence
  Synthetic
acaauacacagggacaacau

SEQ ID NO: 358853 - RNA, 21 nt, Artificial Sequence
  Synthetic
cacaauacacagggacaacau

SEQ ID NO: 358854 - RNA, 22 nt, Artificial Sequence
  Synthetic
acacaauacacagggacaacau

SEQ ID NO: 358855 - RNA, 23 nt, Artificial Sequence
  Synthetic
uacacaauacacagggacaacau

SEQ ID NO: 358856 - RNA, 24 nt, Artificial Sequence
  Synthetic
cuacacaauacacagggacaacau

SEQ ID NO: 358857 - RNA, 18 nt, Artificial Sequence
  Synthetic
auuuggaggggacaacau

SEQ ID NO: 358858 - RNA, 19 nt, Artificial Sequence
  Synthetic
gauuuggaggggacaacau

SEQ ID NO: 358859 - RNA, 20 nt, Artificial Sequence
  Synthetic
agauuuggaggggacaacau

SEQ ID NO: 358860 - RNA, 21 nt, Artificial Sequence
  Synthetic
gagauuuggaggggacaacau

SEQ ID NO: 358861 - RNA, 22 nt, Artificial Sequence
  Synthetic
ugagauuuggaggggacaacau

SEQ ID NO: 358862 - RNA, 23 nt, Artificial Sequence
  Synthetic
augagauuuggaggggacaacau

SEQ ID NO: 358863 - RNA, 24 nt, Artificial Sequence
  Synthetic
caugagauuuggaggggacaacau

SEQ ID NO: 358864 - RNA, 18 nt, Artificial Sequence
  Synthetic
acaggcaaccuacaacau

SEQ ID NO: 358865 - RNA, 19 nt, Artificial Sequence
  Synthetic
aacaggcaaccuacaacau

SEQ ID NO: 358866 - RNA, 20 nt, Artificial Sequence
  Synthetic
gaacaggcaaccuacaacau

SEQ ID NO: 358867 - RNA, 21 nt, Artificial Sequence
  Synthetic
ugaacaggcaaccuacaacau

SEQ ID NO: 358868 - RNA, 22 nt, Artificial Sequence
  Synthetic
gugaacaggcaaccuacaacau

SEQ ID NO: 358869 - RNA, 23 nt, Artificial Sequence
  Synthetic
agugaacaggcaaccuacaacau

SEQ ID NO: 358870 - RNA, 24 nt, Artificial Sequence
  Synthetic
gagugaacaggcaaccuacaacau

SEQ ID NO: 358871 - RNA, 18 nt, Artificial Sequence
  Synthetic
acagggaaccuacaacau

SEQ ID NO: 358872 - RNA, 19 nt, Artificial Sequence
  Synthetic
aacagggaaccuacaacau

SEQ ID NO: 358873 - RNA, 20 nt, Artificial Sequence
  Synthetic
gaacagggaaccuacaacau

SEQ ID NO: 358874 - RNA, 21 nt, Artificial Sequence
  Synthetic
ugaacagggaaccuacaacau

SEQ ID NO: 358875 - RNA, 22 nt, Artificial Sequence
  Synthetic
gugaacagggaaccuacaacau

SEQ ID NO: 358876 - RNA, 23 nt, Artificial Sequence
  Synthetic
agugaacagggaaccuacaacau

SEQ ID NO: 358877 - RNA, 24 nt, Artificial Sequence
  Synthetic
gagugaacagggaaccuacaacau

SEQ ID NO: 358878 - RNA, 18 nt, Artificial Sequence
  Synthetic
uucuuacauguacaacau

SEQ ID NO: 358879 - RNA, 19 nt, Artificial Sequence
  Synthetic
uuucuuacauguacaacau

SEQ ID NO: 358880 - RNA, 20 nt, Artificial Sequence
  Synthetic
auuucuuacauguacaacau

SEQ ID NO: 358881 - RNA, 21 nt, Artificial Sequence
  Synthetic
gauuucuuacauguacaacau

SEQ ID NO: 358882 - RNA, 22 nt, Artificial Sequence
  Synthetic
agauuucuuacauguacaacau

SEQ ID NO: 358883 - RNA, 23 nt, Artificial Sequence
  Synthetic
cagauuucuuacauguacaacau

SEQ ID NO: 358884 - RNA, 24 nt, Artificial Sequence
  Synthetic
ucagauuucuuacauguacaacau

SEQ ID NO: 358885 - RNA, 18 nt, Artificial Sequence
  Synthetic
cagcuucuauuacaacau

SEQ ID NO: 358886 - RNA, 19 nt, Artificial Sequence
  Synthetic
acagcuucuauuacaacau

SEQ ID NO: 358887 - RNA, 20 nt, Artificial Sequence
  Synthetic
uacagcuucuauuacaacau

SEQ ID NO: 358888 - RNA, 21 nt, Artificial Sequence
  Synthetic
guacagcuucuauuacaacau

SEQ ID NO: 358889 - RNA, 22 nt, Artificial Sequence
  Synthetic
aguacagcuucuauuacaacau

SEQ ID NO: 358890 - RNA, 23 nt, Artificial Sequence
  Synthetic
aaguacagcuucuauuacaacau

SEQ ID NO: 358891 - RNA, 24 nt, Artificial Sequence
  Synthetic
aaaguacagcuucuauuacaacau

SEQ ID NO: 358892 - RNA, 18 nt, Artificial Sequence
  Synthetic
aggccccaccaccaacau

SEQ ID NO: 358893 - RNA, 19 nt, Artificial Sequence
  Synthetic
caggccccaccaccaacau

SEQ ID NO: 358894 - RNA, 20 nt, Artificial Sequence
  Synthetic
ccaggccccaccaccaacau

SEQ ID NO: 358895 - RNA, 21 nt, Artificial Sequence
  Synthetic
gccaggccccaccaccaacau

SEQ ID NO: 358896 - RNA, 22 nt, Artificial Sequence
  Synthetic
cgccaggccccaccaccaacau

SEQ ID NO: 358897 - RNA, 23 nt, Artificial Sequence
  Synthetic
ccgccaggccccaccaccaacau

SEQ ID NO: 358898 - RNA, 24 nt, Artificial Sequence
  Synthetic
cccgccaggccccaccaccaacau

SEQ ID NO: 358899 - RNA, 18 nt, Artificial Sequence
  Synthetic
agaacagucacccaacau

SEQ ID NO: 358900 - RNA, 19 nt, Artificial Sequence
  Synthetic
aagaacagucacccaacau

SEQ ID NO: 358901 - RNA, 20 nt, Artificial Sequence
  Synthetic
aaagaacagucacccaacau

SEQ ID NO: 358902 - RNA, 21 nt, Artificial Sequence
  Synthetic
aaaagaacagucacccaacau

SEQ ID NO: 358903 - RNA, 22 nt, Artificial Sequence
  Synthetic
uaaaagaacagucacccaacau

SEQ ID NO: 358904 - RNA, 23 nt, Artificial Sequence
  Synthetic
guaaaagaacagucacccaacau

SEQ ID NO: 358905 - RNA, 24 nt, Artificial Sequence
  Synthetic
aguaaaagaacagucacccaacau

SEQ ID NO: 358906 - RNA, 18 nt, Artificial Sequence
  Synthetic
agcacauuuccccaacau

SEQ ID NO: 358907 - RNA, 19 nt, Artificial Sequence
  Synthetic
aagcacauuuccccaacau

SEQ ID NO: 358908 - RNA, 20 nt, Artificial Sequence
  Synthetic
aaagcacauuuccccaacau

SEQ ID NO: 358909 - RNA, 21 nt, Artificial Sequence
  Synthetic
gaaagcacauuuccccaacau

SEQ ID NO: 358910 - RNA, 22 nt, Artificial Sequence
  Synthetic
ggaaagcacauuuccccaacau

SEQ ID NO: 358911 - RNA, 23 nt, Artificial Sequence
  Synthetic
uggaaagcacauuuccccaacau

SEQ ID NO: 358912 - RNA, 24 nt, Artificial Sequence
  Synthetic
auggaaagcacauuuccccaacau

SEQ ID NO: 358913 - RNA, 18 nt, Artificial Sequence
  Synthetic
aggccccaccuccaacau

SEQ ID NO: 358914 - RNA, 19 nt, Artificial Sequence
  Synthetic
caggccccaccuccaacau

SEQ ID NO: 358915 - RNA, 20 nt, Artificial Sequence
  Synthetic
ccaggccccaccuccaacau

SEQ ID NO: 358916 - RNA, 21 nt, Artificial Sequence
  Synthetic
accaggccccaccuccaacau

SEQ ID NO: 358917 - RNA, 22 nt, Artificial Sequence
  Synthetic
caccaggccccaccuccaacau

SEQ ID NO: 358918 - RNA, 23 nt, Artificial Sequence
  Synthetic
ucaccaggccccaccuccaacau

SEQ ID NO: 358919 - RNA, 24 nt, Artificial Sequence
  Synthetic
cucaccaggccccaccuccaacau

SEQ ID NO: 358920 - RNA, 18 nt, Artificial Sequence
  Synthetic
acaucuugcuuccaacau

SEQ ID NO: 358921 - RNA, 19 nt, Artificial Sequence
  Synthetic
gacaucuugcuuccaacau

SEQ ID NO: 358922 - RNA, 20 nt, Artificial Sequence
  Synthetic
ggacaucuugcuuccaacau

SEQ ID NO: 358923 - RNA, 21 nt, Artificial Sequence
  Synthetic
cggacaucuugcuuccaacau

SEQ ID NO: 358924 - RNA, 22 nt, Artificial Sequence
  Synthetic
ccggacaucuugcuuccaacau

SEQ ID NO: 358925 - RNA, 23 nt, Artificial Sequence
  Synthetic
cccggacaucuugcuuccaacau

SEQ ID NO: 358926 - RNA, 24 nt, Artificial Sequence
  Synthetic
ucccggacaucuugcuuccaacau

SEQ ID NO: 358927 - RNA, 18 nt, Artificial Sequence
  Synthetic
uugaguaguuuccaacau

SEQ ID NO: 358928 - RNA, 19 nt, Artificial Sequence
  Synthetic
auugaguaguuuccaacau

SEQ ID NO: 358929 - RNA, 20 nt, Artificial Sequence
  Synthetic
aauugaguaguuuccaacau

SEQ ID NO: 358930 - RNA, 21 nt, Artificial Sequence
  Synthetic
aaauugaguaguuuccaacau

SEQ ID NO: 358931 - RNA, 22 nt, Artificial Sequence
  Synthetic
gaaauugaguaguuuccaacau

SEQ ID NO: 358932 - RNA, 23 nt, Artificial Sequence
  Synthetic
agaaauugaguaguuuccaacau

SEQ ID NO: 358933 - RNA, 24 nt, Artificial Sequence
  Synthetic
gagaaauugaguaguuuccaacau

SEQ ID NO: 358934 - RNA, 18 nt, Artificial Sequence
  Synthetic
gcccagggccagcaacau

SEQ ID NO: 358935 - RNA, 19 nt, Artificial Sequence
  Synthetic
agcccagggccagcaacau

SEQ ID NO: 358936 - RNA, 20 nt, Artificial Sequence
  Synthetic
uagcccagggccagcaacau

SEQ ID NO: 358937 - RNA, 21 nt, Artificial Sequence
  Synthetic
cuagcccagggccagcaacau

SEQ ID NO: 358938 - RNA, 22 nt, Artificial Sequence
  Synthetic
gcuagcccagggccagcaacau

SEQ ID NO: 358939 - RNA, 23 nt, Artificial Sequence
  Synthetic
ugcuagcccagggccagcaacau

SEQ ID NO: 358940 - RNA, 24 nt, Artificial Sequence
  Synthetic
cugcuagcccagggccagcaacau

SEQ ID NO: 358941 - RNA, 18 nt, Artificial Sequence
  Synthetic
ugcuuagucuaucaacau

SEQ ID NO: 358942 - RNA, 19 nt, Artificial Sequence
  Synthetic
cugcuuagucuaucaacau

SEQ ID NO: 358943 - RNA, 20 nt, Artificial Sequence
  Synthetic
gcugcuuagucuaucaacau

SEQ ID NO: 358944 - RNA, 21 nt, Artificial Sequence
  Synthetic
agcugcuuagucuaucaacau

SEQ ID NO: 358945 - RNA, 22 nt, Artificial Sequence
  Synthetic
aagcugcuuagucuaucaacau

SEQ ID NO: 358946 - RNA, 23 nt, Artificial Sequence
  Synthetic
aaagcugcuuagucuaucaacau

SEQ ID NO: 358947 - RNA, 24 nt, Artificial Sequence
  Synthetic
aaaagcugcuuagucuaucaacau

SEQ ID NO: 358948 - RNA, 18 nt, Artificial Sequence
  Synthetic
ugaaggcuggcucaacau

SEQ ID NO: 358949 - RNA, 19 nt, Artificial Sequence
  Synthetic
uugaaggcuggcucaacau

SEQ ID NO: 358950 - RNA, 20 nt, Artificial Sequence
  Synthetic
auugaaggcuggcucaacau

SEQ ID NO: 358951 - RNA, 21 nt, Artificial Sequence
  Synthetic
uauugaaggcuggcucaacau

SEQ ID NO: 358952 - RNA, 22 nt, Artificial Sequence
  Synthetic
guauugaaggcuggcucaacau

SEQ ID NO: 358953 - RNA, 23 nt, Artificial Sequence
  Synthetic
aguauugaaggcuggcucaacau

SEQ ID NO: 358954 - RNA, 24 nt, Artificial Sequence
  Synthetic
uaguauugaaggcuggcucaacau

SEQ ID NO: 358955 - RNA, 18 nt, Artificial Sequence
  Synthetic
auuuguaauucucaacau

SEQ ID NO: 358956 - RNA, 19 nt, Artificial Sequence
  Synthetic
aauuuguaauucucaacau

SEQ ID NO: 358957 - RNA, 20 nt, Artificial Sequence
  Synthetic
caauuuguaauucucaacau

SEQ ID NO: 358958 - RNA, 21 nt, Artificial Sequence
  Synthetic
ucaauuuguaauucucaacau

SEQ ID NO: 358959 - RNA, 22 nt, Artificial Sequence
  Synthetic
cucaauuuguaauucucaacau

SEQ ID NO: 358960 - RNA, 23 nt, Artificial Sequence
  Synthetic
ccucaauuuguaauucucaacau

SEQ ID NO: 358961 - RNA, 24 nt, Artificial Sequence
  Synthetic
uccucaauuuguaauucucaacau

SEQ ID NO: 358962 - RNA, 18 nt, Artificial Sequence
  Synthetic
caagugcuuugucaacau

SEQ ID NO: 358963 - RNA, 19 nt, Artificial Sequence
  Synthetic
ucaagugcuuugucaacau

SEQ ID NO: 358964 - RNA, 20 nt, Artificial Sequence
  Synthetic
gucaagugcuuugucaacau

SEQ ID NO: 358965 - RNA, 21 nt, Artificial Sequence
  Synthetic
ugucaagugcuuugucaacau

SEQ ID NO: 358966 - RNA, 22 nt, Artificial Sequence
  Synthetic
cugucaagugcuuugucaacau

SEQ ID NO: 358967 - RNA, 23 nt, Artificial Sequence
  Synthetic
acugucaagugcuuugucaacau

SEQ ID NO: 358968 - RNA, 24 nt, Artificial Sequence
  Synthetic
aacugucaagugcuuugucaacau

SEQ ID NO: 358969 - RNA, 18 nt, Artificial Sequence
  Synthetic
ugucuguuaagagaacau

SEQ ID NO: 358970 - RNA, 19 nt, Artificial Sequence
  Synthetic
uugucuguuaagagaacau

SEQ ID NO: 358971 - RNA, 20 nt, Artificial Sequence
  Synthetic
cuugucuguuaagagaacau

SEQ ID NO: 358972 - RNA, 21 nt, Artificial Sequence
  Synthetic
gcuugucuguuaagagaacau

SEQ ID NO: 358973 - RNA, 22 nt, Artificial Sequence
  Synthetic
agcuugucuguuaagagaacau

SEQ ID NO: 358974 - RNA, 23 nt, Artificial Sequence
  Synthetic
aagcuugucuguuaagagaacau

SEQ ID NO: 358975 - RNA, 24 nt, Artificial Sequence
  Synthetic
gaagcuugucuguuaagagaacau

SEQ ID NO: 358976 - RNA, 18 nt, Artificial Sequence
  Synthetic
auuauagagggagaacau

SEQ ID NO: 358977 - RNA, 19 nt, Artificial Sequence
  Synthetic
cauuauagagggagaacau

SEQ ID NO: 358978 - RNA, 20 nt, Artificial Sequence
  Synthetic
ucauuauagagggagaacau

SEQ ID NO: 358979 - RNA, 21 nt, Artificial Sequence
  Synthetic
gucauuauagagggagaacau

SEQ ID NO: 358980 - RNA, 22 nt, Artificial Sequence
  Synthetic
ugucauuauagagggagaacau

SEQ ID NO: 358981 - RNA, 23 nt, Artificial Sequence
  Synthetic
uugucauuauagagggagaacau

SEQ ID NO: 358982 - RNA, 24 nt, Artificial Sequence
  Synthetic
cuugucauuauagagggagaacau

SEQ ID NO: 358983 - RNA, 18 nt, Artificial Sequence
  Synthetic
gcuaaaugaugagaacau

SEQ ID NO: 358984 - RNA, 19 nt, Artificial Sequence
  Synthetic
agcuaaaugaugagaacau

SEQ ID NO: 358985 - RNA, 20 nt, Artificial Sequence
  Synthetic
aagcuaaaugaugagaacau

SEQ ID NO: 358986 - RNA, 21 nt, Artificial Sequence
  Synthetic
gaagcuaaaugaugagaacau

SEQ ID NO: 358987 - RNA, 22 nt, Artificial Sequence
  Synthetic
ggaagcuaaaugaugagaacau

SEQ ID NO: 358988 - RNA, 23 nt, Artificial Sequence
  Synthetic
uggaagcuaaaugaugagaacau

SEQ ID NO: 358989 - RNA, 24 nt, Artificial Sequence
  Synthetic
auggaagcuaaaugaugagaacau

SEQ ID NO: 358990 - RNA, 18 nt, Artificial Sequence
  Synthetic
cauacgaauguagaacau

SEQ ID NO: 358991 - RNA, 19 nt, Artificial Sequence
  Synthetic
ccauacgaauguagaacau

SEQ ID NO: 358992 - RNA, 20 nt, Artificial Sequence
  Synthetic
cccauacgaauguagaacau

SEQ ID NO: 358993 - RNA, 21 nt, Artificial Sequence
  Synthetic
ucccauacgaauguagaacau

SEQ ID NO: 358994 - RNA, 22 nt, Artificial Sequence
  Synthetic
aucccauacgaauguagaacau

SEQ ID NO: 358995 - RNA, 23 nt, Artificial Sequence
  Synthetic
aaucccauacgaauguagaacau

SEQ ID NO: 358996 - RNA, 24 nt, Artificial Sequence
  Synthetic
aaaucccauacgaauguagaacau

SEQ ID NO: 358997 - RNA, 18 nt, Artificial Sequence
  Synthetic
uaacuugauuuagaacau

SEQ ID NO: 358998 - RNA, 19 nt, Artificial Sequence
  Synthetic
cuaacuugauuuagaacau

SEQ ID NO: 358999 - RNA, 20 nt, Artificial Sequence
  Synthetic
acuaacuugauuuagaacau

SEQ ID NO: 359000 - RNA, 21 nt, Artificial Sequence
  Synthetic
gacuaacuugauuuagaacau

SEQ ID NO: 359001 - RNA, 22 nt, Artificial Sequence
  Synthetic
ugacuaacuugauuuagaacau

SEQ ID NO: 359002 - RNA, 23 nt, Artificial Sequence
  Synthetic
cugacuaacuugauuuagaacau

SEQ ID NO: 359003 - RNA, 24 nt, Artificial Sequence
  Synthetic
ucugacuaacuugauuuagaacau

SEQ ID NO: 359004 - RNA, 18 nt, Artificial Sequence
  Synthetic
gaaaccucaagggaacau

SEQ ID NO: 359005 - RNA, 19 nt, Artificial Sequence
  Synthetic
cgaaaccucaagggaacau

SEQ ID NO: 359006 - RNA, 20 nt, Artificial Sequence
  Synthetic
acgaaaccucaagggaacau

SEQ ID NO: 359007 - RNA, 21 nt, Artificial Sequence
  Synthetic
cacgaaaccucaagggaacau

SEQ ID NO: 359008 - RNA, 22 nt, Artificial Sequence
  Synthetic
ucacgaaaccucaagggaacau

SEQ ID NO: 359009 - RNA, 23 nt, Artificial Sequence
  Synthetic
cucacgaaaccucaagggaacau

SEQ ID NO: 359010 - RNA, 24 nt, Artificial Sequence
  Synthetic
acucacgaaaccucaagggaacau

SEQ ID NO: 359011 - RNA, 18 nt, Artificial Sequence
  Synthetic
uacugaaaaugggaacau

SEQ ID NO: 359012 - RNA, 19 nt, Artificial Sequence
  Synthetic
uuacugaaaaugggaacau

SEQ ID NO: 359013 - RNA, 20 nt, Artificial Sequence
  Synthetic
uuuacugaaaaugggaacau

SEQ ID NO: 359014 - RNA, 21 nt, Artificial Sequence
  Synthetic
auuuacugaaaaugggaacau

SEQ ID NO: 359015 - RNA, 22 nt, Artificial Sequence
  Synthetic
cauuuacugaaaaugggaacau

SEQ ID NO: 359016 - RNA, 23 nt, Artificial Sequence
  Synthetic
ucauuuacugaaaaugggaacau

SEQ ID NO: 359017 - RNA, 24 nt, Artificial Sequence
  Synthetic
uucauuuacugaaaaugggaacau

SEQ ID NO: 359018 - RNA, 18 nt, Artificial Sequence
  Synthetic
ggcuacuuaguggaacau

SEQ ID NO: 359019 - RNA, 19 nt, Artificial Sequence
  Synthetic
uggcuacuuaguggaacau

SEQ ID NO: 359020 - RNA, 20 nt, Artificial Sequence
  Synthetic
auggcuacuuaguggaacau

SEQ ID NO: 359021 - RNA, 21 nt, Artificial Sequence
  Synthetic
aauggcuacuuaguggaacau

SEQ ID NO: 359022 - RNA, 22 nt, Artificial Sequence
  Synthetic
aaauggcuacuuaguggaacau

SEQ ID NO: 359023 - RNA, 23 nt, Artificial Sequence
  Synthetic
aaaauggcuacuuaguggaacau

SEQ ID NO: 359024 - RNA, 24 nt, Artificial Sequence
  Synthetic
gaaaauggcuacuuaguggaacau

SEQ ID NO: 359025 - RNA, 18 nt, Artificial Sequence
  Synthetic
aauugcuuauuggaacau

SEQ ID NO: 359026 - RNA, 19 nt, Artificial Sequence
  Synthetic
aaauugcuuauuggaacau

SEQ ID NO: 359027 - RNA, 20 nt, Artificial Sequence
  Synthetic
gaaauugcuuauuggaacau

SEQ ID NO: 359028 - RNA, 21 nt, Artificial Sequence
  Synthetic
agaaauugcuuauuggaacau

SEQ ID NO: 359029 - RNA, 22 nt, Artificial Sequence
  Synthetic
uagaaauugcuuauuggaacau

SEQ ID NO: 359030 - RNA, 23 nt, Artificial Sequence
  Synthetic
uuagaaauugcuuauuggaacau

SEQ ID NO: 359031 - RNA, 24 nt, Artificial Sequence
  Synthetic
cuuagaaauugcuuauuggaacau

SEQ ID NO: 359032 - RNA, 18 nt, Artificial Sequence
  Synthetic
caauaguuugaugaacau

SEQ ID NO: 359033 - RNA, 19 nt, Artificial Sequence
  Synthetic
gcaauaguuugaugaacau

SEQ ID NO: 359034 - RNA, 20 nt, Artificial Sequence
  Synthetic
ugcaauaguuugaugaacau

SEQ ID NO: 359035 - RNA, 21 nt, Artificial Sequence
  Synthetic
cugcaauaguuugaugaacau

SEQ ID NO: 359036 - RNA, 22 nt, Artificial Sequence
  Synthetic
ucugcaauaguuugaugaacau

SEQ ID NO: 359037 - RNA, 23 nt, Artificial Sequence
  Synthetic
aucugcaauaguuugaugaacau

SEQ ID NO: 359038 - RNA, 24 nt, Artificial Sequence
  Synthetic
aaucugcaauaguuugaugaacau

SEQ ID NO: 359039 - RNA, 18 nt, Artificial Sequence
  Synthetic
uccaacuccucugaacau

SEQ ID NO: 359040 - RNA, 19 nt, Artificial Sequence
  Synthetic
cuccaacuccucugaacau

SEQ ID NO: 359041 - RNA, 20 nt, Artificial Sequence
  Synthetic
ucuccaacuccucugaacau

SEQ ID NO: 359042 - RNA, 21 nt, Artificial Sequence
  Synthetic
aucuccaacuccucugaacau

SEQ ID NO: 359043 - RNA, 22 nt, Artificial Sequence
  Synthetic
gaucuccaacuccucugaacau

SEQ ID NO: 359044 - RNA, 23 nt, Artificial Sequence
  Synthetic
ugaucuccaacuccucugaacau

SEQ ID NO: 359045 - RNA, 24 nt, Artificial Sequence
  Synthetic
augaucuccaacuccucugaacau

SEQ ID NO: 359046 - RNA, 18 nt, Artificial Sequence
  Synthetic
auagguaagucugaacau

SEQ ID NO: 359047 - RNA, 19 nt, Artificial Sequence
  Synthetic
aauagguaagucugaacau

SEQ ID NO: 359048 - RNA, 20 nt, Artificial Sequence
  Synthetic
gaauagguaagucugaacau

SEQ ID NO: 359049 - RNA, 21 nt, Artificial Sequence
  Synthetic
ugaauagguaagucugaacau

SEQ ID NO: 359050 - RNA, 22 nt, Artificial Sequence
  Synthetic
uugaauagguaagucugaacau

SEQ ID NO: 359051 - RNA, 23 nt, Artificial Sequence
  Synthetic
uuugaauagguaagucugaacau

SEQ ID NO: 359052 - RNA, 24 nt, Artificial Sequence
  Synthetic
auuugaauagguaagucugaacau

SEQ ID NO: 359053 - RNA, 18 nt, Artificial Sequence
  Synthetic
gaucaauagauugaacau

SEQ ID NO: 359054 - RNA, 19 nt, Artificial Sequence
  Synthetic
ugaucaauagauugaacau

SEQ ID NO: 359055 - RNA, 20 nt, Artificial Sequence
  Synthetic
augaucaauagauugaacau

SEQ ID NO: 359056 - RNA, 21 nt, Artificial Sequence
  Synthetic
caugaucaauagauugaacau

SEQ ID NO: 359057 - RNA, 22 nt, Artificial Sequence
  Synthetic
acaugaucaauagauugaacau

SEQ ID NO: 359058 - RNA, 23 nt, Artificial Sequence
  Synthetic
aacaugaucaauagauugaacau

SEQ ID NO: 359059 - RNA, 24 nt, Artificial Sequence
  Synthetic
caacaugaucaauagauugaacau

SEQ ID NO: 359060 - RNA, 18 nt, Artificial Sequence
  Synthetic
ugauuuuuuauugaacau

SEQ ID NO: 359061 - RNA, 19 nt, Artificial Sequence
  Synthetic
augauuuuuuauugaacau

SEQ ID NO: 359062 - RNA, 20 nt, Artificial Sequence
  Synthetic
aaugauuuuuuauugaacau

SEQ ID NO: 359063 - RNA, 21 nt, Artificial Sequence
  Synthetic
uaaugauuuuuuauugaacau

SEQ ID NO: 359064 - RNA, 22 nt, Artificial Sequence
  Synthetic
auaaugauuuuuuauugaacau

SEQ ID NO: 359065 - RNA, 23 nt, Artificial Sequence
  Synthetic
cauaaugauuuuuuauugaacau

SEQ ID NO: 359066 - RNA, 24 nt, Artificial Sequence
  Synthetic
ucauaaugauuuuuuauugaacau

SEQ ID NO: 359067 - RNA, 18 nt, Artificial Sequence
  Synthetic
ccuuuaauagcauaacau

SEQ ID NO: 359068 - RNA, 19 nt, Artificial Sequence
  Synthetic
accuuuaauagcauaacau

SEQ ID NO: 359069 - RNA, 20 nt, Artificial Sequence
  Synthetic
aaccuuuaauagcauaacau

SEQ ID NO: 359070 - RNA, 21 nt, Artificial Sequence
  Synthetic
gaaccuuuaauagcauaacau

SEQ ID NO: 359071 - RNA, 22 nt, Artificial Sequence
  Synthetic
ggaaccuuuaauagcauaacau

SEQ ID NO: 359072 - RNA, 23 nt, Artificial Sequence
  Synthetic
aggaaccuuuaauagcauaacau

SEQ ID NO: 359073 - RNA, 24 nt, Artificial Sequence
  Synthetic
gaggaaccuuuaauagcauaacau

SEQ ID NO: 359074 - RNA, 18 nt, Artificial Sequence
  Synthetic
auaccugugcuauaacau

SEQ ID NO: 359075 - RNA, 19 nt, Artificial Sequence
  Synthetic
aauaccugugcuauaacau

SEQ ID NO: 359076 - RNA, 20 nt, Artificial Sequence
  Synthetic
caauaccugugcuauaacau

SEQ ID NO: 359077 - RNA, 21 nt, Artificial Sequence
  Synthetic
ucaauaccugugcuauaacau

SEQ ID NO: 359078 - RNA, 22 nt, Artificial Sequence
  Synthetic
gucaauaccugugcuauaacau

SEQ ID NO: 359079 - RNA, 23 nt, Artificial Sequence
  Synthetic
ugucaauaccugugcuauaacau

SEQ ID NO: 359080 - RNA, 24 nt, Artificial Sequence
  Synthetic
augucaauaccugugcuauaacau

SEQ ID NO: 359081 - RNA, 18 nt, Artificial Sequence
  Synthetic
cagcuuuuauuauaacau

SEQ ID NO: 359082 - RNA, 19 nt, Artificial Sequence
  Synthetic
ucagcuuuuauuauaacau

SEQ ID NO: 359083 - RNA, 20 nt, Artificial Sequence
  Synthetic
uucagcuuuuauuauaacau

SEQ ID NO: 359084 - RNA, 21 nt, Artificial Sequence
  Synthetic
auucagcuuuuauuauaacau

SEQ ID NO: 359085 - RNA, 22 nt, Artificial Sequence
  Synthetic
cauucagcuuuuauuauaacau

SEQ ID NO: 359086 - RNA, 23 nt, Artificial Sequence
  Synthetic
ucauucagcuuuuauuauaacau

SEQ ID NO: 359087 - RNA, 24 nt, Artificial Sequence
  Synthetic
cucauucagcuuuuauuauaacau

SEQ ID NO: 359088 - RNA, 18 nt, Artificial Sequence
  Synthetic
auuagucgcuccuaacau

SEQ ID NO: 359089 - RNA, 19 nt, Artificial Sequence
  Synthetic
uauuagucgcuccuaacau

SEQ ID NO: 359090 - RNA, 20 nt, Artificial Sequence
  Synthetic
cuauuagucgcuccuaacau

SEQ ID NO: 359091 - RNA, 21 nt, Artificial Sequence
  Synthetic
acuauuagucgcuccuaacau

SEQ ID NO: 359092 - RNA, 22 nt, Artificial Sequence
  Synthetic
aacuauuagucgcuccuaacau

SEQ ID NO: 359093 - RNA, 23 nt, Artificial Sequence
  Synthetic
aaacuauuagucgcuccuaacau

SEQ ID NO: 359094 - RNA, 24 nt, Artificial Sequence
  Synthetic
aaaacuauuagucgcuccuaacau

SEQ ID NO: 359095 - RNA, 18 nt, Artificial Sequence
  Synthetic
uccuaagcaaauuaacau

SEQ ID NO: 359096 - RNA, 19 nt, Artificial Sequence
  Synthetic
auccuaagcaaauuaacau

SEQ ID NO: 359097 - RNA, 20 nt, Artificial Sequence
  Synthetic
uauccuaagcaaauuaacau

SEQ ID NO: 359098 - RNA, 21 nt, Artificial Sequence
  Synthetic
uuauccuaagcaaauuaacau

SEQ ID NO: 359099 - RNA, 22 nt, Artificial Sequence
  Synthetic
auuauccuaagcaaauuaacau

SEQ ID NO: 359100 - RNA, 23 nt, Artificial Sequence
  Synthetic
cauuauccuaagcaaauuaacau

SEQ ID NO: 359101 - RNA, 24 nt, Artificial Sequence
  Synthetic
ccauuauccuaagcaaauuaacau

SEQ ID NO: 359102 - RNA, 18 nt, Artificial Sequence
  Synthetic
acggguaaagauuaacau

SEQ ID NO: 359103 - RNA, 19 nt, Artificial Sequence
  Synthetic
cacggguaaagauuaacau

SEQ ID NO: 359104 - RNA, 20 nt, Artificial Sequence
  Synthetic
acacggguaaagauuaacau

SEQ ID NO: 359105 - RNA, 21 nt, Artificial Sequence
  Synthetic
uacacggguaaagauuaacau

SEQ ID NO: 359106 - RNA, 22 nt, Artificial Sequence
  Synthetic
uuacacggguaaagauuaacau

SEQ ID NO: 359107 - RNA, 23 nt, Artificial Sequence
  Synthetic
uuuacacggguaaagauuaacau

SEQ ID NO: 359108 - RNA, 24 nt, Artificial Sequence
  Synthetic
uuuuacacggguaaagauuaacau

SEQ ID NO: 359109 - RNA, 18 nt, Artificial Sequence
  Synthetic
cuguauauauauuaacau

SEQ ID NO: 359110 - RNA, 19 nt, Artificial Sequence
  Synthetic
ucuguauauauauuaacau

SEQ ID NO: 359111 - RNA, 20 nt, Artificial Sequence
  Synthetic
uucuguauauauauuaacau

SEQ ID NO: 359112 - RNA, 21 nt, Artificial Sequence
  Synthetic
uuucuguauauauauuaacau

SEQ ID NO: 359113 - RNA, 22 nt, Artificial Sequence
  Synthetic
cuuucuguauauauauuaacau

SEQ ID NO: 359114 - RNA, 23 nt, Artificial Sequence
  Synthetic
ccuuucuguauauauauuaacau

SEQ ID NO: 359115 - RNA, 24 nt, Artificial Sequence
  Synthetic
uccuuucuguauauauauuaacau

SEQ ID NO: 359116 - RNA, 18 nt, Artificial Sequence
  Synthetic
uauauuuuauuuuaacau

SEQ ID NO: 359117 - RNA, 19 nt, Artificial Sequence
  Synthetic
auauauuuuauuuuaacau

SEQ ID NO: 359118 - RNA, 20 nt, Artificial Sequence
  Synthetic
gauauauuuuauuuuaacau

SEQ ID NO: 359119 - RNA, 21 nt, Artificial Sequence
  Synthetic
ggauauauuuuauuuuaacau

SEQ ID NO: 359120 - RNA, 22 nt, Artificial Sequence
  Synthetic
aggauauauuuuauuuuaacau

SEQ ID NO: 359121 - RNA, 23 nt, Artificial Sequence
  Synthetic
gaggauauauuuuauuuuaacau

SEQ ID NO: 359122 - RNA, 24 nt, Artificial Sequence
  Synthetic
ugaggauauauuuuauuuuaacau

SEQ ID NO: 359123 - RNA, 18 nt, Artificial Sequence
  Synthetic
uaagggacucaaacacau

SEQ ID NO: 359124 - RNA, 19 nt, Artificial Sequence
  Synthetic
auaagggacucaaacacau

SEQ ID NO: 359125 - RNA, 20 nt, Artificial Sequence
  Synthetic
aauaagggacucaaacacau

SEQ ID NO: 359126 - RNA, 21 nt, Artificial Sequence
  Synthetic
aaauaagggacucaaacacau

SEQ ID NO: 359127 - RNA, 22 nt, Artificial Sequence
  Synthetic
aaaauaagggacucaaacacau

SEQ ID NO: 359128 - RNA, 23 nt, Artificial Sequence
  Synthetic
aaaaauaagggacucaaacacau

SEQ ID NO: 359129 - RNA, 24 nt, Artificial Sequence
  Synthetic
uaaaaauaagggacucaaacacau

SEQ ID NO: 359130 - RNA, 18 nt, Artificial Sequence
  Synthetic
aauuugguuggaacacau

SEQ ID NO: 359131 - RNA, 19 nt, Artificial Sequence
  Synthetic
uaauuugguuggaacacau

SEQ ID NO: 359132 - RNA, 20 nt, Artificial Sequence
  Synthetic
uuaauuugguuggaacacau

SEQ ID NO: 359133 - RNA, 21 nt, Artificial Sequence
  Synthetic
uuuaauuugguuggaacacau

SEQ ID NO: 359134 - RNA, 22 nt, Artificial Sequence
  Synthetic
uuuuaauuugguuggaacacau

SEQ ID NO: 359135 - RNA, 23 nt, Artificial Sequence
  Synthetic
guuuuaauuugguuggaacacau

SEQ ID NO: 359136 - RNA, 24 nt, Artificial Sequence
  Synthetic
aguuuuaauuugguuggaacacau

SEQ ID NO: 359137 - RNA, 18 nt, Artificial Sequence
  Synthetic
gauacuaaauuaacacau

SEQ ID NO: 359138 - RNA, 19 nt, Artificial Sequence
  Synthetic
agauacuaaauuaacacau

SEQ ID NO: 359139 - RNA, 20 nt, Artificial Sequence
  Synthetic
uagauacuaaauuaacacau

SEQ ID NO: 359140 - RNA, 21 nt, Artificial Sequence
  Synthetic
uuagauacuaaauuaacacau

SEQ ID NO: 359141 - RNA, 22 nt, Artificial Sequence
  Synthetic
cuuagauacuaaauuaacacau

SEQ ID NO: 359142 - RNA, 23 nt, Artificial Sequence
  Synthetic
gcuuagauacuaaauuaacacau

SEQ ID NO: 359143 - RNA, 24 nt, Artificial Sequence
  Synthetic
ugcuuagauacuaaauuaacacau

SEQ ID NO: 359144 - RNA, 18 nt, Artificial Sequence
  Synthetic
ggaaagaaacacacacau

SEQ ID NO: 359145 - RNA, 19 nt, Artificial Sequence
  Synthetic
uggaaagaaacacacacau

SEQ ID NO: 359146 - RNA, 20 nt, Artificial Sequence
  Synthetic
guggaaagaaacacacacau

SEQ ID NO: 359147 - RNA, 21 nt, Artificial Sequence
  Synthetic
aguggaaagaaacacacacau

SEQ ID NO: 359148 - RNA, 22 nt, Artificial Sequence
  Synthetic
uaguggaaagaaacacacacau

SEQ ID NO: 359149 - RNA, 23 nt, Artificial Sequence
  Synthetic
auaguggaaagaaacacacacau

SEQ ID NO: 359150 - RNA, 24 nt, Artificial Sequence
  Synthetic
uauaguggaaagaaacacacacau

SEQ ID NO: 359151 - RNA, 18 nt, Artificial Sequence
  Synthetic
cuccccucucucacacau

SEQ ID NO: 359152 - RNA, 19 nt, Artificial Sequence
  Synthetic
ccuccccucucucacacau

SEQ ID NO: 359153 - RNA, 20 nt, Artificial Sequence
  Synthetic
cccuccccucucucacacau

SEQ ID NO: 359154 - RNA, 21 nt, Artificial Sequence
  Synthetic
ucccuccccucucucacacau

SEQ ID NO: 359155 - RNA, 22 nt, Artificial Sequence
  Synthetic
uucccuccccucucucacacau

SEQ ID NO: 359156 - RNA, 23 nt, Artificial Sequence
  Synthetic
cuucccuccccucucucacacau

SEQ ID NO: 359157 - RNA, 24 nt, Artificial Sequence
  Synthetic
ccuucccuccccucucucacacau

SEQ ID NO: 359158 - RNA, 18 nt, Artificial Sequence
  Synthetic
uuugugguugucacacau

SEQ ID NO: 359159 - RNA, 19 nt, Artificial Sequence
  Synthetic
auuugugguugucacacau

SEQ ID NO: 359160 - RNA, 20 nt, Artificial Sequence
  Synthetic
uauuugugguugucacacau

SEQ ID NO: 359161 - RNA, 21 nt, Artificial Sequence
  Synthetic
auauuugugguugucacacau

SEQ ID NO: 359162 - RNA, 22 nt, Artificial Sequence
  Synthetic
gauauuugugguugucacacau

SEQ ID NO: 359163 - RNA, 23 nt, Artificial Sequence
  Synthetic
agauauuugugguugucacacau

SEQ ID NO: 359164 - RNA, 24 nt, Artificial Sequence
  Synthetic
gagauauuugugguugucacacau

SEQ ID NO: 359165 - RNA, 18 nt, Artificial Sequence
  Synthetic
cccaaaagauucacacau

SEQ ID NO: 359166 - RNA, 19 nt, Artificial Sequence
  Synthetic
ucccaaaagauucacacau

SEQ ID NO: 359167 - RNA, 20 nt, Artificial Sequence
  Synthetic
aucccaaaagauucacacau

SEQ ID NO: 359168 - RNA, 21 nt, Artificial Sequence
  Synthetic
gaucccaaaagauucacacau

SEQ ID NO: 359169 - RNA, 22 nt, Artificial Sequence
  Synthetic
ggaucccaaaagauucacacau

SEQ ID NO: 359170 - RNA, 23 nt, Artificial Sequence
  Synthetic
uggaucccaaaagauucacacau

SEQ ID NO: 359171 - RNA, 24 nt, Artificial Sequence
  Synthetic
auggaucccaaaagauucacacau

SEQ ID NO: 359172 - RNA, 18 nt, Artificial Sequence
  Synthetic
uucuaauuaaagacacau

SEQ ID NO: 359173 - RNA, 19 nt, Artificial Sequence
  Synthetic
auucuaauuaaagacacau

SEQ ID NO: 359174 - RNA, 20 nt, Artificial Sequence
  Synthetic
cauucuaauuaaagacacau

SEQ ID NO: 359175 - RNA, 21 nt, Artificial Sequence
  Synthetic
acauucuaauuaaagacacau

SEQ ID NO: 359176 - RNA, 22 nt, Artificial Sequence
  Synthetic
aacauucuaauuaaagacacau

SEQ ID NO: 359177 - RNA, 23 nt, Artificial Sequence
  Synthetic
aaacauucuaauuaaagacacau

SEQ ID NO: 359178 - RNA, 24 nt, Artificial Sequence
  Synthetic
caaacauucuaauuaaagacacau

SEQ ID NO: 359179 - RNA, 18 nt, Artificial Sequence
  Synthetic
gagaaagcauagacacau

SEQ ID NO: 359180 - RNA, 19 nt, Artificial Sequence
  Synthetic
agagaaagcauagacacau

SEQ ID NO: 359181 - RNA, 20 nt, Artificial Sequence
  Synthetic
gagagaaagcauagacacau

SEQ ID NO: 359182 - RNA, 21 nt, Artificial Sequence
  Synthetic
agagagaaagcauagacacau

SEQ ID NO: 359183 - RNA, 22 nt, Artificial Sequence
  Synthetic
cagagagaaagcauagacacau

SEQ ID NO: 359184 - RNA, 23 nt, Artificial Sequence
  Synthetic
gcagagagaaagcauagacacau

SEQ ID NO: 359185 - RNA, 24 nt, Artificial Sequence
  Synthetic
ggcagagagaaagcauagacacau

SEQ ID NO: 359186 - RNA, 18 nt, Artificial Sequence
  Synthetic
ucucucaauuugacacau

SEQ ID NO: 359187 - RNA, 19 nt, Artificial Sequence
  Synthetic
uucucucaauuugacacau

SEQ ID NO: 359188 - RNA, 20 nt, Artificial Sequence
  Synthetic
uuucucucaauuugacacau

SEQ ID NO: 359189 - RNA, 21 nt, Artificial Sequence
  Synthetic
uuuucucucaauuugacacau

SEQ ID NO: 359190 - RNA, 22 nt, Artificial Sequence
  Synthetic
auuuucucucaauuugacacau

SEQ ID NO: 359191 - RNA, 23 nt, Artificial Sequence
  Synthetic
uauuuucucucaauuugacacau

SEQ ID NO: 359192 - RNA, 24 nt, Artificial Sequence
  Synthetic
cuauuuucucucaauuugacacau

SEQ ID NO: 359193 - RNA, 18 nt, Artificial Sequence
  Synthetic
aauauuuuauauacacau

SEQ ID NO: 359194 - RNA, 19 nt, Artificial Sequence
  Synthetic
gaauauuuuauauacacau

SEQ ID NO: 359195 - RNA, 20 nt, Artificial Sequence
  Synthetic
ugaauauuuuauauacacau

SEQ ID NO: 359196 - RNA, 21 nt, Artificial Sequence
  Synthetic
augaauauuuuauauacacau

SEQ ID NO: 359197 - RNA, 22 nt, Artificial Sequence
  Synthetic
uaugaauauuuuauauacacau

SEQ ID NO: 359198 - RNA, 23 nt, Artificial Sequence
  Synthetic
cuaugaauauuuuauauacacau

SEQ ID NO: 359199 - RNA, 24 nt, Artificial Sequence
  Synthetic
ucuaugaauauuuuauauacacau

SEQ ID NO: 359200 - RNA, 18 nt, Artificial Sequence
  Synthetic
gacgggauuuguacacau

SEQ ID NO: 359201 - RNA, 19 nt, Artificial Sequence
  Synthetic
agacgggauuuguacacau

SEQ ID NO: 359202 - RNA, 20 nt, Artificial Sequence
  Synthetic
uagacgggauuuguacacau

SEQ ID NO: 359203 - RNA, 21 nt, Artificial Sequence
  Synthetic
uuagacgggauuuguacacau

SEQ ID NO: 359204 - RNA, 22 nt, Artificial Sequence
  Synthetic
guuagacgggauuuguacacau

SEQ ID NO: 359205 - RNA, 23 nt, Artificial Sequence
  Synthetic
gguuagacgggauuuguacacau

SEQ ID NO: 359206 - RNA, 24 nt, Artificial Sequence
  Synthetic
agguuagacgggauuuguacacau

SEQ ID NO: 359207 - RNA, 18 nt, Artificial Sequence
  Synthetic
auauugcuccuuacacau

SEQ ID NO: 359208 - RNA, 19 nt, Artificial Sequence
  Synthetic
uauauugcuccuuacacau

SEQ ID NO: 359209 - RNA, 20 nt, Artificial Sequence
  Synthetic
cuauauugcuccuuacacau

SEQ ID NO: 359210 - RNA, 21 nt, Artificial Sequence
  Synthetic
gcuauauugcuccuuacacau

SEQ ID NO: 359211 - RNA, 22 nt, Artificial Sequence
  Synthetic
ugcuauauugcuccuuacacau

SEQ ID NO: 359212 - RNA, 23 nt, Artificial Sequence
  Synthetic
cugcuauauugcuccuuacacau

SEQ ID NO: 359213 - RNA, 24 nt, Artificial Sequence
  Synthetic
ucugcuauauugcuccuuacacau

SEQ ID NO: 359214 - RNA, 18 nt, Artificial Sequence
  Synthetic
ucaugcuuaacaccacau

SEQ ID NO: 359215 - RNA, 19 nt, Artificial Sequence
  Synthetic
uucaugcuuaacaccacau

SEQ ID NO: 359216 - RNA, 20 nt, Artificial Sequence
  Synthetic
guucaugcuuaacaccacau

SEQ ID NO: 359217 - RNA, 21 nt, Artificial Sequence
  Synthetic
gguucaugcuuaacaccacau

SEQ ID NO: 359218 - RNA, 22 nt, Artificial Sequence
  Synthetic
agguucaugcuuaacaccacau

SEQ ID NO: 359219 - RNA, 23 nt, Artificial Sequence
  Synthetic
uagguucaugcuuaacaccacau

SEQ ID NO: 359220 - RNA, 24 nt, Artificial Sequence
  Synthetic
uuagguucaugcuuaacaccacau

SEQ ID NO: 359221 - RNA, 18 nt, Artificial Sequence
  Synthetic
ggaaccggggccccacau

SEQ ID NO: 359222 - RNA, 19 nt, Artificial Sequence
  Synthetic
aggaaccggggccccacau

SEQ ID NO: 359223 - RNA, 20 nt, Artificial Sequence
  Synthetic
uaggaaccggggccccacau

SEQ ID NO: 359224 - RNA, 21 nt, Artificial Sequence
  Synthetic
uuaggaaccggggccccacau

SEQ ID NO: 359225 - RNA, 22 nt, Artificial Sequence
  Synthetic
guuaggaaccggggccccacau

SEQ ID NO: 359226 - RNA, 23 nt, Artificial Sequence
  Synthetic
uguuaggaaccggggccccacau

SEQ ID NO: 359227 - RNA, 24 nt, Artificial Sequence
  Synthetic
cuguuaggaaccggggccccacau

SEQ ID NO: 359228 - RNA, 18 nt, Artificial Sequence
  Synthetic
gugaagcaucucccacau

SEQ ID NO: 359229 - RNA, 19 nt, Artificial Sequence
  Synthetic
agugaagcaucucccacau

SEQ ID NO: 359230 - RNA, 20 nt, Artificial Sequence
  Synthetic
uagugaagcaucucccacau

SEQ ID NO: 359231 - RNA, 21 nt, Artificial Sequence
  Synthetic
auagugaagcaucucccacau

SEQ ID NO: 359232 - RNA, 22 nt, Artificial Sequence
  Synthetic
aauagugaagcaucucccacau

SEQ ID NO: 359233 - RNA, 23 nt, Artificial Sequence
  Synthetic
aaauagugaagcaucucccacau

SEQ ID NO: 359234 - RNA, 24 nt, Artificial Sequence
  Synthetic
uaaauagugaagcaucucccacau

SEQ ID NO: 359235 - RNA, 18 nt, Artificial Sequence
  Synthetic
ggcagucagcagccacau

SEQ ID NO: 359236 - RNA, 19 nt, Artificial Sequence
  Synthetic
uggcagucagcagccacau

SEQ ID NO: 359237 - RNA, 20 nt, Artificial Sequence
  Synthetic
uuggcagucagcagccacau

SEQ ID NO: 359238 - RNA, 21 nt, Artificial Sequence
  Synthetic
guuggcagucagcagccacau

SEQ ID NO: 359239 - RNA, 22 nt, Artificial Sequence
  Synthetic
uguuggcagucagcagccacau

SEQ ID NO: 359240 - RNA, 23 nt, Artificial Sequence
  Synthetic
cuguuggcagucagcagccacau

SEQ ID NO: 359241 - RNA, 24 nt, Artificial Sequence
  Synthetic
ucuguuggcagucagcagccacau

SEQ ID NO: 359242 - RNA, 18 nt, Artificial Sequence
  Synthetic
cacuguuuagcuccacau

SEQ ID NO: 359243 - RNA, 19 nt, Artificial Sequence
  Synthetic
gcacuguuuagcuccacau

SEQ ID NO: 359244 - RNA, 20 nt, Artificial Sequence
  Synthetic
cgcacuguuuagcuccacau

SEQ ID NO: 359245 - RNA, 21 nt, Artificial Sequence
  Synthetic
acgcacuguuuagcuccacau

SEQ ID NO: 359246 - RNA, 22 nt, Artificial Sequence
  Synthetic
aacgcacuguuuagcuccacau

SEQ ID NO: 359247 - RNA, 23 nt, Artificial Sequence
  Synthetic
caacgcacuguuuagcuccacau

SEQ ID NO: 359248 - RNA, 24 nt, Artificial Sequence
  Synthetic
acaacgcacuguuuagcuccacau

SEQ ID NO: 359249 - RNA, 18 nt, Artificial Sequence
  Synthetic
cacguuacuaguccacau

SEQ ID NO: 359250 - RNA, 19 nt, Artificial Sequence
  Synthetic
ccacguuacuaguccacau

SEQ ID NO: 359251 - RNA, 20 nt, Artificial Sequence
  Synthetic
gccacguuacuaguccacau

SEQ ID NO: 359252 - RNA, 21 nt, Artificial Sequence
  Synthetic
agccacguuacuaguccacau

SEQ ID NO: 359253 - RNA, 22 nt, Artificial Sequence
  Synthetic
aagccacguuacuaguccacau

SEQ ID NO: 359254 - RNA, 23 nt, Artificial Sequence
  Synthetic
gaagccacguuacuaguccacau

SEQ ID NO: 359255 - RNA, 24 nt, Artificial Sequence
  Synthetic
ggaagccacguuacuaguccacau

SEQ ID NO: 359256 - RNA, 18 nt, Artificial Sequence
  Synthetic
gggcuauggaaagcacau

SEQ ID NO: 359257 - RNA, 19 nt, Artificial Sequence
  Synthetic
ugggcuauggaaagcacau

SEQ ID NO: 359258 - RNA, 20 nt, Artificial Sequence
  Synthetic
cugggcuauggaaagcacau

SEQ ID NO: 359259 - RNA, 21 nt, Artificial Sequence
  Synthetic
gcugggcuauggaaagcacau

SEQ ID NO: 359260 - RNA, 22 nt, Artificial Sequence
  Synthetic
cgcugggcuauggaaagcacau

SEQ ID NO: 359261 - RNA, 23 nt, Artificial Sequence
  Synthetic
ccgcugggcuauggaaagcacau

SEQ ID NO: 359262 - RNA, 24 nt, Artificial Sequence
  Synthetic
accgcugggcuauggaaagcacau

SEQ ID NO: 359263 - RNA, 18 nt, Artificial Sequence
  Synthetic
ccugcaaucccagcacau

SEQ ID NO: 359264 - RNA, 19 nt, Artificial Sequence
  Synthetic
gccugcaaucccagcacau

SEQ ID NO: 359265 - RNA, 20 nt, Artificial Sequence
  Synthetic
ugccugcaaucccagcacau

SEQ ID NO: 359266 - RNA, 21 nt, Artificial Sequence
  Synthetic
augccugcaaucccagcacau

SEQ ID NO: 359267 - RNA, 22 nt, Artificial Sequence
  Synthetic
caugccugcaaucccagcacau

SEQ ID NO: 359268 - RNA, 23 nt, Artificial Sequence
  Synthetic
ucaugccugcaaucccagcacau

SEQ ID NO: 359269 - RNA, 24 nt, Artificial Sequence
  Synthetic
cucaugccugcaaucccagcacau

SEQ ID NO: 359270 - RNA, 18 nt, Artificial Sequence
  Synthetic
uauuuaucuucagcacau

SEQ ID NO: 359271 - RNA, 19 nt, Artificial Sequence
  Synthetic
guauuuaucuucagcacau

SEQ ID NO: 359272 - RNA, 20 nt, Artificial Sequence
  Synthetic
uguauuuaucuucagcacau

SEQ ID NO: 359273 - RNA, 21 nt, Artificial Sequence
  Synthetic
uuguauuuaucuucagcacau

SEQ ID NO: 359274 - RNA, 22 nt, Artificial Sequence
  Synthetic
auuguauuuaucuucagcacau

SEQ ID NO: 359275 - RNA, 23 nt, Artificial Sequence
  Synthetic
aauuguauuuaucuucagcacau

SEQ ID NO: 359276 - RNA, 24 nt, Artificial Sequence
  Synthetic
aaauuguauuuaucuucagcacau

SEQ ID NO: 359277 - RNA, 18 nt, Artificial Sequence
  Synthetic
gugcaauaucuagcacau

SEQ ID NO: 359278 - RNA, 19 nt, Artificial Sequence
  Synthetic
ugugcaauaucuagcacau

SEQ ID NO: 359279 - RNA, 20 nt, Artificial Sequence
  Synthetic
augugcaauaucuagcacau

SEQ ID NO: 359280 - RNA, 21 nt, Artificial Sequence
  Synthetic
caugugcaauaucuagcacau

SEQ ID NO: 359281 - RNA, 22 nt, Artificial Sequence
  Synthetic
ccaugugcaauaucuagcacau

SEQ ID NO: 359282 - RNA, 23 nt, Artificial Sequence
  Synthetic
cccaugugcaauaucuagcacau

SEQ ID NO: 359283 - RNA, 24 nt, Artificial Sequence
  Synthetic
ucccaugugcaauaucuagcacau

SEQ ID NO: 359284 - RNA, 18 nt, Artificial Sequence
  Synthetic
gacaauuuagaugcacau

SEQ ID NO: 359285 - RNA, 19 nt, Artificial Sequence
  Synthetic
ugacaauuuagaugcacau

SEQ ID NO: 359286 - RNA, 20 nt, Artificial Sequence
  Synthetic
augacaauuuagaugcacau

SEQ ID NO: 359287 - RNA, 21 nt, Artificial Sequence
  Synthetic
aaugacaauuuagaugcacau

SEQ ID NO: 359288 - RNA, 22 nt, Artificial Sequence
  Synthetic
aaaugacaauuuagaugcacau

SEQ ID NO: 359289 - RNA, 23 nt, Artificial Sequence
  Synthetic
gaaaugacaauuuagaugcacau

SEQ ID NO: 359290 - RNA, 24 nt, Artificial Sequence
  Synthetic
ggaaaugacaauuuagaugcacau

SEQ ID NO: 359291 - RNA, 18 nt, Artificial Sequence
  Synthetic
gagaaaaugacugcacau

SEQ ID NO: 359292 - RNA, 19 nt, Artificial Sequence
  Synthetic
agagaaaaugacugcacau

SEQ ID NO: 359293 - RNA, 20 nt, Artificial Sequence
  Synthetic
gagagaaaaugacugcacau

SEQ ID NO: 359294 - RNA, 21 nt, Artificial Sequence
  Synthetic
ugagagaaaaugacugcacau

SEQ ID NO: 359295 - RNA, 22 nt, Artificial Sequence
  Synthetic
gugagagaaaaugacugcacau

SEQ ID NO: 359296 - RNA, 23 nt, Artificial Sequence
  Synthetic
ggugagagaaaaugacugcacau

SEQ ID NO: 359297 - RNA, 24 nt, Artificial Sequence
  Synthetic
cggugagagaaaaugacugcacau

SEQ ID NO: 359298 - RNA, 18 nt, Artificial Sequence
  Synthetic
acacaggucucugcacau

SEQ ID NO: 359299 - RNA, 19 nt, Artificial Sequence
  Synthetic
aacacaggucucugcacau

SEQ ID NO: 359300 - RNA, 20 nt, Artificial Sequence
  Synthetic
aaacacaggucucugcacau

SEQ ID NO: 359301 - RNA, 21 nt, Artificial Sequence
  Synthetic
uaaacacaggucucugcacau

SEQ ID NO: 359302 - RNA, 22 nt, Artificial Sequence
  Synthetic
guaaacacaggucucugcacau

SEQ ID NO: 359303 - RNA, 23 nt, Artificial Sequence
  Synthetic
aguaaacacaggucucugcacau

SEQ ID NO: 359304 - RNA, 24 nt, Artificial Sequence
  Synthetic
caguaaacacaggucucugcacau

SEQ ID NO: 359305 - RNA, 18 nt, Artificial Sequence
  Synthetic
uucugaaccagugcacau

SEQ ID NO: 359306 - RNA, 19 nt, Artificial Sequence
  Synthetic
guucugaaccagugcacau

SEQ ID NO: 359307 - RNA, 20 nt, Artificial Sequence
  Synthetic
aguucugaaccagugcacau

SEQ ID NO: 359308 - RNA, 21 nt, Artificial Sequence
  Synthetic
caguucugaaccagugcacau

SEQ ID NO: 359309 - RNA, 22 nt, Artificial Sequence
  Synthetic
gcaguucugaaccagugcacau

SEQ ID NO: 359310 - RNA, 23 nt, Artificial Sequence
  Synthetic
ugcaguucugaaccagugcacau

SEQ ID NO: 359311 - RNA, 24 nt, Artificial Sequence
  Synthetic
cugcaguucugaaccagugcacau

SEQ ID NO: 359312 - RNA, 18 nt, Artificial Sequence
  Synthetic
ggaagggggaaaucacau

SEQ ID NO: 359313 - RNA, 19 nt, Artificial Sequence
  Synthetic
aggaagggggaaaucacau

SEQ ID NO: 359314 - RNA, 20 nt, Artificial Sequence
  Synthetic
uaggaagggggaaaucacau

SEQ ID NO: 359315 - RNA, 21 nt, Artificial Sequence
  Synthetic
auaggaagggggaaaucacau

SEQ ID NO: 359316 - RNA, 22 nt, Artificial Sequence
  Synthetic
aauaggaagggggaaaucacau

SEQ ID NO: 359317 - RNA, 23 nt, Artificial Sequence
  Synthetic
caauaggaagggggaaaucacau

SEQ ID NO: 359318 - RNA, 24 nt, Artificial Sequence
  Synthetic
gcaauaggaagggggaaaucacau

SEQ ID NO: 359319 - RNA, 18 nt, Artificial Sequence
  Synthetic
uuuuuuuggaaaucacau

SEQ ID NO: 359320 - RNA, 19 nt, Artificial Sequence
  Synthetic
uuuuuuuuggaaaucacau

SEQ ID NO: 359321 - RNA, 20 nt, Artificial Sequence
  Synthetic
uuuuuuuuuggaaaucacau

SEQ ID NO: 359322 - RNA, 21 nt, Artificial Sequence
  Synthetic
uuuuuuuuuuggaaaucacau

SEQ ID NO: 359323 - RNA, 22 nt, Artificial Sequence
  Synthetic
uuuuuuuuuuuggaaaucacau

SEQ ID NO: 359324 - RNA, 23 nt, Artificial Sequence
  Synthetic
uuuuuuuuuuuuggaaaucacau

SEQ ID NO: 359325 - RNA, 24 nt, Artificial Sequence
  Synthetic
uuuuuuuuuuuuuggaaaucacau

SEQ ID NO: 359326 - RNA, 18 nt, Artificial Sequence
  Synthetic
uuaaaaacuaaaucacau

SEQ ID NO: 359327 - RNA, 19 nt, Artificial Sequence
  Synthetic
guuaaaaacuaaaucacau

SEQ ID NO: 359328 - RNA, 20 nt, Artificial Sequence
  Synthetic
gguuaaaaacuaaaucacau

SEQ ID NO: 359329 - RNA, 21 nt, Artificial Sequence
  Synthetic
ugguuaaaaacuaaaucacau

SEQ ID NO: 359330 - RNA, 22 nt, Artificial Sequence
  Synthetic
uugguuaaaaacuaaaucacau

SEQ ID NO: 359331 - RNA, 23 nt, Artificial Sequence
  Synthetic
auugguuaaaaacuaaaucacau

SEQ ID NO: 359332 - RNA, 24 nt, Artificial Sequence
  Synthetic
cauugguuaaaaacuaaaucacau

SEQ ID NO: 359333 - RNA, 18 nt, Artificial Sequence
  Synthetic
gucaacacuuaaucacau

SEQ ID NO: 359334 - RNA, 19 nt, Artificial Sequence
  Synthetic
agucaacacuuaaucacau

SEQ ID NO: 359335 - RNA, 20 nt, Artificial Sequence
  Synthetic
aagucaacacuuaaucacau

SEQ ID NO: 359336 - RNA, 21 nt, Artificial Sequence
  Synthetic
aaagucaacacuuaaucacau

SEQ ID NO: 359337 - RNA, 22 nt, Artificial Sequence
  Synthetic
uaaagucaacacuuaaucacau

SEQ ID NO: 359338 - RNA, 23 nt, Artificial Sequence
  Synthetic
auaaagucaacacuuaaucacau

SEQ ID NO: 359339 - RNA, 24 nt, Artificial Sequence
  Synthetic
uauaaagucaacacuuaaucacau

SEQ ID NO: 359340 - RNA, 18 nt, Artificial Sequence
  Synthetic
acucacucacuaucacau

SEQ ID NO: 359341 - RNA, 19 nt, Artificial Sequence
  Synthetic
aacucacucacuaucacau

SEQ ID NO: 359342 - RNA, 20 nt, Artificial Sequence
  Synthetic
gaacucacucacuaucacau

SEQ ID NO: 359343 - RNA, 21 nt, Artificial Sequence
  Synthetic
agaacucacucacuaucacau

SEQ ID NO: 359344 - RNA, 22 nt, Artificial Sequence
  Synthetic
gagaacucacucacuaucacau

SEQ ID NO: 359345 - RNA, 23 nt, Artificial Sequence
  Synthetic
ugagaacucacucacuaucacau

SEQ ID NO: 359346 - RNA, 24 nt, Artificial Sequence
  Synthetic
augagaacucacucacuaucacau

SEQ ID NO: 359347 - RNA, 18 nt, Artificial Sequence
  Synthetic
gucuguguuuuaucacau

SEQ ID NO: 359348 - RNA, 19 nt, Artificial Sequence
  Synthetic
ugucuguguuuuaucacau

SEQ ID NO: 359349 - RNA, 20 nt, Artificial Sequence
  Synthetic
cugucuguguuuuaucacau

SEQ ID NO: 359350 - RNA, 21 nt, Artificial Sequence
  Synthetic
gcugucuguguuuuaucacau

SEQ ID NO: 359351 - RNA, 22 nt, Artificial Sequence
  Synthetic
ugcugucuguguuuuaucacau

SEQ ID NO: 359352 - RNA, 23 nt, Artificial Sequence
  Synthetic
augcugucuguguuuuaucacau

SEQ ID NO: 359353 - RNA, 24 nt, Artificial Sequence
  Synthetic
aaugcugucuguguuuuaucacau

SEQ ID NO: 359354 - RNA, 18 nt, Artificial Sequence
  Synthetic
uauuuucauaucucacau

SEQ ID NO: 359355 - RNA, 19 nt, Artificial Sequence
  Synthetic
uuauuuucauaucucacau

SEQ ID NO: 359356 - RNA, 20 nt, Artificial Sequence
  Synthetic
uuuauuuucauaucucacau

SEQ ID NO: 359357 - RNA, 21 nt, Artificial Sequence
  Synthetic
cuuuauuuucauaucucacau

SEQ ID NO: 359358 - RNA, 22 nt, Artificial Sequence
  Synthetic
ucuuuauuuucauaucucacau

SEQ ID NO: 359359 - RNA, 23 nt, Artificial Sequence
  Synthetic
gucuuuauuuucauaucucacau

SEQ ID NO: 359360 - RNA, 24 nt, Artificial Sequence
  Synthetic
agucuuuauuuucauaucucacau

SEQ ID NO: 359361 - RNA, 18 nt, Artificial Sequence
  Synthetic
gaaaguguuuucucacau

SEQ ID NO: 359362 - RNA, 19 nt, Artificial Sequence
  Synthetic
agaaaguguuuucucacau

SEQ ID NO: 359363 - RNA, 20 nt, Artificial Sequence
  Synthetic
uagaaaguguuuucucacau

SEQ ID NO: 359364 - RNA, 21 nt, Artificial Sequence
  Synthetic
uuagaaaguguuuucucacau

SEQ ID NO: 359365 - RNA, 22 nt, Artificial Sequence
  Synthetic
uuuagaaaguguuuucucacau

SEQ ID NO: 359366 - RNA, 23 nt, Artificial Sequence
  Synthetic
guuuagaaaguguuuucucacau

SEQ ID NO: 359367 - RNA, 24 nt, Artificial Sequence
  Synthetic
uguuuagaaaguguuuucucacau

SEQ ID NO: 359368 - RNA, 18 nt, Artificial Sequence
  Synthetic
uuuuguauuacgucacau

SEQ ID NO: 359369 - RNA, 19 nt, Artificial Sequence
  Synthetic
auuuuguauuacgucacau

SEQ ID NO: 359370 - RNA, 20 nt, Artificial Sequence
  Synthetic
uauuuuguauuacgucacau

SEQ ID NO: 359371 - RNA, 21 nt, Artificial Sequence
  Synthetic
guauuuuguauuacgucacau

SEQ ID NO: 359372 - RNA, 22 nt, Artificial Sequence
  Synthetic
uguauuuuguauuacgucacau

SEQ ID NO: 359373 - RNA, 23 nt, Artificial Sequence
  Synthetic
guguauuuuguauuacgucacau

SEQ ID NO: 359374 - RNA, 24 nt, Artificial Sequence
  Synthetic
uguguauuuuguauuacgucacau

SEQ ID NO: 359375 - RNA, 18 nt, Artificial Sequence
  Synthetic
cauaagcagaggucacau

SEQ ID NO: 359376 - RNA, 19 nt, Artificial Sequence
  Synthetic
ccauaagcagaggucacau

SEQ ID NO: 359377 - RNA, 20 nt, Artificial Sequence
  Synthetic
cccauaagcagaggucacau

SEQ ID NO: 359378 - RNA, 21 nt, Artificial Sequence
  Synthetic
ucccauaagcagaggucacau

SEQ ID NO: 359379 - RNA, 22 nt, Artificial Sequence
  Synthetic
cucccauaagcagaggucacau

SEQ ID NO: 359380 - RNA, 23 nt, Artificial Sequence
  Synthetic
gcucccauaagcagaggucacau

SEQ ID NO: 359381 - RNA, 24 nt, Artificial Sequence
  Synthetic
ggcucccauaagcagaggucacau

SEQ ID NO: 359382 - RNA, 18 nt, Artificial Sequence
  Synthetic
aauucuugguugucacau

SEQ ID NO: 359383 - RNA, 19 nt, Artificial Sequence
  Synthetic
aaauucuugguugucacau

SEQ ID NO: 359384 - RNA, 20 nt, Artificial Sequence
  Synthetic
gaaauucuugguugucacau

SEQ ID NO: 359385 - RNA, 21 nt, Artificial Sequence
  Synthetic
agaaauucuugguugucacau

SEQ ID NO: 359386 - RNA, 22 nt, Artificial Sequence
  Synthetic
aagaaauucuugguugucacau

SEQ ID NO: 359387 - RNA, 23 nt, Artificial Sequence
  Synthetic
caagaaauucuugguugucacau

SEQ ID NO: 359388 - RNA, 24 nt, Artificial Sequence
  Synthetic
ucaagaaauucuugguugucacau

SEQ ID NO: 359389 - RNA, 18 nt, Artificial Sequence
  Synthetic
gaauuuauuuugucacau

SEQ ID NO: 359390 - RNA, 19 nt, Artificial Sequence
  Synthetic
ugaauuuauuuugucacau

SEQ ID NO: 359391 - RNA, 20 nt, Artificial Sequence
  Synthetic
uugaauuuauuuugucacau

SEQ ID NO: 359392 - RNA, 21 nt, Artificial Sequence
  Synthetic
cuugaauuuauuuugucacau

SEQ ID NO: 359393 - RNA, 22 nt, Artificial Sequence
  Synthetic
ucuugaauuuauuuugucacau

SEQ ID NO: 359394 - RNA, 23 nt, Artificial Sequence
  Synthetic
uucuugaauuuauuuugucacau

SEQ ID NO: 359395 - RNA, 24 nt, Artificial Sequence
  Synthetic
auucuugaauuuauuuugucacau

SEQ ID NO: 359396 - RNA, 18 nt, Artificial Sequence
  Synthetic
caauuuagucauucacau

SEQ ID NO: 359397 - RNA, 19 nt, Artificial Sequence
  Synthetic
acaauuuagucauucacau

SEQ ID NO: 359398 - RNA, 20 nt, Artificial Sequence
  Synthetic
uacaauuuagucauucacau

SEQ ID NO: 359399 - RNA, 21 nt, Artificial Sequence
  Synthetic
auacaauuuagucauucacau

SEQ ID NO: 359400 - RNA, 22 nt, Artificial Sequence
  Synthetic
uauacaauuuagucauucacau

SEQ ID NO: 359401 - RNA, 23 nt, Artificial Sequence
  Synthetic
auauacaauuuagucauucacau

SEQ ID NO: 359402 - RNA, 24 nt, Artificial Sequence
  Synthetic
cauauacaauuuagucauucacau

SEQ ID NO: 359403 - RNA, 18 nt, Artificial Sequence
  Synthetic
uugucuguauauucacau

SEQ ID NO: 359404 - RNA, 19 nt, Artificial Sequence
  Synthetic
auugucuguauauucacau

SEQ ID NO: 359405 - RNA, 20 nt, Artificial Sequence
  Synthetic
gauugucuguauauucacau

SEQ ID NO: 359406 - RNA, 21 nt, Artificial Sequence
  Synthetic
ggauugucuguauauucacau

SEQ ID NO: 359407 - RNA, 22 nt, Artificial Sequence
  Synthetic
aggauugucuguauauucacau

SEQ ID NO: 359408 - RNA, 23 nt, Artificial Sequence
  Synthetic
aaggauugucuguauauucacau

SEQ ID NO: 359409 - RNA, 24 nt, Artificial Sequence
  Synthetic
aaaggauugucuguauauucacau

SEQ ID NO: 359410 - RNA, 18 nt, Artificial Sequence
  Synthetic
gagaaaaaagguucacau

SEQ ID NO: 359411 - RNA, 19 nt, Artificial Sequence
  Synthetic
agagaaaaaagguucacau

SEQ ID NO: 359412 - RNA, 20 nt, Artificial Sequence
  Synthetic
aagagaaaaaagguucacau

SEQ ID NO: 359413 - RNA, 21 nt, Artificial Sequence
  Synthetic
uaagagaaaaaagguucacau

SEQ ID NO: 359414 - RNA, 22 nt, Artificial Sequence
  Synthetic
auaagagaaaaaagguucacau

SEQ ID NO: 359415 - RNA, 23 nt, Artificial Sequence
  Synthetic
gauaagagaaaaaagguucacau

SEQ ID NO: 359416 - RNA, 24 nt, Artificial Sequence
  Synthetic
agauaagagaaaaaagguucacau

SEQ ID NO: 359417 - RNA, 18 nt, Artificial Sequence
  Synthetic
agugugcauauuucacau

SEQ ID NO: 359418 - RNA, 19 nt, Artificial Sequence
  Synthetic
aagugugcauauuucacau

SEQ ID NO: 359419 - RNA, 20 nt, Artificial Sequence
  Synthetic
gaagugugcauauuucacau

SEQ ID NO: 359420 - RNA, 21 nt, Artificial Sequence
  Synthetic
ggaagugugcauauuucacau

SEQ ID NO: 359421 - RNA, 22 nt, Artificial Sequence
  Synthetic
aggaagugugcauauuucacau

SEQ ID NO: 359422 - RNA, 23 nt, Artificial Sequence
  Synthetic
caggaagugugcauauuucacau

SEQ ID NO: 359423 - RNA, 24 nt, Artificial Sequence
  Synthetic
acaggaagugugcauauuucacau

SEQ ID NO: 359424 - RNA, 18 nt, Artificial Sequence
  Synthetic
gccaaguuucuuucacau

SEQ ID NO: 359425 - RNA, 19 nt, Artificial Sequence
  Synthetic
ugccaaguuucuuucacau

SEQ ID NO: 359426 - RNA, 20 nt, Artificial Sequence
  Synthetic
cugccaaguuucuuucacau

SEQ ID NO: 359427 - RNA, 21 nt, Artificial Sequence
  Synthetic
ccugccaaguuucuuucacau

SEQ ID NO: 359428 - RNA, 22 nt, Artificial Sequence
  Synthetic
cccugccaaguuucuuucacau

SEQ ID NO: 359429 - RNA, 23 nt, Artificial Sequence
  Synthetic
acccugccaaguuucuuucacau

SEQ ID NO: 359430 - RNA, 24 nt, Artificial Sequence
  Synthetic
gacccugccaaguuucuuucacau

SEQ ID NO: 359431 - RNA, 18 nt, Artificial Sequence
  Synthetic
gacggagauugaagacau

SEQ ID NO: 359432 - RNA, 19 nt, Artificial Sequence
  Synthetic
agacggagauugaagacau

SEQ ID NO: 359433 - RNA, 20 nt, Artificial Sequence
  Synthetic
uagacggagauugaagacau

SEQ ID NO: 359434 - RNA, 21 nt, Artificial Sequence
  Synthetic
guagacggagauugaagacau

SEQ ID NO: 359435 - RNA, 22 nt, Artificial Sequence
  Synthetic
uguagacggagauugaagacau

SEQ ID NO: 359436 - RNA, 23 nt, Artificial Sequence
  Synthetic
uuguagacggagauugaagacau

SEQ ID NO: 359437 - RNA, 24 nt, Artificial Sequence
  Synthetic
guuguagacggagauugaagacau

SEQ ID NO: 359438 - RNA, 18 nt, Artificial Sequence
  Synthetic
gcugagaaauuaagacau

SEQ ID NO: 359439 - RNA, 19 nt, Artificial Sequence
  Synthetic
agcugagaaauuaagacau

SEQ ID NO: 359440 - RNA, 20 nt, Artificial Sequence
  Synthetic
cagcugagaaauuaagacau

SEQ ID NO: 359441 - RNA, 21 nt, Artificial Sequence
  Synthetic
acagcugagaaauuaagacau

SEQ ID NO: 359442 - RNA, 22 nt, Artificial Sequence
  Synthetic
uacagcugagaaauuaagacau

SEQ ID NO: 359443 - RNA, 23 nt, Artificial Sequence
  Synthetic
uuacagcugagaaauuaagacau

SEQ ID NO: 359444 - RNA, 24 nt, Artificial Sequence
  Synthetic
uuuacagcugagaaauuaagacau

SEQ ID NO: 359445 - RNA, 18 nt, Artificial Sequence
  Synthetic
caaauguuaagcagacau

SEQ ID NO: 359446 - RNA, 19 nt, Artificial Sequence
  Synthetic
acaaauguuaagcagacau

SEQ ID NO: 359447 - RNA, 20 nt, Artificial Sequence
  Synthetic
aacaaauguuaagcagacau

SEQ ID NO: 359448 - RNA, 21 nt, Artificial Sequence
  Synthetic
caacaaauguuaagcagacau

SEQ ID NO: 359449 - RNA, 22 nt, Artificial Sequence
  Synthetic
ucaacaaauguuaagcagacau

SEQ ID NO: 359450 - RNA, 23 nt, Artificial Sequence
  Synthetic
aucaacaaauguuaagcagacau

SEQ ID NO: 359451 - RNA, 24 nt, Artificial Sequence
  Synthetic
aaucaacaaauguuaagcagacau

SEQ ID NO: 359452 - RNA, 18 nt, Artificial Sequence
  Synthetic
aggcuguagagcagacau

SEQ ID NO: 359453 - RNA, 19 nt, Artificial Sequence
  Synthetic
uaggcuguagagcagacau

SEQ ID NO: 359454 - RNA, 20 nt, Artificial Sequence
  Synthetic
auaggcuguagagcagacau

SEQ ID NO: 359455 - RNA, 21 nt, Artificial Sequence
  Synthetic
gauaggcuguagagcagacau

SEQ ID NO: 359456 - RNA, 22 nt, Artificial Sequence
  Synthetic
agauaggcuguagagcagacau

SEQ ID NO: 359457 - RNA, 23 nt, Artificial Sequence
  Synthetic
uagauaggcuguagagcagacau

SEQ ID NO: 359458 - RNA, 24 nt, Artificial Sequence
  Synthetic
auagauaggcuguagagcagacau

SEQ ID NO: 359459 - RNA, 18 nt, Artificial Sequence
  Synthetic
ucagguuucaucagacau

SEQ ID NO: 359460 - RNA, 19 nt, Artificial Sequence
  Synthetic
gucagguuucaucagacau

SEQ ID NO: 359461 - RNA, 20 nt, Artificial Sequence
  Synthetic
ggucagguuucaucagacau

SEQ ID NO: 359462 - RNA, 21 nt, Artificial Sequence
  Synthetic
cggucagguuucaucagacau

SEQ ID NO: 359463 - RNA, 22 nt, Artificial Sequence
  Synthetic
ucggucagguuucaucagacau

SEQ ID NO: 359464 - RNA, 23 nt, Artificial Sequence
  Synthetic
gucggucagguuucaucagacau

SEQ ID NO: 359465 - RNA, 24 nt, Artificial Sequence
  Synthetic
ggucggucagguuucaucagacau

SEQ ID NO: 359466 - RNA, 18 nt, Artificial Sequence
  Synthetic
gucaauucaaagagacau

SEQ ID NO: 359467 - RNA, 19 nt, Artificial Sequence
  Synthetic
agucaauucaaagagacau

SEQ ID NO: 359468 - RNA, 20 nt, Artificial Sequence
  Synthetic
aagucaauucaaagagacau

SEQ ID NO: 359469 - RNA, 21 nt, Artificial Sequence
  Synthetic
caagucaauucaaagagacau

SEQ ID NO: 359470 - RNA, 22 nt, Artificial Sequence
  Synthetic
ccaagucaauucaaagagacau

SEQ ID NO: 359471 - RNA, 23 nt, Artificial Sequence
  Synthetic
gccaagucaauucaaagagacau

SEQ ID NO: 359472 - RNA, 24 nt, Artificial Sequence
  Synthetic
agccaagucaauucaaagagacau

SEQ ID NO: 359473 - RNA, 18 nt, Artificial Sequence
  Synthetic
uauucuaauaagagacau

SEQ ID NO: 359474 - RNA, 19 nt, Artificial Sequence
  Synthetic
auauucuaauaagagacau

SEQ ID NO: 359475 - RNA, 20 nt, Artificial Sequence
  Synthetic
aauauucuaauaagagacau

SEQ ID NO: 359476 - RNA, 21 nt, Artificial Sequence
  Synthetic
aaauauucuaauaagagacau

SEQ ID NO: 359477 - RNA, 22 nt, Artificial Sequence
  Synthetic
aaaauauucuaauaagagacau

SEQ ID NO: 359478 - RNA, 23 nt, Artificial Sequence
  Synthetic
caaaauauucuaauaagagacau

SEQ ID NO: 359479 - RNA, 24 nt, Artificial Sequence
  Synthetic
ucaaaauauucuaauaagagacau

SEQ ID NO: 359480 - RNA, 18 nt, Artificial Sequence
  Synthetic
cacuuugggcagagacau

SEQ ID NO: 359481 - RNA, 19 nt, Artificial Sequence
  Synthetic
ucacuuugggcagagacau

SEQ ID NO: 359482 - RNA, 20 nt, Artificial Sequence
  Synthetic
cucacuuugggcagagacau

SEQ ID NO: 359483 - RNA, 21 nt, Artificial Sequence
  Synthetic
ccucacuuugggcagagacau

SEQ ID NO: 359484 - RNA, 22 nt, Artificial Sequence
  Synthetic
cccucacuuugggcagagacau

SEQ ID NO: 359485 - RNA, 23 nt, Artificial Sequence
  Synthetic
ucccucacuuugggcagagacau

SEQ ID NO: 359486 - RNA, 24 nt, Artificial Sequence
  Synthetic
gucccucacuuugggcagagacau

SEQ ID NO: 359487 - RNA, 18 nt, Artificial Sequence
  Synthetic
ugaaggagauagagacau

SEQ ID NO: 359488 - RNA, 19 nt, Artificial Sequence
  Synthetic
cugaaggagauagagacau

SEQ ID NO: 359489 - RNA, 20 nt, Artificial Sequence
  Synthetic
acugaaggagauagagacau

SEQ ID NO: 359490 - RNA, 21 nt, Artificial Sequence
  Synthetic
aacugaaggagauagagacau

SEQ ID NO: 359491 - RNA, 22 nt, Artificial Sequence
  Synthetic
gaacugaaggagauagagacau

SEQ ID NO: 359492 - RNA, 23 nt, Artificial Sequence
  Synthetic
agaacugaaggagauagagacau

SEQ ID NO: 359493 - RNA, 24 nt, Artificial Sequence
  Synthetic
cagaacugaaggagauagagacau

SEQ ID NO: 359494 - RNA, 18 nt, Artificial Sequence
  Synthetic
ucauagcauuagagacau

SEQ ID NO: 359495 - RNA, 19 nt, Artificial Sequence
  Synthetic
cucauagcauuagagacau

SEQ ID NO: 359496 - RNA, 20 nt, Artificial Sequence
  Synthetic
ccucauagcauuagagacau

SEQ ID NO: 359497 - RNA, 21 nt, Artificial Sequence
  Synthetic
cccucauagcauuagagacau

SEQ ID NO: 359498 - RNA, 22 nt, Artificial Sequence
  Synthetic
acccucauagcauuagagacau

SEQ ID NO: 359499 - RNA, 23 nt, Artificial Sequence
  Synthetic
uacccucauagcauuagagacau

SEQ ID NO: 359500 - RNA, 24 nt, Artificial Sequence
  Synthetic
cuacccucauagcauuagagacau

SEQ ID NO: 359501 - RNA, 18 nt, Artificial Sequence
  Synthetic
gagaaggaaaggagacau

SEQ ID NO: 359502 - RNA, 19 nt, Artificial Sequence
  Synthetic
agagaaggaaaggagacau

SEQ ID NO: 359503 - RNA, 20 nt, Artificial Sequence
  Synthetic
gagagaaggaaaggagacau

SEQ ID NO: 359504 - RNA, 21 nt, Artificial Sequence
  Synthetic
ugagagaaggaaaggagacau

SEQ ID NO: 359505 - RNA, 22 nt, Artificial Sequence
  Synthetic
uugagagaaggaaaggagacau

SEQ ID NO: 359506 - RNA, 23 nt, Artificial Sequence
  Synthetic
uuugagagaaggaaaggagacau

SEQ ID NO: 359507 - RNA, 24 nt, Artificial Sequence
  Synthetic
cuuugagagaaggaaaggagacau

SEQ ID NO: 359508 - RNA, 18 nt, Artificial Sequence
  Synthetic
gcacacaaagggagacau

SEQ ID NO: 359509 - RNA, 19 nt, Artificial Sequence
  Synthetic
ugcacacaaagggagacau

SEQ ID NO: 359510 - RNA, 20 nt, Artificial Sequence
  Synthetic
uugcacacaaagggagacau

SEQ ID NO: 359511 - RNA, 21 nt, Artificial Sequence
  Synthetic
auugcacacaaagggagacau

SEQ ID NO: 359512 - RNA, 22 nt, Artificial Sequence
  Synthetic
gauugcacacaaagggagacau

SEQ ID NO: 359513 - RNA, 23 nt, Artificial Sequence
  Synthetic
ggauugcacacaaagggagacau

SEQ ID NO: 359514 - RNA, 24 nt, Artificial Sequence
  Synthetic
gggauugcacacaaagggagacau

SEQ ID NO: 359515 - RNA, 18 nt, Artificial Sequence
  Synthetic
accugcagguggagacau

SEQ ID NO: 359516 - RNA, 19 nt, Artificial Sequence
  Synthetic
caccugcagguggagacau

SEQ ID NO: 359517 - RNA, 20 nt, Artificial Sequence
  Synthetic
ccaccugcagguggagacau

SEQ ID NO: 359518 - RNA, 21 nt, Artificial Sequence
  Synthetic
accaccugcagguggagacau

SEQ ID NO: 359519 - RNA, 22 nt, Artificial Sequence
  Synthetic
caccaccugcagguggagacau

SEQ ID NO: 359520 - RNA, 23 nt, Artificial Sequence
  Synthetic
ccaccaccugcagguggagacau

SEQ ID NO: 359521 - RNA, 24 nt, Artificial Sequence
  Synthetic
gccaccaccugcagguggagacau

SEQ ID NO: 359522 - RNA, 18 nt, Artificial Sequence
  Synthetic
agauuauguuggagacau

SEQ ID NO: 359523 - RNA, 19 nt, Artificial Sequence
  Synthetic
gagauuauguuggagacau

SEQ ID NO: 359524 - RNA, 20 nt, Artificial Sequence
  Synthetic
agagauuauguuggagacau

SEQ ID NO: 359525 - RNA, 21 nt, Artificial Sequence
  Synthetic
aagagauuauguuggagacau

SEQ ID NO: 359526 - RNA, 22 nt, Artificial Sequence
  Synthetic
uaagagauuauguuggagacau

SEQ ID NO: 359527 - RNA, 23 nt, Artificial Sequence
  Synthetic
uuaagagauuauguuggagacau

SEQ ID NO: 359528 - RNA, 24 nt, Artificial Sequence
  Synthetic
uuuaagagauuauguuggagacau

SEQ ID NO: 359529 - RNA, 18 nt, Artificial Sequence
  Synthetic
auaaaauaauugagacau

SEQ ID NO: 359530 - RNA, 19 nt, Artificial Sequence
  Synthetic
aauaaaauaauugagacau

SEQ ID NO: 359531 - RNA, 20 nt, Artificial Sequence
  Synthetic
gaauaaaauaauugagacau

SEQ ID NO: 359532 - RNA, 21 nt, Artificial Sequence
  Synthetic
cgaauaaaauaauugagacau

SEQ ID NO: 359533 - RNA, 22 nt, Artificial Sequence
  Synthetic
ccgaauaaaauaauugagacau

SEQ ID NO: 359534 - RNA, 23 nt, Artificial Sequence
  Synthetic
uccgaauaaaauaauugagacau

SEQ ID NO: 359535 - RNA, 24 nt, Artificial Sequence
  Synthetic
uuccgaauaaaauaauugagacau

SEQ ID NO: 359536 - RNA, 18 nt, Artificial Sequence
  Synthetic
ggugaaaacaauagacau

SEQ ID NO: 359537 - RNA, 19 nt, Artificial Sequence
  Synthetic
aggugaaaacaauagacau

SEQ ID NO: 359538 - RNA, 20 nt, Artificial Sequence
  Synthetic
aaggugaaaacaauagacau

SEQ ID NO: 359539 - RNA, 21 nt, Artificial Sequence
  Synthetic
aaaggugaaaacaauagacau

SEQ ID NO: 359540 - RNA, 22 nt, Artificial Sequence
  Synthetic
uaaaggugaaaacaauagacau

SEQ ID NO: 359541 - RNA, 23 nt, Artificial Sequence
  Synthetic
auaaaggugaaaacaauagacau

SEQ ID NO: 359542 - RNA, 24 nt, Artificial Sequence
  Synthetic
uauaaaggugaaaacaauagacau

SEQ ID NO: 359543 - RNA, 18 nt, Artificial Sequence
  Synthetic
gucuccucagauagacau

SEQ ID NO: 359544 - RNA, 19 nt, Artificial Sequence
  Synthetic
ggucuccucagauagacau

SEQ ID NO: 359545 - RNA, 20 nt, Artificial Sequence
  Synthetic
aggucuccucagauagacau

SEQ ID NO: 359546 - RNA, 21 nt, Artificial Sequence
  Synthetic
uaggucuccucagauagacau

SEQ ID NO: 359547 - RNA, 22 nt, Artificial Sequence
  Synthetic
guaggucuccucagauagacau

SEQ ID NO: 359548 - RNA, 23 nt, Artificial Sequence
  Synthetic
uguaggucuccucagauagacau

SEQ ID NO: 359549 - RNA, 24 nt, Artificial Sequence
  Synthetic
cuguaggucuccucagauagacau

SEQ ID NO: 359550 - RNA, 18 nt, Artificial Sequence
  Synthetic
ugaaacugagcuagacau

SEQ ID NO: 359551 - RNA, 19 nt, Artificial Sequence
  Synthetic
uugaaacugagcuagacau

SEQ ID NO: 359552 - RNA, 20 nt, Artificial Sequence
  Synthetic
uuugaaacugagcuagacau

SEQ ID NO: 359553 - RNA, 21 nt, Artificial Sequence
  Synthetic
uuuugaaacugagcuagacau

SEQ ID NO: 359554 - RNA, 22 nt, Artificial Sequence
  Synthetic
auuuugaaacugagcuagacau

SEQ ID NO: 359555 - RNA, 23 nt, Artificial Sequence
  Synthetic
aauuuugaaacugagcuagacau

SEQ ID NO: 359556 - RNA, 24 nt, Artificial Sequence
  Synthetic
aaauuuugaaacugagcuagacau

SEQ ID NO: 359557 - RNA, 18 nt, Artificial Sequence
  Synthetic
uaagcaucuuuuagacau

SEQ ID NO: 359558 - RNA, 19 nt, Artificial Sequence
  Synthetic
auaagcaucuuuuagacau

SEQ ID NO: 359559 - RNA, 20 nt, Artificial Sequence
  Synthetic
gauaagcaucuuuuagacau

SEQ ID NO: 359560 - RNA, 21 nt, Artificial Sequence
  Synthetic
ugauaagcaucuuuuagacau

SEQ ID NO: 359561 - RNA, 22 nt, Artificial Sequence
  Synthetic
gugauaagcaucuuuuagacau

SEQ ID NO: 359562 - RNA, 23 nt, Artificial Sequence
  Synthetic
agugauaagcaucuuuuagacau

SEQ ID NO: 359563 - RNA, 24 nt, Artificial Sequence
  Synthetic
uagugauaagcaucuuuuagacau

SEQ ID NO: 359564 - RNA, 18 nt, Artificial Sequence
  Synthetic
gaguaggccauaggacau

SEQ ID NO: 359565 - RNA, 19 nt, Artificial Sequence
  Synthetic
agaguaggccauaggacau

SEQ ID NO: 359566 - RNA, 20 nt, Artificial Sequence
  Synthetic
gagaguaggccauaggacau

SEQ ID NO: 359567 - RNA, 21 nt, Artificial Sequence
  Synthetic
ugagaguaggccauaggacau

SEQ ID NO: 359568 - RNA, 22 nt, Artificial Sequence
  Synthetic
augagaguaggccauaggacau

SEQ ID NO: 359569 - RNA, 23 nt, Artificial Sequence
  Synthetic
caugagaguaggccauaggacau

SEQ ID NO: 359570 - RNA, 24 nt, Artificial Sequence
  Synthetic
ccaugagaguaggccauaggacau

SEQ ID NO: 359571 - RNA, 18 nt, Artificial Sequence
  Synthetic
ugaccagagauaggacau

SEQ ID NO: 359572 - RNA, 19 nt, Artificial Sequence
  Synthetic
augaccagagauaggacau

SEQ ID NO: 359573 - RNA, 20 nt, Artificial Sequence
  Synthetic
caugaccagagauaggacau

SEQ ID NO: 359574 - RNA, 21 nt, Artificial Sequence
  Synthetic
gcaugaccagagauaggacau

SEQ ID NO: 359575 - RNA, 22 nt, Artificial Sequence
  Synthetic
agcaugaccagagauaggacau

SEQ ID NO: 359576 - RNA, 23 nt, Artificial Sequence
  Synthetic
cagcaugaccagagauaggacau

SEQ ID NO: 359577 - RNA, 24 nt, Artificial Sequence
  Synthetic
gcagcaugaccagagauaggacau

SEQ ID NO: 359578 - RNA, 18 nt, Artificial Sequence
  Synthetic
ccuauauucaggggacau

SEQ ID NO: 359579 - RNA, 19 nt, Artificial Sequence
  Synthetic
accuauauucaggggacau

SEQ ID NO: 359580 - RNA, 20 nt, Artificial Sequence
  Synthetic
caccuauauucaggggacau

SEQ ID NO: 359581 - RNA, 21 nt, Artificial Sequence
  Synthetic
ucaccuauauucaggggacau

SEQ ID NO: 359582 - RNA, 22 nt, Artificial Sequence
  Synthetic
cucaccuauauucaggggacau

SEQ ID NO: 359583 - RNA, 23 nt, Artificial Sequence
  Synthetic
acucaccuauauucaggggacau

SEQ ID NO: 359584 - RNA, 24 nt, Artificial Sequence
  Synthetic
aacucaccuauauucaggggacau

SEQ ID NO: 359585 - RNA, 18 nt, Artificial Sequence
  Synthetic
ggcaaauaaaauggacau

SEQ ID NO: 359586 - RNA, 19 nt, Artificial Sequence
  Synthetic
gggcaaauaaaauggacau

SEQ ID NO: 359587 - RNA, 20 nt, Artificial Sequence
  Synthetic
ggggcaaauaaaauggacau

SEQ ID NO: 359588 - RNA, 21 nt, Artificial Sequence
  Synthetic
uggggcaaauaaaauggacau

SEQ ID NO: 359589 - RNA, 22 nt, Artificial Sequence
  Synthetic
guggggcaaauaaaauggacau

SEQ ID NO: 359590 - RNA, 23 nt, Artificial Sequence
  Synthetic
uguggggcaaauaaaauggacau

SEQ ID NO: 359591 - RNA, 24 nt, Artificial Sequence
  Synthetic
auguggggcaaauaaaauggacau

SEQ ID NO: 359592 - RNA, 18 nt, Artificial Sequence
  Synthetic
aggacuacagcuggacau

SEQ ID NO: 359593 - RNA, 19 nt, Artificial Sequence
  Synthetic
caggacuacagcuggacau

SEQ ID NO: 359594 - RNA, 20 nt, Artificial Sequence
  Synthetic
acaggacuacagcuggacau

SEQ ID NO: 359595 - RNA, 21 nt, Artificial Sequence
  Synthetic
gacaggacuacagcuggacau

SEQ ID NO: 359596 - RNA, 22 nt, Artificial Sequence
  Synthetic
agacaggacuacagcuggacau

SEQ ID NO: 359597 - RNA, 23 nt, Artificial Sequence
  Synthetic
uagacaggacuacagcuggacau

SEQ ID NO: 359598 - RNA, 24 nt, Artificial Sequence
  Synthetic
guagacaggacuacagcuggacau

SEQ ID NO: 359599 - RNA, 18 nt, Artificial Sequence
  Synthetic
uaacaauuuguuggacau

SEQ ID NO: 359600 - RNA, 19 nt, Artificial Sequence
  Synthetic
cuaacaauuuguuggacau

SEQ ID NO: 359601 - RNA, 20 nt, Artificial Sequence
  Synthetic
acuaacaauuuguuggacau

SEQ ID NO: 359602 - RNA, 21 nt, Artificial Sequence
  Synthetic
gacuaacaauuuguuggacau

SEQ ID NO: 359603 - RNA, 22 nt, Artificial Sequence
  Synthetic
ggacuaacaauuuguuggacau

SEQ ID NO: 359604 - RNA, 23 nt, Artificial Sequence
  Synthetic
aggacuaacaauuuguuggacau

SEQ ID NO: 359605 - RNA, 24 nt, Artificial Sequence
  Synthetic
uaggacuaacaauuuguuggacau

SEQ ID NO: 359606 - RNA, 18 nt, Artificial Sequence
  Synthetic
uguuugaggaaaugacau

SEQ ID NO: 359607 - RNA, 19 nt, Artificial Sequence
  Synthetic
uuguuugaggaaaugacau

SEQ ID NO: 359608 - RNA, 20 nt, Artificial Sequence
  Synthetic
uuuguuugaggaaaugacau

SEQ ID NO: 359609 - RNA, 21 nt, Artificial Sequence
  Synthetic
uuuuguuugaggaaaugacau

SEQ ID NO: 359610 - RNA, 22 nt, Artificial Sequence
  Synthetic
cuuuuguuugaggaaaugacau

SEQ ID NO: 359611 - RNA, 23 nt, Artificial Sequence
  Synthetic
acuuuuguuugaggaaaugacau

SEQ ID NO: 359612 - RNA, 24 nt, Artificial Sequence
  Synthetic
gacuuuuguuugaggaaaugacau

SEQ ID NO: 359613 - RNA, 18 nt, Artificial Sequence
  Synthetic
ggaucccucccaugacau

SEQ ID NO: 359614 - RNA, 19 nt, Artificial Sequence
  Synthetic
uggaucccucccaugacau

SEQ ID NO: 359615 - RNA, 20 nt, Artificial Sequence
  Synthetic
cuggaucccucccaugacau

SEQ ID NO: 359616 - RNA, 21 nt, Artificial Sequence
  Synthetic
acuggaucccucccaugacau

SEQ ID NO: 359617 - RNA, 22 nt, Artificial Sequence
  Synthetic
cacuggaucccucccaugacau

SEQ ID NO: 359618 - RNA, 23 nt, Artificial Sequence
  Synthetic
ccacuggaucccucccaugacau

SEQ ID NO: 359619 - RNA, 24 nt, Artificial Sequence
  Synthetic
cccacuggaucccucccaugacau

SEQ ID NO: 359620 - RNA, 18 nt, Artificial Sequence
  Synthetic
gaagagaccuuaugacau

SEQ ID NO: 359621 - RNA, 19 nt, Artificial Sequence
  Synthetic
ggaagagaccuuaugacau

SEQ ID NO: 359622 - RNA, 20 nt, Artificial Sequence
  Synthetic
gggaagagaccuuaugacau

SEQ ID NO: 359623 - RNA, 21 nt, Artificial Sequence
  Synthetic
ugggaagagaccuuaugacau

SEQ ID NO: 359624 - RNA, 22 nt, Artificial Sequence
  Synthetic
uugggaagagaccuuaugacau

SEQ ID NO: 359625 - RNA, 23 nt, Artificial Sequence
  Synthetic
cuugggaagagaccuuaugacau

SEQ ID NO: 359626 - RNA, 24 nt, Artificial Sequence
  Synthetic
gcuugggaagagaccuuaugacau

SEQ ID NO: 359627 - RNA, 18 nt, Artificial Sequence
  Synthetic
gugacuaaaaacugacau

SEQ ID NO: 359628 - RNA, 19 nt, Artificial Sequence
  Synthetic
ggugacuaaaaacugacau

SEQ ID NO: 359629 - RNA, 20 nt, Artificial Sequence
  Synthetic
aggugacuaaaaacugacau

SEQ ID NO: 359630 - RNA, 21 nt, Artificial Sequence
  Synthetic
caggugacuaaaaacugacau

SEQ ID NO: 359631 - RNA, 22 nt, Artificial Sequence
  Synthetic
ccaggugacuaaaaacugacau

SEQ ID NO: 359632 - RNA, 23 nt, Artificial Sequence
  Synthetic
cccaggugacuaaaaacugacau

SEQ ID NO: 359633 - RNA, 24 nt, Artificial Sequence
  Synthetic
ucccaggugacuaaaaacugacau

SEQ ID NO: 359634 - RNA, 18 nt, Artificial Sequence
  Synthetic
uccugugcacacugacau

SEQ ID NO: 359635 - RNA, 19 nt, Artificial Sequence
  Synthetic
auccugugcacacugacau

SEQ ID NO: 359636 - RNA, 20 nt, Artificial Sequence
  Synthetic
aauccugugcacacugacau

SEQ ID NO: 359637 - RNA, 21 nt, Artificial Sequence
  Synthetic
gaauccugugcacacugacau

SEQ ID NO: 359638 - RNA, 22 nt, Artificial Sequence
  Synthetic
ugaauccugugcacacugacau

SEQ ID NO: 359639 - RNA, 23 nt, Artificial Sequence
  Synthetic
gugaauccugugcacacugacau

SEQ ID NO: 359640 - RNA, 24 nt, Artificial Sequence
  Synthetic
ggugaauccugugcacacugacau

SEQ ID NO: 359641 - RNA, 18 nt, Artificial Sequence
  Synthetic
ucauugagaaggugacau

SEQ ID NO: 359642 - RNA, 19 nt, Artificial Sequence
  Synthetic
uucauugagaaggugacau

SEQ ID NO: 359643 - RNA, 20 nt, Artificial Sequence
  Synthetic
cuucauugagaaggugacau

SEQ ID NO: 359644 - RNA, 21 nt, Artificial Sequence
  Synthetic
ucuucauugagaaggugacau

SEQ ID NO: 359645 - RNA, 22 nt, Artificial Sequence
  Synthetic
uucuucauugagaaggugacau

SEQ ID NO: 359646 - RNA, 23 nt, Artificial Sequence
  Synthetic
auucuucauugagaaggugacau

SEQ ID NO: 359647 - RNA, 24 nt, Artificial Sequence
  Synthetic
uauucuucauugagaaggugacau

SEQ ID NO: 359648 - RNA, 18 nt, Artificial Sequence
  Synthetic
accucuaugaggugacau

SEQ ID NO: 359649 - RNA, 19 nt, Artificial Sequence
  Synthetic
gaccucuaugaggugacau

SEQ ID NO: 359650 - RNA, 20 nt, Artificial Sequence
  Synthetic
agaccucuaugaggugacau

SEQ ID NO: 359651 - RNA, 21 nt, Artificial Sequence
  Synthetic
cagaccucuaugaggugacau

SEQ ID NO: 359652 - RNA, 22 nt, Artificial Sequence
  Synthetic
gcagaccucuaugaggugacau

SEQ ID NO: 359653 - RNA, 23 nt, Artificial Sequence
  Synthetic
ggcagaccucuaugaggugacau

SEQ ID NO: 359654 - RNA, 24 nt, Artificial Sequence
  Synthetic
gggcagaccucuaugaggugacau

SEQ ID NO: 359655 - RNA, 18 nt, Artificial Sequence
  Synthetic
aggcugagagugugacau

SEQ ID NO: 359656 - RNA, 19 nt, Artificial Sequence
  Synthetic
gaggcugagagugugacau

SEQ ID NO: 359657 - RNA, 20 nt, Artificial Sequence
  Synthetic
ggaggcugagagugugacau

SEQ ID NO: 359658 - RNA, 21 nt, Artificial Sequence
  Synthetic
aggaggcugagagugugacau

SEQ ID NO: 359659 - RNA, 22 nt, Artificial Sequence
  Synthetic
gaggaggcugagagugugacau

SEQ ID NO: 359660 - RNA, 23 nt, Artificial Sequence
  Synthetic
agaggaggcugagagugugacau

SEQ ID NO: 359661 - RNA, 24 nt, Artificial Sequence
  Synthetic
gagaggaggcugagagugugacau

SEQ ID NO: 359662 - RNA, 18 nt, Artificial Sequence
  Synthetic
agaagugauauuugacau

SEQ ID NO: 359663 - RNA, 19 nt, Artificial Sequence
  Synthetic
cagaagugauauuugacau

SEQ ID NO: 359664 - RNA, 20 nt, Artificial Sequence
  Synthetic
ccagaagugauauuugacau

SEQ ID NO: 359665 - RNA, 21 nt, Artificial Sequence
  Synthetic
cccagaagugauauuugacau

SEQ ID NO: 359666 - RNA, 22 nt, Artificial Sequence
  Synthetic
ccccagaagugauauuugacau

SEQ ID NO: 359667 - RNA, 23 nt, Artificial Sequence
  Synthetic
accccagaagugauauuugacau

SEQ ID NO: 359668 - RNA, 24 nt, Artificial Sequence
  Synthetic
aaccccagaagugauauuugacau

SEQ ID NO: 359669 - RNA, 18 nt, Artificial Sequence
  Synthetic
uuuauaagaaaaauacau

SEQ ID NO: 359670 - RNA, 19 nt, Artificial Sequence
  Synthetic
guuuauaagaaaaauacau

SEQ ID NO: 359671 - RNA, 20 nt, Artificial Sequence
  Synthetic
uguuuauaagaaaaauacau

SEQ ID NO: 359672 - RNA, 21 nt, Artificial Sequence
  Synthetic
auguuuauaagaaaaauacau

SEQ ID NO: 359673 - RNA, 22 nt, Artificial Sequence
  Synthetic
aauguuuauaagaaaaauacau

SEQ ID NO: 359674 - RNA, 23 nt, Artificial Sequence
  Synthetic
caauguuuauaagaaaaauacau

SEQ ID NO: 359675 - RNA, 24 nt, Artificial Sequence
  Synthetic
acaauguuuauaagaaaaauacau

SEQ ID NO: 359676 - RNA, 18 nt, Artificial Sequence
  Synthetic
aagugacuucaaauacau

SEQ ID NO: 359677 - RNA, 19 nt, Artificial Sequence
  Synthetic
aaagugacuucaaauacau

SEQ ID NO: 359678 - RNA, 20 nt, Artificial Sequence
  Synthetic
caaagugacuucaaauacau

SEQ ID NO: 359679 - RNA, 21 nt, Artificial Sequence
  Synthetic
gcaaagugacuucaaauacau

SEQ ID NO: 359680 - RNA, 22 nt, Artificial Sequence
  Synthetic
agcaaagugacuucaaauacau

SEQ ID NO: 359681 - RNA, 23 nt, Artificial Sequence
  Synthetic
uagcaaagugacuucaaauacau

SEQ ID NO: 359682 - RNA, 24 nt, Artificial Sequence
  Synthetic
uuagcaaagugacuucaaauacau

SEQ ID NO: 359683 - RNA, 18 nt, Artificial Sequence
  Synthetic
auuuaaaaauaaauacau

SEQ ID NO: 359684 - RNA, 19 nt, Artificial Sequence
  Synthetic
aauuuaaaaauaaauacau

SEQ ID NO: 359685 - RNA, 20 nt, Artificial Sequence
  Synthetic
uaauuuaaaaauaaauacau

SEQ ID NO: 359686 - RNA, 21 nt, Artificial Sequence
  Synthetic
uuaauuuaaaaauaaauacau

SEQ ID NO: 359687 - RNA, 22 nt, Artificial Sequence
  Synthetic
guuaauuuaaaaauaaauacau

SEQ ID NO: 359688 - RNA, 23 nt, Artificial Sequence
  Synthetic
uguuaauuuaaaaauaaauacau

SEQ ID NO: 359689 - RNA, 24 nt, Artificial Sequence
  Synthetic
guguuaauuuaaaaauaaauacau

SEQ ID NO: 359690 - RNA, 18 nt, Artificial Sequence
  Synthetic
aauugaucugcaauacau

SEQ ID NO: 359691 - RNA, 19 nt, Artificial Sequence
  Synthetic
aaauugaucugcaauacau

SEQ ID NO: 359692 - RNA, 20 nt, Artificial Sequence
  Synthetic
gaaauugaucugcaauacau

SEQ ID NO: 359693 - RNA, 21 nt, Artificial Sequence
  Synthetic
agaaauugaucugcaauacau

SEQ ID NO: 359694 - RNA, 22 nt, Artificial Sequence
  Synthetic
cagaaauugaucugcaauacau

SEQ ID NO: 359695 - RNA, 23 nt, Artificial Sequence
  Synthetic
gcagaaauugaucugcaauacau

SEQ ID NO: 359696 - RNA, 24 nt, Artificial Sequence
  Synthetic
ggcagaaauugaucugcaauacau

SEQ ID NO: 359697 - RNA, 18 nt, Artificial Sequence
  Synthetic
aguaauaccugaauacau

SEQ ID NO: 359698 - RNA, 19 nt, Artificial Sequence
  Synthetic
caguaauaccugaauacau

SEQ ID NO: 359699 - RNA, 20 nt, Artificial Sequence
  Synthetic
acaguaauaccugaauacau

SEQ ID NO: 359700 - RNA, 21 nt, Artificial Sequence
  Synthetic
aacaguaauaccugaauacau

SEQ ID NO: 359701 - RNA, 22 nt, Artificial Sequence
  Synthetic
aaacaguaauaccugaauacau

SEQ ID NO: 359702 - RNA, 23 nt, Artificial Sequence
  Synthetic
uaaacaguaauaccugaauacau

SEQ ID NO: 359703 - RNA, 24 nt, Artificial Sequence
  Synthetic
uuaaacaguaauaccugaauacau

SEQ ID NO: 359704 - RNA, 18 nt, Artificial Sequence
  Synthetic
uuugcauguuuaauacau

SEQ ID NO: 359705 - RNA, 19 nt, Artificial Sequence
  Synthetic
guuugcauguuuaauacau

SEQ ID NO: 359706 - RNA, 20 nt, Artificial Sequence
  Synthetic
aguuugcauguuuaauacau

SEQ ID NO: 359707 - RNA, 21 nt, Artificial Sequence
  Synthetic
gaguuugcauguuuaauacau

SEQ ID NO: 359708 - RNA, 22 nt, Artificial Sequence
  Synthetic
agaguuugcauguuuaauacau

SEQ ID NO: 359709 - RNA, 23 nt, Artificial Sequence
  Synthetic
uagaguuugcauguuuaauacau

SEQ ID NO: 359710 - RNA, 24 nt, Artificial Sequence
  Synthetic
guagaguuugcauguuuaauacau

SEQ ID NO: 359711 - RNA, 18 nt, Artificial Sequence
  Synthetic
ccuuccuuauacauacau

SEQ ID NO: 359712 - RNA, 19 nt, Artificial Sequence
  Synthetic
gccuuccuuauacauacau

SEQ ID NO: 359713 - RNA, 20 nt, Artificial Sequence
  Synthetic
ggccuuccuuauacauacau

SEQ ID NO: 359714 - RNA, 21 nt, Artificial Sequence
  Synthetic
aggccuuccuuauacauacau

SEQ ID NO: 359715 - RNA, 22 nt, Artificial Sequence
  Synthetic
uaggccuuccuuauacauacau

SEQ ID NO: 359716 - RNA, 23 nt, Artificial Sequence
  Synthetic
auaggccuuccuuauacauacau

SEQ ID NO: 359717 - RNA, 24 nt, Artificial Sequence
  Synthetic
aauaggccuuccuuauacauacau

SEQ ID NO: 359718 - RNA, 18 nt, Artificial Sequence
  Synthetic
guaagguuaaccauacau

SEQ ID NO: 359719 - RNA, 19 nt, Artificial Sequence
  Synthetic
cguaagguuaaccauacau

SEQ ID NO: 359720 - RNA, 20 nt, Artificial Sequence
  Synthetic
ccguaagguuaaccauacau

SEQ ID NO: 359721 - RNA, 21 nt, Artificial Sequence
  Synthetic
accguaagguuaaccauacau

SEQ ID NO: 359722 - RNA, 22 nt, Artificial Sequence
  Synthetic
aaccguaagguuaaccauacau

SEQ ID NO: 359723 - RNA, 23 nt, Artificial Sequence
  Synthetic
gaaccguaagguuaaccauacau

SEQ ID NO: 359724 - RNA, 24 nt, Artificial Sequence
  Synthetic
ggaaccguaagguuaaccauacau

SEQ ID NO: 359725 - RNA, 18 nt, Artificial Sequence
  Synthetic
gacacaugugagauacau

SEQ ID NO: 359726 - RNA, 19 nt, Artificial Sequence
  Synthetic
agacacaugugagauacau

SEQ ID NO: 359727 - RNA, 20 nt, Artificial Sequence
  Synthetic
uagacacaugugagauacau

SEQ ID NO: 359728 - RNA, 21 nt, Artificial Sequence
  Synthetic
auagacacaugugagauacau

SEQ ID NO: 359729 - RNA, 22 nt, Artificial Sequence
  Synthetic
cauagacacaugugagauacau

SEQ ID NO: 359730 - RNA, 23 nt, Artificial Sequence
  Synthetic
gcauagacacaugugagauacau

SEQ ID NO: 359731 - RNA, 24 nt, Artificial Sequence
  Synthetic
agcauagacacaugugagauacau

SEQ ID NO: 359732 - RNA, 18 nt, Artificial Sequence
  Synthetic
auucaauuugagauacau

SEQ ID NO: 359733 - RNA, 19 nt, Artificial Sequence
  Synthetic
uauucaauuugagauacau

SEQ ID NO: 359734 - RNA, 20 nt, Artificial Sequence
  Synthetic
auauucaauuugagauacau

SEQ ID NO: 359735 - RNA, 21 nt, Artificial Sequence
  Synthetic
uauauucaauuugagauacau

SEQ ID NO: 359736 - RNA, 22 nt, Artificial Sequence
  Synthetic
uuauauucaauuugagauacau

SEQ ID NO: 359737 - RNA, 23 nt, Artificial Sequence
  Synthetic
uuuauauucaauuugagauacau

SEQ ID NO: 359738 - RNA, 24 nt, Artificial Sequence
  Synthetic
auuuauauucaauuugagauacau

SEQ ID NO: 359739 - RNA, 18 nt, Artificial Sequence
  Synthetic
auuuguccaaggauacau

SEQ ID NO: 359740 - RNA, 19 nt, Artificial Sequence
  Synthetic
gauuuguccaaggauacau

SEQ ID NO: 359741 - RNA, 20 nt, Artificial Sequence
  Synthetic
agauuuguccaaggauacau

SEQ ID NO: 359742 - RNA, 21 nt, Artificial Sequence
  Synthetic
gagauuuguccaaggauacau

SEQ ID NO: 359743 - RNA, 22 nt, Artificial Sequence
  Synthetic
agagauuuguccaaggauacau

SEQ ID NO: 359744 - RNA, 23 nt, Artificial Sequence
  Synthetic
aagagauuuguccaaggauacau

SEQ ID NO: 359745 - RNA, 24 nt, Artificial Sequence
  Synthetic
uaagagauuuguccaaggauacau

SEQ ID NO: 359746 - RNA, 18 nt, Artificial Sequence
  Synthetic
guccagcuccugauacau

SEQ ID NO: 359747 - RNA, 19 nt, Artificial Sequence
  Synthetic
gguccagcuccugauacau

SEQ ID NO: 359748 - RNA, 20 nt, Artificial Sequence
  Synthetic
ggguccagcuccugauacau

SEQ ID NO: 359749 - RNA, 21 nt, Artificial Sequence
  Synthetic
aggguccagcuccugauacau

SEQ ID NO: 359750 - RNA, 22 nt, Artificial Sequence
  Synthetic
gaggguccagcuccugauacau

SEQ ID NO: 359751 - RNA, 23 nt, Artificial Sequence
  Synthetic
ggaggguccagcuccugauacau

SEQ ID NO: 359752 - RNA, 24 nt, Artificial Sequence
  Synthetic
uggaggguccagcuccugauacau

SEQ ID NO: 359753 - RNA, 18 nt, Artificial Sequence
  Synthetic
aagcauaaaaauauacau

SEQ ID NO: 359754 - RNA, 19 nt, Artificial Sequence
  Synthetic
aaagcauaaaaauauacau

SEQ ID NO: 359755 - RNA, 20 nt, Artificial Sequence
  Synthetic
aaaagcauaaaaauauacau

SEQ ID NO: 359756 - RNA, 21 nt, Artificial Sequence
  Synthetic
gaaaagcauaaaaauauacau

SEQ ID NO: 359757 - RNA, 22 nt, Artificial Sequence
  Synthetic
ugaaaagcauaaaaauauacau

SEQ ID NO: 359758 - RNA, 23 nt, Artificial Sequence
  Synthetic
gugaaaagcauaaaaauauacau

SEQ ID NO: 359759 - RNA, 24 nt, Artificial Sequence
  Synthetic
ggugaaaagcauaaaaauauacau

SEQ ID NO: 359760 - RNA, 18 nt, Artificial Sequence
  Synthetic
gcaaucaguaauauacau

SEQ ID NO: 359761 - RNA, 19 nt, Artificial Sequence
  Synthetic
cgcaaucaguaauauacau

SEQ ID NO: 359762 - RNA, 20 nt, Artificial Sequence
  Synthetic
ccgcaaucaguaauauacau

SEQ ID NO: 359763 - RNA, 21 nt, Artificial Sequence
  Synthetic
uccgcaaucaguaauauacau

SEQ ID NO: 359764 - RNA, 22 nt, Artificial Sequence
  Synthetic
cuccgcaaucaguaauauacau

SEQ ID NO: 359765 - RNA, 23 nt, Artificial Sequence
  Synthetic
acuccgcaaucaguaauauacau

SEQ ID NO: 359766 - RNA, 24 nt, Artificial Sequence
  Synthetic
cacuccgcaaucaguaauauacau

SEQ ID NO: 359767 - RNA, 18 nt, Artificial Sequence
  Synthetic
auauuaaaacauauacau

SEQ ID NO: 359768 - RNA, 19 nt, Artificial Sequence
  Synthetic
aauauuaaaacauauacau

SEQ ID NO: 359769 - RNA, 20 nt, Artificial Sequence
  Synthetic
uaauauuaaaacauauacau

SEQ ID NO: 359770 - RNA, 21 nt, Artificial Sequence
  Synthetic
uuaauauuaaaacauauacau

SEQ ID NO: 359771 - RNA, 22 nt, Artificial Sequence
  Synthetic
cuuaauauuaaaacauauacau

SEQ ID NO: 359772 - RNA, 23 nt, Artificial Sequence
  Synthetic
ucuuaauauuaaaacauauacau

SEQ ID NO: 359773 - RNA, 24 nt, Artificial Sequence
  Synthetic
aucuuaauauuaaaacauauacau

SEQ ID NO: 359774 - RNA, 18 nt, Artificial Sequence
  Synthetic
ucaacaacagauauacau

SEQ ID NO: 359775 - RNA, 19 nt, Artificial Sequence
  Synthetic
cucaacaacagauauacau

SEQ ID NO: 359776 - RNA, 20 nt, Artificial Sequence
  Synthetic
gcucaacaacagauauacau

SEQ ID NO: 359777 - RNA, 21 nt, Artificial Sequence
  Synthetic
ugcucaacaacagauauacau

SEQ ID NO: 359778 - RNA, 22 nt, Artificial Sequence
  Synthetic
uugcucaacaacagauauacau

SEQ ID NO: 359779 - RNA, 23 nt, Artificial Sequence
  Synthetic
auugcucaacaacagauauacau

SEQ ID NO: 359780 - RNA, 24 nt, Artificial Sequence
  Synthetic
cauugcucaacaacagauauacau

SEQ ID NO: 359781 - RNA, 18 nt, Artificial Sequence
  Synthetic
gauugugaagcuauacau

SEQ ID NO: 359782 - RNA, 19 nt, Artificial Sequence
  Synthetic
ugauugugaagcuauacau

SEQ ID NO: 359783 - RNA, 20 nt, Artificial Sequence
  Synthetic
gugauugugaagcuauacau

SEQ ID NO: 359784 - RNA, 21 nt, Artificial Sequence
  Synthetic
agugauugugaagcuauacau

SEQ ID NO: 359785 - RNA, 22 nt, Artificial Sequence
  Synthetic
gagugauugugaagcuauacau

SEQ ID NO: 359786 - RNA, 23 nt, Artificial Sequence
  Synthetic
cgagugauugugaagcuauacau

SEQ ID NO: 359787 - RNA, 24 nt, Artificial Sequence
  Synthetic
acgagugauugugaagcuauacau

SEQ ID NO: 359788 - RNA, 18 nt, Artificial Sequence
  Synthetic
uguaaguguaguauacau

SEQ ID NO: 359789 - RNA, 19 nt, Artificial Sequence
  Synthetic
auguaaguguaguauacau

SEQ ID NO: 359790 - RNA, 20 nt, Artificial Sequence
  Synthetic
uauguaaguguaguauacau

SEQ ID NO: 359791 - RNA, 21 nt, Artificial Sequence
  Synthetic
uuauguaaguguaguauacau

SEQ ID NO: 359792 - RNA, 22 nt, Artificial Sequence
  Synthetic
cuuauguaaguguaguauacau

SEQ ID NO: 359793 - RNA, 23 nt, Artificial Sequence
  Synthetic
acuuauguaaguguaguauacau

SEQ ID NO: 359794 - RNA, 24 nt, Artificial Sequence
  Synthetic
aacuuauguaaguguaguauacau

SEQ ID NO: 359795 - RNA, 18 nt, Artificial Sequence
  Synthetic
acuuaugcuuuuauacau

SEQ ID NO: 359796 - RNA, 19 nt, Artificial Sequence
  Synthetic
aacuuaugcuuuuauacau

SEQ ID NO: 359797 - RNA, 20 nt, Artificial Sequence
  Synthetic
uaacuuaugcuuuuauacau

SEQ ID NO: 359798 - RNA, 21 nt, Artificial Sequence
  Synthetic
uuaacuuaugcuuuuauacau

SEQ ID NO: 359799 - RNA, 22 nt, Artificial Sequence
  Synthetic
uuuaacuuaugcuuuuauacau

SEQ ID NO: 359800 - RNA, 23 nt, Artificial Sequence
  Synthetic
uuuuaacuuaugcuuuuauacau

SEQ ID NO: 359801 - RNA, 24 nt, Artificial Sequence
  Synthetic
auuuuaacuuaugcuuuuauacau

SEQ ID NO: 359802 - RNA, 18 nt, Artificial Sequence
  Synthetic
uauuucucacaacuacau

SEQ ID NO: 359803 - RNA, 19 nt, Artificial Sequence
  Synthetic
uuauuucucacaacuacau

SEQ ID NO: 359804 - RNA, 20 nt, Artificial Sequence
  Synthetic
auuauuucucacaacuacau

SEQ ID NO: 359805 - RNA, 21 nt, Artificial Sequence
  Synthetic
uauuauuucucacaacuacau

SEQ ID NO: 359806 - RNA, 22 nt, Artificial Sequence
  Synthetic
guauuauuucucacaacuacau

SEQ ID NO: 359807 - RNA, 23 nt, Artificial Sequence
  Synthetic
uguauuauuucucacaacuacau

SEQ ID NO: 359808 - RNA, 24 nt, Artificial Sequence
  Synthetic
cuguauuauuucucacaacuacau

SEQ ID NO: 359809 - RNA, 18 nt, Artificial Sequence
  Synthetic
aaggcauaaacacuacau

SEQ ID NO: 359810 - RNA, 19 nt, Artificial Sequence
  Synthetic
aaaggcauaaacacuacau

SEQ ID NO: 359811 - RNA, 20 nt, Artificial Sequence
  Synthetic
caaaggcauaaacacuacau

SEQ ID NO: 359812 - RNA, 21 nt, Artificial Sequence
  Synthetic
ucaaaggcauaaacacuacau

SEQ ID NO: 359813 - RNA, 22 nt, Artificial Sequence
  Synthetic
aucaaaggcauaaacacuacau

SEQ ID NO: 359814 - RNA, 23 nt, Artificial Sequence
  Synthetic
gaucaaaggcauaaacacuacau

SEQ ID NO: 359815 - RNA, 24 nt, Artificial Sequence
  Synthetic
ugaucaaaggcauaaacacuacau

SEQ ID NO: 359816 - RNA, 18 nt, Artificial Sequence
  Synthetic
auacacaaaucacuacau

SEQ ID NO: 359817 - RNA, 19 nt, Artificial Sequence
  Synthetic
uauacacaaaucacuacau

SEQ ID NO: 359818 - RNA, 20 nt, Artificial Sequence
  Synthetic
uuauacacaaaucacuacau

SEQ ID NO: 359819 - RNA, 21 nt, Artificial Sequence
  Synthetic
uuuauacacaaaucacuacau

SEQ ID NO: 359820 - RNA, 22 nt, Artificial Sequence
  Synthetic
auuuauacacaaaucacuacau

SEQ ID NO: 359821 - RNA, 23 nt, Artificial Sequence
  Synthetic
uauuuauacacaaaucacuacau

SEQ ID NO: 359822 - RNA, 24 nt, Artificial Sequence
  Synthetic
guauuuauacacaaaucacuacau

SEQ ID NO: 359823 - RNA, 18 nt, Artificial Sequence
  Synthetic
caaauuuggagacuacau

SEQ ID NO: 359824 - RNA, 19 nt, Artificial Sequence
  Synthetic
ucaaauuuggagacuacau

SEQ ID NO: 359825 - RNA, 20 nt, Artificial Sequence
  Synthetic
uucaaauuuggagacuacau

SEQ ID NO: 359826 - RNA, 21 nt, Artificial Sequence
  Synthetic
auucaaauuuggagacuacau

SEQ ID NO: 359827 - RNA, 22 nt, Artificial Sequence
  Synthetic
cauucaaauuuggagacuacau

SEQ ID NO: 359828 - RNA, 23 nt, Artificial Sequence
  Synthetic
ucauucaaauuuggagacuacau

SEQ ID NO: 359829 - RNA, 24 nt, Artificial Sequence
  Synthetic
gucauucaaauuuggagacuacau

SEQ ID NO: 359830 - RNA, 18 nt, Artificial Sequence
  Synthetic
uuugaaauuggacuacau

SEQ ID NO: 359831 - RNA, 19 nt, Artificial Sequence
  Synthetic
guuugaaauuggacuacau

SEQ ID NO: 359832 - RNA, 20 nt, Artificial Sequence
  Synthetic
uguuugaaauuggacuacau

SEQ ID NO: 359833 - RNA, 21 nt, Artificial Sequence
  Synthetic
uuguuugaaauuggacuacau

SEQ ID NO: 359834 - RNA, 22 nt, Artificial Sequence
  Synthetic
uuuguuugaaauuggacuacau

SEQ ID NO: 359835 - RNA, 23 nt, Artificial Sequence
  Synthetic
uuuuguuugaaauuggacuacau

SEQ ID NO: 359836 - RNA, 24 nt, Artificial Sequence
  Synthetic
auuuuguuugaaauuggacuacau

SEQ ID NO: 359837 - RNA, 18 nt, Artificial Sequence
  Synthetic
cucgcaggagcccuacau

SEQ ID NO: 359838 - RNA, 19 nt, Artificial Sequence
  Synthetic
ucucgcaggagcccuacau

SEQ ID NO: 359839 - RNA, 20 nt, Artificial Sequence
  Synthetic
gucucgcaggagcccuacau

SEQ ID NO: 359840 - RNA, 21 nt, Artificial Sequence
  Synthetic
agucucgcaggagcccuacau

SEQ ID NO: 359841 - RNA, 22 nt, Artificial Sequence
  Synthetic
cagucucgcaggagcccuacau

SEQ ID NO: 359842 - RNA, 23 nt, Artificial Sequence
  Synthetic
ccagucucgcaggagcccuacau

SEQ ID NO: 359843 - RNA, 24 nt, Artificial Sequence
  Synthetic
gccagucucgcaggagcccuacau

SEQ ID NO: 359844 - RNA, 18 nt, Artificial Sequence
  Synthetic
gcugaaaggaggcuacau

SEQ ID NO: 359845 - RNA, 19 nt, Artificial Sequence
  Synthetic
ugcugaaaggaggcuacau

SEQ ID NO: 359846 - RNA, 20 nt, Artificial Sequence
  Synthetic
augcugaaaggaggcuacau

SEQ ID NO: 359847 - RNA, 21 nt, Artificial Sequence
  Synthetic
uaugcugaaaggaggcuacau

SEQ ID NO: 359848 - RNA, 22 nt, Artificial Sequence
  Synthetic
cuaugcugaaaggaggcuacau

SEQ ID NO: 359849 - RNA, 23 nt, Artificial Sequence
  Synthetic
ccuaugcugaaaggaggcuacau

SEQ ID NO: 359850 - RNA, 24 nt, Artificial Sequence
  Synthetic
accuaugcugaaaggaggcuacau

SEQ ID NO: 359851 - RNA, 18 nt, Artificial Sequence
  Synthetic
aaaaauccaccucuacau

SEQ ID NO: 359852 - RNA, 19 nt, Artificial Sequence
  Synthetic
uaaaaauccaccucuacau

SEQ ID NO: 359853 - RNA, 20 nt, Artificial Sequence
  Synthetic
uuaaaaauccaccucuacau

SEQ ID NO: 359854 - RNA, 21 nt, Artificial Sequence
  Synthetic
uuuaaaaauccaccucuacau

SEQ ID NO: 359855 - RNA, 22 nt, Artificial Sequence
  Synthetic
uuuuaaaaauccaccucuacau

SEQ ID NO: 359856 - RNA, 23 nt, Artificial Sequence
  Synthetic
auuuuaaaaauccaccucuacau

SEQ ID NO: 359857 - RNA, 24 nt, Artificial Sequence
  Synthetic
aauuuuaaaaauccaccucuacau

SEQ ID NO: 359858 - RNA, 18 nt, Artificial Sequence
  Synthetic
ugccuuguaugucuacau

SEQ ID NO: 359859 - RNA, 19 nt, Artificial Sequence
  Synthetic
cugccuuguaugucuacau

SEQ ID NO: 359860 - RNA, 20 nt, Artificial Sequence
  Synthetic
ucugccuuguaugucuacau

SEQ ID NO: 359861 - RNA, 21 nt, Artificial Sequence
  Synthetic
cucugccuuguaugucuacau

SEQ ID NO: 359862 - RNA, 22 nt, Artificial Sequence
  Synthetic
gcucugccuuguaugucuacau

SEQ ID NO: 359863 - RNA, 23 nt, Artificial Sequence
  Synthetic
ggcucugccuuguaugucuacau

SEQ ID NO: 359864 - RNA, 24 nt, Artificial Sequence
  Synthetic
uggcucugccuuguaugucuacau

SEQ ID NO: 359865 - RNA, 18 nt, Artificial Sequence
  Synthetic
uagaugagaauucuacau

SEQ ID NO: 359866 - RNA, 19 nt, Artificial Sequence
  Synthetic
uuagaugagaauucuacau

SEQ ID NO: 359867 - RNA, 20 nt, Artificial Sequence
  Synthetic
cuuagaugagaauucuacau

SEQ ID NO: 359868 - RNA, 21 nt, Artificial Sequence
  Synthetic
gcuuagaugagaauucuacau

SEQ ID NO: 359869 - RNA, 22 nt, Artificial Sequence
  Synthetic
ugcuuagaugagaauucuacau

SEQ ID NO: 359870 - RNA, 23 nt, Artificial Sequence
  Synthetic
augcuuagaugagaauucuacau

SEQ ID NO: 359871 - RNA, 24 nt, Artificial Sequence
  Synthetic
gaugcuuagaugagaauucuacau

SEQ ID NO: 359872 - RNA, 18 nt, Artificial Sequence
  Synthetic
aaaggaaauaaaguacau

SEQ ID NO: 359873 - RNA, 19 nt, Artificial Sequence
  Synthetic
gaaaggaaauaaaguacau

SEQ ID NO: 359874 - RNA, 20 nt, Artificial Sequence
  Synthetic
ugaaaggaaauaaaguacau

SEQ ID NO: 359875 - RNA, 21 nt, Artificial Sequence
  Synthetic
augaaaggaaauaaaguacau

SEQ ID NO: 359876 - RNA, 22 nt, Artificial Sequence
  Synthetic
aaugaaaggaaauaaaguacau

SEQ ID NO: 359877 - RNA, 23 nt, Artificial Sequence
  Synthetic
aaaugaaaggaaauaaaguacau

SEQ ID NO: 359878 - RNA, 24 nt, Artificial Sequence
  Synthetic
gaaaugaaaggaaauaaaguacau

SEQ ID NO: 359879 - RNA, 18 nt, Artificial Sequence
  Synthetic
auguagauuacaguacau

SEQ ID NO: 359880 - RNA, 19 nt, Artificial Sequence
  Synthetic
cauguagauuacaguacau

SEQ ID NO: 359881 - RNA, 20 nt, Artificial Sequence
  Synthetic
acauguagauuacaguacau

SEQ ID NO: 359882 - RNA, 21 nt, Artificial Sequence
  Synthetic
aacauguagauuacaguacau

SEQ ID NO: 359883 - RNA, 22 nt, Artificial Sequence
  Synthetic
gaacauguagauuacaguacau

SEQ ID NO: 359884 - RNA, 23 nt, Artificial Sequence
  Synthetic
agaacauguagauuacaguacau

SEQ ID NO: 359885 - RNA, 24 nt, Artificial Sequence
  Synthetic
cagaacauguagauuacaguacau

SEQ ID NO: 359886 - RNA, 18 nt, Artificial Sequence
  Synthetic
ucuuaucucaagguacau

SEQ ID NO: 359887 - RNA, 19 nt, Artificial Sequence
  Synthetic
cucuuaucucaagguacau

SEQ ID NO: 359888 - RNA, 20 nt, Artificial Sequence
  Synthetic
ucucuuaucucaagguacau

SEQ ID NO: 359889 - RNA, 21 nt, Artificial Sequence
  Synthetic
aucucuuaucucaagguacau

SEQ ID NO: 359890 - RNA, 22 nt, Artificial Sequence
  Synthetic
caucucuuaucucaagguacau

SEQ ID NO: 359891 - RNA, 23 nt, Artificial Sequence
  Synthetic
gcaucucuuaucucaagguacau

SEQ ID NO: 359892 - RNA, 24 nt, Artificial Sequence
  Synthetic
agcaucucuuaucucaagguacau

SEQ ID NO: 359893 - RNA, 18 nt, Artificial Sequence
  Synthetic
uaugucaacgggguacau

SEQ ID NO: 359894 - RNA, 19 nt, Artificial Sequence
  Synthetic
auaugucaacgggguacau

SEQ ID NO: 359895 - RNA, 20 nt, Artificial Sequence
  Synthetic
uauaugucaacgggguacau

SEQ ID NO: 359896 - RNA, 21 nt, Artificial Sequence
  Synthetic
guauaugucaacgggguacau

SEQ ID NO: 359897 - RNA, 22 nt, Artificial Sequence
  Synthetic
uguauaugucaacgggguacau

SEQ ID NO: 359898 - RNA, 23 nt, Artificial Sequence
  Synthetic
guguauaugucaacgggguacau

SEQ ID NO: 359899 - RNA, 24 nt, Artificial Sequence
  Synthetic
gguguauaugucaacgggguacau

SEQ ID NO: 359900 - RNA, 18 nt, Artificial Sequence
  Synthetic
uagguuugugggguacau

SEQ ID NO: 359901 - RNA, 19 nt, Artificial Sequence
  Synthetic
uuagguuugugggguacau

SEQ ID NO: 359902 - RNA, 20 nt, Artificial Sequence
  Synthetic
uuuagguuugugggguacau

SEQ ID NO: 359903 - RNA, 21 nt, Artificial Sequence
  Synthetic
uuuuagguuugugggguacau

SEQ ID NO: 359904 - RNA, 22 nt, Artificial Sequence
  Synthetic
auuuuagguuugugggguacau

SEQ ID NO: 359905 - RNA, 23 nt, Artificial Sequence
  Synthetic
uauuuuagguuugugggguacau

SEQ ID NO: 359906 - RNA, 24 nt, Artificial Sequence
  Synthetic
uuauuuuagguuugugggguacau

SEQ ID NO: 359907 - RNA, 18 nt, Artificial Sequence
  Synthetic
ugauauuacuggguacau

SEQ ID NO: 359908 - RNA, 19 nt, Artificial Sequence
  Synthetic
gugauauuacuggguacau

SEQ ID NO: 359909 - RNA, 20 nt, Artificial Sequence
  Synthetic
agugauauuacuggguacau

SEQ ID NO: 359910 - RNA, 21 nt, Artificial Sequence
  Synthetic
uagugauauuacuggguacau

SEQ ID NO: 359911 - RNA, 22 nt, Artificial Sequence
  Synthetic
guagugauauuacuggguacau

SEQ ID NO: 359912 - RNA, 23 nt, Artificial Sequence
  Synthetic
aguagugauauuacuggguacau

SEQ ID NO: 359913 - RNA, 24 nt, Artificial Sequence
  Synthetic
aaguagugauauuacuggguacau

SEQ ID NO: 359914 - RNA, 18 nt, Artificial Sequence
  Synthetic
cuaagauucaugguacau

SEQ ID NO: 359915 - RNA, 19 nt, Artificial Sequence
  Synthetic
ucuaagauucaugguacau

SEQ ID NO: 359916 - RNA, 20 nt, Artificial Sequence
  Synthetic
uucuaagauucaugguacau

SEQ ID NO: 359917 - RNA, 21 nt, Artificial Sequence
  Synthetic
auucuaagauucaugguacau

SEQ ID NO: 359918 - RNA, 22 nt, Artificial Sequence
  Synthetic
gauucuaagauucaugguacau

SEQ ID NO: 359919 - RNA, 23 nt, Artificial Sequence
  Synthetic
ugauucuaagauucaugguacau

SEQ ID NO: 359920 - RNA, 24 nt, Artificial Sequence
  Synthetic
uugauucuaagauucaugguacau

SEQ ID NO: 359921 - RNA, 18 nt, Artificial Sequence
  Synthetic
cguauucuguauguacau

SEQ ID NO: 359922 - RNA, 19 nt, Artificial Sequence
  Synthetic
acguauucuguauguacau

SEQ ID NO: 359923 - RNA, 20 nt, Artificial Sequence
  Synthetic
uacguauucuguauguacau

SEQ ID NO: 359924 - RNA, 21 nt, Artificial Sequence
  Synthetic
auacguauucuguauguacau

SEQ ID NO: 359925 - RNA, 22 nt, Artificial Sequence
  Synthetic
aauacguauucuguauguacau

SEQ ID NO: 359926 - RNA, 23 nt, Artificial Sequence
  Synthetic
aaauacguauucuguauguacau

SEQ ID NO: 359927 - RNA, 24 nt, Artificial Sequence
  Synthetic
uaaauacguauucuguauguacau

SEQ ID NO: 359928 - RNA, 18 nt, Artificial Sequence
  Synthetic
uuuuaacucuaauuacau

SEQ ID NO: 359929 - RNA, 19 nt, Artificial Sequence
  Synthetic
uuuuuaacucuaauuacau

SEQ ID NO: 359930 - RNA, 20 nt, Artificial Sequence
  Synthetic
auuuuuaacucuaauuacau

SEQ ID NO: 359931 - RNA, 21 nt, Artificial Sequence
  Synthetic
gauuuuuaacucuaauuacau

SEQ ID NO: 359932 - RNA, 22 nt, Artificial Sequence
  Synthetic
ugauuuuuaacucuaauuacau

SEQ ID NO: 359933 - RNA, 23 nt, Artificial Sequence
  Synthetic
augauuuuuaacucuaauuacau

SEQ ID NO: 359934 - RNA, 24 nt, Artificial Sequence
  Synthetic
aaugauuuuuaacucuaauuacau

SEQ ID NO: 359935 - RNA, 18 nt, Artificial Sequence
  Synthetic
auacaaguuucauuacau

SEQ ID NO: 359936 - RNA, 19 nt, Artificial Sequence
  Synthetic
uauacaaguuucauuacau

SEQ ID NO: 359937 - RNA, 20 nt, Artificial Sequence
  Synthetic
auauacaaguuucauuacau

SEQ ID NO: 359938 - RNA, 21 nt, Artificial Sequence
  Synthetic
cauauacaaguuucauuacau

SEQ ID NO: 359939 - RNA, 22 nt, Artificial Sequence
  Synthetic
gcauauacaaguuucauuacau

SEQ ID NO: 359940 - RNA, 23 nt, Artificial Sequence
  Synthetic
agcauauacaaguuucauuacau

SEQ ID NO: 359941 - RNA, 24 nt, Artificial Sequence
  Synthetic
aagcauauacaaguuucauuacau

SEQ ID NO: 359942 - RNA, 18 nt, Artificial Sequence
  Synthetic
auucacaggcuauuacau

SEQ ID NO: 359943 - RNA, 19 nt, Artificial Sequence
  Synthetic
uauucacaggcuauuacau

SEQ ID NO: 359944 - RNA, 20 nt, Artificial Sequence
  Synthetic
uuauucacaggcuauuacau

SEQ ID NO: 359945 - RNA, 21 nt, Artificial Sequence
  Synthetic
uuuauucacaggcuauuacau

SEQ ID NO: 359946 - RNA, 22 nt, Artificial Sequence
  Synthetic
auuuauucacaggcuauuacau

SEQ ID NO: 359947 - RNA, 23 nt, Artificial Sequence
  Synthetic
cauuuauucacaggcuauuacau

SEQ ID NO: 359948 - RNA, 24 nt, Artificial Sequence
  Synthetic
acauuuauucacaggcuauuacau

SEQ ID NO: 359949 - RNA, 18 nt, Artificial Sequence
  Synthetic
auacaaccuuuauuacau

SEQ ID NO: 359950 - RNA, 19 nt, Artificial Sequence
  Synthetic
aauacaaccuuuauuacau

SEQ ID NO: 359951 - RNA, 20 nt, Artificial Sequence
  Synthetic
aaauacaaccuuuauuacau

SEQ ID NO: 359952 - RNA, 21 nt, Artificial Sequence
  Synthetic
aaaauacaaccuuuauuacau

SEQ ID NO: 359953 - RNA, 22 nt, Artificial Sequence
  Synthetic
uaaaauacaaccuuuauuacau

SEQ ID NO: 359954 - RNA, 23 nt, Artificial Sequence
  Synthetic
uuaaaauacaaccuuuauuacau

SEQ ID NO: 359955 - RNA, 24 nt, Artificial Sequence
  Synthetic
uuuaaaauacaaccuuuauuacau

SEQ ID NO: 359956 - RNA, 18 nt, Artificial Sequence
  Synthetic
guuauuuaaugcuuacau

SEQ ID NO: 359957 - RNA, 19 nt, Artificial Sequence
  Synthetic
gguuauuuaaugcuuacau

SEQ ID NO: 359958 - RNA, 20 nt, Artificial Sequence
  Synthetic
cgguuauuuaaugcuuacau

SEQ ID NO: 359959 - RNA, 21 nt, Artificial Sequence
  Synthetic
ucgguuauuuaaugcuuacau

SEQ ID NO: 359960 - RNA, 22 nt, Artificial Sequence
  Synthetic
aucgguuauuuaaugcuuacau

SEQ ID NO: 359961 - RNA, 23 nt, Artificial Sequence
  Synthetic
uaucgguuauuuaaugcuuacau

SEQ ID NO: 359962 - RNA, 24 nt, Artificial Sequence
  Synthetic
auaucgguuauuuaaugcuuacau

SEQ ID NO: 359963 - RNA, 18 nt, Artificial Sequence
  Synthetic
ucuuuauggaucuuacau

SEQ ID NO: 359964 - RNA, 19 nt, Artificial Sequence
  Synthetic
gucuuuauggaucuuacau

SEQ ID NO: 359965 - RNA, 20 nt, Artificial Sequence
  Synthetic
ugucuuuauggaucuuacau

SEQ ID NO: 359966 - RNA, 21 nt, Artificial Sequence
  Synthetic
uugucuuuauggaucuuacau

SEQ ID NO: 359967 - RNA, 22 nt, Artificial Sequence
  Synthetic
cuugucuuuauggaucuuacau

SEQ ID NO: 359968 - RNA, 23 nt, Artificial Sequence
  Synthetic
acuugucuuuauggaucuuacau

SEQ ID NO: 359969 - RNA, 24 nt, Artificial Sequence
  Synthetic
cacuugucuuuauggaucuuacau

SEQ ID NO: 359970 - RNA, 18 nt, Artificial Sequence
  Synthetic
uaguggauauaguuacau

SEQ ID NO: 359971 - RNA, 19 nt, Artificial Sequence
  Synthetic
uuaguggauauaguuacau

SEQ ID NO: 359972 - RNA, 20 nt, Artificial Sequence
  Synthetic
uuuaguggauauaguuacau

SEQ ID NO: 359973 - RNA, 21 nt, Artificial Sequence
  Synthetic
cuuuaguggauauaguuacau

SEQ ID NO: 359974 - RNA, 22 nt, Artificial Sequence
  Synthetic
acuuuaguggauauaguuacau

SEQ ID NO: 359975 - RNA, 23 nt, Artificial Sequence
  Synthetic
gacuuuaguggauauaguuacau

SEQ ID NO: 359976 - RNA, 24 nt, Artificial Sequence
  Synthetic
ggacuuuaguggauauaguuacau

SEQ ID NO: 359977 - RNA, 18 nt, Artificial Sequence
  Synthetic
auguaacugauguuacau

SEQ ID NO: 359978 - RNA, 19 nt, Artificial Sequence
  Synthetic
uauguaacugauguuacau

SEQ ID NO: 359979 - RNA, 20 nt, Artificial Sequence
  Synthetic
auauguaacugauguuacau

SEQ ID NO: 359980 - RNA, 21 nt, Artificial Sequence
  Synthetic
cauauguaacugauguuacau

SEQ ID NO: 359981 - RNA, 22 nt, Artificial Sequence
  Synthetic
acauauguaacugauguuacau

SEQ ID NO: 359982 - RNA, 23 nt, Artificial Sequence
  Synthetic
cacauauguaacugauguuacau

SEQ ID NO: 359983 - RNA, 24 nt, Artificial Sequence
  Synthetic
ucacauauguaacugauguuacau

SEQ ID NO: 359984 - RNA, 18 nt, Artificial Sequence
  Synthetic
gauguggauauguuacau

SEQ ID NO: 359985 - RNA, 19 nt, Artificial Sequence
  Synthetic
agauguggauauguuacau

SEQ ID NO: 359986 - RNA, 20 nt, Artificial Sequence
  Synthetic
aagauguggauauguuacau

SEQ ID NO: 359987 - RNA, 21 nt, Artificial Sequence
  Synthetic
gaagauguggauauguuacau

SEQ ID NO: 359988 - RNA, 22 nt, Artificial Sequence
  Synthetic
ggaagauguggauauguuacau

SEQ ID NO: 359989 - RNA, 23 nt, Artificial Sequence
  Synthetic
aggaagauguggauauguuacau

SEQ ID NO: 359990 - RNA, 24 nt, Artificial Sequence
  Synthetic
gaggaagauguggauauguuacau

SEQ ID NO: 359991 - RNA, 18 nt, Artificial Sequence
  Synthetic
gauugauauauguuacau

SEQ ID NO: 359992 - RNA, 19 nt, Artificial Sequence
  Synthetic
agauugauauauguuacau

SEQ ID NO: 359993 - RNA, 20 nt, Artificial Sequence
  Synthetic
cagauugauauauguuacau

SEQ ID NO: 359994 - RNA, 21 nt, Artificial Sequence
  Synthetic
gcagauugauauauguuacau

SEQ ID NO: 359995 - RNA, 22 nt, Artificial Sequence
  Synthetic
agcagauugauauauguuacau

SEQ ID NO: 359996 - RNA, 23 nt, Artificial Sequence
  Synthetic
aagcagauugauauauguuacau

SEQ ID NO: 359997 - RNA, 24 nt, Artificial Sequence
  Synthetic
aaagcagauugauauauguuacau

SEQ ID NO: 359998 - RNA, 18 nt, Artificial Sequence
  Synthetic
uauucacaaaauuuacau

SEQ ID NO: 359999 - RNA, 19 nt, Artificial Sequence
  Synthetic
cuauucacaaaauuuacau

SEQ ID NO: 360000 - RNA, 20 nt, Artificial Sequence
  Synthetic
ccuauucacaaaauuuacau

SEQ ID NO: 360001 - RNA, 21 nt, Artificial Sequence
  Synthetic
accuauucacaaaauuuacau

SEQ ID NO: 360002 - RNA, 22 nt, Artificial Sequence
  Synthetic
aaccuauucacaaaauuuacau

SEQ ID NO: 360003 - RNA, 23 nt, Artificial Sequence
  Synthetic
aaaccuauucacaaaauuuacau

SEQ ID NO: 360004 - RNA, 24 nt, Artificial Sequence
  Synthetic
gaaaccuauucacaaaauuuacau

SEQ ID NO: 360005 - RNA, 18 nt, Artificial Sequence
  Synthetic
caauaauuccauuuacau

SEQ ID NO: 360006 - RNA, 19 nt, Artificial Sequence
  Synthetic
ccaauaauuccauuuacau

SEQ ID NO: 360007 - RNA, 20 nt, Artificial Sequence
  Synthetic
accaauaauuccauuuacau

SEQ ID NO: 360008 - RNA, 21 nt, Artificial Sequence
  Synthetic
gaccaauaauuccauuuacau

SEQ ID NO: 360009 - RNA, 22 nt, Artificial Sequence
  Synthetic
agaccaauaauuccauuuacau

SEQ ID NO: 360010 - RNA, 23 nt, Artificial Sequence
  Synthetic
gagaccaauaauuccauuuacau

SEQ ID NO: 360011 - RNA, 24 nt, Artificial Sequence
  Synthetic
agagaccaauaauuccauuuacau

SEQ ID NO: 360012 - RNA, 18 nt, Artificial Sequence
  Synthetic
auaucucuauauuuacau

SEQ ID NO: 360013 - RNA, 19 nt, Artificial Sequence
  Synthetic
uauaucucuauauuuacau

SEQ ID NO: 360014 - RNA, 20 nt, Artificial Sequence
  Synthetic
uuauaucucuauauuuacau

SEQ ID NO: 360015 - RNA, 21 nt, Artificial Sequence
  Synthetic
cuuauaucucuauauuuacau

SEQ ID NO: 360016 - RNA, 22 nt, Artificial Sequence
  Synthetic
acuuauaucucuauauuuacau

SEQ ID NO: 360017 - RNA, 23 nt, Artificial Sequence
  Synthetic
aacuuauaucucuauauuuacau

SEQ ID NO: 360018 - RNA, 24 nt, Artificial Sequence
  Synthetic
uaacuuauaucucuauauuuacau

SEQ ID NO: 360019 - RNA, 18 nt, Artificial Sequence
  Synthetic
aaaaaugaaauuuuacau

SEQ ID NO: 360020 - RNA, 19 nt, Artificial Sequence
  Synthetic
aaaaaaugaaauuuuacau

SEQ ID NO: 360021 - RNA, 20 nt, Artificial Sequence
  Synthetic
gaaaaaaugaaauuuuacau

SEQ ID NO: 360022 - RNA, 21 nt, Artificial Sequence
  Synthetic
agaaaaaaugaaauuuuacau

SEQ ID NO: 360023 - RNA, 22 nt, Artificial Sequence
  Synthetic
gagaaaaaaugaaauuuuacau

SEQ ID NO: 360024 - RNA, 23 nt, Artificial Sequence
  Synthetic
ugagaaaaaaugaaauuuuacau

SEQ ID NO: 360025 - RNA, 24 nt, Artificial Sequence
  Synthetic
augagaaaaaaugaaauuuuacau

SEQ ID NO: 360026 - RNA, 18 nt, Artificial Sequence
  Synthetic
aagucaauuguuuuacau

SEQ ID NO: 360027 - RNA, 19 nt, Artificial Sequence
  Synthetic
caagucaauuguuuuacau

SEQ ID NO: 360028 - RNA, 20 nt, Artificial Sequence
  Synthetic
ucaagucaauuguuuuacau

SEQ ID NO: 360029 - RNA, 21 nt, Artificial Sequence
  Synthetic
gucaagucaauuguuuuacau

SEQ ID NO: 360030 - RNA, 22 nt, Artificial Sequence
  Synthetic
ggucaagucaauuguuuuacau

SEQ ID NO: 360031 - RNA, 23 nt, Artificial Sequence
  Synthetic
uggucaagucaauuguuuuacau

SEQ ID NO: 360032 - RNA, 24 nt, Artificial Sequence
  Synthetic
guggucaagucaauuguuuuacau

SEQ ID NO: 360033 - RNA, 18 nt, Artificial Sequence
  Synthetic
auugaauucuuuuuacau

SEQ ID NO: 360034 - RNA, 19 nt, Artificial Sequence
  Synthetic
uauugaauucuuuuuacau

SEQ ID NO: 360035 - RNA, 20 nt, Artificial Sequence
  Synthetic
uuauugaauucuuuuuacau

SEQ ID NO: 360036 - RNA, 21 nt, Artificial Sequence
  Synthetic
auuauugaauucuuuuuacau

SEQ ID NO: 360037 - RNA, 22 nt, Artificial Sequence
  Synthetic
uauuauugaauucuuuuuacau

SEQ ID NO: 360038 - RNA, 23 nt, Artificial Sequence
  Synthetic
uuauuauugaauucuuuuuacau

SEQ ID NO: 360039 - RNA, 24 nt, Artificial Sequence
  Synthetic
uuuauuauugaauucuuuuuacau

SEQ ID NO: 360040 - RNA, 18 nt, Artificial Sequence
  Synthetic
aggacaauacaaaaccau

SEQ ID NO: 360041 - RNA, 19 nt, Artificial Sequence
  Synthetic
gaggacaauacaaaaccau

SEQ ID NO: 360042 - RNA, 20 nt, Artificial Sequence
  Synthetic
ugaggacaauacaaaaccau

SEQ ID NO: 360043 - RNA, 21 nt, Artificial Sequence
  Synthetic
cugaggacaauacaaaaccau

SEQ ID NO: 360044 - RNA, 22 nt, Artificial Sequence
  Synthetic
acugaggacaauacaaaaccau

SEQ ID NO: 360045 - RNA, 23 nt, Artificial Sequence
  Synthetic
cacugaggacaauacaaaaccau

SEQ ID NO: 360046 - RNA, 24 nt, Artificial Sequence
  Synthetic
acacugaggacaauacaaaaccau

SEQ ID NO: 360047 - RNA, 18 nt, Artificial Sequence
  Synthetic
cagccaagagaaaaccau

SEQ ID NO: 360048 - RNA, 19 nt, Artificial Sequence
  Synthetic
ccagccaagagaaaaccau

SEQ ID NO: 360049 - RNA, 20 nt, Artificial Sequence
  Synthetic
gccagccaagagaaaaccau

SEQ ID NO: 360050 - RNA, 21 nt, Artificial Sequence
  Synthetic
ugccagccaagagaaaaccau

SEQ ID NO: 360051 - RNA, 22 nt, Artificial Sequence
  Synthetic
uugccagccaagagaaaaccau

SEQ ID NO: 360052 - RNA, 23 nt, Artificial Sequence
  Synthetic
cuugccagccaagagaaaaccau

SEQ ID NO: 360053 - RNA, 24 nt, Artificial Sequence
  Synthetic
gcuugccagccaagagaaaaccau

SEQ ID NO: 360054 - RNA, 18 nt, Artificial Sequence
  Synthetic
ugaaaacugagaaaccau

SEQ ID NO: 360055 - RNA, 19 nt, Artificial Sequence
  Synthetic
augaaaacugagaaaccau

SEQ ID NO: 360056 - RNA, 20 nt, Artificial Sequence
  Synthetic
aaugaaaacugagaaaccau

SEQ ID NO: 360057 - RNA, 21 nt, Artificial Sequence
  Synthetic
aaaugaaaacugagaaaccau

SEQ ID NO: 360058 - RNA, 22 nt, Artificial Sequence
  Synthetic
gaaaugaaaacugagaaaccau

SEQ ID NO: 360059 - RNA, 23 nt, Artificial Sequence
  Synthetic
agaaaugaaaacugagaaaccau

SEQ ID NO: 360060 - RNA, 24 nt, Artificial Sequence
  Synthetic
gagaaaugaaaacugagaaaccau

SEQ ID NO: 360061 - RNA, 18 nt, Artificial Sequence
  Synthetic
gugcugugaggaaaccau

SEQ ID NO: 360062 - RNA, 19 nt, Artificial Sequence
  Synthetic
ugugcugugaggaaaccau

SEQ ID NO: 360063 - RNA, 20 nt, Artificial Sequence
  Synthetic
augugcugugaggaaaccau

SEQ ID NO: 360064 - RNA, 21 nt, Artificial Sequence
  Synthetic
aaugugcugugaggaaaccau

SEQ ID NO: 360065 - RNA, 22 nt, Artificial Sequence
  Synthetic
uaaugugcugugaggaaaccau

SEQ ID NO: 360066 - RNA, 23 nt, Artificial Sequence
  Synthetic
cuaaugugcugugaggaaaccau

SEQ ID NO: 360067 - RNA, 24 nt, Artificial Sequence
  Synthetic
ucuaaugugcugugaggaaaccau

SEQ ID NO: 360068 - RNA, 18 nt, Artificial Sequence
  Synthetic
ggauguagaugaaaccau

SEQ ID NO: 360069 - RNA, 19 nt, Artificial Sequence
  Synthetic
gggauguagaugaaaccau

SEQ ID NO: 360070 - RNA, 20 nt, Artificial Sequence
  Synthetic
ugggauguagaugaaaccau

SEQ ID NO: 360071 - RNA, 21 nt, Artificial Sequence
  Synthetic
gugggauguagaugaaaccau

SEQ ID NO: 360072 - RNA, 22 nt, Artificial Sequence
  Synthetic
ggugggauguagaugaaaccau

SEQ ID NO: 360073 - RNA, 23 nt, Artificial Sequence
  Synthetic
uggugggauguagaugaaaccau

SEQ ID NO: 360074 - RNA, 24 nt, Artificial Sequence
  Synthetic
uuggugggauguagaugaaaccau

SEQ ID NO: 360075 - RNA, 18 nt, Artificial Sequence
  Synthetic
cacugguuuauaaaccau

SEQ ID NO: 360076 - RNA, 19 nt, Artificial Sequence
  Synthetic
gcacugguuuauaaaccau

SEQ ID NO: 360077 - RNA, 20 nt, Artificial Sequence
  Synthetic
ggcacugguuuauaaaccau

SEQ ID NO: 360078 - RNA, 21 nt, Artificial Sequence
  Synthetic
aggcacugguuuauaaaccau

SEQ ID NO: 360079 - RNA, 22 nt, Artificial Sequence
  Synthetic
aaggcacugguuuauaaaccau

SEQ ID NO: 360080 - RNA, 23 nt, Artificial Sequence
  Synthetic
caaggcacugguuuauaaaccau

SEQ ID NO: 360081 - RNA, 24 nt, Artificial Sequence
  Synthetic
acaaggcacugguuuauaaaccau

SEQ ID NO: 360082 - RNA, 18 nt, Artificial Sequence
  Synthetic
uugcaugaagucaaccau

SEQ ID NO: 360083 - RNA, 19 nt, Artificial Sequence
  Synthetic
guugcaugaagucaaccau

SEQ ID NO: 360084 - RNA, 20 nt, Artificial Sequence
  Synthetic
aguugcaugaagucaaccau

SEQ ID NO: 360085 - RNA, 21 nt, Artificial Sequence
  Synthetic
uaguugcaugaagucaaccau

SEQ ID NO: 360086 - RNA, 22 nt, Artificial Sequence
  Synthetic
guaguugcaugaagucaaccau

SEQ ID NO: 360087 - RNA, 23 nt, Artificial Sequence
  Synthetic
uguaguugcaugaagucaaccau

SEQ ID NO: 360088 - RNA, 24 nt, Artificial Sequence
  Synthetic
auguaguugcaugaagucaaccau

SEQ ID NO: 360089 - RNA, 18 nt, Artificial Sequence
  Synthetic
uauaacaaauauaaccau

SEQ ID NO: 360090 - RNA, 19 nt, Artificial Sequence
  Synthetic
uuauaacaaauauaaccau

SEQ ID NO: 360091 - RNA, 20 nt, Artificial Sequence
  Synthetic
uuuauaacaaauauaaccau

SEQ ID NO: 360092 - RNA, 21 nt, Artificial Sequence
  Synthetic
cuuuauaacaaauauaaccau

SEQ ID NO: 360093 - RNA, 22 nt, Artificial Sequence
  Synthetic
gcuuuauaacaaauauaaccau

SEQ ID NO: 360094 - RNA, 23 nt, Artificial Sequence
  Synthetic
ugcuuuauaacaaauauaaccau

SEQ ID NO: 360095 - RNA, 24 nt, Artificial Sequence
  Synthetic
augcuuuauaacaaauauaaccau

SEQ ID NO: 360096 - RNA, 18 nt, Artificial Sequence
  Synthetic
ggacugagggguaaccau

SEQ ID NO: 360097 - RNA, 19 nt, Artificial Sequence
  Synthetic
uggacugagggguaaccau

SEQ ID NO: 360098 - RNA, 20 nt, Artificial Sequence
  Synthetic
cuggacugagggguaaccau

SEQ ID NO: 360099 - RNA, 21 nt, Artificial Sequence
  Synthetic
acuggacugagggguaaccau

SEQ ID NO: 360100 - RNA, 22 nt, Artificial Sequence
  Synthetic
gacuggacugagggguaaccau

SEQ ID NO: 360101 - RNA, 23 nt, Artificial Sequence
  Synthetic
agacuggacugagggguaaccau

SEQ ID NO: 360102 - RNA, 24 nt, Artificial Sequence
  Synthetic
aagacuggacugagggguaaccau

SEQ ID NO: 360103 - RNA, 18 nt, Artificial Sequence
  Synthetic
cugagauacuuacaccau

SEQ ID NO: 360104 - RNA, 19 nt, Artificial Sequence
  Synthetic
acugagauacuuacaccau

SEQ ID NO: 360105 - RNA, 20 nt, Artificial Sequence
  Synthetic
cacugagauacuuacaccau

SEQ ID NO: 360106 - RNA, 21 nt, Artificial Sequence
  Synthetic
ucacugagauacuuacaccau

SEQ ID NO: 360107 - RNA, 22 nt, Artificial Sequence
  Synthetic
aucacugagauacuuacaccau

SEQ ID NO: 360108 - RNA, 23 nt, Artificial Sequence
  Synthetic
aaucacugagauacuuacaccau

SEQ ID NO: 360109 - RNA, 24 nt, Artificial Sequence
  Synthetic
aaaucacugagauacuuacaccau

SEQ ID NO: 360110 - RNA, 18 nt, Artificial Sequence
  Synthetic
uaccuuggcucccaccau

SEQ ID NO: 360111 - RNA, 19 nt, Artificial Sequence
  Synthetic
guaccuuggcucccaccau

SEQ ID NO: 360112 - RNA, 20 nt, Artificial Sequence
  Synthetic
uguaccuuggcucccaccau

SEQ ID NO: 360113 - RNA, 21 nt, Artificial Sequence
  Synthetic
auguaccuuggcucccaccau

SEQ ID NO: 360114 - RNA, 22 nt, Artificial Sequence
  Synthetic
cauguaccuuggcucccaccau

SEQ ID NO: 360115 - RNA, 23 nt, Artificial Sequence
  Synthetic
ccauguaccuuggcucccaccau

SEQ ID NO: 360116 - RNA, 24 nt, Artificial Sequence
  Synthetic
accauguaccuuggcucccaccau

SEQ ID NO: 360117 - RNA, 18 nt, Artificial Sequence
  Synthetic
aauugggauauccaccau

SEQ ID NO: 360118 - RNA, 19 nt, Artificial Sequence
  Synthetic
uaauugggauauccaccau

SEQ ID NO: 360119 - RNA, 20 nt, Artificial Sequence
  Synthetic
guaauugggauauccaccau

SEQ ID NO: 360120 - RNA, 21 nt, Artificial Sequence
  Synthetic
gguaauugggauauccaccau

SEQ ID NO: 360121 - RNA, 22 nt, Artificial Sequence
  Synthetic
ggguaauugggauauccaccau

SEQ ID NO: 360122 - RNA, 23 nt, Artificial Sequence
  Synthetic
aggguaauugggauauccaccau

SEQ ID NO: 360123 - RNA, 24 nt, Artificial Sequence
  Synthetic
caggguaauugggauauccaccau

SEQ ID NO: 360124 - RNA, 18 nt, Artificial Sequence
  Synthetic
cagcaacaucagcaccau

SEQ ID NO: 360125 - RNA, 19 nt, Artificial Sequence
  Synthetic
ccagcaacaucagcaccau

SEQ ID NO: 360126 - RNA, 20 nt, Artificial Sequence
  Synthetic
accagcaacaucagcaccau

SEQ ID NO: 360127 - RNA, 21 nt, Artificial Sequence
  Synthetic
gaccagcaacaucagcaccau

SEQ ID NO: 360128 - RNA, 22 nt, Artificial Sequence
  Synthetic
ggaccagcaacaucagcaccau

SEQ ID NO: 360129 - RNA, 23 nt, Artificial Sequence
  Synthetic
uggaccagcaacaucagcaccau

SEQ ID NO: 360130 - RNA, 24 nt, Artificial Sequence
  Synthetic
cuggaccagcaacaucagcaccau

SEQ ID NO: 360131 - RNA, 18 nt, Artificial Sequence
  Synthetic
agcaggagaugucaccau

SEQ ID NO: 360132 - RNA, 19 nt, Artificial Sequence
  Synthetic
cagcaggagaugucaccau

SEQ ID NO: 360133 - RNA, 20 nt, Artificial Sequence
  Synthetic
gcagcaggagaugucaccau

SEQ ID NO: 360134 - RNA, 21 nt, Artificial Sequence
  Synthetic
ggcagcaggagaugucaccau

SEQ ID NO: 360135 - RNA, 22 nt, Artificial Sequence
  Synthetic
aggcagcaggagaugucaccau

SEQ ID NO: 360136 - RNA, 23 nt, Artificial Sequence
  Synthetic
caggcagcaggagaugucaccau

SEQ ID NO: 360137 - RNA, 24 nt, Artificial Sequence
  Synthetic
acaggcagcaggagaugucaccau

SEQ ID NO: 360138 - RNA, 18 nt, Artificial Sequence
  Synthetic
auuauuauuuuucaccau

SEQ ID NO: 360139 - RNA, 19 nt, Artificial Sequence
  Synthetic
uauuauuauuuuucaccau

SEQ ID NO: 360140 - RNA, 20 nt, Artificial Sequence
  Synthetic
uuauuauuauuuuucaccau

SEQ ID NO: 360141 - RNA, 21 nt, Artificial Sequence
  Synthetic
auuauuauuauuuuucaccau

SEQ ID NO: 360142 - RNA, 22 nt, Artificial Sequence
  Synthetic
cauuauuauuauuuuucaccau

SEQ ID NO: 360143 - RNA, 23 nt, Artificial Sequence
  Synthetic
acauuauuauuauuuuucaccau

SEQ ID NO: 360144 - RNA, 24 nt, Artificial Sequence
  Synthetic
uacauuauuauuauuuuucaccau

SEQ ID NO: 360145 - RNA, 18 nt, Artificial Sequence
  Synthetic
cugaacuagagagaccau

SEQ ID NO: 360146 - RNA, 19 nt, Artificial Sequence
  Synthetic
gcugaacuagagagaccau

SEQ ID NO: 360147 - RNA, 20 nt, Artificial Sequence
  Synthetic
cgcugaacuagagagaccau

SEQ ID NO: 360148 - RNA, 21 nt, Artificial Sequence
  Synthetic
ccgcugaacuagagagaccau

SEQ ID NO: 360149 - RNA, 22 nt, Artificial Sequence
  Synthetic
uccgcugaacuagagagaccau

SEQ ID NO: 360150 - RNA, 23 nt, Artificial Sequence
  Synthetic
uuccgcugaacuagagagaccau

SEQ ID NO: 360151 - RNA, 24 nt, Artificial Sequence
  Synthetic
guuccgcugaacuagagagaccau

SEQ ID NO: 360152 - RNA, 18 nt, Artificial Sequence
  Synthetic
cagaaguagugagaccau

SEQ ID NO: 360153 - RNA, 19 nt, Artificial Sequence
  Synthetic
acagaaguagugagaccau

SEQ ID NO: 360154 - RNA, 20 nt, Artificial Sequence
  Synthetic
aacagaaguagugagaccau

SEQ ID NO: 360155 - RNA, 21 nt, Artificial Sequence
  Synthetic
aaacagaaguagugagaccau

SEQ ID NO: 360156 - RNA, 22 nt, Artificial Sequence
  Synthetic
uaaacagaaguagugagaccau

SEQ ID NO: 360157 - RNA, 23 nt, Artificial Sequence
  Synthetic
cuaaacagaaguagugagaccau

SEQ ID NO: 360158 - RNA, 24 nt, Artificial Sequence
  Synthetic
acuaaacagaaguagugagaccau

SEQ ID NO: 360159 - RNA, 18 nt, Artificial Sequence
  Synthetic
ugauuagauauagaccau

SEQ ID NO: 360160 - RNA, 19 nt, Artificial Sequence
  Synthetic
cugauuagauauagaccau

SEQ ID NO: 360161 - RNA, 20 nt, Artificial Sequence
  Synthetic
ccugauuagauauagaccau

SEQ ID NO: 360162 - RNA, 21 nt, Artificial Sequence
  Synthetic
accugauuagauauagaccau

SEQ ID NO: 360163 - RNA, 22 nt, Artificial Sequence
  Synthetic
uaccugauuagauauagaccau

SEQ ID NO: 360164 - RNA, 23 nt, Artificial Sequence
  Synthetic
guaccugauuagauauagaccau

SEQ ID NO: 360165 - RNA, 24 nt, Artificial Sequence
  Synthetic
uguaccugauuagauauagaccau

SEQ ID NO: 360166 - RNA, 18 nt, Artificial Sequence
  Synthetic
ggugaaguaaaugaccau

SEQ ID NO: 360167 - RNA, 19 nt, Artificial Sequence
  Synthetic
uggugaaguaaaugaccau

SEQ ID NO: 360168 - RNA, 20 nt, Artificial Sequence
  Synthetic
guggugaaguaaaugaccau

SEQ ID NO: 360169 - RNA, 21 nt, Artificial Sequence
  Synthetic
gguggugaaguaaaugaccau

SEQ ID NO: 360170 - RNA, 22 nt, Artificial Sequence
  Synthetic
ugguggugaaguaaaugaccau

SEQ ID NO: 360171 - RNA, 23 nt, Artificial Sequence
  Synthetic
uugguggugaaguaaaugaccau

SEQ ID NO: 360172 - RNA, 24 nt, Artificial Sequence
  Synthetic
uuugguggugaaguaaaugaccau

SEQ ID NO: 360173 - RNA, 18 nt, Artificial Sequence
  Synthetic
uaauacuuuagugaccau

SEQ ID NO: 360174 - RNA, 19 nt, Artificial Sequence
  Synthetic
auaauacuuuagugaccau

SEQ ID NO: 360175 - RNA, 20 nt, Artificial Sequence
  Synthetic
aauaauacuuuagugaccau

SEQ ID NO: 360176 - RNA, 21 nt, Artificial Sequence
  Synthetic
uaauaauacuuuagugaccau

SEQ ID NO: 360177 - RNA, 22 nt, Artificial Sequence
  Synthetic
uuaauaauacuuuagugaccau

SEQ ID NO: 360178 - RNA, 23 nt, Artificial Sequence
  Synthetic
uuuaauaauacuuuagugaccau

SEQ ID NO: 360179 - RNA, 24 nt, Artificial Sequence
  Synthetic
auuuaauaauacuuuagugaccau

SEQ ID NO: 360180 - RNA, 18 nt, Artificial Sequence
  Synthetic
uggagacucaaauaccau

SEQ ID NO: 360181 - RNA, 19 nt, Artificial Sequence
  Synthetic
auggagacucaaauaccau

SEQ ID NO: 360182 - RNA, 20 nt, Artificial Sequence
  Synthetic
uauggagacucaaauaccau

SEQ ID NO: 360183 - RNA, 21 nt, Artificial Sequence
  Synthetic
guauggagacucaaauaccau

SEQ ID NO: 360184 - RNA, 22 nt, Artificial Sequence
  Synthetic
uguauggagacucaaauaccau

SEQ ID NO: 360185 - RNA, 23 nt, Artificial Sequence
  Synthetic
uuguauggagacucaaauaccau

SEQ ID NO: 360186 - RNA, 24 nt, Artificial Sequence
  Synthetic
guuguauggagacucaaauaccau

SEQ ID NO: 360187 - RNA, 18 nt, Artificial Sequence
  Synthetic
aaaggucaguaauaccau

SEQ ID NO: 360188 - RNA, 19 nt, Artificial Sequence
  Synthetic
aaaaggucaguaauaccau

SEQ ID NO: 360189 - RNA, 20 nt, Artificial Sequence
  Synthetic
uaaaaggucaguaauaccau

SEQ ID NO: 360190 - RNA, 21 nt, Artificial Sequence
  Synthetic
uuaaaaggucaguaauaccau

SEQ ID NO: 360191 - RNA, 22 nt, Artificial Sequence
  Synthetic
auuaaaaggucaguaauaccau

SEQ ID NO: 360192 - RNA, 23 nt, Artificial Sequence
  Synthetic
gauuaaaaggucaguaauaccau

SEQ ID NO: 360193 - RNA, 24 nt, Artificial Sequence
  Synthetic
agauuaaaaggucaguaauaccau

SEQ ID NO: 360194 - RNA, 18 nt, Artificial Sequence
  Synthetic
agaaauacaaacuaccau

SEQ ID NO: 360195 - RNA, 19 nt, Artificial Sequence
  Synthetic
cagaaauacaaacuaccau

SEQ ID NO: 360196 - RNA, 20 nt, Artificial Sequence
  Synthetic
acagaaauacaaacuaccau

SEQ ID NO: 360197 - RNA, 21 nt, Artificial Sequence
  Synthetic
cacagaaauacaaacuaccau

SEQ ID NO: 360198 - RNA, 22 nt, Artificial Sequence
  Synthetic
ccacagaaauacaaacuaccau

SEQ ID NO: 360199 - RNA, 23 nt, Artificial Sequence
  Synthetic
cccacagaaauacaaacuaccau

SEQ ID NO: 360200 - RNA, 24 nt, Artificial Sequence
  Synthetic
ucccacagaaauacaaacuaccau

SEQ ID NO: 360201 - RNA, 18 nt, Artificial Sequence
  Synthetic
guagcuaaugacuaccau

SEQ ID NO: 360202 - RNA, 19 nt, Artificial Sequence
  Synthetic
uguagcuaaugacuaccau

SEQ ID NO: 360203 - RNA, 20 nt, Artificial Sequence
  Synthetic
guguagcuaaugacuaccau

SEQ ID NO: 360204 - RNA, 21 nt, Artificial Sequence
  Synthetic
aguguagcuaaugacuaccau

SEQ ID NO: 360205 - RNA, 22 nt, Artificial Sequence
  Synthetic
aaguguagcuaaugacuaccau

SEQ ID NO: 360206 - RNA, 23 nt, Artificial Sequence
  Synthetic
caaguguagcuaaugacuaccau

SEQ ID NO: 360207 - RNA, 24 nt, Artificial Sequence
  Synthetic
ucaaguguagcuaaugacuaccau

SEQ ID NO: 360208 - RNA, 18 nt, Artificial Sequence
  Synthetic
aggcuaucgaccuaccau

SEQ ID NO: 360209 - RNA, 19 nt, Artificial Sequence
  Synthetic
caggcuaucgaccuaccau

SEQ ID NO: 360210 - RNA, 20 nt, Artificial Sequence
  Synthetic
ucaggcuaucgaccuaccau

SEQ ID NO: 360211 - RNA, 21 nt, Artificial Sequence
  Synthetic
cucaggcuaucgaccuaccau

SEQ ID NO: 360212 - RNA, 22 nt, Artificial Sequence
  Synthetic
acucaggcuaucgaccuaccau

SEQ ID NO: 360213 - RNA, 23 nt, Artificial Sequence
  Synthetic
aacucaggcuaucgaccuaccau

SEQ ID NO: 360214 - RNA, 24 nt, Artificial Sequence
  Synthetic
aaacucaggcuaucgaccuaccau

SEQ ID NO: 360215 - RNA, 18 nt, Artificial Sequence
  Synthetic
guaacaacagccuaccau

SEQ ID NO: 360216 - RNA, 19 nt, Artificial Sequence
  Synthetic
gguaacaacagccuaccau

SEQ ID NO: 360217 - RNA, 20 nt, Artificial Sequence
  Synthetic
ugguaacaacagccuaccau

SEQ ID NO: 360218 - RNA, 21 nt, Artificial Sequence
  Synthetic
gugguaacaacagccuaccau

SEQ ID NO: 360219 - RNA, 22 nt, Artificial Sequence
  Synthetic
ugugguaacaacagccuaccau

SEQ ID NO: 360220 - RNA, 23 nt, Artificial Sequence
  Synthetic
augugguaacaacagccuaccau

SEQ ID NO: 360221 - RNA, 24 nt, Artificial Sequence
  Synthetic
aaugugguaacaacagccuaccau

SEQ ID NO: 360222 - RNA, 18 nt, Artificial Sequence
  Synthetic
cuuaaguguuccuaccau

SEQ ID NO: 360223 - RNA, 19 nt, Artificial Sequence
  Synthetic
ucuuaaguguuccuaccau

SEQ ID NO: 360224 - RNA, 20 nt, Artificial Sequence
  Synthetic
gucuuaaguguuccuaccau

SEQ ID NO: 360225 - RNA, 21 nt, Artificial Sequence
  Synthetic
ugucuuaaguguuccuaccau

SEQ ID NO: 360226 - RNA, 22 nt, Artificial Sequence
  Synthetic
augucuuaaguguuccuaccau

SEQ ID NO: 360227 - RNA, 23 nt, Artificial Sequence
  Synthetic
uaugucuuaaguguuccuaccau

SEQ ID NO: 360228 - RNA, 24 nt, Artificial Sequence
  Synthetic
auaugucuuaaguguuccuaccau

SEQ ID NO: 360229 - RNA, 18 nt, Artificial Sequence
  Synthetic
aaauuucacaucuaccau

SEQ ID NO: 360230 - RNA, 19 nt, Artificial Sequence
  Synthetic
caaauuucacaucuaccau

SEQ ID NO: 360231 - RNA, 20 nt, Artificial Sequence
  Synthetic
ucaaauuucacaucuaccau

SEQ ID NO: 360232 - RNA, 21 nt, Artificial Sequence
  Synthetic
uucaaauuucacaucuaccau

SEQ ID NO: 360233 - RNA, 22 nt, Artificial Sequence
  Synthetic
auucaaauuucacaucuaccau

SEQ ID NO: 360234 - RNA, 23 nt, Artificial Sequence
  Synthetic
aauucaaauuucacaucuaccau

SEQ ID NO: 360235 - RNA, 24 nt, Artificial Sequence
  Synthetic
uaauucaaauuucacaucuaccau

SEQ ID NO: 360236 - RNA, 18 nt, Artificial Sequence
  Synthetic
ccuuaaugaaaguaccau

SEQ ID NO: 360237 - RNA, 19 nt, Artificial Sequence
  Synthetic
gccuuaaugaaaguaccau

SEQ ID NO: 360238 - RNA, 20 nt, Artificial Sequence
  Synthetic
ugccuuaaugaaaguaccau

SEQ ID NO: 360239 - RNA, 21 nt, Artificial Sequence
  Synthetic
augccuuaaugaaaguaccau

SEQ ID NO: 360240 - RNA, 22 nt, Artificial Sequence
  Synthetic
uaugccuuaaugaaaguaccau

SEQ ID NO: 360241 - RNA, 23 nt, Artificial Sequence
  Synthetic
auaugccuuaaugaaaguaccau

SEQ ID NO: 360242 - RNA, 24 nt, Artificial Sequence
  Synthetic
cauaugccuuaaugaaaguaccau

SEQ ID NO: 360243 - RNA, 18 nt, Artificial Sequence
  Synthetic
uuuucuacuaaaacccau

SEQ ID NO: 360244 - RNA, 19 nt, Artificial Sequence
  Synthetic
uuuuucuacuaaaacccau

SEQ ID NO: 360245 - RNA, 20 nt, Artificial Sequence
  Synthetic
auuuuucuacuaaaacccau

SEQ ID NO: 360246 - RNA, 21 nt, Artificial Sequence
  Synthetic
aauuuuucuacuaaaacccau

SEQ ID NO: 360247 - RNA, 22 nt, Artificial Sequence
  Synthetic
aaauuuuucuacuaaaacccau

SEQ ID NO: 360248 - RNA, 23 nt, Artificial Sequence
  Synthetic
uaaauuuuucuacuaaaacccau

SEQ ID NO: 360249 - RNA, 24 nt, Artificial Sequence
  Synthetic
uuaaauuuuucuacuaaaacccau

SEQ ID NO: 360250 - RNA, 18 nt, Artificial Sequence
  Synthetic
cucucuugaccaacccau

SEQ ID NO: 360251 - RNA, 19 nt, Artificial Sequence
  Synthetic
gcucucuugaccaacccau

SEQ ID NO: 360252 - RNA, 20 nt, Artificial Sequence
  Synthetic
ggcucucuugaccaacccau

SEQ ID NO: 360253 - RNA, 21 nt, Artificial Sequence
  Synthetic
aggcucucuugaccaacccau

SEQ ID NO: 360254 - RNA, 22 nt, Artificial Sequence
  Synthetic
aaggcucucuugaccaacccau

SEQ ID NO: 360255 - RNA, 23 nt, Artificial Sequence
  Synthetic
uaaggcucucuugaccaacccau

SEQ ID NO: 360256 - RNA, 24 nt, Artificial Sequence
  Synthetic
uuaaggcucucuugaccaacccau

SEQ ID NO: 360257 - RNA, 18 nt, Artificial Sequence
  Synthetic
uuuucauuuaugacccau

SEQ ID NO: 360258 - RNA, 19 nt, Artificial Sequence
  Synthetic
cuuuucauuuaugacccau

SEQ ID NO: 360259 - RNA, 20 nt, Artificial Sequence
  Synthetic
ccuuuucauuuaugacccau

SEQ ID NO: 360260 - RNA, 21 nt, Artificial Sequence
  Synthetic
gccuuuucauuuaugacccau

SEQ ID NO: 360261 - RNA, 22 nt, Artificial Sequence
  Synthetic
ugccuuuucauuuaugacccau

SEQ ID NO: 360262 - RNA, 23 nt, Artificial Sequence
  Synthetic
uugccuuuucauuuaugacccau

SEQ ID NO: 360263 - RNA, 24 nt, Artificial Sequence
  Synthetic
auugccuuuucauuuaugacccau

SEQ ID NO: 360264 - RNA, 18 nt, Artificial Sequence
  Synthetic
gugccuuagcauacccau

SEQ ID NO: 360265 - RNA, 19 nt, Artificial Sequence
  Synthetic
ugugccuuagcauacccau

SEQ ID NO: 360266 - RNA, 20 nt, Artificial Sequence
  Synthetic
augugccuuagcauacccau

SEQ ID NO: 360267 - RNA, 21 nt, Artificial Sequence
  Synthetic
caugugccuuagcauacccau

SEQ ID NO: 360268 - RNA, 22 nt, Artificial Sequence
  Synthetic
gcaugugccuuagcauacccau

SEQ ID NO: 360269 - RNA, 23 nt, Artificial Sequence
  Synthetic
ggcaugugccuuagcauacccau

SEQ ID NO: 360270 - RNA, 24 nt, Artificial Sequence
  Synthetic
gggcaugugccuuagcauacccau

SEQ ID NO: 360271 - RNA, 18 nt, Artificial Sequence
  Synthetic
cauguacugacuacccau

SEQ ID NO: 360272 - RNA, 19 nt, Artificial Sequence
  Synthetic
acauguacugacuacccau

SEQ ID NO: 360273 - RNA, 20 nt, Artificial Sequence
  Synthetic
aacauguacugacuacccau

SEQ ID NO: 360274 - RNA, 21 nt, Artificial Sequence
  Synthetic
uaacauguacugacuacccau

SEQ ID NO: 360275 - RNA, 22 nt, Artificial Sequence
  Synthetic
uuaacauguacugacuacccau

SEQ ID NO: 360276 - RNA, 23 nt, Artificial Sequence
  Synthetic
auuaacauguacugacuacccau

SEQ ID NO: 360277 - RNA, 24 nt, Artificial Sequence
  Synthetic
aauuaacauguacugacuacccau

SEQ ID NO: 360278 - RNA, 18 nt, Artificial Sequence
  Synthetic
gauuaagguccuacccau

SEQ ID NO: 360279 - RNA, 19 nt, Artificial Sequence
  Synthetic
ggauuaagguccuacccau

SEQ ID NO: 360280 - RNA, 20 nt, Artificial Sequence
  Synthetic
uggauuaagguccuacccau

SEQ ID NO: 360281 - RNA, 21 nt, Artificial Sequence
  Synthetic
uuggauuaagguccuacccau

SEQ ID NO: 360282 - RNA, 22 nt, Artificial Sequence
  Synthetic
auuggauuaagguccuacccau

SEQ ID NO: 360283 - RNA, 23 nt, Artificial Sequence
  Synthetic
uauuggauuaagguccuacccau

SEQ ID NO: 360284 - RNA, 24 nt, Artificial Sequence
  Synthetic
uuauuggauuaagguccuacccau

SEQ ID NO: 360285 - RNA, 18 nt, Artificial Sequence
  Synthetic
cccuguucucuuacccau

SEQ ID NO: 360286 - RNA, 19 nt, Artificial Sequence
  Synthetic
gcccuguucucuuacccau

SEQ ID NO: 360287 - RNA, 20 nt, Artificial Sequence
  Synthetic
ggcccuguucucuuacccau

SEQ ID NO: 360288 - RNA, 21 nt, Artificial Sequence
  Synthetic
uggcccuguucucuuacccau

SEQ ID NO: 360289 - RNA, 22 nt, Artificial Sequence
  Synthetic
auggcccuguucucuuacccau

SEQ ID NO: 360290 - RNA, 23 nt, Artificial Sequence
  Synthetic
gauggcccuguucucuuacccau

SEQ ID NO: 360291 - RNA, 24 nt, Artificial Sequence
  Synthetic
ugauggcccuguucucuuacccau

SEQ ID NO: 360292 - RNA, 18 nt, Artificial Sequence
  Synthetic
uccucaauuuuuacccau

SEQ ID NO: 360293 - RNA, 19 nt, Artificial Sequence
  Synthetic
uuccucaauuuuuacccau

SEQ ID NO: 360294 - RNA, 20 nt, Artificial Sequence
  Synthetic
guuccucaauuuuuacccau

SEQ ID NO: 360295 - RNA, 21 nt, Artificial Sequence
  Synthetic
gguuccucaauuuuuacccau

SEQ ID NO: 360296 - RNA, 22 nt, Artificial Sequence
  Synthetic
agguuccucaauuuuuacccau

SEQ ID NO: 360297 - RNA, 23 nt, Artificial Sequence
  Synthetic
cagguuccucaauuuuuacccau

SEQ ID NO: 360298 - RNA, 24 nt, Artificial Sequence
  Synthetic
ccagguuccucaauuuuuacccau

SEQ ID NO: 360299 - RNA, 18 nt, Artificial Sequence
  Synthetic
uccacacaaaaaccccau

SEQ ID NO: 360300 - RNA, 19 nt, Artificial Sequence
  Synthetic
guccacacaaaaaccccau

SEQ ID NO: 360301 - RNA, 20 nt, Artificial Sequence
  Synthetic
cguccacacaaaaaccccau

SEQ ID NO: 360302 - RNA, 21 nt, Artificial Sequence
  Synthetic
acguccacacaaaaaccccau

SEQ ID NO: 360303 - RNA, 22 nt, Artificial Sequence
  Synthetic
gacguccacacaaaaaccccau

SEQ ID NO: 360304 - RNA, 23 nt, Artificial Sequence
  Synthetic
ggacguccacacaaaaaccccau

SEQ ID NO: 360305 - RNA, 24 nt, Artificial Sequence
  Synthetic
aggacguccacacaaaaaccccau

SEQ ID NO: 360306 - RNA, 18 nt, Artificial Sequence
  Synthetic
gguccugggucaccccau

SEQ ID NO: 360307 - RNA, 19 nt, Artificial Sequence
  Synthetic
ugguccugggucaccccau

SEQ ID NO: 360308 - RNA, 20 nt, Artificial Sequence
  Synthetic
augguccugggucaccccau

SEQ ID NO: 360309 - RNA, 21 nt, Artificial Sequence
  Synthetic
aaugguccugggucaccccau

SEQ ID NO: 360310 - RNA, 22 nt, Artificial Sequence
  Synthetic
uaaugguccugggucaccccau

SEQ ID NO: 360311 - RNA, 23 nt, Artificial Sequence
  Synthetic
uuaaugguccugggucaccccau

SEQ ID NO: 360312 - RNA, 24 nt, Artificial Sequence
  Synthetic
guuaaugguccugggucaccccau

SEQ ID NO: 360313 - RNA, 18 nt, Artificial Sequence
  Synthetic
aggcucuaaccagcccau

SEQ ID NO: 360314 - RNA, 19 nt, Artificial Sequence
  Synthetic
caggcucuaaccagcccau

SEQ ID NO: 360315 - RNA, 20 nt, Artificial Sequence
  Synthetic
ccaggcucuaaccagcccau

SEQ ID NO: 360316 - RNA, 21 nt, Artificial Sequence
  Synthetic
uccaggcucuaaccagcccau

SEQ ID NO: 360317 - RNA, 22 nt, Artificial Sequence
  Synthetic
uuccaggcucuaaccagcccau

SEQ ID NO: 360318 - RNA, 23 nt, Artificial Sequence
  Synthetic
auuccaggcucuaaccagcccau

SEQ ID NO: 360319 - RNA, 24 nt, Artificial Sequence
  Synthetic
aauuccaggcucuaaccagcccau

SEQ ID NO: 360320 - RNA, 18 nt, Artificial Sequence
  Synthetic
cuuaagaggccagcccau

SEQ ID NO: 360321 - RNA, 19 nt, Artificial Sequence
  Synthetic
ucuuaagaggccagcccau

SEQ ID NO: 360322 - RNA, 20 nt, Artificial Sequence
  Synthetic
aucuuaagaggccagcccau

SEQ ID NO: 360323 - RNA, 21 nt, Artificial Sequence
  Synthetic
caucuuaagaggccagcccau

SEQ ID NO: 360324 - RNA, 22 nt, Artificial Sequence
  Synthetic
gcaucuuaagaggccagcccau

SEQ ID NO: 360325 - RNA, 23 nt, Artificial Sequence
  Synthetic
ugcaucuuaagaggccagcccau

SEQ ID NO: 360326 - RNA, 24 nt, Artificial Sequence
  Synthetic
uugcaucuuaagaggccagcccau

SEQ ID NO: 360327 - RNA, 18 nt, Artificial Sequence
  Synthetic
ugagccccagaugcccau

SEQ ID NO: 360328 - RNA, 19 nt, Artificial Sequence
  Synthetic
gugagccccagaugcccau

SEQ ID NO: 360329 - RNA, 20 nt, Artificial Sequence
  Synthetic
ugugagccccagaugcccau

SEQ ID NO: 360330 - RNA, 21 nt, Artificial Sequence
  Synthetic
uugugagccccagaugcccau

SEQ ID NO: 360331 - RNA, 22 nt, Artificial Sequence
  Synthetic
uuugugagccccagaugcccau

SEQ ID NO: 360332 - RNA, 23 nt, Artificial Sequence
  Synthetic
uuuugugagccccagaugcccau

SEQ ID NO: 360333 - RNA, 24 nt, Artificial Sequence
  Synthetic
guuuugugagccccagaugcccau

SEQ ID NO: 360334 - RNA, 18 nt, Artificial Sequence
  Synthetic
guaaaauuauaugcccau

SEQ ID NO: 360335 - RNA, 19 nt, Artificial Sequence
  Synthetic
uguaaaauuauaugcccau

SEQ ID NO: 360336 - RNA, 20 nt, Artificial Sequence
  Synthetic
cuguaaaauuauaugcccau

SEQ ID NO: 360337 - RNA, 21 nt, Artificial Sequence
  Synthetic
ccuguaaaauuauaugcccau

SEQ ID NO: 360338 - RNA, 22 nt, Artificial Sequence
  Synthetic
uccuguaaaauuauaugcccau

SEQ ID NO: 360339 - RNA, 23 nt, Artificial Sequence
  Synthetic
cuccuguaaaauuauaugcccau

SEQ ID NO: 360340 - RNA, 24 nt, Artificial Sequence
  Synthetic
acuccuguaaaauuauaugcccau

SEQ ID NO: 360341 - RNA, 18 nt, Artificial Sequence
  Synthetic
caacuacaugcugcccau

SEQ ID NO: 360342 - RNA, 19 nt, Artificial Sequence
  Synthetic
ucaacuacaugcugcccau

SEQ ID NO: 360343 - RNA, 20 nt, Artificial Sequence
  Synthetic
cucaacuacaugcugcccau

SEQ ID NO: 360344 - RNA, 21 nt, Artificial Sequence
  Synthetic
acucaacuacaugcugcccau

SEQ ID NO: 360345 - RNA, 22 nt, Artificial Sequence
  Synthetic
gacucaacuacaugcugcccau

SEQ ID NO: 360346 - RNA, 23 nt, Artificial Sequence
  Synthetic
agacucaacuacaugcugcccau

SEQ ID NO: 360347 - RNA, 24 nt, Artificial Sequence
  Synthetic
aagacucaacuacaugcugcccau

SEQ ID NO: 360348 - RNA, 18 nt, Artificial Sequence
  Synthetic
gguaucuccaaaucccau

SEQ ID NO: 360349 - RNA, 19 nt, Artificial Sequence
  Synthetic
ggguaucuccaaaucccau

SEQ ID NO: 360350 - RNA, 20 nt, Artificial Sequence
  Synthetic
uggguaucuccaaaucccau

SEQ ID NO: 360351 - RNA, 21 nt, Artificial Sequence
  Synthetic
cuggguaucuccaaaucccau

SEQ ID NO: 360352 - RNA, 22 nt, Artificial Sequence
  Synthetic
ucuggguaucuccaaaucccau

SEQ ID NO: 360353 - RNA, 23 nt, Artificial Sequence
  Synthetic
aucuggguaucuccaaaucccau

SEQ ID NO: 360354 - RNA, 24 nt, Artificial Sequence
  Synthetic
caucuggguaucuccaaaucccau

SEQ ID NO: 360355 - RNA, 18 nt, Artificial Sequence
  Synthetic
uuggccaauuucucccau

SEQ ID NO: 360356 - RNA, 19 nt, Artificial Sequence
  Synthetic
uuuggccaauuucucccau

SEQ ID NO: 360357 - RNA, 20 nt, Artificial Sequence
  Synthetic
uuuuggccaauuucucccau

SEQ ID NO: 360358 - RNA, 21 nt, Artificial Sequence
  Synthetic
auuuuggccaauuucucccau

SEQ ID NO: 360359 - RNA, 22 nt, Artificial Sequence
  Synthetic
uauuuuggccaauuucucccau

SEQ ID NO: 360360 - RNA, 23 nt, Artificial Sequence
  Synthetic
uuauuuuggccaauuucucccau

SEQ ID NO: 360361 - RNA, 24 nt, Artificial Sequence
  Synthetic
uuuauuuuggccaauuucucccau

SEQ ID NO: 360362 - RNA, 18 nt, Artificial Sequence
  Synthetic
gaaauguuaacgucccau

SEQ ID NO: 360363 - RNA, 19 nt, Artificial Sequence
  Synthetic
ggaaauguuaacgucccau

SEQ ID NO: 360364 - RNA, 20 nt, Artificial Sequence
  Synthetic
aggaaauguuaacgucccau

SEQ ID NO: 360365 - RNA, 21 nt, Artificial Sequence
  Synthetic
gaggaaauguuaacgucccau

SEQ ID NO: 360366 - RNA, 22 nt, Artificial Sequence
  Synthetic
agaggaaauguuaacgucccau

SEQ ID NO: 360367 - RNA, 23 nt, Artificial Sequence
  Synthetic
gagaggaaauguuaacgucccau

SEQ ID NO: 360368 - RNA, 24 nt, Artificial Sequence
  Synthetic
agagaggaaauguuaacgucccau

SEQ ID NO: 360369 - RNA, 18 nt, Artificial Sequence
  Synthetic
uucuuuuucaggucccau

SEQ ID NO: 360370 - RNA, 19 nt, Artificial Sequence
  Synthetic
guucuuuuucaggucccau

SEQ ID NO: 360371 - RNA, 20 nt, Artificial Sequence
  Synthetic
uguucuuuuucaggucccau

SEQ ID NO: 360372 - RNA, 21 nt, Artificial Sequence
  Synthetic
cuguucuuuuucaggucccau

SEQ ID NO: 360373 - RNA, 22 nt, Artificial Sequence
  Synthetic
gcuguucuuuuucaggucccau

SEQ ID NO: 360374 - RNA, 23 nt, Artificial Sequence
  Synthetic
ugcuguucuuuuucaggucccau

SEQ ID NO: 360375 - RNA, 24 nt, Artificial Sequence
  Synthetic
cugcuguucuuuuucaggucccau

SEQ ID NO: 360376 - RNA, 18 nt, Artificial Sequence
  Synthetic
gaucuuaucuggucccau

SEQ ID NO: 360377 - RNA, 19 nt, Artificial Sequence
  Synthetic
agaucuuaucuggucccau

SEQ ID NO: 360378 - RNA, 20 nt, Artificial Sequence
  Synthetic
aagaucuuaucuggucccau

SEQ ID NO: 360379 - RNA, 21 nt, Artificial Sequence
  Synthetic
gaagaucuuaucuggucccau

SEQ ID NO: 360380 - RNA, 22 nt, Artificial Sequence
  Synthetic
ggaagaucuuaucuggucccau

SEQ ID NO: 360381 - RNA, 23 nt, Artificial Sequence
  Synthetic
uggaagaucuuaucuggucccau

SEQ ID NO: 360382 - RNA, 24 nt, Artificial Sequence
  Synthetic
auggaagaucuuaucuggucccau

SEQ ID NO: 360383 - RNA, 18 nt, Artificial Sequence
  Synthetic
gccacauuaaauucccau

SEQ ID NO: 360384 - RNA, 19 nt, Artificial Sequence
  Synthetic
agccacauuaaauucccau

SEQ ID NO: 360385 - RNA, 20 nt, Artificial Sequence
  Synthetic
cagccacauuaaauucccau

SEQ ID NO: 360386 - RNA, 21 nt, Artificial Sequence
  Synthetic
gcagccacauuaaauucccau

SEQ ID NO: 360387 - RNA, 22 nt, Artificial Sequence
  Synthetic
agcagccacauuaaauucccau

SEQ ID NO: 360388 - RNA, 23 nt, Artificial Sequence
  Synthetic
cagcagccacauuaaauucccau

SEQ ID NO: 360389 - RNA, 24 nt, Artificial Sequence
  Synthetic
ucagcagccacauuaaauucccau

SEQ ID NO: 360390 - RNA, 18 nt, Artificial Sequence
  Synthetic
cuaccuuuuacuucccau

SEQ ID NO: 360391 - RNA, 19 nt, Artificial Sequence
  Synthetic
ucuaccuuuuacuucccau

SEQ ID NO: 360392 - RNA, 20 nt, Artificial Sequence
  Synthetic
cucuaccuuuuacuucccau

SEQ ID NO: 360393 - RNA, 21 nt, Artificial Sequence
  Synthetic
acucuaccuuuuacuucccau

SEQ ID NO: 360394 - RNA, 22 nt, Artificial Sequence
  Synthetic
aacucuaccuuuuacuucccau

SEQ ID NO: 360395 - RNA, 23 nt, Artificial Sequence
  Synthetic
caacucuaccuuuuacuucccau

SEQ ID NO: 360396 - RNA, 24 nt, Artificial Sequence
  Synthetic
ccaacucuaccuuuuacuucccau

SEQ ID NO: 360397 - RNA, 18 nt, Artificial Sequence
  Synthetic
gaguaugucuaaagccau

SEQ ID NO: 360398 - RNA, 19 nt, Artificial Sequence
  Synthetic
agaguaugucuaaagccau

SEQ ID NO: 360399 - RNA, 20 nt, Artificial Sequence
  Synthetic
cagaguaugucuaaagccau

SEQ ID NO: 360400 - RNA, 21 nt, Artificial Sequence
  Synthetic
ccagaguaugucuaaagccau

SEQ ID NO: 360401 - RNA, 22 nt, Artificial Sequence
  Synthetic
uccagaguaugucuaaagccau

SEQ ID NO: 360402 - RNA, 23 nt, Artificial Sequence
  Synthetic
guccagaguaugucuaaagccau

SEQ ID NO: 360403 - RNA, 24 nt, Artificial Sequence
  Synthetic
uguccagaguaugucuaaagccau

SEQ ID NO: 360404 - RNA, 18 nt, Artificial Sequence
  Synthetic
ucauaggaguaaagccau

SEQ ID NO: 360405 - RNA, 19 nt, Artificial Sequence
  Synthetic
gucauaggaguaaagccau

SEQ ID NO: 360406 - RNA, 20 nt, Artificial Sequence
  Synthetic
ggucauaggaguaaagccau

SEQ ID NO: 360407 - RNA, 21 nt, Artificial Sequence
  Synthetic
gggucauaggaguaaagccau

SEQ ID NO: 360408 - RNA, 22 nt, Artificial Sequence
  Synthetic
ugggucauaggaguaaagccau

SEQ ID NO: 360409 - RNA, 23 nt, Artificial Sequence
  Synthetic
cugggucauaggaguaaagccau

SEQ ID NO: 360410 - RNA, 24 nt, Artificial Sequence
  Synthetic
ccugggucauaggaguaaagccau

SEQ ID NO: 360411 - RNA, 18 nt, Artificial Sequence
  Synthetic
aagugugauggaagccau

SEQ ID NO: 360412 - RNA, 19 nt, Artificial Sequence
  Synthetic
gaagugugauggaagccau

SEQ ID NO: 360413 - RNA, 20 nt, Artificial Sequence
  Synthetic
ggaagugugauggaagccau

SEQ ID NO: 360414 - RNA, 21 nt, Artificial Sequence
  Synthetic
gggaagugugauggaagccau

SEQ ID NO: 360415 - RNA, 22 nt, Artificial Sequence
  Synthetic
ggggaagugugauggaagccau

SEQ ID NO: 360416 - RNA, 23 nt, Artificial Sequence
  Synthetic
aggggaagugugauggaagccau

SEQ ID NO: 360417 - RNA, 24 nt, Artificial Sequence
  Synthetic
caggggaagugugauggaagccau

SEQ ID NO: 360418 - RNA, 18 nt, Artificial Sequence
  Synthetic
ggaggccucugaagccau

SEQ ID NO: 360419 - RNA, 19 nt, Artificial Sequence
  Synthetic
cggaggccucugaagccau

SEQ ID NO: 360420 - RNA, 20 nt, Artificial Sequence
  Synthetic
ccggaggccucugaagccau

SEQ ID NO: 360421 - RNA, 21 nt, Artificial Sequence
  Synthetic
uccggaggccucugaagccau

SEQ ID NO: 360422 - RNA, 22 nt, Artificial Sequence
  Synthetic
uuccggaggccucugaagccau

SEQ ID NO: 360423 - RNA, 23 nt, Artificial Sequence
  Synthetic
uuuccggaggccucugaagccau

SEQ ID NO: 360424 - RNA, 24 nt, Artificial Sequence
  Synthetic
guuuccggaggccucugaagccau

SEQ ID NO: 360425 - RNA, 18 nt, Artificial Sequence
  Synthetic
ggaauacuaugcagccau

SEQ ID NO: 360426 - RNA, 19 nt, Artificial Sequence
  Synthetic
uggaauacuaugcagccau

SEQ ID NO: 360427 - RNA, 20 nt, Artificial Sequence
  Synthetic
auggaauacuaugcagccau

SEQ ID NO: 360428 - RNA, 21 nt, Artificial Sequence
  Synthetic
cauggaauacuaugcagccau

SEQ ID NO: 360429 - RNA, 22 nt, Artificial Sequence
  Synthetic
ccauggaauacuaugcagccau

SEQ ID NO: 360430 - RNA, 23 nt, Artificial Sequence
  Synthetic
accauggaauacuaugcagccau

SEQ ID NO: 360431 - RNA, 24 nt, Artificial Sequence
  Synthetic
caccauggaauacuaugcagccau

SEQ ID NO: 360432 - RNA, 18 nt, Artificial Sequence
  Synthetic
cuccaggcuuggagccau

SEQ ID NO: 360433 - RNA, 19 nt, Artificial Sequence
  Synthetic
acuccaggcuuggagccau

SEQ ID NO: 360434 - RNA, 20 nt, Artificial Sequence
  Synthetic
gacuccaggcuuggagccau

SEQ ID NO: 360435 - RNA, 21 nt, Artificial Sequence
  Synthetic
agacuccaggcuuggagccau

SEQ ID NO: 360436 - RNA, 22 nt, Artificial Sequence
  Synthetic
aagacuccaggcuuggagccau

SEQ ID NO: 360437 - RNA, 23 nt, Artificial Sequence
  Synthetic
caagacuccaggcuuggagccau

SEQ ID NO: 360438 - RNA, 24 nt, Artificial Sequence
  Synthetic
ccaagacuccaggcuuggagccau

SEQ ID NO: 360439 - RNA, 18 nt, Artificial Sequence
  Synthetic
ccuaguguagcuagccau

SEQ ID NO: 360440 - RNA, 19 nt, Artificial Sequence
  Synthetic
cccuaguguagcuagccau

SEQ ID NO: 360441 - RNA, 20 nt, Artificial Sequence
  Synthetic
ccccuaguguagcuagccau

SEQ ID NO: 360442 - RNA, 21 nt, Artificial Sequence
  Synthetic
cccccuaguguagcuagccau

SEQ ID NO: 360443 - RNA, 22 nt, Artificial Sequence
  Synthetic
ucccccuaguguagcuagccau

SEQ ID NO: 360444 - RNA, 23 nt, Artificial Sequence
  Synthetic
uucccccuaguguagcuagccau

SEQ ID NO: 360445 - RNA, 24 nt, Artificial Sequence
  Synthetic
uuucccccuaguguagcuagccau

SEQ ID NO: 360446 - RNA, 18 nt, Artificial Sequence
  Synthetic
cguucuccuucuagccau

SEQ ID NO: 360447 - RNA, 19 nt, Artificial Sequence
  Synthetic
acguucuccuucuagccau

SEQ ID NO: 360448 - RNA, 20 nt, Artificial Sequence
  Synthetic
aacguucuccuucuagccau

SEQ ID NO: 360449 - RNA, 21 nt, Artificial Sequence
  Synthetic
caacguucuccuucuagccau

SEQ ID NO: 360450 - RNA, 22 nt, Artificial Sequence
  Synthetic
ucaacguucuccuucuagccau

SEQ ID NO: 360451 - RNA, 23 nt, Artificial Sequence
  Synthetic
uucaacguucuccuucuagccau

SEQ ID NO: 360452 - RNA, 24 nt, Artificial Sequence
  Synthetic
auucaacguucuccuucuagccau

SEQ ID NO: 360453 - RNA, 18 nt, Artificial Sequence
  Synthetic
aucaaaaacauuagccau

SEQ ID NO: 360454 - RNA, 19 nt, Artificial Sequence
  Synthetic
uaucaaaaacauuagccau

SEQ ID NO: 360455 - RNA, 20 nt, Artificial Sequence
  Synthetic
uuaucaaaaacauuagccau

SEQ ID NO: 360456 - RNA, 21 nt, Artificial Sequence
  Synthetic
auuaucaaaaacauuagccau

SEQ ID NO: 360457 - RNA, 22 nt, Artificial Sequence
  Synthetic
gauuaucaaaaacauuagccau

SEQ ID NO: 360458 - RNA, 23 nt, Artificial Sequence
  Synthetic
agauuaucaaaaacauuagccau

SEQ ID NO: 360459 - RNA, 24 nt, Artificial Sequence
  Synthetic
aagauuaucaaaaacauuagccau

SEQ ID NO: 360460 - RNA, 18 nt, Artificial Sequence
  Synthetic
aacucaagcuuucgccau

SEQ ID NO: 360461 - RNA, 19 nt, Artificial Sequence
  Synthetic
uaacucaagcuuucgccau

SEQ ID NO: 360462 - RNA, 20 nt, Artificial Sequence
  Synthetic
uuaacucaagcuuucgccau

SEQ ID NO: 360463 - RNA, 21 nt, Artificial Sequence
  Synthetic
auuaacucaagcuuucgccau

SEQ ID NO: 360464 - RNA, 22 nt, Artificial Sequence
  Synthetic
cauuaacucaagcuuucgccau

SEQ ID NO: 360465 - RNA, 23 nt, Artificial Sequence
  Synthetic
ucauuaacucaagcuuucgccau

SEQ ID NO: 360466 - RNA, 24 nt, Artificial Sequence
  Synthetic
aucauuaacucaagcuuucgccau

SEQ ID NO: 360467 - RNA, 18 nt, Artificial Sequence
  Synthetic
agagcugcccaaggccau

SEQ ID NO: 360468 - RNA, 19 nt, Artificial Sequence
  Synthetic
cagagcugcccaaggccau

SEQ ID NO: 360469 - RNA, 20 nt, Artificial Sequence
  Synthetic
gcagagcugcccaaggccau

SEQ ID NO: 360470 - RNA, 21 nt, Artificial Sequence
  Synthetic
ggcagagcugcccaaggccau

SEQ ID NO: 360471 - RNA, 22 nt, Artificial Sequence
  Synthetic
gggcagagcugcccaaggccau

SEQ ID NO: 360472 - RNA, 23 nt, Artificial Sequence
  Synthetic
agggcagagcugcccaaggccau

SEQ ID NO: 360473 - RNA, 24 nt, Artificial Sequence
  Synthetic
aagggcagagcugcccaaggccau

SEQ ID NO: 360474 - RNA, 18 nt, Artificial Sequence
  Synthetic
uacaacauacuaggccau

SEQ ID NO: 360475 - RNA, 19 nt, Artificial Sequence
  Synthetic
auacaacauacuaggccau

SEQ ID NO: 360476 - RNA, 20 nt, Artificial Sequence
  Synthetic
aauacaacauacuaggccau

SEQ ID NO: 360477 - RNA, 21 nt, Artificial Sequence
  Synthetic
gaauacaacauacuaggccau

SEQ ID NO: 360478 - RNA, 22 nt, Artificial Sequence
  Synthetic
agaauacaacauacuaggccau

SEQ ID NO: 360479 - RNA, 23 nt, Artificial Sequence
  Synthetic
cagaauacaacauacuaggccau

SEQ ID NO: 360480 - RNA, 24 nt, Artificial Sequence
  Synthetic
gcagaauacaacauacuaggccau

SEQ ID NO: 360481 - RNA, 18 nt, Artificial Sequence
  Synthetic
aaguauuggcuaggccau

SEQ ID NO: 360482 - RNA, 19 nt, Artificial Sequence
  Synthetic
aaaguauuggcuaggccau

SEQ ID NO: 360483 - RNA, 20 nt, Artificial Sequence
  Synthetic
caaaguauuggcuaggccau

SEQ ID NO: 360484 - RNA, 21 nt, Artificial Sequence
  Synthetic
gcaaaguauuggcuaggccau

SEQ ID NO: 360485 - RNA, 22 nt, Artificial Sequence
  Synthetic
agcaaaguauuggcuaggccau

SEQ ID NO: 360486 - RNA, 23 nt, Artificial Sequence
  Synthetic
aagcaaaguauuggcuaggccau

SEQ ID NO: 360487 - RNA, 24 nt, Artificial Sequence
  Synthetic
uaagcaaaguauuggcuaggccau

SEQ ID NO: 360488 - RNA, 18 nt, Artificial Sequence
  Synthetic
aaguggugauuaggccau

SEQ ID NO: 360489 - RNA, 19 nt, Artificial Sequence
  Synthetic
uaaguggugauuaggccau

SEQ ID NO: 360490 - RNA, 20 nt, Artificial Sequence
  Synthetic
uuaaguggugauuaggccau

SEQ ID NO: 360491 - RNA, 21 nt, Artificial Sequence
  Synthetic
uuuaaguggugauuaggccau

SEQ ID NO: 360492 - RNA, 22 nt, Artificial Sequence
  Synthetic
guuuaaguggugauuaggccau

SEQ ID NO: 360493 - RNA, 23 nt, Artificial Sequence
  Synthetic
uguuuaaguggugauuaggccau

SEQ ID NO: 360494 - RNA, 24 nt, Artificial Sequence
  Synthetic
guguuuaaguggugauuaggccau

SEQ ID NO: 360495 - RNA, 18 nt, Artificial Sequence
  Synthetic
cucaccaucacuggccau

SEQ ID NO: 360496 - RNA, 19 nt, Artificial Sequence
  Synthetic
gcucaccaucacuggccau

SEQ ID NO: 360497 - RNA, 20 nt, Artificial Sequence
  Synthetic
ugcucaccaucacuggccau

SEQ ID NO: 360498 - RNA, 21 nt, Artificial Sequence
  Synthetic
augcucaccaucacuggccau

SEQ ID NO: 360499 - RNA, 22 nt, Artificial Sequence
  Synthetic
aaugcucaccaucacuggccau

SEQ ID NO: 360500 - RNA, 23 nt, Artificial Sequence
  Synthetic
aaaugcucaccaucacuggccau

SEQ ID NO: 360501 - RNA, 24 nt, Artificial Sequence
  Synthetic
aaaaugcucaccaucacuggccau

SEQ ID NO: 360502 - RNA, 18 nt, Artificial Sequence
  Synthetic
cucaucaucacuggccau

SEQ ID NO: 360503 - RNA, 19 nt, Artificial Sequence
  Synthetic
gcucaucaucacuggccau

SEQ ID NO: 360504 - RNA, 20 nt, Artificial Sequence
  Synthetic
ugcucaucaucacuggccau

SEQ ID NO: 360505 - RNA, 21 nt, Artificial Sequence
  Synthetic
augcucaucaucacuggccau

SEQ ID NO: 360506 - RNA, 22 nt, Artificial Sequence
  Synthetic
aaugcucaucaucacuggccau

SEQ ID NO: 360507 - RNA, 23 nt, Artificial Sequence
  Synthetic
aaaugcucaucaucacuggccau

SEQ ID NO: 360508 - RNA, 24 nt, Artificial Sequence
  Synthetic
gaaaugcucaucaucacuggccau

SEQ ID NO: 360509 - RNA, 18 nt, Artificial Sequence
  Synthetic
gaugaaaaacguggccau

SEQ ID NO: 360510 - RNA, 19 nt, Artificial Sequence
  Synthetic
ugaugaaaaacguggccau

SEQ ID NO: 360511 - RNA, 20 nt, Artificial Sequence
  Synthetic
gugaugaaaaacguggccau

SEQ ID NO: 360512 - RNA, 21 nt, Artificial Sequence
  Synthetic
ggugaugaaaaacguggccau

SEQ ID NO: 360513 - RNA, 22 nt, Artificial Sequence
  Synthetic
gggugaugaaaaacguggccau

SEQ ID NO: 360514 - RNA, 23 nt, Artificial Sequence
  Synthetic
agggugaugaaaaacguggccau

SEQ ID NO: 360515 - RNA, 24 nt, Artificial Sequence
  Synthetic
gagggugaugaaaaacguggccau

SEQ ID NO: 360516 - RNA, 18 nt, Artificial Sequence
  Synthetic
auguauuauguuggccau

SEQ ID NO: 360517 - RNA, 19 nt, Artificial Sequence
  Synthetic
uauguauuauguuggccau

SEQ ID NO: 360518 - RNA, 20 nt, Artificial Sequence
  Synthetic
uuauguauuauguuggccau

SEQ ID NO: 360519 - RNA, 21 nt, Artificial Sequence
  Synthetic
uuuauguauuauguuggccau

SEQ ID NO: 360520 - RNA, 22 nt, Artificial Sequence
  Synthetic
uuuuauguauuauguuggccau

SEQ ID NO: 360521 - RNA, 23 nt, Artificial Sequence
  Synthetic
uuuuuauguauuauguuggccau

SEQ ID NO: 360522 - RNA, 24 nt, Artificial Sequence
  Synthetic
cuuuuuauguauuauguuggccau

SEQ ID NO: 360523 - RNA, 18 nt, Artificial Sequence
  Synthetic
aauuaaucuaaaugccau

SEQ ID NO: 360524 - RNA, 19 nt, Artificial Sequence
  Synthetic
aaauuaaucuaaaugccau

SEQ ID NO: 360525 - RNA, 20 nt, Artificial Sequence
  Synthetic
uaaauuaaucuaaaugccau

SEQ ID NO: 360526 - RNA, 21 nt, Artificial Sequence
  Synthetic
uuaaauuaaucuaaaugccau

SEQ ID NO: 360527 - RNA, 22 nt, Artificial Sequence
  Synthetic
uuuaaauuaaucuaaaugccau

SEQ ID NO: 360528 - RNA, 23 nt, Artificial Sequence
  Synthetic
cuuuaaauuaaucuaaaugccau

SEQ ID NO: 360529 - RNA, 24 nt, Artificial Sequence
  Synthetic
ccuuuaaauuaaucuaaaugccau

SEQ ID NO: 360530 - RNA, 18 nt, Artificial Sequence
  Synthetic
uuaauguugccaugccau

SEQ ID NO: 360531 - RNA, 19 nt, Artificial Sequence
  Synthetic
uuuaauguugccaugccau

SEQ ID NO: 360532 - RNA, 20 nt, Artificial Sequence
  Synthetic
cuuuaauguugccaugccau

SEQ ID NO: 360533 - RNA, 21 nt, Artificial Sequence
  Synthetic
acuuuaauguugccaugccau

SEQ ID NO: 360534 - RNA, 22 nt, Artificial Sequence
  Synthetic
gacuuuaauguugccaugccau

SEQ ID NO: 360535 - RNA, 23 nt, Artificial Sequence
  Synthetic
ggacuuuaauguugccaugccau

SEQ ID NO: 360536 - RNA, 24 nt, Artificial Sequence
  Synthetic
aggacuuuaauguugccaugccau

SEQ ID NO: 360537 - RNA, 18 nt, Artificial Sequence
  Synthetic
ucaagccacagaugccau

SEQ ID NO: 360538 - RNA, 19 nt, Artificial Sequence
  Synthetic
cucaagccacagaugccau

SEQ ID NO: 360539 - RNA, 20 nt, Artificial Sequence
  Synthetic
ucucaagccacagaugccau

SEQ ID NO: 360540 - RNA, 21 nt, Artificial Sequence
  Synthetic
gucucaagccacagaugccau

SEQ ID NO: 360541 - RNA, 22 nt, Artificial Sequence
  Synthetic
ugucucaagccacagaugccau

SEQ ID NO: 360542 - RNA, 23 nt, Artificial Sequence
  Synthetic
augucucaagccacagaugccau

SEQ ID NO: 360543 - RNA, 24 nt, Artificial Sequence
  Synthetic
uaugucucaagccacagaugccau

SEQ ID NO: 360544 - RNA, 18 nt, Artificial Sequence
  Synthetic
agacuuauucacugccau

SEQ ID NO: 360545 - RNA, 19 nt, Artificial Sequence
  Synthetic
gagacuuauucacugccau

SEQ ID NO: 360546 - RNA, 20 nt, Artificial Sequence
  Synthetic
ugagacuuauucacugccau

SEQ ID NO: 360547 - RNA, 21 nt, Artificial Sequence
  Synthetic
cugagacuuauucacugccau

SEQ ID NO: 360548 - RNA, 22 nt, Artificial Sequence
  Synthetic
ccugagacuuauucacugccau

SEQ ID NO: 360549 - RNA, 23 nt, Artificial Sequence
  Synthetic
uccugagacuuauucacugccau

SEQ ID NO: 360550 - RNA, 24 nt, Artificial Sequence
  Synthetic
cuccugagacuuauucacugccau

SEQ ID NO: 360551 - RNA, 18 nt, Artificial Sequence
  Synthetic
uaaguuucacucugccau

SEQ ID NO: 360552 - RNA, 19 nt, Artificial Sequence
  Synthetic
cuaaguuucacucugccau

SEQ ID NO: 360553 - RNA, 20 nt, Artificial Sequence
  Synthetic
ucuaaguuucacucugccau

SEQ ID NO: 360554 - RNA, 21 nt, Artificial Sequence
  Synthetic
cucuaaguuucacucugccau

SEQ ID NO: 360555 - RNA, 22 nt, Artificial Sequence
  Synthetic
ucucuaaguuucacucugccau

SEQ ID NO: 360556 - RNA, 23 nt, Artificial Sequence
  Synthetic
uucucuaaguuucacucugccau

SEQ ID NO: 360557 - RNA, 24 nt, Artificial Sequence
  Synthetic
auucucuaaguuucacucugccau

SEQ ID NO: 360558 - RNA, 18 nt, Artificial Sequence
  Synthetic
uccuuggccaguugccau

SEQ ID NO: 360559 - RNA, 19 nt, Artificial Sequence
  Synthetic
cuccuuggccaguugccau

SEQ ID NO: 360560 - RNA, 20 nt, Artificial Sequence
  Synthetic
ccuccuuggccaguugccau

SEQ ID NO: 360561 - RNA, 21 nt, Artificial Sequence
  Synthetic
gccuccuuggccaguugccau

SEQ ID NO: 360562 - RNA, 22 nt, Artificial Sequence
  Synthetic
ugccuccuuggccaguugccau

SEQ ID NO: 360563 - RNA, 23 nt, Artificial Sequence
  Synthetic
gugccuccuuggccaguugccau

SEQ ID NO: 360564 - RNA, 24 nt, Artificial Sequence
  Synthetic
ggugccuccuuggccaguugccau

SEQ ID NO: 360565 - RNA, 18 nt, Artificial Sequence
  Synthetic
aaauaaugauguugccau

SEQ ID NO: 360566 - RNA, 19 nt, Artificial Sequence
  Synthetic
aaaauaaugauguugccau

SEQ ID NO: 360567 - RNA, 20 nt, Artificial Sequence
  Synthetic
uaaaauaaugauguugccau

SEQ ID NO: 360568 - RNA, 21 nt, Artificial Sequence
  Synthetic
auaaaauaaugauguugccau

SEQ ID NO: 360569 - RNA, 22 nt, Artificial Sequence
  Synthetic
aauaaaauaaugauguugccau

SEQ ID NO: 360570 - RNA, 23 nt, Artificial Sequence
  Synthetic
aaauaaaauaaugauguugccau

SEQ ID NO: 360571 - RNA, 24 nt, Artificial Sequence
  Synthetic
caaauaaaauaaugauguugccau

SEQ ID NO: 360572 - RNA, 18 nt, Artificial Sequence
  Synthetic
cacauuuuuuuuugccau

SEQ ID NO: 360573 - RNA, 19 nt, Artificial Sequence
  Synthetic
ccacauuuuuuuuugccau

SEQ ID NO: 360574 - RNA, 20 nt, Artificial Sequence
  Synthetic
cccacauuuuuuuuugccau

SEQ ID NO: 360575 - RNA, 21 nt, Artificial Sequence
  Synthetic
ccccacauuuuuuuuugccau

SEQ ID NO: 360576 - RNA, 22 nt, Artificial Sequence
  Synthetic
cccccacauuuuuuuuugccau

SEQ ID NO: 360577 - RNA, 23 nt, Artificial Sequence
  Synthetic
ucccccacauuuuuuuuugccau

SEQ ID NO: 360578 - RNA, 24 nt, Artificial Sequence
  Synthetic
cucccccacauuuuuuuuugccau

SEQ ID NO: 360579 - RNA, 18 nt, Artificial Sequence
  Synthetic
uaugucucuucaauccau

SEQ ID NO: 360580 - RNA, 19 nt, Artificial Sequence
  Synthetic
auaugucucuucaauccau

SEQ ID NO: 360581 - RNA, 20 nt, Artificial Sequence
  Synthetic
aauaugucucuucaauccau

SEQ ID NO: 360582 - RNA, 21 nt, Artificial Sequence
  Synthetic
gaauaugucucuucaauccau

SEQ ID NO: 360583 - RNA, 22 nt, Artificial Sequence
  Synthetic
ggaauaugucucuucaauccau

SEQ ID NO: 360584 - RNA, 23 nt, Artificial Sequence
  Synthetic
uggaauaugucucuucaauccau

SEQ ID NO: 360585 - RNA, 24 nt, Artificial Sequence
  Synthetic
uuggaauaugucucuucaauccau

SEQ ID NO: 360586 - RNA, 18 nt, Artificial Sequence
  Synthetic
gaauggugcuuaauccau

SEQ ID NO: 360587 - RNA, 19 nt, Artificial Sequence
  Synthetic
agaauggugcuuaauccau

SEQ ID NO: 360588 - RNA, 20 nt, Artificial Sequence
  Synthetic
aagaauggugcuuaauccau

SEQ ID NO: 360589 - RNA, 21 nt, Artificial Sequence
  Synthetic
aaagaauggugcuuaauccau

SEQ ID NO: 360590 - RNA, 22 nt, Artificial Sequence
  Synthetic
aaaagaauggugcuuaauccau

SEQ ID NO: 360591 - RNA, 23 nt, Artificial Sequence
  Synthetic
aaaaagaauggugcuuaauccau

SEQ ID NO: 360592 - RNA, 24 nt, Artificial Sequence
  Synthetic
caaaaagaauggugcuuaauccau

SEQ ID NO: 360593 - RNA, 18 nt, Artificial Sequence
  Synthetic
guacuaugacacauccau

SEQ ID NO: 360594 - RNA, 19 nt, Artificial Sequence
  Synthetic
uguacuaugacacauccau

SEQ ID NO: 360595 - RNA, 20 nt, Artificial Sequence
  Synthetic
auguacuaugacacauccau

SEQ ID NO: 360596 - RNA, 21 nt, Artificial Sequence
  Synthetic
aauguacuaugacacauccau

SEQ ID NO: 360597 - RNA, 22 nt, Artificial Sequence
  Synthetic
gaauguacuaugacacauccau

SEQ ID NO: 360598 - RNA, 23 nt, Artificial Sequence
  Synthetic
agaauguacuaugacacauccau

SEQ ID NO: 360599 - RNA, 24 nt, Artificial Sequence
  Synthetic
uagaauguacuaugacacauccau

SEQ ID NO: 360600 - RNA, 18 nt, Artificial Sequence
  Synthetic
uucuacuuuagcauccau

SEQ ID NO: 360601 - RNA, 19 nt, Artificial Sequence
  Synthetic
uuucuacuuuagcauccau

SEQ ID NO: 360602 - RNA, 20 nt, Artificial Sequence
  Synthetic
auuucuacuuuagcauccau

SEQ ID NO: 360603 - RNA, 21 nt, Artificial Sequence
  Synthetic
uauuucuacuuuagcauccau

SEQ ID NO: 360604 - RNA, 22 nt, Artificial Sequence
  Synthetic
uuauuucuacuuuagcauccau

SEQ ID NO: 360605 - RNA, 23 nt, Artificial Sequence
  Synthetic
uuuauuucuacuuuagcauccau

SEQ ID NO: 360606 - RNA, 24 nt, Artificial Sequence
  Synthetic
guuuauuucuacuuuagcauccau

SEQ ID NO: 360607 - RNA, 18 nt, Artificial Sequence
  Synthetic
caguuuacccagauccau

SEQ ID NO: 360608 - RNA, 19 nt, Artificial Sequence
  Synthetic
ucaguuuacccagauccau

SEQ ID NO: 360609 - RNA, 20 nt, Artificial Sequence
  Synthetic
uucaguuuacccagauccau

SEQ ID NO: 360610 - RNA, 21 nt, Artificial Sequence
  Synthetic
uuucaguuuacccagauccau

SEQ ID NO: 360611 - RNA, 22 nt, Artificial Sequence
  Synthetic
uuuucaguuuacccagauccau

SEQ ID NO: 360612 - RNA, 23 nt, Artificial Sequence
  Synthetic
auuuucaguuuacccagauccau

SEQ ID NO: 360613 - RNA, 24 nt, Artificial Sequence
  Synthetic
gauuuucaguuuacccagauccau

SEQ ID NO: 360614 - RNA, 18 nt, Artificial Sequence
  Synthetic
ccaccuccaaauauccau

SEQ ID NO: 360615 - RNA, 19 nt, Artificial Sequence
  Synthetic
cccaccuccaaauauccau

SEQ ID NO: 360616 - RNA, 20 nt, Artificial Sequence
  Synthetic
ccccaccuccaaauauccau

SEQ ID NO: 360617 - RNA, 21 nt, Artificial Sequence
  Synthetic
gccccaccuccaaauauccau

SEQ ID NO: 360618 - RNA, 22 nt, Artificial Sequence
  Synthetic
ggccccaccuccaaauauccau

SEQ ID NO: 360619 - RNA, 23 nt, Artificial Sequence
  Synthetic
aggccccaccuccaaauauccau

SEQ ID NO: 360620 - RNA, 24 nt, Artificial Sequence
  Synthetic
aaggccccaccuccaaauauccau

SEQ ID NO: 360621 - RNA, 18 nt, Artificial Sequence
  Synthetic
cuugagugacaacuccau

SEQ ID NO: 360622 - RNA, 19 nt, Artificial Sequence
  Synthetic
gcuugagugacaacuccau

SEQ ID NO: 360623 - RNA, 20 nt, Artificial Sequence
  Synthetic
ugcuugagugacaacuccau

SEQ ID NO: 360624 - RNA, 21 nt, Artificial Sequence
  Synthetic
gugcuugagugacaacuccau

SEQ ID NO: 360625 - RNA, 22 nt, Artificial Sequence
  Synthetic
agugcuugagugacaacuccau

SEQ ID NO: 360626 - RNA, 23 nt, Artificial Sequence
  Synthetic
cagugcuugagugacaacuccau

SEQ ID NO: 360627 - RNA, 24 nt, Artificial Sequence
  Synthetic
ucagugcuugagugacaacuccau

SEQ ID NO: 360628 - RNA, 18 nt, Artificial Sequence
  Synthetic
cuuucuucuauacuccau

SEQ ID NO: 360629 - RNA, 19 nt, Artificial Sequence
  Synthetic
ucuuucuucuauacuccau

SEQ ID NO: 360630 - RNA, 20 nt, Artificial Sequence
  Synthetic
uucuuucuucuauacuccau

SEQ ID NO: 360631 - RNA, 21 nt, Artificial Sequence
  Synthetic
uuucuuucuucuauacuccau

SEQ ID NO: 360632 - RNA, 22 nt, Artificial Sequence
  Synthetic
auuucuuucuucuauacuccau

SEQ ID NO: 360633 - RNA, 23 nt, Artificial Sequence
  Synthetic
cauuucuuucuucuauacuccau

SEQ ID NO: 360634 - RNA, 24 nt, Artificial Sequence
  Synthetic
gcauuucuuucuucuauacuccau

SEQ ID NO: 360635 - RNA, 18 nt, Artificial Sequence
  Synthetic
aacuguccaugccuccau

SEQ ID NO: 360636 - RNA, 19 nt, Artificial Sequence
  Synthetic
aaacuguccaugccuccau

SEQ ID NO: 360637 - RNA, 20 nt, Artificial Sequence
  Synthetic
aaaacuguccaugccuccau

SEQ ID NO: 360638 - RNA, 21 nt, Artificial Sequence
  Synthetic
aaaaacuguccaugccuccau

SEQ ID NO: 360639 - RNA, 22 nt, Artificial Sequence
  Synthetic
uaaaaacuguccaugccuccau

SEQ ID NO: 360640 - RNA, 23 nt, Artificial Sequence
  Synthetic
auaaaaacuguccaugccuccau

SEQ ID NO: 360641 - RNA, 24 nt, Artificial Sequence
  Synthetic
cauaaaaacuguccaugccuccau

SEQ ID NO: 360642 - RNA, 18 nt, Artificial Sequence
  Synthetic
uaaguucuucaucuccau

SEQ ID NO: 360643 - RNA, 19 nt, Artificial Sequence
  Synthetic
auaaguucuucaucuccau

SEQ ID NO: 360644 - RNA, 20 nt, Artificial Sequence
  Synthetic
aauaaguucuucaucuccau

SEQ ID NO: 360645 - RNA, 21 nt, Artificial Sequence
  Synthetic
caauaaguucuucaucuccau

SEQ ID NO: 360646 - RNA, 22 nt, Artificial Sequence
  Synthetic
ccaauaaguucuucaucuccau

SEQ ID NO: 360647 - RNA, 23 nt, Artificial Sequence
  Synthetic
accaauaaguucuucaucuccau

SEQ ID NO: 360648 - RNA, 24 nt, Artificial Sequence
  Synthetic
uaccaauaaguucuucaucuccau

SEQ ID NO: 360649 - RNA, 18 nt, Artificial Sequence
  Synthetic
acuuucuuugaucuccau

SEQ ID NO: 360650 - RNA, 19 nt, Artificial Sequence
  Synthetic
aacuuucuuugaucuccau

SEQ ID NO: 360651 - RNA, 20 nt, Artificial Sequence
  Synthetic
caacuuucuuugaucuccau

SEQ ID NO: 360652 - RNA, 21 nt, Artificial Sequence
  Synthetic
ccaacuuucuuugaucuccau

SEQ ID NO: 360653 - RNA, 22 nt, Artificial Sequence
  Synthetic
gccaacuuucuuugaucuccau

SEQ ID NO: 360654 - RNA, 23 nt, Artificial Sequence
  Synthetic
ugccaacuuucuuugaucuccau

SEQ ID NO: 360655 - RNA, 24 nt, Artificial Sequence
  Synthetic
uugccaacuuucuuugaucuccau

SEQ ID NO: 360656 - RNA, 18 nt, Artificial Sequence
  Synthetic
acuccggaaugucuccau

SEQ ID NO: 360657 - RNA, 19 nt, Artificial Sequence
  Synthetic
uacuccggaaugucuccau

SEQ ID NO: 360658 - RNA, 20 nt, Artificial Sequence
  Synthetic
guacuccggaaugucuccau

SEQ ID NO: 360659 - RNA, 21 nt, Artificial Sequence
  Synthetic
gguacuccggaaugucuccau

SEQ ID NO: 360660 - RNA, 22 nt, Artificial Sequence
  Synthetic
agguacuccggaaugucuccau

SEQ ID NO: 360661 - RNA, 23 nt, Artificial Sequence
  Synthetic
gagguacuccggaaugucuccau

SEQ ID NO: 360662 - RNA, 24 nt, Artificial Sequence
  Synthetic
cgagguacuccggaaugucuccau

SEQ ID NO: 360663 - RNA, 18 nt, Artificial Sequence
  Synthetic
ugagcucuuaggguccau

SEQ ID NO: 360664 - RNA, 19 nt, Artificial Sequence
  Synthetic
cugagcucuuaggguccau

SEQ ID NO: 360665 - RNA, 20 nt, Artificial Sequence
  Synthetic
acugagcucuuaggguccau

SEQ ID NO: 360666 - RNA, 21 nt, Artificial Sequence
  Synthetic
aacugagcucuuaggguccau

SEQ ID NO: 360667 - RNA, 22 nt, Artificial Sequence
  Synthetic
uaacugagcucuuaggguccau

SEQ ID NO: 360668 - RNA, 23 nt, Artificial Sequence
  Synthetic
guaacugagcucuuaggguccau

SEQ ID NO: 360669 - RNA, 24 nt, Artificial Sequence
  Synthetic
cguaacugagcucuuaggguccau

SEQ ID NO: 360670 - RNA, 18 nt, Artificial Sequence
  Synthetic
aaguuuucaaugguccau

SEQ ID NO: 360671 - RNA, 19 nt, Artificial Sequence
  Synthetic
gaaguuuucaaugguccau

SEQ ID NO: 360672 - RNA, 20 nt, Artificial Sequence
  Synthetic
agaaguuuucaaugguccau

SEQ ID NO: 360673 - RNA, 21 nt, Artificial Sequence
  Synthetic
cagaaguuuucaaugguccau

SEQ ID NO: 360674 - RNA, 22 nt, Artificial Sequence
  Synthetic
ccagaaguuuucaaugguccau

SEQ ID NO: 360675 - RNA, 23 nt, Artificial Sequence
  Synthetic
uccagaaguuuucaaugguccau

SEQ ID NO: 360676 - RNA, 24 nt, Artificial Sequence
  Synthetic
guccagaaguuuucaaugguccau

SEQ ID NO: 360677 - RNA, 18 nt, Artificial Sequence
  Synthetic
aaauauguauugguccau

SEQ ID NO: 360678 - RNA, 19 nt, Artificial Sequence
  Synthetic
caaauauguauugguccau

SEQ ID NO: 360679 - RNA, 20 nt, Artificial Sequence
  Synthetic
ccaaauauguauugguccau

SEQ ID NO: 360680 - RNA, 21 nt, Artificial Sequence
  Synthetic
accaaauauguauugguccau

SEQ ID NO: 360681 - RNA, 22 nt, Artificial Sequence
  Synthetic
aaccaaauauguauugguccau

SEQ ID NO: 360682 - RNA, 23 nt, Artificial Sequence
  Synthetic
uaaccaaauauguauugguccau

SEQ ID NO: 360683 - RNA, 24 nt, Artificial Sequence
  Synthetic
auaaccaaauauguauugguccau

SEQ ID NO: 360684 - RNA, 18 nt, Artificial Sequence
  Synthetic
ggagaaugagguguccau

SEQ ID NO: 360685 - RNA, 19 nt, Artificial Sequence
  Synthetic
uggagaaugagguguccau

SEQ ID NO: 360686 - RNA, 20 nt, Artificial Sequence
  Synthetic
cuggagaaugagguguccau

SEQ ID NO: 360687 - RNA, 21 nt, Artificial Sequence
  Synthetic
ucuggagaaugagguguccau

SEQ ID NO: 360688 - RNA, 22 nt, Artificial Sequence
  Synthetic
cucuggagaaugagguguccau

SEQ ID NO: 360689 - RNA, 23 nt, Artificial Sequence
  Synthetic
gcucuggagaaugagguguccau

SEQ ID NO: 360690 - RNA, 24 nt, Artificial Sequence
  Synthetic
agcucuggagaaugagguguccau

SEQ ID NO: 360691 - RNA, 18 nt, Artificial Sequence
  Synthetic
gauaugauuuuuguccau

SEQ ID NO: 360692 - RNA, 19 nt, Artificial Sequence
  Synthetic
cgauaugauuuuuguccau

SEQ ID NO: 360693 - RNA, 20 nt, Artificial Sequence
  Synthetic
ccgauaugauuuuuguccau

SEQ ID NO: 360694 - RNA, 21 nt, Artificial Sequence
  Synthetic
accgauaugauuuuuguccau

SEQ ID NO: 360695 - RNA, 22 nt, Artificial Sequence
  Synthetic
aaccgauaugauuuuuguccau

SEQ ID NO: 360696 - RNA, 23 nt, Artificial Sequence
  Synthetic
aaaccgauaugauuuuuguccau

SEQ ID NO: 360697 - RNA, 24 nt, Artificial Sequence
  Synthetic
gaaaccgauaugauuuuuguccau

SEQ ID NO: 360698 - RNA, 18 nt, Artificial Sequence
  Synthetic
cuacaaugcaaauuccau

SEQ ID NO: 360699 - RNA, 19 nt, Artificial Sequence
  Synthetic
acuacaaugcaaauuccau

SEQ ID NO: 360700 - RNA, 20 nt, Artificial Sequence
  Synthetic
aacuacaaugcaaauuccau

SEQ ID NO: 360701 - RNA, 21 nt, Artificial Sequence
  Synthetic
uaacuacaaugcaaauuccau

SEQ ID NO: 360702 - RNA, 22 nt, Artificial Sequence
  Synthetic
guaacuacaaugcaaauuccau

SEQ ID NO: 360703 - RNA, 23 nt, Artificial Sequence
  Synthetic
uguaacuacaaugcaaauuccau

SEQ ID NO: 360704 - RNA, 24 nt, Artificial Sequence
  Synthetic
uuguaacuacaaugcaaauuccau

SEQ ID NO: 360705 - RNA, 18 nt, Artificial Sequence
  Synthetic
ugccuucauaaauuccau

SEQ ID NO: 360706 - RNA, 19 nt, Artificial Sequence
  Synthetic
uugccuucauaaauuccau

SEQ ID NO: 360707 - RNA, 20 nt, Artificial Sequence
  Synthetic
guugccuucauaaauuccau

SEQ ID NO: 360708 - RNA, 21 nt, Artificial Sequence
  Synthetic
uguugccuucauaaauuccau

SEQ ID NO: 360709 - RNA, 22 nt, Artificial Sequence
  Synthetic
auguugccuucauaaauuccau

SEQ ID NO: 360710 - RNA, 23 nt, Artificial Sequence
  Synthetic
uauguugccuucauaaauuccau

SEQ ID NO: 360711 - RNA, 24 nt, Artificial Sequence
  Synthetic
uuauguugccuucauaaauuccau

SEQ ID NO: 360712 - RNA, 18 nt, Artificial Sequence
  Synthetic
gggaauagagaauuccau

SEQ ID NO: 360713 - RNA, 19 nt, Artificial Sequence
  Synthetic
ugggaauagagaauuccau

SEQ ID NO: 360714 - RNA, 20 nt, Artificial Sequence
  Synthetic
cugggaauagagaauuccau

SEQ ID NO: 360715 - RNA, 21 nt, Artificial Sequence
  Synthetic
ucugggaauagagaauuccau

SEQ ID NO: 360716 - RNA, 22 nt, Artificial Sequence
  Synthetic
uucugggaauagagaauuccau

SEQ ID NO: 360717 - RNA, 23 nt, Artificial Sequence
  Synthetic
guucugggaauagagaauuccau

SEQ ID NO: 360718 - RNA, 24 nt, Artificial Sequence
  Synthetic
uguucugggaauagagaauuccau

SEQ ID NO: 360719 - RNA, 18 nt, Artificial Sequence
  Synthetic
uuuuuuacuucauuccau

SEQ ID NO: 360720 - RNA, 19 nt, Artificial Sequence
  Synthetic
uuuuuuuacuucauuccau

SEQ ID NO: 360721 - RNA, 20 nt, Artificial Sequence
  Synthetic
uuuuuuuuacuucauuccau

SEQ ID NO: 360722 - RNA, 21 nt, Artificial Sequence
  Synthetic
uuuuuuuuuacuucauuccau

SEQ ID NO: 360723 - RNA, 22 nt, Artificial Sequence
  Synthetic
uuuuuuuuuuacuucauuccau

SEQ ID NO: 360724 - RNA, 23 nt, Artificial Sequence
  Synthetic
uuuuuuuuuuuacuucauuccau

SEQ ID NO: 360725 - RNA, 24 nt, Artificial Sequence
  Synthetic
uuuuuuuuuuuuacuucauuccau

SEQ ID NO: 360726 - RNA, 18 nt, Artificial Sequence
  Synthetic
aaucuuaagguauuccau

SEQ ID NO: 360727 - RNA, 19 nt, Artificial Sequence
  Synthetic
aaaucuuaagguauuccau

SEQ ID NO: 360728 - RNA, 20 nt, Artificial Sequence
  Synthetic
aaaaucuuaagguauuccau

SEQ ID NO: 360729 - RNA, 21 nt, Artificial Sequence
  Synthetic
uaaaaucuuaagguauuccau

SEQ ID NO: 360730 - RNA, 22 nt, Artificial Sequence
  Synthetic
cuaaaaucuuaagguauuccau

SEQ ID NO: 360731 - RNA, 23 nt, Artificial Sequence
  Synthetic
ccuaaaaucuuaagguauuccau

SEQ ID NO: 360732 - RNA, 24 nt, Artificial Sequence
  Synthetic
cccuaaaaucuuaagguauuccau

SEQ ID NO: 360733 - RNA, 18 nt, Artificial Sequence
  Synthetic
uccaaacauagcuuccau

SEQ ID NO: 360734 - RNA, 19 nt, Artificial Sequence
  Synthetic
uuccaaacauagcuuccau

SEQ ID NO: 360735 - RNA, 20 nt, Artificial Sequence
  Synthetic
cuuccaaacauagcuuccau

SEQ ID NO: 360736 - RNA, 21 nt, Artificial Sequence
  Synthetic
ccuuccaaacauagcuuccau

SEQ ID NO: 360737 - RNA, 22 nt, Artificial Sequence
  Synthetic
gccuuccaaacauagcuuccau

SEQ ID NO: 360738 - RNA, 23 nt, Artificial Sequence
  Synthetic
agccuuccaaacauagcuuccau

SEQ ID NO: 360739 - RNA, 24 nt, Artificial Sequence
  Synthetic
cagccuuccaaacauagcuuccau

SEQ ID NO: 360740 - RNA, 18 nt, Artificial Sequence
  Synthetic
caugucuauuucuuccau

SEQ ID NO: 360741 - RNA, 19 nt, Artificial Sequence
  Synthetic
ccaugucuauuucuuccau

SEQ ID NO: 360742 - RNA, 20 nt, Artificial Sequence
  Synthetic
cccaugucuauuucuuccau

SEQ ID NO: 360743 - RNA, 21 nt, Artificial Sequence
  Synthetic
ucccaugucuauuucuuccau

SEQ ID NO: 360744 - RNA, 22 nt, Artificial Sequence
  Synthetic
uucccaugucuauuucuuccau

SEQ ID NO: 360745 - RNA, 23 nt, Artificial Sequence
  Synthetic
auucccaugucuauuucuuccau

SEQ ID NO: 360746 - RNA, 24 nt, Artificial Sequence
  Synthetic
gauucccaugucuauuucuuccau

SEQ ID NO: 360747 - RNA, 18 nt, Artificial Sequence
  Synthetic
aaacagacuuucuuccau

SEQ ID NO: 360748 - RNA, 19 nt, Artificial Sequence
  Synthetic
uaaacagacuuucuuccau

SEQ ID NO: 360749 - RNA, 20 nt, Artificial Sequence
  Synthetic
cuaaacagacuuucuuccau

SEQ ID NO: 360750 - RNA, 21 nt, Artificial Sequence
  Synthetic
acuaaacagacuuucuuccau

SEQ ID NO: 360751 - RNA, 22 nt, Artificial Sequence
  Synthetic
aacuaaacagacuuucuuccau

SEQ ID NO: 360752 - RNA, 23 nt, Artificial Sequence
  Synthetic
caacuaaacagacuuucuuccau

SEQ ID NO: 360753 - RNA, 24 nt, Artificial Sequence
  Synthetic
ucaacuaaacagacuuucuuccau

SEQ ID NO: 360754 - RNA, 18 nt, Artificial Sequence
  Synthetic
ggaacaacucaguuccau

SEQ ID NO: 360755 - RNA, 19 nt, Artificial Sequence
  Synthetic
aggaacaacucaguuccau

SEQ ID NO: 360756 - RNA, 20 nt, Artificial Sequence
  Synthetic
uaggaacaacucaguuccau

SEQ ID NO: 360757 - RNA, 21 nt, Artificial Sequence
  Synthetic
uuaggaacaacucaguuccau

SEQ ID NO: 360758 - RNA, 22 nt, Artificial Sequence
  Synthetic
cuuaggaacaacucaguuccau

SEQ ID NO: 360759 - RNA, 23 nt, Artificial Sequence
  Synthetic
ucuuaggaacaacucaguuccau

SEQ ID NO: 360760 - RNA, 24 nt, Artificial Sequence
  Synthetic
aucuuaggaacaacucaguuccau

SEQ ID NO: 360761 - RNA, 18 nt, Artificial Sequence
  Synthetic
gaaucuauugcguuccau

SEQ ID NO: 360762 - RNA, 19 nt, Artificial Sequence
  Synthetic
ggaaucuauugcguuccau

SEQ ID NO: 360763 - RNA, 20 nt, Artificial Sequence
  Synthetic
aggaaucuauugcguuccau

SEQ ID NO: 360764 - RNA, 21 nt, Artificial Sequence
  Synthetic
caggaaucuauugcguuccau

SEQ ID NO: 360765 - RNA, 22 nt, Artificial Sequence
  Synthetic
gcaggaaucuauugcguuccau

SEQ ID NO: 360766 - RNA, 23 nt, Artificial Sequence
  Synthetic
ggcaggaaucuauugcguuccau

SEQ ID NO: 360767 - RNA, 24 nt, Artificial Sequence
  Synthetic
gggcaggaaucuauugcguuccau

SEQ ID NO: 360768 - RNA, 18 nt, Artificial Sequence
  Synthetic
gcccuuuuuugguuccau

SEQ ID NO: 360769 - RNA, 19 nt, Artificial Sequence
  Synthetic
ggcccuuuuuugguuccau

SEQ ID NO: 360770 - RNA, 20 nt, Artificial Sequence
  Synthetic
gggcccuuuuuugguuccau

SEQ ID NO: 360771 - RNA, 21 nt, Artificial Sequence
  Synthetic
ugggcccuuuuuugguuccau

SEQ ID NO: 360772 - RNA, 22 nt, Artificial Sequence
  Synthetic
augggcccuuuuuugguuccau

SEQ ID NO: 360773 - RNA, 23 nt, Artificial Sequence
  Synthetic
uaugggcccuuuuuugguuccau

SEQ ID NO: 360774 - RNA, 24 nt, Artificial Sequence
  Synthetic
auaugggcccuuuuuugguuccau

SEQ ID NO: 360775 - RNA, 18 nt, Artificial Sequence
  Synthetic
gcucuuuuuugguuccau

SEQ ID NO: 360776 - RNA, 19 nt, Artificial Sequence
  Synthetic
agcucuuuuuugguuccau

SEQ ID NO: 360777 - RNA, 20 nt, Artificial Sequence
  Synthetic
aagcucuuuuuugguuccau

SEQ ID NO: 360778 - RNA, 21 nt, Artificial Sequence
  Synthetic
caagcucuuuuuugguuccau

SEQ ID NO: 360779 - RNA, 22 nt, Artificial Sequence
  Synthetic
acaagcucuuuuuugguuccau

SEQ ID NO: 360780 - RNA, 23 nt, Artificial Sequence
  Synthetic
uacaagcucuuuuuugguuccau

SEQ ID NO: 360781 - RNA, 24 nt, Artificial Sequence
  Synthetic
auacaagcucuuuuuugguuccau

SEQ ID NO: 360782 - RNA, 19 nt, Artificial Sequence
  Synthetic
ggcucuuuuuugguuccau

SEQ ID NO: 360783 - RNA, 20 nt, Artificial Sequence
  Synthetic
gggcucuuuuuugguuccau

SEQ ID NO: 360784 - RNA, 21 nt, Artificial Sequence
  Synthetic
cgggcucuuuuuugguuccau

SEQ ID NO: 360785 - RNA, 22 nt, Artificial Sequence
  Synthetic
gcgggcucuuuuuugguuccau

SEQ ID NO: 360786 - RNA, 23 nt, Artificial Sequence
  Synthetic
ugcgggcucuuuuuugguuccau

SEQ ID NO: 360787 - RNA, 24 nt, Artificial Sequence
  Synthetic
augcgggcucuuuuuugguuccau

SEQ ID NO: 360788 - RNA, 18 nt, Artificial Sequence
  Synthetic
agccacgggaauuuccau

SEQ ID NO: 360789 - RNA, 19 nt, Artificial Sequence
  Synthetic
uagccacgggaauuuccau

SEQ ID NO: 360790 - RNA, 20 nt, Artificial Sequence
  Synthetic
uuagccacgggaauuuccau

SEQ ID NO: 360791 - RNA, 21 nt, Artificial Sequence
  Synthetic
uuuagccacgggaauuuccau

SEQ ID NO: 360792 - RNA, 22 nt, Artificial Sequence
  Synthetic
cuuuagccacgggaauuuccau

SEQ ID NO: 360793 - RNA, 23 nt, Artificial Sequence
  Synthetic
ucuuuagccacgggaauuuccau

SEQ ID NO: 360794 - RNA, 24 nt, Artificial Sequence
  Synthetic
cucuuuagccacgggaauuuccau

SEQ ID NO: 360795 - RNA, 18 nt, Artificial Sequence
  Synthetic
uagaaaauacauuuccau

SEQ ID NO: 360796 - RNA, 19 nt, Artificial Sequence
  Synthetic
uuagaaaauacauuuccau

SEQ ID NO: 360797 - RNA, 20 nt, Artificial Sequence
  Synthetic
guuagaaaauacauuuccau

SEQ ID NO: 360798 - RNA, 21 nt, Artificial Sequence
  Synthetic
uguuagaaaauacauuuccau

SEQ ID NO: 360799 - RNA, 22 nt, Artificial Sequence
  Synthetic
auguuagaaaauacauuuccau

SEQ ID NO: 360800 - RNA, 23 nt, Artificial Sequence
  Synthetic
uauguuagaaaauacauuuccau

SEQ ID NO: 360801 - RNA, 24 nt, Artificial Sequence
  Synthetic
uuauguuagaaaauacauuuccau

SEQ ID NO: 360802 - RNA, 18 nt, Artificial Sequence
  Synthetic
aagacauaggguuuccau

SEQ ID NO: 360803 - RNA, 19 nt, Artificial Sequence
  Synthetic
gaagacauaggguuuccau

SEQ ID NO: 360804 - RNA, 20 nt, Artificial Sequence
  Synthetic
ggaagacauaggguuuccau

SEQ ID NO: 360805 - RNA, 21 nt, Artificial Sequence
  Synthetic
aggaagacauaggguuuccau

SEQ ID NO: 360806 - RNA, 22 nt, Artificial Sequence
  Synthetic
gaggaagacauaggguuuccau

SEQ ID NO: 360807 - RNA, 23 nt, Artificial Sequence
  Synthetic
ggaggaagacauaggguuuccau

SEQ ID NO: 360808 - RNA, 24 nt, Artificial Sequence
  Synthetic
aggaggaagacauaggguuuccau

SEQ ID NO: 360809 - RNA, 18 nt, Artificial Sequence
  Synthetic
aauuucuucucaaagcau

SEQ ID NO: 360810 - RNA, 19 nt, Artificial Sequence
  Synthetic
uaauuucuucucaaagcau

SEQ ID NO: 360811 - RNA, 20 nt, Artificial Sequence
  Synthetic
auaauuucuucucaaagcau

SEQ ID NO: 360812 - RNA, 21 nt, Artificial Sequence
  Synthetic
uauaauuucuucucaaagcau

SEQ ID NO: 360813 - RNA, 22 nt, Artificial Sequence
  Synthetic
guauaauuucuucucaaagcau

SEQ ID NO: 360814 - RNA, 23 nt, Artificial Sequence
  Synthetic
aguauaauuucuucucaaagcau

SEQ ID NO: 360815 - RNA, 24 nt, Artificial Sequence
  Synthetic
uaguauaauuucuucucaaagcau

SEQ ID NO: 360816 - RNA, 18 nt, Artificial Sequence
  Synthetic
uuguggaaaugaaagcau

SEQ ID NO: 360817 - RNA, 19 nt, Artificial Sequence
  Synthetic
guuguggaaaugaaagcau

SEQ ID NO: 360818 - RNA, 20 nt, Artificial Sequence
  Synthetic
uguuguggaaaugaaagcau

SEQ ID NO: 360819 - RNA, 21 nt, Artificial Sequence
  Synthetic
uuguuguggaaaugaaagcau

SEQ ID NO: 360820 - RNA, 22 nt, Artificial Sequence
  Synthetic
uuuguuguggaaaugaaagcau

SEQ ID NO: 360821 - RNA, 23 nt, Artificial Sequence
  Synthetic
uuuuguuguggaaaugaaagcau

SEQ ID NO: 360822 - RNA, 24 nt, Artificial Sequence
  Synthetic
auuuuguuguggaaaugaaagcau

SEQ ID NO: 360823 - RNA, 18 nt, Artificial Sequence
  Synthetic
uaggagagggacaagcau

SEQ ID NO: 360824 - RNA, 19 nt, Artificial Sequence
  Synthetic
uuaggagagggacaagcau

SEQ ID NO: 360825 - RNA, 20 nt, Artificial Sequence
  Synthetic
uuuaggagagggacaagcau

SEQ ID NO: 360826 - RNA, 21 nt, Artificial Sequence
  Synthetic
auuuaggagagggacaagcau

SEQ ID NO: 360827 - RNA, 22 nt, Artificial Sequence
  Synthetic
uauuuaggagagggacaagcau

SEQ ID NO: 360828 - RNA, 23 nt, Artificial Sequence
  Synthetic
uuauuuaggagagggacaagcau

SEQ ID NO: 360829 - RNA, 24 nt, Artificial Sequence
  Synthetic
uuuauuuaggagagggacaagcau

SEQ ID NO: 360830 - RNA, 18 nt, Artificial Sequence
  Synthetic
uggaugaaaagcaagcau

SEQ ID NO: 360831 - RNA, 19 nt, Artificial Sequence
  Synthetic
guggaugaaaagcaagcau

SEQ ID NO: 360832 - RNA, 20 nt, Artificial Sequence
  Synthetic
uguggaugaaaagcaagcau

SEQ ID NO: 360833 - RNA, 21 nt, Artificial Sequence
  Synthetic
cuguggaugaaaagcaagcau

SEQ ID NO: 360834 - RNA, 22 nt, Artificial Sequence
  Synthetic
gcuguggaugaaaagcaagcau

SEQ ID NO: 360835 - RNA, 23 nt, Artificial Sequence
  Synthetic
ugcuguggaugaaaagcaagcau

SEQ ID NO: 360836 - RNA, 24 nt, Artificial Sequence
  Synthetic
augcuguggaugaaaagcaagcau

SEQ ID NO: 360837 - RNA, 18 nt, Artificial Sequence
  Synthetic
auaaaguauaucaagcau

SEQ ID NO: 360838 - RNA, 19 nt, Artificial Sequence
  Synthetic
cauaaaguauaucaagcau

SEQ ID NO: 360839 - RNA, 20 nt, Artificial Sequence
  Synthetic
gcauaaaguauaucaagcau

SEQ ID NO: 360840 - RNA, 21 nt, Artificial Sequence
  Synthetic
ggcauaaaguauaucaagcau

SEQ ID NO: 360841 - RNA, 22 nt, Artificial Sequence
  Synthetic
aggcauaaaguauaucaagcau

SEQ ID NO: 360842 - RNA, 23 nt, Artificial Sequence
  Synthetic
aaggcauaaaguauaucaagcau

SEQ ID NO: 360843 - RNA, 24 nt, Artificial Sequence
  Synthetic
gaaggcauaaaguauaucaagcau

SEQ ID NO: 360844 - RNA, 18 nt, Artificial Sequence
  Synthetic
gcuuuucuggagaagcau

SEQ ID NO: 360845 - RNA, 19 nt, Artificial Sequence
  Synthetic
ugcuuuucuggagaagcau

SEQ ID NO: 360846 - RNA, 20 nt, Artificial Sequence
  Synthetic
uugcuuuucuggagaagcau

SEQ ID NO: 360847 - RNA, 21 nt, Artificial Sequence
  Synthetic
uuugcuuuucuggagaagcau

SEQ ID NO: 360848 - RNA, 22 nt, Artificial Sequence
  Synthetic
uuuugcuuuucuggagaagcau

SEQ ID NO: 360849 - RNA, 23 nt, Artificial Sequence
  Synthetic
uuuuugcuuuucuggagaagcau

SEQ ID NO: 360850 - RNA, 24 nt, Artificial Sequence
  Synthetic
cuuuuugcuuuucuggagaagcau

SEQ ID NO: 360851 - RNA, 18 nt, Artificial Sequence
  Synthetic
uaagcucgaaggaagcau

SEQ ID NO: 360852 - RNA, 19 nt, Artificial Sequence
  Synthetic
guaagcucgaaggaagcau

SEQ ID NO: 360853 - RNA, 20 nt, Artificial Sequence
  Synthetic
aguaagcucgaaggaagcau

SEQ ID NO: 360854 - RNA, 21 nt, Artificial Sequence
  Synthetic
caguaagcucgaaggaagcau

SEQ ID NO: 360855 - RNA, 22 nt, Artificial Sequence
  Synthetic
acaguaagcucgaaggaagcau

SEQ ID NO: 360856 - RNA, 23 nt, Artificial Sequence
  Synthetic
cacaguaagcucgaaggaagcau

SEQ ID NO: 360857 - RNA, 24 nt, Artificial Sequence
  Synthetic
acacaguaagcucgaaggaagcau

SEQ ID NO: 360858 - RNA, 18 nt, Artificial Sequence
  Synthetic
auaauuuuuaggaagcau

SEQ ID NO: 360859 - RNA, 19 nt, Artificial Sequence
  Synthetic
aauaauuuuuaggaagcau

SEQ ID NO: 360860 - RNA, 20 nt, Artificial Sequence
  Synthetic
uaauaauuuuuaggaagcau

SEQ ID NO: 360861 - RNA, 21 nt, Artificial Sequence
  Synthetic
auaauaauuuuuaggaagcau

SEQ ID NO: 360862 - RNA, 22 nt, Artificial Sequence
  Synthetic
aauaauaauuuuuaggaagcau

SEQ ID NO: 360863 - RNA, 23 nt, Artificial Sequence
  Synthetic
uaauaauaauuuuuaggaagcau

SEQ ID NO: 360864 - RNA, 24 nt, Artificial Sequence
  Synthetic
auaauaauaauuuuuaggaagcau

SEQ ID NO: 360865 - RNA, 18 nt, Artificial Sequence
  Synthetic
caacugauuaugaagcau

SEQ ID NO: 360866 - RNA, 19 nt, Artificial Sequence
  Synthetic
ccaacugauuaugaagcau

SEQ ID NO: 360867 - RNA, 20 nt, Artificial Sequence
  Synthetic
cccaacugauuaugaagcau

SEQ ID NO: 360868 - RNA, 21 nt, Artificial Sequence
  Synthetic
ucccaacugauuaugaagcau

SEQ ID NO: 360869 - RNA, 22 nt, Artificial Sequence
  Synthetic
uucccaacugauuaugaagcau

SEQ ID NO: 360870 - RNA, 23 nt, Artificial Sequence
  Synthetic
cuucccaacugauuaugaagcau

SEQ ID NO: 360871 - RNA, 24 nt, Artificial Sequence
  Synthetic
ucuucccaacugauuaugaagcau

SEQ ID NO: 360872 - RNA, 18 nt, Artificial Sequence
  Synthetic
uuaauccaucugaagcau

SEQ ID NO: 360873 - RNA, 19 nt, Artificial Sequence
  Synthetic
cuuaauccaucugaagcau

SEQ ID NO: 360874 - RNA, 20 nt, Artificial Sequence
  Synthetic
gcuuaauccaucugaagcau

SEQ ID NO: 360875 - RNA, 21 nt, Artificial Sequence
  Synthetic
ugcuuaauccaucugaagcau

SEQ ID NO: 360876 - RNA, 22 nt, Artificial Sequence
  Synthetic
gugcuuaauccaucugaagcau

SEQ ID NO: 360877 - RNA, 23 nt, Artificial Sequence
  Synthetic
ggugcuuaauccaucugaagcau

SEQ ID NO: 360878 - RNA, 24 nt, Artificial Sequence
  Synthetic
uggugcuuaauccaucugaagcau

SEQ ID NO: 360879 - RNA, 18 nt, Artificial Sequence
  Synthetic
caacaaaaaaauaagcau

SEQ ID NO: 360880 - RNA, 19 nt, Artificial Sequence
  Synthetic
ucaacaaaaaaauaagcau

SEQ ID NO: 360881 - RNA, 20 nt, Artificial Sequence
  Synthetic
gucaacaaaaaaauaagcau

SEQ ID NO: 360882 - RNA, 21 nt, Artificial Sequence
  Synthetic
agucaacaaaaaaauaagcau

SEQ ID NO: 360883 - RNA, 22 nt, Artificial Sequence
  Synthetic
aagucaacaaaaaaauaagcau

SEQ ID NO: 360884 - RNA, 23 nt, Artificial Sequence
  Synthetic
aaagucaacaaaaaaauaagcau

SEQ ID NO: 360885 - RNA, 24 nt, Artificial Sequence
  Synthetic
caaagucaacaaaaaaauaagcau

SEQ ID NO: 360886 - RNA, 18 nt, Artificial Sequence
  Synthetic
gaucauuagcauaagcau

SEQ ID NO: 360887 - RNA, 19 nt, Artificial Sequence
  Synthetic
agaucauuagcauaagcau

SEQ ID NO: 360888 - RNA, 20 nt, Artificial Sequence
  Synthetic
gagaucauuagcauaagcau

SEQ ID NO: 360889 - RNA, 21 nt, Artificial Sequence
  Synthetic
agagaucauuagcauaagcau

SEQ ID NO: 360890 - RNA, 22 nt, Artificial Sequence
  Synthetic
uagagaucauuagcauaagcau

SEQ ID NO: 360891 - RNA, 23 nt, Artificial Sequence
  Synthetic
auagagaucauuagcauaagcau

SEQ ID NO: 360892 - RNA, 24 nt, Artificial Sequence
  Synthetic
aauagagaucauuagcauaagcau

SEQ ID NO: 360893 - RNA, 18 nt, Artificial Sequence
  Synthetic
guguguagugauaagcau

SEQ ID NO: 360894 - RNA, 19 nt, Artificial Sequence
  Synthetic
aguguguagugauaagcau

SEQ ID NO: 360895 - RNA, 20 nt, Artificial Sequence
  Synthetic
gaguguguagugauaagcau

SEQ ID NO: 360896 - RNA, 21 nt, Artificial Sequence
  Synthetic
agaguguguagugauaagcau

SEQ ID NO: 360897 - RNA, 22 nt, Artificial Sequence
  Synthetic
uagaguguguagugauaagcau

SEQ ID NO: 360898 - RNA, 23 nt, Artificial Sequence
  Synthetic
auagaguguguagugauaagcau

SEQ ID NO: 360899 - RNA, 24 nt, Artificial Sequence
  Synthetic
cauagaguguguagugauaagcau

SEQ ID NO: 360900 - RNA, 18 nt, Artificial Sequence
  Synthetic
uauuggaauacuaagcau

SEQ ID NO: 360901 - RNA, 19 nt, Artificial Sequence
  Synthetic
uuauuggaauacuaagcau

SEQ ID NO: 360902 - RNA, 20 nt, Artificial Sequence
  Synthetic
auuauuggaauacuaagcau

SEQ ID NO: 360903 - RNA, 21 nt, Artificial Sequence
  Synthetic
cauuauuggaauacuaagcau

SEQ ID NO: 360904 - RNA, 22 nt, Artificial Sequence
  Synthetic
ccauuauuggaauacuaagcau

SEQ ID NO: 360905 - RNA, 23 nt, Artificial Sequence
  Synthetic
uccauuauuggaauacuaagcau

SEQ ID NO: 360906 - RNA, 24 nt, Artificial Sequence
  Synthetic
uuccauuauuggaauacuaagcau

SEQ ID NO: 360907 - RNA, 18 nt, Artificial Sequence
  Synthetic
cacaugggaaaacagcau

SEQ ID NO: 360908 - RNA, 19 nt, Artificial Sequence
  Synthetic
ucacaugggaaaacagcau

SEQ ID NO: 360909 - RNA, 20 nt, Artificial Sequence
  Synthetic
aucacaugggaaaacagcau

SEQ ID NO: 360910 - RNA, 21 nt, Artificial Sequence
  Synthetic
uaucacaugggaaaacagcau

SEQ ID NO: 360911 - RNA, 22 nt, Artificial Sequence
  Synthetic
cuaucacaugggaaaacagcau

SEQ ID NO: 360912 - RNA, 23 nt, Artificial Sequence
  Synthetic
acuaucacaugggaaaacagcau

SEQ ID NO: 360913 - RNA, 24 nt, Artificial Sequence
  Synthetic
cacuaucacaugggaaaacagcau

SEQ ID NO: 360914 - RNA, 18 nt, Artificial Sequence
  Synthetic
ccugugaagaaacagcau

SEQ ID NO: 360915 - RNA, 19 nt, Artificial Sequence
  Synthetic
uccugugaagaaacagcau

SEQ ID NO: 360916 - RNA, 20 nt, Artificial Sequence
  Synthetic
uuccugugaagaaacagcau

SEQ ID NO: 360917 - RNA, 21 nt, Artificial Sequence
  Synthetic
auuccugugaagaaacagcau

SEQ ID NO: 360918 - RNA, 22 nt, Artificial Sequence
  Synthetic
cauuccugugaagaaacagcau

SEQ ID NO: 360919 - RNA, 23 nt, Artificial Sequence
  Synthetic
ucauuccugugaagaaacagcau

SEQ ID NO: 360920 - RNA, 24 nt, Artificial Sequence
  Synthetic
aucauuccugugaagaaacagcau

SEQ ID NO: 360921 - RNA, 18 nt, Artificial Sequence
  Synthetic
cuaucacgagaacagcau

SEQ ID NO: 360922 - RNA, 19 nt, Artificial Sequence
  Synthetic
acuaucacgagaacagcau

SEQ ID NO: 360923 - RNA, 20 nt, Artificial Sequence
  Synthetic
uacuaucacgagaacagcau

SEQ ID NO: 360924 - RNA, 21 nt, Artificial Sequence
  Synthetic
uuacuaucacgagaacagcau

SEQ ID NO: 360925 - RNA, 22 nt, Artificial Sequence
  Synthetic
uuuacuaucacgagaacagcau

SEQ ID NO: 360926 - RNA, 23 nt, Artificial Sequence
  Synthetic
auuuacuaucacgagaacagcau

SEQ ID NO: 360927 - RNA, 24 nt, Artificial Sequence
  Synthetic
aauuuacuaucacgagaacagcau

SEQ ID NO: 360928 - RNA, 18 nt, Artificial Sequence
  Synthetic
cuaucaugagaacagcau

SEQ ID NO: 360929 - RNA, 19 nt, Artificial Sequence
  Synthetic
acuaucaugagaacagcau

SEQ ID NO: 360930 - RNA, 20 nt, Artificial Sequence
  Synthetic
cacuaucaugagaacagcau

SEQ ID NO: 360931 - RNA, 21 nt, Artificial Sequence
  Synthetic
ucacuaucaugagaacagcau

SEQ ID NO: 360932 - RNA, 22 nt, Artificial Sequence
  Synthetic
cucacuaucaugagaacagcau

SEQ ID NO: 360933 - RNA, 23 nt, Artificial Sequence
  Synthetic
acucacuaucaugagaacagcau

SEQ ID NO: 360934 - RNA, 24 nt, Artificial Sequence
  Synthetic
cacucacuaucaugagaacagcau

SEQ ID NO: 360935 - RNA, 19 nt, Artificial Sequence
  Synthetic
gcuaucaugagaacagcau

SEQ ID NO: 360936 - RNA, 20 nt, Artificial Sequence
  Synthetic
cgcuaucaugagaacagcau

SEQ ID NO: 360937 - RNA, 21 nt, Artificial Sequence
  Synthetic
ccgcuaucaugagaacagcau

SEQ ID NO: 360938 - RNA, 22 nt, Artificial Sequence
  Synthetic
cccgcuaucaugagaacagcau

SEQ ID NO: 360939 - RNA, 23 nt, Artificial Sequence
  Synthetic
ucccgcuaucaugagaacagcau

SEQ ID NO: 360940 - RNA, 24 nt, Artificial Sequence
  Synthetic
aucccgcuaucaugagaacagcau

SEQ ID NO: 360941 - RNA, 18 nt, Artificial Sequence
  Synthetic
aauuuguauuuccagcau

SEQ ID NO: 360942 - RNA, 19 nt, Artificial Sequence
  Synthetic
gaauuuguauuuccagcau

SEQ ID NO: 360943 - RNA, 20 nt, Artificial Sequence
  Synthetic
ugaauuuguauuuccagcau

SEQ ID NO: 360944 - RNA, 21 nt, Artificial Sequence
  Synthetic
augaauuuguauuuccagcau

SEQ ID NO: 360945 - RNA, 22 nt, Artificial Sequence
  Synthetic
uaugaauuuguauuuccagcau

SEQ ID NO: 360946 - RNA, 23 nt, Artificial Sequence
  Synthetic
auaugaauuuguauuuccagcau

SEQ ID NO: 360947 - RNA, 24 nt, Artificial Sequence
  Synthetic
cauaugaauuuguauuuccagcau

SEQ ID NO: 360948 - RNA, 18 nt, Artificial Sequence
  Synthetic
auuucuucauagcagcau

SEQ ID NO: 360949 - RNA, 19 nt, Artificial Sequence
  Synthetic
uauuucuucauagcagcau

SEQ ID NO: 360950 - RNA, 20 nt, Artificial Sequence
  Synthetic
guauuucuucauagcagcau

SEQ ID NO: 360951 - RNA, 21 nt, Artificial Sequence
  Synthetic
gguauuucuucauagcagcau

SEQ ID NO: 360952 - RNA, 22 nt, Artificial Sequence
  Synthetic
ggguauuucuucauagcagcau

SEQ ID NO: 360953 - RNA, 23 nt, Artificial Sequence
  Synthetic
cggguauuucuucauagcagcau

SEQ ID NO: 360954 - RNA, 24 nt, Artificial Sequence
  Synthetic
ucggguauuucuucauagcagcau

SEQ ID NO: 360955 - RNA, 23 nt, Artificial Sequence
  Synthetic
uggguauuucuucauagcagcau

SEQ ID NO: 360956 - RNA, 24 nt, Artificial Sequence
  Synthetic
uuggguauuucuucauagcagcau

SEQ ID NO: 360957 - RNA, 18 nt, Artificial Sequence
  Synthetic
accuggagaaaucagcau

SEQ ID NO: 360958 - RNA, 19 nt, Artificial Sequence
  Synthetic
gaccuggagaaaucagcau

SEQ ID NO: 360959 - RNA, 20 nt, Artificial Sequence
  Synthetic
agaccuggagaaaucagcau

SEQ ID NO: 360960 - RNA, 21 nt, Artificial Sequence
  Synthetic
aagaccuggagaaaucagcau

SEQ ID NO: 360961 - RNA, 22 nt, Artificial Sequence
  Synthetic
uaagaccuggagaaaucagcau

SEQ ID NO: 360962 - RNA, 23 nt, Artificial Sequence
  Synthetic
cuaagaccuggagaaaucagcau

SEQ ID NO: 360963 - RNA, 24 nt, Artificial Sequence
  Synthetic
ucuaagaccuggagaaaucagcau

SEQ ID NO: 360964 - RNA, 18 nt, Artificial Sequence
  Synthetic
auccgucagccucagcau

SEQ ID NO: 360965 - RNA, 19 nt, Artificial Sequence
  Synthetic
gauccgucagccucagcau

SEQ ID NO: 360966 - RNA, 20 nt, Artificial Sequence
  Synthetic
ugauccgucagccucagcau

SEQ ID NO: 360967 - RNA, 21 nt, Artificial Sequence
  Synthetic
gugauccgucagccucagcau

SEQ ID NO: 360968 - RNA, 22 nt, Artificial Sequence
  Synthetic
agugauccgucagccucagcau

SEQ ID NO: 360969 - RNA, 23 nt, Artificial Sequence
  Synthetic
aagugauccgucagccucagcau

SEQ ID NO: 360970 - RNA, 24 nt, Artificial Sequence
  Synthetic
caagugauccgucagccucagcau

SEQ ID NO: 360971 - RNA, 18 nt, Artificial Sequence
  Synthetic
auauagaaaagucagcau

SEQ ID NO: 360972 - RNA, 19 nt, Artificial Sequence
  Synthetic
uauauagaaaagucagcau

SEQ ID NO: 360973 - RNA, 20 nt, Artificial Sequence
  Synthetic
auauauagaaaagucagcau

SEQ ID NO: 360974 - RNA, 21 nt, Artificial Sequence
  Synthetic
aauauauagaaaagucagcau

SEQ ID NO: 360975 - RNA, 22 nt, Artificial Sequence
  Synthetic
gaauauauagaaaagucagcau

SEQ ID NO: 360976 - RNA, 23 nt, Artificial Sequence
  Synthetic
cgaauauauagaaaagucagcau

SEQ ID NO: 360977 - RNA, 24 nt, Artificial Sequence
  Synthetic
ccgaauauauagaaaagucagcau

SEQ ID NO: 360978 - RNA, 18 nt, Artificial Sequence
  Synthetic
cagaagucaugucagcau

SEQ ID NO: 360979 - RNA, 19 nt, Artificial Sequence
  Synthetic
acagaagucaugucagcau

SEQ ID NO: 360980 - RNA, 20 nt, Artificial Sequence
  Synthetic
gacagaagucaugucagcau

SEQ ID NO: 360981 - RNA, 21 nt, Artificial Sequence
  Synthetic
ugacagaagucaugucagcau

SEQ ID NO: 360982 - RNA, 22 nt, Artificial Sequence
  Synthetic
cugacagaagucaugucagcau

SEQ ID NO: 360983 - RNA, 23 nt, Artificial Sequence
  Synthetic
ucugacagaagucaugucagcau

SEQ ID NO: 360984 - RNA, 24 nt, Artificial Sequence
  Synthetic
gucugacagaagucaugucagcau

SEQ ID NO: 360985 - RNA, 18 nt, Artificial Sequence
  Synthetic
cccuuccagauucagcau

SEQ ID NO: 360986 - RNA, 19 nt, Artificial Sequence
  Synthetic
ccccuuccagauucagcau

SEQ ID NO: 360987 - RNA, 20 nt, Artificial Sequence
  Synthetic
cccccuuccagauucagcau

SEQ ID NO: 360988 - RNA, 21 nt, Artificial Sequence
  Synthetic
ucccccuuccagauucagcau

SEQ ID NO: 360989 - RNA, 22 nt, Artificial Sequence
  Synthetic
cucccccuuccagauucagcau

SEQ ID NO: 360990 - RNA, 23 nt, Artificial Sequence
  Synthetic
gcucccccuuccagauucagcau

SEQ ID NO: 360991 - RNA, 24 nt, Artificial Sequence
  Synthetic
ugcucccccuuccagauucagcau

SEQ ID NO: 360992 - RNA, 18 nt, Artificial Sequence
  Synthetic
uuucaagaggaagagcau

SEQ ID NO: 360993 - RNA, 19 nt, Artificial Sequence
  Synthetic
guuucaagaggaagagcau

SEQ ID NO: 360994 - RNA, 20 nt, Artificial Sequence
  Synthetic
uguuucaagaggaagagcau

SEQ ID NO: 360995 - RNA, 21 nt, Artificial Sequence
  Synthetic
guguuucaagaggaagagcau

SEQ ID NO: 360996 - RNA, 22 nt, Artificial Sequence
  Synthetic
uguguuucaagaggaagagcau

SEQ ID NO: 360997 - RNA, 23 nt, Artificial Sequence
  Synthetic
auguguuucaagaggaagagcau

SEQ ID NO: 360998 - RNA, 24 nt, Artificial Sequence
  Synthetic
cauguguuucaagaggaagagcau

SEQ ID NO: 360999 - RNA, 18 nt, Artificial Sequence
  Synthetic
ucuaaaaugccagagcau

SEQ ID NO: 361000 - RNA, 19 nt, Artificial Sequence
  Synthetic
uucuaaaaugccagagcau

SEQ ID NO: 361001 - RNA, 20 nt, Artificial Sequence
  Synthetic
uuucuaaaaugccagagcau

SEQ ID NO: 361002 - RNA, 21 nt, Artificial Sequence
  Synthetic
auuucuaaaaugccagagcau

SEQ ID NO: 361003 - RNA, 22 nt, Artificial Sequence
  Synthetic
uauuucuaaaaugccagagcau

SEQ ID NO: 361004 - RNA, 23 nt, Artificial Sequence
  Synthetic
guauuucuaaaaugccagagcau

SEQ ID NO: 361005 - RNA, 24 nt, Artificial Sequence
  Synthetic
cguauuucuaaaaugccagagcau

SEQ ID NO: 361006 - RNA, 18 nt, Artificial Sequence
  Synthetic
caaggggagggagagcau

SEQ ID NO: 361007 - RNA, 19 nt, Artificial Sequence
  Synthetic
gcaaggggagggagagcau

SEQ ID NO: 361008 - RNA, 20 nt, Artificial Sequence
  Synthetic
ggcaaggggagggagagcau

SEQ ID NO: 361009 - RNA, 21 nt, Artificial Sequence
  Synthetic
gggcaaggggagggagagcau

SEQ ID NO: 361010 - RNA, 22 nt, Artificial Sequence
  Synthetic
ggggcaaggggagggagagcau

SEQ ID NO: 361011 - RNA, 23 nt, Artificial Sequence
  Synthetic
gggggcaaggggagggagagcau

SEQ ID NO: 361012 - RNA, 24 nt, Artificial Sequence
  Synthetic
ggggggcaaggggagggagagcau

SEQ ID NO: 361013 - RNA, 18 nt, Artificial Sequence
  Synthetic
cgaggggagggagagcau

SEQ ID NO: 361014 - RNA, 19 nt, Artificial Sequence
  Synthetic
gcgaggggagggagagcau

SEQ ID NO: 361015 - RNA, 20 nt, Artificial Sequence
  Synthetic
ggcgaggggagggagagcau

SEQ ID NO: 361016 - RNA, 21 nt, Artificial Sequence
  Synthetic
gggcgaggggagggagagcau

SEQ ID NO: 361017 - RNA, 22 nt, Artificial Sequence
  Synthetic
ggggcgaggggagggagagcau

SEQ ID NO: 361018 - RNA, 23 nt, Artificial Sequence
  Synthetic
uggggcgaggggagggagagcau

SEQ ID NO: 361019 - RNA, 24 nt, Artificial Sequence
  Synthetic
guggggcgaggggagggagagcau

SEQ ID NO: 361020 - RNA, 18 nt, Artificial Sequence
  Synthetic
cucuucaugugagagcau

SEQ ID NO: 361021 - RNA, 19 nt, Artificial Sequence
  Synthetic
ccucuucaugugagagcau

SEQ ID NO: 361022 - RNA, 20 nt, Artificial Sequence
  Synthetic
accucuucaugugagagcau

SEQ ID NO: 361023 - RNA, 21 nt, Artificial Sequence
  Synthetic
caccucuucaugugagagcau

SEQ ID NO: 361024 - RNA, 22 nt, Artificial Sequence
  Synthetic
gcaccucuucaugugagagcau

SEQ ID NO: 361025 - RNA, 23 nt, Artificial Sequence
  Synthetic
agcaccucuucaugugagagcau

SEQ ID NO: 361026 - RNA, 24 nt, Artificial Sequence
  Synthetic
cagcaccucuucaugugagagcau

SEQ ID NO: 361027 - RNA, 18 nt, Artificial Sequence
  Synthetic
cucuuaguuugagagcau

SEQ ID NO: 361028 - RNA, 19 nt, Artificial Sequence
  Synthetic
acucuuaguuugagagcau

SEQ ID NO: 361029 - RNA, 20 nt, Artificial Sequence
  Synthetic
uacucuuaguuugagagcau

SEQ ID NO: 361030 - RNA, 21 nt, Artificial Sequence
  Synthetic
auacucuuaguuugagagcau

SEQ ID NO: 361031 - RNA, 22 nt, Artificial Sequence
  Synthetic
uauacucuuaguuugagagcau

SEQ ID NO: 361032 - RNA, 23 nt, Artificial Sequence
  Synthetic
guauacucuuaguuugagagcau

SEQ ID NO: 361033 - RNA, 24 nt, Artificial Sequence
  Synthetic
uguauacucuuaguuugagagcau

SEQ ID NO: 361034 - RNA, 18 nt, Artificial Sequence
  Synthetic
uuuauccugaaugagcau

SEQ ID NO: 361035 - RNA, 19 nt, Artificial Sequence
  Synthetic
uuuuauccugaaugagcau

SEQ ID NO: 361036 - RNA, 20 nt, Artificial Sequence
  Synthetic
auuuuauccugaaugagcau

SEQ ID NO: 361037 - RNA, 21 nt, Artificial Sequence
  Synthetic
aauuuuauccugaaugagcau

SEQ ID NO: 361038 - RNA, 22 nt, Artificial Sequence
  Synthetic
uaauuuuauccugaaugagcau

SEQ ID NO: 361039 - RNA, 23 nt, Artificial Sequence
  Synthetic
auaauuuuauccugaaugagcau

SEQ ID NO: 361040 - RNA, 24 nt, Artificial Sequence
  Synthetic
aauaauuuuauccugaaugagcau

SEQ ID NO: 361041 - RNA, 18 nt, Artificial Sequence
  Synthetic
agccuaccauaugagcau

SEQ ID NO: 361042 - RNA, 19 nt, Artificial Sequence
  Synthetic
cagccuaccauaugagcau

SEQ ID NO: 361043 - RNA, 20 nt, Artificial Sequence
  Synthetic
acagccuaccauaugagcau

SEQ ID NO: 361044 - RNA, 21 nt, Artificial Sequence
  Synthetic
aacagccuaccauaugagcau

SEQ ID NO: 361045 - RNA, 22 nt, Artificial Sequence
  Synthetic
caacagccuaccauaugagcau

SEQ ID NO: 361046 - RNA, 23 nt, Artificial Sequence
  Synthetic
acaacagccuaccauaugagcau

SEQ ID NO: 361047 - RNA, 24 nt, Artificial Sequence
  Synthetic
aacaacagccuaccauaugagcau

SEQ ID NO: 361048 - RNA, 18 nt, Artificial Sequence
  Synthetic
cccauauucuaugagcau

SEQ ID NO: 361049 - RNA, 19 nt, Artificial Sequence
  Synthetic
ucccauauucuaugagcau

SEQ ID NO: 361050 - RNA, 20 nt, Artificial Sequence
  Synthetic
aucccauauucuaugagcau

SEQ ID NO: 361051 - RNA, 21 nt, Artificial Sequence
  Synthetic
gaucccauauucuaugagcau

SEQ ID NO: 361052 - RNA, 22 nt, Artificial Sequence
  Synthetic
ugaucccauauucuaugagcau

SEQ ID NO: 361053 - RNA, 23 nt, Artificial Sequence
  Synthetic
uugaucccauauucuaugagcau

SEQ ID NO: 361054 - RNA, 24 nt, Artificial Sequence
  Synthetic
auugaucccauauucuaugagcau

SEQ ID NO: 361055 - RNA, 18 nt, Artificial Sequence
  Synthetic
agccagcuaugugagcau

SEQ ID NO: 361056 - RNA, 19 nt, Artificial Sequence
  Synthetic
cagccagcuaugugagcau

SEQ ID NO: 361057 - RNA, 20 nt, Artificial Sequence
  Synthetic
acagccagcuaugugagcau

SEQ ID NO: 361058 - RNA, 21 nt, Artificial Sequence
  Synthetic
gacagccagcuaugugagcau

SEQ ID NO: 361059 - RNA, 22 nt, Artificial Sequence
  Synthetic
cgacagccagcuaugugagcau

SEQ ID NO: 361060 - RNA, 23 nt, Artificial Sequence
  Synthetic
ucgacagccagcuaugugagcau

SEQ ID NO: 361061 - RNA, 24 nt, Artificial Sequence
  Synthetic
gucgacagccagcuaugugagcau

SEQ ID NO: 361062 - RNA, 18 nt, Artificial Sequence
  Synthetic
aauguggguuuugagcau

SEQ ID NO: 361063 - RNA, 19 nt, Artificial Sequence
  Synthetic
caauguggguuuugagcau

SEQ ID NO: 361064 - RNA, 20 nt, Artificial Sequence
  Synthetic
acaauguggguuuugagcau

SEQ ID NO: 361065 - RNA, 21 nt, Artificial Sequence
  Synthetic
uacaauguggguuuugagcau

SEQ ID NO: 361066 - RNA, 22 nt, Artificial Sequence
  Synthetic
auacaauguggguuuugagcau

SEQ ID NO: 361067 - RNA, 23 nt, Artificial Sequence
  Synthetic
aauacaauguggguuuugagcau

SEQ ID NO: 361068 - RNA, 24 nt, Artificial Sequence
  Synthetic
uaauacaauguggguuuugagcau

SEQ ID NO: 361069 - RNA, 18 nt, Artificial Sequence
  Synthetic
augugguagaaauagcau

SEQ ID NO: 361070 - RNA, 19 nt, Artificial Sequence
  Synthetic
gaugugguagaaauagcau

SEQ ID NO: 361071 - RNA, 20 nt, Artificial Sequence
  Synthetic
agaugugguagaaauagcau

SEQ ID NO: 361072 - RNA, 21 nt, Artificial Sequence
  Synthetic
cagaugugguagaaauagcau

SEQ ID NO: 361073 - RNA, 22 nt, Artificial Sequence
  Synthetic
gcagaugugguagaaauagcau

SEQ ID NO: 361074 - RNA, 23 nt, Artificial Sequence
  Synthetic
ugcagaugugguagaaauagcau

SEQ ID NO: 361075 - RNA, 24 nt, Artificial Sequence
  Synthetic
cugcagaugugguagaaauagcau

SEQ ID NO: 361076 - RNA, 18 nt, Artificial Sequence
  Synthetic
cuucuacccucauagcau

SEQ ID NO: 361077 - RNA, 19 nt, Artificial Sequence
  Synthetic
acuucuacccucauagcau

SEQ ID NO: 361078 - RNA, 20 nt, Artificial Sequence
  Synthetic
cacuucuacccucauagcau

SEQ ID NO: 361079 - RNA, 21 nt, Artificial Sequence
  Synthetic
ccacuucuacccucauagcau

SEQ ID NO: 361080 - RNA, 22 nt, Artificial Sequence
  Synthetic
uccacuucuacccucauagcau

SEQ ID NO: 361081 - RNA, 23 nt, Artificial Sequence
  Synthetic
uuccacuucuacccucauagcau

SEQ ID NO: 361082 - RNA, 24 nt, Artificial Sequence
  Synthetic
uuuccacuucuacccucauagcau

SEQ ID NO: 361083 - RNA, 18 nt, Artificial Sequence
  Synthetic
aaauaaaugagauagcau

SEQ ID NO: 361084 - RNA, 19 nt, Artificial Sequence
  Synthetic
gaaauaaaugagauagcau

SEQ ID NO: 361085 - RNA, 20 nt, Artificial Sequence
  Synthetic
ugaaauaaaugagauagcau

SEQ ID NO: 361086 - RNA, 21 nt, Artificial Sequence
  Synthetic
augaaauaaaugagauagcau

SEQ ID NO: 361087 - RNA, 22 nt, Artificial Sequence
  Synthetic
aaugaaauaaaugagauagcau

SEQ ID NO: 361088 - RNA, 23 nt, Artificial Sequence
  Synthetic
aaaugaaauaaaugagauagcau

SEQ ID NO: 361089 - RNA, 24 nt, Artificial Sequence
  Synthetic
uaaaugaaauaaaugagauagcau

SEQ ID NO: 361090 - RNA, 18 nt, Artificial Sequence
  Synthetic
aggggggagggauagcau

SEQ ID NO: 361091 - RNA, 19 nt, Artificial Sequence
  Synthetic
aaggggggagggauagcau

SEQ ID NO: 361092 - RNA, 20 nt, Artificial Sequence
  Synthetic
gaaggggggagggauagcau

SEQ ID NO: 361093 - RNA, 21 nt, Artificial Sequence
  Synthetic
ggaaggggggagggauagcau

SEQ ID NO: 361094 - RNA, 22 nt, Artificial Sequence
  Synthetic
gggaaggggggagggauagcau

SEQ ID NO: 361095 - RNA, 23 nt, Artificial Sequence
  Synthetic
ggggaaggggggagggauagcau

SEQ ID NO: 361096 - RNA, 24 nt, Artificial Sequence
  Synthetic
gggggaaggggggagggauagcau

SEQ ID NO: 361097 - RNA, 21 nt, Artificial Sequence
  Synthetic
gggaggggggagggauagcau

SEQ ID NO: 361098 - RNA, 22 nt, Artificial Sequence
  Synthetic
ggggaggggggagggauagcau

SEQ ID NO: 361099 - RNA, 23 nt, Artificial Sequence
  Synthetic
gggggaggggggagggauagcau

SEQ ID NO: 361100 - RNA, 24 nt, Artificial Sequence
  Synthetic
ggggggaggggggagggauagcau

SEQ ID NO: 361101 - RNA, 18 nt, Artificial Sequence
  Synthetic
aggguggagggauagcau

SEQ ID NO: 361102 - RNA, 19 nt, Artificial Sequence
  Synthetic
gaggguggagggauagcau

SEQ ID NO: 361103 - RNA, 20 nt, Artificial Sequence
  Synthetic
ggaggguggagggauagcau

SEQ ID NO: 361104 - RNA, 21 nt, Artificial Sequence
  Synthetic
gggaggguggagggauagcau

SEQ ID NO: 361105 - RNA, 22 nt, Artificial Sequence
  Synthetic
ggggaggguggagggauagcau

SEQ ID NO: 361106 - RNA, 23 nt, Artificial Sequence
  Synthetic
gggggaggguggagggauagcau

SEQ ID NO: 361107 - RNA, 24 nt, Artificial Sequence
  Synthetic
ggggggaggguggagggauagcau

SEQ ID NO: 361108 - RNA, 18 nt, Artificial Sequence
  Synthetic
guuggguuuauauagcau

SEQ ID NO: 361109 - RNA, 19 nt, Artificial Sequence
  Synthetic
uguuggguuuauauagcau

SEQ ID NO: 361110 - RNA, 20 nt, Artificial Sequence
  Synthetic
auguuggguuuauauagcau

SEQ ID NO: 361111 - RNA, 21 nt, Artificial Sequence
  Synthetic
aauguuggguuuauauagcau

SEQ ID NO: 361112 - RNA, 22 nt, Artificial Sequence
  Synthetic
gaauguuggguuuauauagcau

SEQ ID NO: 361113 - RNA, 23 nt, Artificial Sequence
  Synthetic
agaauguuggguuuauauagcau

SEQ ID NO: 361114 - RNA, 24 nt, Artificial Sequence
  Synthetic
uagaauguuggguuuauauagcau

SEQ ID NO: 361115 - RNA, 18 nt, Artificial Sequence
  Synthetic
gaagacauacacuagcau

SEQ ID NO: 361116 - RNA, 19 nt, Artificial Sequence
  Synthetic
agaagacauacacuagcau

SEQ ID NO: 361117 - RNA, 20 nt, Artificial Sequence
  Synthetic
uagaagacauacacuagcau

SEQ ID NO: 361118 - RNA, 21 nt, Artificial Sequence
  Synthetic
cuagaagacauacacuagcau

SEQ ID NO: 361119 - RNA, 22 nt, Artificial Sequence
  Synthetic
acuagaagacauacacuagcau

SEQ ID NO: 361120 - RNA, 23 nt, Artificial Sequence
  Synthetic
aacuagaagacauacacuagcau

SEQ ID NO: 361121 - RNA, 24 nt, Artificial Sequence
  Synthetic
uaacuagaagacauacacuagcau

SEQ ID NO: 361122 - RNA, 18 nt, Artificial Sequence
  Synthetic
ucaugagacuccuagcau

SEQ ID NO: 361123 - RNA, 19 nt, Artificial Sequence
  Synthetic
gucaugagacuccuagcau

SEQ ID NO: 361124 - RNA, 20 nt, Artificial Sequence
  Synthetic
ugucaugagacuccuagcau

SEQ ID NO: 361125 - RNA, 21 nt, Artificial Sequence
  Synthetic
gugucaugagacuccuagcau

SEQ ID NO: 361126 - RNA, 22 nt, Artificial Sequence
  Synthetic
ugugucaugagacuccuagcau

SEQ ID NO: 361127 - RNA, 23 nt, Artificial Sequence
  Synthetic
gugugucaugagacuccuagcau

SEQ ID NO: 361128 - RNA, 24 nt, Artificial Sequence
  Synthetic
ugugugucaugagacuccuagcau

SEQ ID NO: 361129 - RNA, 18 nt, Artificial Sequence
  Synthetic
uguauguuagucuagcau

SEQ ID NO: 361130 - RNA, 19 nt, Artificial Sequence
  Synthetic
uuguauguuagucuagcau

SEQ ID NO: 361131 - RNA, 20 nt, Artificial Sequence
  Synthetic
auuguauguuagucuagcau

SEQ ID NO: 361132 - RNA, 21 nt, Artificial Sequence
  Synthetic
aauuguauguuagucuagcau

SEQ ID NO: 361133 - RNA, 22 nt, Artificial Sequence
  Synthetic
aaauuguauguuagucuagcau

SEQ ID NO: 361134 - RNA, 23 nt, Artificial Sequence
  Synthetic
aaaauuguauguuagucuagcau

SEQ ID NO: 361135 - RNA, 24 nt, Artificial Sequence
  Synthetic
caaaauuguauguuagucuagcau

SEQ ID NO: 361136 - RNA, 18 nt, Artificial Sequence
  Synthetic
gugagugacuucuagcau

SEQ ID NO: 361137 - RNA, 19 nt, Artificial Sequence
  Synthetic
ugugagugacuucuagcau

SEQ ID NO: 361138 - RNA, 20 nt, Artificial Sequence
  Synthetic
uugugagugacuucuagcau

SEQ ID NO: 361139 - RNA, 21 nt, Artificial Sequence
  Synthetic
uuugugagugacuucuagcau

SEQ ID NO: 361140 - RNA, 22 nt, Artificial Sequence
  Synthetic
uuuugugagugacuucuagcau

SEQ ID NO: 361141 - RNA, 23 nt, Artificial Sequence
  Synthetic
cuuuugugagugacuucuagcau

SEQ ID NO: 361142 - RNA, 24 nt, Artificial Sequence
  Synthetic
gcuuuugugagugacuucuagcau

SEQ ID NO: 361143 - RNA, 18 nt, Artificial Sequence
  Synthetic
gaucuauuaaaguagcau

SEQ ID NO: 361144 - RNA, 19 nt, Artificial Sequence
  Synthetic
ggaucuauuaaaguagcau

SEQ ID NO: 361145 - RNA, 20 nt, Artificial Sequence
  Synthetic
uggaucuauuaaaguagcau

SEQ ID NO: 361146 - RNA, 21 nt, Artificial Sequence
  Synthetic
uuggaucuauuaaaguagcau

SEQ ID NO: 361147 - RNA, 22 nt, Artificial Sequence
  Synthetic
auuggaucuauuaaaguagcau

SEQ ID NO: 361148 - RNA, 23 nt, Artificial Sequence
  Synthetic
gauuggaucuauuaaaguagcau

SEQ ID NO: 361149 - RNA, 24 nt, Artificial Sequence
  Synthetic
ugauuggaucuauuaaaguagcau

SEQ ID NO: 361150 - RNA, 18 nt, Artificial Sequence
  Synthetic
aauaguaaacaguagcau

SEQ ID NO: 361151 - RNA, 19 nt, Artificial Sequence
  Synthetic
gaauaguaaacaguagcau

SEQ ID NO: 361152 - RNA, 20 nt, Artificial Sequence
  Synthetic
ugaauaguaaacaguagcau

SEQ ID NO: 361153 - RNA, 21 nt, Artificial Sequence
  Synthetic
cugaauaguaaacaguagcau

SEQ ID NO: 361154 - RNA, 22 nt, Artificial Sequence
  Synthetic
acugaauaguaaacaguagcau

SEQ ID NO: 361155 - RNA, 23 nt, Artificial Sequence
  Synthetic
cacugaauaguaaacaguagcau

SEQ ID NO: 361156 - RNA, 24 nt, Artificial Sequence
  Synthetic
ucacugaauaguaaacaguagcau

SEQ ID NO: 361157 - RNA, 18 nt, Artificial Sequence
  Synthetic
cucacaucauuguagcau

SEQ ID NO: 361158 - RNA, 19 nt, Artificial Sequence
  Synthetic
ccucacaucauuguagcau

SEQ ID NO: 361159 - RNA, 20 nt, Artificial Sequence
  Synthetic
cccucacaucauuguagcau

SEQ ID NO: 361160 - RNA, 21 nt, Artificial Sequence
  Synthetic
ccccucacaucauuguagcau

SEQ ID NO: 361161 - RNA, 22 nt, Artificial Sequence
  Synthetic
gccccucacaucauuguagcau

SEQ ID NO: 361162 - RNA, 23 nt, Artificial Sequence
  Synthetic
ugccccucacaucauuguagcau

SEQ ID NO: 361163 - RNA, 24 nt, Artificial Sequence
  Synthetic
cugccccucacaucauuguagcau

SEQ ID NO: 361164 - RNA, 18 nt, Artificial Sequence
  Synthetic
acacccauguuguagcau

SEQ ID NO: 361165 - RNA, 19 nt, Artificial Sequence
  Synthetic
uacacccauguuguagcau

SEQ ID NO: 361166 - RNA, 20 nt, Artificial Sequence
  Synthetic
guacacccauguuguagcau

SEQ ID NO: 361167 - RNA, 21 nt, Artificial Sequence
  Synthetic
gguacacccauguuguagcau

SEQ ID NO: 361168 - RNA, 22 nt, Artificial Sequence
  Synthetic
agguacacccauguuguagcau

SEQ ID NO: 361169 - RNA, 23 nt, Artificial Sequence
  Synthetic
aagguacacccauguuguagcau

SEQ ID NO: 361170 - RNA, 24 nt, Artificial Sequence
  Synthetic
caagguacacccauguuguagcau

SEQ ID NO: 361171 - RNA, 18 nt, Artificial Sequence
  Synthetic
ccugugcacauuuagcau

SEQ ID NO: 361172 - RNA, 19 nt, Artificial Sequence
  Synthetic
cccugugcacauuuagcau

SEQ ID NO: 361173 - RNA, 20 nt, Artificial Sequence
  Synthetic
gcccugugcacauuuagcau

SEQ ID NO: 361174 - RNA, 21 nt, Artificial Sequence
  Synthetic
agcccugugcacauuuagcau

SEQ ID NO: 361175 - RNA, 22 nt, Artificial Sequence
  Synthetic
aagcccugugcacauuuagcau

SEQ ID NO: 361176 - RNA, 23 nt, Artificial Sequence
  Synthetic
uaagcccugugcacauuuagcau

SEQ ID NO: 361177 - RNA, 24 nt, Artificial Sequence
  Synthetic
cuaagcccugugcacauuuagcau

SEQ ID NO: 361178 - RNA, 18 nt, Artificial Sequence
  Synthetic
uacuuuaaguuuuagcau

SEQ ID NO: 361179 - RNA, 19 nt, Artificial Sequence
  Synthetic
auacuuuaaguuuuagcau

SEQ ID NO: 361180 - RNA, 20 nt, Artificial Sequence
  Synthetic
uauacuuuaaguuuuagcau

SEQ ID NO: 361181 - RNA, 21 nt, Artificial Sequence
  Synthetic
uuauacuuuaaguuuuagcau

SEQ ID NO: 361182 - RNA, 22 nt, Artificial Sequence
  Synthetic
auuauacuuuaaguuuuagcau

SEQ ID NO: 361183 - RNA, 23 nt, Artificial Sequence
  Synthetic
uauuauacuuuaaguuuuagcau

SEQ ID NO: 361184 - RNA, 24 nt, Artificial Sequence
  Synthetic
uuauuauacuuuaaguuuuagcau

SEQ ID NO: 361185 - RNA, 18 nt, Artificial Sequence
  Synthetic
agauaaagguaaacgcau

SEQ ID NO: 361186 - RNA, 19 nt, Artificial Sequence
  Synthetic
uagauaaagguaaacgcau

SEQ ID NO: 361187 - RNA, 20 nt, Artificial Sequence
  Synthetic
uuagauaaagguaaacgcau

SEQ ID NO: 361188 - RNA, 21 nt, Artificial Sequence
  Synthetic
guuagauaaagguaaacgcau

SEQ ID NO: 361189 - RNA, 22 nt, Artificial Sequence
  Synthetic
uguuagauaaagguaaacgcau

SEQ ID NO: 361190 - RNA, 23 nt, Artificial Sequence
  Synthetic
guguuagauaaagguaaacgcau

SEQ ID NO: 361191 - RNA, 24 nt, Artificial Sequence
  Synthetic
uguguuagauaaagguaaacgcau

SEQ ID NO: 361192 - RNA, 18 nt, Artificial Sequence
  Synthetic
gggggaaaggagacgcau

SEQ ID NO: 361193 - RNA, 19 nt, Artificial Sequence
  Synthetic
agggggaaaggagacgcau

SEQ ID NO: 361194 - RNA, 20 nt, Artificial Sequence
  Synthetic
uagggggaaaggagacgcau

SEQ ID NO: 361195 - RNA, 21 nt, Artificial Sequence
  Synthetic
guagggggaaaggagacgcau

SEQ ID NO: 361196 - RNA, 22 nt, Artificial Sequence
  Synthetic
gguagggggaaaggagacgcau

SEQ ID NO: 361197 - RNA, 23 nt, Artificial Sequence
  Synthetic
ggguagggggaaaggagacgcau

SEQ ID NO: 361198 - RNA, 24 nt, Artificial Sequence
  Synthetic
aggguagggggaaaggagacgcau

SEQ ID NO: 361199 - RNA, 18 nt, Artificial Sequence
  Synthetic
gcuuagaagacagcgcau

SEQ ID NO: 361200 - RNA, 19 nt, Artificial Sequence
  Synthetic
cgcuuagaagacagcgcau

SEQ ID NO: 361201 - RNA, 20 nt, Artificial Sequence
  Synthetic
ccgcuuagaagacagcgcau

SEQ ID NO: 361202 - RNA, 21 nt, Artificial Sequence
  Synthetic
uccgcuuagaagacagcgcau

SEQ ID NO: 361203 - RNA, 22 nt, Artificial Sequence
  Synthetic
auccgcuuagaagacagcgcau

SEQ ID NO: 361204 - RNA, 23 nt, Artificial Sequence
  Synthetic
cauccgcuuagaagacagcgcau

SEQ ID NO: 361205 - RNA, 24 nt, Artificial Sequence
  Synthetic
ucauccgcuuagaagacagcgcau

SEQ ID NO: 361206 - RNA, 18 nt, Artificial Sequence
  Synthetic
uaauuagcacaaaggcau

SEQ ID NO: 361207 - RNA, 19 nt, Artificial Sequence
  Synthetic
guaauuagcacaaaggcau

SEQ ID NO: 361208 - RNA, 20 nt, Artificial Sequence
  Synthetic
uguaauuagcacaaaggcau

SEQ ID NO: 361209 - RNA, 21 nt, Artificial Sequence
  Synthetic
cuguaauuagcacaaaggcau

SEQ ID NO: 361210 - RNA, 22 nt, Artificial Sequence
  Synthetic
gcuguaauuagcacaaaggcau

SEQ ID NO: 361211 - RNA, 23 nt, Artificial Sequence
  Synthetic
ugcuguaauuagcacaaaggcau

SEQ ID NO: 361212 - RNA, 24 nt, Artificial Sequence
  Synthetic
gugcuguaauuagcacaaaggcau

SEQ ID NO: 361213 - RNA, 18 nt, Artificial Sequence
  Synthetic
uucaugaauucaaggcau

SEQ ID NO: 361214 - RNA, 19 nt, Artificial Sequence
  Synthetic
auucaugaauucaaggcau

SEQ ID NO: 361215 - RNA, 20 nt, Artificial Sequence
  Synthetic
uauucaugaauucaaggcau

SEQ ID NO: 361216 - RNA, 21 nt, Artificial Sequence
  Synthetic
uuauucaugaauucaaggcau

SEQ ID NO: 361217 - RNA, 22 nt, Artificial Sequence
  Synthetic
uuuauucaugaauucaaggcau

SEQ ID NO: 361218 - RNA, 23 nt, Artificial Sequence
  Synthetic
uuuuauucaugaauucaaggcau

SEQ ID NO: 361219 - RNA, 24 nt, Artificial Sequence
  Synthetic
guuuuauucaugaauucaaggcau

SEQ ID NO: 361220 - RNA, 18 nt, Artificial Sequence
  Synthetic
gagcugacuugcaggcau

SEQ ID NO: 361221 - RNA, 19 nt, Artificial Sequence
  Synthetic
cgagcugacuugcaggcau

SEQ ID NO: 361222 - RNA, 20 nt, Artificial Sequence
  Synthetic
acgagcugacuugcaggcau

SEQ ID NO: 361223 - RNA, 21 nt, Artificial Sequence
  Synthetic
aacgagcugacuugcaggcau

SEQ ID NO: 361224 - RNA, 22 nt, Artificial Sequence
  Synthetic
aaacgagcugacuugcaggcau

SEQ ID NO: 361225 - RNA, 23 nt, Artificial Sequence
  Synthetic
aaaacgagcugacuugcaggcau

SEQ ID NO: 361226 - RNA, 24 nt, Artificial Sequence
  Synthetic
aaaaacgagcugacuugcaggcau

SEQ ID NO: 361227 - RNA, 18 nt, Artificial Sequence
  Synthetic
acuuuuaugacgaggcau

SEQ ID NO: 361228 - RNA, 19 nt, Artificial Sequence
  Synthetic
uacuuuuaugacgaggcau

SEQ ID NO: 361229 - RNA, 20 nt, Artificial Sequence
  Synthetic
cuacuuuuaugacgaggcau

SEQ ID NO: 361230 - RNA, 21 nt, Artificial Sequence
  Synthetic
gcuacuuuuaugacgaggcau

SEQ ID NO: 361231 - RNA, 22 nt, Artificial Sequence
  Synthetic
agcuacuuuuaugacgaggcau

SEQ ID NO: 361232 - RNA, 23 nt, Artificial Sequence
  Synthetic
aagcuacuuuuaugacgaggcau

SEQ ID NO: 361233 - RNA, 24 nt, Artificial Sequence
  Synthetic
aaagcuacuuuuaugacgaggcau

SEQ ID NO: 361234 - RNA, 18 nt, Artificial Sequence
  Synthetic
augcuaaauuugaggcau

SEQ ID NO: 361235 - RNA, 19 nt, Artificial Sequence
  Synthetic
caugcuaaauuugaggcau

SEQ ID NO: 361236 - RNA, 20 nt, Artificial Sequence
  Synthetic
acaugcuaaauuugaggcau

SEQ ID NO: 361237 - RNA, 21 nt, Artificial Sequence
  Synthetic
aacaugcuaaauuugaggcau

SEQ ID NO: 361238 - RNA, 22 nt, Artificial Sequence
  Synthetic
uaacaugcuaaauuugaggcau

SEQ ID NO: 361239 - RNA, 23 nt, Artificial Sequence
  Synthetic
auaacaugcuaaauuugaggcau

SEQ ID NO: 361240 - RNA, 24 nt, Artificial Sequence
  Synthetic
aauaacaugcuaaauuugaggcau

SEQ ID NO: 361241 - RNA, 18 nt, Artificial Sequence
  Synthetic
uuagauguugguaggcau

SEQ ID NO: 361242 - RNA, 19 nt, Artificial Sequence
  Synthetic
auuagauguugguaggcau

SEQ ID NO: 361243 - RNA, 20 nt, Artificial Sequence
  Synthetic
aauuagauguugguaggcau

SEQ ID NO: 361244 - RNA, 21 nt, Artificial Sequence
  Synthetic
gaauuagauguugguaggcau

SEQ ID NO: 361245 - RNA, 22 nt, Artificial Sequence
  Synthetic
ugaauuagauguugguaggcau

SEQ ID NO: 361246 - RNA, 23 nt, Artificial Sequence
  Synthetic
uugaauuagauguugguaggcau

SEQ ID NO: 361247 - RNA, 24 nt, Artificial Sequence
  Synthetic
auugaauuagauguugguaggcau

SEQ ID NO: 361248 - RNA, 18 nt, Artificial Sequence
  Synthetic
caugugugaguuaggcau

SEQ ID NO: 361249 - RNA, 19 nt, Artificial Sequence
  Synthetic
ucaugugugaguuaggcau

SEQ ID NO: 361250 - RNA, 20 nt, Artificial Sequence
  Synthetic
cucaugugugaguuaggcau

SEQ ID NO: 361251 - RNA, 21 nt, Artificial Sequence
  Synthetic
ucucaugugugaguuaggcau

SEQ ID NO: 361252 - RNA, 22 nt, Artificial Sequence
  Synthetic
aucucaugugugaguuaggcau

SEQ ID NO: 361253 - RNA, 23 nt, Artificial Sequence
  Synthetic
gaucucaugugugaguuaggcau

SEQ ID NO: 361254 - RNA, 24 nt, Artificial Sequence
  Synthetic
ugaucucaugugugaguuaggcau

SEQ ID NO: 361255 - RNA, 18 nt, Artificial Sequence
  Synthetic
auuacauaguuuaggcau

SEQ ID NO: 361256 - RNA, 19 nt, Artificial Sequence
  Synthetic
aauuacauaguuuaggcau

SEQ ID NO: 361257 - RNA, 20 nt, Artificial Sequence
  Synthetic
aaauuacauaguuuaggcau

SEQ ID NO: 361258 - RNA, 21 nt, Artificial Sequence
  Synthetic
uaaauuacauaguuuaggcau

SEQ ID NO: 361259 - RNA, 22 nt, Artificial Sequence
  Synthetic
cuaaauuacauaguuuaggcau

SEQ ID NO: 361260 - RNA, 23 nt, Artificial Sequence
  Synthetic
gcuaaauuacauaguuuaggcau

SEQ ID NO: 361261 - RNA, 24 nt, Artificial Sequence
  Synthetic
ugcuaaauuacauaguuuaggcau

SEQ ID NO: 361262 - RNA, 18 nt, Artificial Sequence
  Synthetic
accacugcacuccggcau

SEQ ID NO: 361263 - RNA, 19 nt, Artificial Sequence
  Synthetic
caccacugcacuccggcau

SEQ ID NO: 361264 - RNA, 20 nt, Artificial Sequence
  Synthetic
acaccacugcacuccggcau

SEQ ID NO: 361265 - RNA, 21 nt, Artificial Sequence
  Synthetic
cacaccacugcacuccggcau

SEQ ID NO: 361266 - RNA, 22 nt, Artificial Sequence
  Synthetic
ucacaccacugcacuccggcau

SEQ ID NO: 361267 - RNA, 23 nt, Artificial Sequence
  Synthetic
aucacaccacugcacuccggcau

SEQ ID NO: 361268 - RNA, 24 nt, Artificial Sequence
  Synthetic
gaucacaccacugcacuccggcau

SEQ ID NO: 361269 - RNA, 18 nt, Artificial Sequence
  Synthetic
aucucaguaagagggcau

SEQ ID NO: 361270 - RNA, 19 nt, Artificial Sequence
  Synthetic
caucucaguaagagggcau

SEQ ID NO: 361271 - RNA, 20 nt, Artificial Sequence
  Synthetic
gcaucucaguaagagggcau

SEQ ID NO: 361272 - RNA, 21 nt, Artificial Sequence
  Synthetic
ggcaucucaguaagagggcau

SEQ ID NO: 361273 - RNA, 22 nt, Artificial Sequence
  Synthetic
gggcaucucaguaagagggcau

SEQ ID NO: 361274 - RNA, 23 nt, Artificial Sequence
  Synthetic
ugggcaucucaguaagagggcau

SEQ ID NO: 361275 - RNA, 24 nt, Artificial Sequence
  Synthetic
gugggcaucucaguaagagggcau

SEQ ID NO: 361276 - RNA, 18 nt, Artificial Sequence
  Synthetic
accugaacaaaggggcau

SEQ ID NO: 361277 - RNA, 19 nt, Artificial Sequence
  Synthetic
caccugaacaaaggggcau

SEQ ID NO: 361278 - RNA, 20 nt, Artificial Sequence
  Synthetic
acaccugaacaaaggggcau

SEQ ID NO: 361279 - RNA, 21 nt, Artificial Sequence
  Synthetic
cacaccugaacaaaggggcau

SEQ ID NO: 361280 - RNA, 22 nt, Artificial Sequence
  Synthetic
gcacaccugaacaaaggggcau

SEQ ID NO: 361281 - RNA, 23 nt, Artificial Sequence
  Synthetic
agcacaccugaacaaaggggcau

SEQ ID NO: 361282 - RNA, 24 nt, Artificial Sequence
  Synthetic
gagcacaccugaacaaaggggcau

SEQ ID NO: 361283 - RNA, 18 nt, Artificial Sequence
  Synthetic
gaauuggauaaggggcau

SEQ ID NO: 361284 - RNA, 19 nt, Artificial Sequence
  Synthetic
ugaauuggauaaggggcau

SEQ ID NO: 361285 - RNA, 20 nt, Artificial Sequence
  Synthetic
augaauuggauaaggggcau

SEQ ID NO: 361286 - RNA, 21 nt, Artificial Sequence
  Synthetic
gaugaauuggauaaggggcau

SEQ ID NO: 361287 - RNA, 22 nt, Artificial Sequence
  Synthetic
ggaugaauuggauaaggggcau

SEQ ID NO: 361288 - RNA, 23 nt, Artificial Sequence
  Synthetic
uggaugaauuggauaaggggcau

SEQ ID NO: 361289 - RNA, 24 nt, Artificial Sequence
  Synthetic
cuggaugaauuggauaaggggcau

SEQ ID NO: 361290 - RNA, 18 nt, Artificial Sequence
  Synthetic
aacccaagauaggggcau

SEQ ID NO: 361291 - RNA, 19 nt, Artificial Sequence
  Synthetic
uaacccaagauaggggcau

SEQ ID NO: 361292 - RNA, 20 nt, Artificial Sequence
  Synthetic
guaacccaagauaggggcau

SEQ ID NO: 361293 - RNA, 21 nt, Artificial Sequence
  Synthetic
uguaacccaagauaggggcau

SEQ ID NO: 361294 - RNA, 22 nt, Artificial Sequence
  Synthetic
uuguaacccaagauaggggcau

SEQ ID NO: 361295 - RNA, 23 nt, Artificial Sequence
  Synthetic
cuuguaacccaagauaggggcau

SEQ ID NO: 361296 - RNA, 24 nt, Artificial Sequence
  Synthetic
ucuuguaacccaagauaggggcau

SEQ ID NO: 361297 - RNA, 18 nt, Artificial Sequence
  Synthetic
guggcaaaucuggggcau

SEQ ID NO: 361298 - RNA, 19 nt, Artificial Sequence
  Synthetic
aguggcaaaucuggggcau

SEQ ID NO: 361299 - RNA, 20 nt, Artificial Sequence
  Synthetic
caguggcaaaucuggggcau

SEQ ID NO: 361300 - RNA, 21 nt, Artificial Sequence
  Synthetic
acaguggcaaaucuggggcau

SEQ ID NO: 361301 - RNA, 22 nt, Artificial Sequence
  Synthetic
aacaguggcaaaucuggggcau

SEQ ID NO: 361302 - RNA, 23 nt, Artificial Sequence
  Synthetic
caacaguggcaaaucuggggcau

SEQ ID NO: 361303 - RNA, 24 nt, Artificial Sequence
  Synthetic
acaacaguggcaaaucuggggcau

SEQ ID NO: 361304 - RNA, 18 nt, Artificial Sequence
  Synthetic
cucaguuuuacugggcau

SEQ ID NO: 361305 - RNA, 19 nt, Artificial Sequence
  Synthetic
acucaguuuuacugggcau

SEQ ID NO: 361306 - RNA, 20 nt, Artificial Sequence
  Synthetic
uacucaguuuuacugggcau

SEQ ID NO: 361307 - RNA, 21 nt, Artificial Sequence
  Synthetic
uuacucaguuuuacugggcau

SEQ ID NO: 361308 - RNA, 22 nt, Artificial Sequence
  Synthetic
guuacucaguuuuacugggcau

SEQ ID NO: 361309 - RNA, 23 nt, Artificial Sequence
  Synthetic
aguuacucaguuuuacugggcau

SEQ ID NO: 361310 - RNA, 24 nt, Artificial Sequence
  Synthetic
aaguuacucaguuuuacugggcau

SEQ ID NO: 361311 - RNA, 18 nt, Artificial Sequence
  Synthetic
uuaaaaaacgcugggcau

SEQ ID NO: 361312 - RNA, 19 nt, Artificial Sequence
  Synthetic
uuuaaaaaacgcugggcau

SEQ ID NO: 361313 - RNA, 20 nt, Artificial Sequence
  Synthetic
auuuaaaaaacgcugggcau

SEQ ID NO: 361314 - RNA, 21 nt, Artificial Sequence
  Synthetic
aauuuaaaaaacgcugggcau

SEQ ID NO: 361315 - RNA, 22 nt, Artificial Sequence
  Synthetic
caauuuaaaaaacgcugggcau

SEQ ID NO: 361316 - RNA, 23 nt, Artificial Sequence
  Synthetic
ucaauuuaaaaaacgcugggcau

SEQ ID NO: 361317 - RNA, 24 nt, Artificial Sequence
  Synthetic
uucaauuuaaaaaacgcugggcau

SEQ ID NO: 361318 - RNA, 18 nt, Artificial Sequence
  Synthetic
uaccuacauucugggcau

SEQ ID NO: 361319 - RNA, 19 nt, Artificial Sequence
  Synthetic
guaccuacauucugggcau

SEQ ID NO: 361320 - RNA, 20 nt, Artificial Sequence
  Synthetic
uguaccuacauucugggcau

SEQ ID NO: 361321 - RNA, 21 nt, Artificial Sequence
  Synthetic
cuguaccuacauucugggcau

SEQ ID NO: 361322 - RNA, 22 nt, Artificial Sequence
  Synthetic
gcuguaccuacauucugggcau

SEQ ID NO: 361323 - RNA, 23 nt, Artificial Sequence
  Synthetic
agcuguaccuacauucugggcau

SEQ ID NO: 361324 - RNA, 24 nt, Artificial Sequence
  Synthetic
aagcuguaccuacauucugggcau

SEQ ID NO: 361325 - RNA, 18 nt, Artificial Sequence
  Synthetic
ucucccauuauugggcau

SEQ ID NO: 361326 - RNA, 19 nt, Artificial Sequence
  Synthetic
uucucccauuauugggcau

SEQ ID NO: 361327 - RNA, 20 nt, Artificial Sequence
  Synthetic
auucucccauuauugggcau

SEQ ID NO: 361328 - RNA, 21 nt, Artificial Sequence
  Synthetic
uauucucccauuauugggcau

SEQ ID NO: 361329 - RNA, 22 nt, Artificial Sequence
  Synthetic
uuauucucccauuauugggcau

SEQ ID NO: 361330 - RNA, 23 nt, Artificial Sequence
  Synthetic
auuauucucccauuauugggcau

SEQ ID NO: 361331 - RNA, 24 nt, Artificial Sequence
  Synthetic
aauuauucucccauuauugggcau

SEQ ID NO: 361332 - RNA, 18 nt, Artificial Sequence
  Synthetic
uuauuuaagcaauggcau

SEQ ID NO: 361333 - RNA, 19 nt, Artificial Sequence
  Synthetic
guuauuuaagcaauggcau

SEQ ID NO: 361334 - RNA, 20 nt, Artificial Sequence
  Synthetic
aguuauuuaagcaauggcau

SEQ ID NO: 361335 - RNA, 21 nt, Artificial Sequence
  Synthetic
aaguuauuuaagcaauggcau

SEQ ID NO: 361336 - RNA, 22 nt, Artificial Sequence
  Synthetic
gaaguuauuuaagcaauggcau

SEQ ID NO: 361337 - RNA, 23 nt, Artificial Sequence
  Synthetic
cgaaguuauuuaagcaauggcau

SEQ ID NO: 361338 - RNA, 24 nt, Artificial Sequence
  Synthetic
ucgaaguuauuuaagcaauggcau

SEQ ID NO: 361339 - RNA, 18 nt, Artificial Sequence
  Synthetic
aaauuuucuuaauggcau

SEQ ID NO: 361340 - RNA, 19 nt, Artificial Sequence
  Synthetic
caaauuuucuuaauggcau

SEQ ID NO: 361341 - RNA, 20 nt, Artificial Sequence
  Synthetic
acaaauuuucuuaauggcau

SEQ ID NO: 361342 - RNA, 21 nt, Artificial Sequence
  Synthetic
cacaaauuuucuuaauggcau

SEQ ID NO: 361343 - RNA, 22 nt, Artificial Sequence
  Synthetic
ucacaaauuuucuuaauggcau

SEQ ID NO: 361344 - RNA, 23 nt, Artificial Sequence
  Synthetic
aucacaaauuuucuuaauggcau

SEQ ID NO: 361345 - RNA, 24 nt, Artificial Sequence
  Synthetic
aaucacaaauuuucuuaauggcau

SEQ ID NO: 361346 - RNA, 18 nt, Artificial Sequence
  Synthetic
aggggggagggauggcau

SEQ ID NO: 361347 - RNA, 19 nt, Artificial Sequence
  Synthetic
gaggggggagggauggcau

SEQ ID NO: 361348 - RNA, 20 nt, Artificial Sequence
  Synthetic
ggaggggggagggauggcau

SEQ ID NO: 361349 - RNA, 21 nt, Artificial Sequence
  Synthetic
gggaggggggagggauggcau

SEQ ID NO: 361350 - RNA, 22 nt, Artificial Sequence
  Synthetic
ggggaggggggagggauggcau

SEQ ID NO: 361351 - RNA, 23 nt, Artificial Sequence
  Synthetic
gggggaggggggagggauggcau

SEQ ID NO: 361352 - RNA, 24 nt, Artificial Sequence
  Synthetic
ggggggaggggggagggauggcau

SEQ ID NO: 361353 - RNA, 18 nt, Artificial Sequence
  Synthetic
uuccagcaaguauggcau

SEQ ID NO: 361354 - RNA, 19 nt, Artificial Sequence
  Synthetic
uuuccagcaaguauggcau

SEQ ID NO: 361355 - RNA, 20 nt, Artificial Sequence
  Synthetic
auuuccagcaaguauggcau

SEQ ID NO: 361356 - RNA, 21 nt, Artificial Sequence
  Synthetic
uauuuccagcaaguauggcau

SEQ ID NO: 361357 - RNA, 22 nt, Artificial Sequence
  Synthetic
cuauuuccagcaaguauggcau

SEQ ID NO: 361358 - RNA, 23 nt, Artificial Sequence
  Synthetic
ucuauuuccagcaaguauggcau

SEQ ID NO: 361359 - RNA, 24 nt, Artificial Sequence
  Synthetic
cucuauuuccagcaaguauggcau

SEQ ID NO: 361360 - RNA, 18 nt, Artificial Sequence
  Synthetic
aaauccaaaugcuggcau

SEQ ID NO: 361361 - RNA, 19 nt, Artificial Sequence
  Synthetic
gaaauccaaaugcuggcau

SEQ ID NO: 361362 - RNA, 20 nt, Artificial Sequence
  Synthetic
ugaaauccaaaugcuggcau

SEQ ID NO: 361363 - RNA, 21 nt, Artificial Sequence
  Synthetic
augaaauccaaaugcuggcau

SEQ ID NO: 361364 - RNA, 22 nt, Artificial Sequence
  Synthetic
aaugaaauccaaaugcuggcau

SEQ ID NO: 361365 - RNA, 23 nt, Artificial Sequence
  Synthetic
uaaugaaauccaaaugcuggcau

SEQ ID NO: 361366 - RNA, 24 nt, Artificial Sequence
  Synthetic
guaaugaaauccaaaugcuggcau

SEQ ID NO: 361367 - RNA, 18 nt, Artificial Sequence
  Synthetic
cccuucaccugcuggcau

SEQ ID NO: 361368 - RNA, 19 nt, Artificial Sequence
  Synthetic
ucccuucaccugcuggcau

SEQ ID NO: 361369 - RNA, 20 nt, Artificial Sequence
  Synthetic
uucccuucaccugcuggcau

SEQ ID NO: 361370 - RNA, 21 nt, Artificial Sequence
  Synthetic
uuucccuucaccugcuggcau

SEQ ID NO: 361371 - RNA, 22 nt, Artificial Sequence
  Synthetic
auuucccuucaccugcuggcau

SEQ ID NO: 361372 - RNA, 23 nt, Artificial Sequence
  Synthetic
uauuucccuucaccugcuggcau

SEQ ID NO: 361373 - RNA, 24 nt, Artificial Sequence
  Synthetic
uuauuucccuucaccugcuggcau

SEQ ID NO: 361374 - RNA, 18 nt, Artificial Sequence
  Synthetic
ugauggauuugguggcau

SEQ ID NO: 361375 - RNA, 19 nt, Artificial Sequence
  Synthetic
uugauggauuugguggcau

SEQ ID NO: 361376 - RNA, 20 nt, Artificial Sequence
  Synthetic
guugauggauuugguggcau

SEQ ID NO: 361377 - RNA, 21 nt, Artificial Sequence
  Synthetic
uguugauggauuugguggcau

SEQ ID NO: 361378 - RNA, 22 nt, Artificial Sequence
  Synthetic
guguugauggauuugguggcau

SEQ ID NO: 361379 - RNA, 23 nt, Artificial Sequence
  Synthetic
aguguugauggauuugguggcau

SEQ ID NO: 361380 - RNA, 24 nt, Artificial Sequence
  Synthetic
aaguguugauggauuugguggcau

SEQ ID NO: 361381 - RNA, 18 nt, Artificial Sequence
  Synthetic
guugaugcucuguggcau

SEQ ID NO: 361382 - RNA, 19 nt, Artificial Sequence
  Synthetic
uguugaugcucuguggcau

SEQ ID NO: 361383 - RNA, 20 nt, Artificial Sequence
  Synthetic
uuguugaugcucuguggcau

SEQ ID NO: 361384 - RNA, 21 nt, Artificial Sequence
  Synthetic
cuuguugaugcucuguggcau

SEQ ID NO: 361385 - RNA, 22 nt, Artificial Sequence
  Synthetic
ucuuguugaugcucuguggcau

SEQ ID NO: 361386 - RNA, 23 nt, Artificial Sequence
  Synthetic
uucuuguugaugcucuguggcau

SEQ ID NO: 361387 - RNA, 24 nt, Artificial Sequence
  Synthetic
guucuuguugaugcucuguggcau

SEQ ID NO: 361388 - RNA, 18 nt, Artificial Sequence
  Synthetic
auucugcaguuguggcau

SEQ ID NO: 361389 - RNA, 19 nt, Artificial Sequence
  Synthetic
gauucugcaguuguggcau

SEQ ID NO: 361390 - RNA, 20 nt, Artificial Sequence
  Synthetic
ugauucugcaguuguggcau

SEQ ID NO: 361391 - RNA, 21 nt, Artificial Sequence
  Synthetic
uugauucugcaguuguggcau

SEQ ID NO: 361392 - RNA, 22 nt, Artificial Sequence
  Synthetic
cuugauucugcaguuguggcau

SEQ ID NO: 361393 - RNA, 23 nt, Artificial Sequence
  Synthetic
acuugauucugcaguuguggcau

SEQ ID NO: 361394 - RNA, 24 nt, Artificial Sequence
  Synthetic
uacuugauucugcaguuguggcau

SEQ ID NO: 361395 - RNA, 18 nt, Artificial Sequence
  Synthetic
guagagggauauuggcau

SEQ ID NO: 361396 - RNA, 19 nt, Artificial Sequence
  Synthetic
gguagagggauauuggcau

SEQ ID NO: 361397 - RNA, 20 nt, Artificial Sequence
  Synthetic
agguagagggauauuggcau

SEQ ID NO: 361398 - RNA, 21 nt, Artificial Sequence
  Synthetic
aagguagagggauauuggcau

SEQ ID NO: 361399 - RNA, 22 nt, Artificial Sequence
  Synthetic
caagguagagggauauuggcau

SEQ ID NO: 361400 - RNA, 23 nt, Artificial Sequence
  Synthetic
ucaagguagagggauauuggcau

SEQ ID NO: 361401 - RNA, 24 nt, Artificial Sequence
  Synthetic
uucaagguagagggauauuggcau

SEQ ID NO: 361402 - RNA, 18 nt, Artificial Sequence
  Synthetic
ugaaacaacuuuuggcau

SEQ ID NO: 361403 - RNA, 19 nt, Artificial Sequence
  Synthetic
cugaaacaacuuuuggcau

SEQ ID NO: 361404 - RNA, 20 nt, Artificial Sequence
  Synthetic
gcugaaacaacuuuuggcau

SEQ ID NO: 361405 - RNA, 21 nt, Artificial Sequence
  Synthetic
ggcugaaacaacuuuuggcau

SEQ ID NO: 361406 - RNA, 22 nt, Artificial Sequence
  Synthetic
aggcugaaacaacuuuuggcau

SEQ ID NO: 361407 - RNA, 23 nt, Artificial Sequence
  Synthetic
gaggcugaaacaacuuuuggcau

SEQ ID NO: 361408 - RNA, 24 nt, Artificial Sequence
  Synthetic
ugaggcugaaacaacuuuuggcau

SEQ ID NO: 361409 - RNA, 18 nt, Artificial Sequence
  Synthetic
ucucauguuuuuuggcau

SEQ ID NO: 361410 - RNA, 19 nt, Artificial Sequence
  Synthetic
cucucauguuuuuuggcau

SEQ ID NO: 361411 - RNA, 20 nt, Artificial Sequence
  Synthetic
acucucauguuuuuuggcau

SEQ ID NO: 361412 - RNA, 21 nt, Artificial Sequence
  Synthetic
uacucucauguuuuuuggcau

SEQ ID NO: 361413 - RNA, 22 nt, Artificial Sequence
  Synthetic
uuacucucauguuuuuuggcau

SEQ ID NO: 361414 - RNA, 23 nt, Artificial Sequence
  Synthetic
auuacucucauguuuuuuggcau

SEQ ID NO: 361415 - RNA, 24 nt, Artificial Sequence
  Synthetic
uauuacucucauguuuuuuggcau

SEQ ID NO: 361416 - RNA, 18 nt, Artificial Sequence
  Synthetic
aacuuggggaaaaugcau

SEQ ID NO: 361417 - RNA, 19 nt, Artificial Sequence
  Synthetic
caacuuggggaaaaugcau

SEQ ID NO: 361418 - RNA, 20 nt, Artificial Sequence
  Synthetic
ccaacuuggggaaaaugcau

SEQ ID NO: 361419 - RNA, 21 nt, Artificial Sequence
  Synthetic
uccaacuuggggaaaaugcau

SEQ ID NO: 361420 - RNA, 22 nt, Artificial Sequence
  Synthetic
cuccaacuuggggaaaaugcau

SEQ ID NO: 361421 - RNA, 23 nt, Artificial Sequence
  Synthetic
acuccaacuuggggaaaaugcau

SEQ ID NO: 361422 - RNA, 24 nt, Artificial Sequence
  Synthetic
cacuccaacuuggggaaaaugcau

SEQ ID NO: 361423 - RNA, 18 nt, Artificial Sequence
  Synthetic
cucagccaggaaaugcau

SEQ ID NO: 361424 - RNA, 19 nt, Artificial Sequence
  Synthetic
acucagccaggaaaugcau

SEQ ID NO: 361425 - RNA, 20 nt, Artificial Sequence
  Synthetic
aacucagccaggaaaugcau

SEQ ID NO: 361426 - RNA, 21 nt, Artificial Sequence
  Synthetic
aaacucagccaggaaaugcau

SEQ ID NO: 361427 - RNA, 22 nt, Artificial Sequence
  Synthetic
gaaacucagccaggaaaugcau

SEQ ID NO: 361428 - RNA, 23 nt, Artificial Sequence
  Synthetic
ggaaacucagccaggaaaugcau

SEQ ID NO: 361429 - RNA, 24 nt, Artificial Sequence
  Synthetic
aggaaacucagccaggaaaugcau

SEQ ID NO: 361430 - RNA, 18 nt, Artificial Sequence
  Synthetic
augaaugguuaaaugcau

SEQ ID NO: 361431 - RNA, 19 nt, Artificial Sequence
  Synthetic
aaugaaugguuaaaugcau

SEQ ID NO: 361432 - RNA, 20 nt, Artificial Sequence
  Synthetic
uaaugaaugguuaaaugcau

SEQ ID NO: 361433 - RNA, 21 nt, Artificial Sequence
  Synthetic
auaaugaaugguuaaaugcau

SEQ ID NO: 361434 - RNA, 22 nt, Artificial Sequence
  Synthetic
aauaaugaaugguuaaaugcau

SEQ ID NO: 361435 - RNA, 23 nt, Artificial Sequence
  Synthetic
aaauaaugaaugguuaaaugcau

SEQ ID NO: 361436 - RNA, 24 nt, Artificial Sequence
  Synthetic
aaaauaaugaaugguuaaaugcau

SEQ ID NO: 361437 - RNA, 18 nt, Artificial Sequence
  Synthetic
auuuucuaaugaaugcau

SEQ ID NO: 361438 - RNA, 19 nt, Artificial Sequence
  Synthetic
aauuuucuaaugaaugcau

SEQ ID NO: 361439 - RNA, 20 nt, Artificial Sequence
  Synthetic
uaauuuucuaaugaaugcau

SEQ ID NO: 361440 - RNA, 21 nt, Artificial Sequence
  Synthetic
uuaauuuucuaaugaaugcau

SEQ ID NO: 361441 - RNA, 22 nt, Artificial Sequence
  Synthetic
uuuaauuuucuaaugaaugcau

SEQ ID NO: 361442 - RNA, 23 nt, Artificial Sequence
  Synthetic
uuuuaauuuucuaaugaaugcau

SEQ ID NO: 361443 - RNA, 24 nt, Artificial Sequence
  Synthetic
auuuuaauuuucuaaugaaugcau

SEQ ID NO: 361444 - RNA, 18 nt, Artificial Sequence
  Synthetic
gacaaauaccuaaugcau

SEQ ID NO: 361445 - RNA, 19 nt, Artificial Sequence
  Synthetic
ggacaaauaccuaaugcau

SEQ ID NO: 361446 - RNA, 20 nt, Artificial Sequence
  Synthetic
aggacaaauaccuaaugcau

SEQ ID NO: 361447 - RNA, 18 nt, Artificial Sequence
  Synthetic
auguccaaaaucaugcau

SEQ ID NO: 361448 - RNA, 19 nt, Artificial Sequence
  Synthetic
uauguccaaaaucaugcau

SEQ ID NO: 361449 - RNA, 20 nt, Artificial Sequence
  Synthetic
uuauguccaaaaucaugcau

SEQ ID NO: 361450 - RNA, 21 nt, Artificial Sequence
  Synthetic
uuuauguccaaaaucaugcau

SEQ ID NO: 361451 - RNA, 22 nt, Artificial Sequence
  Synthetic
uuuuauguccaaaaucaugcau

SEQ ID NO: 361452 - RNA, 23 nt, Artificial Sequence
  Synthetic
auuuuauguccaaaaucaugcau

SEQ ID NO: 361453 - RNA, 24 nt, Artificial Sequence
  Synthetic
uauuuuauguccaaaaucaugcau

SEQ ID NO: 361454 - RNA, 18 nt, Artificial Sequence
  Synthetic
acuggcauauucaugcau

SEQ ID NO: 361455 - RNA, 19 nt, Artificial Sequence
  Synthetic
uacuggcauauucaugcau

SEQ ID NO: 361456 - RNA, 20 nt, Artificial Sequence
  Synthetic
guacuggcauauucaugcau

SEQ ID NO: 361457 - RNA, 21 nt, Artificial Sequence
  Synthetic
gguacuggcauauucaugcau

SEQ ID NO: 361458 - RNA, 22 nt, Artificial Sequence
  Synthetic
ugguacuggcauauucaugcau

SEQ ID NO: 361459 - RNA, 23 nt, Artificial Sequence
  Synthetic
gugguacuggcauauucaugcau

SEQ ID NO: 361460 - RNA, 24 nt, Artificial Sequence
  Synthetic
agugguacuggcauauucaugcau

SEQ ID NO: 361461 - RNA, 18 nt, Artificial Sequence
  Synthetic
ucugaccugaauaugcau

SEQ ID NO: 361462 - RNA, 19 nt, Artificial Sequence
  Synthetic
cucugaccugaauaugcau

SEQ ID NO: 361463 - RNA, 20 nt, Artificial Sequence
  Synthetic
ccucugaccugaauaugcau

SEQ ID NO: 361464 - RNA, 21 nt, Artificial Sequence
  Synthetic
cccucugaccugaauaugcau

SEQ ID NO: 361465 - RNA, 22 nt, Artificial Sequence
  Synthetic
gcccucugaccugaauaugcau

SEQ ID NO: 361466 - RNA, 23 nt, Artificial Sequence
  Synthetic
agcccucugaccugaauaugcau

SEQ ID NO: 361467 - RNA, 24 nt, Artificial Sequence
  Synthetic
gagcccucugaccugaauaugcau

SEQ ID NO: 361468 - RNA, 18 nt, Artificial Sequence
  Synthetic
accagaagaacuaugcau

SEQ ID NO: 361469 - RNA, 19 nt, Artificial Sequence
  Synthetic
caccagaagaacuaugcau

SEQ ID NO: 361470 - RNA, 20 nt, Artificial Sequence
  Synthetic
ccaccagaagaacuaugcau

SEQ ID NO: 361471 - RNA, 21 nt, Artificial Sequence
  Synthetic
uccaccagaagaacuaugcau

SEQ ID NO: 361472 - RNA, 22 nt, Artificial Sequence
  Synthetic
auccaccagaagaacuaugcau

SEQ ID NO: 361473 - RNA, 23 nt, Artificial Sequence
  Synthetic
aauccaccagaagaacuaugcau

SEQ ID NO: 361474 - RNA, 24 nt, Artificial Sequence
  Synthetic
gaauccaccagaagaacuaugcau

SEQ ID NO: 361475 - RNA, 18 nt, Artificial Sequence
  Synthetic
caggcacaauuacugcau

SEQ ID NO: 361476 - RNA, 19 nt, Artificial Sequence
  Synthetic
ucaggcacaauuacugcau

SEQ ID NO: 361477 - RNA, 20 nt, Artificial Sequence
  Synthetic
uucaggcacaauuacugcau

SEQ ID NO: 361478 - RNA, 21 nt, Artificial Sequence
  Synthetic
auucaggcacaauuacugcau

SEQ ID NO: 361479 - RNA, 22 nt, Artificial Sequence
  Synthetic
aauucaggcacaauuacugcau

SEQ ID NO: 361480 - RNA, 23 nt, Artificial Sequence
  Synthetic
caauucaggcacaauuacugcau

SEQ ID NO: 361481 - RNA, 24 nt, Artificial Sequence
  Synthetic
gcaauucaggcacaauuacugcau

SEQ ID NO: 361482 - RNA, 18 nt, Artificial Sequence
  Synthetic
uauuaaauguuacugcau

SEQ ID NO: 361483 - RNA, 19 nt, Artificial Sequence
  Synthetic
auauuaaauguuacugcau

SEQ ID NO: 361484 - RNA, 20 nt, Artificial Sequence
  Synthetic
aauauuaaauguuacugcau

SEQ ID NO: 361485 - RNA, 21 nt, Artificial Sequence
  Synthetic
aaauauuaaauguuacugcau

SEQ ID NO: 361486 - RNA, 22 nt, Artificial Sequence
  Synthetic
aaaauauuaaauguuacugcau

SEQ ID NO: 361487 - RNA, 23 nt, Artificial Sequence
  Synthetic
aaaaauauuaaauguuacugcau

SEQ ID NO: 361488 - RNA, 24 nt, Artificial Sequence
  Synthetic
uaaaaauauuaaauguuacugcau

SEQ ID NO: 361489 - RNA, 18 nt, Artificial Sequence
  Synthetic
augucaacaugccugcau

SEQ ID NO: 361490 - RNA, 19 nt, Artificial Sequence
  Synthetic
uaugucaacaugccugcau

SEQ ID NO: 361491 - RNA, 20 nt, Artificial Sequence
  Synthetic
auaugucaacaugccugcau

SEQ ID NO: 361492 - RNA, 21 nt, Artificial Sequence
  Synthetic
uauaugucaacaugccugcau

SEQ ID NO: 361493 - RNA, 22 nt, Artificial Sequence
  Synthetic
uuauaugucaacaugccugcau

SEQ ID NO: 361494 - RNA, 23 nt, Artificial Sequence
  Synthetic
guuauaugucaacaugccugcau

SEQ ID NO: 361495 - RNA, 24 nt, Artificial Sequence
  Synthetic
aguuauaugucaacaugccugcau

SEQ ID NO: 361496 - RNA, 18 nt, Artificial Sequence
  Synthetic
gagcccugccagcugcau

SEQ ID NO: 361497 - RNA, 19 nt, Artificial Sequence
  Synthetic
ggagcccugccagcugcau

SEQ ID NO: 361498 - RNA, 20 nt, Artificial Sequence
  Synthetic
aggagcccugccagcugcau

SEQ ID NO: 361499 - RNA, 21 nt, Artificial Sequence
  Synthetic
aaggagcccugccagcugcau

SEQ ID NO: 361500 - RNA, 22 nt, Artificial Sequence
  Synthetic
uaaggagcccugccagcugcau

SEQ ID NO: 361501 - RNA, 23 nt, Artificial Sequence
  Synthetic
guaaggagcccugccagcugcau

SEQ ID NO: 361502 - RNA, 24 nt, Artificial Sequence
  Synthetic
uguaaggagcccugccagcugcau

SEQ ID NO: 361503 - RNA, 18 nt, Artificial Sequence
  Synthetic
aaaaauauuuggcugcau

SEQ ID NO: 361504 - RNA, 19 nt, Artificial Sequence
  Synthetic
gaaaaauauuuggcugcau

SEQ ID NO: 361505 - RNA, 20 nt, Artificial Sequence
  Synthetic
agaaaaauauuuggcugcau

SEQ ID NO: 361506 - RNA, 21 nt, Artificial Sequence
  Synthetic
gagaaaaauauuuggcugcau

SEQ ID NO: 361507 - RNA, 22 nt, Artificial Sequence
  Synthetic
ggagaaaaauauuuggcugcau

SEQ ID NO: 361508 - RNA, 23 nt, Artificial Sequence
  Synthetic
aggagaaaaauauuuggcugcau

SEQ ID NO: 361509 - RNA, 24 nt, Artificial Sequence
  Synthetic
aaggagaaaaauauuuggcugcau

SEQ ID NO: 361510 - RNA, 18 nt, Artificial Sequence
  Synthetic
uugcucaagaugcugcau

SEQ ID NO: 361511 - RNA, 19 nt, Artificial Sequence
  Synthetic
auugcucaagaugcugcau

SEQ ID NO: 361512 - RNA, 20 nt, Artificial Sequence
  Synthetic
uauugcucaagaugcugcau

SEQ ID NO: 361513 - RNA, 21 nt, Artificial Sequence
  Synthetic
uuauugcucaagaugcugcau

SEQ ID NO: 361514 - RNA, 22 nt, Artificial Sequence
  Synthetic
guuauugcucaagaugcugcau

SEQ ID NO: 361515 - RNA, 23 nt, Artificial Sequence
  Synthetic
gguuauugcucaagaugcugcau

SEQ ID NO: 361516 - RNA, 24 nt, Artificial Sequence
  Synthetic
ugguuauugcucaagaugcugcau

SEQ ID NO: 361517 - RNA, 18 nt, Artificial Sequence
  Synthetic
aauuauuaaaaucugcau

SEQ ID NO: 361518 - RNA, 19 nt, Artificial Sequence
  Synthetic
uaauuauuaaaaucugcau

SEQ ID NO: 361519 - RNA, 20 nt, Artificial Sequence
  Synthetic
uuaauuauuaaaaucugcau

SEQ ID NO: 361520 - RNA, 21 nt, Artificial Sequence
  Synthetic
auuaauuauuaaaaucugcau

SEQ ID NO: 361521 - RNA, 22 nt, Artificial Sequence
  Synthetic
gauuaauuauuaaaaucugcau

SEQ ID NO: 361522 - RNA, 23 nt, Artificial Sequence
  Synthetic
ugauuaauuauuaaaaucugcau

SEQ ID NO: 361523 - RNA, 24 nt, Artificial Sequence
  Synthetic
uugauuaauuauuaaaaucugcau

SEQ ID NO: 361524 - RNA, 18 nt, Artificial Sequence
  Synthetic
agucucagcauucugcau

SEQ ID NO: 361525 - RNA, 19 nt, Artificial Sequence
  Synthetic
aagucucagcauucugcau

SEQ ID NO: 361526 - RNA, 20 nt, Artificial Sequence
  Synthetic
aaagucucagcauucugcau

SEQ ID NO: 361527 - RNA, 21 nt, Artificial Sequence
  Synthetic
aaaagucucagcauucugcau

SEQ ID NO: 361528 - RNA, 22 nt, Artificial Sequence
  Synthetic
caaaagucucagcauucugcau

SEQ ID NO: 361529 - RNA, 23 nt, Artificial Sequence
  Synthetic
ccaaaagucucagcauucugcau

SEQ ID NO: 361530 - RNA, 24 nt, Artificial Sequence
  Synthetic
gccaaaagucucagcauucugcau

SEQ ID NO: 361531 - RNA, 18 nt, Artificial Sequence
  Synthetic
agcgugauaaaagugcau

SEQ ID NO: 361532 - RNA, 19 nt, Artificial Sequence
  Synthetic
uagcgugauaaaagugcau

SEQ ID NO: 361533 - RNA, 20 nt, Artificial Sequence
  Synthetic
auagcgugauaaaagugcau

SEQ ID NO: 361534 - RNA, 21 nt, Artificial Sequence
  Synthetic
cauagcgugauaaaagugcau

SEQ ID NO: 361535 - RNA, 22 nt, Artificial Sequence
  Synthetic
acauagcgugauaaaagugcau

SEQ ID NO: 361536 - RNA, 23 nt, Artificial Sequence
  Synthetic
gacauagcgugauaaaagugcau

SEQ ID NO: 361537 - RNA, 24 nt, Artificial Sequence
  Synthetic
agacauagcgugauaaaagugcau

SEQ ID NO: 361538 - RNA, 18 nt, Artificial Sequence
  Synthetic
gcuugcaagcaagugcau

SEQ ID NO: 361539 - RNA, 19 nt, Artificial Sequence
  Synthetic
agcuugcaagcaagugcau

SEQ ID NO: 361540 - RNA, 20 nt, Artificial Sequence
  Synthetic
uagcuugcaagcaagugcau

SEQ ID NO: 361541 - RNA, 21 nt, Artificial Sequence
  Synthetic
auagcuugcaagcaagugcau

SEQ ID NO: 361542 - RNA, 22 nt, Artificial Sequence
  Synthetic
uauagcuugcaagcaagugcau

SEQ ID NO: 361543 - RNA, 23 nt, Artificial Sequence
  Synthetic
guauagcuugcaagcaagugcau

SEQ ID NO: 361544 - RNA, 24 nt, Artificial Sequence
  Synthetic
uguauagcuugcaagcaagugcau

SEQ ID NO: 361545 - RNA, 18 nt, Artificial Sequence
  Synthetic
uuuuugggggaggugcau

SEQ ID NO: 361546 - RNA, 19 nt, Artificial Sequence
  Synthetic
uuuuuugggggaggugcau

SEQ ID NO: 361547 - RNA, 20 nt, Artificial Sequence
  Synthetic
guuuuuugggggaggugcau

SEQ ID NO: 361548 - RNA, 21 nt, Artificial Sequence
  Synthetic
uguuuuuugggggaggugcau

SEQ ID NO: 361549 - RNA, 22 nt, Artificial Sequence
  Synthetic
uuguuuuuugggggaggugcau

SEQ ID NO: 361550 - RNA, 23 nt, Artificial Sequence
  Synthetic
uuuguuuuuugggggaggugcau

SEQ ID NO: 361551 - RNA, 24 nt, Artificial Sequence
  Synthetic
uuuuguuuuuugggggaggugcau

SEQ ID NO: 361552 - RNA, 18 nt, Artificial Sequence
  Synthetic
cccaguaaaagggugcau

SEQ ID NO: 361553 - RNA, 19 nt, Artificial Sequence
  Synthetic
ucccaguaaaagggugcau

SEQ ID NO: 361554 - RNA, 20 nt, Artificial Sequence
  Synthetic
aucccaguaaaagggugcau

SEQ ID NO: 361555 - RNA, 21 nt, Artificial Sequence
  Synthetic
uaucccaguaaaagggugcau

SEQ ID NO: 361556 - RNA, 22 nt, Artificial Sequence
  Synthetic
cuaucccaguaaaagggugcau

SEQ ID NO: 361557 - RNA, 23 nt, Artificial Sequence
  Synthetic
ccuaucccaguaaaagggugcau

SEQ ID NO: 361558 - RNA, 24 nt, Artificial Sequence
  Synthetic
uccuaucccaguaaaagggugcau

SEQ ID NO: 361559 - RNA, 18 nt, Artificial Sequence
  Synthetic
aaccuucacguugugcau

SEQ ID NO: 361560 - RNA, 19 nt, Artificial Sequence
  Synthetic
uaaccuucacguugugcau

SEQ ID NO: 361561 - RNA, 20 nt, Artificial Sequence
  Synthetic
cuaaccuucacguugugcau

SEQ ID NO: 361562 - RNA, 21 nt, Artificial Sequence
  Synthetic
acuaaccuucacguugugcau

SEQ ID NO: 361563 - RNA, 22 nt, Artificial Sequence
  Synthetic
aacuaaccuucacguugugcau

SEQ ID NO: 361564 - RNA, 23 nt, Artificial Sequence
  Synthetic
uaacuaaccuucacguugugcau

SEQ ID NO: 361565 - RNA, 24 nt, Artificial Sequence
  Synthetic
guaacuaaccuucacguugugcau

SEQ ID NO: 361566 - RNA, 18 nt, Artificial Sequence
  Synthetic
cugacauguuuugugcau

SEQ ID NO: 361567 - RNA, 19 nt, Artificial Sequence
  Synthetic
acugacauguuuugugcau

SEQ ID NO: 361568 - RNA, 20 nt, Artificial Sequence
  Synthetic
uacugacauguuuugugcau

SEQ ID NO: 361569 - RNA, 21 nt, Artificial Sequence
  Synthetic
guacugacauguuuugugcau

SEQ ID NO: 361570 - RNA, 22 nt, Artificial Sequence
  Synthetic
uguacugacauguuuugugcau

SEQ ID NO: 361571 - RNA, 23 nt, Artificial Sequence
  Synthetic
auguacugacauguuuugugcau

SEQ ID NO: 361572 - RNA, 24 nt, Artificial Sequence
  Synthetic
uauguacugacauguuuugugcau

SEQ ID NO: 361573 - RNA, 18 nt, Artificial Sequence
  Synthetic
gauauuuaauaauugcau

SEQ ID NO: 361574 - RNA, 19 nt, Artificial Sequence
  Synthetic
ugauauuuaauaauugcau

SEQ ID NO: 361575 - RNA, 20 nt, Artificial Sequence
  Synthetic
cugauauuuaauaauugcau

SEQ ID NO: 361576 - RNA, 21 nt, Artificial Sequence
  Synthetic
ucugauauuuaauaauugcau

SEQ ID NO: 361577 - RNA, 22 nt, Artificial Sequence
  Synthetic
uucugauauuuaauaauugcau

SEQ ID NO: 361578 - RNA, 23 nt, Artificial Sequence
  Synthetic
auucugauauuuaauaauugcau

SEQ ID NO: 361579 - RNA, 24 nt, Artificial Sequence
  Synthetic
cauucugauauuuaauaauugcau

SEQ ID NO: 361580 - RNA, 18 nt, Artificial Sequence
  Synthetic
guacuucugacauugcau

SEQ ID NO: 361581 - RNA, 19 nt, Artificial Sequence
  Synthetic
aguacuucugacauugcau

SEQ ID NO: 361582 - RNA, 20 nt, Artificial Sequence
  Synthetic
uaguacuucugacauugcau

SEQ ID NO: 361583 - RNA, 21 nt, Artificial Sequence
  Synthetic
uuaguacuucugacauugcau

SEQ ID NO: 361584 - RNA, 22 nt, Artificial Sequence
  Synthetic
uuuaguacuucugacauugcau

SEQ ID NO: 361585 - RNA, 23 nt, Artificial Sequence
  Synthetic
guuuaguacuucugacauugcau

SEQ ID NO: 361586 - RNA, 24 nt, Artificial Sequence
  Synthetic
cguuuaguacuucugacauugcau

SEQ ID NO: 361587 - RNA, 18 nt, Artificial Sequence
  Synthetic
uauauuuugugauugcau

SEQ ID NO: 361588 - RNA, 19 nt, Artificial Sequence
  Synthetic
auauauuuugugauugcau

SEQ ID NO: 361589 - RNA, 20 nt, Artificial Sequence
  Synthetic
uauauauuuugugauugcau

SEQ ID NO: 361590 - RNA, 21 nt, Artificial Sequence
  Synthetic
auauauauuuugugauugcau

SEQ ID NO: 361591 - RNA, 22 nt, Artificial Sequence
  Synthetic
aauauauauuuugugauugcau

SEQ ID NO: 361592 - RNA, 23 nt, Artificial Sequence
  Synthetic
gaauauauauuuugugauugcau

SEQ ID NO: 361593 - RNA, 24 nt, Artificial Sequence
  Synthetic
cgaauauauauuuugugauugcau

SEQ ID NO: 361594 - RNA, 18 nt, Artificial Sequence
  Synthetic
ugcuaugauguauugcau

SEQ ID NO: 361595 - RNA, 19 nt, Artificial Sequence
  Synthetic
uugcuaugauguauugcau

SEQ ID NO: 361596 - RNA, 20 nt, Artificial Sequence
  Synthetic
auugcuaugauguauugcau

SEQ ID NO: 361597 - RNA, 21 nt, Artificial Sequence
  Synthetic
gauugcuaugauguauugcau

SEQ ID NO: 361598 - RNA, 22 nt, Artificial Sequence
  Synthetic
ggauugcuaugauguauugcau

SEQ ID NO: 361599 - RNA, 23 nt, Artificial Sequence
  Synthetic
cggauugcuaugauguauugcau

SEQ ID NO: 361600 - RNA, 24 nt, Artificial Sequence
  Synthetic
acggauugcuaugauguauugcau

SEQ ID NO: 361601 - RNA, 18 nt, Artificial Sequence
  Synthetic
agcgaaacuguauugcau

SEQ ID NO: 361602 - RNA, 19 nt, Artificial Sequence
  Synthetic
uagcgaaacuguauugcau

SEQ ID NO: 361603 - RNA, 20 nt, Artificial Sequence
  Synthetic
auagcgaaacuguauugcau

SEQ ID NO: 361604 - RNA, 21 nt, Artificial Sequence
  Synthetic
aauagcgaaacuguauugcau

SEQ ID NO: 361605 - RNA, 22 nt, Artificial Sequence
  Synthetic
aaauagcgaaacuguauugcau

SEQ ID NO: 361606 - RNA, 23 nt, Artificial Sequence
  Synthetic
gaaauagcgaaacuguauugcau

SEQ ID NO: 361607 - RNA, 24 nt, Artificial Sequence
  Synthetic
agaaauagcgaaacuguauugcau

SEQ ID NO: 361608 - RNA, 18 nt, Artificial Sequence
  Synthetic
augagaaugcacuugcau

SEQ ID NO: 361609 - RNA, 19 nt, Artificial Sequence
  Synthetic
aaugagaaugcacuugcau

SEQ ID NO: 361610 - RNA, 20 nt, Artificial Sequence
  Synthetic
aaaugagaaugcacuugcau

SEQ ID NO: 361611 - RNA, 21 nt, Artificial Sequence
  Synthetic
uaaaugagaaugcacuugcau

SEQ ID NO: 361612 - RNA, 22 nt, Artificial Sequence
  Synthetic
auaaaugagaaugcacuugcau

SEQ ID NO: 361613 - RNA, 23 nt, Artificial Sequence
  Synthetic
uauaaaugagaaugcacuugcau

SEQ ID NO: 361614 - RNA, 24 nt, Artificial Sequence
  Synthetic
auauaaaugagaaugcacuugcau

SEQ ID NO: 361615 - RNA, 18 nt, Artificial Sequence
  Synthetic
cauaucaaagacuugcau

SEQ ID NO: 361616 - RNA, 19 nt, Artificial Sequence
  Synthetic
ucauaucaaagacuugcau

SEQ ID NO: 361617 - RNA, 20 nt, Artificial Sequence
  Synthetic
aucauaucaaagacuugcau

SEQ ID NO: 361618 - RNA, 21 nt, Artificial Sequence
  Synthetic
aaucauaucaaagacuugcau

SEQ ID NO: 361619 - RNA, 22 nt, Artificial Sequence
  Synthetic
aaaucauaucaaagacuugcau

SEQ ID NO: 361620 - RNA, 23 nt, Artificial Sequence
  Synthetic
caaaucauaucaaagacuugcau

SEQ ID NO: 361621 - RNA, 24 nt, Artificial Sequence
  Synthetic
ccaaaucauaucaaagacuugcau

SEQ ID NO: 361622 - RNA, 18 nt, Artificial Sequence
  Synthetic
aggagaugguccuugcau

SEQ ID NO: 361623 - RNA, 19 nt, Artificial Sequence
  Synthetic
gaggagaugguccuugcau

SEQ ID NO: 361624 - RNA, 20 nt, Artificial Sequence
  Synthetic
agaggagaugguccuugcau

SEQ ID NO: 361625 - RNA, 21 nt, Artificial Sequence
  Synthetic
cagaggagaugguccuugcau

SEQ ID NO: 361626 - RNA, 22 nt, Artificial Sequence
  Synthetic
gcagaggagaugguccuugcau

SEQ ID NO: 361627 - RNA, 23 nt, Artificial Sequence
  Synthetic
agcagaggagaugguccuugcau

SEQ ID NO: 361628 - RNA, 24 nt, Artificial Sequence
  Synthetic
aagcagaggagaugguccuugcau

SEQ ID NO: 361629 - RNA, 18 nt, Artificial Sequence
  Synthetic
acagcuaaaaucuugcau

SEQ ID NO: 361630 - RNA, 19 nt, Artificial Sequence
  Synthetic
aacagcuaaaaucuugcau

SEQ ID NO: 361631 - RNA, 20 nt, Artificial Sequence
  Synthetic
aaacagcuaaaaucuugcau

SEQ ID NO: 361632 - RNA, 21 nt, Artificial Sequence
  Synthetic
uaaacagcuaaaaucuugcau

SEQ ID NO: 361633 - RNA, 22 nt, Artificial Sequence
  Synthetic
uuaaacagcuaaaaucuugcau

SEQ ID NO: 361634 - RNA, 23 nt, Artificial Sequence
  Synthetic
auuaaacagcuaaaaucuugcau

SEQ ID NO: 361635 - RNA, 24 nt, Artificial Sequence
  Synthetic
uauuaaacagcuaaaaucuugcau

SEQ ID NO: 361636 - RNA, 18 nt, Artificial Sequence
  Synthetic
ugguacacaaucuugcau

SEQ ID NO: 361637 - RNA, 19 nt, Artificial Sequence
  Synthetic
cugguacacaaucuugcau

SEQ ID NO: 361638 - RNA, 20 nt, Artificial Sequence
  Synthetic
ccugguacacaaucuugcau

SEQ ID NO: 361639 - RNA, 21 nt, Artificial Sequence
  Synthetic
accugguacacaaucuugcau

SEQ ID NO: 361640 - RNA, 22 nt, Artificial Sequence
  Synthetic
caccugguacacaaucuugcau

SEQ ID NO: 361641 - RNA, 23 nt, Artificial Sequence
  Synthetic
acaccugguacacaaucuugcau

SEQ ID NO: 361642 - RNA, 24 nt, Artificial Sequence
  Synthetic
aacaccugguacacaaucuugcau

SEQ ID NO: 361643 - RNA, 18 nt, Artificial Sequence
  Synthetic
uuaaaauuagucuugcau

SEQ ID NO: 361644 - RNA, 19 nt, Artificial Sequence
  Synthetic
cuuaaaauuagucuugcau

SEQ ID NO: 361645 - RNA, 20 nt, Artificial Sequence
  Synthetic
gcuuaaaauuagucuugcau

SEQ ID NO: 361646 - RNA, 21 nt, Artificial Sequence
  Synthetic
agcuuaaaauuagucuugcau

SEQ ID NO: 361647 - RNA, 22 nt, Artificial Sequence
  Synthetic
aagcuuaaaauuagucuugcau

SEQ ID NO: 361648 - RNA, 23 nt, Artificial Sequence
  Synthetic
caagcuuaaaauuagucuugcau

SEQ ID NO: 361649 - RNA, 24 nt, Artificial Sequence
  Synthetic
ucaagcuuaaaauuagucuugcau

SEQ ID NO: 361650 - RNA, 18 nt, Artificial Sequence
  Synthetic
uuaguuguuuucuugcau

SEQ ID NO: 361651 - RNA, 19 nt, Artificial Sequence
  Synthetic
guuaguuguuuucuugcau

SEQ ID NO: 361652 - RNA, 20 nt, Artificial Sequence
  Synthetic
aguuaguuguuuucuugcau

SEQ ID NO: 361653 - RNA, 21 nt, Artificial Sequence
  Synthetic
caguuaguuguuuucuugcau

SEQ ID NO: 361654 - RNA, 22 nt, Artificial Sequence
  Synthetic
ucaguuaguuguuuucuugcau

SEQ ID NO: 361655 - RNA, 23 nt, Artificial Sequence
  Synthetic
uucaguuaguuguuuucuugcau

SEQ ID NO: 361656 - RNA, 24 nt, Artificial Sequence
  Synthetic
uuucaguuaguuguuuucuugcau

SEQ ID NO: 361657 - RNA, 18 nt, Artificial Sequence
  Synthetic
aggagcuacucguugcau

SEQ ID NO: 361658 - RNA, 19 nt, Artificial Sequence
  Synthetic
aaggagcuacucguugcau

SEQ ID NO: 361659 - RNA, 20 nt, Artificial Sequence
  Synthetic
uaaggagcuacucguugcau

SEQ ID NO: 361660 - RNA, 21 nt, Artificial Sequence
  Synthetic
auaaggagcuacucguugcau

SEQ ID NO: 361661 - RNA, 22 nt, Artificial Sequence
  Synthetic
aauaaggagcuacucguugcau

SEQ ID NO: 361662 - RNA, 23 nt, Artificial Sequence
  Synthetic
aaauaaggagcuacucguugcau

SEQ ID NO: 361663 - RNA, 24 nt, Artificial Sequence
  Synthetic
aaaauaaggagcuacucguugcau

SEQ ID NO: 361664 - RNA, 18 nt, Artificial Sequence
  Synthetic
guuagcagucauuugcau

SEQ ID NO: 361665 - RNA, 19 nt, Artificial Sequence
  Synthetic
aguuagcagucauuugcau

SEQ ID NO: 361666 - RNA, 20 nt, Artificial Sequence
  Synthetic
gaguuagcagucauuugcau

SEQ ID NO: 361667 - RNA, 21 nt, Artificial Sequence
  Synthetic
ggaguuagcagucauuugcau

SEQ ID NO: 361668 - RNA, 22 nt, Artificial Sequence
  Synthetic
uggaguuagcagucauuugcau

SEQ ID NO: 361669 - RNA, 23 nt, Artificial Sequence
  Synthetic
uuggaguuagcagucauuugcau

SEQ ID NO: 361670 - RNA, 24 nt, Artificial Sequence
  Synthetic
guuggaguuagcagucauuugcau

SEQ ID NO: 361671 - RNA, 18 nt, Artificial Sequence
  Synthetic
uuaaauggauauuugcau

SEQ ID NO: 361672 - RNA, 19 nt, Artificial Sequence
  Synthetic
uuuaaauggauauuugcau

SEQ ID NO: 361673 - RNA, 20 nt, Artificial Sequence
  Synthetic
uuuuaaauggauauuugcau

SEQ ID NO: 361674 - RNA, 21 nt, Artificial Sequence
  Synthetic
auuuuaaauggauauuugcau

SEQ ID NO: 361675 - RNA, 22 nt, Artificial Sequence
  Synthetic
uauuuuaaauggauauuugcau

SEQ ID NO: 361676 - RNA, 23 nt, Artificial Sequence
  Synthetic
auauuuuaaauggauauuugcau

SEQ ID NO: 361677 - RNA, 24 nt, Artificial Sequence
  Synthetic
uauauuuuaaauggauauuugcau

SEQ ID NO: 361678 - RNA, 18 nt, Artificial Sequence
  Synthetic
gcugggaccuuuuugcau

SEQ ID NO: 361679 - RNA, 19 nt, Artificial Sequence
  Synthetic
agcugggaccuuuuugcau

SEQ ID NO: 361680 - RNA, 20 nt, Artificial Sequence
  Synthetic
cagcugggaccuuuuugcau

SEQ ID NO: 361681 - RNA, 21 nt, Artificial Sequence
  Synthetic
gcagcugggaccuuuuugcau

SEQ ID NO: 361682 - RNA, 22 nt, Artificial Sequence
  Synthetic
agcagcugggaccuuuuugcau

SEQ ID NO: 361683 - RNA, 23 nt, Artificial Sequence
  Synthetic
aagcagcugggaccuuuuugcau

SEQ ID NO: 361684 - RNA, 24 nt, Artificial Sequence
  Synthetic
aaagcagcugggaccuuuuugcau

SEQ ID NO: 361685 - RNA, 18 nt, Artificial Sequence
  Synthetic
aacacugugcaaaaucau

SEQ ID NO: 361686 - RNA, 19 nt, Artificial Sequence
  Synthetic
gaacacugugcaaaaucau

SEQ ID NO: 361687 - RNA, 20 nt, Artificial Sequence
  Synthetic
agaacacugugcaaaaucau

SEQ ID NO: 361688 - RNA, 21 nt, Artificial Sequence
  Synthetic
cagaacacugugcaaaaucau

SEQ ID NO: 361689 - RNA, 22 nt, Artificial Sequence
  Synthetic
ucagaacacugugcaaaaucau

SEQ ID NO: 361690 - RNA, 23 nt, Artificial Sequence
  Synthetic
uucagaacacugugcaaaaucau

SEQ ID NO: 361691 - RNA, 24 nt, Artificial Sequence
  Synthetic
auucagaacacugugcaaaaucau

SEQ ID NO: 361692 - RNA, 18 nt, Artificial Sequence
  Synthetic
uguuacuaagaaaaucau

SEQ ID NO: 361693 - RNA, 19 nt, Artificial Sequence
  Synthetic
auguuacuaagaaaaucau

SEQ ID NO: 361694 - RNA, 20 nt, Artificial Sequence
  Synthetic
gauguuacuaagaaaaucau

SEQ ID NO: 361695 - RNA, 21 nt, Artificial Sequence
  Synthetic
cgauguuacuaagaaaaucau

SEQ ID NO: 361696 - RNA, 22 nt, Artificial Sequence
  Synthetic
acgauguuacuaagaaaaucau

SEQ ID NO: 361697 - RNA, 23 nt, Artificial Sequence
  Synthetic
uacgauguuacuaagaaaaucau

SEQ ID NO: 361698 - RNA, 24 nt, Artificial Sequence
  Synthetic
auacgauguuacuaagaaaaucau

SEQ ID NO: 361699 - RNA, 18 nt, Artificial Sequence
  Synthetic
ucaaugucuuaaaaucau

SEQ ID NO: 361700 - RNA, 19 nt, Artificial Sequence
  Synthetic
uucaaugucuuaaaaucau

SEQ ID NO: 361701 - RNA, 20 nt, Artificial Sequence
  Synthetic
auucaaugucuuaaaaucau

SEQ ID NO: 361702 - RNA, 21 nt, Artificial Sequence
  Synthetic
aauucaaugucuuaaaaucau

SEQ ID NO: 361703 - RNA, 22 nt, Artificial Sequence
  Synthetic
aaauucaaugucuuaaaaucau

SEQ ID NO: 361704 - RNA, 23 nt, Artificial Sequence
  Synthetic
aaaauucaaugucuuaaaaucau

SEQ ID NO: 361705 - RNA, 24 nt, Artificial Sequence
  Synthetic
aaaaauucaaugucuuaaaaucau

SEQ ID NO: 361706 - RNA, 18 nt, Artificial Sequence
  Synthetic
uugcauuggaagaaucau

SEQ ID NO: 361707 - RNA, 19 nt, Artificial Sequence
  Synthetic
uuugcauuggaagaaucau

SEQ ID NO: 361708 - RNA, 20 nt, Artificial Sequence
  Synthetic
uuuugcauuggaagaaucau

SEQ ID NO: 361709 - RNA, 21 nt, Artificial Sequence
  Synthetic
uuuuugcauuggaagaaucau

SEQ ID NO: 361710 - RNA, 22 nt, Artificial Sequence
  Synthetic
cuuuuugcauuggaagaaucau

SEQ ID NO: 361711 - RNA, 23 nt, Artificial Sequence
  Synthetic
ccuuuuugcauuggaagaaucau

SEQ ID NO: 361712 - RNA, 24 nt, Artificial Sequence
  Synthetic
accuuuuugcauuggaagaaucau

SEQ ID NO: 361713 - RNA, 18 nt, Artificial Sequence
  Synthetic
aacaccuuacagaaucau

SEQ ID NO: 361714 - RNA, 19 nt, Artificial Sequence
  Synthetic
uaacaccuuacagaaucau

SEQ ID NO: 361715 - RNA, 20 nt, Artificial Sequence
  Synthetic
auaacaccuuacagaaucau

SEQ ID NO: 361716 - RNA, 21 nt, Artificial Sequence
  Synthetic
gauaacaccuuacagaaucau

SEQ ID NO: 361717 - RNA, 22 nt, Artificial Sequence
  Synthetic
agauaacaccuuacagaaucau

SEQ ID NO: 361718 - RNA, 23 nt, Artificial Sequence
  Synthetic
cagauaacaccuuacagaaucau

SEQ ID NO: 361719 - RNA, 24 nt, Artificial Sequence
  Synthetic
ccagauaacaccuuacagaaucau

SEQ ID NO: 361720 - RNA, 18 nt, Artificial Sequence
  Synthetic
gauuuuucucagaaucau

SEQ ID NO: 361721 - RNA, 19 nt, Artificial Sequence
  Synthetic
ugauuuuucucagaaucau

SEQ ID NO: 361722 - RNA, 20 nt, Artificial Sequence
  Synthetic
uugauuuuucucagaaucau

SEQ ID NO: 361723 - RNA, 21 nt, Artificial Sequence
  Synthetic
uuugauuuuucucagaaucau

SEQ ID NO: 361724 - RNA, 22 nt, Artificial Sequence
  Synthetic
auuugauuuuucucagaaucau

SEQ ID NO: 361725 - RNA, 23 nt, Artificial Sequence
  Synthetic
aauuugauuuuucucagaaucau

SEQ ID NO: 361726 - RNA, 24 nt, Artificial Sequence
  Synthetic
gaauuugauuuuucucagaaucau

SEQ ID NO: 361727 - RNA, 18 nt, Artificial Sequence
  Synthetic
cugaggcaggagaaucau

SEQ ID NO: 361728 - RNA, 19 nt, Artificial Sequence
  Synthetic
gcugaggcaggagaaucau

SEQ ID NO: 361729 - RNA, 20 nt, Artificial Sequence
  Synthetic
ggcugaggcaggagaaucau

SEQ ID NO: 361730 - RNA, 22 nt, Artificial Sequence
  Synthetic
gaggcugaggcaggagaaucau

SEQ ID NO: 361731 - RNA, 23 nt, Artificial Sequence
  Synthetic
ggaggcugaggcaggagaaucau

SEQ ID NO: 361732 - RNA, 24 nt, Artificial Sequence
  Synthetic
gggaggcugaggcaggagaaucau

SEQ ID NO: 361733 - RNA, 18 nt, Artificial Sequence
  Synthetic
gaaaagagugggaaucau

SEQ ID NO: 361734 - RNA, 19 nt, Artificial Sequence
  Synthetic
agaaaagagugggaaucau

SEQ ID NO: 361735 - RNA, 20 nt, Artificial Sequence
  Synthetic
uagaaaagagugggaaucau

SEQ ID NO: 361736 - RNA, 21 nt, Artificial Sequence
  Synthetic
auagaaaagagugggaaucau

SEQ ID NO: 361737 - RNA, 22 nt, Artificial Sequence
  Synthetic
aauagaaaagagugggaaucau

SEQ ID NO: 361738 - RNA, 23 nt, Artificial Sequence
  Synthetic
aaauagaaaagagugggaaucau

SEQ ID NO: 361739 - RNA, 24 nt, Artificial Sequence
  Synthetic
aaaauagaaaagagugggaaucau

SEQ ID NO: 361740 - RNA, 18 nt, Artificial Sequence
  Synthetic
ugauauccuuggaaucau

SEQ ID NO: 361741 - RNA, 19 nt, Artificial Sequence
  Synthetic
uugauauccuuggaaucau

SEQ ID NO: 361742 - RNA, 20 nt, Artificial Sequence
  Synthetic
uuugauauccuuggaaucau

SEQ ID NO: 361743 - RNA, 21 nt, Artificial Sequence
  Synthetic
guuugauauccuuggaaucau

SEQ ID NO: 361744 - RNA, 22 nt, Artificial Sequence
  Synthetic
aguuugauauccuuggaaucau

SEQ ID NO: 361745 - RNA, 23 nt, Artificial Sequence
  Synthetic
aaguuugauauccuuggaaucau

SEQ ID NO: 361746 - RNA, 24 nt, Artificial Sequence
  Synthetic
caaguuugauauccuuggaaucau

SEQ ID NO: 361747 - RNA, 18 nt, Artificial Sequence
  Synthetic
aaggaauuuuggaaucau

SEQ ID NO: 361748 - RNA, 19 nt, Artificial Sequence
  Synthetic
gaaggaauuuuggaaucau

SEQ ID NO: 361749 - RNA, 20 nt, Artificial Sequence
  Synthetic
ugaaggaauuuuggaaucau

SEQ ID NO: 361750 - RNA, 21 nt, Artificial Sequence
  Synthetic
uugaaggaauuuuggaaucau

SEQ ID NO: 361751 - RNA, 22 nt, Artificial Sequence
  Synthetic
uuugaaggaauuuuggaaucau

SEQ ID NO: 361752 - RNA, 23 nt, Artificial Sequence
  Synthetic
uuuugaaggaauuuuggaaucau

SEQ ID NO: 361753 - RNA, 24 nt, Artificial Sequence
  Synthetic
guuuugaaggaauuuuggaaucau

SEQ ID NO: 361754 - RNA, 18 nt, Artificial Sequence
  Synthetic
uggagguaacugaaucau

SEQ ID NO: 361755 - RNA, 19 nt, Artificial Sequence
  Synthetic
guggagguaacugaaucau

SEQ ID NO: 361756 - RNA, 20 nt, Artificial Sequence
  Synthetic
gguggagguaacugaaucau

SEQ ID NO: 361757 - RNA, 21 nt, Artificial Sequence
  Synthetic
agguggagguaacugaaucau

SEQ ID NO: 361758 - RNA, 22 nt, Artificial Sequence
  Synthetic
cagguggagguaacugaaucau

SEQ ID NO: 361759 - RNA, 23 nt, Artificial Sequence
  Synthetic
ccagguggagguaacugaaucau

SEQ ID NO: 361760 - RNA, 24 nt, Artificial Sequence
  Synthetic
accagguggagguaacugaaucau

SEQ ID NO: 361761 - RNA, 18 nt, Artificial Sequence
  Synthetic
guaaugcacuugaaucau

SEQ ID NO: 361762 - RNA, 19 nt, Artificial Sequence
  Synthetic
uguaaugcacuugaaucau

SEQ ID NO: 361763 - RNA, 20 nt, Artificial Sequence
  Synthetic
cuguaaugcacuugaaucau

SEQ ID NO: 361764 - RNA, 21 nt, Artificial Sequence
  Synthetic
acuguaaugcacuugaaucau

SEQ ID NO: 361765 - RNA, 22 nt, Artificial Sequence
  Synthetic
aacuguaaugcacuugaaucau

SEQ ID NO: 361766 - RNA, 23 nt, Artificial Sequence
  Synthetic
uaacuguaaugcacuugaaucau

SEQ ID NO: 361767 - RNA, 24 nt, Artificial Sequence
  Synthetic
auaacuguaaugcacuugaaucau

SEQ ID NO: 361768 - RNA, 18 nt, Artificial Sequence
  Synthetic
ggaggucauuugaaucau

SEQ ID NO: 361769 - RNA, 19 nt, Artificial Sequence
  Synthetic
gggaggucauuugaaucau

SEQ ID NO: 361770 - RNA, 20 nt, Artificial Sequence
  Synthetic
ugggaggucauuugaaucau

SEQ ID NO: 361771 - RNA, 21 nt, Artificial Sequence
  Synthetic
gugggaggucauuugaaucau

SEQ ID NO: 361772 - RNA, 22 nt, Artificial Sequence
  Synthetic
agugggaggucauuugaaucau

SEQ ID NO: 361773 - RNA, 23 nt, Artificial Sequence
  Synthetic
cagugggaggucauuugaaucau

SEQ ID NO: 361774 - RNA, 24 nt, Artificial Sequence
  Synthetic
ccagugggaggucauuugaaucau

SEQ ID NO: 361775 - RNA, 18 nt, Artificial Sequence
  Synthetic
cucaacaucacuaaucau

SEQ ID NO: 361776 - RNA, 19 nt, Artificial Sequence
  Synthetic
gcucaacaucacuaaucau

SEQ ID NO: 361777 - RNA, 20 nt, Artificial Sequence
  Synthetic
ugcucaacaucacuaaucau

SEQ ID NO: 361778 - RNA, 21 nt, Artificial Sequence
  Synthetic
augcucaacaucacuaaucau

SEQ ID NO: 361779 - RNA, 22 nt, Artificial Sequence
  Synthetic
aaugcucaacaucacuaaucau

SEQ ID NO: 361780 - RNA, 23 nt, Artificial Sequence
  Synthetic
aaaugcucaacaucacuaaucau

SEQ ID NO: 361781 - RNA, 24 nt, Artificial Sequence
  Synthetic
aaaaugcucaacaucacuaaucau

SEQ ID NO: 361782 - RNA, 18 nt, Artificial Sequence
  Synthetic
uauuaguugucuaaucau

SEQ ID NO: 361783 - RNA, 19 nt, Artificial Sequence
  Synthetic
uuauuaguugucuaaucau

SEQ ID NO: 361784 - RNA, 20 nt, Artificial Sequence
  Synthetic
uuuauuaguugucuaaucau

SEQ ID NO: 361785 - RNA, 21 nt, Artificial Sequence
  Synthetic
auuuauuaguugucuaaucau

SEQ ID NO: 361786 - RNA, 22 nt, Artificial Sequence
  Synthetic
uauuuauuaguugucuaaucau

SEQ ID NO: 361787 - RNA, 23 nt, Artificial Sequence
  Synthetic
uuauuuauuaguugucuaaucau

SEQ ID NO: 361788 - RNA, 24 nt, Artificial Sequence
  Synthetic
cuuauuuauuaguugucuaaucau

SEQ ID NO: 361789 - RNA, 18 nt, Artificial Sequence
  Synthetic
aaaauguugccacaucau

SEQ ID NO: 361790 - RNA, 19 nt, Artificial Sequence
  Synthetic
uaaaauguugccacaucau

SEQ ID NO: 361791 - RNA, 20 nt, Artificial Sequence
  Synthetic
cuaaaauguugccacaucau

SEQ ID NO: 361792 - RNA, 21 nt, Artificial Sequence
  Synthetic
ccuaaaauguugccacaucau

SEQ ID NO: 361793 - RNA, 22 nt, Artificial Sequence
  Synthetic
gccuaaaauguugccacaucau

SEQ ID NO: 361794 - RNA, 23 nt, Artificial Sequence
  Synthetic
agccuaaaauguugccacaucau

SEQ ID NO: 361795 - RNA, 24 nt, Artificial Sequence
  Synthetic
gagccuaaaauguugccacaucau

SEQ ID NO: 361796 - RNA, 18 nt, Artificial Sequence
  Synthetic
ccaaggcgggcacaucau

SEQ ID NO: 361797 - RNA, 19 nt, Artificial Sequence
  Synthetic
uccaaggcgggcacaucau

SEQ ID NO: 361798 - RNA, 20 nt, Artificial Sequence
  Synthetic
guccaaggcgggcacaucau

SEQ ID NO: 361799 - RNA, 21 nt, Artificial Sequence
  Synthetic
aguccaaggcgggcacaucau

SEQ ID NO: 361800 - RNA, 22 nt, Artificial Sequence
  Synthetic
gaguccaaggcgggcacaucau

SEQ ID NO: 361801 - RNA, 23 nt, Artificial Sequence
  Synthetic
ggaguccaaggcgggcacaucau

SEQ ID NO: 361802 - RNA, 24 nt, Artificial Sequence
  Synthetic
gggaguccaaggcgggcacaucau

SEQ ID NO: 361803 - RNA, 18 nt, Artificial Sequence
  Synthetic
agauauaauauacaucau

SEQ ID NO: 361804 - RNA, 19 nt, Artificial Sequence
  Synthetic
aagauauaauauacaucau

SEQ ID NO: 361805 - RNA, 20 nt, Artificial Sequence
  Synthetic
aaagauauaauauacaucau

SEQ ID NO: 361806 - RNA, 21 nt, Artificial Sequence
  Synthetic
aaaagauauaauauacaucau

SEQ ID NO: 361807 - RNA, 22 nt, Artificial Sequence
  Synthetic
uaaaagauauaauauacaucau

SEQ ID NO: 361808 - RNA, 23 nt, Artificial Sequence
  Synthetic
uuaaaagauauaauauacaucau

SEQ ID NO: 361809 - RNA, 24 nt, Artificial Sequence
  Synthetic
auuaaaagauauaauauacaucau

SEQ ID NO: 361810 - RNA, 18 nt, Artificial Sequence
  Synthetic
augauuaacggccaucau

SEQ ID NO: 361811 - RNA, 19 nt, Artificial Sequence
  Synthetic
aaugauuaacggccaucau

SEQ ID NO: 361812 - RNA, 20 nt, Artificial Sequence
  Synthetic
uaaugauuaacggccaucau

SEQ ID NO: 361813 - RNA, 21 nt, Artificial Sequence
  Synthetic
cuaaugauuaacggccaucau

SEQ ID NO: 361814 - RNA, 22 nt, Artificial Sequence
  Synthetic
acuaaugauuaacggccaucau

SEQ ID NO: 361815 - RNA, 23 nt, Artificial Sequence
  Synthetic
aacuaaugauuaacggccaucau

SEQ ID NO: 361816 - RNA, 24 nt, Artificial Sequence
  Synthetic
aaacuaaugauuaacggccaucau

SEQ ID NO: 361817 - RNA, 18 nt, Artificial Sequence
  Synthetic
gggaacuaauuccaucau

SEQ ID NO: 361818 - RNA, 19 nt, Artificial Sequence
  Synthetic
agggaacuaauuccaucau

SEQ ID NO: 361819 - RNA, 20 nt, Artificial Sequence
  Synthetic
aagggaacuaauuccaucau

SEQ ID NO: 361820 - RNA, 21 nt, Artificial Sequence
  Synthetic
uaagggaacuaauuccaucau

SEQ ID NO: 361821 - RNA, 22 nt, Artificial Sequence
  Synthetic
auaagggaacuaauuccaucau

SEQ ID NO: 361822 - RNA, 23 nt, Artificial Sequence
  Synthetic
uauaagggaacuaauuccaucau

SEQ ID NO: 361823 - RNA, 24 nt, Artificial Sequence
  Synthetic
uuauaagggaacuaauuccaucau

SEQ ID NO: 361824 - RNA, 18 nt, Artificial Sequence
  Synthetic
cguguauucuuccaucau

SEQ ID NO: 361825 - RNA, 19 nt, Artificial Sequence
  Synthetic
ucguguauucuuccaucau

SEQ ID NO: 361826 - RNA, 20 nt, Artificial Sequence
  Synthetic
uucguguauucuuccaucau

SEQ ID NO: 361827 - RNA, 21 nt, Artificial Sequence
  Synthetic
guucguguauucuuccaucau

SEQ ID NO: 361828 - RNA, 22 nt, Artificial Sequence
  Synthetic
uguucguguauucuuccaucau

SEQ ID NO: 361829 - RNA, 23 nt, Artificial Sequence
  Synthetic
guguucguguauucuuccaucau

SEQ ID NO: 361830 - RNA, 24 nt, Artificial Sequence
  Synthetic
gguguucguguauucuuccaucau

SEQ ID NO: 361831 - RNA, 18 nt, Artificial Sequence
  Synthetic
aacaccuuucagcaucau

SEQ ID NO: 361832 - RNA, 19 nt, Artificial Sequence
  Synthetic
aaacaccuuucagcaucau

SEQ ID NO: 361833 - RNA, 20 nt, Artificial Sequence
  Synthetic
aaaacaccuuucagcaucau

SEQ ID NO: 361834 - RNA, 21 nt, Artificial Sequence
  Synthetic
uaaaacaccuuucagcaucau

SEQ ID NO: 361835 - RNA, 22 nt, Artificial Sequence
  Synthetic
auaaaacaccuuucagcaucau

SEQ ID NO: 361836 - RNA, 23 nt, Artificial Sequence
  Synthetic
cauaaaacaccuuucagcaucau

SEQ ID NO: 361837 - RNA, 24 nt, Artificial Sequence
  Synthetic
ccauaaaacaccuuucagcaucau

SEQ ID NO: 361838 - RNA, 18 nt, Artificial Sequence
  Synthetic
uagauaugggagcaucau

SEQ ID NO: 361839 - RNA, 19 nt, Artificial Sequence
  Synthetic
uuagauaugggagcaucau

SEQ ID NO: 361840 - RNA, 20 nt, Artificial Sequence
  Synthetic
uuuagauaugggagcaucau

SEQ ID NO: 361841 - RNA, 21 nt, Artificial Sequence
  Synthetic
guuuagauaugggagcaucau

SEQ ID NO: 361842 - RNA, 22 nt, Artificial Sequence
  Synthetic
aguuuagauaugggagcaucau

SEQ ID NO: 361843 - RNA, 23 nt, Artificial Sequence
  Synthetic
uaguuuagauaugggagcaucau

SEQ ID NO: 361844 - RNA, 24 nt, Artificial Sequence
  Synthetic
auaguuuagauaugggagcaucau

SEQ ID NO: 361845 - RNA, 18 nt, Artificial Sequence
  Synthetic
aguuuacuguagcaucau

SEQ ID NO: 361846 - RNA, 19 nt, Artificial Sequence
  Synthetic
caguuuacuguagcaucau

SEQ ID NO: 361847 - RNA, 20 nt, Artificial Sequence
  Synthetic
ccaguuuacuguagcaucau

SEQ ID NO: 361848 - RNA, 21 nt, Artificial Sequence
  Synthetic
accaguuuacuguagcaucau

SEQ ID NO: 361849 - RNA, 22 nt, Artificial Sequence
  Synthetic
uaccaguuuacuguagcaucau

SEQ ID NO: 361850 - RNA, 23 nt, Artificial Sequence
  Synthetic
uuaccaguuuacuguagcaucau

SEQ ID NO: 361851 - RNA, 24 nt, Artificial Sequence
  Synthetic
uuuaccaguuuacuguagcaucau

SEQ ID NO: 361852 - RNA, 18 nt, Artificial Sequence
  Synthetic
caucaggaggugcaucau

SEQ ID NO: 361853 - RNA, 19 nt, Artificial Sequence
  Synthetic
acaucaggaggugcaucau

SEQ ID NO: 361854 - RNA, 20 nt, Artificial Sequence
  Synthetic
cacaucaggaggugcaucau

SEQ ID NO: 361855 - RNA, 21 nt, Artificial Sequence
  Synthetic
ucacaucaggaggugcaucau

SEQ ID NO: 361856 - RNA, 22 nt, Artificial Sequence
  Synthetic
gucacaucaggaggugcaucau

SEQ ID NO: 361857 - RNA, 23 nt, Artificial Sequence
  Synthetic
cgucacaucaggaggugcaucau

SEQ ID NO: 361858 - RNA, 24 nt, Artificial Sequence
  Synthetic
acgucacaucaggaggugcaucau

SEQ ID NO: 361859 - RNA, 18 nt, Artificial Sequence
  Synthetic
cuccacaucacucaucau

SEQ ID NO: 361860 - RNA, 19 nt, Artificial Sequence
  Synthetic
gcuccacaucacucaucau

SEQ ID NO: 361861 - RNA, 20 nt, Artificial Sequence
  Synthetic
ugcuccacaucacucaucau

SEQ ID NO: 361862 - RNA, 21 nt, Artificial Sequence
  Synthetic
augcuccacaucacucaucau

SEQ ID NO: 361863 - RNA, 22 nt, Artificial Sequence
  Synthetic
aaugcuccacaucacucaucau

SEQ ID NO: 361864 - RNA, 23 nt, Artificial Sequence
  Synthetic
aaaugcuccacaucacucaucau

SEQ ID NO: 361865 - RNA, 24 nt, Artificial Sequence
  Synthetic
aaaaugcuccacaucacucaucau

SEQ ID NO: 361866 - RNA, 18 nt, Artificial Sequence
  Synthetic
cgucacaucacucaucau

SEQ ID NO: 361867 - RNA, 19 nt, Artificial Sequence
  Synthetic
gcgucacaucacucaucau

SEQ ID NO: 361868 - RNA, 20 nt, Artificial Sequence
  Synthetic
ugcgucacaucacucaucau

SEQ ID NO: 361869 - RNA, 21 nt, Artificial Sequence
  Synthetic
augcgucacaucacucaucau

SEQ ID NO: 361870 - RNA, 22 nt, Artificial Sequence
  Synthetic
aaugcgucacaucacucaucau

SEQ ID NO: 361871 - RNA, 23 nt, Artificial Sequence
  Synthetic
aaaugcgucacaucacucaucau

SEQ ID NO: 361872 - RNA, 24 nt, Artificial Sequence
  Synthetic
aaaaugcgucacaucacucaucau

SEQ ID NO: 361873 - RNA, 18 nt, Artificial Sequence
  Synthetic
aaguuauagagucaucau

SEQ ID NO: 361874 - RNA, 19 nt, Artificial Sequence
  Synthetic
uaaguuauagagucaucau

SEQ ID NO: 361875 - RNA, 20 nt, Artificial Sequence
  Synthetic
cuaaguuauagagucaucau

SEQ ID NO: 361876 - RNA, 21 nt, Artificial Sequence
  Synthetic
gcuaaguuauagagucaucau

SEQ ID NO: 361877 - RNA, 22 nt, Artificial Sequence
  Synthetic
agcuaaguuauagagucaucau

SEQ ID NO: 361878 - RNA, 23 nt, Artificial Sequence
  Synthetic
cagcuaaguuauagagucaucau

SEQ ID NO: 361879 - RNA, 24 nt, Artificial Sequence
  Synthetic
ucagcuaaguuauagagucaucau

SEQ ID NO: 361880 - RNA, 18 nt, Artificial Sequence
  Synthetic
uauauuacauuucaucau

SEQ ID NO: 361881 - RNA, 19 nt, Artificial Sequence
  Synthetic
cuauauuacauuucaucau

SEQ ID NO: 361882 - RNA, 20 nt, Artificial Sequence
  Synthetic
ucuauauuacauuucaucau

SEQ ID NO: 361883 - RNA, 21 nt, Artificial Sequence
  Synthetic
gucuauauuacauuucaucau

SEQ ID NO: 361884 - RNA, 22 nt, Artificial Sequence
  Synthetic
ugucuauauuacauuucaucau

SEQ ID NO: 361885 - RNA, 23 nt, Artificial Sequence
  Synthetic
cugucuauauuacauuucaucau

SEQ ID NO: 361886 - RNA, 24 nt, Artificial Sequence
  Synthetic
acugucuauauuacauuucaucau

SEQ ID NO: 361887 - RNA, 18 nt, Artificial Sequence
  Synthetic
uaucuagguuuucaucau

SEQ ID NO: 361888 - RNA, 19 nt, Artificial Sequence
  Synthetic
uuaucuagguuuucaucau

SEQ ID NO: 361889 - RNA, 20 nt, Artificial Sequence
  Synthetic
uuuaucuagguuuucaucau

SEQ ID NO: 361890 - RNA, 21 nt, Artificial Sequence
  Synthetic
auuuaucuagguuuucaucau

SEQ ID NO: 361891 - RNA, 22 nt, Artificial Sequence
  Synthetic
cauuuaucuagguuuucaucau

SEQ ID NO: 361892 - RNA, 23 nt, Artificial Sequence
  Synthetic
acauuuaucuagguuuucaucau

SEQ ID NO: 361893 - RNA, 24 nt, Artificial Sequence
  Synthetic
aacauuuaucuagguuuucaucau

SEQ ID NO: 361894 - RNA, 18 nt, Artificial Sequence
  Synthetic
acuuacucugaagaucau

SEQ ID NO: 361895 - RNA, 19 nt, Artificial Sequence
  Synthetic
gacuuacucugaagaucau

SEQ ID NO: 361896 - RNA, 20 nt, Artificial Sequence
  Synthetic
ugacuuacucugaagaucau

SEQ ID NO: 361897 - RNA, 21 nt, Artificial Sequence
  Synthetic
uugacuuacucugaagaucau

SEQ ID NO: 361898 - RNA, 22 nt, Artificial Sequence
  Synthetic
auugacuuacucugaagaucau

SEQ ID NO: 361899 - RNA, 23 nt, Artificial Sequence
  Synthetic
aauugacuuacucugaagaucau

SEQ ID NO: 361900 - RNA, 24 nt, Artificial Sequence
  Synthetic
aaauugacuuacucugaagaucau

SEQ ID NO: 361901 - RNA, 18 nt, Artificial Sequence
  Synthetic
uucugaaugccagaucau

SEQ ID NO: 361902 - RNA, 19 nt, Artificial Sequence
  Synthetic
auucugaaugccagaucau

SEQ ID NO: 361903 - RNA, 20 nt, Artificial Sequence
  Synthetic
gauucugaaugccagaucau

SEQ ID NO: 361904 - RNA, 21 nt, Artificial Sequence
  Synthetic
ggauucugaaugccagaucau

SEQ ID NO: 361905 - RNA, 22 nt, Artificial Sequence
  Synthetic
gggauucugaaugccagaucau

SEQ ID NO: 361906 - RNA, 23 nt, Artificial Sequence
  Synthetic
agggauucugaaugccagaucau

SEQ ID NO: 361907 - RNA, 24 nt, Artificial Sequence
  Synthetic
gagggauucugaaugccagaucau

SEQ ID NO: 361908 - RNA, 18 nt, Artificial Sequence
  Synthetic
ccaagaugggcagaucau

SEQ ID NO: 361909 - RNA, 19 nt, Artificial Sequence
  Synthetic
gccaagaugggcagaucau

SEQ ID NO: 361910 - RNA, 20 nt, Artificial Sequence
  Synthetic
ggccaagaugggcagaucau

SEQ ID NO: 361911 - RNA, 21 nt, Artificial Sequence
  Synthetic
aggccaagaugggcagaucau

SEQ ID NO: 361912 - RNA, 22 nt, Artificial Sequence
  Synthetic
gaggccaagaugggcagaucau

SEQ ID NO: 361913 - RNA, 23 nt, Artificial Sequence
  Synthetic
ggaggccaagaugggcagaucau

SEQ ID NO: 361914 - RNA, 24 nt, Artificial Sequence
  Synthetic
gggaggccaagaugggcagaucau

SEQ ID NO: 361915 - RNA, 18 nt, Artificial Sequence
  Synthetic
guagucaaaggagaucau

SEQ ID NO: 361916 - RNA, 19 nt, Artificial Sequence
  Synthetic
uguagucaaaggagaucau

SEQ ID NO: 361917 - RNA, 20 nt, Artificial Sequence
  Synthetic
auguagucaaaggagaucau

SEQ ID NO: 361918 - RNA, 21 nt, Artificial Sequence
  Synthetic
cauguagucaaaggagaucau

SEQ ID NO: 361919 - RNA, 22 nt, Artificial Sequence
  Synthetic
acauguagucaaaggagaucau

SEQ ID NO: 361920 - RNA, 23 nt, Artificial Sequence
  Synthetic
gacauguagucaaaggagaucau

SEQ ID NO: 361921 - RNA, 24 nt, Artificial Sequence
  Synthetic
agacauguagucaaaggagaucau

SEQ ID NO: 361922 - RNA, 18 nt, Artificial Sequence
  Synthetic
uaaguuggcagggaucau

SEQ ID NO: 361923 - RNA, 19 nt, Artificial Sequence
  Synthetic
guaaguuggcagggaucau

SEQ ID NO: 361924 - RNA, 20 nt, Artificial Sequence
  Synthetic
aguaaguuggcagggaucau

SEQ ID NO: 361925 - RNA, 21 nt, Artificial Sequence
  Synthetic
gaguaaguuggcagggaucau

SEQ ID NO: 361926 - RNA, 22 nt, Artificial Sequence
  Synthetic
ugaguaaguuggcagggaucau

SEQ ID NO: 361927 - RNA, 23 nt, Artificial Sequence
  Synthetic
gugaguaaguuggcagggaucau

SEQ ID NO: 361928 - RNA, 24 nt, Artificial Sequence
  Synthetic
ugugaguaaguuggcagggaucau

SEQ ID NO: 361929 - RNA, 18 nt, Artificial Sequence
  Synthetic
gugggauugcuggaucau

SEQ ID NO: 361930 - RNA, 19 nt, Artificial Sequence
  Synthetic
agugggauugcuggaucau

SEQ ID NO: 361931 - RNA, 20 nt, Artificial Sequence
  Synthetic
cagugggauugcuggaucau

SEQ ID NO: 361932 - RNA, 21 nt, Artificial Sequence
  Synthetic
gcagugggauugcuggaucau

SEQ ID NO: 361933 - RNA, 22 nt, Artificial Sequence
  Synthetic
agcagugggauugcuggaucau

SEQ ID NO: 361934 - RNA, 23 nt, Artificial Sequence
  Synthetic
cagcagugggauugcuggaucau

SEQ ID NO: 361935 - RNA, 24 nt, Artificial Sequence
  Synthetic
ccagcagugggauugcuggaucau

SEQ ID NO: 361936 - RNA, 18 nt, Artificial Sequence
  Synthetic
aaauuaauaguugaucau

SEQ ID NO: 361937 - RNA, 19 nt, Artificial Sequence
  Synthetic
aaaauuaauaguugaucau

SEQ ID NO: 361938 - RNA, 20 nt, Artificial Sequence
  Synthetic
caaaauuaauaguugaucau

SEQ ID NO: 361939 - RNA, 21 nt, Artificial Sequence
  Synthetic
ucaaaauuaauaguugaucau

SEQ ID NO: 361940 - RNA, 22 nt, Artificial Sequence
  Synthetic
aucaaaauuaauaguugaucau

SEQ ID NO: 361941 - RNA, 23 nt, Artificial Sequence
  Synthetic
gaucaaaauuaauaguugaucau

SEQ ID NO: 361942 - RNA, 24 nt, Artificial Sequence
  Synthetic
ugaucaaaauuaauaguugaucau

SEQ ID NO: 361943 - RNA, 18 nt, Artificial Sequence
  Synthetic
uugaguuaguuugaucau

SEQ ID NO: 361944 - RNA, 19 nt, Artificial Sequence
  Synthetic
guugaguuaguuugaucau

SEQ ID NO: 361945 - RNA, 20 nt, Artificial Sequence
  Synthetic
uguugaguuaguuugaucau

SEQ ID NO: 361946 - RNA, 21 nt, Artificial Sequence
  Synthetic
guguugaguuaguuugaucau

SEQ ID NO: 361947 - RNA, 22 nt, Artificial Sequence
  Synthetic
cguguugaguuaguuugaucau

SEQ ID NO: 361948 - RNA, 23 nt, Artificial Sequence
  Synthetic
gcguguugaguuaguuugaucau

SEQ ID NO: 361949 - RNA, 24 nt, Artificial Sequence
  Synthetic
ugcguguugaguuaguuugaucau

SEQ ID NO: 361950 - RNA, 18 nt, Artificial Sequence
  Synthetic
uuucuccuaaaauaucau

SEQ ID NO: 361951 - RNA, 19 nt, Artificial Sequence
  Synthetic
cuuucuccuaaaauaucau

SEQ ID NO: 361952 - RNA, 20 nt, Artificial Sequence
  Synthetic
ucuuucuccuaaaauaucau

SEQ ID NO: 361953 - RNA, 21 nt, Artificial Sequence
  Synthetic
aucuuucuccuaaaauaucau

SEQ ID NO: 361954 - RNA, 22 nt, Artificial Sequence
  Synthetic
aaucuuucuccuaaaauaucau

SEQ ID NO: 361955 - RNA, 23 nt, Artificial Sequence
  Synthetic
uaaucuuucuccuaaaauaucau

SEQ ID NO: 361956 - RNA, 24 nt, Artificial Sequence
  Synthetic
uuaaucuuucuccuaaaauaucau

SEQ ID NO: 361957 - RNA, 18 nt, Artificial Sequence
  Synthetic
aggagcucacuauaucau

SEQ ID NO: 361958 - RNA, 19 nt, Artificial Sequence
  Synthetic
aaggagcucacuauaucau

SEQ ID NO: 361959 - RNA, 20 nt, Artificial Sequence
  Synthetic
aaaggagcucacuauaucau

SEQ ID NO: 361960 - RNA, 21 nt, Artificial Sequence
  Synthetic
uaaaggagcucacuauaucau

SEQ ID NO: 361961 - RNA, 22 nt, Artificial Sequence
  Synthetic
uuaaaggagcucacuauaucau

SEQ ID NO: 361962 - RNA, 23 nt, Artificial Sequence
  Synthetic
uuuaaaggagcucacuauaucau

SEQ ID NO: 361963 - RNA, 24 nt, Artificial Sequence
  Synthetic
guuuaaaggagcucacuauaucau

SEQ ID NO: 361964 - RNA, 18 nt, Artificial Sequence
  Synthetic
gagcaguguguauaucau

SEQ ID NO: 361965 - RNA, 19 nt, Artificial Sequence
  Synthetic
ugagcaguguguauaucau

SEQ ID NO: 361966 - RNA, 20 nt, Artificial Sequence
  Synthetic
gugagcaguguguauaucau

SEQ ID NO: 361967 - RNA, 21 nt, Artificial Sequence
  Synthetic
agugagcaguguguauaucau

SEQ ID NO: 361968 - RNA, 22 nt, Artificial Sequence
  Synthetic
aagugagcaguguguauaucau

SEQ ID NO: 361969 - RNA, 23 nt, Artificial Sequence
  Synthetic
uaagugagcaguguguauaucau

SEQ ID NO: 361970 - RNA, 24 nt, Artificial Sequence
  Synthetic
guaagugagcaguguguauaucau

SEQ ID NO: 361971 - RNA, 18 nt, Artificial Sequence
  Synthetic
auauuauucuuauaucau

SEQ ID NO: 361972 - RNA, 19 nt, Artificial Sequence
  Synthetic
aauauuauucuuauaucau

SEQ ID NO: 361973 - RNA, 20 nt, Artificial Sequence
  Synthetic
uaauauuauucuuauaucau

SEQ ID NO: 361974 - RNA, 21 nt, Artificial Sequence
  Synthetic
cuaauauuauucuuauaucau

SEQ ID NO: 361975 - RNA, 22 nt, Artificial Sequence
  Synthetic
ccuaauauuauucuuauaucau

SEQ ID NO: 361976 - RNA, 23 nt, Artificial Sequence
  Synthetic
accuaauauuauucuuauaucau

SEQ ID NO: 361977 - RNA, 24 nt, Artificial Sequence
  Synthetic
uaccuaauauuauucuuauaucau

SEQ ID NO: 361978 - RNA, 18 nt, Artificial Sequence
  Synthetic
agaguguuccacuaucau

SEQ ID NO: 361979 - RNA, 19 nt, Artificial Sequence
  Synthetic
aagaguguuccacuaucau

SEQ ID NO: 361980 - RNA, 20 nt, Artificial Sequence
  Synthetic
uaagaguguuccacuaucau

SEQ ID NO: 361981 - RNA, 21 nt, Artificial Sequence
  Synthetic
uuaagaguguuccacuaucau

SEQ ID NO: 361982 - RNA, 22 nt, Artificial Sequence
  Synthetic
cuuaagaguguuccacuaucau

SEQ ID NO: 361983 - RNA, 23 nt, Artificial Sequence
  Synthetic
ucuuaagaguguuccacuaucau

SEQ ID NO: 361984 - RNA, 24 nt, Artificial Sequence
  Synthetic
cucuuaagaguguuccacuaucau

SEQ ID NO: 361985 - RNA, 18 nt, Artificial Sequence
  Synthetic
gaauucacucacuaucau

SEQ ID NO: 361986 - RNA, 19 nt, Artificial Sequence
  Synthetic
agaauucacucacuaucau

SEQ ID NO: 361987 - RNA, 20 nt, Artificial Sequence
  Synthetic
gagaauucacucacuaucau

SEQ ID NO: 361988 - RNA, 21 nt, Artificial Sequence
  Synthetic
ggagaauucacucacuaucau

SEQ ID NO: 361989 - RNA, 22 nt, Artificial Sequence
  Synthetic
gggagaauucacucacuaucau

SEQ ID NO: 361990 - RNA, 23 nt, Artificial Sequence
  Synthetic
ugggagaauucacucacuaucau

SEQ ID NO: 361991 - RNA, 24 nt, Artificial Sequence
  Synthetic
uugggagaauucacucacuaucau

SEQ ID NO: 361992 - RNA, 18 nt, Artificial Sequence
  Synthetic
augagagcucacuaucau

SEQ ID NO: 361993 - RNA, 19 nt, Artificial Sequence
  Synthetic
caugagagcucacuaucau

SEQ ID NO: 361994 - RNA, 20 nt, Artificial Sequence
  Synthetic
ucaugagagcucacuaucau

SEQ ID NO: 361995 - RNA, 21 nt, Artificial Sequence
  Synthetic
cucaugagagcucacuaucau

SEQ ID NO: 361996 - RNA, 22 nt, Artificial Sequence
  Synthetic
ucucaugagagcucacuaucau

SEQ ID NO: 361997 - RNA, 23 nt, Artificial Sequence
  Synthetic
cucucaugagagcucacuaucau

SEQ ID NO: 361998 - RNA, 24 nt, Artificial Sequence
  Synthetic
gcucucaugagagcucacuaucau

SEQ ID NO: 361999 - RNA, 18 nt, Artificial Sequence
  Synthetic
acacaaauucacuaucau

SEQ ID NO: 362000 - RNA, 19 nt, Artificial Sequence
  Synthetic
gacacaaauucacuaucau

SEQ ID NO: 362001 - RNA, 20 nt, Artificial Sequence
  Synthetic
ggacacaaauucacuaucau

SEQ ID NO: 362002 - RNA, 21 nt, Artificial Sequence
  Synthetic
aggacacaaauucacuaucau

SEQ ID NO: 362003 - RNA, 22 nt, Artificial Sequence
  Synthetic
uaggacacaaauucacuaucau

SEQ ID NO: 362004 - RNA, 23 nt, Artificial Sequence
  Synthetic
auaggacacaaauucacuaucau

SEQ ID NO: 362005 - RNA, 24 nt, Artificial Sequence
  Synthetic
aauaggacacaaauucacuaucau

SEQ ID NO: 362006 - RNA, 18 nt, Artificial Sequence
  Synthetic
aucagaucccgcuaucau

SEQ ID NO: 362007 - RNA, 19 nt, Artificial Sequence
  Synthetic
caucagaucccgcuaucau

SEQ ID NO: 362008 - RNA, 20 nt, Artificial Sequence
  Synthetic
ccaucagaucccgcuaucau

SEQ ID NO: 362009 - RNA, 21 nt, Artificial Sequence
  Synthetic
accaucagaucccgcuaucau

SEQ ID NO: 362010 - RNA, 22 nt, Artificial Sequence
  Synthetic
aaccaucagaucccgcuaucau

SEQ ID NO: 362011 - RNA, 23 nt, Artificial Sequence
  Synthetic
aaaccaucagaucccgcuaucau

SEQ ID NO: 362012 - RNA, 24 nt, Artificial Sequence
  Synthetic
aaaaccaucagaucccgcuaucau

SEQ ID NO: 362013 - RNA, 18 nt, Artificial Sequence
  Synthetic
uauuuaaaaugcuaucau

SEQ ID NO: 362014 - RNA, 19 nt, Artificial Sequence
  Synthetic
guauuuaaaaugcuaucau

SEQ ID NO: 362015 - RNA, 20 nt, Artificial Sequence
  Synthetic
gguauuuaaaaugcuaucau

SEQ ID NO: 362016 - RNA, 21 nt, Artificial Sequence
  Synthetic
ggguauuuaaaaugcuaucau

SEQ ID NO: 362017 - RNA, 22 nt, Artificial Sequence
  Synthetic
uggguauuuaaaaugcuaucau

SEQ ID NO: 362018 - RNA, 23 nt, Artificial Sequence
  Synthetic
auggguauuuaaaaugcuaucau

SEQ ID NO: 362019 - RNA, 24 nt, Artificial Sequence
  Synthetic
uauggguauuuaaaaugcuaucau

SEQ ID NO: 362020 - RNA, 18 nt, Artificial Sequence
  Synthetic
gaacucagcugcuaucau

SEQ ID NO: 362021 - RNA, 19 nt, Artificial Sequence
  Synthetic
agaacucagcugcuaucau

SEQ ID NO: 362022 - RNA, 20 nt, Artificial Sequence
  Synthetic
aagaacucagcugcuaucau

SEQ ID NO: 362023 - RNA, 21 nt, Artificial Sequence
  Synthetic
caagaacucagcugcuaucau

SEQ ID NO: 362024 - RNA, 22 nt, Artificial Sequence
  Synthetic
ucaagaacucagcugcuaucau

SEQ ID NO: 362025 - RNA, 23 nt, Artificial Sequence
  Synthetic
cucaagaacucagcugcuaucau

SEQ ID NO: 362026 - RNA, 24 nt, Artificial Sequence
  Synthetic
gcucaagaacucagcugcuaucau

SEQ ID NO: 362027 - RNA, 18 nt, Artificial Sequence
  Synthetic
guuuuaagaaucuaucau

SEQ ID NO: 362028 - RNA, 19 nt, Artificial Sequence
  Synthetic
aguuuuaagaaucuaucau

SEQ ID NO: 362029 - RNA, 20 nt, Artificial Sequence
  Synthetic
gaguuuuaagaaucuaucau

SEQ ID NO: 362030 - RNA, 21 nt, Artificial Sequence
  Synthetic
agaguuuuaagaaucuaucau

SEQ ID NO: 362031 - RNA, 22 nt, Artificial Sequence
  Synthetic
aagaguuuuaagaaucuaucau

SEQ ID NO: 362032 - RNA, 23 nt, Artificial Sequence
  Synthetic
uaagaguuuuaagaaucuaucau

SEQ ID NO: 362033 - RNA, 24 nt, Artificial Sequence
  Synthetic
auaagaguuuuaagaaucuaucau

SEQ ID NO: 362034 - RNA, 18 nt, Artificial Sequence
  Synthetic
aaagucuaccucuaucau

SEQ ID NO: 362035 - RNA, 19 nt, Artificial Sequence
  Synthetic
gaaagucuaccucuaucau

SEQ ID NO: 362036 - RNA, 20 nt, Artificial Sequence
  Synthetic
agaaagucuaccucuaucau

SEQ ID NO: 362037 - RNA, 21 nt, Artificial Sequence
  Synthetic
aagaaagucuaccucuaucau

SEQ ID NO: 362038 - RNA, 22 nt, Artificial Sequence
  Synthetic
gaagaaagucuaccucuaucau

SEQ ID NO: 362039 - RNA, 23 nt, Artificial Sequence
  Synthetic
agaagaaagucuaccucuaucau

SEQ ID NO: 362040 - RNA, 24 nt, Artificial Sequence
  Synthetic
uagaagaaagucuaccucuaucau

SEQ ID NO: 362041 - RNA, 18 nt, Artificial Sequence
  Synthetic
augagcauugaguaucau

SEQ ID NO: 362042 - RNA, 19 nt, Artificial Sequence
  Synthetic
uaugagcauugaguaucau

SEQ ID NO: 362043 - RNA, 20 nt, Artificial Sequence
  Synthetic
auaugagcauugaguaucau

SEQ ID NO: 362044 - RNA, 21 nt, Artificial Sequence
  Synthetic
cauaugagcauugaguaucau

SEQ ID NO: 362045 - RNA, 22 nt, Artificial Sequence
  Synthetic
ucauaugagcauugaguaucau

SEQ ID NO: 362046 - RNA, 23 nt, Artificial Sequence
  Synthetic
gucauaugagcauugaguaucau

SEQ ID NO: 362047 - RNA, 24 nt, Artificial Sequence
  Synthetic
agucauaugagcauugaguaucau

SEQ ID NO: 362048 - RNA, 18 nt, Artificial Sequence
  Synthetic
uaggagcauucuuaucau

SEQ ID NO: 362049 - RNA, 19 nt, Artificial Sequence
  Synthetic
auaggagcauucuuaucau

SEQ ID NO: 362050 - RNA, 20 nt, Artificial Sequence
  Synthetic
cauaggagcauucuuaucau

SEQ ID NO: 362051 - RNA, 21 nt, Artificial Sequence
  Synthetic
ccauaggagcauucuuaucau

SEQ ID NO: 362052 - RNA, 22 nt, Artificial Sequence
  Synthetic
accauaggagcauucuuaucau

SEQ ID NO: 362053 - RNA, 23 nt, Artificial Sequence
  Synthetic
aaccauaggagcauucuuaucau

SEQ ID NO: 362054 - RNA, 24 nt, Artificial Sequence
  Synthetic
aaaccauaggagcauucuuaucau

SEQ ID NO: 362055 - RNA, 18 nt, Artificial Sequence
  Synthetic
guacagaagaguuaucau

SEQ ID NO: 362056 - RNA, 19 nt, Artificial Sequence
  Synthetic
cguacagaagaguuaucau

SEQ ID NO: 362057 - RNA, 20 nt, Artificial Sequence
  Synthetic
gcguacagaagaguuaucau

SEQ ID NO: 362058 - RNA, 21 nt, Artificial Sequence
  Synthetic
ugcguacagaagaguuaucau

SEQ ID NO: 362059 - RNA, 22 nt, Artificial Sequence
  Synthetic
augcguacagaagaguuaucau

SEQ ID NO: 362060 - RNA, 23 nt, Artificial Sequence
  Synthetic
caugcguacagaagaguuaucau

SEQ ID NO: 362061 - RNA, 24 nt, Artificial Sequence
  Synthetic
ucaugcguacagaagaguuaucau

SEQ ID NO: 362062 - RNA, 18 nt, Artificial Sequence
  Synthetic
aagugaauuaguuaucau

SEQ ID NO: 362063 - RNA, 19 nt, Artificial Sequence
  Synthetic
caagugaauuaguuaucau

SEQ ID NO: 362064 - RNA, 20 nt, Artificial Sequence
  Synthetic
ucaagugaauuaguuaucau

SEQ ID NO: 362065 - RNA, 21 nt, Artificial Sequence
  Synthetic
uucaagugaauuaguuaucau

SEQ ID NO: 362066 - RNA, 22 nt, Artificial Sequence
  Synthetic
cuucaagugaauuaguuaucau

SEQ ID NO: 362067 - RNA, 23 nt, Artificial Sequence
  Synthetic
ucuucaagugaauuaguuaucau

SEQ ID NO: 362068 - RNA, 24 nt, Artificial Sequence
  Synthetic
uucuucaagugaauuaguuaucau

SEQ ID NO: 362069 - RNA, 18 nt, Artificial Sequence
  Synthetic
ucagugcugaaaacucau

SEQ ID NO: 362070 - RNA, 19 nt, Artificial Sequence
  Synthetic
aucagugcugaaaacucau

SEQ ID NO: 362071 - RNA, 20 nt, Artificial Sequence
  Synthetic
caucagugcugaaaacucau

SEQ ID NO: 362072 - RNA, 21 nt, Artificial Sequence
  Synthetic
ucaucagugcugaaaacucau

SEQ ID NO: 362073 - RNA, 22 nt, Artificial Sequence
  Synthetic
uucaucagugcugaaaacucau

SEQ ID NO: 362074 - RNA, 23 nt, Artificial Sequence
  Synthetic
guucaucagugcugaaaacucau

SEQ ID NO: 362075 - RNA, 24 nt, Artificial Sequence
  Synthetic
uguucaucagugcugaaaacucau

SEQ ID NO: 362076 - RNA, 18 nt, Artificial Sequence
  Synthetic
uuuucuaaguaaacucau

SEQ ID NO: 362077 - RNA, 19 nt, Artificial Sequence
  Synthetic
guuuucuaaguaaacucau

SEQ ID NO: 362078 - RNA, 20 nt, Artificial Sequence
  Synthetic
aguuuucuaaguaaacucau

SEQ ID NO: 362079 - RNA, 21 nt, Artificial Sequence
  Synthetic
gaguuuucuaaguaaacucau

SEQ ID NO: 362080 - RNA, 22 nt, Artificial Sequence
  Synthetic
ggaguuuucuaaguaaacucau

SEQ ID NO: 362081 - RNA, 23 nt, Artificial Sequence
  Synthetic
gggaguuuucuaaguaaacucau

SEQ ID NO: 362082 - RNA, 24 nt, Artificial Sequence
  Synthetic
agggaguuuucuaaguaaacucau

SEQ ID NO: 362083 - RNA, 18 nt, Artificial Sequence
  Synthetic
cuaagcuaaauaacucau

SEQ ID NO: 362084 - RNA, 19 nt, Artificial Sequence
  Synthetic
ccuaagcuaaauaacucau

SEQ ID NO: 362085 - RNA, 20 nt, Artificial Sequence
  Synthetic
uccuaagcuaaauaacucau

SEQ ID NO: 362086 - RNA, 21 nt, Artificial Sequence
  Synthetic
guccuaagcuaaauaacucau

SEQ ID NO: 362087 - RNA, 22 nt, Artificial Sequence
  Synthetic
uguccuaagcuaaauaacucau

SEQ ID NO: 362088 - RNA, 23 nt, Artificial Sequence
  Synthetic
uuguccuaagcuaaauaacucau

SEQ ID NO: 362089 - RNA, 24 nt, Artificial Sequence
  Synthetic
auuguccuaagcuaaauaacucau

SEQ ID NO: 362090 - RNA, 18 nt, Artificial Sequence
  Synthetic
uuaaaccagauaacucau

SEQ ID NO: 362091 - RNA, 19 nt, Artificial Sequence
  Synthetic
auuaaaccagauaacucau

SEQ ID NO: 362092 - RNA, 20 nt, Artificial Sequence
  Synthetic
gauuaaaccagauaacucau

SEQ ID NO: 362093 - RNA, 21 nt, Artificial Sequence
  Synthetic
ugauuaaaccagauaacucau

SEQ ID NO: 362094 - RNA, 22 nt, Artificial Sequence
  Synthetic
augauuaaaccagauaacucau

SEQ ID NO: 362095 - RNA, 23 nt, Artificial Sequence
  Synthetic
gaugauuaaaccagauaacucau

SEQ ID NO: 362096 - RNA, 24 nt, Artificial Sequence
  Synthetic
ggaugauuaaaccagauaacucau

SEQ ID NO: 362097 - RNA, 18 nt, Artificial Sequence
  Synthetic
agcacuucucacacucau

SEQ ID NO: 362098 - RNA, 19 nt, Artificial Sequence
  Synthetic
cagcacuucucacacucau

SEQ ID NO: 362099 - RNA, 20 nt, Artificial Sequence
  Synthetic
ccagcacuucucacacucau

SEQ ID NO: 362100 - RNA, 21 nt, Artificial Sequence
  Synthetic
cccagcacuucucacacucau

SEQ ID NO: 362101 - RNA, 22 nt, Artificial Sequence
  Synthetic
ccccagcacuucucacacucau

SEQ ID NO: 362102 - RNA, 23 nt, Artificial Sequence
  Synthetic
gccccagcacuucucacacucau

SEQ ID NO: 362103 - RNA, 24 nt, Artificial Sequence
  Synthetic
ggccccagcacuucucacacucau

SEQ ID NO: 362104 - RNA, 18 nt, Artificial Sequence
  Synthetic
gucaugaacugcacucau

SEQ ID NO: 362105 - RNA, 19 nt, Artificial Sequence
  Synthetic
ugucaugaacugcacucau

SEQ ID NO: 362106 - RNA, 20 nt, Artificial Sequence
  Synthetic
augucaugaacugcacucau

SEQ ID NO: 362107 - RNA, 21 nt, Artificial Sequence
  Synthetic
gaugucaugaacugcacucau

SEQ ID NO: 362108 - RNA, 22 nt, Artificial Sequence
  Synthetic
agaugucaugaacugcacucau

SEQ ID NO: 362109 - RNA, 23 nt, Artificial Sequence
  Synthetic
gagaugucaugaacugcacucau

SEQ ID NO: 362110 - RNA, 24 nt, Artificial Sequence
  Synthetic
ugagaugucaugaacugcacucau

SEQ ID NO: 362111 - RNA, 18 nt, Artificial Sequence
  Synthetic
ugaauaaaaaucacucau

SEQ ID NO: 362112 - RNA, 19 nt, Artificial Sequence
  Synthetic
uugaauaaaaaucacucau

SEQ ID NO: 362113 - RNA, 20 nt, Artificial Sequence
  Synthetic
auugaauaaaaaucacucau

SEQ ID NO: 362114 - RNA, 21 nt, Artificial Sequence
  Synthetic
cauugaauaaaaaucacucau

SEQ ID NO: 362115 - RNA, 22 nt, Artificial Sequence
  Synthetic
gcauugaauaaaaaucacucau

SEQ ID NO: 362116 - RNA, 23 nt, Artificial Sequence
  Synthetic
cgcauugaauaaaaaucacucau

SEQ ID NO: 362117 - RNA, 24 nt, Artificial Sequence
  Synthetic
gcgcauugaauaaaaaucacucau

SEQ ID NO: 362118 - RNA, 18 nt, Artificial Sequence
  Synthetic
uucagaagguauacucau

SEQ ID NO: 362119 - RNA, 19 nt, Artificial Sequence
  Synthetic
uuucagaagguauacucau

SEQ ID NO: 362120 - RNA, 20 nt, Artificial Sequence
  Synthetic
uuuucagaagguauacucau

SEQ ID NO: 362121 - RNA, 21 nt, Artificial Sequence
  Synthetic
cuuuucagaagguauacucau

SEQ ID NO: 362122 - RNA, 22 nt, Artificial Sequence
  Synthetic
ucuuuucagaagguauacucau

SEQ ID NO: 362123 - RNA, 23 nt, Artificial Sequence
  Synthetic
uucuuuucagaagguauacucau

SEQ ID NO: 362124 - RNA, 24 nt, Artificial Sequence
  Synthetic
uuucuuuucagaagguauacucau

SEQ ID NO: 362125 - RNA, 18 nt, Artificial Sequence
  Synthetic
ggauacuacuguacucau

SEQ ID NO: 362126 - RNA, 19 nt, Artificial Sequence
  Synthetic
gggauacuacuguacucau

SEQ ID NO: 362127 - RNA, 20 nt, Artificial Sequence
  Synthetic
ugggauacuacuguacucau

SEQ ID NO: 362128 - RNA, 21 nt, Artificial Sequence
  Synthetic
uugggauacuacuguacucau

SEQ ID NO: 362129 - RNA, 22 nt, Artificial Sequence
  Synthetic
cuugggauacuacuguacucau

SEQ ID NO: 362130 - RNA, 23 nt, Artificial Sequence
  Synthetic
ucuugggauacuacuguacucau

SEQ ID NO: 362131 - RNA, 24 nt, Artificial Sequence
  Synthetic
cucuugggauacuacuguacucau

SEQ ID NO: 362132 - RNA, 18 nt, Artificial Sequence
  Synthetic
gccuuuucucugccucau

SEQ ID NO: 362133 - RNA, 19 nt, Artificial Sequence
  Synthetic
ugccuuuucucugccucau

SEQ ID NO: 362134 - RNA, 20 nt, Artificial Sequence
  Synthetic
gugccuuuucucugccucau

SEQ ID NO: 362135 - RNA, 21 nt, Artificial Sequence
  Synthetic
agugccuuuucucugccucau

SEQ ID NO: 362136 - RNA, 22 nt, Artificial Sequence
  Synthetic
uagugccuuuucucugccucau

SEQ ID NO: 362137 - RNA, 23 nt, Artificial Sequence
  Synthetic
uuagugccuuuucucugccucau

SEQ ID NO: 362138 - RNA, 24 nt, Artificial Sequence
  Synthetic
cuuagugccuuuucucugccucau

SEQ ID NO: 362139 - RNA, 18 nt, Artificial Sequence
  Synthetic
accaccaggcauccucau

SEQ ID NO: 362140 - RNA, 19 nt, Artificial Sequence
  Synthetic
uaccaccaggcauccucau

SEQ ID NO: 362141 - RNA, 20 nt, Artificial Sequence
  Synthetic
cuaccaccaggcauccucau

SEQ ID NO: 362142 - RNA, 21 nt, Artificial Sequence
  Synthetic
acuaccaccaggcauccucau

SEQ ID NO: 362143 - RNA, 22 nt, Artificial Sequence
  Synthetic
aacuaccaccaggcauccucau

SEQ ID NO: 362144 - RNA, 23 nt, Artificial Sequence
  Synthetic
aaacuaccaccaggcauccucau

SEQ ID NO: 362145 - RNA, 24 nt, Artificial Sequence
  Synthetic
gaaacuaccaccaggcauccucau

SEQ ID NO: 362146 - RNA, 18 nt, Artificial Sequence
  Synthetic
aagaauuguauuccucau

SEQ ID NO: 362147 - RNA, 19 nt, Artificial Sequence
  Synthetic
aaagaauuguauuccucau

SEQ ID NO: 362148 - RNA, 20 nt, Artificial Sequence
  Synthetic
caaagaauuguauuccucau

SEQ ID NO: 362149 - RNA, 21 nt, Artificial Sequence
  Synthetic
ccaaagaauuguauuccucau

SEQ ID NO: 362150 - RNA, 22 nt, Artificial Sequence
  Synthetic
accaaagaauuguauuccucau

SEQ ID NO: 362151 - RNA, 23 nt, Artificial Sequence
  Synthetic
uaccaaagaauuguauuccucau

SEQ ID NO: 362152 - RNA, 24 nt, Artificial Sequence
  Synthetic
auaccaaagaauuguauuccucau

SEQ ID NO: 362153 - RNA, 18 nt, Artificial Sequence
  Synthetic
auuuuccuuauuccucau

SEQ ID NO: 362154 - RNA, 19 nt, Artificial Sequence
  Synthetic
gauuuuccuuauuccucau

SEQ ID NO: 362155 - RNA, 20 nt, Artificial Sequence
  Synthetic
agauuuuccuuauuccucau

SEQ ID NO: 362156 - RNA, 21 nt, Artificial Sequence
  Synthetic
uagauuuuccuuauuccucau

SEQ ID NO: 362157 - RNA, 22 nt, Artificial Sequence
  Synthetic
cuagauuuuccuuauuccucau

SEQ ID NO: 362158 - RNA, 23 nt, Artificial Sequence
  Synthetic
acuagauuuuccuuauuccucau

SEQ ID NO: 362159 - RNA, 24 nt, Artificial Sequence
  Synthetic
aacuagauuuuccuuauuccucau

SEQ ID NO: 362160 - RNA, 18 nt, Artificial Sequence
  Synthetic
aacguuaacuuuccucau

SEQ ID NO: 362161 - RNA, 19 nt, Artificial Sequence
  Synthetic
gaacguuaacuuuccucau

SEQ ID NO: 362162 - RNA, 20 nt, Artificial Sequence
  Synthetic
ugaacguuaacuuuccucau

SEQ ID NO: 362163 - RNA, 21 nt, Artificial Sequence
  Synthetic
gugaacguuaacuuuccucau

SEQ ID NO: 362164 - RNA, 22 nt, Artificial Sequence
  Synthetic
agugaacguuaacuuuccucau

SEQ ID NO: 362165 - RNA, 23 nt, Artificial Sequence
  Synthetic
gagugaacguuaacuuuccucau

SEQ ID NO: 362166 - RNA, 24 nt, Artificial Sequence
  Synthetic
agagugaacguuaacuuuccucau

SEQ ID NO: 362167 - RNA, 18 nt, Artificial Sequence
  Synthetic
ugaguaaaaacagcucau

SEQ ID NO: 362168 - RNA, 19 nt, Artificial Sequence
  Synthetic
cugaguaaaaacagcucau

SEQ ID NO: 362169 - RNA, 20 nt, Artificial Sequence
  Synthetic
gcugaguaaaaacagcucau

SEQ ID NO: 362170 - RNA, 21 nt, Artificial Sequence
  Synthetic
ugcugaguaaaaacagcucau

SEQ ID NO: 362171 - RNA, 22 nt, Artificial Sequence
  Synthetic
augcugaguaaaaacagcucau

SEQ ID NO: 362172 - RNA, 23 nt, Artificial Sequence
  Synthetic
uaugcugaguaaaaacagcucau

SEQ ID NO: 362173 - RNA, 24 nt, Artificial Sequence
  Synthetic
uuaugcugaguaaaaacagcucau

SEQ ID NO: 362174 - RNA, 18 nt, Artificial Sequence
  Synthetic
gguccauuugcagcucau

SEQ ID NO: 362175 - RNA, 19 nt, Artificial Sequence
  Synthetic
ggguccauuugcagcucau

SEQ ID NO: 362176 - RNA, 20 nt, Artificial Sequence
  Synthetic
uggguccauuugcagcucau

SEQ ID NO: 362177 - RNA, 21 nt, Artificial Sequence
  Synthetic
uuggguccauuugcagcucau

SEQ ID NO: 362178 - RNA, 22 nt, Artificial Sequence
  Synthetic
uuuggguccauuugcagcucau

SEQ ID NO: 362179 - RNA, 23 nt, Artificial Sequence
  Synthetic
guuuggguccauuugcagcucau

SEQ ID NO: 362180 - RNA, 24 nt, Artificial Sequence
  Synthetic
uguuuggguccauuugcagcucau

SEQ ID NO: 362181 - RNA, 18 nt, Artificial Sequence
  Synthetic
gcacguaaaggagcucau

SEQ ID NO: 362182 - RNA, 19 nt, Artificial Sequence
  Synthetic
ggcacguaaaggagcucau

SEQ ID NO: 362183 - RNA, 20 nt, Artificial Sequence
  Synthetic
aggcacguaaaggagcucau

SEQ ID NO: 362184 - RNA, 21 nt, Artificial Sequence
  Synthetic
gaggcacguaaaggagcucau

SEQ ID NO: 362185 - RNA, 22 nt, Artificial Sequence
  Synthetic
agaggcacguaaaggagcucau

SEQ ID NO: 362186 - RNA, 23 nt, Artificial Sequence
  Synthetic
aagaggcacguaaaggagcucau

SEQ ID NO: 362187 - RNA, 24 nt, Artificial Sequence
  Synthetic
caagaggcacguaaaggagcucau

SEQ ID NO: 362188 - RNA, 18 nt, Artificial Sequence
  Synthetic
caaaaauauguagcucau

SEQ ID NO: 362189 - RNA, 19 nt, Artificial Sequence
  Synthetic
ccaaaaauauguagcucau

SEQ ID NO: 362190 - RNA, 20 nt, Artificial Sequence
  Synthetic
cccaaaaauauguagcucau

SEQ ID NO: 362191 - RNA, 21 nt, Artificial Sequence
  Synthetic
ccccaaaaauauguagcucau

SEQ ID NO: 362192 - RNA, 22 nt, Artificial Sequence
  Synthetic
cccccaaaaauauguagcucau

SEQ ID NO: 362193 - RNA, 23 nt, Artificial Sequence
  Synthetic
ccccccaaaaauauguagcucau

SEQ ID NO: 362194 - RNA, 24 nt, Artificial Sequence
  Synthetic
cccccccaaaaauauguagcucau

SEQ ID NO: 362195 - RNA, 18 nt, Artificial Sequence
  Synthetic
ggugguagauuagcucau

SEQ ID NO: 362196 - RNA, 19 nt, Artificial Sequence
  Synthetic
aggugguagauuagcucau

SEQ ID NO: 362197 - RNA, 20 nt, Artificial Sequence
  Synthetic
aaggugguagauuagcucau

SEQ ID NO: 362198 - RNA, 21 nt, Artificial Sequence
  Synthetic
gaaggugguagauuagcucau

SEQ ID NO: 362199 - RNA, 22 nt, Artificial Sequence
  Synthetic
agaaggugguagauuagcucau

SEQ ID NO: 362200 - RNA, 23 nt, Artificial Sequence
  Synthetic
gagaaggugguagauuagcucau

SEQ ID NO: 362201 - RNA, 24 nt, Artificial Sequence
  Synthetic
ggagaaggugguagauuagcucau

SEQ ID NO: 362202 - RNA, 18 nt, Artificial Sequence
  Synthetic
cuagcagcaaaggcucau

SEQ ID NO: 362203 - RNA, 19 nt, Artificial Sequence
  Synthetic
ucuagcagcaaaggcucau

SEQ ID NO: 362204 - RNA, 20 nt, Artificial Sequence
  Synthetic
uucuagcagcaaaggcucau

SEQ ID NO: 362205 - RNA, 21 nt, Artificial Sequence
  Synthetic
cuucuagcagcaaaggcucau

SEQ ID NO: 362206 - RNA, 22 nt, Artificial Sequence
  Synthetic
acuucuagcagcaaaggcucau

SEQ ID NO: 362207 - RNA, 23 nt, Artificial Sequence
  Synthetic
gacuucuagcagcaaaggcucau

SEQ ID NO: 362208 - RNA, 24 nt, Artificial Sequence
  Synthetic
ugacuucuagcagcaaaggcucau

SEQ ID NO: 362209 - RNA, 18 nt, Artificial Sequence
  Synthetic
uguauuccauuggcucau

SEQ ID NO: 362210 - RNA, 19 nt, Artificial Sequence
  Synthetic
uuguauuccauuggcucau

SEQ ID NO: 362211 - RNA, 20 nt, Artificial Sequence
  Synthetic
uuuguauuccauuggcucau

SEQ ID NO: 362212 - RNA, 21 nt, Artificial Sequence
  Synthetic
cuuuguauuccauuggcucau

SEQ ID NO: 362213 - RNA, 22 nt, Artificial Sequence
  Synthetic
ccuuuguauuccauuggcucau

SEQ ID NO: 362214 - RNA, 23 nt, Artificial Sequence
  Synthetic
cccuuuguauuccauuggcucau

SEQ ID NO: 362215 - RNA, 24 nt, Artificial Sequence
  Synthetic
ucccuuuguauuccauuggcucau

SEQ ID NO: 362216 - RNA, 18 nt, Artificial Sequence
  Synthetic
gaaauggccugugcucau

SEQ ID NO: 362217 - RNA, 19 nt, Artificial Sequence
  Synthetic
ugaaauggccugugcucau

SEQ ID NO: 362218 - RNA, 20 nt, Artificial Sequence
  Synthetic
uugaaauggccugugcucau

SEQ ID NO: 362219 - RNA, 21 nt, Artificial Sequence
  Synthetic
uuugaaauggccugugcucau

SEQ ID NO: 362220 - RNA, 22 nt, Artificial Sequence
  Synthetic
guuugaaauggccugugcucau

SEQ ID NO: 362221 - RNA, 23 nt, Artificial Sequence
  Synthetic
gguuugaaauggccugugcucau

SEQ ID NO: 362222 - RNA, 24 nt, Artificial Sequence
  Synthetic
agguuugaaauggccugugcucau

SEQ ID NO: 362223 - RNA, 18 nt, Artificial Sequence
  Synthetic
uagagccuuuuugcucau

SEQ ID NO: 362224 - RNA, 19 nt, Artificial Sequence
  Synthetic
uuagagccuuuuugcucau

SEQ ID NO: 362225 - RNA, 20 nt, Artificial Sequence
  Synthetic
guuagagccuuuuugcucau

SEQ ID NO: 362226 - RNA, 21 nt, Artificial Sequence
  Synthetic
uguuagagccuuuuugcucau

SEQ ID NO: 362227 - RNA, 22 nt, Artificial Sequence
  Synthetic
uuguuagagccuuuuugcucau

SEQ ID NO: 362228 - RNA, 23 nt, Artificial Sequence
  Synthetic
cuuguuagagccuuuuugcucau

SEQ ID NO: 362229 - RNA, 24 nt, Artificial Sequence
  Synthetic
acuuguuagagccuuuuugcucau

SEQ ID NO: 362230 - RNA, 18 nt, Artificial Sequence
  Synthetic
aaaaccaucaaaucucau

SEQ ID NO: 362231 - RNA, 19 nt, Artificial Sequence
  Synthetic
uaaaaccaucaaaucucau

SEQ ID NO: 362232 - RNA, 20 nt, Artificial Sequence
  Synthetic
auaaaaccaucaaaucucau

SEQ ID NO: 362233 - RNA, 21 nt, Artificial Sequence
  Synthetic
uauaaaaccaucaaaucucau

SEQ ID NO: 362234 - RNA, 22 nt, Artificial Sequence
  Synthetic
uuauaaaaccaucaaaucucau

SEQ ID NO: 362235 - RNA, 23 nt, Artificial Sequence
  Synthetic
cuuauaaaaccaucaaaucucau

SEQ ID NO: 362236 - RNA, 24 nt, Artificial Sequence
  Synthetic
ccuuauaaaaccaucaaaucucau

SEQ ID NO: 362237 - RNA, 18 nt, Artificial Sequence
  Synthetic
uuacacuuuaaaucucau

SEQ ID NO: 362238 - RNA, 19 nt, Artificial Sequence
  Synthetic
auuacacuuuaaaucucau

SEQ ID NO: 362239 - RNA, 20 nt, Artificial Sequence
  Synthetic
aauuacacuuuaaaucucau

SEQ ID NO: 362240 - RNA, 21 nt, Artificial Sequence
  Synthetic
uaauuacacuuuaaaucucau

SEQ ID NO: 362241 - RNA, 22 nt, Artificial Sequence
  Synthetic
uuaauuacacuuuaaaucucau

SEQ ID NO: 362242 - RNA, 23 nt, Artificial Sequence
  Synthetic
uuuaauuacacuuuaaaucucau

SEQ ID NO: 362243 - RNA, 24 nt, Artificial Sequence
  Synthetic
uuuuaauuacacuuuaaaucucau

SEQ ID NO: 362244 - RNA, 18 nt, Artificial Sequence
  Synthetic
aaaaccauuggaucucau

SEQ ID NO: 362245 - RNA, 19 nt, Artificial Sequence
  Synthetic
uaaaaccauuggaucucau

SEQ ID NO: 362246 - RNA, 20 nt, Artificial Sequence
  Synthetic
auaaaaccauuggaucucau

SEQ ID NO: 362247 - RNA, 21 nt, Artificial Sequence
  Synthetic
uauaaaaccauuggaucucau

SEQ ID NO: 362248 - RNA, 22 nt, Artificial Sequence
  Synthetic
uuauaaaaccauuggaucucau

SEQ ID NO: 362249 - RNA, 23 nt, Artificial Sequence
  Synthetic
cuuauaaaaccauuggaucucau

SEQ ID NO: 362250 - RNA, 24 nt, Artificial Sequence
  Synthetic
ccuuauaaaaccauuggaucucau

SEQ ID NO: 362251 - RNA, 18 nt, Artificial Sequence
  Synthetic
ugccuuaaaguaucucau

SEQ ID NO: 362252 - RNA, 19 nt, Artificial Sequence
  Synthetic
cugccuuaaaguaucucau

SEQ ID NO: 362253 - RNA, 20 nt, Artificial Sequence
  Synthetic
ccugccuuaaaguaucucau

SEQ ID NO: 362254 - RNA, 21 nt, Artificial Sequence
  Synthetic
uccugccuuaaaguaucucau

SEQ ID NO: 362255 - RNA, 22 nt, Artificial Sequence
  Synthetic
auccugccuuaaaguaucucau

SEQ ID NO: 362256 - RNA, 23 nt, Artificial Sequence
  Synthetic
aauccugccuuaaaguaucucau

SEQ ID NO: 362257 - RNA, 24 nt, Artificial Sequence
  Synthetic
aaauccugccuuaaaguaucucau

SEQ ID NO: 362258 - RNA, 18 nt, Artificial Sequence
  Synthetic
gaaaccaucagcucucau

SEQ ID NO: 362259 - RNA, 19 nt, Artificial Sequence
  Synthetic
ugaaaccaucagcucucau

SEQ ID NO: 362260 - RNA, 20 nt, Artificial Sequence
  Synthetic
augaaaccaucagcucucau

SEQ ID NO: 362261 - RNA, 21 nt, Artificial Sequence
  Synthetic
uaugaaaccaucagcucucau

SEQ ID NO: 362262 - RNA, 22 nt, Artificial Sequence
  Synthetic
uuaugaaaccaucagcucucau

SEQ ID NO: 362263 - RNA, 23 nt, Artificial Sequence
  Synthetic
cuuaugaaaccaucagcucucau

SEQ ID NO: 362264 - RNA, 24 nt, Artificial Sequence
  Synthetic
ccuuaugaaaccaucagcucucau

SEQ ID NO: 362265 - RNA, 18 nt, Artificial Sequence
  Synthetic
ccaaguccaaagucucau

SEQ ID NO: 362266 - RNA, 19 nt, Artificial Sequence
  Synthetic
uccaaguccaaagucucau

SEQ ID NO: 362267 - RNA, 20 nt, Artificial Sequence
  Synthetic
guccaaguccaaagucucau

SEQ ID NO: 362268 - RNA, 21 nt, Artificial Sequence
  Synthetic
aguccaaguccaaagucucau

SEQ ID NO: 362269 - RNA, 22 nt, Artificial Sequence
  Synthetic
aaguccaaguccaaagucucau

SEQ ID NO: 362270 - RNA, 23 nt, Artificial Sequence
  Synthetic
aaaguccaaguccaaagucucau

SEQ ID NO: 362271 - RNA, 24 nt, Artificial Sequence
  Synthetic
aaaaguccaaguccaaagucucau

SEQ ID NO: 362272 - RNA, 22 nt, Artificial Sequence
  Synthetic
gaguccaaguccaaagucucau

SEQ ID NO: 362273 - RNA, 23 nt, Artificial Sequence
  Synthetic
ggaguccaaguccaaagucucau

SEQ ID NO: 362274 - RNA, 24 nt, Artificial Sequence
  Synthetic
aggaguccaaguccaaagucucau

SEQ ID NO: 362275 - RNA, 18 nt, Artificial Sequence
  Synthetic
ccagggcuagggucucau

SEQ ID NO: 362276 - RNA, 19 nt, Artificial Sequence
  Synthetic
gccagggcuagggucucau

SEQ ID NO: 362277 - RNA, 20 nt, Artificial Sequence
  Synthetic
ggccagggcuagggucucau

SEQ ID NO: 362278 - RNA, 21 nt, Artificial Sequence
  Synthetic
uggccagggcuagggucucau

SEQ ID NO: 362279 - RNA, 22 nt, Artificial Sequence
  Synthetic
uuggccagggcuagggucucau

SEQ ID NO: 362280 - RNA, 23 nt, Artificial Sequence
  Synthetic
guuggccagggcuagggucucau

SEQ ID NO: 362281 - RNA, 24 nt, Artificial Sequence
  Synthetic
uguuggccagggcuagggucucau

SEQ ID NO: 362282 - RNA, 18 nt, Artificial Sequence
  Synthetic
agacuacacaugucucau

SEQ ID NO: 362283 - RNA, 19 nt, Artificial Sequence
  Synthetic
aagacuacacaugucucau

SEQ ID NO: 362284 - RNA, 20 nt, Artificial Sequence
  Synthetic
uaagacuacacaugucucau

SEQ ID NO: 362285 - RNA, 21 nt, Artificial Sequence
  Synthetic
guaagacuacacaugucucau

SEQ ID NO: 362286 - RNA, 22 nt, Artificial Sequence
  Synthetic
gguaagacuacacaugucucau

SEQ ID NO: 362287 - RNA, 23 nt, Artificial Sequence
  Synthetic
agguaagacuacacaugucucau

SEQ ID NO: 362288 - RNA, 24 nt, Artificial Sequence
  Synthetic
aagguaagacuacacaugucucau

SEQ ID NO: 362289 - RNA, 18 nt, Artificial Sequence
  Synthetic
acugugacccauucucau

SEQ ID NO: 362290 - RNA, 19 nt, Artificial Sequence
  Synthetic
aacugugacccauucucau

SEQ ID NO: 362291 - RNA, 20 nt, Artificial Sequence
  Synthetic
caacugugacccauucucau

SEQ ID NO: 362292 - RNA, 21 nt, Artificial Sequence
  Synthetic
ucaacugugacccauucucau

SEQ ID NO: 362293 - RNA, 22 nt, Artificial Sequence
  Synthetic
uucaacugugacccauucucau

SEQ ID NO: 362294 - RNA, 23 nt, Artificial Sequence
  Synthetic
guucaacugugacccauucucau

SEQ ID NO: 362295 - RNA, 24 nt, Artificial Sequence
  Synthetic
cguucaacugugacccauucucau

SEQ ID NO: 362296 - RNA, 18 nt, Artificial Sequence
  Synthetic
gagcauuuauauucucau

SEQ ID NO: 362297 - RNA, 19 nt, Artificial Sequence
  Synthetic
agagcauuuauauucucau

SEQ ID NO: 362298 - RNA, 20 nt, Artificial Sequence
  Synthetic
cagagcauuuauauucucau

SEQ ID NO: 362299 - RNA, 21 nt, Artificial Sequence
  Synthetic
ucagagcauuuauauucucau

SEQ ID NO: 362300 - RNA, 22 nt, Artificial Sequence
  Synthetic
uucagagcauuuauauucucau

SEQ ID NO: 362301 - RNA, 23 nt, Artificial Sequence
  Synthetic
uuucagagcauuuauauucucau

SEQ ID NO: 362302 - RNA, 24 nt, Artificial Sequence
  Synthetic
cuuucagagcauuuauauucucau

SEQ ID NO: 362303 - RNA, 18 nt, Artificial Sequence
  Synthetic
ccacuaccaacuucucau

SEQ ID NO: 362304 - RNA, 19 nt, Artificial Sequence
  Synthetic
accacuaccaacuucucau

SEQ ID NO: 362305 - RNA, 20 nt, Artificial Sequence
  Synthetic
caccacuaccaacuucucau

SEQ ID NO: 362306 - RNA, 21 nt, Artificial Sequence
  Synthetic
gcaccacuaccaacuucucau

SEQ ID NO: 362307 - RNA, 22 nt, Artificial Sequence
  Synthetic
ggcaccacuaccaacuucucau

SEQ ID NO: 362308 - RNA, 23 nt, Artificial Sequence
  Synthetic
uggcaccacuaccaacuucucau

SEQ ID NO: 362309 - RNA, 24 nt, Artificial Sequence
  Synthetic
auggcaccacuaccaacuucucau

SEQ ID NO: 362310 - RNA, 18 nt, Artificial Sequence
  Synthetic
gagagagggacuucucau

SEQ ID NO: 362311 - RNA, 19 nt, Artificial Sequence
  Synthetic
ggagagagggacuucucau

SEQ ID NO: 362312 - RNA, 20 nt, Artificial Sequence
  Synthetic
uggagagagggacuucucau

SEQ ID NO: 362313 - RNA, 21 nt, Artificial Sequence
  Synthetic
uuggagagagggacuucucau

SEQ ID NO: 362314 - RNA, 22 nt, Artificial Sequence
  Synthetic
cuuggagagagggacuucucau

SEQ ID NO: 362315 - RNA, 23 nt, Artificial Sequence
  Synthetic
acuuggagagagggacuucucau

SEQ ID NO: 362316 - RNA, 24 nt, Artificial Sequence
  Synthetic
aacuuggagagagggacuucucau

SEQ ID NO: 362317 - RNA, 18 nt, Artificial Sequence
  Synthetic
uagaacaugucuucucau

SEQ ID NO: 362318 - RNA, 19 nt, Artificial Sequence
  Synthetic
auagaacaugucuucucau

SEQ ID NO: 362319 - RNA, 20 nt, Artificial Sequence
  Synthetic
uauagaacaugucuucucau

SEQ ID NO: 362320 - RNA, 21 nt, Artificial Sequence
  Synthetic
cuauagaacaugucuucucau

SEQ ID NO: 362321 - RNA, 22 nt, Artificial Sequence
  Synthetic
ccuauagaacaugucuucucau

SEQ ID NO: 362322 - RNA, 23 nt, Artificial Sequence
  Synthetic
uccuauagaacaugucuucucau

SEQ ID NO: 362323 - RNA, 24 nt, Artificial Sequence
  Synthetic
cuccuauagaacaugucuucucau

SEQ ID NO: 362324 - RNA, 18 nt, Artificial Sequence
  Synthetic
uccgaaaaaaguucucau

SEQ ID NO: 362325 - RNA, 19 nt, Artificial Sequence
  Synthetic
uuccgaaaaaaguucucau

SEQ ID NO: 362326 - RNA, 20 nt, Artificial Sequence
  Synthetic
uuuccgaaaaaaguucucau

SEQ ID NO: 362327 - RNA, 21 nt, Artificial Sequence
  Synthetic
cuuuccgaaaaaaguucucau

SEQ ID NO: 362328 - RNA, 22 nt, Artificial Sequence
  Synthetic
acuuuccgaaaaaaguucucau

SEQ ID NO: 362329 - RNA, 23 nt, Artificial Sequence
  Synthetic
uacuuuccgaaaaaaguucucau

SEQ ID NO: 362330 - RNA, 24 nt, Artificial Sequence
  Synthetic
guacuuuccgaaaaaaguucucau

SEQ ID NO: 362331 - RNA, 18 nt, Artificial Sequence
  Synthetic
ugacccagaaaaagucau

SEQ ID NO: 362332 - RNA, 19 nt, Artificial Sequence
  Synthetic
cugacccagaaaaagucau

SEQ ID NO: 362333 - RNA, 20 nt, Artificial Sequence
  Synthetic
gcugacccagaaaaagucau

SEQ ID NO: 362334 - RNA, 21 nt, Artificial Sequence
  Synthetic
agcugacccagaaaaagucau

SEQ ID NO: 362335 - RNA, 22 nt, Artificial Sequence
  Synthetic
aagcugacccagaaaaagucau

SEQ ID NO: 362336 - RNA, 23 nt, Artificial Sequence
  Synthetic
aaagcugacccagaaaaagucau

SEQ ID NO: 362337 - RNA, 24 nt, Artificial Sequence
  Synthetic
caaagcugacccagaaaaagucau

SEQ ID NO: 362338 - RNA, 18 nt, Artificial Sequence
  Synthetic
uaacuguuaaaaagucau

SEQ ID NO: 362339 - RNA, 19 nt, Artificial Sequence
  Synthetic
uuaacuguuaaaaagucau

SEQ ID NO: 362340 - RNA, 20 nt, Artificial Sequence
  Synthetic
guuaacuguuaaaaagucau

SEQ ID NO: 362341 - RNA, 21 nt, Artificial Sequence
  Synthetic
aguuaacuguuaaaaagucau

SEQ ID NO: 362342 - RNA, 22 nt, Artificial Sequence
  Synthetic
aaguuaacuguuaaaaagucau

SEQ ID NO: 362343 - RNA, 23 nt, Artificial Sequence
  Synthetic
gaaguuaacuguuaaaaagucau

SEQ ID NO: 362344 - RNA, 24 nt, Artificial Sequence
  Synthetic
ugaaguuaacuguuaaaaagucau

SEQ ID NO: 362345 - RNA, 18 nt, Artificial Sequence
  Synthetic
gcacaagucugaagucau

SEQ ID NO: 362346 - RNA, 19 nt, Artificial Sequence
  Synthetic
ugcacaagucugaagucau

SEQ ID NO: 362347 - RNA, 20 nt, Artificial Sequence
  Synthetic
gugcacaagucugaagucau

SEQ ID NO: 362348 - RNA, 21 nt, Artificial Sequence
  Synthetic
ugugcacaagucugaagucau

SEQ ID NO: 362349 - RNA, 22 nt, Artificial Sequence
  Synthetic
cugugcacaagucugaagucau

SEQ ID NO: 362350 - RNA, 23 nt, Artificial Sequence
  Synthetic
acugugcacaagucugaagucau

SEQ ID NO: 362351 - RNA, 24 nt, Artificial Sequence
  Synthetic
uacugugcacaagucugaagucau

SEQ ID NO: 362352 - RNA, 18 nt, Artificial Sequence
  Synthetic
auuuuuaggauaagucau

SEQ ID NO: 362353 - RNA, 19 nt, Artificial Sequence
  Synthetic
gauuuuuaggauaagucau

SEQ ID NO: 362354 - RNA, 20 nt, Artificial Sequence
  Synthetic
agauuuuuaggauaagucau

SEQ ID NO: 362355 - RNA, 21 nt, Artificial Sequence
  Synthetic
uagauuuuuaggauaagucau

SEQ ID NO: 362356 - RNA, 22 nt, Artificial Sequence
  Synthetic
guagauuuuuaggauaagucau

SEQ ID NO: 362357 - RNA, 23 nt, Artificial Sequence
  Synthetic
uguagauuuuuaggauaagucau

SEQ ID NO: 362358 - RNA, 24 nt, Artificial Sequence
  Synthetic
uuguagauuuuuaggauaagucau

SEQ ID NO: 362359 - RNA, 18 nt, Artificial Sequence
  Synthetic
uagucuagaaccagucau

SEQ ID NO: 362360 - RNA, 19 nt, Artificial Sequence
  Synthetic
uuagucuagaaccagucau

SEQ ID NO: 362361 - RNA, 20 nt, Artificial Sequence
  Synthetic
cuuagucuagaaccagucau

SEQ ID NO: 362362 - RNA, 21 nt, Artificial Sequence
  Synthetic
ucuuagucuagaaccagucau

SEQ ID NO: 362363 - RNA, 22 nt, Artificial Sequence
  Synthetic
cucuuagucuagaaccagucau

SEQ ID NO: 362364 - RNA, 23 nt, Artificial Sequence
  Synthetic
gcucuuagucuagaaccagucau

SEQ ID NO: 362365 - RNA, 24 nt, Artificial Sequence
  Synthetic
ugcucuuagucuagaaccagucau

SEQ ID NO: 362366 - RNA, 18 nt, Artificial Sequence
  Synthetic
ugaggccuccccagucau

SEQ ID NO: 362367 - RNA, 19 nt, Artificial Sequence
  Synthetic
cugaggccuccccagucau

SEQ ID NO: 362368 - RNA, 20 nt, Artificial Sequence
  Synthetic
ucugaggccuccccagucau

SEQ ID NO: 362369 - RNA, 21 nt, Artificial Sequence
  Synthetic
uucugaggccuccccagucau

SEQ ID NO: 362370 - RNA, 22 nt, Artificial Sequence
  Synthetic
auucugaggccuccccagucau

SEQ ID NO: 362371 - RNA, 23 nt, Artificial Sequence
  Synthetic
gauucugaggccuccccagucau

SEQ ID NO: 362372 - RNA, 24 nt, Artificial Sequence
  Synthetic
ugauucugaggccuccccagucau

SEQ ID NO: 362373 - RNA, 18 nt, Artificial Sequence
  Synthetic
aagcuugcuagcagucau

SEQ ID NO: 362374 - RNA, 19 nt, Artificial Sequence
  Synthetic
aaagcuugcuagcagucau

SEQ ID NO: 362375 - RNA, 20 nt, Artificial Sequence
  Synthetic
uaaagcuugcuagcagucau

SEQ ID NO: 362376 - RNA, 21 nt, Artificial Sequence
  Synthetic
cuaaagcuugcuagcagucau

SEQ ID NO: 362377 - RNA, 22 nt, Artificial Sequence
  Synthetic
gcuaaagcuugcuagcagucau

SEQ ID NO: 362378 - RNA, 23 nt, Artificial Sequence
  Synthetic
ugcuaaagcuugcuagcagucau

SEQ ID NO: 362379 - RNA, 24 nt, Artificial Sequence
  Synthetic
uugcuaaagcuugcuagcagucau

SEQ ID NO: 362380 - RNA, 18 nt, Artificial Sequence
  Synthetic
uuccuccaaggcagucau

SEQ ID NO: 362381 - RNA, 19 nt, Artificial Sequence
  Synthetic
auuccuccaaggcagucau

SEQ ID NO: 362382 - RNA, 20 nt, Artificial Sequence
  Synthetic
uauuccuccaaggcagucau

SEQ ID NO: 362383 - RNA, 21 nt, Artificial Sequence
  Synthetic
uuauuccuccaaggcagucau

SEQ ID NO: 362384 - RNA, 22 nt, Artificial Sequence
  Synthetic
auuauuccuccaaggcagucau

SEQ ID NO: 362385 - RNA, 23 nt, Artificial Sequence
  Synthetic
aauuauuccuccaaggcagucau

SEQ ID NO: 362386 - RNA, 24 nt, Artificial Sequence
  Synthetic
caauuauuccuccaaggcagucau

SEQ ID NO: 362387 - RNA, 18 nt, Artificial Sequence
  Synthetic
uagccucuggucagucau

SEQ ID NO: 362388 - RNA, 19 nt, Artificial Sequence
  Synthetic
auagccucuggucagucau

SEQ ID NO: 362389 - RNA, 20 nt, Artificial Sequence
  Synthetic
aauagccucuggucagucau

SEQ ID NO: 362390 - RNA, 21 nt, Artificial Sequence
  Synthetic
gaauagccucuggucagucau

SEQ ID NO: 362391 - RNA, 22 nt, Artificial Sequence
  Synthetic
ugaauagccucuggucagucau

SEQ ID NO: 362392 - RNA, 23 nt, Artificial Sequence
  Synthetic
uugaauagccucuggucagucau

SEQ ID NO: 362393 - RNA, 24 nt, Artificial Sequence
  Synthetic
cuugaauagccucuggucagucau

SEQ ID NO: 362394 - RNA, 18 nt, Artificial Sequence
  Synthetic
ucccguggauucagucau

SEQ ID NO: 362395 - RNA, 19 nt, Artificial Sequence
  Synthetic
aucccguggauucagucau

SEQ ID NO: 362396 - RNA, 20 nt, Artificial Sequence
  Synthetic
aaucccguggauucagucau

SEQ ID NO: 362397 - RNA, 21 nt, Artificial Sequence
  Synthetic
gaaucccguggauucagucau

SEQ ID NO: 362398 - RNA, 22 nt, Artificial Sequence
  Synthetic
ggaaucccguggauucagucau

SEQ ID NO: 362399 - RNA, 23 nt, Artificial Sequence
  Synthetic
aggaaucccguggauucagucau

SEQ ID NO: 362400 - RNA, 24 nt, Artificial Sequence
  Synthetic
aaggaaucccguggauucagucau

SEQ ID NO: 362401 - RNA, 18 nt, Artificial Sequence
  Synthetic
uaacuagguuucagucau

SEQ ID NO: 362402 - RNA, 19 nt, Artificial Sequence
  Synthetic
cuaacuagguuucagucau

SEQ ID NO: 362403 - RNA, 20 nt, Artificial Sequence
  Synthetic
acuaacuagguuucagucau

SEQ ID NO: 362404 - RNA, 21 nt, Artificial Sequence
  Synthetic
uacuaacuagguuucagucau

SEQ ID NO: 362405 - RNA, 22 nt, Artificial Sequence
  Synthetic
auacuaacuagguuucagucau

SEQ ID NO: 362406 - RNA, 23 nt, Artificial Sequence
  Synthetic
aauacuaacuagguuucagucau

SEQ ID NO: 362407 - RNA, 24 nt, Artificial Sequence
  Synthetic
aaauacuaacuagguuucagucau

SEQ ID NO: 362408 - RNA, 18 nt, Artificial Sequence
  Synthetic
uaaacgugccagagucau

SEQ ID NO: 362409 - RNA, 19 nt, Artificial Sequence
  Synthetic
uuaaacgugccagagucau

SEQ ID NO: 362410 - RNA, 20 nt, Artificial Sequence
  Synthetic
uuuaaacgugccagagucau

SEQ ID NO: 362411 - RNA, 21 nt, Artificial Sequence
  Synthetic
guuuaaacgugccagagucau

SEQ ID NO: 362412 - RNA, 22 nt, Artificial Sequence
  Synthetic
uguuuaaacgugccagagucau

SEQ ID NO: 362413 - RNA, 23 nt, Artificial Sequence
  Synthetic
auguuuaaacgugccagagucau

SEQ ID NO: 362414 - RNA, 24 nt, Artificial Sequence
  Synthetic
uauguuuaaacgugccagagucau

SEQ ID NO: 362415 - RNA, 18 nt, Artificial Sequence
  Synthetic
agucuucugcauagucau

SEQ ID NO: 362416 - RNA, 19 nt, Artificial Sequence
  Synthetic
uagucuucugcauagucau

SEQ ID NO: 362417 - RNA, 20 nt, Artificial Sequence
  Synthetic
auagucuucugcauagucau

SEQ ID NO: 362418 - RNA, 21 nt, Artificial Sequence
  Synthetic
cauagucuucugcauagucau

SEQ ID NO: 362419 - RNA, 22 nt, Artificial Sequence
  Synthetic
acauagucuucugcauagucau

SEQ ID NO: 362420 - RNA, 23 nt, Artificial Sequence
  Synthetic
cacauagucuucugcauagucau

SEQ ID NO: 362421 - RNA, 24 nt, Artificial Sequence
  Synthetic
ucacauagucuucugcauagucau

SEQ ID NO: 362422 - RNA, 18 nt, Artificial Sequence
  Synthetic
cucagcaucacuagucau

SEQ ID NO: 362423 - RNA, 19 nt, Artificial Sequence
  Synthetic
gcucagcaucacuagucau

SEQ ID NO: 362424 - RNA, 20 nt, Artificial Sequence
  Synthetic
ugcucagcaucacuagucau

SEQ ID NO: 362425 - RNA, 21 nt, Artificial Sequence
  Synthetic
gugcucagcaucacuagucau

SEQ ID NO: 362426 - RNA, 22 nt, Artificial Sequence
  Synthetic
ggugcucagcaucacuagucau

SEQ ID NO: 362427 - RNA, 23 nt, Artificial Sequence
  Synthetic
aggugcucagcaucacuagucau

SEQ ID NO: 362428 - RNA, 24 nt, Artificial Sequence
  Synthetic
aaggugcucagcaucacuagucau

SEQ ID NO: 362429 - RNA, 18 nt, Artificial Sequence
  Synthetic
auacucuuuccuagucau

SEQ ID NO: 362430 - RNA, 19 nt, Artificial Sequence
  Synthetic
uauacucuuuccuagucau

SEQ ID NO: 362431 - RNA, 20 nt, Artificial Sequence
  Synthetic
uuauacucuuuccuagucau

SEQ ID NO: 362432 - RNA, 21 nt, Artificial Sequence
  Synthetic
auuauacucuuuccuagucau

SEQ ID NO: 362433 - RNA, 22 nt, Artificial Sequence
  Synthetic
cauuauacucuuuccuagucau

SEQ ID NO: 362434 - RNA, 23 nt, Artificial Sequence
  Synthetic
acauuauacucuuuccuagucau

SEQ ID NO: 362435 - RNA, 24 nt, Artificial Sequence
  Synthetic
uacauuauacucuuuccuagucau

SEQ ID NO: 362436 - RNA, 18 nt, Artificial Sequence
  Synthetic
uucuucagagcccgucau

SEQ ID NO: 362437 - RNA, 19 nt, Artificial Sequence
  Synthetic
uuucuucagagcccgucau

SEQ ID NO: 362438 - RNA, 20 nt, Artificial Sequence
  Synthetic
uuuucuucagagcccgucau

SEQ ID NO: 362439 - RNA, 21 nt, Artificial Sequence
  Synthetic
guuuucuucagagcccgucau

SEQ ID NO: 362440 - RNA, 22 nt, Artificial Sequence
  Synthetic
aguuuucuucagagcccgucau

SEQ ID NO: 362441 - RNA, 23 nt, Artificial Sequence
  Synthetic
aaguuuucuucagagcccgucau

SEQ ID NO: 362442 - RNA, 24 nt, Artificial Sequence
  Synthetic
gaaguuuucuucagagcccgucau

SEQ ID NO: 362443 - RNA, 18 nt, Artificial Sequence
  Synthetic
cuuucugucuuccgucau

SEQ ID NO: 362444 - RNA, 19 nt, Artificial Sequence
  Synthetic
acuuucugucuuccgucau

SEQ ID NO: 362445 - RNA, 20 nt, Artificial Sequence
  Synthetic
aacuuucugucuuccgucau

SEQ ID NO: 362446 - RNA, 21 nt, Artificial Sequence
  Synthetic
uaacuuucugucuuccgucau

SEQ ID NO: 362447 - RNA, 22 nt, Artificial Sequence
  Synthetic
uuaacuuucugucuuccgucau

SEQ ID NO: 362448 - RNA, 23 nt, Artificial Sequence
  Synthetic
cuuaacuuucugucuuccgucau

SEQ ID NO: 362449 - RNA, 24 nt, Artificial Sequence
  Synthetic
ucuuaacuuucugucuuccgucau

SEQ ID NO: 362450 - RNA, 18 nt, Artificial Sequence
  Synthetic
aaauauuacacaggucau

SEQ ID NO: 362451 - RNA, 19 nt, Artificial Sequence
  Synthetic
gaaauauuacacaggucau

SEQ ID NO: 362452 - RNA, 20 nt, Artificial Sequence
  Synthetic
ugaaauauuacacaggucau

SEQ ID NO: 362453 - RNA, 21 nt, Artificial Sequence
  Synthetic
augaaauauuacacaggucau

SEQ ID NO: 362454 - RNA, 22 nt, Artificial Sequence
  Synthetic
caugaaauauuacacaggucau

SEQ ID NO: 362455 - RNA, 23 nt, Artificial Sequence
  Synthetic
ccaugaaauauuacacaggucau

SEQ ID NO: 362456 - RNA, 24 nt, Artificial Sequence
  Synthetic
gccaugaaauauuacacaggucau

SEQ ID NO: 362457 - RNA, 18 nt, Artificial Sequence
  Synthetic
aaaaggaccagaggucau

SEQ ID NO: 362458 - RNA, 19 nt, Artificial Sequence
  Synthetic
gaaaaggaccagaggucau

SEQ ID NO: 362459 - RNA, 20 nt, Artificial Sequence
  Synthetic
agaaaaggaccagaggucau

SEQ ID NO: 362460 - RNA, 21 nt, Artificial Sequence
  Synthetic
cagaaaaggaccagaggucau

SEQ ID NO: 362461 - RNA, 22 nt, Artificial Sequence
  Synthetic
acagaaaaggaccagaggucau

SEQ ID NO: 362462 - RNA, 23 nt, Artificial Sequence
  Synthetic
aacagaaaaggaccagaggucau

SEQ ID NO: 362463 - RNA, 24 nt, Artificial Sequence
  Synthetic
aaacagaaaaggaccagaggucau

SEQ ID NO: 362464 - RNA, 18 nt, Artificial Sequence
  Synthetic
ggugucucccuaggucau

SEQ ID NO: 362465 - RNA, 19 nt, Artificial Sequence
  Synthetic
uggugucucccuaggucau

SEQ ID NO: 362466 - RNA, 20 nt, Artificial Sequence
  Synthetic
cuggugucucccuaggucau

SEQ ID NO: 362467 - RNA, 21 nt, Artificial Sequence
  Synthetic
gcuggugucucccuaggucau

SEQ ID NO: 362468 - RNA, 22 nt, Artificial Sequence
  Synthetic
agcuggugucucccuaggucau

SEQ ID NO: 362469 - RNA, 23 nt, Artificial Sequence
  Synthetic
cagcuggugucucccuaggucau

SEQ ID NO: 362470 - RNA, 24 nt, Artificial Sequence
  Synthetic
ccagcuggugucucccuaggucau

SEQ ID NO: 362471 - RNA, 18 nt, Artificial Sequence
  Synthetic
ggggggugauuaggucau

SEQ ID NO: 362472 - RNA, 19 nt, Artificial Sequence
  Synthetic
gggggggugauuaggucau

SEQ ID NO: 362473 - RNA, 20 nt, Artificial Sequence
  Synthetic
ugggggggugauuaggucau

SEQ ID NO: 362474 - RNA, 21 nt, Artificial Sequence
  Synthetic
uugggggggugauuaggucau

SEQ ID NO: 362475 - RNA, 22 nt, Artificial Sequence
  Synthetic
uuugggggggugauuaggucau

SEQ ID NO: 362476 - RNA, 23 nt, Artificial Sequence
  Synthetic
guuugggggggugauuaggucau

SEQ ID NO: 362477 - RNA, 24 nt, Artificial Sequence
  Synthetic
gguuugggggggugauuaggucau

SEQ ID NO: 362478 - RNA, 18 nt, Artificial Sequence
  Synthetic
acaacccccaagggucau

SEQ ID NO: 362479 - RNA, 19 nt, Artificial Sequence
  Synthetic
uacaacccccaagggucau

SEQ ID NO: 362480 - RNA, 20 nt, Artificial Sequence
  Synthetic
cuacaacccccaagggucau

SEQ ID NO: 362481 - RNA, 21 nt, Artificial Sequence
  Synthetic
acuacaacccccaagggucau

SEQ ID NO: 362482 - RNA, 22 nt, Artificial Sequence
  Synthetic
cacuacaacccccaagggucau

SEQ ID NO: 362483 - RNA, 23 nt, Artificial Sequence
  Synthetic
ccacuacaacccccaagggucau

SEQ ID NO: 362484 - RNA, 24 nt, Artificial Sequence
  Synthetic
accacuacaacccccaagggucau

SEQ ID NO: 362485 - RNA, 18 nt, Artificial Sequence
  Synthetic
cccuucucacugggucau

SEQ ID NO: 362486 - RNA, 19 nt, Artificial Sequence
  Synthetic
ucccuucucacugggucau

SEQ ID NO: 362487 - RNA, 20 nt, Artificial Sequence
  Synthetic
uucccuucucacugggucau

SEQ ID NO: 362488 - RNA, 21 nt, Artificial Sequence
  Synthetic
auucccuucucacugggucau

SEQ ID NO: 362489 - RNA, 22 nt, Artificial Sequence
  Synthetic
uauucccuucucacugggucau

SEQ ID NO: 362490 - RNA, 23 nt, Artificial Sequence
  Synthetic
guauucccuucucacugggucau

SEQ ID NO: 362491 - RNA, 24 nt, Artificial Sequence
  Synthetic
gguauucccuucucacugggucau

SEQ ID NO: 362492 - RNA, 18 nt, Artificial Sequence
  Synthetic
cucaucaucacuggucau

SEQ ID NO: 362493 - RNA, 19 nt, Artificial Sequence
  Synthetic
gcucaucaucacuggucau

SEQ ID NO: 362494 - RNA, 20 nt, Artificial Sequence
  Synthetic
agcucaucaucacuggucau

SEQ ID NO: 362495 - RNA, 21 nt, Artificial Sequence
  Synthetic
aagcucaucaucacuggucau

SEQ ID NO: 362496 - RNA, 22 nt, Artificial Sequence
  Synthetic
aaagcucaucaucacuggucau

SEQ ID NO: 362497 - RNA, 23 nt, Artificial Sequence
  Synthetic
aaaagcucaucaucacuggucau

SEQ ID NO: 362498 - RNA, 24 nt, Artificial Sequence
  Synthetic
aaaaagcucaucaucacuggucau

SEQ ID NO: 362499 - RNA, 18 nt, Artificial Sequence
  Synthetic
uaacagucauuuggucau

SEQ ID NO: 362500 - RNA, 19 nt, Artificial Sequence
  Synthetic
auaacagucauuuggucau

SEQ ID NO: 362501 - RNA, 20 nt, Artificial Sequence
  Synthetic
aauaacagucauuuggucau

SEQ ID NO: 362502 - RNA, 21 nt, Artificial Sequence
  Synthetic
aaauaacagucauuuggucau

SEQ ID NO: 362503 - RNA, 22 nt, Artificial Sequence
  Synthetic
caaauaacagucauuuggucau

SEQ ID NO: 362504 - RNA, 23 nt, Artificial Sequence
  Synthetic
ucaaauaacagucauuuggucau

SEQ ID NO: 362505 - RNA, 24 nt, Artificial Sequence
  Synthetic
aucaaauaacagucauuuggucau

SEQ ID NO: 362506 - RNA, 18 nt, Artificial Sequence
  Synthetic
gcagaggaguuuggucau

SEQ ID NO: 362507 - RNA, 19 nt, Artificial Sequence
  Synthetic
agcagaggaguuuggucau

SEQ ID NO: 362508 - RNA, 20 nt, Artificial Sequence
  Synthetic
gagcagaggaguuuggucau

SEQ ID NO: 362509 - RNA, 21 nt, Artificial Sequence
  Synthetic
agagcagaggaguuuggucau

SEQ ID NO: 362510 - RNA, 22 nt, Artificial Sequence
  Synthetic
cagagcagaggaguuuggucau

SEQ ID NO: 362511 - RNA, 23 nt, Artificial Sequence
  Synthetic
gcagagcagaggaguuuggucau

SEQ ID NO: 362512 - RNA, 24 nt, Artificial Sequence
  Synthetic
ugcagagcagaggaguuuggucau

SEQ ID NO: 362513 - RNA, 18 nt, Artificial Sequence
  Synthetic
uaaaccuagaaaugucau

SEQ ID NO: 362514 - RNA, 19 nt, Artificial Sequence
  Synthetic
cuaaaccuagaaaugucau

SEQ ID NO: 362515 - RNA, 20 nt, Artificial Sequence
  Synthetic
gcuaaaccuagaaaugucau

SEQ ID NO: 362516 - RNA, 21 nt, Artificial Sequence
  Synthetic
agcuaaaccuagaaaugucau

SEQ ID NO: 362517 - RNA, 22 nt, Artificial Sequence
  Synthetic
uagcuaaaccuagaaaugucau

SEQ ID NO: 362518 - RNA, 23 nt, Artificial Sequence
  Synthetic
uuagcuaaaccuagaaaugucau

SEQ ID NO: 362519 - RNA, 24 nt, Artificial Sequence
  Synthetic
cuuagcuaaaccuagaaaugucau

SEQ ID NO: 362520 - RNA, 18 nt, Artificial Sequence
  Synthetic
uuauaauugaaaugucau

SEQ ID NO: 362521 - RNA, 19 nt, Artificial Sequence
  Synthetic
cuuauaauugaaaugucau

SEQ ID NO: 362522 - RNA, 20 nt, Artificial Sequence
  Synthetic
gcuuauaauugaaaugucau

SEQ ID NO: 362523 - RNA, 21 nt, Artificial Sequence
  Synthetic
ggcuuauaauugaaaugucau

SEQ ID NO: 362524 - RNA, 22 nt, Artificial Sequence
  Synthetic
cggcuuauaauugaaaugucau

SEQ ID NO: 362525 - RNA, 23 nt, Artificial Sequence
  Synthetic
ucggcuuauaauugaaaugucau

SEQ ID NO: 362526 - RNA, 24 nt, Artificial Sequence
  Synthetic
uucggcuuauaauugaaaugucau

SEQ ID NO: 362527 - RNA, 18 nt, Artificial Sequence
  Synthetic
aaaugauaagaaugucau

SEQ ID NO: 362528 - RNA, 19 nt, Artificial Sequence
  Synthetic
caaaugauaagaaugucau

SEQ ID NO: 362529 - RNA, 20 nt, Artificial Sequence
  Synthetic
ucaaaugauaagaaugucau

SEQ ID NO: 362530 - RNA, 21 nt, Artificial Sequence
  Synthetic
uucaaaugauaagaaugucau

SEQ ID NO: 362531 - RNA, 22 nt, Artificial Sequence
  Synthetic
cuucaaaugauaagaaugucau

SEQ ID NO: 362532 - RNA, 23 nt, Artificial Sequence
  Synthetic
acuucaaaugauaagaaugucau

SEQ ID NO: 362533 - RNA, 24 nt, Artificial Sequence
  Synthetic
gacuucaaaugauaagaaugucau

SEQ ID NO: 362534 - RNA, 18 nt, Artificial Sequence
  Synthetic
acuuauauaacaugucau

SEQ ID NO: 362535 - RNA, 19 nt, Artificial Sequence
  Synthetic
gacuuauauaacaugucau

SEQ ID NO: 362536 - RNA, 20 nt, Artificial Sequence
  Synthetic
agacuuauauaacaugucau

SEQ ID NO: 362537 - RNA, 21 nt, Artificial Sequence
  Synthetic
aagacuuauauaacaugucau

SEQ ID NO: 362538 - RNA, 22 nt, Artificial Sequence
  Synthetic
uaagacuuauauaacaugucau

SEQ ID NO: 362539 - RNA, 23 nt, Artificial Sequence
  Synthetic
auaagacuuauauaacaugucau

SEQ ID NO: 362540 - RNA, 24 nt, Artificial Sequence
  Synthetic
cauaagacuuauauaacaugucau

SEQ ID NO: 362541 - RNA, 18 nt, Artificial Sequence
  Synthetic
uaaaaccggagaugucau

SEQ ID NO: 362542 - RNA, 19 nt, Artificial Sequence
  Synthetic
auaaaaccggagaugucau

SEQ ID NO: 362543 - RNA, 20 nt, Artificial Sequence
  Synthetic
aauaaaaccggagaugucau

SEQ ID NO: 362544 - RNA, 21 nt, Artificial Sequence
  Synthetic
aaauaaaaccggagaugucau

SEQ ID NO: 362545 - RNA, 22 nt, Artificial Sequence
  Synthetic
gaaauaaaaccggagaugucau

SEQ ID NO: 362546 - RNA, 23 nt, Artificial Sequence
  Synthetic
agaaauaaaaccggagaugucau

SEQ ID NO: 362547 - RNA, 24 nt, Artificial Sequence
  Synthetic
cagaaauaaaaccggagaugucau

SEQ ID NO: 362548 - RNA, 18 nt, Artificial Sequence
  Synthetic
ugcacagggagaugucau

SEQ ID NO: 362549 - RNA, 19 nt, Artificial Sequence
  Synthetic
uugcacagggagaugucau

SEQ ID NO: 362550 - RNA, 20 nt, Artificial Sequence
  Synthetic
auugcacagggagaugucau

SEQ ID NO: 362551 - RNA, 21 nt, Artificial Sequence
  Synthetic
gauugcacagggagaugucau

SEQ ID NO: 362552 - RNA, 22 nt, Artificial Sequence
  Synthetic
agauugcacagggagaugucau

SEQ ID NO: 362553 - RNA, 23 nt, Artificial Sequence
  Synthetic
gagauugcacagggagaugucau

SEQ ID NO: 362554 - RNA, 24 nt, Artificial Sequence
  Synthetic
ggagauugcacagggagaugucau

SEQ ID NO: 362555 - RNA, 18 nt, Artificial Sequence
  Synthetic
caauuaagaugaugucau

SEQ ID NO: 362556 - RNA, 19 nt, Artificial Sequence
  Synthetic
acaauuaagaugaugucau

SEQ ID NO: 362557 - RNA, 20 nt, Artificial Sequence
  Synthetic
uacaauuaagaugaugucau

SEQ ID NO: 362558 - RNA, 21 nt, Artificial Sequence
  Synthetic
auacaauuaagaugaugucau

SEQ ID NO: 362559 - RNA, 22 nt, Artificial Sequence
  Synthetic
uauacaauuaagaugaugucau

SEQ ID NO: 362560 - RNA, 23 nt, Artificial Sequence
  Synthetic
auauacaauuaagaugaugucau

SEQ ID NO: 362561 - RNA, 24 nt, Artificial Sequence
  Synthetic
gauauacaauuaagaugaugucau

SEQ ID NO: 362562 - RNA, 18 nt, Artificial Sequence
  Synthetic
ccuucuugaugaugucau

SEQ ID NO: 362563 - RNA, 19 nt, Artificial Sequence
  Synthetic
uccuucuugaugaugucau

SEQ ID NO: 362564 - RNA, 20 nt, Artificial Sequence
  Synthetic
auccuucuugaugaugucau

SEQ ID NO: 362565 - RNA, 21 nt, Artificial Sequence
  Synthetic
uauccuucuugaugaugucau

SEQ ID NO: 362566 - RNA, 22 nt, Artificial Sequence
  Synthetic
uuauccuucuugaugaugucau

SEQ ID NO: 362567 - RNA, 23 nt, Artificial Sequence
  Synthetic
cuuauccuucuugaugaugucau

SEQ ID NO: 362568 - RNA, 24 nt, Artificial Sequence
  Synthetic
acuuauccuucuugaugaugucau

SEQ ID NO: 362569 - RNA, 18 nt, Artificial Sequence
  Synthetic
acagugugguacugucau

SEQ ID NO: 362570 - RNA, 19 nt, Artificial Sequence
  Synthetic
gacagugugguacugucau

SEQ ID NO: 362571 - RNA, 20 nt, Artificial Sequence
  Synthetic
agacagugugguacugucau

SEQ ID NO: 362572 - RNA, 21 nt, Artificial Sequence
  Synthetic
aagacagugugguacugucau

SEQ ID NO: 362573 - RNA, 22 nt, Artificial Sequence
  Synthetic
gaagacagugugguacugucau

SEQ ID NO: 362574 - RNA, 23 nt, Artificial Sequence
  Synthetic
ugaagacagugugguacugucau

SEQ ID NO: 362575 - RNA, 24 nt, Artificial Sequence
  Synthetic
augaagacagugugguacugucau

SEQ ID NO: 362576 - RNA, 18 nt, Artificial Sequence
  Synthetic
auggauacuuacugucau

SEQ ID NO: 362577 - RNA, 19 nt, Artificial Sequence
  Synthetic
aauggauacuuacugucau

SEQ ID NO: 362578 - RNA, 20 nt, Artificial Sequence
  Synthetic
uaauggauacuuacugucau

SEQ ID NO: 362579 - RNA, 21 nt, Artificial Sequence
  Synthetic
cuaauggauacuuacugucau

SEQ ID NO: 362580 - RNA, 22 nt, Artificial Sequence
  Synthetic
ucuaauggauacuuacugucau

SEQ ID NO: 362581 - RNA, 23 nt, Artificial Sequence
  Synthetic
cucuaauggauacuuacugucau

SEQ ID NO: 362582 - RNA, 24 nt, Artificial Sequence
  Synthetic
acucuaauggauacuuacugucau

SEQ ID NO: 362583 - RNA, 18 nt, Artificial Sequence
  Synthetic
gguucucucaucugucau

SEQ ID NO: 362584 - RNA, 19 nt, Artificial Sequence
  Synthetic
ugguucucucaucugucau

SEQ ID NO: 362585 - RNA, 20 nt, Artificial Sequence
  Synthetic
gugguucucucaucugucau

SEQ ID NO: 362586 - RNA, 21 nt, Artificial Sequence
  Synthetic
ugugguucucucaucugucau

SEQ ID NO: 362587 - RNA, 22 nt, Artificial Sequence
  Synthetic
cugugguucucucaucugucau

SEQ ID NO: 362588 - RNA, 23 nt, Artificial Sequence
  Synthetic
acugugguucucucaucugucau

SEQ ID NO: 362589 - RNA, 24 nt, Artificial Sequence
  Synthetic
aacugugguucucucaucugucau

SEQ ID NO: 362590 - RNA, 18 nt, Artificial Sequence
  Synthetic
auaaacuuccucugucau

SEQ ID NO: 362591 - RNA, 19 nt, Artificial Sequence
  Synthetic
gauaaacuuccucugucau

SEQ ID NO: 362592 - RNA, 20 nt, Artificial Sequence
  Synthetic
ugauaaacuuccucugucau

SEQ ID NO: 362593 - RNA, 21 nt, Artificial Sequence
  Synthetic
augauaaacuuccucugucau

SEQ ID NO: 362594 - RNA, 22 nt, Artificial Sequence
  Synthetic
uaugauaaacuuccucugucau

SEQ ID NO: 362595 - RNA, 23 nt, Artificial Sequence
  Synthetic
cuaugauaaacuuccucugucau

SEQ ID NO: 362596 - RNA, 24 nt, Artificial Sequence
  Synthetic
ccuaugauaaacuuccucugucau

SEQ ID NO: 362597 - RNA, 18 nt, Artificial Sequence
  Synthetic
auauuuccuuucugucau

SEQ ID NO: 362598 - RNA, 19 nt, Artificial Sequence
  Synthetic
cauauuuccuuucugucau

SEQ ID NO: 362599 - RNA, 20 nt, Artificial Sequence
  Synthetic
ucauauuuccuuucugucau

SEQ ID NO: 362600 - RNA, 21 nt, Artificial Sequence
  Synthetic
aucauauuuccuuucugucau

SEQ ID NO: 362601 - RNA, 22 nt, Artificial Sequence
  Synthetic
uaucauauuuccuuucugucau

SEQ ID NO: 362602 - RNA, 23 nt, Artificial Sequence
  Synthetic
auaucauauuuccuuucugucau

SEQ ID NO: 362603 - RNA, 24 nt, Artificial Sequence
  Synthetic
aauaucauauuuccuuucugucau

SEQ ID NO: 362604 - RNA, 18 nt, Artificial Sequence
  Synthetic
aaaauccccaggugucau

SEQ ID NO: 362605 - RNA, 19 nt, Artificial Sequence
  Synthetic
caaaauccccaggugucau

SEQ ID NO: 362606 - RNA, 20 nt, Artificial Sequence
  Synthetic
ccaaaauccccaggugucau

SEQ ID NO: 362607 - RNA, 21 nt, Artificial Sequence
  Synthetic
uccaaaauccccaggugucau

SEQ ID NO: 362608 - RNA, 22 nt, Artificial Sequence
  Synthetic
cuccaaaauccccaggugucau

SEQ ID NO: 362609 - RNA, 23 nt, Artificial Sequence
  Synthetic
ucuccaaaauccccaggugucau

SEQ ID NO: 362610 - RNA, 24 nt, Artificial Sequence
  Synthetic
aucuccaaaauccccaggugucau

SEQ ID NO: 362611 - RNA, 18 nt, Artificial Sequence
  Synthetic
uuguuuuaauugugucau

SEQ ID NO: 362612 - RNA, 19 nt, Artificial Sequence
  Synthetic
uuuguuuuaauugugucau

SEQ ID NO: 362613 - RNA, 20 nt, Artificial Sequence
  Synthetic
auuuguuuuaauugugucau

SEQ ID NO: 362614 - RNA, 21 nt, Artificial Sequence
  Synthetic
uauuuguuuuaauugugucau

SEQ ID NO: 362615 - RNA, 22 nt, Artificial Sequence
  Synthetic
uuauuuguuuuaauugugucau

SEQ ID NO: 362616 - RNA, 23 nt, Artificial Sequence
  Synthetic
uuuauuuguuuuaauugugucau

SEQ ID NO: 362617 - RNA, 24 nt, Artificial Sequence
  Synthetic
uuuuauuuguuuuaauugugucau

SEQ ID NO: 362618 - RNA, 18 nt, Artificial Sequence
  Synthetic
uuguucuuuaguugucau

SEQ ID NO: 362619 - RNA, 19 nt, Artificial Sequence
  Synthetic
uuuguucuuuaguugucau

SEQ ID NO: 362620 - RNA, 20 nt, Artificial Sequence
  Synthetic
auuuguucuuuaguugucau

SEQ ID NO: 362621 - RNA, 21 nt, Artificial Sequence
  Synthetic
cauuuguucuuuaguugucau

SEQ ID NO: 362622 - RNA, 22 nt, Artificial Sequence
  Synthetic
acauuuguucuuuaguugucau

SEQ ID NO: 362623 - RNA, 23 nt, Artificial Sequence
  Synthetic
aacauuuguucuuuaguugucau

SEQ ID NO: 362624 - RNA, 24 nt, Artificial Sequence
  Synthetic
gaacauuuguucuuuaguugucau

SEQ ID NO: 362625 - RNA, 18 nt, Artificial Sequence
  Synthetic
gugaaguggucaauucau

SEQ ID NO: 362626 - RNA, 19 nt, Artificial Sequence
  Synthetic
agugaaguggucaauucau

SEQ ID NO: 362627 - RNA, 20 nt, Artificial Sequence
  Synthetic
uagugaaguggucaauucau

SEQ ID NO: 362628 - RNA, 21 nt, Artificial Sequence
  Synthetic
auagugaaguggucaauucau

SEQ ID NO: 362629 - RNA, 22 nt, Artificial Sequence
  Synthetic
aauagugaaguggucaauucau

SEQ ID NO: 362630 - RNA, 23 nt, Artificial Sequence
  Synthetic
gaauagugaaguggucaauucau

SEQ ID NO: 362631 - RNA, 24 nt, Artificial Sequence
  Synthetic
ggaauagugaaguggucaauucau

SEQ ID NO: 362632 - RNA, 18 nt, Artificial Sequence
  Synthetic
augaugguuagaauucau

SEQ ID NO: 362633 - RNA, 19 nt, Artificial Sequence
  Synthetic
caugaugguuagaauucau

SEQ ID NO: 362634 - RNA, 20 nt, Artificial Sequence
  Synthetic
ccaugaugguuagaauucau

SEQ ID NO: 362635 - RNA, 21 nt, Artificial Sequence
  Synthetic
gccaugaugguuagaauucau

SEQ ID NO: 362636 - RNA, 22 nt, Artificial Sequence
  Synthetic
ugccaugaugguuagaauucau

SEQ ID NO: 362637 - RNA, 23 nt, Artificial Sequence
  Synthetic
augccaugaugguuagaauucau

SEQ ID NO: 362638 - RNA, 24 nt, Artificial Sequence
  Synthetic
caugccaugaugguuagaauucau

SEQ ID NO: 362639 - RNA, 18 nt, Artificial Sequence
  Synthetic
uuuauaaaaggaauucau

SEQ ID NO: 362640 - RNA, 19 nt, Artificial Sequence
  Synthetic
uuuuauaaaaggaauucau

SEQ ID NO: 362641 - RNA, 20 nt, Artificial Sequence
  Synthetic
guuuuauaaaaggaauucau

SEQ ID NO: 362642 - RNA, 21 nt, Artificial Sequence
  Synthetic
uguuuuauaaaaggaauucau

SEQ ID NO: 362643 - RNA, 22 nt, Artificial Sequence
  Synthetic
guguuuuauaaaaggaauucau

SEQ ID NO: 362644 - RNA, 23 nt, Artificial Sequence
  Synthetic
aguguuuuauaaaaggaauucau

SEQ ID NO: 362645 - RNA, 24 nt, Artificial Sequence
  Synthetic
caguguuuuauaaaaggaauucau

SEQ ID NO: 362646 - RNA, 18 nt, Artificial Sequence
  Synthetic
caccaucugggaauucau

SEQ ID NO: 362647 - RNA, 19 nt, Artificial Sequence
  Synthetic
gcaccaucugggaauucau

SEQ ID NO: 362648 - RNA, 20 nt, Artificial Sequence
  Synthetic
agcaccaucugggaauucau

SEQ ID NO: 362649 - RNA, 21 nt, Artificial Sequence
  Synthetic
cagcaccaucugggaauucau

SEQ ID NO: 362650 - RNA, 22 nt, Artificial Sequence
  Synthetic
ucagcaccaucugggaauucau

SEQ ID NO: 362651 - RNA, 23 nt, Artificial Sequence
  Synthetic
aucagcaccaucugggaauucau

SEQ ID NO: 362652 - RNA, 24 nt, Artificial Sequence
  Synthetic
caucagcaccaucugggaauucau

SEQ ID NO: 362653 - RNA, 18 nt, Artificial Sequence
  Synthetic
agcacaaucauaauucau

SEQ ID NO: 362654 - RNA, 19 nt, Artificial Sequence
  Synthetic
uagcacaaucauaauucau

SEQ ID NO: 362655 - RNA, 20 nt, Artificial Sequence
  Synthetic
guagcacaaucauaauucau

SEQ ID NO: 362656 - RNA, 21 nt, Artificial Sequence
  Synthetic
gguagcacaaucauaauucau

SEQ ID NO: 362657 - RNA, 22 nt, Artificial Sequence
  Synthetic
ggguagcacaaucauaauucau

SEQ ID NO: 362658 - RNA, 23 nt, Artificial Sequence
  Synthetic
gggguagcacaaucauaauucau

SEQ ID NO: 362659 - RNA, 24 nt, Artificial Sequence
  Synthetic
ugggguagcacaaucauaauucau

SEQ ID NO: 362660 - RNA, 18 nt, Artificial Sequence
  Synthetic
auauaauugauaauucau

SEQ ID NO: 362661 - RNA, 19 nt, Artificial Sequence
  Synthetic
aauauaauugauaauucau

SEQ ID NO: 362662 - RNA, 20 nt, Artificial Sequence
  Synthetic
uaauauaauugauaauucau

SEQ ID NO: 362663 - RNA, 21 nt, Artificial Sequence
  Synthetic
guaauauaauugauaauucau

SEQ ID NO: 362664 - RNA, 22 nt, Artificial Sequence
  Synthetic
aguaauauaauugauaauucau

SEQ ID NO: 362665 - RNA, 23 nt, Artificial Sequence
  Synthetic
uaguaauauaauugauaauucau

SEQ ID NO: 362666 - RNA, 24 nt, Artificial Sequence
  Synthetic
auaguaauauaauugauaauucau

SEQ ID NO: 362667 - RNA, 18 nt, Artificial Sequence
  Synthetic
uuaaaaugcaacauucau

SEQ ID NO: 362668 - RNA, 19 nt, Artificial Sequence
  Synthetic
guuaaaaugcaacauucau

SEQ ID NO: 362669 - RNA, 20 nt, Artificial Sequence
  Synthetic
cguuaaaaugcaacauucau

SEQ ID NO: 362670 - RNA, 21 nt, Artificial Sequence
  Synthetic
gcguuaaaaugcaacauucau

SEQ ID NO: 362671 - RNA, 22 nt, Artificial Sequence
  Synthetic
ugcguuaaaaugcaacauucau

SEQ ID NO: 362672 - RNA, 23 nt, Artificial Sequence
  Synthetic
cugcguuaaaaugcaacauucau

SEQ ID NO: 362673 - RNA, 24 nt, Artificial Sequence
  Synthetic
acugcguuaaaaugcaacauucau

SEQ ID NO: 362674 - RNA, 18 nt, Artificial Sequence
  Synthetic
ugguguuaaaccauucau

SEQ ID NO: 362675 - RNA, 19 nt, Artificial Sequence
  Synthetic
augguguuaaaccauucau

SEQ ID NO: 362676 - RNA, 20 nt, Artificial Sequence
  Synthetic
gaugguguuaaaccauucau

SEQ ID NO: 362677 - RNA, 21 nt, Artificial Sequence
  Synthetic
ggaugguguuaaaccauucau

SEQ ID NO: 362678 - RNA, 22 nt, Artificial Sequence
  Synthetic
aggaugguguuaaaccauucau

SEQ ID NO: 362679 - RNA, 23 nt, Artificial Sequence
  Synthetic
gaggaugguguuaaaccauucau

SEQ ID NO: 362680 - RNA, 24 nt, Artificial Sequence
  Synthetic
agaggaugguguuaaaccauucau

SEQ ID NO: 362681 - RNA, 18 nt, Artificial Sequence
  Synthetic
auggaugaauccauucau

SEQ ID NO: 362682 - RNA, 19 nt, Artificial Sequence
  Synthetic
aauggaugaauccauucau

SEQ ID NO: 362683 - RNA, 20 nt, Artificial Sequence
  Synthetic
gaauggaugaauccauucau

SEQ ID NO: 362684 - RNA, 21 nt, Artificial Sequence
  Synthetic
ugaauggaugaauccauucau

SEQ ID NO: 362685 - RNA, 22 nt, Artificial Sequence
  Synthetic
augaauggaugaauccauucau

SEQ ID NO: 362686 - RNA, 23 nt, Artificial Sequence
  Synthetic
uaugaauggaugaauccauucau

SEQ ID NO: 362687 - RNA, 24 nt, Artificial Sequence
  Synthetic
uuaugaauggaugaauccauucau

SEQ ID NO: 362688 - RNA, 18 nt, Artificial Sequence
  Synthetic
ccauguguuaagauucau

SEQ ID NO: 362689 - RNA, 19 nt, Artificial Sequence
  Synthetic
uccauguguuaagauucau

SEQ ID NO: 362690 - RNA, 20 nt, Artificial Sequence
  Synthetic
auccauguguuaagauucau

SEQ ID NO: 362691 - RNA, 21 nt, Artificial Sequence
  Synthetic
cauccauguguuaagauucau

SEQ ID NO: 362692 - RNA, 22 nt, Artificial Sequence
  Synthetic
ucauccauguguuaagauucau

SEQ ID NO: 362693 - RNA, 23 nt, Artificial Sequence
  Synthetic
uucauccauguguuaagauucau

SEQ ID NO: 362694 - RNA, 24 nt, Artificial Sequence
  Synthetic
uuucauccauguguuaagauucau

SEQ ID NO: 362695 - RNA, 18 nt, Artificial Sequence
  Synthetic
ucugucaaauagauucau

SEQ ID NO: 362696 - RNA, 19 nt, Artificial Sequence
  Synthetic
gucugucaaauagauucau

SEQ ID NO: 362697 - RNA, 20 nt, Artificial Sequence
  Synthetic
ggucugucaaauagauucau

SEQ ID NO: 362698 - RNA, 21 nt, Artificial Sequence
  Synthetic
aggucugucaaauagauucau

SEQ ID NO: 362699 - RNA, 22 nt, Artificial Sequence
  Synthetic
caggucugucaaauagauucau

SEQ ID NO: 362700 - RNA, 23 nt, Artificial Sequence
  Synthetic
ccaggucugucaaauagauucau

SEQ ID NO: 362701 - RNA, 24 nt, Artificial Sequence
  Synthetic
uccaggucugucaaauagauucau

SEQ ID NO: 362702 - RNA, 18 nt, Artificial Sequence
  Synthetic
aaaaaauauaguauucau

SEQ ID NO: 362703 - RNA, 19 nt, Artificial Sequence
  Synthetic
gaaaaaauauaguauucau

SEQ ID NO: 362704 - RNA, 20 nt, Artificial Sequence
  Synthetic
ugaaaaaauauaguauucau

SEQ ID NO: 362705 - RNA, 21 nt, Artificial Sequence
  Synthetic
gugaaaaaauauaguauucau

SEQ ID NO: 362706 - RNA, 22 nt, Artificial Sequence
  Synthetic
ugugaaaaaauauaguauucau

SEQ ID NO: 362707 - RNA, 23 nt, Artificial Sequence
  Synthetic
augugaaaaaauauaguauucau

SEQ ID NO: 362708 - RNA, 24 nt, Artificial Sequence
  Synthetic
aaugugaaaaaauauaguauucau

SEQ ID NO: 362709 - RNA, 18 nt, Artificial Sequence
  Synthetic
acuagucacuguauucau

SEQ ID NO: 362710 - RNA, 19 nt, Artificial Sequence
  Synthetic
gacuagucacuguauucau

SEQ ID NO: 362711 - RNA, 20 nt, Artificial Sequence
  Synthetic
agacuagucacuguauucau

SEQ ID NO: 362712 - RNA, 21 nt, Artificial Sequence
  Synthetic
gagacuagucacuguauucau

SEQ ID NO: 362713 - RNA, 22 nt, Artificial Sequence
  Synthetic
ugagacuagucacuguauucau

SEQ ID NO: 362714 - RNA, 23 nt, Artificial Sequence
  Synthetic
gugagacuagucacuguauucau

SEQ ID NO: 362715 - RNA, 24 nt, Artificial Sequence
  Synthetic
agugagacuagucacuguauucau

SEQ ID NO: 362716 - RNA, 18 nt, Artificial Sequence
  Synthetic
acauuuaucuguauucau

SEQ ID NO: 362717 - RNA, 19 nt, Artificial Sequence
  Synthetic
gacauuuaucuguauucau

SEQ ID NO: 362718 - RNA, 20 nt, Artificial Sequence
  Synthetic
agacauuuaucuguauucau

SEQ ID NO: 362719 - RNA, 21 nt, Artificial Sequence
  Synthetic
aagacauuuaucuguauucau

SEQ ID NO: 362720 - RNA, 22 nt, Artificial Sequence
  Synthetic
caagacauuuaucuguauucau

SEQ ID NO: 362721 - RNA, 23 nt, Artificial Sequence
  Synthetic
ucaagacauuuaucuguauucau

SEQ ID NO: 362722 - RNA, 24 nt, Artificial Sequence
  Synthetic
aucaagacauuuaucuguauucau

SEQ ID NO: 362723 - RNA, 18 nt, Artificial Sequence
  Synthetic
aguguuuuucuuauucau

SEQ ID NO: 362724 - RNA, 19 nt, Artificial Sequence
  Synthetic
gaguguuuuucuuauucau

SEQ ID NO: 362725 - RNA, 20 nt, Artificial Sequence
  Synthetic
ugaguguuuuucuuauucau

SEQ ID NO: 362726 - RNA, 21 nt, Artificial Sequence
  Synthetic
uugaguguuuuucuuauucau

SEQ ID NO: 362727 - RNA, 22 nt, Artificial Sequence
  Synthetic
auugaguguuuuucuuauucau

SEQ ID NO: 362728 - RNA, 23 nt, Artificial Sequence
  Synthetic
aauugaguguuuuucuuauucau

SEQ ID NO: 362729 - RNA, 24 nt, Artificial Sequence
  Synthetic
caauugaguguuuuucuuauucau

SEQ ID NO: 362730 - RNA, 18 nt, Artificial Sequence
  Synthetic
auccauguauuuauucau

SEQ ID NO: 362731 - RNA, 19 nt, Artificial Sequence
  Synthetic
aauccauguauuuauucau

SEQ ID NO: 362732 - RNA, 20 nt, Artificial Sequence
  Synthetic
uaauccauguauuuauucau

SEQ ID NO: 362733 - RNA, 21 nt, Artificial Sequence
  Synthetic
uuaauccauguauuuauucau

SEQ ID NO: 362734 - RNA, 22 nt, Artificial Sequence
  Synthetic
uuuaauccauguauuuauucau

SEQ ID NO: 362735 - RNA, 23 nt, Artificial Sequence
  Synthetic
uuuuaauccauguauuuauucau

SEQ ID NO: 362736 - RNA, 24 nt, Artificial Sequence
  Synthetic
cuuuuaauccauguauuuauucau

SEQ ID NO: 362737 - RNA, 18 nt, Artificial Sequence
  Synthetic
caugcuuuuucacuucau

SEQ ID NO: 362738 - RNA, 19 nt, Artificial Sequence
  Synthetic
gcaugcuuuuucacuucau

SEQ ID NO: 362739 - RNA, 20 nt, Artificial Sequence
  Synthetic
ggcaugcuuuuucacuucau

SEQ ID NO: 362740 - RNA, 21 nt, Artificial Sequence
  Synthetic
uggcaugcuuuuucacuucau

SEQ ID NO: 362741 - RNA, 22 nt, Artificial Sequence
  Synthetic
auggcaugcuuuuucacuucau

SEQ ID NO: 362742 - RNA, 23 nt, Artificial Sequence
  Synthetic
aauggcaugcuuuuucacuucau

SEQ ID NO: 362743 - RNA, 24 nt, Artificial Sequence
  Synthetic
aaauggcaugcuuuuucacuucau

SEQ ID NO: 362744 - RNA, 18 nt, Artificial Sequence
  Synthetic
gugaaaauuugacuucau

SEQ ID NO: 362745 - RNA, 19 nt, Artificial Sequence
  Synthetic
ggugaaaauuugacuucau

SEQ ID NO: 362746 - RNA, 20 nt, Artificial Sequence
  Synthetic
aggugaaaauuugacuucau

SEQ ID NO: 362747 - RNA, 21 nt, Artificial Sequence
  Synthetic
gaggugaaaauuugacuucau

SEQ ID NO: 362748 - RNA, 22 nt, Artificial Sequence
  Synthetic
ugaggugaaaauuugacuucau

SEQ ID NO: 362749 - RNA, 23 nt, Artificial Sequence
  Synthetic
uugaggugaaaauuugacuucau

SEQ ID NO: 362750 - RNA, 24 nt, Artificial Sequence
  Synthetic
uuugaggugaaaauuugacuucau

SEQ ID NO: 362751 - RNA, 18 nt, Artificial Sequence
  Synthetic
uuggcgagaauacuucau

SEQ ID NO: 362752 - RNA, 19 nt, Artificial Sequence
  Synthetic
uuuggcgagaauacuucau

SEQ ID NO: 362753 - RNA, 20 nt, Artificial Sequence
  Synthetic
guuuggcgagaauacuucau

SEQ ID NO: 362754 - RNA, 21 nt, Artificial Sequence
  Synthetic
uguuuggcgagaauacuucau

SEQ ID NO: 362755 - RNA, 22 nt, Artificial Sequence
  Synthetic
auguuuggcgagaauacuucau

SEQ ID NO: 362756 - RNA, 23 nt, Artificial Sequence
  Synthetic
cauguuuggcgagaauacuucau

SEQ ID NO: 362757 - RNA, 24 nt, Artificial Sequence
  Synthetic
acauguuuggcgagaauacuucau

SEQ ID NO: 362758 - RNA, 18 nt, Artificial Sequence
  Synthetic
gagcugacguaccuucau

SEQ ID NO: 362759 - RNA, 19 nt, Artificial Sequence
  Synthetic
agagcugacguaccuucau

SEQ ID NO: 362760 - RNA, 20 nt, Artificial Sequence
  Synthetic
gagagcugacguaccuucau

SEQ ID NO: 362761 - RNA, 21 nt, Artificial Sequence
  Synthetic
agagagcugacguaccuucau

SEQ ID NO: 362762 - RNA, 22 nt, Artificial Sequence
  Synthetic
gagagagcugacguaccuucau

SEQ ID NO: 362763 - RNA, 23 nt, Artificial Sequence
  Synthetic
agagagagcugacguaccuucau

SEQ ID NO: 362764 - RNA, 24 nt, Artificial Sequence
  Synthetic
aagagagagcugacguaccuucau

SEQ ID NO: 362765 - RNA, 18 nt, Artificial Sequence
  Synthetic
cucuucuuccuccuucau

SEQ ID NO: 362766 - RNA, 19 nt, Artificial Sequence
  Synthetic
acucuucuuccuccuucau

SEQ ID NO: 362767 - RNA, 20 nt, Artificial Sequence
  Synthetic
cacucuucuuccuccuucau

SEQ ID NO: 362768 - RNA, 21 nt, Artificial Sequence
  Synthetic
gcacucuucuuccuccuucau

SEQ ID NO: 362769 - RNA, 22 nt, Artificial Sequence
  Synthetic
agcacucuucuuccuccuucau

SEQ ID NO: 362770 - RNA, 23 nt, Artificial Sequence
  Synthetic
aagcacucuucuuccuccuucau

SEQ ID NO: 362771 - RNA, 24 nt, Artificial Sequence
  Synthetic
aaagcacucuucuuccuccuucau

SEQ ID NO: 362772 - RNA, 18 nt, Artificial Sequence
  Synthetic
caagauuaaaagcuucau

SEQ ID NO: 362773 - RNA, 19 nt, Artificial Sequence
  Synthetic
gcaagauuaaaagcuucau

SEQ ID NO: 362774 - RNA, 20 nt, Artificial Sequence
  Synthetic
agcaagauuaaaagcuucau

SEQ ID NO: 362775 - RNA, 21 nt, Artificial Sequence
  Synthetic
cagcaagauuaaaagcuucau

SEQ ID NO: 362776 - RNA, 22 nt, Artificial Sequence
  Synthetic
ccagcaagauuaaaagcuucau

SEQ ID NO: 362777 - RNA, 23 nt, Artificial Sequence
  Synthetic
cccagcaagauuaaaagcuucau

SEQ ID NO: 362778 - RNA, 24 nt, Artificial Sequence
  Synthetic
ccccagcaagauuaaaagcuucau

SEQ ID NO: 362779 - RNA, 18 nt, Artificial Sequence
  Synthetic
ggacuuuauaagcuucau

SEQ ID NO: 362780 - RNA, 19 nt, Artificial Sequence
  Synthetic
aggacuuuauaagcuucau

SEQ ID NO: 362781 - RNA, 20 nt, Artificial Sequence
  Synthetic
uaggacuuuauaagcuucau

SEQ ID NO: 362782 - RNA, 21 nt, Artificial Sequence
  Synthetic
guaggacuuuauaagcuucau

SEQ ID NO: 362783 - RNA, 22 nt, Artificial Sequence
  Synthetic
uguaggacuuuauaagcuucau

SEQ ID NO: 362784 - RNA, 23 nt, Artificial Sequence
  Synthetic
guguaggacuuuauaagcuucau

SEQ ID NO: 362785 - RNA, 24 nt, Artificial Sequence
  Synthetic
aguguaggacuuuauaagcuucau

SEQ ID NO: 362786 - RNA, 18 nt, Artificial Sequence
  Synthetic
cuuucagcaccucuucau

SEQ ID NO: 362787 - RNA, 19 nt, Artificial Sequence
  Synthetic
ucuuucagcaccucuucau

SEQ ID NO: 362788 - RNA, 20 nt, Artificial Sequence
  Synthetic
cucuuucagcaccucuucau

SEQ ID NO: 362789 - RNA, 21 nt, Artificial Sequence
  Synthetic
ccucuuucagcaccucuucau

SEQ ID NO: 362790 - RNA, 22 nt, Artificial Sequence
  Synthetic
uccucuuucagcaccucuucau

SEQ ID NO: 362791 - RNA, 23 nt, Artificial Sequence
  Synthetic
auccucuuucagcaccucuucau

SEQ ID NO: 362792 - RNA, 24 nt, Artificial Sequence
  Synthetic
cauccucuuucagcaccucuucau

SEQ ID NO: 362793 - RNA, 18 nt, Artificial Sequence
  Synthetic
acaccauauccucuucau

SEQ ID NO: 362794 - RNA, 19 nt, Artificial Sequence
  Synthetic
aacaccauauccucuucau

SEQ ID NO: 362795 - RNA, 20 nt, Artificial Sequence
  Synthetic
uaacaccauauccucuucau

SEQ ID NO: 362796 - RNA, 21 nt, Artificial Sequence
  Synthetic
cuaacaccauauccucuucau

SEQ ID NO: 362797 - RNA, 22 nt, Artificial Sequence
  Synthetic
ucuaacaccauauccucuucau

SEQ ID NO: 362798 - RNA, 23 nt, Artificial Sequence
  Synthetic
gucuaacaccauauccucuucau

SEQ ID NO: 362799 - RNA, 24 nt, Artificial Sequence
  Synthetic
ugucuaacaccauauccucuucau

SEQ ID NO: 362800 - RNA, 18 nt, Artificial Sequence
  Synthetic
cugucaguuuuucuucau

SEQ ID NO: 362801 - RNA, 19 nt, Artificial Sequence
  Synthetic
acugucaguuuuucuucau

SEQ ID NO: 362802 - RNA, 20 nt, Artificial Sequence
  Synthetic
gacugucaguuuuucuucau

SEQ ID NO: 362803 - RNA, 21 nt, Artificial Sequence
  Synthetic
ugacugucaguuuuucuucau

SEQ ID NO: 362804 - RNA, 22 nt, Artificial Sequence
  Synthetic
cugacugucaguuuuucuucau

SEQ ID NO: 362805 - RNA, 23 nt, Artificial Sequence
  Synthetic
gcugacugucaguuuuucuucau

SEQ ID NO: 362806 - RNA, 24 nt, Artificial Sequence
  Synthetic
ugcugacugucaguuuuucuucau

SEQ ID NO: 362807 - RNA, 18 nt, Artificial Sequence
  Synthetic
ugguauuuuuuucuucau

SEQ ID NO: 362808 - RNA, 19 nt, Artificial Sequence
  Synthetic
augguauuuuuuucuucau

SEQ ID NO: 362809 - RNA, 20 nt, Artificial Sequence
  Synthetic
gaugguauuuuuuucuucau

SEQ ID NO: 362810 - RNA, 21 nt, Artificial Sequence
  Synthetic
agaugguauuuuuuucuucau

SEQ ID NO: 362811 - RNA, 22 nt, Artificial Sequence
  Synthetic
cagaugguauuuuuuucuucau

SEQ ID NO: 362812 - RNA, 23 nt, Artificial Sequence
  Synthetic
acagaugguauuuuuuucuucau

SEQ ID NO: 362813 - RNA, 24 nt, Artificial Sequence
  Synthetic
cacagaugguauuuuuuucuucau

SEQ ID NO: 362814 - RNA, 18 nt, Artificial Sequence
  Synthetic
aacuacuuuaaaguucau

SEQ ID NO: 362815 - RNA, 19 nt, Artificial Sequence
  Synthetic
aaacuacuuuaaaguucau

SEQ ID NO: 362816 - RNA, 20 nt, Artificial Sequence
  Synthetic
aaaacuacuuuaaaguucau

SEQ ID NO: 362817 - RNA, 18 nt, Artificial Sequence
  Synthetic
gagacuuuuaaaguucau

SEQ ID NO: 362818 - RNA, 19 nt, Artificial Sequence
  Synthetic
ggagacuuuuaaaguucau

SEQ ID NO: 362819 - RNA, 20 nt, Artificial Sequence
  Synthetic
gggagacuuuuaaaguucau

SEQ ID NO: 362820 - RNA, 21 nt, Artificial Sequence
  Synthetic
ggggagacuuuuaaaguucau

SEQ ID NO: 362821 - RNA, 22 nt, Artificial Sequence
  Synthetic
aggggagacuuuuaaaguucau

SEQ ID NO: 362822 - RNA, 23 nt, Artificial Sequence
  Synthetic
gaggggagacuuuuaaaguucau

SEQ ID NO: 362823 - RNA, 24 nt, Artificial Sequence
  Synthetic
ggaggggagacuuuuaaaguucau

SEQ ID NO: 362824 - RNA, 18 nt, Artificial Sequence
  Synthetic
acucaacugauaguucau

SEQ ID NO: 362825 - RNA, 19 nt, Artificial Sequence
  Synthetic
cacucaacugauaguucau

SEQ ID NO: 362826 - RNA, 20 nt, Artificial Sequence
  Synthetic
ucacucaacugauaguucau

SEQ ID NO: 362827 - RNA, 21 nt, Artificial Sequence
  Synthetic
uucacucaacugauaguucau

SEQ ID NO: 362828 - RNA, 22 nt, Artificial Sequence
  Synthetic
auucacucaacugauaguucau

SEQ ID NO: 362829 - RNA, 23 nt, Artificial Sequence
  Synthetic
aauucacucaacugauaguucau

SEQ ID NO: 362830 - RNA, 24 nt, Artificial Sequence
  Synthetic
aaauucacucaacugauaguucau

SEQ ID NO: 362831 - RNA, 18 nt, Artificial Sequence
  Synthetic
cugacuuggaggguucau

SEQ ID NO: 362832 - RNA, 19 nt, Artificial Sequence
  Synthetic
acugacuuggaggguucau

SEQ ID NO: 362833 - RNA, 20 nt, Artificial Sequence
  Synthetic
uacugacuuggaggguucau

SEQ ID NO: 362834 - RNA, 21 nt, Artificial Sequence
  Synthetic
auacugacuuggaggguucau

SEQ ID NO: 362835 - RNA, 22 nt, Artificial Sequence
  Synthetic
aauacugacuuggaggguucau

SEQ ID NO: 362836 - RNA, 23 nt, Artificial Sequence
  Synthetic
aaauacugacuuggaggguucau

SEQ ID NO: 362837 - RNA, 24 nt, Artificial Sequence
  Synthetic
aaaauacugacuuggaggguucau

SEQ ID NO: 362838 - RNA, 18 nt, Artificial Sequence
  Synthetic
cuaucucaugggguucau

SEQ ID NO: 362839 - RNA, 19 nt, Artificial Sequence
  Synthetic
ucuaucucaugggguucau

SEQ ID NO: 362840 - RNA, 20 nt, Artificial Sequence
  Synthetic
gucuaucucaugggguucau

SEQ ID NO: 362841 - RNA, 21 nt, Artificial Sequence
  Synthetic
ugucuaucucaugggguucau

SEQ ID NO: 362842 - RNA, 22 nt, Artificial Sequence
  Synthetic
augucuaucucaugggguucau

SEQ ID NO: 362843 - RNA, 23 nt, Artificial Sequence
  Synthetic
caugucuaucucaugggguucau

SEQ ID NO: 362844 - RNA, 24 nt, Artificial Sequence
  Synthetic
ccaugucuaucucaugggguucau

SEQ ID NO: 362845 - RNA, 18 nt, Artificial Sequence
  Synthetic
uuuugcaucgauguucau

SEQ ID NO: 362846 - RNA, 19 nt, Artificial Sequence
  Synthetic
uuuuugcaucgauguucau

SEQ ID NO: 362847 - RNA, 20 nt, Artificial Sequence
  Synthetic
auuuuugcaucgauguucau

SEQ ID NO: 362848 - RNA, 21 nt, Artificial Sequence
  Synthetic
gauuuuugcaucgauguucau

SEQ ID NO: 362849 - RNA, 22 nt, Artificial Sequence
  Synthetic
ggauuuuugcaucgauguucau

SEQ ID NO: 362850 - RNA, 23 nt, Artificial Sequence
  Synthetic
aggauuuuugcaucgauguucau

SEQ ID NO: 362851 - RNA, 24 nt, Artificial Sequence
  Synthetic
gaggauuuuugcaucgauguucau

SEQ ID NO: 362852 - RNA, 18 nt, Artificial Sequence
  Synthetic
uguccucuaaguguucau

SEQ ID NO: 362853 - RNA, 19 nt, Artificial Sequence
  Synthetic
auguccucuaaguguucau

SEQ ID NO: 362854 - RNA, 20 nt, Artificial Sequence
  Synthetic
aauguccucuaaguguucau

SEQ ID NO: 362855 - RNA, 21 nt, Artificial Sequence
  Synthetic
caauguccucuaaguguucau

SEQ ID NO: 362856 - RNA, 22 nt, Artificial Sequence
  Synthetic
acaauguccucuaaguguucau

SEQ ID NO: 362857 - RNA, 23 nt, Artificial Sequence
  Synthetic
uacaauguccucuaaguguucau

SEQ ID NO: 362858 - RNA, 24 nt, Artificial Sequence
  Synthetic
cuacaauguccucuaaguguucau

SEQ ID NO: 362859 - RNA, 18 nt, Artificial Sequence
  Synthetic
gagaccuauuuuguucau

SEQ ID NO: 362860 - RNA, 19 nt, Artificial Sequence
  Synthetic
ugagaccuauuuuguucau

SEQ ID NO: 362861 - RNA, 20 nt, Artificial Sequence
  Synthetic
cugagaccuauuuuguucau

SEQ ID NO: 362862 - RNA, 21 nt, Artificial Sequence
  Synthetic
ccugagaccuauuuuguucau

SEQ ID NO: 362863 - RNA, 22 nt, Artificial Sequence
  Synthetic
cccugagaccuauuuuguucau

SEQ ID NO: 362864 - RNA, 23 nt, Artificial Sequence
  Synthetic
acccugagaccuauuuuguucau

SEQ ID NO: 362865 - RNA, 24 nt, Artificial Sequence
  Synthetic
uacccugagaccuauuuuguucau

SEQ ID NO: 362866 - RNA, 18 nt, Artificial Sequence
  Synthetic
aacuacuuuaaauuucau

SEQ ID NO: 362867 - RNA, 19 nt, Artificial Sequence
  Synthetic
aaacuacuuuaaauuucau

SEQ ID NO: 362868 - RNA, 20 nt, Artificial Sequence
  Synthetic
aaaacuacuuuaaauuucau

SEQ ID NO: 362869 - RNA, 21 nt, Artificial Sequence
  Synthetic
aaaaacuacuuuaaauuucau

SEQ ID NO: 362870 - RNA, 22 nt, Artificial Sequence
  Synthetic
gaaaaacuacuuuaaauuucau

SEQ ID NO: 362871 - RNA, 23 nt, Artificial Sequence
  Synthetic
agaaaaacuacuuuaaauuucau

SEQ ID NO: 362872 - RNA, 24 nt, Artificial Sequence
  Synthetic
uagaaaaacuacuuuaaauuucau

SEQ ID NO: 362873 - RNA, 18 nt, Artificial Sequence
  Synthetic
ugcuuccuuuaauuucau

SEQ ID NO: 362874 - RNA, 19 nt, Artificial Sequence
  Synthetic
gugcuuccuuuaauuucau

SEQ ID NO: 362875 - RNA, 20 nt, Artificial Sequence
  Synthetic
cgugcuuccuuuaauuucau

SEQ ID NO: 362876 - RNA, 21 nt, Artificial Sequence
  Synthetic
acgugcuuccuuuaauuucau

SEQ ID NO: 362877 - RNA, 22 nt, Artificial Sequence
  Synthetic
uacgugcuuccuuuaauuucau

SEQ ID NO: 362878 - RNA, 23 nt, Artificial Sequence
  Synthetic
auacgugcuuccuuuaauuucau

SEQ ID NO: 362879 - RNA, 24 nt, Artificial Sequence
  Synthetic
aauacgugcuuccuuuaauuucau

SEQ ID NO: 362880 - RNA, 18 nt, Artificial Sequence
  Synthetic
agucuauuugcauuucau

SEQ ID NO: 362881 - RNA, 19 nt, Artificial Sequence
  Synthetic
cagucuauuugcauuucau

SEQ ID NO: 362882 - RNA, 20 nt, Artificial Sequence
  Synthetic
gcagucuauuugcauuucau

SEQ ID NO: 362883 - RNA, 21 nt, Artificial Sequence
  Synthetic
agcagucuauuugcauuucau

SEQ ID NO: 362884 - RNA, 22 nt, Artificial Sequence
  Synthetic
cagcagucuauuugcauuucau

SEQ ID NO: 362885 - RNA, 23 nt, Artificial Sequence
  Synthetic
gcagcagucuauuugcauuucau

SEQ ID NO: 362886 - RNA, 24 nt, Artificial Sequence
  Synthetic
ugcagcagucuauuugcauuucau

SEQ ID NO: 362887 - RNA, 18 nt, Artificial Sequence
  Synthetic
uuagcccauucauuucau

SEQ ID NO: 362888 - RNA, 19 nt, Artificial Sequence
  Synthetic
guuagcccauucauuucau

SEQ ID NO: 362889 - RNA, 20 nt, Artificial Sequence
  Synthetic
uguuagcccauucauuucau

SEQ ID NO: 362890 - RNA, 21 nt, Artificial Sequence
  Synthetic
auguuagcccauucauuucau

SEQ ID NO: 362891 - RNA, 22 nt, Artificial Sequence
  Synthetic
cauguuagcccauucauuucau

SEQ ID NO: 362892 - RNA, 23 nt, Artificial Sequence
  Synthetic
ucauguuagcccauucauuucau

SEQ ID NO: 362893 - RNA, 24 nt, Artificial Sequence
  Synthetic
cucauguuagcccauucauuucau

SEQ ID NO: 362894 - RNA, 18 nt, Artificial Sequence
  Synthetic
ggugagguuggauuucau

SEQ ID NO: 362895 - RNA, 19 nt, Artificial Sequence
  Synthetic
aggugagguuggauuucau

SEQ ID NO: 362896 - RNA, 20 nt, Artificial Sequence
  Synthetic
aaggugagguuggauuucau

SEQ ID NO: 362897 - RNA, 21 nt, Artificial Sequence
  Synthetic
aaaggugagguuggauuucau

SEQ ID NO: 362898 - RNA, 22 nt, Artificial Sequence
  Synthetic
gaaaggugagguuggauuucau

SEQ ID NO: 362899 - RNA, 23 nt, Artificial Sequence
  Synthetic
agaaaggugagguuggauuucau

SEQ ID NO: 362900 - RNA, 24 nt, Artificial Sequence
  Synthetic
gagaaaggugagguuggauuucau

SEQ ID NO: 362901 - RNA, 18 nt, Artificial Sequence
  Synthetic
uuuagaagaauauuucau

SEQ ID NO: 362902 - RNA, 19 nt, Artificial Sequence
  Synthetic
cuuuagaagaauauuucau

SEQ ID NO: 362903 - RNA, 20 nt, Artificial Sequence
  Synthetic
ucuuuagaagaauauuucau

SEQ ID NO: 362904 - RNA, 21 nt, Artificial Sequence
  Synthetic
uucuuuagaagaauauuucau

SEQ ID NO: 362905 - RNA, 22 nt, Artificial Sequence
  Synthetic
uuucuuuagaagaauauuucau

SEQ ID NO: 362906 - RNA, 23 nt, Artificial Sequence
  Synthetic
cuuucuuuagaagaauauuucau

SEQ ID NO: 362907 - RNA, 24 nt, Artificial Sequence
  Synthetic
gcuuucuuuagaagaauauuucau

SEQ ID NO: 362908 - RNA, 18 nt, Artificial Sequence
  Synthetic
gcuuugguaguauuucau

SEQ ID NO: 362909 - RNA, 19 nt, Artificial Sequence
  Synthetic
agcuuugguaguauuucau

SEQ ID NO: 362910 - RNA, 20 nt, Artificial Sequence
  Synthetic
aagcuuugguaguauuucau

SEQ ID NO: 362911 - RNA, 21 nt, Artificial Sequence
  Synthetic
aaagcuuugguaguauuucau

SEQ ID NO: 362912 - RNA, 22 nt, Artificial Sequence
  Synthetic
caaagcuuugguaguauuucau

SEQ ID NO: 362913 - RNA, 23 nt, Artificial Sequence
  Synthetic
acaaagcuuugguaguauuucau

SEQ ID NO: 362914 - RNA, 24 nt, Artificial Sequence
  Synthetic
gacaaagcuuugguaguauuucau

SEQ ID NO: 362915 - RNA, 18 nt, Artificial Sequence
  Synthetic
uaauguuagguauuucau

SEQ ID NO: 362916 - RNA, 19 nt, Artificial Sequence
  Synthetic
auaauguuagguauuucau

SEQ ID NO: 362917 - RNA, 20 nt, Artificial Sequence
  Synthetic
uauaauguuagguauuucau

SEQ ID NO: 362918 - RNA, 21 nt, Artificial Sequence
  Synthetic
guauaauguuagguauuucau

SEQ ID NO: 362919 - RNA, 22 nt, Artificial Sequence
  Synthetic
gguauaauguuagguauuucau

SEQ ID NO: 362920 - RNA, 23 nt, Artificial Sequence
  Synthetic
agguauaauguuagguauuucau

SEQ ID NO: 362921 - RNA, 24 nt, Artificial Sequence
  Synthetic
gagguauaauguuagguauuucau

SEQ ID NO: 362922 - RNA, 18 nt, Artificial Sequence
  Synthetic
uuugaaauuuuauuucau

SEQ ID NO: 362923 - RNA, 19 nt, Artificial Sequence
  Synthetic
auuugaaauuuuauuucau

SEQ ID NO: 362924 - RNA, 20 nt, Artificial Sequence
  Synthetic
cauuugaaauuuuauuucau

SEQ ID NO: 362925 - RNA, 21 nt, Artificial Sequence
  Synthetic
acauuugaaauuuuauuucau

SEQ ID NO: 362926 - RNA, 22 nt, Artificial Sequence
  Synthetic
uacauuugaaauuuuauuucau

SEQ ID NO: 362927 - RNA, 23 nt, Artificial Sequence
  Synthetic
auacauuugaaauuuuauuucau

SEQ ID NO: 362928 - RNA, 24 nt, Artificial Sequence
  Synthetic
uauacauuugaaauuuuauuucau

SEQ ID NO: 362929 - RNA, 18 nt, Artificial Sequence
  Synthetic
agaaaaagagucuuucau

SEQ ID NO: 362930 - RNA, 19 nt, Artificial Sequence
  Synthetic
aagaaaaagagucuuucau

SEQ ID NO: 362931 - RNA, 20 nt, Artificial Sequence
  Synthetic
uaagaaaaagagucuuucau

SEQ ID NO: 362932 - RNA, 21 nt, Artificial Sequence
  Synthetic
cuaagaaaaagagucuuucau

SEQ ID NO: 362933 - RNA, 22 nt, Artificial Sequence
  Synthetic
ucuaagaaaaagagucuuucau

SEQ ID NO: 362934 - RNA, 23 nt, Artificial Sequence
  Synthetic
cucuaagaaaaagagucuuucau

SEQ ID NO: 362935 - RNA, 24 nt, Artificial Sequence
  Synthetic
ucucuaagaaaaagagucuuucau

SEQ ID NO: 362936 - RNA, 18 nt, Artificial Sequence
  Synthetic
ugggcaugucaguuucau

SEQ ID NO: 362937 - RNA, 19 nt, Artificial Sequence
  Synthetic
augggcaugucaguuucau

SEQ ID NO: 362938 - RNA, 20 nt, Artificial Sequence
  Synthetic
uaugggcaugucaguuucau

SEQ ID NO: 362939 - RNA, 21 nt, Artificial Sequence
  Synthetic
auaugggcaugucaguuucau

SEQ ID NO: 362940 - RNA, 22 nt, Artificial Sequence
  Synthetic
gauaugggcaugucaguuucau

SEQ ID NO: 362941 - RNA, 23 nt, Artificial Sequence
  Synthetic
ggauaugggcaugucaguuucau

SEQ ID NO: 362942 - RNA, 24 nt, Artificial Sequence
  Synthetic
uggauaugggcaugucaguuucau

SEQ ID NO: 362943 - RNA, 18 nt, Artificial Sequence
  Synthetic
guucuuuuucaguuucau

SEQ ID NO: 362944 - RNA, 19 nt, Artificial Sequence
  Synthetic
aguucuuuuucaguuucau

SEQ ID NO: 362945 - RNA, 20 nt, Artificial Sequence
  Synthetic
aaguucuuuuucaguuucau

SEQ ID NO: 362946 - RNA, 21 nt, Artificial Sequence
  Synthetic
uaaguucuuuuucaguuucau

SEQ ID NO: 362947 - RNA, 22 nt, Artificial Sequence
  Synthetic
auaaguucuuuuucaguuucau

SEQ ID NO: 362948 - RNA, 23 nt, Artificial Sequence
  Synthetic
uauaaguucuuuuucaguuucau

SEQ ID NO: 362949 - RNA, 24 nt, Artificial Sequence
  Synthetic
auauaaguucuuuuucaguuucau

SEQ ID NO: 362950 - RNA, 18 nt, Artificial Sequence
  Synthetic
cuauugaaauaguuucau

SEQ ID NO: 362951 - RNA, 19 nt, Artificial Sequence
  Synthetic
acuauugaaauaguuucau

SEQ ID NO: 362952 - RNA, 20 nt, Artificial Sequence
  Synthetic
aacuauugaaauaguuucau

SEQ ID NO: 362953 - RNA, 21 nt, Artificial Sequence
  Synthetic
aaacuauugaaauaguuucau

SEQ ID NO: 362954 - RNA, 22 nt, Artificial Sequence
  Synthetic
caaacuauugaaauaguuucau

SEQ ID NO: 362955 - RNA, 23 nt, Artificial Sequence
  Synthetic
ucaaacuauugaaauaguuucau

SEQ ID NO: 362956 - RNA, 24 nt, Artificial Sequence
  Synthetic
gucaaacuauugaaauaguuucau

SEQ ID NO: 362957 - RNA, 18 nt, Artificial Sequence
  Synthetic
aauugguauggguuucau

SEQ ID NO: 362958 - RNA, 19 nt, Artificial Sequence
  Synthetic
uaauugguauggguuucau

SEQ ID NO: 362959 - RNA, 20 nt, Artificial Sequence
  Synthetic
uuaauugguauggguuucau

SEQ ID NO: 362960 - RNA, 21 nt, Artificial Sequence
  Synthetic
guuaauugguauggguuucau

SEQ ID NO: 362961 - RNA, 22 nt, Artificial Sequence
  Synthetic
uguuaauugguauggguuucau

SEQ ID NO: 362962 - RNA, 23 nt, Artificial Sequence
  Synthetic
cuguuaauugguauggguuucau

SEQ ID NO: 362963 - RNA, 24 nt, Artificial Sequence
  Synthetic
acuguuaauugguauggguuucau

SEQ ID NO: 362964 - RNA, 18 nt, Artificial Sequence
  Synthetic
ugaagacauauguuucau

SEQ ID NO: 362965 - RNA, 19 nt, Artificial Sequence
  Synthetic
uugaagacauauguuucau

SEQ ID NO: 362966 - RNA, 20 nt, Artificial Sequence
  Synthetic
uuugaagacauauguuucau

SEQ ID NO: 362967 - RNA, 21 nt, Artificial Sequence
  Synthetic
guuugaagacauauguuucau

SEQ ID NO: 362968 - RNA, 22 nt, Artificial Sequence
  Synthetic
uguuugaagacauauguuucau

SEQ ID NO: 362969 - RNA, 23 nt, Artificial Sequence
  Synthetic
cuguuugaagacauauguuucau

SEQ ID NO: 362970 - RNA, 24 nt, Artificial Sequence
  Synthetic
acuguuugaagacauauguuucau

SEQ ID NO: 362971 - RNA, 18 nt, Artificial Sequence
  Synthetic
ccugcagcacauuuucau

SEQ ID NO: 362972 - RNA, 19 nt, Artificial Sequence
  Synthetic
gccugcagcacauuuucau

SEQ ID NO: 362973 - RNA, 20 nt, Artificial Sequence
  Synthetic
agccugcagcacauuuucau

SEQ ID NO: 362974 - RNA, 21 nt, Artificial Sequence
  Synthetic
uagccugcagcacauuuucau

SEQ ID NO: 362975 - RNA, 22 nt, Artificial Sequence
  Synthetic
guagccugcagcacauuuucau

SEQ ID NO: 362976 - RNA, 23 nt, Artificial Sequence
  Synthetic
aguagccugcagcacauuuucau

SEQ ID NO: 362977 - RNA, 24 nt, Artificial Sequence
  Synthetic
gaguagccugcagcacauuuucau

SEQ ID NO: 362978 - RNA, 18 nt, Artificial Sequence
  Synthetic
uauuauuuccauuuucau

SEQ ID NO: 362979 - RNA, 19 nt, Artificial Sequence
  Synthetic
cuauuauuuccauuuucau

SEQ ID NO: 362980 - RNA, 20 nt, Artificial Sequence
  Synthetic
ccuauuauuuccauuuucau

SEQ ID NO: 362981 - RNA, 21 nt, Artificial Sequence
  Synthetic
uccuauuauuuccauuuucau

SEQ ID NO: 362982 - RNA, 22 nt, Artificial Sequence
  Synthetic
cuccuauuauuuccauuuucau

SEQ ID NO: 362983 - RNA, 23 nt, Artificial Sequence
  Synthetic
acuccuauuauuuccauuuucau

SEQ ID NO: 362984 - RNA, 24 nt, Artificial Sequence
  Synthetic
uacuccuauuauuuccauuuucau

SEQ ID NO: 362985 - RNA, 18 nt, Artificial Sequence
  Synthetic
gaacucacucauuuucau

SEQ ID NO: 362986 - RNA, 19 nt, Artificial Sequence
  Synthetic
agaacucacucauuuucau

SEQ ID NO: 362987 - RNA, 20 nt, Artificial Sequence
  Synthetic
gagaacucacucauuuucau

SEQ ID NO: 362988 - RNA, 21 nt, Artificial Sequence
  Synthetic
ggagaacucacucauuuucau

SEQ ID NO: 362989 - RNA, 22 nt, Artificial Sequence
  Synthetic
uggagaacucacucauuuucau

SEQ ID NO: 362990 - RNA, 23 nt, Artificial Sequence
  Synthetic
uuggagaacucacucauuuucau

SEQ ID NO: 362991 - RNA, 24 nt, Artificial Sequence
  Synthetic
cuuggagaacucacucauuuucau

SEQ ID NO: 362992 - RNA, 18 nt, Artificial Sequence
  Synthetic
caugguucucauuuucau

SEQ ID NO: 362993 - RNA, 19 nt, Artificial Sequence
  Synthetic
ucaugguucucauuuucau

SEQ ID NO: 362994 - RNA, 20 nt, Artificial Sequence
  Synthetic
uucaugguucucauuuucau

SEQ ID NO: 362995 - RNA, 21 nt, Artificial Sequence
  Synthetic
cuucaugguucucauuuucau

SEQ ID NO: 362996 - RNA, 22 nt, Artificial Sequence
  Synthetic
gcuucaugguucucauuuucau

SEQ ID NO: 362997 - RNA, 23 nt, Artificial Sequence
  Synthetic
ggcuucaugguucucauuuucau

SEQ ID NO: 362998 - RNA, 24 nt, Artificial Sequence
  Synthetic
aggcuucaugguucucauuuucau

SEQ ID NO: 362999 - RNA, 18 nt, Artificial Sequence
  Synthetic
uauagucaagauuuucau

SEQ ID NO: 363000 - RNA, 19 nt, Artificial Sequence
  Synthetic
cuauagucaagauuuucau

SEQ ID NO: 363001 - RNA, 20 nt, Artificial Sequence
  Synthetic
ucuauagucaagauuuucau

SEQ ID NO: 363002 - RNA, 21 nt, Artificial Sequence
  Synthetic
aucuauagucaagauuuucau

SEQ ID NO: 363003 - RNA, 22 nt, Artificial Sequence
  Synthetic
aaucuauagucaagauuuucau

SEQ ID NO: 363004 - RNA, 23 nt, Artificial Sequence
  Synthetic
aaaucuauagucaagauuuucau

SEQ ID NO: 363005 - RNA, 24 nt, Artificial Sequence
  Synthetic
aaaaucuauagucaagauuuucau

SEQ ID NO: 363006 - RNA, 18 nt, Artificial Sequence
  Synthetic
cugagcuuguauuuucau

SEQ ID NO: 363007 - RNA, 19 nt, Artificial Sequence
  Synthetic
ucugagcuuguauuuucau

SEQ ID NO: 363008 - RNA, 20 nt, Artificial Sequence
  Synthetic
cucugagcuuguauuuucau

SEQ ID NO: 363009 - RNA, 21 nt, Artificial Sequence
  Synthetic
gcucugagcuuguauuuucau

SEQ ID NO: 363010 - RNA, 22 nt, Artificial Sequence
  Synthetic
ggcucugagcuuguauuuucau

SEQ ID NO: 363011 - RNA, 23 nt, Artificial Sequence
  Synthetic
uggcucugagcuuguauuuucau

SEQ ID NO: 363012 - RNA, 24 nt, Artificial Sequence
  Synthetic
guggcucugagcuuguauuuucau

SEQ ID NO: 363013 - RNA, 18 nt, Artificial Sequence
  Synthetic
aauaucagaacuuuucau

SEQ ID NO: 363014 - RNA, 19 nt, Artificial Sequence
  Synthetic
aaauaucagaacuuuucau

SEQ ID NO: 363015 - RNA, 20 nt, Artificial Sequence
  Synthetic
gaaauaucagaacuuuucau

SEQ ID NO: 363016 - RNA, 21 nt, Artificial Sequence
  Synthetic
ugaaauaucagaacuuuucau

SEQ ID NO: 363017 - RNA, 22 nt, Artificial Sequence
  Synthetic
cugaaauaucagaacuuuucau

SEQ ID NO: 363018 - RNA, 23 nt, Artificial Sequence
  Synthetic
ucugaaauaucagaacuuuucau

SEQ ID NO: 363019 - RNA, 24 nt, Artificial Sequence
  Synthetic
uucugaaauaucagaacuuuucau

SEQ ID NO: 363020 - RNA, 18 nt, Artificial Sequence
  Synthetic
agaacauccacuuuucau

SEQ ID NO: 363021 - RNA, 19 nt, Artificial Sequence
  Synthetic
aagaacauccacuuuucau

SEQ ID NO: 363022 - RNA, 20 nt, Artificial Sequence
  Synthetic
gaagaacauccacuuuucau

SEQ ID NO: 363023 - RNA, 21 nt, Artificial Sequence
  Synthetic
ugaagaacauccacuuuucau

SEQ ID NO: 363024 - RNA, 22 nt, Artificial Sequence
  Synthetic
gugaagaacauccacuuuucau

SEQ ID NO: 363025 - RNA, 23 nt, Artificial Sequence
  Synthetic
ugugaagaacauccacuuuucau

SEQ ID NO: 363026 - RNA, 24 nt, Artificial Sequence
  Synthetic
augugaagaacauccacuuuucau

SEQ ID NO: 363027 - RNA, 18 nt, Artificial Sequence
  Synthetic
uucugggcuucuuuucau

SEQ ID NO: 363028 - RNA, 19 nt, Artificial Sequence
  Synthetic
cuucugggcuucuuuucau

SEQ ID NO: 363029 - RNA, 20 nt, Artificial Sequence
  Synthetic
acuucugggcuucuuuucau

SEQ ID NO: 363030 - RNA, 21 nt, Artificial Sequence
  Synthetic
cacuucugggcuucuuuucau

SEQ ID NO: 363031 - RNA, 22 nt, Artificial Sequence
  Synthetic
ucacuucugggcuucuuuucau

SEQ ID NO: 363032 - RNA, 23 nt, Artificial Sequence
  Synthetic
uucacuucugggcuucuuuucau

SEQ ID NO: 363033 - RNA, 24 nt, Artificial Sequence
  Synthetic
uuucacuucugggcuucuuuucau

SEQ ID NO: 363034 - RNA, 18 nt, Artificial Sequence
  Synthetic
uuauccacuuguuuucau

SEQ ID NO: 363035 - RNA, 19 nt, Artificial Sequence
  Synthetic
uuuauccacuuguuuucau

SEQ ID NO: 363036 - RNA, 20 nt, Artificial Sequence
  Synthetic
auuuauccacuuguuuucau

SEQ ID NO: 363037 - RNA, 21 nt, Artificial Sequence
  Synthetic
aauuuauccacuuguuuucau

SEQ ID NO: 363038 - RNA, 22 nt, Artificial Sequence
  Synthetic
gaauuuauccacuuguuuucau

SEQ ID NO: 363039 - RNA, 23 nt, Artificial Sequence
  Synthetic
ugaauuuauccacuuguuuucau

SEQ ID NO: 363040 - RNA, 24 nt, Artificial Sequence
  Synthetic
uugaauuuauccacuuguuuucau

SEQ ID NO: 363041 - RNA, 18 nt, Artificial Sequence
  Synthetic
uauauauauuuuuuucau

SEQ ID NO: 363042 - RNA, 19 nt, Artificial Sequence
  Synthetic
auauauauauuuuuuucau

SEQ ID NO: 363043 - RNA, 20 nt, Artificial Sequence
  Synthetic
uauauauauauuuuuuucau

SEQ ID NO: 363044 - RNA, 21 nt, Artificial Sequence
  Synthetic
auauauauauauuuuuuucau

SEQ ID NO: 363045 - RNA, 22 nt, Artificial Sequence
  Synthetic
aauauauauauauuuuuuucau

SEQ ID NO: 363046 - RNA, 23 nt, Artificial Sequence
  Synthetic
aaauauauauauauuuuuuucau

SEQ ID NO: 363047 - RNA, 24 nt, Artificial Sequence
  Synthetic
aaaauauauauauauuuuuuucau

SEQ ID NO: 363048 - RNA, 18 nt, Artificial Sequence
  Synthetic
uuuaaaaaggaaaaagau

SEQ ID NO: 363049 - RNA, 19 nt, Artificial Sequence
  Synthetic
auuuaaaaaggaaaaagau

SEQ ID NO: 363050 - RNA, 20 nt, Artificial Sequence
  Synthetic
uauuuaaaaaggaaaaagau

SEQ ID NO: 363051 - RNA, 21 nt, Artificial Sequence
  Synthetic
auauuuaaaaaggaaaaagau

SEQ ID NO: 363052 - RNA, 22 nt, Artificial Sequence
  Synthetic
uauauuuaaaaaggaaaaagau

SEQ ID NO: 363053 - RNA, 23 nt, Artificial Sequence
  Synthetic
cuauauuuaaaaaggaaaaagau

SEQ ID NO: 363054 - RNA, 24 nt, Artificial Sequence
  Synthetic
ccuauauuuaaaaaggaaaaagau

SEQ ID NO: 363055 - RNA, 18 nt, Artificial Sequence
  Synthetic
uuagcguauuaaaaagau

SEQ ID NO: 363056 - RNA, 19 nt, Artificial Sequence
  Synthetic
auuagcguauuaaaaagau

SEQ ID NO: 363057 - RNA, 20 nt, Artificial Sequence
  Synthetic
cauuagcguauuaaaaagau

SEQ ID NO: 363058 - RNA, 21 nt, Artificial Sequence
  Synthetic
acauuagcguauuaaaaagau

SEQ ID NO: 363059 - RNA, 22 nt, Artificial Sequence
  Synthetic
gacauuagcguauuaaaaagau

SEQ ID NO: 363060 - RNA, 23 nt, Artificial Sequence
  Synthetic
ugacauuagcguauuaaaaagau

SEQ ID NO: 363061 - RNA, 24 nt, Artificial Sequence
  Synthetic
cugacauuagcguauuaaaaagau

SEQ ID NO: 363062 - RNA, 18 nt, Artificial Sequence
  Synthetic
cuucacuccccaaaagau

SEQ ID NO: 363063 - RNA, 19 nt, Artificial Sequence
  Synthetic
ccuucacuccccaaaagau

SEQ ID NO: 363064 - RNA, 20 nt, Artificial Sequence
  Synthetic
gccuucacuccccaaaagau

SEQ ID NO: 363065 - RNA, 21 nt, Artificial Sequence
  Synthetic
agccuucacuccccaaaagau

SEQ ID NO: 363066 - RNA, 22 nt, Artificial Sequence
  Synthetic
cagccuucacuccccaaaagau

SEQ ID NO: 363067 - RNA, 23 nt, Artificial Sequence
  Synthetic
gcagccuucacuccccaaaagau

SEQ ID NO: 363068 - RNA, 24 nt, Artificial Sequence
  Synthetic
ugcagccuucacuccccaaaagau

SEQ ID NO: 363069 - RNA, 18 nt, Artificial Sequence
  Synthetic
auagccaauccaaaagau

SEQ ID NO: 363070 - RNA, 19 nt, Artificial Sequence
  Synthetic
aauagccaauccaaaagau

SEQ ID NO: 363071 - RNA, 20 nt, Artificial Sequence
  Synthetic
uaauagccaauccaaaagau

SEQ ID NO: 363072 - RNA, 21 nt, Artificial Sequence
  Synthetic
auaauagccaauccaaaagau

SEQ ID NO: 363073 - RNA, 22 nt, Artificial Sequence
  Synthetic
gauaauagccaauccaaaagau

SEQ ID NO: 363074 - RNA, 23 nt, Artificial Sequence
  Synthetic
ugauaauagccaauccaaaagau

SEQ ID NO: 363075 - RNA, 24 nt, Artificial Sequence
  Synthetic
uugauaauagccaauccaaaagau

SEQ ID NO: 363076 - RNA, 18 nt, Artificial Sequence
  Synthetic
gugacauuugcaaaagau

SEQ ID NO: 363077 - RNA, 19 nt, Artificial Sequence
  Synthetic
ggugacauuugcaaaagau

SEQ ID NO: 363078 - RNA, 20 nt, Artificial Sequence
  Synthetic
aggugacauuugcaaaagau

SEQ ID NO: 363079 - RNA, 21 nt, Artificial Sequence
  Synthetic
aaggugacauuugcaaaagau

SEQ ID NO: 363080 - RNA, 22 nt, Artificial Sequence
  Synthetic
gaaggugacauuugcaaaagau

SEQ ID NO: 363081 - RNA, 23 nt, Artificial Sequence
  Synthetic
agaaggugacauuugcaaaagau

SEQ ID NO: 363082 - RNA, 24 nt, Artificial Sequence
  Synthetic
gagaaggugacauuugcaaaagau

SEQ ID NO: 363083 - RNA, 18 nt, Artificial Sequence
  Synthetic
cauuagguaggaaaagau

SEQ ID NO: 363084 - RNA, 19 nt, Artificial Sequence
  Synthetic
acauuagguaggaaaagau

SEQ ID NO: 363085 - RNA, 20 nt, Artificial Sequence
  Synthetic
aacauuagguaggaaaagau

SEQ ID NO: 363086 - RNA, 21 nt, Artificial Sequence
  Synthetic
caacauuagguaggaaaagau

SEQ ID NO: 363087 - RNA, 22 nt, Artificial Sequence
  Synthetic
ucaacauuagguaggaaaagau

SEQ ID NO: 363088 - RNA, 23 nt, Artificial Sequence
  Synthetic
cucaacauuagguaggaaaagau

SEQ ID NO: 363089 - RNA, 24 nt, Artificial Sequence
  Synthetic
ucucaacauuagguaggaaaagau

SEQ ID NO: 363090 - RNA, 18 nt, Artificial Sequence
  Synthetic
uuuuaguauggaaaagau

SEQ ID NO: 363091 - RNA, 19 nt, Artificial Sequence
  Synthetic
uuuuuaguauggaaaagau

SEQ ID NO: 363092 - RNA, 20 nt, Artificial Sequence
  Synthetic
auuuuuaguauggaaaagau

SEQ ID NO: 363093 - RNA, 21 nt, Artificial Sequence
  Synthetic
cauuuuuaguauggaaaagau

SEQ ID NO: 363094 - RNA, 22 nt, Artificial Sequence
  Synthetic
acauuuuuaguauggaaaagau

SEQ ID NO: 363095 - RNA, 23 nt, Artificial Sequence
  Synthetic
uacauuuuuaguauggaaaagau

SEQ ID NO: 363096 - RNA, 24 nt, Artificial Sequence
  Synthetic
auacauuuuuaguauggaaaagau

SEQ ID NO: 363097 - RNA, 18 nt, Artificial Sequence
  Synthetic
aaauagaaaugaaaagau

SEQ ID NO: 363098 - RNA, 19 nt, Artificial Sequence
  Synthetic
gaaauagaaaugaaaagau

SEQ ID NO: 363099 - RNA, 20 nt, Artificial Sequence
  Synthetic
ugaaauagaaaugaaaagau

SEQ ID NO: 363100 - RNA, 21 nt, Artificial Sequence
  Synthetic
augaaauagaaaugaaaagau

SEQ ID NO: 363101 - RNA, 22 nt, Artificial Sequence
  Synthetic
aaugaaauagaaaugaaaagau

SEQ ID NO: 363102 - RNA, 23 nt, Artificial Sequence
  Synthetic
uaaugaaauagaaaugaaaagau

SEQ ID NO: 363103 - RNA, 24 nt, Artificial Sequence
  Synthetic
cuaaugaaauagaaaugaaaagau

SEQ ID NO: 363104 - RNA, 18 nt, Artificial Sequence
  Synthetic
aaauuacuaauaaaagau

SEQ ID NO: 363105 - RNA, 19 nt, Artificial Sequence
  Synthetic
caaauuacuaauaaaagau

SEQ ID NO: 363106 - RNA, 20 nt, Artificial Sequence
  Synthetic
gcaaauuacuaauaaaagau

SEQ ID NO: 363107 - RNA, 21 nt, Artificial Sequence
  Synthetic
ugcaaauuacuaauaaaagau

SEQ ID NO: 363108 - RNA, 22 nt, Artificial Sequence
  Synthetic
uugcaaauuacuaauaaaagau

SEQ ID NO: 363109 - RNA, 23 nt, Artificial Sequence
  Synthetic
cuugcaaauuacuaauaaaagau

SEQ ID NO: 363110 - RNA, 24 nt, Artificial Sequence
  Synthetic
ccuugcaaauuacuaauaaaagau

SEQ ID NO: 363111 - RNA, 18 nt, Artificial Sequence
  Synthetic
cuaauaauuauaaaagau

SEQ ID NO: 363112 - RNA, 19 nt, Artificial Sequence
  Synthetic
gcuaauaauuauaaaagau

SEQ ID NO: 363113 - RNA, 20 nt, Artificial Sequence
  Synthetic
ugcuaauaauuauaaaagau

SEQ ID NO: 363114 - RNA, 21 nt, Artificial Sequence
  Synthetic
uugcuaauaauuauaaaagau

SEQ ID NO: 363115 - RNA, 22 nt, Artificial Sequence
  Synthetic
uuugcuaauaauuauaaaagau

SEQ ID NO: 363116 - RNA, 23 nt, Artificial Sequence
  Synthetic
auuugcuaauaauuauaaaagau

SEQ ID NO: 363117 - RNA, 24 nt, Artificial Sequence
  Synthetic
uauuugcuaauaauuauaaaagau

SEQ ID NO: 363118 - RNA, 18 nt, Artificial Sequence
  Synthetic
cuuaacauucuaaaagau

SEQ ID NO: 363119 - RNA, 19 nt, Artificial Sequence
  Synthetic
gcuuaacauucuaaaagau

SEQ ID NO: 363120 - RNA, 20 nt, Artificial Sequence
  Synthetic
ugcuuaacauucuaaaagau

SEQ ID NO: 363121 - RNA, 21 nt, Artificial Sequence
  Synthetic
augcuuaacauucuaaaagau

SEQ ID NO: 363122 - RNA, 22 nt, Artificial Sequence
  Synthetic
uaugcuuaacauucuaaaagau

SEQ ID NO: 363123 - RNA, 23 nt, Artificial Sequence
  Synthetic
cuaugcuuaacauucuaaaagau

SEQ ID NO: 363124 - RNA, 24 nt, Artificial Sequence
  Synthetic
gcuaugcuuaacauucuaaaagau

SEQ ID NO: 363125 - RNA, 18 nt, Artificial Sequence
  Synthetic
guaaccaaccacaaagau

SEQ ID NO: 363126 - RNA, 19 nt, Artificial Sequence
  Synthetic
uguaaccaaccacaaagau

SEQ ID NO: 363127 - RNA, 20 nt, Artificial Sequence
  Synthetic
auguaaccaaccacaaagau

SEQ ID NO: 363128 - RNA, 21 nt, Artificial Sequence
  Synthetic
aauguaaccaaccacaaagau

SEQ ID NO: 363129 - RNA, 22 nt, Artificial Sequence
  Synthetic
aaauguaaccaaccacaaagau

SEQ ID NO: 363130 - RNA, 23 nt, Artificial Sequence
  Synthetic
aaaauguaaccaaccacaaagau

SEQ ID NO: 363131 - RNA, 24 nt, Artificial Sequence
  Synthetic
uaaaauguaaccaaccacaaagau

SEQ ID NO: 363132 - RNA, 18 nt, Artificial Sequence
  Synthetic
augcacauccacaaagau

SEQ ID NO: 363133 - RNA, 19 nt, Artificial Sequence
  Synthetic
uaugcacauccacaaagau

SEQ ID NO: 363134 - RNA, 20 nt, Artificial Sequence
  Synthetic
uuaugcacauccacaaagau

SEQ ID NO: 363135 - RNA, 21 nt, Artificial Sequence
  Synthetic
auuaugcacauccacaaagau

SEQ ID NO: 363136 - RNA, 22 nt, Artificial Sequence
  Synthetic
aauuaugcacauccacaaagau

SEQ ID NO: 363137 - RNA, 23 nt, Artificial Sequence
  Synthetic
caauuaugcacauccacaaagau

SEQ ID NO: 363138 - RNA, 24 nt, Artificial Sequence
  Synthetic
ucaauuaugcacauccacaaagau

SEQ ID NO: 363139 - RNA, 18 nt, Artificial Sequence
  Synthetic
aacaauuacuacaaagau

SEQ ID NO: 363140 - RNA, 19 nt, Artificial Sequence
  Synthetic
uaacaauuacuacaaagau

SEQ ID NO: 363141 - RNA, 20 nt, Artificial Sequence
  Synthetic
auaacaauuacuacaaagau

SEQ ID NO: 363142 - RNA, 21 nt, Artificial Sequence
  Synthetic
cauaacaauuacuacaaagau

SEQ ID NO: 363143 - RNA, 22 nt, Artificial Sequence
  Synthetic
gcauaacaauuacuacaaagau

SEQ ID NO: 363144 - RNA, 23 nt, Artificial Sequence
  Synthetic
ugcauaacaauuacuacaaagau

SEQ ID NO: 363145 - RNA, 24 nt, Artificial Sequence
  Synthetic
cugcauaacaauuacuacaaagau

SEQ ID NO: 363146 - RNA, 18 nt, Artificial Sequence
  Synthetic
cguggcauauccaaagau

SEQ ID NO: 363147 - RNA, 19 nt, Artificial Sequence
  Synthetic
acguggcauauccaaagau

SEQ ID NO: 363148 - RNA, 20 nt, Artificial Sequence
  Synthetic
cacguggcauauccaaagau

SEQ ID NO: 363149 - RNA, 21 nt, Artificial Sequence
  Synthetic
ucacguggcauauccaaagau

SEQ ID NO: 363150 - RNA, 22 nt, Artificial Sequence
  Synthetic
gucacguggcauauccaaagau

SEQ ID NO: 363151 - RNA, 23 nt, Artificial Sequence
  Synthetic
agucacguggcauauccaaagau

SEQ ID NO: 363152 - RNA, 24 nt, Artificial Sequence
  Synthetic
aagucacguggcauauccaaagau

SEQ ID NO: 363153 - RNA, 18 nt, Artificial Sequence
  Synthetic
ugaccuuugagcaaagau

SEQ ID NO: 363154 - RNA, 19 nt, Artificial Sequence
  Synthetic
augaccuuugagcaaagau

SEQ ID NO: 363155 - RNA, 20 nt, Artificial Sequence
  Synthetic
aaugaccuuugagcaaagau

SEQ ID NO: 363156 - RNA, 21 nt, Artificial Sequence
  Synthetic
aaaugaccuuugagcaaagau

SEQ ID NO: 363157 - RNA, 22 nt, Artificial Sequence
  Synthetic
gaaaugaccuuugagcaaagau

SEQ ID NO: 363158 - RNA, 23 nt, Artificial Sequence
  Synthetic
agaaaugaccuuugagcaaagau

SEQ ID NO: 363159 - RNA, 24 nt, Artificial Sequence
  Synthetic
uagaaaugaccuuugagcaaagau

SEQ ID NO: 363160 - RNA, 18 nt, Artificial Sequence
  Synthetic
auucacaguugcaaagau

SEQ ID NO: 363161 - RNA, 19 nt, Artificial Sequence
  Synthetic
aauucacaguugcaaagau

SEQ ID NO: 363162 - RNA, 20 nt, Artificial Sequence
  Synthetic
caauucacaguugcaaagau

SEQ ID NO: 363163 - RNA, 21 nt, Artificial Sequence
  Synthetic
acaauucacaguugcaaagau

SEQ ID NO: 363164 - RNA, 22 nt, Artificial Sequence
  Synthetic
cacaauucacaguugcaaagau

SEQ ID NO: 363165 - RNA, 23 nt, Artificial Sequence
  Synthetic
gcacaauucacaguugcaaagau

SEQ ID NO: 363166 - RNA, 24 nt, Artificial Sequence
  Synthetic
agcacaauucacaguugcaaagau

SEQ ID NO: 363167 - RNA, 18 nt, Artificial Sequence
  Synthetic
acaauggcguucaaagau

SEQ ID NO: 363168 - RNA, 19 nt, Artificial Sequence
  Synthetic
aacaauggcguucaaagau

SEQ ID NO: 363169 - RNA, 20 nt, Artificial Sequence
  Synthetic
aaacaauggcguucaaagau

SEQ ID NO: 363170 - RNA, 21 nt, Artificial Sequence
  Synthetic
aaaacaauggcguucaaagau

SEQ ID NO: 363171 - RNA, 22 nt, Artificial Sequence
  Synthetic
caaaacaauggcguucaaagau

SEQ ID NO: 363172 - RNA, 23 nt, Artificial Sequence
  Synthetic
acaaaacaauggcguucaaagau

SEQ ID NO: 363173 - RNA, 24 nt, Artificial Sequence
  Synthetic
cacaaaacaauggcguucaaagau

SEQ ID NO: 363174 - RNA, 18 nt, Artificial Sequence
  Synthetic
aauagcauuuucaaagau

SEQ ID NO: 363175 - RNA, 19 nt, Artificial Sequence
  Synthetic
caauagcauuuucaaagau

SEQ ID NO: 363176 - RNA, 20 nt, Artificial Sequence
  Synthetic
gcaauagcauuuucaaagau

SEQ ID NO: 363177 - RNA, 21 nt, Artificial Sequence
  Synthetic
ggcaauagcauuuucaaagau

SEQ ID NO: 363178 - RNA, 22 nt, Artificial Sequence
  Synthetic
uggcaauagcauuuucaaagau

SEQ ID NO: 363179 - RNA, 23 nt, Artificial Sequence
  Synthetic
auggcaauagcauuuucaaagau

SEQ ID NO: 363180 - RNA, 24 nt, Artificial Sequence
  Synthetic
aauggcaauagcauuuucaaagau

SEQ ID NO: 363181 - RNA, 18 nt, Artificial Sequence
  Synthetic
augaaguuagagaaagau

SEQ ID NO: 363182 - RNA, 19 nt, Artificial Sequence
  Synthetic
aaugaaguuagagaaagau

SEQ ID NO: 363183 - RNA, 20 nt, Artificial Sequence
  Synthetic
aaaugaaguuagagaaagau

SEQ ID NO: 363184 - RNA, 21 nt, Artificial Sequence
  Synthetic
gaaaugaaguuagagaaagau

SEQ ID NO: 363185 - RNA, 22 nt, Artificial Sequence
  Synthetic
ggaaaugaaguuagagaaagau

SEQ ID NO: 363186 - RNA, 23 nt, Artificial Sequence
  Synthetic
uggaaaugaaguuagagaaagau

SEQ ID NO: 363187 - RNA, 24 nt, Artificial Sequence
  Synthetic
cuggaaaugaaguuagagaaagau

SEQ ID NO: 363188 - RNA, 18 nt, Artificial Sequence
  Synthetic
agaaugaauuggaaagau

SEQ ID NO: 363189 - RNA, 19 nt, Artificial Sequence
  Synthetic
gagaaugaauuggaaagau

SEQ ID NO: 363190 - RNA, 20 nt, Artificial Sequence
  Synthetic
ggagaaugaauuggaaagau

SEQ ID NO: 363191 - RNA, 21 nt, Artificial Sequence
  Synthetic
aggagaaugaauuggaaagau

SEQ ID NO: 363192 - RNA, 22 nt, Artificial Sequence
  Synthetic
uaggagaaugaauuggaaagau

SEQ ID NO: 363193 - RNA, 23 nt, Artificial Sequence
  Synthetic
uuaggagaaugaauuggaaagau

SEQ ID NO: 363194 - RNA, 24 nt, Artificial Sequence
  Synthetic
guuaggagaaugaauuggaaagau

SEQ ID NO: 363195 - RNA, 18 nt, Artificial Sequence
  Synthetic
uaaguauauuugaaagau

SEQ ID NO: 363196 - RNA, 19 nt, Artificial Sequence
  Synthetic
auaaguauauuugaaagau

SEQ ID NO: 363197 - RNA, 20 nt, Artificial Sequence
  Synthetic
cauaaguauauuugaaagau

SEQ ID NO: 363198 - RNA, 21 nt, Artificial Sequence
  Synthetic
ucauaaguauauuugaaagau

SEQ ID NO: 363199 - RNA, 22 nt, Artificial Sequence
  Synthetic
uucauaaguauauuugaaagau

SEQ ID NO: 363200 - RNA, 23 nt, Artificial Sequence
  Synthetic
auucauaaguauauuugaaagau

SEQ ID NO: 363201 - RNA, 24 nt, Artificial Sequence
  Synthetic
uauucauaaguauauuugaaagau

SEQ ID NO: 363202 - RNA, 18 nt, Artificial Sequence
  Synthetic
uuaagcugaaauaaagau

SEQ ID NO: 363203 - RNA, 19 nt, Artificial Sequence
  Synthetic
auuaagcugaaauaaagau

SEQ ID NO: 363204 - RNA, 20 nt, Artificial Sequence
  Synthetic
uauuaagcugaaauaaagau

SEQ ID NO: 363205 - RNA, 21 nt, Artificial Sequence
  Synthetic
auauuaagcugaaauaaagau

SEQ ID NO: 363206 - RNA, 22 nt, Artificial Sequence
  Synthetic
aauauuaagcugaaauaaagau

SEQ ID NO: 363207 - RNA, 23 nt, Artificial Sequence
  Synthetic
gaauauuaagcugaaauaaagau

SEQ ID NO: 363208 - RNA, 24 nt, Artificial Sequence
  Synthetic
agaauauuaagcugaaauaaagau

SEQ ID NO: 363209 - RNA, 18 nt, Artificial Sequence
  Synthetic
cugaaaucauauaaagau

SEQ ID NO: 363210 - RNA, 19 nt, Artificial Sequence
  Synthetic
ucugaaaucauauaaagau

SEQ ID NO: 363211 - RNA, 20 nt, Artificial Sequence
  Synthetic
aucugaaaucauauaaagau

SEQ ID NO: 363212 - RNA, 21 nt, Artificial Sequence
  Synthetic
uaucugaaaucauauaaagau

SEQ ID NO: 363213 - RNA, 22 nt, Artificial Sequence
  Synthetic
uuaucugaaaucauauaaagau

SEQ ID NO: 363214 - RNA, 23 nt, Artificial Sequence
  Synthetic
cuuaucugaaaucauauaaagau

SEQ ID NO: 363215 - RNA, 24 nt, Artificial Sequence
  Synthetic
ccuuaucugaaaucauauaaagau

SEQ ID NO: 363216 - RNA, 18 nt, Artificial Sequence
  Synthetic
augcuuuguuauaaagau

SEQ ID NO: 363217 - RNA, 19 nt, Artificial Sequence
  Synthetic
gaugcuuuguuauaaagau

SEQ ID NO: 363218 - RNA, 20 nt, Artificial Sequence
  Synthetic
cgaugcuuuguuauaaagau

SEQ ID NO: 363219 - RNA, 21 nt, Artificial Sequence
  Synthetic
ucgaugcuuuguuauaaagau

SEQ ID NO: 363220 - RNA, 22 nt, Artificial Sequence
  Synthetic
uucgaugcuuuguuauaaagau

SEQ ID NO: 363221 - RNA, 23 nt, Artificial Sequence
  Synthetic
guucgaugcuuuguuauaaagau

SEQ ID NO: 363222 - RNA, 24 nt, Artificial Sequence
  Synthetic
uguucgaugcuuuguuauaaagau

SEQ ID NO: 363223 - RNA, 18 nt, Artificial Sequence
  Synthetic
uucauaaugauuaaagau

SEQ ID NO: 363224 - RNA, 19 nt, Artificial Sequence
  Synthetic
uuucauaaugauuaaagau

SEQ ID NO: 363225 - RNA, 20 nt, Artificial Sequence
  Synthetic
uuuucauaaugauuaaagau

SEQ ID NO: 363226 - RNA, 21 nt, Artificial Sequence
  Synthetic
uuuuucauaaugauuaaagau

SEQ ID NO: 363227 - RNA, 22 nt, Artificial Sequence
  Synthetic
guuuuucauaaugauuaaagau

SEQ ID NO: 363228 - RNA, 23 nt, Artificial Sequence
  Synthetic
uguuuuucauaaugauuaaagau

SEQ ID NO: 363229 - RNA, 24 nt, Artificial Sequence
  Synthetic
guguuuuucauaaugauuaaagau

SEQ ID NO: 363230 - RNA, 18 nt, Artificial Sequence
  Synthetic
uuguuguuguuuaaagau

SEQ ID NO: 363231 - RNA, 19 nt, Artificial Sequence
  Synthetic
guuguuguuguuuaaagau

SEQ ID NO: 363232 - RNA, 20 nt, Artificial Sequence
  Synthetic
uguuguuguuguuuaaagau

SEQ ID NO: 363233 - RNA, 21 nt, Artificial Sequence
  Synthetic
uuguuguuguuguuuaaagau

SEQ ID NO: 363234 - RNA, 22 nt, Artificial Sequence
  Synthetic
guuguuguuguuguuuaaagau

SEQ ID NO: 363235 - RNA, 23 nt, Artificial Sequence
  Synthetic
uguuguuguuguuguuuaaagau

SEQ ID NO: 363236 - RNA, 24 nt, Artificial Sequence
  Synthetic
uuguuguuguuguuguuuaaagau

SEQ ID NO: 363237 - RNA, 18 nt, Artificial Sequence
  Synthetic
aagagaaacuaacaagau

SEQ ID NO: 363238 - RNA, 19 nt, Artificial Sequence
  Synthetic
aaagagaaacuaacaagau

SEQ ID NO: 363239 - RNA, 20 nt, Artificial Sequence
  Synthetic
aaaagagaaacuaacaagau

SEQ ID NO: 363240 - RNA, 21 nt, Artificial Sequence
  Synthetic
gaaaagagaaacuaacaagau

SEQ ID NO: 363241 - RNA, 22 nt, Artificial Sequence
  Synthetic
agaaaagagaaacuaacaagau

SEQ ID NO: 363242 - RNA, 23 nt, Artificial Sequence
  Synthetic
aagaaaagagaaacuaacaagau

SEQ ID NO: 363243 - RNA, 24 nt, Artificial Sequence
  Synthetic
gaagaaaagagaaacuaacaagau

SEQ ID NO: 363244 - RNA, 18 nt, Artificial Sequence
  Synthetic
acagacaacccacaagau

SEQ ID NO: 363245 - RNA, 19 nt, Artificial Sequence
  Synthetic
aacagacaacccacaagau

SEQ ID NO: 363246 - RNA, 20 nt, Artificial Sequence
  Synthetic
aaacagacaacccacaagau

SEQ ID NO: 363247 - RNA, 21 nt, Artificial Sequence
  Synthetic
uaaacagacaacccacaagau

SEQ ID NO: 363248 - RNA, 22 nt, Artificial Sequence
  Synthetic
guaaacagacaacccacaagau

SEQ ID NO: 363249 - RNA, 23 nt, Artificial Sequence
  Synthetic
aguaaacagacaacccacaagau

SEQ ID NO: 363250 - RNA, 24 nt, Artificial Sequence
  Synthetic
gaguaaacagacaacccacaagau

SEQ ID NO: 363251 - RNA, 18 nt, Artificial Sequence
  Synthetic
uggugggaaagacaagau

SEQ ID NO: 363252 - RNA, 19 nt, Artificial Sequence
  Synthetic
auggugggaaagacaagau

SEQ ID NO: 363253 - RNA, 20 nt, Artificial Sequence
  Synthetic
gauggugggaaagacaagau

SEQ ID NO: 363254 - RNA, 21 nt, Artificial Sequence
  Synthetic
ugauggugggaaagacaagau

SEQ ID NO: 363255 - RNA, 22 nt, Artificial Sequence
  Synthetic
augauggugggaaagacaagau

SEQ ID NO: 363256 - RNA, 23 nt, Artificial Sequence
  Synthetic
uaugauggugggaaagacaagau

SEQ ID NO: 363257 - RNA, 24 nt, Artificial Sequence
  Synthetic
uuaugauggugggaaagacaagau

SEQ ID NO: 363258 - RNA, 18 nt, Artificial Sequence
  Synthetic
guaugauaaugacaagau

SEQ ID NO: 363259 - RNA, 19 nt, Artificial Sequence
  Synthetic
gguaugauaaugacaagau

SEQ ID NO: 363260 - RNA, 20 nt, Artificial Sequence
  Synthetic
ugguaugauaaugacaagau

SEQ ID NO: 363261 - RNA, 21 nt, Artificial Sequence
  Synthetic
gugguaugauaaugacaagau

SEQ ID NO: 363262 - RNA, 22 nt, Artificial Sequence
  Synthetic
ugugguaugauaaugacaagau

SEQ ID NO: 363263 - RNA, 23 nt, Artificial Sequence
  Synthetic
uugugguaugauaaugacaagau

SEQ ID NO: 363264 - RNA, 24 nt, Artificial Sequence
  Synthetic
cuugugguaugauaaugacaagau

SEQ ID NO: 363265 - RNA, 18 nt, Artificial Sequence
  Synthetic
cuucuuguaacccaagau

SEQ ID NO: 363266 - RNA, 19 nt, Artificial Sequence
  Synthetic
gcuucuuguaacccaagau

SEQ ID NO: 363267 - RNA, 20 nt, Artificial Sequence
  Synthetic
agcuucuuguaacccaagau

SEQ ID NO: 363268 - RNA, 21 nt, Artificial Sequence
  Synthetic
cagcuucuuguaacccaagau

SEQ ID NO: 363269 - RNA, 22 nt, Artificial Sequence
  Synthetic
ccagcuucuuguaacccaagau

SEQ ID NO: 363270 - RNA, 23 nt, Artificial Sequence
  Synthetic
gccagcuucuuguaacccaagau

SEQ ID NO: 363271 - RNA, 24 nt, Artificial Sequence
  Synthetic
agccagcuucuuguaacccaagau

SEQ ID NO: 363272 - RNA, 18 nt, Artificial Sequence
  Synthetic
aggcguuguguccaagau

SEQ ID NO: 363273 - RNA, 19 nt, Artificial Sequence
  Synthetic
aaggcguuguguccaagau

SEQ ID NO: 363274 - RNA, 20 nt, Artificial Sequence
  Synthetic
aaaggcguuguguccaagau

SEQ ID NO: 363275 - RNA, 21 nt, Artificial Sequence
  Synthetic
aaaaggcguuguguccaagau

SEQ ID NO: 363276 - RNA, 22 nt, Artificial Sequence
  Synthetic
uaaaaggcguuguguccaagau

SEQ ID NO: 363277 - RNA, 23 nt, Artificial Sequence
  Synthetic
auaaaaggcguuguguccaagau

SEQ ID NO: 363278 - RNA, 24 nt, Artificial Sequence
  Synthetic
uauaaaaggcguuguguccaagau

SEQ ID NO: 363279 - RNA, 18 nt, Artificial Sequence
  Synthetic
aggcugggauuccaagau

SEQ ID NO: 363280 - RNA, 19 nt, Artificial Sequence
  Synthetic
gaggcugggauuccaagau

SEQ ID NO: 363281 - RNA, 20 nt, Artificial Sequence
  Synthetic
ggaggcugggauuccaagau

SEQ ID NO: 363282 - RNA, 21 nt, Artificial Sequence
  Synthetic
uggaggcugggauuccaagau

SEQ ID NO: 363283 - RNA, 22 nt, Artificial Sequence
  Synthetic
cuggaggcugggauuccaagau

SEQ ID NO: 363284 - RNA, 23 nt, Artificial Sequence
  Synthetic
ucuggaggcugggauuccaagau

SEQ ID NO: 363285 - RNA, 24 nt, Artificial Sequence
  Synthetic
uucuggaggcugggauuccaagau

SEQ ID NO: 363286 - RNA, 18 nt, Artificial Sequence
  Synthetic
gaaagaauucaucaagau

SEQ ID NO: 363287 - RNA, 19 nt, Artificial Sequence
  Synthetic
agaaagaauucaucaagau

SEQ ID NO: 363288 - RNA, 20 nt, Artificial Sequence
  Synthetic
aagaaagaauucaucaagau

SEQ ID NO: 363289 - RNA, 21 nt, Artificial Sequence
  Synthetic
caagaaagaauucaucaagau

SEQ ID NO: 363290 - RNA, 22 nt, Artificial Sequence
  Synthetic
ccaagaaagaauucaucaagau

SEQ ID NO: 363291 - RNA, 23 nt, Artificial Sequence
  Synthetic
cccaagaaagaauucaucaagau

SEQ ID NO: 363292 - RNA, 24 nt, Artificial Sequence
  Synthetic
ucccaagaaagaauucaucaagau

SEQ ID NO: 363293 - RNA, 18 nt, Artificial Sequence
  Synthetic
caaguggagggagaagau

SEQ ID NO: 363294 - RNA, 19 nt, Artificial Sequence
  Synthetic
acaaguggagggagaagau

SEQ ID NO: 363295 - RNA, 20 nt, Artificial Sequence
  Synthetic
cacaaguggagggagaagau

SEQ ID NO: 363296 - RNA, 21 nt, Artificial Sequence
  Synthetic
acacaaguggagggagaagau

SEQ ID NO: 363297 - RNA, 22 nt, Artificial Sequence
  Synthetic
aacacaaguggagggagaagau

SEQ ID NO: 363298 - RNA, 23 nt, Artificial Sequence
  Synthetic
gaacacaaguggagggagaagau

SEQ ID NO: 363299 - RNA, 24 nt, Artificial Sequence
  Synthetic
ggaacacaaguggagggagaagau

SEQ ID NO: 363300 - RNA, 18 nt, Artificial Sequence
  Synthetic
aagaggaaguuagaagau

SEQ ID NO: 363301 - RNA, 19 nt, Artificial Sequence
  Synthetic
aaagaggaaguuagaagau

SEQ ID NO: 363302 - RNA, 20 nt, Artificial Sequence
  Synthetic
uaaagaggaaguuagaagau

SEQ ID NO: 363303 - RNA, 21 nt, Artificial Sequence
  Synthetic
uuaaagaggaaguuagaagau

SEQ ID NO: 363304 - RNA, 22 nt, Artificial Sequence
  Synthetic
guuaaagaggaaguuagaagau

SEQ ID NO: 363305 - RNA, 23 nt, Artificial Sequence
  Synthetic
uguuaaagaggaaguuagaagau

SEQ ID NO: 363306 - RNA, 24 nt, Artificial Sequence
  Synthetic
cuguuaaagaggaaguuagaagau

SEQ ID NO: 363307 - RNA, 18 nt, Artificial Sequence
  Synthetic
uaaagugaaaacgaagau

SEQ ID NO: 363308 - RNA, 19 nt, Artificial Sequence
  Synthetic
auaaagugaaaacgaagau

SEQ ID NO: 363309 - RNA, 20 nt, Artificial Sequence
  Synthetic
uauaaagugaaaacgaagau

SEQ ID NO: 363310 - RNA, 21 nt, Artificial Sequence
  Synthetic
auauaaagugaaaacgaagau

SEQ ID NO: 363311 - RNA, 22 nt, Artificial Sequence
  Synthetic
uauauaaagugaaaacgaagau

SEQ ID NO: 363312 - RNA, 23 nt, Artificial Sequence
  Synthetic
uuauauaaagugaaaacgaagau

SEQ ID NO: 363313 - RNA, 24 nt, Artificial Sequence
  Synthetic
auuauauaaagugaaaacgaagau

SEQ ID NO: 363314 - RNA, 18 nt, Artificial Sequence
  Synthetic
agauaaauccacgaagau

SEQ ID NO: 363315 - RNA, 19 nt, Artificial Sequence
  Synthetic
uagauaaauccacgaagau

SEQ ID NO: 363316 - RNA, 20 nt, Artificial Sequence
  Synthetic
guagauaaauccacgaagau

SEQ ID NO: 363317 - RNA, 21 nt, Artificial Sequence
  Synthetic
gguagauaaauccacgaagau

SEQ ID NO: 363318 - RNA, 22 nt, Artificial Sequence
  Synthetic
agguagauaaauccacgaagau

SEQ ID NO: 363319 - RNA, 23 nt, Artificial Sequence
  Synthetic
aagguagauaaauccacgaagau

SEQ ID NO: 363320 - RNA, 24 nt, Artificial Sequence
  Synthetic
aaagguagauaaauccacgaagau

SEQ ID NO: 363321 - RNA, 18 nt, Artificial Sequence
  Synthetic
acugucacaaaggaagau

SEQ ID NO: 363322 - RNA, 19 nt, Artificial Sequence
  Synthetic
cacugucacaaaggaagau

SEQ ID NO: 363323 - RNA, 20 nt, Artificial Sequence
  Synthetic
ucacugucacaaaggaagau

SEQ ID NO: 363324 - RNA, 21 nt, Artificial Sequence
  Synthetic
cucacugucacaaaggaagau

SEQ ID NO: 363325 - RNA, 22 nt, Artificial Sequence
  Synthetic
ucucacugucacaaaggaagau

SEQ ID NO: 363326 - RNA, 23 nt, Artificial Sequence
  Synthetic
uucucacugucacaaaggaagau

SEQ ID NO: 363327 - RNA, 24 nt, Artificial Sequence
  Synthetic
uuucucacugucacaaaggaagau

SEQ ID NO: 363328 - RNA, 18 nt, Artificial Sequence
  Synthetic
aaaugcuuaaaggaagau

SEQ ID NO: 363329 - RNA, 19 nt, Artificial Sequence
  Synthetic
gaaaugcuuaaaggaagau

SEQ ID NO: 363330 - RNA, 20 nt, Artificial Sequence
  Synthetic
agaaaugcuuaaaggaagau

SEQ ID NO: 363331 - RNA, 21 nt, Artificial Sequence
  Synthetic
cagaaaugcuuaaaggaagau

SEQ ID NO: 363332 - RNA, 22 nt, Artificial Sequence
  Synthetic
ccagaaaugcuuaaaggaagau

SEQ ID NO: 363333 - RNA, 23 nt, Artificial Sequence
  Synthetic
uccagaaaugcuuaaaggaagau

SEQ ID NO: 363334 - RNA, 24 nt, Artificial Sequence
  Synthetic
cuccagaaaugcuuaaaggaagau

SEQ ID NO: 363335 - RNA, 18 nt, Artificial Sequence
  Synthetic
cuuuguuauuaggaagau

SEQ ID NO: 363336 - RNA, 19 nt, Artificial Sequence
  Synthetic
gcuuuguuauuaggaagau

SEQ ID NO: 363337 - RNA, 20 nt, Artificial Sequence
  Synthetic
ugcuuuguuauuaggaagau

SEQ ID NO: 363338 - RNA, 21 nt, Artificial Sequence
  Synthetic
gugcuuuguuauuaggaagau

SEQ ID NO: 363339 - RNA, 22 nt, Artificial Sequence
  Synthetic
agugcuuuguuauuaggaagau

SEQ ID NO: 363340 - RNA, 23 nt, Artificial Sequence
  Synthetic
aagugcuuuguuauuaggaagau

SEQ ID NO: 363341 - RNA, 24 nt, Artificial Sequence
  Synthetic
gaagugcuuuguuauuaggaagau

SEQ ID NO: 363342 - RNA, 18 nt, Artificial Sequence
  Synthetic
ucaggugcuggggaagau

SEQ ID NO: 363343 - RNA, 19 nt, Artificial Sequence
  Synthetic
aucaggugcuggggaagau

SEQ ID NO: 363344 - RNA, 20 nt, Artificial Sequence
  Synthetic
caucaggugcuggggaagau

SEQ ID NO: 363345 - RNA, 21 nt, Artificial Sequence
  Synthetic
acaucaggugcuggggaagau

SEQ ID NO: 363346 - RNA, 22 nt, Artificial Sequence
  Synthetic
aacaucaggugcuggggaagau

SEQ ID NO: 363347 - RNA, 23 nt, Artificial Sequence
  Synthetic
aaacaucaggugcuggggaagau

SEQ ID NO: 363348 - RNA, 24 nt, Artificial Sequence
  Synthetic
gaaacaucaggugcuggggaagau

SEQ ID NO: 363349 - RNA, 18 nt, Artificial Sequence
  Synthetic
gaccaggucauggaagau

SEQ ID NO: 363350 - RNA, 19 nt, Artificial Sequence
  Synthetic
ggaccaggucauggaagau

SEQ ID NO: 363351 - RNA, 20 nt, Artificial Sequence
  Synthetic
uggaccaggucauggaagau

SEQ ID NO: 363352 - RNA, 21 nt, Artificial Sequence
  Synthetic
auggaccaggucauggaagau

SEQ ID NO: 363353 - RNA, 22 nt, Artificial Sequence
  Synthetic
gauggaccaggucauggaagau

SEQ ID NO: 363354 - RNA, 23 nt, Artificial Sequence
  Synthetic
agauggaccaggucauggaagau

SEQ ID NO: 363355 - RNA, 24 nt, Artificial Sequence
  Synthetic
aagauggaccaggucauggaagau

SEQ ID NO: 363356 - RNA, 18 nt, Artificial Sequence
  Synthetic
ucucucaugauggaagau

SEQ ID NO: 363357 - RNA, 19 nt, Artificial Sequence
  Synthetic
uucucucaugauggaagau

SEQ ID NO: 363358 - RNA, 20 nt, Artificial Sequence
  Synthetic
auucucucaugauggaagau

SEQ ID NO: 363359 - RNA, 21 nt, Artificial Sequence
  Synthetic
uauucucucaugauggaagau

SEQ ID NO: 363360 - RNA, 22 nt, Artificial Sequence
  Synthetic
uuauucucucaugauggaagau

SEQ ID NO: 363361 - RNA, 23 nt, Artificial Sequence
  Synthetic
auuauucucucaugauggaagau

SEQ ID NO: 363362 - RNA, 24 nt, Artificial Sequence
  Synthetic
uauuauucucucaugauggaagau

SEQ ID NO: 363363 - RNA, 18 nt, Artificial Sequence
  Synthetic
ugcuguaacuuggaagau

SEQ ID NO: 363364 - RNA, 19 nt, Artificial Sequence
  Synthetic
cugcuguaacuuggaagau

SEQ ID NO: 363365 - RNA, 20 nt, Artificial Sequence
  Synthetic
acugcuguaacuuggaagau

SEQ ID NO: 363366 - RNA, 21 nt, Artificial Sequence
  Synthetic
aacugcuguaacuuggaagau

SEQ ID NO: 363367 - RNA, 22 nt, Artificial Sequence
  Synthetic
gaacugcuguaacuuggaagau

SEQ ID NO: 363368 - RNA, 23 nt, Artificial Sequence
  Synthetic
agaacugcuguaacuuggaagau

SEQ ID NO: 363369 - RNA, 24 nt, Artificial Sequence
  Synthetic
gagaacugcuguaacuuggaagau

SEQ ID NO: 363370 - RNA, 18 nt, Artificial Sequence
  Synthetic
uauguuggaaaugaagau

SEQ ID NO: 363371 - RNA, 19 nt, Artificial Sequence
  Synthetic
cuauguuggaaaugaagau

SEQ ID NO: 363372 - RNA, 20 nt, Artificial Sequence
  Synthetic
ucuauguuggaaaugaagau

SEQ ID NO: 363373 - RNA, 21 nt, Artificial Sequence
  Synthetic
aucuauguuggaaaugaagau

SEQ ID NO: 363374 - RNA, 22 nt, Artificial Sequence
  Synthetic
uaucuauguuggaaaugaagau

SEQ ID NO: 363375 - RNA, 23 nt, Artificial Sequence
  Synthetic
uuaucuauguuggaaaugaagau

SEQ ID NO: 363376 - RNA, 24 nt, Artificial Sequence
  Synthetic
auuaucuauguuggaaaugaagau

SEQ ID NO: 363377 - RNA, 18 nt, Artificial Sequence
  Synthetic
aaucuaaugccugaagau

SEQ ID NO: 363378 - RNA, 19 nt, Artificial Sequence
  Synthetic
gaaucuaaugccugaagau

SEQ ID NO: 363379 - RNA, 20 nt, Artificial Sequence
  Synthetic
agaaucuaaugccugaagau

SEQ ID NO: 363380 - RNA, 21 nt, Artificial Sequence
  Synthetic
gagaaucuaaugccugaagau

SEQ ID NO: 363381 - RNA, 22 nt, Artificial Sequence
  Synthetic
ugagaaucuaaugccugaagau

SEQ ID NO: 363382 - RNA, 23 nt, Artificial Sequence
  Synthetic
augagaaucuaaugccugaagau

SEQ ID NO: 363383 - RNA, 24 nt, Artificial Sequence
  Synthetic
uaugagaaucuaaugccugaagau

SEQ ID NO: 363384 - RNA, 18 nt, Artificial Sequence
  Synthetic
aaaagacaugaauaagau

SEQ ID NO: 363385 - RNA, 19 nt, Artificial Sequence
  Synthetic
aaaaagacaugaauaagau

SEQ ID NO: 363386 - RNA, 20 nt, Artificial Sequence
  Synthetic
aaaaaagacaugaauaagau

SEQ ID NO: 363387 - RNA, 21 nt, Artificial Sequence
  Synthetic
caaaaaagacaugaauaagau

SEQ ID NO: 363388 - RNA, 22 nt, Artificial Sequence
  Synthetic
acaaaaaagacaugaauaagau

SEQ ID NO: 363389 - RNA, 23 nt, Artificial Sequence
  Synthetic
aacaaaaaagacaugaauaagau

SEQ ID NO: 363390 - RNA, 24 nt, Artificial Sequence
  Synthetic
gaacaaaaaagacaugaauaagau

SEQ ID NO: 363391 - RNA, 18 nt, Artificial Sequence
  Synthetic
caucucuaauaauaagau

SEQ ID NO: 363392 - RNA, 19 nt, Artificial Sequence
  Synthetic
ucaucucuaauaauaagau

SEQ ID NO: 363393 - RNA, 20 nt, Artificial Sequence
  Synthetic
cucaucucuaauaauaagau

SEQ ID NO: 363394 - RNA, 21 nt, Artificial Sequence
  Synthetic
ucucaucucuaauaauaagau

SEQ ID NO: 363395 - RNA, 22 nt, Artificial Sequence
  Synthetic
uucucaucucuaauaauaagau

SEQ ID NO: 363396 - RNA, 23 nt, Artificial Sequence
  Synthetic
cuucucaucucuaauaauaagau

SEQ ID NO: 363397 - RNA, 24 nt, Artificial Sequence
  Synthetic
ucuucucaucucuaauaauaagau

SEQ ID NO: 363398 - RNA, 18 nt, Artificial Sequence
  Synthetic
accaaaagcagauaagau

SEQ ID NO: 363399 - RNA, 19 nt, Artificial Sequence
  Synthetic
gaccaaaagcagauaagau

SEQ ID NO: 363400 - RNA, 20 nt, Artificial Sequence
  Synthetic
ggaccaaaagcagauaagau

SEQ ID NO: 363401 - RNA, 21 nt, Artificial Sequence
  Synthetic
gggaccaaaagcagauaagau

SEQ ID NO: 363402 - RNA, 22 nt, Artificial Sequence
  Synthetic
ggggaccaaaagcagauaagau

SEQ ID NO: 363403 - RNA, 23 nt, Artificial Sequence
  Synthetic
aggggaccaaaagcagauaagau

SEQ ID NO: 363404 - RNA, 24 nt, Artificial Sequence
  Synthetic
caggggaccaaaagcagauaagau

SEQ ID NO: 363405 - RNA, 18 nt, Artificial Sequence
  Synthetic
cauauuuucagauaagau

SEQ ID NO: 363406 - RNA, 19 nt, Artificial Sequence
  Synthetic
ucauauuuucagauaagau

SEQ ID NO: 363407 - RNA, 20 nt, Artificial Sequence
  Synthetic
aucauauuuucagauaagau

SEQ ID NO: 363408 - RNA, 21 nt, Artificial Sequence
  Synthetic
caucauauuuucagauaagau

SEQ ID NO: 363409 - RNA, 22 nt, Artificial Sequence
  Synthetic
acaucauauuuucagauaagau

SEQ ID NO: 363410 - RNA, 23 nt, Artificial Sequence
  Synthetic
gacaucauauuuucagauaagau

SEQ ID NO: 363411 - RNA, 24 nt, Artificial Sequence
  Synthetic
ugacaucauauuuucagauaagau

SEQ ID NO: 363412 - RNA, 18 nt, Artificial Sequence
  Synthetic
uauacaaguugauaagau

SEQ ID NO: 363413 - RNA, 19 nt, Artificial Sequence
  Synthetic
auauacaaguugauaagau

SEQ ID NO: 363414 - RNA, 20 nt, Artificial Sequence
  Synthetic
aauauacaaguugauaagau

SEQ ID NO: 363415 - RNA, 21 nt, Artificial Sequence
  Synthetic
aaauauacaaguugauaagau

SEQ ID NO: 363416 - RNA, 22 nt, Artificial Sequence
  Synthetic
aaaauauacaaguugauaagau

SEQ ID NO: 363417 - RNA, 23 nt, Artificial Sequence
  Synthetic
gaaaauauacaaguugauaagau

SEQ ID NO: 363418 - RNA, 24 nt, Artificial Sequence
  Synthetic
ugaaaauauacaaguugauaagau

SEQ ID NO: 363419 - RNA, 18 nt, Artificial Sequence
  Synthetic
auaaggcaaaacuaagau

SEQ ID NO: 363420 - RNA, 19 nt, Artificial Sequence
  Synthetic
gauaaggcaaaacuaagau

SEQ ID NO: 363421 - RNA, 20 nt, Artificial Sequence
  Synthetic
agauaaggcaaaacuaagau

SEQ ID NO: 363422 - RNA, 21 nt, Artificial Sequence
  Synthetic
uagauaaggcaaaacuaagau

SEQ ID NO: 363423 - RNA, 22 nt, Artificial Sequence
  Synthetic
uuagauaaggcaaaacuaagau

SEQ ID NO: 363424 - RNA, 23 nt, Artificial Sequence
  Synthetic
guuagauaaggcaaaacuaagau

SEQ ID NO: 363425 - RNA, 24 nt, Artificial Sequence
  Synthetic
uguuagauaaggcaaaacuaagau

SEQ ID NO: 363426 - RNA, 18 nt, Artificial Sequence
  Synthetic
acauuccucaccuaagau

SEQ ID NO: 363427 - RNA, 19 nt, Artificial Sequence
  Synthetic
aacauuccucaccuaagau

SEQ ID NO: 363428 - RNA, 20 nt, Artificial Sequence
  Synthetic
uaacauuccucaccuaagau

SEQ ID NO: 363429 - RNA, 21 nt, Artificial Sequence
  Synthetic
cuaacauuccucaccuaagau

SEQ ID NO: 363430 - RNA, 22 nt, Artificial Sequence
  Synthetic
ucuaacauuccucaccuaagau

SEQ ID NO: 363431 - RNA, 23 nt, Artificial Sequence
  Synthetic
aucuaacauuccucaccuaagau

SEQ ID NO: 363432 - RNA, 24 nt, Artificial Sequence
  Synthetic
caucuaacauuccucaccuaagau

SEQ ID NO: 363433 - RNA, 18 nt, Artificial Sequence
  Synthetic
aaugcuuuccccuaagau

SEQ ID NO: 363434 - RNA, 19 nt, Artificial Sequence
  Synthetic
gaaugcuuuccccuaagau

SEQ ID NO: 363435 - RNA, 20 nt, Artificial Sequence
  Synthetic
ugaaugcuuuccccuaagau

SEQ ID NO: 363436 - RNA, 21 nt, Artificial Sequence
  Synthetic
cugaaugcuuuccccuaagau

SEQ ID NO: 363437 - RNA, 22 nt, Artificial Sequence
  Synthetic
acugaaugcuuuccccuaagau

SEQ ID NO: 363438 - RNA, 23 nt, Artificial Sequence
  Synthetic
cacugaaugcuuuccccuaagau

SEQ ID NO: 363439 - RNA, 24 nt, Artificial Sequence
  Synthetic
acacugaaugcuuuccccuaagau

SEQ ID NO: 363440 - RNA, 18 nt, Artificial Sequence
  Synthetic
ucgacuuuuggcuaagau

SEQ ID NO: 363441 - RNA, 19 nt, Artificial Sequence
  Synthetic
uucgacuuuuggcuaagau

SEQ ID NO: 363442 - RNA, 20 nt, Artificial Sequence
  Synthetic
uuucgacuuuuggcuaagau

SEQ ID NO: 363443 - RNA, 21 nt, Artificial Sequence
  Synthetic
guuucgacuuuuggcuaagau

SEQ ID NO: 363444 - RNA, 22 nt, Artificial Sequence
  Synthetic
uguuucgacuuuuggcuaagau

SEQ ID NO: 363445 - RNA, 23 nt, Artificial Sequence
  Synthetic
uuguuucgacuuuuggcuaagau

SEQ ID NO: 363446 - RNA, 24 nt, Artificial Sequence
  Synthetic
uuuguuucgacuuuuggcuaagau

SEQ ID NO: 363447 - RNA, 18 nt, Artificial Sequence
  Synthetic
aucccuuaugaguaagau

SEQ ID NO: 363448 - RNA, 19 nt, Artificial Sequence
  Synthetic
caucccuuaugaguaagau

SEQ ID NO: 363449 - RNA, 20 nt, Artificial Sequence
  Synthetic
gcaucccuuaugaguaagau

SEQ ID NO: 363450 - RNA, 21 nt, Artificial Sequence
  Synthetic
ugcaucccuuaugaguaagau

SEQ ID NO: 363451 - RNA, 22 nt, Artificial Sequence
  Synthetic
cugcaucccuuaugaguaagau

SEQ ID NO: 363452 - RNA, 23 nt, Artificial Sequence
  Synthetic
ucugcaucccuuaugaguaagau

SEQ ID NO: 363453 - RNA, 24 nt, Artificial Sequence
  Synthetic
uucugcaucccuuaugaguaagau

SEQ ID NO: 363454 - RNA, 18 nt, Artificial Sequence
  Synthetic
cuuacucaguuguaagau

SEQ ID NO: 363455 - RNA, 19 nt, Artificial Sequence
  Synthetic
ccuuacucaguuguaagau

SEQ ID NO: 363456 - RNA, 20 nt, Artificial Sequence
  Synthetic
uccuuacucaguuguaagau

SEQ ID NO: 363457 - RNA, 21 nt, Artificial Sequence
  Synthetic
uuccuuacucaguuguaagau

SEQ ID NO: 363458 - RNA, 22 nt, Artificial Sequence
  Synthetic
cuuccuuacucaguuguaagau

SEQ ID NO: 363459 - RNA, 23 nt, Artificial Sequence
  Synthetic
ccuuccuuacucaguuguaagau

SEQ ID NO: 363460 - RNA, 24 nt, Artificial Sequence
  Synthetic
accuuccuuacucaguuguaagau

SEQ ID NO: 363461 - RNA, 18 nt, Artificial Sequence
  Synthetic
auuaaguuguuguaagau

SEQ ID NO: 363462 - RNA, 19 nt, Artificial Sequence
  Synthetic
uauuaaguuguuguaagau

SEQ ID NO: 363463 - RNA, 20 nt, Artificial Sequence
  Synthetic
uuauuaaguuguuguaagau

SEQ ID NO: 363464 - RNA, 21 nt, Artificial Sequence
  Synthetic
guuauuaaguuguuguaagau

SEQ ID NO: 363465 - RNA, 22 nt, Artificial Sequence
  Synthetic
uguuauuaaguuguuguaagau

SEQ ID NO: 363466 - RNA, 23 nt, Artificial Sequence
  Synthetic
auguuauuaaguuguuguaagau

SEQ ID NO: 363467 - RNA, 24 nt, Artificial Sequence
  Synthetic
uauguuauuaaguuguuguaagau

SEQ ID NO: 363468 - RNA, 18 nt, Artificial Sequence
  Synthetic
ucuacaagccuuuaagau

SEQ ID NO: 363469 - RNA, 19 nt, Artificial Sequence
  Synthetic
uucuacaagccuuuaagau

SEQ ID NO: 363470 - RNA, 20 nt, Artificial Sequence
  Synthetic
auucuacaagccuuuaagau

SEQ ID NO: 363471 - RNA, 21 nt, Artificial Sequence
  Synthetic
uauucuacaagccuuuaagau

SEQ ID NO: 363472 - RNA, 22 nt, Artificial Sequence
  Synthetic
uuauucuacaagccuuuaagau

SEQ ID NO: 363473 - RNA, 23 nt, Artificial Sequence
  Synthetic
guuauucuacaagccuuuaagau

SEQ ID NO: 363474 - RNA, 24 nt, Artificial Sequence
  Synthetic
uguuauucuacaagccuuuaagau

SEQ ID NO: 363475 - RNA, 18 nt, Artificial Sequence
  Synthetic
uagcaaaccgaaacagau

SEQ ID NO: 363476 - RNA, 19 nt, Artificial Sequence
  Synthetic
uuagcaaaccgaaacagau

SEQ ID NO: 363477 - RNA, 20 nt, Artificial Sequence
  Synthetic
uuuagcaaaccgaaacagau

SEQ ID NO: 363478 - RNA, 21 nt, Artificial Sequence
  Synthetic
cuuuagcaaaccgaaacagau

SEQ ID NO: 363479 - RNA, 22 nt, Artificial Sequence
  Synthetic
ucuuuagcaaaccgaaacagau

SEQ ID NO: 363480 - RNA, 23 nt, Artificial Sequence
  Synthetic
cucuuuagcaaaccgaaacagau

SEQ ID NO: 363481 - RNA, 24 nt, Artificial Sequence
  Synthetic
ccucuuuagcaaaccgaaacagau

SEQ ID NO: 363482 - RNA, 18 nt, Artificial Sequence
  Synthetic
aacggguggcuaacagau

SEQ ID NO: 363483 - RNA, 19 nt, Artificial Sequence
  Synthetic
aaacggguggcuaacagau

SEQ ID NO: 363484 - RNA, 20 nt, Artificial Sequence
  Synthetic
caaacggguggcuaacagau

SEQ ID NO: 363485 - RNA, 21 nt, Artificial Sequence
  Synthetic
acaaacggguggcuaacagau

SEQ ID NO: 363486 - RNA, 22 nt, Artificial Sequence
  Synthetic
gacaaacggguggcuaacagau

SEQ ID NO: 363487 - RNA, 23 nt, Artificial Sequence
  Synthetic
agacaaacggguggcuaacagau

SEQ ID NO: 363488 - RNA, 24 nt, Artificial Sequence
  Synthetic
aagacaaacggguggcuaacagau

SEQ ID NO: 363489 - RNA, 18 nt, Artificial Sequence
  Synthetic
gagagaagcuuaacagau

SEQ ID NO: 363490 - RNA, 19 nt, Artificial Sequence
  Synthetic
ggagagaagcuuaacagau

SEQ ID NO: 363491 - RNA, 20 nt, Artificial Sequence
  Synthetic
uggagagaagcuuaacagau

SEQ ID NO: 363492 - RNA, 21 nt, Artificial Sequence
  Synthetic
guggagagaagcuuaacagau

SEQ ID NO: 363493 - RNA, 22 nt, Artificial Sequence
  Synthetic
gguggagagaagcuuaacagau

SEQ ID NO: 363494 - RNA, 23 nt, Artificial Sequence
  Synthetic
agguggagagaagcuuaacagau

SEQ ID NO: 363495 - RNA, 24 nt, Artificial Sequence
  Synthetic
cagguggagagaagcuuaacagau

SEQ ID NO: 363496 - RNA, 18 nt, Artificial Sequence
  Synthetic
gcacagggcaacacagau

SEQ ID NO: 363497 - RNA, 19 nt, Artificial Sequence
  Synthetic
agcacagggcaacacagau

SEQ ID NO: 363498 - RNA, 20 nt, Artificial Sequence
  Synthetic
uagcacagggcaacacagau

SEQ ID NO: 363499 - RNA, 21 nt, Artificial Sequence
  Synthetic
uuagcacagggcaacacagau

SEQ ID NO: 363500 - RNA, 22 nt, Artificial Sequence
  Synthetic
uuuagcacagggcaacacagau

SEQ ID NO: 363501 - RNA, 23 nt, Artificial Sequence
  Synthetic
auuuagcacagggcaacacagau

SEQ ID NO: 363502 - RNA, 24 nt, Artificial Sequence
  Synthetic
aauuuagcacagggcaacacagau

SEQ ID NO: 363503 - RNA, 18 nt, Artificial Sequence
  Synthetic
cauguugaaugcacagau

SEQ ID NO: 363504 - RNA, 19 nt, Artificial Sequence
  Synthetic
gcauguugaaugcacagau

SEQ ID NO: 363505 - RNA, 20 nt, Artificial Sequence
  Synthetic
agcauguugaaugcacagau

SEQ ID NO: 363506 - RNA, 21 nt, Artificial Sequence
  Synthetic
gagcauguugaaugcacagau

SEQ ID NO: 363507 - RNA, 22 nt, Artificial Sequence
  Synthetic
agagcauguugaaugcacagau

SEQ ID NO: 363508 - RNA, 23 nt, Artificial Sequence
  Synthetic
uagagcauguugaaugcacagau

SEQ ID NO: 363509 - RNA, 24 nt, Artificial Sequence
  Synthetic
uuagagcauguugaaugcacagau

SEQ ID NO: 363510 - RNA, 18 nt, Artificial Sequence
  Synthetic
guagcugggaucacagau

SEQ ID NO: 363511 - RNA, 19 nt, Artificial Sequence
  Synthetic
aguagcugggaucacagau

SEQ ID NO: 363512 - RNA, 20 nt, Artificial Sequence
  Synthetic
aaguagcugggaucacagau

SEQ ID NO: 363513 - RNA, 21 nt, Artificial Sequence
  Synthetic
uaaguagcugggaucacagau

SEQ ID NO: 363514 - RNA, 22 nt, Artificial Sequence
  Synthetic
cuaaguagcugggaucacagau

SEQ ID NO: 363515 - RNA, 23 nt, Artificial Sequence
  Synthetic
ccuaaguagcugggaucacagau

SEQ ID NO: 363516 - RNA, 24 nt, Artificial Sequence
  Synthetic
uccuaaguagcugggaucacagau

SEQ ID NO: 363517 - RNA, 18 nt, Artificial Sequence
  Synthetic
aaagagaaguucacagau

SEQ ID NO: 363518 - RNA, 19 nt, Artificial Sequence
  Synthetic
caaagagaaguucacagau

SEQ ID NO: 363519 - RNA, 20 nt, Artificial Sequence
  Synthetic
acaaagagaaguucacagau

SEQ ID NO: 363520 - RNA, 21 nt, Artificial Sequence
  Synthetic
gacaaagagaaguucacagau

SEQ ID NO: 363521 - RNA, 22 nt, Artificial Sequence
  Synthetic
ggacaaagagaaguucacagau

SEQ ID NO: 363522 - RNA, 23 nt, Artificial Sequence
  Synthetic
aggacaaagagaaguucacagau

SEQ ID NO: 363523 - RNA, 24 nt, Artificial Sequence
  Synthetic
aaggacaaagagaaguucacagau

SEQ ID NO: 363524 - RNA, 18 nt, Artificial Sequence
  Synthetic
auacugauuaagacagau

SEQ ID NO: 363525 - RNA, 19 nt, Artificial Sequence
  Synthetic
aauacugauuaagacagau

SEQ ID NO: 363526 - RNA, 20 nt, Artificial Sequence
  Synthetic
aaauacugauuaagacagau

SEQ ID NO: 363527 - RNA, 21 nt, Artificial Sequence
  Synthetic
aaaauacugauuaagacagau

SEQ ID NO: 363528 - RNA, 22 nt, Artificial Sequence
  Synthetic
gaaaauacugauuaagacagau

SEQ ID NO: 363529 - RNA, 23 nt, Artificial Sequence
  Synthetic
agaaaauacugauuaagacagau

SEQ ID NO: 363530 - RNA, 24 nt, Artificial Sequence
  Synthetic
cagaaaauacugauuaagacagau

SEQ ID NO: 363531 - RNA, 18 nt, Artificial Sequence
  Synthetic
gcagcuggguugacagau

SEQ ID NO: 363532 - RNA, 19 nt, Artificial Sequence
  Synthetic
ggcagcuggguugacagau

SEQ ID NO: 363533 - RNA, 20 nt, Artificial Sequence
  Synthetic
uggcagcuggguugacagau

SEQ ID NO: 363534 - RNA, 21 nt, Artificial Sequence
  Synthetic
auggcagcuggguugacagau

SEQ ID NO: 363535 - RNA, 22 nt, Artificial Sequence
  Synthetic
aauggcagcuggguugacagau

SEQ ID NO: 363536 - RNA, 23 nt, Artificial Sequence
  Synthetic
aaauggcagcuggguugacagau

SEQ ID NO: 363537 - RNA, 24 nt, Artificial Sequence
  Synthetic
aaaauggcagcuggguugacagau

SEQ ID NO: 363538 - RNA, 18 nt, Artificial Sequence
  Synthetic
uagcaacuuuugacagau

SEQ ID NO: 363539 - RNA, 19 nt, Artificial Sequence
  Synthetic
guagcaacuuuugacagau

SEQ ID NO: 363540 - RNA, 20 nt, Artificial Sequence
  Synthetic
aguagcaacuuuugacagau

SEQ ID NO: 363541 - RNA, 21 nt, Artificial Sequence
  Synthetic
uaguagcaacuuuugacagau

SEQ ID NO: 363542 - RNA, 22 nt, Artificial Sequence
  Synthetic
uuaguagcaacuuuugacagau

SEQ ID NO: 363543 - RNA, 23 nt, Artificial Sequence
  Synthetic
auuaguagcaacuuuugacagau

SEQ ID NO: 363544 - RNA, 24 nt, Artificial Sequence
  Synthetic
uauuaguagcaacuuuugacagau

SEQ ID NO: 363545 - RNA, 18 nt, Artificial Sequence
  Synthetic
aauguauccccuacagau

SEQ ID NO: 363546 - RNA, 19 nt, Artificial Sequence
  Synthetic
gaauguauccccuacagau

SEQ ID NO: 363547 - RNA, 20 nt, Artificial Sequence
  Synthetic
ggaauguauccccuacagau

SEQ ID NO: 363548 - RNA, 21 nt, Artificial Sequence
  Synthetic
uggaauguauccccuacagau

SEQ ID NO: 363549 - RNA, 22 nt, Artificial Sequence
  Synthetic
uuggaauguauccccuacagau

SEQ ID NO: 363550 - RNA, 23 nt, Artificial Sequence
  Synthetic
cuuggaauguauccccuacagau

SEQ ID NO: 363551 - RNA, 24 nt, Artificial Sequence
  Synthetic
ucuuggaauguauccccuacagau

SEQ ID NO: 363552 - RNA, 18 nt, Artificial Sequence
  Synthetic
agagaaaccuguacagau

SEQ ID NO: 363553 - RNA, 19 nt, Artificial Sequence
  Synthetic
gagagaaaccuguacagau

SEQ ID NO: 363554 - RNA, 20 nt, Artificial Sequence
  Synthetic
agagagaaaccuguacagau

SEQ ID NO: 363555 - RNA, 21 nt, Artificial Sequence
  Synthetic
uagagagaaaccuguacagau

SEQ ID NO: 363556 - RNA, 22 nt, Artificial Sequence
  Synthetic
guagagagaaaccuguacagau

SEQ ID NO: 363557 - RNA, 23 nt, Artificial Sequence
  Synthetic
uguagagagaaaccuguacagau

SEQ ID NO: 363558 - RNA, 24 nt, Artificial Sequence
  Synthetic
uuguagagagaaaccuguacagau

SEQ ID NO: 363559 - RNA, 18 nt, Artificial Sequence
  Synthetic
cgugcuggaauuacagau

SEQ ID NO: 363560 - RNA, 19 nt, Artificial Sequence
  Synthetic
acgugcuggaauuacagau

SEQ ID NO: 363561 - RNA, 20 nt, Artificial Sequence
  Synthetic
aacgugcuggaauuacagau

SEQ ID NO: 363562 - RNA, 21 nt, Artificial Sequence
  Synthetic
caacgugcuggaauuacagau

SEQ ID NO: 363563 - RNA, 22 nt, Artificial Sequence
  Synthetic
acaacgugcuggaauuacagau

SEQ ID NO: 363564 - RNA, 23 nt, Artificial Sequence
  Synthetic
gacaacgugcuggaauuacagau

SEQ ID NO: 363565 - RNA, 24 nt, Artificial Sequence
  Synthetic
ugacaacgugcuggaauuacagau

SEQ ID NO: 363566 - RNA, 18 nt, Artificial Sequence
  Synthetic
aauggugggauuacagau

SEQ ID NO: 363567 - RNA, 19 nt, Artificial Sequence
  Synthetic
aaauggugggauuacagau

SEQ ID NO: 363568 - RNA, 20 nt, Artificial Sequence
  Synthetic
aaaauggugggauuacagau

SEQ ID NO: 363569 - RNA, 21 nt, Artificial Sequence
  Synthetic
uaaaauggugggauuacagau

SEQ ID NO: 363570 - RNA, 22 nt, Artificial Sequence
  Synthetic
uuaaaauggugggauuacagau

SEQ ID NO: 363571 - RNA, 23 nt, Artificial Sequence
  Synthetic
cuuaaaauggugggauuacagau

SEQ ID NO: 363572 - RNA, 24 nt, Artificial Sequence
  Synthetic
ucuuaaaauggugggauuacagau

SEQ ID NO: 363573 - RNA, 18 nt, Artificial Sequence
  Synthetic
aauagaucucuuacagau

SEQ ID NO: 363574 - RNA, 19 nt, Artificial Sequence
  Synthetic
uaauagaucucuuacagau

SEQ ID NO: 363575 - RNA, 20 nt, Artificial Sequence
  Synthetic
auaauagaucucuuacagau

SEQ ID NO: 363576 - RNA, 21 nt, Artificial Sequence
  Synthetic
cauaauagaucucuuacagau

SEQ ID NO: 363577 - RNA, 22 nt, Artificial Sequence
  Synthetic
ucauaauagaucucuuacagau

SEQ ID NO: 363578 - RNA, 23 nt, Artificial Sequence
  Synthetic
cucauaauagaucucuuacagau

SEQ ID NO: 363579 - RNA, 24 nt, Artificial Sequence
  Synthetic
ccucauaauagaucucuuacagau

SEQ ID NO: 363580 - RNA, 18 nt, Artificial Sequence
  Synthetic
caguuuagaaacccagau

SEQ ID NO: 363581 - RNA, 19 nt, Artificial Sequence
  Synthetic
acaguuuagaaacccagau

SEQ ID NO: 363582 - RNA, 20 nt, Artificial Sequence
  Synthetic
uacaguuuagaaacccagau

SEQ ID NO: 363583 - RNA, 21 nt, Artificial Sequence
  Synthetic
guacaguuuagaaacccagau

SEQ ID NO: 363584 - RNA, 22 nt, Artificial Sequence
  Synthetic
uguacaguuuagaaacccagau

SEQ ID NO: 363585 - RNA, 23 nt, Artificial Sequence
  Synthetic
uuguacaguuuagaaacccagau

SEQ ID NO: 363586 - RNA, 24 nt, Artificial Sequence
  Synthetic
auuguacaguuuagaaacccagau

SEQ ID NO: 363587 - RNA, 18 nt, Artificial Sequence
  Synthetic
uaguucuauaacccagau

SEQ ID NO: 363588 - RNA, 19 nt, Artificial Sequence
  Synthetic
guaguucuauaacccagau

SEQ ID NO: 363589 - RNA, 20 nt, Artificial Sequence
  Synthetic
gguaguucuauaacccagau

SEQ ID NO: 363590 - RNA, 21 nt, Artificial Sequence
  Synthetic
agguaguucuauaacccagau

SEQ ID NO: 363591 - RNA, 22 nt, Artificial Sequence
  Synthetic
uagguaguucuauaacccagau

SEQ ID NO: 363592 - RNA, 23 nt, Artificial Sequence
  Synthetic
auagguaguucuauaacccagau

SEQ ID NO: 363593 - RNA, 24 nt, Artificial Sequence
  Synthetic
gauagguaguucuauaacccagau

SEQ ID NO: 363594 - RNA, 18 nt, Artificial Sequence
  Synthetic
gagacaacaaauccagau

SEQ ID NO: 363595 - RNA, 19 nt, Artificial Sequence
  Synthetic
agagacaacaaauccagau

SEQ ID NO: 363596 - RNA, 20 nt, Artificial Sequence
  Synthetic
uagagacaacaaauccagau

SEQ ID NO: 363597 - RNA, 21 nt, Artificial Sequence
  Synthetic
cuagagacaacaaauccagau

SEQ ID NO: 363598 - RNA, 22 nt, Artificial Sequence
  Synthetic
ccuagagacaacaaauccagau

SEQ ID NO: 363599 - RNA, 23 nt, Artificial Sequence
  Synthetic
uccuagagacaacaaauccagau

SEQ ID NO: 363600 - RNA, 24 nt, Artificial Sequence
  Synthetic
cuccuagagacaacaaauccagau

SEQ ID NO: 363601 - RNA, 18 nt, Artificial Sequence
  Synthetic
aauaaaagacauccagau

SEQ ID NO: 363602 - RNA, 19 nt, Artificial Sequence
  Synthetic
aaauaaaagacauccagau

SEQ ID NO: 363603 - RNA, 20 nt, Artificial Sequence
  Synthetic
uaaauaaaagacauccagau

SEQ ID NO: 363604 - RNA, 21 nt, Artificial Sequence
  Synthetic
auaaauaaaagacauccagau

SEQ ID NO: 363605 - RNA, 22 nt, Artificial Sequence
  Synthetic
aauaaauaaaagacauccagau

SEQ ID NO: 363606 - RNA, 23 nt, Artificial Sequence
  Synthetic
aaauaaauaaaagacauccagau

SEQ ID NO: 363607 - RNA, 24 nt, Artificial Sequence
  Synthetic
aaaauaaauaaaagacauccagau

SEQ ID NO: 363608 - RNA, 18 nt, Artificial Sequence
  Synthetic
uuagauaaauauccagau

SEQ ID NO: 363609 - RNA, 19 nt, Artificial Sequence
  Synthetic
uuuagauaaauauccagau

SEQ ID NO: 363610 - RNA, 20 nt, Artificial Sequence
  Synthetic
guuuagauaaauauccagau

SEQ ID NO: 363611 - RNA, 21 nt, Artificial Sequence
  Synthetic
cguuuagauaaauauccagau

SEQ ID NO: 363612 - RNA, 22 nt, Artificial Sequence
  Synthetic
ucguuuagauaaauauccagau

SEQ ID NO: 363613 - RNA, 23 nt, Artificial Sequence
  Synthetic
uucguuuagauaaauauccagau

SEQ ID NO: 363614 - RNA, 24 nt, Artificial Sequence
  Synthetic
auucguuuagauaaauauccagau

SEQ ID NO: 363615 - RNA, 18 nt, Artificial Sequence
  Synthetic
augaguguugcuccagau

SEQ ID NO: 363616 - RNA, 19 nt, Artificial Sequence
  Synthetic
uaugaguguugcuccagau

SEQ ID NO: 363617 - RNA, 20 nt, Artificial Sequence
  Synthetic
guaugaguguugcuccagau

SEQ ID NO: 363618 - RNA, 21 nt, Artificial Sequence
  Synthetic
aguaugaguguugcuccagau

SEQ ID NO: 363619 - RNA, 22 nt, Artificial Sequence
  Synthetic
aaguaugaguguugcuccagau

SEQ ID NO: 363620 - RNA, 23 nt, Artificial Sequence
  Synthetic
aaaguaugaguguugcuccagau

SEQ ID NO: 363621 - RNA, 24 nt, Artificial Sequence
  Synthetic
aaaaguaugaguguugcuccagau

SEQ ID NO: 363622 - RNA, 18 nt, Artificial Sequence
  Synthetic
aauacacccauuccagau

SEQ ID NO: 363623 - RNA, 19 nt, Artificial Sequence
  Synthetic
aaauacacccauuccagau

SEQ ID NO: 363624 - RNA, 20 nt, Artificial Sequence
  Synthetic
uaaauacacccauuccagau

SEQ ID NO: 363625 - RNA, 21 nt, Artificial Sequence
  Synthetic
uuaaauacacccauuccagau

SEQ ID NO: 363626 - RNA, 22 nt, Artificial Sequence
  Synthetic
guuaaauacacccauuccagau

SEQ ID NO: 363627 - RNA, 23 nt, Artificial Sequence
  Synthetic
gguuaaauacacccauuccagau

SEQ ID NO: 363628 - RNA, 24 nt, Artificial Sequence
  Synthetic
ugguuaaauacacccauuccagau

SEQ ID NO: 363629 - RNA, 18 nt, Artificial Sequence
  Synthetic
aaagaaauaaaagcagau

SEQ ID NO: 363630 - RNA, 19 nt, Artificial Sequence
  Synthetic
uaaagaaauaaaagcagau

SEQ ID NO: 363631 - RNA, 20 nt, Artificial Sequence
  Synthetic
auaaagaaauaaaagcagau

SEQ ID NO: 363632 - RNA, 21 nt, Artificial Sequence
  Synthetic
aauaaagaaauaaaagcagau

SEQ ID NO: 363633 - RNA, 22 nt, Artificial Sequence
  Synthetic
uaauaaagaaauaaaagcagau

SEQ ID NO: 363634 - RNA, 23 nt, Artificial Sequence
  Synthetic
uuaauaaagaaauaaaagcagau

SEQ ID NO: 363635 - RNA, 24 nt, Artificial Sequence
  Synthetic
cuuaauaaagaaauaaaagcagau

SEQ ID NO: 363636 - RNA, 18 nt, Artificial Sequence
  Synthetic
aguuauuaauaagcagau

SEQ ID NO: 363637 - RNA, 19 nt, Artificial Sequence
  Synthetic
gaguuauuaauaagcagau

SEQ ID NO: 363638 - RNA, 20 nt, Artificial Sequence
  Synthetic
ugaguuauuaauaagcagau

SEQ ID NO: 363639 - RNA, 21 nt, Artificial Sequence
  Synthetic
cugaguuauuaauaagcagau

SEQ ID NO: 363640 - RNA, 22 nt, Artificial Sequence
  Synthetic
acugaguuauuaauaagcagau

SEQ ID NO: 363641 - RNA, 23 nt, Artificial Sequence
  Synthetic
cacugaguuauuaauaagcagau

SEQ ID NO: 363642 - RNA, 24 nt, Artificial Sequence
  Synthetic
acacugaguuauuaauaagcagau

SEQ ID NO: 363643 - RNA, 18 nt, Artificial Sequence
  Synthetic
uuuacugaaacagcagau

SEQ ID NO: 363644 - RNA, 19 nt, Artificial Sequence
  Synthetic
guuuacugaaacagcagau

SEQ ID NO: 363645 - RNA, 20 nt, Artificial Sequence
  Synthetic
gguuuacugaaacagcagau

SEQ ID NO: 363646 - RNA, 21 nt, Artificial Sequence
  Synthetic
agguuuacugaaacagcagau

SEQ ID NO: 363647 - RNA, 22 nt, Artificial Sequence
  Synthetic
cagguuuacugaaacagcagau

SEQ ID NO: 363648 - RNA, 23 nt, Artificial Sequence
  Synthetic
ucagguuuacugaaacagcagau

SEQ ID NO: 363649 - RNA, 24 nt, Artificial Sequence
  Synthetic
gucagguuuacugaaacagcagau

SEQ ID NO: 363650 - RNA, 18 nt, Artificial Sequence
  Synthetic
uuuuuuaaaggagcagau

SEQ ID NO: 363651 - RNA, 19 nt, Artificial Sequence
  Synthetic
auuuuuuaaaggagcagau

SEQ ID NO: 363652 - RNA, 20 nt, Artificial Sequence
  Synthetic
cauuuuuuaaaggagcagau

SEQ ID NO: 363653 - RNA, 21 nt, Artificial Sequence
  Synthetic
acauuuuuuaaaggagcagau

SEQ ID NO: 363654 - RNA, 22 nt, Artificial Sequence
  Synthetic
uacauuuuuuaaaggagcagau

SEQ ID NO: 363655 - RNA, 23 nt, Artificial Sequence
  Synthetic
auacauuuuuuaaaggagcagau

SEQ ID NO: 363656 - RNA, 24 nt, Artificial Sequence
  Synthetic
uauacauuuuuuaaaggagcagau

SEQ ID NO: 363657 - RNA, 18 nt, Artificial Sequence
  Synthetic
ccauuaucaggagcagau

SEQ ID NO: 363658 - RNA, 19 nt, Artificial Sequence
  Synthetic
accauuaucaggagcagau

SEQ ID NO: 363659 - RNA, 20 nt, Artificial Sequence
  Synthetic
aaccauuaucaggagcagau

SEQ ID NO: 363660 - RNA, 21 nt, Artificial Sequence
  Synthetic
caaccauuaucaggagcagau

SEQ ID NO: 363661 - RNA, 22 nt, Artificial Sequence
  Synthetic
gcaaccauuaucaggagcagau

SEQ ID NO: 363662 - RNA, 23 nt, Artificial Sequence
  Synthetic
agcaaccauuaucaggagcagau

SEQ ID NO: 363663 - RNA, 24 nt, Artificial Sequence
  Synthetic
uagcaaccauuaucaggagcagau

SEQ ID NO: 363664 - RNA, 18 nt, Artificial Sequence
  Synthetic
ggcaguauuugagcagau

SEQ ID NO: 363665 - RNA, 19 nt, Artificial Sequence
  Synthetic
gggcaguauuugagcagau

SEQ ID NO: 363666 - RNA, 20 nt, Artificial Sequence
  Synthetic
ggggcaguauuugagcagau

SEQ ID NO: 363667 - RNA, 21 nt, Artificial Sequence
  Synthetic
gggggcaguauuugagcagau

SEQ ID NO: 363668 - RNA, 22 nt, Artificial Sequence
  Synthetic
agggggcaguauuugagcagau

SEQ ID NO: 363669 - RNA, 23 nt, Artificial Sequence
  Synthetic
uagggggcaguauuugagcagau

SEQ ID NO: 363670 - RNA, 24 nt, Artificial Sequence
  Synthetic
cuagggggcaguauuugagcagau

SEQ ID NO: 363671 - RNA, 18 nt, Artificial Sequence
  Synthetic
aacagaagacuagcagau

SEQ ID NO: 363672 - RNA, 19 nt, Artificial Sequence
  Synthetic
caacagaagacuagcagau

SEQ ID NO: 363673 - RNA, 20 nt, Artificial Sequence
  Synthetic
ccaacagaagacuagcagau

SEQ ID NO: 363674 - RNA, 21 nt, Artificial Sequence
  Synthetic
cccaacagaagacuagcagau

SEQ ID NO: 363675 - RNA, 22 nt, Artificial Sequence
  Synthetic
ucccaacagaagacuagcagau

SEQ ID NO: 363676 - RNA, 23 nt, Artificial Sequence
  Synthetic
cucccaacagaagacuagcagau

SEQ ID NO: 363677 - RNA, 24 nt, Artificial Sequence
  Synthetic
ccucccaacagaagacuagcagau

SEQ ID NO: 363678 - RNA, 18 nt, Artificial Sequence
  Synthetic
cugguagggguagcagau

SEQ ID NO: 363679 - RNA, 19 nt, Artificial Sequence
  Synthetic
ucugguagggguagcagau

SEQ ID NO: 363680 - RNA, 20 nt, Artificial Sequence
  Synthetic
aucugguagggguagcagau

SEQ ID NO: 363681 - RNA, 21 nt, Artificial Sequence
  Synthetic
caucugguagggguagcagau

SEQ ID NO: 363682 - RNA, 22 nt, Artificial Sequence
  Synthetic
acaucugguagggguagcagau

SEQ ID NO: 363683 - RNA, 23 nt, Artificial Sequence
  Synthetic
aacaucugguagggguagcagau

SEQ ID NO: 363684 - RNA, 24 nt, Artificial Sequence
  Synthetic
uaacaucugguagggguagcagau

SEQ ID NO: 363685 - RNA, 18 nt, Artificial Sequence
  Synthetic
auaaccagaaaggcagau

SEQ ID NO: 363686 - RNA, 19 nt, Artificial Sequence
  Synthetic
cauaaccagaaaggcagau

SEQ ID NO: 363687 - RNA, 20 nt, Artificial Sequence
  Synthetic
ccauaaccagaaaggcagau

SEQ ID NO: 363688 - RNA, 21 nt, Artificial Sequence
  Synthetic
accauaaccagaaaggcagau

SEQ ID NO: 363689 - RNA, 22 nt, Artificial Sequence
  Synthetic
caccauaaccagaaaggcagau

SEQ ID NO: 363690 - RNA, 23 nt, Artificial Sequence
  Synthetic
ucaccauaaccagaaaggcagau

SEQ ID NO: 363691 - RNA, 24 nt, Artificial Sequence
  Synthetic
cucaccauaaccagaaaggcagau

SEQ ID NO: 363692 - RNA, 18 nt, Artificial Sequence
  Synthetic
cuuugcuuuuaggcagau

SEQ ID NO: 363693 - RNA, 19 nt, Artificial Sequence
  Synthetic
ucuuugcuuuuaggcagau

SEQ ID NO: 363694 - RNA, 20 nt, Artificial Sequence
  Synthetic
aucuuugcuuuuaggcagau

SEQ ID NO: 363695 - RNA, 21 nt, Artificial Sequence
  Synthetic
aaucuuugcuuuuaggcagau

SEQ ID NO: 363696 - RNA, 22 nt, Artificial Sequence
  Synthetic
aaaucuuugcuuuuaggcagau

SEQ ID NO: 363697 - RNA, 23 nt, Artificial Sequence
  Synthetic
gaaaucuuugcuuuuaggcagau

SEQ ID NO: 363698 - RNA, 24 nt, Artificial Sequence
  Synthetic
agaaaucuuugcuuuuaggcagau

SEQ ID NO: 363699 - RNA, 18 nt, Artificial Sequence
  Synthetic
agaaaagaaggggcagau

SEQ ID NO: 363700 - RNA, 19 nt, Artificial Sequence
  Synthetic
cagaaaagaaggggcagau

SEQ ID NO: 363701 - RNA, 20 nt, Artificial Sequence
  Synthetic
acagaaaagaaggggcagau

SEQ ID NO: 363702 - RNA, 21 nt, Artificial Sequence
  Synthetic
aacagaaaagaaggggcagau

SEQ ID NO: 363703 - RNA, 22 nt, Artificial Sequence
  Synthetic
gaacagaaaagaaggggcagau

SEQ ID NO: 363704 - RNA, 23 nt, Artificial Sequence
  Synthetic
agaacagaaaagaaggggcagau

SEQ ID NO: 363705 - RNA, 24 nt, Artificial Sequence
  Synthetic
gagaacagaaaagaaggggcagau

SEQ ID NO: 363706 - RNA, 18 nt, Artificial Sequence
  Synthetic
cuuacaaucauggcagau

SEQ ID NO: 363707 - RNA, 19 nt, Artificial Sequence
  Synthetic
acuuacaaucauggcagau

SEQ ID NO: 363708 - RNA, 20 nt, Artificial Sequence
  Synthetic
aacuuacaaucauggcagau

SEQ ID NO: 363709 - RNA, 21 nt, Artificial Sequence
  Synthetic
aaacuuacaaucauggcagau

SEQ ID NO: 363710 - RNA, 22 nt, Artificial Sequence
  Synthetic
gaaacuuacaaucauggcagau

SEQ ID NO: 363711 - RNA, 23 nt, Artificial Sequence
  Synthetic
ggaaacuuacaaucauggcagau

SEQ ID NO: 363712 - RNA, 24 nt, Artificial Sequence
  Synthetic
aggaaacuuacaaucauggcagau

SEQ ID NO: 363713 - RNA, 18 nt, Artificial Sequence
  Synthetic
gcuucaaaguuggcagau

SEQ ID NO: 363714 - RNA, 19 nt, Artificial Sequence
  Synthetic
agcuucaaaguuggcagau

SEQ ID NO: 363715 - RNA, 20 nt, Artificial Sequence
  Synthetic
cagcuucaaaguuggcagau

SEQ ID NO: 363716 - RNA, 21 nt, Artificial Sequence
  Synthetic
ucagcuucaaaguuggcagau

SEQ ID NO: 363717 - RNA, 22 nt, Artificial Sequence
  Synthetic
uucagcuucaaaguuggcagau

SEQ ID NO: 363718 - RNA, 23 nt, Artificial Sequence
  Synthetic
guucagcuucaaaguuggcagau

SEQ ID NO: 363719 - RNA, 24 nt, Artificial Sequence
  Synthetic
aguucagcuucaaaguuggcagau

SEQ ID NO: 363720 - RNA, 18 nt, Artificial Sequence
  Synthetic
ugugcuagagaugcagau

SEQ ID NO: 363721 - RNA, 19 nt, Artificial Sequence
  Synthetic
augugcuagagaugcagau

SEQ ID NO: 363722 - RNA, 20 nt, Artificial Sequence
  Synthetic
uaugugcuagagaugcagau

SEQ ID NO: 363723 - RNA, 21 nt, Artificial Sequence
  Synthetic
guaugugcuagagaugcagau

SEQ ID NO: 363724 - RNA, 22 nt, Artificial Sequence
  Synthetic
aguaugugcuagagaugcagau

SEQ ID NO: 363725 - RNA, 23 nt, Artificial Sequence
  Synthetic
aaguaugugcuagagaugcagau

SEQ ID NO: 363726 - RNA, 24 nt, Artificial Sequence
  Synthetic
gaaguaugugcuagagaugcagau

SEQ ID NO: 363727 - RNA, 18 nt, Artificial Sequence
  Synthetic
auccuacagauugcagau

SEQ ID NO: 363728 - RNA, 19 nt, Artificial Sequence
  Synthetic
cauccuacagauugcagau

SEQ ID NO: 363729 - RNA, 20 nt, Artificial Sequence
  Synthetic
ucauccuacagauugcagau

SEQ ID NO: 363730 - RNA, 21 nt, Artificial Sequence
  Synthetic
uucauccuacagauugcagau

SEQ ID NO: 363731 - RNA, 22 nt, Artificial Sequence
  Synthetic
uuucauccuacagauugcagau

SEQ ID NO: 363732 - RNA, 23 nt, Artificial Sequence
  Synthetic
auuucauccuacagauugcagau

SEQ ID NO: 363733 - RNA, 24 nt, Artificial Sequence
  Synthetic
gauuucauccuacagauugcagau

SEQ ID NO: 363734 - RNA, 18 nt, Artificial Sequence
  Synthetic
gcaauagauauugcagau

SEQ ID NO: 363735 - RNA, 19 nt, Artificial Sequence
  Synthetic
agcaauagauauugcagau

SEQ ID NO: 363736 - RNA, 20 nt, Artificial Sequence
  Synthetic
cagcaauagauauugcagau

SEQ ID NO: 363737 - RNA, 21 nt, Artificial Sequence
  Synthetic
acagcaauagauauugcagau

SEQ ID NO: 363738 - RNA, 22 nt, Artificial Sequence
  Synthetic
cacagcaauagauauugcagau

SEQ ID NO: 363739 - RNA, 23 nt, Artificial Sequence
  Synthetic
ucacagcaauagauauugcagau

SEQ ID NO: 363740 - RNA, 24 nt, Artificial Sequence
  Synthetic
aucacagcaauagauauugcagau

SEQ ID NO: 363741 - RNA, 18 nt, Artificial Sequence
  Synthetic
aaaccaaauaaaucagau

SEQ ID NO: 363742 - RNA, 19 nt, Artificial Sequence
  Synthetic
gaaaccaaauaaaucagau

SEQ ID NO: 363743 - RNA, 20 nt, Artificial Sequence
  Synthetic
agaaaccaaauaaaucagau

SEQ ID NO: 363744 - RNA, 21 nt, Artificial Sequence
  Synthetic
uagaaaccaaauaaaucagau

SEQ ID NO: 363745 - RNA, 22 nt, Artificial Sequence
  Synthetic
guagaaaccaaauaaaucagau

SEQ ID NO: 363746 - RNA, 23 nt, Artificial Sequence
  Synthetic
aguagaaaccaaauaaaucagau

SEQ ID NO: 363747 - RNA, 24 nt, Artificial Sequence
  Synthetic
gaguagaaaccaaauaaaucagau

SEQ ID NO: 363748 - RNA, 18 nt, Artificial Sequence
  Synthetic
gguaaucguaaaucagau

SEQ ID NO: 363749 - RNA, 19 nt, Artificial Sequence
  Synthetic
agguaaucguaaaucagau

SEQ ID NO: 363750 - RNA, 20 nt, Artificial Sequence
  Synthetic
cagguaaucguaaaucagau

SEQ ID NO: 363751 - RNA, 21 nt, Artificial Sequence
  Synthetic
ucagguaaucguaaaucagau

SEQ ID NO: 363752 - RNA, 22 nt, Artificial Sequence
  Synthetic
uucagguaaucguaaaucagau

SEQ ID NO: 363753 - RNA, 23 nt, Artificial Sequence
  Synthetic
uuucagguaaucguaaaucagau

SEQ ID NO: 363754 - RNA, 24 nt, Artificial Sequence
  Synthetic
auuucagguaaucguaaaucagau

SEQ ID NO: 363755 - RNA, 18 nt, Artificial Sequence
  Synthetic
cucuguaaacaaucagau

SEQ ID NO: 363756 - RNA, 19 nt, Artificial Sequence
  Synthetic
gcucuguaaacaaucagau

SEQ ID NO: 363757 - RNA, 20 nt, Artificial Sequence
  Synthetic
ugcucuguaaacaaucagau

SEQ ID NO: 363758 - RNA, 21 nt, Artificial Sequence
  Synthetic
uugcucuguaaacaaucagau

SEQ ID NO: 363759 - RNA, 22 nt, Artificial Sequence
  Synthetic
uuugcucuguaaacaaucagau

SEQ ID NO: 363760 - RNA, 23 nt, Artificial Sequence
  Synthetic
uuuugcucuguaaacaaucagau

SEQ ID NO: 363761 - RNA, 24 nt, Artificial Sequence
  Synthetic
uuuuugcucuguaaacaaucagau

SEQ ID NO: 363762 - RNA, 18 nt, Artificial Sequence
  Synthetic
ucauuuuuagcaucagau

SEQ ID NO: 363763 - RNA, 19 nt, Artificial Sequence
  Synthetic
cucauuuuuagcaucagau

SEQ ID NO: 363764 - RNA, 20 nt, Artificial Sequence
  Synthetic
acucauuuuuagcaucagau

SEQ ID NO: 363765 - RNA, 21 nt, Artificial Sequence
  Synthetic
aacucauuuuuagcaucagau

SEQ ID NO: 363766 - RNA, 22 nt, Artificial Sequence
  Synthetic
uaacucauuuuuagcaucagau

SEQ ID NO: 363767 - RNA, 23 nt, Artificial Sequence
  Synthetic
auaacucauuuuuagcaucagau

SEQ ID NO: 363768 - RNA, 24 nt, Artificial Sequence
  Synthetic
uauaacucauuuuuagcaucagau

SEQ ID NO: 363769 - RNA, 18 nt, Artificial Sequence
  Synthetic
ugaauccacuuaucagau

SEQ ID NO: 363770 - RNA, 19 nt, Artificial Sequence
  Synthetic
uugaauccacuuaucagau

SEQ ID NO: 363771 - RNA, 20 nt, Artificial Sequence
  Synthetic
auugaauccacuuaucagau

SEQ ID NO: 363772 - RNA, 21 nt, Artificial Sequence
  Synthetic
cauugaauccacuuaucagau

SEQ ID NO: 363773 - RNA, 22 nt, Artificial Sequence
  Synthetic
ucauugaauccacuuaucagau

SEQ ID NO: 363774 - RNA, 23 nt, Artificial Sequence
  Synthetic
aucauugaauccacuuaucagau

SEQ ID NO: 363775 - RNA, 24 nt, Artificial Sequence
  Synthetic
aaucauugaauccacuuaucagau

SEQ ID NO: 363776 - RNA, 18 nt, Artificial Sequence
  Synthetic
aguagaugagacucagau

SEQ ID NO: 363777 - RNA, 19 nt, Artificial Sequence
  Synthetic
gaguagaugagacucagau

SEQ ID NO: 363778 - RNA, 20 nt, Artificial Sequence
  Synthetic
agaguagaugagacucagau

SEQ ID NO: 363779 - RNA, 21 nt, Artificial Sequence
  Synthetic
aagaguagaugagacucagau

SEQ ID NO: 363780 - RNA, 22 nt, Artificial Sequence
  Synthetic
caagaguagaugagacucagau

SEQ ID NO: 363781 - RNA, 23 nt, Artificial Sequence
  Synthetic
acaagaguagaugagacucagau

SEQ ID NO: 363782 - RNA, 24 nt, Artificial Sequence
  Synthetic
aacaagaguagaugagacucagau

SEQ ID NO: 363783 - RNA, 18 nt, Artificial Sequence
  Synthetic
uggcuauauaccucagau

SEQ ID NO: 363784 - RNA, 19 nt, Artificial Sequence
  Synthetic
uuggcuauauaccucagau

SEQ ID NO: 363785 - RNA, 20 nt, Artificial Sequence
  Synthetic
guuggcuauauaccucagau

SEQ ID NO: 363786 - RNA, 21 nt, Artificial Sequence
  Synthetic
aguuggcuauauaccucagau

SEQ ID NO: 363787 - RNA, 22 nt, Artificial Sequence
  Synthetic
caguuggcuauauaccucagau

SEQ ID NO: 363788 - RNA, 23 nt, Artificial Sequence
  Synthetic
gcaguuggcuauauaccucagau

SEQ ID NO: 363789 - RNA, 24 nt, Artificial Sequence
  Synthetic
agcaguuggcuauauaccucagau

SEQ ID NO: 363790 - RNA, 18 nt, Artificial Sequence
  Synthetic
gagauuucacccucagau

SEQ ID NO: 363791 - RNA, 19 nt, Artificial Sequence
  Synthetic
agagauuucacccucagau

SEQ ID NO: 363792 - RNA, 20 nt, Artificial Sequence
  Synthetic
cagagauuucacccucagau

SEQ ID NO: 363793 - RNA, 21 nt, Artificial Sequence
  Synthetic
ucagagauuucacccucagau

SEQ ID NO: 363794 - RNA, 22 nt, Artificial Sequence
  Synthetic
uucagagauuucacccucagau

SEQ ID NO: 363795 - RNA, 23 nt, Artificial Sequence
  Synthetic
auucagagauuucacccucagau

SEQ ID NO: 363796 - RNA, 24 nt, Artificial Sequence
  Synthetic
gauucagagauuucacccucagau

SEQ ID NO: 363797 - RNA, 18 nt, Artificial Sequence
  Synthetic
ggcaucauuuccucagau

SEQ ID NO: 363798 - RNA, 19 nt, Artificial Sequence
  Synthetic
aggcaucauuuccucagau

SEQ ID NO: 363799 - RNA, 20 nt, Artificial Sequence
  Synthetic
caggcaucauuuccucagau

SEQ ID NO: 363800 - RNA, 21 nt, Artificial Sequence
  Synthetic
ccaggcaucauuuccucagau

SEQ ID NO: 363801 - RNA, 22 nt, Artificial Sequence
  Synthetic
uccaggcaucauuuccucagau

SEQ ID NO: 363802 - RNA, 23 nt, Artificial Sequence
  Synthetic
uuccaggcaucauuuccucagau

SEQ ID NO: 363803 - RNA, 24 nt, Artificial Sequence
  Synthetic
cuuccaggcaucauuuccucagau

SEQ ID NO: 363804 - RNA, 18 nt, Artificial Sequence
  Synthetic
ugcugugaucucucagau

SEQ ID NO: 363805 - RNA, 19 nt, Artificial Sequence
  Synthetic
cugcugugaucucucagau

SEQ ID NO: 363806 - RNA, 20 nt, Artificial Sequence
  Synthetic
ccugcugugaucucucagau

SEQ ID NO: 363807 - RNA, 21 nt, Artificial Sequence
  Synthetic
cccugcugugaucucucagau

SEQ ID NO: 363808 - RNA, 22 nt, Artificial Sequence
  Synthetic
acccugcugugaucucucagau

SEQ ID NO: 363809 - RNA, 23 nt, Artificial Sequence
  Synthetic
gacccugcugugaucucucagau

SEQ ID NO: 363810 - RNA, 24 nt, Artificial Sequence
  Synthetic
ugacccugcugugaucucucagau

SEQ ID NO: 363811 - RNA, 18 nt, Artificial Sequence
  Synthetic
gauauaaauaauucagau

SEQ ID NO: 363812 - RNA, 19 nt, Artificial Sequence
  Synthetic
agauauaaauaauucagau

SEQ ID NO: 363813 - RNA, 20 nt, Artificial Sequence
  Synthetic
uagauauaaauaauucagau

SEQ ID NO: 363814 - RNA, 21 nt, Artificial Sequence
  Synthetic
auagauauaaauaauucagau

SEQ ID NO: 363815 - RNA, 22 nt, Artificial Sequence
  Synthetic
gauagauauaaauaauucagau

SEQ ID NO: 363816 - RNA, 23 nt, Artificial Sequence
  Synthetic
ugauagauauaaauaauucagau

SEQ ID NO: 363817 - RNA, 24 nt, Artificial Sequence
  Synthetic
gugauagauauaaauaauucagau

SEQ ID NO: 363818 - RNA, 18 nt, Artificial Sequence
  Synthetic
uagaaauuagcuucagau

SEQ ID NO: 363819 - RNA, 19 nt, Artificial Sequence
  Synthetic
uuagaaauuagcuucagau

SEQ ID NO: 363820 - RNA, 20 nt, Artificial Sequence
  Synthetic
uuuagaaauuagcuucagau

SEQ ID NO: 363821 - RNA, 21 nt, Artificial Sequence
  Synthetic
auuuagaaauuagcuucagau

SEQ ID NO: 363822 - RNA, 22 nt, Artificial Sequence
  Synthetic
aauuuagaaauuagcuucagau

SEQ ID NO: 363823 - RNA, 23 nt, Artificial Sequence
  Synthetic
aaauuuagaaauuagcuucagau

SEQ ID NO: 363824 - RNA, 24 nt, Artificial Sequence
  Synthetic
gaaauuuagaaauuagcuucagau

SEQ ID NO: 363825 - RNA, 18 nt, Artificial Sequence
  Synthetic
uuaaaacuuucuucagau

SEQ ID NO: 363826 - RNA, 19 nt, Artificial Sequence
  Synthetic
uuuaaaacuuucuucagau

SEQ ID NO: 363827 - RNA, 20 nt, Artificial Sequence
  Synthetic
guuuaaaacuuucuucagau

SEQ ID NO: 363828 - RNA, 21 nt, Artificial Sequence
  Synthetic
aguuuaaaacuuucuucagau

SEQ ID NO: 363829 - RNA, 22 nt, Artificial Sequence
  Synthetic
uaguuuaaaacuuucuucagau

SEQ ID NO: 363830 - RNA, 23 nt, Artificial Sequence
  Synthetic
uuaguuuaaaacuuucuucagau

SEQ ID NO: 363831 - RNA, 24 nt, Artificial Sequence
  Synthetic
guuaguuuaaaacuuucuucagau

SEQ ID NO: 363832 - RNA, 18 nt, Artificial Sequence
  Synthetic
uucuuguauauuucagau

SEQ ID NO: 363833 - RNA, 19 nt, Artificial Sequence
  Synthetic
cuucuuguauauuucagau

SEQ ID NO: 363834 - RNA, 20 nt, Artificial Sequence
  Synthetic
ucuucuuguauauuucagau

SEQ ID NO: 363835 - RNA, 21 nt, Artificial Sequence
  Synthetic
uucuucuuguauauuucagau

SEQ ID NO: 363836 - RNA, 22 nt, Artificial Sequence
  Synthetic
uuucuucuuguauauuucagau

SEQ ID NO: 363837 - RNA, 23 nt, Artificial Sequence
  Synthetic
guuucuucuuguauauuucagau

SEQ ID NO: 363838 - RNA, 24 nt, Artificial Sequence
  Synthetic
aguuucuucuuguauauuucagau

SEQ ID NO: 363839 - RNA, 18 nt, Artificial Sequence
  Synthetic
gauuuuggauuuucagau

SEQ ID NO: 363840 - RNA, 19 nt, Artificial Sequence
  Synthetic
ggauuuuggauuuucagau

SEQ ID NO: 363841 - RNA, 20 nt, Artificial Sequence
  Synthetic
uggauuuuggauuuucagau

SEQ ID NO: 363842 - RNA, 21 nt, Artificial Sequence
  Synthetic
uuggauuuuggauuuucagau

SEQ ID NO: 363843 - RNA, 22 nt, Artificial Sequence
  Synthetic
uuuggauuuuggauuuucagau

SEQ ID NO: 363844 - RNA, 23 nt, Artificial Sequence
  Synthetic
uuuuggauuuuggauuuucagau

SEQ ID NO: 363845 - RNA, 24 nt, Artificial Sequence
  Synthetic
uuuuuggauuuuggauuuucagau

SEQ ID NO: 363846 - RNA, 18 nt, Artificial Sequence
  Synthetic
augagggacaaaagagau

SEQ ID NO: 363847 - RNA, 19 nt, Artificial Sequence
  Synthetic
uaugagggacaaaagagau

SEQ ID NO: 363848 - RNA, 20 nt, Artificial Sequence
  Synthetic
auaugagggacaaaagagau

SEQ ID NO: 363849 - RNA, 21 nt, Artificial Sequence
  Synthetic
gauaugagggacaaaagagau

SEQ ID NO: 363850 - RNA, 22 nt, Artificial Sequence
  Synthetic
agauaugagggacaaaagagau

SEQ ID NO: 363851 - RNA, 23 nt, Artificial Sequence
  Synthetic
uagauaugagggacaaaagagau

SEQ ID NO: 363852 - RNA, 24 nt, Artificial Sequence
  Synthetic
cuagauaugagggacaaaagagau

SEQ ID NO: 363853 - RNA, 18 nt, Artificial Sequence
  Synthetic
uggaaagaauaaagagau

SEQ ID NO: 363854 - RNA, 19 nt, Artificial Sequence
  Synthetic
auggaaagaauaaagagau

SEQ ID NO: 363855 - RNA, 20 nt, Artificial Sequence
  Synthetic
cauggaaagaauaaagagau

SEQ ID NO: 363856 - RNA, 21 nt, Artificial Sequence
  Synthetic
ucauggaaagaauaaagagau

SEQ ID NO: 363857 - RNA, 22 nt, Artificial Sequence
  Synthetic
cucauggaaagaauaaagagau

SEQ ID NO: 363858 - RNA, 23 nt, Artificial Sequence
  Synthetic
acucauggaaagaauaaagagau

SEQ ID NO: 363859 - RNA, 24 nt, Artificial Sequence
  Synthetic
cacucauggaaagaauaaagagau

SEQ ID NO: 363860 - RNA, 18 nt, Artificial Sequence
  Synthetic
aaaccaaaaacaagagau

SEQ ID NO: 363861 - RNA, 19 nt, Artificial Sequence
  Synthetic
caaaccaaaaacaagagau

SEQ ID NO: 363862 - RNA, 20 nt, Artificial Sequence
  Synthetic
acaaaccaaaaacaagagau

SEQ ID NO: 363863 - RNA, 21 nt, Artificial Sequence
  Synthetic
aacaaaccaaaaacaagagau

SEQ ID NO: 363864 - RNA, 22 nt, Artificial Sequence
  Synthetic
aaacaaaccaaaaacaagagau

SEQ ID NO: 363865 - RNA, 23 nt, Artificial Sequence
  Synthetic
aaaacaaaccaaaaacaagagau

SEQ ID NO: 363866 - RNA, 24 nt, Artificial Sequence
  Synthetic
aaaaacaaaccaaaaacaagagau

SEQ ID NO: 363867 - RNA, 18 nt, Artificial Sequence
  Synthetic
agcccagauucaagagau

SEQ ID NO: 363868 - RNA, 19 nt, Artificial Sequence
  Synthetic
cagcccagauucaagagau

SEQ ID NO: 363869 - RNA, 20 nt, Artificial Sequence
  Synthetic
ucagcccagauucaagagau

SEQ ID NO: 363870 - RNA, 21 nt, Artificial Sequence
  Synthetic
aucagcccagauucaagagau

SEQ ID NO: 363871 - RNA, 22 nt, Artificial Sequence
  Synthetic
gaucagcccagauucaagagau

SEQ ID NO: 363872 - RNA, 23 nt, Artificial Sequence
  Synthetic
agaucagcccagauucaagagau

SEQ ID NO: 363873 - RNA, 24 nt, Artificial Sequence
  Synthetic
aagaucagcccagauucaagagau

SEQ ID NO: 363874 - RNA, 18 nt, Artificial Sequence
  Synthetic
acuaguaggggaagagau

SEQ ID NO: 363875 - RNA, 19 nt, Artificial Sequence
  Synthetic
aacuaguaggggaagagau

SEQ ID NO: 363876 - RNA, 20 nt, Artificial Sequence
  Synthetic
aaacuaguaggggaagagau

SEQ ID NO: 363877 - RNA, 21 nt, Artificial Sequence
  Synthetic
gaaacuaguaggggaagagau

SEQ ID NO: 363878 - RNA, 22 nt, Artificial Sequence
  Synthetic
ggaaacuaguaggggaagagau

SEQ ID NO: 363879 - RNA, 23 nt, Artificial Sequence
  Synthetic
uggaaacuaguaggggaagagau

SEQ ID NO: 363880 - RNA, 24 nt, Artificial Sequence
  Synthetic
cuggaaacuaguaggggaagagau

SEQ ID NO: 363881 - RNA, 18 nt, Artificial Sequence
  Synthetic
guucuuauugccagagau

SEQ ID NO: 363882 - RNA, 19 nt, Artificial Sequence
  Synthetic
gguucuuauugccagagau

SEQ ID NO: 363883 - RNA, 20 nt, Artificial Sequence
  Synthetic
agguucuuauugccagagau

SEQ ID NO: 363884 - RNA, 21 nt, Artificial Sequence
  Synthetic
uagguucuuauugccagagau

SEQ ID NO: 363885 - RNA, 22 nt, Artificial Sequence
  Synthetic
cuagguucuuauugccagagau

SEQ ID NO: 363886 - RNA, 23 nt, Artificial Sequence
  Synthetic
acuagguucuuauugccagagau

SEQ ID NO: 363887 - RNA, 24 nt, Artificial Sequence
  Synthetic
aacuagguucuuauugccagagau

SEQ ID NO: 363888 - RNA, 18 nt, Artificial Sequence
  Synthetic
gcagaguaaaagagagau

SEQ ID NO: 363889 - RNA, 19 nt, Artificial Sequence
  Synthetic
agcagaguaaaagagagau

SEQ ID NO: 363890 - RNA, 20 nt, Artificial Sequence
  Synthetic
aagcagaguaaaagagagau

SEQ ID NO: 363891 - RNA, 21 nt, Artificial Sequence
  Synthetic
caagcagaguaaaagagagau

SEQ ID NO: 363892 - RNA, 22 nt, Artificial Sequence
  Synthetic
acaagcagaguaaaagagagau

SEQ ID NO: 363893 - RNA, 23 nt, Artificial Sequence
  Synthetic
uacaagcagaguaaaagagagau

SEQ ID NO: 363894 - RNA, 24 nt, Artificial Sequence
  Synthetic
auacaagcagaguaaaagagagau

SEQ ID NO: 363895 - RNA, 18 nt, Artificial Sequence
  Synthetic
augagaagaaggagagau

SEQ ID NO: 363896 - RNA, 19 nt, Artificial Sequence
  Synthetic
gaugagaagaaggagagau

SEQ ID NO: 363897 - RNA, 20 nt, Artificial Sequence
  Synthetic
agaugagaagaaggagagau

SEQ ID NO: 363898 - RNA, 21 nt, Artificial Sequence
  Synthetic
uagaugagaagaaggagagau

SEQ ID NO: 363899 - RNA, 22 nt, Artificial Sequence
  Synthetic
uuagaugagaagaaggagagau

SEQ ID NO: 363900 - RNA, 23 nt, Artificial Sequence
  Synthetic
guuagaugagaagaaggagagau

SEQ ID NO: 363901 - RNA, 24 nt, Artificial Sequence
  Synthetic
aguuagaugagaagaaggagagau

SEQ ID NO: 363902 - RNA, 18 nt, Artificial Sequence
  Synthetic
gaggccaaagggagagau

SEQ ID NO: 363903 - RNA, 19 nt, Artificial Sequence
  Synthetic
agaggccaaagggagagau

SEQ ID NO: 363904 - RNA, 20 nt, Artificial Sequence
  Synthetic
cagaggccaaagggagagau

SEQ ID NO: 363905 - RNA, 21 nt, Artificial Sequence
  Synthetic
ucagaggccaaagggagagau

SEQ ID NO: 363906 - RNA, 22 nt, Artificial Sequence
  Synthetic
cucagaggccaaagggagagau

SEQ ID NO: 363907 - RNA, 23 nt, Artificial Sequence
  Synthetic
ccucagaggccaaagggagagau

SEQ ID NO: 363908 - RNA, 24 nt, Artificial Sequence
  Synthetic
gccucagaggccaaagggagagau

SEQ ID NO: 363909 - RNA, 18 nt, Artificial Sequence
  Synthetic
cuaagaguacugagagau

SEQ ID NO: 363910 - RNA, 19 nt, Artificial Sequence
  Synthetic
ccuaagaguacugagagau

SEQ ID NO: 363911 - RNA, 20 nt, Artificial Sequence
  Synthetic
accuaagaguacugagagau

SEQ ID NO: 363912 - RNA, 21 nt, Artificial Sequence
  Synthetic
gaccuaagaguacugagagau

SEQ ID NO: 363913 - RNA, 22 nt, Artificial Sequence
  Synthetic
agaccuaagaguacugagagau

SEQ ID NO: 363914 - RNA, 23 nt, Artificial Sequence
  Synthetic
gagaccuaagaguacugagagau

SEQ ID NO: 363915 - RNA, 24 nt, Artificial Sequence
  Synthetic
ggagaccuaagaguacugagagau

SEQ ID NO: 363916 - RNA, 18 nt, Artificial Sequence
  Synthetic
cagagcauggugagagau

SEQ ID NO: 363917 - RNA, 19 nt, Artificial Sequence
  Synthetic
gcagagcauggugagagau

SEQ ID NO: 363918 - RNA, 20 nt, Artificial Sequence
  Synthetic
ggcagagcauggugagagau

SEQ ID NO: 363919 - RNA, 21 nt, Artificial Sequence
  Synthetic
uggcagagcauggugagagau

SEQ ID NO: 363920 - RNA, 22 nt, Artificial Sequence
  Synthetic
auggcagagcauggugagagau

SEQ ID NO: 363921 - RNA, 23 nt, Artificial Sequence
  Synthetic
gauggcagagcauggugagagau

SEQ ID NO: 363922 - RNA, 24 nt, Artificial Sequence
  Synthetic
ugauggcagagcauggugagagau

SEQ ID NO: 363923 - RNA, 18 nt, Artificial Sequence
  Synthetic
ccugaagaaaauagagau

SEQ ID NO: 363924 - RNA, 19 nt, Artificial Sequence
  Synthetic
accugaagaaaauagagau

SEQ ID NO: 363925 - RNA, 20 nt, Artificial Sequence
  Synthetic
uaccugaagaaaauagagau

SEQ ID NO: 363926 - RNA, 21 nt, Artificial Sequence
  Synthetic
auaccugaagaaaauagagau

SEQ ID NO: 363927 - RNA, 22 nt, Artificial Sequence
  Synthetic
uauaccugaagaaaauagagau

SEQ ID NO: 363928 - RNA, 23 nt, Artificial Sequence
  Synthetic
guauaccugaagaaaauagagau

SEQ ID NO: 363929 - RNA, 24 nt, Artificial Sequence
  Synthetic
uguauaccugaagaaaauagagau

SEQ ID NO: 363930 - RNA, 18 nt, Artificial Sequence
  Synthetic
uuuuagaagaauagagau

SEQ ID NO: 363931 - RNA, 19 nt, Artificial Sequence
  Synthetic
cuuuuagaagaauagagau

SEQ ID NO: 363932 - RNA, 20 nt, Artificial Sequence
  Synthetic
ucuuuuagaagaauagagau

SEQ ID NO: 363933 - RNA, 21 nt, Artificial Sequence
  Synthetic
aucuuuuagaagaauagagau

SEQ ID NO: 363934 - RNA, 22 nt, Artificial Sequence
  Synthetic
uaucuuuuagaagaauagagau

SEQ ID NO: 363935 - RNA, 23 nt, Artificial Sequence
  Synthetic
uuaucuuuuagaagaauagagau

SEQ ID NO: 363936 - RNA, 24 nt, Artificial Sequence
  Synthetic
auuaucuuuuagaagaauagagau

SEQ ID NO: 363937 - RNA, 18 nt, Artificial Sequence
  Synthetic
auauggugcuauagagau

SEQ ID NO: 363938 - RNA, 19 nt, Artificial Sequence
  Synthetic
aauauggugcuauagagau

SEQ ID NO: 363939 - RNA, 20 nt, Artificial Sequence
  Synthetic
aaauauggugcuauagagau

SEQ ID NO: 363940 - RNA, 21 nt, Artificial Sequence
  Synthetic
uaaauauggugcuauagagau

SEQ ID NO: 363941 - RNA, 22 nt, Artificial Sequence
  Synthetic
cuaaauauggugcuauagagau

SEQ ID NO: 363942 - RNA, 23 nt, Artificial Sequence
  Synthetic
ucuaaauauggugcuauagagau

SEQ ID NO: 363943 - RNA, 24 nt, Artificial Sequence
  Synthetic
cucuaaauauggugcuauagagau

SEQ ID NO: 363944 - RNA, 18 nt, Artificial Sequence
  Synthetic
accuagcaagcuagagau

SEQ ID NO: 363945 - RNA, 19 nt, Artificial Sequence
  Synthetic
uaccuagcaagcuagagau

SEQ ID NO: 363946 - RNA, 20 nt, Artificial Sequence
  Synthetic
auaccuagcaagcuagagau

SEQ ID NO: 363947 - RNA, 21 nt, Artificial Sequence
  Synthetic
uauaccuagcaagcuagagau

SEQ ID NO: 363948 - RNA, 22 nt, Artificial Sequence
  Synthetic
uuauaccuagcaagcuagagau

SEQ ID NO: 363949 - RNA, 23 nt, Artificial Sequence
  Synthetic
uuuauaccuagcaagcuagagau

SEQ ID NO: 363950 - RNA, 24 nt, Artificial Sequence
  Synthetic
uuuuauaccuagcaagcuagagau

SEQ ID NO: 363951 - RNA, 18 nt, Artificial Sequence
  Synthetic
ggugguucagcuagagau

SEQ ID NO: 363952 - RNA, 19 nt, Artificial Sequence
  Synthetic
uggugguucagcuagagau

SEQ ID NO: 363953 - RNA, 20 nt, Artificial Sequence
  Synthetic
cuggugguucagcuagagau

SEQ ID NO: 363954 - RNA, 21 nt, Artificial Sequence
  Synthetic
acuggugguucagcuagagau

SEQ ID NO: 363955 - RNA, 22 nt, Artificial Sequence
  Synthetic
aacuggugguucagcuagagau

SEQ ID NO: 363956 - RNA, 23 nt, Artificial Sequence
  Synthetic
gaacuggugguucagcuagagau

SEQ ID NO: 363957 - RNA, 24 nt, Artificial Sequence
  Synthetic
agaacuggugguucagcuagagau

SEQ ID NO: 363958 - RNA, 18 nt, Artificial Sequence
  Synthetic
agaaagaguguuagagau

SEQ ID NO: 363959 - RNA, 19 nt, Artificial Sequence
  Synthetic
cagaaagaguguuagagau

SEQ ID NO: 363960 - RNA, 20 nt, Artificial Sequence
  Synthetic
acagaaagaguguuagagau

SEQ ID NO: 363961 - RNA, 21 nt, Artificial Sequence
  Synthetic
aacagaaagaguguuagagau

SEQ ID NO: 363962 - RNA, 22 nt, Artificial Sequence
  Synthetic
gaacagaaagaguguuagagau

SEQ ID NO: 363963 - RNA, 23 nt, Artificial Sequence
  Synthetic
agaacagaaagaguguuagagau

SEQ ID NO: 363964 - RNA, 24 nt, Artificial Sequence
  Synthetic
aagaacagaaagaguguuagagau

SEQ ID NO: 363965 - RNA, 18 nt, Artificial Sequence
  Synthetic
gcaggcagaucacgagau

SEQ ID NO: 363966 - RNA, 19 nt, Artificial Sequence
  Synthetic
ggcaggcagaucacgagau

SEQ ID NO: 363967 - RNA, 20 nt, Artificial Sequence
  Synthetic
aggcaggcagaucacgagau

SEQ ID NO: 363968 - RNA, 21 nt, Artificial Sequence
  Synthetic
gaggcaggcagaucacgagau

SEQ ID NO: 363969 - RNA, 22 nt, Artificial Sequence
  Synthetic
cgaggcaggcagaucacgagau

SEQ ID NO: 363970 - RNA, 23 nt, Artificial Sequence
  Synthetic
ccgaggcaggcagaucacgagau

SEQ ID NO: 363971 - RNA, 24 nt, Artificial Sequence
  Synthetic
gccgaggcaggcagaucacgagau

SEQ ID NO: 363972 - RNA, 18 nt, Artificial Sequence
  Synthetic
gaauuugaaagacgagau

SEQ ID NO: 363973 - RNA, 19 nt, Artificial Sequence
  Synthetic
agaauuugaaagacgagau

SEQ ID NO: 363974 - RNA, 20 nt, Artificial Sequence
  Synthetic
aagaauuugaaagacgagau

SEQ ID NO: 363975 - RNA, 21 nt, Artificial Sequence
  Synthetic
caagaauuugaaagacgagau

SEQ ID NO: 363976 - RNA, 22 nt, Artificial Sequence
  Synthetic
acaagaauuugaaagacgagau

SEQ ID NO: 363977 - RNA, 23 nt, Artificial Sequence
  Synthetic
aacaagaauuugaaagacgagau

SEQ ID NO: 363978 - RNA, 24 nt, Artificial Sequence
  Synthetic
aaacaagaauuugaaagacgagau

SEQ ID NO: 363979 - RNA, 18 nt, Artificial Sequence
  Synthetic
ugacccuuucaaggagau

SEQ ID NO: 363980 - RNA, 19 nt, Artificial Sequence
  Synthetic
uugacccuuucaaggagau

SEQ ID NO: 363981 - RNA, 20 nt, Artificial Sequence
  Synthetic
cuugacccuuucaaggagau

SEQ ID NO: 363982 - RNA, 21 nt, Artificial Sequence
  Synthetic
acuugacccuuucaaggagau

SEQ ID NO: 363983 - RNA, 22 nt, Artificial Sequence
  Synthetic
uacuugacccuuucaaggagau

SEQ ID NO: 363984 - RNA, 23 nt, Artificial Sequence
  Synthetic
cuacuugacccuuucaaggagau

SEQ ID NO: 363985 - RNA, 24 nt, Artificial Sequence
  Synthetic
ucuacuugacccuuucaaggagau

SEQ ID NO: 363986 - RNA, 18 nt, Artificial Sequence
  Synthetic
gcuaaaauaccaggagau

SEQ ID NO: 363987 - RNA, 19 nt, Artificial Sequence
  Synthetic
ggcuaaaauaccaggagau

SEQ ID NO: 363988 - RNA, 20 nt, Artificial Sequence
  Synthetic
gggcuaaaauaccaggagau

SEQ ID NO: 363989 - RNA, 21 nt, Artificial Sequence
  Synthetic
agggcuaaaauaccaggagau

SEQ ID NO: 363990 - RNA, 22 nt, Artificial Sequence
  Synthetic
aagggcuaaaauaccaggagau

SEQ ID NO: 363991 - RNA, 23 nt, Artificial Sequence
  Synthetic
caagggcuaaaauaccaggagau

SEQ ID NO: 363992 - RNA, 24 nt, Artificial Sequence
  Synthetic
acaagggcuaaaauaccaggagau

SEQ ID NO: 363993 - RNA, 18 nt, Artificial Sequence
  Synthetic
gaggcguuggcaggagau

SEQ ID NO: 363994 - RNA, 19 nt, Artificial Sequence
  Synthetic
ggaggcguuggcaggagau

SEQ ID NO: 363995 - RNA, 20 nt, Artificial Sequence
  Synthetic
gggaggcguuggcaggagau

SEQ ID NO: 363996 - RNA, 21 nt, Artificial Sequence
  Synthetic
ugggaggcguuggcaggagau

SEQ ID NO: 363997 - RNA, 22 nt, Artificial Sequence
  Synthetic
gugggaggcguuggcaggagau

SEQ ID NO: 363998 - RNA, 23 nt, Artificial Sequence
  Synthetic
agugggaggcguuggcaggagau

SEQ ID NO: 363999 - RNA, 24 nt, Artificial Sequence
  Synthetic
cagugggaggcguuggcaggagau

SEQ ID NO: 364000 - RNA, 18 nt, Artificial Sequence
  Synthetic
agcuagagauacggagau

SEQ ID NO: 364001 - RNA, 19 nt, Artificial Sequence
  Synthetic
cagcuagagauacggagau

SEQ ID NO: 364002 - RNA, 20 nt, Artificial Sequence
  Synthetic
ucagcuagagauacggagau

SEQ ID NO: 364003 - RNA, 21 nt, Artificial Sequence
  Synthetic
uucagcuagagauacggagau

SEQ ID NO: 364004 - RNA, 22 nt, Artificial Sequence
  Synthetic
guucagcuagagauacggagau

SEQ ID NO: 364005 - RNA, 23 nt, Artificial Sequence
  Synthetic
gguucagcuagagauacggagau

SEQ ID NO: 364006 - RNA, 24 nt, Artificial Sequence
  Synthetic
ugguucagcuagagauacggagau

SEQ ID NO: 364007 - RNA, 18 nt, Artificial Sequence
  Synthetic
auagaauuaaagggagau

SEQ ID NO: 364008 - RNA, 19 nt, Artificial Sequence
  Synthetic
cauagaauuaaagggagau

SEQ ID NO: 364009 - RNA, 20 nt, Artificial Sequence
  Synthetic
acauagaauuaaagggagau

SEQ ID NO: 364010 - RNA, 21 nt, Artificial Sequence
  Synthetic
cacauagaauuaaagggagau

SEQ ID NO: 364011 - RNA, 22 nt, Artificial Sequence
  Synthetic
ccacauagaauuaaagggagau

SEQ ID NO: 364012 - RNA, 23 nt, Artificial Sequence
  Synthetic
uccacauagaauuaaagggagau

SEQ ID NO: 364013 - RNA, 24 nt, Artificial Sequence
  Synthetic
uuccacauagaauuaaagggagau

SEQ ID NO: 364014 - RNA, 18 nt, Artificial Sequence
  Synthetic
agcauggcgaagggagau

SEQ ID NO: 364015 - RNA, 19 nt, Artificial Sequence
  Synthetic
aagcauggcgaagggagau

SEQ ID NO: 364016 - RNA, 20 nt, Artificial Sequence
  Synthetic
gaagcauggcgaagggagau

SEQ ID NO: 364017 - RNA, 21 nt, Artificial Sequence
  Synthetic
agaagcauggcgaagggagau

SEQ ID NO: 364018 - RNA, 22 nt, Artificial Sequence
  Synthetic
aagaagcauggcgaagggagau

SEQ ID NO: 364019 - RNA, 23 nt, Artificial Sequence
  Synthetic
aaagaagcauggcgaagggagau

SEQ ID NO: 364020 - RNA, 24 nt, Artificial Sequence
  Synthetic
aaaagaagcauggcgaagggagau

SEQ ID NO: 364021 - RNA, 18 nt, Artificial Sequence
  Synthetic
ccuucaaccaauggagau

SEQ ID NO: 364022 - RNA, 19 nt, Artificial Sequence
  Synthetic
accuucaaccaauggagau

SEQ ID NO: 364023 - RNA, 20 nt, Artificial Sequence
  Synthetic
aaccuucaaccaauggagau

SEQ ID NO: 364024 - RNA, 21 nt, Artificial Sequence
  Synthetic
caaccuucaaccaauggagau

SEQ ID NO: 364025 - RNA, 22 nt, Artificial Sequence
  Synthetic
gcaaccuucaaccaauggagau

SEQ ID NO: 364026 - RNA, 23 nt, Artificial Sequence
  Synthetic
agcaaccuucaaccaauggagau

SEQ ID NO: 364027 - RNA, 24 nt, Artificial Sequence
  Synthetic
gagcaaccuucaaccaauggagau

SEQ ID NO: 364028 - RNA, 18 nt, Artificial Sequence
  Synthetic
augagaacacauggagau

SEQ ID NO: 364029 - RNA, 19 nt, Artificial Sequence
  Synthetic
gaugagaacacauggagau

SEQ ID NO: 364030 - RNA, 20 nt, Artificial Sequence
  Synthetic
cgaugagaacacauggagau

SEQ ID NO: 364031 - RNA, 21 nt, Artificial Sequence
  Synthetic
acgaugagaacacauggagau

SEQ ID NO: 364032 - RNA, 22 nt, Artificial Sequence
  Synthetic
aacgaugagaacacauggagau

SEQ ID NO: 364033 - RNA, 23 nt, Artificial Sequence
  Synthetic
gaacgaugagaacacauggagau

SEQ ID NO: 364034 - RNA, 24 nt, Artificial Sequence
  Synthetic
ugaacgaugagaacacauggagau

SEQ ID NO: 364035 - RNA, 18 nt, Artificial Sequence
  Synthetic
guggucucagauggagau

SEQ ID NO: 364036 - RNA, 19 nt, Artificial Sequence
  Synthetic
gguggucucagauggagau

SEQ ID NO: 364037 - RNA, 20 nt, Artificial Sequence
  Synthetic
agguggucucagauggagau

SEQ ID NO: 364038 - RNA, 21 nt, Artificial Sequence
  Synthetic
gagguggucucagauggagau

SEQ ID NO: 364039 - RNA, 22 nt, Artificial Sequence
  Synthetic
ugagguggucucagauggagau

SEQ ID NO: 364040 - RNA, 23 nt, Artificial Sequence
  Synthetic
cugagguggucucagauggagau

SEQ ID NO: 364041 - RNA, 24 nt, Artificial Sequence
  Synthetic
gcugagguggucucagauggagau

SEQ ID NO: 364042 - RNA, 18 nt, Artificial Sequence
  Synthetic
acagagagaacuggagau

SEQ ID NO: 364043 - RNA, 19 nt, Artificial Sequence
  Synthetic
uacagagagaacuggagau

SEQ ID NO: 364044 - RNA, 20 nt, Artificial Sequence
  Synthetic
guacagagagaacuggagau

SEQ ID NO: 364045 - RNA, 21 nt, Artificial Sequence
  Synthetic
gguacagagagaacuggagau

SEQ ID NO: 364046 - RNA, 22 nt, Artificial Sequence
  Synthetic
ugguacagagagaacuggagau

SEQ ID NO: 364047 - RNA, 23 nt, Artificial Sequence
  Synthetic
uugguacagagagaacuggagau

SEQ ID NO: 364048 - RNA, 24 nt, Artificial Sequence
  Synthetic
uuugguacagagagaacuggagau

SEQ ID NO: 364049 - RNA, 18 nt, Artificial Sequence
  Synthetic
gguuaccuaccuggagau

SEQ ID NO: 364050 - RNA, 19 nt, Artificial Sequence
  Synthetic
ugguuaccuaccuggagau

SEQ ID NO: 364051 - RNA, 20 nt, Artificial Sequence
  Synthetic
cugguuaccuaccuggagau

SEQ ID NO: 364052 - RNA, 21 nt, Artificial Sequence
  Synthetic
ccugguuaccuaccuggagau

SEQ ID NO: 364053 - RNA, 22 nt, Artificial Sequence
  Synthetic
uccugguuaccuaccuggagau

SEQ ID NO: 364054 - RNA, 23 nt, Artificial Sequence
  Synthetic
guccugguuaccuaccuggagau

SEQ ID NO: 364055 - RNA, 24 nt, Artificial Sequence
  Synthetic
uguccugguuaccuaccuggagau

SEQ ID NO: 364056 - RNA, 18 nt, Artificial Sequence
  Synthetic
uuaguugugauuggagau

SEQ ID NO: 364057 - RNA, 19 nt, Artificial Sequence
  Synthetic
uuuaguugugauuggagau

SEQ ID NO: 364058 - RNA, 20 nt, Artificial Sequence
  Synthetic
guuuaguugugauuggagau

SEQ ID NO: 364059 - RNA, 21 nt, Artificial Sequence
  Synthetic
uguuuaguugugauuggagau

SEQ ID NO: 364060 - RNA, 22 nt, Artificial Sequence
  Synthetic
auguuuaguugugauuggagau

SEQ ID NO: 364061 - RNA, 23 nt, Artificial Sequence
  Synthetic
aauguuuaguugugauuggagau

SEQ ID NO: 364062 - RNA, 24 nt, Artificial Sequence
  Synthetic
gaauguuuaguugugauuggagau

SEQ ID NO: 364063 - RNA, 18 nt, Artificial Sequence
  Synthetic
acugggccacuuggagau

SEQ ID NO: 364064 - RNA, 19 nt, Artificial Sequence
  Synthetic
uacugggccacuuggagau

SEQ ID NO: 364065 - RNA, 20 nt, Artificial Sequence
  Synthetic
cuacugggccacuuggagau

SEQ ID NO: 364066 - RNA, 21 nt, Artificial Sequence
  Synthetic
acuacugggccacuuggagau

SEQ ID NO: 364067 - RNA, 22 nt, Artificial Sequence
  Synthetic
aacuacugggccacuuggagau

SEQ ID NO: 364068 - RNA, 23 nt, Artificial Sequence
  Synthetic
caacuacugggccacuuggagau

SEQ ID NO: 364069 - RNA, 24 nt, Artificial Sequence
  Synthetic
ucaacuacugggccacuuggagau

SEQ ID NO: 364070 - RNA, 18 nt, Artificial Sequence
  Synthetic
gaagauucuaaaugagau

SEQ ID NO: 364071 - RNA, 19 nt, Artificial Sequence
  Synthetic
agaagauucuaaaugagau

SEQ ID NO: 364072 - RNA, 20 nt, Artificial Sequence
  Synthetic
aagaagauucuaaaugagau

SEQ ID NO: 364073 - RNA, 21 nt, Artificial Sequence
  Synthetic
aaagaagauucuaaaugagau

SEQ ID NO: 364074 - RNA, 22 nt, Artificial Sequence
  Synthetic
uaaagaagauucuaaaugagau

SEQ ID NO: 364075 - RNA, 23 nt, Artificial Sequence
  Synthetic
guaaagaagauucuaaaugagau

SEQ ID NO: 364076 - RNA, 24 nt, Artificial Sequence
  Synthetic
uguaaagaagauucuaaaugagau

SEQ ID NO: 364077 - RNA, 18 nt, Artificial Sequence
  Synthetic
aggagugaucaaugagau

SEQ ID NO: 364078 - RNA, 19 nt, Artificial Sequence
  Synthetic
aaggagugaucaaugagau

SEQ ID NO: 364079 - RNA, 20 nt, Artificial Sequence
  Synthetic
aaaggagugaucaaugagau

SEQ ID NO: 364080 - RNA, 21 nt, Artificial Sequence
  Synthetic
aaaaggagugaucaaugagau

SEQ ID NO: 364081 - RNA, 22 nt, Artificial Sequence
  Synthetic
gaaaaggagugaucaaugagau

SEQ ID NO: 364082 - RNA, 23 nt, Artificial Sequence
  Synthetic
agaaaaggagugaucaaugagau

SEQ ID NO: 364083 - RNA, 24 nt, Artificial Sequence
  Synthetic
aagaaaaggagugaucaaugagau

SEQ ID NO: 364084 - RNA, 18 nt, Artificial Sequence
  Synthetic
agaauuuucgaaugagau

SEQ ID NO: 364085 - RNA, 19 nt, Artificial Sequence
  Synthetic
gagaauuuucgaaugagau

SEQ ID NO: 364086 - RNA, 20 nt, Artificial Sequence
  Synthetic
ugagaauuuucgaaugagau

SEQ ID NO: 364087 - RNA, 21 nt, Artificial Sequence
  Synthetic
gugagaauuuucgaaugagau

SEQ ID NO: 364088 - RNA, 22 nt, Artificial Sequence
  Synthetic
ugugagaauuuucgaaugagau

SEQ ID NO: 364089 - RNA, 23 nt, Artificial Sequence
  Synthetic
gugugagaauuuucgaaugagau

SEQ ID NO: 364090 - RNA, 24 nt, Artificial Sequence
  Synthetic
agugugagaauuuucgaaugagau

SEQ ID NO: 364091 - RNA, 18 nt, Artificial Sequence
  Synthetic
caaauuucaacaugagau

SEQ ID NO: 364092 - RNA, 19 nt, Artificial Sequence
  Synthetic
ucaaauuucaacaugagau

SEQ ID NO: 364093 - RNA, 20 nt, Artificial Sequence
  Synthetic
aucaaauuucaacaugagau

SEQ ID NO: 364094 - RNA, 21 nt, Artificial Sequence
  Synthetic
gaucaaauuucaacaugagau

SEQ ID NO: 364095 - RNA, 22 nt, Artificial Sequence
  Synthetic
ggaucaaauuucaacaugagau

SEQ ID NO: 364096 - RNA, 23 nt, Artificial Sequence
  Synthetic
aggaucaaauuucaacaugagau

SEQ ID NO: 364097 - RNA, 24 nt, Artificial Sequence
  Synthetic
gaggaucaaauuucaacaugagau

SEQ ID NO: 364098 - RNA, 18 nt, Artificial Sequence
  Synthetic
aaugugaugacaugagau

SEQ ID NO: 364099 - RNA, 19 nt, Artificial Sequence
  Synthetic
aaaugugaugacaugagau

SEQ ID NO: 364100 - RNA, 20 nt, Artificial Sequence
  Synthetic
gaaaugugaugacaugagau

SEQ ID NO: 364101 - RNA, 21 nt, Artificial Sequence
  Synthetic
ugaaaugugaugacaugagau

SEQ ID NO: 364102 - RNA, 22 nt, Artificial Sequence
  Synthetic
uugaaaugugaugacaugagau

SEQ ID NO: 364103 - RNA, 23 nt, Artificial Sequence
  Synthetic
uuugaaaugugaugacaugagau

SEQ ID NO: 364104 - RNA, 24 nt, Artificial Sequence
  Synthetic
uuuugaaaugugaugacaugagau

SEQ ID NO: 364105 - RNA, 18 nt, Artificial Sequence
  Synthetic
uacauuucaagaugagau

SEQ ID NO: 364106 - RNA, 19 nt, Artificial Sequence
  Synthetic
uuacauuucaagaugagau

SEQ ID NO: 364107 - RNA, 20 nt, Artificial Sequence
  Synthetic
auuacauuucaagaugagau

SEQ ID NO: 364108 - RNA, 21 nt, Artificial Sequence
  Synthetic
aauuacauuucaagaugagau

SEQ ID NO: 364109 - RNA, 22 nt, Artificial Sequence
  Synthetic
gaauuacauuucaagaugagau

SEQ ID NO: 364110 - RNA, 23 nt, Artificial Sequence
  Synthetic
ggaauuacauuucaagaugagau

SEQ ID NO: 364111 - RNA, 24 nt, Artificial Sequence
  Synthetic
gggaauuacauuucaagaugagau

SEQ ID NO: 364112 - RNA, 18 nt, Artificial Sequence
  Synthetic
ucaaucuauagaugagau

SEQ ID NO: 364113 - RNA, 19 nt, Artificial Sequence
  Synthetic
cucaaucuauagaugagau

SEQ ID NO: 364114 - RNA, 20 nt, Artificial Sequence
  Synthetic
ucucaaucuauagaugagau

SEQ ID NO: 364115 - RNA, 21 nt, Artificial Sequence
  Synthetic
uucucaaucuauagaugagau

SEQ ID NO: 364116 - RNA, 22 nt, Artificial Sequence
  Synthetic
uuucucaaucuauagaugagau

SEQ ID NO: 364117 - RNA, 23 nt, Artificial Sequence
  Synthetic
uuuucucaaucuauagaugagau

SEQ ID NO: 364118 - RNA, 24 nt, Artificial Sequence
  Synthetic
uuuuucucaaucuauagaugagau

SEQ ID NO: 364119 - RNA, 18 nt, Artificial Sequence
  Synthetic
gaaagacaaugaugagau

SEQ ID NO: 364120 - RNA, 19 nt, Artificial Sequence
  Synthetic
agaaagacaaugaugagau

SEQ ID NO: 364121 - RNA, 20 nt, Artificial Sequence
  Synthetic
aagaaagacaaugaugagau

SEQ ID NO: 364122 - RNA, 21 nt, Artificial Sequence
  Synthetic
gaagaaagacaaugaugagau

SEQ ID NO: 364123 - RNA, 22 nt, Artificial Sequence
  Synthetic
ggaagaaagacaaugaugagau

SEQ ID NO: 364124 - RNA, 23 nt, Artificial Sequence
  Synthetic
aggaagaaagacaaugaugagau

SEQ ID NO: 364125 - RNA, 24 nt, Artificial Sequence
  Synthetic
gaggaagaaagacaaugaugagau

SEQ ID NO: 364126 - RNA, 18 nt, Artificial Sequence
  Synthetic
uugugacaucuaugagau

SEQ ID NO: 364127 - RNA, 19 nt, Artificial Sequence
  Synthetic
cuugugacaucuaugagau

SEQ ID NO: 364128 - RNA, 20 nt, Artificial Sequence
  Synthetic
ucuugugacaucuaugagau

SEQ ID NO: 364129 - RNA, 21 nt, Artificial Sequence
  Synthetic
gucuugugacaucuaugagau

SEQ ID NO: 364130 - RNA, 22 nt, Artificial Sequence
  Synthetic
ugucuugugacaucuaugagau

SEQ ID NO: 364131 - RNA, 23 nt, Artificial Sequence
  Synthetic
augucuugugacaucuaugagau

SEQ ID NO: 364132 - RNA, 24 nt, Artificial Sequence
  Synthetic
uaugucuugugacaucuaugagau

SEQ ID NO: 364133 - RNA, 18 nt, Artificial Sequence
  Synthetic
gucacaucuaacugagau

SEQ ID NO: 364134 - RNA, 19 nt, Artificial Sequence
  Synthetic
agucacaucuaacugagau

SEQ ID NO: 364135 - RNA, 20 nt, Artificial Sequence
  Synthetic
aagucacaucuaacugagau

SEQ ID NO: 364136 - RNA, 21 nt, Artificial Sequence
  Synthetic
aaagucacaucuaacugagau

SEQ ID NO: 364137 - RNA, 22 nt, Artificial Sequence
  Synthetic
aaaagucacaucuaacugagau

SEQ ID NO: 364138 - RNA, 23 nt, Artificial Sequence
  Synthetic
uaaaagucacaucuaacugagau

SEQ ID NO: 364139 - RNA, 24 nt, Artificial Sequence
  Synthetic
uuaaaagucacaucuaacugagau

SEQ ID NO: 364140 - RNA, 18 nt, Artificial Sequence
  Synthetic
uggcuaagguacugagau

SEQ ID NO: 364141 - RNA, 19 nt, Artificial Sequence
  Synthetic
uuggcuaagguacugagau

SEQ ID NO: 364142 - RNA, 20 nt, Artificial Sequence
  Synthetic
uuuggcuaagguacugagau

SEQ ID NO: 364143 - RNA, 21 nt, Artificial Sequence
  Synthetic
uuuuggcuaagguacugagau

SEQ ID NO: 364144 - RNA, 22 nt, Artificial Sequence
  Synthetic
uuuuuggcuaagguacugagau

SEQ ID NO: 364145 - RNA, 23 nt, Artificial Sequence
  Synthetic
auuuuuggcuaagguacugagau

SEQ ID NO: 364146 - RNA, 24 nt, Artificial Sequence
  Synthetic
aauuuuuggcuaagguacugagau

SEQ ID NO: 364147 - RNA, 18 nt, Artificial Sequence
  Synthetic
gucaucauuuacugagau

SEQ ID NO: 364148 - RNA, 19 nt, Artificial Sequence
  Synthetic
ggucaucauuuacugagau

SEQ ID NO: 364149 - RNA, 20 nt, Artificial Sequence
  Synthetic
gggucaucauuuacugagau

SEQ ID NO: 364150 - RNA, 21 nt, Artificial Sequence
  Synthetic
ggggucaucauuuacugagau

SEQ ID NO: 364151 - RNA, 22 nt, Artificial Sequence
  Synthetic
uggggucaucauuuacugagau

SEQ ID NO: 364152 - RNA, 23 nt, Artificial Sequence
  Synthetic
auggggucaucauuuacugagau

SEQ ID NO: 364153 - RNA, 24 nt, Artificial Sequence
  Synthetic
gauggggucaucauuuacugagau

SEQ ID NO: 364154 - RNA, 18 nt, Artificial Sequence
  Synthetic
ugaugucuaaccugagau

SEQ ID NO: 364155 - RNA, 19 nt, Artificial Sequence
  Synthetic
gugaugucuaaccugagau

SEQ ID NO: 364156 - RNA, 20 nt, Artificial Sequence
  Synthetic
agugaugucuaaccugagau

SEQ ID NO: 364157 - RNA, 21 nt, Artificial Sequence
  Synthetic
aagugaugucuaaccugagau

SEQ ID NO: 364158 - RNA, 22 nt, Artificial Sequence
  Synthetic
gaagugaugucuaaccugagau

SEQ ID NO: 364159 - RNA, 23 nt, Artificial Sequence
  Synthetic
ggaagugaugucuaaccugagau

SEQ ID NO: 364160 - RNA, 24 nt, Artificial Sequence
  Synthetic
aggaagugaugucuaaccugagau

SEQ ID NO: 364161 - RNA, 18 nt, Artificial Sequence
  Synthetic
uuuuaaacacccugagau

SEQ ID NO: 364162 - RNA, 19 nt, Artificial Sequence
  Synthetic
uuuuuaaacacccugagau

SEQ ID NO: 364163 - RNA, 20 nt, Artificial Sequence
  Synthetic
guuuuuaaacacccugagau

SEQ ID NO: 364164 - RNA, 21 nt, Artificial Sequence
  Synthetic
uguuuuuaaacacccugagau

SEQ ID NO: 364165 - RNA, 22 nt, Artificial Sequence
  Synthetic
guguuuuuaaacacccugagau

SEQ ID NO: 364166 - RNA, 23 nt, Artificial Sequence
  Synthetic
gguguuuuuaaacacccugagau

SEQ ID NO: 364167 - RNA, 24 nt, Artificial Sequence
  Synthetic
agguguuuuuaaacacccugagau

SEQ ID NO: 364168 - RNA, 18 nt, Artificial Sequence
  Synthetic
uuucuuaccagcugagau

SEQ ID NO: 364169 - RNA, 19 nt, Artificial Sequence
  Synthetic
auuucuuaccagcugagau

SEQ ID NO: 364170 - RNA, 20 nt, Artificial Sequence
  Synthetic
aauuucuuaccagcugagau

SEQ ID NO: 364171 - RNA, 21 nt, Artificial Sequence
  Synthetic
uaauuucuuaccagcugagau

SEQ ID NO: 364172 - RNA, 22 nt, Artificial Sequence
  Synthetic
uuaauuucuuaccagcugagau

SEQ ID NO: 364173 - RNA, 23 nt, Artificial Sequence
  Synthetic
uuuaauuucuuaccagcugagau

SEQ ID NO: 364174 - RNA, 24 nt, Artificial Sequence
  Synthetic
cuuuaauuucuuaccagcugagau

SEQ ID NO: 364175 - RNA, 18 nt, Artificial Sequence
  Synthetic
gguuagagaggcugagau

SEQ ID NO: 364176 - RNA, 19 nt, Artificial Sequence
  Synthetic
ugguuagagaggcugagau

SEQ ID NO: 364177 - RNA, 20 nt, Artificial Sequence
  Synthetic
gugguuagagaggcugagau

SEQ ID NO: 364178 - RNA, 21 nt, Artificial Sequence
  Synthetic
ggugguuagagaggcugagau

SEQ ID NO: 364179 - RNA, 22 nt, Artificial Sequence
  Synthetic
aggugguuagagaggcugagau

SEQ ID NO: 364180 - RNA, 23 nt, Artificial Sequence
  Synthetic
gaggugguuagagaggcugagau

SEQ ID NO: 364181 - RNA, 24 nt, Artificial Sequence
  Synthetic
ugaggugguuagagaggcugagau

SEQ ID NO: 364182 - RNA, 18 nt, Artificial Sequence
  Synthetic
uacucaggaggcugagau

SEQ ID NO: 364183 - RNA, 19 nt, Artificial Sequence
  Synthetic
cuacucaggaggcugagau

SEQ ID NO: 364184 - RNA, 20 nt, Artificial Sequence
  Synthetic
gcuacucaggaggcugagau

SEQ ID NO: 364185 - RNA, 21 nt, Artificial Sequence
  Synthetic
agcuacucaggaggcugagau

SEQ ID NO: 364186 - RNA, 22 nt, Artificial Sequence
  Synthetic
cagcuacucaggaggcugagau

SEQ ID NO: 364187 - RNA, 23 nt, Artificial Sequence
  Synthetic
ccagcuacucaggaggcugagau

SEQ ID NO: 364188 - RNA, 24 nt, Artificial Sequence
  Synthetic
cccagcuacucaggaggcugagau

SEQ ID NO: 364189 - RNA, 18 nt, Artificial Sequence
  Synthetic
auuguuugaugcugagau

SEQ ID NO: 364190 - RNA, 19 nt, Artificial Sequence
  Synthetic
uauuguuugaugcugagau

SEQ ID NO: 364191 - RNA, 20 nt, Artificial Sequence
  Synthetic
auauuguuugaugcugagau

SEQ ID NO: 364192 - RNA, 21 nt, Artificial Sequence
  Synthetic
uauauuguuugaugcugagau

SEQ ID NO: 364193 - RNA, 22 nt, Artificial Sequence
  Synthetic
auauauuguuugaugcugagau

SEQ ID NO: 364194 - RNA, 23 nt, Artificial Sequence
  Synthetic
gauauauuguuugaugcugagau

SEQ ID NO: 364195 - RNA, 24 nt, Artificial Sequence
  Synthetic
ggauauauuguuugaugcugagau

SEQ ID NO: 364196 - RNA, 18 nt, Artificial Sequence
  Synthetic
uuauuccucaucugagau

SEQ ID NO: 364197 - RNA, 19 nt, Artificial Sequence
  Synthetic
cuuauuccucaucugagau

SEQ ID NO: 364198 - RNA, 20 nt, Artificial Sequence
  Synthetic
ccuuauuccucaucugagau

SEQ ID NO: 364199 - RNA, 21 nt, Artificial Sequence
  Synthetic
uccuuauuccucaucugagau

SEQ ID NO: 364200 - RNA, 22 nt, Artificial Sequence
  Synthetic
uuccuuauuccucaucugagau

SEQ ID NO: 364201 - RNA, 23 nt, Artificial Sequence
  Synthetic
uuuccuuauuccucaucugagau

SEQ ID NO: 364202 - RNA, 24 nt, Artificial Sequence
  Synthetic
uuuuccuuauuccucaucugagau

SEQ ID NO: 364203 - RNA, 18 nt, Artificial Sequence
  Synthetic
gaacugagacagugagau

SEQ ID NO: 364204 - RNA, 19 nt, Artificial Sequence
  Synthetic
agaacugagacagugagau

SEQ ID NO: 364205 - RNA, 20 nt, Artificial Sequence
  Synthetic
aagaacugagacagugagau

SEQ ID NO: 364206 - RNA, 21 nt, Artificial Sequence
  Synthetic
caagaacugagacagugagau

SEQ ID NO: 364207 - RNA, 22 nt, Artificial Sequence
  Synthetic
ccaagaacugagacagugagau

SEQ ID NO: 364208 - RNA, 23 nt, Artificial Sequence
  Synthetic
cccaagaacugagacagugagau

SEQ ID NO: 364209 - RNA, 24 nt, Artificial Sequence
  Synthetic
acccaagaacugagacagugagau

SEQ ID NO: 364210 - RNA, 18 nt, Artificial Sequence
  Synthetic
guggggugggggugagau

SEQ ID NO: 364211 - RNA, 19 nt, Artificial Sequence
  Synthetic
aguggggugggggugagau

SEQ ID NO: 364212 - RNA, 20 nt, Artificial Sequence
  Synthetic
caguggggugggggugagau

SEQ ID NO: 364213 - RNA, 21 nt, Artificial Sequence
  Synthetic
ucaguggggugggggugagau

SEQ ID NO: 364214 - RNA, 22 nt, Artificial Sequence
  Synthetic
aucaguggggugggggugagau

SEQ ID NO: 364215 - RNA, 23 nt, Artificial Sequence
  Synthetic
aaucaguggggugggggugagau

SEQ ID NO: 364216 - RNA, 24 nt, Artificial Sequence
  Synthetic
gaaucaguggggugggggugagau

SEQ ID NO: 364217 - RNA, 18 nt, Artificial Sequence
  Synthetic
agcaggugacuuugagau

SEQ ID NO: 364218 - RNA, 19 nt, Artificial Sequence
  Synthetic
aagcaggugacuuugagau

SEQ ID NO: 364219 - RNA, 20 nt, Artificial Sequence
  Synthetic
uaagcaggugacuuugagau

SEQ ID NO: 364220 - RNA, 21 nt, Artificial Sequence
  Synthetic
cuaagcaggugacuuugagau

SEQ ID NO: 364221 - RNA, 22 nt, Artificial Sequence
  Synthetic
gcuaagcaggugacuuugagau

SEQ ID NO: 364222 - RNA, 23 nt, Artificial Sequence
  Synthetic
ugcuaagcaggugacuuugagau

SEQ ID NO: 364223 - RNA, 24 nt, Artificial Sequence
  Synthetic
uugcuaagcaggugacuuugagau

SEQ ID NO: 364224 - RNA, 18 nt, Artificial Sequence
  Synthetic
gcggauaaggaaauagau

SEQ ID NO: 364225 - RNA, 19 nt, Artificial Sequence
  Synthetic
ugcggauaaggaaauagau

SEQ ID NO: 364226 - RNA, 20 nt, Artificial Sequence
  Synthetic
cugcggauaaggaaauagau

SEQ ID NO: 364227 - RNA, 21 nt, Artificial Sequence
  Synthetic
ucugcggauaaggaaauagau

SEQ ID NO: 364228 - RNA, 22 nt, Artificial Sequence
  Synthetic
uucugcggauaaggaaauagau

SEQ ID NO: 364229 - RNA, 23 nt, Artificial Sequence
  Synthetic
auucugcggauaaggaaauagau

SEQ ID NO: 364230 - RNA, 24 nt, Artificial Sequence
  Synthetic
cauucugcggauaaggaaauagau

SEQ ID NO: 364231 - RNA, 18 nt, Artificial Sequence
  Synthetic
aguuaccagauaauagau

SEQ ID NO: 364232 - RNA, 19 nt, Artificial Sequence
  Synthetic
aaguuaccagauaauagau

SEQ ID NO: 364233 - RNA, 20 nt, Artificial Sequence
  Synthetic
gaaguuaccagauaauagau

SEQ ID NO: 364234 - RNA, 21 nt, Artificial Sequence
  Synthetic
agaaguuaccagauaauagau

SEQ ID NO: 364235 - RNA, 22 nt, Artificial Sequence
  Synthetic
cagaaguuaccagauaauagau

SEQ ID NO: 364236 - RNA, 23 nt, Artificial Sequence
  Synthetic
gcagaaguuaccagauaauagau

SEQ ID NO: 364237 - RNA, 24 nt, Artificial Sequence
  Synthetic
ugcagaaguuaccagauaauagau

SEQ ID NO: 364238 - RNA, 18 nt, Artificial Sequence
  Synthetic
auuagcaauuuaauagau

SEQ ID NO: 364239 - RNA, 19 nt, Artificial Sequence
  Synthetic
aauuagcaauuuaauagau

SEQ ID NO: 364240 - RNA, 20 nt, Artificial Sequence
  Synthetic
uaauuagcaauuuaauagau

SEQ ID NO: 364241 - RNA, 21 nt, Artificial Sequence
  Synthetic
uuaauuagcaauuuaauagau

SEQ ID NO: 364242 - RNA, 22 nt, Artificial Sequence
  Synthetic
auuaauuagcaauuuaauagau

SEQ ID NO: 364243 - RNA, 23 nt, Artificial Sequence
  Synthetic
uauuaauuagcaauuuaauagau

SEQ ID NO: 364244 - RNA, 24 nt, Artificial Sequence
  Synthetic
cuauuaauuagcaauuuaauagau

SEQ ID NO: 364245 - RNA, 18 nt, Artificial Sequence
  Synthetic
ugucaguguuacauagau

SEQ ID NO: 364246 - RNA, 19 nt, Artificial Sequence
  Synthetic
augucaguguuacauagau

SEQ ID NO: 364247 - RNA, 20 nt, Artificial Sequence
  Synthetic
uaugucaguguuacauagau

SEQ ID NO: 364248 - RNA, 21 nt, Artificial Sequence
  Synthetic
cuaugucaguguuacauagau

SEQ ID NO: 364249 - RNA, 22 nt, Artificial Sequence
  Synthetic
acuaugucaguguuacauagau

SEQ ID NO: 364250 - RNA, 23 nt, Artificial Sequence
  Synthetic
uacuaugucaguguuacauagau

SEQ ID NO: 364251 - RNA, 24 nt, Artificial Sequence
  Synthetic
cuacuaugucaguguuacauagau

SEQ ID NO: 364252 - RNA, 18 nt, Artificial Sequence
  Synthetic
guuacaaaugccauagau

SEQ ID NO: 364253 - RNA, 19 nt, Artificial Sequence
  Synthetic
aguuacaaaugccauagau

SEQ ID NO: 364254 - RNA, 20 nt, Artificial Sequence
  Synthetic
aaguuacaaaugccauagau

SEQ ID NO: 364255 - RNA, 21 nt, Artificial Sequence
  Synthetic
uaaguuacaaaugccauagau

SEQ ID NO: 364256 - RNA, 22 nt, Artificial Sequence
  Synthetic
guaaguuacaaaugccauagau

SEQ ID NO: 364257 - RNA, 23 nt, Artificial Sequence
  Synthetic
uguaaguuacaaaugccauagau

SEQ ID NO: 364258 - RNA, 24 nt, Artificial Sequence
  Synthetic
cuguaaguuacaaaugccauagau

SEQ ID NO: 364259 - RNA, 18 nt, Artificial Sequence
  Synthetic
cuauucuaugucauagau

SEQ ID NO: 364260 - RNA, 19 nt, Artificial Sequence
  Synthetic
ccuauucuaugucauagau

SEQ ID NO: 364261 - RNA, 20 nt, Artificial Sequence
  Synthetic
uccuauucuaugucauagau

SEQ ID NO: 364262 - RNA, 21 nt, Artificial Sequence
  Synthetic
uuccuauucuaugucauagau

SEQ ID NO: 364263 - RNA, 22 nt, Artificial Sequence
  Synthetic
uuuccuauucuaugucauagau

SEQ ID NO: 364264 - RNA, 23 nt, Artificial Sequence
  Synthetic
auuuccuauucuaugucauagau

SEQ ID NO: 364265 - RNA, 24 nt, Artificial Sequence
  Synthetic
cauuuccuauucuaugucauagau

SEQ ID NO: 364266 - RNA, 18 nt, Artificial Sequence
  Synthetic
acacauguugauauagau

SEQ ID NO: 364267 - RNA, 19 nt, Artificial Sequence
  Synthetic
uacacauguugauauagau

SEQ ID NO: 364268 - RNA, 20 nt, Artificial Sequence
  Synthetic
uuacacauguugauauagau

SEQ ID NO: 364269 - RNA, 21 nt, Artificial Sequence
  Synthetic
uuuacacauguugauauagau

SEQ ID NO: 364270 - RNA, 22 nt, Artificial Sequence
  Synthetic
auuuacacauguugauauagau

SEQ ID NO: 364271 - RNA, 23 nt, Artificial Sequence
  Synthetic
uauuuacacauguugauauagau

SEQ ID NO: 364272 - RNA, 24 nt, Artificial Sequence
  Synthetic
guauuuacacauguugauauagau

SEQ ID NO: 364273 - RNA, 18 nt, Artificial Sequence
  Synthetic
gcagcuuggccuauagau

SEQ ID NO: 364274 - RNA, 19 nt, Artificial Sequence
  Synthetic
ugcagcuuggccuauagau

SEQ ID NO: 364275 - RNA, 20 nt, Artificial Sequence
  Synthetic
cugcagcuuggccuauagau

SEQ ID NO: 364276 - RNA, 21 nt, Artificial Sequence
  Synthetic
ucugcagcuuggccuauagau

SEQ ID NO: 364277 - RNA, 22 nt, Artificial Sequence
  Synthetic
uucugcagcuuggccuauagau

SEQ ID NO: 364278 - RNA, 23 nt, Artificial Sequence
  Synthetic
cuucugcagcuuggccuauagau

SEQ ID NO: 364279 - RNA, 24 nt, Artificial Sequence
  Synthetic
ccuucugcagcuuggccuauagau

SEQ ID NO: 364280 - RNA, 18 nt, Artificial Sequence
  Synthetic
uggccugccuuacuagau

SEQ ID NO: 364281 - RNA, 19 nt, Artificial Sequence
  Synthetic
uuggccugccuuacuagau

SEQ ID NO: 364282 - RNA, 20 nt, Artificial Sequence
  Synthetic
guuggccugccuuacuagau

SEQ ID NO: 364283 - RNA, 21 nt, Artificial Sequence
  Synthetic
cguuggccugccuuacuagau

SEQ ID NO: 364284 - RNA, 22 nt, Artificial Sequence
  Synthetic
acguuggccugccuuacuagau

SEQ ID NO: 364285 - RNA, 23 nt, Artificial Sequence
  Synthetic
aacguuggccugccuuacuagau

SEQ ID NO: 364286 - RNA, 24 nt, Artificial Sequence
  Synthetic
gaacguuggccugccuuacuagau

SEQ ID NO: 364287 - RNA, 18 nt, Artificial Sequence
  Synthetic
cauaacugcuaccuagau

SEQ ID NO: 364288 - RNA, 19 nt, Artificial Sequence
  Synthetic
acauaacugcuaccuagau

SEQ ID NO: 364289 - RNA, 20 nt, Artificial Sequence
  Synthetic
aacauaacugcuaccuagau

SEQ ID NO: 364290 - RNA, 21 nt, Artificial Sequence
  Synthetic
gaacauaacugcuaccuagau

SEQ ID NO: 364291 - RNA, 22 nt, Artificial Sequence
  Synthetic
ggaacauaacugcuaccuagau

SEQ ID NO: 364292 - RNA, 23 nt, Artificial Sequence
  Synthetic
uggaacauaacugcuaccuagau

SEQ ID NO: 364293 - RNA, 24 nt, Artificial Sequence
  Synthetic
guggaacauaacugcuaccuagau

SEQ ID NO: 364294 - RNA, 18 nt, Artificial Sequence
  Synthetic
aaaaauuaagcccuagau

SEQ ID NO: 364295 - RNA, 19 nt, Artificial Sequence
  Synthetic
caaaaauuaagcccuagau

SEQ ID NO: 364296 - RNA, 20 nt, Artificial Sequence
  Synthetic
acaaaaauuaagcccuagau

SEQ ID NO: 364297 - RNA, 21 nt, Artificial Sequence
  Synthetic
uacaaaaauuaagcccuagau

SEQ ID NO: 364298 - RNA, 22 nt, Artificial Sequence
  Synthetic
uuacaaaaauuaagcccuagau

SEQ ID NO: 364299 - RNA, 23 nt, Artificial Sequence
  Synthetic
guuacaaaaauuaagcccuagau

SEQ ID NO: 364300 - RNA, 24 nt, Artificial Sequence
  Synthetic
aguuacaaaaauuaagcccuagau

SEQ ID NO: 364301 - RNA, 18 nt, Artificial Sequence
  Synthetic
aauaugaaauagcuagau

SEQ ID NO: 364302 - RNA, 19 nt, Artificial Sequence
  Synthetic
aaauaugaaauagcuagau

SEQ ID NO: 364303 - RNA, 20 nt, Artificial Sequence
  Synthetic
aaaauaugaaauagcuagau

SEQ ID NO: 364304 - RNA, 21 nt, Artificial Sequence
  Synthetic
uaaaauaugaaauagcuagau

SEQ ID NO: 364305 - RNA, 22 nt, Artificial Sequence
  Synthetic
cuaaaauaugaaauagcuagau

SEQ ID NO: 364306 - RNA, 23 nt, Artificial Sequence
  Synthetic
ucuaaaauaugaaauagcuagau

SEQ ID NO: 364307 - RNA, 24 nt, Artificial Sequence
  Synthetic
aucuaaaauaugaaauagcuagau

SEQ ID NO: 364308 - RNA, 18 nt, Artificial Sequence
  Synthetic
uauaaaaaaaaucuagau

SEQ ID NO: 364309 - RNA, 19 nt, Artificial Sequence
  Synthetic
guauaaaaaaaaucuagau

SEQ ID NO: 364310 - RNA, 20 nt, Artificial Sequence
  Synthetic
aguauaaaaaaaaucuagau

SEQ ID NO: 364311 - RNA, 21 nt, Artificial Sequence
  Synthetic
aaguauaaaaaaaaucuagau

SEQ ID NO: 364312 - RNA, 22 nt, Artificial Sequence
  Synthetic
aaaguauaaaaaaaaucuagau

SEQ ID NO: 364313 - RNA, 23 nt, Artificial Sequence
  Synthetic
caaaguauaaaaaaaaucuagau

SEQ ID NO: 364314 - RNA, 24 nt, Artificial Sequence
  Synthetic
ucaaaguauaaaaaaaaucuagau

SEQ ID NO: 364315 - RNA, 18 nt, Artificial Sequence
  Synthetic
gaaauuugacaucuagau

SEQ ID NO: 364316 - RNA, 19 nt, Artificial Sequence
  Synthetic
ggaaauuugacaucuagau

SEQ ID NO: 364317 - RNA, 20 nt, Artificial Sequence
  Synthetic
uggaaauuugacaucuagau

SEQ ID NO: 364318 - RNA, 21 nt, Artificial Sequence
  Synthetic
guggaaauuugacaucuagau

SEQ ID NO: 364319 - RNA, 22 nt, Artificial Sequence
  Synthetic
aguggaaauuugacaucuagau

SEQ ID NO: 364320 - RNA, 23 nt, Artificial Sequence
  Synthetic
caguggaaauuugacaucuagau

SEQ ID NO: 364321 - RNA, 24 nt, Artificial Sequence
  Synthetic
ucaguggaaauuugacaucuagau

SEQ ID NO: 364322 - RNA, 18 nt, Artificial Sequence
  Synthetic
ugccucauuugucuagau

SEQ ID NO: 364323 - RNA, 19 nt, Artificial Sequence
  Synthetic
uugccucauuugucuagau

SEQ ID NO: 364324 - RNA, 20 nt, Artificial Sequence
  Synthetic
uuugccucauuugucuagau

SEQ ID NO: 364325 - RNA, 21 nt, Artificial Sequence
  Synthetic
uuuugccucauuugucuagau

SEQ ID NO: 364326 - RNA, 22 nt, Artificial Sequence
  Synthetic
guuuugccucauuugucuagau

SEQ ID NO: 364327 - RNA, 23 nt, Artificial Sequence
  Synthetic
aguuuugccucauuugucuagau

SEQ ID NO: 364328 - RNA, 24 nt, Artificial Sequence
  Synthetic
uaguuuugccucauuugucuagau

SEQ ID NO: 364329 - RNA, 18 nt, Artificial Sequence
  Synthetic
gaauuacaaaaaguagau

SEQ ID NO: 364330 - RNA, 19 nt, Artificial Sequence
  Synthetic
agaauuacaaaaaguagau

SEQ ID NO: 364331 - RNA, 20 nt, Artificial Sequence
  Synthetic
cagaauuacaaaaaguagau

SEQ ID NO: 364332 - RNA, 21 nt, Artificial Sequence
  Synthetic
gcagaauuacaaaaaguagau

SEQ ID NO: 364333 - RNA, 22 nt, Artificial Sequence
  Synthetic
agcagaauuacaaaaaguagau

SEQ ID NO: 364334 - RNA, 23 nt, Artificial Sequence
  Synthetic
cagcagaauuacaaaaaguagau

SEQ ID NO: 364335 - RNA, 24 nt, Artificial Sequence
  Synthetic
gcagcagaauuacaaaaaguagau

SEQ ID NO: 364336 - RNA, 18 nt, Artificial Sequence
  Synthetic
ucauaaacaaaaguagau

SEQ ID NO: 364337 - RNA, 19 nt, Artificial Sequence
  Synthetic
aucauaaacaaaaguagau

SEQ ID NO: 364338 - RNA, 20 nt, Artificial Sequence
  Synthetic
gaucauaaacaaaaguagau

SEQ ID NO: 364339 - RNA, 21 nt, Artificial Sequence
  Synthetic
agaucauaaacaaaaguagau

SEQ ID NO: 364340 - RNA, 22 nt, Artificial Sequence
  Synthetic
gagaucauaaacaaaaguagau

SEQ ID NO: 364341 - RNA, 23 nt, Artificial Sequence
  Synthetic
ugagaucauaaacaaaaguagau

SEQ ID NO: 364342 - RNA, 24 nt, Artificial Sequence
  Synthetic
uugagaucauaaacaaaaguagau

SEQ ID NO: 364343 - RNA, 18 nt, Artificial Sequence
  Synthetic
guuacuugucaaguagau

SEQ ID NO: 364344 - RNA, 19 nt, Artificial Sequence
  Synthetic
gguuacuugucaaguagau

SEQ ID NO: 364345 - RNA, 20 nt, Artificial Sequence
  Synthetic
ugguuacuugucaaguagau

SEQ ID NO: 364346 - RNA, 21 nt, Artificial Sequence
  Synthetic
augguuacuugucaaguagau

SEQ ID NO: 364347 - RNA, 22 nt, Artificial Sequence
  Synthetic
caugguuacuugucaaguagau

SEQ ID NO: 364348 - RNA, 23 nt, Artificial Sequence
  Synthetic
ucaugguuacuugucaaguagau

SEQ ID NO: 364349 - RNA, 24 nt, Artificial Sequence
  Synthetic
cucaugguuacuugucaaguagau

SEQ ID NO: 364350 - RNA, 18 nt, Artificial Sequence
  Synthetic
aucauagaagaaguagau

SEQ ID NO: 364351 - RNA, 19 nt, Artificial Sequence
  Synthetic
uaucauagaagaaguagau

SEQ ID NO: 364352 - RNA, 20 nt, Artificial Sequence
  Synthetic
auaucauagaagaaguagau

SEQ ID NO: 364353 - RNA, 21 nt, Artificial Sequence
  Synthetic
cauaucauagaagaaguagau

SEQ ID NO: 364354 - RNA, 22 nt, Artificial Sequence
  Synthetic
acauaucauagaagaaguagau

SEQ ID NO: 364355 - RNA, 23 nt, Artificial Sequence
  Synthetic
aacauaucauagaagaaguagau

SEQ ID NO: 364356 - RNA, 24 nt, Artificial Sequence
  Synthetic
gaacauaucauagaagaaguagau

SEQ ID NO: 364357 - RNA, 18 nt, Artificial Sequence
  Synthetic
gcuucugauucaguagau

SEQ ID NO: 364358 - RNA, 19 nt, Artificial Sequence
  Synthetic
agcuucugauucaguagau

SEQ ID NO: 364359 - RNA, 20 nt, Artificial Sequence
  Synthetic
gagcuucugauucaguagau

SEQ ID NO: 364360 - RNA, 21 nt, Artificial Sequence
  Synthetic
agagcuucugauucaguagau

SEQ ID NO: 364361 - RNA, 22 nt, Artificial Sequence
  Synthetic
uagagcuucugauucaguagau

SEQ ID NO: 364362 - RNA, 23 nt, Artificial Sequence
  Synthetic
auagagcuucugauucaguagau

SEQ ID NO: 364363 - RNA, 24 nt, Artificial Sequence
  Synthetic
cauagagcuucugauucaguagau

SEQ ID NO: 364364 - RNA, 18 nt, Artificial Sequence
  Synthetic
auuugcaguucaguagau

SEQ ID NO: 364365 - RNA, 19 nt, Artificial Sequence
  Synthetic
aauuugcaguucaguagau

SEQ ID NO: 364366 - RNA, 20 nt, Artificial Sequence
  Synthetic
aaauuugcaguucaguagau

SEQ ID NO: 364367 - RNA, 21 nt, Artificial Sequence
  Synthetic
gaaauuugcaguucaguagau

SEQ ID NO: 364368 - RNA, 22 nt, Artificial Sequence
  Synthetic
ggaaauuugcaguucaguagau

SEQ ID NO: 364369 - RNA, 23 nt, Artificial Sequence
  Synthetic
gggaaauuugcaguucaguagau

SEQ ID NO: 364370 - RNA, 24 nt, Artificial Sequence
  Synthetic
agggaaauuugcaguucaguagau

SEQ ID NO: 364371 - RNA, 18 nt, Artificial Sequence
  Synthetic
ugacuuaaaugaguagau

SEQ ID NO: 364372 - RNA, 19 nt, Artificial Sequence
  Synthetic
uugacuuaaaugaguagau

SEQ ID NO: 364373 - RNA, 20 nt, Artificial Sequence
  Synthetic
uuugacuuaaaugaguagau

SEQ ID NO: 364374 - RNA, 21 nt, Artificial Sequence
  Synthetic
guuugacuuaaaugaguagau

SEQ ID NO: 364375 - RNA, 22 nt, Artificial Sequence
  Synthetic
uguuugacuuaaaugaguagau

SEQ ID NO: 364376 - RNA, 23 nt, Artificial Sequence
  Synthetic
uuguuugacuuaaaugaguagau

SEQ ID NO: 364377 - RNA, 24 nt, Artificial Sequence
  Synthetic
auuguuugacuuaaaugaguagau

SEQ ID NO: 364378 - RNA, 18 nt, Artificial Sequence
  Synthetic
gaaaaacaagacguagau

SEQ ID NO: 364379 - RNA, 19 nt, Artificial Sequence
  Synthetic
ggaaaaacaagacguagau

SEQ ID NO: 364380 - RNA, 20 nt, Artificial Sequence
  Synthetic
aggaaaaacaagacguagau

SEQ ID NO: 364381 - RNA, 21 nt, Artificial Sequence
  Synthetic
uaggaaaaacaagacguagau

SEQ ID NO: 364382 - RNA, 22 nt, Artificial Sequence
  Synthetic
cuaggaaaaacaagacguagau

SEQ ID NO: 364383 - RNA, 23 nt, Artificial Sequence
  Synthetic
acuaggaaaaacaagacguagau

SEQ ID NO: 364384 - RNA, 24 nt, Artificial Sequence
  Synthetic
aacuaggaaaaacaagacguagau

SEQ ID NO: 364385 - RNA, 18 nt, Artificial Sequence
  Synthetic
agaguaaaguucguagau

SEQ ID NO: 364386 - RNA, 19 nt, Artificial Sequence
  Synthetic
cagaguaaaguucguagau

SEQ ID NO: 364387 - RNA, 20 nt, Artificial Sequence
  Synthetic
ucagaguaaaguucguagau

SEQ ID NO: 364388 - RNA, 21 nt, Artificial Sequence
  Synthetic
uucagaguaaaguucguagau

SEQ ID NO: 364389 - RNA, 22 nt, Artificial Sequence
  Synthetic
guucagaguaaaguucguagau

SEQ ID NO: 364390 - RNA, 23 nt, Artificial Sequence
  Synthetic
gguucagaguaaaguucguagau

SEQ ID NO: 364391 - RNA, 24 nt, Artificial Sequence
  Synthetic
ugguucagaguaaaguucguagau

SEQ ID NO: 364392 - RNA, 18 nt, Artificial Sequence
  Synthetic
caucucgauaggguagau

SEQ ID NO: 364393 - RNA, 19 nt, Artificial Sequence
  Synthetic
ccaucucgauaggguagau

SEQ ID NO: 364394 - RNA, 20 nt, Artificial Sequence
  Synthetic
gccaucucgauaggguagau

SEQ ID NO: 364395 - RNA, 21 nt, Artificial Sequence
  Synthetic
ugccaucucgauaggguagau

SEQ ID NO: 364396 - RNA, 22 nt, Artificial Sequence
  Synthetic
augccaucucgauaggguagau

SEQ ID NO: 364397 - RNA, 23 nt, Artificial Sequence
  Synthetic
aaugccaucucgauaggguagau

SEQ ID NO: 364398 - RNA, 24 nt, Artificial Sequence
  Synthetic
aaaugccaucucgauaggguagau

SEQ ID NO: 364399 - RNA, 18 nt, Artificial Sequence
  Synthetic
aauccuggcuugguagau

SEQ ID NO: 364400 - RNA, 19 nt, Artificial Sequence
  Synthetic
uaauccuggcuugguagau

SEQ ID NO: 364401 - RNA, 20 nt, Artificial Sequence
  Synthetic
auaauccuggcuugguagau

SEQ ID NO: 364402 - RNA, 21 nt, Artificial Sequence
  Synthetic
aauaauccuggcuugguagau

SEQ ID NO: 364403 - RNA, 22 nt, Artificial Sequence
  Synthetic
uaauaauccuggcuugguagau

SEQ ID NO: 364404 - RNA, 23 nt, Artificial Sequence
  Synthetic
auaauaauccuggcuugguagau

SEQ ID NO: 364405 - RNA, 24 nt, Artificial Sequence
  Synthetic
uauaauaauccuggcuugguagau

SEQ ID NO: 364406 - RNA, 18 nt, Artificial Sequence
  Synthetic
gaaacuuuagcuguagau

SEQ ID NO: 364407 - RNA, 19 nt, Artificial Sequence
  Synthetic
ugaaacuuuagcuguagau

SEQ ID NO: 364408 - RNA, 20 nt, Artificial Sequence
  Synthetic
uugaaacuuuagcuguagau

SEQ ID NO: 364409 - RNA, 21 nt, Artificial Sequence
  Synthetic
cuugaaacuuuagcuguagau

SEQ ID NO: 364410 - RNA, 22 nt, Artificial Sequence
  Synthetic
ccuugaaacuuuagcuguagau

SEQ ID NO: 364411 - RNA, 23 nt, Artificial Sequence
  Synthetic
accuugaaacuuuagcuguagau

SEQ ID NO: 364412 - RNA, 24 nt, Artificial Sequence
  Synthetic
uaccuugaaacuuuagcuguagau

SEQ ID NO: 364413 - RNA, 18 nt, Artificial Sequence
  Synthetic
auaagggucucuguagau

SEQ ID NO: 364414 - RNA, 19 nt, Artificial Sequence
  Synthetic
aauaagggucucuguagau

SEQ ID NO: 364415 - RNA, 20 nt, Artificial Sequence
  Synthetic
caauaagggucucuguagau

SEQ ID NO: 364416 - RNA, 21 nt, Artificial Sequence
  Synthetic
ucaauaagggucucuguagau

SEQ ID NO: 364417 - RNA, 22 nt, Artificial Sequence
  Synthetic
gucaauaagggucucuguagau

SEQ ID NO: 364418 - RNA, 23 nt, Artificial Sequence
  Synthetic
ugucaauaagggucucuguagau

SEQ ID NO: 364419 - RNA, 24 nt, Artificial Sequence
  Synthetic
cugucaauaagggucucuguagau

SEQ ID NO: 364420 - RNA, 18 nt, Artificial Sequence
  Synthetic
aaguggcaagguguagau

SEQ ID NO: 364421 - RNA, 19 nt, Artificial Sequence
  Synthetic
gaaguggcaagguguagau

SEQ ID NO: 364422 - RNA, 20 nt, Artificial Sequence
  Synthetic
ugaaguggcaagguguagau

SEQ ID NO: 364423 - RNA, 21 nt, Artificial Sequence
  Synthetic
uugaaguggcaagguguagau

SEQ ID NO: 364424 - RNA, 22 nt, Artificial Sequence
  Synthetic
guugaaguggcaagguguagau

SEQ ID NO: 364425 - RNA, 23 nt, Artificial Sequence
  Synthetic
aguugaaguggcaagguguagau

SEQ ID NO: 364426 - RNA, 24 nt, Artificial Sequence
  Synthetic
aaguugaaguggcaagguguagau

SEQ ID NO: 364427 - RNA, 18 nt, Artificial Sequence
  Synthetic
auccauuagucauuagau

SEQ ID NO: 364428 - RNA, 19 nt, Artificial Sequence
  Synthetic
aauccauuagucauuagau

SEQ ID NO: 364429 - RNA, 20 nt, Artificial Sequence
  Synthetic
uaauccauuagucauuagau

SEQ ID NO: 364430 - RNA, 21 nt, Artificial Sequence
  Synthetic
cuaauccauuagucauuagau

SEQ ID NO: 364431 - RNA, 22 nt, Artificial Sequence
  Synthetic
ccuaauccauuagucauuagau

SEQ ID NO: 364432 - RNA, 23 nt, Artificial Sequence
  Synthetic
cccuaauccauuagucauuagau

SEQ ID NO: 364433 - RNA, 24 nt, Artificial Sequence
  Synthetic
ucccuaauccauuagucauuagau

SEQ ID NO: 364434 - RNA, 18 nt, Artificial Sequence
  Synthetic
ggaaagacaugauuagau

SEQ ID NO: 364435 - RNA, 19 nt, Artificial Sequence
  Synthetic
aggaaagacaugauuagau

SEQ ID NO: 364436 - RNA, 20 nt, Artificial Sequence
  Synthetic
caggaaagacaugauuagau

SEQ ID NO: 364437 - RNA, 21 nt, Artificial Sequence
  Synthetic
ucaggaaagacaugauuagau

SEQ ID NO: 364438 - RNA, 22 nt, Artificial Sequence
  Synthetic
uucaggaaagacaugauuagau

SEQ ID NO: 364439 - RNA, 23 nt, Artificial Sequence
  Synthetic
cuucaggaaagacaugauuagau

SEQ ID NO: 364440 - RNA, 24 nt, Artificial Sequence
  Synthetic
gcuucaggaaagacaugauuagau

SEQ ID NO: 364441 - RNA, 18 nt, Artificial Sequence
  Synthetic
auaaaagaacuauuagau

SEQ ID NO: 364442 - RNA, 19 nt, Artificial Sequence
  Synthetic
aauaaaagaacuauuagau

SEQ ID NO: 364443 - RNA, 20 nt, Artificial Sequence
  Synthetic
aaauaaaagaacuauuagau

SEQ ID NO: 364444 - RNA, 21 nt, Artificial Sequence
  Synthetic
uaaauaaaagaacuauuagau

SEQ ID NO: 364445 - RNA, 22 nt, Artificial Sequence
  Synthetic
uuaaauaaaagaacuauuagau

SEQ ID NO: 364446 - RNA, 23 nt, Artificial Sequence
  Synthetic
guuaaauaaaagaacuauuagau

SEQ ID NO: 364447 - RNA, 24 nt, Artificial Sequence
  Synthetic
aguuaaauaaaagaacuauuagau

SEQ ID NO: 364448 - RNA, 18 nt, Artificial Sequence
  Synthetic
aauguagagcccuuagau

SEQ ID NO: 364449 - RNA, 19 nt, Artificial Sequence
  Synthetic
uaauguagagcccuuagau

SEQ ID NO: 364450 - RNA, 20 nt, Artificial Sequence
  Synthetic
uuaauguagagcccuuagau

SEQ ID NO: 364451 - RNA, 21 nt, Artificial Sequence
  Synthetic
auuaauguagagcccuuagau

SEQ ID NO: 364452 - RNA, 22 nt, Artificial Sequence
  Synthetic
aauuaauguagagcccuuagau

SEQ ID NO: 364453 - RNA, 23 nt, Artificial Sequence
  Synthetic
uaauuaauguagagcccuuagau

SEQ ID NO: 364454 - RNA, 24 nt, Artificial Sequence
  Synthetic
auaauuaauguagagcccuuagau

SEQ ID NO: 364455 - RNA, 18 nt, Artificial Sequence
  Synthetic
auaaacaacugcuuagau

SEQ ID NO: 364456 - RNA, 19 nt, Artificial Sequence
  Synthetic
cauaaacaacugcuuagau

SEQ ID NO: 364457 - RNA, 20 nt, Artificial Sequence
  Synthetic
ccauaaacaacugcuuagau

SEQ ID NO: 364458 - RNA, 21 nt, Artificial Sequence
  Synthetic
uccauaaacaacugcuuagau

SEQ ID NO: 364459 - RNA, 22 nt, Artificial Sequence
  Synthetic
auccauaaacaacugcuuagau

SEQ ID NO: 364460 - RNA, 23 nt, Artificial Sequence
  Synthetic
uauccauaaacaacugcuuagau

SEQ ID NO: 364461 - RNA, 24 nt, Artificial Sequence
  Synthetic
guauccauaaacaacugcuuagau

SEQ ID NO: 364462 - RNA, 18 nt, Artificial Sequence
  Synthetic
acaaaauuucaguuagau

SEQ ID NO: 364463 - RNA, 19 nt, Artificial Sequence
  Synthetic
uacaaaauuucaguuagau

SEQ ID NO: 364464 - RNA, 20 nt, Artificial Sequence
  Synthetic
auacaaaauuucaguuagau

SEQ ID NO: 364465 - RNA, 21 nt, Artificial Sequence
  Synthetic
gauacaaaauuucaguuagau

SEQ ID NO: 364466 - RNA, 22 nt, Artificial Sequence
  Synthetic
ggauacaaaauuucaguuagau

SEQ ID NO: 364467 - RNA, 23 nt, Artificial Sequence
  Synthetic
aggauacaaaauuucaguuagau

SEQ ID NO: 364468 - RNA, 24 nt, Artificial Sequence
  Synthetic
gaggauacaaaauuucaguuagau

SEQ ID NO: 364469 - RNA, 18 nt, Artificial Sequence
  Synthetic
uggauccuugaguuagau

SEQ ID NO: 364470 - RNA, 19 nt, Artificial Sequence
  Synthetic
cuggauccuugaguuagau

SEQ ID NO: 364471 - RNA, 20 nt, Artificial Sequence
  Synthetic
acuggauccuugaguuagau

SEQ ID NO: 364472 - RNA, 21 nt, Artificial Sequence
  Synthetic
gacuggauccuugaguuagau

SEQ ID NO: 364473 - RNA, 22 nt, Artificial Sequence
  Synthetic
ggacuggauccuugaguuagau

SEQ ID NO: 364474 - RNA, 23 nt, Artificial Sequence
  Synthetic
uggacuggauccuugaguuagau

SEQ ID NO: 364475 - RNA, 24 nt, Artificial Sequence
  Synthetic
uuggacuggauccuugaguuagau

SEQ ID NO: 364476 - RNA, 18 nt, Artificial Sequence
  Synthetic
aacuggcagcauuuagau

SEQ ID NO: 364477 - RNA, 19 nt, Artificial Sequence
  Synthetic
uaacuggcagcauuuagau

SEQ ID NO: 364478 - RNA, 20 nt, Artificial Sequence
  Synthetic
auaacuggcagcauuuagau

SEQ ID NO: 364479 - RNA, 21 nt, Artificial Sequence
  Synthetic
gauaacuggcagcauuuagau

SEQ ID NO: 364480 - RNA, 22 nt, Artificial Sequence
  Synthetic
ugauaacuggcagcauuuagau

SEQ ID NO: 364481 - RNA, 23 nt, Artificial Sequence
  Synthetic
cugauaacuggcagcauuuagau

SEQ ID NO: 364482 - RNA, 24 nt, Artificial Sequence
  Synthetic
gcugauaacuggcagcauuuagau

SEQ ID NO: 364483 - RNA, 18 nt, Artificial Sequence
  Synthetic
auguuuuagacuuuagau

SEQ ID NO: 364484 - RNA, 19 nt, Artificial Sequence
  Synthetic
aauguuuuagacuuuagau

SEQ ID NO: 364485 - RNA, 20 nt, Artificial Sequence
  Synthetic
aaauguuuuagacuuuagau

SEQ ID NO: 364486 - RNA, 21 nt, Artificial Sequence
  Synthetic
aaaauguuuuagacuuuagau

SEQ ID NO: 364487 - RNA, 22 nt, Artificial Sequence
  Synthetic
uaaaauguuuuagacuuuagau

SEQ ID NO: 364488 - RNA, 23 nt, Artificial Sequence
  Synthetic
cuaaaauguuuuagacuuuagau

SEQ ID NO: 364489 - RNA, 24 nt, Artificial Sequence
  Synthetic
acuaaaauguuuuagacuuuagau

SEQ ID NO: 364490 - RNA, 18 nt, Artificial Sequence
  Synthetic
agacauuacgcuuuagau

SEQ ID NO: 364491 - RNA, 19 nt, Artificial Sequence
  Synthetic
cagacauuacgcuuuagau

SEQ ID NO: 364492 - RNA, 20 nt, Artificial Sequence
  Synthetic
acagacauuacgcuuuagau

SEQ ID NO: 364493 - RNA, 21 nt, Artificial Sequence
  Synthetic
aacagacauuacgcuuuagau

SEQ ID NO: 364494 - RNA, 22 nt, Artificial Sequence
  Synthetic
aaacagacauuacgcuuuagau

SEQ ID NO: 364495 - RNA, 23 nt, Artificial Sequence
  Synthetic
aaaacagacauuacgcuuuagau

SEQ ID NO: 364496 - RNA, 24 nt, Artificial Sequence
  Synthetic
uaaaacagacauuacgcuuuagau

SEQ ID NO: 364497 - RNA, 18 nt, Artificial Sequence
  Synthetic
uugauuaauaguuuagau

SEQ ID NO: 364498 - RNA, 19 nt, Artificial Sequence
  Synthetic
auugauuaauaguuuagau

SEQ ID NO: 364499 - RNA, 20 nt, Artificial Sequence
  Synthetic
gauugauuaauaguuuagau

SEQ ID NO: 364500 - RNA, 21 nt, Artificial Sequence
  Synthetic
ggauugauuaauaguuuagau

SEQ ID NO: 364501 - RNA, 22 nt, Artificial Sequence
  Synthetic
uggauugauuaauaguuuagau

SEQ ID NO: 364502 - RNA, 23 nt, Artificial Sequence
  Synthetic
uuggauugauuaauaguuuagau

SEQ ID NO: 364503 - RNA, 24 nt, Artificial Sequence
  Synthetic
guuggauugauuaauaguuuagau

SEQ ID NO: 364504 - RNA, 18 nt, Artificial Sequence
  Synthetic
aagaaauaacuuuuagau

SEQ ID NO: 364505 - RNA, 19 nt, Artificial Sequence
  Synthetic
aaagaaauaacuuuuagau

SEQ ID NO: 364506 - RNA, 20 nt, Artificial Sequence
  Synthetic
uaaagaaauaacuuuuagau

SEQ ID NO: 364507 - RNA, 21 nt, Artificial Sequence
  Synthetic
guaaagaaauaacuuuuagau

SEQ ID NO: 364508 - RNA, 22 nt, Artificial Sequence
  Synthetic
aguaaagaaauaacuuuuagau

SEQ ID NO: 364509 - RNA, 23 nt, Artificial Sequence
  Synthetic
caguaaagaaauaacuuuuagau

SEQ ID NO: 364510 - RNA, 24 nt, Artificial Sequence
  Synthetic
ucaguaaagaaauaacuuuuagau

SEQ ID NO: 364511 - RNA, 18 nt, Artificial Sequence
  Synthetic
ccuuaauaacuuuuagau

SEQ ID NO: 364512 - RNA, 19 nt, Artificial Sequence
  Synthetic
uccuuaauaacuuuuagau

SEQ ID NO: 364513 - RNA, 20 nt, Artificial Sequence
  Synthetic
uuccuuaauaacuuuuagau

SEQ ID NO: 364514 - RNA, 21 nt, Artificial Sequence
  Synthetic
cuuccuuaauaacuuuuagau

SEQ ID NO: 364515 - RNA, 22 nt, Artificial Sequence
  Synthetic
ucuuccuuaauaacuuuuagau

SEQ ID NO: 364516 - RNA, 23 nt, Artificial Sequence
  Synthetic
cucuuccuuaauaacuuuuagau

SEQ ID NO: 364517 - RNA, 24 nt, Artificial Sequence
  Synthetic
acucuuccuuaauaacuuuuagau

SEQ ID NO: 364518 - RNA, 18 nt, Artificial Sequence
  Synthetic
aagugggaguugaacgau

SEQ ID NO: 364519 - RNA, 19 nt, Artificial Sequence
  Synthetic
uaagugggaguugaacgau

SEQ ID NO: 364520 - RNA, 20 nt, Artificial Sequence
  Synthetic
auaagugggaguugaacgau

SEQ ID NO: 364521 - RNA, 22 nt, Artificial Sequence
  Synthetic
ucauaagugggaguugaacgau

SEQ ID NO: 364522 - RNA, 23 nt, Artificial Sequence
  Synthetic
cucauaagugggaguugaacgau

SEQ ID NO: 364523 - RNA, 24 nt, Artificial Sequence
  Synthetic
acucauaagugggaguugaacgau

SEQ ID NO: 364524 - RNA, 18 nt, Artificial Sequence
  Synthetic
aaucuuggaagacacgau

SEQ ID NO: 364525 - RNA, 19 nt, Artificial Sequence
  Synthetic
gaaucuuggaagacacgau

SEQ ID NO: 364526 - RNA, 20 nt, Artificial Sequence
  Synthetic
ugaaucuuggaagacacgau

SEQ ID NO: 364527 - RNA, 21 nt, Artificial Sequence
  Synthetic
uugaaucuuggaagacacgau

SEQ ID NO: 364528 - RNA, 22 nt, Artificial Sequence
  Synthetic
uuugaaucuuggaagacacgau

SEQ ID NO: 364529 - RNA, 23 nt, Artificial Sequence
  Synthetic
auuugaaucuuggaagacacgau

SEQ ID NO: 364530 - RNA, 24 nt, Artificial Sequence
  Synthetic
cauuugaaucuuggaagacacgau

SEQ ID NO: 364531 - RNA, 18 nt, Artificial Sequence
  Synthetic
guacaaguggcccacgau

SEQ ID NO: 364532 - RNA, 19 nt, Artificial Sequence
  Synthetic
uguacaaguggcccacgau

SEQ ID NO: 364533 - RNA, 20 nt, Artificial Sequence
  Synthetic
auguacaaguggcccacgau

SEQ ID NO: 364534 - RNA, 21 nt, Artificial Sequence
  Synthetic
cauguacaaguggcccacgau

SEQ ID NO: 364535 - RNA, 22 nt, Artificial Sequence
  Synthetic
acauguacaaguggcccacgau

SEQ ID NO: 364536 - RNA, 23 nt, Artificial Sequence
  Synthetic
aacauguacaaguggcccacgau

SEQ ID NO: 364537 - RNA, 24 nt, Artificial Sequence
  Synthetic
gaacauguacaaguggcccacgau

SEQ ID NO: 364538 - RNA, 18 nt, Artificial Sequence
  Synthetic
uggguacaaagucacgau

SEQ ID NO: 364539 - RNA, 19 nt, Artificial Sequence
  Synthetic
auggguacaaagucacgau

SEQ ID NO: 364540 - RNA, 20 nt, Artificial Sequence
  Synthetic
aauggguacaaagucacgau

SEQ ID NO: 364541 - RNA, 21 nt, Artificial Sequence
  Synthetic
caauggguacaaagucacgau

SEQ ID NO: 364542 - RNA, 22 nt, Artificial Sequence
  Synthetic
ucaauggguacaaagucacgau

SEQ ID NO: 364543 - RNA, 23 nt, Artificial Sequence
  Synthetic
gucaauggguacaaagucacgau

SEQ ID NO: 364544 - RNA, 24 nt, Artificial Sequence
  Synthetic
ugucaauggguacaaagucacgau

SEQ ID NO: 364545 - RNA, 18 nt, Artificial Sequence
  Synthetic
caagaaauaugggacgau

SEQ ID NO: 364546 - RNA, 19 nt, Artificial Sequence
  Synthetic
ucaagaaauaugggacgau

SEQ ID NO: 364547 - RNA, 20 nt, Artificial Sequence
  Synthetic
uucaagaaauaugggacgau

SEQ ID NO: 364548 - RNA, 21 nt, Artificial Sequence
  Synthetic
cuucaagaaauaugggacgau

SEQ ID NO: 364549 - RNA, 22 nt, Artificial Sequence
  Synthetic
ccuucaagaaauaugggacgau

SEQ ID NO: 364550 - RNA, 23 nt, Artificial Sequence
  Synthetic
gccuucaagaaauaugggacgau

SEQ ID NO: 364551 - RNA, 24 nt, Artificial Sequence
  Synthetic
agccuucaagaaauaugggacgau

SEQ ID NO: 364552 - RNA, 18 nt, Artificial Sequence
  Synthetic
caucacaugauggacgau

SEQ ID NO: 364553 - RNA, 19 nt, Artificial Sequence
  Synthetic
ucaucacaugauggacgau

SEQ ID NO: 364554 - RNA, 20 nt, Artificial Sequence
  Synthetic
gucaucacaugauggacgau

SEQ ID NO: 364555 - RNA, 21 nt, Artificial Sequence
  Synthetic
ugucaucacaugauggacgau

SEQ ID NO: 364556 - RNA, 22 nt, Artificial Sequence
  Synthetic
augucaucacaugauggacgau

SEQ ID NO: 364557 - RNA, 23 nt, Artificial Sequence
  Synthetic
uaugucaucacaugauggacgau

SEQ ID NO: 364558 - RNA, 24 nt, Artificial Sequence
  Synthetic
auaugucaucacaugauggacgau

SEQ ID NO: 364559 - RNA, 18 nt, Artificial Sequence
  Synthetic
gauuuggccaaauacgau

SEQ ID NO: 364560 - RNA, 19 nt, Artificial Sequence
  Synthetic
ugauuuggccaaauacgau

SEQ ID NO: 364561 - RNA, 20 nt, Artificial Sequence
  Synthetic
cugauuuggccaaauacgau

SEQ ID NO: 364562 - RNA, 21 nt, Artificial Sequence
  Synthetic
ucugauuuggccaaauacgau

SEQ ID NO: 364563 - RNA, 22 nt, Artificial Sequence
  Synthetic
gucugauuuggccaaauacgau

SEQ ID NO: 364564 - RNA, 23 nt, Artificial Sequence
  Synthetic
ugucugauuuggccaaauacgau

SEQ ID NO: 364565 - RNA, 24 nt, Artificial Sequence
  Synthetic
augucugauuuggccaaauacgau

SEQ ID NO: 364566 - RNA, 18 nt, Artificial Sequence
  Synthetic
agaagaaauaacuacgau

SEQ ID NO: 364567 - RNA, 19 nt, Artificial Sequence
  Synthetic
gagaagaaauaacuacgau

SEQ ID NO: 364568 - RNA, 20 nt, Artificial Sequence
  Synthetic
agagaagaaauaacuacgau

SEQ ID NO: 364569 - RNA, 21 nt, Artificial Sequence
  Synthetic
aagagaagaaauaacuacgau

SEQ ID NO: 364570 - RNA, 22 nt, Artificial Sequence
  Synthetic
gaagagaagaaauaacuacgau

SEQ ID NO: 364571 - RNA, 23 nt, Artificial Sequence
  Synthetic
agaagagaagaaauaacuacgau

SEQ ID NO: 364572 - RNA, 24 nt, Artificial Sequence
  Synthetic
cagaagagaagaaauaacuacgau

SEQ ID NO: 364573 - RNA, 18 nt, Artificial Sequence
  Synthetic
gagaaaaguaacuacgau

SEQ ID NO: 364574 - RNA, 19 nt, Artificial Sequence
  Synthetic
ggagaaaaguaacuacgau

SEQ ID NO: 364575 - RNA, 20 nt, Artificial Sequence
  Synthetic
aggagaaaaguaacuacgau

SEQ ID NO: 364576 - RNA, 21 nt, Artificial Sequence
  Synthetic
uaggagaaaaguaacuacgau

SEQ ID NO: 364577 - RNA, 22 nt, Artificial Sequence
  Synthetic
uuaggagaaaaguaacuacgau

SEQ ID NO: 364578 - RNA, 23 nt, Artificial Sequence
  Synthetic
auuaggagaaaaguaacuacgau

SEQ ID NO: 364579 - RNA, 24 nt, Artificial Sequence
  Synthetic
gauuaggagaaaaguaacuacgau

SEQ ID NO: 364580 - RNA, 18 nt, Artificial Sequence
  Synthetic
ccaacacuaugauccgau

SEQ ID NO: 364581 - RNA, 19 nt, Artificial Sequence
  Synthetic
uccaacacuaugauccgau

SEQ ID NO: 364582 - RNA, 20 nt, Artificial Sequence
  Synthetic
guccaacacuaugauccgau

SEQ ID NO: 364583 - RNA, 21 nt, Artificial Sequence
  Synthetic
uguccaacacuaugauccgau

SEQ ID NO: 364584 - RNA, 22 nt, Artificial Sequence
  Synthetic
cuguccaacacuaugauccgau

SEQ ID NO: 364585 - RNA, 23 nt, Artificial Sequence
  Synthetic
acuguccaacacuaugauccgau

SEQ ID NO: 364586 - RNA, 24 nt, Artificial Sequence
  Synthetic
aacuguccaacacuaugauccgau

SEQ ID NO: 364587 - RNA, 18 nt, Artificial Sequence
  Synthetic
aaauuccaauacuccgau

SEQ ID NO: 364588 - RNA, 19 nt, Artificial Sequence
  Synthetic
gaaauuccaauacuccgau

SEQ ID NO: 364589 - RNA, 20 nt, Artificial Sequence
  Synthetic
agaaauuccaauacuccgau

SEQ ID NO: 364590 - RNA, 21 nt, Artificial Sequence
  Synthetic
uagaaauuccaauacuccgau

SEQ ID NO: 364591 - RNA, 22 nt, Artificial Sequence
  Synthetic
auagaaauuccaauacuccgau

SEQ ID NO: 364592 - RNA, 23 nt, Artificial Sequence
  Synthetic
aauagaaauuccaauacuccgau

SEQ ID NO: 364593 - RNA, 24 nt, Artificial Sequence
  Synthetic
uaauagaaauuccaauacuccgau

SEQ ID NO: 364594 - RNA, 18 nt, Artificial Sequence
  Synthetic
cuucauagagagagcgau

SEQ ID NO: 364595 - RNA, 19 nt, Artificial Sequence
  Synthetic
gcuucauagagagagcgau

SEQ ID NO: 364596 - RNA, 20 nt, Artificial Sequence
  Synthetic
agcuucauagagagagcgau

SEQ ID NO: 364597 - RNA, 21 nt, Artificial Sequence
  Synthetic
aagcuucauagagagagcgau

SEQ ID NO: 364598 - RNA, 22 nt, Artificial Sequence
  Synthetic
aaagcuucauagagagagcgau

SEQ ID NO: 364599 - RNA, 23 nt, Artificial Sequence
  Synthetic
gaaagcuucauagagagagcgau

SEQ ID NO: 364600 - RNA, 24 nt, Artificial Sequence
  Synthetic
ggaaagcuucauagagagagcgau

SEQ ID NO: 364601 - RNA, 18 nt, Artificial Sequence
  Synthetic
uagauagaauggggcgau

SEQ ID NO: 364602 - RNA, 19 nt, Artificial Sequence
  Synthetic
auagauagaauggggcgau

SEQ ID NO: 364603 - RNA, 20 nt, Artificial Sequence
  Synthetic
uauagauagaauggggcgau

SEQ ID NO: 364604 - RNA, 21 nt, Artificial Sequence
  Synthetic
cuauagauagaauggggcgau

SEQ ID NO: 364605 - RNA, 22 nt, Artificial Sequence
  Synthetic
acuauagauagaauggggcgau

SEQ ID NO: 364606 - RNA, 23 nt, Artificial Sequence
  Synthetic
gacuauagauagaauggggcgau

SEQ ID NO: 364607 - RNA, 24 nt, Artificial Sequence
  Synthetic
agacuauagauagaauggggcgau

SEQ ID NO: 364608 - RNA, 18 nt, Artificial Sequence
  Synthetic
gguugccccuggggcgau

SEQ ID NO: 364609 - RNA, 19 nt, Artificial Sequence
  Synthetic
agguugccccuggggcgau

SEQ ID NO: 364610 - RNA, 20 nt, Artificial Sequence
  Synthetic
gagguugccccuggggcgau

SEQ ID NO: 364611 - RNA, 21 nt, Artificial Sequence
  Synthetic
agagguugccccuggggcgau

SEQ ID NO: 364612 - RNA, 22 nt, Artificial Sequence
  Synthetic
uagagguugccccuggggcgau

SEQ ID NO: 364613 - RNA, 23 nt, Artificial Sequence
  Synthetic
auagagguugccccuggggcgau

SEQ ID NO: 364614 - RNA, 24 nt, Artificial Sequence
  Synthetic
gauagagguugccccuggggcgau

SEQ ID NO: 364615 - RNA, 18 nt, Artificial Sequence
  Synthetic
caggauugacuuggcgau

SEQ ID NO: 364616 - RNA, 19 nt, Artificial Sequence
  Synthetic
ucaggauugacuuggcgau

SEQ ID NO: 364617 - RNA, 20 nt, Artificial Sequence
  Synthetic
cucaggauugacuuggcgau

SEQ ID NO: 364618 - RNA, 24 nt, Artificial Sequence
  Synthetic
uuggcucaggauugacuuggcgau

SEQ ID NO: 364619 - RNA, 18 nt, Artificial Sequence
  Synthetic
uaggauugacuuggcgau

SEQ ID NO: 364620 - RNA, 19 nt, Artificial Sequence
  Synthetic
uuaggauugacuuggcgau

SEQ ID NO: 364621 - RNA, 20 nt, Artificial Sequence
  Synthetic
cuuaggauugacuuggcgau

SEQ ID NO: 364622 - RNA, 21 nt, Artificial Sequence
  Synthetic
gcuuaggauugacuuggcgau

SEQ ID NO: 364623 - RNA, 22 nt, Artificial Sequence
  Synthetic
ggcuuaggauugacuuggcgau

SEQ ID NO: 364624 - RNA, 23 nt, Artificial Sequence
  Synthetic
uggcuuaggauugacuuggcgau

SEQ ID NO: 364625 - RNA, 24 nt, Artificial Sequence
  Synthetic
uuggcuuaggauugacuuggcgau

SEQ ID NO: 364626 - RNA, 18 nt, Artificial Sequence
  Synthetic
aagacuuuuggcugcgau

SEQ ID NO: 364627 - RNA, 19 nt, Artificial Sequence
  Synthetic
uaagacuuuuggcugcgau

SEQ ID NO: 364628 - RNA, 20 nt, Artificial Sequence
  Synthetic
uuaagacuuuuggcugcgau

SEQ ID NO: 364629 - RNA, 21 nt, Artificial Sequence
  Synthetic
uuuaagacuuuuggcugcgau

SEQ ID NO: 364630 - RNA, 22 nt, Artificial Sequence
  Synthetic
uuuuaagacuuuuggcugcgau

SEQ ID NO: 364631 - RNA, 23 nt, Artificial Sequence
  Synthetic
auuuuaagacuuuuggcugcgau

SEQ ID NO: 364632 - RNA, 24 nt, Artificial Sequence
  Synthetic
uauuuuaagacuuuuggcugcgau

SEQ ID NO: 364633 - RNA, 18 nt, Artificial Sequence
  Synthetic
uaccaauacuuaaucgau

SEQ ID NO: 364634 - RNA, 19 nt, Artificial Sequence
  Synthetic
auaccaauacuuaaucgau

SEQ ID NO: 364635 - RNA, 20 nt, Artificial Sequence
  Synthetic
cauaccaauacuuaaucgau

SEQ ID NO: 364636 - RNA, 21 nt, Artificial Sequence
  Synthetic
ccauaccaauacuuaaucgau

SEQ ID NO: 364637 - RNA, 22 nt, Artificial Sequence
  Synthetic
uccauaccaauacuuaaucgau

SEQ ID NO: 364638 - RNA, 23 nt, Artificial Sequence
  Synthetic
cuccauaccaauacuuaaucgau

SEQ ID NO: 364639 - RNA, 24 nt, Artificial Sequence
  Synthetic
acuccauaccaauacuuaaucgau

SEQ ID NO: 364640 - RNA, 18 nt, Artificial Sequence
  Synthetic
acucgugguuuccucgau

SEQ ID NO: 364641 - RNA, 19 nt, Artificial Sequence
  Synthetic
aacucgugguuuccucgau

SEQ ID NO: 364642 - RNA, 20 nt, Artificial Sequence
  Synthetic
aaacucgugguuuccucgau

SEQ ID NO: 364643 - RNA, 21 nt, Artificial Sequence
  Synthetic
caaacucgugguuuccucgau

SEQ ID NO: 364644 - RNA, 22 nt, Artificial Sequence
  Synthetic
ucaaacucgugguuuccucgau

SEQ ID NO: 364645 - RNA, 23 nt, Artificial Sequence
  Synthetic
cucaaacucgugguuuccucgau

SEQ ID NO: 364646 - RNA, 24 nt, Artificial Sequence
  Synthetic
ucucaaacucgugguuuccucgau

SEQ ID NO: 364647 - RNA, 18 nt, Artificial Sequence
  Synthetic
uaauuuuaaugucucgau

SEQ ID NO: 364648 - RNA, 19 nt, Artificial Sequence
  Synthetic
cuaauuuuaaugucucgau

SEQ ID NO: 364649 - RNA, 20 nt, Artificial Sequence
  Synthetic
ucuaauuuuaaugucucgau

SEQ ID NO: 364650 - RNA, 21 nt, Artificial Sequence
  Synthetic
uucuaauuuuaaugucucgau

SEQ ID NO: 364651 - RNA, 22 nt, Artificial Sequence
  Synthetic
auucuaauuuuaaugucucgau

SEQ ID NO: 364652 - RNA, 23 nt, Artificial Sequence
  Synthetic
uauucuaauuuuaaugucucgau

SEQ ID NO: 364653 - RNA, 24 nt, Artificial Sequence
  Synthetic
auauucuaauuuuaaugucucgau

SEQ ID NO: 364654 - RNA, 18 nt, Artificial Sequence
  Synthetic
aguuuuauaugugucgau

SEQ ID NO: 364655 - RNA, 19 nt, Artificial Sequence
  Synthetic
gaguuuuauaugugucgau

SEQ ID NO: 364656 - RNA, 20 nt, Artificial Sequence
  Synthetic
agaguuuuauaugugucgau

SEQ ID NO: 364657 - RNA, 21 nt, Artificial Sequence
  Synthetic
aagaguuuuauaugugucgau

SEQ ID NO: 364658 - RNA, 22 nt, Artificial Sequence
  Synthetic
gaagaguuuuauaugugucgau

SEQ ID NO: 364659 - RNA, 23 nt, Artificial Sequence
  Synthetic
ggaagaguuuuauaugugucgau

SEQ ID NO: 364660 - RNA, 24 nt, Artificial Sequence
  Synthetic
gggaagaguuuuauaugugucgau

SEQ ID NO: 364661 - RNA, 18 nt, Artificial Sequence
  Synthetic
ccagaaacugaauucgau

SEQ ID NO: 364662 - RNA, 19 nt, Artificial Sequence
  Synthetic
cccagaaacugaauucgau

SEQ ID NO: 364663 - RNA, 20 nt, Artificial Sequence
  Synthetic
acccagaaacugaauucgau

SEQ ID NO: 364664 - RNA, 21 nt, Artificial Sequence
  Synthetic
uacccagaaacugaauucgau

SEQ ID NO: 364665 - RNA, 22 nt, Artificial Sequence
  Synthetic
uuacccagaaacugaauucgau

SEQ ID NO: 364666 - RNA, 23 nt, Artificial Sequence
  Synthetic
uuuacccagaaacugaauucgau

SEQ ID NO: 364667 - RNA, 24 nt, Artificial Sequence
  Synthetic
uuuuacccagaaacugaauucgau

SEQ ID NO: 364668 - RNA, 18 nt, Artificial Sequence
  Synthetic
ugaauuguacacuucgau

SEQ ID NO: 364669 - RNA, 19 nt, Artificial Sequence
  Synthetic
uugaauuguacacuucgau

SEQ ID NO: 364670 - RNA, 20 nt, Artificial Sequence
  Synthetic
auugaauuguacacuucgau

SEQ ID NO: 364671 - RNA, 21 nt, Artificial Sequence
  Synthetic
gauugaauuguacacuucgau

SEQ ID NO: 364672 - RNA, 22 nt, Artificial Sequence
  Synthetic
ggauugaauuguacacuucgau

SEQ ID NO: 364673 - RNA, 23 nt, Artificial Sequence
  Synthetic
aggauugaauuguacacuucgau

SEQ ID NO: 364674 - RNA, 24 nt, Artificial Sequence
  Synthetic
caggauugaauuguacacuucgau

SEQ ID NO: 364675 - RNA, 18 nt, Artificial Sequence
  Synthetic
agucugcucuacuucgau

SEQ ID NO: 364676 - RNA, 19 nt, Artificial Sequence
  Synthetic
aagucugcucuacuucgau

SEQ ID NO: 364677 - RNA, 20 nt, Artificial Sequence
  Synthetic
caagucugcucuacuucgau

SEQ ID NO: 364678 - RNA, 21 nt, Artificial Sequence
  Synthetic
ucaagucugcucuacuucgau

SEQ ID NO: 364679 - RNA, 22 nt, Artificial Sequence
  Synthetic
cucaagucugcucuacuucgau

SEQ ID NO: 364680 - RNA, 23 nt, Artificial Sequence
  Synthetic
ucucaagucugcucuacuucgau

SEQ ID NO: 364681 - RNA, 24 nt, Artificial Sequence
  Synthetic
aucucaagucugcucuacuucgau

SEQ ID NO: 364682 - RNA, 18 nt, Artificial Sequence
  Synthetic
ugcuuuucucccuucgau

SEQ ID NO: 364683 - RNA, 19 nt, Artificial Sequence
  Synthetic
cugcuuuucucccuucgau

SEQ ID NO: 364684 - RNA, 20 nt, Artificial Sequence
  Synthetic
ccugcuuuucucccuucgau

SEQ ID NO: 364685 - RNA, 21 nt, Artificial Sequence
  Synthetic
uccugcuuuucucccuucgau

SEQ ID NO: 364686 - RNA, 22 nt, Artificial Sequence
  Synthetic
uuccugcuuuucucccuucgau

SEQ ID NO: 364687 - RNA, 23 nt, Artificial Sequence
  Synthetic
uuuccugcuuuucucccuucgau

SEQ ID NO: 364688 - RNA, 24 nt, Artificial Sequence
  Synthetic
auuuccugcuuuucucccuucgau

SEQ ID NO: 364689 - RNA, 18 nt, Artificial Sequence
  Synthetic
caugucccuacaaaggau

SEQ ID NO: 364690 - RNA, 19 nt, Artificial Sequence
  Synthetic
ccaugucccuacaaaggau

SEQ ID NO: 364691 - RNA, 20 nt, Artificial Sequence
  Synthetic
uccaugucccuacaaaggau

SEQ ID NO: 364692 - RNA, 18 nt, Artificial Sequence
  Synthetic
aaaaauugggcaaaggau

SEQ ID NO: 364693 - RNA, 19 nt, Artificial Sequence
  Synthetic
caaaaauugggcaaaggau

SEQ ID NO: 364694 - RNA, 20 nt, Artificial Sequence
  Synthetic
ucaaaaauugggcaaaggau

SEQ ID NO: 364695 - RNA, 21 nt, Artificial Sequence
  Synthetic
aucaaaaauugggcaaaggau

SEQ ID NO: 364696 - RNA, 22 nt, Artificial Sequence
  Synthetic
aaucaaaaauugggcaaaggau

SEQ ID NO: 364697 - RNA, 23 nt, Artificial Sequence
  Synthetic
uaaucaaaaauugggcaaaggau

SEQ ID NO: 364698 - RNA, 24 nt, Artificial Sequence
  Synthetic
cuaaucaaaaauugggcaaaggau

SEQ ID NO: 364699 - RNA, 18 nt, Artificial Sequence
  Synthetic
auagaugcaugaaaggau

SEQ ID NO: 364700 - RNA, 19 nt, Artificial Sequence
  Synthetic
aauagaugcaugaaaggau

SEQ ID NO: 364701 - RNA, 20 nt, Artificial Sequence
  Synthetic
aaauagaugcaugaaaggau

SEQ ID NO: 364702 - RNA, 21 nt, Artificial Sequence
  Synthetic
aaaauagaugcaugaaaggau

SEQ ID NO: 364703 - RNA, 22 nt, Artificial Sequence
  Synthetic
gaaaauagaugcaugaaaggau

SEQ ID NO: 364704 - RNA, 23 nt, Artificial Sequence
  Synthetic
ugaaaauagaugcaugaaaggau

SEQ ID NO: 364705 - RNA, 24 nt, Artificial Sequence
  Synthetic
uugaaaauagaugcaugaaaggau

SEQ ID NO: 364706 - RNA, 18 nt, Artificial Sequence
  Synthetic
ggaugggucuuaaaggau

SEQ ID NO: 364707 - RNA, 19 nt, Artificial Sequence
  Synthetic
gggaugggucuuaaaggau

SEQ ID NO: 364708 - RNA, 20 nt, Artificial Sequence
  Synthetic
ugggaugggucuuaaaggau

SEQ ID NO: 364709 - RNA, 21 nt, Artificial Sequence
  Synthetic
cugggaugggucuuaaaggau

SEQ ID NO: 364710 - RNA, 22 nt, Artificial Sequence
  Synthetic
ucugggaugggucuuaaaggau

SEQ ID NO: 364711 - RNA, 23 nt, Artificial Sequence
  Synthetic
cucugggaugggucuuaaaggau

SEQ ID NO: 364712 - RNA, 24 nt, Artificial Sequence
  Synthetic
ucucugggaugggucuuaaaggau

SEQ ID NO: 364713 - RNA, 18 nt, Artificial Sequence
  Synthetic
auucaaauuaccaaggau

SEQ ID NO: 364714 - RNA, 19 nt, Artificial Sequence
  Synthetic
aauucaaauuaccaaggau

SEQ ID NO: 364715 - RNA, 20 nt, Artificial Sequence
  Synthetic
aaauucaaauuaccaaggau

SEQ ID NO: 364716 - RNA, 21 nt, Artificial Sequence
  Synthetic
aaaauucaaauuaccaaggau

SEQ ID NO: 364717 - RNA, 22 nt, Artificial Sequence
  Synthetic
aaaaauucaaauuaccaaggau

SEQ ID NO: 364718 - RNA, 23 nt, Artificial Sequence
  Synthetic
aaaaaauucaaauuaccaaggau

SEQ ID NO: 364719 - RNA, 24 nt, Artificial Sequence
  Synthetic
caaaaaauucaaauuaccaaggau

SEQ ID NO: 364720 - RNA, 18 nt, Artificial Sequence
  Synthetic
gccuguaaucccaaggau

SEQ ID NO: 364721 - RNA, 19 nt, Artificial Sequence
  Synthetic
ugccuguaaucccaaggau

SEQ ID NO: 364722 - RNA, 20 nt, Artificial Sequence
  Synthetic
augccuguaaucccaaggau

SEQ ID NO: 364723 - RNA, 21 nt, Artificial Sequence
  Synthetic
caugccuguaaucccaaggau

SEQ ID NO: 364724 - RNA, 22 nt, Artificial Sequence
  Synthetic
ucaugccuguaaucccaaggau

SEQ ID NO: 364725 - RNA, 23 nt, Artificial Sequence
  Synthetic
cucaugccuguaaucccaaggau

SEQ ID NO: 364726 - RNA, 24 nt, Artificial Sequence
  Synthetic
gcucaugccuguaaucccaaggau

SEQ ID NO: 364727 - RNA, 18 nt, Artificial Sequence
  Synthetic
uguauuaaggccaaggau

SEQ ID NO: 364728 - RNA, 19 nt, Artificial Sequence
  Synthetic
uuguauuaaggccaaggau

SEQ ID NO: 364729 - RNA, 20 nt, Artificial Sequence
  Synthetic
uuuguauuaaggccaaggau

SEQ ID NO: 364730 - RNA, 21 nt, Artificial Sequence
  Synthetic
uuuuguauuaaggccaaggau

SEQ ID NO: 364731 - RNA, 22 nt, Artificial Sequence
  Synthetic
guuuuguauuaaggccaaggau

SEQ ID NO: 364732 - RNA, 23 nt, Artificial Sequence
  Synthetic
aguuuuguauuaaggccaaggau

SEQ ID NO: 364733 - RNA, 24 nt, Artificial Sequence
  Synthetic
gaguuuuguauuaaggccaaggau

SEQ ID NO: 364734 - RNA, 18 nt, Artificial Sequence
  Synthetic
ccagaugcuagcaaggau

SEQ ID NO: 364735 - RNA, 19 nt, Artificial Sequence
  Synthetic
accagaugcuagcaaggau

SEQ ID NO: 364736 - RNA, 20 nt, Artificial Sequence
  Synthetic
caccagaugcuagcaaggau

SEQ ID NO: 364737 - RNA, 21 nt, Artificial Sequence
  Synthetic
acaccagaugcuagcaaggau

SEQ ID NO: 364738 - RNA, 22 nt, Artificial Sequence
  Synthetic
aacaccagaugcuagcaaggau

SEQ ID NO: 364739 - RNA, 23 nt, Artificial Sequence
  Synthetic
caacaccagaugcuagcaaggau

SEQ ID NO: 364740 - RNA, 24 nt, Artificial Sequence
  Synthetic
acaacaccagaugcuagcaaggau

SEQ ID NO: 364741 - RNA, 18 nt, Artificial Sequence
  Synthetic
ugcugaaguggcaaggau

SEQ ID NO: 364742 - RNA, 19 nt, Artificial Sequence
  Synthetic
gugcugaaguggcaaggau

SEQ ID NO: 364743 - RNA, 20 nt, Artificial Sequence
  Synthetic
ggugcugaaguggcaaggau

SEQ ID NO: 364744 - RNA, 21 nt, Artificial Sequence
  Synthetic
gggugcugaaguggcaaggau

SEQ ID NO: 364745 - RNA, 22 nt, Artificial Sequence
  Synthetic
ugggugcugaaguggcaaggau

SEQ ID NO: 364746 - RNA, 23 nt, Artificial Sequence
  Synthetic
augggugcugaaguggcaaggau

SEQ ID NO: 364747 - RNA, 24 nt, Artificial Sequence
  Synthetic
gaugggugcugaaguggcaaggau

SEQ ID NO: 364748 - RNA, 18 nt, Artificial Sequence
  Synthetic
caaguguugaucaaggau

SEQ ID NO: 364749 - RNA, 19 nt, Artificial Sequence
  Synthetic
acaaguguugaucaaggau

SEQ ID NO: 364750 - RNA, 20 nt, Artificial Sequence
  Synthetic
aacaaguguugaucaaggau

SEQ ID NO: 364751 - RNA, 21 nt, Artificial Sequence
  Synthetic
uaacaaguguugaucaaggau

SEQ ID NO: 364752 - RNA, 22 nt, Artificial Sequence
  Synthetic
auaacaaguguugaucaaggau

SEQ ID NO: 364753 - RNA, 23 nt, Artificial Sequence
  Synthetic
gauaacaaguguugaucaaggau

SEQ ID NO: 364754 - RNA, 24 nt, Artificial Sequence
  Synthetic
ugauaacaaguguugaucaaggau

SEQ ID NO: 364755 - RNA, 18 nt, Artificial Sequence
  Synthetic
cuuuuugaagucaaggau

SEQ ID NO: 364756 - RNA, 19 nt, Artificial Sequence
  Synthetic
gcuuuuugaagucaaggau

SEQ ID NO: 364757 - RNA, 20 nt, Artificial Sequence
  Synthetic
agcuuuuugaagucaaggau

SEQ ID NO: 364758 - RNA, 21 nt, Artificial Sequence
  Synthetic
aagcuuuuugaagucaaggau

SEQ ID NO: 364759 - RNA, 22 nt, Artificial Sequence
  Synthetic
aaagcuuuuugaagucaaggau

SEQ ID NO: 364760 - RNA, 23 nt, Artificial Sequence
  Synthetic
uaaagcuuuuugaagucaaggau

SEQ ID NO: 364761 - RNA, 24 nt, Artificial Sequence
  Synthetic
auaaagcuuuuugaagucaaggau

SEQ ID NO: 364762 - RNA, 18 nt, Artificial Sequence
  Synthetic
ucuuuauuagucaaggau

SEQ ID NO: 364763 - RNA, 19 nt, Artificial Sequence
  Synthetic
aucuuuauuagucaaggau

SEQ ID NO: 364764 - RNA, 20 nt, Artificial Sequence
  Synthetic
uaucuuuauuagucaaggau

SEQ ID NO: 364765 - RNA, 21 nt, Artificial Sequence
  Synthetic
cuaucuuuauuagucaaggau

SEQ ID NO: 364766 - RNA, 22 nt, Artificial Sequence
  Synthetic
ucuaucuuuauuagucaaggau

SEQ ID NO: 364767 - RNA, 23 nt, Artificial Sequence
  Synthetic
aucuaucuuuauuagucaaggau

SEQ ID NO: 364768 - RNA, 24 nt, Artificial Sequence
  Synthetic
uaucuaucuuuauuagucaaggau

SEQ ID NO: 364769 - RNA, 18 nt, Artificial Sequence
  Synthetic
agaguuuuaaagaaggau

SEQ ID NO: 364770 - RNA, 19 nt, Artificial Sequence
  Synthetic
uagaguuuuaaagaaggau

SEQ ID NO: 364771 - RNA, 20 nt, Artificial Sequence
  Synthetic
cuagaguuuuaaagaaggau

SEQ ID NO: 364772 - RNA, 21 nt, Artificial Sequence
  Synthetic
acuagaguuuuaaagaaggau

SEQ ID NO: 364773 - RNA, 22 nt, Artificial Sequence
  Synthetic
gacuagaguuuuaaagaaggau

SEQ ID NO: 364774 - RNA, 23 nt, Artificial Sequence
  Synthetic
ugacuagaguuuuaaagaaggau

SEQ ID NO: 364775 - RNA, 24 nt, Artificial Sequence
  Synthetic
cugacuagaguuuuaaagaaggau

SEQ ID NO: 364776 - RNA, 18 nt, Artificial Sequence
  Synthetic
acaauauguaagaaggau

SEQ ID NO: 364777 - RNA, 19 nt, Artificial Sequence
  Synthetic
aacaauauguaagaaggau

SEQ ID NO: 364778 - RNA, 20 nt, Artificial Sequence
  Synthetic
uaacaauauguaagaaggau

SEQ ID NO: 364779 - RNA, 21 nt, Artificial Sequence
  Synthetic
auaacaauauguaagaaggau

SEQ ID NO: 364780 - RNA, 22 nt, Artificial Sequence
  Synthetic
aauaacaauauguaagaaggau

SEQ ID NO: 364781 - RNA, 23 nt, Artificial Sequence
  Synthetic
uaauaacaauauguaagaaggau

SEQ ID NO: 364782 - RNA, 24 nt, Artificial Sequence
  Synthetic
auaauaacaauauguaagaaggau

SEQ ID NO: 364783 - RNA, 18 nt, Artificial Sequence
  Synthetic
cugggagaggagaaggau

SEQ ID NO: 364784 - RNA, 19 nt, Artificial Sequence
  Synthetic
ucugggagaggagaaggau

SEQ ID NO: 364785 - RNA, 20 nt, Artificial Sequence
  Synthetic
aucugggagaggagaaggau

SEQ ID NO: 364786 - RNA, 21 nt, Artificial Sequence
  Synthetic
aaucugggagaggagaaggau

SEQ ID NO: 364787 - RNA, 22 nt, Artificial Sequence
  Synthetic
gaaucugggagaggagaaggau

SEQ ID NO: 364788 - RNA, 23 nt, Artificial Sequence
  Synthetic
agaaucugggagaggagaaggau

SEQ ID NO: 364789 - RNA, 24 nt, Artificial Sequence
  Synthetic
uagaaucugggagaggagaaggau

SEQ ID NO: 364790 - RNA, 18 nt, Artificial Sequence
  Synthetic
cuaugggaugagaaggau

SEQ ID NO: 364791 - RNA, 19 nt, Artificial Sequence
  Synthetic
ucuaugggaugagaaggau

SEQ ID NO: 364792 - RNA, 20 nt, Artificial Sequence
  Synthetic
aucuaugggaugagaaggau

SEQ ID NO: 364793 - RNA, 21 nt, Artificial Sequence
  Synthetic
aaucuaugggaugagaaggau

SEQ ID NO: 364794 - RNA, 22 nt, Artificial Sequence
  Synthetic
gaaucuaugggaugagaaggau

SEQ ID NO: 364795 - RNA, 23 nt, Artificial Sequence
  Synthetic
ggaaucuaugggaugagaaggau

SEQ ID NO: 364796 - RNA, 24 nt, Artificial Sequence
  Synthetic
gggaaucuaugggaugagaaggau

SEQ ID NO: 364797 - RNA, 18 nt, Artificial Sequence
  Synthetic
acccaaaacaugaaggau

SEQ ID NO: 364798 - RNA, 19 nt, Artificial Sequence
  Synthetic
uacccaaaacaugaaggau

SEQ ID NO: 364799 - RNA, 20 nt, Artificial Sequence
  Synthetic
uuacccaaaacaugaaggau

SEQ ID NO: 364800 - RNA, 21 nt, Artificial Sequence
  Synthetic
auuacccaaaacaugaaggau

SEQ ID NO: 364801 - RNA, 22 nt, Artificial Sequence
  Synthetic
uauuacccaaaacaugaaggau

SEQ ID NO: 364802 - RNA, 23 nt, Artificial Sequence
  Synthetic
uuauuacccaaaacaugaaggau

SEQ ID NO: 364803 - RNA, 24 nt, Artificial Sequence
  Synthetic
uuuauuacccaaaacaugaaggau

SEQ ID NO: 364804 - RNA, 18 nt, Artificial Sequence
  Synthetic
agaagauuuaugaaggau

SEQ ID NO: 364805 - RNA, 19 nt, Artificial Sequence
  Synthetic
aagaagauuuaugaaggau

SEQ ID NO: 364806 - RNA, 20 nt, Artificial Sequence
  Synthetic
uaagaagauuuaugaaggau

SEQ ID NO: 364807 - RNA, 21 nt, Artificial Sequence
  Synthetic
guaagaagauuuaugaaggau

SEQ ID NO: 364808 - RNA, 22 nt, Artificial Sequence
  Synthetic
aguaagaagauuuaugaaggau

SEQ ID NO: 364809 - RNA, 23 nt, Artificial Sequence
  Synthetic
caguaagaagauuuaugaaggau

SEQ ID NO: 364810 - RNA, 24 nt, Artificial Sequence
  Synthetic
gcaguaagaagauuuaugaaggau

SEQ ID NO: 364811 - RNA, 18 nt, Artificial Sequence
  Synthetic
cauuaaaugccacaggau

SEQ ID NO: 364812 - RNA, 19 nt, Artificial Sequence
  Synthetic
ccauuaaaugccacaggau

SEQ ID NO: 364813 - RNA, 20 nt, Artificial Sequence
  Synthetic
gccauuaaaugccacaggau

SEQ ID NO: 364814 - RNA, 21 nt, Artificial Sequence
  Synthetic
ugccauuaaaugccacaggau

SEQ ID NO: 364815 - RNA, 22 nt, Artificial Sequence
  Synthetic
uugccauuaaaugccacaggau

SEQ ID NO: 364816 - RNA, 23 nt, Artificial Sequence
  Synthetic
uuugccauuaaaugccacaggau

SEQ ID NO: 364817 - RNA, 24 nt, Artificial Sequence
  Synthetic
cuuugccauuaaaugccacaggau

SEQ ID NO: 364818 - RNA, 18 nt, Artificial Sequence
  Synthetic
acuuugggaggccaggau

SEQ ID NO: 364819 - RNA, 19 nt, Artificial Sequence
  Synthetic
cacuuugggaggccaggau

SEQ ID NO: 364820 - RNA, 20 nt, Artificial Sequence
  Synthetic
gcacuuugggaggccaggau

SEQ ID NO: 364821 - RNA, 21 nt, Artificial Sequence
  Synthetic
agcacuuugggaggccaggau

SEQ ID NO: 364822 - RNA, 22 nt, Artificial Sequence
  Synthetic
cagcacuuugggaggccaggau

SEQ ID NO: 364823 - RNA, 23 nt, Artificial Sequence
  Synthetic
ccagcacuuugggaggccaggau

SEQ ID NO: 364824 - RNA, 24 nt, Artificial Sequence
  Synthetic
cccagcacuuugggaggccaggau

SEQ ID NO: 364825 - RNA, 18 nt, Artificial Sequence
  Synthetic
aaaaaaagauggcaggau

SEQ ID NO: 364826 - RNA, 19 nt, Artificial Sequence
  Synthetic
caaaaaaagauggcaggau

SEQ ID NO: 364827 - RNA, 20 nt, Artificial Sequence
  Synthetic
gcaaaaaaagauggcaggau

SEQ ID NO: 364828 - RNA, 21 nt, Artificial Sequence
  Synthetic
agcaaaaaaagauggcaggau

SEQ ID NO: 364829 - RNA, 22 nt, Artificial Sequence
  Synthetic
aagcaaaaaaagauggcaggau

SEQ ID NO: 364830 - RNA, 23 nt, Artificial Sequence
  Synthetic
aaagcaaaaaaagauggcaggau

SEQ ID NO: 364831 - RNA, 24 nt, Artificial Sequence
  Synthetic
aaaagcaaaaaaagauggcaggau

SEQ ID NO: 364832 - RNA, 18 nt, Artificial Sequence
  Synthetic
caggcaacaaugcaggau

SEQ ID NO: 364833 - RNA, 19 nt, Artificial Sequence
  Synthetic
acaggcaacaaugcaggau

SEQ ID NO: 364834 - RNA, 20 nt, Artificial Sequence
  Synthetic
uacaggcaacaaugcaggau

SEQ ID NO: 364835 - RNA, 21 nt, Artificial Sequence
  Synthetic
uuacaggcaacaaugcaggau

SEQ ID NO: 364836 - RNA, 22 nt, Artificial Sequence
  Synthetic
cuuacaggcaacaaugcaggau

SEQ ID NO: 364837 - RNA, 23 nt, Artificial Sequence
  Synthetic
ucuuacaggcaacaaugcaggau

SEQ ID NO: 364838 - RNA, 24 nt, Artificial Sequence
  Synthetic
uucuuacaggcaacaaugcaggau

SEQ ID NO: 364839 - RNA, 18 nt, Artificial Sequence
  Synthetic
uaauauuaagaucaggau

SEQ ID NO: 364840 - RNA, 19 nt, Artificial Sequence
  Synthetic
cuaauauuaagaucaggau

SEQ ID NO: 364841 - RNA, 20 nt, Artificial Sequence
  Synthetic
ucuaauauuaagaucaggau

SEQ ID NO: 364842 - RNA, 21 nt, Artificial Sequence
  Synthetic
cucuaauauuaagaucaggau

SEQ ID NO: 364843 - RNA, 22 nt, Artificial Sequence
  Synthetic
acucuaauauuaagaucaggau

SEQ ID NO: 364844 - RNA, 23 nt, Artificial Sequence
  Synthetic
cacucuaauauuaagaucaggau

SEQ ID NO: 364845 - RNA, 24 nt, Artificial Sequence
  Synthetic
gcacucuaauauuaagaucaggau

SEQ ID NO: 364846 - RNA, 18 nt, Artificial Sequence
  Synthetic
gugaguggguaucaggau

SEQ ID NO: 364847 - RNA, 19 nt, Artificial Sequence
  Synthetic
ggugaguggguaucaggau

SEQ ID NO: 364848 - RNA, 20 nt, Artificial Sequence
  Synthetic
gggugaguggguaucaggau

SEQ ID NO: 364849 - RNA, 21 nt, Artificial Sequence
  Synthetic
ggggugaguggguaucaggau

SEQ ID NO: 364850 - RNA, 22 nt, Artificial Sequence
  Synthetic
gggggugaguggguaucaggau

SEQ ID NO: 364851 - RNA, 23 nt, Artificial Sequence
  Synthetic
ugggggugaguggguaucaggau

SEQ ID NO: 364852 - RNA, 24 nt, Artificial Sequence
  Synthetic
augggggugaguggguaucaggau

SEQ ID NO: 364853 - RNA, 18 nt, Artificial Sequence
  Synthetic
cagagacaaacucaggau

SEQ ID NO: 364854 - RNA, 19 nt, Artificial Sequence
  Synthetic
ccagagacaaacucaggau

SEQ ID NO: 364855 - RNA, 20 nt, Artificial Sequence
  Synthetic
accagagacaaacucaggau

SEQ ID NO: 364856 - RNA, 21 nt, Artificial Sequence
  Synthetic
aaccagagacaaacucaggau

SEQ ID NO: 364857 - RNA, 22 nt, Artificial Sequence
  Synthetic
uaaccagagacaaacucaggau

SEQ ID NO: 364858 - RNA, 23 nt, Artificial Sequence
  Synthetic
auaaccagagacaaacucaggau

SEQ ID NO: 364859 - RNA, 24 nt, Artificial Sequence
  Synthetic
cauaaccagagacaaacucaggau

SEQ ID NO: 364860 - RNA, 18 nt, Artificial Sequence
  Synthetic
aaagaaaugagucaggau

SEQ ID NO: 364861 - RNA, 19 nt, Artificial Sequence
  Synthetic
uaaagaaaugagucaggau

SEQ ID NO: 364862 - RNA, 20 nt, Artificial Sequence
  Synthetic
cuaaagaaaugagucaggau

SEQ ID NO: 364863 - RNA, 21 nt, Artificial Sequence
  Synthetic
ucuaaagaaaugagucaggau

SEQ ID NO: 364864 - RNA, 22 nt, Artificial Sequence
  Synthetic
aucuaaagaaaugagucaggau

SEQ ID NO: 364865 - RNA, 23 nt, Artificial Sequence
  Synthetic
uaucuaaagaaaugagucaggau

SEQ ID NO: 364866 - RNA, 24 nt, Artificial Sequence
  Synthetic
cuaucuaaagaaaugagucaggau

SEQ ID NO: 364867 - RNA, 18 nt, Artificial Sequence
  Synthetic
aaggcuguuagucaggau

SEQ ID NO: 364868 - RNA, 19 nt, Artificial Sequence
  Synthetic
gaaggcuguuagucaggau

SEQ ID NO: 364869 - RNA, 20 nt, Artificial Sequence
  Synthetic
ggaaggcuguuagucaggau

SEQ ID NO: 364870 - RNA, 21 nt, Artificial Sequence
  Synthetic
uggaaggcuguuagucaggau

SEQ ID NO: 364871 - RNA, 22 nt, Artificial Sequence
  Synthetic
auggaaggcuguuagucaggau

SEQ ID NO: 364872 - RNA, 23 nt, Artificial Sequence
  Synthetic
cauggaaggcuguuagucaggau

SEQ ID NO: 364873 - RNA, 24 nt, Artificial Sequence
  Synthetic
gcauggaaggcuguuagucaggau

SEQ ID NO: 364874 - RNA, 18 nt, Artificial Sequence
  Synthetic
gacuuuuugugucaggau

SEQ ID NO: 364875 - RNA, 19 nt, Artificial Sequence
  Synthetic
ggacuuuuugugucaggau

SEQ ID NO: 364876 - RNA, 20 nt, Artificial Sequence
  Synthetic
uggacuuuuugugucaggau

SEQ ID NO: 364877 - RNA, 21 nt, Artificial Sequence
  Synthetic
auggacuuuuugugucaggau

SEQ ID NO: 364878 - RNA, 22 nt, Artificial Sequence
  Synthetic
uauggacuuuuugugucaggau

SEQ ID NO: 364879 - RNA, 23 nt, Artificial Sequence
  Synthetic
cuauggacuuuuugugucaggau

SEQ ID NO: 364880 - RNA, 24 nt, Artificial Sequence
  Synthetic
gcuauggacuuuuugugucaggau

SEQ ID NO: 364881 - RNA, 18 nt, Artificial Sequence
  Synthetic
guccuuguacuucaggau

SEQ ID NO: 364882 - RNA, 19 nt, Artificial Sequence
  Synthetic
cguccuuguacuucaggau

SEQ ID NO: 364883 - RNA, 20 nt, Artificial Sequence
  Synthetic
ucguccuuguacuucaggau

SEQ ID NO: 364884 - RNA, 21 nt, Artificial Sequence
  Synthetic
gucguccuuguacuucaggau

SEQ ID NO: 364885 - RNA, 22 nt, Artificial Sequence
  Synthetic
cgucguccuuguacuucaggau

SEQ ID NO: 364886 - RNA, 23 nt, Artificial Sequence
  Synthetic
ccgucguccuuguacuucaggau

SEQ ID NO: 364887 - RNA, 24 nt, Artificial Sequence
  Synthetic
accgucguccuuguacuucaggau

SEQ ID NO: 364888 - RNA, 18 nt, Artificial Sequence
  Synthetic
cauagcagugaagaggau

SEQ ID NO: 364889 - RNA, 19 nt, Artificial Sequence
  Synthetic
gcauagcagugaagaggau

SEQ ID NO: 364890 - RNA, 20 nt, Artificial Sequence
  Synthetic
ugcauagcagugaagaggau

SEQ ID NO: 364891 - RNA, 21 nt, Artificial Sequence
  Synthetic
uugcauagcagugaagaggau

SEQ ID NO: 364892 - RNA, 22 nt, Artificial Sequence
  Synthetic
cuugcauagcagugaagaggau

SEQ ID NO: 364893 - RNA, 23 nt, Artificial Sequence
  Synthetic
ccuugcauagcagugaagaggau

SEQ ID NO: 364894 - RNA, 24 nt, Artificial Sequence
  Synthetic
accuugcauagcagugaagaggau

SEQ ID NO: 364895 - RNA, 18 nt, Artificial Sequence
  Synthetic
acagaugcuggagaggau

SEQ ID NO: 364896 - RNA, 19 nt, Artificial Sequence
  Synthetic
aacagaugcuggagaggau

SEQ ID NO: 364897 - RNA, 20 nt, Artificial Sequence
  Synthetic
caacagaugcuggagaggau

SEQ ID NO: 364898 - RNA, 18 nt, Artificial Sequence
  Synthetic
agaaucucccccgaggau

SEQ ID NO: 364899 - RNA, 19 nt, Artificial Sequence
  Synthetic
gagaaucucccccgaggau

SEQ ID NO: 364900 - RNA, 20 nt, Artificial Sequence
  Synthetic
agagaaucucccccgaggau

SEQ ID NO: 364901 - RNA, 21 nt, Artificial Sequence
  Synthetic
gagagaaucucccccgaggau

SEQ ID NO: 364902 - RNA, 22 nt, Artificial Sequence
  Synthetic
agagagaaucucccccgaggau

SEQ ID NO: 364903 - RNA, 23 nt, Artificial Sequence
  Synthetic
gagagagaaucucccccgaggau

SEQ ID NO: 364904 - RNA, 24 nt, Artificial Sequence
  Synthetic
ugagagagaaucucccccgaggau

SEQ ID NO: 364905 - RNA, 18 nt, Artificial Sequence
  Synthetic
uucaaauagugcgaggau

SEQ ID NO: 364906 - RNA, 19 nt, Artificial Sequence
  Synthetic
uuucaaauagugcgaggau

SEQ ID NO: 364907 - RNA, 20 nt, Artificial Sequence
  Synthetic
cuuucaaauagugcgaggau

SEQ ID NO: 364908 - RNA, 21 nt, Artificial Sequence
  Synthetic
gcuuucaaauagugcgaggau

SEQ ID NO: 364909 - RNA, 22 nt, Artificial Sequence
  Synthetic
ggcuuucaaauagugcgaggau

SEQ ID NO: 364910 - RNA, 23 nt, Artificial Sequence
  Synthetic
gggcuuucaaauagugcgaggau

SEQ ID NO: 364911 - RNA, 24 nt, Artificial Sequence
  Synthetic
agggcuuucaaauagugcgaggau

SEQ ID NO: 364912 - RNA, 18 nt, Artificial Sequence
  Synthetic
acacuggaaaaggaggau

SEQ ID NO: 364913 - RNA, 19 nt, Artificial Sequence
  Synthetic
aacacuggaaaaggaggau

SEQ ID NO: 364914 - RNA, 20 nt, Artificial Sequence
  Synthetic
aaacacuggaaaaggaggau

SEQ ID NO: 364915 - RNA, 21 nt, Artificial Sequence
  Synthetic
aaaacacuggaaaaggaggau

SEQ ID NO: 364916 - RNA, 22 nt, Artificial Sequence
  Synthetic
aaaaacacuggaaaaggaggau

SEQ ID NO: 364917 - RNA, 23 nt, Artificial Sequence
  Synthetic
gaaaaacacuggaaaaggaggau

SEQ ID NO: 364918 - RNA, 24 nt, Artificial Sequence
  Synthetic
agaaaaacacuggaaaaggaggau

SEQ ID NO: 364919 - RNA, 18 nt, Artificial Sequence
  Synthetic
ucacaaccuagggaggau

SEQ ID NO: 364920 - RNA, 19 nt, Artificial Sequence
  Synthetic
cucacaaccuagggaggau

SEQ ID NO: 364921 - RNA, 20 nt, Artificial Sequence
  Synthetic
gcucacaaccuagggaggau

SEQ ID NO: 364922 - RNA, 21 nt, Artificial Sequence
  Synthetic
ggcucacaaccuagggaggau

SEQ ID NO: 364923 - RNA, 22 nt, Artificial Sequence
  Synthetic
aggcucacaaccuagggaggau

SEQ ID NO: 364924 - RNA, 23 nt, Artificial Sequence
  Synthetic
aaggcucacaaccuagggaggau

SEQ ID NO: 364925 - RNA, 24 nt, Artificial Sequence
  Synthetic
caaggcucacaaccuagggaggau

SEQ ID NO: 364926 - RNA, 18 nt, Artificial Sequence
  Synthetic
acagauggucuggaggau

SEQ ID NO: 364927 - RNA, 19 nt, Artificial Sequence
  Synthetic
cacagauggucuggaggau

SEQ ID NO: 364928 - RNA, 20 nt, Artificial Sequence
  Synthetic
ucacagauggucuggaggau

SEQ ID NO: 364929 - RNA, 21 nt, Artificial Sequence
  Synthetic
uucacagauggucuggaggau

SEQ ID NO: 364930 - RNA, 22 nt, Artificial Sequence
  Synthetic
auucacagauggucuggaggau

SEQ ID NO: 364931 - RNA, 23 nt, Artificial Sequence
  Synthetic
uauucacagauggucuggaggau

SEQ ID NO: 364932 - RNA, 24 nt, Artificial Sequence
  Synthetic
auauucacagauggucuggaggau

SEQ ID NO: 364933 - RNA, 18 nt, Artificial Sequence
  Synthetic
guguguguuguggaggau

SEQ ID NO: 364934 - RNA, 19 nt, Artificial Sequence
  Synthetic
uguguguguuguggaggau

SEQ ID NO: 364935 - RNA, 20 nt, Artificial Sequence
  Synthetic
guguguguguuguggaggau

SEQ ID NO: 364936 - RNA, 21 nt, Artificial Sequence
  Synthetic
uguguguguguuguggaggau

SEQ ID NO: 364937 - RNA, 22 nt, Artificial Sequence
  Synthetic
guguguguguguuguggaggau

SEQ ID NO: 364938 - RNA, 23 nt, Artificial Sequence
  Synthetic
uguguguguguguuguggaggau

SEQ ID NO: 364939 - RNA, 24 nt, Artificial Sequence
  Synthetic
guguguguguguguuguggaggau

SEQ ID NO: 364940 - RNA, 18 nt, Artificial Sequence
  Synthetic
guagaaagagaugaggau

SEQ ID NO: 364941 - RNA, 19 nt, Artificial Sequence
  Synthetic
gguagaaagagaugaggau

SEQ ID NO: 364942 - RNA, 20 nt, Artificial Sequence
  Synthetic
ggguagaaagagaugaggau

SEQ ID NO: 364943 - RNA, 21 nt, Artificial Sequence
  Synthetic
aggguagaaagagaugaggau

SEQ ID NO: 364944 - RNA, 22 nt, Artificial Sequence
  Synthetic
aaggguagaaagagaugaggau

SEQ ID NO: 364945 - RNA, 23 nt, Artificial Sequence
  Synthetic
gaaggguagaaagagaugaggau

SEQ ID NO: 364946 - RNA, 24 nt, Artificial Sequence
  Synthetic
ggaaggguagaaagagaugaggau

SEQ ID NO: 364947 - RNA, 18 nt, Artificial Sequence
  Synthetic
ucuaaaagaccugaggau

SEQ ID NO: 364948 - RNA, 19 nt, Artificial Sequence
  Synthetic
uucuaaaagaccugaggau

SEQ ID NO: 364949 - RNA, 20 nt, Artificial Sequence
  Synthetic
auucuaaaagaccugaggau

SEQ ID NO: 364950 - RNA, 21 nt, Artificial Sequence
  Synthetic
aauucuaaaagaccugaggau

SEQ ID NO: 364951 - RNA, 22 nt, Artificial Sequence
  Synthetic
aaauucuaaaagaccugaggau

SEQ ID NO: 364952 - RNA, 23 nt, Artificial Sequence
  Synthetic
caaauucuaaaagaccugaggau

SEQ ID NO: 364953 - RNA, 24 nt, Artificial Sequence
  Synthetic
gcaaauucuaaaagaccugaggau

SEQ ID NO: 364954 - RNA, 18 nt, Artificial Sequence
  Synthetic
acaggugcuggugaggau

SEQ ID NO: 364955 - RNA, 19 nt, Artificial Sequence
  Synthetic
aacaggugcuggugaggau

SEQ ID NO: 364956 - RNA, 20 nt, Artificial Sequence
  Synthetic
caacaggugcuggugaggau

SEQ ID NO: 364957 - RNA, 21 nt, Artificial Sequence
  Synthetic
acaacaggugcuggugaggau

SEQ ID NO: 364958 - RNA, 22 nt, Artificial Sequence
  Synthetic
aacaacaggugcuggugaggau

SEQ ID NO: 364959 - RNA, 23 nt, Artificial Sequence
  Synthetic
aaacaacaggugcuggugaggau

SEQ ID NO: 364960 - RNA, 24 nt, Artificial Sequence
  Synthetic
gaaacaacaggugcuggugaggau

SEQ ID NO: 364961 - RNA, 18 nt, Artificial Sequence
  Synthetic
aggugagugugugaggau

SEQ ID NO: 364962 - RNA, 19 nt, Artificial Sequence
  Synthetic
aaggugagugugugaggau

SEQ ID NO: 364963 - RNA, 20 nt, Artificial Sequence
  Synthetic
uaaggugagugugugaggau

SEQ ID NO: 364964 - RNA, 21 nt, Artificial Sequence
  Synthetic
cuaaggugagugugugaggau

SEQ ID NO: 364965 - RNA, 22 nt, Artificial Sequence
  Synthetic
ccuaaggugagugugugaggau

SEQ ID NO: 364966 - RNA, 23 nt, Artificial Sequence
  Synthetic
accuaaggugagugugugaggau

SEQ ID NO: 364967 - RNA, 24 nt, Artificial Sequence
  Synthetic
uaccuaaggugagugugugaggau

SEQ ID NO: 364968 - RNA, 18 nt, Artificial Sequence
  Synthetic
agaaauguuguugaggau

SEQ ID NO: 364969 - RNA, 19 nt, Artificial Sequence
  Synthetic
aagaaauguuguugaggau

SEQ ID NO: 364970 - RNA, 20 nt, Artificial Sequence
  Synthetic
uaagaaauguuguugaggau

SEQ ID NO: 364971 - RNA, 21 nt, Artificial Sequence
  Synthetic
auaagaaauguuguugaggau

SEQ ID NO: 364972 - RNA, 22 nt, Artificial Sequence
  Synthetic
gauaagaaauguuguugaggau

SEQ ID NO: 364973 - RNA, 23 nt, Artificial Sequence
  Synthetic
agauaagaaauguuguugaggau

SEQ ID NO: 364974 - RNA, 24 nt, Artificial Sequence
  Synthetic
gagauaagaaauguuguugaggau

SEQ ID NO: 364975 - RNA, 18 nt, Artificial Sequence
  Synthetic
aaguaggauaaauaggau

SEQ ID NO: 364976 - RNA, 19 nt, Artificial Sequence
  Synthetic
gaaguaggauaaauaggau

SEQ ID NO: 364977 - RNA, 20 nt, Artificial Sequence
  Synthetic
ugaaguaggauaaauaggau

SEQ ID NO: 364978 - RNA, 21 nt, Artificial Sequence
  Synthetic
uugaaguaggauaaauaggau

SEQ ID NO: 364979 - RNA, 22 nt, Artificial Sequence
  Synthetic
uuugaaguaggauaaauaggau

SEQ ID NO: 364980 - RNA, 23 nt, Artificial Sequence
  Synthetic
auuugaaguaggauaaauaggau

SEQ ID NO: 364981 - RNA, 24 nt, Artificial Sequence
  Synthetic
gauuugaaguaggauaaauaggau

SEQ ID NO: 364982 - RNA, 18 nt, Artificial Sequence
  Synthetic
auugugugacuauaggau

SEQ ID NO: 364983 - RNA, 19 nt, Artificial Sequence
  Synthetic
uauugugugacuauaggau

SEQ ID NO: 364984 - RNA, 20 nt, Artificial Sequence
  Synthetic
cuauugugugacuauaggau

SEQ ID NO: 364985 - RNA, 21 nt, Artificial Sequence
  Synthetic
gcuauugugugacuauaggau

SEQ ID NO: 364986 - RNA, 22 nt, Artificial Sequence
  Synthetic
ggcuauugugugacuauaggau

SEQ ID NO: 364987 - RNA, 23 nt, Artificial Sequence
  Synthetic
uggcuauugugugacuauaggau

SEQ ID NO: 364988 - RNA, 24 nt, Artificial Sequence
  Synthetic
cuggcuauugugugacuauaggau

SEQ ID NO: 364989 - RNA, 18 nt, Artificial Sequence
  Synthetic
accugcaaagccuaggau

SEQ ID NO: 364990 - RNA, 19 nt, Artificial Sequence
  Synthetic
uaccugcaaagccuaggau

SEQ ID NO: 364991 - RNA, 20 nt, Artificial Sequence
  Synthetic
uuaccugcaaagccuaggau

SEQ ID NO: 364992 - RNA, 21 nt, Artificial Sequence
  Synthetic
auuaccugcaaagccuaggau

SEQ ID NO: 364993 - RNA, 22 nt, Artificial Sequence
  Synthetic
uauuaccugcaaagccuaggau

SEQ ID NO: 364994 - RNA, 23 nt, Artificial Sequence
  Synthetic
guauuaccugcaaagccuaggau

SEQ ID NO: 364995 - RNA, 24 nt, Artificial Sequence
  Synthetic
aguauuaccugcaaagccuaggau

SEQ ID NO: 364996 - RNA, 18 nt, Artificial Sequence
  Synthetic
gucaauucaugcuaggau

SEQ ID NO: 364997 - RNA, 19 nt, Artificial Sequence
  Synthetic
agucaauucaugcuaggau

SEQ ID NO: 364998 - RNA, 20 nt, Artificial Sequence
  Synthetic
uagucaauucaugcuaggau

SEQ ID NO: 364999 - RNA, 21 nt, Artificial Sequence
  Synthetic
auagucaauucaugcuaggau

SEQ ID NO: 365000 - RNA, 22 nt, Artificial Sequence
  Synthetic
aauagucaauucaugcuaggau

SEQ ID NO: 365001 - RNA, 23 nt, Artificial Sequence
  Synthetic
aaauagucaauucaugcuaggau

SEQ ID NO: 365002 - RNA, 24 nt, Artificial Sequence
  Synthetic
gaaauagucaauucaugcuaggau

SEQ ID NO: 365003 - RNA, 18 nt, Artificial Sequence
  Synthetic
caggaaaaaaaguaggau

SEQ ID NO: 365004 - RNA, 19 nt, Artificial Sequence
  Synthetic
ucaggaaaaaaaguaggau

SEQ ID NO: 365005 - RNA, 20 nt, Artificial Sequence
  Synthetic
cucaggaaaaaaaguaggau

SEQ ID NO: 365006 - RNA, 21 nt, Artificial Sequence
  Synthetic
gcucaggaaaaaaaguaggau

SEQ ID NO: 365007 - RNA, 22 nt, Artificial Sequence
  Synthetic
ugcucaggaaaaaaaguaggau

SEQ ID NO: 365008 - RNA, 23 nt, Artificial Sequence
  Synthetic
augcucaggaaaaaaaguaggau

SEQ ID NO: 365009 - RNA, 24 nt, Artificial Sequence
  Synthetic
aaugcucaggaaaaaaaguaggau

SEQ ID NO: 365010 - RNA, 18 nt, Artificial Sequence
  Synthetic
gguacauaacaguaggau

SEQ ID NO: 365011 - RNA, 19 nt, Artificial Sequence
  Synthetic
ugguacauaacaguaggau

SEQ ID NO: 365012 - RNA, 20 nt, Artificial Sequence
  Synthetic
augguacauaacaguaggau

SEQ ID NO: 365013 - RNA, 21 nt, Artificial Sequence
  Synthetic
caugguacauaacaguaggau

SEQ ID NO: 365014 - RNA, 22 nt, Artificial Sequence
  Synthetic
acaugguacauaacaguaggau

SEQ ID NO: 365015 - RNA, 23 nt, Artificial Sequence
  Synthetic
cacaugguacauaacaguaggau

SEQ ID NO: 365016 - RNA, 24 nt, Artificial Sequence
  Synthetic
acacaugguacauaacaguaggau

SEQ ID NO: 365017 - RNA, 18 nt, Artificial Sequence
  Synthetic
uguaaguuacgguaggau

SEQ ID NO: 365018 - RNA, 19 nt, Artificial Sequence
  Synthetic
auguaaguuacgguaggau

SEQ ID NO: 365019 - RNA, 20 nt, Artificial Sequence
  Synthetic
aauguaaguuacgguaggau

SEQ ID NO: 365020 - RNA, 21 nt, Artificial Sequence
  Synthetic
gaauguaaguuacgguaggau

SEQ ID NO: 365021 - RNA, 22 nt, Artificial Sequence
  Synthetic
agaauguaaguuacgguaggau

SEQ ID NO: 365022 - RNA, 23 nt, Artificial Sequence
  Synthetic
uagaauguaaguuacgguaggau

SEQ ID NO: 365023 - RNA, 24 nt, Artificial Sequence
  Synthetic
cuagaauguaaguuacgguaggau

SEQ ID NO: 365024 - RNA, 18 nt, Artificial Sequence
  Synthetic
gaaggugguuauuaggau

SEQ ID NO: 365025 - RNA, 19 nt, Artificial Sequence
  Synthetic
ggaaggugguuauuaggau

SEQ ID NO: 365026 - RNA, 20 nt, Artificial Sequence
  Synthetic
uggaaggugguuauuaggau

SEQ ID NO: 365027 - RNA, 21 nt, Artificial Sequence
  Synthetic
uuggaaggugguuauuaggau

SEQ ID NO: 365028 - RNA, 22 nt, Artificial Sequence
  Synthetic
cuuggaaggugguuauuaggau

SEQ ID NO: 365029 - RNA, 23 nt, Artificial Sequence
  Synthetic
ucuuggaaggugguuauuaggau

SEQ ID NO: 365030 - RNA, 24 nt, Artificial Sequence
  Synthetic
aucuuggaaggugguuauuaggau

SEQ ID NO: 365031 - RNA, 18 nt, Artificial Sequence
  Synthetic
uauacuuuuccuuaggau

SEQ ID NO: 365032 - RNA, 19 nt, Artificial Sequence
  Synthetic
guauacuuuuccuuaggau

SEQ ID NO: 365033 - RNA, 20 nt, Artificial Sequence
  Synthetic
aguauacuuuuccuuaggau

SEQ ID NO: 365034 - RNA, 21 nt, Artificial Sequence
  Synthetic
aaguauacuuuuccuuaggau

SEQ ID NO: 365035 - RNA, 22 nt, Artificial Sequence
  Synthetic
caaguauacuuuuccuuaggau

SEQ ID NO: 365036 - RNA, 23 nt, Artificial Sequence
  Synthetic
acaaguauacuuuuccuuaggau

SEQ ID NO: 365037 - RNA, 24 nt, Artificial Sequence
  Synthetic
uacaaguauacuuuuccuuaggau

SEQ ID NO: 365038 - RNA, 18 nt, Artificial Sequence
  Synthetic
caagcuaaacaaccggau

SEQ ID NO: 365039 - RNA, 19 nt, Artificial Sequence
  Synthetic
ucaagcuaaacaaccggau

SEQ ID NO: 365040 - RNA, 20 nt, Artificial Sequence
  Synthetic
uucaagcuaaacaaccggau

SEQ ID NO: 365041 - RNA, 21 nt, Artificial Sequence
  Synthetic
guucaagcuaaacaaccggau

SEQ ID NO: 365042 - RNA, 22 nt, Artificial Sequence
  Synthetic
aguucaagcuaaacaaccggau

SEQ ID NO: 365043 - RNA, 23 nt, Artificial Sequence
  Synthetic
caguucaagcuaaacaaccggau

SEQ ID NO: 365044 - RNA, 24 nt, Artificial Sequence
  Synthetic
gcaguucaagcuaaacaaccggau

SEQ ID NO: 365045 - RNA, 18 nt, Artificial Sequence
  Synthetic
caucuccauucugcggau

SEQ ID NO: 365046 - RNA, 19 nt, Artificial Sequence
  Synthetic
ucaucuccauucugcggau

SEQ ID NO: 365047 - RNA, 20 nt, Artificial Sequence
  Synthetic
aucaucuccauucugcggau

SEQ ID NO: 365048 - RNA, 21 nt, Artificial Sequence
  Synthetic
uaucaucuccauucugcggau

SEQ ID NO: 365049 - RNA, 22 nt, Artificial Sequence
  Synthetic
uuaucaucuccauucugcggau

SEQ ID NO: 365050 - RNA, 23 nt, Artificial Sequence
  Synthetic
auuaucaucuccauucugcggau

SEQ ID NO: 365051 - RNA, 24 nt, Artificial Sequence
  Synthetic
uauuaucaucuccauucugcggau

SEQ ID NO: 365052 - RNA, 18 nt, Artificial Sequence
  Synthetic
uacgccaagaaaagggau

SEQ ID NO: 365053 - RNA, 19 nt, Artificial Sequence
  Synthetic
auacgccaagaaaagggau

SEQ ID NO: 365054 - RNA, 20 nt, Artificial Sequence
  Synthetic
aauacgccaagaaaagggau

SEQ ID NO: 365055 - RNA, 21 nt, Artificial Sequence
  Synthetic
caauacgccaagaaaagggau

SEQ ID NO: 365056 - RNA, 22 nt, Artificial Sequence
  Synthetic
gcaauacgccaagaaaagggau

SEQ ID NO: 365057 - RNA, 23 nt, Artificial Sequence
  Synthetic
ggcaauacgccaagaaaagggau

SEQ ID NO: 365058 - RNA, 24 nt, Artificial Sequence
  Synthetic
aggcaauacgccaagaaaagggau

SEQ ID NO: 365059 - RNA, 18 nt, Artificial Sequence
  Synthetic
cagugacugcaaagggau

SEQ ID NO: 365060 - RNA, 19 nt, Artificial Sequence
  Synthetic
gcagugacugcaaagggau

SEQ ID NO: 365061 - RNA, 20 nt, Artificial Sequence
  Synthetic
ggcagugacugcaaagggau

SEQ ID NO: 365062 - RNA, 21 nt, Artificial Sequence
  Synthetic
aggcagugacugcaaagggau

SEQ ID NO: 365063 - RNA, 22 nt, Artificial Sequence
  Synthetic
gaggcagugacugcaaagggau

SEQ ID NO: 365064 - RNA, 23 nt, Artificial Sequence
  Synthetic
ggaggcagugacugcaaagggau

SEQ ID NO: 365065 - RNA, 24 nt, Artificial Sequence
  Synthetic
uggaggcagugacugcaaagggau

SEQ ID NO: 365066 - RNA, 18 nt, Artificial Sequence
  Synthetic
auccaacuuacaagggau

SEQ ID NO: 365067 - RNA, 19 nt, Artificial Sequence
  Synthetic
aauccaacuuacaagggau

SEQ ID NO: 365068 - RNA, 20 nt, Artificial Sequence
  Synthetic
gaauccaacuuacaagggau

SEQ ID NO: 365069 - RNA, 18 nt, Artificial Sequence
  Synthetic
augcaacuuacaagggau

SEQ ID NO: 365070 - RNA, 19 nt, Artificial Sequence
  Synthetic
aaugcaacuuacaagggau

SEQ ID NO: 365071 - RNA, 20 nt, Artificial Sequence
  Synthetic
gaaugcaacuuacaagggau

SEQ ID NO: 365072 - RNA, 21 nt, Artificial Sequence
  Synthetic
ggaaugcaacuuacaagggau

SEQ ID NO: 365073 - RNA, 22 nt, Artificial Sequence
  Synthetic
aggaaugcaacuuacaagggau

SEQ ID NO: 365074 - RNA, 23 nt, Artificial Sequence
  Synthetic
uaggaaugcaacuuacaagggau

SEQ ID NO: 365075 - RNA, 24 nt, Artificial Sequence
  Synthetic
cuaggaaugcaacuuacaagggau

SEQ ID NO: 365076 - RNA, 18 nt, Artificial Sequence
  Synthetic
ugaauugaagcaagggau

SEQ ID NO: 365077 - RNA, 19 nt, Artificial Sequence
  Synthetic
cugaauugaagcaagggau

SEQ ID NO: 365078 - RNA, 20 nt, Artificial Sequence
  Synthetic
gcugaauugaagcaagggau

SEQ ID NO: 365079 - RNA, 21 nt, Artificial Sequence
  Synthetic
cgcugaauugaagcaagggau

SEQ ID NO: 365080 - RNA, 22 nt, Artificial Sequence
  Synthetic
acgcugaauugaagcaagggau

SEQ ID NO: 365081 - RNA, 23 nt, Artificial Sequence
  Synthetic
cacgcugaauugaagcaagggau

SEQ ID NO: 365082 - RNA, 24 nt, Artificial Sequence
  Synthetic
acacgcugaauugaagcaagggau

SEQ ID NO: 365083 - RNA, 18 nt, Artificial Sequence
  Synthetic
uaccaggccucaagggau

SEQ ID NO: 365084 - RNA, 19 nt, Artificial Sequence
  Synthetic
uuaccaggccucaagggau

SEQ ID NO: 365085 - RNA, 20 nt, Artificial Sequence
  Synthetic
uuuaccaggccucaagggau

SEQ ID NO: 365086 - RNA, 21 nt, Artificial Sequence
  Synthetic
cuuuaccaggccucaagggau

SEQ ID NO: 365087 - RNA, 22 nt, Artificial Sequence
  Synthetic
acuuuaccaggccucaagggau

SEQ ID NO: 365088 - RNA, 23 nt, Artificial Sequence
  Synthetic
aacuuuaccaggccucaagggau

SEQ ID NO: 365089 - RNA, 24 nt, Artificial Sequence
  Synthetic
aaacuuuaccaggccucaagggau

SEQ ID NO: 365090 - RNA, 18 nt, Artificial Sequence
  Synthetic
auacaacuuagaagggau

SEQ ID NO: 365091 - RNA, 19 nt, Artificial Sequence
  Synthetic
aauacaacuuagaagggau

SEQ ID NO: 365092 - RNA, 20 nt, Artificial Sequence
  Synthetic
gaauacaacuuagaagggau

SEQ ID NO: 365093 - RNA, 21 nt, Artificial Sequence
  Synthetic
ggaauacaacuuagaagggau

SEQ ID NO: 365094 - RNA, 22 nt, Artificial Sequence
  Synthetic
aggaauacaacuuagaagggau

SEQ ID NO: 365095 - RNA, 23 nt, Artificial Sequence
  Synthetic
uaggaauacaacuuagaagggau

SEQ ID NO: 365096 - RNA, 24 nt, Artificial Sequence
  Synthetic
cuaggaauacaacuuagaagggau

SEQ ID NO: 365097 - RNA, 18 nt, Artificial Sequence
  Synthetic
uggagacucugaagggau

SEQ ID NO: 365098 - RNA, 19 nt, Artificial Sequence
  Synthetic
auggagacucugaagggau

SEQ ID NO: 365099 - RNA, 20 nt, Artificial Sequence
  Synthetic
aauggagacucugaagggau

SEQ ID NO: 365100 - RNA, 21 nt, Artificial Sequence
  Synthetic
aaauggagacucugaagggau

SEQ ID NO: 365101 - RNA, 22 nt, Artificial Sequence
  Synthetic
aaaauggagacucugaagggau

SEQ ID NO: 365102 - RNA, 23 nt, Artificial Sequence
  Synthetic
gaaaauggagacucugaagggau

SEQ ID NO: 365103 - RNA, 24 nt, Artificial Sequence
  Synthetic
agaaaauggagacucugaagggau

SEQ ID NO: 365104 - RNA, 18 nt, Artificial Sequence
  Synthetic
cucauaguaguaagggau

SEQ ID NO: 365105 - RNA, 19 nt, Artificial Sequence
  Synthetic
ccucauaguaguaagggau

SEQ ID NO: 365106 - RNA, 20 nt, Artificial Sequence
  Synthetic
uccucauaguaguaagggau

SEQ ID NO: 365107 - RNA, 21 nt, Artificial Sequence
  Synthetic
uuccucauaguaguaagggau

SEQ ID NO: 365108 - RNA, 22 nt, Artificial Sequence
  Synthetic
cuuccucauaguaguaagggau

SEQ ID NO: 365109 - RNA, 23 nt, Artificial Sequence
  Synthetic
gcuuccucauaguaguaagggau

SEQ ID NO: 365110 - RNA, 24 nt, Artificial Sequence
  Synthetic
ugcuuccucauaguaguaagggau

SEQ ID NO: 365111 - RNA, 18 nt, Artificial Sequence
  Synthetic
uucuggggggacagggau

SEQ ID NO: 365112 - RNA, 19 nt, Artificial Sequence
  Synthetic
uuucuggggggacagggau

SEQ ID NO: 365113 - RNA, 20 nt, Artificial Sequence
  Synthetic
cuuucuggggggacagggau

SEQ ID NO: 365114 - RNA, 21 nt, Artificial Sequence
  Synthetic
acuuucuggggggacagggau

SEQ ID NO: 365115 - RNA, 22 nt, Artificial Sequence
  Synthetic
aacuuucuggggggacagggau

SEQ ID NO: 365116 - RNA, 23 nt, Artificial Sequence
  Synthetic
caacuuucuggggggacagggau

SEQ ID NO: 365117 - RNA, 24 nt, Artificial Sequence
  Synthetic
ccaacuuucuggggggacagggau

SEQ ID NO: 365118 - RNA, 18 nt, Artificial Sequence
  Synthetic
aggcccauauucagggau

SEQ ID NO: 365119 - RNA, 19 nt, Artificial Sequence
  Synthetic
caggcccauauucagggau

SEQ ID NO: 365120 - RNA, 20 nt, Artificial Sequence
  Synthetic
gcaggcccauauucagggau

SEQ ID NO: 365121 - RNA, 21 nt, Artificial Sequence
  Synthetic
ggcaggcccauauucagggau

SEQ ID NO: 365122 - RNA, 22 nt, Artificial Sequence
  Synthetic
aggcaggcccauauucagggau

SEQ ID NO: 365123 - RNA, 23 nt, Artificial Sequence
  Synthetic
aaggcaggcccauauucagggau

SEQ ID NO: 365124 - RNA, 24 nt, Artificial Sequence
  Synthetic
caaggcaggcccauauucagggau

SEQ ID NO: 365125 - RNA, 18 nt, Artificial Sequence
  Synthetic
auugaacuuacgagggau

SEQ ID NO: 365126 - RNA, 19 nt, Artificial Sequence
  Synthetic
gauugaacuuacgagggau

SEQ ID NO: 365127 - RNA, 20 nt, Artificial Sequence
  Synthetic
agauugaacuuacgagggau

SEQ ID NO: 365128 - RNA, 21 nt, Artificial Sequence
  Synthetic
cagauugaacuuacgagggau

SEQ ID NO: 365129 - RNA, 22 nt, Artificial Sequence
  Synthetic
ccagauugaacuuacgagggau

SEQ ID NO: 365130 - RNA, 23 nt, Artificial Sequence
  Synthetic
uccagauugaacuuacgagggau

SEQ ID NO: 365131 - RNA, 24 nt, Artificial Sequence
  Synthetic
uuccagauugaacuuacgagggau

SEQ ID NO: 365132 - RNA, 18 nt, Artificial Sequence
  Synthetic
uaugauacuacuagggau

SEQ ID NO: 365133 - RNA, 19 nt, Artificial Sequence
  Synthetic
guaugauacuacuagggau

SEQ ID NO: 365134 - RNA, 20 nt, Artificial Sequence
  Synthetic
uguaugauacuacuagggau

SEQ ID NO: 365135 - RNA, 21 nt, Artificial Sequence
  Synthetic
auguaugauacuacuagggau

SEQ ID NO: 365136 - RNA, 22 nt, Artificial Sequence
  Synthetic
aauguaugauacuacuagggau

SEQ ID NO: 365137 - RNA, 23 nt, Artificial Sequence
  Synthetic
gaauguaugauacuacuagggau

SEQ ID NO: 365138 - RNA, 24 nt, Artificial Sequence
  Synthetic
ugaauguaugauacuacuagggau

SEQ ID NO: 365139 - RNA, 18 nt, Artificial Sequence
  Synthetic
aauaaaauaucuagggau

SEQ ID NO: 365140 - RNA, 19 nt, Artificial Sequence
  Synthetic
aaauaaaauaucuagggau

SEQ ID NO: 365141 - RNA, 20 nt, Artificial Sequence
  Synthetic
aaaauaaaauaucuagggau

SEQ ID NO: 365142 - RNA, 21 nt, Artificial Sequence
  Synthetic
uaaaauaaaauaucuagggau

SEQ ID NO: 365143 - RNA, 22 nt, Artificial Sequence
  Synthetic
auaaaauaaaauaucuagggau

SEQ ID NO: 365144 - RNA, 23 nt, Artificial Sequence
  Synthetic
uauaaaauaaaauaucuagggau

SEQ ID NO: 365145 - RNA, 24 nt, Artificial Sequence
  Synthetic
cuauaaaauaaaauaucuagggau

SEQ ID NO: 365146 - RNA, 18 nt, Artificial Sequence
  Synthetic
cuauggagcucuagggau

SEQ ID NO: 365147 - RNA, 19 nt, Artificial Sequence
  Synthetic
ucuauggagcucuagggau

SEQ ID NO: 365148 - RNA, 20 nt, Artificial Sequence
  Synthetic
cucuauggagcucuagggau

SEQ ID NO: 365149 - RNA, 21 nt, Artificial Sequence
  Synthetic
ucucuauggagcucuagggau

SEQ ID NO: 365150 - RNA, 22 nt, Artificial Sequence
  Synthetic
uucucuauggagcucuagggau

SEQ ID NO: 365151 - RNA, 23 nt, Artificial Sequence
  Synthetic
auucucuauggagcucuagggau

SEQ ID NO: 365152 - RNA, 24 nt, Artificial Sequence
  Synthetic
cauucucuauggagcucuagggau

SEQ ID NO: 365153 - RNA, 18 nt, Artificial Sequence
  Synthetic
uucgagaaauuuagggau

SEQ ID NO: 365154 - RNA, 19 nt, Artificial Sequence
  Synthetic
guucgagaaauuuagggau

SEQ ID NO: 365155 - RNA, 20 nt, Artificial Sequence
  Synthetic
aguucgagaaauuuagggau

SEQ ID NO: 365156 - RNA, 21 nt, Artificial Sequence
  Synthetic
gaguucgagaaauuuagggau

SEQ ID NO: 365157 - RNA, 22 nt, Artificial Sequence
  Synthetic
ugaguucgagaaauuuagggau

SEQ ID NO: 365158 - RNA, 23 nt, Artificial Sequence
  Synthetic
augaguucgagaaauuuagggau

SEQ ID NO: 365159 - RNA, 24 nt, Artificial Sequence
  Synthetic
aaugaguucgagaaauuuagggau

SEQ ID NO: 365160 - RNA, 18 nt, Artificial Sequence
  Synthetic
guugcaugacaacgggau

SEQ ID NO: 365161 - RNA, 19 nt, Artificial Sequence
  Synthetic
uguugcaugacaacgggau

SEQ ID NO: 365162 - RNA, 20 nt, Artificial Sequence
  Synthetic
guguugcaugacaacgggau

SEQ ID NO: 365163 - RNA, 21 nt, Artificial Sequence
  Synthetic
aguguugcaugacaacgggau

SEQ ID NO: 365164 - RNA, 22 nt, Artificial Sequence
  Synthetic
aaguguugcaugacaacgggau

SEQ ID NO: 365165 - RNA, 23 nt, Artificial Sequence
  Synthetic
aaaguguugcaugacaacgggau

SEQ ID NO: 365166 - RNA, 24 nt, Artificial Sequence
  Synthetic
caaaguguugcaugacaacgggau

SEQ ID NO: 365167 - RNA, 18 nt, Artificial Sequence
  Synthetic
gcucugauucaaggggau

SEQ ID NO: 365168 - RNA, 19 nt, Artificial Sequence
  Synthetic
agcucugauucaaggggau

SEQ ID NO: 365169 - RNA, 20 nt, Artificial Sequence
  Synthetic
gagcucugauucaaggggau

SEQ ID NO: 365170 - RNA, 21 nt, Artificial Sequence
  Synthetic
agagcucugauucaaggggau

SEQ ID NO: 365171 - RNA, 22 nt, Artificial Sequence
  Synthetic
cagagcucugauucaaggggau

SEQ ID NO: 365172 - RNA, 23 nt, Artificial Sequence
  Synthetic
acagagcucugauucaaggggau

SEQ ID NO: 365173 - RNA, 24 nt, Artificial Sequence
  Synthetic
gacagagcucugauucaaggggau

SEQ ID NO: 365174 - RNA, 18 nt, Artificial Sequence
  Synthetic
ugucaccaucagggggau

SEQ ID NO: 365175 - RNA, 19 nt, Artificial Sequence
  Synthetic
augucaccaucagggggau

SEQ ID NO: 365176 - RNA, 20 nt, Artificial Sequence
  Synthetic
gaugucaccaucagggggau

SEQ ID NO: 365177 - RNA, 21 nt, Artificial Sequence
  Synthetic
agaugucaccaucagggggau

SEQ ID NO: 365178 - RNA, 22 nt, Artificial Sequence
  Synthetic
gagaugucaccaucagggggau

SEQ ID NO: 365179 - RNA, 23 nt, Artificial Sequence
  Synthetic
ggagaugucaccaucagggggau

SEQ ID NO: 365180 - RNA, 24 nt, Artificial Sequence
  Synthetic
aggagaugucaccaucagggggau

SEQ ID NO: 365181 - RNA, 18 nt, Artificial Sequence
  Synthetic
guguugggggggggggau

SEQ ID NO: 365182 - RNA, 19 nt, Artificial Sequence
  Synthetic
uguguugggggggggggau

SEQ ID NO: 365183 - RNA, 20 nt, Artificial Sequence
  Synthetic
guguguugggggggggggau

SEQ ID NO: 365184 - RNA, 21 nt, Artificial Sequence
  Synthetic
uguguguugggggggggggau

SEQ ID NO: 365185 - RNA, 22 nt, Artificial Sequence
  Synthetic
guguguguugggggggggggau

SEQ ID NO: 365186 - RNA, 23 nt, Artificial Sequence
  Synthetic
uguguguguugggggggggggau

SEQ ID NO: 365187 - RNA, 24 nt, Artificial Sequence
  Synthetic
guguguguguugggggggggggau

SEQ ID NO: 365188 - RNA, 18 nt, Artificial Sequence
  Synthetic
acacaccaguugggggau

SEQ ID NO: 365189 - RNA, 19 nt, Artificial Sequence
  Synthetic
cacacaccaguugggggau

SEQ ID NO: 365190 - RNA, 20 nt, Artificial Sequence
  Synthetic
ucacacaccaguugggggau

SEQ ID NO: 365191 - RNA, 21 nt, Artificial Sequence
  Synthetic
aucacacaccaguugggggau

SEQ ID NO: 365192 - RNA, 22 nt, Artificial Sequence
  Synthetic
caucacacaccaguugggggau

SEQ ID NO: 365193 - RNA, 23 nt, Artificial Sequence
  Synthetic
acaucacacaccaguugggggau

SEQ ID NO: 365194 - RNA, 24 nt, Artificial Sequence
  Synthetic
aacaucacacaccaguugggggau

SEQ ID NO: 365195 - RNA, 18 nt, Artificial Sequence
  Synthetic
acaggucaaguuggggau

SEQ ID NO: 365196 - RNA, 19 nt, Artificial Sequence
  Synthetic
gacaggucaaguuggggau

SEQ ID NO: 365197 - RNA, 20 nt, Artificial Sequence
  Synthetic
agacaggucaaguuggggau

SEQ ID NO: 365198 - RNA, 21 nt, Artificial Sequence
  Synthetic
uagacaggucaaguuggggau

SEQ ID NO: 365199 - RNA, 22 nt, Artificial Sequence
  Synthetic
uuagacaggucaaguuggggau

SEQ ID NO: 365200 - RNA, 23 nt, Artificial Sequence
  Synthetic
guuagacaggucaaguuggggau

SEQ ID NO: 365201 - RNA, 24 nt, Artificial Sequence
  Synthetic
aguuagacaggucaaguuggggau

SEQ ID NO: 365202 - RNA, 18 nt, Artificial Sequence
  Synthetic
aagaagguaguuggggau

SEQ ID NO: 365203 - RNA, 19 nt, Artificial Sequence
  Synthetic
gaagaagguaguuggggau

SEQ ID NO: 365204 - RNA, 20 nt, Artificial Sequence
  Synthetic
ugaagaagguaguuggggau

SEQ ID NO: 365205 - RNA, 21 nt, Artificial Sequence
  Synthetic
augaagaagguaguuggggau

SEQ ID NO: 365206 - RNA, 22 nt, Artificial Sequence
  Synthetic
gaugaagaagguaguuggggau

SEQ ID NO: 365207 - RNA, 23 nt, Artificial Sequence
  Synthetic
agaugaagaagguaguuggggau

SEQ ID NO: 365208 - RNA, 24 nt, Artificial Sequence
  Synthetic
uagaugaagaagguaguuggggau

SEQ ID NO: 365209 - RNA, 18 nt, Artificial Sequence
  Synthetic
cagagcagaagaugggau

SEQ ID NO: 365210 - RNA, 19 nt, Artificial Sequence
  Synthetic
acagagcagaagaugggau

SEQ ID NO: 365211 - RNA, 20 nt, Artificial Sequence
  Synthetic
uacagagcagaagaugggau

SEQ ID NO: 365212 - RNA, 21 nt, Artificial Sequence
  Synthetic
guacagagcagaagaugggau

SEQ ID NO: 365213 - RNA, 22 nt, Artificial Sequence
  Synthetic
gguacagagcagaagaugggau

SEQ ID NO: 365214 - RNA, 23 nt, Artificial Sequence
  Synthetic
agguacagagcagaagaugggau

SEQ ID NO: 365215 - RNA, 24 nt, Artificial Sequence
  Synthetic
gagguacagagcagaagaugggau

SEQ ID NO: 365216 - RNA, 18 nt, Artificial Sequence
  Synthetic
cugguagcuggaugggau

SEQ ID NO: 365217 - RNA, 19 nt, Artificial Sequence
  Synthetic
ccugguagcuggaugggau

SEQ ID NO: 365218 - RNA, 20 nt, Artificial Sequence
  Synthetic
gccugguagcuggaugggau

SEQ ID NO: 365219 - RNA, 21 nt, Artificial Sequence
  Synthetic
ugccugguagcuggaugggau

SEQ ID NO: 365220 - RNA, 22 nt, Artificial Sequence
  Synthetic
gugccugguagcuggaugggau

SEQ ID NO: 365221 - RNA, 23 nt, Artificial Sequence
  Synthetic
agugccugguagcuggaugggau

SEQ ID NO: 365222 - RNA, 24 nt, Artificial Sequence
  Synthetic
uagugccugguagcuggaugggau

SEQ ID NO: 365223 - RNA, 18 nt, Artificial Sequence
  Synthetic
auaauucagauaugggau

SEQ ID NO: 365224 - RNA, 19 nt, Artificial Sequence
  Synthetic
aauaauucagauaugggau

SEQ ID NO: 365225 - RNA, 20 nt, Artificial Sequence
  Synthetic
aaauaauucagauaugggau

SEQ ID NO: 365226 - RNA, 21 nt, Artificial Sequence
  Synthetic
uaaauaauucagauaugggau

SEQ ID NO: 365227 - RNA, 22 nt, Artificial Sequence
  Synthetic
auaaauaauucagauaugggau

SEQ ID NO: 365228 - RNA, 23 nt, Artificial Sequence
  Synthetic
uauaaauaauucagauaugggau

SEQ ID NO: 365229 - RNA, 24 nt, Artificial Sequence
  Synthetic
auauaaauaauucagauaugggau

SEQ ID NO: 365230 - RNA, 18 nt, Artificial Sequence
  Synthetic
ugagggaaucuaugggau

SEQ ID NO: 365231 - RNA, 19 nt, Artificial Sequence
  Synthetic
augagggaaucuaugggau

SEQ ID NO: 365232 - RNA, 20 nt, Artificial Sequence
  Synthetic
aaugagggaaucuaugggau

SEQ ID NO: 365233 - RNA, 21 nt, Artificial Sequence
  Synthetic
aaaugagggaaucuaugggau

SEQ ID NO: 365234 - RNA, 22 nt, Artificial Sequence
  Synthetic
gaaaugagggaaucuaugggau

SEQ ID NO: 365235 - RNA, 23 nt, Artificial Sequence
  Synthetic
ugaaaugagggaaucuaugggau

SEQ ID NO: 365236 - RNA, 24 nt, Artificial Sequence
  Synthetic
cugaaaugagggaaucuaugggau

SEQ ID NO: 365237 - RNA, 18 nt, Artificial Sequence
  Synthetic
aaagaauaaaacugggau

SEQ ID NO: 365238 - RNA, 19 nt, Artificial Sequence
  Synthetic
caaagaauaaaacugggau

SEQ ID NO: 365239 - RNA, 20 nt, Artificial Sequence
  Synthetic
acaaagaauaaaacugggau

SEQ ID NO: 365240 - RNA, 21 nt, Artificial Sequence
  Synthetic
gacaaagaauaaaacugggau

SEQ ID NO: 365241 - RNA, 22 nt, Artificial Sequence
  Synthetic
ugacaaagaauaaaacugggau

SEQ ID NO: 365242 - RNA, 23 nt, Artificial Sequence
  Synthetic
gugacaaagaauaaaacugggau

SEQ ID NO: 365243 - RNA, 24 nt, Artificial Sequence
  Synthetic
agugacaaagaauaaaacugggau

SEQ ID NO: 365244 - RNA, 18 nt, Artificial Sequence
  Synthetic
cucccaagcagcugggau

SEQ ID NO: 365245 - RNA, 19 nt, Artificial Sequence
  Synthetic
ccucccaagcagcugggau

SEQ ID NO: 365246 - RNA, 20 nt, Artificial Sequence
  Synthetic
gccucccaagcagcugggau

SEQ ID NO: 365247 - RNA, 21 nt, Artificial Sequence
  Synthetic
ggccucccaagcagcugggau

SEQ ID NO: 365248 - RNA, 22 nt, Artificial Sequence
  Synthetic
cggccucccaagcagcugggau

SEQ ID NO: 365249 - RNA, 23 nt, Artificial Sequence
  Synthetic
ucggccucccaagcagcugggau

SEQ ID NO: 365250 - RNA, 24 nt, Artificial Sequence
  Synthetic
cucggccucccaagcagcugggau

SEQ ID NO: 365251 - RNA, 18 nt, Artificial Sequence
  Synthetic
cucccaaguagcugggau

SEQ ID NO: 365252 - RNA, 19 nt, Artificial Sequence
  Synthetic
ccucccaaguagcugggau

SEQ ID NO: 365253 - RNA, 20 nt, Artificial Sequence
  Synthetic
gccucccaaguagcugggau

SEQ ID NO: 365254 - RNA, 21 nt, Artificial Sequence
  Synthetic
agccucccaaguagcugggau

SEQ ID NO: 365255 - RNA, 22 nt, Artificial Sequence
  Synthetic
cagccucccaaguagcugggau

SEQ ID NO: 365256 - RNA, 23 nt, Artificial Sequence
  Synthetic
ucagccucccaaguagcugggau

SEQ ID NO: 365257 - RNA, 24 nt, Artificial Sequence
  Synthetic
cucagccucccaaguagcugggau

SEQ ID NO: 365258 - RNA, 18 nt, Artificial Sequence
  Synthetic
auaagaucuaucugggau

SEQ ID NO: 365259 - RNA, 19 nt, Artificial Sequence
  Synthetic
cauaagaucuaucugggau

SEQ ID NO: 365260 - RNA, 20 nt, Artificial Sequence
  Synthetic
acauaagaucuaucugggau

SEQ ID NO: 365261 - RNA, 21 nt, Artificial Sequence
  Synthetic
uacauaagaucuaucugggau

SEQ ID NO: 365262 - RNA, 22 nt, Artificial Sequence
  Synthetic
uuacauaagaucuaucugggau

SEQ ID NO: 365263 - RNA, 23 nt, Artificial Sequence
  Synthetic
uuuacauaagaucuaucugggau

SEQ ID NO: 365264 - RNA, 24 nt, Artificial Sequence
  Synthetic
auuuacauaagaucuaucugggau

SEQ ID NO: 365265 - RNA, 18 nt, Artificial Sequence
  Synthetic
uuuugaaaaaggugggau

SEQ ID NO: 365266 - RNA, 19 nt, Artificial Sequence
  Synthetic
cuuuugaaaaaggugggau

SEQ ID NO: 365267 - RNA, 20 nt, Artificial Sequence
  Synthetic
acuuuugaaaaaggugggau

SEQ ID NO: 365268 - RNA, 21 nt, Artificial Sequence
  Synthetic
uacuuuugaaaaaggugggau

SEQ ID NO: 365269 - RNA, 22 nt, Artificial Sequence
  Synthetic
auacuuuugaaaaaggugggau

SEQ ID NO: 365270 - RNA, 23 nt, Artificial Sequence
  Synthetic
aauacuuuugaaaaaggugggau

SEQ ID NO: 365271 - RNA, 24 nt, Artificial Sequence
  Synthetic
aaauacuuuugaaaaaggugggau

SEQ ID NO: 365272 - RNA, 18 nt, Artificial Sequence
  Synthetic
ucagguugcaauugggau

SEQ ID NO: 365273 - RNA, 19 nt, Artificial Sequence
  Synthetic
aucagguugcaauugggau

SEQ ID NO: 365274 - RNA, 20 nt, Artificial Sequence
  Synthetic
aaucagguugcaauugggau

SEQ ID NO: 365275 - RNA, 21 nt, Artificial Sequence
  Synthetic
caaucagguugcaauugggau

SEQ ID NO: 365276 - RNA, 22 nt, Artificial Sequence
  Synthetic
ucaaucagguugcaauugggau

SEQ ID NO: 365277 - RNA, 23 nt, Artificial Sequence
  Synthetic
cucaaucagguugcaauugggau

SEQ ID NO: 365278 - RNA, 24 nt, Artificial Sequence
  Synthetic
ccucaaucagguugcaauugggau

SEQ ID NO: 365279 - RNA, 18 nt, Artificial Sequence
  Synthetic
agaaaaagaaaaauggau

SEQ ID NO: 365280 - RNA, 19 nt, Artificial Sequence
  Synthetic
aagaaaaagaaaaauggau

SEQ ID NO: 365281 - RNA, 20 nt, Artificial Sequence
  Synthetic
caagaaaaagaaaaauggau

SEQ ID NO: 365282 - RNA, 21 nt, Artificial Sequence
  Synthetic
ucaagaaaaagaaaaauggau

SEQ ID NO: 365283 - RNA, 22 nt, Artificial Sequence
  Synthetic
uucaagaaaaagaaaaauggau

SEQ ID NO: 365284 - RNA, 23 nt, Artificial Sequence
  Synthetic
guucaagaaaaagaaaaauggau

SEQ ID NO: 365285 - RNA, 24 nt, Artificial Sequence
  Synthetic
aguucaagaaaaagaaaaauggau

SEQ ID NO: 365286 - RNA, 18 nt, Artificial Sequence
  Synthetic
uuguuauuucaaauggau

SEQ ID NO: 365287 - RNA, 19 nt, Artificial Sequence
  Synthetic
uuuguuauuucaaauggau

SEQ ID NO: 365288 - RNA, 20 nt, Artificial Sequence
  Synthetic
uuuuguuauuucaaauggau

SEQ ID NO: 365289 - RNA, 21 nt, Artificial Sequence
  Synthetic
cuuuuguuauuucaaauggau

SEQ ID NO: 365290 - RNA, 22 nt, Artificial Sequence
  Synthetic
ucuuuuguuauuucaaauggau

SEQ ID NO: 365291 - RNA, 23 nt, Artificial Sequence
  Synthetic
cucuuuuguuauuucaaauggau

SEQ ID NO: 365292 - RNA, 24 nt, Artificial Sequence
  Synthetic
ucucuuuuguuauuucaaauggau

SEQ ID NO: 365293 - RNA, 18 nt, Artificial Sequence
  Synthetic
cuccaucacacaauggau

SEQ ID NO: 365294 - RNA, 19 nt, Artificial Sequence
  Synthetic
ccuccaucacacaauggau

SEQ ID NO: 365295 - RNA, 20 nt, Artificial Sequence
  Synthetic
gccuccaucacacaauggau

SEQ ID NO: 365296 - RNA, 21 nt, Artificial Sequence
  Synthetic
agccuccaucacacaauggau

SEQ ID NO: 365297 - RNA, 22 nt, Artificial Sequence
  Synthetic
gagccuccaucacacaauggau

SEQ ID NO: 365298 - RNA, 23 nt, Artificial Sequence
  Synthetic
ggagccuccaucacacaauggau

SEQ ID NO: 365299 - RNA, 24 nt, Artificial Sequence
  Synthetic
gggagccuccaucacacaauggau

SEQ ID NO: 365300 - RNA, 18 nt, Artificial Sequence
  Synthetic
aucagcagaucaauggau

SEQ ID NO: 365301 - RNA, 19 nt, Artificial Sequence
  Synthetic
caucagcagaucaauggau

SEQ ID NO: 365302 - RNA, 20 nt, Artificial Sequence
  Synthetic
gcaucagcagaucaauggau

SEQ ID NO: 365303 - RNA, 21 nt, Artificial Sequence
  Synthetic
ggcaucagcagaucaauggau

SEQ ID NO: 365304 - RNA, 22 nt, Artificial Sequence
  Synthetic
aggcaucagcagaucaauggau

SEQ ID NO: 365305 - RNA, 23 nt, Artificial Sequence
  Synthetic
gaggcaucagcagaucaauggau

SEQ ID NO: 365306 - RNA, 24 nt, Artificial Sequence
  Synthetic
ggaggcaucagcagaucaauggau

SEQ ID NO: 365307 - RNA, 18 nt, Artificial Sequence
  Synthetic
ugagacuggguaauggau

SEQ ID NO: 365308 - RNA, 19 nt, Artificial Sequence
  Synthetic
cugagacuggguaauggau

SEQ ID NO: 365309 - RNA, 20 nt, Artificial Sequence
  Synthetic
ccugagacuggguaauggau

SEQ ID NO: 365310 - RNA, 21 nt, Artificial Sequence
  Synthetic
accugagacuggguaauggau

SEQ ID NO: 365311 - RNA, 22 nt, Artificial Sequence
  Synthetic
uaccugagacuggguaauggau

SEQ ID NO: 365312 - RNA, 23 nt, Artificial Sequence
  Synthetic
auaccugagacuggguaauggau

SEQ ID NO: 365313 - RNA, 24 nt, Artificial Sequence
  Synthetic
aauaccugagacuggguaauggau

SEQ ID NO: 365314 - RNA, 18 nt, Artificial Sequence
  Synthetic
gcuuuguauuuaauggau

SEQ ID NO: 365315 - RNA, 19 nt, Artificial Sequence
  Synthetic
ugcuuuguauuuaauggau

SEQ ID NO: 365316 - RNA, 20 nt, Artificial Sequence
  Synthetic
uugcuuuguauuuaauggau

SEQ ID NO: 365317 - RNA, 21 nt, Artificial Sequence
  Synthetic
cuugcuuuguauuuaauggau

SEQ ID NO: 365318 - RNA, 22 nt, Artificial Sequence
  Synthetic
acuugcuuuguauuuaauggau

SEQ ID NO: 365319 - RNA, 23 nt, Artificial Sequence
  Synthetic
cacuugcuuuguauuuaauggau

SEQ ID NO: 365320 - RNA, 24 nt, Artificial Sequence
  Synthetic
ucacuugcuuuguauuuaauggau

SEQ ID NO: 365321 - RNA, 18 nt, Artificial Sequence
  Synthetic
cauuccaugcucauggau

SEQ ID NO: 365322 - RNA, 19 nt, Artificial Sequence
  Synthetic
acauuccaugcucauggau

SEQ ID NO: 365323 - RNA, 20 nt, Artificial Sequence
  Synthetic
aacauuccaugcucauggau

SEQ ID NO: 365324 - RNA, 21 nt, Artificial Sequence
  Synthetic
gaacauuccaugcucauggau

SEQ ID NO: 365325 - RNA, 22 nt, Artificial Sequence
  Synthetic
agaacauuccaugcucauggau

SEQ ID NO: 365326 - RNA, 23 nt, Artificial Sequence
  Synthetic
aagaacauuccaugcucauggau

SEQ ID NO: 365327 - RNA, 24 nt, Artificial Sequence
  Synthetic
gaagaacauuccaugcucauggau

SEQ ID NO: 365328 - RNA, 18 nt, Artificial Sequence
  Synthetic
gcuauguaucucauggau

SEQ ID NO: 365329 - RNA, 19 nt, Artificial Sequence
  Synthetic
ugcuauguaucucauggau

SEQ ID NO: 365330 - RNA, 20 nt, Artificial Sequence
  Synthetic
gugcuauguaucucauggau

SEQ ID NO: 365331 - RNA, 21 nt, Artificial Sequence
  Synthetic
agugcuauguaucucauggau

SEQ ID NO: 365332 - RNA, 22 nt, Artificial Sequence
  Synthetic
aagugcuauguaucucauggau

SEQ ID NO: 365333 - RNA, 23 nt, Artificial Sequence
  Synthetic
aaagugcuauguaucucauggau

SEQ ID NO: 365334 - RNA, 24 nt, Artificial Sequence
  Synthetic
aaaagugcuauguaucucauggau

SEQ ID NO: 365335 - RNA, 18 nt, Artificial Sequence
  Synthetic
uggaaaagaucgauggau

SEQ ID NO: 365336 - RNA, 19 nt, Artificial Sequence
  Synthetic
uuggaaaagaucgauggau

SEQ ID NO: 365337 - RNA, 20 nt, Artificial Sequence
  Synthetic
guuggaaaagaucgauggau

SEQ ID NO: 365338 - RNA, 21 nt, Artificial Sequence
  Synthetic
aguuggaaaagaucgauggau

SEQ ID NO: 365339 - RNA, 22 nt, Artificial Sequence
  Synthetic
gaguuggaaaagaucgauggau

SEQ ID NO: 365340 - RNA, 23 nt, Artificial Sequence
  Synthetic
ugaguuggaaaagaucgauggau

SEQ ID NO: 365341 - RNA, 24 nt, Artificial Sequence
  Synthetic
cugaguuggaaaagaucgauggau

SEQ ID NO: 365342 - RNA, 18 nt, Artificial Sequence
  Synthetic
gggcuacacaggauggau

SEQ ID NO: 365343 - RNA, 19 nt, Artificial Sequence
  Synthetic
agggcuacacaggauggau

SEQ ID NO: 365344 - RNA, 20 nt, Artificial Sequence
  Synthetic
aagggcuacacaggauggau

SEQ ID NO: 365345 - RNA, 21 nt, Artificial Sequence
  Synthetic
gaagggcuacacaggauggau

SEQ ID NO: 365346 - RNA, 22 nt, Artificial Sequence
  Synthetic
agaagggcuacacaggauggau

SEQ ID NO: 365347 - RNA, 23 nt, Artificial Sequence
  Synthetic
uagaagggcuacacaggauggau

SEQ ID NO: 365348 - RNA, 24 nt, Artificial Sequence
  Synthetic
uuagaagggcuacacaggauggau

SEQ ID NO: 365349 - RNA, 18 nt, Artificial Sequence
  Synthetic
auugauugauggauggau

SEQ ID NO: 365350 - RNA, 19 nt, Artificial Sequence
  Synthetic
gauugauugauggauggau

SEQ ID NO: 365351 - RNA, 20 nt, Artificial Sequence
  Synthetic
ugauugauugauggauggau

SEQ ID NO: 365352 - RNA, 21 nt, Artificial Sequence
  Synthetic
augauugauugauggauggau

SEQ ID NO: 365353 - RNA, 22 nt, Artificial Sequence
  Synthetic
uaugauugauugauggauggau

SEQ ID NO: 365354 - RNA, 23 nt, Artificial Sequence
  Synthetic
auaugauugauugauggauggau

SEQ ID NO: 365355 - RNA, 24 nt, Artificial Sequence
  Synthetic
aauaugauugauugauggauggau

SEQ ID NO: 365356 - RNA, 18 nt, Artificial Sequence
  Synthetic
uugaacagaaugauggau

SEQ ID NO: 365357 - RNA, 19 nt, Artificial Sequence
  Synthetic
uuugaacagaaugauggau

SEQ ID NO: 365358 - RNA, 20 nt, Artificial Sequence
  Synthetic
auuugaacagaaugauggau

SEQ ID NO: 365359 - RNA, 21 nt, Artificial Sequence
  Synthetic
aauuugaacagaaugauggau

SEQ ID NO: 365360 - RNA, 22 nt, Artificial Sequence
  Synthetic
caauuugaacagaaugauggau

SEQ ID NO: 365361 - RNA, 23 nt, Artificial Sequence
  Synthetic
gcaauuugaacagaaugauggau

SEQ ID NO: 365362 - RNA, 24 nt, Artificial Sequence
  Synthetic
agcaauuugaacagaaugauggau

SEQ ID NO: 365363 - RNA, 18 nt, Artificial Sequence
  Synthetic
auggguuggacuauggau

SEQ ID NO: 365364 - RNA, 19 nt, Artificial Sequence
  Synthetic
gauggguuggacuauggau

SEQ ID NO: 365365 - RNA, 20 nt, Artificial Sequence
  Synthetic
agauggguuggacuauggau

SEQ ID NO: 365366 - RNA, 21 nt, Artificial Sequence
  Synthetic
aagauggguuggacuauggau

SEQ ID NO: 365367 - RNA, 22 nt, Artificial Sequence
  Synthetic
uaagauggguuggacuauggau

SEQ ID NO: 365368 - RNA, 23 nt, Artificial Sequence
  Synthetic
cuaagauggguuggacuauggau

SEQ ID NO: 365369 - RNA, 24 nt, Artificial Sequence
  Synthetic
ccuaagauggguuggacuauggau

SEQ ID NO: 365370 - RNA, 18 nt, Artificial Sequence
  Synthetic
uuaauuccacuuauggau

SEQ ID NO: 365371 - RNA, 19 nt, Artificial Sequence
  Synthetic
auuaauuccacuuauggau

SEQ ID NO: 365372 - RNA, 20 nt, Artificial Sequence
  Synthetic
uauuaauuccacuuauggau

SEQ ID NO: 365373 - RNA, 21 nt, Artificial Sequence
  Synthetic
uuauuaauuccacuuauggau

SEQ ID NO: 365374 - RNA, 22 nt, Artificial Sequence
  Synthetic
auuauuaauuccacuuauggau

SEQ ID NO: 365375 - RNA, 23 nt, Artificial Sequence
  Synthetic
uauuauuaauuccacuuauggau

SEQ ID NO: 365376 - RNA, 24 nt, Artificial Sequence
  Synthetic
guauuauuaauuccacuuauggau

SEQ ID NO: 365377 - RNA, 18 nt, Artificial Sequence
  Synthetic
auagagccucuuauggau

SEQ ID NO: 365378 - RNA, 19 nt, Artificial Sequence
  Synthetic
uauagagccucuuauggau

SEQ ID NO: 365379 - RNA, 20 nt, Artificial Sequence
  Synthetic
auauagagccucuuauggau

SEQ ID NO: 365380 - RNA, 21 nt, Artificial Sequence
  Synthetic
gauauagagccucuuauggau

SEQ ID NO: 365381 - RNA, 22 nt, Artificial Sequence
  Synthetic
ugauauagagccucuuauggau

SEQ ID NO: 365382 - RNA, 23 nt, Artificial Sequence
  Synthetic
augauauagagccucuuauggau

SEQ ID NO: 365383 - RNA, 24 nt, Artificial Sequence
  Synthetic
gaugauauagagccucuuauggau

SEQ ID NO: 365384 - RNA, 18 nt, Artificial Sequence
  Synthetic
acagguguaguuauggau

SEQ ID NO: 365385 - RNA, 19 nt, Artificial Sequence
  Synthetic
cacagguguaguuauggau

SEQ ID NO: 365386 - RNA, 20 nt, Artificial Sequence
  Synthetic
ccacagguguaguuauggau

SEQ ID NO: 365387 - RNA, 21 nt, Artificial Sequence
  Synthetic
accacagguguaguuauggau

SEQ ID NO: 365388 - RNA, 22 nt, Artificial Sequence
  Synthetic
caccacagguguaguuauggau

SEQ ID NO: 365389 - RNA, 23 nt, Artificial Sequence
  Synthetic
gcaccacagguguaguuauggau

SEQ ID NO: 365390 - RNA, 24 nt, Artificial Sequence
  Synthetic
agcaccacagguguaguuauggau

SEQ ID NO: 365391 - RNA, 18 nt, Artificial Sequence
  Synthetic
ucaagucaugcacuggau

SEQ ID NO: 365392 - RNA, 19 nt, Artificial Sequence
  Synthetic
gucaagucaugcacuggau

SEQ ID NO: 365393 - RNA, 20 nt, Artificial Sequence
  Synthetic
ugucaagucaugcacuggau

SEQ ID NO: 365394 - RNA, 21 nt, Artificial Sequence
  Synthetic
gugucaagucaugcacuggau

SEQ ID NO: 365395 - RNA, 22 nt, Artificial Sequence
  Synthetic
cgugucaagucaugcacuggau

SEQ ID NO: 365396 - RNA, 23 nt, Artificial Sequence
  Synthetic
ccgugucaagucaugcacuggau

SEQ ID NO: 365397 - RNA, 24 nt, Artificial Sequence
  Synthetic
cccgugucaagucaugcacuggau

SEQ ID NO: 365398 - RNA, 18 nt, Artificial Sequence
  Synthetic
guuaaaagaucacuggau

SEQ ID NO: 365399 - RNA, 19 nt, Artificial Sequence
  Synthetic
uguuaaaagaucacuggau

SEQ ID NO: 365400 - RNA, 20 nt, Artificial Sequence
  Synthetic
cuguuaaaagaucacuggau

SEQ ID NO: 365401 - RNA, 21 nt, Artificial Sequence
  Synthetic
acuguuaaaagaucacuggau

SEQ ID NO: 365402 - RNA, 22 nt, Artificial Sequence
  Synthetic
cacuguuaaaagaucacuggau

SEQ ID NO: 365403 - RNA, 23 nt, Artificial Sequence
  Synthetic
gcacuguuaaaagaucacuggau

SEQ ID NO: 365404 - RNA, 24 nt, Artificial Sequence
  Synthetic
ggcacuguuaaaagaucacuggau

SEQ ID NO: 365405 - RNA, 18 nt, Artificial Sequence
  Synthetic
uuugcauugugacuggau

SEQ ID NO: 365406 - RNA, 19 nt, Artificial Sequence
  Synthetic
uuuugcauugugacuggau

SEQ ID NO: 365407 - RNA, 20 nt, Artificial Sequence
  Synthetic
uuuuugcauugugacuggau

SEQ ID NO: 365408 - RNA, 21 nt, Artificial Sequence
  Synthetic
auuuuugcauugugacuggau

SEQ ID NO: 365409 - RNA, 22 nt, Artificial Sequence
  Synthetic
aauuuuugcauugugacuggau

SEQ ID NO: 365410 - RNA, 23 nt, Artificial Sequence
  Synthetic
gaauuuuugcauugugacuggau

SEQ ID NO: 365411 - RNA, 24 nt, Artificial Sequence
  Synthetic
ggaauuuuugcauugugacuggau

SEQ ID NO: 365412 - RNA, 18 nt, Artificial Sequence
  Synthetic
uaauuauuauuacuggau

SEQ ID NO: 365413 - RNA, 19 nt, Artificial Sequence
  Synthetic
uuaauuauuauuacuggau

SEQ ID NO: 365414 - RNA, 20 nt, Artificial Sequence
  Synthetic
uuuaauuauuauuacuggau

SEQ ID NO: 365415 - RNA, 21 nt, Artificial Sequence
  Synthetic
uuuuaauuauuauuacuggau

SEQ ID NO: 365416 - RNA, 22 nt, Artificial Sequence
  Synthetic
uuuuuaauuauuauuacuggau

SEQ ID NO: 365417 - RNA, 23 nt, Artificial Sequence
  Synthetic
auuuuuaauuauuauuacuggau

SEQ ID NO: 365418 - RNA, 24 nt, Artificial Sequence
  Synthetic
cauuuuuaauuauuauuacuggau

SEQ ID NO: 365419 - RNA, 18 nt, Artificial Sequence
  Synthetic
caucagcaugaccuggau

SEQ ID NO: 365420 - RNA, 19 nt, Artificial Sequence
  Synthetic
gcaucagcaugaccuggau

SEQ ID NO: 365421 - RNA, 20 nt, Artificial Sequence
  Synthetic
ugcaucagcaugaccuggau

SEQ ID NO: 365422 - RNA, 21 nt, Artificial Sequence
  Synthetic
uugcaucagcaugaccuggau

SEQ ID NO: 365423 - RNA, 22 nt, Artificial Sequence
  Synthetic
cuugcaucagcaugaccuggau

SEQ ID NO: 365424 - RNA, 23 nt, Artificial Sequence
  Synthetic
ucuugcaucagcaugaccuggau

SEQ ID NO: 365425 - RNA, 24 nt, Artificial Sequence
  Synthetic
cucuugcaucagcaugaccuggau

SEQ ID NO: 365426 - RNA, 18 nt, Artificial Sequence
  Synthetic
guuuuaguuugccuggau

SEQ ID NO: 365427 - RNA, 19 nt, Artificial Sequence
  Synthetic
aguuuuaguuugccuggau

SEQ ID NO: 365428 - RNA, 20 nt, Artificial Sequence
  Synthetic
uaguuuuaguuugccuggau

SEQ ID NO: 365429 - RNA, 21 nt, Artificial Sequence
  Synthetic
cuaguuuuaguuugccuggau

SEQ ID NO: 365430 - RNA, 22 nt, Artificial Sequence
  Synthetic
gcuaguuuuaguuugccuggau

SEQ ID NO: 365431 - RNA, 23 nt, Artificial Sequence
  Synthetic
agcuaguuuuaguuugccuggau

SEQ ID NO: 365432 - RNA, 24 nt, Artificial Sequence
  Synthetic
uagcuaguuuuaguuugccuggau

SEQ ID NO: 365433 - RNA, 18 nt, Artificial Sequence
  Synthetic
agcuuaguuuggcuggau

SEQ ID NO: 365434 - RNA, 19 nt, Artificial Sequence
  Synthetic
aagcuuaguuuggcuggau

SEQ ID NO: 365435 - RNA, 20 nt, Artificial Sequence
  Synthetic
gaagcuuaguuuggcuggau

SEQ ID NO: 365436 - RNA, 18 nt, Artificial Sequence
  Synthetic
gggaaaauggaucuggau

SEQ ID NO: 365437 - RNA, 19 nt, Artificial Sequence
  Synthetic
agggaaaauggaucuggau

SEQ ID NO: 365438 - RNA, 20 nt, Artificial Sequence
  Synthetic
aagggaaaauggaucuggau

SEQ ID NO: 365439 - RNA, 21 nt, Artificial Sequence
  Synthetic
gaagggaaaauggaucuggau

SEQ ID NO: 365440 - RNA, 22 nt, Artificial Sequence
  Synthetic
agaagggaaaauggaucuggau

SEQ ID NO: 365441 - RNA, 23 nt, Artificial Sequence
  Synthetic
aagaagggaaaauggaucuggau

SEQ ID NO: 365442 - RNA, 24 nt, Artificial Sequence
  Synthetic
aaagaagggaaaauggaucuggau

SEQ ID NO: 365443 - RNA, 18 nt, Artificial Sequence
  Synthetic
aacauaagaucucuggau

SEQ ID NO: 365444 - RNA, 19 nt, Artificial Sequence
  Synthetic
aaacauaagaucucuggau

SEQ ID NO: 365445 - RNA, 20 nt, Artificial Sequence
  Synthetic
gaaacauaagaucucuggau

SEQ ID NO: 365446 - RNA, 21 nt, Artificial Sequence
  Synthetic
ggaaacauaagaucucuggau

SEQ ID NO: 365447 - RNA, 22 nt, Artificial Sequence
  Synthetic
aggaaacauaagaucucuggau

SEQ ID NO: 365448 - RNA, 23 nt, Artificial Sequence
  Synthetic
caggaaacauaagaucucuggau

SEQ ID NO: 365449 - RNA, 24 nt, Artificial Sequence
  Synthetic
ucaggaaacauaagaucucuggau

SEQ ID NO: 365450 - RNA, 18 nt, Artificial Sequence
  Synthetic
cauucuugauuucuggau

SEQ ID NO: 365451 - RNA, 19 nt, Artificial Sequence
  Synthetic
ccauucuugauuucuggau

SEQ ID NO: 365452 - RNA, 20 nt, Artificial Sequence
  Synthetic
cccauucuugauuucuggau

SEQ ID NO: 365453 - RNA, 21 nt, Artificial Sequence
  Synthetic
ccccauucuugauuucuggau

SEQ ID NO: 365454 - RNA, 22 nt, Artificial Sequence
  Synthetic
uccccauucuugauuucuggau

SEQ ID NO: 365455 - RNA, 23 nt, Artificial Sequence
  Synthetic
auccccauucuugauuucuggau

SEQ ID NO: 365456 - RNA, 24 nt, Artificial Sequence
  Synthetic
aauccccauucuugauuucuggau

SEQ ID NO: 365457 - RNA, 18 nt, Artificial Sequence
  Synthetic
uuguaccaggaaguggau

SEQ ID NO: 365458 - RNA, 19 nt, Artificial Sequence
  Synthetic
auuguaccaggaaguggau

SEQ ID NO: 365459 - RNA, 20 nt, Artificial Sequence
  Synthetic
aauuguaccaggaaguggau

SEQ ID NO: 365460 - RNA, 21 nt, Artificial Sequence
  Synthetic
aaauuguaccaggaaguggau

SEQ ID NO: 365461 - RNA, 22 nt, Artificial Sequence
  Synthetic
gaaauuguaccaggaaguggau

SEQ ID NO: 365462 - RNA, 23 nt, Artificial Sequence
  Synthetic
agaaauuguaccaggaaguggau

SEQ ID NO: 365463 - RNA, 24 nt, Artificial Sequence
  Synthetic
aagaaauuguaccaggaaguggau

SEQ ID NO: 365464 - RNA, 18 nt, Artificial Sequence
  Synthetic
gaaguguaaagaguggau

SEQ ID NO: 365465 - RNA, 19 nt, Artificial Sequence
  Synthetic
ugaaguguaaagaguggau

SEQ ID NO: 365466 - RNA, 20 nt, Artificial Sequence
  Synthetic
cugaaguguaaagaguggau

SEQ ID NO: 365467 - RNA, 21 nt, Artificial Sequence
  Synthetic
ucugaaguguaaagaguggau

SEQ ID NO: 365468 - RNA, 22 nt, Artificial Sequence
  Synthetic
uucugaaguguaaagaguggau

SEQ ID NO: 365469 - RNA, 23 nt, Artificial Sequence
  Synthetic
auucugaaguguaaagaguggau

SEQ ID NO: 365470 - RNA, 24 nt, Artificial Sequence
  Synthetic
uauucugaaguguaaagaguggau

SEQ ID NO: 365471 - RNA, 18 nt, Artificial Sequence
  Synthetic
agaagaacuauaguggau

SEQ ID NO: 365472 - RNA, 19 nt, Artificial Sequence
  Synthetic
aagaagaacuauaguggau

SEQ ID NO: 365473 - RNA, 20 nt, Artificial Sequence
  Synthetic
aaagaagaacuauaguggau

SEQ ID NO: 365474 - RNA, 21 nt, Artificial Sequence
  Synthetic
gaaagaagaacuauaguggau

SEQ ID NO: 365475 - RNA, 22 nt, Artificial Sequence
  Synthetic
agaaagaagaacuauaguggau

SEQ ID NO: 365476 - RNA, 23 nt, Artificial Sequence
  Synthetic
aagaaagaagaacuauaguggau

SEQ ID NO: 365477 - RNA, 24 nt, Artificial Sequence
  Synthetic
uaagaaagaagaacuauaguggau

SEQ ID NO: 365478 - RNA, 18 nt, Artificial Sequence
  Synthetic
uuccuccaaaugguggau

SEQ ID NO: 365479 - RNA, 19 nt, Artificial Sequence
  Synthetic
uuuccuccaaaugguggau

SEQ ID NO: 365480 - RNA, 20 nt, Artificial Sequence
  Synthetic
auuuccuccaaaugguggau

SEQ ID NO: 365481 - RNA, 21 nt, Artificial Sequence
  Synthetic
gauuuccuccaaaugguggau

SEQ ID NO: 365482 - RNA, 22 nt, Artificial Sequence
  Synthetic
agauuuccuccaaaugguggau

SEQ ID NO: 365483 - RNA, 23 nt, Artificial Sequence
  Synthetic
uagauuuccuccaaaugguggau

SEQ ID NO: 365484 - RNA, 24 nt, Artificial Sequence
  Synthetic
guagauuuccuccaaaugguggau

SEQ ID NO: 365485 - RNA, 18 nt, Artificial Sequence
  Synthetic
aaauuacaaaauguggau

SEQ ID NO: 365486 - RNA, 19 nt, Artificial Sequence
  Synthetic
gaaauuacaaaauguggau

SEQ ID NO: 365487 - RNA, 20 nt, Artificial Sequence
  Synthetic
ugaaauuacaaaauguggau

SEQ ID NO: 365488 - RNA, 21 nt, Artificial Sequence
  Synthetic
uugaaauuacaaaauguggau

SEQ ID NO: 365489 - RNA, 22 nt, Artificial Sequence
  Synthetic
auugaaauuacaaaauguggau

SEQ ID NO: 365490 - RNA, 23 nt, Artificial Sequence
  Synthetic
cauugaaauuacaaaauguggau

SEQ ID NO: 365491 - RNA, 24 nt, Artificial Sequence
  Synthetic
acauugaaauuacaaaauguggau

SEQ ID NO: 365492 - RNA, 18 nt, Artificial Sequence
  Synthetic
gguaugugagguguggau

SEQ ID NO: 365493 - RNA, 19 nt, Artificial Sequence
  Synthetic
ggguaugugagguguggau

SEQ ID NO: 365494 - RNA, 20 nt, Artificial Sequence
  Synthetic
aggguaugugagguguggau

SEQ ID NO: 365495 - RNA, 21 nt, Artificial Sequence
  Synthetic
aaggguaugugagguguggau

SEQ ID NO: 365496 - RNA, 22 nt, Artificial Sequence
  Synthetic
gaaggguaugugagguguggau

SEQ ID NO: 365497 - RNA, 23 nt, Artificial Sequence
  Synthetic
agaaggguaugugagguguggau

SEQ ID NO: 365498 - RNA, 24 nt, Artificial Sequence
  Synthetic
uagaaggguaugugagguguggau

SEQ ID NO: 365499 - RNA, 18 nt, Artificial Sequence
  Synthetic
gcuuuauacgaauuggau

SEQ ID NO: 365500 - RNA, 19 nt, Artificial Sequence
  Synthetic
ugcuuuauacgaauuggau

SEQ ID NO: 365501 - RNA, 20 nt, Artificial Sequence
  Synthetic
gugcuuuauacgaauuggau

SEQ ID NO: 365502 - RNA, 21 nt, Artificial Sequence
  Synthetic
ugugcuuuauacgaauuggau

SEQ ID NO: 365503 - RNA, 22 nt, Artificial Sequence
  Synthetic
cugugcuuuauacgaauuggau

SEQ ID NO: 365504 - RNA, 23 nt, Artificial Sequence
  Synthetic
gcugugcuuuauacgaauuggau

SEQ ID NO: 365505 - RNA, 24 nt, Artificial Sequence
  Synthetic
ugcugugcuuuauacgaauuggau

SEQ ID NO: 365506 - RNA, 18 nt, Artificial Sequence
  Synthetic
uuucuggaugaauuggau

SEQ ID NO: 365507 - RNA, 19 nt, Artificial Sequence
  Synthetic
auuucuggaugaauuggau

SEQ ID NO: 365508 - RNA, 20 nt, Artificial Sequence
  Synthetic
gauuucuggaugaauuggau

SEQ ID NO: 365509 - RNA, 21 nt, Artificial Sequence
  Synthetic
ggauuucuggaugaauuggau

SEQ ID NO: 365510 - RNA, 22 nt, Artificial Sequence
  Synthetic
aggauuucuggaugaauuggau

SEQ ID NO: 365511 - RNA, 23 nt, Artificial Sequence
  Synthetic
aaggauuucuggaugaauuggau

SEQ ID NO: 365512 - RNA, 24 nt, Artificial Sequence
  Synthetic
caaggauuucuggaugaauuggau

SEQ ID NO: 365513 - RNA, 18 nt, Artificial Sequence
  Synthetic
auagguaacugauuggau

SEQ ID NO: 365514 - RNA, 19 nt, Artificial Sequence
  Synthetic
aauagguaacugauuggau

SEQ ID NO: 365515 - RNA, 20 nt, Artificial Sequence
  Synthetic
gaauagguaacugauuggau

SEQ ID NO: 365516 - RNA, 21 nt, Artificial Sequence
  Synthetic
agaauagguaacugauuggau

SEQ ID NO: 365517 - RNA, 22 nt, Artificial Sequence
  Synthetic
aagaauagguaacugauuggau

SEQ ID NO: 365518 - RNA, 23 nt, Artificial Sequence
  Synthetic
gaagaauagguaacugauuggau

SEQ ID NO: 365519 - RNA, 24 nt, Artificial Sequence
  Synthetic
ugaagaauagguaacugauuggau

SEQ ID NO: 365520 - RNA, 18 nt, Artificial Sequence
  Synthetic
caguguuuuauauuggau

SEQ ID NO: 365521 - RNA, 19 nt, Artificial Sequence
  Synthetic
ucaguguuuuauauuggau

SEQ ID NO: 365522 - RNA, 20 nt, Artificial Sequence
  Synthetic
uucaguguuuuauauuggau

SEQ ID NO: 365523 - RNA, 21 nt, Artificial Sequence
  Synthetic
uuucaguguuuuauauuggau

SEQ ID NO: 365524 - RNA, 22 nt, Artificial Sequence
  Synthetic
guuucaguguuuuauauuggau

SEQ ID NO: 365525 - RNA, 23 nt, Artificial Sequence
  Synthetic
aguuucaguguuuuauauuggau

SEQ ID NO: 365526 - RNA, 24 nt, Artificial Sequence
  Synthetic
aaguuucaguguuuuauauuggau

SEQ ID NO: 365527 - RNA, 18 nt, Artificial Sequence
  Synthetic
aaugauuaaaacuuggau

SEQ ID NO: 365528 - RNA, 19 nt, Artificial Sequence
  Synthetic
aaaugauuaaaacuuggau

SEQ ID NO: 365529 - RNA, 20 nt, Artificial Sequence
  Synthetic
aaaaugauuaaaacuuggau

SEQ ID NO: 365530 - RNA, 21 nt, Artificial Sequence
  Synthetic
caaaaugauuaaaacuuggau

SEQ ID NO: 365531 - RNA, 22 nt, Artificial Sequence
  Synthetic
gcaaaaugauuaaaacuuggau

SEQ ID NO: 365532 - RNA, 23 nt, Artificial Sequence
  Synthetic
ugcaaaaugauuaaaacuuggau

SEQ ID NO: 365533 - RNA, 24 nt, Artificial Sequence
  Synthetic
cugcaaaaugauuaaaacuuggau

SEQ ID NO: 365534 - RNA, 18 nt, Artificial Sequence
  Synthetic
cccauuucucccuuggau

SEQ ID NO: 365535 - RNA, 19 nt, Artificial Sequence
  Synthetic
ucccauuucucccuuggau

SEQ ID NO: 365536 - RNA, 20 nt, Artificial Sequence
  Synthetic
uucccauuucucccuuggau

SEQ ID NO: 365537 - RNA, 21 nt, Artificial Sequence
  Synthetic
cuucccauuucucccuuggau

SEQ ID NO: 365538 - RNA, 22 nt, Artificial Sequence
  Synthetic
ucuucccauuucucccuuggau

SEQ ID NO: 365539 - RNA, 23 nt, Artificial Sequence
  Synthetic
gucuucccauuucucccuuggau

SEQ ID NO: 365540 - RNA, 24 nt, Artificial Sequence
  Synthetic
ugucuucccauuucucccuuggau

SEQ ID NO: 365541 - RNA, 18 nt, Artificial Sequence
  Synthetic
cguuugacccucuuggau

SEQ ID NO: 365542 - RNA, 19 nt, Artificial Sequence
  Synthetic
ccguuugacccucuuggau

SEQ ID NO: 365543 - RNA, 20 nt, Artificial Sequence
  Synthetic
accguuugacccucuuggau

SEQ ID NO: 365544 - RNA, 21 nt, Artificial Sequence
  Synthetic
aaccguuugacccucuuggau

SEQ ID NO: 365545 - RNA, 22 nt, Artificial Sequence
  Synthetic
uaaccguuugacccucuuggau

SEQ ID NO: 365546 - RNA, 23 nt, Artificial Sequence
  Synthetic
auaaccguuugacccucuuggau

SEQ ID NO: 365547 - RNA, 24 nt, Artificial Sequence
  Synthetic
uauaaccguuugacccucuuggau

SEQ ID NO: 365548 - RNA, 18 nt, Artificial Sequence
  Synthetic
gcauaagggcucuuggau

SEQ ID NO: 365549 - RNA, 19 nt, Artificial Sequence
  Synthetic
agcauaagggcucuuggau

SEQ ID NO: 365550 - RNA, 20 nt, Artificial Sequence
  Synthetic
aagcauaagggcucuuggau

SEQ ID NO: 365551 - RNA, 21 nt, Artificial Sequence
  Synthetic
aaagcauaagggcucuuggau

SEQ ID NO: 365552 - RNA, 22 nt, Artificial Sequence
  Synthetic
caaagcauaagggcucuuggau

SEQ ID NO: 365553 - RNA, 23 nt, Artificial Sequence
  Synthetic
ucaaagcauaagggcucuuggau

SEQ ID NO: 365554 - RNA, 24 nt, Artificial Sequence
  Synthetic
cucaaagcauaagggcucuuggau

SEQ ID NO: 365555 - RNA, 18 nt, Artificial Sequence
  Synthetic
guaaaauagaauuuggau

SEQ ID NO: 365556 - RNA, 19 nt, Artificial Sequence
  Synthetic
aguaaaauagaauuuggau

SEQ ID NO: 365557 - RNA, 20 nt, Artificial Sequence
  Synthetic
caguaaaauagaauuuggau

SEQ ID NO: 365558 - RNA, 21 nt, Artificial Sequence
  Synthetic
ucaguaaaauagaauuuggau

SEQ ID NO: 365559 - RNA, 22 nt, Artificial Sequence
  Synthetic
aucaguaaaauagaauuuggau

SEQ ID NO: 365560 - RNA, 23 nt, Artificial Sequence
  Synthetic
gaucaguaaaauagaauuuggau

SEQ ID NO: 365561 - RNA, 24 nt, Artificial Sequence
  Synthetic
ggaucaguaaaauagaauuuggau

SEQ ID NO: 365562 - RNA, 18 nt, Artificial Sequence
  Synthetic
ucaagaugagauuuggau

SEQ ID NO: 365563 - RNA, 19 nt, Artificial Sequence
  Synthetic
uucaagaugagauuuggau

SEQ ID NO: 365564 - RNA, 20 nt, Artificial Sequence
  Synthetic
auucaagaugagauuuggau

SEQ ID NO: 365565 - RNA, 21 nt, Artificial Sequence
  Synthetic
aauucaagaugagauuuggau

SEQ ID NO: 365566 - RNA, 22 nt, Artificial Sequence
  Synthetic
caauucaagaugagauuuggau

SEQ ID NO: 365567 - RNA, 23 nt, Artificial Sequence
  Synthetic
acaauucaagaugagauuuggau

SEQ ID NO: 365568 - RNA, 24 nt, Artificial Sequence
  Synthetic
uacaauucaagaugagauuuggau

SEQ ID NO: 365569 - RNA, 18 nt, Artificial Sequence
  Synthetic
gucuuguauccuuuggau

SEQ ID NO: 365570 - RNA, 19 nt, Artificial Sequence
  Synthetic
ugucuuguauccuuuggau

SEQ ID NO: 365571 - RNA, 20 nt, Artificial Sequence
  Synthetic
cugucuuguauccuuuggau

SEQ ID NO: 365572 - RNA, 21 nt, Artificial Sequence
  Synthetic
ucugucuuguauccuuuggau

SEQ ID NO: 365573 - RNA, 22 nt, Artificial Sequence
  Synthetic
uucugucuuguauccuuuggau

SEQ ID NO: 365574 - RNA, 23 nt, Artificial Sequence
  Synthetic
uuucugucuuguauccuuuggau

SEQ ID NO: 365575 - RNA, 24 nt, Artificial Sequence
  Synthetic
cuuucugucuuguauccuuuggau

SEQ ID NO: 365576 - RNA, 18 nt, Artificial Sequence
  Synthetic
ugacacucagcuuuggau

SEQ ID NO: 365577 - RNA, 19 nt, Artificial Sequence
  Synthetic
gugacacucagcuuuggau

SEQ ID NO: 365578 - RNA, 20 nt, Artificial Sequence
  Synthetic
agugacacucagcuuuggau

SEQ ID NO: 365579 - RNA, 21 nt, Artificial Sequence
  Synthetic
cagugacacucagcuuuggau

SEQ ID NO: 365580 - RNA, 22 nt, Artificial Sequence
  Synthetic
gcagugacacucagcuuuggau

SEQ ID NO: 365581 - RNA, 23 nt, Artificial Sequence
  Synthetic
agcagugacacucagcuuuggau

SEQ ID NO: 365582 - RNA, 24 nt, Artificial Sequence
  Synthetic
cagcagugacacucagcuuuggau

SEQ ID NO: 365583 - RNA, 18 nt, Artificial Sequence
  Synthetic
aucccaagcauuuuggau

SEQ ID NO: 365584 - RNA, 19 nt, Artificial Sequence
  Synthetic
aaucccaagcauuuuggau

SEQ ID NO: 365585 - RNA, 20 nt, Artificial Sequence
  Synthetic
caaucccaagcauuuuggau

SEQ ID NO: 365586 - RNA, 21 nt, Artificial Sequence
  Synthetic
ccaaucccaagcauuuuggau

SEQ ID NO: 365587 - RNA, 22 nt, Artificial Sequence
  Synthetic
uccaaucccaagcauuuuggau

SEQ ID NO: 365588 - RNA, 23 nt, Artificial Sequence
  Synthetic
uuccaaucccaagcauuuuggau

SEQ ID NO: 365589 - RNA, 24 nt, Artificial Sequence
  Synthetic
cuuccaaucccaagcauuuuggau

SEQ ID NO: 365590 - RNA, 18 nt, Artificial Sequence
  Synthetic
gucgcaaguauuuuggau

SEQ ID NO: 365591 - RNA, 19 nt, Artificial Sequence
  Synthetic
agucgcaaguauuuuggau

SEQ ID NO: 365592 - RNA, 20 nt, Artificial Sequence
  Synthetic
cagucgcaaguauuuuggau

SEQ ID NO: 365593 - RNA, 21 nt, Artificial Sequence
  Synthetic
ucagucgcaaguauuuuggau

SEQ ID NO: 365594 - RNA, 22 nt, Artificial Sequence
  Synthetic
uucagucgcaaguauuuuggau

SEQ ID NO: 365595 - RNA, 23 nt, Artificial Sequence
  Synthetic
uuucagucgcaaguauuuuggau

SEQ ID NO: 365596 - RNA, 24 nt, Artificial Sequence
  Synthetic
cuuucagucgcaaguauuuuggau

SEQ ID NO: 365597 - RNA, 18 nt, Artificial Sequence
  Synthetic
ugggaaugucuuuuggau

SEQ ID NO: 365598 - RNA, 19 nt, Artificial Sequence
  Synthetic
cugggaaugucuuuuggau

SEQ ID NO: 365599 - RNA, 20 nt, Artificial Sequence
  Synthetic
acugggaaugucuuuuggau

SEQ ID NO: 365600 - RNA, 21 nt, Artificial Sequence
  Synthetic
uacugggaaugucuuuuggau

SEQ ID NO: 365601 - RNA, 22 nt, Artificial Sequence
  Synthetic
uuacugggaaugucuuuuggau

SEQ ID NO: 365602 - RNA, 23 nt, Artificial Sequence
  Synthetic
uuuacugggaaugucuuuuggau

SEQ ID NO: 365603 - RNA, 24 nt, Artificial Sequence
  Synthetic
cuuuacugggaaugucuuuuggau

SEQ ID NO: 365604 - RNA, 18 nt, Artificial Sequence
  Synthetic
aaaccaaugcaaaaugau

SEQ ID NO: 365605 - RNA, 19 nt, Artificial Sequence
  Synthetic
aaaaccaaugcaaaaugau

SEQ ID NO: 365606 - RNA, 20 nt, Artificial Sequence
  Synthetic
aaaaaccaaugcaaaaugau

SEQ ID NO: 365607 - RNA, 21 nt, Artificial Sequence
  Synthetic
uaaaaaccaaugcaaaaugau

SEQ ID NO: 365608 - RNA, 22 nt, Artificial Sequence
  Synthetic
auaaaaaccaaugcaaaaugau

SEQ ID NO: 365609 - RNA, 23 nt, Artificial Sequence
  Synthetic
uauaaaaaccaaugcaaaaugau

SEQ ID NO: 365610 - RNA, 24 nt, Artificial Sequence
  Synthetic
uuauaaaaaccaaugcaaaaugau

SEQ ID NO: 365611 - RNA, 18 nt, Artificial Sequence
  Synthetic
cagcauaaggaaaaugau

SEQ ID NO: 365612 - RNA, 19 nt, Artificial Sequence
  Synthetic
acagcauaaggaaaaugau

SEQ ID NO: 365613 - RNA, 20 nt, Artificial Sequence
  Synthetic
aacagcauaaggaaaaugau

SEQ ID NO: 365614 - RNA, 21 nt, Artificial Sequence
  Synthetic
aaacagcauaaggaaaaugau

SEQ ID NO: 365615 - RNA, 22 nt, Artificial Sequence
  Synthetic
gaaacagcauaaggaaaaugau

SEQ ID NO: 365616 - RNA, 23 nt, Artificial Sequence
  Synthetic
agaaacagcauaaggaaaaugau

SEQ ID NO: 365617 - RNA, 24 nt, Artificial Sequence
  Synthetic
aagaaacagcauaaggaaaaugau

SEQ ID NO: 365618 - RNA, 18 nt, Artificial Sequence
  Synthetic
aauccuauugaaaaugau

SEQ ID NO: 365619 - RNA, 19 nt, Artificial Sequence
  Synthetic
aaauccuauugaaaaugau

SEQ ID NO: 365620 - RNA, 20 nt, Artificial Sequence
  Synthetic
gaaauccuauugaaaaugau

SEQ ID NO: 365621 - RNA, 21 nt, Artificial Sequence
  Synthetic
ugaaauccuauugaaaaugau

SEQ ID NO: 365622 - RNA, 22 nt, Artificial Sequence
  Synthetic
augaaauccuauugaaaaugau

SEQ ID NO: 365623 - RNA, 23 nt, Artificial Sequence
  Synthetic
gaugaaauccuauugaaaaugau

SEQ ID NO: 365624 - RNA, 24 nt, Artificial Sequence
  Synthetic
ggaugaaauccuauugaaaaugau

SEQ ID NO: 365625 - RNA, 18 nt, Artificial Sequence
  Synthetic
aaauggaagcuaaaugau

SEQ ID NO: 365626 - RNA, 19 nt, Artificial Sequence
  Synthetic
uaaauggaagcuaaaugau

SEQ ID NO: 365627 - RNA, 20 nt, Artificial Sequence
  Synthetic
auaaauggaagcuaaaugau

SEQ ID NO: 365628 - RNA, 21 nt, Artificial Sequence
  Synthetic
uauaaauggaagcuaaaugau

SEQ ID NO: 365629 - RNA, 22 nt, Artificial Sequence
  Synthetic
uuauaaauggaagcuaaaugau

SEQ ID NO: 365630 - RNA, 23 nt, Artificial Sequence
  Synthetic
cuuauaaauggaagcuaaaugau

SEQ ID NO: 365631 - RNA, 24 nt, Artificial Sequence
  Synthetic
acuuauaaauggaagcuaaaugau

SEQ ID NO: 365632 - RNA, 18 nt, Artificial Sequence
  Synthetic
uauauaagauuaaaugau

SEQ ID NO: 365633 - RNA, 19 nt, Artificial Sequence
  Synthetic
auauauaagauuaaaugau

SEQ ID NO: 365634 - RNA, 20 nt, Artificial Sequence
  Synthetic
aauauauaagauuaaaugau

SEQ ID NO: 365635 - RNA, 21 nt, Artificial Sequence
  Synthetic
aaauauauaagauuaaaugau

SEQ ID NO: 365636 - RNA, 22 nt, Artificial Sequence
  Synthetic
uaaauauauaagauuaaaugau

SEQ ID NO: 365637 - RNA, 23 nt, Artificial Sequence
  Synthetic
auaaauauauaagauuaaaugau

SEQ ID NO: 365638 - RNA, 24 nt, Artificial Sequence
  Synthetic
uauaaauauauaagauuaaaugau

SEQ ID NO: 365639 - RNA, 18 nt, Artificial Sequence
  Synthetic
auauuuggagccaaugau

SEQ ID NO: 365640 - RNA, 19 nt, Artificial Sequence
  Synthetic
cauauuuggagccaaugau

SEQ ID NO: 365641 - RNA, 20 nt, Artificial Sequence
  Synthetic
gcauauuuggagccaaugau

SEQ ID NO: 365642 - RNA, 21 nt, Artificial Sequence
  Synthetic
ugcauauuuggagccaaugau

SEQ ID NO: 365643 - RNA, 22 nt, Artificial Sequence
  Synthetic
augcauauuuggagccaaugau

SEQ ID NO: 365644 - RNA, 23 nt, Artificial Sequence
  Synthetic
aaugcauauuuggagccaaugau

SEQ ID NO: 365645 - RNA, 24 nt, Artificial Sequence
  Synthetic
caaugcauauuuggagccaaugau

SEQ ID NO: 365646 - RNA, 18 nt, Artificial Sequence
  Synthetic
cuccuuuaauccaaugau

SEQ ID NO: 365647 - RNA, 19 nt, Artificial Sequence
  Synthetic
ucuccuuuaauccaaugau

SEQ ID NO: 365648 - RNA, 20 nt, Artificial Sequence
  Synthetic
aucuccuuuaauccaaugau

SEQ ID NO: 365649 - RNA, 21 nt, Artificial Sequence
  Synthetic
caucuccuuuaauccaaugau

SEQ ID NO: 365650 - RNA, 22 nt, Artificial Sequence
  Synthetic
ccaucuccuuuaauccaaugau

SEQ ID NO: 365651 - RNA, 23 nt, Artificial Sequence
  Synthetic
uccaucuccuuuaauccaaugau

SEQ ID NO: 365652 - RNA, 24 nt, Artificial Sequence
  Synthetic
cuccaucuccuuuaauccaaugau

SEQ ID NO: 365653 - RNA, 18 nt, Artificial Sequence
  Synthetic
auugccuuaugcaaugau

SEQ ID NO: 365654 - RNA, 19 nt, Artificial Sequence
  Synthetic
cauugccuuaugcaaugau

SEQ ID NO: 365655 - RNA, 20 nt, Artificial Sequence
  Synthetic
gcauugccuuaugcaaugau

SEQ ID NO: 365656 - RNA, 21 nt, Artificial Sequence
  Synthetic
agcauugccuuaugcaaugau

SEQ ID NO: 365657 - RNA, 22 nt, Artificial Sequence
  Synthetic
cagcauugccuuaugcaaugau

SEQ ID NO: 365658 - RNA, 23 nt, Artificial Sequence
  Synthetic
gcagcauugccuuaugcaaugau

SEQ ID NO: 365659 - RNA, 24 nt, Artificial Sequence
  Synthetic
agcagcauugccuuaugcaaugau

SEQ ID NO: 365660 - RNA, 18 nt, Artificial Sequence
  Synthetic
caaaaaugcaagaaugau

SEQ ID NO: 365661 - RNA, 19 nt, Artificial Sequence
  Synthetic
gcaaaaaugcaagaaugau

SEQ ID NO: 365662 - RNA, 20 nt, Artificial Sequence
  Synthetic
ggcaaaaaugcaagaaugau

SEQ ID NO: 365663 - RNA, 21 nt, Artificial Sequence
  Synthetic
gggcaaaaaugcaagaaugau

SEQ ID NO: 365664 - RNA, 22 nt, Artificial Sequence
  Synthetic
ggggcaaaaaugcaagaaugau

SEQ ID NO: 365665 - RNA, 23 nt, Artificial Sequence
  Synthetic
aggggcaaaaaugcaagaaugau

SEQ ID NO: 365666 - RNA, 24 nt, Artificial Sequence
  Synthetic
uaggggcaaaaaugcaagaaugau

SEQ ID NO: 365667 - RNA, 18 nt, Artificial Sequence
  Synthetic
uuguaauggcagaaugau

SEQ ID NO: 365668 - RNA, 19 nt, Artificial Sequence
  Synthetic
cuuguaauggcagaaugau

SEQ ID NO: 365669 - RNA, 20 nt, Artificial Sequence
  Synthetic
gcuuguaauggcagaaugau

SEQ ID NO: 365670 - RNA, 21 nt, Artificial Sequence
  Synthetic
ggcuuguaauggcagaaugau

SEQ ID NO: 365671 - RNA, 22 nt, Artificial Sequence
  Synthetic
uggcuuguaauggcagaaugau

SEQ ID NO: 365672 - RNA, 23 nt, Artificial Sequence
  Synthetic
cuggcuuguaauggcagaaugau

SEQ ID NO: 365673 - RNA, 24 nt, Artificial Sequence
  Synthetic
ucuggcuuguaauggcagaaugau

SEQ ID NO: 365674 - RNA, 18 nt, Artificial Sequence
  Synthetic
uuuccccauuagaaugau

SEQ ID NO: 365675 - RNA, 19 nt, Artificial Sequence
  Synthetic
uuuuccccauuagaaugau

SEQ ID NO: 365676 - RNA, 20 nt, Artificial Sequence
  Synthetic
auuuuccccauuagaaugau

SEQ ID NO: 365677 - RNA, 21 nt, Artificial Sequence
  Synthetic
uauuuuccccauuagaaugau

SEQ ID NO: 365678 - RNA, 22 nt, Artificial Sequence
  Synthetic
uuauuuuccccauuagaaugau

SEQ ID NO: 365679 - RNA, 23 nt, Artificial Sequence
  Synthetic
guuauuuuccccauuagaaugau

SEQ ID NO: 365680 - RNA, 24 nt, Artificial Sequence
  Synthetic
aguuauuuuccccauuagaaugau

SEQ ID NO: 365681 - RNA, 18 nt, Artificial Sequence
  Synthetic
cuguugacauggaaugau

SEQ ID NO: 365682 - RNA, 19 nt, Artificial Sequence
  Synthetic
ccuguugacauggaaugau

SEQ ID NO: 365683 - RNA, 20 nt, Artificial Sequence
  Synthetic
uccuguugacauggaaugau

SEQ ID NO: 365684 - RNA, 21 nt, Artificial Sequence
  Synthetic
cuccuguugacauggaaugau

SEQ ID NO: 365685 - RNA, 22 nt, Artificial Sequence
  Synthetic
ucuccuguugacauggaaugau

SEQ ID NO: 365686 - RNA, 23 nt, Artificial Sequence
  Synthetic
cucuccuguugacauggaaugau

SEQ ID NO: 365687 - RNA, 24 nt, Artificial Sequence
  Synthetic
gcucuccuguugacauggaaugau

SEQ ID NO: 365688 - RNA, 18 nt, Artificial Sequence
  Synthetic
cagcuuaauuggaaugau

SEQ ID NO: 365689 - RNA, 19 nt, Artificial Sequence
  Synthetic
acagcuuaauuggaaugau

SEQ ID NO: 365690 - RNA, 20 nt, Artificial Sequence
  Synthetic
uacagcuuaauuggaaugau

SEQ ID NO: 365691 - RNA, 21 nt, Artificial Sequence
  Synthetic
uuacagcuuaauuggaaugau

SEQ ID NO: 365692 - RNA, 22 nt, Artificial Sequence
  Synthetic
uuuacagcuuaauuggaaugau

SEQ ID NO: 365693 - RNA, 23 nt, Artificial Sequence
  Synthetic
uuuuacagcuuaauuggaaugau

SEQ ID NO: 365694 - RNA, 24 nt, Artificial Sequence
  Synthetic
auuuuacagcuuaauuggaaugau

SEQ ID NO: 365695 - RNA, 18 nt, Artificial Sequence
  Synthetic
uuauacaaucauaaugau

SEQ ID NO: 365696 - RNA, 19 nt, Artificial Sequence
  Synthetic
auuauacaaucauaaugau

SEQ ID NO: 365697 - RNA, 20 nt, Artificial Sequence
  Synthetic
aauuauacaaucauaaugau

SEQ ID NO: 365698 - RNA, 21 nt, Artificial Sequence
  Synthetic
caauuauacaaucauaaugau

SEQ ID NO: 365699 - RNA, 22 nt, Artificial Sequence
  Synthetic
acaauuauacaaucauaaugau

SEQ ID NO: 365700 - RNA, 23 nt, Artificial Sequence
  Synthetic
gacaauuauacaaucauaaugau

SEQ ID NO: 365701 - RNA, 24 nt, Artificial Sequence
  Synthetic
ugacaauuauacaaucauaaugau

SEQ ID NO: 365702 - RNA, 18 nt, Artificial Sequence
  Synthetic
cuugucacagguaaugau

SEQ ID NO: 365703 - RNA, 19 nt, Artificial Sequence
  Synthetic
ucuugucacagguaaugau

SEQ ID NO: 365704 - RNA, 20 nt, Artificial Sequence
  Synthetic
uucuugucacagguaaugau

SEQ ID NO: 365705 - RNA, 21 nt, Artificial Sequence
  Synthetic
uuucuugucacagguaaugau

SEQ ID NO: 365706 - RNA, 22 nt, Artificial Sequence
  Synthetic
auuucuugucacagguaaugau

SEQ ID NO: 365707 - RNA, 23 nt, Artificial Sequence
  Synthetic
uauuucuugucacagguaaugau

SEQ ID NO: 365708 - RNA, 24 nt, Artificial Sequence
  Synthetic
auauuucuugucacagguaaugau

SEQ ID NO: 365709 - RNA, 18 nt, Artificial Sequence
  Synthetic
aauuuacuuauacaugau

SEQ ID NO: 365710 - RNA, 19 nt, Artificial Sequence
  Synthetic
aaauuuacuuauacaugau

SEQ ID NO: 365711 - RNA, 20 nt, Artificial Sequence
  Synthetic
aaaauuuacuuauacaugau

SEQ ID NO: 365712 - RNA, 21 nt, Artificial Sequence
  Synthetic
caaaauuuacuuauacaugau

SEQ ID NO: 365713 - RNA, 22 nt, Artificial Sequence
  Synthetic
ccaaaauuuacuuauacaugau

SEQ ID NO: 365714 - RNA, 23 nt, Artificial Sequence
  Synthetic
accaaaauuuacuuauacaugau

SEQ ID NO: 365715 - RNA, 24 nt, Artificial Sequence
  Synthetic
uaccaaaauuuacuuauacaugau

SEQ ID NO: 365716 - RNA, 18 nt, Artificial Sequence
  Synthetic
agucacaaaagccaugau

SEQ ID NO: 365717 - RNA, 19 nt, Artificial Sequence
  Synthetic
uagucacaaaagccaugau

SEQ ID NO: 365718 - RNA, 20 nt, Artificial Sequence
  Synthetic
uuagucacaaaagccaugau

SEQ ID NO: 365719 - RNA, 21 nt, Artificial Sequence
  Synthetic
auuagucacaaaagccaugau

SEQ ID NO: 365720 - RNA, 22 nt, Artificial Sequence
  Synthetic
cauuagucacaaaagccaugau

SEQ ID NO: 365721 - RNA, 23 nt, Artificial Sequence
  Synthetic
gcauuagucacaaaagccaugau

SEQ ID NO: 365722 - RNA, 24 nt, Artificial Sequence
  Synthetic
agcauuagucacaaaagccaugau

SEQ ID NO: 365723 - RNA, 18 nt, Artificial Sequence
  Synthetic
uuucauacuagccaugau

SEQ ID NO: 365724 - RNA, 19 nt, Artificial Sequence
  Synthetic
uuuucauacuagccaugau

SEQ ID NO: 365725 - RNA, 20 nt, Artificial Sequence
  Synthetic
cuuuucauacuagccaugau

SEQ ID NO: 365726 - RNA, 21 nt, Artificial Sequence
  Synthetic
acuuuucauacuagccaugau

SEQ ID NO: 365727 - RNA, 22 nt, Artificial Sequence
  Synthetic
cacuuuucauacuagccaugau

SEQ ID NO: 365728 - RNA, 23 nt, Artificial Sequence
  Synthetic
gcacuuuucauacuagccaugau

SEQ ID NO: 365729 - RNA, 24 nt, Artificial Sequence
  Synthetic
agcacuuuucauacuagccaugau

SEQ ID NO: 365730 - RNA, 18 nt, Artificial Sequence
  Synthetic
uauagagacaagcaugau

SEQ ID NO: 365731 - RNA, 19 nt, Artificial Sequence
  Synthetic
auauagagacaagcaugau

SEQ ID NO: 365732 - RNA, 20 nt, Artificial Sequence
  Synthetic
aauauagagacaagcaugau

SEQ ID NO: 365733 - RNA, 21 nt, Artificial Sequence
  Synthetic
aaauauagagacaagcaugau

SEQ ID NO: 365734 - RNA, 22 nt, Artificial Sequence
  Synthetic
aaaauauagagacaagcaugau

SEQ ID NO: 365735 - RNA, 23 nt, Artificial Sequence
  Synthetic
uaaaauauagagacaagcaugau

SEQ ID NO: 365736 - RNA, 24 nt, Artificial Sequence
  Synthetic
auaaaauauagagacaagcaugau

SEQ ID NO: 365737 - RNA, 18 nt, Artificial Sequence
  Synthetic
gaaugaagaaaucaugau

SEQ ID NO: 365738 - RNA, 19 nt, Artificial Sequence
  Synthetic
agaaugaagaaaucaugau

SEQ ID NO: 365739 - RNA, 20 nt, Artificial Sequence
  Synthetic
aagaaugaagaaaucaugau

SEQ ID NO: 365740 - RNA, 21 nt, Artificial Sequence
  Synthetic
aaagaaugaagaaaucaugau

SEQ ID NO: 365741 - RNA, 22 nt, Artificial Sequence
  Synthetic
uaaagaaugaagaaaucaugau

SEQ ID NO: 365742 - RNA, 23 nt, Artificial Sequence
  Synthetic
auaaagaaugaagaaaucaugau

SEQ ID NO: 365743 - RNA, 24 nt, Artificial Sequence
  Synthetic
uauaaagaaugaagaaaucaugau

SEQ ID NO: 365744 - RNA, 18 nt, Artificial Sequence
  Synthetic
gugacuaaaucucaugau

SEQ ID NO: 365745 - RNA, 19 nt, Artificial Sequence
  Synthetic
agugacuaaaucucaugau

SEQ ID NO: 365746 - RNA, 20 nt, Artificial Sequence
  Synthetic
aagugacuaaaucucaugau

SEQ ID NO: 365747 - RNA, 21 nt, Artificial Sequence
  Synthetic
gaagugacuaaaucucaugau

SEQ ID NO: 365748 - RNA, 22 nt, Artificial Sequence
  Synthetic
ggaagugacuaaaucucaugau

SEQ ID NO: 365749 - RNA, 23 nt, Artificial Sequence
  Synthetic
aggaagugacuaaaucucaugau

SEQ ID NO: 365750 - RNA, 24 nt, Artificial Sequence
  Synthetic
caggaagugacuaaaucucaugau

SEQ ID NO: 365751 - RNA, 18 nt, Artificial Sequence
  Synthetic
gcaacuucaagucaugau

SEQ ID NO: 365752 - RNA, 19 nt, Artificial Sequence
  Synthetic
ugcaacuucaagucaugau

SEQ ID NO: 365753 - RNA, 20 nt, Artificial Sequence
  Synthetic
gugcaacuucaagucaugau

SEQ ID NO: 365754 - RNA, 21 nt, Artificial Sequence
  Synthetic
agugcaacuucaagucaugau

SEQ ID NO: 365755 - RNA, 22 nt, Artificial Sequence
  Synthetic
gagugcaacuucaagucaugau

SEQ ID NO: 365756 - RNA, 23 nt, Artificial Sequence
  Synthetic
agagugcaacuucaagucaugau

SEQ ID NO: 365757 - RNA, 24 nt, Artificial Sequence
  Synthetic
aagagugcaacuucaagucaugau

SEQ ID NO: 365758 - RNA, 18 nt, Artificial Sequence
  Synthetic
ucaggaaagagucaugau

SEQ ID NO: 365759 - RNA, 19 nt, Artificial Sequence
  Synthetic
gucaggaaagagucaugau

SEQ ID NO: 365760 - RNA, 20 nt, Artificial Sequence
  Synthetic
ugucaggaaagagucaugau

SEQ ID NO: 365761 - RNA, 21 nt, Artificial Sequence
  Synthetic
uugucaggaaagagucaugau

SEQ ID NO: 365762 - RNA, 22 nt, Artificial Sequence
  Synthetic
guugucaggaaagagucaugau

SEQ ID NO: 365763 - RNA, 23 nt, Artificial Sequence
  Synthetic
gguugucaggaaagagucaugau

SEQ ID NO: 365764 - RNA, 24 nt, Artificial Sequence
  Synthetic
ugguugucaggaaagagucaugau

SEQ ID NO: 365765 - RNA, 18 nt, Artificial Sequence
  Synthetic
ugaaacggacuucaugau

SEQ ID NO: 365766 - RNA, 19 nt, Artificial Sequence
  Synthetic
augaaacggacuucaugau

SEQ ID NO: 365767 - RNA, 20 nt, Artificial Sequence
  Synthetic
caugaaacggacuucaugau

SEQ ID NO: 365768 - RNA, 21 nt, Artificial Sequence
  Synthetic
ucaugaaacggacuucaugau

SEQ ID NO: 365769 - RNA, 22 nt, Artificial Sequence
  Synthetic
aucaugaaacggacuucaugau

SEQ ID NO: 365770 - RNA, 23 nt, Artificial Sequence
  Synthetic
gaucaugaaacggacuucaugau

SEQ ID NO: 365771 - RNA, 24 nt, Artificial Sequence
  Synthetic
ugaucaugaaacggacuucaugau

SEQ ID NO: 365772 - RNA, 18 nt, Artificial Sequence
  Synthetic
aaauauaaauuucaugau

SEQ ID NO: 365773 - RNA, 19 nt, Artificial Sequence
  Synthetic
gaaauauaaauuucaugau

SEQ ID NO: 365774 - RNA, 20 nt, Artificial Sequence
  Synthetic
ugaaauauaaauuucaugau

SEQ ID NO: 365775 - RNA, 21 nt, Artificial Sequence
  Synthetic
uugaaauauaaauuucaugau

SEQ ID NO: 365776 - RNA, 22 nt, Artificial Sequence
  Synthetic
uuugaaauauaaauuucaugau

SEQ ID NO: 365777 - RNA, 23 nt, Artificial Sequence
  Synthetic
cuuugaaauauaaauuucaugau

SEQ ID NO: 365778 - RNA, 24 nt, Artificial Sequence
  Synthetic
ccuuugaaauauaaauuucaugau

SEQ ID NO: 365779 - RNA, 18 nt, Artificial Sequence
  Synthetic
accugagcaagagaugau

SEQ ID NO: 365780 - RNA, 19 nt, Artificial Sequence
  Synthetic
uaccugagcaagagaugau

SEQ ID NO: 365781 - RNA, 20 nt, Artificial Sequence
  Synthetic
guaccugagcaagagaugau

SEQ ID NO: 365782 - RNA, 21 nt, Artificial Sequence
  Synthetic
aguaccugagcaagagaugau

SEQ ID NO: 365783 - RNA, 22 nt, Artificial Sequence
  Synthetic
uaguaccugagcaagagaugau

SEQ ID NO: 365784 - RNA, 23 nt, Artificial Sequence
  Synthetic
uuaguaccugagcaagagaugau

SEQ ID NO: 365785 - RNA, 24 nt, Artificial Sequence
  Synthetic
uuuaguaccugagcaagagaugau

SEQ ID NO: 365786 - RNA, 18 nt, Artificial Sequence
  Synthetic
gaacuugagagagaugau

SEQ ID NO: 365787 - RNA, 19 nt, Artificial Sequence
  Synthetic
ugaacuugagagagaugau

SEQ ID NO: 365788 - RNA, 20 nt, Artificial Sequence
  Synthetic
uugaacuugagagagaugau

SEQ ID NO: 365789 - RNA, 21 nt, Artificial Sequence
  Synthetic
uuugaacuugagagagaugau

SEQ ID NO: 365790 - RNA, 22 nt, Artificial Sequence
  Synthetic
auuugaacuugagagagaugau

SEQ ID NO: 365791 - RNA, 23 nt, Artificial Sequence
  Synthetic
aauuugaacuugagagagaugau

SEQ ID NO: 365792 - RNA, 24 nt, Artificial Sequence
  Synthetic
aaauuugaacuugagagagaugau

SEQ ID NO: 365793 - RNA, 18 nt, Artificial Sequence
  Synthetic
agaugaaauagagaugau

SEQ ID NO: 365794 - RNA, 19 nt, Artificial Sequence
  Synthetic
gagaugaaauagagaugau

SEQ ID NO: 365795 - RNA, 20 nt, Artificial Sequence
  Synthetic
agagaugaaauagagaugau

SEQ ID NO: 365796 - RNA, 21 nt, Artificial Sequence
  Synthetic
uagagaugaaauagagaugau

SEQ ID NO: 365797 - RNA, 22 nt, Artificial Sequence
  Synthetic
auagagaugaaauagagaugau

SEQ ID NO: 365798 - RNA, 23 nt, Artificial Sequence
  Synthetic
aauagagaugaaauagagaugau

SEQ ID NO: 365799 - RNA, 24 nt, Artificial Sequence
  Synthetic
aaauagagaugaaauagagaugau

SEQ ID NO: 365800 - RNA, 18 nt, Artificial Sequence
  Synthetic
acgcuugcuuuagaugau

SEQ ID NO: 365801 - RNA, 19 nt, Artificial Sequence
  Synthetic
uacgcuugcuuuagaugau

SEQ ID NO: 365802 - RNA, 20 nt, Artificial Sequence
  Synthetic
auacgcuugcuuuagaugau

SEQ ID NO: 365803 - RNA, 21 nt, Artificial Sequence
  Synthetic
aauacgcuugcuuuagaugau

SEQ ID NO: 365804 - RNA, 22 nt, Artificial Sequence
  Synthetic
aaauacgcuugcuuuagaugau

SEQ ID NO: 365805 - RNA, 23 nt, Artificial Sequence
  Synthetic
gaaauacgcuugcuuuagaugau

SEQ ID NO: 365806 - RNA, 24 nt, Artificial Sequence
  Synthetic
agaaauacgcuugcuuuagaugau

SEQ ID NO: 365807 - RNA, 18 nt, Artificial Sequence
  Synthetic
auaguaugggaggaugau

SEQ ID NO: 365808 - RNA, 19 nt, Artificial Sequence
  Synthetic
gauaguaugggaggaugau

SEQ ID NO: 365809 - RNA, 20 nt, Artificial Sequence
  Synthetic
ggauaguaugggaggaugau

SEQ ID NO: 365810 - RNA, 21 nt, Artificial Sequence
  Synthetic
gggauaguaugggaggaugau

SEQ ID NO: 365811 - RNA, 22 nt, Artificial Sequence
  Synthetic
agggauaguaugggaggaugau

SEQ ID NO: 365812 - RNA, 23 nt, Artificial Sequence
  Synthetic
aagggauaguaugggaggaugau

SEQ ID NO: 365813 - RNA, 24 nt, Artificial Sequence
  Synthetic
gaagggauaguaugggaggaugau

SEQ ID NO: 365814 - RNA, 18 nt, Artificial Sequence
  Synthetic
uuaaguagaugggaugau

SEQ ID NO: 365815 - RNA, 19 nt, Artificial Sequence
  Synthetic
guuaaguagaugggaugau

SEQ ID NO: 365816 - RNA, 20 nt, Artificial Sequence
  Synthetic
cguuaaguagaugggaugau

SEQ ID NO: 365817 - RNA, 21 nt, Artificial Sequence
  Synthetic
ucguuaaguagaugggaugau

SEQ ID NO: 365818 - RNA, 22 nt, Artificial Sequence
  Synthetic
gucguuaaguagaugggaugau

SEQ ID NO: 365819 - RNA, 23 nt, Artificial Sequence
  Synthetic
agucguuaaguagaugggaugau

SEQ ID NO: 365820 - RNA, 24 nt, Artificial Sequence
  Synthetic
uagucguuaaguagaugggaugau

SEQ ID NO: 365821 - RNA, 18 nt, Artificial Sequence
  Synthetic
uaccugaaggaugaugau

SEQ ID NO: 365822 - RNA, 19 nt, Artificial Sequence
  Synthetic
cuaccugaaggaugaugau

SEQ ID NO: 365823 - RNA, 20 nt, Artificial Sequence
  Synthetic
ucuaccugaaggaugaugau

SEQ ID NO: 365824 - RNA, 21 nt, Artificial Sequence
  Synthetic
cucuaccugaaggaugaugau

SEQ ID NO: 365825 - RNA, 22 nt, Artificial Sequence
  Synthetic
gcucuaccugaaggaugaugau

SEQ ID NO: 365826 - RNA, 23 nt, Artificial Sequence
  Synthetic
ggcucuaccugaaggaugaugau

SEQ ID NO: 365827 - RNA, 24 nt, Artificial Sequence
  Synthetic
gggcucuaccugaaggaugaugau

SEQ ID NO: 365828 - RNA, 18 nt, Artificial Sequence
  Synthetic
uuguuuuauuaugaugau

SEQ ID NO: 365829 - RNA, 19 nt, Artificial Sequence
  Synthetic
cuuguuuuauuaugaugau

SEQ ID NO: 365830 - RNA, 20 nt, Artificial Sequence
  Synthetic
gcuuguuuuauuaugaugau

SEQ ID NO: 365831 - RNA, 21 nt, Artificial Sequence
  Synthetic
cgcuuguuuuauuaugaugau

SEQ ID NO: 365832 - RNA, 22 nt, Artificial Sequence
  Synthetic
gcgcuuguuuuauuaugaugau

SEQ ID NO: 365833 - RNA, 23 nt, Artificial Sequence
  Synthetic
ggcgcuuguuuuauuaugaugau

SEQ ID NO: 365834 - RNA, 24 nt, Artificial Sequence
  Synthetic
gggcgcuuguuuuauuaugaugau

SEQ ID NO: 365835 - RNA, 18 nt, Artificial Sequence
  Synthetic
ggggaauaagcugaugau

SEQ ID NO: 365836 - RNA, 19 nt, Artificial Sequence
  Synthetic
gggggaauaagcugaugau

SEQ ID NO: 365837 - RNA, 20 nt, Artificial Sequence
  Synthetic
ugggggaauaagcugaugau

SEQ ID NO: 365838 - RNA, 21 nt, Artificial Sequence
  Synthetic
augggggaauaagcugaugau

SEQ ID NO: 365839 - RNA, 22 nt, Artificial Sequence
  Synthetic
gaugggggaauaagcugaugau

SEQ ID NO: 365840 - RNA, 23 nt, Artificial Sequence
  Synthetic
ggaugggggaauaagcugaugau

SEQ ID NO: 365841 - RNA, 24 nt, Artificial Sequence
  Synthetic
uggaugggggaauaagcugaugau

SEQ ID NO: 365842 - RNA, 18 nt, Artificial Sequence
  Synthetic
aacaucaauucugaugau

SEQ ID NO: 365843 - RNA, 19 nt, Artificial Sequence
  Synthetic
uaacaucaauucugaugau

SEQ ID NO: 365844 - RNA, 20 nt, Artificial Sequence
  Synthetic
cuaacaucaauucugaugau

SEQ ID NO: 365845 - RNA, 21 nt, Artificial Sequence
  Synthetic
gcuaacaucaauucugaugau

SEQ ID NO: 365846 - RNA, 22 nt, Artificial Sequence
  Synthetic
ggcuaacaucaauucugaugau

SEQ ID NO: 365847 - RNA, 23 nt, Artificial Sequence
  Synthetic
aggcuaacaucaauucugaugau

SEQ ID NO: 365848 - RNA, 24 nt, Artificial Sequence
  Synthetic
aaggcuaacaucaauucugaugau

SEQ ID NO: 365849 - RNA, 18 nt, Artificial Sequence
  Synthetic
augguuuuaggugaugau

SEQ ID NO: 365850 - RNA, 19 nt, Artificial Sequence
  Synthetic
uaugguuuuaggugaugau

SEQ ID NO: 365851 - RNA, 20 nt, Artificial Sequence
  Synthetic
auaugguuuuaggugaugau

SEQ ID NO: 365852 - RNA, 21 nt, Artificial Sequence
  Synthetic
aauaugguuuuaggugaugau

SEQ ID NO: 365853 - RNA, 22 nt, Artificial Sequence
  Synthetic
caauaugguuuuaggugaugau

SEQ ID NO: 365854 - RNA, 23 nt, Artificial Sequence
  Synthetic
ccaauaugguuuuaggugaugau

SEQ ID NO: 365855 - RNA, 24 nt, Artificial Sequence
  Synthetic
accaauaugguuuuaggugaugau

SEQ ID NO: 365856 - RNA, 18 nt, Artificial Sequence
  Synthetic
gauauuauuauugaugau

SEQ ID NO: 365857 - RNA, 19 nt, Artificial Sequence
  Synthetic
ugauauuauuauugaugau

SEQ ID NO: 365858 - RNA, 20 nt, Artificial Sequence
  Synthetic
augauauuauuauugaugau

SEQ ID NO: 365859 - RNA, 21 nt, Artificial Sequence
  Synthetic
caugauauuauuauugaugau

SEQ ID NO: 365860 - RNA, 22 nt, Artificial Sequence
  Synthetic
acaugauauuauuauugaugau

SEQ ID NO: 365861 - RNA, 23 nt, Artificial Sequence
  Synthetic
uacaugauauuauuauugaugau

SEQ ID NO: 365862 - RNA, 24 nt, Artificial Sequence
  Synthetic
cuacaugauauuauuauugaugau

SEQ ID NO: 365863 - RNA, 18 nt, Artificial Sequence
  Synthetic
uuugcauuuuuugaugau

SEQ ID NO: 365864 - RNA, 19 nt, Artificial Sequence
  Synthetic
auuugcauuuuuugaugau

SEQ ID NO: 365865 - RNA, 20 nt, Artificial Sequence
  Synthetic
aauuugcauuuuuugaugau

SEQ ID NO: 365866 - RNA, 21 nt, Artificial Sequence
  Synthetic
uaauuugcauuuuuugaugau

SEQ ID NO: 365867 - RNA, 22 nt, Artificial Sequence
  Synthetic
uuaauuugcauuuuuugaugau

SEQ ID NO: 365868 - RNA, 23 nt, Artificial Sequence
  Synthetic
uuuaauuugcauuuuuugaugau

SEQ ID NO: 365869 - RNA, 24 nt, Artificial Sequence
  Synthetic
uuuuaauuugcauuuuuugaugau

SEQ ID NO: 365870 - RNA, 18 nt, Artificial Sequence
  Synthetic
gagacugguugauaugau

SEQ ID NO: 365871 - RNA, 19 nt, Artificial Sequence
  Synthetic
agagacugguugauaugau

SEQ ID NO: 365872 - RNA, 20 nt, Artificial Sequence
  Synthetic
aagagacugguugauaugau

SEQ ID NO: 365873 - RNA, 21 nt, Artificial Sequence
  Synthetic
aaagagacugguugauaugau

SEQ ID NO: 365874 - RNA, 22 nt, Artificial Sequence
  Synthetic
caaagagacugguugauaugau

SEQ ID NO: 365875 - RNA, 23 nt, Artificial Sequence
  Synthetic
gcaaagagacugguugauaugau

SEQ ID NO: 365876 - RNA, 24 nt, Artificial Sequence
  Synthetic
agcaaagagacugguugauaugau

SEQ ID NO: 365877 - RNA, 18 nt, Artificial Sequence
  Synthetic
aaguuaaggguauaugau

SEQ ID NO: 365878 - RNA, 19 nt, Artificial Sequence
  Synthetic
gaaguuaaggguauaugau

SEQ ID NO: 365879 - RNA, 20 nt, Artificial Sequence
  Synthetic
ugaaguuaaggguauaugau

SEQ ID NO: 365880 - RNA, 21 nt, Artificial Sequence
  Synthetic
cugaaguuaaggguauaugau

SEQ ID NO: 365881 - RNA, 22 nt, Artificial Sequence
  Synthetic
gcugaaguuaaggguauaugau

SEQ ID NO: 365882 - RNA, 23 nt, Artificial Sequence
  Synthetic
ggcugaaguuaaggguauaugau

SEQ ID NO: 365883 - RNA, 24 nt, Artificial Sequence
  Synthetic
uggcugaaguuaaggguauaugau

SEQ ID NO: 365884 - RNA, 18 nt, Artificial Sequence
  Synthetic
caaagcuauaacuaugau

SEQ ID NO: 365885 - RNA, 19 nt, Artificial Sequence
  Synthetic
ucaaagcuauaacuaugau

SEQ ID NO: 365886 - RNA, 20 nt, Artificial Sequence
  Synthetic
uucaaagcuauaacuaugau

SEQ ID NO: 365887 - RNA, 21 nt, Artificial Sequence
  Synthetic
cuucaaagcuauaacuaugau

SEQ ID NO: 365888 - RNA, 22 nt, Artificial Sequence
  Synthetic
acuucaaagcuauaacuaugau

SEQ ID NO: 365889 - RNA, 23 nt, Artificial Sequence
  Synthetic
aacuucaaagcuauaacuaugau

SEQ ID NO: 365890 - RNA, 24 nt, Artificial Sequence
  Synthetic
gaacuucaaagcuauaacuaugau

SEQ ID NO: 365891 - RNA, 18 nt, Artificial Sequence
  Synthetic
guagcaagguacuaugau

SEQ ID NO: 365892 - RNA, 19 nt, Artificial Sequence
  Synthetic
aguagcaagguacuaugau

SEQ ID NO: 365893 - RNA, 20 nt, Artificial Sequence
  Synthetic
aaguagcaagguacuaugau

SEQ ID NO: 365894 - RNA, 21 nt, Artificial Sequence
  Synthetic
gaaguagcaagguacuaugau

SEQ ID NO: 365895 - RNA, 22 nt, Artificial Sequence
  Synthetic
agaaguagcaagguacuaugau

SEQ ID NO: 365896 - RNA, 23 nt, Artificial Sequence
  Synthetic
gagaaguagcaagguacuaugau

SEQ ID NO: 365897 - RNA, 24 nt, Artificial Sequence
  Synthetic
ggagaaguagcaagguacuaugau

SEQ ID NO: 365898 - RNA, 18 nt, Artificial Sequence
  Synthetic
ggccucugguccuaugau

SEQ ID NO: 365899 - RNA, 19 nt, Artificial Sequence
  Synthetic
aggccucugguccuaugau

SEQ ID NO: 365900 - RNA, 20 nt, Artificial Sequence
  Synthetic
uaggccucugguccuaugau

SEQ ID NO: 365901 - RNA, 21 nt, Artificial Sequence
  Synthetic
cuaggccucugguccuaugau

SEQ ID NO: 365902 - RNA, 22 nt, Artificial Sequence
  Synthetic
ccuaggccucugguccuaugau

SEQ ID NO: 365903 - RNA, 23 nt, Artificial Sequence
  Synthetic
uccuaggccucugguccuaugau

SEQ ID NO: 365904 - RNA, 24 nt, Artificial Sequence
  Synthetic
uuccuaggccucugguccuaugau

SEQ ID NO: 365905 - RNA, 18 nt, Artificial Sequence
  Synthetic
aagauucuuuccuaugau

SEQ ID NO: 365906 - RNA, 19 nt, Artificial Sequence
  Synthetic
uaagauucuuuccuaugau

SEQ ID NO: 365907 - RNA, 20 nt, Artificial Sequence
  Synthetic
uuaagauucuuuccuaugau

SEQ ID NO: 365908 - RNA, 21 nt, Artificial Sequence
  Synthetic
uuuaagauucuuuccuaugau

SEQ ID NO: 365909 - RNA, 22 nt, Artificial Sequence
  Synthetic
guuuaagauucuuuccuaugau

SEQ ID NO: 365910 - RNA, 23 nt, Artificial Sequence
  Synthetic
uguuuaagauucuuuccuaugau

SEQ ID NO: 365911 - RNA, 24 nt, Artificial Sequence
  Synthetic
cuguuuaagauucuuuccuaugau

SEQ ID NO: 365912 - RNA, 18 nt, Artificial Sequence
  Synthetic
uaauauaacaucuaugau

SEQ ID NO: 365913 - RNA, 19 nt, Artificial Sequence
  Synthetic
guaauauaacaucuaugau

SEQ ID NO: 365914 - RNA, 20 nt, Artificial Sequence
  Synthetic
gguaauauaacaucuaugau

SEQ ID NO: 365915 - RNA, 21 nt, Artificial Sequence
  Synthetic
ggguaauauaacaucuaugau

SEQ ID NO: 365916 - RNA, 22 nt, Artificial Sequence
  Synthetic
aggguaauauaacaucuaugau

SEQ ID NO: 365917 - RNA, 23 nt, Artificial Sequence
  Synthetic
uaggguaauauaacaucuaugau

SEQ ID NO: 365918 - RNA, 24 nt, Artificial Sequence
  Synthetic
guaggguaauauaacaucuaugau

SEQ ID NO: 365919 - RNA, 18 nt, Artificial Sequence
  Synthetic
acaccagagugguaugau

SEQ ID NO: 365920 - RNA, 19 nt, Artificial Sequence
  Synthetic
cacaccagagugguaugau

SEQ ID NO: 365921 - RNA, 20 nt, Artificial Sequence
  Synthetic
ccacaccagagugguaugau

SEQ ID NO: 365922 - RNA, 21 nt, Artificial Sequence
  Synthetic
uccacaccagagugguaugau

SEQ ID NO: 365923 - RNA, 22 nt, Artificial Sequence
  Synthetic
auccacaccagagugguaugau

SEQ ID NO: 365924 - RNA, 23 nt, Artificial Sequence
  Synthetic
uauccacaccagagugguaugau

SEQ ID NO: 365925 - RNA, 24 nt, Artificial Sequence
  Synthetic
cuauccacaccagagugguaugau

SEQ ID NO: 365926 - RNA, 18 nt, Artificial Sequence
  Synthetic
cuuugagugcuguaugau

SEQ ID NO: 365927 - RNA, 19 nt, Artificial Sequence
  Synthetic
acuuugagugcuguaugau

SEQ ID NO: 365928 - RNA, 20 nt, Artificial Sequence
  Synthetic
gacuuugagugcuguaugau

SEQ ID NO: 365929 - RNA, 21 nt, Artificial Sequence
  Synthetic
ugacuuugagugcuguaugau

SEQ ID NO: 365930 - RNA, 22 nt, Artificial Sequence
  Synthetic
gugacuuugagugcuguaugau

SEQ ID NO: 365931 - RNA, 23 nt, Artificial Sequence
  Synthetic
agugacuuugagugcuguaugau

SEQ ID NO: 365932 - RNA, 24 nt, Artificial Sequence
  Synthetic
cagugacuuugagugcuguaugau

SEQ ID NO: 365933 - RNA, 18 nt, Artificial Sequence
  Synthetic
uuauguuuuguguaugau

SEQ ID NO: 365934 - RNA, 19 nt, Artificial Sequence
  Synthetic
uuuauguuuuguguaugau

SEQ ID NO: 365935 - RNA, 20 nt, Artificial Sequence
  Synthetic
auuuauguuuuguguaugau

SEQ ID NO: 365936 - RNA, 21 nt, Artificial Sequence
  Synthetic
aauuuauguuuuguguaugau

SEQ ID NO: 365937 - RNA, 22 nt, Artificial Sequence
  Synthetic
gaauuuauguuuuguguaugau

SEQ ID NO: 365938 - RNA, 23 nt, Artificial Sequence
  Synthetic
agaauuuauguuuuguguaugau

SEQ ID NO: 365939 - RNA, 24 nt, Artificial Sequence
  Synthetic
uagaauuuauguuuuguguaugau

SEQ ID NO: 365940 - RNA, 18 nt, Artificial Sequence
  Synthetic
auuuucaaaaauuaugau

SEQ ID NO: 365941 - RNA, 19 nt, Artificial Sequence
  Synthetic
uauuuucaaaaauuaugau

SEQ ID NO: 365942 - RNA, 20 nt, Artificial Sequence
  Synthetic
auauuuucaaaaauuaugau

SEQ ID NO: 365943 - RNA, 21 nt, Artificial Sequence
  Synthetic
cauauuuucaaaaauuaugau

SEQ ID NO: 365944 - RNA, 22 nt, Artificial Sequence
  Synthetic
acauauuuucaaaaauuaugau

SEQ ID NO: 365945 - RNA, 23 nt, Artificial Sequence
  Synthetic
aacauauuuucaaaaauuaugau

SEQ ID NO: 365946 - RNA, 24 nt, Artificial Sequence
  Synthetic
caacauauuuucaaaaauuaugau

SEQ ID NO: 365947 - RNA, 18 nt, Artificial Sequence
  Synthetic
cuuauuauaaaaacugau

SEQ ID NO: 365948 - RNA, 19 nt, Artificial Sequence
  Synthetic
gcuuauuauaaaaacugau

SEQ ID NO: 365949 - RNA, 20 nt, Artificial Sequence
  Synthetic
ugcuuauuauaaaaacugau

SEQ ID NO: 365950 - RNA, 21 nt, Artificial Sequence
  Synthetic
augcuuauuauaaaaacugau

SEQ ID NO: 365951 - RNA, 22 nt, Artificial Sequence
  Synthetic
aaugcuuauuauaaaaacugau

SEQ ID NO: 365952 - RNA, 23 nt, Artificial Sequence
  Synthetic
uaaugcuuauuauaaaaacugau

SEQ ID NO: 365953 - RNA, 24 nt, Artificial Sequence
  Synthetic
auaaugcuuauuauaaaaacugau

SEQ ID NO: 365954 - RNA, 18 nt, Artificial Sequence
  Synthetic
uguaacaagucaacugau

SEQ ID NO: 365955 - RNA, 19 nt, Artificial Sequence
  Synthetic
uuguaacaagucaacugau

SEQ ID NO: 365956 - RNA, 20 nt, Artificial Sequence
  Synthetic
guuguaacaagucaacugau

SEQ ID NO: 365957 - RNA, 21 nt, Artificial Sequence
  Synthetic
gguuguaacaagucaacugau

SEQ ID NO: 365958 - RNA, 22 nt, Artificial Sequence
  Synthetic
cgguuguaacaagucaacugau

SEQ ID NO: 365959 - RNA, 23 nt, Artificial Sequence
  Synthetic
acgguuguaacaagucaacugau

SEQ ID NO: 365960 - RNA, 24 nt, Artificial Sequence
  Synthetic
gacgguuguaacaagucaacugau

SEQ ID NO: 365961 - RNA, 18 nt, Artificial Sequence
  Synthetic
auuacuguuggcacugau

SEQ ID NO: 365962 - RNA, 19 nt, Artificial Sequence
  Synthetic
gauuacuguuggcacugau

SEQ ID NO: 365963 - RNA, 20 nt, Artificial Sequence
  Synthetic
agauuacuguuggcacugau

SEQ ID NO: 365964 - RNA, 21 nt, Artificial Sequence
  Synthetic
aagauuacuguuggcacugau

SEQ ID NO: 365965 - RNA, 22 nt, Artificial Sequence
  Synthetic
caagauuacuguuggcacugau

SEQ ID NO: 365966 - RNA, 23 nt, Artificial Sequence
  Synthetic
ucaagauuacuguuggcacugau

SEQ ID NO: 365967 - RNA, 24 nt, Artificial Sequence
  Synthetic
uucaagauuacuguuggcacugau

SEQ ID NO: 365968 - RNA, 18 nt, Artificial Sequence
  Synthetic
uguucguuguagacugau

SEQ ID NO: 365969 - RNA, 19 nt, Artificial Sequence
  Synthetic
auguucguuguagacugau

SEQ ID NO: 365970 - RNA, 20 nt, Artificial Sequence
  Synthetic
cauguucguuguagacugau

SEQ ID NO: 365971 - RNA, 21 nt, Artificial Sequence
  Synthetic
acauguucguuguagacugau

SEQ ID NO: 365972 - RNA, 22 nt, Artificial Sequence
  Synthetic
uacauguucguuguagacugau

SEQ ID NO: 365973 - RNA, 23 nt, Artificial Sequence
  Synthetic
uuacauguucguuguagacugau

SEQ ID NO: 365974 - RNA, 24 nt, Artificial Sequence
  Synthetic
guuacauguucguuguagacugau

SEQ ID NO: 365975 - RNA, 18 nt, Artificial Sequence
  Synthetic
uaugggauagguacugau

SEQ ID NO: 365976 - RNA, 19 nt, Artificial Sequence
  Synthetic
guaugggauagguacugau

SEQ ID NO: 365977 - RNA, 20 nt, Artificial Sequence
  Synthetic
uguaugggauagguacugau

SEQ ID NO: 365978 - RNA, 21 nt, Artificial Sequence
  Synthetic
auguaugggauagguacugau

SEQ ID NO: 365979 - RNA, 22 nt, Artificial Sequence
  Synthetic
gauguaugggauagguacugau

SEQ ID NO: 365980 - RNA, 23 nt, Artificial Sequence
  Synthetic
ugauguaugggauagguacugau

SEQ ID NO: 365981 - RNA, 24 nt, Artificial Sequence
  Synthetic
augauguaugggauagguacugau

SEQ ID NO: 365982 - RNA, 18 nt, Artificial Sequence
  Synthetic
aguuauaaaguaccugau

SEQ ID NO: 365983 - RNA, 19 nt, Artificial Sequence
  Synthetic
uaguuauaaaguaccugau

SEQ ID NO: 365984 - RNA, 20 nt, Artificial Sequence
  Synthetic
auaguuauaaaguaccugau

SEQ ID NO: 365985 - RNA, 21 nt, Artificial Sequence
  Synthetic
aauaguuauaaaguaccugau

SEQ ID NO: 365986 - RNA, 22 nt, Artificial Sequence
  Synthetic
caauaguuauaaaguaccugau

SEQ ID NO: 365987 - RNA, 23 nt, Artificial Sequence
  Synthetic
gcaauaguuauaaaguaccugau

SEQ ID NO: 365988 - RNA, 24 nt, Artificial Sequence
  Synthetic
ugcaauaguuauaaaguaccugau

SEQ ID NO: 365989 - RNA, 18 nt, Artificial Sequence
  Synthetic
aaauaguagcauccugau

SEQ ID NO: 365990 - RNA, 19 nt, Artificial Sequence
  Synthetic
aaaauaguagcauccugau

SEQ ID NO: 365991 - RNA, 20 nt, Artificial Sequence
  Synthetic
uaaaauaguagcauccugau

SEQ ID NO: 365992 - RNA, 21 nt, Artificial Sequence
  Synthetic
auaaaauaguagcauccugau

SEQ ID NO: 365993 - RNA, 22 nt, Artificial Sequence
  Synthetic
cauaaaauaguagcauccugau

SEQ ID NO: 365994 - RNA, 23 nt, Artificial Sequence
  Synthetic
ccauaaaauaguagcauccugau

SEQ ID NO: 365995 - RNA, 24 nt, Artificial Sequence
  Synthetic
uccauaaaauaguagcauccugau

SEQ ID NO: 365996 - RNA, 18 nt, Artificial Sequence
  Synthetic
uugucuugcauuccugau

SEQ ID NO: 365997 - RNA, 19 nt, Artificial Sequence
  Synthetic
auugucuugcauuccugau

SEQ ID NO: 365998 - RNA, 20 nt, Artificial Sequence
  Synthetic
uauugucuugcauuccugau

SEQ ID NO: 365999 - RNA, 21 nt, Artificial Sequence
  Synthetic
uuauugucuugcauuccugau

SEQ ID NO: 366000 - RNA, 22 nt, Artificial Sequence
  Synthetic
guuauugucuugcauuccugau

SEQ ID NO: 366001 - RNA, 23 nt, Artificial Sequence
  Synthetic
uguuauugucuugcauuccugau

SEQ ID NO: 366002 - RNA, 24 nt, Artificial Sequence
  Synthetic
auguuauugucuugcauuccugau

SEQ ID NO: 366003 - RNA, 18 nt, Artificial Sequence
  Synthetic
uuguguagcacagcugau

SEQ ID NO: 366004 - RNA, 19 nt, Artificial Sequence
  Synthetic
uuuguguagcacagcugau

SEQ ID NO: 366005 - RNA, 20 nt, Artificial Sequence
  Synthetic
cuuuguguagcacagcugau

SEQ ID NO: 366006 - RNA, 21 nt, Artificial Sequence
  Synthetic
ucuuuguguagcacagcugau

SEQ ID NO: 366007 - RNA, 22 nt, Artificial Sequence
  Synthetic
aucuuuguguagcacagcugau

SEQ ID NO: 366008 - RNA, 23 nt, Artificial Sequence
  Synthetic
uaucuuuguguagcacagcugau

SEQ ID NO: 366009 - RNA, 24 nt, Artificial Sequence
  Synthetic
auaucuuuguguagcacagcugau

SEQ ID NO: 366010 - RNA, 18 nt, Artificial Sequence
  Synthetic
uggaacugaagagcugau

SEQ ID NO: 366011 - RNA, 19 nt, Artificial Sequence
  Synthetic
auggaacugaagagcugau

SEQ ID NO: 366012 - RNA, 20 nt, Artificial Sequence
  Synthetic
cauggaacugaagagcugau

SEQ ID NO: 366013 - RNA, 21 nt, Artificial Sequence
  Synthetic
acauggaacugaagagcugau

SEQ ID NO: 366014 - RNA, 22 nt, Artificial Sequence
  Synthetic
uacauggaacugaagagcugau

SEQ ID NO: 366015 - RNA, 23 nt, Artificial Sequence
  Synthetic
uuacauggaacugaagagcugau

SEQ ID NO: 366016 - RNA, 24 nt, Artificial Sequence
  Synthetic
guuacauggaacugaagagcugau

SEQ ID NO: 366017 - RNA, 18 nt, Artificial Sequence
  Synthetic
gcacauauucuagcugau

SEQ ID NO: 366018 - RNA, 19 nt, Artificial Sequence
  Synthetic
ggcacauauucuagcugau

SEQ ID NO: 366019 - RNA, 20 nt, Artificial Sequence
  Synthetic
uggcacauauucuagcugau

SEQ ID NO: 366020 - RNA, 21 nt, Artificial Sequence
  Synthetic
uuggcacauauucuagcugau

SEQ ID NO: 366021 - RNA, 22 nt, Artificial Sequence
  Synthetic
cuuggcacauauucuagcugau

SEQ ID NO: 366022 - RNA, 23 nt, Artificial Sequence
  Synthetic
ccuuggcacauauucuagcugau

SEQ ID NO: 366023 - RNA, 24 nt, Artificial Sequence
  Synthetic
accuuggcacauauucuagcugau

SEQ ID NO: 366024 - RNA, 18 nt, Artificial Sequence
  Synthetic
gucacaugcaacgcugau

SEQ ID NO: 366025 - RNA, 19 nt, Artificial Sequence
  Synthetic
ugucacaugcaacgcugau

SEQ ID NO: 366026 - RNA, 20 nt, Artificial Sequence
  Synthetic
cugucacaugcaacgcugau

SEQ ID NO: 366027 - RNA, 21 nt, Artificial Sequence
  Synthetic
acugucacaugcaacgcugau

SEQ ID NO: 366028 - RNA, 22 nt, Artificial Sequence
  Synthetic
gacugucacaugcaacgcugau

SEQ ID NO: 366029 - RNA, 23 nt, Artificial Sequence
  Synthetic
ugacugucacaugcaacgcugau

SEQ ID NO: 366030 - RNA, 24 nt, Artificial Sequence
  Synthetic
augacugucacaugcaacgcugau

SEQ ID NO: 366031 - RNA, 18 nt, Artificial Sequence
  Synthetic
gguaacaaaagggcugau

SEQ ID NO: 366032 - RNA, 19 nt, Artificial Sequence
  Synthetic
ggguaacaaaagggcugau

SEQ ID NO: 366033 - RNA, 20 nt, Artificial Sequence
  Synthetic
uggguaacaaaagggcugau

SEQ ID NO: 366034 - RNA, 21 nt, Artificial Sequence
  Synthetic
auggguaacaaaagggcugau

SEQ ID NO: 366035 - RNA, 22 nt, Artificial Sequence
  Synthetic
uauggguaacaaaagggcugau

SEQ ID NO: 366036 - RNA, 23 nt, Artificial Sequence
  Synthetic
guauggguaacaaaagggcugau

SEQ ID NO: 366037 - RNA, 24 nt, Artificial Sequence
  Synthetic
uguauggguaacaaaagggcugau

SEQ ID NO: 366038 - RNA, 18 nt, Artificial Sequence
  Synthetic
uaauauaauaaugcugau

SEQ ID NO: 366039 - RNA, 19 nt, Artificial Sequence
  Synthetic
auaauauaauaaugcugau

SEQ ID NO: 366040 - RNA, 20 nt, Artificial Sequence
  Synthetic
gauaauauaauaaugcugau

SEQ ID NO: 366041 - RNA, 21 nt, Artificial Sequence
  Synthetic
agauaauauaauaaugcugau

SEQ ID NO: 366042 - RNA, 22 nt, Artificial Sequence
  Synthetic
aagauaauauaauaaugcugau

SEQ ID NO: 366043 - RNA, 23 nt, Artificial Sequence
  Synthetic
uaagauaauauaauaaugcugau

SEQ ID NO: 366044 - RNA, 24 nt, Artificial Sequence
  Synthetic
uuaagauaauauaauaaugcugau

SEQ ID NO: 366045 - RNA, 18 nt, Artificial Sequence
  Synthetic
uaacuuuuauaugcugau

SEQ ID NO: 366046 - RNA, 19 nt, Artificial Sequence
  Synthetic
auaacuuuuauaugcugau

SEQ ID NO: 366047 - RNA, 20 nt, Artificial Sequence
  Synthetic
gauaacuuuuauaugcugau

SEQ ID NO: 366048 - RNA, 21 nt, Artificial Sequence
  Synthetic
ggauaacuuuuauaugcugau

SEQ ID NO: 366049 - RNA, 22 nt, Artificial Sequence
  Synthetic
uggauaacuuuuauaugcugau

SEQ ID NO: 366050 - RNA, 23 nt, Artificial Sequence
  Synthetic
cuggauaacuuuuauaugcugau

SEQ ID NO: 366051 - RNA, 24 nt, Artificial Sequence
  Synthetic
acuggauaacuuuuauaugcugau

SEQ ID NO: 366052 - RNA, 18 nt, Artificial Sequence
  Synthetic
uuuggaggaucugcugau

SEQ ID NO: 366053 - RNA, 19 nt, Artificial Sequence
  Synthetic
uuuuggaggaucugcugau

SEQ ID NO: 366054 - RNA, 20 nt, Artificial Sequence
  Synthetic
cuuuuggaggaucugcugau

SEQ ID NO: 366055 - RNA, 21 nt, Artificial Sequence
  Synthetic
acuuuuggaggaucugcugau

SEQ ID NO: 366056 - RNA, 22 nt, Artificial Sequence
  Synthetic
uacuuuuggaggaucugcugau

SEQ ID NO: 366057 - RNA, 23 nt, Artificial Sequence
  Synthetic
uuacuuuuggaggaucugcugau

SEQ ID NO: 366058 - RNA, 24 nt, Artificial Sequence
  Synthetic
uuuacuuuuggaggaucugcugau

SEQ ID NO: 366059 - RNA, 18 nt, Artificial Sequence
  Synthetic
ucgcuccugagugcugau

SEQ ID NO: 366060 - RNA, 19 nt, Artificial Sequence
  Synthetic
aucgcuccugagugcugau

SEQ ID NO: 366061 - RNA, 20 nt, Artificial Sequence
  Synthetic
caucgcuccugagugcugau

SEQ ID NO: 366062 - RNA, 21 nt, Artificial Sequence
  Synthetic
ucaucgcuccugagugcugau

SEQ ID NO: 366063 - RNA, 22 nt, Artificial Sequence
  Synthetic
aucaucgcuccugagugcugau

SEQ ID NO: 366064 - RNA, 23 nt, Artificial Sequence
  Synthetic
caucaucgcuccugagugcugau

SEQ ID NO: 366065 - RNA, 24 nt, Artificial Sequence
  Synthetic
acaucaucgcuccugagugcugau

SEQ ID NO: 366066 - RNA, 18 nt, Artificial Sequence
  Synthetic
acuacaaacucaucugau

SEQ ID NO: 366067 - RNA, 19 nt, Artificial Sequence
  Synthetic
aacuacaaacucaucugau

SEQ ID NO: 366068 - RNA, 20 nt, Artificial Sequence
  Synthetic
caacuacaaacucaucugau

SEQ ID NO: 366069 - RNA, 21 nt, Artificial Sequence
  Synthetic
acaacuacaaacucaucugau

SEQ ID NO: 366070 - RNA, 22 nt, Artificial Sequence
  Synthetic
uacaacuacaaacucaucugau

SEQ ID NO: 366071 - RNA, 23 nt, Artificial Sequence
  Synthetic
auacaacuacaaacucaucugau

SEQ ID NO: 366072 - RNA, 24 nt, Artificial Sequence
  Synthetic
aauacaacuacaaacucaucugau

SEQ ID NO: 366073 - RNA, 18 nt, Artificial Sequence
  Synthetic
cacuuaaugguaucugau

SEQ ID NO: 366074 - RNA, 19 nt, Artificial Sequence
  Synthetic
acacuuaaugguaucugau

SEQ ID NO: 366075 - RNA, 20 nt, Artificial Sequence
  Synthetic
aacacuuaaugguaucugau

SEQ ID NO: 366076 - RNA, 21 nt, Artificial Sequence
  Synthetic
aaacacuuaaugguaucugau

SEQ ID NO: 366077 - RNA, 22 nt, Artificial Sequence
  Synthetic
aaaacacuuaaugguaucugau

SEQ ID NO: 366078 - RNA, 23 nt, Artificial Sequence
  Synthetic
aaaaacacuuaaugguaucugau

SEQ ID NO: 366079 - RNA, 24 nt, Artificial Sequence
  Synthetic
uaaaaacacuuaaugguaucugau

SEQ ID NO: 366080 - RNA, 18 nt, Artificial Sequence
  Synthetic
cuaugaaaagacucugau

SEQ ID NO: 366081 - RNA, 19 nt, Artificial Sequence
  Synthetic
acuaugaaaagacucugau

SEQ ID NO: 366082 - RNA, 20 nt, Artificial Sequence
  Synthetic
uacuaugaaaagacucugau

SEQ ID NO: 366083 - RNA, 21 nt, Artificial Sequence
  Synthetic
uuacuaugaaaagacucugau

SEQ ID NO: 366084 - RNA, 22 nt, Artificial Sequence
  Synthetic
uuuacuaugaaaagacucugau

SEQ ID NO: 366085 - RNA, 23 nt, Artificial Sequence
  Synthetic
cuuuacuaugaaaagacucugau

SEQ ID NO: 366086 - RNA, 24 nt, Artificial Sequence
  Synthetic
ucuuuacuaugaaaagacucugau

SEQ ID NO: 366087 - RNA, 18 nt, Artificial Sequence
  Synthetic
guauuuuuaugcucugau

SEQ ID NO: 366088 - RNA, 19 nt, Artificial Sequence
  Synthetic
uguauuuuuaugcucugau

SEQ ID NO: 366089 - RNA, 20 nt, Artificial Sequence
  Synthetic
guguauuuuuaugcucugau

SEQ ID NO: 366090 - RNA, 21 nt, Artificial Sequence
  Synthetic
uguguauuuuuaugcucugau

SEQ ID NO: 366091 - RNA, 22 nt, Artificial Sequence
  Synthetic
guguguauuuuuaugcucugau

SEQ ID NO: 366092 - RNA, 23 nt, Artificial Sequence
  Synthetic
aguguguauuuuuaugcucugau

SEQ ID NO: 366093 - RNA, 24 nt, Artificial Sequence
  Synthetic
aaguguguauuuuuaugcucugau

SEQ ID NO: 366094 - RNA, 18 nt, Artificial Sequence
  Synthetic
auauuuaggugcucugau

SEQ ID NO: 366095 - RNA, 19 nt, Artificial Sequence
  Synthetic
uauauuuaggugcucugau

SEQ ID NO: 366096 - RNA, 20 nt, Artificial Sequence
  Synthetic
auauauuuaggugcucugau

SEQ ID NO: 366097 - RNA, 21 nt, Artificial Sequence
  Synthetic
uauauauuuaggugcucugau

SEQ ID NO: 366098 - RNA, 22 nt, Artificial Sequence
  Synthetic
uuauauauuuaggugcucugau

SEQ ID NO: 366099 - RNA, 23 nt, Artificial Sequence
  Synthetic
uuuauauauuuaggugcucugau

SEQ ID NO: 366100 - RNA, 24 nt, Artificial Sequence
  Synthetic
cuuuauauauuuaggugcucugau

SEQ ID NO: 366101 - RNA, 18 nt, Artificial Sequence
  Synthetic
gcaggcuuccucucugau

SEQ ID NO: 366102 - RNA, 19 nt, Artificial Sequence
  Synthetic
ggcaggcuuccucucugau

SEQ ID NO: 366103 - RNA, 20 nt, Artificial Sequence
  Synthetic
aggcaggcuuccucucugau

SEQ ID NO: 366104 - RNA, 21 nt, Artificial Sequence
  Synthetic
uaggcaggcuuccucucugau

SEQ ID NO: 366105 - RNA, 22 nt, Artificial Sequence
  Synthetic
guaggcaggcuuccucucugau

SEQ ID NO: 366106 - RNA, 23 nt, Artificial Sequence
  Synthetic
uguaggcaggcuuccucucugau

SEQ ID NO: 366107 - RNA, 24 nt, Artificial Sequence
  Synthetic
cuguaggcaggcuuccucucugau

SEQ ID NO: 366108 - RNA, 18 nt, Artificial Sequence
  Synthetic
uaccagugggauucugau

SEQ ID NO: 366109 - RNA, 19 nt, Artificial Sequence
  Synthetic
auaccagugggauucugau

SEQ ID NO: 366110 - RNA, 20 nt, Artificial Sequence
  Synthetic
aauaccagugggauucugau

SEQ ID NO: 366111 - RNA, 21 nt, Artificial Sequence
  Synthetic
aaauaccagugggauucugau

SEQ ID NO: 366112 - RNA, 22 nt, Artificial Sequence
  Synthetic
aaaauaccagugggauucugau

SEQ ID NO: 366113 - RNA, 23 nt, Artificial Sequence
  Synthetic
uaaaauaccagugggauucugau

SEQ ID NO: 366114 - RNA, 24 nt, Artificial Sequence
  Synthetic
auaaaauaccagugggauucugau

SEQ ID NO: 366115 - RNA, 18 nt, Artificial Sequence
  Synthetic
acagguacuuauucugau

SEQ ID NO: 366116 - RNA, 19 nt, Artificial Sequence
  Synthetic
cacagguacuuauucugau

SEQ ID NO: 366117 - RNA, 20 nt, Artificial Sequence
  Synthetic
acacagguacuuauucugau

SEQ ID NO: 366118 - RNA, 21 nt, Artificial Sequence
  Synthetic
aacacagguacuuauucugau

SEQ ID NO: 366119 - RNA, 22 nt, Artificial Sequence
  Synthetic
caacacagguacuuauucugau

SEQ ID NO: 366120 - RNA, 23 nt, Artificial Sequence
  Synthetic
ucaacacagguacuuauucugau

SEQ ID NO: 366121 - RNA, 24 nt, Artificial Sequence
  Synthetic
aucaacacagguacuuauucugau

SEQ ID NO: 366122 - RNA, 18 nt, Artificial Sequence
  Synthetic
cccaagcugaguucugau

SEQ ID NO: 366123 - RNA, 19 nt, Artificial Sequence
  Synthetic
ucccaagcugaguucugau

SEQ ID NO: 366124 - RNA, 20 nt, Artificial Sequence
  Synthetic
cucccaagcugaguucugau

SEQ ID NO: 366125 - RNA, 21 nt, Artificial Sequence
  Synthetic
ccucccaagcugaguucugau

SEQ ID NO: 366126 - RNA, 22 nt, Artificial Sequence
  Synthetic
accucccaagcugaguucugau

SEQ ID NO: 366127 - RNA, 23 nt, Artificial Sequence
  Synthetic
caccucccaagcugaguucugau

SEQ ID NO: 366128 - RNA, 24 nt, Artificial Sequence
  Synthetic
ucaccucccaagcugaguucugau

SEQ ID NO: 366129 - RNA, 18 nt, Artificial Sequence
  Synthetic
agaucaaagauuucugau

SEQ ID NO: 366130 - RNA, 19 nt, Artificial Sequence
  Synthetic
aagaucaaagauuucugau

SEQ ID NO: 366131 - RNA, 20 nt, Artificial Sequence
  Synthetic
uaagaucaaagauuucugau

SEQ ID NO: 366132 - RNA, 21 nt, Artificial Sequence
  Synthetic
auaagaucaaagauuucugau

SEQ ID NO: 366133 - RNA, 22 nt, Artificial Sequence
  Synthetic
aauaagaucaaagauuucugau

SEQ ID NO: 366134 - RNA, 23 nt, Artificial Sequence
  Synthetic
aaauaagaucaaagauuucugau

SEQ ID NO: 366135 - RNA, 24 nt, Artificial Sequence
  Synthetic
caaauaagaucaaagauuucugau

SEQ ID NO: 366136 - RNA, 18 nt, Artificial Sequence
  Synthetic
cuuuuaagaaaaagugau

SEQ ID NO: 366137 - RNA, 19 nt, Artificial Sequence
  Synthetic
ucuuuuaagaaaaagugau

SEQ ID NO: 366138 - RNA, 20 nt, Artificial Sequence
  Synthetic
uucuuuuaagaaaaagugau

SEQ ID NO: 366139 - RNA, 21 nt, Artificial Sequence
  Synthetic
uuucuuuuaagaaaaagugau

SEQ ID NO: 366140 - RNA, 22 nt, Artificial Sequence
  Synthetic
uuuucuuuuaagaaaaagugau

SEQ ID NO: 366141 - RNA, 23 nt, Artificial Sequence
  Synthetic
uuuuucuuuuaagaaaaagugau

SEQ ID NO: 366142 - RNA, 24 nt, Artificial Sequence
  Synthetic
auuuuucuuuuaagaaaaagugau

SEQ ID NO: 366143 - RNA, 18 nt, Artificial Sequence
  Synthetic
gguaaaaucaaaagugau

SEQ ID NO: 366144 - RNA, 19 nt, Artificial Sequence
  Synthetic
ugguaaaaucaaaagugau

SEQ ID NO: 366145 - RNA, 20 nt, Artificial Sequence
  Synthetic
augguaaaaucaaaagugau

SEQ ID NO: 366146 - RNA, 21 nt, Artificial Sequence
  Synthetic
gaugguaaaaucaaaagugau

SEQ ID NO: 366147 - RNA, 22 nt, Artificial Sequence
  Synthetic
agaugguaaaaucaaaagugau

SEQ ID NO: 366148 - RNA, 23 nt, Artificial Sequence
  Synthetic
cagaugguaaaaucaaaagugau

SEQ ID NO: 366149 - RNA, 24 nt, Artificial Sequence
  Synthetic
acagaugguaaaaucaaaagugau

SEQ ID NO: 366150 - RNA, 18 nt, Artificial Sequence
  Synthetic
uguuggaaccaaagugau

SEQ ID NO: 366151 - RNA, 19 nt, Artificial Sequence
  Synthetic
cuguuggaaccaaagugau

SEQ ID NO: 366152 - RNA, 20 nt, Artificial Sequence
  Synthetic
gcuguuggaaccaaagugau

SEQ ID NO: 366153 - RNA, 21 nt, Artificial Sequence
  Synthetic
agcuguuggaaccaaagugau

SEQ ID NO: 366154 - RNA, 22 nt, Artificial Sequence
  Synthetic
cagcuguuggaaccaaagugau

SEQ ID NO: 366155 - RNA, 23 nt, Artificial Sequence
  Synthetic
gcagcuguuggaaccaaagugau

SEQ ID NO: 366156 - RNA, 24 nt, Artificial Sequence
  Synthetic
ggcagcuguuggaaccaaagugau

SEQ ID NO: 366157 - RNA, 18 nt, Artificial Sequence
  Synthetic
gguguaccugaaagugau

SEQ ID NO: 366158 - RNA, 19 nt, Artificial Sequence
  Synthetic
ugguguaccugaaagugau

SEQ ID NO: 366159 - RNA, 20 nt, Artificial Sequence
  Synthetic
uugguguaccugaaagugau

SEQ ID NO: 366160 - RNA, 21 nt, Artificial Sequence
  Synthetic
auugguguaccugaaagugau

SEQ ID NO: 366161 - RNA, 22 nt, Artificial Sequence
  Synthetic
gauugguguaccugaaagugau

SEQ ID NO: 366162 - RNA, 23 nt, Artificial Sequence
  Synthetic
ugauugguguaccugaaagugau

SEQ ID NO: 366163 - RNA, 24 nt, Artificial Sequence
  Synthetic
uugauugguguaccugaaagugau

SEQ ID NO: 366164 - RNA, 18 nt, Artificial Sequence
  Synthetic
auuaugguggcaagugau

SEQ ID NO: 366165 - RNA, 19 nt, Artificial Sequence
  Synthetic
aauuaugguggcaagugau

SEQ ID NO: 366166 - RNA, 20 nt, Artificial Sequence
  Synthetic
uaauuaugguggcaagugau

SEQ ID NO: 366167 - RNA, 21 nt, Artificial Sequence
  Synthetic
guaauuaugguggcaagugau

SEQ ID NO: 366168 - RNA, 22 nt, Artificial Sequence
  Synthetic
uguaauuaugguggcaagugau

SEQ ID NO: 366169 - RNA, 23 nt, Artificial Sequence
  Synthetic
uuguaauuaugguggcaagugau

SEQ ID NO: 366170 - RNA, 24 nt, Artificial Sequence
  Synthetic
auuguaauuaugguggcaagugau

SEQ ID NO: 366171 - RNA, 18 nt, Artificial Sequence
  Synthetic
gagugggagcuaagugau

SEQ ID NO: 366172 - RNA, 19 nt, Artificial Sequence
  Synthetic
ugagugggagcuaagugau

SEQ ID NO: 366173 - RNA, 20 nt, Artificial Sequence
  Synthetic
augagugggagcuaagugau

SEQ ID NO: 366174 - RNA, 21 nt, Artificial Sequence
  Synthetic
uaugagugggagcuaagugau

SEQ ID NO: 366175 - RNA, 22 nt, Artificial Sequence
  Synthetic
uuaugagugggagcuaagugau

SEQ ID NO: 366176 - RNA, 23 nt, Artificial Sequence
  Synthetic
guuaugagugggagcuaagugau

SEQ ID NO: 366177 - RNA, 24 nt, Artificial Sequence
  Synthetic
aguuaugagugggagcuaagugau

SEQ ID NO: 366178 - RNA, 18 nt, Artificial Sequence
  Synthetic
uaagugcuuuuaagugau

SEQ ID NO: 366179 - RNA, 19 nt, Artificial Sequence
  Synthetic
cuaagugcuuuuaagugau

SEQ ID NO: 366180 - RNA, 20 nt, Artificial Sequence
  Synthetic
ucuaagugcuuuuaagugau

SEQ ID NO: 366181 - RNA, 21 nt, Artificial Sequence
  Synthetic
uucuaagugcuuuuaagugau

SEQ ID NO: 366182 - RNA, 22 nt, Artificial Sequence
  Synthetic
guucuaagugcuuuuaagugau

SEQ ID NO: 366183 - RNA, 23 nt, Artificial Sequence
  Synthetic
aguucuaagugcuuuuaagugau

SEQ ID NO: 366184 - RNA, 24 nt, Artificial Sequence
  Synthetic
uaguucuaagugcuuuuaagugau

SEQ ID NO: 366185 - RNA, 18 nt, Artificial Sequence
  Synthetic
agcuaaaugcccagugau

SEQ ID NO: 366186 - RNA, 19 nt, Artificial Sequence
  Synthetic
cagcuaaaugcccagugau

SEQ ID NO: 366187 - RNA, 20 nt, Artificial Sequence
  Synthetic
gcagcuaaaugcccagugau

SEQ ID NO: 366188 - RNA, 21 nt, Artificial Sequence
  Synthetic
ugcagcuaaaugcccagugau

SEQ ID NO: 366189 - RNA, 22 nt, Artificial Sequence
  Synthetic
cugcagcuaaaugcccagugau

SEQ ID NO: 366190 - RNA, 23 nt, Artificial Sequence
  Synthetic
gcugcagcuaaaugcccagugau

SEQ ID NO: 366191 - RNA, 24 nt, Artificial Sequence
  Synthetic
agcugcagcuaaaugcccagugau

SEQ ID NO: 366192 - RNA, 18 nt, Artificial Sequence
  Synthetic
cagauguguaucagugau

SEQ ID NO: 366193 - RNA, 19 nt, Artificial Sequence
  Synthetic
acagauguguaucagugau

SEQ ID NO: 366194 - RNA, 20 nt, Artificial Sequence
  Synthetic
aacagauguguaucagugau

SEQ ID NO: 366195 - RNA, 21 nt, Artificial Sequence
  Synthetic
gaacagauguguaucagugau

SEQ ID NO: 366196 - RNA, 22 nt, Artificial Sequence
  Synthetic
ggaacagauguguaucagugau

SEQ ID NO: 366197 - RNA, 23 nt, Artificial Sequence
  Synthetic
aggaacagauguguaucagugau

SEQ ID NO: 366198 - RNA, 24 nt, Artificial Sequence
  Synthetic
gaggaacagauguguaucagugau

SEQ ID NO: 366199 - RNA, 18 nt, Artificial Sequence
  Synthetic
aauaaaugucucagugau

SEQ ID NO: 366200 - RNA, 19 nt, Artificial Sequence
  Synthetic
aaauaaaugucucagugau

SEQ ID NO: 366201 - RNA, 20 nt, Artificial Sequence
  Synthetic
caaauaaaugucucagugau

SEQ ID NO: 366202 - RNA, 21 nt, Artificial Sequence
  Synthetic
ccaaauaaaugucucagugau

SEQ ID NO: 366203 - RNA, 22 nt, Artificial Sequence
  Synthetic
cccaaauaaaugucucagugau

SEQ ID NO: 366204 - RNA, 23 nt, Artificial Sequence
  Synthetic
acccaaauaaaugucucagugau

SEQ ID NO: 366205 - RNA, 24 nt, Artificial Sequence
  Synthetic
uacccaaauaaaugucucagugau

SEQ ID NO: 366206 - RNA, 18 nt, Artificial Sequence
  Synthetic
ucuacagaauucagugau

SEQ ID NO: 366207 - RNA, 19 nt, Artificial Sequence
  Synthetic
aucuacagaauucagugau

SEQ ID NO: 366208 - RNA, 20 nt, Artificial Sequence
  Synthetic
aaucuacagaauucagugau

SEQ ID NO: 366209 - RNA, 21 nt, Artificial Sequence
  Synthetic
aaaucuacagaauucagugau

SEQ ID NO: 366210 - RNA, 22 nt, Artificial Sequence
  Synthetic
aaaaucuacagaauucagugau

SEQ ID NO: 366211 - RNA, 23 nt, Artificial Sequence
  Synthetic
aaaaaucuacagaauucagugau

SEQ ID NO: 366212 - RNA, 24 nt, Artificial Sequence
  Synthetic
gaaaaaucuacagaauucagugau

SEQ ID NO: 366213 - RNA, 18 nt, Artificial Sequence
  Synthetic
aaaguaaacaggagugau

SEQ ID NO: 366214 - RNA, 19 nt, Artificial Sequence
  Synthetic
aaaaguaaacaggagugau

SEQ ID NO: 366215 - RNA, 20 nt, Artificial Sequence
  Synthetic
aaaaaguaaacaggagugau

SEQ ID NO: 366216 - RNA, 21 nt, Artificial Sequence
  Synthetic
gaaaaaguaaacaggagugau

SEQ ID NO: 366217 - RNA, 22 nt, Artificial Sequence
  Synthetic
ggaaaaaguaaacaggagugau

SEQ ID NO: 366218 - RNA, 23 nt, Artificial Sequence
  Synthetic
aggaaaaaguaaacaggagugau

SEQ ID NO: 366219 - RNA, 24 nt, Artificial Sequence
  Synthetic
aaggaaaaaguaaacaggagugau

SEQ ID NO: 366220 - RNA, 18 nt, Artificial Sequence
  Synthetic
ucucugauguugagugau

SEQ ID NO: 366221 - RNA, 19 nt, Artificial Sequence
  Synthetic
uucucugauguugagugau

SEQ ID NO: 366222 - RNA, 20 nt, Artificial Sequence
  Synthetic
uuucucugauguugagugau

SEQ ID NO: 366223 - RNA, 21 nt, Artificial Sequence
  Synthetic
auuucucugauguugagugau

SEQ ID NO: 366224 - RNA, 22 nt, Artificial Sequence
  Synthetic
cauuucucugauguugagugau

SEQ ID NO: 366225 - RNA, 23 nt, Artificial Sequence
  Synthetic
gcauuucucugauguugagugau

SEQ ID NO: 366226 - RNA, 24 nt, Artificial Sequence
  Synthetic
ugcauuucucugauguugagugau

SEQ ID NO: 366227 - RNA, 18 nt, Artificial Sequence
  Synthetic
aaaauuaugcauagugau

SEQ ID NO: 366228 - RNA, 19 nt, Artificial Sequence
  Synthetic
aaaaauuaugcauagugau

SEQ ID NO: 366229 - RNA, 20 nt, Artificial Sequence
  Synthetic
uaaaaauuaugcauagugau

SEQ ID NO: 366230 - RNA, 21 nt, Artificial Sequence
  Synthetic
auaaaaauuaugcauagugau

SEQ ID NO: 366231 - RNA, 22 nt, Artificial Sequence
  Synthetic
aauaaaaauuaugcauagugau

SEQ ID NO: 366232 - RNA, 23 nt, Artificial Sequence
  Synthetic
uaauaaaaauuaugcauagugau

SEQ ID NO: 366233 - RNA, 24 nt, Artificial Sequence
  Synthetic
auaauaaaaauuaugcauagugau

SEQ ID NO: 366234 - RNA, 18 nt, Artificial Sequence
  Synthetic
agacuugauaaaggugau

SEQ ID NO: 366235 - RNA, 19 nt, Artificial Sequence
  Synthetic
aagacuugauaaaggugau

SEQ ID NO: 366236 - RNA, 20 nt, Artificial Sequence
  Synthetic
gaagacuugauaaaggugau

SEQ ID NO: 366237 - RNA, 21 nt, Artificial Sequence
  Synthetic
ggaagacuugauaaaggugau

SEQ ID NO: 366238 - RNA, 22 nt, Artificial Sequence
  Synthetic
uggaagacuugauaaaggugau

SEQ ID NO: 366239 - RNA, 23 nt, Artificial Sequence
  Synthetic
uuggaagacuugauaaaggugau

SEQ ID NO: 366240 - RNA, 24 nt, Artificial Sequence
  Synthetic
uuuggaagacuugauaaaggugau

SEQ ID NO: 366241 - RNA, 18 nt, Artificial Sequence
  Synthetic
cauugaaaauaaggugau

SEQ ID NO: 366242 - RNA, 19 nt, Artificial Sequence
  Synthetic
acauugaaaauaaggugau

SEQ ID NO: 366243 - RNA, 20 nt, Artificial Sequence
  Synthetic
aacauugaaaauaaggugau

SEQ ID NO: 366244 - RNA, 21 nt, Artificial Sequence
  Synthetic
gaacauugaaaauaaggugau

SEQ ID NO: 366245 - RNA, 22 nt, Artificial Sequence
  Synthetic
ggaacauugaaaauaaggugau

SEQ ID NO: 366246 - RNA, 23 nt, Artificial Sequence
  Synthetic
uggaacauugaaaauaaggugau

SEQ ID NO: 366247 - RNA, 24 nt, Artificial Sequence
  Synthetic
uuggaacauugaaaauaaggugau

SEQ ID NO: 366248 - RNA, 18 nt, Artificial Sequence
  Synthetic
cgugcaugcacaggugau

SEQ ID NO: 366249 - RNA, 19 nt, Artificial Sequence
  Synthetic
acgugcaugcacaggugau

SEQ ID NO: 366250 - RNA, 20 nt, Artificial Sequence
  Synthetic
cacgugcaugcacaggugau

SEQ ID NO: 366251 - RNA, 21 nt, Artificial Sequence
  Synthetic
acacgugcaugcacaggugau

SEQ ID NO: 366252 - RNA, 22 nt, Artificial Sequence
  Synthetic
cacacgugcaugcacaggugau

SEQ ID NO: 366253 - RNA, 23 nt, Artificial Sequence
  Synthetic
acacacgugcaugcacaggugau

SEQ ID NO: 366254 - RNA, 24 nt, Artificial Sequence
  Synthetic
cacacacgugcaugcacaggugau

SEQ ID NO: 366255 - RNA, 18 nt, Artificial Sequence
  Synthetic
aagcuuauuggaggugau

SEQ ID NO: 366256 - RNA, 19 nt, Artificial Sequence
  Synthetic
gaagcuuauuggaggugau

SEQ ID NO: 366257 - RNA, 20 nt, Artificial Sequence
  Synthetic
agaagcuuauuggaggugau

SEQ ID NO: 366258 - RNA, 21 nt, Artificial Sequence
  Synthetic
cagaagcuuauuggaggugau

SEQ ID NO: 366259 - RNA, 22 nt, Artificial Sequence
  Synthetic
ucagaagcuuauuggaggugau

SEQ ID NO: 366260 - RNA, 23 nt, Artificial Sequence
  Synthetic
cucagaagcuuauuggaggugau

SEQ ID NO: 366261 - RNA, 24 nt, Artificial Sequence
  Synthetic
ucucagaagcuuauuggaggugau

SEQ ID NO: 366262 - RNA, 18 nt, Artificial Sequence
  Synthetic
uuugaugaaauaggugau

SEQ ID NO: 366263 - RNA, 19 nt, Artificial Sequence
  Synthetic
auuugaugaaauaggugau

SEQ ID NO: 366264 - RNA, 20 nt, Artificial Sequence
  Synthetic
uauuugaugaaauaggugau

SEQ ID NO: 366265 - RNA, 21 nt, Artificial Sequence
  Synthetic
uuauuugaugaaauaggugau

SEQ ID NO: 366266 - RNA, 22 nt, Artificial Sequence
  Synthetic
auuauuugaugaaauaggugau

SEQ ID NO: 366267 - RNA, 23 nt, Artificial Sequence
  Synthetic
aauuauuugaugaaauaggugau

SEQ ID NO: 366268 - RNA, 24 nt, Artificial Sequence
  Synthetic
aaauuauuugaugaaauaggugau

SEQ ID NO: 366269 - RNA, 18 nt, Artificial Sequence
  Synthetic
gacugagaccagggugau

SEQ ID NO: 366270 - RNA, 19 nt, Artificial Sequence
  Synthetic
ugacugagaccagggugau

SEQ ID NO: 366271 - RNA, 20 nt, Artificial Sequence
  Synthetic
cugacugagaccagggugau

SEQ ID NO: 366272 - RNA, 21 nt, Artificial Sequence
  Synthetic
gcugacugagaccagggugau

SEQ ID NO: 366273 - RNA, 22 nt, Artificial Sequence
  Synthetic
ugcugacugagaccagggugau

SEQ ID NO: 366274 - RNA, 23 nt, Artificial Sequence
  Synthetic
augcugacugagaccagggugau

SEQ ID NO: 366275 - RNA, 24 nt, Artificial Sequence
  Synthetic
gaugcugacugagaccagggugau

SEQ ID NO: 366276 - RNA, 18 nt, Artificial Sequence
  Synthetic
uugggaaaaaggggugau

SEQ ID NO: 366277 - RNA, 19 nt, Artificial Sequence
  Synthetic
uuugggaaaaaggggugau

SEQ ID NO: 366278 - RNA, 20 nt, Artificial Sequence
  Synthetic
auuugggaaaaaggggugau

SEQ ID NO: 366279 - RNA, 21 nt, Artificial Sequence
  Synthetic
uauuugggaaaaaggggugau

SEQ ID NO: 366280 - RNA, 22 nt, Artificial Sequence
  Synthetic
auauuugggaaaaaggggugau

SEQ ID NO: 366281 - RNA, 23 nt, Artificial Sequence
  Synthetic
cauauuugggaaaaaggggugau

SEQ ID NO: 366282 - RNA, 24 nt, Artificial Sequence
  Synthetic
gcauauuugggaaaaaggggugau

SEQ ID NO: 366283 - RNA, 18 nt, Artificial Sequence
  Synthetic
cguccagugcugggugau

SEQ ID NO: 366284 - RNA, 19 nt, Artificial Sequence
  Synthetic
acguccagugcugggugau

SEQ ID NO: 366285 - RNA, 20 nt, Artificial Sequence
  Synthetic
cacguccagugcugggugau

SEQ ID NO: 366286 - RNA, 21 nt, Artificial Sequence
  Synthetic
gcacguccagugcugggugau

SEQ ID NO: 366287 - RNA, 22 nt, Artificial Sequence
  Synthetic
ugcacguccagugcugggugau

SEQ ID NO: 366288 - RNA, 23 nt, Artificial Sequence
  Synthetic
cugcacguccagugcugggugau

SEQ ID NO: 366289 - RNA, 24 nt, Artificial Sequence
  Synthetic
acugcacguccagugcugggugau

SEQ ID NO: 366290 - RNA, 18 nt, Artificial Sequence
  Synthetic
guuuaucaguugggugau

SEQ ID NO: 366291 - RNA, 19 nt, Artificial Sequence
  Synthetic
uguuuaucaguugggugau

SEQ ID NO: 366292 - RNA, 20 nt, Artificial Sequence
  Synthetic
uuguuuaucaguugggugau

SEQ ID NO: 366293 - RNA, 21 nt, Artificial Sequence
  Synthetic
uuuguuuaucaguugggugau

SEQ ID NO: 366294 - RNA, 22 nt, Artificial Sequence
  Synthetic
auuuguuuaucaguugggugau

SEQ ID NO: 366295 - RNA, 23 nt, Artificial Sequence
  Synthetic
aauuuguuuaucaguugggugau

SEQ ID NO: 366296 - RNA, 24 nt, Artificial Sequence
  Synthetic
gaauuuguuuaucaguugggugau

SEQ ID NO: 366297 - RNA, 18 nt, Artificial Sequence
  Synthetic
caaaaugccgauggugau

SEQ ID NO: 366298 - RNA, 19 nt, Artificial Sequence
  Synthetic
ccaaaaugccgauggugau

SEQ ID NO: 366299 - RNA, 20 nt, Artificial Sequence
  Synthetic
accaaaaugccgauggugau

SEQ ID NO: 366300 - RNA, 21 nt, Artificial Sequence
  Synthetic
gaccaaaaugccgauggugau

SEQ ID NO: 366301 - RNA, 22 nt, Artificial Sequence
  Synthetic
ugaccaaaaugccgauggugau

SEQ ID NO: 366302 - RNA, 23 nt, Artificial Sequence
  Synthetic
uugaccaaaaugccgauggugau

SEQ ID NO: 366303 - RNA, 24 nt, Artificial Sequence
  Synthetic
uuugaccaaaaugccgauggugau

SEQ ID NO: 366304 - RNA, 18 nt, Artificial Sequence
  Synthetic
cucaucaucacuggugau

SEQ ID NO: 366305 - RNA, 19 nt, Artificial Sequence
  Synthetic
gcucaucaucacuggugau

SEQ ID NO: 366306 - RNA, 20 nt, Artificial Sequence
  Synthetic
agcucaucaucacuggugau

SEQ ID NO: 366307 - RNA, 21 nt, Artificial Sequence
  Synthetic
aagcucaucaucacuggugau

SEQ ID NO: 366308 - RNA, 22 nt, Artificial Sequence
  Synthetic
aaagcucaucaucacuggugau

SEQ ID NO: 366309 - RNA, 23 nt, Artificial Sequence
  Synthetic
aaaagcucaucaucacuggugau

SEQ ID NO: 366310 - RNA, 24 nt, Artificial Sequence
  Synthetic
aaaaagcucaucaucacuggugau

SEQ ID NO: 366311 - RNA, 18 nt, Artificial Sequence
  Synthetic
uguuuauguacuggugau

SEQ ID NO: 366312 - RNA, 19 nt, Artificial Sequence
  Synthetic
auguuuauguacuggugau

SEQ ID NO: 366313 - RNA, 20 nt, Artificial Sequence
  Synthetic
aauguuuauguacuggugau

SEQ ID NO: 366314 - RNA, 21 nt, Artificial Sequence
  Synthetic
gaauguuuauguacuggugau

SEQ ID NO: 366315 - RNA, 22 nt, Artificial Sequence
  Synthetic
agaauguuuauguacuggugau

SEQ ID NO: 366316 - RNA, 23 nt, Artificial Sequence
  Synthetic
uagaauguuuauguacuggugau

SEQ ID NO: 366317 - RNA, 24 nt, Artificial Sequence
  Synthetic
auagaauguuuauguacuggugau

SEQ ID NO: 366318 - RNA, 18 nt, Artificial Sequence
  Synthetic
aggaggaaugguggugau

SEQ ID NO: 366319 - RNA, 19 nt, Artificial Sequence
  Synthetic
aaggaggaaugguggugau

SEQ ID NO: 366320 - RNA, 20 nt, Artificial Sequence
  Synthetic
gaaggaggaaugguggugau

SEQ ID NO: 366321 - RNA, 21 nt, Artificial Sequence
  Synthetic
agaaggaggaaugguggugau

SEQ ID NO: 366322 - RNA, 22 nt, Artificial Sequence
  Synthetic
aagaaggaggaaugguggugau

SEQ ID NO: 366323 - RNA, 23 nt, Artificial Sequence
  Synthetic
gaagaaggaggaaugguggugau

SEQ ID NO: 366324 - RNA, 24 nt, Artificial Sequence
  Synthetic
ggaagaaggaggaaugguggugau

SEQ ID NO: 366325 - RNA, 18 nt, Artificial Sequence
  Synthetic
gguuuggauauuggugau

SEQ ID NO: 366326 - RNA, 19 nt, Artificial Sequence
  Synthetic
ugguuuggauauuggugau

SEQ ID NO: 366327 - RNA, 20 nt, Artificial Sequence
  Synthetic
uugguuuggauauuggugau

SEQ ID NO: 366328 - RNA, 21 nt, Artificial Sequence
  Synthetic
cuugguuuggauauuggugau

SEQ ID NO: 366329 - RNA, 22 nt, Artificial Sequence
  Synthetic
ucuugguuuggauauuggugau

SEQ ID NO: 366330 - RNA, 23 nt, Artificial Sequence
  Synthetic
gucuugguuuggauauuggugau

SEQ ID NO: 366331 - RNA, 24 nt, Artificial Sequence
  Synthetic
ugucuugguuuggauauuggugau

SEQ ID NO: 366332 - RNA, 18 nt, Artificial Sequence
  Synthetic
auauaauuuuuuggugau

SEQ ID NO: 366333 - RNA, 19 nt, Artificial Sequence
  Synthetic
cauauaauuuuuuggugau

SEQ ID NO: 366334 - RNA, 20 nt, Artificial Sequence
  Synthetic
acauauaauuuuuuggugau

SEQ ID NO: 366335 - RNA, 21 nt, Artificial Sequence
  Synthetic
aacauauaauuuuuuggugau

SEQ ID NO: 366336 - RNA, 22 nt, Artificial Sequence
  Synthetic
caacauauaauuuuuuggugau

SEQ ID NO: 366337 - RNA, 23 nt, Artificial Sequence
  Synthetic
gcaacauauaauuuuuuggugau

SEQ ID NO: 366338 - RNA, 24 nt, Artificial Sequence
  Synthetic
ggcaacauauaauuuuuuggugau

SEQ ID NO: 366339 - RNA, 18 nt, Artificial Sequence
  Synthetic
augugaaugcaaugugau

SEQ ID NO: 366340 - RNA, 19 nt, Artificial Sequence
  Synthetic
aaugugaaugcaaugugau

SEQ ID NO: 366341 - RNA, 20 nt, Artificial Sequence
  Synthetic
uaaugugaaugcaaugugau

SEQ ID NO: 366342 - RNA, 21 nt, Artificial Sequence
  Synthetic
auaaugugaaugcaaugugau

SEQ ID NO: 366343 - RNA, 22 nt, Artificial Sequence
  Synthetic
gauaaugugaaugcaaugugau

SEQ ID NO: 366344 - RNA, 23 nt, Artificial Sequence
  Synthetic
ggauaaugugaaugcaaugugau

SEQ ID NO: 366345 - RNA, 24 nt, Artificial Sequence
  Synthetic
uggauaaugugaaugcaaugugau

SEQ ID NO: 366346 - RNA, 18 nt, Artificial Sequence
  Synthetic
gaccucugggucugugau

SEQ ID NO: 366347 - RNA, 19 nt, Artificial Sequence
  Synthetic
agaccucugggucugugau

SEQ ID NO: 366348 - RNA, 20 nt, Artificial Sequence
  Synthetic
uagaccucugggucugugau

SEQ ID NO: 366349 - RNA, 21 nt, Artificial Sequence
  Synthetic
cuagaccucugggucugugau

SEQ ID NO: 366350 - RNA, 22 nt, Artificial Sequence
  Synthetic
ccuagaccucugggucugugau

SEQ ID NO: 366351 - RNA, 23 nt, Artificial Sequence
  Synthetic
uccuagaccucugggucugugau

SEQ ID NO: 366352 - RNA, 24 nt, Artificial Sequence
  Synthetic
cuccuagaccucugggucugugau

SEQ ID NO: 366353 - RNA, 18 nt, Artificial Sequence
  Synthetic
uuccuauccuucugugau

SEQ ID NO: 366354 - RNA, 19 nt, Artificial Sequence
  Synthetic
auuccuauccuucugugau

SEQ ID NO: 366355 - RNA, 20 nt, Artificial Sequence
  Synthetic
aauuccuauccuucugugau

SEQ ID NO: 366356 - RNA, 21 nt, Artificial Sequence
  Synthetic
caauuccuauccuucugugau

SEQ ID NO: 366357 - RNA, 22 nt, Artificial Sequence
  Synthetic
ucaauuccuauccuucugugau

SEQ ID NO: 366358 - RNA, 23 nt, Artificial Sequence
  Synthetic
cucaauuccuauccuucugugau

SEQ ID NO: 366359 - RNA, 24 nt, Artificial Sequence
  Synthetic
ccucaauuccuauccuucugugau

SEQ ID NO: 366360 - RNA, 18 nt, Artificial Sequence
  Synthetic
agaauguuuaguugugau

SEQ ID NO: 366361 - RNA, 19 nt, Artificial Sequence
  Synthetic
aagaauguuuaguugugau

SEQ ID NO: 366362 - RNA, 20 nt, Artificial Sequence
  Synthetic
aaagaauguuuaguugugau

SEQ ID NO: 366363 - RNA, 21 nt, Artificial Sequence
  Synthetic
caaagaauguuuaguugugau

SEQ ID NO: 366364 - RNA, 22 nt, Artificial Sequence
  Synthetic
acaaagaauguuuaguugugau

SEQ ID NO: 366365 - RNA, 23 nt, Artificial Sequence
  Synthetic
gacaaagaauguuuaguugugau

SEQ ID NO: 366366 - RNA, 24 nt, Artificial Sequence
  Synthetic
agacaaagaauguuuaguugugau

SEQ ID NO: 366367 - RNA, 18 nt, Artificial Sequence
  Synthetic
uguuguacaauuugugau

SEQ ID NO: 366368 - RNA, 19 nt, Artificial Sequence
  Synthetic
cuguuguacaauuugugau

SEQ ID NO: 366369 - RNA, 20 nt, Artificial Sequence
  Synthetic
gcuguuguacaauuugugau

SEQ ID NO: 366370 - RNA, 21 nt, Artificial Sequence
  Synthetic
ugcuguuguacaauuugugau

SEQ ID NO: 366371 - RNA, 22 nt, Artificial Sequence
  Synthetic
cugcuguuguacaauuugugau

SEQ ID NO: 366372 - RNA, 23 nt, Artificial Sequence
  Synthetic
ccugcuguuguacaauuugugau

SEQ ID NO: 366373 - RNA, 24 nt, Artificial Sequence
  Synthetic
accugcuguuguacaauuugugau

SEQ ID NO: 366374 - RNA, 18 nt, Artificial Sequence
  Synthetic
augugagaacuuugugau

SEQ ID NO: 366375 - RNA, 19 nt, Artificial Sequence
  Synthetic
gaugugagaacuuugugau

SEQ ID NO: 366376 - RNA, 20 nt, Artificial Sequence
  Synthetic
ugaugugagaacuuugugau

SEQ ID NO: 366377 - RNA, 21 nt, Artificial Sequence
  Synthetic
gugaugugagaacuuugugau

SEQ ID NO: 366378 - RNA, 22 nt, Artificial Sequence
  Synthetic
ggugaugugagaacuuugugau

SEQ ID NO: 366379 - RNA, 23 nt, Artificial Sequence
  Synthetic
uggugaugugagaacuuugugau

SEQ ID NO: 366380 - RNA, 24 nt, Artificial Sequence
  Synthetic
uuggugaugugagaacuuugugau

SEQ ID NO: 366381 - RNA, 18 nt, Artificial Sequence
  Synthetic
aacuguuuacuuugugau

SEQ ID NO: 366382 - RNA, 19 nt, Artificial Sequence
  Synthetic
aaacuguuuacuuugugau

SEQ ID NO: 366383 - RNA, 20 nt, Artificial Sequence
  Synthetic
aaaacuguuuacuuugugau

SEQ ID NO: 366384 - RNA, 21 nt, Artificial Sequence
  Synthetic
aaaaacuguuuacuuugugau

SEQ ID NO: 366385 - RNA, 22 nt, Artificial Sequence
  Synthetic
aaaaaacuguuuacuuugugau

SEQ ID NO: 366386 - RNA, 23 nt, Artificial Sequence
  Synthetic
uaaaaaacuguuuacuuugugau

SEQ ID NO: 366387 - RNA, 24 nt, Artificial Sequence
  Synthetic
auaaaaaacuguuuacuuugugau

SEQ ID NO: 366388 - RNA, 18 nt, Artificial Sequence
  Synthetic
accaaauacuuuugugau

SEQ ID NO: 366389 - RNA, 19 nt, Artificial Sequence
  Synthetic
aaccaaauacuuuugugau

SEQ ID NO: 366390 - RNA, 20 nt, Artificial Sequence
  Synthetic
aaaccaaauacuuuugugau

SEQ ID NO: 366391 - RNA, 21 nt, Artificial Sequence
  Synthetic
gaaaccaaauacuuuugugau

SEQ ID NO: 366392 - RNA, 22 nt, Artificial Sequence
  Synthetic
agaaaccaaauacuuuugugau

SEQ ID NO: 366393 - RNA, 23 nt, Artificial Sequence
  Synthetic
gagaaaccaaauacuuuugugau

SEQ ID NO: 366394 - RNA, 24 nt, Artificial Sequence
  Synthetic
ggagaaaccaaauacuuuugugau

SEQ ID NO: 366395 - RNA, 18 nt, Artificial Sequence
  Synthetic
uuauguuccaaaauugau

SEQ ID NO: 366396 - RNA, 19 nt, Artificial Sequence
  Synthetic
uuuauguuccaaaauugau

SEQ ID NO: 366397 - RNA, 20 nt, Artificial Sequence
  Synthetic
uuuuauguuccaaaauugau

SEQ ID NO: 366398 - RNA, 21 nt, Artificial Sequence
  Synthetic
guuuuauguuccaaaauugau

SEQ ID NO: 366399 - RNA, 22 nt, Artificial Sequence
  Synthetic
aguuuuauguuccaaaauugau

SEQ ID NO: 366400 - RNA, 23 nt, Artificial Sequence
  Synthetic
aaguuuuauguuccaaaauugau

SEQ ID NO: 366401 - RNA, 24 nt, Artificial Sequence
  Synthetic
gaaguuuuauguuccaaaauugau

SEQ ID NO: 366402 - RNA, 18 nt, Artificial Sequence
  Synthetic
aaggacuucaaaauugau

SEQ ID NO: 366403 - RNA, 19 nt, Artificial Sequence
  Synthetic
uaaggacuucaaaauugau

SEQ ID NO: 366404 - RNA, 20 nt, Artificial Sequence
  Synthetic
uuaaggacuucaaaauugau

SEQ ID NO: 366405 - RNA, 21 nt, Artificial Sequence
  Synthetic
cuuaaggacuucaaaauugau

SEQ ID NO: 366406 - RNA, 22 nt, Artificial Sequence
  Synthetic
ucuuaaggacuucaaaauugau

SEQ ID NO: 366407 - RNA, 23 nt, Artificial Sequence
  Synthetic
cucuuaaggacuucaaaauugau

SEQ ID NO: 366408 - RNA, 24 nt, Artificial Sequence
  Synthetic
ucucuuaaggacuucaaaauugau

SEQ ID NO: 366409 - RNA, 18 nt, Artificial Sequence
  Synthetic
gcucaauaggaaauugau

SEQ ID NO: 366410 - RNA, 19 nt, Artificial Sequence
  Synthetic
ugcucaauaggaaauugau

SEQ ID NO: 366411 - RNA, 20 nt, Artificial Sequence
  Synthetic
uugcucaauaggaaauugau

SEQ ID NO: 366412 - RNA, 21 nt, Artificial Sequence
  Synthetic
uuugcucaauaggaaauugau

SEQ ID NO: 366413 - RNA, 22 nt, Artificial Sequence
  Synthetic
uuuugcucaauaggaaauugau

SEQ ID NO: 366414 - RNA, 23 nt, Artificial Sequence
  Synthetic
guuuugcucaauaggaaauugau

SEQ ID NO: 366415 - RNA, 24 nt, Artificial Sequence
  Synthetic
gguuuugcucaauaggaaauugau

SEQ ID NO: 366416 - RNA, 18 nt, Artificial Sequence
  Synthetic
cauacaagcuaaauugau

SEQ ID NO: 366417 - RNA, 19 nt, Artificial Sequence
  Synthetic
ucauacaagcuaaauugau

SEQ ID NO: 366418 - RNA, 20 nt, Artificial Sequence
  Synthetic
uucauacaagcuaaauugau

SEQ ID NO: 366419 - RNA, 21 nt, Artificial Sequence
  Synthetic
cuucauacaagcuaaauugau

SEQ ID NO: 366420 - RNA, 22 nt, Artificial Sequence
  Synthetic
ccuucauacaagcuaaauugau

SEQ ID NO: 366421 - RNA, 23 nt, Artificial Sequence
  Synthetic
uccuucauacaagcuaaauugau

SEQ ID NO: 366422 - RNA, 24 nt, Artificial Sequence
  Synthetic
uuccuucauacaagcuaaauugau

SEQ ID NO: 366423 - RNA, 18 nt, Artificial Sequence
  Synthetic
aaauauauuauaauugau

SEQ ID NO: 366424 - RNA, 19 nt, Artificial Sequence
  Synthetic
caaauauauuauaauugau

SEQ ID NO: 366425 - RNA, 20 nt, Artificial Sequence
  Synthetic
gcaaauauauuauaauugau

SEQ ID NO: 366426 - RNA, 21 nt, Artificial Sequence
  Synthetic
ugcaaauauauuauaauugau

SEQ ID NO: 366427 - RNA, 22 nt, Artificial Sequence
  Synthetic
gugcaaauauauuauaauugau

SEQ ID NO: 366428 - RNA, 23 nt, Artificial Sequence
  Synthetic
ugugcaaauauauuauaauugau

SEQ ID NO: 366429 - RNA, 24 nt, Artificial Sequence
  Synthetic
uugugcaaauauauuauaauugau

SEQ ID NO: 366430 - RNA, 18 nt, Artificial Sequence
  Synthetic
uguagguagaagauugau

SEQ ID NO: 366431 - RNA, 19 nt, Artificial Sequence
  Synthetic
cuguagguagaagauugau

SEQ ID NO: 366432 - RNA, 20 nt, Artificial Sequence
  Synthetic
acuguagguagaagauugau

SEQ ID NO: 366433 - RNA, 21 nt, Artificial Sequence
  Synthetic
gacuguagguagaagauugau

SEQ ID NO: 366434 - RNA, 22 nt, Artificial Sequence
  Synthetic
agacuguagguagaagauugau

SEQ ID NO: 366435 - RNA, 23 nt, Artificial Sequence
  Synthetic
gagacuguagguagaagauugau

SEQ ID NO: 366436 - RNA, 24 nt, Artificial Sequence
  Synthetic
agagacuguagguagaagauugau

SEQ ID NO: 366437 - RNA, 18 nt, Artificial Sequence
  Synthetic
agcuauuuuuagauugau

SEQ ID NO: 366438 - RNA, 19 nt, Artificial Sequence
  Synthetic
gagcuauuuuuagauugau

SEQ ID NO: 366439 - RNA, 20 nt, Artificial Sequence
  Synthetic
agagcuauuuuuagauugau

SEQ ID NO: 366440 - RNA, 21 nt, Artificial Sequence
  Synthetic
aagagcuauuuuuagauugau

SEQ ID NO: 366441 - RNA, 22 nt, Artificial Sequence
  Synthetic
aaagagcuauuuuuagauugau

SEQ ID NO: 366442 - RNA, 23 nt, Artificial Sequence
  Synthetic
caaagagcuauuuuuagauugau

SEQ ID NO: 366443 - RNA, 24 nt, Artificial Sequence
  Synthetic
ccaaagagcuauuuuuagauugau

SEQ ID NO: 366444 - RNA, 18 nt, Artificial Sequence
  Synthetic
gcuguauguccuauugau

SEQ ID NO: 366445 - RNA, 19 nt, Artificial Sequence
  Synthetic
ugcuguauguccuauugau

SEQ ID NO: 366446 - RNA, 20 nt, Artificial Sequence
  Synthetic
cugcuguauguccuauugau

SEQ ID NO: 366447 - RNA, 21 nt, Artificial Sequence
  Synthetic
ucugcuguauguccuauugau

SEQ ID NO: 366448 - RNA, 22 nt, Artificial Sequence
  Synthetic
gucugcuguauguccuauugau

SEQ ID NO: 366449 - RNA, 23 nt, Artificial Sequence
  Synthetic
agucugcuguauguccuauugau

SEQ ID NO: 366450 - RNA, 24 nt, Artificial Sequence
  Synthetic
cagucugcuguauguccuauugau

SEQ ID NO: 366451 - RNA, 18 nt, Artificial Sequence
  Synthetic
uguagugccauacuugau

SEQ ID NO: 366452 - RNA, 19 nt, Artificial Sequence
  Synthetic
cuguagugccauacuugau

SEQ ID NO: 366453 - RNA, 20 nt, Artificial Sequence
  Synthetic
gcuguagugccauacuugau

SEQ ID NO: 366454 - RNA, 21 nt, Artificial Sequence
  Synthetic
agcuguagugccauacuugau

SEQ ID NO: 366455 - RNA, 22 nt, Artificial Sequence
  Synthetic
cagcuguagugccauacuugau

SEQ ID NO: 366456 - RNA, 23 nt, Artificial Sequence
  Synthetic
ucagcuguagugccauacuugau

SEQ ID NO: 366457 - RNA, 24 nt, Artificial Sequence
  Synthetic
uucagcuguagugccauacuugau

SEQ ID NO: 366458 - RNA, 18 nt, Artificial Sequence
  Synthetic
cagcaaaucccccuugau

SEQ ID NO: 366459 - RNA, 19 nt, Artificial Sequence
  Synthetic
ucagcaaaucccccuugau

SEQ ID NO: 366460 - RNA, 20 nt, Artificial Sequence
  Synthetic
gucagcaaaucccccuugau

SEQ ID NO: 366461 - RNA, 21 nt, Artificial Sequence
  Synthetic
agucagcaaaucccccuugau

SEQ ID NO: 366462 - RNA, 22 nt, Artificial Sequence
  Synthetic
gagucagcaaaucccccuugau

SEQ ID NO: 366463 - RNA, 23 nt, Artificial Sequence
  Synthetic
agagucagcaaaucccccuugau

SEQ ID NO: 366464 - RNA, 24 nt, Artificial Sequence
  Synthetic
gagagucagcaaaucccccuugau

SEQ ID NO: 366465 - RNA, 18 nt, Artificial Sequence
  Synthetic
uuuacauaacugcuugau

SEQ ID NO: 366466 - RNA, 19 nt, Artificial Sequence
  Synthetic
cuuuacauaacugcuugau

SEQ ID NO: 366467 - RNA, 20 nt, Artificial Sequence
  Synthetic
acuuuacauaacugcuugau

SEQ ID NO: 366468 - RNA, 21 nt, Artificial Sequence
  Synthetic
cacuuuacauaacugcuugau

SEQ ID NO: 366469 - RNA, 22 nt, Artificial Sequence
  Synthetic
acacuuuacauaacugcuugau

SEQ ID NO: 366470 - RNA, 23 nt, Artificial Sequence
  Synthetic
uacacuuuacauaacugcuugau

SEQ ID NO: 366471 - RNA, 24 nt, Artificial Sequence
  Synthetic
uuacacuuuacauaacugcuugau

SEQ ID NO: 366472 - RNA, 18 nt, Artificial Sequence
  Synthetic
cuaagcagacugcuugau

SEQ ID NO: 366473 - RNA, 19 nt, Artificial Sequence
  Synthetic
acuaagcagacugcuugau

SEQ ID NO: 366474 - RNA, 20 nt, Artificial Sequence
  Synthetic
cacuaagcagacugcuugau

SEQ ID NO: 366475 - RNA, 21 nt, Artificial Sequence
  Synthetic
ucacuaagcagacugcuugau

SEQ ID NO: 366476 - RNA, 22 nt, Artificial Sequence
  Synthetic
aucacuaagcagacugcuugau

SEQ ID NO: 366477 - RNA, 23 nt, Artificial Sequence
  Synthetic
aaucacuaagcagacugcuugau

SEQ ID NO: 366478 - RNA, 24 nt, Artificial Sequence
  Synthetic
aaaucacuaagcagacugcuugau

SEQ ID NO: 366479 - RNA, 18 nt, Artificial Sequence
  Synthetic
aucucagaccugcuugau

SEQ ID NO: 366480 - RNA, 19 nt, Artificial Sequence
  Synthetic
caucucagaccugcuugau

SEQ ID NO: 366481 - RNA, 20 nt, Artificial Sequence
  Synthetic
ucaucucagaccugcuugau

SEQ ID NO: 366482 - RNA, 21 nt, Artificial Sequence
  Synthetic
cucaucucagaccugcuugau

SEQ ID NO: 366483 - RNA, 22 nt, Artificial Sequence
  Synthetic
ccucaucucagaccugcuugau

SEQ ID NO: 366484 - RNA, 23 nt, Artificial Sequence
  Synthetic
gccucaucucagaccugcuugau

SEQ ID NO: 366485 - RNA, 24 nt, Artificial Sequence
  Synthetic
ggccucaucucagaccugcuugau

SEQ ID NO: 366486 - RNA, 18 nt, Artificial Sequence
  Synthetic
cacuguaucucucuugau

SEQ ID NO: 366487 - RNA, 19 nt, Artificial Sequence
  Synthetic
acacuguaucucucuugau

SEQ ID NO: 366488 - RNA, 20 nt, Artificial Sequence
  Synthetic
gacacuguaucucucuugau

SEQ ID NO: 366489 - RNA, 21 nt, Artificial Sequence
  Synthetic
agacacuguaucucucuugau

SEQ ID NO: 366490 - RNA, 22 nt, Artificial Sequence
  Synthetic
gagacacuguaucucucuugau

SEQ ID NO: 366491 - RNA, 23 nt, Artificial Sequence
  Synthetic
cgagacacuguaucucucuugau

SEQ ID NO: 366492 - RNA, 24 nt, Artificial Sequence
  Synthetic
ucgagacacuguaucucucuugau

SEQ ID NO: 366493 - RNA, 18 nt, Artificial Sequence
  Synthetic
cuguaggcuucucuugau

SEQ ID NO: 366494 - RNA, 19 nt, Artificial Sequence
  Synthetic
acuguaggcuucucuugau

SEQ ID NO: 366495 - RNA, 20 nt, Artificial Sequence
  Synthetic
gacuguaggcuucucuugau

SEQ ID NO: 366496 - RNA, 21 nt, Artificial Sequence
  Synthetic
agacuguaggcuucucuugau

SEQ ID NO: 366497 - RNA, 22 nt, Artificial Sequence
  Synthetic
gagacuguaggcuucucuugau

SEQ ID NO: 366498 - RNA, 23 nt, Artificial Sequence
  Synthetic
cgagacuguaggcuucucuugau

SEQ ID NO: 366499 - RNA, 24 nt, Artificial Sequence
  Synthetic
ucgagacuguaggcuucucuugau

SEQ ID NO: 366500 - RNA, 18 nt, Artificial Sequence
  Synthetic
uaaaguugcagucuugau

SEQ ID NO: 366501 - RNA, 19 nt, Artificial Sequence
  Synthetic
cuaaaguugcagucuugau

SEQ ID NO: 366502 - RNA, 20 nt, Artificial Sequence
  Synthetic
ccuaaaguugcagucuugau

SEQ ID NO: 366503 - RNA, 21 nt, Artificial Sequence
  Synthetic
gccuaaaguugcagucuugau

SEQ ID NO: 366504 - RNA, 22 nt, Artificial Sequence
  Synthetic
ggccuaaaguugcagucuugau

SEQ ID NO: 366505 - RNA, 23 nt, Artificial Sequence
  Synthetic
uggccuaaaguugcagucuugau

SEQ ID NO: 366506 - RNA, 24 nt, Artificial Sequence
  Synthetic
cuggccuaaaguugcagucuugau

SEQ ID NO: 366507 - RNA, 18 nt, Artificial Sequence
  Synthetic
uacucaugguuucuugau

SEQ ID NO: 366508 - RNA, 19 nt, Artificial Sequence
  Synthetic
uuacucaugguuucuugau

SEQ ID NO: 366509 - RNA, 20 nt, Artificial Sequence
  Synthetic
guuacucaugguuucuugau

SEQ ID NO: 366510 - RNA, 21 nt, Artificial Sequence
  Synthetic
uguuacucaugguuucuugau

SEQ ID NO: 366511 - RNA, 22 nt, Artificial Sequence
  Synthetic
auguuacucaugguuucuugau

SEQ ID NO: 366512 - RNA, 23 nt, Artificial Sequence
  Synthetic
uauguuacucaugguuucuugau

SEQ ID NO: 366513 - RNA, 24 nt, Artificial Sequence
  Synthetic
uuauguuacucaugguuucuugau

SEQ ID NO: 366514 - RNA, 18 nt, Artificial Sequence
  Synthetic
uauauauaucaaguugau

SEQ ID NO: 366515 - RNA, 19 nt, Artificial Sequence
  Synthetic
auauauauaucaaguugau

SEQ ID NO: 366516 - RNA, 20 nt, Artificial Sequence
  Synthetic
uauauauauaucaaguugau

SEQ ID NO: 366517 - RNA, 21 nt, Artificial Sequence
  Synthetic
auauauauauaucaaguugau

SEQ ID NO: 366518 - RNA, 22 nt, Artificial Sequence
  Synthetic
aauauauauauaucaaguugau

SEQ ID NO: 366519 - RNA, 23 nt, Artificial Sequence
  Synthetic
aaauauauauauaucaaguugau

SEQ ID NO: 366520 - RNA, 24 nt, Artificial Sequence
  Synthetic
aaaauauauauauaucaaguugau

SEQ ID NO: 366521 - RNA, 18 nt, Artificial Sequence
  Synthetic
ugaaguauucagguugau

SEQ ID NO: 366522 - RNA, 19 nt, Artificial Sequence
  Synthetic
augaaguauucagguugau

SEQ ID NO: 366523 - RNA, 20 nt, Artificial Sequence
  Synthetic
gaugaaguauucagguugau

SEQ ID NO: 366524 - RNA, 21 nt, Artificial Sequence
  Synthetic
ugaugaaguauucagguugau

SEQ ID NO: 366525 - RNA, 22 nt, Artificial Sequence
  Synthetic
cugaugaaguauucagguugau

SEQ ID NO: 366526 - RNA, 23 nt, Artificial Sequence
  Synthetic
acugaugaaguauucagguugau

SEQ ID NO: 366527 - RNA, 24 nt, Artificial Sequence
  Synthetic
uacugaugaaguauucagguugau

SEQ ID NO: 366528 - RNA, 18 nt, Artificial Sequence
  Synthetic
agaagggaguggguugau

SEQ ID NO: 366529 - RNA, 19 nt, Artificial Sequence
  Synthetic
aagaagggaguggguugau

SEQ ID NO: 366530 - RNA, 20 nt, Artificial Sequence
  Synthetic
aaagaagggaguggguugau

SEQ ID NO: 366531 - RNA, 21 nt, Artificial Sequence
  Synthetic
aaaagaagggaguggguugau

SEQ ID NO: 366532 - RNA, 22 nt, Artificial Sequence
  Synthetic
uaaaagaagggaguggguugau

SEQ ID NO: 366533 - RNA, 23 nt, Artificial Sequence
  Synthetic
auaaaagaagggaguggguugau

SEQ ID NO: 366534 - RNA, 24 nt, Artificial Sequence
  Synthetic
aauaaaagaagggaguggguugau

SEQ ID NO: 366535 - RNA, 18 nt, Artificial Sequence
  Synthetic
caaauacacgcuguugau

SEQ ID NO: 366536 - RNA, 19 nt, Artificial Sequence
  Synthetic
gcaaauacacgcuguugau

SEQ ID NO: 366537 - RNA, 20 nt, Artificial Sequence
  Synthetic
ugcaaauacacgcuguugau

SEQ ID NO: 366538 - RNA, 21 nt, Artificial Sequence
  Synthetic
augcaaauacacgcuguugau

SEQ ID NO: 366539 - RNA, 22 nt, Artificial Sequence
  Synthetic
caugcaaauacacgcuguugau

SEQ ID NO: 366540 - RNA, 23 nt, Artificial Sequence
  Synthetic
gcaugcaaauacacgcuguugau

SEQ ID NO: 366541 - RNA, 24 nt, Artificial Sequence
  Synthetic
ugcaugcaaauacacgcuguugau

SEQ ID NO: 366542 - RNA, 18 nt, Artificial Sequence
  Synthetic
cuuugacagucuguugau

SEQ ID NO: 366543 - RNA, 19 nt, Artificial Sequence
  Synthetic
ucuuugacagucuguugau

SEQ ID NO: 366544 - RNA, 20 nt, Artificial Sequence
  Synthetic
gucuuugacagucuguugau

SEQ ID NO: 366545 - RNA, 21 nt, Artificial Sequence
  Synthetic
ggucuuugacagucuguugau

SEQ ID NO: 366546 - RNA, 22 nt, Artificial Sequence
  Synthetic
uggucuuugacagucuguugau

SEQ ID NO: 366547 - RNA, 23 nt, Artificial Sequence
  Synthetic
cuggucuuugacagucuguugau

SEQ ID NO: 366548 - RNA, 24 nt, Artificial Sequence
  Synthetic
ucuggucuuugacagucuguugau

SEQ ID NO: 366549 - RNA, 19 nt, Artificial Sequence
  Synthetic
aaauguauauucuguugau

SEQ ID NO: 366550 - RNA, 20 nt, Artificial Sequence
  Synthetic
aaaauguauauucuguugau

SEQ ID NO: 366551 - RNA, 21 nt, Artificial Sequence
  Synthetic
aaaaauguauauucuguugau

SEQ ID NO: 366552 - RNA, 22 nt, Artificial Sequence
  Synthetic
aaaaaauguauauucuguugau

SEQ ID NO: 366553 - RNA, 23 nt, Artificial Sequence
  Synthetic
aaaaaaauguauauucuguugau

SEQ ID NO: 366554 - RNA, 24 nt, Artificial Sequence
  Synthetic
gaaaaaaauguauauucuguugau

SEQ ID NO: 366555 - RNA, 18 nt, Artificial Sequence
  Synthetic
guagaucuaacauuugau

SEQ ID NO: 366556 - RNA, 19 nt, Artificial Sequence
  Synthetic
aguagaucuaacauuugau

SEQ ID NO: 366557 - RNA, 20 nt, Artificial Sequence
  Synthetic
aaguagaucuaacauuugau

SEQ ID NO: 366558 - RNA, 21 nt, Artificial Sequence
  Synthetic
aaaguagaucuaacauuugau

SEQ ID NO: 366559 - RNA, 22 nt, Artificial Sequence
  Synthetic
aaaaguagaucuaacauuugau

SEQ ID NO: 366560 - RNA, 23 nt, Artificial Sequence
  Synthetic
uaaaaguagaucuaacauuugau

SEQ ID NO: 366561 - RNA, 24 nt, Artificial Sequence
  Synthetic
cuaaaaguagaucuaacauuugau

SEQ ID NO: 366562 - RNA, 18 nt, Artificial Sequence
  Synthetic
guuuuguuuugauuugau

SEQ ID NO: 366563 - RNA, 19 nt, Artificial Sequence
  Synthetic
gguuuuguuuugauuugau

SEQ ID NO: 366564 - RNA, 20 nt, Artificial Sequence
  Synthetic
agguuuuguuuugauuugau

SEQ ID NO: 366565 - RNA, 21 nt, Artificial Sequence
  Synthetic
aagguuuuguuuugauuugau

SEQ ID NO: 366566 - RNA, 22 nt, Artificial Sequence
  Synthetic
aaagguuuuguuuugauuugau

SEQ ID NO: 366567 - RNA, 23 nt, Artificial Sequence
  Synthetic
aaaagguuuuguuuugauuugau

SEQ ID NO: 366568 - RNA, 24 nt, Artificial Sequence
  Synthetic
aaaaagguuuuguuuugauuugau

SEQ ID NO: 366569 - RNA, 18 nt, Artificial Sequence
  Synthetic
cagaucagcuuauuugau

SEQ ID NO: 366570 - RNA, 19 nt, Artificial Sequence
  Synthetic
ucagaucagcuuauuugau

SEQ ID NO: 366571 - RNA, 20 nt, Artificial Sequence
  Synthetic
uucagaucagcuuauuugau

SEQ ID NO: 366572 - RNA, 21 nt, Artificial Sequence
  Synthetic
auucagaucagcuuauuugau

SEQ ID NO: 366573 - RNA, 22 nt, Artificial Sequence
  Synthetic
cauucagaucagcuuauuugau

SEQ ID NO: 366574 - RNA, 23 nt, Artificial Sequence
  Synthetic
ucauucagaucagcuuauuugau

SEQ ID NO: 366575 - RNA, 24 nt, Artificial Sequence
  Synthetic
cucauucagaucagcuuauuugau

SEQ ID NO: 366576 - RNA, 18 nt, Artificial Sequence
  Synthetic
cuugagcuuuccuuugau

SEQ ID NO: 366577 - RNA, 19 nt, Artificial Sequence
  Synthetic
ucuugagcuuuccuuugau

SEQ ID NO: 366578 - RNA, 20 nt, Artificial Sequence
  Synthetic
gucuugagcuuuccuuugau

SEQ ID NO: 366579 - RNA, 21 nt, Artificial Sequence
  Synthetic
ggucuugagcuuuccuuugau

SEQ ID NO: 366580 - RNA, 22 nt, Artificial Sequence
  Synthetic
uggucuugagcuuuccuuugau

SEQ ID NO: 366581 - RNA, 23 nt, Artificial Sequence
  Synthetic
cuggucuugagcuuuccuuugau

SEQ ID NO: 366582 - RNA, 24 nt, Artificial Sequence
  Synthetic
ucuggucuugagcuuuccuuugau

SEQ ID NO: 366583 - RNA, 18 nt, Artificial Sequence
  Synthetic
acauuaggaagcuuugau

SEQ ID NO: 366584 - RNA, 19 nt, Artificial Sequence
  Synthetic
aacauuaggaagcuuugau

SEQ ID NO: 366585 - RNA, 20 nt, Artificial Sequence
  Synthetic
aaacauuaggaagcuuugau

SEQ ID NO: 366586 - RNA, 21 nt, Artificial Sequence
  Synthetic
uaaacauuaggaagcuuugau

SEQ ID NO: 366587 - RNA, 22 nt, Artificial Sequence
  Synthetic
guaaacauuaggaagcuuugau

SEQ ID NO: 366588 - RNA, 23 nt, Artificial Sequence
  Synthetic
uguaaacauuaggaagcuuugau

SEQ ID NO: 366589 - RNA, 24 nt, Artificial Sequence
  Synthetic
cuguaaacauuaggaagcuuugau

SEQ ID NO: 366590 - RNA, 18 nt, Artificial Sequence
  Synthetic
acaguuuuuaucuuugau

SEQ ID NO: 366591 - RNA, 19 nt, Artificial Sequence
  Synthetic
cacaguuuuuaucuuugau

SEQ ID NO: 366592 - RNA, 20 nt, Artificial Sequence
  Synthetic
ucacaguuuuuaucuuugau

SEQ ID NO: 366593 - RNA, 21 nt, Artificial Sequence
  Synthetic
uucacaguuuuuaucuuugau

SEQ ID NO: 366594 - RNA, 22 nt, Artificial Sequence
  Synthetic
auucacaguuuuuaucuuugau

SEQ ID NO: 366595 - RNA, 23 nt, Artificial Sequence
  Synthetic
aauucacaguuuuuaucuuugau

SEQ ID NO: 366596 - RNA, 24 nt, Artificial Sequence
  Synthetic
uaauucacaguuuuuaucuuugau

SEQ ID NO: 366597 - RNA, 18 nt, Artificial Sequence
  Synthetic
acccuaaucaaguuugau

SEQ ID NO: 366598 - RNA, 19 nt, Artificial Sequence
  Synthetic
uacccuaaucaaguuugau

SEQ ID NO: 366599 - RNA, 20 nt, Artificial Sequence
  Synthetic
uuacccuaaucaaguuugau

SEQ ID NO: 366600 - RNA, 21 nt, Artificial Sequence
  Synthetic
cuuacccuaaucaaguuugau

SEQ ID NO: 366601 - RNA, 22 nt, Artificial Sequence
  Synthetic
acuuacccuaaucaaguuugau

SEQ ID NO: 366602 - RNA, 23 nt, Artificial Sequence
  Synthetic
cacuuacccuaaucaaguuugau

SEQ ID NO: 366603 - RNA, 24 nt, Artificial Sequence
  Synthetic
ccacuuacccuaaucaaguuugau

SEQ ID NO: 366604 - RNA, 18 nt, Artificial Sequence
  Synthetic
uuccuguauuaguuugau

SEQ ID NO: 366605 - RNA, 19 nt, Artificial Sequence
  Synthetic
guuccuguauuaguuugau

SEQ ID NO: 366606 - RNA, 20 nt, Artificial Sequence
  Synthetic
uguuccuguauuaguuugau

SEQ ID NO: 366607 - RNA, 21 nt, Artificial Sequence
  Synthetic
uuguuccuguauuaguuugau

SEQ ID NO: 366608 - RNA, 22 nt, Artificial Sequence
  Synthetic
uuuguuccuguauuaguuugau

SEQ ID NO: 366609 - RNA, 23 nt, Artificial Sequence
  Synthetic
uuuuguuccuguauuaguuugau

SEQ ID NO: 366610 - RNA, 24 nt, Artificial Sequence
  Synthetic
uuuuuguuccuguauuaguuugau

SEQ ID NO: 366611 - RNA, 18 nt, Artificial Sequence
  Synthetic
gagaaauuccauuuugau

SEQ ID NO: 366612 - RNA, 19 nt, Artificial Sequence
  Synthetic
agagaaauuccauuuugau

SEQ ID NO: 366613 - RNA, 20 nt, Artificial Sequence
  Synthetic
aagagaaauuccauuuugau

SEQ ID NO: 366614 - RNA, 21 nt, Artificial Sequence
  Synthetic
caagagaaauuccauuuugau

SEQ ID NO: 366615 - RNA, 22 nt, Artificial Sequence
  Synthetic
ucaagagaaauuccauuuugau

SEQ ID NO: 366616 - RNA, 23 nt, Artificial Sequence
  Synthetic
aucaagagaaauuccauuuugau

SEQ ID NO: 366617 - RNA, 24 nt, Artificial Sequence
  Synthetic
aaucaagagaaauuccauuuugau

SEQ ID NO: 366618 - RNA, 18 nt, Artificial Sequence
  Synthetic
ggauuauuauauuuugau

SEQ ID NO: 366619 - RNA, 19 nt, Artificial Sequence
  Synthetic
uggauuauuauauuuugau

SEQ ID NO: 366620 - RNA, 20 nt, Artificial Sequence
  Synthetic
cuggauuauuauauuuugau

SEQ ID NO: 366621 - RNA, 21 nt, Artificial Sequence
  Synthetic
ucuggauuauuauauuuugau

SEQ ID NO: 366622 - RNA, 22 nt, Artificial Sequence
  Synthetic
uucuggauuauuauauuuugau

SEQ ID NO: 366623 - RNA, 23 nt, Artificial Sequence
  Synthetic
uuucuggauuauuauauuuugau

SEQ ID NO: 366624 - RNA, 24 nt, Artificial Sequence
  Synthetic
auuucuggauuauuauauuuugau

SEQ ID NO: 366625 - RNA, 18 nt, Artificial Sequence
  Synthetic
cacucuaugccuuuugau

SEQ ID NO: 366626 - RNA, 19 nt, Artificial Sequence
  Synthetic
ccacucuaugccuuuugau

SEQ ID NO: 366627 - RNA, 20 nt, Artificial Sequence
  Synthetic
accacucuaugccuuuugau

SEQ ID NO: 366628 - RNA, 21 nt, Artificial Sequence
  Synthetic
aaccacucuaugccuuuugau

SEQ ID NO: 366629 - RNA, 22 nt, Artificial Sequence
  Synthetic
caaccacucuaugccuuuugau

SEQ ID NO: 366630 - RNA, 23 nt, Artificial Sequence
  Synthetic
ucaaccacucuaugccuuuugau

SEQ ID NO: 366631 - RNA, 24 nt, Artificial Sequence
  Synthetic
cucaaccacucuaugccuuuugau

SEQ ID NO: 366632 - RNA, 18 nt, Artificial Sequence
  Synthetic
gaaucuaugaaaaaauau

SEQ ID NO: 366633 - RNA, 19 nt, Artificial Sequence
  Synthetic
agaaucuaugaaaaaauau

SEQ ID NO: 366634 - RNA, 20 nt, Artificial Sequence
  Synthetic
aagaaucuaugaaaaaauau

SEQ ID NO: 366635 - RNA, 21 nt, Artificial Sequence
  Synthetic
gaagaaucuaugaaaaaauau

SEQ ID NO: 366636 - RNA, 22 nt, Artificial Sequence
  Synthetic
ugaagaaucuaugaaaaaauau

SEQ ID NO: 366637 - RNA, 23 nt, Artificial Sequence
  Synthetic
uugaagaaucuaugaaaaaauau

SEQ ID NO: 366638 - RNA, 24 nt, Artificial Sequence
  Synthetic
uuugaagaaucuaugaaaaaauau

SEQ ID NO: 366639 - RNA, 18 nt, Artificial Sequence
  Synthetic
aggagaauacaaaaauau

SEQ ID NO: 366640 - RNA, 19 nt, Artificial Sequence
  Synthetic
uaggagaauacaaaaauau

SEQ ID NO: 366641 - RNA, 20 nt, Artificial Sequence
  Synthetic
guaggagaauacaaaaauau

SEQ ID NO: 366642 - RNA, 21 nt, Artificial Sequence
  Synthetic
aguaggagaauacaaaaauau

SEQ ID NO: 366643 - RNA, 22 nt, Artificial Sequence
  Synthetic
gaguaggagaauacaaaaauau

SEQ ID NO: 366644 - RNA, 23 nt, Artificial Sequence
  Synthetic
ggaguaggagaauacaaaaauau

SEQ ID NO: 366645 - RNA, 24 nt, Artificial Sequence
  Synthetic
aggaguaggagaauacaaaaauau

SEQ ID NO: 366646 - RNA, 18 nt, Artificial Sequence
  Synthetic
uuaaacaaucaaaaauau

SEQ ID NO: 366647 - RNA, 19 nt, Artificial Sequence
  Synthetic
uuuaaacaaucaaaaauau

SEQ ID NO: 366648 - RNA, 20 nt, Artificial Sequence
  Synthetic
guuuaaacaaucaaaaauau

SEQ ID NO: 366649 - RNA, 21 nt, Artificial Sequence
  Synthetic
aguuuaaacaaucaaaaauau

SEQ ID NO: 366650 - RNA, 22 nt, Artificial Sequence
  Synthetic
aaguuuaaacaaucaaaaauau

SEQ ID NO: 366651 - RNA, 23 nt, Artificial Sequence
  Synthetic
gaaguuuaaacaaucaaaaauau

SEQ ID NO: 366652 - RNA, 24 nt, Artificial Sequence
  Synthetic
ugaaguuuaaacaaucaaaaauau

SEQ ID NO: 366653 - RNA, 18 nt, Artificial Sequence
  Synthetic
gauuuuauucaaaaauau

SEQ ID NO: 366654 - RNA, 19 nt, Artificial Sequence
  Synthetic
ugauuuuauucaaaaauau

SEQ ID NO: 366655 - RNA, 20 nt, Artificial Sequence
  Synthetic
uugauuuuauucaaaaauau

SEQ ID NO: 366656 - RNA, 21 nt, Artificial Sequence
  Synthetic
guugauuuuauucaaaaauau

SEQ ID NO: 366657 - RNA, 22 nt, Artificial Sequence
  Synthetic
uguugauuuuauucaaaaauau

SEQ ID NO: 366658 - RNA, 23 nt, Artificial Sequence
  Synthetic
auguugauuuuauucaaaaauau

SEQ ID NO: 366659 - RNA, 24 nt, Artificial Sequence
  Synthetic
uauguugauuuuauucaaaaauau

SEQ ID NO: 366660 - RNA, 18 nt, Artificial Sequence
  Synthetic
auagaauuugaaaaauau

SEQ ID NO: 366661 - RNA, 19 nt, Artificial Sequence
  Synthetic
uauagaauuugaaaaauau

SEQ ID NO: 366662 - RNA, 20 nt, Artificial Sequence
  Synthetic
uuauagaauuugaaaaauau

SEQ ID NO: 366663 - RNA, 21 nt, Artificial Sequence
  Synthetic
auuauagaauuugaaaaauau

SEQ ID NO: 366664 - RNA, 22 nt, Artificial Sequence
  Synthetic
cauuauagaauuugaaaaauau

SEQ ID NO: 366665 - RNA, 23 nt, Artificial Sequence
  Synthetic
ucauuauagaauuugaaaaauau

SEQ ID NO: 366666 - RNA, 24 nt, Artificial Sequence
  Synthetic
cucauuauagaauuugaaaaauau

SEQ ID NO: 366667 - RNA, 18 nt, Artificial Sequence
  Synthetic
uacuguaauuaaaaauau

SEQ ID NO: 366668 - RNA, 19 nt, Artificial Sequence
  Synthetic
uuacuguaauuaaaaauau

SEQ ID NO: 366669 - RNA, 20 nt, Artificial Sequence
  Synthetic
auuacuguaauuaaaaauau

SEQ ID NO: 366670 - RNA, 21 nt, Artificial Sequence
  Synthetic
cauuacuguaauuaaaaauau

SEQ ID NO: 366671 - RNA, 22 nt, Artificial Sequence
  Synthetic
gcauuacuguaauuaaaaauau

SEQ ID NO: 366672 - RNA, 23 nt, Artificial Sequence
  Synthetic
agcauuacuguaauuaaaaauau

SEQ ID NO: 366673 - RNA, 24 nt, Artificial Sequence
  Synthetic
cagcauuacuguaauuaaaaauau

SEQ ID NO: 366674 - RNA, 18 nt, Artificial Sequence
  Synthetic
gcuucuuuuuaaaaauau

SEQ ID NO: 366675 - RNA, 19 nt, Artificial Sequence
  Synthetic
ggcuucuuuuuaaaaauau

SEQ ID NO: 366676 - RNA, 20 nt, Artificial Sequence
  Synthetic
cggcuucuuuuuaaaaauau

SEQ ID NO: 366677 - RNA, 21 nt, Artificial Sequence
  Synthetic
acggcuucuuuuuaaaaauau

SEQ ID NO: 366678 - RNA, 22 nt, Artificial Sequence
  Synthetic
cacggcuucuuuuuaaaaauau

SEQ ID NO: 366679 - RNA, 23 nt, Artificial Sequence
  Synthetic
ccacggcuucuuuuuaaaaauau

SEQ ID NO: 366680 - RNA, 24 nt, Artificial Sequence
  Synthetic
uccacggcuucuuuuuaaaaauau

SEQ ID NO: 366681 - RNA, 18 nt, Artificial Sequence
  Synthetic
gguugacaaacaaaauau

SEQ ID NO: 366682 - RNA, 19 nt, Artificial Sequence
  Synthetic
ggguugacaaacaaaauau

SEQ ID NO: 366683 - RNA, 20 nt, Artificial Sequence
  Synthetic
aggguugacaaacaaaauau

SEQ ID NO: 366684 - RNA, 21 nt, Artificial Sequence
  Synthetic
aaggguugacaaacaaaauau

SEQ ID NO: 366685 - RNA, 22 nt, Artificial Sequence
  Synthetic
gaaggguugacaaacaaaauau

SEQ ID NO: 366686 - RNA, 23 nt, Artificial Sequence
  Synthetic
agaaggguugacaaacaaaauau

SEQ ID NO: 366687 - RNA, 24 nt, Artificial Sequence
  Synthetic
cagaaggguugacaaacaaaauau

SEQ ID NO: 366688 - RNA, 18 nt, Artificial Sequence
  Synthetic
gaaauccaaacaaaauau

SEQ ID NO: 366689 - RNA, 19 nt, Artificial Sequence
  Synthetic
agaaauccaaacaaaauau

SEQ ID NO: 366690 - RNA, 20 nt, Artificial Sequence
  Synthetic
uagaaauccaaacaaaauau

SEQ ID NO: 366691 - RNA, 21 nt, Artificial Sequence
  Synthetic
guagaaauccaaacaaaauau

SEQ ID NO: 366692 - RNA, 22 nt, Artificial Sequence
  Synthetic
uguagaaauccaaacaaaauau

SEQ ID NO: 366693 - RNA, 23 nt, Artificial Sequence
  Synthetic
auguagaaauccaaacaaaauau

SEQ ID NO: 366694 - RNA, 24 nt, Artificial Sequence
  Synthetic
uauguagaaauccaaacaaaauau

SEQ ID NO: 366695 - RNA, 18 nt, Artificial Sequence
  Synthetic
uacccauucacaaaauau

SEQ ID NO: 366696 - RNA, 19 nt, Artificial Sequence
  Synthetic
auacccauucacaaaauau

SEQ ID NO: 366697 - RNA, 20 nt, Artificial Sequence
  Synthetic
aauacccauucacaaaauau

SEQ ID NO: 366698 - RNA, 21 nt, Artificial Sequence
  Synthetic
caauacccauucacaaaauau

SEQ ID NO: 366699 - RNA, 22 nt, Artificial Sequence
  Synthetic
ucaauacccauucacaaaauau

SEQ ID NO: 366700 - RNA, 23 nt, Artificial Sequence
  Synthetic
uucaauacccauucacaaaauau

SEQ ID NO: 366701 - RNA, 24 nt, Artificial Sequence
  Synthetic
cuucaauacccauucacaaaauau

SEQ ID NO: 366702 - RNA, 18 nt, Artificial Sequence
  Synthetic
ugcuuauuuacaaaauau

SEQ ID NO: 366703 - RNA, 19 nt, Artificial Sequence
  Synthetic
augcuuauuuacaaaauau

SEQ ID NO: 366704 - RNA, 20 nt, Artificial Sequence
  Synthetic
gaugcuuauuuacaaaauau

SEQ ID NO: 366705 - RNA, 21 nt, Artificial Sequence
  Synthetic
ugaugcuuauuuacaaaauau

SEQ ID NO: 366706 - RNA, 22 nt, Artificial Sequence
  Synthetic
cugaugcuuauuuacaaaauau

SEQ ID NO: 366707 - RNA, 23 nt, Artificial Sequence
  Synthetic
ccugaugcuuauuuacaaaauau

SEQ ID NO: 366708 - RNA, 24 nt, Artificial Sequence
  Synthetic
uccugaugcuuauuuacaaaauau

SEQ ID NO: 366709 - RNA, 18 nt, Artificial Sequence
  Synthetic
guaguuuccccaaaauau

SEQ ID NO: 366710 - RNA, 19 nt, Artificial Sequence
  Synthetic
aguaguuuccccaaaauau

SEQ ID NO: 366711 - RNA, 20 nt, Artificial Sequence
  Synthetic
uaguaguuuccccaaaauau

SEQ ID NO: 366712 - RNA, 21 nt, Artificial Sequence
  Synthetic
cuaguaguuuccccaaaauau

SEQ ID NO: 366713 - RNA, 22 nt, Artificial Sequence
  Synthetic
acuaguaguuuccccaaaauau

SEQ ID NO: 366714 - RNA, 23 nt, Artificial Sequence
  Synthetic
aacuaguaguuuccccaaaauau

SEQ ID NO: 366715 - RNA, 24 nt, Artificial Sequence
  Synthetic
aaacuaguaguuuccccaaaauau

SEQ ID NO: 366716 - RNA, 18 nt, Artificial Sequence
  Synthetic
uuuuauacaucaaaauau

SEQ ID NO: 366717 - RNA, 19 nt, Artificial Sequence
  Synthetic
uuuuuauacaucaaaauau

SEQ ID NO: 366718 - RNA, 20 nt, Artificial Sequence
  Synthetic
auuuuuauacaucaaaauau

SEQ ID NO: 366719 - RNA, 21 nt, Artificial Sequence
  Synthetic
uauuuuuauacaucaaaauau

SEQ ID NO: 366720 - RNA, 22 nt, Artificial Sequence
  Synthetic
cuauuuuuauacaucaaaauau

SEQ ID NO: 366721 - RNA, 23 nt, Artificial Sequence
  Synthetic
acuauuuuuauacaucaaaauau

SEQ ID NO: 366722 - RNA, 24 nt, Artificial Sequence
  Synthetic
gacuauuuuuauacaucaaaauau

SEQ ID NO: 366723 - RNA, 18 nt, Artificial Sequence
  Synthetic
aaaaaaacaagaaaauau

SEQ ID NO: 366724 - RNA, 19 nt, Artificial Sequence
  Synthetic
aaaaaaaacaagaaaauau

SEQ ID NO: 366725 - RNA, 20 nt, Artificial Sequence
  Synthetic
gaaaaaaaacaagaaaauau

SEQ ID NO: 366726 - RNA, 21 nt, Artificial Sequence
  Synthetic
agaaaaaaaacaagaaaauau

SEQ ID NO: 366727 - RNA, 22 nt, Artificial Sequence
  Synthetic
cagaaaaaaaacaagaaaauau

SEQ ID NO: 366728 - RNA, 23 nt, Artificial Sequence
  Synthetic
ucagaaaaaaaacaagaaaauau

SEQ ID NO: 366729 - RNA, 24 nt, Artificial Sequence
  Synthetic
cucagaaaaaaaacaagaaaauau

SEQ ID NO: 366730 - RNA, 18 nt, Artificial Sequence
  Synthetic
agagaauuaggaaaauau

SEQ ID NO: 366731 - RNA, 19 nt, Artificial Sequence
  Synthetic
aagagaauuaggaaaauau

SEQ ID NO: 366732 - RNA, 20 nt, Artificial Sequence
  Synthetic
uaagagaauuaggaaaauau

SEQ ID NO: 366733 - RNA, 21 nt, Artificial Sequence
  Synthetic
guaagagaauuaggaaaauau

SEQ ID NO: 366734 - RNA, 22 nt, Artificial Sequence
  Synthetic
gguaagagaauuaggaaaauau

SEQ ID NO: 366735 - RNA, 23 nt, Artificial Sequence
  Synthetic
agguaagagaauuaggaaaauau

SEQ ID NO: 366736 - RNA, 24 nt, Artificial Sequence
  Synthetic
gagguaagagaauuaggaaaauau

SEQ ID NO: 366737 - RNA, 18 nt, Artificial Sequence
  Synthetic
gguauuuaaugaaaauau

SEQ ID NO: 366738 - RNA, 19 nt, Artificial Sequence
  Synthetic
agguauuuaaugaaaauau

SEQ ID NO: 366739 - RNA, 20 nt, Artificial Sequence
  Synthetic
cagguauuuaaugaaaauau

SEQ ID NO: 366740 - RNA, 21 nt, Artificial Sequence
  Synthetic
gcagguauuuaaugaaaauau

SEQ ID NO: 366741 - RNA, 22 nt, Artificial Sequence
  Synthetic
agcagguauuuaaugaaaauau

SEQ ID NO: 366742 - RNA, 23 nt, Artificial Sequence
  Synthetic
gagcagguauuuaaugaaaauau

SEQ ID NO: 366743 - RNA, 24 nt, Artificial Sequence
  Synthetic
agagcagguauuuaaugaaaauau

SEQ ID NO: 366744 - RNA, 18 nt, Artificial Sequence
  Synthetic
ucacugugaauaaaauau

SEQ ID NO: 366745 - RNA, 19 nt, Artificial Sequence
  Synthetic
gucacugugaauaaaauau

SEQ ID NO: 366746 - RNA, 20 nt, Artificial Sequence
  Synthetic
cgucacugugaauaaaauau

SEQ ID NO: 366747 - RNA, 21 nt, Artificial Sequence
  Synthetic
ccgucacugugaauaaaauau

SEQ ID NO: 366748 - RNA, 22 nt, Artificial Sequence
  Synthetic
cccgucacugugaauaaaauau

SEQ ID NO: 366749 - RNA, 23 nt, Artificial Sequence
  Synthetic
gcccgucacugugaauaaaauau

SEQ ID NO: 366750 - RNA, 24 nt, Artificial Sequence
  Synthetic
ggcccgucacugugaauaaaauau

SEQ ID NO: 366751 - RNA, 18 nt, Artificial Sequence
  Synthetic
uagcauggaguaaaauau

SEQ ID NO: 366752 - RNA, 19 nt, Artificial Sequence
  Synthetic
guagcauggaguaaaauau

SEQ ID NO: 366753 - RNA, 20 nt, Artificial Sequence
  Synthetic
cguagcauggaguaaaauau

SEQ ID NO: 366754 - RNA, 21 nt, Artificial Sequence
  Synthetic
ucguagcauggaguaaaauau

SEQ ID NO: 366755 - RNA, 22 nt, Artificial Sequence
  Synthetic
gucguagcauggaguaaaauau

SEQ ID NO: 366756 - RNA, 23 nt, Artificial Sequence
  Synthetic
ggucguagcauggaguaaaauau

SEQ ID NO: 366757 - RNA, 24 nt, Artificial Sequence
  Synthetic
aggucguagcauggaguaaaauau

SEQ ID NO: 366758 - RNA, 18 nt, Artificial Sequence
  Synthetic
ucugacaacuuaaaauau

SEQ ID NO: 366759 - RNA, 19 nt, Artificial Sequence
  Synthetic
aucugacaacuuaaaauau

SEQ ID NO: 366760 - RNA, 20 nt, Artificial Sequence
  Synthetic
uaucugacaacuuaaaauau

SEQ ID NO: 366761 - RNA, 21 nt, Artificial Sequence
  Synthetic
uuaucugacaacuuaaaauau

SEQ ID NO: 366762 - RNA, 22 nt, Artificial Sequence
  Synthetic
uuuaucugacaacuuaaaauau

SEQ ID NO: 366763 - RNA, 23 nt, Artificial Sequence
  Synthetic
auuuaucugacaacuuaaaauau

SEQ ID NO: 366764 - RNA, 24 nt, Artificial Sequence
  Synthetic
uauuuaucugacaacuuaaaauau

SEQ ID NO: 366765 - RNA, 18 nt, Artificial Sequence
  Synthetic
uauuugugucacaaauau

SEQ ID NO: 366766 - RNA, 19 nt, Artificial Sequence
  Synthetic
uuauuugugucacaaauau

SEQ ID NO: 366767 - RNA, 20 nt, Artificial Sequence
  Synthetic
guuauuugugucacaaauau

SEQ ID NO: 366768 - RNA, 21 nt, Artificial Sequence
  Synthetic
aguuauuugugucacaaauau

SEQ ID NO: 366769 - RNA, 22 nt, Artificial Sequence
  Synthetic
aaguuauuugugucacaaauau

SEQ ID NO: 366770 - RNA, 23 nt, Artificial Sequence
  Synthetic
uaaguuauuugugucacaaauau

SEQ ID NO: 366771 - RNA, 24 nt, Artificial Sequence
  Synthetic
uuaaguuauuugugucacaaauau

SEQ ID NO: 366772 - RNA, 18 nt, Artificial Sequence
  Synthetic
aauacugucuacaaauau

SEQ ID NO: 366773 - RNA, 19 nt, Artificial Sequence
  Synthetic
aaauacugucuacaaauau

SEQ ID NO: 366774 - RNA, 20 nt, Artificial Sequence
  Synthetic
aaaauacugucuacaaauau

SEQ ID NO: 366775 - RNA, 21 nt, Artificial Sequence
  Synthetic
gaaaauacugucuacaaauau

SEQ ID NO: 366776 - RNA, 22 nt, Artificial Sequence
  Synthetic
agaaaauacugucuacaaauau

SEQ ID NO: 366777 - RNA, 23 nt, Artificial Sequence
  Synthetic
uagaaaauacugucuacaaauau

SEQ ID NO: 366778 - RNA, 24 nt, Artificial Sequence
  Synthetic
uuagaaaauacugucuacaaauau

SEQ ID NO: 366779 - RNA, 18 nt, Artificial Sequence
  Synthetic
caguagcuuuacaaauau

SEQ ID NO: 366780 - RNA, 19 nt, Artificial Sequence
  Synthetic
gcaguagcuuuacaaauau

SEQ ID NO: 366781 - RNA, 20 nt, Artificial Sequence
  Synthetic
ugcaguagcuuuacaaauau

SEQ ID NO: 366782 - RNA, 21 nt, Artificial Sequence
  Synthetic
uugcaguagcuuuacaaauau

SEQ ID NO: 366783 - RNA, 22 nt, Artificial Sequence
  Synthetic
uuugcaguagcuuuacaaauau

SEQ ID NO: 366784 - RNA, 23 nt, Artificial Sequence
  Synthetic
uuuugcaguagcuuuacaaauau

SEQ ID NO: 366785 - RNA, 24 nt, Artificial Sequence
  Synthetic
uuuuugcaguagcuuuacaaauau

SEQ ID NO: 366786 - RNA, 18 nt, Artificial Sequence
  Synthetic
uugguaaaggccaaauau

SEQ ID NO: 366787 - RNA, 19 nt, Artificial Sequence
  Synthetic
uuugguaaaggccaaauau

SEQ ID NO: 366788 - RNA, 20 nt, Artificial Sequence
  Synthetic
cuuugguaaaggccaaauau

SEQ ID NO: 366789 - RNA, 21 nt, Artificial Sequence
  Synthetic
acuuugguaaaggccaaauau

SEQ ID NO: 366790 - RNA, 22 nt, Artificial Sequence
  Synthetic
uacuuugguaaaggccaaauau

SEQ ID NO: 366791 - RNA, 23 nt, Artificial Sequence
  Synthetic
cuacuuugguaaaggccaaauau

SEQ ID NO: 366792 - RNA, 24 nt, Artificial Sequence
  Synthetic
ccuacuuugguaaaggccaaauau

SEQ ID NO: 366793 - RNA, 18 nt, Artificial Sequence
  Synthetic
cucuuaguuugcaaauau

SEQ ID NO: 366794 - RNA, 19 nt, Artificial Sequence
  Synthetic
gcucuuaguuugcaaauau

SEQ ID NO: 366795 - RNA, 20 nt, Artificial Sequence
  Synthetic
agcucuuaguuugcaaauau

SEQ ID NO: 366796 - RNA, 21 nt, Artificial Sequence
  Synthetic
aagcucuuaguuugcaaauau

SEQ ID NO: 366797 - RNA, 22 nt, Artificial Sequence
  Synthetic
gaagcucuuaguuugcaaauau

SEQ ID NO: 366798 - RNA, 23 nt, Artificial Sequence
  Synthetic
ugaagcucuuaguuugcaaauau

SEQ ID NO: 366799 - RNA, 24 nt, Artificial Sequence
  Synthetic
augaagcucuuaguuugcaaauau

SEQ ID NO: 366800 - RNA, 18 nt, Artificial Sequence
  Synthetic
aaauagaauuucaaauau

SEQ ID NO: 366801 - RNA, 19 nt, Artificial Sequence
  Synthetic
uaaauagaauuucaaauau

SEQ ID NO: 366802 - RNA, 20 nt, Artificial Sequence
  Synthetic
guaaauagaauuucaaauau

SEQ ID NO: 366803 - RNA, 21 nt, Artificial Sequence
  Synthetic
aguaaauagaauuucaaauau

SEQ ID NO: 366804 - RNA, 22 nt, Artificial Sequence
  Synthetic
aaguaaauagaauuucaaauau

SEQ ID NO: 366805 - RNA, 23 nt, Artificial Sequence
  Synthetic
gaaguaaauagaauuucaaauau

SEQ ID NO: 366806 - RNA, 24 nt, Artificial Sequence
  Synthetic
ggaaguaaauagaauuucaaauau

SEQ ID NO: 366807 - RNA, 18 nt, Artificial Sequence
  Synthetic
ggaucaugaaagaaauau

SEQ ID NO: 366808 - RNA, 19 nt, Artificial Sequence
  Synthetic
aggaucaugaaagaaauau

SEQ ID NO: 366809 - RNA, 20 nt, Artificial Sequence
  Synthetic
gaggaucaugaaagaaauau

SEQ ID NO: 366810 - RNA, 21 nt, Artificial Sequence
  Synthetic
ggaggaucaugaaagaaauau

SEQ ID NO: 366811 - RNA, 22 nt, Artificial Sequence
  Synthetic
gggaggaucaugaaagaaauau

SEQ ID NO: 366812 - RNA, 23 nt, Artificial Sequence
  Synthetic
ugggaggaucaugaaagaaauau

SEQ ID NO: 366813 - RNA, 24 nt, Artificial Sequence
  Synthetic
cugggaggaucaugaaagaaauau

SEQ ID NO: 366814 - RNA, 18 nt, Artificial Sequence
  Synthetic
aacaaaaagcagaaauau

SEQ ID NO: 366815 - RNA, 19 nt, Artificial Sequence
  Synthetic
aaacaaaaagcagaaauau

SEQ ID NO: 366816 - RNA, 20 nt, Artificial Sequence
  Synthetic
aaaacaaaaagcagaaauau

SEQ ID NO: 366817 - RNA, 21 nt, Artificial Sequence
  Synthetic
aaaaacaaaaagcagaaauau

SEQ ID NO: 366818 - RNA, 22 nt, Artificial Sequence
  Synthetic
uaaaaacaaaaagcagaaauau

SEQ ID NO: 366819 - RNA, 23 nt, Artificial Sequence
  Synthetic
auaaaaacaaaaagcagaaauau

SEQ ID NO: 366820 - RNA, 24 nt, Artificial Sequence
  Synthetic
cauaaaaacaaaaagcagaaauau

SEQ ID NO: 366821 - RNA, 18 nt, Artificial Sequence
  Synthetic
uccaccccucagaaauau

SEQ ID NO: 366822 - RNA, 19 nt, Artificial Sequence
  Synthetic
uuccaccccucagaaauau

SEQ ID NO: 366823 - RNA, 20 nt, Artificial Sequence
  Synthetic
auuccaccccucagaaauau

SEQ ID NO: 366824 - RNA, 21 nt, Artificial Sequence
  Synthetic
uauuccaccccucagaaauau

SEQ ID NO: 366825 - RNA, 22 nt, Artificial Sequence
  Synthetic
uuauuccaccccucagaaauau

SEQ ID NO: 366826 - RNA, 23 nt, Artificial Sequence
  Synthetic
guuauuccaccccucagaaauau

SEQ ID NO: 366827 - RNA, 24 nt, Artificial Sequence
  Synthetic
gguuauuccaccccucagaaauau

SEQ ID NO: 366828 - RNA, 18 nt, Artificial Sequence
  Synthetic
uuguauccauagaaauau

SEQ ID NO: 366829 - RNA, 19 nt, Artificial Sequence
  Synthetic
uuuguauccauagaaauau

SEQ ID NO: 366830 - RNA, 20 nt, Artificial Sequence
  Synthetic
auuuguauccauagaaauau

SEQ ID NO: 366831 - RNA, 21 nt, Artificial Sequence
  Synthetic
aauuuguauccauagaaauau

SEQ ID NO: 366832 - RNA, 22 nt, Artificial Sequence
  Synthetic
caauuuguauccauagaaauau

SEQ ID NO: 366833 - RNA, 23 nt, Artificial Sequence
  Synthetic
acaauuuguauccauagaaauau

SEQ ID NO: 366834 - RNA, 24 nt, Artificial Sequence
  Synthetic
uacaauuuguauccauagaaauau

SEQ ID NO: 366835 - RNA, 18 nt, Artificial Sequence
  Synthetic
uaaucaaagaugaaauau

SEQ ID NO: 366836 - RNA, 19 nt, Artificial Sequence
  Synthetic
cuaaucaaagaugaaauau

SEQ ID NO: 366837 - RNA, 20 nt, Artificial Sequence
  Synthetic
ccuaaucaaagaugaaauau

SEQ ID NO: 366838 - RNA, 21 nt, Artificial Sequence
  Synthetic
accuaaucaaagaugaaauau

SEQ ID NO: 366839 - RNA, 22 nt, Artificial Sequence
  Synthetic
caccuaaucaaagaugaaauau

SEQ ID NO: 366840 - RNA, 23 nt, Artificial Sequence
  Synthetic
ucaccuaaucaaagaugaaauau

SEQ ID NO: 366841 - RNA, 24 nt, Artificial Sequence
  Synthetic
cucaccuaaucaaagaugaaauau

SEQ ID NO: 366842 - RNA, 18 nt, Artificial Sequence
  Synthetic
gcccuauuuaugaaauau

SEQ ID NO: 366843 - RNA, 19 nt, Artificial Sequence
  Synthetic
agcccuauuuaugaaauau

SEQ ID NO: 366844 - RNA, 20 nt, Artificial Sequence
  Synthetic
cagcccuauuuaugaaauau

SEQ ID NO: 366845 - RNA, 21 nt, Artificial Sequence
  Synthetic
acagcccuauuuaugaaauau

SEQ ID NO: 366846 - RNA, 22 nt, Artificial Sequence
  Synthetic
uacagcccuauuuaugaaauau

SEQ ID NO: 366847 - RNA, 23 nt, Artificial Sequence
  Synthetic
uuacagcccuauuuaugaaauau

SEQ ID NO: 366848 - RNA, 24 nt, Artificial Sequence
  Synthetic
guuacagcccuauuuaugaaauau

SEQ ID NO: 366849 - RNA, 18 nt, Artificial Sequence
  Synthetic
aaauguuuucugaaauau

SEQ ID NO: 366850 - RNA, 19 nt, Artificial Sequence
  Synthetic
uaaauguuuucugaaauau

SEQ ID NO: 366851 - RNA, 20 nt, Artificial Sequence
  Synthetic
guaaauguuuucugaaauau

SEQ ID NO: 366852 - RNA, 21 nt, Artificial Sequence
  Synthetic
uguaaauguuuucugaaauau

SEQ ID NO: 366853 - RNA, 22 nt, Artificial Sequence
  Synthetic
auguaaauguuuucugaaauau

SEQ ID NO: 366854 - RNA, 23 nt, Artificial Sequence
  Synthetic
aauguaaauguuuucugaaauau

SEQ ID NO: 366855 - RNA, 24 nt, Artificial Sequence
  Synthetic
gaauguaaauguuuucugaaauau

SEQ ID NO: 366856 - RNA, 18 nt, Artificial Sequence
  Synthetic
agauuucaagugaaauau

SEQ ID NO: 366857 - RNA, 19 nt, Artificial Sequence
  Synthetic
gagauuucaagugaaauau

SEQ ID NO: 366858 - RNA, 20 nt, Artificial Sequence
  Synthetic
ggagauuucaagugaaauau

SEQ ID NO: 366859 - RNA, 21 nt, Artificial Sequence
  Synthetic
uggagauuucaagugaaauau

SEQ ID NO: 366860 - RNA, 22 nt, Artificial Sequence
  Synthetic
auggagauuucaagugaaauau

SEQ ID NO: 366861 - RNA, 23 nt, Artificial Sequence
  Synthetic
cauggagauuucaagugaaauau

SEQ ID NO: 366862 - RNA, 24 nt, Artificial Sequence
  Synthetic
acauggagauuucaagugaaauau

SEQ ID NO: 366863 - RNA, 18 nt, Artificial Sequence
  Synthetic
cuaaggagcaauaaauau

SEQ ID NO: 366864 - RNA, 19 nt, Artificial Sequence
  Synthetic
acuaaggagcaauaaauau

SEQ ID NO: 366865 - RNA, 20 nt, Artificial Sequence
  Synthetic
aacuaaggagcaauaaauau

SEQ ID NO: 366866 - RNA, 21 nt, Artificial Sequence
  Synthetic
aaacuaaggagcaauaaauau

SEQ ID NO: 366867 - RNA, 22 nt, Artificial Sequence
  Synthetic
caaacuaaggagcaauaaauau

SEQ ID NO: 366868 - RNA, 23 nt, Artificial Sequence
  Synthetic
acaaacuaaggagcaauaaauau

SEQ ID NO: 366869 - RNA, 24 nt, Artificial Sequence
  Synthetic
gacaaacuaaggagcaauaaauau

SEQ ID NO: 366870 - RNA, 18 nt, Artificial Sequence
  Synthetic
uuugugaugaauaaauau

SEQ ID NO: 366871 - RNA, 19 nt, Artificial Sequence
  Synthetic
uuuugugaugaauaaauau

SEQ ID NO: 366872 - RNA, 20 nt, Artificial Sequence
  Synthetic
uuuuugugaugaauaaauau

SEQ ID NO: 366873 - RNA, 21 nt, Artificial Sequence
  Synthetic
auuuuugugaugaauaaauau

SEQ ID NO: 366874 - RNA, 22 nt, Artificial Sequence
  Synthetic
cauuuuugugaugaauaaauau

SEQ ID NO: 366875 - RNA, 23 nt, Artificial Sequence
  Synthetic
acauuuuugugaugaauaaauau

SEQ ID NO: 366876 - RNA, 24 nt, Artificial Sequence
  Synthetic
cacauuuuugugaugaauaaauau

SEQ ID NO: 366877 - RNA, 18 nt, Artificial Sequence
  Synthetic
uugggaguucauaaauau

SEQ ID NO: 366878 - RNA, 19 nt, Artificial Sequence
  Synthetic
uuugggaguucauaaauau

SEQ ID NO: 366879 - RNA, 20 nt, Artificial Sequence
  Synthetic
auuugggaguucauaaauau

SEQ ID NO: 366880 - RNA, 21 nt, Artificial Sequence
  Synthetic
aauuugggaguucauaaauau

SEQ ID NO: 366881 - RNA, 22 nt, Artificial Sequence
  Synthetic
aaauuugggaguucauaaauau

SEQ ID NO: 366882 - RNA, 23 nt, Artificial Sequence
  Synthetic
uaaauuugggaguucauaaauau

SEQ ID NO: 366883 - RNA, 24 nt, Artificial Sequence
  Synthetic
guaaauuugggaguucauaaauau

SEQ ID NO: 366884 - RNA, 18 nt, Artificial Sequence
  Synthetic
agccugucagauaaauau

SEQ ID NO: 366885 - RNA, 19 nt, Artificial Sequence
  Synthetic
cagccugucagauaaauau

SEQ ID NO: 366886 - RNA, 20 nt, Artificial Sequence
  Synthetic
acagccugucagauaaauau

SEQ ID NO: 366887 - RNA, 21 nt, Artificial Sequence
  Synthetic
uacagccugucagauaaauau

SEQ ID NO: 366888 - RNA, 22 nt, Artificial Sequence
  Synthetic
guacagccugucagauaaauau

SEQ ID NO: 366889 - RNA, 23 nt, Artificial Sequence
  Synthetic
aguacagccugucagauaaauau

SEQ ID NO: 366890 - RNA, 24 nt, Artificial Sequence
  Synthetic
caguacagccugucagauaaauau

SEQ ID NO: 366891 - RNA, 18 nt, Artificial Sequence
  Synthetic
aagcauacauauaaauau

SEQ ID NO: 366892 - RNA, 19 nt, Artificial Sequence
  Synthetic
aaagcauacauauaaauau

SEQ ID NO: 366893 - RNA, 20 nt, Artificial Sequence
  Synthetic
uaaagcauacauauaaauau

SEQ ID NO: 366894 - RNA, 21 nt, Artificial Sequence
  Synthetic
cuaaagcauacauauaaauau

SEQ ID NO: 366895 - RNA, 22 nt, Artificial Sequence
  Synthetic
ccuaaagcauacauauaaauau

SEQ ID NO: 366896 - RNA, 23 nt, Artificial Sequence
  Synthetic
uccuaaagcauacauauaaauau

SEQ ID NO: 366897 - RNA, 24 nt, Artificial Sequence
  Synthetic
uuccuaaagcauacauauaaauau

SEQ ID NO: 366898 - RNA, 18 nt, Artificial Sequence
  Synthetic
acugagauugcuaaauau

SEQ ID NO: 366899 - RNA, 19 nt, Artificial Sequence
  Synthetic
aacugagauugcuaaauau

SEQ ID NO: 366900 - RNA, 20 nt, Artificial Sequence
  Synthetic
gaacugagauugcuaaauau

SEQ ID NO: 366901 - RNA, 21 nt, Artificial Sequence
  Synthetic
agaacugagauugcuaaauau

SEQ ID NO: 366902 - RNA, 22 nt, Artificial Sequence
  Synthetic
cagaacugagauugcuaaauau

SEQ ID NO: 366903 - RNA, 23 nt, Artificial Sequence
  Synthetic
ccagaacugagauugcuaaauau

SEQ ID NO: 366904 - RNA, 24 nt, Artificial Sequence
  Synthetic
cccagaacugagauugcuaaauau

SEQ ID NO: 366905 - RNA, 18 nt, Artificial Sequence
  Synthetic
aaaaagccaucuaaauau

SEQ ID NO: 366906 - RNA, 19 nt, Artificial Sequence
  Synthetic
caaaaagccaucuaaauau

SEQ ID NO: 366907 - RNA, 20 nt, Artificial Sequence
  Synthetic
acaaaaagccaucuaaauau

SEQ ID NO: 366908 - RNA, 21 nt, Artificial Sequence
  Synthetic
aacaaaaagccaucuaaauau

SEQ ID NO: 366909 - RNA, 22 nt, Artificial Sequence
  Synthetic
caacaaaaagccaucuaaauau

SEQ ID NO: 366910 - RNA, 23 nt, Artificial Sequence
  Synthetic
ucaacaaaaagccaucuaaauau

SEQ ID NO: 366911 - RNA, 24 nt, Artificial Sequence
  Synthetic
cucaacaaaaagccaucuaaauau

SEQ ID NO: 366912 - RNA, 18 nt, Artificial Sequence
  Synthetic
cuguaggaagguaaauau

SEQ ID NO: 366913 - RNA, 19 nt, Artificial Sequence
  Synthetic
acuguaggaagguaaauau

SEQ ID NO: 366914 - RNA, 20 nt, Artificial Sequence
  Synthetic
aacuguaggaagguaaauau

SEQ ID NO: 366915 - RNA, 21 nt, Artificial Sequence
  Synthetic
aaacuguaggaagguaaauau

SEQ ID NO: 366916 - RNA, 22 nt, Artificial Sequence
  Synthetic
caaacuguaggaagguaaauau

SEQ ID NO: 366917 - RNA, 23 nt, Artificial Sequence
  Synthetic
ccaaacuguaggaagguaaauau

SEQ ID NO: 366918 - RNA, 24 nt, Artificial Sequence
  Synthetic
gccaaacuguaggaagguaaauau

SEQ ID NO: 366919 - RNA, 18 nt, Artificial Sequence
  Synthetic
cuggagagaguuaaauau

SEQ ID NO: 366920 - RNA, 19 nt, Artificial Sequence
  Synthetic
ucuggagagaguuaaauau

SEQ ID NO: 366921 - RNA, 20 nt, Artificial Sequence
  Synthetic
cucuggagagaguuaaauau

SEQ ID NO: 366922 - RNA, 21 nt, Artificial Sequence
  Synthetic
ucucuggagagaguuaaauau

SEQ ID NO: 366923 - RNA, 22 nt, Artificial Sequence
  Synthetic
uucucuggagagaguuaaauau

SEQ ID NO: 366924 - RNA, 23 nt, Artificial Sequence
  Synthetic
uuucucuggagagaguuaaauau

SEQ ID NO: 366925 - RNA, 24 nt, Artificial Sequence
  Synthetic
uuuucucuggagagaguuaaauau

SEQ ID NO: 366926 - RNA, 18 nt, Artificial Sequence
  Synthetic
gaaagaagauaacaauau

SEQ ID NO: 366927 - RNA, 19 nt, Artificial Sequence
  Synthetic
agaaagaagauaacaauau

SEQ ID NO: 366928 - RNA, 20 nt, Artificial Sequence
  Synthetic
uagaaagaagauaacaauau

SEQ ID NO: 366929 - RNA, 21 nt, Artificial Sequence
  Synthetic
cuagaaagaagauaacaauau

SEQ ID NO: 366930 - RNA, 22 nt, Artificial Sequence
  Synthetic
ucuagaaagaagauaacaauau

SEQ ID NO: 366931 - RNA, 23 nt, Artificial Sequence
  Synthetic
uucuagaaagaagauaacaauau

SEQ ID NO: 366932 - RNA, 24 nt, Artificial Sequence
  Synthetic
cuucuagaaagaagauaacaauau

SEQ ID NO: 366933 - RNA, 18 nt, Artificial Sequence
  Synthetic
uaauuaaauucacaauau

SEQ ID NO: 366934 - RNA, 19 nt, Artificial Sequence
  Synthetic
cuaauuaaauucacaauau

SEQ ID NO: 366935 - RNA, 20 nt, Artificial Sequence
  Synthetic
acuaauuaaauucacaauau

SEQ ID NO: 366936 - RNA, 21 nt, Artificial Sequence
  Synthetic
uacuaauuaaauucacaauau

SEQ ID NO: 366937 - RNA, 22 nt, Artificial Sequence
  Synthetic
cuacuaauuaaauucacaauau

SEQ ID NO: 366938 - RNA, 23 nt, Artificial Sequence
  Synthetic
ccuacuaauuaaauucacaauau

SEQ ID NO: 366939 - RNA, 24 nt, Artificial Sequence
  Synthetic
gccuacuaauuaaauucacaauau

SEQ ID NO: 366940 - RNA, 18 nt, Artificial Sequence
  Synthetic
gauacaaagggacaauau

SEQ ID NO: 366941 - RNA, 19 nt, Artificial Sequence
  Synthetic
ugauacaaagggacaauau

SEQ ID NO: 366942 - RNA, 20 nt, Artificial Sequence
  Synthetic
uugauacaaagggacaauau

SEQ ID NO: 366943 - RNA, 21 nt, Artificial Sequence
  Synthetic
guugauacaaagggacaauau

SEQ ID NO: 366944 - RNA, 22 nt, Artificial Sequence
  Synthetic
aguugauacaaagggacaauau

SEQ ID NO: 366945 - RNA, 23 nt, Artificial Sequence
  Synthetic
aaguugauacaaagggacaauau

SEQ ID NO: 366946 - RNA, 24 nt, Artificial Sequence
  Synthetic
aaaguugauacaaagggacaauau

SEQ ID NO: 366947 - RNA, 18 nt, Artificial Sequence
  Synthetic
auagcaccuguacaauau

SEQ ID NO: 366948 - RNA, 19 nt, Artificial Sequence
  Synthetic
aauagcaccuguacaauau

SEQ ID NO: 366949 - RNA, 20 nt, Artificial Sequence
  Synthetic
aaauagcaccuguacaauau

SEQ ID NO: 366950 - RNA, 21 nt, Artificial Sequence
  Synthetic
aaaauagcaccuguacaauau

SEQ ID NO: 366951 - RNA, 22 nt, Artificial Sequence
  Synthetic
aaaaauagcaccuguacaauau

SEQ ID NO: 366952 - RNA, 23 nt, Artificial Sequence
  Synthetic
aaaaaauagcaccuguacaauau

SEQ ID NO: 366953 - RNA, 24 nt, Artificial Sequence
  Synthetic
gaaaaaauagcaccuguacaauau

SEQ ID NO: 366954 - RNA, 18 nt, Artificial Sequence
  Synthetic
uauauaugcacccaauau

SEQ ID NO: 366955 - RNA, 19 nt, Artificial Sequence
  Synthetic
auauauaugcacccaauau

SEQ ID NO: 366956 - RNA, 20 nt, Artificial Sequence
  Synthetic
aauauauaugcacccaauau

SEQ ID NO: 366957 - RNA, 21 nt, Artificial Sequence
  Synthetic
aaauauauaugcacccaauau

SEQ ID NO: 366958 - RNA, 22 nt, Artificial Sequence
  Synthetic
uaaauauauaugcacccaauau

SEQ ID NO: 366959 - RNA, 23 nt, Artificial Sequence
  Synthetic
cuaaauauauaugcacccaauau

SEQ ID NO: 366960 - RNA, 24 nt, Artificial Sequence
  Synthetic
ccuaaauauauaugcacccaauau

SEQ ID NO: 366961 - RNA, 18 nt, Artificial Sequence
  Synthetic
aaugaaacacagcaauau

SEQ ID NO: 366962 - RNA, 19 nt, Artificial Sequence
  Synthetic
aaaugaaacacagcaauau

SEQ ID NO: 366963 - RNA, 20 nt, Artificial Sequence
  Synthetic
aaaaugaaacacagcaauau

SEQ ID NO: 366964 - RNA, 21 nt, Artificial Sequence
  Synthetic
gaaaaugaaacacagcaauau

SEQ ID NO: 366965 - RNA, 22 nt, Artificial Sequence
  Synthetic
ugaaaaugaaacacagcaauau

SEQ ID NO: 366966 - RNA, 23 nt, Artificial Sequence
  Synthetic
augaaaaugaaacacagcaauau

SEQ ID NO: 366967 - RNA, 24 nt, Artificial Sequence
  Synthetic
aaugaaaaugaaacacagcaauau

SEQ ID NO: 366968 - RNA, 18 nt, Artificial Sequence
  Synthetic
gaggcuguauagcaauau

SEQ ID NO: 366969 - RNA, 19 nt, Artificial Sequence
  Synthetic
ugaggcuguauagcaauau

SEQ ID NO: 366970 - RNA, 20 nt, Artificial Sequence
  Synthetic
cugaggcuguauagcaauau

SEQ ID NO: 366971 - RNA, 21 nt, Artificial Sequence
  Synthetic
acugaggcuguauagcaauau

SEQ ID NO: 366972 - RNA, 22 nt, Artificial Sequence
  Synthetic
cacugaggcuguauagcaauau

SEQ ID NO: 366973 - RNA, 23 nt, Artificial Sequence
  Synthetic
gcacugaggcuguauagcaauau

SEQ ID NO: 366974 - RNA, 24 nt, Artificial Sequence
  Synthetic
agcacugaggcuguauagcaauau

SEQ ID NO: 366975 - RNA, 18 nt, Artificial Sequence
  Synthetic
guggacauuuagcaauau

SEQ ID NO: 366976 - RNA, 19 nt, Artificial Sequence
  Synthetic
aguggacauuuagcaauau

SEQ ID NO: 366977 - RNA, 20 nt, Artificial Sequence
  Synthetic
aaguggacauuuagcaauau

SEQ ID NO: 366978 - RNA, 21 nt, Artificial Sequence
  Synthetic
caaguggacauuuagcaauau

SEQ ID NO: 366979 - RNA, 22 nt, Artificial Sequence
  Synthetic
ccaaguggacauuuagcaauau

SEQ ID NO: 366980 - RNA, 23 nt, Artificial Sequence
  Synthetic
accaaguggacauuuagcaauau

SEQ ID NO: 366981 - RNA, 24 nt, Artificial Sequence
  Synthetic
caccaaguggacauuuagcaauau

SEQ ID NO: 366982 - RNA, 18 nt, Artificial Sequence
  Synthetic
uucuucuggaugcaauau

SEQ ID NO: 366983 - RNA, 19 nt, Artificial Sequence
  Synthetic
auucuucuggaugcaauau

SEQ ID NO: 366984 - RNA, 20 nt, Artificial Sequence
  Synthetic
cauucuucuggaugcaauau

SEQ ID NO: 366985 - RNA, 21 nt, Artificial Sequence
  Synthetic
ucauucuucuggaugcaauau

SEQ ID NO: 366986 - RNA, 22 nt, Artificial Sequence
  Synthetic
gucauucuucuggaugcaauau

SEQ ID NO: 366987 - RNA, 23 nt, Artificial Sequence
  Synthetic
ugucauucuucuggaugcaauau

SEQ ID NO: 366988 - RNA, 24 nt, Artificial Sequence
  Synthetic
gugucauucuucuggaugcaauau

SEQ ID NO: 366989 - RNA, 18 nt, Artificial Sequence
  Synthetic
aauucaccuacucaauau

SEQ ID NO: 366990 - RNA, 19 nt, Artificial Sequence
  Synthetic
aaauucaccuacucaauau

SEQ ID NO: 366991 - RNA, 20 nt, Artificial Sequence
  Synthetic
uaaauucaccuacucaauau

SEQ ID NO: 366992 - RNA, 21 nt, Artificial Sequence
  Synthetic
uuaaauucaccuacucaauau

SEQ ID NO: 366993 - RNA, 22 nt, Artificial Sequence
  Synthetic
guuaaauucaccuacucaauau

SEQ ID NO: 366994 - RNA, 23 nt, Artificial Sequence
  Synthetic
aguuaaauucaccuacucaauau

SEQ ID NO: 366995 - RNA, 24 nt, Artificial Sequence
  Synthetic
aaguuaaauucaccuacucaauau

SEQ ID NO: 366996 - RNA, 18 nt, Artificial Sequence
  Synthetic
ggacuagcgggucaauau

SEQ ID NO: 366997 - RNA, 19 nt, Artificial Sequence
  Synthetic
cggacuagcgggucaauau

SEQ ID NO: 366998 - RNA, 20 nt, Artificial Sequence
  Synthetic
ucggacuagcgggucaauau

SEQ ID NO: 366999 - RNA, 21 nt, Artificial Sequence
  Synthetic
cucggacuagcgggucaauau

SEQ ID NO: 367000 - RNA, 22 nt, Artificial Sequence
  Synthetic
acucggacuagcgggucaauau

SEQ ID NO: 367001 - RNA, 23 nt, Artificial Sequence
  Synthetic
gacucggacuagcgggucaauau

SEQ ID NO: 367002 - RNA, 24 nt, Artificial Sequence
  Synthetic
ugacucggacuagcgggucaauau

SEQ ID NO: 367003 - RNA, 18 nt, Artificial Sequence
  Synthetic
aaaaaaaaaaaagaauau

SEQ ID NO: 367004 - RNA, 19 nt, Artificial Sequence
  Synthetic
aaaaaaaaaaaaagaauau

SEQ ID NO: 367005 - RNA, 20 nt, Artificial Sequence
  Synthetic
gaaaaaaaaaaaaagaauau

SEQ ID NO: 367006 - RNA, 21 nt, Artificial Sequence
  Synthetic
ugaaaaaaaaaaaaagaauau

SEQ ID NO: 367007 - RNA, 22 nt, Artificial Sequence
  Synthetic
augaaaaaaaaaaaaagaauau

SEQ ID NO: 367008 - RNA, 23 nt, Artificial Sequence
  Synthetic
caugaaaaaaaaaaaaagaauau

SEQ ID NO: 367009 - RNA, 24 nt, Artificial Sequence
  Synthetic
ucaugaaaaaaaaaaaaagaauau

SEQ ID NO: 367010 - RNA, 18 nt, Artificial Sequence
  Synthetic
auauaaauaaaagaauau

SEQ ID NO: 367011 - RNA, 19 nt, Artificial Sequence
  Synthetic
cauauaaauaaaagaauau

SEQ ID NO: 367012 - RNA, 20 nt, Artificial Sequence
  Synthetic
acauauaaauaaaagaauau

SEQ ID NO: 367013 - RNA, 21 nt, Artificial Sequence
  Synthetic
cacauauaaauaaaagaauau

SEQ ID NO: 367014 - RNA, 22 nt, Artificial Sequence
  Synthetic
acacauauaaauaaaagaauau

SEQ ID NO: 367015 - RNA, 23 nt, Artificial Sequence
  Synthetic
cacacauauaaauaaaagaauau

SEQ ID NO: 367016 - RNA, 24 nt, Artificial Sequence
  Synthetic
acacacauauaaauaaaagaauau

SEQ ID NO: 367017 - RNA, 18 nt, Artificial Sequence
  Synthetic
cgcugaaucucagaauau

SEQ ID NO: 367018 - RNA, 19 nt, Artificial Sequence
  Synthetic
acgcugaaucucagaauau

SEQ ID NO: 367019 - RNA, 20 nt, Artificial Sequence
  Synthetic
aacgcugaaucucagaauau

SEQ ID NO: 367020 - RNA, 21 nt, Artificial Sequence
  Synthetic
uaacgcugaaucucagaauau

SEQ ID NO: 367021 - RNA, 22 nt, Artificial Sequence
  Synthetic
auaacgcugaaucucagaauau

SEQ ID NO: 367022 - RNA, 23 nt, Artificial Sequence
  Synthetic
uauaacgcugaaucucagaauau

SEQ ID NO: 367023 - RNA, 24 nt, Artificial Sequence
  Synthetic
guauaacgcugaaucucagaauau

SEQ ID NO: 367024 - RNA, 18 nt, Artificial Sequence
  Synthetic
aaagaaaauucagaauau

SEQ ID NO: 367025 - RNA, 19 nt, Artificial Sequence
  Synthetic
aaaagaaaauucagaauau

SEQ ID NO: 367026 - RNA, 20 nt, Artificial Sequence
  Synthetic
aaaaagaaaauucagaauau

SEQ ID NO: 367027 - RNA, 21 nt, Artificial Sequence
  Synthetic
caaaaagaaaauucagaauau

SEQ ID NO: 367028 - RNA, 22 nt, Artificial Sequence
  Synthetic
acaaaaagaaaauucagaauau

SEQ ID NO: 367029 - RNA, 23 nt, Artificial Sequence
  Synthetic
gacaaaaagaaaauucagaauau

SEQ ID NO: 367030 - RNA, 24 nt, Artificial Sequence
  Synthetic
agacaaaaagaaaauucagaauau

SEQ ID NO: 367031 - RNA, 18 nt, Artificial Sequence
  Synthetic
aagaauaaaugagaauau

SEQ ID NO: 367032 - RNA, 19 nt, Artificial Sequence
  Synthetic
caagaauaaaugagaauau

SEQ ID NO: 367033 - RNA, 20 nt, Artificial Sequence
  Synthetic
ucaagaauaaaugagaauau

SEQ ID NO: 367034 - RNA, 21 nt, Artificial Sequence
  Synthetic
aucaagaauaaaugagaauau

SEQ ID NO: 367035 - RNA, 22 nt, Artificial Sequence
  Synthetic
gaucaagaauaaaugagaauau

SEQ ID NO: 367036 - RNA, 23 nt, Artificial Sequence
  Synthetic
ggaucaagaauaaaugagaauau

SEQ ID NO: 367037 - RNA, 24 nt, Artificial Sequence
  Synthetic
aggaucaagaauaaaugagaauau

SEQ ID NO: 367038 - RNA, 18 nt, Artificial Sequence
  Synthetic
uggcuugugauagaauau

SEQ ID NO: 367039 - RNA, 19 nt, Artificial Sequence
  Synthetic
auggcuugugauagaauau

SEQ ID NO: 367040 - RNA, 20 nt, Artificial Sequence
  Synthetic
cauggcuugugauagaauau

SEQ ID NO: 367041 - RNA, 21 nt, Artificial Sequence
  Synthetic
ccauggcuugugauagaauau

SEQ ID NO: 367042 - RNA, 22 nt, Artificial Sequence
  Synthetic
cccauggcuugugauagaauau

SEQ ID NO: 367043 - RNA, 23 nt, Artificial Sequence
  Synthetic
ucccauggcuugugauagaauau

SEQ ID NO: 367044 - RNA, 24 nt, Artificial Sequence
  Synthetic
cucccauggcuugugauagaauau

SEQ ID NO: 367045 - RNA, 18 nt, Artificial Sequence
  Synthetic
uuaaauuuaagggaauau

SEQ ID NO: 367046 - RNA, 19 nt, Artificial Sequence
  Synthetic
auuaaauuuaagggaauau

SEQ ID NO: 367047 - RNA, 20 nt, Artificial Sequence
  Synthetic
cauuaaauuuaagggaauau

SEQ ID NO: 367048 - RNA, 21 nt, Artificial Sequence
  Synthetic
acauuaaauuuaagggaauau

SEQ ID NO: 367049 - RNA, 22 nt, Artificial Sequence
  Synthetic
cacauuaaauuuaagggaauau

SEQ ID NO: 367050 - RNA, 23 nt, Artificial Sequence
  Synthetic
acacauuaaauuuaagggaauau

SEQ ID NO: 367051 - RNA, 24 nt, Artificial Sequence
  Synthetic
gacacauuaaauuuaagggaauau

SEQ ID NO: 367052 - RNA, 18 nt, Artificial Sequence
  Synthetic
aagaacucaguggaauau

SEQ ID NO: 367053 - RNA, 19 nt, Artificial Sequence
  Synthetic
uaagaacucaguggaauau

SEQ ID NO: 367054 - RNA, 20 nt, Artificial Sequence
  Synthetic
auaagaacucaguggaauau

SEQ ID NO: 367055 - RNA, 21 nt, Artificial Sequence
  Synthetic
aauaagaacucaguggaauau

SEQ ID NO: 367056 - RNA, 22 nt, Artificial Sequence
  Synthetic
aaauaagaacucaguggaauau

SEQ ID NO: 367057 - RNA, 23 nt, Artificial Sequence
  Synthetic
uaaauaagaacucaguggaauau

SEQ ID NO: 367058 - RNA, 24 nt, Artificial Sequence
  Synthetic
guaaauaagaacucaguggaauau

SEQ ID NO: 367059 - RNA, 18 nt, Artificial Sequence
  Synthetic
aaauggaccguggaauau

SEQ ID NO: 367060 - RNA, 19 nt, Artificial Sequence
  Synthetic
caaauggaccguggaauau

SEQ ID NO: 367061 - RNA, 20 nt, Artificial Sequence
  Synthetic
ucaaauggaccguggaauau

SEQ ID NO: 367062 - RNA, 21 nt, Artificial Sequence
  Synthetic
uucaaauggaccguggaauau

SEQ ID NO: 367063 - RNA, 22 nt, Artificial Sequence
  Synthetic
uuucaaauggaccguggaauau

SEQ ID NO: 367064 - RNA, 23 nt, Artificial Sequence
  Synthetic
cuuucaaauggaccguggaauau

SEQ ID NO: 367065 - RNA, 24 nt, Artificial Sequence
  Synthetic
gcuuucaaauggaccguggaauau

SEQ ID NO: 367066 - RNA, 18 nt, Artificial Sequence
  Synthetic
aaauaauguaaugaauau

SEQ ID NO: 367067 - RNA, 19 nt, Artificial Sequence
  Synthetic
uaaauaauguaaugaauau

SEQ ID NO: 367068 - RNA, 20 nt, Artificial Sequence
  Synthetic
auaaauaauguaaugaauau

SEQ ID NO: 367069 - RNA, 21 nt, Artificial Sequence
  Synthetic
aauaaauaauguaaugaauau

SEQ ID NO: 367070 - RNA, 22 nt, Artificial Sequence
  Synthetic
aaauaaauaauguaaugaauau

SEQ ID NO: 367071 - RNA, 23 nt, Artificial Sequence
  Synthetic
caaauaaauaauguaaugaauau

SEQ ID NO: 367072 - RNA, 24 nt, Artificial Sequence
  Synthetic
ucaaauaaauaauguaaugaauau

SEQ ID NO: 367073 - RNA, 18 nt, Artificial Sequence
  Synthetic
ugcuuuucuaaauaauau

SEQ ID NO: 367074 - RNA, 19 nt, Artificial Sequence
  Synthetic
augcuuuucuaaauaauau

SEQ ID NO: 367075 - RNA, 20 nt, Artificial Sequence
  Synthetic
caugcuuuucuaaauaauau

SEQ ID NO: 367076 - RNA, 21 nt, Artificial Sequence
  Synthetic
gcaugcuuuucuaaauaauau

SEQ ID NO: 367077 - RNA, 22 nt, Artificial Sequence
  Synthetic
ggcaugcuuuucuaaauaauau

SEQ ID NO: 367078 - RNA, 23 nt, Artificial Sequence
  Synthetic
uggcaugcuuuucuaaauaauau

SEQ ID NO: 367079 - RNA, 24 nt, Artificial Sequence
  Synthetic
auggcaugcuuuucuaaauaauau

SEQ ID NO: 367080 - RNA, 18 nt, Artificial Sequence
  Synthetic
ucguauucaacauaauau

SEQ ID NO: 367081 - RNA, 19 nt, Artificial Sequence
  Synthetic
cucguauucaacauaauau

SEQ ID NO: 367082 - RNA, 20 nt, Artificial Sequence
  Synthetic
acucguauucaacauaauau

SEQ ID NO: 367083 - RNA, 21 nt, Artificial Sequence
  Synthetic
cacucguauucaacauaauau

SEQ ID NO: 367084 - RNA, 22 nt, Artificial Sequence
  Synthetic
ccacucguauucaacauaauau

SEQ ID NO: 367085 - RNA, 23 nt, Artificial Sequence
  Synthetic
accacucguauucaacauaauau

SEQ ID NO: 367086 - RNA, 24 nt, Artificial Sequence
  Synthetic
caccacucguauucaacauaauau

SEQ ID NO: 367087 - RNA, 18 nt, Artificial Sequence
  Synthetic
ucuaugcuuccauaauau

SEQ ID NO: 367088 - RNA, 19 nt, Artificial Sequence
  Synthetic
gucuaugcuuccauaauau

SEQ ID NO: 367089 - RNA, 20 nt, Artificial Sequence
  Synthetic
agucuaugcuuccauaauau

SEQ ID NO: 367090 - RNA, 21 nt, Artificial Sequence
  Synthetic
uagucuaugcuuccauaauau

SEQ ID NO: 367091 - RNA, 22 nt, Artificial Sequence
  Synthetic
uuagucuaugcuuccauaauau

SEQ ID NO: 367092 - RNA, 23 nt, Artificial Sequence
  Synthetic
cuuagucuaugcuuccauaauau

SEQ ID NO: 367093 - RNA, 24 nt, Artificial Sequence
  Synthetic
ucuuagucuaugcuuccauaauau

SEQ ID NO: 367094 - RNA, 18 nt, Artificial Sequence
  Synthetic
uuaucauaaugauaauau

SEQ ID NO: 367095 - RNA, 19 nt, Artificial Sequence
  Synthetic
auuaucauaaugauaauau

SEQ ID NO: 367096 - RNA, 20 nt, Artificial Sequence
  Synthetic
aauuaucauaaugauaauau

SEQ ID NO: 367097 - RNA, 21 nt, Artificial Sequence
  Synthetic
aaauuaucauaaugauaauau

SEQ ID NO: 367098 - RNA, 22 nt, Artificial Sequence
  Synthetic
aaaauuaucauaaugauaauau

SEQ ID NO: 367099 - RNA, 23 nt, Artificial Sequence
  Synthetic
gaaaauuaucauaaugauaauau

SEQ ID NO: 367100 - RNA, 24 nt, Artificial Sequence
  Synthetic
agaaaauuaucauaaugauaauau

SEQ ID NO: 367101 - RNA, 18 nt, Artificial Sequence
  Synthetic
caauuuguuauauaauau

SEQ ID NO: 367102 - RNA, 19 nt, Artificial Sequence
  Synthetic
ccaauuuguuauauaauau

SEQ ID NO: 367103 - RNA, 20 nt, Artificial Sequence
  Synthetic
uccaauuuguuauauaauau

SEQ ID NO: 367104 - RNA, 21 nt, Artificial Sequence
  Synthetic
uuccaauuuguuauauaauau

SEQ ID NO: 367105 - RNA, 22 nt, Artificial Sequence
  Synthetic
uuuccaauuuguuauauaauau

SEQ ID NO: 367106 - RNA, 23 nt, Artificial Sequence
  Synthetic
cuuuccaauuuguuauauaauau

SEQ ID NO: 367107 - RNA, 24 nt, Artificial Sequence
  Synthetic
ccuuuccaauuuguuauauaauau

SEQ ID NO: 367108 - RNA, 18 nt, Artificial Sequence
  Synthetic
uggucaaauuacuaauau

SEQ ID NO: 367109 - RNA, 19 nt, Artificial Sequence
  Synthetic
auggucaaauuacuaauau

SEQ ID NO: 367110 - RNA, 20 nt, Artificial Sequence
  Synthetic
aauggucaaauuacuaauau

SEQ ID NO: 367111 - RNA, 21 nt, Artificial Sequence
  Synthetic
aaauggucaaauuacuaauau

SEQ ID NO: 367112 - RNA, 22 nt, Artificial Sequence
  Synthetic
gaaauggucaaauuacuaauau

SEQ ID NO: 367113 - RNA, 23 nt, Artificial Sequence
  Synthetic
agaaauggucaaauuacuaauau

SEQ ID NO: 367114 - RNA, 24 nt, Artificial Sequence
  Synthetic
aagaaauggucaaauuacuaauau

SEQ ID NO: 367115 - RNA, 18 nt, Artificial Sequence
  Synthetic
cucugugcuaucuaauau

SEQ ID NO: 367116 - RNA, 19 nt, Artificial Sequence
  Synthetic
acucugugcuaucuaauau

SEQ ID NO: 367117 - RNA, 20 nt, Artificial Sequence
  Synthetic
uacucugugcuaucuaauau

SEQ ID NO: 367118 - RNA, 21 nt, Artificial Sequence
  Synthetic
cuacucugugcuaucuaauau

SEQ ID NO: 367119 - RNA, 22 nt, Artificial Sequence
  Synthetic
ccuacucugugcuaucuaauau

SEQ ID NO: 367120 - RNA, 23 nt, Artificial Sequence
  Synthetic
gccuacucugugcuaucuaauau

SEQ ID NO: 367121 - RNA, 24 nt, Artificial Sequence
  Synthetic
ugccuacucugugcuaucuaauau

SEQ ID NO: 367122 - RNA, 18 nt, Artificial Sequence
  Synthetic
ucuagacaauaguaauau

SEQ ID NO: 367123 - RNA, 19 nt, Artificial Sequence
  Synthetic
uucuagacaauaguaauau

SEQ ID NO: 367124 - RNA, 20 nt, Artificial Sequence
  Synthetic
guucuagacaauaguaauau

SEQ ID NO: 367125 - RNA, 21 nt, Artificial Sequence
  Synthetic
aguucuagacaauaguaauau

SEQ ID NO: 367126 - RNA, 22 nt, Artificial Sequence
  Synthetic
gaguucuagacaauaguaauau

SEQ ID NO: 367127 - RNA, 23 nt, Artificial Sequence
  Synthetic
ggaguucuagacaauaguaauau

SEQ ID NO: 367128 - RNA, 24 nt, Artificial Sequence
  Synthetic
cggaguucuagacaauaguaauau

SEQ ID NO: 367129 - RNA, 18 nt, Artificial Sequence
  Synthetic
aaauaguucauguaauau

SEQ ID NO: 367130 - RNA, 19 nt, Artificial Sequence
  Synthetic
aaaauaguucauguaauau

SEQ ID NO: 367131 - RNA, 20 nt, Artificial Sequence
  Synthetic
caaaauaguucauguaauau

SEQ ID NO: 367132 - RNA, 21 nt, Artificial Sequence
  Synthetic
ccaaaauaguucauguaauau

SEQ ID NO: 367133 - RNA, 22 nt, Artificial Sequence
  Synthetic
uccaaaauaguucauguaauau

SEQ ID NO: 367134 - RNA, 23 nt, Artificial Sequence
  Synthetic
uuccaaaauaguucauguaauau

SEQ ID NO: 367135 - RNA, 24 nt, Artificial Sequence
  Synthetic
uuuccaaaauaguucauguaauau

SEQ ID NO: 367136 - RNA, 18 nt, Artificial Sequence
  Synthetic
guucuucaacuguaauau

SEQ ID NO: 367137 - RNA, 19 nt, Artificial Sequence
  Synthetic
uguucuucaacuguaauau

SEQ ID NO: 367138 - RNA, 20 nt, Artificial Sequence
  Synthetic
uuguucuucaacuguaauau

SEQ ID NO: 367139 - RNA, 21 nt, Artificial Sequence
  Synthetic
uuuguucuucaacuguaauau

SEQ ID NO: 367140 - RNA, 22 nt, Artificial Sequence
  Synthetic
uuuuguucuucaacuguaauau

SEQ ID NO: 367141 - RNA, 23 nt, Artificial Sequence
  Synthetic
auuuuguucuucaacuguaauau

SEQ ID NO: 367142 - RNA, 24 nt, Artificial Sequence
  Synthetic
uauuuuguucuucaacuguaauau

SEQ ID NO: 367143 - RNA, 18 nt, Artificial Sequence
  Synthetic
aaacccauaaauuaauau

SEQ ID NO: 367144 - RNA, 19 nt, Artificial Sequence
  Synthetic
uaaacccauaaauuaauau

SEQ ID NO: 367145 - RNA, 20 nt, Artificial Sequence
  Synthetic
guaaacccauaaauuaauau

SEQ ID NO: 367146 - RNA, 21 nt, Artificial Sequence
  Synthetic
aguaaacccauaaauuaauau

SEQ ID NO: 367147 - RNA, 22 nt, Artificial Sequence
  Synthetic
uaguaaacccauaaauuaauau

SEQ ID NO: 367148 - RNA, 23 nt, Artificial Sequence
  Synthetic
auaguaaacccauaaauuaauau

SEQ ID NO: 367149 - RNA, 24 nt, Artificial Sequence
  Synthetic
cauaguaaacccauaaauuaauau

SEQ ID NO: 367150 - RNA, 18 nt, Artificial Sequence
  Synthetic
uuaggagauuauuaauau

SEQ ID NO: 367151 - RNA, 19 nt, Artificial Sequence
  Synthetic
auuaggagauuauuaauau

SEQ ID NO: 367152 - RNA, 20 nt, Artificial Sequence
  Synthetic
cauuaggagauuauuaauau

SEQ ID NO: 367153 - RNA, 21 nt, Artificial Sequence
  Synthetic
ucauuaggagauuauuaauau

SEQ ID NO: 367154 - RNA, 22 nt, Artificial Sequence
  Synthetic
gucauuaggagauuauuaauau

SEQ ID NO: 367155 - RNA, 23 nt, Artificial Sequence
  Synthetic
ugucauuaggagauuauuaauau

SEQ ID NO: 367156 - RNA, 24 nt, Artificial Sequence
  Synthetic
augucauuaggagauuauuaauau

SEQ ID NO: 367157 - RNA, 18 nt, Artificial Sequence
  Synthetic
aaccuuuagaguuaauau

SEQ ID NO: 367158 - RNA, 19 nt, Artificial Sequence
  Synthetic
uaaccuuuagaguuaauau

SEQ ID NO: 367159 - RNA, 20 nt, Artificial Sequence
  Synthetic
auaaccuuuagaguuaauau

SEQ ID NO: 367160 - RNA, 21 nt, Artificial Sequence
  Synthetic
uauaaccuuuagaguuaauau

SEQ ID NO: 367161 - RNA, 22 nt, Artificial Sequence
  Synthetic
auauaaccuuuagaguuaauau

SEQ ID NO: 367162 - RNA, 23 nt, Artificial Sequence
  Synthetic
aauauaaccuuuagaguuaauau

SEQ ID NO: 367163 - RNA, 24 nt, Artificial Sequence
  Synthetic
gaauauaaccuuuagaguuaauau

SEQ ID NO: 367164 - RNA, 18 nt, Artificial Sequence
  Synthetic
ugauuuggccuuuaauau

SEQ ID NO: 367165 - RNA, 19 nt, Artificial Sequence
  Synthetic
augauuuggccuuuaauau

SEQ ID NO: 367166 - RNA, 20 nt, Artificial Sequence
  Synthetic
uaugauuuggccuuuaauau

SEQ ID NO: 367167 - RNA, 21 nt, Artificial Sequence
  Synthetic
auaugauuuggccuuuaauau

SEQ ID NO: 367168 - RNA, 22 nt, Artificial Sequence
  Synthetic
cauaugauuuggccuuuaauau

SEQ ID NO: 367169 - RNA, 23 nt, Artificial Sequence
  Synthetic
gcauaugauuuggccuuuaauau

SEQ ID NO: 367170 - RNA, 24 nt, Artificial Sequence
  Synthetic
agcauaugauuuggccuuuaauau

SEQ ID NO: 367171 - RNA, 18 nt, Artificial Sequence
  Synthetic
uauuucugaguuuaauau

SEQ ID NO: 367172 - RNA, 19 nt, Artificial Sequence
  Synthetic
uuauuucugaguuuaauau

SEQ ID NO: 367173 - RNA, 20 nt, Artificial Sequence
  Synthetic
uuuauuucugaguuuaauau

SEQ ID NO: 367174 - RNA, 21 nt, Artificial Sequence
  Synthetic
auuuauuucugaguuuaauau

SEQ ID NO: 367175 - RNA, 22 nt, Artificial Sequence
  Synthetic
cauuuauuucugaguuuaauau

SEQ ID NO: 367176 - RNA, 23 nt, Artificial Sequence
  Synthetic
acauuuauuucugaguuuaauau

SEQ ID NO: 367177 - RNA, 24 nt, Artificial Sequence
  Synthetic
cacauuuauuucugaguuuaauau

SEQ ID NO: 367178 - RNA, 18 nt, Artificial Sequence
  Synthetic
uccuguuuauuuuaauau

SEQ ID NO: 367179 - RNA, 19 nt, Artificial Sequence
  Synthetic
guccuguuuauuuuaauau

SEQ ID NO: 367180 - RNA, 20 nt, Artificial Sequence
  Synthetic
aguccuguuuauuuuaauau

SEQ ID NO: 367181 - RNA, 21 nt, Artificial Sequence
  Synthetic
uaguccuguuuauuuuaauau

SEQ ID NO: 367182 - RNA, 22 nt, Artificial Sequence
  Synthetic
guaguccuguuuauuuuaauau

SEQ ID NO: 367183 - RNA, 23 nt, Artificial Sequence
  Synthetic
uguaguccuguuuauuuuaauau

SEQ ID NO: 367184 - RNA, 24 nt, Artificial Sequence
  Synthetic
auguaguccuguuuauuuuaauau

SEQ ID NO: 367185 - RNA, 18 nt, Artificial Sequence
  Synthetic
ccaauugaccaaacauau

SEQ ID NO: 367186 - RNA, 19 nt, Artificial Sequence
  Synthetic
cccaauugaccaaacauau

SEQ ID NO: 367187 - RNA, 20 nt, Artificial Sequence
  Synthetic
ucccaauugaccaaacauau

SEQ ID NO: 367188 - RNA, 21 nt, Artificial Sequence
  Synthetic
uucccaauugaccaaacauau

SEQ ID NO: 367189 - RNA, 22 nt, Artificial Sequence
  Synthetic
uuucccaauugaccaaacauau

SEQ ID NO: 367190 - RNA, 23 nt, Artificial Sequence
  Synthetic
guuucccaauugaccaaacauau

SEQ ID NO: 367191 - RNA, 24 nt, Artificial Sequence
  Synthetic
uguuucccaauugaccaaacauau

SEQ ID NO: 367192 - RNA, 18 nt, Artificial Sequence
  Synthetic
ccagggccagcaacauau

SEQ ID NO: 367193 - RNA, 19 nt, Artificial Sequence
  Synthetic
cccagggccagcaacauau

SEQ ID NO: 367194 - RNA, 20 nt, Artificial Sequence
  Synthetic
gcccagggccagcaacauau

SEQ ID NO: 367195 - RNA, 21 nt, Artificial Sequence
  Synthetic
agcccagggccagcaacauau

SEQ ID NO: 367196 - RNA, 22 nt, Artificial Sequence
  Synthetic
uagcccagggccagcaacauau

SEQ ID NO: 367197 - RNA, 23 nt, Artificial Sequence
  Synthetic
cuagcccagggccagcaacauau

SEQ ID NO: 367198 - RNA, 24 nt, Artificial Sequence
  Synthetic
gcuagcccagggccagcaacauau

SEQ ID NO: 367199 - RNA, 18 nt, Artificial Sequence
  Synthetic
uauuuuacaaacacauau

SEQ ID NO: 367200 - RNA, 19 nt, Artificial Sequence
  Synthetic
uuauuuuacaaacacauau

SEQ ID NO: 367201 - RNA, 20 nt, Artificial Sequence
  Synthetic
uuuauuuuacaaacacauau

SEQ ID NO: 367202 - RNA, 21 nt, Artificial Sequence
  Synthetic
auuuauuuuacaaacacauau

SEQ ID NO: 367203 - RNA, 22 nt, Artificial Sequence
  Synthetic
aauuuauuuuacaaacacauau

SEQ ID NO: 367204 - RNA, 23 nt, Artificial Sequence
  Synthetic
aaauuuauuuuacaaacacauau

SEQ ID NO: 367205 - RNA, 24 nt, Artificial Sequence
  Synthetic
aaaauuuauuuuacaaacacauau

SEQ ID NO: 367206 - RNA, 18 nt, Artificial Sequence
  Synthetic
gaaaaugacugcacauau

SEQ ID NO: 367207 - RNA, 19 nt, Artificial Sequence
  Synthetic
agaaaaugacugcacauau

SEQ ID NO: 367208 - RNA, 20 nt, Artificial Sequence
  Synthetic
gagaaaaugacugcacauau

SEQ ID NO: 367209 - RNA, 21 nt, Artificial Sequence
  Synthetic
agagaaaaugacugcacauau

SEQ ID NO: 367210 - RNA, 22 nt, Artificial Sequence
  Synthetic
gagagaaaaugacugcacauau

SEQ ID NO: 367211 - RNA, 23 nt, Artificial Sequence
  Synthetic
ugagagaaaaugacugcacauau

SEQ ID NO: 367212 - RNA, 24 nt, Artificial Sequence
  Synthetic
gugagagaaaaugacugcacauau

SEQ ID NO: 367213 - RNA, 18 nt, Artificial Sequence
  Synthetic
gauacuccacagacauau

SEQ ID NO: 367214 - RNA, 19 nt, Artificial Sequence
  Synthetic
agauacuccacagacauau

SEQ ID NO: 367215 - RNA, 20 nt, Artificial Sequence
  Synthetic
aagauacuccacagacauau

SEQ ID NO: 367216 - RNA, 21 nt, Artificial Sequence
  Synthetic
caagauacuccacagacauau

SEQ ID NO: 367217 - RNA, 22 nt, Artificial Sequence
  Synthetic
ccaagauacuccacagacauau

SEQ ID NO: 367218 - RNA, 23 nt, Artificial Sequence
  Synthetic
uccaagauacuccacagacauau

SEQ ID NO: 367219 - RNA, 24 nt, Artificial Sequence
  Synthetic
uuccaagauacuccacagacauau

SEQ ID NO: 367220 - RNA, 18 nt, Artificial Sequence
  Synthetic
aggagauuccagacauau

SEQ ID NO: 367221 - RNA, 19 nt, Artificial Sequence
  Synthetic
aaggagauuccagacauau

SEQ ID NO: 367222 - RNA, 20 nt, Artificial Sequence
  Synthetic
aaaggagauuccagacauau

SEQ ID NO: 367223 - RNA, 21 nt, Artificial Sequence
  Synthetic
aaaaggagauuccagacauau

SEQ ID NO: 367224 - RNA, 22 nt, Artificial Sequence
  Synthetic
aaaaaggagauuccagacauau

SEQ ID NO: 367225 - RNA, 23 nt, Artificial Sequence
  Synthetic
uaaaaaggagauuccagacauau

SEQ ID NO: 367226 - RNA, 24 nt, Artificial Sequence
  Synthetic
guaaaaaggagauuccagacauau

SEQ ID NO: 367227 - RNA, 18 nt, Artificial Sequence
  Synthetic
aaauaauuugagacauau

SEQ ID NO: 367228 - RNA, 19 nt, Artificial Sequence
  Synthetic
uaaauaauuugagacauau

SEQ ID NO: 367229 - RNA, 20 nt, Artificial Sequence
  Synthetic
guaaauaauuugagacauau

SEQ ID NO: 367230 - RNA, 21 nt, Artificial Sequence
  Synthetic
aguaaauaauuugagacauau

SEQ ID NO: 367231 - RNA, 22 nt, Artificial Sequence
  Synthetic
uaguaaauaauuugagacauau

SEQ ID NO: 367232 - RNA, 23 nt, Artificial Sequence
  Synthetic
cuaguaaauaauuugagacauau

SEQ ID NO: 367233 - RNA, 24 nt, Artificial Sequence
  Synthetic
gcuaguaaauaauuugagacauau

SEQ ID NO: 367234 - RNA, 18 nt, Artificial Sequence
  Synthetic
cuccucagauagacauau

SEQ ID NO: 367235 - RNA, 19 nt, Artificial Sequence
  Synthetic
ucuccucagauagacauau

SEQ ID NO: 367236 - RNA, 20 nt, Artificial Sequence
  Synthetic
gucuccucagauagacauau

SEQ ID NO: 367237 - RNA, 21 nt, Artificial Sequence
  Synthetic
ggucuccucagauagacauau

SEQ ID NO: 367238 - RNA, 22 nt, Artificial Sequence
  Synthetic
aggucuccucagauagacauau

SEQ ID NO: 367239 - RNA, 23 nt, Artificial Sequence
  Synthetic
uaggucuccucagauagacauau

SEQ ID NO: 367240 - RNA, 24 nt, Artificial Sequence
  Synthetic
guaggucuccucagauagacauau

SEQ ID NO: 367241 - RNA, 18 nt, Artificial Sequence
  Synthetic
guauauauauauacauau

SEQ ID NO: 367242 - RNA, 19 nt, Artificial Sequence
  Synthetic
cguauauauauauacauau

SEQ ID NO: 367243 - RNA, 20 nt, Artificial Sequence
  Synthetic
acguauauauauauacauau

SEQ ID NO: 367244 - RNA, 21 nt, Artificial Sequence
  Synthetic
uacguauauauauauacauau

SEQ ID NO: 367245 - RNA, 22 nt, Artificial Sequence
  Synthetic
auacguauauauauauacauau

SEQ ID NO: 367246 - RNA, 23 nt, Artificial Sequence
  Synthetic
uauacguauauauauauacauau

SEQ ID NO: 367247 - RNA, 24 nt, Artificial Sequence
  Synthetic
auauacguauauauauauacauau

SEQ ID NO: 367248 - RNA, 18 nt, Artificial Sequence
  Synthetic
uucacaaaauuuacauau

SEQ ID NO: 367249 - RNA, 19 nt, Artificial Sequence
  Synthetic
auucacaaaauuuacauau

SEQ ID NO: 367250 - RNA, 20 nt, Artificial Sequence
  Synthetic
uauucacaaaauuuacauau

SEQ ID NO: 367251 - RNA, 21 nt, Artificial Sequence
  Synthetic
cuauucacaaaauuuacauau

SEQ ID NO: 367252 - RNA, 22 nt, Artificial Sequence
  Synthetic
ccuauucacaaaauuuacauau

SEQ ID NO: 367253 - RNA, 23 nt, Artificial Sequence
  Synthetic
accuauucacaaaauuuacauau

SEQ ID NO: 367254 - RNA, 24 nt, Artificial Sequence
  Synthetic
aaccuauucacaaaauuuacauau

SEQ ID NO: 367255 - RNA, 18 nt, Artificial Sequence
  Synthetic
aauuauccauuuacauau

SEQ ID NO: 367256 - RNA, 19 nt, Artificial Sequence
  Synthetic
aaauuauccauuuacauau

SEQ ID NO: 367257 - RNA, 20 nt, Artificial Sequence
  Synthetic
gaaauuauccauuuacauau

SEQ ID NO: 367258 - RNA, 21 nt, Artificial Sequence
  Synthetic
agaaauuauccauuuacauau

SEQ ID NO: 367259 - RNA, 22 nt, Artificial Sequence
  Synthetic
gagaaauuauccauuuacauau

SEQ ID NO: 367260 - RNA, 23 nt, Artificial Sequence
  Synthetic
ggagaaauuauccauuuacauau

SEQ ID NO: 367261 - RNA, 24 nt, Artificial Sequence
  Synthetic
gggagaaauuauccauuuacauau

SEQ ID NO: 367262 - RNA, 18 nt, Artificial Sequence
  Synthetic
ucaucaacccaaccauau

SEQ ID NO: 367263 - RNA, 19 nt, Artificial Sequence
  Synthetic
aucaucaacccaaccauau

SEQ ID NO: 367264 - RNA, 20 nt, Artificial Sequence
  Synthetic
gaucaucaacccaaccauau

SEQ ID NO: 367265 - RNA, 21 nt, Artificial Sequence
  Synthetic
ugaucaucaacccaaccauau

SEQ ID NO: 367266 - RNA, 22 nt, Artificial Sequence
  Synthetic
gugaucaucaacccaaccauau

SEQ ID NO: 367267 - RNA, 23 nt, Artificial Sequence
  Synthetic
ugugaucaucaacccaaccauau

SEQ ID NO: 367268 - RNA, 24 nt, Artificial Sequence
  Synthetic
augugaucaucaacccaaccauau

SEQ ID NO: 367269 - RNA, 18 nt, Artificial Sequence
  Synthetic
aauuaaucucuaccauau

SEQ ID NO: 367270 - RNA, 19 nt, Artificial Sequence
  Synthetic
gaauuaaucucuaccauau

SEQ ID NO: 367271 - RNA, 20 nt, Artificial Sequence
  Synthetic
agaauuaaucucuaccauau

SEQ ID NO: 367272 - RNA, 21 nt, Artificial Sequence
  Synthetic
uagaauuaaucucuaccauau

SEQ ID NO: 367273 - RNA, 22 nt, Artificial Sequence
  Synthetic
uuagaauuaaucucuaccauau

SEQ ID NO: 367274 - RNA, 23 nt, Artificial Sequence
  Synthetic
cuuagaauuaaucucuaccauau

SEQ ID NO: 367275 - RNA, 24 nt, Artificial Sequence
  Synthetic
ucuuagaauuaaucucuaccauau

SEQ ID NO: 367276 - RNA, 18 nt, Artificial Sequence
  Synthetic
gucuagugguuaccauau

SEQ ID NO: 367277 - RNA, 19 nt, Artificial Sequence
  Synthetic
ugucuagugguuaccauau

SEQ ID NO: 367278 - RNA, 20 nt, Artificial Sequence
  Synthetic
gugucuagugguuaccauau

SEQ ID NO: 367279 - RNA, 21 nt, Artificial Sequence
  Synthetic
ugugucuagugguuaccauau

SEQ ID NO: 367280 - RNA, 22 nt, Artificial Sequence
  Synthetic
augugucuagugguuaccauau

SEQ ID NO: 367281 - RNA, 23 nt, Artificial Sequence
  Synthetic
uaugugucuagugguuaccauau

SEQ ID NO: 367282 - RNA, 24 nt, Artificial Sequence
  Synthetic
auaugugucuagugguuaccauau

SEQ ID NO: 367283 - RNA, 18 nt, Artificial Sequence
  Synthetic
accucacauuacccauau

SEQ ID NO: 367284 - RNA, 19 nt, Artificial Sequence
  Synthetic
aaccucacauuacccauau

SEQ ID NO: 367285 - RNA, 20 nt, Artificial Sequence
  Synthetic
uaaccucacauuacccauau

SEQ ID NO: 367286 - RNA, 21 nt, Artificial Sequence
  Synthetic
auaaccucacauuacccauau

SEQ ID NO: 367287 - RNA, 22 nt, Artificial Sequence
  Synthetic
aauaaccucacauuacccauau

SEQ ID NO: 367288 - RNA, 23 nt, Artificial Sequence
  Synthetic
aaauaaccucacauuacccauau

SEQ ID NO: 367289 - RNA, 24 nt, Artificial Sequence
  Synthetic
gaaauaaccucacauuacccauau

SEQ ID NO: 367290 - RNA, 18 nt, Artificial Sequence
  Synthetic
aaccuaacuugcccauau

SEQ ID NO: 367291 - RNA, 19 nt, Artificial Sequence
  Synthetic
caaccuaacuugcccauau

SEQ ID NO: 367292 - RNA, 20 nt, Artificial Sequence
  Synthetic
ccaaccuaacuugcccauau

SEQ ID NO: 367293 - RNA, 21 nt, Artificial Sequence
  Synthetic
accaaccuaacuugcccauau

SEQ ID NO: 367294 - RNA, 22 nt, Artificial Sequence
  Synthetic
caccaaccuaacuugcccauau

SEQ ID NO: 367295 - RNA, 23 nt, Artificial Sequence
  Synthetic
ucaccaaccuaacuugcccauau

SEQ ID NO: 367296 - RNA, 24 nt, Artificial Sequence
  Synthetic
uucaccaaccuaacuugcccauau

SEQ ID NO: 367297 - RNA, 18 nt, Artificial Sequence
  Synthetic
auuuucuacuagccauau

SEQ ID NO: 367298 - RNA, 19 nt, Artificial Sequence
  Synthetic
aauuuucuacuagccauau

SEQ ID NO: 367299 - RNA, 20 nt, Artificial Sequence
  Synthetic
caauuuucuacuagccauau

SEQ ID NO: 367300 - RNA, 21 nt, Artificial Sequence
  Synthetic
ucaauuuucuacuagccauau

SEQ ID NO: 367301 - RNA, 22 nt, Artificial Sequence
  Synthetic
uucaauuuucuacuagccauau

SEQ ID NO: 367302 - RNA, 23 nt, Artificial Sequence
  Synthetic
uuucaauuuucuacuagccauau

SEQ ID NO: 367303 - RNA, 24 nt, Artificial Sequence
  Synthetic
uuuucaauuuucuacuagccauau

SEQ ID NO: 367304 - RNA, 18 nt, Artificial Sequence
  Synthetic
ucagauagugauccauau

SEQ ID NO: 367305 - RNA, 19 nt, Artificial Sequence
  Synthetic
uucagauagugauccauau

SEQ ID NO: 367306 - RNA, 20 nt, Artificial Sequence
  Synthetic
uuucagauagugauccauau

SEQ ID NO: 367307 - RNA, 21 nt, Artificial Sequence
  Synthetic
auuucagauagugauccauau

SEQ ID NO: 367308 - RNA, 22 nt, Artificial Sequence
  Synthetic
gauuucagauagugauccauau

SEQ ID NO: 367309 - RNA, 23 nt, Artificial Sequence
  Synthetic
ugauuucagauagugauccauau

SEQ ID NO: 367310 - RNA, 24 nt, Artificial Sequence
  Synthetic
augauuucagauagugauccauau

SEQ ID NO: 367311 - RNA, 18 nt, Artificial Sequence
  Synthetic
ucuagcauuaguccauau

SEQ ID NO: 367312 - RNA, 19 nt, Artificial Sequence
  Synthetic
uucuagcauuaguccauau

SEQ ID NO: 367313 - RNA, 20 nt, Artificial Sequence
  Synthetic
cuucuagcauuaguccauau

SEQ ID NO: 367314 - RNA, 21 nt, Artificial Sequence
  Synthetic
gcuucuagcauuaguccauau

SEQ ID NO: 367315 - RNA, 22 nt, Artificial Sequence
  Synthetic
ugcuucuagcauuaguccauau

SEQ ID NO: 367316 - RNA, 23 nt, Artificial Sequence
  Synthetic
cugcuucuagcauuaguccauau

SEQ ID NO: 367317 - RNA, 24 nt, Artificial Sequence
  Synthetic
acugcuucuagcauuaguccauau

SEQ ID NO: 367318 - RNA, 18 nt, Artificial Sequence
  Synthetic
acauuauuccuuccauau

SEQ ID NO: 367319 - RNA, 19 nt, Artificial Sequence
  Synthetic
aacauuauuccuuccauau

SEQ ID NO: 367320 - RNA, 20 nt, Artificial Sequence
  Synthetic
aaacauuauuccuuccauau

SEQ ID NO: 367321 - RNA, 21 nt, Artificial Sequence
  Synthetic
aaaacauuauuccuuccauau

SEQ ID NO: 367322 - RNA, 22 nt, Artificial Sequence
  Synthetic
gaaaacauuauuccuuccauau

SEQ ID NO: 367323 - RNA, 23 nt, Artificial Sequence
  Synthetic
ugaaaacauuauuccuuccauau

SEQ ID NO: 367324 - RNA, 24 nt, Artificial Sequence
  Synthetic
cugaaaacauuauuccuuccauau

SEQ ID NO: 367325 - RNA, 18 nt, Artificial Sequence
  Synthetic
ugucuauuucuuccauau

SEQ ID NO: 367326 - RNA, 19 nt, Artificial Sequence
  Synthetic
augucuauuucuuccauau

SEQ ID NO: 367327 - RNA, 20 nt, Artificial Sequence
  Synthetic
caugucuauuucuuccauau

SEQ ID NO: 367328 - RNA, 21 nt, Artificial Sequence
  Synthetic
ccaugucuauuucuuccauau

SEQ ID NO: 367329 - RNA, 22 nt, Artificial Sequence
  Synthetic
cccaugucuauuucuuccauau

SEQ ID NO: 367330 - RNA, 23 nt, Artificial Sequence
  Synthetic
ucccaugucuauuucuuccauau

SEQ ID NO: 367331 - RNA, 24 nt, Artificial Sequence
  Synthetic
uucccaugucuauuucuuccauau

SEQ ID NO: 367332 - RNA, 18 nt, Artificial Sequence
  Synthetic
uacucaaguuuuccauau

SEQ ID NO: 367333 - RNA, 19 nt, Artificial Sequence
  Synthetic
auacucaaguuuuccauau

SEQ ID NO: 367334 - RNA, 20 nt, Artificial Sequence
  Synthetic
cauacucaaguuuuccauau

SEQ ID NO: 367335 - RNA, 21 nt, Artificial Sequence
  Synthetic
ucauacucaaguuuuccauau

SEQ ID NO: 367336 - RNA, 22 nt, Artificial Sequence
  Synthetic
uucauacucaaguuuuccauau

SEQ ID NO: 367337 - RNA, 23 nt, Artificial Sequence
  Synthetic
auucauacucaaguuuuccauau

SEQ ID NO: 367338 - RNA, 24 nt, Artificial Sequence
  Synthetic
uauucauacucaaguuuuccauau

SEQ ID NO: 367339 - RNA, 18 nt, Artificial Sequence
  Synthetic
uuuaguaaaaaagcauau

SEQ ID NO: 367340 - RNA, 19 nt, Artificial Sequence
  Synthetic
guuuaguaaaaaagcauau

SEQ ID NO: 367341 - RNA, 20 nt, Artificial Sequence
  Synthetic
uguuuaguaaaaaagcauau

SEQ ID NO: 367342 - RNA, 21 nt, Artificial Sequence
  Synthetic
cuguuuaguaaaaaagcauau

SEQ ID NO: 367343 - RNA, 22 nt, Artificial Sequence
  Synthetic
ucuguuuaguaaaaaagcauau

SEQ ID NO: 367344 - RNA, 23 nt, Artificial Sequence
  Synthetic
cucuguuuaguaaaaaagcauau

SEQ ID NO: 367345 - RNA, 24 nt, Artificial Sequence
  Synthetic
ucucuguuuaguaaaaaagcauau

SEQ ID NO: 367346 - RNA, 18 nt, Artificial Sequence
  Synthetic
uuaauuuuauaagcauau

SEQ ID NO: 367347 - RNA, 19 nt, Artificial Sequence
  Synthetic
cuuaauuuuauaagcauau

SEQ ID NO: 367348 - RNA, 20 nt, Artificial Sequence
  Synthetic
acuuaauuuuauaagcauau

SEQ ID NO: 367349 - RNA, 21 nt, Artificial Sequence
  Synthetic
aacuuaauuuuauaagcauau

SEQ ID NO: 367350 - RNA, 22 nt, Artificial Sequence
  Synthetic
uaacuuaauuuuauaagcauau

SEQ ID NO: 367351 - RNA, 23 nt, Artificial Sequence
  Synthetic
auaacuuaauuuuauaagcauau

SEQ ID NO: 367352 - RNA, 24 nt, Artificial Sequence
  Synthetic
cauaacuuaauuuuauaagcauau

SEQ ID NO: 367353 - RNA, 18 nt, Artificial Sequence
  Synthetic
uauucauacuccgcauau

SEQ ID NO: 367354 - RNA, 19 nt, Artificial Sequence
  Synthetic
uuauucauacuccgcauau

SEQ ID NO: 367355 - RNA, 20 nt, Artificial Sequence
  Synthetic
uuuauucauacuccgcauau

SEQ ID NO: 367356 - RNA, 21 nt, Artificial Sequence
  Synthetic
uuuuauucauacuccgcauau

SEQ ID NO: 367357 - RNA, 22 nt, Artificial Sequence
  Synthetic
uuuuuauucauacuccgcauau

SEQ ID NO: 367358 - RNA, 23 nt, Artificial Sequence
  Synthetic
uuuuuuauucauacuccgcauau

SEQ ID NO: 367359 - RNA, 24 nt, Artificial Sequence
  Synthetic
auuuuuuauucauacuccgcauau

SEQ ID NO: 367360 - RNA, 18 nt, Artificial Sequence
  Synthetic
guaauguuuggggcauau

SEQ ID NO: 367361 - RNA, 19 nt, Artificial Sequence
  Synthetic
aguaauguuuggggcauau

SEQ ID NO: 367362 - RNA, 20 nt, Artificial Sequence
  Synthetic
aaguaauguuuggggcauau

SEQ ID NO: 367363 - RNA, 21 nt, Artificial Sequence
  Synthetic
gaaguaauguuuggggcauau

SEQ ID NO: 367364 - RNA, 22 nt, Artificial Sequence
  Synthetic
agaaguaauguuuggggcauau

SEQ ID NO: 367365 - RNA, 23 nt, Artificial Sequence
  Synthetic
aagaaguaauguuuggggcauau

SEQ ID NO: 367366 - RNA, 24 nt, Artificial Sequence
  Synthetic
caagaaguaauguuuggggcauau

SEQ ID NO: 367367 - RNA, 18 nt, Artificial Sequence
  Synthetic
uguaacauaauggcauau

SEQ ID NO: 367368 - RNA, 19 nt, Artificial Sequence
  Synthetic
cuguaacauaauggcauau

SEQ ID NO: 367369 - RNA, 20 nt, Artificial Sequence
  Synthetic
ucuguaacauaauggcauau

SEQ ID NO: 367370 - RNA, 21 nt, Artificial Sequence
  Synthetic
uucuguaacauaauggcauau

SEQ ID NO: 367371 - RNA, 22 nt, Artificial Sequence
  Synthetic
cuucuguaacauaauggcauau

SEQ ID NO: 367372 - RNA, 23 nt, Artificial Sequence
  Synthetic
acuucuguaacauaauggcauau

SEQ ID NO: 367373 - RNA, 24 nt, Artificial Sequence
  Synthetic
cacuucuguaacauaauggcauau

SEQ ID NO: 367374 - RNA, 18 nt, Artificial Sequence
  Synthetic
auauaugugauggcauau

SEQ ID NO: 367375 - RNA, 19 nt, Artificial Sequence
  Synthetic
uauauaugugauggcauau

SEQ ID NO: 367376 - RNA, 20 nt, Artificial Sequence
  Synthetic
auauauaugugauggcauau

SEQ ID NO: 367377 - RNA, 21 nt, Artificial Sequence
  Synthetic
uauauauaugugauggcauau

SEQ ID NO: 367378 - RNA, 22 nt, Artificial Sequence
  Synthetic
auauauauaugugauggcauau

SEQ ID NO: 367379 - RNA, 23 nt, Artificial Sequence
  Synthetic
uauauauauaugugauggcauau

SEQ ID NO: 367380 - RNA, 24 nt, Artificial Sequence
  Synthetic
auauauauauaugugauggcauau

SEQ ID NO: 367381 - RNA, 18 nt, Artificial Sequence
  Synthetic
acacagggucuggcauau

SEQ ID NO: 367382 - RNA, 19 nt, Artificial Sequence
  Synthetic
aacacagggucuggcauau

SEQ ID NO: 367383 - RNA, 20 nt, Artificial Sequence
  Synthetic
uaacacagggucuggcauau

SEQ ID NO: 367384 - RNA, 21 nt, Artificial Sequence
  Synthetic
cuaacacagggucuggcauau

SEQ ID NO: 367385 - RNA, 22 nt, Artificial Sequence
  Synthetic
ucuaacacagggucuggcauau

SEQ ID NO: 367386 - RNA, 23 nt, Artificial Sequence
  Synthetic
uucuaacacagggucuggcauau

SEQ ID NO: 367387 - RNA, 24 nt, Artificial Sequence
  Synthetic
guucuaacacagggucuggcauau

SEQ ID NO: 367388 - RNA, 18 nt, Artificial Sequence
  Synthetic
uaagauucuguggcauau

SEQ ID NO: 367389 - RNA, 19 nt, Artificial Sequence
  Synthetic
uuaagauucuguggcauau

SEQ ID NO: 367390 - RNA, 20 nt, Artificial Sequence
  Synthetic
auuaagauucuguggcauau

SEQ ID NO: 367391 - RNA, 21 nt, Artificial Sequence
  Synthetic
aauuaagauucuguggcauau

SEQ ID NO: 367392 - RNA, 22 nt, Artificial Sequence
  Synthetic
aaauuaagauucuguggcauau

SEQ ID NO: 367393 - RNA, 23 nt, Artificial Sequence
  Synthetic
caaauuaagauucuguggcauau

SEQ ID NO: 367394 - RNA, 24 nt, Artificial Sequence
  Synthetic
ucaaauuaagauucuguggcauau

SEQ ID NO: 367395 - RNA, 18 nt, Artificial Sequence
  Synthetic
uuuaagugcaaugcauau

SEQ ID NO: 367396 - RNA, 19 nt, Artificial Sequence
  Synthetic
uuuuaagugcaaugcauau

SEQ ID NO: 367397 - RNA, 20 nt, Artificial Sequence
  Synthetic
auuuuaagugcaaugcauau

SEQ ID NO: 367398 - RNA, 21 nt, Artificial Sequence
  Synthetic
aauuuuaagugcaaugcauau

SEQ ID NO: 367399 - RNA, 22 nt, Artificial Sequence
  Synthetic
aaauuuuaagugcaaugcauau

SEQ ID NO: 367400 - RNA, 23 nt, Artificial Sequence
  Synthetic
aaaauuuuaagugcaaugcauau

SEQ ID NO: 367401 - RNA, 24 nt, Artificial Sequence
  Synthetic
uaaaauuuuaagugcaaugcauau

SEQ ID NO: 367402 - RNA, 18 nt, Artificial Sequence
  Synthetic
ucaaagggguaugcauau

SEQ ID NO: 367403 - RNA, 19 nt, Artificial Sequence
  Synthetic
aucaaagggguaugcauau

SEQ ID NO: 367404 - RNA, 20 nt, Artificial Sequence
  Synthetic
uaucaaagggguaugcauau

SEQ ID NO: 367405 - RNA, 21 nt, Artificial Sequence
  Synthetic
auaucaaagggguaugcauau

SEQ ID NO: 367406 - RNA, 22 nt, Artificial Sequence
  Synthetic
cauaucaaagggguaugcauau

SEQ ID NO: 367407 - RNA, 23 nt, Artificial Sequence
  Synthetic
gcauaucaaagggguaugcauau

SEQ ID NO: 367408 - RNA, 24 nt, Artificial Sequence
  Synthetic
cgcauaucaaagggguaugcauau

SEQ ID NO: 367409 - RNA, 18 nt, Artificial Sequence
  Synthetic
auauguaucugugcauau

SEQ ID NO: 367410 - RNA, 19 nt, Artificial Sequence
  Synthetic
uauauguaucugugcauau

SEQ ID NO: 367411 - RNA, 20 nt, Artificial Sequence
  Synthetic
auauauguaucugugcauau

SEQ ID NO: 367412 - RNA, 21 nt, Artificial Sequence
  Synthetic
gauauauguaucugugcauau

SEQ ID NO: 367413 - RNA, 22 nt, Artificial Sequence
  Synthetic
ugauauauguaucugugcauau

SEQ ID NO: 367414 - RNA, 23 nt, Artificial Sequence
  Synthetic
augauauauguaucugugcauau

SEQ ID NO: 367415 - RNA, 24 nt, Artificial Sequence
  Synthetic
uaugauauauguaucugugcauau

SEQ ID NO: 367416 - RNA, 18 nt, Artificial Sequence
  Synthetic
uucacuauguuugcauau

SEQ ID NO: 367417 - RNA, 19 nt, Artificial Sequence
  Synthetic
cuucacuauguuugcauau

SEQ ID NO: 367418 - RNA, 20 nt, Artificial Sequence
  Synthetic
ccuucacuauguuugcauau

SEQ ID NO: 367419 - RNA, 21 nt, Artificial Sequence
  Synthetic
uccuucacuauguuugcauau

SEQ ID NO: 367420 - RNA, 22 nt, Artificial Sequence
  Synthetic
guccuucacuauguuugcauau

SEQ ID NO: 367421 - RNA, 23 nt, Artificial Sequence
  Synthetic
uguccuucacuauguuugcauau

SEQ ID NO: 367422 - RNA, 24 nt, Artificial Sequence
  Synthetic
cuguccuucacuauguuugcauau

SEQ ID NO: 367423 - RNA, 18 nt, Artificial Sequence
  Synthetic
uugucuuguaaaucauau

SEQ ID NO: 367424 - RNA, 19 nt, Artificial Sequence
  Synthetic
cuugucuuguaaaucauau

SEQ ID NO: 367425 - RNA, 20 nt, Artificial Sequence
  Synthetic
ucuugucuuguaaaucauau

SEQ ID NO: 367426 - RNA, 21 nt, Artificial Sequence
  Synthetic
aucuugucuuguaaaucauau

SEQ ID NO: 367427 - RNA, 22 nt, Artificial Sequence
  Synthetic
caucuugucuuguaaaucauau

SEQ ID NO: 367428 - RNA, 23 nt, Artificial Sequence
  Synthetic
acaucuugucuuguaaaucauau

SEQ ID NO: 367429 - RNA, 24 nt, Artificial Sequence
  Synthetic
cacaucuugucuuguaaaucauau

SEQ ID NO: 367430 - RNA, 18 nt, Artificial Sequence
  Synthetic
aaauaucugggaucauau

SEQ ID NO: 367431 - RNA, 19 nt, Artificial Sequence
  Synthetic
caaauaucugggaucauau

SEQ ID NO: 367432 - RNA, 20 nt, Artificial Sequence
  Synthetic
acaaauaucugggaucauau

SEQ ID NO: 367433 - RNA, 21 nt, Artificial Sequence
  Synthetic
cacaaauaucugggaucauau

SEQ ID NO: 367434 - RNA, 22 nt, Artificial Sequence
  Synthetic
ucacaaauaucugggaucauau

SEQ ID NO: 367435 - RNA, 23 nt, Artificial Sequence
  Synthetic
gucacaaauaucugggaucauau

SEQ ID NO: 367436 - RNA, 24 nt, Artificial Sequence
  Synthetic
ugucacaaauaucugggaucauau

SEQ ID NO: 367437 - RNA, 18 nt, Artificial Sequence
  Synthetic
aacaggcucuuaucauau

SEQ ID NO: 367438 - RNA, 19 nt, Artificial Sequence
  Synthetic
gaacaggcucuuaucauau

SEQ ID NO: 367439 - RNA, 20 nt, Artificial Sequence
  Synthetic
ugaacaggcucuuaucauau

SEQ ID NO: 367440 - RNA, 21 nt, Artificial Sequence
  Synthetic
uugaacaggcucuuaucauau

SEQ ID NO: 367441 - RNA, 22 nt, Artificial Sequence
  Synthetic
uuugaacaggcucuuaucauau

SEQ ID NO: 367442 - RNA, 23 nt, Artificial Sequence
  Synthetic
cuuugaacaggcucuuaucauau

SEQ ID NO: 367443 - RNA, 24 nt, Artificial Sequence
  Synthetic
acuuugaacaggcucuuaucauau

SEQ ID NO: 367444 - RNA, 18 nt, Artificial Sequence
  Synthetic
uuaaacuuccacucauau

SEQ ID NO: 367445 - RNA, 19 nt, Artificial Sequence
  Synthetic
uuuaaacuuccacucauau

SEQ ID NO: 367446 - RNA, 20 nt, Artificial Sequence
  Synthetic
auuuaaacuuccacucauau

SEQ ID NO: 367447 - RNA, 21 nt, Artificial Sequence
  Synthetic
aauuuaaacuuccacucauau

SEQ ID NO: 367448 - RNA, 22 nt, Artificial Sequence
  Synthetic
caauuuaaacuuccacucauau

SEQ ID NO: 367449 - RNA, 23 nt, Artificial Sequence
  Synthetic
ccaauuuaaacuuccacucauau

SEQ ID NO: 367450 - RNA, 24 nt, Artificial Sequence
  Synthetic
accaauuuaaacuuccacucauau

SEQ ID NO: 367451 - RNA, 18 nt, Artificial Sequence
  Synthetic
gaacuauguuucucauau

SEQ ID NO: 367452 - RNA, 19 nt, Artificial Sequence
  Synthetic
ggaacuauguuucucauau

SEQ ID NO: 367453 - RNA, 20 nt, Artificial Sequence
  Synthetic
uggaacuauguuucucauau

SEQ ID NO: 367454 - RNA, 21 nt, Artificial Sequence
  Synthetic
cuggaacuauguuucucauau

SEQ ID NO: 367455 - RNA, 22 nt, Artificial Sequence
  Synthetic
ucuggaacuauguuucucauau

SEQ ID NO: 367456 - RNA, 23 nt, Artificial Sequence
  Synthetic
cucuggaacuauguuucucauau

SEQ ID NO: 367457 - RNA, 24 nt, Artificial Sequence
  Synthetic
ucucuggaacuauguuucucauau

SEQ ID NO: 367458 - RNA, 18 nt, Artificial Sequence
  Synthetic
uuaucuuauacuucauau

SEQ ID NO: 367459 - RNA, 19 nt, Artificial Sequence
  Synthetic
auuaucuuauacuucauau

SEQ ID NO: 367460 - RNA, 20 nt, Artificial Sequence
  Synthetic
uauuaucuuauacuucauau

SEQ ID NO: 367461 - RNA, 21 nt, Artificial Sequence
  Synthetic
auauuaucuuauacuucauau

SEQ ID NO: 367462 - RNA, 22 nt, Artificial Sequence
  Synthetic
gauauuaucuuauacuucauau

SEQ ID NO: 367463 - RNA, 23 nt, Artificial Sequence
  Synthetic
ggauauuaucuuauacuucauau

SEQ ID NO: 367464 - RNA, 24 nt, Artificial Sequence
  Synthetic
uggauauuaucuuauacuucauau

SEQ ID NO: 367465 - RNA, 18 nt, Artificial Sequence
  Synthetic
cacucgaguauuucauau

SEQ ID NO: 367466 - RNA, 19 nt, Artificial Sequence
  Synthetic
acacucgaguauuucauau

SEQ ID NO: 367467 - RNA, 20 nt, Artificial Sequence
  Synthetic
uacacucgaguauuucauau

SEQ ID NO: 367468 - RNA, 21 nt, Artificial Sequence
  Synthetic
auacacucgaguauuucauau

SEQ ID NO: 367469 - RNA, 22 nt, Artificial Sequence
  Synthetic
gauacacucgaguauuucauau

SEQ ID NO: 367470 - RNA, 23 nt, Artificial Sequence
  Synthetic
agauacacucgaguauuucauau

SEQ ID NO: 367471 - RNA, 24 nt, Artificial Sequence
  Synthetic
uagauacacucgaguauuucauau

SEQ ID NO: 367472 - RNA, 18 nt, Artificial Sequence
  Synthetic
gugguagcccuuucauau

SEQ ID NO: 367473 - RNA, 19 nt, Artificial Sequence
  Synthetic
ugugguagcccuuucauau

SEQ ID NO: 367474 - RNA, 20 nt, Artificial Sequence
  Synthetic
augugguagcccuuucauau

SEQ ID NO: 367475 - RNA, 21 nt, Artificial Sequence
  Synthetic
uaugugguagcccuuucauau

SEQ ID NO: 367476 - RNA, 22 nt, Artificial Sequence
  Synthetic
guaugugguagcccuuucauau

SEQ ID NO: 367477 - RNA, 23 nt, Artificial Sequence
  Synthetic
uguaugugguagcccuuucauau

SEQ ID NO: 367478 - RNA, 24 nt, Artificial Sequence
  Synthetic
auguaugugguagcccuuucauau

SEQ ID NO: 367479 - RNA, 18 nt, Artificial Sequence
  Synthetic
uugcaaccaaaaagauau

SEQ ID NO: 367480 - RNA, 19 nt, Artificial Sequence
  Synthetic
uuugcaaccaaaaagauau

SEQ ID NO: 367481 - RNA, 20 nt, Artificial Sequence
  Synthetic
cuuugcaaccaaaaagauau

SEQ ID NO: 367482 - RNA, 21 nt, Artificial Sequence
  Synthetic
acuuugcaaccaaaaagauau

SEQ ID NO: 367483 - RNA, 22 nt, Artificial Sequence
  Synthetic
aacuuugcaaccaaaaagauau

SEQ ID NO: 367484 - RNA, 23 nt, Artificial Sequence
  Synthetic
aaacuuugcaaccaaaaagauau

SEQ ID NO: 367485 - RNA, 24 nt, Artificial Sequence
  Synthetic
aaaacuuugcaaccaaaaagauau

SEQ ID NO: 367486 - RNA, 18 nt, Artificial Sequence
  Synthetic
ucugagcaagaaagauau

SEQ ID NO: 367487 - RNA, 19 nt, Artificial Sequence
  Synthetic
uucugagcaagaaagauau

SEQ ID NO: 367488 - RNA, 20 nt, Artificial Sequence
  Synthetic
uuucugagcaagaaagauau

SEQ ID NO: 367489 - RNA, 21 nt, Artificial Sequence
  Synthetic
cuuucugagcaagaaagauau

SEQ ID NO: 367490 - RNA, 22 nt, Artificial Sequence
  Synthetic
ccuuucugagcaagaaagauau

SEQ ID NO: 367491 - RNA, 23 nt, Artificial Sequence
  Synthetic
uccuuucugagcaagaaagauau

SEQ ID NO: 367492 - RNA, 24 nt, Artificial Sequence
  Synthetic
auccuuucugagcaagaaagauau

SEQ ID NO: 367493 - RNA, 18 nt, Artificial Sequence
  Synthetic
ugauuagacacaagauau

SEQ ID NO: 367494 - RNA, 19 nt, Artificial Sequence
  Synthetic
augauuagacacaagauau

SEQ ID NO: 367495 - RNA, 20 nt, Artificial Sequence
  Synthetic
caugauuagacacaagauau

SEQ ID NO: 367496 - RNA, 21 nt, Artificial Sequence
  Synthetic
acaugauuagacacaagauau

SEQ ID NO: 367497 - RNA, 22 nt, Artificial Sequence
  Synthetic
cacaugauuagacacaagauau

SEQ ID NO: 367498 - RNA, 23 nt, Artificial Sequence
  Synthetic
ucacaugauuagacacaagauau

SEQ ID NO: 367499 - RNA, 24 nt, Artificial Sequence
  Synthetic
cucacaugauuagacacaagauau

SEQ ID NO: 367500 - RNA, 18 nt, Artificial Sequence
  Synthetic
cucuuaaauggaagauau

SEQ ID NO: 367501 - RNA, 19 nt, Artificial Sequence
  Synthetic
gcucuuaaauggaagauau

SEQ ID NO: 367502 - RNA, 20 nt, Artificial Sequence
  Synthetic
ggcucuuaaauggaagauau

SEQ ID NO: 367503 - RNA, 21 nt, Artificial Sequence
  Synthetic
uggcucuuaaauggaagauau

SEQ ID NO: 367504 - RNA, 22 nt, Artificial Sequence
  Synthetic
auggcucuuaaauggaagauau

SEQ ID NO: 367505 - RNA, 23 nt, Artificial Sequence
  Synthetic
cauggcucuuaaauggaagauau

SEQ ID NO: 367506 - RNA, 24 nt, Artificial Sequence
  Synthetic
ucauggcucuuaaauggaagauau

SEQ ID NO: 367507 - RNA, 18 nt, Artificial Sequence
  Synthetic
ucugaaauuuuaagauau

SEQ ID NO: 367508 - RNA, 19 nt, Artificial Sequence
  Synthetic
uucugaaauuuuaagauau

SEQ ID NO: 367509 - RNA, 20 nt, Artificial Sequence
  Synthetic
cuucugaaauuuuaagauau

SEQ ID NO: 367510 - RNA, 21 nt, Artificial Sequence
  Synthetic
ucuucugaaauuuuaagauau

SEQ ID NO: 367511 - RNA, 22 nt, Artificial Sequence
  Synthetic
gucuucugaaauuuuaagauau

SEQ ID NO: 367512 - RNA, 23 nt, Artificial Sequence
  Synthetic
agucuucugaaauuuuaagauau

SEQ ID NO: 367513 - RNA, 24 nt, Artificial Sequence
  Synthetic
aagucuucugaaauuuuaagauau

SEQ ID NO: 367514 - RNA, 18 nt, Artificial Sequence
  Synthetic
guccccuuacccagauau

SEQ ID NO: 367515 - RNA, 19 nt, Artificial Sequence
  Synthetic
aguccccuuacccagauau

SEQ ID NO: 367516 - RNA, 20 nt, Artificial Sequence
  Synthetic
aaguccccuuacccagauau

SEQ ID NO: 367517 - RNA, 21 nt, Artificial Sequence
  Synthetic
gaaguccccuuacccagauau

SEQ ID NO: 367518 - RNA, 22 nt, Artificial Sequence
  Synthetic
ggaaguccccuuacccagauau

SEQ ID NO: 367519 - RNA, 23 nt, Artificial Sequence
  Synthetic
aggaaguccccuuacccagauau

SEQ ID NO: 367520 - RNA, 24 nt, Artificial Sequence
  Synthetic
aaggaaguccccuuacccagauau

SEQ ID NO: 367521 - RNA, 18 nt, Artificial Sequence
  Synthetic
ucaaggauuuccagauau

SEQ ID NO: 367522 - RNA, 19 nt, Artificial Sequence
  Synthetic
aucaaggauuuccagauau

SEQ ID NO: 367523 - RNA, 20 nt, Artificial Sequence
  Synthetic
aaucaaggauuuccagauau

SEQ ID NO: 367524 - RNA, 21 nt, Artificial Sequence
  Synthetic
caaucaaggauuuccagauau

SEQ ID NO: 367525 - RNA, 22 nt, Artificial Sequence
  Synthetic
acaaucaaggauuuccagauau

SEQ ID NO: 367526 - RNA, 23 nt, Artificial Sequence
  Synthetic
gacaaucaaggauuuccagauau

SEQ ID NO: 367527 - RNA, 24 nt, Artificial Sequence
  Synthetic
agacaaucaaggauuuccagauau

SEQ ID NO: 367528 - RNA, 18 nt, Artificial Sequence
  Synthetic
caguauuugagcagauau

SEQ ID NO: 367529 - RNA, 19 nt, Artificial Sequence
  Synthetic
gcaguauuugagcagauau

SEQ ID NO: 367530 - RNA, 20 nt, Artificial Sequence
  Synthetic
ggcaguauuugagcagauau

SEQ ID NO: 367531 - RNA, 21 nt, Artificial Sequence
  Synthetic
gggcaguauuugagcagauau

SEQ ID NO: 367532 - RNA, 22 nt, Artificial Sequence
  Synthetic
ggggcaguauuugagcagauau

SEQ ID NO: 367533 - RNA, 23 nt, Artificial Sequence
  Synthetic
gggggcaguauuugagcagauau

SEQ ID NO: 367534 - RNA, 24 nt, Artificial Sequence
  Synthetic
agggggcaguauuugagcagauau

SEQ ID NO: 367535 - RNA, 18 nt, Artificial Sequence
  Synthetic
uauauaauccagagauau

SEQ ID NO: 367536 - RNA, 19 nt, Artificial Sequence
  Synthetic
guauauaauccagagauau

SEQ ID NO: 367537 - RNA, 20 nt, Artificial Sequence
  Synthetic
gguauauaauccagagauau

SEQ ID NO: 367538 - RNA, 21 nt, Artificial Sequence
  Synthetic
ggguauauaauccagagauau

SEQ ID NO: 367539 - RNA, 22 nt, Artificial Sequence
  Synthetic
gggguauauaauccagagauau

SEQ ID NO: 367540 - RNA, 23 nt, Artificial Sequence
  Synthetic
ugggguauauaauccagagauau

SEQ ID NO: 367541 - RNA, 24 nt, Artificial Sequence
  Synthetic
uugggguauauaauccagagauau

SEQ ID NO: 367542 - RNA, 18 nt, Artificial Sequence
  Synthetic
cuuggguuugugagauau

SEQ ID NO: 367543 - RNA, 19 nt, Artificial Sequence
  Synthetic
acuuggguuugugagauau

SEQ ID NO: 367544 - RNA, 20 nt, Artificial Sequence
  Synthetic
uacuuggguuugugagauau

SEQ ID NO: 367545 - RNA, 21 nt, Artificial Sequence
  Synthetic
auacuuggguuugugagauau

SEQ ID NO: 367546 - RNA, 22 nt, Artificial Sequence
  Synthetic
gauacuuggguuugugagauau

SEQ ID NO: 367547 - RNA, 23 nt, Artificial Sequence
  Synthetic
ugauacuuggguuugugagauau

SEQ ID NO: 367548 - RNA, 24 nt, Artificial Sequence
  Synthetic
cugauacuuggguuugugagauau

SEQ ID NO: 367549 - RNA, 18 nt, Artificial Sequence
  Synthetic
uucaucaacaauagauau

SEQ ID NO: 367550 - RNA, 19 nt, Artificial Sequence
  Synthetic
uuucaucaacaauagauau

SEQ ID NO: 367551 - RNA, 20 nt, Artificial Sequence
  Synthetic
uuuucaucaacaauagauau

SEQ ID NO: 367552 - RNA, 21 nt, Artificial Sequence
  Synthetic
cuuuucaucaacaauagauau

SEQ ID NO: 367553 - RNA, 22 nt, Artificial Sequence
  Synthetic
acuuuucaucaacaauagauau

SEQ ID NO: 367554 - RNA, 23 nt, Artificial Sequence
  Synthetic
gacuuuucaucaacaauagauau

SEQ ID NO: 367555 - RNA, 24 nt, Artificial Sequence
  Synthetic
agacuuuucaucaacaauagauau

SEQ ID NO: 367556 - RNA, 18 nt, Artificial Sequence
  Synthetic
acauaaauggauagauau

SEQ ID NO: 367557 - RNA, 19 nt, Artificial Sequence
  Synthetic
uacauaaauggauagauau

SEQ ID NO: 367558 - RNA, 20 nt, Artificial Sequence
  Synthetic
uuacauaaauggauagauau

SEQ ID NO: 367559 - RNA, 21 nt, Artificial Sequence
  Synthetic
auuacauaaauggauagauau

SEQ ID NO: 367560 - RNA, 22 nt, Artificial Sequence
  Synthetic
uauuacauaaauggauagauau

SEQ ID NO: 367561 - RNA, 23 nt, Artificial Sequence
  Synthetic
auauuacauaaauggauagauau

SEQ ID NO: 367562 - RNA, 24 nt, Artificial Sequence
  Synthetic
aauauuacauaaauggauagauau

SEQ ID NO: 367563 - RNA, 18 nt, Artificial Sequence
  Synthetic
ugagaaaguacuagauau

SEQ ID NO: 367564 - RNA, 19 nt, Artificial Sequence
  Synthetic
gugagaaaguacuagauau

SEQ ID NO: 367565 - RNA, 20 nt, Artificial Sequence
  Synthetic
agugagaaaguacuagauau

SEQ ID NO: 367566 - RNA, 21 nt, Artificial Sequence
  Synthetic
uagugagaaaguacuagauau

SEQ ID NO: 367567 - RNA, 22 nt, Artificial Sequence
  Synthetic
uuagugagaaaguacuagauau

SEQ ID NO: 367568 - RNA, 23 nt, Artificial Sequence
  Synthetic
guuagugagaaaguacuagauau

SEQ ID NO: 367569 - RNA, 24 nt, Artificial Sequence
  Synthetic
aguuagugagaaaguacuagauau

SEQ ID NO: 367570 - RNA, 18 nt, Artificial Sequence
  Synthetic
aauuugacaucuagauau

SEQ ID NO: 367571 - RNA, 19 nt, Artificial Sequence
  Synthetic
aaauuugacaucuagauau

SEQ ID NO: 367572 - RNA, 20 nt, Artificial Sequence
  Synthetic
gaaauuugacaucuagauau

SEQ ID NO: 367573 - RNA, 21 nt, Artificial Sequence
  Synthetic
ggaaauuugacaucuagauau

SEQ ID NO: 367574 - RNA, 22 nt, Artificial Sequence
  Synthetic
uggaaauuugacaucuagauau

SEQ ID NO: 367575 - RNA, 23 nt, Artificial Sequence
  Synthetic
guggaaauuugacaucuagauau

SEQ ID NO: 367576 - RNA, 24 nt, Artificial Sequence
  Synthetic
aguggaaauuugacaucuagauau

SEQ ID NO: 367577 - RNA, 18 nt, Artificial Sequence
  Synthetic
ugcaaaggaaguagauau

SEQ ID NO: 367578 - RNA, 19 nt, Artificial Sequence
  Synthetic
augcaaaggaaguagauau

SEQ ID NO: 367579 - RNA, 20 nt, Artificial Sequence
  Synthetic
aaugcaaaggaaguagauau

SEQ ID NO: 367580 - RNA, 21 nt, Artificial Sequence
  Synthetic
uaaugcaaaggaaguagauau

SEQ ID NO: 367581 - RNA, 22 nt, Artificial Sequence
  Synthetic
uuaaugcaaaggaaguagauau

SEQ ID NO: 367582 - RNA, 23 nt, Artificial Sequence
  Synthetic
guuaaugcaaaggaaguagauau

SEQ ID NO: 367583 - RNA, 24 nt, Artificial Sequence
  Synthetic
aguuaaugcaaaggaaguagauau

SEQ ID NO: 367584 - RNA, 18 nt, Artificial Sequence
  Synthetic
uggaauggcaguagauau

SEQ ID NO: 367585 - RNA, 19 nt, Artificial Sequence
  Synthetic
cuggaauggcaguagauau

SEQ ID NO: 367586 - RNA, 20 nt, Artificial Sequence
  Synthetic
gcuggaauggcaguagauau

SEQ ID NO: 367587 - RNA, 21 nt, Artificial Sequence
  Synthetic
agcuggaauggcaguagauau

SEQ ID NO: 367588 - RNA, 22 nt, Artificial Sequence
  Synthetic
aagcuggaauggcaguagauau

SEQ ID NO: 367589 - RNA, 23 nt, Artificial Sequence
  Synthetic
caagcuggaauggcaguagauau

SEQ ID NO: 367590 - RNA, 24 nt, Artificial Sequence
  Synthetic
ucaagcuggaauggcaguagauau

SEQ ID NO: 367591 - RNA, 18 nt, Artificial Sequence
  Synthetic
cuacugcagauuagauau

SEQ ID NO: 367592 - RNA, 19 nt, Artificial Sequence
  Synthetic
ucuacugcagauuagauau

SEQ ID NO: 367593 - RNA, 20 nt, Artificial Sequence
  Synthetic
aucuacugcagauuagauau

SEQ ID NO: 367594 - RNA, 21 nt, Artificial Sequence
  Synthetic
uaucuacugcagauuagauau

SEQ ID NO: 367595 - RNA, 22 nt, Artificial Sequence
  Synthetic
guaucuacugcagauuagauau

SEQ ID NO: 367596 - RNA, 23 nt, Artificial Sequence
  Synthetic
aguaucuacugcagauuagauau

SEQ ID NO: 367597 - RNA, 24 nt, Artificial Sequence
  Synthetic
aaguaucuacugcagauuagauau

SEQ ID NO: 367598 - RNA, 18 nt, Artificial Sequence
  Synthetic
gauuaauaguuuagauau

SEQ ID NO: 367599 - RNA, 19 nt, Artificial Sequence
  Synthetic
ugauuaauaguuuagauau

SEQ ID NO: 367600 - RNA, 20 nt, Artificial Sequence
  Synthetic
uugauuaauaguuuagauau

SEQ ID NO: 367601 - RNA, 21 nt, Artificial Sequence
  Synthetic
auugauuaauaguuuagauau

SEQ ID NO: 367602 - RNA, 22 nt, Artificial Sequence
  Synthetic
gauugauuaauaguuuagauau

SEQ ID NO: 367603 - RNA, 23 nt, Artificial Sequence
  Synthetic
ggauugauuaauaguuuagauau

SEQ ID NO: 367604 - RNA, 24 nt, Artificial Sequence
  Synthetic
uggauugauuaauaguuuagauau

SEQ ID NO: 367605 - RNA, 18 nt, Artificial Sequence
  Synthetic
agaaguuaaaagcgauau

SEQ ID NO: 367606 - RNA, 19 nt, Artificial Sequence
  Synthetic
cagaaguuaaaagcgauau

SEQ ID NO: 367607 - RNA, 20 nt, Artificial Sequence
  Synthetic
acagaaguuaaaagcgauau

SEQ ID NO: 367608 - RNA, 21 nt, Artificial Sequence
  Synthetic
aacagaaguuaaaagcgauau

SEQ ID NO: 367609 - RNA, 22 nt, Artificial Sequence
  Synthetic
caacagaaguuaaaagcgauau

SEQ ID NO: 367610 - RNA, 23 nt, Artificial Sequence
  Synthetic
gcaacagaaguuaaaagcgauau

SEQ ID NO: 367611 - RNA, 24 nt, Artificial Sequence
  Synthetic
ggcaacagaaguuaaaagcgauau

SEQ ID NO: 367612 - RNA, 18 nt, Artificial Sequence
  Synthetic
gcugagagggaucgauau

SEQ ID NO: 367613 - RNA, 19 nt, Artificial Sequence
  Synthetic
ggcugagagggaucgauau

SEQ ID NO: 367614 - RNA, 20 nt, Artificial Sequence
  Synthetic
gggcugagagggaucgauau

SEQ ID NO: 367615 - RNA, 21 nt, Artificial Sequence
  Synthetic
agggcugagagggaucgauau

SEQ ID NO: 367616 - RNA, 22 nt, Artificial Sequence
  Synthetic
cagggcugagagggaucgauau

SEQ ID NO: 367617 - RNA, 23 nt, Artificial Sequence
  Synthetic
ccagggcugagagggaucgauau

SEQ ID NO: 367618 - RNA, 24 nt, Artificial Sequence
  Synthetic
cccagggcugagagggaucgauau

SEQ ID NO: 367619 - RNA, 18 nt, Artificial Sequence
  Synthetic
aagcaaaagaaaggauau

SEQ ID NO: 367620 - RNA, 19 nt, Artificial Sequence
  Synthetic
caagcaaaagaaaggauau

SEQ ID NO: 367621 - RNA, 20 nt, Artificial Sequence
  Synthetic
ccaagcaaaagaaaggauau

SEQ ID NO: 367622 - RNA, 21 nt, Artificial Sequence
  Synthetic
accaagcaaaagaaaggauau

SEQ ID NO: 367623 - RNA, 22 nt, Artificial Sequence
  Synthetic
gaccaagcaaaagaaaggauau

SEQ ID NO: 367624 - RNA, 23 nt, Artificial Sequence
  Synthetic
cgaccaagcaaaagaaaggauau

SEQ ID NO: 367625 - RNA, 24 nt, Artificial Sequence
  Synthetic
ucgaccaagcaaaagaaaggauau

SEQ ID NO: 367626 - RNA, 18 nt, Artificial Sequence
  Synthetic
caaucccugaaaggauau

SEQ ID NO: 367627 - RNA, 19 nt, Artificial Sequence
  Synthetic
ccaaucccugaaaggauau

SEQ ID NO: 367628 - RNA, 20 nt, Artificial Sequence
  Synthetic
uccaaucccugaaaggauau

SEQ ID NO: 367629 - RNA, 21 nt, Artificial Sequence
  Synthetic
guccaaucccugaaaggauau

SEQ ID NO: 367630 - RNA, 22 nt, Artificial Sequence
  Synthetic
cguccaaucccugaaaggauau

SEQ ID NO: 367631 - RNA, 23 nt, Artificial Sequence
  Synthetic
acguccaaucccugaaaggauau

SEQ ID NO: 367632 - RNA, 24 nt, Artificial Sequence
  Synthetic
aacguccaaucccugaaaggauau

SEQ ID NO: 367633 - RNA, 18 nt, Artificial Sequence
  Synthetic
uucuggagaagaggauau

SEQ ID NO: 367634 - RNA, 19 nt, Artificial Sequence
  Synthetic
auucuggagaagaggauau

SEQ ID NO: 367635 - RNA, 20 nt, Artificial Sequence
  Synthetic
uauucuggagaagaggauau

SEQ ID NO: 367636 - RNA, 21 nt, Artificial Sequence
  Synthetic
uuauucuggagaagaggauau

SEQ ID NO: 367637 - RNA, 22 nt, Artificial Sequence
  Synthetic
auuauucuggagaagaggauau

SEQ ID NO: 367638 - RNA, 23 nt, Artificial Sequence
  Synthetic
uauuauucuggagaagaggauau

SEQ ID NO: 367639 - RNA, 24 nt, Artificial Sequence
  Synthetic
auauuauucuggagaagaggauau

SEQ ID NO: 367640 - RNA, 18 nt, Artificial Sequence
  Synthetic
uacauaacaguaggauau

SEQ ID NO: 367641 - RNA, 19 nt, Artificial Sequence
  Synthetic
guacauaacaguaggauau

SEQ ID NO: 367642 - RNA, 20 nt, Artificial Sequence
  Synthetic
gguacauaacaguaggauau

SEQ ID NO: 367643 - RNA, 21 nt, Artificial Sequence
  Synthetic
ugguacauaacaguaggauau

SEQ ID NO: 367644 - RNA, 22 nt, Artificial Sequence
  Synthetic
augguacauaacaguaggauau

SEQ ID NO: 367645 - RNA, 23 nt, Artificial Sequence
  Synthetic
caugguacauaacaguaggauau

SEQ ID NO: 367646 - RNA, 24 nt, Artificial Sequence
  Synthetic
acaugguacauaacaguaggauau

SEQ ID NO: 367647 - RNA, 18 nt, Artificial Sequence
  Synthetic
cagguacugaagggauau

SEQ ID NO: 367648 - RNA, 19 nt, Artificial Sequence
  Synthetic
gcagguacugaagggauau

SEQ ID NO: 367649 - RNA, 20 nt, Artificial Sequence
  Synthetic
ggcagguacugaagggauau

SEQ ID NO: 367650 - RNA, 21 nt, Artificial Sequence
  Synthetic
uggcagguacugaagggauau

SEQ ID NO: 367651 - RNA, 22 nt, Artificial Sequence
  Synthetic
uuggcagguacugaagggauau

SEQ ID NO: 367652 - RNA, 23 nt, Artificial Sequence
  Synthetic
auuggcagguacugaagggauau

SEQ ID NO: 367653 - RNA, 24 nt, Artificial Sequence
  Synthetic
aauuggcagguacugaagggauau

SEQ ID NO: 367654 - RNA, 18 nt, Artificial Sequence
  Synthetic
cugacauaauagggauau

SEQ ID NO: 367655 - RNA, 19 nt, Artificial Sequence
  Synthetic
ucugacauaauagggauau

SEQ ID NO: 367656 - RNA, 20 nt, Artificial Sequence
  Synthetic
uucugacauaauagggauau

SEQ ID NO: 367657 - RNA, 21 nt, Artificial Sequence
  Synthetic
auucugacauaauagggauau

SEQ ID NO: 367658 - RNA, 22 nt, Artificial Sequence
  Synthetic
aauucugacauaauagggauau

SEQ ID NO: 367659 - RNA, 23 nt, Artificial Sequence
  Synthetic
aaauucugacauaauagggauau

SEQ ID NO: 367660 - RNA, 24 nt, Artificial Sequence
  Synthetic
gaaauucugacauaauagggauau

SEQ ID NO: 367661 - RNA, 18 nt, Artificial Sequence
  Synthetic
ugcaugacaacgggauau

SEQ ID NO: 367662 - RNA, 19 nt, Artificial Sequence
  Synthetic
uugcaugacaacgggauau

SEQ ID NO: 367663 - RNA, 20 nt, Artificial Sequence
  Synthetic
guugcaugacaacgggauau

SEQ ID NO: 367664 - RNA, 21 nt, Artificial Sequence
  Synthetic
uguugcaugacaacgggauau

SEQ ID NO: 367665 - RNA, 22 nt, Artificial Sequence
  Synthetic
guguugcaugacaacgggauau

SEQ ID NO: 367666 - RNA, 23 nt, Artificial Sequence
  Synthetic
aguguugcaugacaacgggauau

SEQ ID NO: 367667 - RNA, 24 nt, Artificial Sequence
  Synthetic
aaguguugcaugacaacgggauau

SEQ ID NO: 367668 - RNA, 18 nt, Artificial Sequence
  Synthetic
ugaaaaggcacuggauau

SEQ ID NO: 367669 - RNA, 19 nt, Artificial Sequence
  Synthetic
gugaaaaggcacuggauau

SEQ ID NO: 367670 - RNA, 20 nt, Artificial Sequence
  Synthetic
cgugaaaaggcacuggauau

SEQ ID NO: 367671 - RNA, 21 nt, Artificial Sequence
  Synthetic
gcgugaaaaggcacuggauau

SEQ ID NO: 367672 - RNA, 22 nt, Artificial Sequence
  Synthetic
ggcgugaaaaggcacuggauau

SEQ ID NO: 367673 - RNA, 23 nt, Artificial Sequence
  Synthetic
uggcgugaaaaggcacuggauau

SEQ ID NO: 367674 - RNA, 24 nt, Artificial Sequence
  Synthetic
cuggcgugaaaaggcacuggauau

SEQ ID NO: 367675 - RNA, 18 nt, Artificial Sequence
  Synthetic
cauugagauacuggauau

SEQ ID NO: 367676 - RNA, 19 nt, Artificial Sequence
  Synthetic
acauugagauacuggauau

SEQ ID NO: 367677 - RNA, 20 nt, Artificial Sequence
  Synthetic
aacauugagauacuggauau

SEQ ID NO: 367678 - RNA, 21 nt, Artificial Sequence
  Synthetic
gaacauugagauacuggauau

SEQ ID NO: 367679 - RNA, 22 nt, Artificial Sequence
  Synthetic
agaacauugagauacuggauau

SEQ ID NO: 367680 - RNA, 23 nt, Artificial Sequence
  Synthetic
gagaacauugagauacuggauau

SEQ ID NO: 367681 - RNA, 24 nt, Artificial Sequence
  Synthetic
agagaacauugagauacuggauau

SEQ ID NO: 367682 - RNA, 18 nt, Artificial Sequence
  Synthetic
guucucugaccuggauau

SEQ ID NO: 367683 - RNA, 19 nt, Artificial Sequence
  Synthetic
aguucucugaccuggauau

SEQ ID NO: 367684 - RNA, 20 nt, Artificial Sequence
  Synthetic
caguucucugaccuggauau

SEQ ID NO: 367685 - RNA, 21 nt, Artificial Sequence
  Synthetic
ccaguucucugaccuggauau

SEQ ID NO: 367686 - RNA, 22 nt, Artificial Sequence
  Synthetic
accaguucucugaccuggauau

SEQ ID NO: 367687 - RNA, 23 nt, Artificial Sequence
  Synthetic
aaccaguucucugaccuggauau

SEQ ID NO: 367688 - RNA, 24 nt, Artificial Sequence
  Synthetic
aaaccaguucucugaccuggauau

SEQ ID NO: 367689 - RNA, 18 nt, Artificial Sequence
  Synthetic
gaaaugagauaaugauau

SEQ ID NO: 367690 - RNA, 19 nt, Artificial Sequence
  Synthetic
agaaaugagauaaugauau

SEQ ID NO: 367691 - RNA, 20 nt, Artificial Sequence
  Synthetic
gagaaaugagauaaugauau

SEQ ID NO: 367692 - RNA, 21 nt, Artificial Sequence
  Synthetic
ggagaaaugagauaaugauau

SEQ ID NO: 367693 - RNA, 22 nt, Artificial Sequence
  Synthetic
aggagaaaugagauaaugauau

SEQ ID NO: 367694 - RNA, 23 nt, Artificial Sequence
  Synthetic
uaggagaaaugagauaaugauau

SEQ ID NO: 367695 - RNA, 24 nt, Artificial Sequence
  Synthetic
uuaggagaaaugagauaaugauau

SEQ ID NO: 367696 - RNA, 18 nt, Artificial Sequence
  Synthetic
aauaguauuuaaugauau

SEQ ID NO: 367697 - RNA, 19 nt, Artificial Sequence
  Synthetic
aaauaguauuuaaugauau

SEQ ID NO: 367698 - RNA, 20 nt, Artificial Sequence
  Synthetic
caaauaguauuuaaugauau

SEQ ID NO: 367699 - RNA, 21 nt, Artificial Sequence
  Synthetic
ucaaauaguauuuaaugauau

SEQ ID NO: 367700 - RNA, 22 nt, Artificial Sequence
  Synthetic
uucaaauaguauuuaaugauau

SEQ ID NO: 367701 - RNA, 23 nt, Artificial Sequence
  Synthetic
uuucaaauaguauuuaaugauau

SEQ ID NO: 367702 - RNA, 24 nt, Artificial Sequence
  Synthetic
guuucaaauaguauuuaaugauau

SEQ ID NO: 367703 - RNA, 18 nt, Artificial Sequence
  Synthetic
uuuuuguuuuaaugauau

SEQ ID NO: 367704 - RNA, 19 nt, Artificial Sequence
  Synthetic
auuuuuguuuuaaugauau

SEQ ID NO: 367705 - RNA, 20 nt, Artificial Sequence
  Synthetic
aauuuuuguuuuaaugauau

SEQ ID NO: 367706 - RNA, 21 nt, Artificial Sequence
  Synthetic
aaauuuuuguuuuaaugauau

SEQ ID NO: 367707 - RNA, 22 nt, Artificial Sequence
  Synthetic
uaaauuuuuguuuuaaugauau

SEQ ID NO: 367708 - RNA, 23 nt, Artificial Sequence
  Synthetic
guaaauuuuuguuuuaaugauau

SEQ ID NO: 367709 - RNA, 24 nt, Artificial Sequence
  Synthetic
uguaaauuuuuguuuuaaugauau

SEQ ID NO: 367710 - RNA, 18 nt, Artificial Sequence
  Synthetic
aucauuuccugaugauau

SEQ ID NO: 367711 - RNA, 19 nt, Artificial Sequence
  Synthetic
uaucauuuccugaugauau

SEQ ID NO: 367712 - RNA, 20 nt, Artificial Sequence
  Synthetic
guaucauuuccugaugauau

SEQ ID NO: 367713 - RNA, 21 nt, Artificial Sequence
  Synthetic
aguaucauuuccugaugauau

SEQ ID NO: 367714 - RNA, 22 nt, Artificial Sequence
  Synthetic
uaguaucauuuccugaugauau

SEQ ID NO: 367715 - RNA, 23 nt, Artificial Sequence
  Synthetic
auaguaucauuuccugaugauau

SEQ ID NO: 367716 - RNA, 24 nt, Artificial Sequence
  Synthetic
aauaguaucauuuccugaugauau

SEQ ID NO: 367717 - RNA, 18 nt, Artificial Sequence
  Synthetic
ggaauaagcugaugauau

SEQ ID NO: 367718 - RNA, 19 nt, Artificial Sequence
  Synthetic
gggaauaagcugaugauau

SEQ ID NO: 367719 - RNA, 20 nt, Artificial Sequence
  Synthetic
ggggaauaagcugaugauau

SEQ ID NO: 367720 - RNA, 21 nt, Artificial Sequence
  Synthetic
gggggaauaagcugaugauau

SEQ ID NO: 367721 - RNA, 22 nt, Artificial Sequence
  Synthetic
ugggggaauaagcugaugauau

SEQ ID NO: 367722 - RNA, 23 nt, Artificial Sequence
  Synthetic
augggggaauaagcugaugauau

SEQ ID NO: 367723 - RNA, 24 nt, Artificial Sequence
  Synthetic
gaugggggaauaagcugaugauau

SEQ ID NO: 367724 - RNA, 18 nt, Artificial Sequence
  Synthetic
aaugaacuauuaugauau

SEQ ID NO: 367725 - RNA, 19 nt, Artificial Sequence
  Synthetic
uaaugaacuauuaugauau

SEQ ID NO: 367726 - RNA, 20 nt, Artificial Sequence
  Synthetic
auaaugaacuauuaugauau

SEQ ID NO: 367727 - RNA, 21 nt, Artificial Sequence
  Synthetic
uauaaugaacuauuaugauau

SEQ ID NO: 367728 - RNA, 22 nt, Artificial Sequence
  Synthetic
uuauaaugaacuauuaugauau

SEQ ID NO: 367729 - RNA, 23 nt, Artificial Sequence
  Synthetic
auuauaaugaacuauuaugauau

SEQ ID NO: 367730 - RNA, 24 nt, Artificial Sequence
  Synthetic
uauuauaaugaacuauuaugauau

SEQ ID NO: 367731 - RNA, 18 nt, Artificial Sequence
  Synthetic
uaacaauauuacugauau

SEQ ID NO: 367732 - RNA, 19 nt, Artificial Sequence
  Synthetic
guaacaauauuacugauau

SEQ ID NO: 367733 - RNA, 20 nt, Artificial Sequence
  Synthetic
aguaacaauauuacugauau

SEQ ID NO: 367734 - RNA, 21 nt, Artificial Sequence
  Synthetic
uaguaacaauauuacugauau

SEQ ID NO: 367735 - RNA, 22 nt, Artificial Sequence
  Synthetic
cuaguaacaauauuacugauau

SEQ ID NO: 367736 - RNA, 23 nt, Artificial Sequence
  Synthetic
acuaguaacaauauuacugauau

SEQ ID NO: 367737 - RNA, 24 nt, Artificial Sequence
  Synthetic
uacuaguaacaauauuacugauau

SEQ ID NO: 367738 - RNA, 18 nt, Artificial Sequence
  Synthetic
ugaauauggagcugauau

SEQ ID NO: 367739 - RNA, 19 nt, Artificial Sequence
  Synthetic
uugaauauggagcugauau

SEQ ID NO: 367740 - RNA, 20 nt, Artificial Sequence
  Synthetic
cuugaauauggagcugauau

SEQ ID NO: 367741 - RNA, 21 nt, Artificial Sequence
  Synthetic
acuugaauauggagcugauau

SEQ ID NO: 367742 - RNA, 22 nt, Artificial Sequence
  Synthetic
aacuugaauauggagcugauau

SEQ ID NO: 367743 - RNA, 23 nt, Artificial Sequence
  Synthetic
aaacuugaauauggagcugauau

SEQ ID NO: 367744 - RNA, 24 nt, Artificial Sequence
  Synthetic
caaacuugaauauggagcugauau

SEQ ID NO: 367745 - RNA, 18 nt, Artificial Sequence
  Synthetic
ugauuggcuugcugauau

SEQ ID NO: 367746 - RNA, 19 nt, Artificial Sequence
  Synthetic
uugauuggcuugcugauau

SEQ ID NO: 367747 - RNA, 20 nt, Artificial Sequence
  Synthetic
uuugauuggcuugcugauau

SEQ ID NO: 367748 - RNA, 21 nt, Artificial Sequence
  Synthetic
uuuugauuggcuugcugauau

SEQ ID NO: 367749 - RNA, 22 nt, Artificial Sequence
  Synthetic
cuuuugauuggcuugcugauau

SEQ ID NO: 367750 - RNA, 23 nt, Artificial Sequence
  Synthetic
ccuuuugauuggcuugcugauau

SEQ ID NO: 367751 - RNA, 24 nt, Artificial Sequence
  Synthetic
cccuuuugauuggcuugcugauau

SEQ ID NO: 367752 - RNA, 18 nt, Artificial Sequence
  Synthetic
ggagauugagucugauau

SEQ ID NO: 367753 - RNA, 19 nt, Artificial Sequence
  Synthetic
aggagauugagucugauau

SEQ ID NO: 367754 - RNA, 20 nt, Artificial Sequence
  Synthetic
gaggagauugagucugauau

SEQ ID NO: 367755 - RNA, 21 nt, Artificial Sequence
  Synthetic
ugaggagauugagucugauau

SEQ ID NO: 367756 - RNA, 22 nt, Artificial Sequence
  Synthetic
augaggagauugagucugauau

SEQ ID NO: 367757 - RNA, 23 nt, Artificial Sequence
  Synthetic
aaugaggagauugagucugauau

SEQ ID NO: 367758 - RNA, 24 nt, Artificial Sequence
  Synthetic
gaaugaggagauugagucugauau

SEQ ID NO: 367759 - RNA, 18 nt, Artificial Sequence
  Synthetic
acugauaaauggugauau

SEQ ID NO: 367760 - RNA, 19 nt, Artificial Sequence
  Synthetic
aacugauaaauggugauau

SEQ ID NO: 367761 - RNA, 20 nt, Artificial Sequence
  Synthetic
uaacugauaaauggugauau

SEQ ID NO: 367762 - RNA, 21 nt, Artificial Sequence
  Synthetic
auaacugauaaauggugauau

SEQ ID NO: 367763 - RNA, 22 nt, Artificial Sequence
  Synthetic
cauaacugauaaauggugauau

SEQ ID NO: 367764 - RNA, 23 nt, Artificial Sequence
  Synthetic
ucauaacugauaaauggugauau

SEQ ID NO: 367765 - RNA, 24 nt, Artificial Sequence
  Synthetic
uucauaacugauaaauggugauau

SEQ ID NO: 367766 - RNA, 18 nt, Artificial Sequence
  Synthetic
cgcuguacuuggugauau

SEQ ID NO: 367767 - RNA, 19 nt, Artificial Sequence
  Synthetic
gcgcuguacuuggugauau

SEQ ID NO: 367768 - RNA, 20 nt, Artificial Sequence
  Synthetic
agcgcuguacuuggugauau

SEQ ID NO: 367769 - RNA, 21 nt, Artificial Sequence
  Synthetic
cagcgcuguacuuggugauau

SEQ ID NO: 367770 - RNA, 22 nt, Artificial Sequence
  Synthetic
ucagcgcuguacuuggugauau

SEQ ID NO: 367771 - RNA, 23 nt, Artificial Sequence
  Synthetic
cucagcgcuguacuuggugauau

SEQ ID NO: 367772 - RNA, 24 nt, Artificial Sequence
  Synthetic
gcucagcgcuguacuuggugauau

SEQ ID NO: 367773 - RNA, 18 nt, Artificial Sequence
  Synthetic
accucuuugaugugauau

SEQ ID NO: 367774 - RNA, 19 nt, Artificial Sequence
  Synthetic
gaccucuuugaugugauau

SEQ ID NO: 367775 - RNA, 20 nt, Artificial Sequence
  Synthetic
agaccucuuugaugugauau

SEQ ID NO: 367776 - RNA, 21 nt, Artificial Sequence
  Synthetic
cagaccucuuugaugugauau

SEQ ID NO: 367777 - RNA, 22 nt, Artificial Sequence
  Synthetic
gcagaccucuuugaugugauau

SEQ ID NO: 367778 - RNA, 23 nt, Artificial Sequence
  Synthetic
ggcagaccucuuugaugugauau

SEQ ID NO: 367779 - RNA, 24 nt, Artificial Sequence
  Synthetic
gggcagaccucuuugaugugauau

SEQ ID NO: 367780 - RNA, 18 nt, Artificial Sequence
  Synthetic
gaaacaucgcauugauau

SEQ ID NO: 367781 - RNA, 19 nt, Artificial Sequence
  Synthetic
ugaaacaucgcauugauau

SEQ ID NO: 367782 - RNA, 20 nt, Artificial Sequence
  Synthetic
augaaacaucgcauugauau

SEQ ID NO: 367783 - RNA, 21 nt, Artificial Sequence
  Synthetic
caugaaacaucgcauugauau

SEQ ID NO: 367784 - RNA, 22 nt, Artificial Sequence
  Synthetic
gcaugaaacaucgcauugauau

SEQ ID NO: 367785 - RNA, 23 nt, Artificial Sequence
  Synthetic
agcaugaaacaucgcauugauau

SEQ ID NO: 367786 - RNA, 24 nt, Artificial Sequence
  Synthetic
aagcaugaaacaucgcauugauau

SEQ ID NO: 367787 - RNA, 18 nt, Artificial Sequence
  Synthetic
guguuugccauuugauau

SEQ ID NO: 367788 - RNA, 19 nt, Artificial Sequence
  Synthetic
uguguuugccauuugauau

SEQ ID NO: 367789 - RNA, 20 nt, Artificial Sequence
  Synthetic
guguguuugccauuugauau

SEQ ID NO: 367790 - RNA, 21 nt, Artificial Sequence
  Synthetic
uguguguuugccauuugauau

SEQ ID NO: 367791 - RNA, 22 nt, Artificial Sequence
  Synthetic
uuguguguuugccauuugauau

SEQ ID NO: 367792 - RNA, 23 nt, Artificial Sequence
  Synthetic
guuguguguuugccauuugauau

SEQ ID NO: 367793 - RNA, 24 nt, Artificial Sequence
  Synthetic
uguuguguguuugccauuugauau

SEQ ID NO: 367794 - RNA, 18 nt, Artificial Sequence
  Synthetic
aaaaaagaaaaaauauau

SEQ ID NO: 367795 - RNA, 19 nt, Artificial Sequence
  Synthetic
aaaaaaagaaaaaauauau

SEQ ID NO: 367796 - RNA, 20 nt, Artificial Sequence
  Synthetic
gaaaaaaagaaaaaauauau

SEQ ID NO: 367797 - RNA, 21 nt, Artificial Sequence
  Synthetic
ugaaaaaaagaaaaaauauau

SEQ ID NO: 367798 - RNA, 22 nt, Artificial Sequence
  Synthetic
uugaaaaaaagaaaaaauauau

SEQ ID NO: 367799 - RNA, 23 nt, Artificial Sequence
  Synthetic
uuugaaaaaaagaaaaaauauau

SEQ ID NO: 367800 - RNA, 24 nt, Artificial Sequence
  Synthetic
auuugaaaaaaagaaaaaauauau

SEQ ID NO: 367801 - RNA, 18 nt, Artificial Sequence
  Synthetic
acaggaauuaaaauauau

SEQ ID NO: 367802 - RNA, 19 nt, Artificial Sequence
  Synthetic
uacaggaauuaaaauauau

SEQ ID NO: 367803 - RNA, 20 nt, Artificial Sequence
  Synthetic
uuacaggaauuaaaauauau

SEQ ID NO: 367804 - RNA, 21 nt, Artificial Sequence
  Synthetic
uuuacaggaauuaaaauauau

SEQ ID NO: 367805 - RNA, 22 nt, Artificial Sequence
  Synthetic
uuuuacaggaauuaaaauauau

SEQ ID NO: 367806 - RNA, 23 nt, Artificial Sequence
  Synthetic
auuuuacaggaauuaaaauauau

SEQ ID NO: 367807 - RNA, 24 nt, Artificial Sequence
  Synthetic
uauuuuacaggaauuaaaauauau

SEQ ID NO: 367808 - RNA, 18 nt, Artificial Sequence
  Synthetic
uucagcacccaaauauau

SEQ ID NO: 367809 - RNA, 19 nt, Artificial Sequence
  Synthetic
cuucagcacccaaauauau

SEQ ID NO: 367810 - RNA, 20 nt, Artificial Sequence
  Synthetic
ucuucagcacccaaauauau

SEQ ID NO: 367811 - RNA, 21 nt, Artificial Sequence
  Synthetic
cucuucagcacccaaauauau

SEQ ID NO: 367812 - RNA, 22 nt, Artificial Sequence
  Synthetic
ucucuucagcacccaaauauau

SEQ ID NO: 367813 - RNA, 23 nt, Artificial Sequence
  Synthetic
aucucuucagcacccaaauauau

SEQ ID NO: 367814 - RNA, 24 nt, Artificial Sequence
  Synthetic
uaucucuucagcacccaaauauau

SEQ ID NO: 367815 - RNA, 18 nt, Artificial Sequence
  Synthetic
uccuacuuucaaauauau

SEQ ID NO: 367816 - RNA, 19 nt, Artificial Sequence
  Synthetic
uuccuacuuucaaauauau

SEQ ID NO: 367817 - RNA, 20 nt, Artificial Sequence
  Synthetic
uuuccuacuuucaaauauau

SEQ ID NO: 367818 - RNA, 21 nt, Artificial Sequence
  Synthetic
uuuuccuacuuucaaauauau

SEQ ID NO: 367819 - RNA, 22 nt, Artificial Sequence
  Synthetic
auuuuccuacuuucaaauauau

SEQ ID NO: 367820 - RNA, 23 nt, Artificial Sequence
  Synthetic
uauuuuccuacuuucaaauauau

SEQ ID NO: 367821 - RNA, 24 nt, Artificial Sequence
  Synthetic
uuauuuuccuacuuucaaauauau

SEQ ID NO: 367822 - RNA, 18 nt, Artificial Sequence
  Synthetic
uuuacauaagaaauauau

SEQ ID NO: 367823 - RNA, 19 nt, Artificial Sequence
  Synthetic
uuuuacauaagaaauauau

SEQ ID NO: 367824 - RNA, 20 nt, Artificial Sequence
  Synthetic
guuuuacauaagaaauauau

SEQ ID NO: 367825 - RNA, 21 nt, Artificial Sequence
  Synthetic
uguuuuacauaagaaauauau

SEQ ID NO: 367826 - RNA, 22 nt, Artificial Sequence
  Synthetic
uuguuuuacauaagaaauauau

SEQ ID NO: 367827 - RNA, 23 nt, Artificial Sequence
  Synthetic
auuguuuuacauaagaaauauau

SEQ ID NO: 367828 - RNA, 24 nt, Artificial Sequence
  Synthetic
aauuguuuuacauaagaaauauau

SEQ ID NO: 367829 - RNA, 18 nt, Artificial Sequence
  Synthetic
gaagcaucagaaauauau

SEQ ID NO: 367830 - RNA, 19 nt, Artificial Sequence
  Synthetic
ggaagcaucagaaauauau

SEQ ID NO: 367831 - RNA, 20 nt, Artificial Sequence
  Synthetic
aggaagcaucagaaauauau

SEQ ID NO: 367832 - RNA, 21 nt, Artificial Sequence
  Synthetic
uaggaagcaucagaaauauau

SEQ ID NO: 367833 - RNA, 22 nt, Artificial Sequence
  Synthetic
uuaggaagcaucagaaauauau

SEQ ID NO: 367834 - RNA, 23 nt, Artificial Sequence
  Synthetic
uuuaggaagcaucagaaauauau

SEQ ID NO: 367835 - RNA, 24 nt, Artificial Sequence
  Synthetic
uuuuaggaagcaucagaaauauau

SEQ ID NO: 367836 - RNA, 18 nt, Artificial Sequence
  Synthetic
guaggaagguaaauauau

SEQ ID NO: 367837 - RNA, 19 nt, Artificial Sequence
  Synthetic
uguaggaagguaaauauau

SEQ ID NO: 367838 - RNA, 20 nt, Artificial Sequence
  Synthetic
cuguaggaagguaaauauau

SEQ ID NO: 367839 - RNA, 21 nt, Artificial Sequence
  Synthetic
acuguaggaagguaaauauau

SEQ ID NO: 367840 - RNA, 22 nt, Artificial Sequence
  Synthetic
aacuguaggaagguaaauauau

SEQ ID NO: 367841 - RNA, 23 nt, Artificial Sequence
  Synthetic
aaacuguaggaagguaaauauau

SEQ ID NO: 367842 - RNA, 24 nt, Artificial Sequence
  Synthetic
caaacuguaggaagguaaauauau

SEQ ID NO: 367843 - RNA, 18 nt, Artificial Sequence
  Synthetic
uuaucugacacaauauau

SEQ ID NO: 367844 - RNA, 19 nt, Artificial Sequence
  Synthetic
auuaucugacacaauauau

SEQ ID NO: 367845 - RNA, 20 nt, Artificial Sequence
  Synthetic
gauuaucugacacaauauau

SEQ ID NO: 367846 - RNA, 21 nt, Artificial Sequence
  Synthetic
ggauuaucugacacaauauau

SEQ ID NO: 367847 - RNA, 22 nt, Artificial Sequence
  Synthetic
aggauuaucugacacaauauau

SEQ ID NO: 367848 - RNA, 23 nt, Artificial Sequence
  Synthetic
gaggauuaucugacacaauauau

SEQ ID NO: 367849 - RNA, 24 nt, Artificial Sequence
  Synthetic
ugaggauuaucugacacaauauau

SEQ ID NO: 367850 - RNA, 18 nt, Artificial Sequence
  Synthetic
aauuaaugcacaauauau

SEQ ID NO: 367851 - RNA, 19 nt, Artificial Sequence
  Synthetic
aaauuaaugcacaauauau

SEQ ID NO: 367852 - RNA, 20 nt, Artificial Sequence
  Synthetic
uaaauuaaugcacaauauau

SEQ ID NO: 367853 - RNA, 21 nt, Artificial Sequence
  Synthetic
uuaaauuaaugcacaauauau

SEQ ID NO: 367854 - RNA, 22 nt, Artificial Sequence
  Synthetic
uuuaaauuaaugcacaauauau

SEQ ID NO: 367855 - RNA, 23 nt, Artificial Sequence
  Synthetic
uuuuaaauuaaugcacaauauau

SEQ ID NO: 367856 - RNA, 24 nt, Artificial Sequence
  Synthetic
uuuuuaaauuaaugcacaauauau

SEQ ID NO: 367857 - RNA, 18 nt, Artificial Sequence
  Synthetic
uuaguacaaugaauauau

SEQ ID NO: 367858 - RNA, 19 nt, Artificial Sequence
  Synthetic
uuuaguacaaugaauauau

SEQ ID NO: 367859 - RNA, 20 nt, Artificial Sequence
  Synthetic
uuuuaguacaaugaauauau

SEQ ID NO: 367860 - RNA, 21 nt, Artificial Sequence
  Synthetic
cuuuuaguacaaugaauauau

SEQ ID NO: 367861 - RNA, 22 nt, Artificial Sequence
  Synthetic
ucuuuuaguacaaugaauauau

SEQ ID NO: 367862 - RNA, 23 nt, Artificial Sequence
  Synthetic
uucuuuuaguacaaugaauauau

SEQ ID NO: 367863 - RNA, 24 nt, Artificial Sequence
  Synthetic
uuucuuuuaguacaaugaauauau

SEQ ID NO: 367864 - RNA, 18 nt, Artificial Sequence
  Synthetic
cacugggccuuaauauau

SEQ ID NO: 367865 - RNA, 19 nt, Artificial Sequence
  Synthetic
ccacugggccuuaauauau

SEQ ID NO: 367866 - RNA, 20 nt, Artificial Sequence
  Synthetic
uccacugggccuuaauauau

SEQ ID NO: 367867 - RNA, 21 nt, Artificial Sequence
  Synthetic
uuccacugggccuuaauauau

SEQ ID NO: 367868 - RNA, 22 nt, Artificial Sequence
  Synthetic
uuuccacugggccuuaauauau

SEQ ID NO: 367869 - RNA, 23 nt, Artificial Sequence
  Synthetic
uuuuccacugggccuuaauauau

SEQ ID NO: 367870 - RNA, 24 nt, Artificial Sequence
  Synthetic
auuuuccacugggccuuaauauau

SEQ ID NO: 367871 - RNA, 18 nt, Artificial Sequence
  Synthetic
acacacacacacauauau

SEQ ID NO: 367872 - RNA, 19 nt, Artificial Sequence
  Synthetic
cacacacacacacauauau

SEQ ID NO: 367873 - RNA, 20 nt, Artificial Sequence
  Synthetic
acacacacacacacauauau

SEQ ID NO: 367874 - RNA, 21 nt, Artificial Sequence
  Synthetic
cacacacacacacacauauau

SEQ ID NO: 367875 - RNA, 22 nt, Artificial Sequence
  Synthetic
acacacacacacacacauauau

SEQ ID NO: 367876 - RNA, 23 nt, Artificial Sequence
  Synthetic
cacacacacacacacacauauau

SEQ ID NO: 367877 - RNA, 24 nt, Artificial Sequence
  Synthetic
acacacacacacacacacauauau

SEQ ID NO: 367878 - RNA, 18 nt, Artificial Sequence
  Synthetic
cacaguguauacauauau

SEQ ID NO: 367879 - RNA, 19 nt, Artificial Sequence
  Synthetic
ccacaguguauacauauau

SEQ ID NO: 367880 - RNA, 20 nt, Artificial Sequence
  Synthetic
uccacaguguauacauauau

SEQ ID NO: 367881 - RNA, 21 nt, Artificial Sequence
  Synthetic
uuccacaguguauacauauau

SEQ ID NO: 367882 - RNA, 22 nt, Artificial Sequence
  Synthetic
auuccacaguguauacauauau

SEQ ID NO: 367883 - RNA, 23 nt, Artificial Sequence
  Synthetic
cauuccacaguguauacauauau

SEQ ID NO: 367884 - RNA, 24 nt, Artificial Sequence
  Synthetic
ucauuccacaguguauacauauau

SEQ ID NO: 367885 - RNA, 18 nt, Artificial Sequence
  Synthetic
uuggggcuuaccauauau

SEQ ID NO: 367886 - RNA, 19 nt, Artificial Sequence
  Synthetic
uuuggggcuuaccauauau

SEQ ID NO: 367887 - RNA, 20 nt, Artificial Sequence
  Synthetic
cuuuggggcuuaccauauau

SEQ ID NO: 367888 - RNA, 21 nt, Artificial Sequence
  Synthetic
gcuuuggggcuuaccauauau

SEQ ID NO: 367889 - RNA, 22 nt, Artificial Sequence
  Synthetic
ugcuuuggggcuuaccauauau

SEQ ID NO: 367890 - RNA, 23 nt, Artificial Sequence
  Synthetic
augcuuuggggcuuaccauauau

SEQ ID NO: 367891 - RNA, 24 nt, Artificial Sequence
  Synthetic
aaugcuuuggggcuuaccauauau

SEQ ID NO: 367892 - RNA, 18 nt, Artificial Sequence
  Synthetic
ucaagcuuuagcauauau

SEQ ID NO: 367893 - RNA, 19 nt, Artificial Sequence
  Synthetic
cucaagcuuuagcauauau

SEQ ID NO: 367894 - RNA, 20 nt, Artificial Sequence
  Synthetic
ucucaagcuuuagcauauau

SEQ ID NO: 367895 - RNA, 21 nt, Artificial Sequence
  Synthetic
uucucaagcuuuagcauauau

SEQ ID NO: 367896 - RNA, 22 nt, Artificial Sequence
  Synthetic
auucucaagcuuuagcauauau

SEQ ID NO: 367897 - RNA, 23 nt, Artificial Sequence
  Synthetic
gauucucaagcuuuagcauauau

SEQ ID NO: 367898 - RNA, 24 nt, Artificial Sequence
  Synthetic
ugauucucaagcuuuagcauauau

SEQ ID NO: 367899 - RNA, 18 nt, Artificial Sequence
  Synthetic
uagguaggggucauauau

SEQ ID NO: 367900 - RNA, 19 nt, Artificial Sequence
  Synthetic
guagguaggggucauauau

SEQ ID NO: 367901 - RNA, 20 nt, Artificial Sequence
  Synthetic
uguagguaggggucauauau

SEQ ID NO: 367902 - RNA, 21 nt, Artificial Sequence
  Synthetic
auguagguaggggucauauau

SEQ ID NO: 367903 - RNA, 22 nt, Artificial Sequence
  Synthetic
uauguagguaggggucauauau

SEQ ID NO: 367904 - RNA, 23 nt, Artificial Sequence
  Synthetic
auauguagguaggggucauauau

SEQ ID NO: 367905 - RNA, 24 nt, Artificial Sequence
  Synthetic
aauauguagguaggggucauauau

SEQ ID NO: 367906 - RNA, 18 nt, Artificial Sequence
  Synthetic
auuugaucgaagauauau

SEQ ID NO: 367907 - RNA, 19 nt, Artificial Sequence
  Synthetic
uauuugaucgaagauauau

SEQ ID NO: 367908 - RNA, 20 nt, Artificial Sequence
  Synthetic
uuauuugaucgaagauauau

SEQ ID NO: 367909 - RNA, 21 nt, Artificial Sequence
  Synthetic
auuauuugaucgaagauauau

SEQ ID NO: 367910 - RNA, 22 nt, Artificial Sequence
  Synthetic
aauuauuugaucgaagauauau

SEQ ID NO: 367911 - RNA, 23 nt, Artificial Sequence
  Synthetic
uaauuauuugaucgaagauauau

SEQ ID NO: 367912 - RNA, 24 nt, Artificial Sequence
  Synthetic
auaauuauuugaucgaagauauau

SEQ ID NO: 367913 - RNA, 18 nt, Artificial Sequence
  Synthetic
ucuagauuuacgauauau

SEQ ID NO: 367914 - RNA, 19 nt, Artificial Sequence
  Synthetic
uucuagauuuacgauauau

SEQ ID NO: 367915 - RNA, 20 nt, Artificial Sequence
  Synthetic
uuucuagauuuacgauauau

SEQ ID NO: 367916 - RNA, 21 nt, Artificial Sequence
  Synthetic
auuucuagauuuacgauauau

SEQ ID NO: 367917 - RNA, 22 nt, Artificial Sequence
  Synthetic
cauuucuagauuuacgauauau

SEQ ID NO: 367918 - RNA, 23 nt, Artificial Sequence
  Synthetic
acauuucuagauuuacgauauau

SEQ ID NO: 367919 - RNA, 24 nt, Artificial Sequence
  Synthetic
cacauuucuagauuuacgauauau

SEQ ID NO: 367920 - RNA, 18 nt, Artificial Sequence
  Synthetic
augugauugcugauauau

SEQ ID NO: 367921 - RNA, 19 nt, Artificial Sequence
  Synthetic
uaugugauugcugauauau

SEQ ID NO: 367922 - RNA, 20 nt, Artificial Sequence
  Synthetic
uuaugugauugcugauauau

SEQ ID NO: 367923 - RNA, 21 nt, Artificial Sequence
  Synthetic
auuaugugauugcugauauau

SEQ ID NO: 367924 - RNA, 22 nt, Artificial Sequence
  Synthetic
aauuaugugauugcugauauau

SEQ ID NO: 367925 - RNA, 23 nt, Artificial Sequence
  Synthetic
caauuaugugauugcugauauau

SEQ ID NO: 367926 - RNA, 24 nt, Artificial Sequence
  Synthetic
acaauuaugugauugcugauauau

SEQ ID NO: 367927 - RNA, 18 nt, Artificial Sequence
  Synthetic
uauauuucacauauauau

SEQ ID NO: 367928 - RNA, 19 nt, Artificial Sequence
  Synthetic
auauauuucacauauauau

SEQ ID NO: 367929 - RNA, 20 nt, Artificial Sequence
  Synthetic
uauauauuucacauauauau

SEQ ID NO: 367930 - RNA, 21 nt, Artificial Sequence
  Synthetic
auauauauuucacauauauau

SEQ ID NO: 367931 - RNA, 22 nt, Artificial Sequence
  Synthetic
uauauauauuucacauauauau

SEQ ID NO: 367932 - RNA, 23 nt, Artificial Sequence
  Synthetic
guauauauauuucacauauauau

SEQ ID NO: 367933 - RNA, 24 nt, Artificial Sequence
  Synthetic
uguauauauauuucacauauauau

SEQ ID NO: 367934 - RNA, 18 nt, Artificial Sequence
  Synthetic
uacuauaaauauauauau

SEQ ID NO: 367935 - RNA, 19 nt, Artificial Sequence
  Synthetic
auacuauaaauauauauau

SEQ ID NO: 367936 - RNA, 20 nt, Artificial Sequence
  Synthetic
cauacuauaaauauauauau

SEQ ID NO: 367937 - RNA, 21 nt, Artificial Sequence
  Synthetic
ccauacuauaaauauauauau

SEQ ID NO: 367938 - RNA, 22 nt, Artificial Sequence
  Synthetic
accauacuauaaauauauauau

SEQ ID NO: 367939 - RNA, 23 nt, Artificial Sequence
  Synthetic
uaccauacuauaaauauauauau

SEQ ID NO: 367940 - RNA, 24 nt, Artificial Sequence
  Synthetic
auaccauacuauaaauauauauau

SEQ ID NO: 367941 - RNA, 18 nt, Artificial Sequence
  Synthetic
auaaacucauauauauau

SEQ ID NO: 367942 - RNA, 19 nt, Artificial Sequence
  Synthetic
uauaaacucauauauauau

SEQ ID NO: 367943 - RNA, 20 nt, Artificial Sequence
  Synthetic
auauaaacucauauauauau

SEQ ID NO: 367944 - RNA, 21 nt, Artificial Sequence
  Synthetic
uauauaaacucauauauauau

SEQ ID NO: 367945 - RNA, 22 nt, Artificial Sequence
  Synthetic
auauauaaacucauauauauau

SEQ ID NO: 367946 - RNA, 23 nt, Artificial Sequence
  Synthetic
uauauauaaacucauauauauau

SEQ ID NO: 367947 - RNA, 24 nt, Artificial Sequence
  Synthetic
uuauauauaaacucauauauauau

SEQ ID NO: 367948 - RNA, 18 nt, Artificial Sequence
  Synthetic
ggguacauauauauauau

SEQ ID NO: 367949 - RNA, 19 nt, Artificial Sequence
  Synthetic
gggguacauauauauauau

SEQ ID NO: 367950 - RNA, 20 nt, Artificial Sequence
  Synthetic
ugggguacauauauauauau

SEQ ID NO: 367951 - RNA, 21 nt, Artificial Sequence
  Synthetic
gugggguacauauauauauau

SEQ ID NO: 367952 - RNA, 22 nt, Artificial Sequence
  Synthetic
ugugggguacauauauauauau

SEQ ID NO: 367953 - RNA, 23 nt, Artificial Sequence
  Synthetic
augugggguacauauauauauau

SEQ ID NO: 367954 - RNA, 24 nt, Artificial Sequence
  Synthetic
uaugugggguacauauauauauau

SEQ ID NO: 367955 - RNA, 18 nt, Artificial Sequence
  Synthetic
acauauauauauauauau

SEQ ID NO: 367956 - RNA, 19 nt, Artificial Sequence
  Synthetic
uacauauauauauauauau

SEQ ID NO: 367957 - RNA, 20 nt, Artificial Sequence
  Synthetic
auacauauauauauauauau

SEQ ID NO: 367958 - RNA, 21 nt, Artificial Sequence
  Synthetic
uauacauauauauauauauau

SEQ ID NO: 367959 - RNA, 22 nt, Artificial Sequence
  Synthetic
auauacauauauauauauauau

SEQ ID NO: 367960 - RNA, 23 nt, Artificial Sequence
  Synthetic
uauauacauauauauauauauau

SEQ ID NO: 367961 - RNA, 24 nt, Artificial Sequence
  Synthetic
auauauacauauauauauauauau

SEQ ID NO: 367962 - RNA, 18 nt, Artificial Sequence
  Synthetic
auauauauauauauauau

SEQ ID NO: 367963 - RNA, 19 nt, Artificial Sequence
  Synthetic
uauauauauauauauauau

SEQ ID NO: 367964 - RNA, 20 nt, Artificial Sequence
  Synthetic
auauauauauauauauauau

SEQ ID NO: 367965 - RNA, 18 nt, Artificial Sequence
  Synthetic
ugugggguauauauauau

SEQ ID NO: 367966 - RNA, 19 nt, Artificial Sequence
  Synthetic
augugggguauauauauau

SEQ ID NO: 367967 - RNA, 20 nt, Artificial Sequence
  Synthetic
uaugugggguauauauauau

SEQ ID NO: 367968 - RNA, 21 nt, Artificial Sequence
  Synthetic
auaugugggguauauauauau

SEQ ID NO: 367969 - RNA, 22 nt, Artificial Sequence
  Synthetic
uauaugugggguauauauauau

SEQ ID NO: 367970 - RNA, 23 nt, Artificial Sequence
  Synthetic
auauaugugggguauauauauau

SEQ ID NO: 367971 - RNA, 24 nt, Artificial Sequence
  Synthetic
uauauaugugggguauauauauau

SEQ ID NO: 367972 - RNA, 18 nt, Artificial Sequence
  Synthetic
guguguguauauauauau

SEQ ID NO: 367973 - RNA, 19 nt, Artificial Sequence
  Synthetic
uguguguguauauauauau

SEQ ID NO: 367974 - RNA, 20 nt, Artificial Sequence
  Synthetic
guguguguguauauauauau

SEQ ID NO: 367975 - RNA, 21 nt, Artificial Sequence
  Synthetic
uguguguguguauauauauau

SEQ ID NO: 367976 - RNA, 22 nt, Artificial Sequence
  Synthetic
auguguguguguauauauauau

SEQ ID NO: 367977 - RNA, 23 nt, Artificial Sequence
  Synthetic
uauguguguguguauauauauau

SEQ ID NO: 367978 - RNA, 24 nt, Artificial Sequence
  Synthetic
auauguguguguguauauauauau

SEQ ID NO: 367979 - RNA, 18 nt, Artificial Sequence
  Synthetic
ucaaauugguauauauau

SEQ ID NO: 367980 - RNA, 19 nt, Artificial Sequence
  Synthetic
aucaaauugguauauauau

SEQ ID NO: 367981 - RNA, 20 nt, Artificial Sequence
  Synthetic
uaucaaauugguauauauau

SEQ ID NO: 367982 - RNA, 21 nt, Artificial Sequence
  Synthetic
cuaucaaauugguauauauau

SEQ ID NO: 367983 - RNA, 22 nt, Artificial Sequence
  Synthetic
acuaucaaauugguauauauau

SEQ ID NO: 367984 - RNA, 23 nt, Artificial Sequence
  Synthetic
aacuaucaaauugguauauauau

SEQ ID NO: 367985 - RNA, 24 nt, Artificial Sequence
  Synthetic
aaacuaucaaauugguauauauau

SEQ ID NO: 367986 - RNA, 18 nt, Artificial Sequence
  Synthetic
gaaaaagaaccuauauau

SEQ ID NO: 367987 - RNA, 19 nt, Artificial Sequence
  Synthetic
ugaaaaagaaccuauauau

SEQ ID NO: 367988 - RNA, 20 nt, Artificial Sequence
  Synthetic
gugaaaaagaaccuauauau

SEQ ID NO: 367989 - RNA, 21 nt, Artificial Sequence
  Synthetic
ggugaaaaagaaccuauauau

SEQ ID NO: 367990 - RNA, 22 nt, Artificial Sequence
  Synthetic
aggugaaaaagaaccuauauau

SEQ ID NO: 367991 - RNA, 23 nt, Artificial Sequence
  Synthetic
aaggugaaaaagaaccuauauau

SEQ ID NO: 367992 - RNA, 24 nt, Artificial Sequence
  Synthetic
uaaggugaaaaagaaccuauauau

SEQ ID NO: 367993 - RNA, 18 nt, Artificial Sequence
  Synthetic
gagauauucaguauauau

SEQ ID NO: 367994 - RNA, 19 nt, Artificial Sequence
  Synthetic
agagauauucaguauauau

SEQ ID NO: 367995 - RNA, 20 nt, Artificial Sequence
  Synthetic
aagagauauucaguauauau

SEQ ID NO: 367996 - RNA, 21 nt, Artificial Sequence
  Synthetic
aaagagauauucaguauauau

SEQ ID NO: 367997 - RNA, 22 nt, Artificial Sequence
  Synthetic
gaaagagauauucaguauauau

SEQ ID NO: 367998 - RNA, 23 nt, Artificial Sequence
  Synthetic
agaaagagauauucaguauauau

SEQ ID NO: 367999 - RNA, 24 nt, Artificial Sequence
  Synthetic
gagaaagagauauucaguauauau

SEQ ID NO: 368000 - RNA, 18 nt, Artificial Sequence
  Synthetic
gauuuuauauguauauau

SEQ ID NO: 368001 - RNA, 19 nt, Artificial Sequence
  Synthetic
agauuuuauauguauauau

SEQ ID NO: 368002 - RNA, 20 nt, Artificial Sequence
  Synthetic
gagauuuuauauguauauau

SEQ ID NO: 368003 - RNA, 21 nt, Artificial Sequence
  Synthetic
agagauuuuauauguauauau

SEQ ID NO: 368004 - RNA, 22 nt, Artificial Sequence
  Synthetic
aagagauuuuauauguauauau

SEQ ID NO: 368005 - RNA, 23 nt, Artificial Sequence
  Synthetic
uaagagauuuuauauguauauau

SEQ ID NO: 368006 - RNA, 24 nt, Artificial Sequence
  Synthetic
auaagagauuuuauauguauauau

SEQ ID NO: 368007 - RNA, 18 nt, Artificial Sequence
  Synthetic
cauacauaguguauauau

SEQ ID NO: 368008 - RNA, 19 nt, Artificial Sequence
  Synthetic
acauacauaguguauauau

SEQ ID NO: 368009 - RNA, 20 nt, Artificial Sequence
  Synthetic
cacauacauaguguauauau

SEQ ID NO: 368010 - RNA, 21 nt, Artificial Sequence
  Synthetic
acacauacauaguguauauau

SEQ ID NO: 368011 - RNA, 22 nt, Artificial Sequence
  Synthetic
cacacauacauaguguauauau

SEQ ID NO: 368012 - RNA, 23 nt, Artificial Sequence
  Synthetic
acacacauacauaguguauauau

SEQ ID NO: 368013 - RNA, 24 nt, Artificial Sequence
  Synthetic
uacacacauacauaguguauauau

SEQ ID NO: 368014 - RNA, 18 nt, Artificial Sequence
  Synthetic
auauauauguguauauau

SEQ ID NO: 368015 - RNA, 19 nt, Artificial Sequence
  Synthetic
cauauauauguguauauau

SEQ ID NO: 368016 - RNA, 20 nt, Artificial Sequence
  Synthetic
acauauauauguguauauau

SEQ ID NO: 368017 - RNA, 21 nt, Artificial Sequence
  Synthetic
cacauauauauguguauauau

SEQ ID NO: 368018 - RNA, 22 nt, Artificial Sequence
  Synthetic
acacauauauauguguauauau

SEQ ID NO: 368019 - RNA, 23 nt, Artificial Sequence
  Synthetic
uacacauauauauguguauauau

SEQ ID NO: 368020 - RNA, 24 nt, Artificial Sequence
  Synthetic
uuacacauauauauguguauauau

SEQ ID NO: 368021 - RNA, 18 nt, Artificial Sequence
  Synthetic
gggaaaaucauuauauau

SEQ ID NO: 368022 - RNA, 19 nt, Artificial Sequence
  Synthetic
agggaaaaucauuauauau

SEQ ID NO: 368023 - RNA, 20 nt, Artificial Sequence
  Synthetic
gagggaaaaucauuauauau

SEQ ID NO: 368024 - RNA, 21 nt, Artificial Sequence
  Synthetic
ugagggaaaaucauuauauau

SEQ ID NO: 368025 - RNA, 22 nt, Artificial Sequence
  Synthetic
augagggaaaaucauuauauau

SEQ ID NO: 368026 - RNA, 23 nt, Artificial Sequence
  Synthetic
aaugagggaaaaucauuauauau

SEQ ID NO: 368027 - RNA, 24 nt, Artificial Sequence
  Synthetic
aaaugagggaaaaucauuauauau

SEQ ID NO: 368028 - RNA, 18 nt, Artificial Sequence
  Synthetic
uagugcucccuuauauau

SEQ ID NO: 368029 - RNA, 19 nt, Artificial Sequence
  Synthetic
cuagugcucccuuauauau

SEQ ID NO: 368030 - RNA, 20 nt, Artificial Sequence
  Synthetic
gcuagugcucccuuauauau

SEQ ID NO: 368031 - RNA, 21 nt, Artificial Sequence
  Synthetic
ggcuagugcucccuuauauau

SEQ ID NO: 368032 - RNA, 22 nt, Artificial Sequence
  Synthetic
aggcuagugcucccuuauauau

SEQ ID NO: 368033 - RNA, 23 nt, Artificial Sequence
  Synthetic
gaggcuagugcucccuuauauau

SEQ ID NO: 368034 - RNA, 24 nt, Artificial Sequence
  Synthetic
agaggcuagugcucccuuauauau

SEQ ID NO: 368035 - RNA, 18 nt, Artificial Sequence
  Synthetic
ucucucuugcuuauauau

SEQ ID NO: 368036 - RNA, 19 nt, Artificial Sequence
  Synthetic
gucucucuugcuuauauau

SEQ ID NO: 368037 - RNA, 20 nt, Artificial Sequence
  Synthetic
agucucucuugcuuauauau

SEQ ID NO: 368038 - RNA, 21 nt, Artificial Sequence
  Synthetic
cagucucucuugcuuauauau

SEQ ID NO: 368039 - RNA, 22 nt, Artificial Sequence
  Synthetic
gcagucucucuugcuuauauau

SEQ ID NO: 368040 - RNA, 23 nt, Artificial Sequence
  Synthetic
ggcagucucucuugcuuauauau

SEQ ID NO: 368041 - RNA, 24 nt, Artificial Sequence
  Synthetic
aggcagucucucuugcuuauauau

SEQ ID NO: 368042 - RNA, 18 nt, Artificial Sequence
  Synthetic
aggaaagaaguuauauau

SEQ ID NO: 368043 - RNA, 19 nt, Artificial Sequence
  Synthetic
gaggaaagaaguuauauau

SEQ ID NO: 368044 - RNA, 20 nt, Artificial Sequence
  Synthetic
agaggaaagaaguuauauau

SEQ ID NO: 368045 - RNA, 21 nt, Artificial Sequence
  Synthetic
aagaggaaagaaguuauauau

SEQ ID NO: 368046 - RNA, 22 nt, Artificial Sequence
  Synthetic
aaagaggaaagaaguuauauau

SEQ ID NO: 368047 - RNA, 23 nt, Artificial Sequence
  Synthetic
gaaagaggaaagaaguuauauau

SEQ ID NO: 368048 - RNA, 24 nt, Artificial Sequence
  Synthetic
agaaagaggaaagaaguuauauau

SEQ ID NO: 368049 - RNA, 18 nt, Artificial Sequence
  Synthetic
caaauauccaaacuauau

SEQ ID NO: 368050 - RNA, 19 nt, Artificial Sequence
  Synthetic
gcaaauauccaaacuauau

SEQ ID NO: 368051 - RNA, 20 nt, Artificial Sequence
  Synthetic
ggcaaauauccaaacuauau

SEQ ID NO: 368052 - RNA, 21 nt, Artificial Sequence
  Synthetic
cggcaaauauccaaacuauau

SEQ ID NO: 368053 - RNA, 22 nt, Artificial Sequence
  Synthetic
gcggcaaauauccaaacuauau

SEQ ID NO: 368054 - RNA, 23 nt, Artificial Sequence
  Synthetic
ggcggcaaauauccaaacuauau

SEQ ID NO: 368055 - RNA, 24 nt, Artificial Sequence
  Synthetic
uggcggcaaauauccaaacuauau

SEQ ID NO: 368056 - RNA, 18 nt, Artificial Sequence
  Synthetic
uugugcuaccaacuauau

SEQ ID NO: 368057 - RNA, 19 nt, Artificial Sequence
  Synthetic
guugugcuaccaacuauau

SEQ ID NO: 368058 - RNA, 20 nt, Artificial Sequence
  Synthetic
aguugugcuaccaacuauau

SEQ ID NO: 368059 - RNA, 21 nt, Artificial Sequence
  Synthetic
caguugugcuaccaacuauau

SEQ ID NO: 368060 - RNA, 22 nt, Artificial Sequence
  Synthetic
ucaguugugcuaccaacuauau

SEQ ID NO: 368061 - RNA, 23 nt, Artificial Sequence
  Synthetic
cucaguugugcuaccaacuauau

SEQ ID NO: 368062 - RNA, 24 nt, Artificial Sequence
  Synthetic
ucucaguugugcuaccaacuauau

SEQ ID NO: 368063 - RNA, 18 nt, Artificial Sequence
  Synthetic
gaacuugugugacuauau

SEQ ID NO: 368064 - RNA, 19 nt, Artificial Sequence
  Synthetic
ggaacuugugugacuauau

SEQ ID NO: 368065 - RNA, 20 nt, Artificial Sequence
  Synthetic
aggaacuugugugacuauau

SEQ ID NO: 368066 - RNA, 21 nt, Artificial Sequence
  Synthetic
uaggaacuugugugacuauau

SEQ ID NO: 368067 - RNA, 22 nt, Artificial Sequence
  Synthetic
auaggaacuugugugacuauau

SEQ ID NO: 368068 - RNA, 23 nt, Artificial Sequence
  Synthetic
aauaggaacuugugugacuauau

SEQ ID NO: 368069 - RNA, 24 nt, Artificial Sequence
  Synthetic
gaauaggaacuugugugacuauau

SEQ ID NO: 368070 - RNA, 18 nt, Artificial Sequence
  Synthetic
uuaaauaaaauacuauau

SEQ ID NO: 368071 - RNA, 19 nt, Artificial Sequence
  Synthetic
auuaaauaaaauacuauau

SEQ ID NO: 368072 - RNA, 20 nt, Artificial Sequence
  Synthetic
aauuaaauaaaauacuauau

SEQ ID NO: 368073 - RNA, 21 nt, Artificial Sequence
  Synthetic
aaauuaaauaaaauacuauau

SEQ ID NO: 368074 - RNA, 22 nt, Artificial Sequence
  Synthetic
aaaauuaaauaaaauacuauau

SEQ ID NO: 368075 - RNA, 23 nt, Artificial Sequence
  Synthetic
caaaauuaaauaaaauacuauau

SEQ ID NO: 368076 - RNA, 24 nt, Artificial Sequence
  Synthetic
ucaaaauuaaauaaaauacuauau

SEQ ID NO: 368077 - RNA, 18 nt, Artificial Sequence
  Synthetic
cugauucuaucccuauau

SEQ ID NO: 368078 - RNA, 19 nt, Artificial Sequence
  Synthetic
ccugauucuaucccuauau

SEQ ID NO: 368079 - RNA, 20 nt, Artificial Sequence
  Synthetic
gccugauucuaucccuauau

SEQ ID NO: 368080 - RNA, 21 nt, Artificial Sequence
  Synthetic
agccugauucuaucccuauau

SEQ ID NO: 368081 - RNA, 22 nt, Artificial Sequence
  Synthetic
gagccugauucuaucccuauau

SEQ ID NO: 368082 - RNA, 23 nt, Artificial Sequence
  Synthetic
ugagccugauucuaucccuauau

SEQ ID NO: 368083 - RNA, 24 nt, Artificial Sequence
  Synthetic
cugagccugauucuaucccuauau

SEQ ID NO: 368084 - RNA, 18 nt, Artificial Sequence
  Synthetic
cuuucuaugagucuauau

SEQ ID NO: 368085 - RNA, 19 nt, Artificial Sequence
  Synthetic
ucuuucuaugagucuauau

SEQ ID NO: 368086 - RNA, 20 nt, Artificial Sequence
  Synthetic
cucuuucuaugagucuauau

SEQ ID NO: 368087 - RNA, 21 nt, Artificial Sequence
  Synthetic
acucuuucuaugagucuauau

SEQ ID NO: 368088 - RNA, 22 nt, Artificial Sequence
  Synthetic
aacucuuucuaugagucuauau

SEQ ID NO: 368089 - RNA, 23 nt, Artificial Sequence
  Synthetic
uaacucuuucuaugagucuauau

SEQ ID NO: 368090 - RNA, 24 nt, Artificial Sequence
  Synthetic
uuaacucuuucuaugagucuauau

SEQ ID NO: 368091 - RNA, 18 nt, Artificial Sequence
  Synthetic
gcacuauuacuucuauau

SEQ ID NO: 368092 - RNA, 19 nt, Artificial Sequence
  Synthetic
ggcacuauuacuucuauau

SEQ ID NO: 368093 - RNA, 20 nt, Artificial Sequence
  Synthetic
uggcacuauuacuucuauau

SEQ ID NO: 368094 - RNA, 21 nt, Artificial Sequence
  Synthetic
auggcacuauuacuucuauau

SEQ ID NO: 368095 - RNA, 22 nt, Artificial Sequence
  Synthetic
gauggcacuauuacuucuauau

SEQ ID NO: 368096 - RNA, 23 nt, Artificial Sequence
  Synthetic
agauggcacuauuacuucuauau

SEQ ID NO: 368097 - RNA, 24 nt, Artificial Sequence
  Synthetic
uagauggcacuauuacuucuauau

SEQ ID NO: 368098 - RNA, 18 nt, Artificial Sequence
  Synthetic
caauccguuuuucuauau

SEQ ID NO: 368099 - RNA, 19 nt, Artificial Sequence
  Synthetic
ucaauccguuuuucuauau

SEQ ID NO: 368100 - RNA, 20 nt, Artificial Sequence
  Synthetic
gucaauccguuuuucuauau

SEQ ID NO: 368101 - RNA, 21 nt, Artificial Sequence
  Synthetic
ugucaauccguuuuucuauau

SEQ ID NO: 368102 - RNA, 22 nt, Artificial Sequence
  Synthetic
cugucaauccguuuuucuauau

SEQ ID NO: 368103 - RNA, 23 nt, Artificial Sequence
  Synthetic
acugucaauccguuuuucuauau

SEQ ID NO: 368104 - RNA, 24 nt, Artificial Sequence
  Synthetic
gacugucaauccguuuuucuauau

SEQ ID NO: 368105 - RNA, 18 nt, Artificial Sequence
  Synthetic
agauguuuuaaaguauau

SEQ ID NO: 368106 - RNA, 19 nt, Artificial Sequence
  Synthetic
gagauguuuuaaaguauau

SEQ ID NO: 368107 - RNA, 20 nt, Artificial Sequence
  Synthetic
agagauguuuuaaaguauau

SEQ ID NO: 368108 - RNA, 21 nt, Artificial Sequence
  Synthetic
uagagauguuuuaaaguauau

SEQ ID NO: 368109 - RNA, 22 nt, Artificial Sequence
  Synthetic
cuagagauguuuuaaaguauau

SEQ ID NO: 368110 - RNA, 23 nt, Artificial Sequence
  Synthetic
ucuagagauguuuuaaaguauau

SEQ ID NO: 368111 - RNA, 24 nt, Artificial Sequence
  Synthetic
aucuagagauguuuuaaaguauau

SEQ ID NO: 368112 - RNA, 18 nt, Artificial Sequence
  Synthetic
aacuauucauaaguauau

SEQ ID NO: 368113 - RNA, 19 nt, Artificial Sequence
  Synthetic
aaacuauucauaaguauau

SEQ ID NO: 368114 - RNA, 20 nt, Artificial Sequence
  Synthetic
uaaacuauucauaaguauau

SEQ ID NO: 368115 - RNA, 21 nt, Artificial Sequence
  Synthetic
auaaacuauucauaaguauau

SEQ ID NO: 368116 - RNA, 22 nt, Artificial Sequence
  Synthetic
aauaaacuauucauaaguauau

SEQ ID NO: 368117 - RNA, 23 nt, Artificial Sequence
  Synthetic
uaauaaacuauucauaaguauau

SEQ ID NO: 368118 - RNA, 24 nt, Artificial Sequence
  Synthetic
guaauaaacuauucauaaguauau

SEQ ID NO: 368119 - RNA, 18 nt, Artificial Sequence
  Synthetic
aaaaaaaaguaaguauau

SEQ ID NO: 368120 - RNA, 19 nt, Artificial Sequence
  Synthetic
aaaaaaaaaguaaguauau

SEQ ID NO: 368121 - RNA, 20 nt, Artificial Sequence
  Synthetic
gaaaaaaaaaguaaguauau

SEQ ID NO: 368122 - RNA, 21 nt, Artificial Sequence
  Synthetic
ggaaaaaaaaaguaaguauau

SEQ ID NO: 368123 - RNA, 22 nt, Artificial Sequence
  Synthetic
aggaaaaaaaaaguaaguauau

SEQ ID NO: 368124 - RNA, 23 nt, Artificial Sequence
  Synthetic
gaggaaaaaaaaaguaaguauau

SEQ ID NO: 368125 - RNA, 24 nt, Artificial Sequence
  Synthetic
ugaggaaaaaaaaaguaaguauau

SEQ ID NO: 368126 - RNA, 18 nt, Artificial Sequence
  Synthetic
ggugauaguacaguauau

SEQ ID NO: 368127 - RNA, 19 nt, Artificial Sequence
  Synthetic
uggugauaguacaguauau

SEQ ID NO: 368128 - RNA, 20 nt, Artificial Sequence
  Synthetic
guggugauaguacaguauau

SEQ ID NO: 368129 - RNA, 21 nt, Artificial Sequence
  Synthetic
aguggugauaguacaguauau

SEQ ID NO: 368130 - RNA, 22 nt, Artificial Sequence
  Synthetic
uaguggugauaguacaguauau

SEQ ID NO: 368131 - RNA, 23 nt, Artificial Sequence
  Synthetic
guaguggugauaguacaguauau

SEQ ID NO: 368132 - RNA, 24 nt, Artificial Sequence
  Synthetic
aguaguggugauaguacaguauau

SEQ ID NO: 368133 - RNA, 18 nt, Artificial Sequence
  Synthetic
ucuuguucuucaguauau

SEQ ID NO: 368134 - RNA, 19 nt, Artificial Sequence
  Synthetic
uucuuguucuucaguauau

SEQ ID NO: 368135 - RNA, 20 nt, Artificial Sequence
  Synthetic
auucuuguucuucaguauau

SEQ ID NO: 368136 - RNA, 21 nt, Artificial Sequence
  Synthetic
gauucuuguucuucaguauau

SEQ ID NO: 368137 - RNA, 22 nt, Artificial Sequence
  Synthetic
ugauucuuguucuucaguauau

SEQ ID NO: 368138 - RNA, 23 nt, Artificial Sequence
  Synthetic
augauucuuguucuucaguauau

SEQ ID NO: 368139 - RNA, 24 nt, Artificial Sequence
  Synthetic
gaugauucuuguucuucaguauau

SEQ ID NO: 368140 - RNA, 18 nt, Artificial Sequence
  Synthetic
aaaaaaaacagaguauau

SEQ ID NO: 368141 - RNA, 19 nt, Artificial Sequence
  Synthetic
gaaaaaaaacagaguauau

SEQ ID NO: 368142 - RNA, 20 nt, Artificial Sequence
  Synthetic
ggaaaaaaaacagaguauau

SEQ ID NO: 368143 - RNA, 21 nt, Artificial Sequence
  Synthetic
uggaaaaaaaacagaguauau

SEQ ID NO: 368144 - RNA, 22 nt, Artificial Sequence
  Synthetic
guggaaaaaaaacagaguauau

SEQ ID NO: 368145 - RNA, 23 nt, Artificial Sequence
  Synthetic
gguggaaaaaaaacagaguauau

SEQ ID NO: 368146 - RNA, 24 nt, Artificial Sequence
  Synthetic
agguggaaaaaaaacagaguauau

SEQ ID NO: 368147 - RNA, 18 nt, Artificial Sequence
  Synthetic
ggauguuguugaguauau

SEQ ID NO: 368148 - RNA, 19 nt, Artificial Sequence
  Synthetic
aggauguuguugaguauau

SEQ ID NO: 368149 - RNA, 20 nt, Artificial Sequence
  Synthetic
uaggauguuguugaguauau

SEQ ID NO: 368150 - RNA, 21 nt, Artificial Sequence
  Synthetic
cuaggauguuguugaguauau

SEQ ID NO: 368151 - RNA, 22 nt, Artificial Sequence
  Synthetic
acuaggauguuguugaguauau

SEQ ID NO: 368152 - RNA, 23 nt, Artificial Sequence
  Synthetic
cacuaggauguuguugaguauau

SEQ ID NO: 368153 - RNA, 24 nt, Artificial Sequence
  Synthetic
gcacuaggauguuguugaguauau

SEQ ID NO: 368154 - RNA, 18 nt, Artificial Sequence
  Synthetic
aaauugauuauaguauau

SEQ ID NO: 368155 - RNA, 19 nt, Artificial Sequence
  Synthetic
caaauugauuauaguauau

SEQ ID NO: 368156 - RNA, 20 nt, Artificial Sequence
  Synthetic
acaaauugauuauaguauau

SEQ ID NO: 368157 - RNA, 21 nt, Artificial Sequence
  Synthetic
aacaaauugauuauaguauau

SEQ ID NO: 368158 - RNA, 22 nt, Artificial Sequence
  Synthetic
uaacaaauugauuauaguauau

SEQ ID NO: 368159 - RNA, 23 nt, Artificial Sequence
  Synthetic
uuaacaaauugauuauaguauau

SEQ ID NO: 368160 - RNA, 24 nt, Artificial Sequence
  Synthetic
cuuaacaaauugauuauaguauau

SEQ ID NO: 368161 - RNA, 18 nt, Artificial Sequence
  Synthetic
agauuugugaagguauau

SEQ ID NO: 368162 - RNA, 19 nt, Artificial Sequence
  Synthetic
uagauuugugaagguauau

SEQ ID NO: 368163 - RNA, 20 nt, Artificial Sequence
  Synthetic
guagauuugugaagguauau

SEQ ID NO: 368164 - RNA, 21 nt, Artificial Sequence
  Synthetic
uguagauuugugaagguauau

SEQ ID NO: 368165 - RNA, 22 nt, Artificial Sequence
  Synthetic
uuguagauuugugaagguauau

SEQ ID NO: 368166 - RNA, 23 nt, Artificial Sequence
  Synthetic
guuguagauuugugaagguauau

SEQ ID NO: 368167 - RNA, 24 nt, Artificial Sequence
  Synthetic
aguuguagauuugugaagguauau

SEQ ID NO: 368168 - RNA, 18 nt, Artificial Sequence
  Synthetic
gagauuuuauauguauau

SEQ ID NO: 368169 - RNA, 19 nt, Artificial Sequence
  Synthetic
agagauuuuauauguauau

SEQ ID NO: 368170 - RNA, 20 nt, Artificial Sequence
  Synthetic
aagagauuuuauauguauau

SEQ ID NO: 368171 - RNA, 21 nt, Artificial Sequence
  Synthetic
uaagagauuuuauauguauau

SEQ ID NO: 368172 - RNA, 22 nt, Artificial Sequence
  Synthetic
auaagagauuuuauauguauau

SEQ ID NO: 368173 - RNA, 23 nt, Artificial Sequence
  Synthetic
uauaagagauuuuauauguauau

SEQ ID NO: 368174 - RNA, 24 nt, Artificial Sequence
  Synthetic
auauaagagauuuuauauguauau

SEQ ID NO: 368175 - RNA, 18 nt, Artificial Sequence
  Synthetic
uaccauaauuauguauau

SEQ ID NO: 368176 - RNA, 19 nt, Artificial Sequence
  Synthetic
cuaccauaauuauguauau

SEQ ID NO: 368177 - RNA, 20 nt, Artificial Sequence
  Synthetic
ucuaccauaauuauguauau

SEQ ID NO: 368178 - RNA, 21 nt, Artificial Sequence
  Synthetic
uucuaccauaauuauguauau

SEQ ID NO: 368179 - RNA, 22 nt, Artificial Sequence
  Synthetic
auucuaccauaauuauguauau

SEQ ID NO: 368180 - RNA, 23 nt, Artificial Sequence
  Synthetic
aauucuaccauaauuauguauau

SEQ ID NO: 368181 - RNA, 24 nt, Artificial Sequence
  Synthetic
caauucuaccauaauuauguauau

SEQ ID NO: 368182 - RNA, 18 nt, Artificial Sequence
  Synthetic
acauacaauguuguauau

SEQ ID NO: 368183 - RNA, 19 nt, Artificial Sequence
  Synthetic
uacauacaauguuguauau

SEQ ID NO: 368184 - RNA, 20 nt, Artificial Sequence
  Synthetic
uuacauacaauguuguauau

SEQ ID NO: 368185 - RNA, 21 nt, Artificial Sequence
  Synthetic
auuacauacaauguuguauau

SEQ ID NO: 368186 - RNA, 22 nt, Artificial Sequence
  Synthetic
cauuacauacaauguuguauau

SEQ ID NO: 368187 - RNA, 23 nt, Artificial Sequence
  Synthetic
acauuacauacaauguuguauau

SEQ ID NO: 368188 - RNA, 24 nt, Artificial Sequence
  Synthetic
gacauuacauacaauguuguauau

SEQ ID NO: 368189 - RNA, 18 nt, Artificial Sequence
  Synthetic
gcauuaugcuuuguauau

SEQ ID NO: 368190 - RNA, 19 nt, Artificial Sequence
  Synthetic
ugcauuaugcuuuguauau

SEQ ID NO: 368191 - RNA, 20 nt, Artificial Sequence
  Synthetic
cugcauuaugcuuuguauau

SEQ ID NO: 368192 - RNA, 21 nt, Artificial Sequence
  Synthetic
gcugcauuaugcuuuguauau

SEQ ID NO: 368193 - RNA, 22 nt, Artificial Sequence
  Synthetic
ugcugcauuaugcuuuguauau

SEQ ID NO: 368194 - RNA, 23 nt, Artificial Sequence
  Synthetic
augcugcauuaugcuuuguauau

SEQ ID NO: 368195 - RNA, 24 nt, Artificial Sequence
  Synthetic
aaugcugcauuaugcuuuguauau

SEQ ID NO: 368196 - RNA, 18 nt, Artificial Sequence
  Synthetic
aauauagaaaaauuauau

SEQ ID NO: 368197 - RNA, 19 nt, Artificial Sequence
  Synthetic
aaauauagaaaaauuauau

SEQ ID NO: 368198 - RNA, 20 nt, Artificial Sequence
  Synthetic
aaaauauagaaaaauuauau

SEQ ID NO: 368199 - RNA, 21 nt, Artificial Sequence
  Synthetic
aaaaauauagaaaaauuauau

SEQ ID NO: 368200 - RNA, 22 nt, Artificial Sequence
  Synthetic
gaaaaauauagaaaaauuauau

SEQ ID NO: 368201 - RNA, 23 nt, Artificial Sequence
  Synthetic
ugaaaaauauagaaaaauuauau

SEQ ID NO: 368202 - RNA, 24 nt, Artificial Sequence
  Synthetic
uugaaaaauauagaaaaauuauau

SEQ ID NO: 368203 - RNA, 18 nt, Artificial Sequence
  Synthetic
aaagcucugaaauuauau

SEQ ID NO: 368204 - RNA, 19 nt, Artificial Sequence
  Synthetic
aaaagcucugaaauuauau

SEQ ID NO: 368205 - RNA, 20 nt, Artificial Sequence
  Synthetic
caaaagcucugaaauuauau

SEQ ID NO: 368206 - RNA, 21 nt, Artificial Sequence
  Synthetic
acaaaagcucugaaauuauau

SEQ ID NO: 368207 - RNA, 22 nt, Artificial Sequence
  Synthetic
aacaaaagcucugaaauuauau

SEQ ID NO: 368208 - RNA, 23 nt, Artificial Sequence
  Synthetic
uaacaaaagcucugaaauuauau

SEQ ID NO: 368209 - RNA, 24 nt, Artificial Sequence
  Synthetic
uuaacaaaagcucugaaauuauau

SEQ ID NO: 368210 - RNA, 18 nt, Artificial Sequence
  Synthetic
cauauucaacaauuauau

SEQ ID NO: 368211 - RNA, 19 nt, Artificial Sequence
  Synthetic
acauauucaacaauuauau

SEQ ID NO: 368212 - RNA, 20 nt, Artificial Sequence
  Synthetic
cacauauucaacaauuauau

SEQ ID NO: 368213 - RNA, 21 nt, Artificial Sequence
  Synthetic
ucacauauucaacaauuauau

SEQ ID NO: 368214 - RNA, 22 nt, Artificial Sequence
  Synthetic
gucacauauucaacaauuauau

SEQ ID NO: 368215 - RNA, 23 nt, Artificial Sequence
  Synthetic
ugucacauauucaacaauuauau

SEQ ID NO: 368216 - RNA, 24 nt, Artificial Sequence
  Synthetic
augucacauauucaacaauuauau

SEQ ID NO: 368217 - RNA, 18 nt, Artificial Sequence
  Synthetic
aguuuagcagaauuauau

SEQ ID NO: 368218 - RNA, 19 nt, Artificial Sequence
  Synthetic
aaguuuagcagaauuauau

SEQ ID NO: 368219 - RNA, 20 nt, Artificial Sequence
  Synthetic
aaaguuuagcagaauuauau

SEQ ID NO: 368220 - RNA, 21 nt, Artificial Sequence
  Synthetic
gaaaguuuagcagaauuauau

SEQ ID NO: 368221 - RNA, 22 nt, Artificial Sequence
  Synthetic
agaaaguuuagcagaauuauau

SEQ ID NO: 368222 - RNA, 23 nt, Artificial Sequence
  Synthetic
cagaaaguuuagcagaauuauau

SEQ ID NO: 368223 - RNA, 24 nt, Artificial Sequence
  Synthetic
acagaaaguuuagcagaauuauau

SEQ ID NO: 368224 - RNA, 18 nt, Artificial Sequence
  Synthetic
agacauuuuuaauuauau

SEQ ID NO: 368225 - RNA, 19 nt, Artificial Sequence
  Synthetic
aagacauuuuuaauuauau

SEQ ID NO: 368226 - RNA, 20 nt, Artificial Sequence
  Synthetic
aaagacauuuuuaauuauau

SEQ ID NO: 368227 - RNA, 21 nt, Artificial Sequence
  Synthetic
aaaagacauuuuuaauuauau

SEQ ID NO: 368228 - RNA, 22 nt, Artificial Sequence
  Synthetic
aaaaagacauuuuuaauuauau

SEQ ID NO: 368229 - RNA, 23 nt, Artificial Sequence
  Synthetic
gaaaaagacauuuuuaauuauau

SEQ ID NO: 368230 - RNA, 24 nt, Artificial Sequence
  Synthetic
agaaaaagacauuuuuaauuauau

SEQ ID NO: 368231 - RNA, 18 nt, Artificial Sequence
  Synthetic
gcuaaaacgcuauuauau

SEQ ID NO: 368232 - RNA, 19 nt, Artificial Sequence
  Synthetic
ugcuaaaacgcuauuauau

SEQ ID NO: 368233 - RNA, 20 nt, Artificial Sequence
  Synthetic
gugcuaaaacgcuauuauau

SEQ ID NO: 368234 - RNA, 21 nt, Artificial Sequence
  Synthetic
ugugcuaaaacgcuauuauau

SEQ ID NO: 368235 - RNA, 22 nt, Artificial Sequence
  Synthetic
gugugcuaaaacgcuauuauau

SEQ ID NO: 368236 - RNA, 23 nt, Artificial Sequence
  Synthetic
ugugugcuaaaacgcuauuauau

SEQ ID NO: 368237 - RNA, 24 nt, Artificial Sequence
  Synthetic
cugugugcuaaaacgcuauuauau

SEQ ID NO: 368238 - RNA, 18 nt, Artificial Sequence
  Synthetic
guaugaucucacuuauau

SEQ ID NO: 368239 - RNA, 19 nt, Artificial Sequence
  Synthetic
uguaugaucucacuuauau

SEQ ID NO: 368240 - RNA, 20 nt, Artificial Sequence
  Synthetic
uuguaugaucucacuuauau

SEQ ID NO: 368241 - RNA, 21 nt, Artificial Sequence
  Synthetic
auuguaugaucucacuuauau

SEQ ID NO: 368242 - RNA, 22 nt, Artificial Sequence
  Synthetic
uauuguaugaucucacuuauau

SEQ ID NO: 368243 - RNA, 23 nt, Artificial Sequence
  Synthetic
auauuguaugaucucacuuauau

SEQ ID NO: 368244 - RNA, 24 nt, Artificial Sequence
  Synthetic
aauauuguaugaucucacuuauau

SEQ ID NO: 368245 - RNA, 18 nt, Artificial Sequence
  Synthetic
aaaguuucaggcuuauau

SEQ ID NO: 368246 - RNA, 19 nt, Artificial Sequence
  Synthetic
gaaaguuucaggcuuauau

SEQ ID NO: 368247 - RNA, 20 nt, Artificial Sequence
  Synthetic
ggaaaguuucaggcuuauau

SEQ ID NO: 368248 - RNA, 21 nt, Artificial Sequence
  Synthetic
aggaaaguuucaggcuuauau

SEQ ID NO: 368249 - RNA, 22 nt, Artificial Sequence
  Synthetic
caggaaaguuucaggcuuauau

SEQ ID NO: 368250 - RNA, 23 nt, Artificial Sequence
  Synthetic
ucaggaaaguuucaggcuuauau

SEQ ID NO: 368251 - RNA, 24 nt, Artificial Sequence
  Synthetic
cucaggaaaguuucaggcuuauau

SEQ ID NO: 368252 - RNA, 18 nt, Artificial Sequence
  Synthetic
agauuucugugcuuauau

SEQ ID NO: 368253 - RNA, 19 nt, Artificial Sequence
  Synthetic
cagauuucugugcuuauau

SEQ ID NO: 368254 - RNA, 20 nt, Artificial Sequence
  Synthetic
acagauuucugugcuuauau

SEQ ID NO: 368255 - RNA, 21 nt, Artificial Sequence
  Synthetic
uacagauuucugugcuuauau

SEQ ID NO: 368256 - RNA, 22 nt, Artificial Sequence
  Synthetic
auacagauuucugugcuuauau

SEQ ID NO: 368257 - RNA, 23 nt, Artificial Sequence
  Synthetic
uauacagauuucugugcuuauau

SEQ ID NO: 368258 - RNA, 24 nt, Artificial Sequence
  Synthetic
uuauacagauuucugugcuuauau

SEQ ID NO: 368259 - RNA, 18 nt, Artificial Sequence
  Synthetic
agucucucuugcuuauau

SEQ ID NO: 368260 - RNA, 19 nt, Artificial Sequence
  Synthetic
cagucucucuugcuuauau

SEQ ID NO: 368261 - RNA, 20 nt, Artificial Sequence
  Synthetic
gcagucucucuugcuuauau

SEQ ID NO: 368262 - RNA, 21 nt, Artificial Sequence
  Synthetic
ggcagucucucuugcuuauau

SEQ ID NO: 368263 - RNA, 22 nt, Artificial Sequence
  Synthetic
aggcagucucucuugcuuauau

SEQ ID NO: 368264 - RNA, 23 nt, Artificial Sequence
  Synthetic
gaggcagucucucuugcuuauau

SEQ ID NO: 368265 - RNA, 24 nt, Artificial Sequence
  Synthetic
agaggcagucucucuugcuuauau

SEQ ID NO: 368266 - RNA, 18 nt, Artificial Sequence
  Synthetic
auacagauuuucuuauau

SEQ ID NO: 368267 - RNA, 19 nt, Artificial Sequence
  Synthetic
uauacagauuuucuuauau

SEQ ID NO: 368268 - RNA, 20 nt, Artificial Sequence
  Synthetic
uuauacagauuuucuuauau

SEQ ID NO: 368269 - RNA, 21 nt, Artificial Sequence
  Synthetic
auuauacagauuuucuuauau

SEQ ID NO: 368270 - RNA, 22 nt, Artificial Sequence
  Synthetic
gauuauacagauuuucuuauau

SEQ ID NO: 368271 - RNA, 23 nt, Artificial Sequence
  Synthetic
agauuauacagauuuucuuauau

SEQ ID NO: 368272 - RNA, 24 nt, Artificial Sequence
  Synthetic
gagauuauacagauuuucuuauau

SEQ ID NO: 368273 - RNA, 18 nt, Artificial Sequence
  Synthetic
agaggaaagaaguuauau

SEQ ID NO: 368274 - RNA, 19 nt, Artificial Sequence
  Synthetic
aagaggaaagaaguuauau

SEQ ID NO: 368275 - RNA, 20 nt, Artificial Sequence
  Synthetic
aaagaggaaagaaguuauau

SEQ ID NO: 368276 - RNA, 21 nt, Artificial Sequence
  Synthetic
gaaagaggaaagaaguuauau

SEQ ID NO: 368277 - RNA, 22 nt, Artificial Sequence
  Synthetic
agaaagaggaaagaaguuauau

SEQ ID NO: 368278 - RNA, 23 nt, Artificial Sequence
  Synthetic
uagaaagaggaaagaaguuauau

SEQ ID NO: 368279 - RNA, 24 nt, Artificial Sequence
  Synthetic
auagaaagaggaaagaaguuauau

SEQ ID NO: 368280 - RNA, 18 nt, Artificial Sequence
  Synthetic
acucaaucucaguuauau

SEQ ID NO: 368281 - RNA, 19 nt, Artificial Sequence
  Synthetic
aacucaaucucaguuauau

SEQ ID NO: 368282 - RNA, 20 nt, Artificial Sequence
  Synthetic
uaacucaaucucaguuauau

SEQ ID NO: 368283 - RNA, 21 nt, Artificial Sequence
  Synthetic
cuaacucaaucucaguuauau

SEQ ID NO: 368284 - RNA, 22 nt, Artificial Sequence
  Synthetic
ccuaacucaaucucaguuauau

SEQ ID NO: 368285 - RNA, 23 nt, Artificial Sequence
  Synthetic
uccuaacucaaucucaguuauau

SEQ ID NO: 368286 - RNA, 24 nt, Artificial Sequence
  Synthetic
auccuaacucaaucucaguuauau

SEQ ID NO: 368287 - RNA, 18 nt, Artificial Sequence
  Synthetic
cggagauccuaguuauau

SEQ ID NO: 368288 - RNA, 19 nt, Artificial Sequence
  Synthetic
ccggagauccuaguuauau

SEQ ID NO: 368289 - RNA, 20 nt, Artificial Sequence
  Synthetic
accggagauccuaguuauau

SEQ ID NO: 368290 - RNA, 21 nt, Artificial Sequence
  Synthetic
caccggagauccuaguuauau

SEQ ID NO: 368291 - RNA, 22 nt, Artificial Sequence
  Synthetic
acaccggagauccuaguuauau

SEQ ID NO: 368292 - RNA, 23 nt, Artificial Sequence
  Synthetic
uacaccggagauccuaguuauau

SEQ ID NO: 368293 - RNA, 24 nt, Artificial Sequence
  Synthetic
guacaccggagauccuaguuauau

SEQ ID NO: 368294 - RNA, 18 nt, Artificial Sequence
  Synthetic
aauaauaugugguuauau

SEQ ID NO: 368295 - RNA, 19 nt, Artificial Sequence
  Synthetic
aaauaauaugugguuauau

SEQ ID NO: 368296 - RNA, 20 nt, Artificial Sequence
  Synthetic
gaaauaauaugugguuauau

SEQ ID NO: 368297 - RNA, 21 nt, Artificial Sequence
  Synthetic
ggaaauaauaugugguuauau

SEQ ID NO: 368298 - RNA, 22 nt, Artificial Sequence
  Synthetic
cggaaauaauaugugguuauau

SEQ ID NO: 368299 - RNA, 23 nt, Artificial Sequence
  Synthetic
gcggaaauaauaugugguuauau

SEQ ID NO: 368300 - RNA, 24 nt, Artificial Sequence
  Synthetic
ugcggaaauaauaugugguuauau

SEQ ID NO: 368301 - RNA, 18 nt, Artificial Sequence
  Synthetic
cuagaucagauguuauau

SEQ ID NO: 368302 - RNA, 19 nt, Artificial Sequence
  Synthetic
ucuagaucagauguuauau

SEQ ID NO: 368303 - RNA, 20 nt, Artificial Sequence
  Synthetic
uucuagaucagauguuauau

SEQ ID NO: 368304 - RNA, 21 nt, Artificial Sequence
  Synthetic
cuucuagaucagauguuauau

SEQ ID NO: 368305 - RNA, 22 nt, Artificial Sequence
  Synthetic
acuucuagaucagauguuauau

SEQ ID NO: 368306 - RNA, 23 nt, Artificial Sequence
  Synthetic
uacuucuagaucagauguuauau

SEQ ID NO: 368307 - RNA, 24 nt, Artificial Sequence
  Synthetic
guacuucuagaucagauguuauau

SEQ ID NO: 368308 - RNA, 18 nt, Artificial Sequence
  Synthetic
agugauacaguguuauau

SEQ ID NO: 368309 - RNA, 19 nt, Artificial Sequence
  Synthetic
uagugauacaguguuauau

SEQ ID NO: 368310 - RNA, 20 nt, Artificial Sequence
  Synthetic
uuagugauacaguguuauau

SEQ ID NO: 368311 - RNA, 21 nt, Artificial Sequence
  Synthetic
uuuagugauacaguguuauau

SEQ ID NO: 368312 - RNA, 22 nt, Artificial Sequence
  Synthetic
guuuagugauacaguguuauau

SEQ ID NO: 368313 - RNA, 23 nt, Artificial Sequence
  Synthetic
uguuuagugauacaguguuauau

SEQ ID NO: 368314 - RNA, 24 nt, Artificial Sequence
  Synthetic
cuguuuagugauacaguguuauau

SEQ ID NO: 368315 - RNA, 18 nt, Artificial Sequence
  Synthetic
aggaaacauuuguuauau

SEQ ID NO: 368316 - RNA, 19 nt, Artificial Sequence
  Synthetic
uaggaaacauuuguuauau

SEQ ID NO: 368317 - RNA, 20 nt, Artificial Sequence
  Synthetic
auaggaaacauuuguuauau

SEQ ID NO: 368318 - RNA, 21 nt, Artificial Sequence
  Synthetic
gauaggaaacauuuguuauau

SEQ ID NO: 368319 - RNA, 22 nt, Artificial Sequence
  Synthetic
ugauaggaaacauuuguuauau

SEQ ID NO: 368320 - RNA, 23 nt, Artificial Sequence
  Synthetic
augauaggaaacauuuguuauau

SEQ ID NO: 368321 - RNA, 24 nt, Artificial Sequence
  Synthetic
aaugauaggaaacauuuguuauau

SEQ ID NO: 368322 - RNA, 18 nt, Artificial Sequence
  Synthetic
cauacucuguauuuauau

SEQ ID NO: 368323 - RNA, 19 nt, Artificial Sequence
  Synthetic
acauacucuguauuuauau

SEQ ID NO: 368324 - RNA, 20 nt, Artificial Sequence
  Synthetic
uacauacucuguauuuauau

SEQ ID NO: 368325 - RNA, 21 nt, Artificial Sequence
  Synthetic
auacauacucuguauuuauau

SEQ ID NO: 368326 - RNA, 22 nt, Artificial Sequence
  Synthetic
aauacauacucuguauuuauau

SEQ ID NO: 368327 - RNA, 23 nt, Artificial Sequence
  Synthetic
aaauacauacucuguauuuauau

SEQ ID NO: 368328 - RNA, 24 nt, Artificial Sequence
  Synthetic
caaauacauacucuguauuuauau

SEQ ID NO: 368329 - RNA, 18 nt, Artificial Sequence
  Synthetic
gaaccuuuguguuuauau

SEQ ID NO: 368330 - RNA, 19 nt, Artificial Sequence
  Synthetic
agaaccuuuguguuuauau

SEQ ID NO: 368331 - RNA, 20 nt, Artificial Sequence
  Synthetic
gagaaccuuuguguuuauau

SEQ ID NO: 368332 - RNA, 21 nt, Artificial Sequence
  Synthetic
ugagaaccuuuguguuuauau

SEQ ID NO: 368333 - RNA, 22 nt, Artificial Sequence
  Synthetic
uugagaaccuuuguguuuauau

SEQ ID NO: 368334 - RNA, 23 nt, Artificial Sequence
  Synthetic
uuugagaaccuuuguguuuauau

SEQ ID NO: 368335 - RNA, 24 nt, Artificial Sequence
  Synthetic
cuuugagaaccuuuguguuuauau

SEQ ID NO: 368336 - RNA, 18 nt, Artificial Sequence
  Synthetic
ucuauauaguuuuuauau

SEQ ID NO: 368337 - RNA, 19 nt, Artificial Sequence
  Synthetic
cucuauauaguuuuuauau

SEQ ID NO: 368338 - RNA, 20 nt, Artificial Sequence
  Synthetic
ucucuauauaguuuuuauau

SEQ ID NO: 368339 - RNA, 21 nt, Artificial Sequence
  Synthetic
aucucuauauaguuuuuauau

SEQ ID NO: 368340 - RNA, 22 nt, Artificial Sequence
  Synthetic
uaucucuauauaguuuuuauau

SEQ ID NO: 368341 - RNA, 23 nt, Artificial Sequence
  Synthetic
auaucucuauauaguuuuuauau

SEQ ID NO: 368342 - RNA, 24 nt, Artificial Sequence
  Synthetic
uauaucucuauauaguuuuuauau

SEQ ID NO: 368343 - RNA, 18 nt, Artificial Sequence
  Synthetic
gaaaaauuuuuuuuauau

SEQ ID NO: 368344 - RNA, 19 nt, Artificial Sequence
  Synthetic
ugaaaaauuuuuuuuauau

SEQ ID NO: 368345 - RNA, 20 nt, Artificial Sequence
  Synthetic
gugaaaaauuuuuuuuauau

SEQ ID NO: 368346 - RNA, 21 nt, Artificial Sequence
  Synthetic
agugaaaaauuuuuuuuauau

SEQ ID NO: 368347 - RNA, 22 nt, Artificial Sequence
  Synthetic
aagugaaaaauuuuuuuuauau

SEQ ID NO: 368348 - RNA, 23 nt, Artificial Sequence
  Synthetic
gaagugaaaaauuuuuuuuauau

SEQ ID NO: 368349 - RNA, 24 nt, Artificial Sequence
  Synthetic
ugaagugaaaaauuuuuuuuauau

SEQ ID NO: 368350 - RNA, 18 nt, Artificial Sequence
  Synthetic
aaacuuuaaaaaaacuau

SEQ ID NO: 368351 - RNA, 19 nt, Artificial Sequence
  Synthetic
gaaacuuuaaaaaaacuau

SEQ ID NO: 368352 - RNA, 20 nt, Artificial Sequence
  Synthetic
ggaaacuuuaaaaaaacuau

SEQ ID NO: 368353 - RNA, 21 nt, Artificial Sequence
  Synthetic
uggaaacuuuaaaaaaacuau

SEQ ID NO: 368354 - RNA, 22 nt, Artificial Sequence
  Synthetic
guggaaacuuuaaaaaaacuau

SEQ ID NO: 368355 - RNA, 23 nt, Artificial Sequence
  Synthetic
uguggaaacuuuaaaaaaacuau

SEQ ID NO: 368356 - RNA, 24 nt, Artificial Sequence
  Synthetic
uuguggaaacuuuaaaaaaacuau

SEQ ID NO: 368357 - RNA, 18 nt, Artificial Sequence
  Synthetic
auucaugauaaaaacuau

SEQ ID NO: 368358 - RNA, 19 nt, Artificial Sequence
  Synthetic
cauucaugauaaaaacuau

SEQ ID NO: 368359 - RNA, 20 nt, Artificial Sequence
  Synthetic
ccauucaugauaaaaacuau

SEQ ID NO: 368360 - RNA, 21 nt, Artificial Sequence
  Synthetic
uccauucaugauaaaaacuau

SEQ ID NO: 368361 - RNA, 22 nt, Artificial Sequence
  Synthetic
auccauucaugauaaaaacuau

SEQ ID NO: 368362 - RNA, 23 nt, Artificial Sequence
  Synthetic
cauccauucaugauaaaaacuau

SEQ ID NO: 368363 - RNA, 24 nt, Artificial Sequence
  Synthetic
gcauccauucaugauaaaaacuau

SEQ ID NO: 368364 - RNA, 18 nt, Artificial Sequence
  Synthetic
uauaauauugaaaacuau

SEQ ID NO: 368365 - RNA, 19 nt, Artificial Sequence
  Synthetic
auauaauauugaaaacuau

SEQ ID NO: 368366 - RNA, 20 nt, Artificial Sequence
  Synthetic
uauauaauauugaaaacuau

SEQ ID NO: 368367 - RNA, 21 nt, Artificial Sequence
  Synthetic
cuauauaauauugaaaacuau

SEQ ID NO: 368368 - RNA, 22 nt, Artificial Sequence
  Synthetic
gcuauauaauauugaaaacuau

SEQ ID NO: 368369 - RNA, 23 nt, Artificial Sequence
  Synthetic
ggcuauauaauauugaaaacuau

SEQ ID NO: 368370 - RNA, 24 nt, Artificial Sequence
  Synthetic
uggcuauauaauauugaaaacuau

SEQ ID NO: 368371 - RNA, 18 nt, Artificial Sequence
  Synthetic
aggguaguaagaaacuau

SEQ ID NO: 368372 - RNA, 19 nt, Artificial Sequence
  Synthetic
aaggguaguaagaaacuau

SEQ ID NO: 368373 - RNA, 20 nt, Artificial Sequence
  Synthetic
caaggguaguaagaaacuau

SEQ ID NO: 368374 - RNA, 21 nt, Artificial Sequence
  Synthetic
ucaaggguaguaagaaacuau

SEQ ID NO: 368375 - RNA, 22 nt, Artificial Sequence
  Synthetic
aucaaggguaguaagaaacuau

SEQ ID NO: 368376 - RNA, 23 nt, Artificial Sequence
  Synthetic
caucaaggguaguaagaaacuau

SEQ ID NO: 368377 - RNA, 24 nt, Artificial Sequence
  Synthetic
ucaucaaggguaguaagaaacuau

SEQ ID NO: 368378 - RNA, 18 nt, Artificial Sequence
  Synthetic
uucaauuugagaaacuau

SEQ ID NO: 368379 - RNA, 19 nt, Artificial Sequence
  Synthetic
cuucaauuugagaaacuau

SEQ ID NO: 368380 - RNA, 20 nt, Artificial Sequence
  Synthetic
gcuucaauuugagaaacuau

SEQ ID NO: 368381 - RNA, 21 nt, Artificial Sequence
  Synthetic
agcuucaauuugagaaacuau

SEQ ID NO: 368382 - RNA, 22 nt, Artificial Sequence
  Synthetic
gagcuucaauuugagaaacuau

SEQ ID NO: 368383 - RNA, 23 nt, Artificial Sequence
  Synthetic
agagcuucaauuugagaaacuau

SEQ ID NO: 368384 - RNA, 24 nt, Artificial Sequence
  Synthetic
gagagcuucaauuugagaaacuau

SEQ ID NO: 368385 - RNA, 18 nt, Artificial Sequence
  Synthetic
uagaauucuggaaacuau

SEQ ID NO: 368386 - RNA, 19 nt, Artificial Sequence
  Synthetic
cuagaauucuggaaacuau

SEQ ID NO: 368387 - RNA, 20 nt, Artificial Sequence
  Synthetic
gcuagaauucuggaaacuau

SEQ ID NO: 368388 - RNA, 21 nt, Artificial Sequence
  Synthetic
ggcuagaauucuggaaacuau

SEQ ID NO: 368389 - RNA, 22 nt, Artificial Sequence
  Synthetic
uggcuagaauucuggaaacuau

SEQ ID NO: 368390 - RNA, 23 nt, Artificial Sequence
  Synthetic
auggcuagaauucuggaaacuau

SEQ ID NO: 368391 - RNA, 24 nt, Artificial Sequence
  Synthetic
cauggcuagaauucuggaaacuau

SEQ ID NO: 368392 - RNA, 18 nt, Artificial Sequence
  Synthetic
ucucuaccaaacaacuau

SEQ ID NO: 368393 - RNA, 19 nt, Artificial Sequence
  Synthetic
aucucuaccaaacaacuau

SEQ ID NO: 368394 - RNA, 20 nt, Artificial Sequence
  Synthetic
caucucuaccaaacaacuau

SEQ ID NO: 368395 - RNA, 21 nt, Artificial Sequence
  Synthetic
ucaucucuaccaaacaacuau

SEQ ID NO: 368396 - RNA, 22 nt, Artificial Sequence
  Synthetic
gucaucucuaccaaacaacuau

SEQ ID NO: 368397 - RNA, 23 nt, Artificial Sequence
  Synthetic
cgucaucucuaccaaacaacuau

SEQ ID NO: 368398 - RNA, 24 nt, Artificial Sequence
  Synthetic
ucgucaucucuaccaaacaacuau

SEQ ID NO: 368399 - RNA, 18 nt, Artificial Sequence
  Synthetic
cagagaaaugagaacuau

SEQ ID NO: 368400 - RNA, 19 nt, Artificial Sequence
  Synthetic
gcagagaaaugagaacuau

SEQ ID NO: 368401 - RNA, 20 nt, Artificial Sequence
  Synthetic
agcagagaaaugagaacuau

SEQ ID NO: 368402 - RNA, 21 nt, Artificial Sequence
  Synthetic
aagcagagaaaugagaacuau

SEQ ID NO: 368403 - RNA, 22 nt, Artificial Sequence
  Synthetic
uaagcagagaaaugagaacuau

SEQ ID NO: 368404 - RNA, 23 nt, Artificial Sequence
  Synthetic
auaagcagagaaaugagaacuau

SEQ ID NO: 368405 - RNA, 24 nt, Artificial Sequence
  Synthetic
aauaagcagagaaaugagaacuau

SEQ ID NO: 368406 - RNA, 18 nt, Artificial Sequence
  Synthetic
uacauuugauagaacuau

SEQ ID NO: 368407 - RNA, 19 nt, Artificial Sequence
  Synthetic
uuacauuugauagaacuau

SEQ ID NO: 368408 - RNA, 20 nt, Artificial Sequence
  Synthetic
auuacauuugauagaacuau

SEQ ID NO: 368409 - RNA, 21 nt, Artificial Sequence
  Synthetic
uauuacauuugauagaacuau

SEQ ID NO: 368410 - RNA, 22 nt, Artificial Sequence
  Synthetic
uuauuacauuugauagaacuau

SEQ ID NO: 368411 - RNA, 23 nt, Artificial Sequence
  Synthetic
auuauuacauuugauagaacuau

SEQ ID NO: 368412 - RNA, 24 nt, Artificial Sequence
  Synthetic
aauuauuacauuugauagaacuau

SEQ ID NO: 368413 - RNA, 18 nt, Artificial Sequence
  Synthetic
uauacagaguugaacuau

SEQ ID NO: 368414 - RNA, 19 nt, Artificial Sequence
  Synthetic
uuauacagaguugaacuau

SEQ ID NO: 368415 - RNA, 20 nt, Artificial Sequence
  Synthetic
guuauacagaguugaacuau

SEQ ID NO: 368416 - RNA, 21 nt, Artificial Sequence
  Synthetic
aguuauacagaguugaacuau

SEQ ID NO: 368417 - RNA, 22 nt, Artificial Sequence
  Synthetic
uaguuauacagaguugaacuau

SEQ ID NO: 368418 - RNA, 23 nt, Artificial Sequence
  Synthetic
uuaguuauacagaguugaacuau

SEQ ID NO: 368419 - RNA, 24 nt, Artificial Sequence
  Synthetic
guuaguuauacagaguugaacuau

SEQ ID NO: 368420 - RNA, 18 nt, Artificial Sequence
  Synthetic
caaaucugaaauaacuau

SEQ ID NO: 368421 - RNA, 19 nt, Artificial Sequence
  Synthetic
ccaaaucugaaauaacuau

SEQ ID NO: 368422 - RNA, 20 nt, Artificial Sequence
  Synthetic
gccaaaucugaaauaacuau

SEQ ID NO: 368423 - RNA, 21 nt, Artificial Sequence
  Synthetic
agccaaaucugaaauaacuau

SEQ ID NO: 368424 - RNA, 22 nt, Artificial Sequence
  Synthetic
uagccaaaucugaaauaacuau

SEQ ID NO: 368425 - RNA, 23 nt, Artificial Sequence
  Synthetic
cuagccaaaucugaaauaacuau

SEQ ID NO: 368426 - RNA, 24 nt, Artificial Sequence
  Synthetic
ucuagccaaaucugaaauaacuau

SEQ ID NO: 368427 - RNA, 18 nt, Artificial Sequence
  Synthetic
gaaauauuuaaacacuau

SEQ ID NO: 368428 - RNA, 19 nt, Artificial Sequence
  Synthetic
ugaaauauuuaaacacuau

SEQ ID NO: 368429 - RNA, 20 nt, Artificial Sequence
  Synthetic
cugaaauauuuaaacacuau

SEQ ID NO: 368430 - RNA, 21 nt, Artificial Sequence
  Synthetic
acugaaauauuuaaacacuau

SEQ ID NO: 368431 - RNA, 22 nt, Artificial Sequence
  Synthetic
uacugaaauauuuaaacacuau

SEQ ID NO: 368432 - RNA, 23 nt, Artificial Sequence
  Synthetic
auacugaaauauuuaaacacuau

SEQ ID NO: 368433 - RNA, 24 nt, Artificial Sequence
  Synthetic
uauacugaaauauuuaaacacuau

SEQ ID NO: 368434 - RNA, 18 nt, Artificial Sequence
  Synthetic
ucaaugaaucuacacuau

SEQ ID NO: 368435 - RNA, 19 nt, Artificial Sequence
  Synthetic
uucaaugaaucuacacuau

SEQ ID NO: 368436 - RNA, 20 nt, Artificial Sequence
  Synthetic
auucaaugaaucuacacuau

SEQ ID NO: 368437 - RNA, 21 nt, Artificial Sequence
  Synthetic
cauucaaugaaucuacacuau

SEQ ID NO: 368438 - RNA, 22 nt, Artificial Sequence
  Synthetic
ucauucaaugaaucuacacuau

SEQ ID NO: 368439 - RNA, 23 nt, Artificial Sequence
  Synthetic
cucauucaaugaaucuacacuau

SEQ ID NO: 368440 - RNA, 24 nt, Artificial Sequence
  Synthetic
ccucauucaaugaaucuacacuau

SEQ ID NO: 368441 - RNA, 18 nt, Artificial Sequence
  Synthetic
uccuggacugaccacuau

SEQ ID NO: 368442 - RNA, 19 nt, Artificial Sequence
  Synthetic
cuccuggacugaccacuau

SEQ ID NO: 368443 - RNA, 20 nt, Artificial Sequence
  Synthetic
gcuccuggacugaccacuau

SEQ ID NO: 368444 - RNA, 21 nt, Artificial Sequence
  Synthetic
agcuccuggacugaccacuau

SEQ ID NO: 368445 - RNA, 22 nt, Artificial Sequence
  Synthetic
uagcuccuggacugaccacuau

SEQ ID NO: 368446 - RNA, 23 nt, Artificial Sequence
  Synthetic
cuagcuccuggacugaccacuau

SEQ ID NO: 368447 - RNA, 24 nt, Artificial Sequence
  Synthetic
ccuagcuccuggacugaccacuau

SEQ ID NO: 368448 - RNA, 18 nt, Artificial Sequence
  Synthetic
guucuggauauccacuau

SEQ ID NO: 368449 - RNA, 19 nt, Artificial Sequence
  Synthetic
uguucuggauauccacuau

SEQ ID NO: 368450 - RNA, 20 nt, Artificial Sequence
  Synthetic
auguucuggauauccacuau

SEQ ID NO: 368451 - RNA, 21 nt, Artificial Sequence
  Synthetic
uauguucuggauauccacuau

SEQ ID NO: 368452 - RNA, 22 nt, Artificial Sequence
  Synthetic
uuauguucuggauauccacuau

SEQ ID NO: 368453 - RNA, 23 nt, Artificial Sequence
  Synthetic
auuauguucuggauauccacuau

SEQ ID NO: 368454 - RNA, 24 nt, Artificial Sequence
  Synthetic
cauuauguucuggauauccacuau

SEQ ID NO: 368455 - RNA, 18 nt, Artificial Sequence
  Synthetic
augagacuuauucacuau

SEQ ID NO: 368456 - RNA, 19 nt, Artificial Sequence
  Synthetic
caugagacuuauucacuau

SEQ ID NO: 368457 - RNA, 20 nt, Artificial Sequence
  Synthetic
ucaugagacuuauucacuau

SEQ ID NO: 368458 - RNA, 21 nt, Artificial Sequence
  Synthetic
cucaugagacuuauucacuau

SEQ ID NO: 368459 - RNA, 22 nt, Artificial Sequence
  Synthetic
ucucaugagacuuauucacuau

SEQ ID NO: 368460 - RNA, 23 nt, Artificial Sequence
  Synthetic
aucucaugagacuuauucacuau

SEQ ID NO: 368461 - RNA, 24 nt, Artificial Sequence
  Synthetic
gaucucaugagacuuauucacuau

SEQ ID NO: 368462 - RNA, 18 nt, Artificial Sequence
  Synthetic
ugcugguccauggacuau

SEQ ID NO: 368463 - RNA, 19 nt, Artificial Sequence
  Synthetic
cugcugguccauggacuau

SEQ ID NO: 368464 - RNA, 20 nt, Artificial Sequence
  Synthetic
gcugcugguccauggacuau

SEQ ID NO: 368465 - RNA, 21 nt, Artificial Sequence
  Synthetic
ugcugcugguccauggacuau

SEQ ID NO: 368466 - RNA, 22 nt, Artificial Sequence
  Synthetic
gugcugcugguccauggacuau

SEQ ID NO: 368467 - RNA, 23 nt, Artificial Sequence
  Synthetic
ggugcugcugguccauggacuau

SEQ ID NO: 368468 - RNA, 24 nt, Artificial Sequence
  Synthetic
uggugcugcugguccauggacuau

SEQ ID NO: 368469 - RNA, 18 nt, Artificial Sequence
  Synthetic
ucguauuucuuggacuau

SEQ ID NO: 368470 - RNA, 19 nt, Artificial Sequence
  Synthetic
aucguauuucuuggacuau

SEQ ID NO: 368471 - RNA, 20 nt, Artificial Sequence
  Synthetic
uaucguauuucuuggacuau

SEQ ID NO: 368472 - RNA, 21 nt, Artificial Sequence
  Synthetic
guaucguauuucuuggacuau

SEQ ID NO: 368473 - RNA, 22 nt, Artificial Sequence
  Synthetic
aguaucguauuucuuggacuau

SEQ ID NO: 368474 - RNA, 23 nt, Artificial Sequence
  Synthetic
gaguaucguauuucuuggacuau

SEQ ID NO: 368475 - RNA, 24 nt, Artificial Sequence
  Synthetic
ggaguaucguauuucuuggacuau

SEQ ID NO: 368476 - RNA, 18 nt, Artificial Sequence
  Synthetic
ucagcauggugugacuau

SEQ ID NO: 368477 - RNA, 19 nt, Artificial Sequence
  Synthetic
gucagcauggugugacuau

SEQ ID NO: 368478 - RNA, 20 nt, Artificial Sequence
  Synthetic
ugucagcauggugugacuau

SEQ ID NO: 368479 - RNA, 21 nt, Artificial Sequence
  Synthetic
cugucagcauggugugacuau

SEQ ID NO: 368480 - RNA, 22 nt, Artificial Sequence
  Synthetic
ucugucagcauggugugacuau

SEQ ID NO: 368481 - RNA, 23 nt, Artificial Sequence
  Synthetic
uucugucagcauggugugacuau

SEQ ID NO: 368482 - RNA, 24 nt, Artificial Sequence
  Synthetic
cuucugucagcauggugugacuau

SEQ ID NO: 368483 - RNA, 18 nt, Artificial Sequence
  Synthetic
cuuuacuuucuugacuau

SEQ ID NO: 368484 - RNA, 19 nt, Artificial Sequence
  Synthetic
ucuuuacuuucuugacuau

SEQ ID NO: 368485 - RNA, 20 nt, Artificial Sequence
  Synthetic
gucuuuacuuucuugacuau

SEQ ID NO: 368486 - RNA, 21 nt, Artificial Sequence
  Synthetic
agucuuuacuuucuugacuau

SEQ ID NO: 368487 - RNA, 22 nt, Artificial Sequence
  Synthetic
cagucuuuacuuucuugacuau

SEQ ID NO: 368488 - RNA, 23 nt, Artificial Sequence
  Synthetic
ucagucuuuacuuucuugacuau

SEQ ID NO: 368489 - RNA, 24 nt, Artificial Sequence
  Synthetic
uucagucuuuacuuucuugacuau

SEQ ID NO: 368490 - RNA, 18 nt, Artificial Sequence
  Synthetic
guucauguuguugacuau

SEQ ID NO: 368491 - RNA, 19 nt, Artificial Sequence
  Synthetic
uguucauguuguugacuau

SEQ ID NO: 368492 - RNA, 20 nt, Artificial Sequence
  Synthetic
uuguucauguuguugacuau

SEQ ID NO: 368493 - RNA, 21 nt, Artificial Sequence
  Synthetic
guuguucauguuguugacuau

SEQ ID NO: 368494 - RNA, 22 nt, Artificial Sequence
  Synthetic
uguuguucauguuguugacuau

SEQ ID NO: 368495 - RNA, 23 nt, Artificial Sequence
  Synthetic
uuguuguucauguuguugacuau

SEQ ID NO: 368496 - RNA, 24 nt, Artificial Sequence
  Synthetic
auuguuguucauguuguugacuau

SEQ ID NO: 368497 - RNA, 18 nt, Artificial Sequence
  Synthetic
aaaauaguaaaauacuau

SEQ ID NO: 368498 - RNA, 19 nt, Artificial Sequence
  Synthetic
uaaaauaguaaaauacuau

SEQ ID NO: 368499 - RNA, 20 nt, Artificial Sequence
  Synthetic
cuaaaauaguaaaauacuau

SEQ ID NO: 368500 - RNA, 21 nt, Artificial Sequence
  Synthetic
acuaaaauaguaaaauacuau

SEQ ID NO: 368501 - RNA, 22 nt, Artificial Sequence
  Synthetic
aacuaaaauaguaaaauacuau

SEQ ID NO: 368502 - RNA, 23 nt, Artificial Sequence
  Synthetic
aaacuaaaauaguaaaauacuau

SEQ ID NO: 368503 - RNA, 24 nt, Artificial Sequence
  Synthetic
caaacuaaaauaguaaaauacuau

SEQ ID NO: 368504 - RNA, 18 nt, Artificial Sequence
  Synthetic
ucguuuuguugauacuau

SEQ ID NO: 368505 - RNA, 19 nt, Artificial Sequence
  Synthetic
uucguuuuguugauacuau

SEQ ID NO: 368506 - RNA, 20 nt, Artificial Sequence
  Synthetic
auucguuuuguugauacuau

SEQ ID NO: 368507 - RNA, 21 nt, Artificial Sequence
  Synthetic
cauucguuuuguugauacuau

SEQ ID NO: 368508 - RNA, 22 nt, Artificial Sequence
  Synthetic
acauucguuuuguugauacuau

SEQ ID NO: 368509 - RNA, 23 nt, Artificial Sequence
  Synthetic
uacauucguuuuguugauacuau

SEQ ID NO: 368510 - RNA, 24 nt, Artificial Sequence
  Synthetic
auacauucguuuuguugauacuau

SEQ ID NO: 368511 - RNA, 18 nt, Artificial Sequence
  Synthetic
uaccauccuuccuacuau

SEQ ID NO: 368512 - RNA, 19 nt, Artificial Sequence
  Synthetic
auaccauccuuccuacuau

SEQ ID NO: 368513 - RNA, 20 nt, Artificial Sequence
  Synthetic
aauaccauccuuccuacuau

SEQ ID NO: 368514 - RNA, 21 nt, Artificial Sequence
  Synthetic
uaauaccauccuuccuacuau

SEQ ID NO: 368515 - RNA, 22 nt, Artificial Sequence
  Synthetic
auaauaccauccuuccuacuau

SEQ ID NO: 368516 - RNA, 23 nt, Artificial Sequence
  Synthetic
aauaauaccauccuuccuacuau

SEQ ID NO: 368517 - RNA, 24 nt, Artificial Sequence
  Synthetic
aaauaauaccauccuuccuacuau

SEQ ID NO: 368518 - RNA, 18 nt, Artificial Sequence
  Synthetic
uguauguaacuguacuau

SEQ ID NO: 368519 - RNA, 19 nt, Artificial Sequence
  Synthetic
auguauguaacuguacuau

SEQ ID NO: 368520 - RNA, 20 nt, Artificial Sequence
  Synthetic
aauguauguaacuguacuau

SEQ ID NO: 368521 - RNA, 21 nt, Artificial Sequence
  Synthetic
aaauguauguaacuguacuau

SEQ ID NO: 368522 - RNA, 22 nt, Artificial Sequence
  Synthetic
caaauguauguaacuguacuau

SEQ ID NO: 368523 - RNA, 23 nt, Artificial Sequence
  Synthetic
ccaaauguauguaacuguacuau

SEQ ID NO: 368524 - RNA, 24 nt, Artificial Sequence
  Synthetic
cccaaauguauguaacuguacuau

SEQ ID NO: 368525 - RNA, 18 nt, Artificial Sequence
  Synthetic
uuauugaacacuuacuau

SEQ ID NO: 368526 - RNA, 19 nt, Artificial Sequence
  Synthetic
uuuauugaacacuuacuau

SEQ ID NO: 368527 - RNA, 20 nt, Artificial Sequence
  Synthetic
guuuauugaacacuuacuau

SEQ ID NO: 368528 - RNA, 21 nt, Artificial Sequence
  Synthetic
uguuuauugaacacuuacuau

SEQ ID NO: 368529 - RNA, 22 nt, Artificial Sequence
  Synthetic
guguuuauugaacacuuacuau

SEQ ID NO: 368530 - RNA, 23 nt, Artificial Sequence
  Synthetic
aguguuuauugaacacuuacuau

SEQ ID NO: 368531 - RNA, 24 nt, Artificial Sequence
  Synthetic
aaguguuuauugaacacuuacuau

SEQ ID NO: 368532 - RNA, 18 nt, Artificial Sequence
  Synthetic
gaagaaggaauuuacuau

SEQ ID NO: 368533 - RNA, 19 nt, Artificial Sequence
  Synthetic
ggaagaaggaauuuacuau

SEQ ID NO: 368534 - RNA, 20 nt, Artificial Sequence
  Synthetic
uggaagaaggaauuuacuau

SEQ ID NO: 368535 - RNA, 21 nt, Artificial Sequence
  Synthetic
cuggaagaaggaauuuacuau

SEQ ID NO: 368536 - RNA, 22 nt, Artificial Sequence
  Synthetic
ucuggaagaaggaauuuacuau

SEQ ID NO: 368537 - RNA, 23 nt, Artificial Sequence
  Synthetic
gucuggaagaaggaauuuacuau

SEQ ID NO: 368538 - RNA, 24 nt, Artificial Sequence
  Synthetic
ggucuggaagaaggaauuuacuau

SEQ ID NO: 368539 - RNA, 18 nt, Artificial Sequence
  Synthetic
accaccauguuuuacuau

SEQ ID NO: 368540 - RNA, 19 nt, Artificial Sequence
  Synthetic
caccaccauguuuuacuau

SEQ ID NO: 368541 - RNA, 20 nt, Artificial Sequence
  Synthetic
ccaccaccauguuuuacuau

SEQ ID NO: 368542 - RNA, 21 nt, Artificial Sequence
  Synthetic
gccaccaccauguuuuacuau

SEQ ID NO: 368543 - RNA, 22 nt, Artificial Sequence
  Synthetic
agccaccaccauguuuuacuau

SEQ ID NO: 368544 - RNA, 23 nt, Artificial Sequence
  Synthetic
aagccaccaccauguuuuacuau

SEQ ID NO: 368545 - RNA, 24 nt, Artificial Sequence
  Synthetic
caagccaccaccauguuuuacuau

SEQ ID NO: 368546 - RNA, 18 nt, Artificial Sequence
  Synthetic
uccauuucaaaaaccuau

SEQ ID NO: 368547 - RNA, 19 nt, Artificial Sequence
  Synthetic
cuccauuucaaaaaccuau

SEQ ID NO: 368548 - RNA, 20 nt, Artificial Sequence
  Synthetic
acuccauuucaaaaaccuau

SEQ ID NO: 368549 - RNA, 21 nt, Artificial Sequence
  Synthetic
uacuccauuucaaaaaccuau

SEQ ID NO: 368550 - RNA, 22 nt, Artificial Sequence
  Synthetic
uuacuccauuucaaaaaccuau

SEQ ID NO: 368551 - RNA, 23 nt, Artificial Sequence
  Synthetic
guuacuccauuucaaaaaccuau

SEQ ID NO: 368552 - RNA, 24 nt, Artificial Sequence
  Synthetic
aguuacuccauuucaaaaaccuau

SEQ ID NO: 368553 - RNA, 18 nt, Artificial Sequence
  Synthetic
uuuguucaacgaaccuau

SEQ ID NO: 368554 - RNA, 19 nt, Artificial Sequence
  Synthetic
auuuguucaacgaaccuau

SEQ ID NO: 368555 - RNA, 20 nt, Artificial Sequence
  Synthetic
uauuuguucaacgaaccuau

SEQ ID NO: 368556 - RNA, 21 nt, Artificial Sequence
  Synthetic
auauuuguucaacgaaccuau

SEQ ID NO: 368557 - RNA, 22 nt, Artificial Sequence
  Synthetic
aauauuuguucaacgaaccuau

SEQ ID NO: 368558 - RNA, 23 nt, Artificial Sequence
  Synthetic
uaauauuuguucaacgaaccuau

SEQ ID NO: 368559 - RNA, 24 nt, Artificial Sequence
  Synthetic
uuaauauuuguucaacgaaccuau

SEQ ID NO: 368560 - RNA, 18 nt, Artificial Sequence
  Synthetic
aaaauacuuuccaccuau

SEQ ID NO: 368561 - RNA, 19 nt, Artificial Sequence
  Synthetic
gaaaauacuuuccaccuau

SEQ ID NO: 368562 - RNA, 20 nt, Artificial Sequence
  Synthetic
ggaaaauacuuuccaccuau

SEQ ID NO: 368563 - RNA, 21 nt, Artificial Sequence
  Synthetic
aggaaaauacuuuccaccuau

SEQ ID NO: 368564 - RNA, 22 nt, Artificial Sequence
  Synthetic
uaggaaaauacuuuccaccuau

SEQ ID NO: 368565 - RNA, 23 nt, Artificial Sequence
  Synthetic
guaggaaaauacuuuccaccuau

SEQ ID NO: 368566 - RNA, 24 nt, Artificial Sequence
  Synthetic
gguaggaaaauacuuuccaccuau

SEQ ID NO: 368567 - RNA, 18 nt, Artificial Sequence
  Synthetic
uaguggcuggggaccuau

SEQ ID NO: 368568 - RNA, 19 nt, Artificial Sequence
  Synthetic
auaguggcuggggaccuau

SEQ ID NO: 368569 - RNA, 20 nt, Artificial Sequence
  Synthetic
uauaguggcuggggaccuau

SEQ ID NO: 368570 - RNA, 21 nt, Artificial Sequence
  Synthetic
uuauaguggcuggggaccuau

SEQ ID NO: 368571 - RNA, 22 nt, Artificial Sequence
  Synthetic
uuuauaguggcuggggaccuau

SEQ ID NO: 368572 - RNA, 23 nt, Artificial Sequence
  Synthetic
auuuauaguggcuggggaccuau

SEQ ID NO: 368573 - RNA, 24 nt, Artificial Sequence
  Synthetic
aauuuauaguggcuggggaccuau

SEQ ID NO: 368574 - RNA, 18 nt, Artificial Sequence
  Synthetic
agguuagaggugaccuau

SEQ ID NO: 368575 - RNA, 19 nt, Artificial Sequence
  Synthetic
uagguuagaggugaccuau

SEQ ID NO: 368576 - RNA, 20 nt, Artificial Sequence
  Synthetic
uuagguuagaggugaccuau

SEQ ID NO: 368577 - RNA, 21 nt, Artificial Sequence
  Synthetic
guuagguuagaggugaccuau

SEQ ID NO: 368578 - RNA, 22 nt, Artificial Sequence
  Synthetic
gguuagguuagaggugaccuau

SEQ ID NO: 368579 - RNA, 23 nt, Artificial Sequence
  Synthetic
ugguuagguuagaggugaccuau

SEQ ID NO: 368580 - RNA, 24 nt, Artificial Sequence
  Synthetic
gugguuagguuagaggugaccuau

SEQ ID NO: 368581 - RNA, 18 nt, Artificial Sequence
  Synthetic
cuuauaaaauauaccuau

SEQ ID NO: 368582 - RNA, 19 nt, Artificial Sequence
  Synthetic
gcuuauaaaauauaccuau

SEQ ID NO: 368583 - RNA, 20 nt, Artificial Sequence
  Synthetic
ugcuuauaaaauauaccuau

SEQ ID NO: 368584 - RNA, 21 nt, Artificial Sequence
  Synthetic
cugcuuauaaaauauaccuau

SEQ ID NO: 368585 - RNA, 22 nt, Artificial Sequence
  Synthetic
acugcuuauaaaauauaccuau

SEQ ID NO: 368586 - RNA, 23 nt, Artificial Sequence
  Synthetic
aacugcuuauaaaauauaccuau

SEQ ID NO: 368587 - RNA, 24 nt, Artificial Sequence
  Synthetic
uaacugcuuauaaaauauaccuau

SEQ ID NO: 368588 - RNA, 18 nt, Artificial Sequence
  Synthetic
aaacaagucuguaccuau

SEQ ID NO: 368589 - RNA, 19 nt, Artificial Sequence
  Synthetic
caaacaagucuguaccuau

SEQ ID NO: 368590 - RNA, 20 nt, Artificial Sequence
  Synthetic
acaaacaagucuguaccuau

SEQ ID NO: 368591 - RNA, 21 nt, Artificial Sequence
  Synthetic
gacaaacaagucuguaccuau

SEQ ID NO: 368592 - RNA, 22 nt, Artificial Sequence
  Synthetic
agacaaacaagucuguaccuau

SEQ ID NO: 368593 - RNA, 23 nt, Artificial Sequence
  Synthetic
uagacaaacaagucuguaccuau

SEQ ID NO: 368594 - RNA, 24 nt, Artificial Sequence
  Synthetic
cuagacaaacaagucuguaccuau

SEQ ID NO: 368595 - RNA, 18 nt, Artificial Sequence
  Synthetic
gggaagagaguuaccuau

SEQ ID NO: 368596 - RNA, 19 nt, Artificial Sequence
  Synthetic
ugggaagagaguuaccuau

SEQ ID NO: 368597 - RNA, 20 nt, Artificial Sequence
  Synthetic
augggaagagaguuaccuau

SEQ ID NO: 368598 - RNA, 21 nt, Artificial Sequence
  Synthetic
caugggaagagaguuaccuau

SEQ ID NO: 368599 - RNA, 22 nt, Artificial Sequence
  Synthetic
ccaugggaagagaguuaccuau

SEQ ID NO: 368600 - RNA, 23 nt, Artificial Sequence
  Synthetic
uccaugggaagagaguuaccuau

SEQ ID NO: 368601 - RNA, 24 nt, Artificial Sequence
  Synthetic
guccaugggaagagaguuaccuau

SEQ ID NO: 368602 - RNA, 18 nt, Artificial Sequence
  Synthetic
aaccccucauuuaccuau

SEQ ID NO: 368603 - RNA, 19 nt, Artificial Sequence
  Synthetic
uaaccccucauuuaccuau

SEQ ID NO: 368604 - RNA, 20 nt, Artificial Sequence
  Synthetic
guaaccccucauuuaccuau

SEQ ID NO: 368605 - RNA, 21 nt, Artificial Sequence
  Synthetic
aguaaccccucauuuaccuau

SEQ ID NO: 368606 - RNA, 22 nt, Artificial Sequence
  Synthetic
uaguaaccccucauuuaccuau

SEQ ID NO: 368607 - RNA, 23 nt, Artificial Sequence
  Synthetic
auaguaaccccucauuuaccuau

SEQ ID NO: 368608 - RNA, 24 nt, Artificial Sequence
  Synthetic
uauaguaaccccucauuuaccuau

SEQ ID NO: 368609 - RNA, 18 nt, Artificial Sequence
  Synthetic
gccugauucuaucccuau

SEQ ID NO: 368610 - RNA, 19 nt, Artificial Sequence
  Synthetic
agccugauucuaucccuau

SEQ ID NO: 368611 - RNA, 20 nt, Artificial Sequence
  Synthetic
gagccugauucuaucccuau

SEQ ID NO: 368612 - RNA, 21 nt, Artificial Sequence
  Synthetic
ugagccugauucuaucccuau

SEQ ID NO: 368613 - RNA, 22 nt, Artificial Sequence
  Synthetic
cugagccugauucuaucccuau

SEQ ID NO: 368614 - RNA, 23 nt, Artificial Sequence
  Synthetic
acugagccugauucuaucccuau

SEQ ID NO: 368615 - RNA, 24 nt, Artificial Sequence
  Synthetic
aacugagccugauucuaucccuau

SEQ ID NO: 368616 - RNA, 18 nt, Artificial Sequence
  Synthetic
uuacaaccuagucccuau

SEQ ID NO: 368617 - RNA, 19 nt, Artificial Sequence
  Synthetic
guuacaaccuagucccuau

SEQ ID NO: 368618 - RNA, 20 nt, Artificial Sequence
  Synthetic
uguuacaaccuagucccuau

SEQ ID NO: 368619 - RNA, 21 nt, Artificial Sequence
  Synthetic
uuguuacaaccuagucccuau

SEQ ID NO: 368620 - RNA, 22 nt, Artificial Sequence
  Synthetic
uuuguuacaaccuagucccuau

SEQ ID NO: 368621 - RNA, 23 nt, Artificial Sequence
  Synthetic
cuuuguuacaaccuagucccuau

SEQ ID NO: 368622 - RNA, 24 nt, Artificial Sequence
  Synthetic
ccuuuguuacaaccuagucccuau

SEQ ID NO: 368623 - RNA, 18 nt, Artificial Sequence
  Synthetic
acacacaauggggccuau

SEQ ID NO: 368624 - RNA, 19 nt, Artificial Sequence
  Synthetic
aacacacaauggggccuau

SEQ ID NO: 368625 - RNA, 20 nt, Artificial Sequence
  Synthetic
caacacacaauggggccuau

SEQ ID NO: 368626 - RNA, 21 nt, Artificial Sequence
  Synthetic
acaacacacaauggggccuau

SEQ ID NO: 368627 - RNA, 22 nt, Artificial Sequence
  Synthetic
aacaacacacaauggggccuau

SEQ ID NO: 368628 - RNA, 23 nt, Artificial Sequence
  Synthetic
gaacaacacacaauggggccuau

SEQ ID NO: 368629 - RNA, 24 nt, Artificial Sequence
  Synthetic
ggaacaacacacaauggggccuau

SEQ ID NO: 368630 - RNA, 18 nt, Artificial Sequence
  Synthetic
ugaggaguacuggccuau

SEQ ID NO: 368631 - RNA, 19 nt, Artificial Sequence
  Synthetic
uugaggaguacuggccuau

SEQ ID NO: 368632 - RNA, 20 nt, Artificial Sequence
  Synthetic
auugaggaguacuggccuau

SEQ ID NO: 368633 - RNA, 21 nt, Artificial Sequence
  Synthetic
gauugaggaguacuggccuau

SEQ ID NO: 368634 - RNA, 22 nt, Artificial Sequence
  Synthetic
agauugaggaguacuggccuau

SEQ ID NO: 368635 - RNA, 23 nt, Artificial Sequence
  Synthetic
aagauugaggaguacuggccuau

SEQ ID NO: 368636 - RNA, 24 nt, Artificial Sequence
  Synthetic
aaagauugaggaguacuggccuau

SEQ ID NO: 368637 - RNA, 18 nt, Artificial Sequence
  Synthetic
ggagucaccugugccuau

SEQ ID NO: 368638 - RNA, 19 nt, Artificial Sequence
  Synthetic
gggagucaccugugccuau

SEQ ID NO: 368639 - RNA, 20 nt, Artificial Sequence
  Synthetic
ugggagucaccugugccuau

SEQ ID NO: 368640 - RNA, 21 nt, Artificial Sequence
  Synthetic
gugggagucaccugugccuau

SEQ ID NO: 368641 - RNA, 22 nt, Artificial Sequence
  Synthetic
ggugggagucaccugugccuau

SEQ ID NO: 368642 - RNA, 23 nt, Artificial Sequence
  Synthetic
aggugggagucaccugugccuau

SEQ ID NO: 368643 - RNA, 24 nt, Artificial Sequence
  Synthetic
uaggugggagucaccugugccuau

SEQ ID NO: 368644 - RNA, 18 nt, Artificial Sequence
  Synthetic
gcuaugacagaauccuau

SEQ ID NO: 368645 - RNA, 19 nt, Artificial Sequence
  Synthetic
ggcuaugacagaauccuau

SEQ ID NO: 368646 - RNA, 20 nt, Artificial Sequence
  Synthetic
aggcuaugacagaauccuau

SEQ ID NO: 368647 - RNA, 21 nt, Artificial Sequence
  Synthetic
uaggcuaugacagaauccuau

SEQ ID NO: 368648 - RNA, 22 nt, Artificial Sequence
  Synthetic
auaggcuaugacagaauccuau

SEQ ID NO: 368649 - RNA, 23 nt, Artificial Sequence
  Synthetic
aauaggcuaugacagaauccuau

SEQ ID NO: 368650 - RNA, 24 nt, Artificial Sequence
  Synthetic
caauaggcuaugacagaauccuau

SEQ ID NO: 368651 - RNA, 18 nt, Artificial Sequence
  Synthetic
uuaaguuugccauccuau

SEQ ID NO: 368652 - RNA, 19 nt, Artificial Sequence
  Synthetic
auuaaguuugccauccuau

SEQ ID NO: 368653 - RNA, 20 nt, Artificial Sequence
  Synthetic
gauuaaguuugccauccuau

SEQ ID NO: 368654 - RNA, 21 nt, Artificial Sequence
  Synthetic
ggauuaaguuugccauccuau

SEQ ID NO: 368655 - RNA, 22 nt, Artificial Sequence
  Synthetic
uggauuaaguuugccauccuau

SEQ ID NO: 368656 - RNA, 23 nt, Artificial Sequence
  Synthetic
auggauuaaguuugccauccuau

SEQ ID NO: 368657 - RNA, 24 nt, Artificial Sequence
  Synthetic
aauggauuaaguuugccauccuau

SEQ ID NO: 368658 - RNA, 18 nt, Artificial Sequence
  Synthetic
uuugauuucauauccuau

SEQ ID NO: 368659 - RNA, 19 nt, Artificial Sequence
  Synthetic
cuuugauuucauauccuau

SEQ ID NO: 368660 - RNA, 20 nt, Artificial Sequence
  Synthetic
gcuuugauuucauauccuau

SEQ ID NO: 368661 - RNA, 21 nt, Artificial Sequence
  Synthetic
ggcuuugauuucauauccuau

SEQ ID NO: 368662 - RNA, 22 nt, Artificial Sequence
  Synthetic
uggcuuugauuucauauccuau

SEQ ID NO: 368663 - RNA, 23 nt, Artificial Sequence
  Synthetic
uuggcuuugauuucauauccuau

SEQ ID NO: 368664 - RNA, 24 nt, Artificial Sequence
  Synthetic
uuuggcuuugauuucauauccuau

SEQ ID NO: 368665 - RNA, 18 nt, Artificial Sequence
  Synthetic
aggccacugugcuccuau

SEQ ID NO: 368666 - RNA, 19 nt, Artificial Sequence
  Synthetic
aaggccacugugcuccuau

SEQ ID NO: 368667 - RNA, 20 nt, Artificial Sequence
  Synthetic
aaaggccacugugcuccuau

SEQ ID NO: 368668 - RNA, 21 nt, Artificial Sequence
  Synthetic
uaaaggccacugugcuccuau

SEQ ID NO: 368669 - RNA, 22 nt, Artificial Sequence
  Synthetic
uuaaaggccacugugcuccuau

SEQ ID NO: 368670 - RNA, 23 nt, Artificial Sequence
  Synthetic
guuaaaggccacugugcuccuau

SEQ ID NO: 368671 - RNA, 24 nt, Artificial Sequence
  Synthetic
aguuaaaggccacugugcuccuau

SEQ ID NO: 368672 - RNA, 18 nt, Artificial Sequence
  Synthetic
auaaagaaaacuuccuau

SEQ ID NO: 368673 - RNA, 19 nt, Artificial Sequence
  Synthetic
aauaaagaaaacuuccuau

SEQ ID NO: 368674 - RNA, 20 nt, Artificial Sequence
  Synthetic
aaauaaagaaaacuuccuau

SEQ ID NO: 368675 - RNA, 21 nt, Artificial Sequence
  Synthetic
aaaauaaagaaaacuuccuau

SEQ ID NO: 368676 - RNA, 22 nt, Artificial Sequence
  Synthetic
aaaaauaaagaaaacuuccuau

SEQ ID NO: 368677 - RNA, 23 nt, Artificial Sequence
  Synthetic
uaaaaauaaagaaaacuuccuau

SEQ ID NO: 368678 - RNA, 24 nt, Artificial Sequence
  Synthetic
auaaaaauaaagaaaacuuccuau

SEQ ID NO: 368679 - RNA, 18 nt, Artificial Sequence
  Synthetic
acaaaacucaaaagcuau

SEQ ID NO: 368680 - RNA, 19 nt, Artificial Sequence
  Synthetic
cacaaaacucaaaagcuau

SEQ ID NO: 368681 - RNA, 20 nt, Artificial Sequence
  Synthetic
acacaaaacucaaaagcuau

SEQ ID NO: 368682 - RNA, 21 nt, Artificial Sequence
  Synthetic
gacacaaaacucaaaagcuau

SEQ ID NO: 368683 - RNA, 22 nt, Artificial Sequence
  Synthetic
agacacaaaacucaaaagcuau

SEQ ID NO: 368684 - RNA, 23 nt, Artificial Sequence
  Synthetic
aagacacaaaacucaaaagcuau

SEQ ID NO: 368685 - RNA, 24 nt, Artificial Sequence
  Synthetic
caagacacaaaacucaaaagcuau

SEQ ID NO: 368686 - RNA, 18 nt, Artificial Sequence
  Synthetic
gucuguaaucccagcuau

SEQ ID NO: 368687 - RNA, 19 nt, Artificial Sequence
  Synthetic
ugucuguaaucccagcuau

SEQ ID NO: 368688 - RNA, 20 nt, Artificial Sequence
  Synthetic
gugucuguaaucccagcuau

SEQ ID NO: 368689 - RNA, 21 nt, Artificial Sequence
  Synthetic
ugugucuguaaucccagcuau

SEQ ID NO: 368690 - RNA, 22 nt, Artificial Sequence
  Synthetic
augugucuguaaucccagcuau

SEQ ID NO: 368691 - RNA, 23 nt, Artificial Sequence
  Synthetic
caugugucuguaaucccagcuau

SEQ ID NO: 368692 - RNA, 24 nt, Artificial Sequence
  Synthetic
gcaugugucuguaaucccagcuau

SEQ ID NO: 368693 - RNA, 18 nt, Artificial Sequence
  Synthetic
augucgacagccagcuau

SEQ ID NO: 368694 - RNA, 19 nt, Artificial Sequence
  Synthetic
aaugucgacagccagcuau

SEQ ID NO: 368695 - RNA, 20 nt, Artificial Sequence
  Synthetic
uaaugucgacagccagcuau

SEQ ID NO: 368696 - RNA, 21 nt, Artificial Sequence
  Synthetic
uuaaugucgacagccagcuau

SEQ ID NO: 368697 - RNA, 22 nt, Artificial Sequence
  Synthetic
guuaaugucgacagccagcuau

SEQ ID NO: 368698 - RNA, 23 nt, Artificial Sequence
  Synthetic
uguuaaugucgacagccagcuau

SEQ ID NO: 368699 - RNA, 24 nt, Artificial Sequence
  Synthetic
auguuaaugucgacagccagcuau

SEQ ID NO: 368700 - RNA, 18 nt, Artificial Sequence
  Synthetic
caaauucuaagcagcuau

SEQ ID NO: 368701 - RNA, 19 nt, Artificial Sequence
  Synthetic
acaaauucuaagcagcuau

SEQ ID NO: 368702 - RNA, 20 nt, Artificial Sequence
  Synthetic
cacaaauucuaagcagcuau

SEQ ID NO: 368703 - RNA, 21 nt, Artificial Sequence
  Synthetic
gcacaaauucuaagcagcuau

SEQ ID NO: 368704 - RNA, 22 nt, Artificial Sequence
  Synthetic
agcacaaauucuaagcagcuau

SEQ ID NO: 368705 - RNA, 23 nt, Artificial Sequence
  Synthetic
cagcacaaauucuaagcagcuau

SEQ ID NO: 368706 - RNA, 24 nt, Artificial Sequence
  Synthetic
ccagcacaaauucuaagcagcuau

SEQ ID NO: 368707 - RNA, 18 nt, Artificial Sequence
  Synthetic
aacagauacgugagcuau

SEQ ID NO: 368708 - RNA, 19 nt, Artificial Sequence
  Synthetic
aaacagauacgugagcuau

SEQ ID NO: 368709 - RNA, 20 nt, Artificial Sequence
  Synthetic
aaaacagauacgugagcuau

SEQ ID NO: 368710 - RNA, 21 nt, Artificial Sequence
  Synthetic
caaaacagauacgugagcuau

SEQ ID NO: 368711 - RNA, 22 nt, Artificial Sequence
  Synthetic
acaaaacagauacgugagcuau

SEQ ID NO: 368712 - RNA, 23 nt, Artificial Sequence
  Synthetic
aacaaaacagauacgugagcuau

SEQ ID NO: 368713 - RNA, 24 nt, Artificial Sequence
  Synthetic
aaacaaaacagauacgugagcuau

SEQ ID NO: 368714 - RNA, 18 nt, Artificial Sequence
  Synthetic
auguucacuacuagcuau

SEQ ID NO: 368715 - RNA, 19 nt, Artificial Sequence
  Synthetic
uauguucacuacuagcuau

SEQ ID NO: 368716 - RNA, 20 nt, Artificial Sequence
  Synthetic
guauguucacuacuagcuau

SEQ ID NO: 368717 - RNA, 21 nt, Artificial Sequence
  Synthetic
aguauguucacuacuagcuau

SEQ ID NO: 368718 - RNA, 22 nt, Artificial Sequence
  Synthetic
caguauguucacuacuagcuau

SEQ ID NO: 368719 - RNA, 23 nt, Artificial Sequence
  Synthetic
ucaguauguucacuacuagcuau

SEQ ID NO: 368720 - RNA, 24 nt, Artificial Sequence
  Synthetic
aucaguauguucacuacuagcuau

SEQ ID NO: 368721 - RNA, 18 nt, Artificial Sequence
  Synthetic
augaccauaucuagcuau

SEQ ID NO: 368722 - RNA, 19 nt, Artificial Sequence
  Synthetic
uaugaccauaucuagcuau

SEQ ID NO: 368723 - RNA, 20 nt, Artificial Sequence
  Synthetic
auaugaccauaucuagcuau

SEQ ID NO: 368724 - RNA, 21 nt, Artificial Sequence
  Synthetic
cauaugaccauaucuagcuau

SEQ ID NO: 368725 - RNA, 22 nt, Artificial Sequence
  Synthetic
acauaugaccauaucuagcuau

SEQ ID NO: 368726 - RNA, 23 nt, Artificial Sequence
  Synthetic
uacauaugaccauaucuagcuau

SEQ ID NO: 368727 - RNA, 24 nt, Artificial Sequence
  Synthetic
uuacauaugaccauaucuagcuau

SEQ ID NO: 368728 - RNA, 18 nt, Artificial Sequence
  Synthetic
cauugguuucuuagcuau

SEQ ID NO: 368729 - RNA, 19 nt, Artificial Sequence
  Synthetic
acauugguuucuuagcuau

SEQ ID NO: 368730 - RNA, 20 nt, Artificial Sequence
  Synthetic
uacauugguuucuuagcuau

SEQ ID NO: 368731 - RNA, 21 nt, Artificial Sequence
  Synthetic
guacauugguuucuuagcuau

SEQ ID NO: 368732 - RNA, 22 nt, Artificial Sequence
  Synthetic
cguacauugguuucuuagcuau

SEQ ID NO: 368733 - RNA, 23 nt, Artificial Sequence
  Synthetic
ccguacauugguuucuuagcuau

SEQ ID NO: 368734 - RNA, 24 nt, Artificial Sequence
  Synthetic
uccguacauugguuucuuagcuau

SEQ ID NO: 368735 - RNA, 18 nt, Artificial Sequence
  Synthetic
auccuccuuuuuagcuau

SEQ ID NO: 368736 - RNA, 19 nt, Artificial Sequence
  Synthetic
aauccuccuuuuuagcuau

SEQ ID NO: 368737 - RNA, 20 nt, Artificial Sequence
  Synthetic
aaauccuccuuuuuagcuau

SEQ ID NO: 368738 - RNA, 21 nt, Artificial Sequence
  Synthetic
aaaauccuccuuuuuagcuau

SEQ ID NO: 368739 - RNA, 22 nt, Artificial Sequence
  Synthetic
uaaaauccuccuuuuuagcuau

SEQ ID NO: 368740 - RNA, 23 nt, Artificial Sequence
  Synthetic
uuaaaauccuccuuuuuagcuau

SEQ ID NO: 368741 - RNA, 24 nt, Artificial Sequence
  Synthetic
uuuaaaauccuccuuuuuagcuau

SEQ ID NO: 368742 - RNA, 18 nt, Artificial Sequence
  Synthetic
cugcuuuagcuacgcuau

SEQ ID NO: 368743 - RNA, 19 nt, Artificial Sequence
  Synthetic
acugcuuuagcuacgcuau

SEQ ID NO: 368744 - RNA, 20 nt, Artificial Sequence
  Synthetic
cacugcuuuagcuacgcuau

SEQ ID NO: 368745 - RNA, 21 nt, Artificial Sequence
  Synthetic
ccacugcuuuagcuacgcuau

SEQ ID NO: 368746 - RNA, 22 nt, Artificial Sequence
  Synthetic
accacugcuuuagcuacgcuau

SEQ ID NO: 368747 - RNA, 23 nt, Artificial Sequence
  Synthetic
aaccacugcuuuagcuacgcuau

SEQ ID NO: 368748 - RNA, 24 nt, Artificial Sequence
  Synthetic
aaaccacugcuuuagcuacgcuau

SEQ ID NO: 368749 - RNA, 18 nt, Artificial Sequence
  Synthetic
gaauguuauguacgcuau

SEQ ID NO: 368750 - RNA, 19 nt, Artificial Sequence
  Synthetic
ugaauguuauguacgcuau

SEQ ID NO: 368751 - RNA, 20 nt, Artificial Sequence
  Synthetic
cugaauguuauguacgcuau

SEQ ID NO: 368752 - RNA, 21 nt, Artificial Sequence
  Synthetic
ucugaauguuauguacgcuau

SEQ ID NO: 368753 - RNA, 22 nt, Artificial Sequence
  Synthetic
uucugaauguuauguacgcuau

SEQ ID NO: 368754 - RNA, 23 nt, Artificial Sequence
  Synthetic
guucugaauguuauguacgcuau

SEQ ID NO: 368755 - RNA, 24 nt, Artificial Sequence
  Synthetic
gguucugaauguuauguacgcuau

SEQ ID NO: 368756 - RNA, 18 nt, Artificial Sequence
  Synthetic
uucaaggguaaaggcuau

SEQ ID NO: 368757 - RNA, 19 nt, Artificial Sequence
  Synthetic
guucaaggguaaaggcuau

SEQ ID NO: 368758 - RNA, 20 nt, Artificial Sequence
  Synthetic
aguucaaggguaaaggcuau

SEQ ID NO: 368759 - RNA, 21 nt, Artificial Sequence
  Synthetic
aaguucaaggguaaaggcuau

SEQ ID NO: 368760 - RNA, 22 nt, Artificial Sequence
  Synthetic
gaaguucaaggguaaaggcuau

SEQ ID NO: 368761 - RNA, 23 nt, Artificial Sequence
  Synthetic
ugaaguucaaggguaaaggcuau

SEQ ID NO: 368762 - RNA, 24 nt, Artificial Sequence
  Synthetic
cugaaguucaaggguaaaggcuau

SEQ ID NO: 368763 - RNA, 18 nt, Artificial Sequence
  Synthetic
acaagcuccccaggcuau

SEQ ID NO: 368764 - RNA, 19 nt, Artificial Sequence
  Synthetic
aacaagcuccccaggcuau

SEQ ID NO: 368765 - RNA, 20 nt, Artificial Sequence
  Synthetic
uaacaagcuccccaggcuau

SEQ ID NO: 368766 - RNA, 21 nt, Artificial Sequence
  Synthetic
auaacaagcuccccaggcuau

SEQ ID NO: 368767 - RNA, 22 nt, Artificial Sequence
  Synthetic
uauaacaagcuccccaggcuau

SEQ ID NO: 368768 - RNA, 23 nt, Artificial Sequence
  Synthetic
uuauaacaagcuccccaggcuau

SEQ ID NO: 368769 - RNA, 24 nt, Artificial Sequence
  Synthetic
uuuauaacaagcuccccaggcuau

SEQ ID NO: 368770 - RNA, 18 nt, Artificial Sequence
  Synthetic
aacuuacguggaggcuau

SEQ ID NO: 368771 - RNA, 19 nt, Artificial Sequence
  Synthetic
caacuuacguggaggcuau

SEQ ID NO: 368772 - RNA, 20 nt, Artificial Sequence
  Synthetic
gcaacuuacguggaggcuau

SEQ ID NO: 368773 - RNA, 21 nt, Artificial Sequence
  Synthetic
ugcaacuuacguggaggcuau

SEQ ID NO: 368774 - RNA, 22 nt, Artificial Sequence
  Synthetic
augcaacuuacguggaggcuau

SEQ ID NO: 368775 - RNA, 23 nt, Artificial Sequence
  Synthetic
aaugcaacuuacguggaggcuau

SEQ ID NO: 368776 - RNA, 24 nt, Artificial Sequence
  Synthetic
aaaugcaacuuacguggaggcuau

SEQ ID NO: 368777 - RNA, 18 nt, Artificial Sequence
  Synthetic
aaagaaguuggaggcuau

SEQ ID NO: 368778 - RNA, 19 nt, Artificial Sequence
  Synthetic
uaaagaaguuggaggcuau

SEQ ID NO: 368779 - RNA, 20 nt, Artificial Sequence
  Synthetic
cuaaagaaguuggaggcuau

SEQ ID NO: 368780 - RNA, 21 nt, Artificial Sequence
  Synthetic
gcuaaagaaguuggaggcuau

SEQ ID NO: 368781 - RNA, 22 nt, Artificial Sequence
  Synthetic
ggcuaaagaaguuggaggcuau

SEQ ID NO: 368782 - RNA, 23 nt, Artificial Sequence
  Synthetic
aggcuaaagaaguuggaggcuau

SEQ ID NO: 368783 - RNA, 24 nt, Artificial Sequence
  Synthetic
caggcuaaagaaguuggaggcuau

SEQ ID NO: 368784 - RNA, 18 nt, Artificial Sequence
  Synthetic
caaacccuaugaggcuau

SEQ ID NO: 368785 - RNA, 19 nt, Artificial Sequence
  Synthetic
ccaaacccuaugaggcuau

SEQ ID NO: 368786 - RNA, 20 nt, Artificial Sequence
  Synthetic
gccaaacccuaugaggcuau

SEQ ID NO: 368787 - RNA, 21 nt, Artificial Sequence
  Synthetic
ugccaaacccuaugaggcuau

SEQ ID NO: 368788 - RNA, 22 nt, Artificial Sequence
  Synthetic
cugccaaacccuaugaggcuau

SEQ ID NO: 368789 - RNA, 23 nt, Artificial Sequence
  Synthetic
ccugccaaacccuaugaggcuau

SEQ ID NO: 368790 - RNA, 24 nt, Artificial Sequence
  Synthetic
accugccaaacccuaugaggcuau

SEQ ID NO: 368791 - RNA, 18 nt, Artificial Sequence
  Synthetic
cugcuuuagcuaggcuau

SEQ ID NO: 368792 - RNA, 19 nt, Artificial Sequence
  Synthetic
acugcuuuagcuaggcuau

SEQ ID NO: 368793 - RNA, 20 nt, Artificial Sequence
  Synthetic
cacugcuuuagcuaggcuau

SEQ ID NO: 368794 - RNA, 21 nt, Artificial Sequence
  Synthetic
ccacugcuuuagcuaggcuau

SEQ ID NO: 368795 - RNA, 22 nt, Artificial Sequence
  Synthetic
accacugcuuuagcuaggcuau

SEQ ID NO: 368796 - RNA, 23 nt, Artificial Sequence
  Synthetic
aaccacugcuuuagcuaggcuau

SEQ ID NO: 368797 - RNA, 24 nt, Artificial Sequence
  Synthetic
aaaccacugcuuuagcuaggcuau

SEQ ID NO: 368798 - RNA, 18 nt, Artificial Sequence
  Synthetic
gagaaaaaaguaggcuau

SEQ ID NO: 368799 - RNA, 19 nt, Artificial Sequence
  Synthetic
ugagaaaaaaguaggcuau

SEQ ID NO: 368800 - RNA, 20 nt, Artificial Sequence
  Synthetic
gugagaaaaaaguaggcuau

SEQ ID NO: 368801 - RNA, 21 nt, Artificial Sequence
  Synthetic
ugugagaaaaaaguaggcuau

SEQ ID NO: 368802 - RNA, 22 nt, Artificial Sequence
  Synthetic
augugagaaaaaaguaggcuau

SEQ ID NO: 368803 - RNA, 23 nt, Artificial Sequence
  Synthetic
uaugugagaaaaaaguaggcuau

SEQ ID NO: 368804 - RNA, 24 nt, Artificial Sequence
  Synthetic
uuaugugagaaaaaaguaggcuau

SEQ ID NO: 368805 - RNA, 18 nt, Artificial Sequence
  Synthetic
ugucuauuauggggcuau

SEQ ID NO: 368806 - RNA, 19 nt, Artificial Sequence
  Synthetic
gugucuauuauggggcuau

SEQ ID NO: 368807 - RNA, 20 nt, Artificial Sequence
  Synthetic
ugugucuauuauggggcuau

SEQ ID NO: 368808 - RNA, 21 nt, Artificial Sequence
  Synthetic
cugugucuauuauggggcuau

SEQ ID NO: 368809 - RNA, 22 nt, Artificial Sequence
  Synthetic
gcugugucuauuauggggcuau

SEQ ID NO: 368810 - RNA, 23 nt, Artificial Sequence
  Synthetic
ggcugugucuauuauggggcuau

SEQ ID NO: 368811 - RNA, 24 nt, Artificial Sequence
  Synthetic
gggcugugucuauuauggggcuau

SEQ ID NO: 368812 - RNA, 18 nt, Artificial Sequence
  Synthetic
uaggauuuucuuggcuau

SEQ ID NO: 368813 - RNA, 19 nt, Artificial Sequence
  Synthetic
uuaggauuuucuuggcuau

SEQ ID NO: 368814 - RNA, 20 nt, Artificial Sequence
  Synthetic
cuuaggauuuucuuggcuau

SEQ ID NO: 368815 - RNA, 21 nt, Artificial Sequence
  Synthetic
gcuuaggauuuucuuggcuau

SEQ ID NO: 368816 - RNA, 22 nt, Artificial Sequence
  Synthetic
ugcuuaggauuuucuuggcuau

SEQ ID NO: 368817 - RNA, 23 nt, Artificial Sequence
  Synthetic
uugcuuaggauuuucuuggcuau

SEQ ID NO: 368818 - RNA, 24 nt, Artificial Sequence
  Synthetic
cuugcuuaggauuuucuuggcuau

SEQ ID NO: 368819 - RNA, 18 nt, Artificial Sequence
  Synthetic
caagacuguuuuggcuau

SEQ ID NO: 368820 - RNA, 19 nt, Artificial Sequence
  Synthetic
ucaagacuguuuuggcuau

SEQ ID NO: 368821 - RNA, 20 nt, Artificial Sequence
  Synthetic
cucaagacuguuuuggcuau

SEQ ID NO: 368822 - RNA, 21 nt, Artificial Sequence
  Synthetic
ccucaagacuguuuuggcuau

SEQ ID NO: 368823 - RNA, 22 nt, Artificial Sequence
  Synthetic
uccucaagacuguuuuggcuau

SEQ ID NO: 368824 - RNA, 23 nt, Artificial Sequence
  Synthetic
uuccucaagacuguuuuggcuau

SEQ ID NO: 368825 - RNA, 24 nt, Artificial Sequence
  Synthetic
cuuccucaagacuguuuuggcuau

SEQ ID NO: 368826 - RNA, 18 nt, Artificial Sequence
  Synthetic
agggaccugagcugcuau

SEQ ID NO: 368827 - RNA, 19 nt, Artificial Sequence
  Synthetic
aagggaccugagcugcuau

SEQ ID NO: 368828 - RNA, 20 nt, Artificial Sequence
  Synthetic
gaagggaccugagcugcuau

SEQ ID NO: 368829 - RNA, 21 nt, Artificial Sequence
  Synthetic
cgaagggaccugagcugcuau

SEQ ID NO: 368830 - RNA, 22 nt, Artificial Sequence
  Synthetic
ucgaagggaccugagcugcuau

SEQ ID NO: 368831 - RNA, 23 nt, Artificial Sequence
  Synthetic
aucgaagggaccugagcugcuau

SEQ ID NO: 368832 - RNA, 24 nt, Artificial Sequence
  Synthetic
uaucgaagggaccugagcugcuau

SEQ ID NO: 368833 - RNA, 18 nt, Artificial Sequence
  Synthetic
uauuauuauuucugcuau

SEQ ID NO: 368834 - RNA, 19 nt, Artificial Sequence
  Synthetic
guauuauuauuucugcuau

SEQ ID NO: 368835 - RNA, 20 nt, Artificial Sequence
  Synthetic
aguauuauuauuucugcuau

SEQ ID NO: 368836 - RNA, 21 nt, Artificial Sequence
  Synthetic
aaguauuauuauuucugcuau

SEQ ID NO: 368837 - RNA, 22 nt, Artificial Sequence
  Synthetic
aaaguauuauuauuucugcuau

SEQ ID NO: 368838 - RNA, 23 nt, Artificial Sequence
  Synthetic
uaaaguauuauuauuucugcuau

SEQ ID NO: 368839 - RNA, 24 nt, Artificial Sequence
  Synthetic
auaaaguauuauuauuucugcuau

SEQ ID NO: 368840 - RNA, 18 nt, Artificial Sequence
  Synthetic
auggacauucugugcuau

SEQ ID NO: 368841 - RNA, 19 nt, Artificial Sequence
  Synthetic
cauggacauucugugcuau

SEQ ID NO: 368842 - RNA, 20 nt, Artificial Sequence
  Synthetic
ucauggacauucugugcuau

SEQ ID NO: 368843 - RNA, 21 nt, Artificial Sequence
  Synthetic
uucauggacauucugugcuau

SEQ ID NO: 368844 - RNA, 22 nt, Artificial Sequence
  Synthetic
auucauggacauucugugcuau

SEQ ID NO: 368845 - RNA, 23 nt, Artificial Sequence
  Synthetic
gauucauggacauucugugcuau

SEQ ID NO: 368846 - RNA, 24 nt, Artificial Sequence
  Synthetic
ugauucauggacauucugugcuau

SEQ ID NO: 368847 - RNA, 18 nt, Artificial Sequence
  Synthetic
aaucgauuggcuugcuau

SEQ ID NO: 368848 - RNA, 19 nt, Artificial Sequence
  Synthetic
caaucgauuggcuugcuau

SEQ ID NO: 368849 - RNA, 20 nt, Artificial Sequence
  Synthetic
ucaaucgauuggcuugcuau

SEQ ID NO: 368850 - RNA, 21 nt, Artificial Sequence
  Synthetic
gucaaucgauuggcuugcuau

SEQ ID NO: 368851 - RNA, 22 nt, Artificial Sequence
  Synthetic
ugucaaucgauuggcuugcuau

SEQ ID NO: 368852 - RNA, 23 nt, Artificial Sequence
  Synthetic
augucaaucgauuggcuugcuau

SEQ ID NO: 368853 - RNA, 24 nt, Artificial Sequence
  Synthetic
aaugucaaucgauuggcuugcuau

SEQ ID NO: 368854 - RNA, 18 nt, Artificial Sequence
  Synthetic
uuggggagugcuugcuau

SEQ ID NO: 368855 - RNA, 19 nt, Artificial Sequence
  Synthetic
auuggggagugcuugcuau

SEQ ID NO: 368856 - RNA, 20 nt, Artificial Sequence
  Synthetic
uauuggggagugcuugcuau

SEQ ID NO: 368857 - RNA, 21 nt, Artificial Sequence
  Synthetic
cuauuggggagugcuugcuau

SEQ ID NO: 368858 - RNA, 22 nt, Artificial Sequence
  Synthetic
ucuauuggggagugcuugcuau

SEQ ID NO: 368859 - RNA, 23 nt, Artificial Sequence
  Synthetic
aucuauuggggagugcuugcuau

SEQ ID NO: 368860 - RNA, 24 nt, Artificial Sequence
  Synthetic
aaucuauuggggagugcuugcuau

SEQ ID NO: 368861 - RNA, 18 nt, Artificial Sequence
  Synthetic
agccaguccaaaaucuau

SEQ ID NO: 368862 - RNA, 19 nt, Artificial Sequence
  Synthetic
aagccaguccaaaaucuau

SEQ ID NO: 368863 - RNA, 20 nt, Artificial Sequence
  Synthetic
caagccaguccaaaaucuau

SEQ ID NO: 368864 - RNA, 21 nt, Artificial Sequence
  Synthetic
ccaagccaguccaaaaucuau

SEQ ID NO: 368865 - RNA, 22 nt, Artificial Sequence
  Synthetic
cccaagccaguccaaaaucuau

SEQ ID NO: 368866 - RNA, 23 nt, Artificial Sequence
  Synthetic
ccccaagccaguccaaaaucuau

SEQ ID NO: 368867 - RNA, 24 nt, Artificial Sequence
  Synthetic
gccccaagccaguccaaaaucuau

SEQ ID NO: 368868 - RNA, 18 nt, Artificial Sequence
  Synthetic
gcauacucuaaaaucuau

SEQ ID NO: 368869 - RNA, 19 nt, Artificial Sequence
  Synthetic
agcauacucuaaaaucuau

SEQ ID NO: 368870 - RNA, 20 nt, Artificial Sequence
  Synthetic
aagcauacucuaaaaucuau

SEQ ID NO: 368871 - RNA, 21 nt, Artificial Sequence
  Synthetic
caagcauacucuaaaaucuau

SEQ ID NO: 368872 - RNA, 22 nt, Artificial Sequence
  Synthetic
acaagcauacucuaaaaucuau

SEQ ID NO: 368873 - RNA, 23 nt, Artificial Sequence
  Synthetic
gacaagcauacucuaaaaucuau

SEQ ID NO: 368874 - RNA, 24 nt, Artificial Sequence
  Synthetic
agacaagcauacucuaaaaucuau

SEQ ID NO: 368875 - RNA, 18 nt, Artificial Sequence
  Synthetic
cugaguuuggaaaucuau

SEQ ID NO: 368876 - RNA, 19 nt, Artificial Sequence
  Synthetic
ucugaguuuggaaaucuau

SEQ ID NO: 368877 - RNA, 20 nt, Artificial Sequence
  Synthetic
uucugaguuuggaaaucuau

SEQ ID NO: 368878 - RNA, 21 nt, Artificial Sequence
  Synthetic
auucugaguuuggaaaucuau

SEQ ID NO: 368879 - RNA, 22 nt, Artificial Sequence
  Synthetic
aauucugaguuuggaaaucuau

SEQ ID NO: 368880 - RNA, 23 nt, Artificial Sequence
  Synthetic
aaauucugaguuuggaaaucuau

SEQ ID NO: 368881 - RNA, 24 nt, Artificial Sequence
  Synthetic
aaaauucugaguuuggaaaucuau

SEQ ID NO: 368882 - RNA, 18 nt, Artificial Sequence
  Synthetic
uagaagccauaaaucuau

SEQ ID NO: 368883 - RNA, 19 nt, Artificial Sequence
  Synthetic
guagaagccauaaaucuau

SEQ ID NO: 368884 - RNA, 20 nt, Artificial Sequence
  Synthetic
uguagaagccauaaaucuau

SEQ ID NO: 368885 - RNA, 21 nt, Artificial Sequence
  Synthetic
cuguagaagccauaaaucuau

SEQ ID NO: 368886 - RNA, 22 nt, Artificial Sequence
  Synthetic
ucuguagaagccauaaaucuau

SEQ ID NO: 368887 - RNA, 23 nt, Artificial Sequence
  Synthetic
gucuguagaagccauaaaucuau

SEQ ID NO: 368888 - RNA, 24 nt, Artificial Sequence
  Synthetic
agucuguagaagccauaaaucuau

SEQ ID NO: 368889 - RNA, 18 nt, Artificial Sequence
  Synthetic
guaauauccagaaucuau

SEQ ID NO: 368890 - RNA, 19 nt, Artificial Sequence
  Synthetic
uguaauauccagaaucuau

SEQ ID NO: 368891 - RNA, 20 nt, Artificial Sequence
  Synthetic
guguaauauccagaaucuau

SEQ ID NO: 368892 - RNA, 21 nt, Artificial Sequence
  Synthetic
gguguaauauccagaaucuau

SEQ ID NO: 368893 - RNA, 22 nt, Artificial Sequence
  Synthetic
ugguguaauauccagaaucuau

SEQ ID NO: 368894 - RNA, 23 nt, Artificial Sequence
  Synthetic
gugguguaauauccagaaucuau

SEQ ID NO: 368895 - RNA, 24 nt, Artificial Sequence
  Synthetic
ggugguguaauauccagaaucuau

SEQ ID NO: 368896 - RNA, 18 nt, Artificial Sequence
  Synthetic
cuaauauccauaaucuau

SEQ ID NO: 368897 - RNA, 19 nt, Artificial Sequence
  Synthetic
ucuaauauccauaaucuau

SEQ ID NO: 368898 - RNA, 20 nt, Artificial Sequence
  Synthetic
aucuaauauccauaaucuau

SEQ ID NO: 368899 - RNA, 21 nt, Artificial Sequence
  Synthetic
gaucuaauauccauaaucuau

SEQ ID NO: 368900 - RNA, 22 nt, Artificial Sequence
  Synthetic
agaucuaauauccauaaucuau

SEQ ID NO: 368901 - RNA, 23 nt, Artificial Sequence
  Synthetic
aagaucuaauauccauaaucuau

SEQ ID NO: 368902 - RNA, 24 nt, Artificial Sequence
  Synthetic
aaagaucuaauauccauaaucuau

SEQ ID NO: 368903 - RNA, 18 nt, Artificial Sequence
  Synthetic
aauaugaaucacaucuau

SEQ ID NO: 368904 - RNA, 19 nt, Artificial Sequence
  Synthetic
gaauaugaaucacaucuau

SEQ ID NO: 368905 - RNA, 20 nt, Artificial Sequence
  Synthetic
agaauaugaaucacaucuau

SEQ ID NO: 368906 - RNA, 21 nt, Artificial Sequence
  Synthetic
gagaauaugaaucacaucuau

SEQ ID NO: 368907 - RNA, 22 nt, Artificial Sequence
  Synthetic
agagaauaugaaucacaucuau

SEQ ID NO: 368908 - RNA, 23 nt, Artificial Sequence
  Synthetic
uagagaauaugaaucacaucuau

SEQ ID NO: 368909 - RNA, 24 nt, Artificial Sequence
  Synthetic
uuagagaauaugaaucacaucuau

SEQ ID NO: 368910 - RNA, 18 nt, Artificial Sequence
  Synthetic
uauaucaggaagaucuau

SEQ ID NO: 368911 - RNA, 19 nt, Artificial Sequence
  Synthetic
uuauaucaggaagaucuau

SEQ ID NO: 368912 - RNA, 20 nt, Artificial Sequence
  Synthetic
uuuauaucaggaagaucuau

SEQ ID NO: 368913 - RNA, 21 nt, Artificial Sequence
  Synthetic
auuuauaucaggaagaucuau

SEQ ID NO: 368914 - RNA, 22 nt, Artificial Sequence
  Synthetic
uauuuauaucaggaagaucuau

SEQ ID NO: 368915 - RNA, 23 nt, Artificial Sequence
  Synthetic
guauuuauaucaggaagaucuau

SEQ ID NO: 368916 - RNA, 24 nt, Artificial Sequence
  Synthetic
uguauuuauaucaggaagaucuau

SEQ ID NO: 368917 - RNA, 18 nt, Artificial Sequence
  Synthetic
aauuuacauaagaucuau

SEQ ID NO: 368918 - RNA, 19 nt, Artificial Sequence
  Synthetic
gaauuuacauaagaucuau

SEQ ID NO: 368919 - RNA, 20 nt, Artificial Sequence
  Synthetic
agaauuuacauaagaucuau

SEQ ID NO: 368920 - RNA, 21 nt, Artificial Sequence
  Synthetic
aagaauuuacauaagaucuau

SEQ ID NO: 368921 - RNA, 22 nt, Artificial Sequence
  Synthetic
aaagaauuuacauaagaucuau

SEQ ID NO: 368922 - RNA, 23 nt, Artificial Sequence
  Synthetic
caaagaauuuacauaagaucuau

SEQ ID NO: 368923 - RNA, 24 nt, Artificial Sequence
  Synthetic
acaaagaauuuacauaagaucuau

SEQ ID NO: 368924 - RNA, 18 nt, Artificial Sequence
  Synthetic
auuaguggaaauaucuau

SEQ ID NO: 368925 - RNA, 19 nt, Artificial Sequence
  Synthetic
uauuaguggaaauaucuau

SEQ ID NO: 368926 - RNA, 20 nt, Artificial Sequence
  Synthetic
uuauuaguggaaauaucuau

SEQ ID NO: 368927 - RNA, 21 nt, Artificial Sequence
  Synthetic
uuuauuaguggaaauaucuau

SEQ ID NO: 368928 - RNA, 22 nt, Artificial Sequence
  Synthetic
uuuuauuaguggaaauaucuau

SEQ ID NO: 368929 - RNA, 23 nt, Artificial Sequence
  Synthetic
auuuuauuaguggaaauaucuau

SEQ ID NO: 368930 - RNA, 24 nt, Artificial Sequence
  Synthetic
uauuuuauuaguggaaauaucuau

SEQ ID NO: 368931 - RNA, 18 nt, Artificial Sequence
  Synthetic
cuaccaauuccuaucuau

SEQ ID NO: 368932 - RNA, 19 nt, Artificial Sequence
  Synthetic
acuaccaauuccuaucuau

SEQ ID NO: 368933 - RNA, 20 nt, Artificial Sequence
  Synthetic
aacuaccaauuccuaucuau

SEQ ID NO: 368934 - RNA, 21 nt, Artificial Sequence
  Synthetic
gaacuaccaauuccuaucuau

SEQ ID NO: 368935 - RNA, 22 nt, Artificial Sequence
  Synthetic
ggaacuaccaauuccuaucuau

SEQ ID NO: 368936 - RNA, 23 nt, Artificial Sequence
  Synthetic
aggaacuaccaauuccuaucuau

SEQ ID NO: 368937 - RNA, 24 nt, Artificial Sequence
  Synthetic
uaggaacuaccaauuccuaucuau

SEQ ID NO: 368938 - RNA, 18 nt, Artificial Sequence
  Synthetic
ucagguguuuuuaucuau

SEQ ID NO: 368939 - RNA, 19 nt, Artificial Sequence
  Synthetic
uucagguguuuuuaucuau

SEQ ID NO: 368940 - RNA, 20 nt, Artificial Sequence
  Synthetic
uuucagguguuuuuaucuau

SEQ ID NO: 368941 - RNA, 21 nt, Artificial Sequence
  Synthetic
auuucagguguuuuuaucuau

SEQ ID NO: 368942 - RNA, 22 nt, Artificial Sequence
  Synthetic
aauuucagguguuuuuaucuau

SEQ ID NO: 368943 - RNA, 23 nt, Artificial Sequence
  Synthetic
caauuucagguguuuuuaucuau

SEQ ID NO: 368944 - RNA, 24 nt, Artificial Sequence
  Synthetic
ccaauuucagguguuuuuaucuau

SEQ ID NO: 368945 - RNA, 18 nt, Artificial Sequence
  Synthetic
ugccucaaagaacucuau

SEQ ID NO: 368946 - RNA, 19 nt, Artificial Sequence
  Synthetic
cugccucaaagaacucuau

SEQ ID NO: 368947 - RNA, 20 nt, Artificial Sequence
  Synthetic
acugccucaaagaacucuau

SEQ ID NO: 368948 - RNA, 21 nt, Artificial Sequence
  Synthetic
uacugccucaaagaacucuau

SEQ ID NO: 368949 - RNA, 22 nt, Artificial Sequence
  Synthetic
cuacugccucaaagaacucuau

SEQ ID NO: 368950 - RNA, 23 nt, Artificial Sequence
  Synthetic
ucuacugccucaaagaacucuau

SEQ ID NO: 368951 - RNA, 24 nt, Artificial Sequence
  Synthetic
aucuacugccucaaagaacucuau

SEQ ID NO: 368952 - RNA, 18 nt, Artificial Sequence
  Synthetic
ucgauuuggccacucuau

SEQ ID NO: 368953 - RNA, 19 nt, Artificial Sequence
  Synthetic
uucgauuuggccacucuau

SEQ ID NO: 368954 - RNA, 20 nt, Artificial Sequence
  Synthetic
uuucgauuuggccacucuau

SEQ ID NO: 368955 - RNA, 21 nt, Artificial Sequence
  Synthetic
uuuucgauuuggccacucuau

SEQ ID NO: 368956 - RNA, 22 nt, Artificial Sequence
  Synthetic
guuuucgauuuggccacucuau

SEQ ID NO: 368957 - RNA, 23 nt, Artificial Sequence
  Synthetic
gguuuucgauuuggccacucuau

SEQ ID NO: 368958 - RNA, 24 nt, Artificial Sequence
  Synthetic
ugguuuucgauuuggccacucuau

SEQ ID NO: 368959 - RNA, 18 nt, Artificial Sequence
  Synthetic
ccccaguggggacucuau

SEQ ID NO: 368960 - RNA, 19 nt, Artificial Sequence
  Synthetic
gccccaguggggacucuau

SEQ ID NO: 368961 - RNA, 20 nt, Artificial Sequence
  Synthetic
ugccccaguggggacucuau

SEQ ID NO: 368962 - RNA, 21 nt, Artificial Sequence
  Synthetic
gugccccaguggggacucuau

SEQ ID NO: 368963 - RNA, 22 nt, Artificial Sequence
  Synthetic
agugccccaguggggacucuau

SEQ ID NO: 368964 - RNA, 23 nt, Artificial Sequence
  Synthetic
cagugccccaguggggacucuau

SEQ ID NO: 368965 - RNA, 24 nt, Artificial Sequence
  Synthetic
gcagugccccaguggggacucuau

SEQ ID NO: 368966 - RNA, 18 nt, Artificial Sequence
  Synthetic
agaauugcccuacucuau

SEQ ID NO: 368967 - RNA, 19 nt, Artificial Sequence
  Synthetic
uagaauugcccuacucuau

SEQ ID NO: 368968 - RNA, 20 nt, Artificial Sequence
  Synthetic
uuagaauugcccuacucuau

SEQ ID NO: 368969 - RNA, 21 nt, Artificial Sequence
  Synthetic
auuagaauugcccuacucuau

SEQ ID NO: 368970 - RNA, 22 nt, Artificial Sequence
  Synthetic
uauuagaauugcccuacucuau

SEQ ID NO: 368971 - RNA, 23 nt, Artificial Sequence
  Synthetic
guauuagaauugcccuacucuau

SEQ ID NO: 368972 - RNA, 24 nt, Artificial Sequence
  Synthetic
gguauuagaauugcccuacucuau

SEQ ID NO: 368973 - RNA, 18 nt, Artificial Sequence
  Synthetic
uuagaguguauccucuau

SEQ ID NO: 368974 - RNA, 19 nt, Artificial Sequence
  Synthetic
uuuagaguguauccucuau

SEQ ID NO: 368975 - RNA, 20 nt, Artificial Sequence
  Synthetic
uuuuagaguguauccucuau

SEQ ID NO: 368976 - RNA, 21 nt, Artificial Sequence
  Synthetic
auuuuagaguguauccucuau

SEQ ID NO: 368977 - RNA, 22 nt, Artificial Sequence
  Synthetic
aauuuuagaguguauccucuau

SEQ ID NO: 368978 - RNA, 23 nt, Artificial Sequence
  Synthetic
uaauuuuagaguguauccucuau

SEQ ID NO: 368979 - RNA, 24 nt, Artificial Sequence
  Synthetic
cuaauuuuagaguguauccucuau

SEQ ID NO: 368980 - RNA, 18 nt, Artificial Sequence
  Synthetic
gugagagccugucucuau

SEQ ID NO: 368981 - RNA, 19 nt, Artificial Sequence
  Synthetic
agugagagccugucucuau

SEQ ID NO: 368982 - RNA, 20 nt, Artificial Sequence
  Synthetic
cagugagagccugucucuau

SEQ ID NO: 368983 - RNA, 21 nt, Artificial Sequence
  Synthetic
acagugagagccugucucuau

SEQ ID NO: 368984 - RNA, 22 nt, Artificial Sequence
  Synthetic
cacagugagagccugucucuau

SEQ ID NO: 368985 - RNA, 23 nt, Artificial Sequence
  Synthetic
acacagugagagccugucucuau

SEQ ID NO: 368986 - RNA, 24 nt, Artificial Sequence
  Synthetic
aacacagugagagccugucucuau

SEQ ID NO: 368987 - RNA, 18 nt, Artificial Sequence
  Synthetic
ugacuaucaauucucuau

SEQ ID NO: 368988 - RNA, 19 nt, Artificial Sequence
  Synthetic
augacuaucaauucucuau

SEQ ID NO: 368989 - RNA, 20 nt, Artificial Sequence
  Synthetic
aaugacuaucaauucucuau

SEQ ID NO: 368990 - RNA, 21 nt, Artificial Sequence
  Synthetic
caaugacuaucaauucucuau

SEQ ID NO: 368991 - RNA, 22 nt, Artificial Sequence
  Synthetic
ccaaugacuaucaauucucuau

SEQ ID NO: 368992 - RNA, 23 nt, Artificial Sequence
  Synthetic
uccaaugacuaucaauucucuau

SEQ ID NO: 368993 - RNA, 24 nt, Artificial Sequence
  Synthetic
uuccaaugacuaucaauucucuau

SEQ ID NO: 368994 - RNA, 18 nt, Artificial Sequence
  Synthetic
cuccccuuuggggucuau

SEQ ID NO: 368995 - RNA, 19 nt, Artificial Sequence
  Synthetic
gcuccccuuuggggucuau

SEQ ID NO: 368996 - RNA, 20 nt, Artificial Sequence
  Synthetic
agcuccccuuuggggucuau

SEQ ID NO: 368997 - RNA, 21 nt, Artificial Sequence
  Synthetic
gagcuccccuuuggggucuau

SEQ ID NO: 368998 - RNA, 22 nt, Artificial Sequence
  Synthetic
agagcuccccuuuggggucuau

SEQ ID NO: 368999 - RNA, 23 nt, Artificial Sequence
  Synthetic
aagagcuccccuuuggggucuau

SEQ ID NO: 369000 - RNA, 24 nt, Artificial Sequence
  Synthetic
aaagagcuccccuuuggggucuau

SEQ ID NO: 369001 - RNA, 18 nt, Artificial Sequence
  Synthetic
uucaagcuagaugucuau

SEQ ID NO: 369002 - RNA, 19 nt, Artificial Sequence
  Synthetic
auucaagcuagaugucuau

SEQ ID NO: 369003 - RNA, 20 nt, Artificial Sequence
  Synthetic
aauucaagcuagaugucuau

SEQ ID NO: 369004 - RNA, 21 nt, Artificial Sequence
  Synthetic
aaauucaagcuagaugucuau

SEQ ID NO: 369005 - RNA, 22 nt, Artificial Sequence
  Synthetic
uaaauucaagcuagaugucuau

SEQ ID NO: 369006 - RNA, 23 nt, Artificial Sequence
  Synthetic
auaaauucaagcuagaugucuau

SEQ ID NO: 369007 - RNA, 24 nt, Artificial Sequence
  Synthetic
uauaaauucaagcuagaugucuau

SEQ ID NO: 369008 - RNA, 18 nt, Artificial Sequence
  Synthetic
uaggggggcacugucuau

SEQ ID NO: 369009 - RNA, 19 nt, Artificial Sequence
  Synthetic
cuaggggggcacugucuau

SEQ ID NO: 369010 - RNA, 20 nt, Artificial Sequence
  Synthetic
gcuaggggggcacugucuau

SEQ ID NO: 369011 - RNA, 21 nt, Artificial Sequence
  Synthetic
agcuaggggggcacugucuau

SEQ ID NO: 369012 - RNA, 22 nt, Artificial Sequence
  Synthetic
cagcuaggggggcacugucuau

SEQ ID NO: 369013 - RNA, 23 nt, Artificial Sequence
  Synthetic
ucagcuaggggggcacugucuau

SEQ ID NO: 369014 - RNA, 24 nt, Artificial Sequence
  Synthetic
cucagcuaggggggcacugucuau

SEQ ID NO: 369015 - RNA, 18 nt, Artificial Sequence
  Synthetic
gaaaggcucucauucuau

SEQ ID NO: 369016 - RNA, 19 nt, Artificial Sequence
  Synthetic
ggaaaggcucucauucuau

SEQ ID NO: 369017 - RNA, 20 nt, Artificial Sequence
  Synthetic
aggaaaggcucucauucuau

SEQ ID NO: 369018 - RNA, 21 nt, Artificial Sequence
  Synthetic
caggaaaggcucucauucuau

SEQ ID NO: 369019 - RNA, 22 nt, Artificial Sequence
  Synthetic
ucaggaaaggcucucauucuau

SEQ ID NO: 369020 - RNA, 23 nt, Artificial Sequence
  Synthetic
cucaggaaaggcucucauucuau

SEQ ID NO: 369021 - RNA, 24 nt, Artificial Sequence
  Synthetic
ucucaggaaaggcucucauucuau

SEQ ID NO: 369022 - RNA, 18 nt, Artificial Sequence
  Synthetic
cucuaaauuauauucuau

SEQ ID NO: 369023 - RNA, 19 nt, Artificial Sequence
  Synthetic
ccucuaaauuauauucuau

SEQ ID NO: 369024 - RNA, 20 nt, Artificial Sequence
  Synthetic
cccucuaaauuauauucuau

SEQ ID NO: 369025 - RNA, 21 nt, Artificial Sequence
  Synthetic
acccucuaaauuauauucuau

SEQ ID NO: 369026 - RNA, 22 nt, Artificial Sequence
  Synthetic
uacccucuaaauuauauucuau

SEQ ID NO: 369027 - RNA, 23 nt, Artificial Sequence
  Synthetic
uuacccucuaaauuauauucuau

SEQ ID NO: 369028 - RNA, 24 nt, Artificial Sequence
  Synthetic
cuuacccucuaaauuauauucuau

SEQ ID NO: 369029 - RNA, 18 nt, Artificial Sequence
  Synthetic
aaaagcaguuuauucuau

SEQ ID NO: 369030 - RNA, 19 nt, Artificial Sequence
  Synthetic
uaaaagcaguuuauucuau

SEQ ID NO: 369031 - RNA, 20 nt, Artificial Sequence
  Synthetic
guaaaagcaguuuauucuau

SEQ ID NO: 369032 - RNA, 21 nt, Artificial Sequence
  Synthetic
uguaaaagcaguuuauucuau

SEQ ID NO: 369033 - RNA, 22 nt, Artificial Sequence
  Synthetic
auguaaaagcaguuuauucuau

SEQ ID NO: 369034 - RNA, 23 nt, Artificial Sequence
  Synthetic
uauguaaaagcaguuuauucuau

SEQ ID NO: 369035 - RNA, 24 nt, Artificial Sequence
  Synthetic
uuauguaaaagcaguuuauucuau

SEQ ID NO: 369036 - RNA, 18 nt, Artificial Sequence
  Synthetic
augugacuuaacuucuau

SEQ ID NO: 369037 - RNA, 19 nt, Artificial Sequence
  Synthetic
uaugugacuuaacuucuau

SEQ ID NO: 369038 - RNA, 20 nt, Artificial Sequence
  Synthetic
uuaugugacuuaacuucuau

SEQ ID NO: 369039 - RNA, 21 nt, Artificial Sequence
  Synthetic
uuuaugugacuuaacuucuau

SEQ ID NO: 369040 - RNA, 22 nt, Artificial Sequence
  Synthetic
cuuuaugugacuuaacuucuau

SEQ ID NO: 369041 - RNA, 23 nt, Artificial Sequence
  Synthetic
ucuuuaugugacuuaacuucuau

SEQ ID NO: 369042 - RNA, 24 nt, Artificial Sequence
  Synthetic
aucuuuaugugacuuaacuucuau

SEQ ID NO: 369043 - RNA, 18 nt, Artificial Sequence
  Synthetic
uaacauauauacuucuau

SEQ ID NO: 369044 - RNA, 19 nt, Artificial Sequence
  Synthetic
uuaacauauauacuucuau

SEQ ID NO: 369045 - RNA, 20 nt, Artificial Sequence
  Synthetic
uuuaacauauauacuucuau

SEQ ID NO: 369046 - RNA, 21 nt, Artificial Sequence
  Synthetic
uuuuaacauauauacuucuau

SEQ ID NO: 369047 - RNA, 22 nt, Artificial Sequence
  Synthetic
auuuuaacauauauacuucuau

SEQ ID NO: 369048 - RNA, 23 nt, Artificial Sequence
  Synthetic
aauuuuaacauauauacuucuau

SEQ ID NO: 369049 - RNA, 24 nt, Artificial Sequence
  Synthetic
aaauuuuaacauauauacuucuau

SEQ ID NO: 369050 - RNA, 18 nt, Artificial Sequence
  Synthetic
uggcacuauuacuucuau

SEQ ID NO: 369051 - RNA, 19 nt, Artificial Sequence
  Synthetic
auggcacuauuacuucuau

SEQ ID NO: 369052 - RNA, 20 nt, Artificial Sequence
  Synthetic
gauggcacuauuacuucuau

SEQ ID NO: 369053 - RNA, 21 nt, Artificial Sequence
  Synthetic
agauggcacuauuacuucuau

SEQ ID NO: 369054 - RNA, 22 nt, Artificial Sequence
  Synthetic
uagauggcacuauuacuucuau

SEQ ID NO: 369055 - RNA, 23 nt, Artificial Sequence
  Synthetic
guagauggcacuauuacuucuau

SEQ ID NO: 369056 - RNA, 24 nt, Artificial Sequence
  Synthetic
gguagauggcacuauuacuucuau

SEQ ID NO: 369057 - RNA, 18 nt, Artificial Sequence
  Synthetic
gacgaaacagccuucuau

SEQ ID NO: 369058 - RNA, 19 nt, Artificial Sequence
  Synthetic
agacgaaacagccuucuau

SEQ ID NO: 369059 - RNA, 20 nt, Artificial Sequence
  Synthetic
uagacgaaacagccuucuau

SEQ ID NO: 369060 - RNA, 21 nt, Artificial Sequence
  Synthetic
auagacgaaacagccuucuau

SEQ ID NO: 369061 - RNA, 22 nt, Artificial Sequence
  Synthetic
uauagacgaaacagccuucuau

SEQ ID NO: 369062 - RNA, 23 nt, Artificial Sequence
  Synthetic
auauagacgaaacagccuucuau

SEQ ID NO: 369063 - RNA, 24 nt, Artificial Sequence
  Synthetic
aauauagacgaaacagccuucuau

SEQ ID NO: 369064 - RNA, 18 nt, Artificial Sequence
  Synthetic
aauaauucaaucuucuau

SEQ ID NO: 369065 - RNA, 19 nt, Artificial Sequence
  Synthetic
caauaauucaaucuucuau

SEQ ID NO: 369066 - RNA, 20 nt, Artificial Sequence
  Synthetic
ccaauaauucaaucuucuau

SEQ ID NO: 369067 - RNA, 21 nt, Artificial Sequence
  Synthetic
gccaauaauucaaucuucuau

SEQ ID NO: 369068 - RNA, 22 nt, Artificial Sequence
  Synthetic
ggccaauaauucaaucuucuau

SEQ ID NO: 369069 - RNA, 23 nt, Artificial Sequence
  Synthetic
aggccaauaauucaaucuucuau

SEQ ID NO: 369070 - RNA, 24 nt, Artificial Sequence
  Synthetic
gaggccaauaauucaaucuucuau

SEQ ID NO: 369071 - RNA, 18 nt, Artificial Sequence
  Synthetic
acauuauauuaguucuau

SEQ ID NO: 369072 - RNA, 19 nt, Artificial Sequence
  Synthetic
uacauuauauuaguucuau

SEQ ID NO: 369073 - RNA, 20 nt, Artificial Sequence
  Synthetic
guacauuauauuaguucuau

SEQ ID NO: 369074 - RNA, 21 nt, Artificial Sequence
  Synthetic
aguacauuauauuaguucuau

SEQ ID NO: 369075 - RNA, 22 nt, Artificial Sequence
  Synthetic
caguacauuauauuaguucuau

SEQ ID NO: 369076 - RNA, 23 nt, Artificial Sequence
  Synthetic
ccaguacauuauauuaguucuau

SEQ ID NO: 369077 - RNA, 24 nt, Artificial Sequence
  Synthetic
cccaguacauuauauuaguucuau

SEQ ID NO: 369078 - RNA, 18 nt, Artificial Sequence
  Synthetic
uguaaaauguuguucuau

SEQ ID NO: 369079 - RNA, 19 nt, Artificial Sequence
  Synthetic
uuguaaaauguuguucuau

SEQ ID NO: 369080 - RNA, 20 nt, Artificial Sequence
  Synthetic
auuguaaaauguuguucuau

SEQ ID NO: 369081 - RNA, 21 nt, Artificial Sequence
  Synthetic
aauuguaaaauguuguucuau

SEQ ID NO: 369082 - RNA, 22 nt, Artificial Sequence
  Synthetic
aaauuguaaaauguuguucuau

SEQ ID NO: 369083 - RNA, 23 nt, Artificial Sequence
  Synthetic
gaaauuguaaaauguuguucuau

SEQ ID NO: 369084 - RNA, 24 nt, Artificial Sequence
  Synthetic
agaaauuguaaaauguuguucuau

SEQ ID NO: 369085 - RNA, 18 nt, Artificial Sequence
  Synthetic
agcuagauaauuuucuau

SEQ ID NO: 369086 - RNA, 19 nt, Artificial Sequence
  Synthetic
aagcuagauaauuuucuau

SEQ ID NO: 369087 - RNA, 20 nt, Artificial Sequence
  Synthetic
gaagcuagauaauuuucuau

SEQ ID NO: 369088 - RNA, 21 nt, Artificial Sequence
  Synthetic
ugaagcuagauaauuuucuau

SEQ ID NO: 369089 - RNA, 22 nt, Artificial Sequence
  Synthetic
cugaagcuagauaauuuucuau

SEQ ID NO: 369090 - RNA, 23 nt, Artificial Sequence
  Synthetic
acugaagcuagauaauuuucuau

SEQ ID NO: 369091 - RNA, 24 nt, Artificial Sequence
  Synthetic
cacugaagcuagauaauuuucuau

SEQ ID NO: 369092 - RNA, 18 nt, Artificial Sequence
  Synthetic
gauagaauguuuuucuau

SEQ ID NO: 369093 - RNA, 19 nt, Artificial Sequence
  Synthetic
ugauagaauguuuuucuau

SEQ ID NO: 369094 - RNA, 20 nt, Artificial Sequence
  Synthetic
gugauagaauguuuuucuau

SEQ ID NO: 369095 - RNA, 21 nt, Artificial Sequence
  Synthetic
agugauagaauguuuuucuau

SEQ ID NO: 369096 - RNA, 22 nt, Artificial Sequence
  Synthetic
aagugauagaauguuuuucuau

SEQ ID NO: 369097 - RNA, 23 nt, Artificial Sequence
  Synthetic
aaagugauagaauguuuuucuau

SEQ ID NO: 369098 - RNA, 24 nt, Artificial Sequence
  Synthetic
caaagugauagaauguuuuucuau

SEQ ID NO: 369099 - RNA, 18 nt, Artificial Sequence
  Synthetic
gguuuuaaaaaaaaguau

SEQ ID NO: 369100 - RNA, 19 nt, Artificial Sequence
  Synthetic
ggguuuuaaaaaaaaguau

SEQ ID NO: 369101 - RNA, 20 nt, Artificial Sequence
  Synthetic
uggguuuuaaaaaaaaguau

SEQ ID NO: 369102 - RNA, 21 nt, Artificial Sequence
  Synthetic
cuggguuuuaaaaaaaaguau

SEQ ID NO: 369103 - RNA, 22 nt, Artificial Sequence
  Synthetic
ucuggguuuuaaaaaaaaguau

SEQ ID NO: 369104 - RNA, 23 nt, Artificial Sequence
  Synthetic
uucuggguuuuaaaaaaaaguau

SEQ ID NO: 369105 - RNA, 24 nt, Artificial Sequence
  Synthetic
uuucuggguuuuaaaaaaaaguau

SEQ ID NO: 369106 - RNA, 18 nt, Artificial Sequence
  Synthetic
uaucauugaaaaaaguau

SEQ ID NO: 369107 - RNA, 19 nt, Artificial Sequence
  Synthetic
uuaucauugaaaaaaguau

SEQ ID NO: 369108 - RNA, 20 nt, Artificial Sequence
  Synthetic
uuuaucauugaaaaaaguau

SEQ ID NO: 369109 - RNA, 21 nt, Artificial Sequence
  Synthetic
auuuaucauugaaaaaaguau

SEQ ID NO: 369110 - RNA, 22 nt, Artificial Sequence
  Synthetic
uauuuaucauugaaaaaaguau

SEQ ID NO: 369111 - RNA, 23 nt, Artificial Sequence
  Synthetic
uuauuuaucauugaaaaaaguau

SEQ ID NO: 369112 - RNA, 24 nt, Artificial Sequence
  Synthetic
uuuauuuaucauugaaaaaaguau

SEQ ID NO: 369113 - RNA, 18 nt, Artificial Sequence
  Synthetic
gcuaugaaugaaaaguau

SEQ ID NO: 369114 - RNA, 19 nt, Artificial Sequence
  Synthetic
ugcuaugaaugaaaaguau

SEQ ID NO: 369115 - RNA, 20 nt, Artificial Sequence
  Synthetic
gugcuaugaaugaaaaguau

SEQ ID NO: 369116 - RNA, 21 nt, Artificial Sequence
  Synthetic
ggugcuaugaaugaaaaguau

SEQ ID NO: 369117 - RNA, 22 nt, Artificial Sequence
  Synthetic
aggugcuaugaaugaaaaguau

SEQ ID NO: 369118 - RNA, 23 nt, Artificial Sequence
  Synthetic
uaggugcuaugaaugaaaaguau

SEQ ID NO: 369119 - RNA, 24 nt, Artificial Sequence
  Synthetic
guaggugcuaugaaugaaaaguau

SEQ ID NO: 369120 - RNA, 18 nt, Artificial Sequence
  Synthetic
uuguggucugaaaaguau

SEQ ID NO: 369121 - RNA, 19 nt, Artificial Sequence
  Synthetic
auuguggucugaaaaguau

SEQ ID NO: 369122 - RNA, 20 nt, Artificial Sequence
  Synthetic
gauuguggucugaaaaguau

SEQ ID NO: 369123 - RNA, 21 nt, Artificial Sequence
  Synthetic
agauuguggucugaaaaguau

SEQ ID NO: 369124 - RNA, 22 nt, Artificial Sequence
  Synthetic
aagauuguggucugaaaaguau

SEQ ID NO: 369125 - RNA, 23 nt, Artificial Sequence
  Synthetic
uaagauuguggucugaaaaguau

SEQ ID NO: 369126 - RNA, 24 nt, Artificial Sequence
  Synthetic
uuaagauuguggucugaaaaguau

SEQ ID NO: 369127 - RNA, 18 nt, Artificial Sequence
  Synthetic
guguauuuaugaaaguau

SEQ ID NO: 369128 - RNA, 19 nt, Artificial Sequence
  Synthetic
uguguauuuaugaaaguau

SEQ ID NO: 369129 - RNA, 20 nt, Artificial Sequence
  Synthetic
auguguauuuaugaaaguau

SEQ ID NO: 369130 - RNA, 21 nt, Artificial Sequence
  Synthetic
uauguguauuuaugaaaguau

SEQ ID NO: 369131 - RNA, 22 nt, Artificial Sequence
  Synthetic
guauguguauuuaugaaaguau

SEQ ID NO: 369132 - RNA, 23 nt, Artificial Sequence
  Synthetic
aguauguguauuuaugaaaguau

SEQ ID NO: 369133 - RNA, 24 nt, Artificial Sequence
  Synthetic
aaguauguguauuuaugaaaguau

SEQ ID NO: 369134 - RNA, 18 nt, Artificial Sequence
  Synthetic
cuguugauccuaaaguau

SEQ ID NO: 369135 - RNA, 19 nt, Artificial Sequence
  Synthetic
ucuguugauccuaaaguau

SEQ ID NO: 369136 - RNA, 20 nt, Artificial Sequence
  Synthetic
uucuguugauccuaaaguau

SEQ ID NO: 369137 - RNA, 21 nt, Artificial Sequence
  Synthetic
auucuguugauccuaaaguau

SEQ ID NO: 369138 - RNA, 22 nt, Artificial Sequence
  Synthetic
gauucuguugauccuaaaguau

SEQ ID NO: 369139 - RNA, 23 nt, Artificial Sequence
  Synthetic
ugauucuguugauccuaaaguau

SEQ ID NO: 369140 - RNA, 24 nt, Artificial Sequence
  Synthetic
gugauucuguugauccuaaaguau

SEQ ID NO: 369141 - RNA, 18 nt, Artificial Sequence
  Synthetic
ucuucuugguuaaaguau

SEQ ID NO: 369142 - RNA, 19 nt, Artificial Sequence
  Synthetic
aucuucuugguuaaaguau

SEQ ID NO: 369143 - RNA, 20 nt, Artificial Sequence
  Synthetic
caucuucuugguuaaaguau

SEQ ID NO: 369144 - RNA, 21 nt, Artificial Sequence
  Synthetic
gcaucuucuugguuaaaguau

SEQ ID NO: 369145 - RNA, 22 nt, Artificial Sequence
  Synthetic
ggcaucuucuugguuaaaguau

SEQ ID NO: 369146 - RNA, 23 nt, Artificial Sequence
  Synthetic
cggcaucuucuugguuaaaguau

SEQ ID NO: 369147 - RNA, 24 nt, Artificial Sequence
  Synthetic
ucggcaucuucuugguuaaaguau

SEQ ID NO: 369148 - RNA, 18 nt, Artificial Sequence
  Synthetic
ccucaaacucccaaguau

SEQ ID NO: 369149 - RNA, 19 nt, Artificial Sequence
  Synthetic
gccucaaacucccaaguau

SEQ ID NO: 369150 - RNA, 20 nt, Artificial Sequence
  Synthetic
ugccucaaacucccaaguau

SEQ ID NO: 369151 - RNA, 21 nt, Artificial Sequence
  Synthetic
cugccucaaacucccaaguau

SEQ ID NO: 369152 - RNA, 22 nt, Artificial Sequence
  Synthetic
ucugccucaaacucccaaguau

SEQ ID NO: 369153 - RNA, 23 nt, Artificial Sequence
  Synthetic
uucugccucaaacucccaaguau

SEQ ID NO: 369154 - RNA, 24 nt, Artificial Sequence
  Synthetic
cuucugccucaaacucccaaguau

SEQ ID NO: 369155 - RNA, 18 nt, Artificial Sequence
  Synthetic
ugcacagccagcaaguau

SEQ ID NO: 369156 - RNA, 19 nt, Artificial Sequence
  Synthetic
uugcacagccagcaaguau

SEQ ID NO: 369157 - RNA, 20 nt, Artificial Sequence
  Synthetic
auugcacagccagcaaguau

SEQ ID NO: 369158 - RNA, 21 nt, Artificial Sequence
  Synthetic
gauugcacagccagcaaguau

SEQ ID NO: 369159 - RNA, 22 nt, Artificial Sequence
  Synthetic
agauugcacagccagcaaguau

SEQ ID NO: 369160 - RNA, 23 nt, Artificial Sequence
  Synthetic
aagauugcacagccagcaaguau

SEQ ID NO: 369161 - RNA, 24 nt, Artificial Sequence
  Synthetic
caagauugcacagccagcaaguau

SEQ ID NO: 369162 - RNA, 18 nt, Artificial Sequence
  Synthetic
aaugauaaaaagaaguau

SEQ ID NO: 369163 - RNA, 19 nt, Artificial Sequence
  Synthetic
aaaugauaaaaagaaguau

SEQ ID NO: 369164 - RNA, 20 nt, Artificial Sequence
  Synthetic
caaaugauaaaaagaaguau

SEQ ID NO: 369165 - RNA, 21 nt, Artificial Sequence
  Synthetic
ccaaaugauaaaaagaaguau

SEQ ID NO: 369166 - RNA, 22 nt, Artificial Sequence
  Synthetic
accaaaugauaaaaagaaguau

SEQ ID NO: 369167 - RNA, 23 nt, Artificial Sequence
  Synthetic
gaccaaaugauaaaaagaaguau

SEQ ID NO: 369168 - RNA, 24 nt, Artificial Sequence
  Synthetic
ggaccaaaugauaaaaagaaguau

SEQ ID NO: 369169 - RNA, 18 nt, Artificial Sequence
  Synthetic
aauuagagaaagaaguau

SEQ ID NO: 369170 - RNA, 19 nt, Artificial Sequence
  Synthetic
aaauuagagaaagaaguau

SEQ ID NO: 369171 - RNA, 20 nt, Artificial Sequence
  Synthetic
aaaauuagagaaagaaguau

SEQ ID NO: 369172 - RNA, 21 nt, Artificial Sequence
  Synthetic
aaaaauuagagaaagaaguau

SEQ ID NO: 369173 - RNA, 22 nt, Artificial Sequence
  Synthetic
aaaaaauuagagaaagaaguau

SEQ ID NO: 369174 - RNA, 23 nt, Artificial Sequence
  Synthetic
aaaaaaauuagagaaagaaguau

SEQ ID NO: 369175 - RNA, 24 nt, Artificial Sequence
  Synthetic
uaaaaaaauuagagaaagaaguau

SEQ ID NO: 369176 - RNA, 18 nt, Artificial Sequence
  Synthetic
guuuauucagagaaguau

SEQ ID NO: 369177 - RNA, 19 nt, Artificial Sequence
  Synthetic
aguuuauucagagaaguau

SEQ ID NO: 369178 - RNA, 20 nt, Artificial Sequence
  Synthetic
aaguuuauucagagaaguau

SEQ ID NO: 369179 - RNA, 21 nt, Artificial Sequence
  Synthetic
aaaguuuauucagagaaguau

SEQ ID NO: 369180 - RNA, 22 nt, Artificial Sequence
  Synthetic
caaaguuuauucagagaaguau

SEQ ID NO: 369181 - RNA, 23 nt, Artificial Sequence
  Synthetic
acaaaguuuauucagagaaguau

SEQ ID NO: 369182 - RNA, 24 nt, Artificial Sequence
  Synthetic
gacaaaguuuauucagagaaguau

SEQ ID NO: 369183 - RNA, 18 nt, Artificial Sequence
  Synthetic
uagcacuuuaugaaguau

SEQ ID NO: 369184 - RNA, 19 nt, Artificial Sequence
  Synthetic
auagcacuuuaugaaguau

SEQ ID NO: 369185 - RNA, 20 nt, Artificial Sequence
  Synthetic
gauagcacuuuaugaaguau

SEQ ID NO: 369186 - RNA, 21 nt, Artificial Sequence
  Synthetic
ugauagcacuuuaugaaguau

SEQ ID NO: 369187 - RNA, 22 nt, Artificial Sequence
  Synthetic
cugauagcacuuuaugaaguau

SEQ ID NO: 369188 - RNA, 23 nt, Artificial Sequence
  Synthetic
ucugauagcacuuuaugaaguau

SEQ ID NO: 369189 - RNA, 24 nt, Artificial Sequence
  Synthetic
aucugauagcacuuuaugaaguau

SEQ ID NO: 369190 - RNA, 18 nt, Artificial Sequence
  Synthetic
uauuuuuccgugaaguau

SEQ ID NO: 369191 - RNA, 19 nt, Artificial Sequence
  Synthetic
auauuuuuccgugaaguau

SEQ ID NO: 369192 - RNA, 20 nt, Artificial Sequence
  Synthetic
uauauuuuuccgugaaguau

SEQ ID NO: 369193 - RNA, 21 nt, Artificial Sequence
  Synthetic
uuauauuuuuccgugaaguau

SEQ ID NO: 369194 - RNA, 22 nt, Artificial Sequence
  Synthetic
guuauauuuuuccgugaaguau

SEQ ID NO: 369195 - RNA, 23 nt, Artificial Sequence
  Synthetic
uguuauauuuuuccgugaaguau

SEQ ID NO: 369196 - RNA, 24 nt, Artificial Sequence
  Synthetic
cuguuauauuuuuccgugaaguau

SEQ ID NO: 369197 - RNA, 18 nt, Artificial Sequence
  Synthetic
agaaggauaaguaaguau

SEQ ID NO: 369198 - RNA, 19 nt, Artificial Sequence
  Synthetic
aagaaggauaaguaaguau

SEQ ID NO: 369199 - RNA, 20 nt, Artificial Sequence
  Synthetic
uaagaaggauaaguaaguau

SEQ ID NO: 369200 - RNA, 21 nt, Artificial Sequence
  Synthetic
auaagaaggauaaguaaguau

SEQ ID NO: 369201 - RNA, 22 nt, Artificial Sequence
  Synthetic
aauaagaaggauaaguaaguau

SEQ ID NO: 369202 - RNA, 23 nt, Artificial Sequence
  Synthetic
aaauaagaaggauaaguaaguau

SEQ ID NO: 369203 - RNA, 24 nt, Artificial Sequence
  Synthetic
gaaauaagaaggauaaguaaguau

SEQ ID NO: 369204 - RNA, 18 nt, Artificial Sequence
  Synthetic
aaaauuaaaguuaaguau

SEQ ID NO: 369205 - RNA, 19 nt, Artificial Sequence
  Synthetic
gaaaauuaaaguuaaguau

SEQ ID NO: 369206 - RNA, 20 nt, Artificial Sequence
  Synthetic
agaaaauuaaaguuaaguau

SEQ ID NO: 369207 - RNA, 21 nt, Artificial Sequence
  Synthetic
uagaaaauuaaaguuaaguau

SEQ ID NO: 369208 - RNA, 22 nt, Artificial Sequence
  Synthetic
auagaaaauuaaaguuaaguau

SEQ ID NO: 369209 - RNA, 23 nt, Artificial Sequence
  Synthetic
aauagaaaauuaaaguuaaguau

SEQ ID NO: 369210 - RNA, 24 nt, Artificial Sequence
  Synthetic
uaauagaaaauuaaaguuaaguau

SEQ ID NO: 369211 - RNA, 18 nt, Artificial Sequence
  Synthetic
cagguacaaacacaguau

SEQ ID NO: 369212 - RNA, 19 nt, Artificial Sequence
  Synthetic
acagguacaaacacaguau

SEQ ID NO: 369213 - RNA, 20 nt, Artificial Sequence
  Synthetic
aacagguacaaacacaguau

SEQ ID NO: 369214 - RNA, 21 nt, Artificial Sequence
  Synthetic
gaacagguacaaacacaguau

SEQ ID NO: 369215 - RNA, 22 nt, Artificial Sequence
  Synthetic
ggaacagguacaaacacaguau

SEQ ID NO: 369216 - RNA, 23 nt, Artificial Sequence
  Synthetic
gggaacagguacaaacacaguau

SEQ ID NO: 369217 - RNA, 24 nt, Artificial Sequence
  Synthetic
agggaacagguacaaacacaguau

SEQ ID NO: 369218 - RNA, 18 nt, Artificial Sequence
  Synthetic
auuaggaaagcacaguau

SEQ ID NO: 369219 - RNA, 19 nt, Artificial Sequence
  Synthetic
aauuaggaaagcacaguau

SEQ ID NO: 369220 - RNA, 20 nt, Artificial Sequence
  Synthetic
uaauuaggaaagcacaguau

SEQ ID NO: 369221 - RNA, 21 nt, Artificial Sequence
  Synthetic
guaauuaggaaagcacaguau

SEQ ID NO: 369222 - RNA, 22 nt, Artificial Sequence
  Synthetic
uguaauuaggaaagcacaguau

SEQ ID NO: 369223 - RNA, 23 nt, Artificial Sequence
  Synthetic
guguaauuaggaaagcacaguau

SEQ ID NO: 369224 - RNA, 24 nt, Artificial Sequence
  Synthetic
aguguaauuaggaaagcacaguau

SEQ ID NO: 369225 - RNA, 18 nt, Artificial Sequence
  Synthetic
uggcacuuuucacaguau

SEQ ID NO: 369226 - RNA, 19 nt, Artificial Sequence
  Synthetic
uuggcacuuuucacaguau

SEQ ID NO: 369227 - RNA, 20 nt, Artificial Sequence
  Synthetic
uuuggcacuuuucacaguau

SEQ ID NO: 369228 - RNA, 21 nt, Artificial Sequence
  Synthetic
cuuuggcacuuuucacaguau

SEQ ID NO: 369229 - RNA, 22 nt, Artificial Sequence
  Synthetic
acuuuggcacuuuucacaguau

SEQ ID NO: 369230 - RNA, 23 nt, Artificial Sequence
  Synthetic
aacuuuggcacuuuucacaguau

SEQ ID NO: 369231 - RNA, 24 nt, Artificial Sequence
  Synthetic
gaacuuuggcacuuuucacaguau

SEQ ID NO: 369232 - RNA, 18 nt, Artificial Sequence
  Synthetic
uaccaaaauuuccaguau

SEQ ID NO: 369233 - RNA, 19 nt, Artificial Sequence
  Synthetic
cuaccaaaauuuccaguau

SEQ ID NO: 369234 - RNA, 20 nt, Artificial Sequence
  Synthetic
gcuaccaaaauuuccaguau

SEQ ID NO: 369235 - RNA, 21 nt, Artificial Sequence
  Synthetic
ugcuaccaaaauuuccaguau

SEQ ID NO: 369236 - RNA, 22 nt, Artificial Sequence
  Synthetic
augcuaccaaaauuuccaguau

SEQ ID NO: 369237 - RNA, 23 nt, Artificial Sequence
  Synthetic
uaugcuaccaaaauuuccaguau

SEQ ID NO: 369238 - RNA, 24 nt, Artificial Sequence
  Synthetic
guaugcuaccaaaauuuccaguau

SEQ ID NO: 369239 - RNA, 18 nt, Artificial Sequence
  Synthetic
auauauaaagagcaguau

SEQ ID NO: 369240 - RNA, 19 nt, Artificial Sequence
  Synthetic
aauauauaaagagcaguau

SEQ ID NO: 369241 - RNA, 20 nt, Artificial Sequence
  Synthetic
aaauauauaaagagcaguau

SEQ ID NO: 369242 - RNA, 21 nt, Artificial Sequence
  Synthetic
gaaauauauaaagagcaguau

SEQ ID NO: 369243 - RNA, 22 nt, Artificial Sequence
  Synthetic
cgaaauauauaaagagcaguau

SEQ ID NO: 369244 - RNA, 23 nt, Artificial Sequence
  Synthetic
acgaaauauauaaagagcaguau

SEQ ID NO: 369245 - RNA, 24 nt, Artificial Sequence
  Synthetic
aacgaaauauauaaagagcaguau

SEQ ID NO: 369246 - RNA, 18 nt, Artificial Sequence
  Synthetic
augagaaggaggcaguau

SEQ ID NO: 369247 - RNA, 19 nt, Artificial Sequence
  Synthetic
aaugagaaggaggcaguau

SEQ ID NO: 369248 - RNA, 20 nt, Artificial Sequence
  Synthetic
aaaugagaaggaggcaguau

SEQ ID NO: 369249 - RNA, 21 nt, Artificial Sequence
  Synthetic
caaaugagaaggaggcaguau

SEQ ID NO: 369250 - RNA, 22 nt, Artificial Sequence
  Synthetic
gcaaaugagaaggaggcaguau

SEQ ID NO: 369251 - RNA, 23 nt, Artificial Sequence
  Synthetic
ggcaaaugagaaggaggcaguau

SEQ ID NO: 369252 - RNA, 24 nt, Artificial Sequence
  Synthetic
aggcaaaugagaaggaggcaguau

SEQ ID NO: 369253 - RNA, 18 nt, Artificial Sequence
  Synthetic
uucucuagggggcaguau

SEQ ID NO: 369254 - RNA, 19 nt, Artificial Sequence
  Synthetic
cuucucuagggggcaguau

SEQ ID NO: 369255 - RNA, 20 nt, Artificial Sequence
  Synthetic
gcuucucuagggggcaguau

SEQ ID NO: 369256 - RNA, 21 nt, Artificial Sequence
  Synthetic
ggcuucucuagggggcaguau

SEQ ID NO: 369257 - RNA, 22 nt, Artificial Sequence
  Synthetic
uggcuucucuagggggcaguau

SEQ ID NO: 369258 - RNA, 23 nt, Artificial Sequence
  Synthetic
auggcuucucuagggggcaguau

SEQ ID NO: 369259 - RNA, 24 nt, Artificial Sequence
  Synthetic
cauggcuucucuagggggcaguau

SEQ ID NO: 369260 - RNA, 18 nt, Artificial Sequence
  Synthetic
ggcucuuccuugcaguau

SEQ ID NO: 369261 - RNA, 19 nt, Artificial Sequence
  Synthetic
uggcucuuccuugcaguau

SEQ ID NO: 369262 - RNA, 20 nt, Artificial Sequence
  Synthetic
cuggcucuuccuugcaguau

SEQ ID NO: 369263 - RNA, 21 nt, Artificial Sequence
  Synthetic
gcuggcucuuccuugcaguau

SEQ ID NO: 369264 - RNA, 22 nt, Artificial Sequence
  Synthetic
ugcuggcucuuccuugcaguau

SEQ ID NO: 369265 - RNA, 23 nt, Artificial Sequence
  Synthetic
cugcuggcucuuccuugcaguau

SEQ ID NO: 369266 - RNA, 24 nt, Artificial Sequence
  Synthetic
ucugcuggcucuuccuugcaguau

SEQ ID NO: 369267 - RNA, 18 nt, Artificial Sequence
  Synthetic
guaauauacucucaguau

SEQ ID NO: 369268 - RNA, 19 nt, Artificial Sequence
  Synthetic
aguaauauacucucaguau

SEQ ID NO: 369269 - RNA, 20 nt, Artificial Sequence
  Synthetic
aaguaauauacucucaguau

SEQ ID NO: 369270 - RNA, 21 nt, Artificial Sequence
  Synthetic
uaaguaauauacucucaguau

SEQ ID NO: 369271 - RNA, 22 nt, Artificial Sequence
  Synthetic
uuaaguaauauacucucaguau

SEQ ID NO: 369272 - RNA, 23 nt, Artificial Sequence
  Synthetic
cuuaaguaauauacucucaguau

SEQ ID NO: 369273 - RNA, 24 nt, Artificial Sequence
  Synthetic
acuuaaguaauauacucucaguau

SEQ ID NO: 369274 - RNA, 18 nt, Artificial Sequence
  Synthetic
agaacaucucgucaguau

SEQ ID NO: 369275 - RNA, 19 nt, Artificial Sequence
  Synthetic
uagaacaucucgucaguau

SEQ ID NO: 369276 - RNA, 20 nt, Artificial Sequence
  Synthetic
auagaacaucucgucaguau

SEQ ID NO: 369277 - RNA, 21 nt, Artificial Sequence
  Synthetic
cauagaacaucucgucaguau

SEQ ID NO: 369278 - RNA, 22 nt, Artificial Sequence
  Synthetic
ucauagaacaucucgucaguau

SEQ ID NO: 369279 - RNA, 23 nt, Artificial Sequence
  Synthetic
uucauagaacaucucgucaguau

SEQ ID NO: 369280 - RNA, 24 nt, Artificial Sequence
  Synthetic
cuucauagaacaucucgucaguau

SEQ ID NO: 369281 - RNA, 18 nt, Artificial Sequence
  Synthetic
auucuuguucuucaguau

SEQ ID NO: 369282 - RNA, 19 nt, Artificial Sequence
  Synthetic
gauucuuguucuucaguau

SEQ ID NO: 369283 - RNA, 20 nt, Artificial Sequence
  Synthetic
ugauucuuguucuucaguau

SEQ ID NO: 369284 - RNA, 21 nt, Artificial Sequence
  Synthetic
augauucuuguucuucaguau

SEQ ID NO: 369285 - RNA, 22 nt, Artificial Sequence
  Synthetic
gaugauucuuguucuucaguau

SEQ ID NO: 369286 - RNA, 23 nt, Artificial Sequence
  Synthetic
agaugauucuuguucuucaguau

SEQ ID NO: 369287 - RNA, 24 nt, Artificial Sequence
  Synthetic
uagaugauucuuguucuucaguau

SEQ ID NO: 369288 - RNA, 18 nt, Artificial Sequence
  Synthetic
gugcaucugaaagaguau

SEQ ID NO: 369289 - RNA, 19 nt, Artificial Sequence
  Synthetic
agugcaucugaaagaguau

SEQ ID NO: 369290 - RNA, 20 nt, Artificial Sequence
  Synthetic
aagugcaucugaaagaguau

SEQ ID NO: 369291 - RNA, 21 nt, Artificial Sequence
  Synthetic
aaagugcaucugaaagaguau

SEQ ID NO: 369292 - RNA, 22 nt, Artificial Sequence
  Synthetic
aaaagugcaucugaaagaguau

SEQ ID NO: 369293 - RNA, 23 nt, Artificial Sequence
  Synthetic
uaaaagugcaucugaaagaguau

SEQ ID NO: 369294 - RNA, 24 nt, Artificial Sequence
  Synthetic
auaaaagugcaucugaaagaguau

SEQ ID NO: 369295 - RNA, 18 nt, Artificial Sequence
  Synthetic
uauagcagacaagaguau

SEQ ID NO: 369296 - RNA, 19 nt, Artificial Sequence
  Synthetic
auauagcagacaagaguau

SEQ ID NO: 369297 - RNA, 20 nt, Artificial Sequence
  Synthetic
aauauagcagacaagaguau

SEQ ID NO: 369298 - RNA, 21 nt, Artificial Sequence
  Synthetic
aaauauagcagacaagaguau

SEQ ID NO: 369299 - RNA, 22 nt, Artificial Sequence
  Synthetic
caaauauagcagacaagaguau

SEQ ID NO: 369300 - RNA, 23 nt, Artificial Sequence
  Synthetic
gcaaauauagcagacaagaguau

SEQ ID NO: 369301 - RNA, 24 nt, Artificial Sequence
  Synthetic
agcaaauauagcagacaagaguau

SEQ ID NO: 369302 - RNA, 18 nt, Artificial Sequence
  Synthetic
aagggggccagagaguau

SEQ ID NO: 369303 - RNA, 19 nt, Artificial Sequence
  Synthetic
gaagggggccagagaguau

SEQ ID NO: 369304 - RNA, 20 nt, Artificial Sequence
  Synthetic
ggaagggggccagagaguau

SEQ ID NO: 369305 - RNA, 21 nt, Artificial Sequence
  Synthetic
aggaagggggccagagaguau

SEQ ID NO: 369306 - RNA, 22 nt, Artificial Sequence
  Synthetic
gaggaagggggccagagaguau

SEQ ID NO: 369307 - RNA, 23 nt, Artificial Sequence
  Synthetic
ugaggaagggggccagagaguau

SEQ ID NO: 369308 - RNA, 24 nt, Artificial Sequence
  Synthetic
augaggaagggggccagagaguau

SEQ ID NO: 369309 - RNA, 18 nt, Artificial Sequence
  Synthetic
caaagagagagggaguau

SEQ ID NO: 369310 - RNA, 19 nt, Artificial Sequence
  Synthetic
acaaagagagagggaguau

SEQ ID NO: 369311 - RNA, 20 nt, Artificial Sequence
  Synthetic
cacaaagagagagggaguau

SEQ ID NO: 369312 - RNA, 21 nt, Artificial Sequence
  Synthetic
acacaaagagagagggaguau

SEQ ID NO: 369313 - RNA, 22 nt, Artificial Sequence
  Synthetic
cacacaaagagagagggaguau

SEQ ID NO: 369314 - RNA, 23 nt, Artificial Sequence
  Synthetic
acacacaaagagagagggaguau

SEQ ID NO: 369315 - RNA, 24 nt, Artificial Sequence
  Synthetic
aacacacaaagagagagggaguau

SEQ ID NO: 369316 - RNA, 18 nt, Artificial Sequence
  Synthetic
aaaaaagucuuggaguau

SEQ ID NO: 369317 - RNA, 19 nt, Artificial Sequence
  Synthetic
aaaaaaagucuuggaguau

SEQ ID NO: 369318 - RNA, 20 nt, Artificial Sequence
  Synthetic
aaaaaaaagucuuggaguau

SEQ ID NO: 369319 - RNA, 21 nt, Artificial Sequence
  Synthetic
gaaaaaaaagucuuggaguau

SEQ ID NO: 369320 - RNA, 22 nt, Artificial Sequence
  Synthetic
ugaaaaaaaagucuuggaguau

SEQ ID NO: 369321 - RNA, 23 nt, Artificial Sequence
  Synthetic
cugaaaaaaaagucuuggaguau

SEQ ID NO: 369322 - RNA, 24 nt, Artificial Sequence
  Synthetic
acugaaaaaaaagucuuggaguau

SEQ ID NO: 369323 - RNA, 18 nt, Artificial Sequence
  Synthetic
uaggauguuguugaguau

SEQ ID NO: 369324 - RNA, 19 nt, Artificial Sequence
  Synthetic
cuaggauguuguugaguau

SEQ ID NO: 369325 - RNA, 20 nt, Artificial Sequence
  Synthetic
acuaggauguuguugaguau

SEQ ID NO: 369326 - RNA, 21 nt, Artificial Sequence
  Synthetic
cacuaggauguuguugaguau

SEQ ID NO: 369327 - RNA, 22 nt, Artificial Sequence
  Synthetic
gcacuaggauguuguugaguau

SEQ ID NO: 369328 - RNA, 23 nt, Artificial Sequence
  Synthetic
ggcacuaggauguuguugaguau

SEQ ID NO: 369329 - RNA, 24 nt, Artificial Sequence
  Synthetic
uggcacuaggauguuguugaguau

SEQ ID NO: 369330 - RNA, 18 nt, Artificial Sequence
  Synthetic
accgcaaaaaaauaguau

SEQ ID NO: 369331 - RNA, 19 nt, Artificial Sequence
  Synthetic
caccgcaaaaaaauaguau

SEQ ID NO: 369332 - RNA, 20 nt, Artificial Sequence
  Synthetic
ucaccgcaaaaaaauaguau

SEQ ID NO: 369333 - RNA, 21 nt, Artificial Sequence
  Synthetic
cucaccgcaaaaaaauaguau

SEQ ID NO: 369334 - RNA, 22 nt, Artificial Sequence
  Synthetic
ucucaccgcaaaaaaauaguau

SEQ ID NO: 369335 - RNA, 23 nt, Artificial Sequence
  Synthetic
uucucaccgcaaaaaaauaguau

SEQ ID NO: 369336 - RNA, 24 nt, Artificial Sequence
  Synthetic
guucucaccgcaaaaaaauaguau

SEQ ID NO: 369337 - RNA, 18 nt, Artificial Sequence
  Synthetic
acaaggaagggauaguau

SEQ ID NO: 369338 - RNA, 19 nt, Artificial Sequence
  Synthetic
uacaaggaagggauaguau

SEQ ID NO: 369339 - RNA, 20 nt, Artificial Sequence
  Synthetic
uuacaaggaagggauaguau

SEQ ID NO: 369340 - RNA, 21 nt, Artificial Sequence
  Synthetic
auuacaaggaagggauaguau

SEQ ID NO: 369341 - RNA, 22 nt, Artificial Sequence
  Synthetic
uauuacaaggaagggauaguau

SEQ ID NO: 369342 - RNA, 23 nt, Artificial Sequence
  Synthetic
cuauuacaaggaagggauaguau

SEQ ID NO: 369343 - RNA, 24 nt, Artificial Sequence
  Synthetic
ucuauuacaaggaagggauaguau

SEQ ID NO: 369344 - RNA, 18 nt, Artificial Sequence
  Synthetic
aucaaggaaauauaguau

SEQ ID NO: 369345 - RNA, 19 nt, Artificial Sequence
  Synthetic
aaucaaggaaauauaguau

SEQ ID NO: 369346 - RNA, 20 nt, Artificial Sequence
  Synthetic
aaaucaaggaaauauaguau

SEQ ID NO: 369347 - RNA, 21 nt, Artificial Sequence
  Synthetic
aaaaucaaggaaauauaguau

SEQ ID NO: 369348 - RNA, 22 nt, Artificial Sequence
  Synthetic
aaaaaucaaggaaauauaguau

SEQ ID NO: 369349 - RNA, 23 nt, Artificial Sequence
  Synthetic
caaaaaucaaggaaauauaguau

SEQ ID NO: 369350 - RNA, 24 nt, Artificial Sequence
  Synthetic
ucaaaaaucaaggaaauauaguau

SEQ ID NO: 369351 - RNA, 18 nt, Artificial Sequence
  Synthetic
ucuaauauuguauaguau

SEQ ID NO: 369352 - RNA, 19 nt, Artificial Sequence
  Synthetic
aucuaauauuguauaguau

SEQ ID NO: 369353 - RNA, 20 nt, Artificial Sequence
  Synthetic
aaucuaauauuguauaguau

SEQ ID NO: 369354 - RNA, 21 nt, Artificial Sequence
  Synthetic
aaaucuaauauuguauaguau

SEQ ID NO: 369355 - RNA, 22 nt, Artificial Sequence
  Synthetic
aaaaucuaauauuguauaguau

SEQ ID NO: 369356 - RNA, 23 nt, Artificial Sequence
  Synthetic
caaaaucuaauauuguauaguau

SEQ ID NO: 369357 - RNA, 24 nt, Artificial Sequence
  Synthetic
gcaaaaucuaauauuguauaguau

SEQ ID NO: 369358 - RNA, 18 nt, Artificial Sequence
  Synthetic
acaaauugauuauaguau

SEQ ID NO: 369359 - RNA, 19 nt, Artificial Sequence
  Synthetic
aacaaauugauuauaguau

SEQ ID NO: 369360 - RNA, 20 nt, Artificial Sequence
  Synthetic
uaacaaauugauuauaguau

SEQ ID NO: 369361 - RNA, 21 nt, Artificial Sequence
  Synthetic
uuaacaaauugauuauaguau

SEQ ID NO: 369362 - RNA, 22 nt, Artificial Sequence
  Synthetic
cuuaacaaauugauuauaguau

SEQ ID NO: 369363 - RNA, 23 nt, Artificial Sequence
  Synthetic
ucuuaacaaauugauuauaguau

SEQ ID NO: 369364 - RNA, 24 nt, Artificial Sequence
  Synthetic
aucuuaacaaauugauuauaguau

SEQ ID NO: 369365 - RNA, 18 nt, Artificial Sequence
  Synthetic
ggcuagaggcccuaguau

SEQ ID NO: 369366 - RNA, 19 nt, Artificial Sequence
  Synthetic
uggcuagaggcccuaguau

SEQ ID NO: 369367 - RNA, 20 nt, Artificial Sequence
  Synthetic
guggcuagaggcccuaguau

SEQ ID NO: 369368 - RNA, 21 nt, Artificial Sequence
  Synthetic
gguggcuagaggcccuaguau

SEQ ID NO: 369369 - RNA, 22 nt, Artificial Sequence
  Synthetic
cgguggcuagaggcccuaguau

SEQ ID NO: 369370 - RNA, 23 nt, Artificial Sequence
  Synthetic
acgguggcuagaggcccuaguau

SEQ ID NO: 369371 - RNA, 24 nt, Artificial Sequence
  Synthetic
gacgguggcuagaggcccuaguau

SEQ ID NO: 369372 - RNA, 18 nt, Artificial Sequence
  Synthetic
acuucuaauugguaguau

SEQ ID NO: 369373 - RNA, 19 nt, Artificial Sequence
  Synthetic
uacuucuaauugguaguau

SEQ ID NO: 369374 - RNA, 20 nt, Artificial Sequence
  Synthetic
uuacuucuaauugguaguau

SEQ ID NO: 369375 - RNA, 21 nt, Artificial Sequence
  Synthetic
auuacuucuaauugguaguau

SEQ ID NO: 369376 - RNA, 22 nt, Artificial Sequence
  Synthetic
gauuacuucuaauugguaguau

SEQ ID NO: 369377 - RNA, 23 nt, Artificial Sequence
  Synthetic
ggauuacuucuaauugguaguau

SEQ ID NO: 369378 - RNA, 24 nt, Artificial Sequence
  Synthetic
gggauuacuucuaauugguaguau

SEQ ID NO: 369379 - RNA, 18 nt, Artificial Sequence
  Synthetic
acuaguuuuacuuaguau

SEQ ID NO: 369380 - RNA, 19 nt, Artificial Sequence
  Synthetic
uacuaguuuuacuuaguau

SEQ ID NO: 369381 - RNA, 20 nt, Artificial Sequence
  Synthetic
uuacuaguuuuacuuaguau

SEQ ID NO: 369382 - RNA, 21 nt, Artificial Sequence
  Synthetic
auuacuaguuuuacuuaguau

SEQ ID NO: 369383 - RNA, 22 nt, Artificial Sequence
  Synthetic
gauuacuaguuuuacuuaguau

SEQ ID NO: 369384 - RNA, 23 nt, Artificial Sequence
  Synthetic
agauuacuaguuuuacuuaguau

SEQ ID NO: 369385 - RNA, 24 nt, Artificial Sequence
  Synthetic
cagauuacuaguuuuacuuaguau

SEQ ID NO: 369386 - RNA, 18 nt, Artificial Sequence
  Synthetic
ucuuaaaaugcuuaguau

SEQ ID NO: 369387 - RNA, 19 nt, Artificial Sequence
  Synthetic
cucuuaaaaugcuuaguau

SEQ ID NO: 369388 - RNA, 20 nt, Artificial Sequence
  Synthetic
acucuuaaaaugcuuaguau

SEQ ID NO: 369389 - RNA, 21 nt, Artificial Sequence
  Synthetic
uacucuuaaaaugcuuaguau

SEQ ID NO: 369390 - RNA, 22 nt, Artificial Sequence
  Synthetic
guacucuuaaaaugcuuaguau

SEQ ID NO: 369391 - RNA, 23 nt, Artificial Sequence
  Synthetic
gguacucuuaaaaugcuuaguau

SEQ ID NO: 369392 - RNA, 24 nt, Artificial Sequence
  Synthetic
cgguacucuuaaaaugcuuaguau

SEQ ID NO: 369393 - RNA, 18 nt, Artificial Sequence
  Synthetic
ucacaauagaguuaguau

SEQ ID NO: 369394 - RNA, 19 nt, Artificial Sequence
  Synthetic
uucacaauagaguuaguau

SEQ ID NO: 369395 - RNA, 20 nt, Artificial Sequence
  Synthetic
auucacaauagaguuaguau

SEQ ID NO: 369396 - RNA, 21 nt, Artificial Sequence
  Synthetic
uauucacaauagaguuaguau

SEQ ID NO: 369397 - RNA, 22 nt, Artificial Sequence
  Synthetic
guauucacaauagaguuaguau

SEQ ID NO: 369398 - RNA, 23 nt, Artificial Sequence
  Synthetic
uguauucacaauagaguuaguau

SEQ ID NO: 369399 - RNA, 24 nt, Artificial Sequence
  Synthetic
auguauucacaauagaguuaguau

SEQ ID NO: 369400 - RNA, 18 nt, Artificial Sequence
  Synthetic
gaaauuuuugguuaguau

SEQ ID NO: 369401 - RNA, 19 nt, Artificial Sequence
  Synthetic
agaaauuuuugguuaguau

SEQ ID NO: 369402 - RNA, 20 nt, Artificial Sequence
  Synthetic
aagaaauuuuugguuaguau

SEQ ID NO: 369403 - RNA, 21 nt, Artificial Sequence
  Synthetic
gaagaaauuuuugguuaguau

SEQ ID NO: 369404 - RNA, 22 nt, Artificial Sequence
  Synthetic
ggaagaaauuuuugguuaguau

SEQ ID NO: 369405 - RNA, 23 nt, Artificial Sequence
  Synthetic
aggaagaaauuuuugguuaguau

SEQ ID NO: 369406 - RNA, 24 nt, Artificial Sequence
  Synthetic
uaggaagaaauuuuugguuaguau

SEQ ID NO: 369407 - RNA, 18 nt, Artificial Sequence
  Synthetic
guaugacuccaaacguau

SEQ ID NO: 369408 - RNA, 19 nt, Artificial Sequence
  Synthetic
aguaugacuccaaacguau

SEQ ID NO: 369409 - RNA, 20 nt, Artificial Sequence
  Synthetic
aaguaugacuccaaacguau

SEQ ID NO: 369410 - RNA, 21 nt, Artificial Sequence
  Synthetic
aaaguaugacuccaaacguau

SEQ ID NO: 369411 - RNA, 22 nt, Artificial Sequence
  Synthetic
caaaguaugacuccaaacguau

SEQ ID NO: 369412 - RNA, 23 nt, Artificial Sequence
  Synthetic
ucaaaguaugacuccaaacguau

SEQ ID NO: 369413 - RNA, 24 nt, Artificial Sequence
  Synthetic
aucaaaguaugacuccaaacguau

SEQ ID NO: 369414 - RNA, 18 nt, Artificial Sequence
  Synthetic
cuaagcauguaaacguau

SEQ ID NO: 369415 - RNA, 19 nt, Artificial Sequence
  Synthetic
acuaagcauguaaacguau

SEQ ID NO: 369416 - RNA, 20 nt, Artificial Sequence
  Synthetic
gacuaagcauguaaacguau

SEQ ID NO: 369417 - RNA, 21 nt, Artificial Sequence
  Synthetic
ugacuaagcauguaaacguau

SEQ ID NO: 369418 - RNA, 22 nt, Artificial Sequence
  Synthetic
augacuaagcauguaaacguau

SEQ ID NO: 369419 - RNA, 23 nt, Artificial Sequence
  Synthetic
uaugacuaagcauguaaacguau

SEQ ID NO: 369420 - RNA, 24 nt, Artificial Sequence
  Synthetic
auaugacuaagcauguaaacguau

SEQ ID NO: 369421 - RNA, 18 nt, Artificial Sequence
  Synthetic
cagcucaucuuuccguau

SEQ ID NO: 369422 - RNA, 19 nt, Artificial Sequence
  Synthetic
ccagcucaucuuuccguau

SEQ ID NO: 369423 - RNA, 20 nt, Artificial Sequence
  Synthetic
cccagcucaucuuuccguau

SEQ ID NO: 369424 - RNA, 21 nt, Artificial Sequence
  Synthetic
acccagcucaucuuuccguau

SEQ ID NO: 369425 - RNA, 22 nt, Artificial Sequence
  Synthetic
cacccagcucaucuuuccguau

SEQ ID NO: 369426 - RNA, 23 nt, Artificial Sequence
  Synthetic
ucacccagcucaucuuuccguau

SEQ ID NO: 369427 - RNA, 24 nt, Artificial Sequence
  Synthetic
cucacccagcucaucuuuccguau

SEQ ID NO: 369428 - RNA, 18 nt, Artificial Sequence
  Synthetic
aaaaugcugcaugcguau

SEQ ID NO: 369429 - RNA, 19 nt, Artificial Sequence
  Synthetic
uaaaaugcugcaugcguau

SEQ ID NO: 369430 - RNA, 20 nt, Artificial Sequence
  Synthetic
auaaaaugcugcaugcguau

SEQ ID NO: 369431 - RNA, 21 nt, Artificial Sequence
  Synthetic
uauaaaaugcugcaugcguau

SEQ ID NO: 369432 - RNA, 22 nt, Artificial Sequence
  Synthetic
uuauaaaaugcugcaugcguau

SEQ ID NO: 369433 - RNA, 23 nt, Artificial Sequence
  Synthetic
guuauaaaaugcugcaugcguau

SEQ ID NO: 369434 - RNA, 24 nt, Artificial Sequence
  Synthetic
uguuauaaaaugcugcaugcguau

SEQ ID NO: 369435 - RNA, 18 nt, Artificial Sequence
  Synthetic
cucaccgcagucucguau

SEQ ID NO: 369436 - RNA, 19 nt, Artificial Sequence
  Synthetic
ucucaccgcagucucguau

SEQ ID NO: 369437 - RNA, 20 nt, Artificial Sequence
  Synthetic
aucucaccgcagucucguau

SEQ ID NO: 369438 - RNA, 21 nt, Artificial Sequence
  Synthetic
gaucucaccgcagucucguau

SEQ ID NO: 369439 - RNA, 22 nt, Artificial Sequence
  Synthetic
ugaucucaccgcagucucguau

SEQ ID NO: 369440 - RNA, 23 nt, Artificial Sequence
  Synthetic
augaucucaccgcagucucguau

SEQ ID NO: 369441 - RNA, 24 nt, Artificial Sequence
  Synthetic
aaugaucucaccgcagucucguau

SEQ ID NO: 369442 - RNA, 18 nt, Artificial Sequence
  Synthetic
uuuaauucagguucguau

SEQ ID NO: 369443 - RNA, 19 nt, Artificial Sequence
  Synthetic
uuuuaauucagguucguau

SEQ ID NO: 369444 - RNA, 20 nt, Artificial Sequence
  Synthetic
uuuuuaauucagguucguau

SEQ ID NO: 369445 - RNA, 21 nt, Artificial Sequence
  Synthetic
guuuuuaauucagguucguau

SEQ ID NO: 369446 - RNA, 22 nt, Artificial Sequence
  Synthetic
uguuuuuaauucagguucguau

SEQ ID NO: 369447 - RNA, 23 nt, Artificial Sequence
  Synthetic
cuguuuuuaauucagguucguau

SEQ ID NO: 369448 - RNA, 24 nt, Artificial Sequence
  Synthetic
gcuguuuuuaauucagguucguau

SEQ ID NO: 369449 - RNA, 18 nt, Artificial Sequence
  Synthetic
aggugaaaagaaagguau

SEQ ID NO: 369450 - RNA, 19 nt, Artificial Sequence
  Synthetic
aaggugaaaagaaagguau

SEQ ID NO: 369451 - RNA, 20 nt, Artificial Sequence
  Synthetic
aaaggugaaaagaaagguau

SEQ ID NO: 369452 - RNA, 21 nt, Artificial Sequence
  Synthetic
gaaaggugaaaagaaagguau

SEQ ID NO: 369453 - RNA, 22 nt, Artificial Sequence
  Synthetic
ggaaaggugaaaagaaagguau

SEQ ID NO: 369454 - RNA, 23 nt, Artificial Sequence
  Synthetic
uggaaaggugaaaagaaagguau

SEQ ID NO: 369455 - RNA, 24 nt, Artificial Sequence
  Synthetic
uuggaaaggugaaaagaaagguau

SEQ ID NO: 369456 - RNA, 18 nt, Artificial Sequence
  Synthetic
uaaucuguggaaagguau

SEQ ID NO: 369457 - RNA, 19 nt, Artificial Sequence
  Synthetic
auaaucuguggaaagguau

SEQ ID NO: 369458 - RNA, 20 nt, Artificial Sequence
  Synthetic
uauaaucuguggaaagguau

SEQ ID NO: 369459 - RNA, 21 nt, Artificial Sequence
  Synthetic
auauaaucuguggaaagguau

SEQ ID NO: 369460 - RNA, 22 nt, Artificial Sequence
  Synthetic
aauauaaucuguggaaagguau

SEQ ID NO: 369461 - RNA, 23 nt, Artificial Sequence
  Synthetic
caauauaaucuguggaaagguau

SEQ ID NO: 369462 - RNA, 24 nt, Artificial Sequence
  Synthetic
acaauauaaucuguggaaagguau

SEQ ID NO: 369463 - RNA, 18 nt, Artificial Sequence
  Synthetic
uuacagugugcaagguau

SEQ ID NO: 369464 - RNA, 19 nt, Artificial Sequence
  Synthetic
cuuacagugugcaagguau

SEQ ID NO: 369465 - RNA, 20 nt, Artificial Sequence
  Synthetic
gcuuacagugugcaagguau

SEQ ID NO: 369466 - RNA, 21 nt, Artificial Sequence
  Synthetic
ugcuuacagugugcaagguau

SEQ ID NO: 369467 - RNA, 22 nt, Artificial Sequence
  Synthetic
gugcuuacagugugcaagguau

SEQ ID NO: 369468 - RNA, 23 nt, Artificial Sequence
  Synthetic
ugugcuuacagugugcaagguau

SEQ ID NO: 369469 - RNA, 24 nt, Artificial Sequence
  Synthetic
augugcuuacagugugcaagguau

SEQ ID NO: 369470 - RNA, 18 nt, Artificial Sequence
  Synthetic
ucaucaagcagaagguau

SEQ ID NO: 369471 - RNA, 19 nt, Artificial Sequence
  Synthetic
aucaucaagcagaagguau

SEQ ID NO: 369472 - RNA, 20 nt, Artificial Sequence
  Synthetic
gaucaucaagcagaagguau

SEQ ID NO: 369473 - RNA, 21 nt, Artificial Sequence
  Synthetic
ugaucaucaagcagaagguau

SEQ ID NO: 369474 - RNA, 22 nt, Artificial Sequence
  Synthetic
augaucaucaagcagaagguau

SEQ ID NO: 369475 - RNA, 23 nt, Artificial Sequence
  Synthetic
gaugaucaucaagcagaagguau

SEQ ID NO: 369476 - RNA, 24 nt, Artificial Sequence
  Synthetic
agaugaucaucaagcagaagguau

SEQ ID NO: 369477 - RNA, 18 nt, Artificial Sequence
  Synthetic
gaaauggccaacagguau

SEQ ID NO: 369478 - RNA, 19 nt, Artificial Sequence
  Synthetic
agaaauggccaacagguau

SEQ ID NO: 369479 - RNA, 20 nt, Artificial Sequence
  Synthetic
uagaaauggccaacagguau

SEQ ID NO: 369480 - RNA, 21 nt, Artificial Sequence
  Synthetic
auagaaauggccaacagguau

SEQ ID NO: 369481 - RNA, 22 nt, Artificial Sequence
  Synthetic
cauagaaauggccaacagguau

SEQ ID NO: 369482 - RNA, 23 nt, Artificial Sequence
  Synthetic
acauagaaauggccaacagguau

SEQ ID NO: 369483 - RNA, 24 nt, Artificial Sequence
  Synthetic
gacauagaaauggccaacagguau

SEQ ID NO: 369484 - RNA, 18 nt, Artificial Sequence
  Synthetic
cucauuccgcccagguau

SEQ ID NO: 369485 - RNA, 19 nt, Artificial Sequence
  Synthetic
gcucauuccgcccagguau

SEQ ID NO: 369486 - RNA, 20 nt, Artificial Sequence
  Synthetic
agcucauuccgcccagguau

SEQ ID NO: 369487 - RNA, 21 nt, Artificial Sequence
  Synthetic
uagcucauuccgcccagguau

SEQ ID NO: 369488 - RNA, 22 nt, Artificial Sequence
  Synthetic
guagcucauuccgcccagguau

SEQ ID NO: 369489 - RNA, 23 nt, Artificial Sequence
  Synthetic
aguagcucauuccgcccagguau

SEQ ID NO: 369490 - RNA, 24 nt, Artificial Sequence
  Synthetic
gaguagcucauuccgcccagguau

SEQ ID NO: 369491 - RNA, 18 nt, Artificial Sequence
  Synthetic
gcuuuuuauugcagguau

SEQ ID NO: 369492 - RNA, 19 nt, Artificial Sequence
  Synthetic
ugcuuuuuauugcagguau

SEQ ID NO: 369493 - RNA, 20 nt, Artificial Sequence
  Synthetic
cugcuuuuuauugcagguau

SEQ ID NO: 369494 - RNA, 21 nt, Artificial Sequence
  Synthetic
ccugcuuuuuauugcagguau

SEQ ID NO: 369495 - RNA, 22 nt, Artificial Sequence
  Synthetic
gccugcuuuuuauugcagguau

SEQ ID NO: 369496 - RNA, 23 nt, Artificial Sequence
  Synthetic
ugccugcuuuuuauugcagguau

SEQ ID NO: 369497 - RNA, 24 nt, Artificial Sequence
  Synthetic
cugccugcuuuuuauugcagguau

SEQ ID NO: 369498 - RNA, 18 nt, Artificial Sequence
  Synthetic
auguuggccaagagguau

SEQ ID NO: 369499 - RNA, 19 nt, Artificial Sequence
  Synthetic
cauguuggccaagagguau

SEQ ID NO: 369500 - RNA, 20 nt, Artificial Sequence
  Synthetic
acauguuggccaagagguau

SEQ ID NO: 369501 - RNA, 21 nt, Artificial Sequence
  Synthetic
cacauguuggccaagagguau

SEQ ID NO: 369502 - RNA, 22 nt, Artificial Sequence
  Synthetic
ucacauguuggccaagagguau

SEQ ID NO: 369503 - RNA, 23 nt, Artificial Sequence
  Synthetic
aucacauguuggccaagagguau

SEQ ID NO: 369504 - RNA, 24 nt, Artificial Sequence
  Synthetic
caucacauguuggccaagagguau

SEQ ID NO: 369505 - RNA, 18 nt, Artificial Sequence
  Synthetic
cuuuuauuucagagguau

SEQ ID NO: 369506 - RNA, 19 nt, Artificial Sequence
  Synthetic
gcuuuuauuucagagguau

SEQ ID NO: 369507 - RNA, 20 nt, Artificial Sequence
  Synthetic
ugcuuuuauuucagagguau

SEQ ID NO: 369508 - RNA, 21 nt, Artificial Sequence
  Synthetic
uugcuuuuauuucagagguau

SEQ ID NO: 369509 - RNA, 22 nt, Artificial Sequence
  Synthetic
auugcuuuuauuucagagguau

SEQ ID NO: 369510 - RNA, 23 nt, Artificial Sequence
  Synthetic
aauugcuuuuauuucagagguau

SEQ ID NO: 369511 - RNA, 24 nt, Artificial Sequence
  Synthetic
aaauugcuuuuauuucagagguau

SEQ ID NO: 369512 - RNA, 18 nt, Artificial Sequence
  Synthetic
uucaugcccuugagguau

SEQ ID NO: 369513 - RNA, 19 nt, Artificial Sequence
  Synthetic
auucaugcccuugagguau

SEQ ID NO: 369514 - RNA, 20 nt, Artificial Sequence
  Synthetic
uauucaugcccuugagguau

SEQ ID NO: 369515 - RNA, 21 nt, Artificial Sequence
  Synthetic
uuauucaugcccuugagguau

SEQ ID NO: 369516 - RNA, 22 nt, Artificial Sequence
  Synthetic
auuauucaugcccuugagguau

SEQ ID NO: 369517 - RNA, 23 nt, Artificial Sequence
  Synthetic
uauuauucaugcccuugagguau

SEQ ID NO: 369518 - RNA, 24 nt, Artificial Sequence
  Synthetic
auauuauucaugcccuugagguau

SEQ ID NO: 369519 - RNA, 18 nt, Artificial Sequence
  Synthetic
cgauguuuuacuagguau

SEQ ID NO: 369520 - RNA, 19 nt, Artificial Sequence
  Synthetic
ccgauguuuuacuagguau

SEQ ID NO: 369521 - RNA, 20 nt, Artificial Sequence
  Synthetic
uccgauguuuuacuagguau

SEQ ID NO: 369522 - RNA, 21 nt, Artificial Sequence
  Synthetic
auccgauguuuuacuagguau

SEQ ID NO: 369523 - RNA, 22 nt, Artificial Sequence
  Synthetic
cauccgauguuuuacuagguau

SEQ ID NO: 369524 - RNA, 23 nt, Artificial Sequence
  Synthetic
acauccgauguuuuacuagguau

SEQ ID NO: 369525 - RNA, 24 nt, Artificial Sequence
  Synthetic
uacauccgauguuuuacuagguau

SEQ ID NO: 369526 - RNA, 18 nt, Artificial Sequence
  Synthetic
guugugauaccuagguau

SEQ ID NO: 369527 - RNA, 19 nt, Artificial Sequence
  Synthetic
aguugugauaccuagguau

SEQ ID NO: 369528 - RNA, 20 nt, Artificial Sequence
  Synthetic
aaguugugauaccuagguau

SEQ ID NO: 369529 - RNA, 21 nt, Artificial Sequence
  Synthetic
uaaguugugauaccuagguau

SEQ ID NO: 369530 - RNA, 22 nt, Artificial Sequence
  Synthetic
cuaaguugugauaccuagguau

SEQ ID NO: 369531 - RNA, 23 nt, Artificial Sequence
  Synthetic
acuaaguugugauaccuagguau

SEQ ID NO: 369532 - RNA, 24 nt, Artificial Sequence
  Synthetic
aacuaaguugugauaccuagguau

SEQ ID NO: 369533 - RNA, 18 nt, Artificial Sequence
  Synthetic
gcugaaggcaguagguau

SEQ ID NO: 369534 - RNA, 19 nt, Artificial Sequence
  Synthetic
ggcugaaggcaguagguau

SEQ ID NO: 369535 - RNA, 20 nt, Artificial Sequence
  Synthetic
uggcugaaggcaguagguau

SEQ ID NO: 369536 - RNA, 21 nt, Artificial Sequence
  Synthetic
cuggcugaaggcaguagguau

SEQ ID NO: 369537 - RNA, 22 nt, Artificial Sequence
  Synthetic
ccuggcugaaggcaguagguau

SEQ ID NO: 369538 - RNA, 23 nt, Artificial Sequence
  Synthetic
accuggcugaaggcaguagguau

SEQ ID NO: 369539 - RNA, 24 nt, Artificial Sequence
  Synthetic
aaccuggcugaaggcaguagguau

SEQ ID NO: 369540 - RNA, 18 nt, Artificial Sequence
  Synthetic
cuaaugacuuaucgguau

SEQ ID NO: 369541 - RNA, 19 nt, Artificial Sequence
  Synthetic
acuaaugacuuaucgguau

SEQ ID NO: 369542 - RNA, 20 nt, Artificial Sequence
  Synthetic
aacuaaugacuuaucgguau

SEQ ID NO: 369543 - RNA, 21 nt, Artificial Sequence
  Synthetic
gaacuaaugacuuaucgguau

SEQ ID NO: 369544 - RNA, 22 nt, Artificial Sequence
  Synthetic
ugaacuaaugacuuaucgguau

SEQ ID NO: 369545 - RNA, 23 nt, Artificial Sequence
  Synthetic
augaacuaaugacuuaucgguau

SEQ ID NO: 369546 - RNA, 24 nt, Artificial Sequence
  Synthetic
gaugaacuaaugacuuaucgguau

SEQ ID NO: 369547 - RNA, 18 nt, Artificial Sequence
  Synthetic
ccugauguauuucgguau

SEQ ID NO: 369548 - RNA, 19 nt, Artificial Sequence
  Synthetic
gccugauguauuucgguau

SEQ ID NO: 369549 - RNA, 20 nt, Artificial Sequence
  Synthetic
agccugauguauuucgguau

SEQ ID NO: 369550 - RNA, 21 nt, Artificial Sequence
  Synthetic
cagccugauguauuucgguau

SEQ ID NO: 369551 - RNA, 22 nt, Artificial Sequence
  Synthetic
acagccugauguauuucgguau

SEQ ID NO: 369552 - RNA, 23 nt, Artificial Sequence
  Synthetic
uacagccugauguauuucgguau

SEQ ID NO: 369553 - RNA, 24 nt, Artificial Sequence
  Synthetic
auacagccugauguauuucgguau

SEQ ID NO: 369554 - RNA, 18 nt, Artificial Sequence
  Synthetic
aaugguuuagaaggguau

SEQ ID NO: 369555 - RNA, 19 nt, Artificial Sequence
  Synthetic
uaaugguuuagaaggguau

SEQ ID NO: 369556 - RNA, 20 nt, Artificial Sequence
  Synthetic
guaaugguuuagaaggguau

SEQ ID NO: 369557 - RNA, 21 nt, Artificial Sequence
  Synthetic
cguaaugguuuagaaggguau

SEQ ID NO: 369558 - RNA, 22 nt, Artificial Sequence
  Synthetic
acguaaugguuuagaaggguau

SEQ ID NO: 369559 - RNA, 23 nt, Artificial Sequence
  Synthetic
aacguaaugguuuagaaggguau

SEQ ID NO: 369560 - RNA, 24 nt, Artificial Sequence
  Synthetic
aaacguaaugguuuagaaggguau

SEQ ID NO: 369561 - RNA, 18 nt, Artificial Sequence
  Synthetic
cuacaaaccaagggguau

SEQ ID NO: 369562 - RNA, 19 nt, Artificial Sequence
  Synthetic
acuacaaaccaagggguau

SEQ ID NO: 369563 - RNA, 20 nt, Artificial Sequence
  Synthetic
aacuacaaaccaagggguau

SEQ ID NO: 369564 - RNA, 21 nt, Artificial Sequence
  Synthetic
gaacuacaaaccaagggguau

SEQ ID NO: 369565 - RNA, 22 nt, Artificial Sequence
  Synthetic
agaacuacaaaccaagggguau

SEQ ID NO: 369566 - RNA, 23 nt, Artificial Sequence
  Synthetic
gagaacuacaaaccaagggguau

SEQ ID NO: 369567 - RNA, 24 nt, Artificial Sequence
  Synthetic
ugagaacuacaaaccaagggguau

SEQ ID NO: 369568 - RNA, 18 nt, Artificial Sequence
  Synthetic
uugccacagaagggguau

SEQ ID NO: 369569 - RNA, 19 nt, Artificial Sequence
  Synthetic
uuugccacagaagggguau

SEQ ID NO: 369570 - RNA, 20 nt, Artificial Sequence
  Synthetic
auuugccacagaagggguau

SEQ ID NO: 369571 - RNA, 21 nt, Artificial Sequence
  Synthetic
uauuugccacagaagggguau

SEQ ID NO: 369572 - RNA, 22 nt, Artificial Sequence
  Synthetic
auauuugccacagaagggguau

SEQ ID NO: 369573 - RNA, 23 nt, Artificial Sequence
  Synthetic
aauauuugccacagaagggguau

SEQ ID NO: 369574 - RNA, 24 nt, Artificial Sequence
  Synthetic
aaauauuugccacagaagggguau

SEQ ID NO: 369575 - RNA, 18 nt, Artificial Sequence
  Synthetic
acaaucaaauguggguau

SEQ ID NO: 369576 - RNA, 19 nt, Artificial Sequence
  Synthetic
cacaaucaaauguggguau

SEQ ID NO: 369577 - RNA, 20 nt, Artificial Sequence
  Synthetic
ucacaaucaaauguggguau

SEQ ID NO: 369578 - RNA, 21 nt, Artificial Sequence
  Synthetic
cucacaaucaaauguggguau

SEQ ID NO: 369579 - RNA, 22 nt, Artificial Sequence
  Synthetic
gcucacaaucaaauguggguau

SEQ ID NO: 369580 - RNA, 23 nt, Artificial Sequence
  Synthetic
agcucacaaucaaauguggguau

SEQ ID NO: 369581 - RNA, 24 nt, Artificial Sequence
  Synthetic
gagcucacaaucaaauguggguau

SEQ ID NO: 369582 - RNA, 18 nt, Artificial Sequence
  Synthetic
cuguuuaagauuggguau

SEQ ID NO: 369583 - RNA, 19 nt, Artificial Sequence
  Synthetic
acuguuuaagauuggguau

SEQ ID NO: 369584 - RNA, 20 nt, Artificial Sequence
  Synthetic
aacuguuuaagauuggguau

SEQ ID NO: 369585 - RNA, 21 nt, Artificial Sequence
  Synthetic
caacuguuuaagauuggguau

SEQ ID NO: 369586 - RNA, 22 nt, Artificial Sequence
  Synthetic
acaacuguuuaagauuggguau

SEQ ID NO: 369587 - RNA, 23 nt, Artificial Sequence
  Synthetic
gacaacuguuuaagauuggguau

SEQ ID NO: 369588 - RNA, 24 nt, Artificial Sequence
  Synthetic
agacaacuguuuaagauuggguau

SEQ ID NO: 369589 - RNA, 18 nt, Artificial Sequence
  Synthetic
ugguggccacuuggguau

SEQ ID NO: 369590 - RNA, 19 nt, Artificial Sequence
  Synthetic
augguggccacuuggguau

SEQ ID NO: 369591 - RNA, 20 nt, Artificial Sequence
  Synthetic
caugguggccacuuggguau

SEQ ID NO: 369592 - RNA, 21 nt, Artificial Sequence
  Synthetic
ucaugguggccacuuggguau

SEQ ID NO: 369593 - RNA, 22 nt, Artificial Sequence
  Synthetic
cucaugguggccacuuggguau

SEQ ID NO: 369594 - RNA, 23 nt, Artificial Sequence
  Synthetic
ucucaugguggccacuuggguau

SEQ ID NO: 369595 - RNA, 24 nt, Artificial Sequence
  Synthetic
uucucaugguggccacuuggguau

SEQ ID NO: 369596 - RNA, 18 nt, Artificial Sequence
  Synthetic
gggugucauuaaugguau

SEQ ID NO: 369597 - RNA, 19 nt, Artificial Sequence
  Synthetic
ugggugucauuaaugguau

SEQ ID NO: 369598 - RNA, 20 nt, Artificial Sequence
  Synthetic
gugggugucauuaaugguau

SEQ ID NO: 369599 - RNA, 21 nt, Artificial Sequence
  Synthetic
ugugggugucauuaaugguau

SEQ ID NO: 369600 - RNA, 22 nt, Artificial Sequence
  Synthetic
uugugggugucauuaaugguau

SEQ ID NO: 369601 - RNA, 23 nt, Artificial Sequence
  Synthetic
auugugggugucauuaaugguau

SEQ ID NO: 369602 - RNA, 24 nt, Artificial Sequence
  Synthetic
uauugugggugucauuaaugguau

SEQ ID NO: 369603 - RNA, 18 nt, Artificial Sequence
  Synthetic
cacucaaggugaugguau

SEQ ID NO: 369604 - RNA, 19 nt, Artificial Sequence
  Synthetic
acacucaaggugaugguau

SEQ ID NO: 369605 - RNA, 20 nt, Artificial Sequence
  Synthetic
aacacucaaggugaugguau

SEQ ID NO: 369606 - RNA, 21 nt, Artificial Sequence
  Synthetic
uaacacucaaggugaugguau

SEQ ID NO: 369607 - RNA, 22 nt, Artificial Sequence
  Synthetic
cuaacacucaaggugaugguau

SEQ ID NO: 369608 - RNA, 23 nt, Artificial Sequence
  Synthetic
ccuaacacucaaggugaugguau

SEQ ID NO: 369609 - RNA, 24 nt, Artificial Sequence
  Synthetic
accuaacacucaaggugaugguau

SEQ ID NO: 369610 - RNA, 18 nt, Artificial Sequence
  Synthetic
aauuuuuguauaugguau

SEQ ID NO: 369611 - RNA, 19 nt, Artificial Sequence
  Synthetic
uaauuuuuguauaugguau

SEQ ID NO: 369612 - RNA, 20 nt, Artificial Sequence
  Synthetic
uuaauuuuuguauaugguau

SEQ ID NO: 369613 - RNA, 21 nt, Artificial Sequence
  Synthetic
auuaauuuuuguauaugguau

SEQ ID NO: 369614 - RNA, 22 nt, Artificial Sequence
  Synthetic
aauuaauuuuuguauaugguau

SEQ ID NO: 369615 - RNA, 23 nt, Artificial Sequence
  Synthetic
gaauuaauuuuuguauaugguau

SEQ ID NO: 369616 - RNA, 24 nt, Artificial Sequence
  Synthetic
ugaauuaauuuuuguauaugguau

SEQ ID NO: 369617 - RNA, 18 nt, Artificial Sequence
  Synthetic
gcuuuucuauucugguau

SEQ ID NO: 369618 - RNA, 19 nt, Artificial Sequence
  Synthetic
ugcuuuucuauucugguau

SEQ ID NO: 369619 - RNA, 20 nt, Artificial Sequence
  Synthetic
cugcuuuucuauucugguau

SEQ ID NO: 369620 - RNA, 21 nt, Artificial Sequence
  Synthetic
acugcuuuucuauucugguau

SEQ ID NO: 369621 - RNA, 22 nt, Artificial Sequence
  Synthetic
gacugcuuuucuauucugguau

SEQ ID NO: 369622 - RNA, 23 nt, Artificial Sequence
  Synthetic
ugacugcuuuucuauucugguau

SEQ ID NO: 369623 - RNA, 24 nt, Artificial Sequence
  Synthetic
gugacugcuuuucuauucugguau

SEQ ID NO: 369624 - RNA, 18 nt, Artificial Sequence
  Synthetic
guauagggugagugguau

SEQ ID NO: 369625 - RNA, 19 nt, Artificial Sequence
  Synthetic
gguauagggugagugguau

SEQ ID NO: 369626 - RNA, 20 nt, Artificial Sequence
  Synthetic
ugguauagggugagugguau

SEQ ID NO: 369627 - RNA, 21 nt, Artificial Sequence
  Synthetic
gugguauagggugagugguau

SEQ ID NO: 369628 - RNA, 22 nt, Artificial Sequence
  Synthetic
ugugguauagggugagugguau

SEQ ID NO: 369629 - RNA, 23 nt, Artificial Sequence
  Synthetic
uugugguauagggugagugguau

SEQ ID NO: 369630 - RNA, 24 nt, Artificial Sequence
  Synthetic
guugugguauagggugagugguau

SEQ ID NO: 369631 - RNA, 18 nt, Artificial Sequence
  Synthetic
uagcgguagaggugguau

SEQ ID NO: 369632 - RNA, 19 nt, Artificial Sequence
  Synthetic
guagcgguagaggugguau

SEQ ID NO: 369633 - RNA, 20 nt, Artificial Sequence
  Synthetic
aguagcgguagaggugguau

SEQ ID NO: 369634 - RNA, 21 nt, Artificial Sequence
  Synthetic
aaguagcgguagaggugguau

SEQ ID NO: 369635 - RNA, 22 nt, Artificial Sequence
  Synthetic
uaaguagcgguagaggugguau

SEQ ID NO: 369636 - RNA, 23 nt, Artificial Sequence
  Synthetic
auaaguagcgguagaggugguau

SEQ ID NO: 369637 - RNA, 24 nt, Artificial Sequence
  Synthetic
uauaaguagcgguagaggugguau

SEQ ID NO: 369638 - RNA, 18 nt, Artificial Sequence
  Synthetic
aauuaagaugugugguau

SEQ ID NO: 369639 - RNA, 19 nt, Artificial Sequence
  Synthetic
caauuaagaugugugguau

SEQ ID NO: 369640 - RNA, 20 nt, Artificial Sequence
  Synthetic
acaauuaagaugugugguau

SEQ ID NO: 369641 - RNA, 21 nt, Artificial Sequence
  Synthetic
uacaauuaagaugugugguau

SEQ ID NO: 369642 - RNA, 22 nt, Artificial Sequence
  Synthetic
uuacaauuaagaugugugguau

SEQ ID NO: 369643 - RNA, 23 nt, Artificial Sequence
  Synthetic
uuuacaauuaagaugugugguau

SEQ ID NO: 369644 - RNA, 24 nt, Artificial Sequence
  Synthetic
guuuacaauuaagaugugugguau

SEQ ID NO: 369645 - RNA, 18 nt, Artificial Sequence
  Synthetic
cauggaaucaauugguau

SEQ ID NO: 369646 - RNA, 19 nt, Artificial Sequence
  Synthetic
acauggaaucaauugguau

SEQ ID NO: 369647 - RNA, 20 nt, Artificial Sequence
  Synthetic
cacauggaaucaauugguau

SEQ ID NO: 369648 - RNA, 21 nt, Artificial Sequence
  Synthetic
ucacauggaaucaauugguau

SEQ ID NO: 369649 - RNA, 22 nt, Artificial Sequence
  Synthetic
uucacauggaaucaauugguau

SEQ ID NO: 369650 - RNA, 23 nt, Artificial Sequence
  Synthetic
auucacauggaaucaauugguau

SEQ ID NO: 369651 - RNA, 24 nt, Artificial Sequence
  Synthetic
uauucacauggaaucaauugguau

SEQ ID NO: 369652 - RNA, 18 nt, Artificial Sequence
  Synthetic
auagaaaacuguugguau

SEQ ID NO: 369653 - RNA, 19 nt, Artificial Sequence
  Synthetic
gauagaaaacuguugguau

SEQ ID NO: 369654 - RNA, 20 nt, Artificial Sequence
  Synthetic
agauagaaaacuguugguau

SEQ ID NO: 369655 - RNA, 21 nt, Artificial Sequence
  Synthetic
cagauagaaaacuguugguau

SEQ ID NO: 369656 - RNA, 22 nt, Artificial Sequence
  Synthetic
ucagauagaaaacuguugguau

SEQ ID NO: 369657 - RNA, 23 nt, Artificial Sequence
  Synthetic
cucagauagaaaacuguugguau

SEQ ID NO: 369658 - RNA, 24 nt, Artificial Sequence
  Synthetic
gcucagauagaaaacuguugguau

SEQ ID NO: 369659 - RNA, 18 nt, Artificial Sequence
  Synthetic
auuccaugucuuugguau

SEQ ID NO: 369660 - RNA, 19 nt, Artificial Sequence
  Synthetic
gauuccaugucuuugguau

SEQ ID NO: 369661 - RNA, 20 nt, Artificial Sequence
  Synthetic
ugauuccaugucuuugguau

SEQ ID NO: 369662 - RNA, 21 nt, Artificial Sequence
  Synthetic
uugauuccaugucuuugguau

SEQ ID NO: 369663 - RNA, 22 nt, Artificial Sequence
  Synthetic
guugauuccaugucuuugguau

SEQ ID NO: 369664 - RNA, 23 nt, Artificial Sequence
  Synthetic
gguugauuccaugucuuugguau

SEQ ID NO: 369665 - RNA, 24 nt, Artificial Sequence
  Synthetic
agguugauuccaugucuuugguau

SEQ ID NO: 369666 - RNA, 18 nt, Artificial Sequence
  Synthetic
aaaagccaagaaauguau

SEQ ID NO: 369667 - RNA, 19 nt, Artificial Sequence
  Synthetic
aaaaagccaagaaauguau

SEQ ID NO: 369668 - RNA, 20 nt, Artificial Sequence
  Synthetic
aaaaaagccaagaaauguau

SEQ ID NO: 369669 - RNA, 21 nt, Artificial Sequence
  Synthetic
gaaaaaagccaagaaauguau

SEQ ID NO: 369670 - RNA, 22 nt, Artificial Sequence
  Synthetic
agaaaaaagccaagaaauguau

SEQ ID NO: 369671 - RNA, 23 nt, Artificial Sequence
  Synthetic
aagaaaaaagccaagaaauguau

SEQ ID NO: 369672 - RNA, 24 nt, Artificial Sequence
  Synthetic
aaagaaaaaagccaagaaauguau

SEQ ID NO: 369673 - RNA, 18 nt, Artificial Sequence
  Synthetic
uuuaaaagagaaauguau

SEQ ID NO: 369674 - RNA, 19 nt, Artificial Sequence
  Synthetic
guuuaaaagagaaauguau

SEQ ID NO: 369675 - RNA, 20 nt, Artificial Sequence
  Synthetic
uguuuaaaagagaaauguau

SEQ ID NO: 369676 - RNA, 21 nt, Artificial Sequence
  Synthetic
uuguuuaaaagagaaauguau

SEQ ID NO: 369677 - RNA, 22 nt, Artificial Sequence
  Synthetic
uuuguuuaaaagagaaauguau

SEQ ID NO: 369678 - RNA, 23 nt, Artificial Sequence
  Synthetic
guuuguuuaaaagagaaauguau

SEQ ID NO: 369679 - RNA, 24 nt, Artificial Sequence
  Synthetic
aguuuguuuaaaagagaaauguau

SEQ ID NO: 369680 - RNA, 18 nt, Artificial Sequence
  Synthetic
acgaauucugaaauguau

SEQ ID NO: 369681 - RNA, 19 nt, Artificial Sequence
  Synthetic
aacgaauucugaaauguau

SEQ ID NO: 369682 - RNA, 20 nt, Artificial Sequence
  Synthetic
aaacgaauucugaaauguau

SEQ ID NO: 369683 - RNA, 21 nt, Artificial Sequence
  Synthetic
aaaacgaauucugaaauguau

SEQ ID NO: 369684 - RNA, 22 nt, Artificial Sequence
  Synthetic
aaaaacgaauucugaaauguau

SEQ ID NO: 369685 - RNA, 23 nt, Artificial Sequence
  Synthetic
uaaaaacgaauucugaaauguau

SEQ ID NO: 369686 - RNA, 24 nt, Artificial Sequence
  Synthetic
auaaaaacgaauucugaaauguau

SEQ ID NO: 369687 - RNA, 18 nt, Artificial Sequence
  Synthetic
ugcuuccgauaaauguau

SEQ ID NO: 369688 - RNA, 19 nt, Artificial Sequence
  Synthetic
cugcuuccgauaaauguau

SEQ ID NO: 369689 - RNA, 20 nt, Artificial Sequence
  Synthetic
acugcuuccgauaaauguau

SEQ ID NO: 369690 - RNA, 21 nt, Artificial Sequence
  Synthetic
aacugcuuccgauaaauguau

SEQ ID NO: 369691 - RNA, 22 nt, Artificial Sequence
  Synthetic
caacugcuuccgauaaauguau

SEQ ID NO: 369692 - RNA, 23 nt, Artificial Sequence
  Synthetic
gcaacugcuuccgauaaauguau

SEQ ID NO: 369693 - RNA, 24 nt, Artificial Sequence
  Synthetic
ggcaacugcuuccgauaaauguau

SEQ ID NO: 369694 - RNA, 18 nt, Artificial Sequence
  Synthetic
aucuccacuuaaauguau

SEQ ID NO: 369695 - RNA, 19 nt, Artificial Sequence
  Synthetic
caucuccacuuaaauguau

SEQ ID NO: 369696 - RNA, 20 nt, Artificial Sequence
  Synthetic
acaucuccacuuaaauguau

SEQ ID NO: 369697 - RNA, 21 nt, Artificial Sequence
  Synthetic
gacaucuccacuuaaauguau

SEQ ID NO: 369698 - RNA, 22 nt, Artificial Sequence
  Synthetic
ugacaucuccacuuaaauguau

SEQ ID NO: 369699 - RNA, 23 nt, Artificial Sequence
  Synthetic
uugacaucuccacuuaaauguau

SEQ ID NO: 369700 - RNA, 24 nt, Artificial Sequence
  Synthetic
auugacaucuccacuuaaauguau

SEQ ID NO: 369701 - RNA, 18 nt, Artificial Sequence
  Synthetic
ucugccuuuacaauguau

SEQ ID NO: 369702 - RNA, 19 nt, Artificial Sequence
  Synthetic
uucugccuuuacaauguau

SEQ ID NO: 369703 - RNA, 20 nt, Artificial Sequence
  Synthetic
auucugccuuuacaauguau

SEQ ID NO: 369704 - RNA, 21 nt, Artificial Sequence
  Synthetic
gauucugccuuuacaauguau

SEQ ID NO: 369705 - RNA, 22 nt, Artificial Sequence
  Synthetic
ggauucugccuuuacaauguau

SEQ ID NO: 369706 - RNA, 23 nt, Artificial Sequence
  Synthetic
aggauucugccuuuacaauguau

SEQ ID NO: 369707 - RNA, 24 nt, Artificial Sequence
  Synthetic
aaggauucugccuuuacaauguau

SEQ ID NO: 369708 - RNA, 18 nt, Artificial Sequence
  Synthetic
aaagaagaaaccauguau

SEQ ID NO: 369709 - RNA, 19 nt, Artificial Sequence
  Synthetic
uaaagaagaaaccauguau

SEQ ID NO: 369710 - RNA, 20 nt, Artificial Sequence
  Synthetic
uuaaagaagaaaccauguau

SEQ ID NO: 369711 - RNA, 21 nt, Artificial Sequence
  Synthetic
cuuaaagaagaaaccauguau

SEQ ID NO: 369712 - RNA, 22 nt, Artificial Sequence
  Synthetic
gcuuaaagaagaaaccauguau

SEQ ID NO: 369713 - RNA, 23 nt, Artificial Sequence
  Synthetic
ggcuuaaagaagaaaccauguau

SEQ ID NO: 369714 - RNA, 24 nt, Artificial Sequence
  Synthetic
uggcuuaaagaagaaaccauguau

SEQ ID NO: 369715 - RNA, 18 nt, Artificial Sequence
  Synthetic
acaucaccugccauguau

SEQ ID NO: 369716 - RNA, 19 nt, Artificial Sequence
  Synthetic
uacaucaccugccauguau

SEQ ID NO: 369717 - RNA, 20 nt, Artificial Sequence
  Synthetic
uuacaucaccugccauguau

SEQ ID NO: 369718 - RNA, 21 nt, Artificial Sequence
  Synthetic
cuuacaucaccugccauguau

SEQ ID NO: 369719 - RNA, 22 nt, Artificial Sequence
  Synthetic
gcuuacaucaccugccauguau

SEQ ID NO: 369720 - RNA, 23 nt, Artificial Sequence
  Synthetic
ugcuuacaucaccugccauguau

SEQ ID NO: 369721 - RNA, 24 nt, Artificial Sequence
  Synthetic
augcuuacaucaccugccauguau

SEQ ID NO: 369722 - RNA, 18 nt, Artificial Sequence
  Synthetic
guuggaaaugucauguau

SEQ ID NO: 369723 - RNA, 19 nt, Artificial Sequence
  Synthetic
aguuggaaaugucauguau

SEQ ID NO: 369724 - RNA, 20 nt, Artificial Sequence
  Synthetic
gaguuggaaaugucauguau

SEQ ID NO: 369725 - RNA, 21 nt, Artificial Sequence
  Synthetic
agaguuggaaaugucauguau

SEQ ID NO: 369726 - RNA, 22 nt, Artificial Sequence
  Synthetic
cagaguuggaaaugucauguau

SEQ ID NO: 369727 - RNA, 23 nt, Artificial Sequence
  Synthetic
acagaguuggaaaugucauguau

SEQ ID NO: 369728 - RNA, 24 nt, Artificial Sequence
  Synthetic
aacagaguuggaaaugucauguau

SEQ ID NO: 369729 - RNA, 18 nt, Artificial Sequence
  Synthetic
uuuggcuagcagauguau

SEQ ID NO: 369730 - RNA, 19 nt, Artificial Sequence
  Synthetic
uuuuggcuagcagauguau

SEQ ID NO: 369731 - RNA, 20 nt, Artificial Sequence
  Synthetic
guuuuggcuagcagauguau

SEQ ID NO: 369732 - RNA, 21 nt, Artificial Sequence
  Synthetic
uguuuuggcuagcagauguau

SEQ ID NO: 369733 - RNA, 22 nt, Artificial Sequence
  Synthetic
cuguuuuggcuagcagauguau

SEQ ID NO: 369734 - RNA, 23 nt, Artificial Sequence
  Synthetic
acuguuuuggcuagcagauguau

SEQ ID NO: 369735 - RNA, 24 nt, Artificial Sequence
  Synthetic
gacuguuuuggcuagcagauguau

SEQ ID NO: 369736 - RNA, 18 nt, Artificial Sequence
  Synthetic
ugauuccagaugauguau

SEQ ID NO: 369737 - RNA, 19 nt, Artificial Sequence
  Synthetic
gugauuccagaugauguau

SEQ ID NO: 369738 - RNA, 20 nt, Artificial Sequence
  Synthetic
ugugauuccagaugauguau

SEQ ID NO: 369739 - RNA, 21 nt, Artificial Sequence
  Synthetic
gugugauuccagaugauguau

SEQ ID NO: 369740 - RNA, 22 nt, Artificial Sequence
  Synthetic
ugugugauuccagaugauguau

SEQ ID NO: 369741 - RNA, 23 nt, Artificial Sequence
  Synthetic
uugugugauuccagaugauguau

SEQ ID NO: 369742 - RNA, 24 nt, Artificial Sequence
  Synthetic
guugugugauuccagaugauguau

SEQ ID NO: 369743 - RNA, 18 nt, Artificial Sequence
  Synthetic
auagagcaccugauguau

SEQ ID NO: 369744 - RNA, 19 nt, Artificial Sequence
  Synthetic
uauagagcaccugauguau

SEQ ID NO: 369745 - RNA, 20 nt, Artificial Sequence
  Synthetic
auauagagcaccugauguau

SEQ ID NO: 369746 - RNA, 21 nt, Artificial Sequence
  Synthetic
uauauagagcaccugauguau

SEQ ID NO: 369747 - RNA, 22 nt, Artificial Sequence
  Synthetic
uuauauagagcaccugauguau

SEQ ID NO: 369748 - RNA, 23 nt, Artificial Sequence
  Synthetic
auuauauagagcaccugauguau

SEQ ID NO: 369749 - RNA, 24 nt, Artificial Sequence
  Synthetic
gauuauauagagcaccugauguau

SEQ ID NO: 369750 - RNA, 18 nt, Artificial Sequence
  Synthetic
uugcuucuaaauauguau

SEQ ID NO: 369751 - RNA, 19 nt, Artificial Sequence
  Synthetic
guugcuucuaaauauguau

SEQ ID NO: 369752 - RNA, 20 nt, Artificial Sequence
  Synthetic
uguugcuucuaaauauguau

SEQ ID NO: 369753 - RNA, 21 nt, Artificial Sequence
  Synthetic
auguugcuucuaaauauguau

SEQ ID NO: 369754 - RNA, 22 nt, Artificial Sequence
  Synthetic
cauguugcuucuaaauauguau

SEQ ID NO: 369755 - RNA, 23 nt, Artificial Sequence
  Synthetic
ucauguugcuucuaaauauguau

SEQ ID NO: 369756 - RNA, 24 nt, Artificial Sequence
  Synthetic
aucauguugcuucuaaauauguau

SEQ ID NO: 369757 - RNA, 18 nt, Artificial Sequence
  Synthetic
uaaccauugaauauguau

SEQ ID NO: 369758 - RNA, 19 nt, Artificial Sequence
  Synthetic
auaaccauugaauauguau

SEQ ID NO: 369759 - RNA, 20 nt, Artificial Sequence
  Synthetic
uauaaccauugaauauguau

SEQ ID NO: 369760 - RNA, 21 nt, Artificial Sequence
  Synthetic
auauaaccauugaauauguau

SEQ ID NO: 369761 - RNA, 22 nt, Artificial Sequence
  Synthetic
uauauaaccauugaauauguau

SEQ ID NO: 369762 - RNA, 23 nt, Artificial Sequence
  Synthetic
auauauaaccauugaauauguau

SEQ ID NO: 369763 - RNA, 24 nt, Artificial Sequence
  Synthetic
aauauauaaccauugaauauguau

SEQ ID NO: 369764 - RNA, 18 nt, Artificial Sequence
  Synthetic
auauaaguuucuauguau

SEQ ID NO: 369765 - RNA, 19 nt, Artificial Sequence
  Synthetic
uauauaaguuucuauguau

SEQ ID NO: 369766 - RNA, 20 nt, Artificial Sequence
  Synthetic
auauauaaguuucuauguau

SEQ ID NO: 369767 - RNA, 21 nt, Artificial Sequence
  Synthetic
aauauauaaguuucuauguau

SEQ ID NO: 369768 - RNA, 22 nt, Artificial Sequence
  Synthetic
aaauauauaaguuucuauguau

SEQ ID NO: 369769 - RNA, 23 nt, Artificial Sequence
  Synthetic
aaaauauauaaguuucuauguau

SEQ ID NO: 369770 - RNA, 24 nt, Artificial Sequence
  Synthetic
aaaaauauauaaguuucuauguau

SEQ ID NO: 369771 - RNA, 18 nt, Artificial Sequence
  Synthetic
cugguaccugguauguau

SEQ ID NO: 369772 - RNA, 19 nt, Artificial Sequence
  Synthetic
ucugguaccugguauguau

SEQ ID NO: 369773 - RNA, 20 nt, Artificial Sequence
  Synthetic
uucugguaccugguauguau

SEQ ID NO: 369774 - RNA, 21 nt, Artificial Sequence
  Synthetic
auucugguaccugguauguau

SEQ ID NO: 369775 - RNA, 22 nt, Artificial Sequence
  Synthetic
cauucugguaccugguauguau

SEQ ID NO: 369776 - RNA, 23 nt, Artificial Sequence
  Synthetic
ucauucugguaccugguauguau

SEQ ID NO: 369777 - RNA, 24 nt, Artificial Sequence
  Synthetic
cucauucugguaccugguauguau

SEQ ID NO: 369778 - RNA, 18 nt, Artificial Sequence
  Synthetic
acguauguauguauguau

SEQ ID NO: 369779 - RNA, 19 nt, Artificial Sequence
  Synthetic
uacguauguauguauguau

SEQ ID NO: 369780 - RNA, 20 nt, Artificial Sequence
  Synthetic
guacguauguauguauguau

SEQ ID NO: 369781 - RNA, 21 nt, Artificial Sequence
  Synthetic
cguacguauguauguauguau

SEQ ID NO: 369782 - RNA, 22 nt, Artificial Sequence
  Synthetic
acguacguauguauguauguau

SEQ ID NO: 369783 - RNA, 23 nt, Artificial Sequence
  Synthetic
uacguacguauguauguauguau

SEQ ID NO: 369784 - RNA, 24 nt, Artificial Sequence
  Synthetic
guacguacguauguauguauguau

SEQ ID NO: 369785 - RNA, 18 nt, Artificial Sequence
  Synthetic
cugagucuuuguauguau

SEQ ID NO: 369786 - RNA, 19 nt, Artificial Sequence
  Synthetic
ccugagucuuuguauguau

SEQ ID NO: 369787 - RNA, 20 nt, Artificial Sequence
  Synthetic
uccugagucuuuguauguau

SEQ ID NO: 369788 - RNA, 21 nt, Artificial Sequence
  Synthetic
auccugagucuuuguauguau

SEQ ID NO: 369789 - RNA, 22 nt, Artificial Sequence
  Synthetic
uauccugagucuuuguauguau

SEQ ID NO: 369790 - RNA, 23 nt, Artificial Sequence
  Synthetic
auauccugagucuuuguauguau

SEQ ID NO: 369791 - RNA, 24 nt, Artificial Sequence
  Synthetic
cauauccugagucuuuguauguau

SEQ ID NO: 369792 - RNA, 18 nt, Artificial Sequence
  Synthetic
ucuaccauaauuauguau

SEQ ID NO: 369793 - RNA, 19 nt, Artificial Sequence
  Synthetic
uucuaccauaauuauguau

SEQ ID NO: 369794 - RNA, 20 nt, Artificial Sequence
  Synthetic
auucuaccauaauuauguau

SEQ ID NO: 369795 - RNA, 21 nt, Artificial Sequence
  Synthetic
aauucuaccauaauuauguau

SEQ ID NO: 369796 - RNA, 22 nt, Artificial Sequence
  Synthetic
caauucuaccauaauuauguau

SEQ ID NO: 369797 - RNA, 23 nt, Artificial Sequence
  Synthetic
ucaauucuaccauaauuauguau

SEQ ID NO: 369798 - RNA, 24 nt, Artificial Sequence
  Synthetic
cucaauucuaccauaauuauguau

SEQ ID NO: 369799 - RNA, 18 nt, Artificial Sequence
  Synthetic
augcuaaagaaacuguau

SEQ ID NO: 369800 - RNA, 19 nt, Artificial Sequence
  Synthetic
caugcuaaagaaacuguau

SEQ ID NO: 369801 - RNA, 20 nt, Artificial Sequence
  Synthetic
ucaugcuaaagaaacuguau

SEQ ID NO: 369802 - RNA, 21 nt, Artificial Sequence
  Synthetic
uucaugcuaaagaaacuguau

SEQ ID NO: 369803 - RNA, 22 nt, Artificial Sequence
  Synthetic
uuucaugcuaaagaaacuguau

SEQ ID NO: 369804 - RNA, 23 nt, Artificial Sequence
  Synthetic
cuuucaugcuaaagaaacuguau

SEQ ID NO: 369805 - RNA, 24 nt, Artificial Sequence
  Synthetic
ccuuucaugcuaaagaaacuguau

SEQ ID NO: 369806 - RNA, 18 nt, Artificial Sequence
  Synthetic
uuuagcaaaguacuguau

SEQ ID NO: 369807 - RNA, 19 nt, Artificial Sequence
  Synthetic
guuuagcaaaguacuguau

SEQ ID NO: 369808 - RNA, 20 nt, Artificial Sequence
  Synthetic
aguuuagcaaaguacuguau

SEQ ID NO: 369809 - RNA, 21 nt, Artificial Sequence
  Synthetic
gaguuuagcaaaguacuguau

SEQ ID NO: 369810 - RNA, 22 nt, Artificial Sequence
  Synthetic
agaguuuagcaaaguacuguau

SEQ ID NO: 369811 - RNA, 23 nt, Artificial Sequence
  Synthetic
gagaguuuagcaaaguacuguau

SEQ ID NO: 369812 - RNA, 24 nt, Artificial Sequence
  Synthetic
agagaguuuagcaaaguacuguau

SEQ ID NO: 369813 - RNA, 18 nt, Artificial Sequence
  Synthetic
gaguaguaaaaccuguau

SEQ ID NO: 369814 - RNA, 19 nt, Artificial Sequence
  Synthetic
agaguaguaaaaccuguau

SEQ ID NO: 369815 - RNA, 20 nt, Artificial Sequence
  Synthetic
uagaguaguaaaaccuguau

SEQ ID NO: 369816 - RNA, 21 nt, Artificial Sequence
  Synthetic
auagaguaguaaaaccuguau

SEQ ID NO: 369817 - RNA, 22 nt, Artificial Sequence
  Synthetic
cauagaguaguaaaaccuguau

SEQ ID NO: 369818 - RNA, 23 nt, Artificial Sequence
  Synthetic
ccauagaguaguaaaaccuguau

SEQ ID NO: 369819 - RNA, 24 nt, Artificial Sequence
  Synthetic
gccauagaguaguaaaaccuguau

SEQ ID NO: 369820 - RNA, 18 nt, Artificial Sequence
  Synthetic
gucugcuuguagcuguau

SEQ ID NO: 369821 - RNA, 19 nt, Artificial Sequence
  Synthetic
ugucugcuuguagcuguau

SEQ ID NO: 369822 - RNA, 20 nt, Artificial Sequence
  Synthetic
uugucugcuuguagcuguau

SEQ ID NO: 369823 - RNA, 21 nt, Artificial Sequence
  Synthetic
auugucugcuuguagcuguau

SEQ ID NO: 369824 - RNA, 22 nt, Artificial Sequence
  Synthetic
aauugucugcuuguagcuguau

SEQ ID NO: 369825 - RNA, 23 nt, Artificial Sequence
  Synthetic
gaauugucugcuuguagcuguau

SEQ ID NO: 369826 - RNA, 24 nt, Artificial Sequence
  Synthetic
ugaauugucugcuuguagcuguau

SEQ ID NO: 369827 - RNA, 18 nt, Artificial Sequence
  Synthetic
caccucagucugcuguau

SEQ ID NO: 369828 - RNA, 19 nt, Artificial Sequence
  Synthetic
ucaccucagucugcuguau

SEQ ID NO: 369829 - RNA, 20 nt, Artificial Sequence
  Synthetic
aucaccucagucugcuguau

SEQ ID NO: 369830 - RNA, 21 nt, Artificial Sequence
  Synthetic
gaucaccucagucugcuguau

SEQ ID NO: 369831 - RNA, 22 nt, Artificial Sequence
  Synthetic
ggaucaccucagucugcuguau

SEQ ID NO: 369832 - RNA, 23 nt, Artificial Sequence
  Synthetic
aggaucaccucagucugcuguau

SEQ ID NO: 369833 - RNA, 24 nt, Artificial Sequence
  Synthetic
uaggaucaccucagucugcuguau

SEQ ID NO: 369834 - RNA, 18 nt, Artificial Sequence
  Synthetic
aauacaaaugaucuguau

SEQ ID NO: 369835 - RNA, 19 nt, Artificial Sequence
  Synthetic
aaauacaaaugaucuguau

SEQ ID NO: 369836 - RNA, 20 nt, Artificial Sequence
  Synthetic
caaauacaaaugaucuguau

SEQ ID NO: 369837 - RNA, 21 nt, Artificial Sequence
  Synthetic
ucaaauacaaaugaucuguau

SEQ ID NO: 369838 - RNA, 22 nt, Artificial Sequence
  Synthetic
aucaaauacaaaugaucuguau

SEQ ID NO: 369839 - RNA, 23 nt, Artificial Sequence
  Synthetic
uaucaaauacaaaugaucuguau

SEQ ID NO: 369840 - RNA, 24 nt, Artificial Sequence
  Synthetic
guaucaaauacaaaugaucuguau

SEQ ID NO: 369841 - RNA, 18 nt, Artificial Sequence
  Synthetic
agucagucagcucuguau

SEQ ID NO: 369842 - RNA, 19 nt, Artificial Sequence
  Synthetic
uagucagucagcucuguau

SEQ ID NO: 369843 - RNA, 20 nt, Artificial Sequence
  Synthetic
cuagucagucagcucuguau

SEQ ID NO: 369844 - RNA, 21 nt, Artificial Sequence
  Synthetic
gcuagucagucagcucuguau

SEQ ID NO: 369845 - RNA, 22 nt, Artificial Sequence
  Synthetic
ggcuagucagucagcucuguau

SEQ ID NO: 369846 - RNA, 23 nt, Artificial Sequence
  Synthetic
uggcuagucagucagcucuguau

SEQ ID NO: 369847 - RNA, 24 nt, Artificial Sequence
  Synthetic
auggcuagucagucagcucuguau

SEQ ID NO: 369848 - RNA, 18 nt, Artificial Sequence
  Synthetic
cauuagacuugucuguau

SEQ ID NO: 369849 - RNA, 19 nt, Artificial Sequence
  Synthetic
acauuagacuugucuguau

SEQ ID NO: 369850 - RNA, 20 nt, Artificial Sequence
  Synthetic
aacauuagacuugucuguau

SEQ ID NO: 369851 - RNA, 21 nt, Artificial Sequence
  Synthetic
uaacauuagacuugucuguau

SEQ ID NO: 369852 - RNA, 22 nt, Artificial Sequence
  Synthetic
uuaacauuagacuugucuguau

SEQ ID NO: 369853 - RNA, 23 nt, Artificial Sequence
  Synthetic
uuuaacauuagacuugucuguau

SEQ ID NO: 369854 - RNA, 24 nt, Artificial Sequence
  Synthetic
auuuaacauuagacuugucuguau

SEQ ID NO: 369855 - RNA, 18 nt, Artificial Sequence
  Synthetic
uccaguuuuauucuguau

SEQ ID NO: 369856 - RNA, 19 nt, Artificial Sequence
  Synthetic
guccaguuuuauucuguau

SEQ ID NO: 369857 - RNA, 20 nt, Artificial Sequence
  Synthetic
gguccaguuuuauucuguau

SEQ ID NO: 369858 - RNA, 21 nt, Artificial Sequence
  Synthetic
ggguccaguuuuauucuguau

SEQ ID NO: 369859 - RNA, 22 nt, Artificial Sequence
  Synthetic
aggguccaguuuuauucuguau

SEQ ID NO: 369860 - RNA, 23 nt, Artificial Sequence
  Synthetic
aaggguccaguuuuauucuguau

SEQ ID NO: 369861 - RNA, 24 nt, Artificial Sequence
  Synthetic
uaaggguccaguuuuauucuguau

SEQ ID NO: 369862 - RNA, 18 nt, Artificial Sequence
  Synthetic
acucuggcacuucuguau

SEQ ID NO: 369863 - RNA, 19 nt, Artificial Sequence
  Synthetic
cacucuggcacuucuguau

SEQ ID NO: 369864 - RNA, 20 nt, Artificial Sequence
  Synthetic
acacucuggcacuucuguau

SEQ ID NO: 369865 - RNA, 21 nt, Artificial Sequence
  Synthetic
cacacucuggcacuucuguau

SEQ ID NO: 369866 - RNA, 22 nt, Artificial Sequence
  Synthetic
ucacacucuggcacuucuguau

SEQ ID NO: 369867 - RNA, 23 nt, Artificial Sequence
  Synthetic
aucacacucuggcacuucuguau

SEQ ID NO: 369868 - RNA, 24 nt, Artificial Sequence
  Synthetic
gaucacacucuggcacuucuguau

SEQ ID NO: 369869 - RNA, 18 nt, Artificial Sequence
  Synthetic
gcagagggaacaguguau

SEQ ID NO: 369870 - RNA, 19 nt, Artificial Sequence
  Synthetic
agcagagggaacaguguau

SEQ ID NO: 369871 - RNA, 20 nt, Artificial Sequence
  Synthetic
aagcagagggaacaguguau

SEQ ID NO: 369872 - RNA, 21 nt, Artificial Sequence
  Synthetic
caagcagagggaacaguguau

SEQ ID NO: 369873 - RNA, 22 nt, Artificial Sequence
  Synthetic
ccaagcagagggaacaguguau

SEQ ID NO: 369874 - RNA, 23 nt, Artificial Sequence
  Synthetic
uccaagcagagggaacaguguau

SEQ ID NO: 369875 - RNA, 24 nt, Artificial Sequence
  Synthetic
cuccaagcagagggaacaguguau

SEQ ID NO: 369876 - RNA, 18 nt, Artificial Sequence
  Synthetic
uuaaacuacaacguguau

SEQ ID NO: 369877 - RNA, 19 nt, Artificial Sequence
  Synthetic
auuaaacuacaacguguau

SEQ ID NO: 369878 - RNA, 20 nt, Artificial Sequence
  Synthetic
cauuaaacuacaacguguau

SEQ ID NO: 369879 - RNA, 21 nt, Artificial Sequence
  Synthetic
gcauuaaacuacaacguguau

SEQ ID NO: 369880 - RNA, 22 nt, Artificial Sequence
  Synthetic
agcauuaaacuacaacguguau

SEQ ID NO: 369881 - RNA, 23 nt, Artificial Sequence
  Synthetic
uagcauuaaacuacaacguguau

SEQ ID NO: 369882 - RNA, 24 nt, Artificial Sequence
  Synthetic
uuagcauuaaacuacaacguguau

SEQ ID NO: 369883 - RNA, 18 nt, Artificial Sequence
  Synthetic
uuagcauuaaccguguau

SEQ ID NO: 369884 - RNA, 19 nt, Artificial Sequence
  Synthetic
uuuagcauuaaccguguau

SEQ ID NO: 369885 - RNA, 20 nt, Artificial Sequence
  Synthetic
auuuagcauuaaccguguau

SEQ ID NO: 369886 - RNA, 21 nt, Artificial Sequence
  Synthetic
uauuuagcauuaaccguguau

SEQ ID NO: 369887 - RNA, 22 nt, Artificial Sequence
  Synthetic
auauuuagcauuaaccguguau

SEQ ID NO: 369888 - RNA, 23 nt, Artificial Sequence
  Synthetic
cauauuuagcauuaaccguguau

SEQ ID NO: 369889 - RNA, 24 nt, Artificial Sequence
  Synthetic
acauauuuagcauuaaccguguau

SEQ ID NO: 369890 - RNA, 18 nt, Artificial Sequence
  Synthetic
uaaaaugaaaauguguau

SEQ ID NO: 369891 - RNA, 19 nt, Artificial Sequence
  Synthetic
cuaaaaugaaaauguguau

SEQ ID NO: 369892 - RNA, 20 nt, Artificial Sequence
  Synthetic
ucuaaaaugaaaauguguau

SEQ ID NO: 369893 - RNA, 21 nt, Artificial Sequence
  Synthetic
uucuaaaaugaaaauguguau

SEQ ID NO: 369894 - RNA, 22 nt, Artificial Sequence
  Synthetic
uuucuaaaaugaaaauguguau

SEQ ID NO: 369895 - RNA, 23 nt, Artificial Sequence
  Synthetic
cuuucuaaaaugaaaauguguau

SEQ ID NO: 369896 - RNA, 24 nt, Artificial Sequence
  Synthetic
acuuucuaaaaugaaaauguguau

SEQ ID NO: 369897 - RNA, 18 nt, Artificial Sequence
  Synthetic
gggcaauaaaauguguau

SEQ ID NO: 369898 - RNA, 19 nt, Artificial Sequence
  Synthetic
ugggcaauaaaauguguau

SEQ ID NO: 369899 - RNA, 20 nt, Artificial Sequence
  Synthetic
augggcaauaaaauguguau

SEQ ID NO: 369900 - RNA, 21 nt, Artificial Sequence
  Synthetic
uaugggcaauaaaauguguau

SEQ ID NO: 369901 - RNA, 22 nt, Artificial Sequence
  Synthetic
auaugggcaauaaaauguguau

SEQ ID NO: 369902 - RNA, 23 nt, Artificial Sequence
  Synthetic
cauaugggcaauaaaauguguau

SEQ ID NO: 369903 - RNA, 24 nt, Artificial Sequence
  Synthetic
ucauaugggcaauaaaauguguau

SEQ ID NO: 369904 - RNA, 18 nt, Artificial Sequence
  Synthetic
auaauuuuaaauguguau

SEQ ID NO: 369905 - RNA, 19 nt, Artificial Sequence
  Synthetic
uauaauuuuaaauguguau

SEQ ID NO: 369906 - RNA, 20 nt, Artificial Sequence
  Synthetic
cuauaauuuuaaauguguau

SEQ ID NO: 369907 - RNA, 21 nt, Artificial Sequence
  Synthetic
acuauaauuuuaaauguguau

SEQ ID NO: 369908 - RNA, 22 nt, Artificial Sequence
  Synthetic
gacuauaauuuuaaauguguau

SEQ ID NO: 369909 - RNA, 23 nt, Artificial Sequence
  Synthetic
ugacuauaauuuuaaauguguau

SEQ ID NO: 369910 - RNA, 24 nt, Artificial Sequence
  Synthetic
augacuauaauuuuaaauguguau

SEQ ID NO: 369911 - RNA, 18 nt, Artificial Sequence
  Synthetic
uaauaagaccauguguau

SEQ ID NO: 369912 - RNA, 19 nt, Artificial Sequence
  Synthetic
uuaauaagaccauguguau

SEQ ID NO: 369913 - RNA, 20 nt, Artificial Sequence
  Synthetic
uuuaauaagaccauguguau

SEQ ID NO: 369914 - RNA, 21 nt, Artificial Sequence
  Synthetic
uuuuaauaagaccauguguau

SEQ ID NO: 369915 - RNA, 22 nt, Artificial Sequence
  Synthetic
uuuuuaauaagaccauguguau

SEQ ID NO: 369916 - RNA, 23 nt, Artificial Sequence
  Synthetic
auuuuuaauaagaccauguguau

SEQ ID NO: 369917 - RNA, 24 nt, Artificial Sequence
  Synthetic
cauuuuuaauaagaccauguguau

SEQ ID NO: 369918 - RNA, 18 nt, Artificial Sequence
  Synthetic
agcugugcauguguguau

SEQ ID NO: 369919 - RNA, 19 nt, Artificial Sequence
  Synthetic
uagcugugcauguguguau

SEQ ID NO: 369920 - RNA, 20 nt, Artificial Sequence
  Synthetic
guagcugugcauguguguau

SEQ ID NO: 369921 - RNA, 21 nt, Artificial Sequence
  Synthetic
uguagcugugcauguguguau

SEQ ID NO: 369922 - RNA, 22 nt, Artificial Sequence
  Synthetic
guguagcugugcauguguguau

SEQ ID NO: 369923 - RNA, 23 nt, Artificial Sequence
  Synthetic
uguguagcugugcauguguguau

SEQ ID NO: 369924 - RNA, 24 nt, Artificial Sequence
  Synthetic
uuguguagcugugcauguguguau

SEQ ID NO: 369925 - RNA, 18 nt, Artificial Sequence
  Synthetic
guguguguguguguguau

SEQ ID NO: 369926 - RNA, 19 nt, Artificial Sequence
  Synthetic
uguguguguguguguguau

SEQ ID NO: 369927 - RNA, 20 nt, Artificial Sequence
  Synthetic
guguguguguguguguguau

SEQ ID NO: 369928 - RNA, 18 nt, Artificial Sequence
  Synthetic
guauuuuucauuguguau

SEQ ID NO: 369929 - RNA, 19 nt, Artificial Sequence
  Synthetic
aguauuuuucauuguguau

SEQ ID NO: 369930 - RNA, 20 nt, Artificial Sequence
  Synthetic
uaguauuuuucauuguguau

SEQ ID NO: 369931 - RNA, 21 nt, Artificial Sequence
  Synthetic
guaguauuuuucauuguguau

SEQ ID NO: 369932 - RNA, 22 nt, Artificial Sequence
  Synthetic
uguaguauuuuucauuguguau

SEQ ID NO: 369933 - RNA, 23 nt, Artificial Sequence
  Synthetic
uuguaguauuuuucauuguguau

SEQ ID NO: 369934 - RNA, 24 nt, Artificial Sequence
  Synthetic
uuuguaguauuuuucauuguguau

SEQ ID NO: 369935 - RNA, 18 nt, Artificial Sequence
  Synthetic
gagcaaacauuuguguau

SEQ ID NO: 369936 - RNA, 19 nt, Artificial Sequence
  Synthetic
agagcaaacauuuguguau

SEQ ID NO: 369937 - RNA, 20 nt, Artificial Sequence
  Synthetic
aagagcaaacauuuguguau

SEQ ID NO: 369938 - RNA, 21 nt, Artificial Sequence
  Synthetic
uaagagcaaacauuuguguau

SEQ ID NO: 369939 - RNA, 22 nt, Artificial Sequence
  Synthetic
auaagagcaaacauuuguguau

SEQ ID NO: 369940 - RNA, 23 nt, Artificial Sequence
  Synthetic
uauaagagcaaacauuuguguau

SEQ ID NO: 369941 - RNA, 24 nt, Artificial Sequence
  Synthetic
guauaagagcaaacauuuguguau

SEQ ID NO: 369942 - RNA, 18 nt, Artificial Sequence
  Synthetic
aaaaaaaaaaaauuguau

SEQ ID NO: 369943 - RNA, 19 nt, Artificial Sequence
  Synthetic
aaaaaaaaaaaaauuguau

SEQ ID NO: 369944 - RNA, 20 nt, Artificial Sequence
  Synthetic
aaaaaaaaaaaaaauuguau

SEQ ID NO: 369945 - RNA, 21 nt, Artificial Sequence
  Synthetic
uaaaaaaaaaaaaaauuguau

SEQ ID NO: 369946 - RNA, 22 nt, Artificial Sequence
  Synthetic
guaaaaaaaaaaaaaauuguau

SEQ ID NO: 369947 - RNA, 23 nt, Artificial Sequence
  Synthetic
gguaaaaaaaaaaaaaauuguau

SEQ ID NO: 369948 - RNA, 24 nt, Artificial Sequence
  Synthetic
ggguaaaaaaaaaaaaaauuguau

SEQ ID NO: 369949 - RNA, 18 nt, Artificial Sequence
  Synthetic
augaauaacccauuguau

SEQ ID NO: 369950 - RNA, 19 nt, Artificial Sequence
  Synthetic
aaugaauaacccauuguau

SEQ ID NO: 369951 - RNA, 20 nt, Artificial Sequence
  Synthetic
gaaugaauaacccauuguau

SEQ ID NO: 369952 - RNA, 21 nt, Artificial Sequence
  Synthetic
ggaaugaauaacccauuguau

SEQ ID NO: 369953 - RNA, 22 nt, Artificial Sequence
  Synthetic
uggaaugaauaacccauuguau

SEQ ID NO: 369954 - RNA, 23 nt, Artificial Sequence
  Synthetic
auggaaugaauaacccauuguau

SEQ ID NO: 369955 - RNA, 24 nt, Artificial Sequence
  Synthetic
uauggaaugaauaacccauuguau

SEQ ID NO: 369956 - RNA, 18 nt, Artificial Sequence
  Synthetic
ggaauguuugcauuguau

SEQ ID NO: 369957 - RNA, 19 nt, Artificial Sequence
  Synthetic
uggaauguuugcauuguau

SEQ ID NO: 369958 - RNA, 20 nt, Artificial Sequence
  Synthetic
cuggaauguuugcauuguau

SEQ ID NO: 369959 - RNA, 21 nt, Artificial Sequence
  Synthetic
acuggaauguuugcauuguau

SEQ ID NO: 369960 - RNA, 22 nt, Artificial Sequence
  Synthetic
uacuggaauguuugcauuguau

SEQ ID NO: 369961 - RNA, 23 nt, Artificial Sequence
  Synthetic
guacuggaauguuugcauuguau

SEQ ID NO: 369962 - RNA, 24 nt, Artificial Sequence
  Synthetic
aguacuggaauguuugcauuguau

SEQ ID NO: 369963 - RNA, 18 nt, Artificial Sequence
  Synthetic
uuuucuugcauauuguau

SEQ ID NO: 369964 - RNA, 19 nt, Artificial Sequence
  Synthetic
auuuucuugcauauuguau

SEQ ID NO: 369965 - RNA, 20 nt, Artificial Sequence
  Synthetic
uauuuucuugcauauuguau

SEQ ID NO: 369966 - RNA, 21 nt, Artificial Sequence
  Synthetic
auauuuucuugcauauuguau

SEQ ID NO: 369967 - RNA, 22 nt, Artificial Sequence
  Synthetic
aauauuuucuugcauauuguau

SEQ ID NO: 369968 - RNA, 23 nt, Artificial Sequence
  Synthetic
aaauauuuucuugcauauuguau

SEQ ID NO: 369969 - RNA, 24 nt, Artificial Sequence
  Synthetic
gaaauauuuucuugcauauuguau

SEQ ID NO: 369970 - RNA, 18 nt, Artificial Sequence
  Synthetic
cuguucacccuauuguau

SEQ ID NO: 369971 - RNA, 19 nt, Artificial Sequence
  Synthetic
acuguucacccuauuguau

SEQ ID NO: 369972 - RNA, 20 nt, Artificial Sequence
  Synthetic
cacuguucacccuauuguau

SEQ ID NO: 369973 - RNA, 21 nt, Artificial Sequence
  Synthetic
ucacuguucacccuauuguau

SEQ ID NO: 369974 - RNA, 22 nt, Artificial Sequence
  Synthetic
aucacuguucacccuauuguau

SEQ ID NO: 369975 - RNA, 23 nt, Artificial Sequence
  Synthetic
caucacuguucacccuauuguau

SEQ ID NO: 369976 - RNA, 24 nt, Artificial Sequence
  Synthetic
ccaucacuguucacccuauuguau

SEQ ID NO: 369977 - RNA, 18 nt, Artificial Sequence
  Synthetic
aacucuagccucuuguau

SEQ ID NO: 369978 - RNA, 19 nt, Artificial Sequence
  Synthetic
caacucuagccucuuguau

SEQ ID NO: 369979 - RNA, 20 nt, Artificial Sequence
  Synthetic
ucaacucuagccucuuguau

SEQ ID NO: 369980 - RNA, 21 nt, Artificial Sequence
  Synthetic
gucaacucuagccucuuguau

SEQ ID NO: 369981 - RNA, 22 nt, Artificial Sequence
  Synthetic
ugucaacucuagccucuuguau

SEQ ID NO: 369982 - RNA, 23 nt, Artificial Sequence
  Synthetic
cugucaacucuagccucuuguau

SEQ ID NO: 369983 - RNA, 24 nt, Artificial Sequence
  Synthetic
ccugucaacucuagccucuuguau

SEQ ID NO: 369984 - RNA, 18 nt, Artificial Sequence
  Synthetic
uugaguugauucuuguau

SEQ ID NO: 369985 - RNA, 19 nt, Artificial Sequence
  Synthetic
uuugaguugauucuuguau

SEQ ID NO: 369986 - RNA, 20 nt, Artificial Sequence
  Synthetic
uuuugaguugauucuuguau

SEQ ID NO: 369987 - RNA, 21 nt, Artificial Sequence
  Synthetic
auuuugaguugauucuuguau

SEQ ID NO: 369988 - RNA, 22 nt, Artificial Sequence
  Synthetic
cauuuugaguugauucuuguau

SEQ ID NO: 369989 - RNA, 23 nt, Artificial Sequence
  Synthetic
ccauuuugaguugauucuuguau

SEQ ID NO: 369990 - RNA, 24 nt, Artificial Sequence
  Synthetic
uccauuuugaguugauucuuguau

SEQ ID NO: 369991 - RNA, 18 nt, Artificial Sequence
  Synthetic
ucugguaguuucuuguau

SEQ ID NO: 369992 - RNA, 19 nt, Artificial Sequence
  Synthetic
uucugguaguuucuuguau

SEQ ID NO: 369993 - RNA, 20 nt, Artificial Sequence
  Synthetic
uuucugguaguuucuuguau

SEQ ID NO: 369994 - RNA, 21 nt, Artificial Sequence
  Synthetic
auuucugguaguuucuuguau

SEQ ID NO: 369995 - RNA, 22 nt, Artificial Sequence
  Synthetic
aauuucugguaguuucuuguau

SEQ ID NO: 369996 - RNA, 23 nt, Artificial Sequence
  Synthetic
caauuucugguaguuucuuguau

SEQ ID NO: 369997 - RNA, 24 nt, Artificial Sequence
  Synthetic
ucaauuucugguaguuucuuguau

SEQ ID NO: 369998 - RNA, 18 nt, Artificial Sequence
  Synthetic
ugccugcuggaguuguau

SEQ ID NO: 369999 - RNA, 19 nt, Artificial Sequence
  Synthetic
cugccugcuggaguuguau

SEQ ID NO: 370000 - RNA, 20 nt, Artificial Sequence
  Synthetic
gcugccugcuggaguuguau

SEQ ID NO: 370001 - RNA, 21 nt, Artificial Sequence
  Synthetic
ggcugccugcuggaguuguau

SEQ ID NO: 370002 - RNA, 22 nt, Artificial Sequence
  Synthetic
uggcugccugcuggaguuguau

SEQ ID NO: 370003 - RNA, 23 nt, Artificial Sequence
  Synthetic
cuggcugccugcuggaguuguau

SEQ ID NO: 370004 - RNA, 24 nt, Artificial Sequence
  Synthetic
ccuggcugccugcuggaguuguau

SEQ ID NO: 370005 - RNA, 18 nt, Artificial Sequence
  Synthetic
ggaccuuucuuguuguau

SEQ ID NO: 370006 - RNA, 19 nt, Artificial Sequence
  Synthetic
gggaccuuucuuguuguau

SEQ ID NO: 370007 - RNA, 20 nt, Artificial Sequence
  Synthetic
ugggaccuuucuuguuguau

SEQ ID NO: 370008 - RNA, 21 nt, Artificial Sequence
  Synthetic
augggaccuuucuuguuguau

SEQ ID NO: 370009 - RNA, 22 nt, Artificial Sequence
  Synthetic
aaugggaccuuucuuguuguau

SEQ ID NO: 370010 - RNA, 23 nt, Artificial Sequence
  Synthetic
gaaugggaccuuucuuguuguau

SEQ ID NO: 370011 - RNA, 24 nt, Artificial Sequence
  Synthetic
ugaaugggaccuuucuuguuguau

SEQ ID NO: 370012 - RNA, 18 nt, Artificial Sequence
  Synthetic
gagaguucuuuguuguau

SEQ ID NO: 370013 - RNA, 19 nt, Artificial Sequence
  Synthetic
ggagaguucuuuguuguau

SEQ ID NO: 370014 - RNA, 20 nt, Artificial Sequence
  Synthetic
gggagaguucuuuguuguau

SEQ ID NO: 370015 - RNA, 21 nt, Artificial Sequence
  Synthetic
ugggagaguucuuuguuguau

SEQ ID NO: 370016 - RNA, 22 nt, Artificial Sequence
  Synthetic
uugggagaguucuuuguuguau

SEQ ID NO: 370017 - RNA, 23 nt, Artificial Sequence
  Synthetic
cuugggagaguucuuuguuguau

SEQ ID NO: 370018 - RNA, 24 nt, Artificial Sequence
  Synthetic
acuugggagaguucuuuguuguau

SEQ ID NO: 370019 - RNA, 18 nt, Artificial Sequence
  Synthetic
agguguucacauuuguau

SEQ ID NO: 370020 - RNA, 19 nt, Artificial Sequence
  Synthetic
aagguguucacauuuguau

SEQ ID NO: 370021 - RNA, 20 nt, Artificial Sequence
  Synthetic
aaagguguucacauuuguau

SEQ ID NO: 370022 - RNA, 21 nt, Artificial Sequence
  Synthetic
uaaagguguucacauuuguau

SEQ ID NO: 370023 - RNA, 22 nt, Artificial Sequence
  Synthetic
uuaaagguguucacauuuguau

SEQ ID NO: 370024 - RNA, 23 nt, Artificial Sequence
  Synthetic
uuuaaagguguucacauuuguau

SEQ ID NO: 370025 - RNA, 24 nt, Artificial Sequence
  Synthetic
uuuuaaagguguucacauuuguau

SEQ ID NO: 370026 - RNA, 18 nt, Artificial Sequence
  Synthetic
aucagauuccauuuguau

SEQ ID NO: 370027 - RNA, 19 nt, Artificial Sequence
  Synthetic
caucagauuccauuuguau

SEQ ID NO: 370028 - RNA, 20 nt, Artificial Sequence
  Synthetic
ccaucagauuccauuuguau

SEQ ID NO: 370029 - RNA, 21 nt, Artificial Sequence
  Synthetic
cccaucagauuccauuuguau

SEQ ID NO: 370030 - RNA, 22 nt, Artificial Sequence
  Synthetic
ccccaucagauuccauuuguau

SEQ ID NO: 370031 - RNA, 23 nt, Artificial Sequence
  Synthetic
cccccaucagauuccauuuguau

SEQ ID NO: 370032 - RNA, 24 nt, Artificial Sequence
  Synthetic
ucccccaucagauuccauuuguau

SEQ ID NO: 370033 - RNA, 18 nt, Artificial Sequence
  Synthetic
aaguuuuuagauuuguau

SEQ ID NO: 370034 - RNA, 19 nt, Artificial Sequence
  Synthetic
gaaguuuuuagauuuguau

SEQ ID NO: 370035 - RNA, 20 nt, Artificial Sequence
  Synthetic
agaaguuuuuagauuuguau

SEQ ID NO: 370036 - RNA, 21 nt, Artificial Sequence
  Synthetic
uagaaguuuuuagauuuguau

SEQ ID NO: 370037 - RNA, 22 nt, Artificial Sequence
  Synthetic
auagaaguuuuuagauuuguau

SEQ ID NO: 370038 - RNA, 23 nt, Artificial Sequence
  Synthetic
cauagaaguuuuuagauuuguau

SEQ ID NO: 370039 - RNA, 24 nt, Artificial Sequence
  Synthetic
ucauagaaguuuuuagauuuguau

SEQ ID NO: 370040 - RNA, 18 nt, Artificial Sequence
  Synthetic
aaguacuaaacuuuguau

SEQ ID NO: 370041 - RNA, 19 nt, Artificial Sequence
  Synthetic
aaaguacuaaacuuuguau

SEQ ID NO: 370042 - RNA, 20 nt, Artificial Sequence
  Synthetic
aaaaguacuaaacuuuguau

SEQ ID NO: 370043 - RNA, 21 nt, Artificial Sequence
  Synthetic
aaaaaguacuaaacuuuguau

SEQ ID NO: 370044 - RNA, 22 nt, Artificial Sequence
  Synthetic
uaaaaaguacuaaacuuuguau

SEQ ID NO: 370045 - RNA, 23 nt, Artificial Sequence
  Synthetic
auaaaaaguacuaaacuuuguau

SEQ ID NO: 370046 - RNA, 24 nt, Artificial Sequence
  Synthetic
uauaaaaaguacuaaacuuuguau

SEQ ID NO: 370047 - RNA, 18 nt, Artificial Sequence
  Synthetic
uucugauucacuuuguau

SEQ ID NO: 370048 - RNA, 19 nt, Artificial Sequence
  Synthetic
cuucugauucacuuuguau

SEQ ID NO: 370049 - RNA, 20 nt, Artificial Sequence
  Synthetic
acuucugauucacuuuguau

SEQ ID NO: 370050 - RNA, 21 nt, Artificial Sequence
  Synthetic
gacuucugauucacuuuguau

SEQ ID NO: 370051 - RNA, 22 nt, Artificial Sequence
  Synthetic
agacuucugauucacuuuguau

SEQ ID NO: 370052 - RNA, 23 nt, Artificial Sequence
  Synthetic
aagacuucugauucacuuuguau

SEQ ID NO: 370053 - RNA, 24 nt, Artificial Sequence
  Synthetic
aaagacuucugauucacuuuguau

SEQ ID NO: 370054 - RNA, 18 nt, Artificial Sequence
  Synthetic
cuaugugaauguuuguau

SEQ ID NO: 370055 - RNA, 19 nt, Artificial Sequence
  Synthetic
gcuaugugaauguuuguau

SEQ ID NO: 370056 - RNA, 20 nt, Artificial Sequence
  Synthetic
ggcuaugugaauguuuguau

SEQ ID NO: 370057 - RNA, 21 nt, Artificial Sequence
  Synthetic
gggcuaugugaauguuuguau

SEQ ID NO: 370058 - RNA, 22 nt, Artificial Sequence
  Synthetic
ugggcuaugugaauguuuguau

SEQ ID NO: 370059 - RNA, 23 nt, Artificial Sequence
  Synthetic
gugggcuaugugaauguuuguau

SEQ ID NO: 370060 - RNA, 24 nt, Artificial Sequence
  Synthetic
ggugggcuaugugaauguuuguau

SEQ ID NO: 370061 - RNA, 18 nt, Artificial Sequence
  Synthetic
aaguugagaauuuuguau

SEQ ID NO: 370062 - RNA, 19 nt, Artificial Sequence
  Synthetic
uaaguugagaauuuuguau

SEQ ID NO: 370063 - RNA, 20 nt, Artificial Sequence
  Synthetic
guaaguugagaauuuuguau

SEQ ID NO: 370064 - RNA, 21 nt, Artificial Sequence
  Synthetic
uguaaguugagaauuuuguau

SEQ ID NO: 370065 - RNA, 22 nt, Artificial Sequence
  Synthetic
uuguaaguugagaauuuuguau

SEQ ID NO: 370066 - RNA, 23 nt, Artificial Sequence
  Synthetic
auuguaaguugagaauuuuguau

SEQ ID NO: 370067 - RNA, 24 nt, Artificial Sequence
  Synthetic
cauuguaaguugagaauuuuguau

SEQ ID NO: 370068 - RNA, 18 nt, Artificial Sequence
  Synthetic
ucuuuuaaacuuuuguau

SEQ ID NO: 370069 - RNA, 19 nt, Artificial Sequence
  Synthetic
cucuuuuaaacuuuuguau

SEQ ID NO: 370070 - RNA, 20 nt, Artificial Sequence
  Synthetic
ccucuuuuaaacuuuuguau

SEQ ID NO: 370071 - RNA, 21 nt, Artificial Sequence
  Synthetic
uccucuuuuaaacuuuuguau

SEQ ID NO: 370072 - RNA, 22 nt, Artificial Sequence
  Synthetic
guccucuuuuaaacuuuuguau

SEQ ID NO: 370073 - RNA, 23 nt, Artificial Sequence
  Synthetic
aguccucuuuuaaacuuuuguau

SEQ ID NO: 370074 - RNA, 24 nt, Artificial Sequence
  Synthetic
aaguccucuuuuaaacuuuuguau

SEQ ID NO: 370075 - RNA, 18 nt, Artificial Sequence
  Synthetic
uugaguugauuuuuguau

SEQ ID NO: 370076 - RNA, 19 nt, Artificial Sequence
  Synthetic
cuugaguugauuuuuguau

SEQ ID NO: 370077 - RNA, 20 nt, Artificial Sequence
  Synthetic
ucuugaguugauuuuuguau

SEQ ID NO: 370078 - RNA, 21 nt, Artificial Sequence
  Synthetic
aucuugaguugauuuuuguau

SEQ ID NO: 370079 - RNA, 22 nt, Artificial Sequence
  Synthetic
caucuugaguugauuuuuguau

SEQ ID NO: 370080 - RNA, 23 nt, Artificial Sequence
  Synthetic
gcaucuugaguugauuuuuguau

SEQ ID NO: 370081 - RNA, 24 nt, Artificial Sequence
  Synthetic
ugcaucuugaguugauuuuuguau

SEQ ID NO: 370082 - RNA, 18 nt, Artificial Sequence
  Synthetic
cucacgacaaaaaauuau

SEQ ID NO: 370083 - RNA, 19 nt, Artificial Sequence
  Synthetic
acucacgacaaaaaauuau

SEQ ID NO: 370084 - RNA, 20 nt, Artificial Sequence
  Synthetic
cacucacgacaaaaaauuau

SEQ ID NO: 370085 - RNA, 21 nt, Artificial Sequence
  Synthetic
ccacucacgacaaaaaauuau

SEQ ID NO: 370086 - RNA, 22 nt, Artificial Sequence
  Synthetic
gccacucacgacaaaaaauuau

SEQ ID NO: 370087 - RNA, 23 nt, Artificial Sequence
  Synthetic
agccacucacgacaaaaaauuau

SEQ ID NO: 370088 - RNA, 24 nt, Artificial Sequence
  Synthetic
cagccacucacgacaaaaaauuau

SEQ ID NO: 370089 - RNA, 18 nt, Artificial Sequence
  Synthetic
aagaggcagaaaaauuau

SEQ ID NO: 370090 - RNA, 19 nt, Artificial Sequence
  Synthetic
aaagaggcagaaaaauuau

SEQ ID NO: 370091 - RNA, 20 nt, Artificial Sequence
  Synthetic
uaaagaggcagaaaaauuau

SEQ ID NO: 370092 - RNA, 21 nt, Artificial Sequence
  Synthetic
uuaaagaggcagaaaaauuau

SEQ ID NO: 370093 - RNA, 22 nt, Artificial Sequence
  Synthetic
guuaaagaggcagaaaaauuau

SEQ ID NO: 370094 - RNA, 23 nt, Artificial Sequence
  Synthetic
uguuaaagaggcagaaaaauuau

SEQ ID NO: 370095 - RNA, 24 nt, Artificial Sequence
  Synthetic
uuguuaaagaggcagaaaaauuau

SEQ ID NO: 370096 - RNA, 18 nt, Artificial Sequence
  Synthetic
auuuuauguaaaaauuau

SEQ ID NO: 370097 - RNA, 19 nt, Artificial Sequence
  Synthetic
aauuuuauguaaaaauuau

SEQ ID NO: 370098 - RNA, 20 nt, Artificial Sequence
  Synthetic
gaauuuuauguaaaaauuau

SEQ ID NO: 370099 - RNA, 21 nt, Artificial Sequence
  Synthetic
ugaauuuuauguaaaaauuau

SEQ ID NO: 370100 - RNA, 22 nt, Artificial Sequence
  Synthetic
uugaauuuuauguaaaaauuau

SEQ ID NO: 370101 - RNA, 23 nt, Artificial Sequence
  Synthetic
guugaauuuuauguaaaaauuau

SEQ ID NO: 370102 - RNA, 24 nt, Artificial Sequence
  Synthetic
aguugaauuuuauguaaaaauuau

SEQ ID NO: 370103 - RNA, 18 nt, Artificial Sequence
  Synthetic
aagagaacucaaaauuau

SEQ ID NO: 370104 - RNA, 19 nt, Artificial Sequence
  Synthetic
aaagagaacucaaaauuau

SEQ ID NO: 370105 - RNA, 20 nt, Artificial Sequence
  Synthetic
gaaagagaacucaaaauuau

SEQ ID NO: 370106 - RNA, 21 nt, Artificial Sequence
  Synthetic
agaaagagaacucaaaauuau

SEQ ID NO: 370107 - RNA, 22 nt, Artificial Sequence
  Synthetic
aagaaagagaacucaaaauuau

SEQ ID NO: 370108 - RNA, 23 nt, Artificial Sequence
  Synthetic
gaagaaagagaacucaaaauuau

SEQ ID NO: 370109 - RNA, 24 nt, Artificial Sequence
  Synthetic
agaagaaagagaacucaaaauuau

SEQ ID NO: 370110 - RNA, 18 nt, Artificial Sequence
  Synthetic
aaaacugcauaaaauuau

SEQ ID NO: 370111 - RNA, 19 nt, Artificial Sequence
  Synthetic
aaaaacugcauaaaauuau

SEQ ID NO: 370112 - RNA, 20 nt, Artificial Sequence
  Synthetic
caaaaacugcauaaaauuau

SEQ ID NO: 370113 - RNA, 21 nt, Artificial Sequence
  Synthetic
acaaaaacugcauaaaauuau

SEQ ID NO: 370114 - RNA, 22 nt, Artificial Sequence
  Synthetic
uacaaaaacugcauaaaauuau

SEQ ID NO: 370115 - RNA, 23 nt, Artificial Sequence
  Synthetic
auacaaaaacugcauaaaauuau

SEQ ID NO: 370116 - RNA, 24 nt, Artificial Sequence
  Synthetic
uauacaaaaacugcauaaaauuau

SEQ ID NO: 370117 - RNA, 18 nt, Artificial Sequence
  Synthetic
gucagucuguaaaauuau

SEQ ID NO: 370118 - RNA, 19 nt, Artificial Sequence
  Synthetic
ugucagucuguaaaauuau

SEQ ID NO: 370119 - RNA, 20 nt, Artificial Sequence
  Synthetic
augucagucuguaaaauuau

SEQ ID NO: 370120 - RNA, 21 nt, Artificial Sequence
  Synthetic
caugucagucuguaaaauuau

SEQ ID NO: 370121 - RNA, 22 nt, Artificial Sequence
  Synthetic
ucaugucagucuguaaaauuau

SEQ ID NO: 370122 - RNA, 23 nt, Artificial Sequence
  Synthetic
uucaugucagucuguaaaauuau

SEQ ID NO: 370123 - RNA, 24 nt, Artificial Sequence
  Synthetic
auucaugucagucuguaaaauuau

SEQ ID NO: 370124 - RNA, 18 nt, Artificial Sequence
  Synthetic
uaagauauuuaaaauuau

SEQ ID NO: 370125 - RNA, 19 nt, Artificial Sequence
  Synthetic
auaagauauuuaaaauuau

SEQ ID NO: 370126 - RNA, 20 nt, Artificial Sequence
  Synthetic
uauaagauauuuaaaauuau

SEQ ID NO: 370127 - RNA, 21 nt, Artificial Sequence
  Synthetic
auauaagauauuuaaaauuau

SEQ ID NO: 370128 - RNA, 22 nt, Artificial Sequence
  Synthetic
uauauaagauauuuaaaauuau

SEQ ID NO: 370129 - RNA, 23 nt, Artificial Sequence
  Synthetic
uuauauaagauauuuaaaauuau

SEQ ID NO: 370130 - RNA, 24 nt, Artificial Sequence
  Synthetic
cuuauauaagauauuuaaaauuau

SEQ ID NO: 370131 - RNA, 18 nt, Artificial Sequence
  Synthetic
aaccauaauucaaauuau

SEQ ID NO: 370132 - RNA, 19 nt, Artificial Sequence
  Synthetic
gaaccauaauucaaauuau

SEQ ID NO: 370133 - RNA, 20 nt, Artificial Sequence
  Synthetic
ugaaccauaauucaaauuau

SEQ ID NO: 370134 - RNA, 21 nt, Artificial Sequence
  Synthetic
cugaaccauaauucaaauuau

SEQ ID NO: 370135 - RNA, 22 nt, Artificial Sequence
  Synthetic
gcugaaccauaauucaaauuau

SEQ ID NO: 370136 - RNA, 23 nt, Artificial Sequence
  Synthetic
ugcugaaccauaauucaaauuau

SEQ ID NO: 370137 - RNA, 24 nt, Artificial Sequence
  Synthetic
uugcugaaccauaauucaaauuau

SEQ ID NO: 370138 - RNA, 18 nt, Artificial Sequence
  Synthetic
uuaauauuuucaaauuau

SEQ ID NO: 370139 - RNA, 19 nt, Artificial Sequence
  Synthetic
cuuaauauuuucaaauuau

SEQ ID NO: 370140 - RNA, 20 nt, Artificial Sequence
  Synthetic
ucuuaauauuuucaaauuau

SEQ ID NO: 370141 - RNA, 21 nt, Artificial Sequence
  Synthetic
uucuuaauauuuucaaauuau

SEQ ID NO: 370142 - RNA, 22 nt, Artificial Sequence
  Synthetic
auucuuaauauuuucaaauuau

SEQ ID NO: 370143 - RNA, 23 nt, Artificial Sequence
  Synthetic
aauucuuaauauuuucaaauuau

SEQ ID NO: 370144 - RNA, 24 nt, Artificial Sequence
  Synthetic
aaauucuuaauauuuucaaauuau

SEQ ID NO: 370145 - RNA, 18 nt, Artificial Sequence
  Synthetic
cugugaagaagaaauuau

SEQ ID NO: 370146 - RNA, 19 nt, Artificial Sequence
  Synthetic
ucugugaagaagaaauuau

SEQ ID NO: 370147 - RNA, 20 nt, Artificial Sequence
  Synthetic
cucugugaagaagaaauuau

SEQ ID NO: 370148 - RNA, 21 nt, Artificial Sequence
  Synthetic
ucucugugaagaagaaauuau

SEQ ID NO: 370149 - RNA, 22 nt, Artificial Sequence
  Synthetic
gucucugugaagaagaaauuau

SEQ ID NO: 370150 - RNA, 23 nt, Artificial Sequence
  Synthetic
ugucucugugaagaagaaauuau

SEQ ID NO: 370151 - RNA, 24 nt, Artificial Sequence
  Synthetic
uugucucugugaagaagaaauuau

SEQ ID NO: 370152 - RNA, 18 nt, Artificial Sequence
  Synthetic
ugguguuauagaaauuau

SEQ ID NO: 370153 - RNA, 19 nt, Artificial Sequence
  Synthetic
uugguguuauagaaauuau

SEQ ID NO: 370154 - RNA, 20 nt, Artificial Sequence
  Synthetic
uuugguguuauagaaauuau

SEQ ID NO: 370155 - RNA, 21 nt, Artificial Sequence
  Synthetic
auuugguguuauagaaauuau

SEQ ID NO: 370156 - RNA, 22 nt, Artificial Sequence
  Synthetic
cauuugguguuauagaaauuau

SEQ ID NO: 370157 - RNA, 23 nt, Artificial Sequence
  Synthetic
ucauuugguguuauagaaauuau

SEQ ID NO: 370158 - RNA, 24 nt, Artificial Sequence
  Synthetic
uucauuugguguuauagaaauuau

SEQ ID NO: 370159 - RNA, 18 nt, Artificial Sequence
  Synthetic
cagaguaggauaaauuau

SEQ ID NO: 370160 - RNA, 19 nt, Artificial Sequence
  Synthetic
acagaguaggauaaauuau

SEQ ID NO: 370161 - RNA, 20 nt, Artificial Sequence
  Synthetic
cacagaguaggauaaauuau

SEQ ID NO: 370162 - RNA, 21 nt, Artificial Sequence
  Synthetic
ccacagaguaggauaaauuau

SEQ ID NO: 370163 - RNA, 22 nt, Artificial Sequence
  Synthetic
cccacagaguaggauaaauuau

SEQ ID NO: 370164 - RNA, 23 nt, Artificial Sequence
  Synthetic
acccacagaguaggauaaauuau

SEQ ID NO: 370165 - RNA, 24 nt, Artificial Sequence
  Synthetic
aacccacagaguaggauaaauuau

SEQ ID NO: 370166 - RNA, 18 nt, Artificial Sequence
  Synthetic
gaagauguuauaaauuau

SEQ ID NO: 370167 - RNA, 19 nt, Artificial Sequence
  Synthetic
ugaagauguuauaaauuau

SEQ ID NO: 370168 - RNA, 20 nt, Artificial Sequence
  Synthetic
cugaagauguuauaaauuau

SEQ ID NO: 370169 - RNA, 21 nt, Artificial Sequence
  Synthetic
acugaagauguuauaaauuau

SEQ ID NO: 370170 - RNA, 22 nt, Artificial Sequence
  Synthetic
aacugaagauguuauaaauuau

SEQ ID NO: 370171 - RNA, 23 nt, Artificial Sequence
  Synthetic
aaacugaagauguuauaaauuau

SEQ ID NO: 370172 - RNA, 24 nt, Artificial Sequence
  Synthetic
gaaacugaagauguuauaaauuau

SEQ ID NO: 370173 - RNA, 18 nt, Artificial Sequence
  Synthetic
caacuggggcuaaauuau

SEQ ID NO: 370174 - RNA, 19 nt, Artificial Sequence
  Synthetic
ucaacuggggcuaaauuau

SEQ ID NO: 370175 - RNA, 20 nt, Artificial Sequence
  Synthetic
aucaacuggggcuaaauuau

SEQ ID NO: 370176 - RNA, 21 nt, Artificial Sequence
  Synthetic
gaucaacuggggcuaaauuau

SEQ ID NO: 370177 - RNA, 22 nt, Artificial Sequence
  Synthetic
agaucaacuggggcuaaauuau

SEQ ID NO: 370178 - RNA, 23 nt, Artificial Sequence
  Synthetic
uagaucaacuggggcuaaauuau

SEQ ID NO: 370179 - RNA, 24 nt, Artificial Sequence
  Synthetic
uuagaucaacuggggcuaaauuau

SEQ ID NO: 370180 - RNA, 18 nt, Artificial Sequence
  Synthetic
aaaauaaauguaaauuau

SEQ ID NO: 370181 - RNA, 19 nt, Artificial Sequence
  Synthetic
aaaaauaaauguaaauuau

SEQ ID NO: 370182 - RNA, 20 nt, Artificial Sequence
  Synthetic
uaaaaauaaauguaaauuau

SEQ ID NO: 370183 - RNA, 21 nt, Artificial Sequence
  Synthetic
guaaaaauaaauguaaauuau

SEQ ID NO: 370184 - RNA, 22 nt, Artificial Sequence
  Synthetic
aguaaaaauaaauguaaauuau

SEQ ID NO: 370185 - RNA, 23 nt, Artificial Sequence
  Synthetic
aaguaaaaauaaauguaaauuau

SEQ ID NO: 370186 - RNA, 24 nt, Artificial Sequence
  Synthetic
uaaguaaaaauaaauguaaauuau

SEQ ID NO: 370187 - RNA, 18 nt, Artificial Sequence
  Synthetic
accagcuacuuaaauuau

SEQ ID NO: 370188 - RNA, 19 nt, Artificial Sequence
  Synthetic
caccagcuacuuaaauuau

SEQ ID NO: 370189 - RNA, 20 nt, Artificial Sequence
  Synthetic
gcaccagcuacuuaaauuau

SEQ ID NO: 370190 - RNA, 21 nt, Artificial Sequence
  Synthetic
ugcaccagcuacuuaaauuau

SEQ ID NO: 370191 - RNA, 22 nt, Artificial Sequence
  Synthetic
uugcaccagcuacuuaaauuau

SEQ ID NO: 370192 - RNA, 23 nt, Artificial Sequence
  Synthetic
cuugcaccagcuacuuaaauuau

SEQ ID NO: 370193 - RNA, 24 nt, Artificial Sequence
  Synthetic
ucuugcaccagcuacuuaaauuau

SEQ ID NO: 370194 - RNA, 18 nt, Artificial Sequence
  Synthetic
cauuaguauuuaaauuau

SEQ ID NO: 370195 - RNA, 19 nt, Artificial Sequence
  Synthetic
gcauuaguauuuaaauuau

SEQ ID NO: 370196 - RNA, 20 nt, Artificial Sequence
  Synthetic
ugcauuaguauuuaaauuau

SEQ ID NO: 370197 - RNA, 21 nt, Artificial Sequence
  Synthetic
uugcauuaguauuuaaauuau

SEQ ID NO: 370198 - RNA, 22 nt, Artificial Sequence
  Synthetic
uuugcauuaguauuuaaauuau

SEQ ID NO: 370199 - RNA, 23 nt, Artificial Sequence
  Synthetic
auuugcauuaguauuuaaauuau

SEQ ID NO: 370200 - RNA, 24 nt, Artificial Sequence
  Synthetic
aauuugcauuaguauuuaaauuau

SEQ ID NO: 370201 - RNA, 18 nt, Artificial Sequence
  Synthetic
guugaauaaaucaauuau

SEQ ID NO: 370202 - RNA, 19 nt, Artificial Sequence
  Synthetic
uguugaauaaaucaauuau

SEQ ID NO: 370203 - RNA, 20 nt, Artificial Sequence
  Synthetic
auguugaauaaaucaauuau

SEQ ID NO: 370204 - RNA, 21 nt, Artificial Sequence
  Synthetic
uauguugaauaaaucaauuau

SEQ ID NO: 370205 - RNA, 22 nt, Artificial Sequence
  Synthetic
auauguugaauaaaucaauuau

SEQ ID NO: 370206 - RNA, 23 nt, Artificial Sequence
  Synthetic
aauauguugaauaaaucaauuau

SEQ ID NO: 370207 - RNA, 24 nt, Artificial Sequence
  Synthetic
aaauauguugaauaaaucaauuau

SEQ ID NO: 370208 - RNA, 18 nt, Artificial Sequence
  Synthetic
cauaucacauucaauuau

SEQ ID NO: 370209 - RNA, 19 nt, Artificial Sequence
  Synthetic
ucauaucacauucaauuau

SEQ ID NO: 370210 - RNA, 20 nt, Artificial Sequence
  Synthetic
aucauaucacauucaauuau

SEQ ID NO: 370211 - RNA, 21 nt, Artificial Sequence
  Synthetic
aaucauaucacauucaauuau

SEQ ID NO: 370212 - RNA, 22 nt, Artificial Sequence
  Synthetic
aaaucauaucacauucaauuau

SEQ ID NO: 370213 - RNA, 23 nt, Artificial Sequence
  Synthetic
aaaaucauaucacauucaauuau

SEQ ID NO: 370214 - RNA, 24 nt, Artificial Sequence
  Synthetic
aaaaaucauaucacauucaauuau

SEQ ID NO: 370215 - RNA, 18 nt, Artificial Sequence
  Synthetic
gucccucauaagaauuau

SEQ ID NO: 370216 - RNA, 19 nt, Artificial Sequence
  Synthetic
agucccucauaagaauuau

SEQ ID NO: 370217 - RNA, 20 nt, Artificial Sequence
  Synthetic
uagucccucauaagaauuau

SEQ ID NO: 370218 - RNA, 21 nt, Artificial Sequence
  Synthetic
uuagucccucauaagaauuau

SEQ ID NO: 370219 - RNA, 22 nt, Artificial Sequence
  Synthetic
uuuagucccucauaagaauuau

SEQ ID NO: 370220 - RNA, 23 nt, Artificial Sequence
  Synthetic
cuuuagucccucauaagaauuau

SEQ ID NO: 370221 - RNA, 24 nt, Artificial Sequence
  Synthetic
acuuuagucccucauaagaauuau

SEQ ID NO: 370222 - RNA, 18 nt, Artificial Sequence
  Synthetic
uguacaauucagaauuau

SEQ ID NO: 370223 - RNA, 19 nt, Artificial Sequence
  Synthetic
auguacaauucagaauuau

SEQ ID NO: 370224 - RNA, 20 nt, Artificial Sequence
  Synthetic
uauguacaauucagaauuau

SEQ ID NO: 370225 - RNA, 21 nt, Artificial Sequence
  Synthetic
cuauguacaauucagaauuau

SEQ ID NO: 370226 - RNA, 22 nt, Artificial Sequence
  Synthetic
gcuauguacaauucagaauuau

SEQ ID NO: 370227 - RNA, 23 nt, Artificial Sequence
  Synthetic
agcuauguacaauucagaauuau

SEQ ID NO: 370228 - RNA, 24 nt, Artificial Sequence
  Synthetic
aagcuauguacaauucagaauuau

SEQ ID NO: 370229 - RNA, 18 nt, Artificial Sequence
  Synthetic
gacaagugaaggaauuau

SEQ ID NO: 370230 - RNA, 19 nt, Artificial Sequence
  Synthetic
agacaagugaaggaauuau

SEQ ID NO: 370231 - RNA, 20 nt, Artificial Sequence
  Synthetic
aagacaagugaaggaauuau

SEQ ID NO: 370232 - RNA, 21 nt, Artificial Sequence
  Synthetic
aaagacaagugaaggaauuau

SEQ ID NO: 370233 - RNA, 22 nt, Artificial Sequence
  Synthetic
aaaagacaagugaaggaauuau

SEQ ID NO: 370234 - RNA, 23 nt, Artificial Sequence
  Synthetic
uaaaagacaagugaaggaauuau

SEQ ID NO: 370235 - RNA, 24 nt, Artificial Sequence
  Synthetic
guaaaagacaagugaaggaauuau

SEQ ID NO: 370236 - RNA, 18 nt, Artificial Sequence
  Synthetic
agggugaaagggaauuau

SEQ ID NO: 370237 - RNA, 19 nt, Artificial Sequence
  Synthetic
uagggugaaagggaauuau

SEQ ID NO: 370238 - RNA, 20 nt, Artificial Sequence
  Synthetic
auagggugaaagggaauuau

SEQ ID NO: 370239 - RNA, 21 nt, Artificial Sequence
  Synthetic
gauagggugaaagggaauuau

SEQ ID NO: 370240 - RNA, 22 nt, Artificial Sequence
  Synthetic
ugauagggugaaagggaauuau

SEQ ID NO: 370241 - RNA, 23 nt, Artificial Sequence
  Synthetic
uugauagggugaaagggaauuau

SEQ ID NO: 370242 - RNA, 24 nt, Artificial Sequence
  Synthetic
uuugauagggugaaagggaauuau

SEQ ID NO: 370243 - RNA, 18 nt, Artificial Sequence
  Synthetic
aauauguuauggaauuau

SEQ ID NO: 370244 - RNA, 19 nt, Artificial Sequence
  Synthetic
gaauauguuauggaauuau

SEQ ID NO: 370245 - RNA, 20 nt, Artificial Sequence
  Synthetic
ugaauauguuauggaauuau

SEQ ID NO: 370246 - RNA, 21 nt, Artificial Sequence
  Synthetic
uugaauauguuauggaauuau

SEQ ID NO: 370247 - RNA, 22 nt, Artificial Sequence
  Synthetic
auugaauauguuauggaauuau

SEQ ID NO: 370248 - RNA, 23 nt, Artificial Sequence
  Synthetic
uauugaauauguuauggaauuau

SEQ ID NO: 370249 - RNA, 24 nt, Artificial Sequence
  Synthetic
uuauugaauauguuauggaauuau

SEQ ID NO: 370250 - RNA, 18 nt, Artificial Sequence
  Synthetic
ucucacuuuuugaauuau

SEQ ID NO: 370251 - RNA, 19 nt, Artificial Sequence
  Synthetic
cucucacuuuuugaauuau

SEQ ID NO: 370252 - RNA, 20 nt, Artificial Sequence
  Synthetic
ucucucacuuuuugaauuau

SEQ ID NO: 370253 - RNA, 21 nt, Artificial Sequence
  Synthetic
cucucucacuuuuugaauuau

SEQ ID NO: 370254 - RNA, 22 nt, Artificial Sequence
  Synthetic
ucucucucacuuuuugaauuau

SEQ ID NO: 370255 - RNA, 23 nt, Artificial Sequence
  Synthetic
uucucucucacuuuuugaauuau

SEQ ID NO: 370256 - RNA, 24 nt, Artificial Sequence
  Synthetic
uuucucucucacuuuuugaauuau

SEQ ID NO: 370257 - RNA, 18 nt, Artificial Sequence
  Synthetic
cauucgucuaauaauuau

SEQ ID NO: 370258 - RNA, 19 nt, Artificial Sequence
  Synthetic
ucauucgucuaauaauuau

SEQ ID NO: 370259 - RNA, 20 nt, Artificial Sequence
  Synthetic
aucauucgucuaauaauuau

SEQ ID NO: 370260 - RNA, 21 nt, Artificial Sequence
  Synthetic
aaucauucgucuaauaauuau

SEQ ID NO: 370261 - RNA, 22 nt, Artificial Sequence
  Synthetic
aaaucauucgucuaauaauuau

SEQ ID NO: 370262 - RNA, 23 nt, Artificial Sequence
  Synthetic
caaaucauucgucuaauaauuau

SEQ ID NO: 370263 - RNA, 24 nt, Artificial Sequence
  Synthetic
ucaaaucauucgucuaauaauuau

SEQ ID NO: 370264 - RNA, 18 nt, Artificial Sequence
  Synthetic
uuguuuuuagauaauuau

SEQ ID NO: 370265 - RNA, 19 nt, Artificial Sequence
  Synthetic
guuguuuuuagauaauuau

SEQ ID NO: 370266 - RNA, 20 nt, Artificial Sequence
  Synthetic
gguuguuuuuagauaauuau

SEQ ID NO: 370267 - RNA, 21 nt, Artificial Sequence
  Synthetic
ugguuguuuuuagauaauuau

SEQ ID NO: 370268 - RNA, 22 nt, Artificial Sequence
  Synthetic
augguuguuuuuagauaauuau

SEQ ID NO: 370269 - RNA, 23 nt, Artificial Sequence
  Synthetic
aaugguuguuuuuagauaauuau

SEQ ID NO: 370270 - RNA, 24 nt, Artificial Sequence
  Synthetic
caaugguuguuuuuagauaauuau

SEQ ID NO: 370271 - RNA, 18 nt, Artificial Sequence
  Synthetic
aaauuuguaacuaauuau

SEQ ID NO: 370272 - RNA, 19 nt, Artificial Sequence
  Synthetic
gaaauuuguaacuaauuau

SEQ ID NO: 370273 - RNA, 20 nt, Artificial Sequence
  Synthetic
agaaauuuguaacuaauuau

SEQ ID NO: 370274 - RNA, 21 nt, Artificial Sequence
  Synthetic
gagaaauuuguaacuaauuau

SEQ ID NO: 370275 - RNA, 22 nt, Artificial Sequence
  Synthetic
agagaaauuuguaacuaauuau

SEQ ID NO: 370276 - RNA, 23 nt, Artificial Sequence
  Synthetic
gagagaaauuuguaacuaauuau

SEQ ID NO: 370277 - RNA, 24 nt, Artificial Sequence
  Synthetic
ugagagaaauuuguaacuaauuau

SEQ ID NO: 370278 - RNA, 18 nt, Artificial Sequence
  Synthetic
agcuuggaaaguaauuau

SEQ ID NO: 370279 - RNA, 19 nt, Artificial Sequence
  Synthetic
uagcuuggaaaguaauuau

SEQ ID NO: 370280 - RNA, 20 nt, Artificial Sequence
  Synthetic
auagcuuggaaaguaauuau

SEQ ID NO: 370281 - RNA, 21 nt, Artificial Sequence
  Synthetic
uauagcuuggaaaguaauuau

SEQ ID NO: 370282 - RNA, 22 nt, Artificial Sequence
  Synthetic
guauagcuuggaaaguaauuau

SEQ ID NO: 370283 - RNA, 23 nt, Artificial Sequence
  Synthetic
aguauagcuuggaaaguaauuau

SEQ ID NO: 370284 - RNA, 24 nt, Artificial Sequence
  Synthetic
uaguauagcuuggaaaguaauuau

SEQ ID NO: 370285 - RNA, 18 nt, Artificial Sequence
  Synthetic
cucaugccaaguaauuau

SEQ ID NO: 370286 - RNA, 19 nt, Artificial Sequence
  Synthetic
ccucaugccaaguaauuau

SEQ ID NO: 370287 - RNA, 20 nt, Artificial Sequence
  Synthetic
accucaugccaaguaauuau

SEQ ID NO: 370288 - RNA, 21 nt, Artificial Sequence
  Synthetic
aaccucaugccaaguaauuau

SEQ ID NO: 370289 - RNA, 22 nt, Artificial Sequence
  Synthetic
uaaccucaugccaaguaauuau

SEQ ID NO: 370290 - RNA, 23 nt, Artificial Sequence
  Synthetic
uuaaccucaugccaaguaauuau

SEQ ID NO: 370291 - RNA, 24 nt, Artificial Sequence
  Synthetic
auuaaccucaugccaaguaauuau

SEQ ID NO: 370292 - RNA, 18 nt, Artificial Sequence
  Synthetic
gauguagccaguaauuau

SEQ ID NO: 370293 - RNA, 19 nt, Artificial Sequence
  Synthetic
ugauguagccaguaauuau

SEQ ID NO: 370294 - RNA, 20 nt, Artificial Sequence
  Synthetic
cugauguagccaguaauuau

SEQ ID NO: 370295 - RNA, 21 nt, Artificial Sequence
  Synthetic
acugauguagccaguaauuau

SEQ ID NO: 370296 - RNA, 22 nt, Artificial Sequence
  Synthetic
aacugauguagccaguaauuau

SEQ ID NO: 370297 - RNA, 23 nt, Artificial Sequence
  Synthetic
gaacugauguagccaguaauuau

SEQ ID NO: 370298 - RNA, 24 nt, Artificial Sequence
  Synthetic
agaacugauguagccaguaauuau

SEQ ID NO: 370299 - RNA, 18 nt, Artificial Sequence
  Synthetic
gguggaagagguaauuau

SEQ ID NO: 370300 - RNA, 19 nt, Artificial Sequence
  Synthetic
ugguggaagagguaauuau

SEQ ID NO: 370301 - RNA, 20 nt, Artificial Sequence
  Synthetic
cugguggaagagguaauuau

SEQ ID NO: 370302 - RNA, 21 nt, Artificial Sequence
  Synthetic
ucugguggaagagguaauuau

SEQ ID NO: 370303 - RNA, 22 nt, Artificial Sequence
  Synthetic
uucugguggaagagguaauuau

SEQ ID NO: 370304 - RNA, 23 nt, Artificial Sequence
  Synthetic
auucugguggaagagguaauuau

SEQ ID NO: 370305 - RNA, 24 nt, Artificial Sequence
  Synthetic
aauucugguggaagagguaauuau

SEQ ID NO: 370306 - RNA, 18 nt, Artificial Sequence
  Synthetic
uuuuaaguguguaauuau

SEQ ID NO: 370307 - RNA, 19 nt, Artificial Sequence
  Synthetic
auuuuaaguguguaauuau

SEQ ID NO: 370308 - RNA, 20 nt, Artificial Sequence
  Synthetic
aauuuuaaguguguaauuau

SEQ ID NO: 370309 - RNA, 21 nt, Artificial Sequence
  Synthetic
caauuuuaaguguguaauuau

SEQ ID NO: 370310 - RNA, 22 nt, Artificial Sequence
  Synthetic
ccaauuuuaaguguguaauuau

SEQ ID NO: 370311 - RNA, 23 nt, Artificial Sequence
  Synthetic
accaauuuuaaguguguaauuau

SEQ ID NO: 370312 - RNA, 24 nt, Artificial Sequence
  Synthetic
caccaauuuuaaguguguaauuau

SEQ ID NO: 370313 - RNA, 18 nt, Artificial Sequence
  Synthetic
aaccuuaagauuaauuau

SEQ ID NO: 370314 - RNA, 19 nt, Artificial Sequence
  Synthetic
gaaccuuaagauuaauuau

SEQ ID NO: 370315 - RNA, 20 nt, Artificial Sequence
  Synthetic
ugaaccuuaagauuaauuau

SEQ ID NO: 370316 - RNA, 21 nt, Artificial Sequence
  Synthetic
gugaaccuuaagauuaauuau

SEQ ID NO: 370317 - RNA, 22 nt, Artificial Sequence
  Synthetic
agugaaccuuaagauuaauuau

SEQ ID NO: 370318 - RNA, 23 nt, Artificial Sequence
  Synthetic
aagugaaccuuaagauuaauuau

SEQ ID NO: 370319 - RNA, 24 nt, Artificial Sequence
  Synthetic
aaagugaaccuuaagauuaauuau

SEQ ID NO: 370320 - RNA, 18 nt, Artificial Sequence
  Synthetic
uaaauauuguuuaauuau

SEQ ID NO: 370321 - RNA, 19 nt, Artificial Sequence
  Synthetic
auaaauauuguuuaauuau

SEQ ID NO: 370322 - RNA, 20 nt, Artificial Sequence
  Synthetic
uauaaauauuguuuaauuau

SEQ ID NO: 370323 - RNA, 21 nt, Artificial Sequence
  Synthetic
auauaaauauuguuuaauuau

SEQ ID NO: 370324 - RNA, 22 nt, Artificial Sequence
  Synthetic
aauauaaauauuguuuaauuau

SEQ ID NO: 370325 - RNA, 23 nt, Artificial Sequence
  Synthetic
uaauauaaauauuguuuaauuau

SEQ ID NO: 370326 - RNA, 24 nt, Artificial Sequence
  Synthetic
auaauauaaauauuguuuaauuau

SEQ ID NO: 370327 - RNA, 18 nt, Artificial Sequence
  Synthetic
auaaauuguuuuaauuau

SEQ ID NO: 370328 - RNA, 19 nt, Artificial Sequence
  Synthetic
uauaaauuguuuuaauuau

SEQ ID NO: 370329 - RNA, 20 nt, Artificial Sequence
  Synthetic
guauaaauuguuuuaauuau

SEQ ID NO: 370330 - RNA, 21 nt, Artificial Sequence
  Synthetic
uguauaaauuguuuuaauuau

SEQ ID NO: 370331 - RNA, 22 nt, Artificial Sequence
  Synthetic
cuguauaaauuguuuuaauuau

SEQ ID NO: 370332 - RNA, 23 nt, Artificial Sequence
  Synthetic
gcuguauaaauuguuuuaauuau

SEQ ID NO: 370333 - RNA, 24 nt, Artificial Sequence
  Synthetic
agcuguauaaauuguuuuaauuau

SEQ ID NO: 370334 - RNA, 18 nt, Artificial Sequence
  Synthetic
cugugauggaaacauuau

SEQ ID NO: 370335 - RNA, 19 nt, Artificial Sequence
  Synthetic
ccugugauggaaacauuau

SEQ ID NO: 370336 - RNA, 20 nt, Artificial Sequence
  Synthetic
uccugugauggaaacauuau

SEQ ID NO: 370337 - RNA, 21 nt, Artificial Sequence
  Synthetic
uuccugugauggaaacauuau

SEQ ID NO: 370338 - RNA, 22 nt, Artificial Sequence
  Synthetic
uuuccugugauggaaacauuau

SEQ ID NO: 370339 - RNA, 23 nt, Artificial Sequence
  Synthetic
auuuccugugauggaaacauuau

SEQ ID NO: 370340 - RNA, 24 nt, Artificial Sequence
  Synthetic
uauuuccugugauggaaacauuau

SEQ ID NO: 370341 - RNA, 18 nt, Artificial Sequence
  Synthetic
ucaaaauaucaacauuau

SEQ ID NO: 370342 - RNA, 19 nt, Artificial Sequence
  Synthetic
gucaaaauaucaacauuau

SEQ ID NO: 370343 - RNA, 20 nt, Artificial Sequence
  Synthetic
ggucaaaauaucaacauuau

SEQ ID NO: 370344 - RNA, 21 nt, Artificial Sequence
  Synthetic
aggucaaaauaucaacauuau

SEQ ID NO: 370345 - RNA, 22 nt, Artificial Sequence
  Synthetic
gaggucaaaauaucaacauuau

SEQ ID NO: 370346 - RNA, 23 nt, Artificial Sequence
  Synthetic
ggaggucaaaauaucaacauuau

SEQ ID NO: 370347 - RNA, 24 nt, Artificial Sequence
  Synthetic
aggaggucaaaauaucaacauuau

SEQ ID NO: 370348 - RNA, 18 nt, Artificial Sequence
  Synthetic
cagauuuucauacauuau

SEQ ID NO: 370349 - RNA, 19 nt, Artificial Sequence
  Synthetic
acagauuuucauacauuau

SEQ ID NO: 370350 - RNA, 20 nt, Artificial Sequence
  Synthetic
gacagauuuucauacauuau

SEQ ID NO: 370351 - RNA, 21 nt, Artificial Sequence
  Synthetic
ugacagauuuucauacauuau

SEQ ID NO: 370352 - RNA, 22 nt, Artificial Sequence
  Synthetic
augacagauuuucauacauuau

SEQ ID NO: 370353 - RNA, 23 nt, Artificial Sequence
  Synthetic
gaugacagauuuucauacauuau

SEQ ID NO: 370354 - RNA, 24 nt, Artificial Sequence
  Synthetic
agaugacagauuuucauacauuau

SEQ ID NO: 370355 - RNA, 18 nt, Artificial Sequence
  Synthetic
cagcagaauuuacauuau

SEQ ID NO: 370356 - RNA, 19 nt, Artificial Sequence
  Synthetic
ucagcagaauuuacauuau

SEQ ID NO: 370357 - RNA, 20 nt, Artificial Sequence
  Synthetic
uucagcagaauuuacauuau

SEQ ID NO: 370358 - RNA, 21 nt, Artificial Sequence
  Synthetic
uuucagcagaauuuacauuau

SEQ ID NO: 370359 - RNA, 22 nt, Artificial Sequence
  Synthetic
auuucagcagaauuuacauuau

SEQ ID NO: 370360 - RNA, 23 nt, Artificial Sequence
  Synthetic
aauuucagcagaauuuacauuau

SEQ ID NO: 370361 - RNA, 24 nt, Artificial Sequence
  Synthetic
uaauuucagcagaauuuacauuau

SEQ ID NO: 370362 - RNA, 18 nt, Artificial Sequence
  Synthetic
uuuuauagcaaccauuau

SEQ ID NO: 370363 - RNA, 19 nt, Artificial Sequence
  Synthetic
cuuuuauagcaaccauuau

SEQ ID NO: 370364 - RNA, 20 nt, Artificial Sequence
  Synthetic
ucuuuuauagcaaccauuau

SEQ ID NO: 370365 - RNA, 21 nt, Artificial Sequence
  Synthetic
uucuuuuauagcaaccauuau

SEQ ID NO: 370366 - RNA, 22 nt, Artificial Sequence
  Synthetic
auucuuuuauagcaaccauuau

SEQ ID NO: 370367 - RNA, 23 nt, Artificial Sequence
  Synthetic
uauucuuuuauagcaaccauuau

SEQ ID NO: 370368 - RNA, 24 nt, Artificial Sequence
  Synthetic
uuauucuuuuauagcaaccauuau

SEQ ID NO: 370369 - RNA, 18 nt, Artificial Sequence
  Synthetic
ccaaaauaucaccauuau

SEQ ID NO: 370370 - RNA, 19 nt, Artificial Sequence
  Synthetic
gccaaaauaucaccauuau

SEQ ID NO: 370371 - RNA, 20 nt, Artificial Sequence
  Synthetic
ugccaaaauaucaccauuau

SEQ ID NO: 370372 - RNA, 21 nt, Artificial Sequence
  Synthetic
augccaaaauaucaccauuau

SEQ ID NO: 370373 - RNA, 22 nt, Artificial Sequence
  Synthetic
uaugccaaaauaucaccauuau

SEQ ID NO: 370374 - RNA, 23 nt, Artificial Sequence
  Synthetic
auaugccaaaauaucaccauuau

SEQ ID NO: 370375 - RNA, 24 nt, Artificial Sequence
  Synthetic
uauaugccaaaauaucaccauuau

SEQ ID NO: 370376 - RNA, 18 nt, Artificial Sequence
  Synthetic
auaucuacuugccauuau

SEQ ID NO: 370377 - RNA, 19 nt, Artificial Sequence
  Synthetic
gauaucuacuugccauuau

SEQ ID NO: 370378 - RNA, 20 nt, Artificial Sequence
  Synthetic
agauaucuacuugccauuau

SEQ ID NO: 370379 - RNA, 21 nt, Artificial Sequence
  Synthetic
cagauaucuacuugccauuau

SEQ ID NO: 370380 - RNA, 22 nt, Artificial Sequence
  Synthetic
ccagauaucuacuugccauuau

SEQ ID NO: 370381 - RNA, 23 nt, Artificial Sequence
  Synthetic
uccagauaucuacuugccauuau

SEQ ID NO: 370382 - RNA, 24 nt, Artificial Sequence
  Synthetic
uuccagauaucuacuugccauuau

SEQ ID NO: 370383 - RNA, 18 nt, Artificial Sequence
  Synthetic
aauaaugaaaagcauuau

SEQ ID NO: 370384 - RNA, 19 nt, Artificial Sequence
  Synthetic
caauaaugaaaagcauuau

SEQ ID NO: 370385 - RNA, 20 nt, Artificial Sequence
  Synthetic
acaauaaugaaaagcauuau

SEQ ID NO: 370386 - RNA, 21 nt, Artificial Sequence
  Synthetic
uacaauaaugaaaagcauuau

SEQ ID NO: 370387 - RNA, 22 nt, Artificial Sequence
  Synthetic
guacaauaaugaaaagcauuau

SEQ ID NO: 370388 - RNA, 23 nt, Artificial Sequence
  Synthetic
gguacaauaaugaaaagcauuau

SEQ ID NO: 370389 - RNA, 24 nt, Artificial Sequence
  Synthetic
ugguacaauaaugaaaagcauuau

SEQ ID NO: 370390 - RNA, 18 nt, Artificial Sequence
  Synthetic
aaguauaauaaucauuau

SEQ ID NO: 370391 - RNA, 19 nt, Artificial Sequence
  Synthetic
gaaguauaauaaucauuau

SEQ ID NO: 370392 - RNA, 20 nt, Artificial Sequence
  Synthetic
ggaaguauaauaaucauuau

SEQ ID NO: 370393 - RNA, 21 nt, Artificial Sequence
  Synthetic
aggaaguauaauaaucauuau

SEQ ID NO: 370394 - RNA, 22 nt, Artificial Sequence
  Synthetic
uaggaaguauaauaaucauuau

SEQ ID NO: 370395 - RNA, 23 nt, Artificial Sequence
  Synthetic
guaggaaguauaauaaucauuau

SEQ ID NO: 370396 - RNA, 24 nt, Artificial Sequence
  Synthetic
aguaggaaguauaauaaucauuau

SEQ ID NO: 370397 - RNA, 18 nt, Artificial Sequence
  Synthetic
uucugauuggaucauuau

SEQ ID NO: 370398 - RNA, 19 nt, Artificial Sequence
  Synthetic
cuucugauuggaucauuau

SEQ ID NO: 370399 - RNA, 20 nt, Artificial Sequence
  Synthetic
ucuucugauuggaucauuau

SEQ ID NO: 370400 - RNA, 21 nt, Artificial Sequence
  Synthetic
uucuucugauuggaucauuau

SEQ ID NO: 370401 - RNA, 22 nt, Artificial Sequence
  Synthetic
guucuucugauuggaucauuau

SEQ ID NO: 370402 - RNA, 23 nt, Artificial Sequence
  Synthetic
gguucuucugauuggaucauuau

SEQ ID NO: 370403 - RNA, 24 nt, Artificial Sequence
  Synthetic
agguucuucugauuggaucauuau

SEQ ID NO: 370404 - RNA, 18 nt, Artificial Sequence
  Synthetic
ccaaaacacacucauuau

SEQ ID NO: 370405 - RNA, 19 nt, Artificial Sequence
  Synthetic
gccaaaacacacucauuau

SEQ ID NO: 370406 - RNA, 20 nt, Artificial Sequence
  Synthetic
ugccaaaacacacucauuau

SEQ ID NO: 370407 - RNA, 21 nt, Artificial Sequence
  Synthetic
gugccaaaacacacucauuau

SEQ ID NO: 370408 - RNA, 22 nt, Artificial Sequence
  Synthetic
ugugccaaaacacacucauuau

SEQ ID NO: 370409 - RNA, 23 nt, Artificial Sequence
  Synthetic
uugugccaaaacacacucauuau

SEQ ID NO: 370410 - RNA, 24 nt, Artificial Sequence
  Synthetic
uuugugccaaaacacacucauuau

SEQ ID NO: 370411 - RNA, 18 nt, Artificial Sequence
  Synthetic
guguuguugggucauuau

SEQ ID NO: 370412 - RNA, 19 nt, Artificial Sequence
  Synthetic
aguguuguugggucauuau

SEQ ID NO: 370413 - RNA, 20 nt, Artificial Sequence
  Synthetic
aaguguuguugggucauuau

SEQ ID NO: 370414 - RNA, 21 nt, Artificial Sequence
  Synthetic
uaaguguuguugggucauuau

SEQ ID NO: 370415 - RNA, 22 nt, Artificial Sequence
  Synthetic
cuaaguguuguugggucauuau

SEQ ID NO: 370416 - RNA, 23 nt, Artificial Sequence
  Synthetic
ucuaaguguuguugggucauuau

SEQ ID NO: 370417 - RNA, 24 nt, Artificial Sequence
  Synthetic
cucuaaguguuguugggucauuau

SEQ ID NO: 370418 - RNA, 18 nt, Artificial Sequence
  Synthetic
ugcuaaagcacagauuau

SEQ ID NO: 370419 - RNA, 19 nt, Artificial Sequence
  Synthetic
uugcuaaagcacagauuau

SEQ ID NO: 370420 - RNA, 20 nt, Artificial Sequence
  Synthetic
uuugcuaaagcacagauuau

SEQ ID NO: 370421 - RNA, 21 nt, Artificial Sequence
  Synthetic
cuuugcuaaagcacagauuau

SEQ ID NO: 370422 - RNA, 22 nt, Artificial Sequence
  Synthetic
ucuuugcuaaagcacagauuau

SEQ ID NO: 370423 - RNA, 23 nt, Artificial Sequence
  Synthetic
aucuuugcuaaagcacagauuau

SEQ ID NO: 370424 - RNA, 24 nt, Artificial Sequence
  Synthetic
gaucuuugcuaaagcacagauuau

SEQ ID NO: 370425 - RNA, 18 nt, Artificial Sequence
  Synthetic
aaagauugaucagauuau

SEQ ID NO: 370426 - RNA, 19 nt, Artificial Sequence
  Synthetic
aaaagauugaucagauuau

SEQ ID NO: 370427 - RNA, 20 nt, Artificial Sequence
  Synthetic
uaaaagauugaucagauuau

SEQ ID NO: 370428 - RNA, 21 nt, Artificial Sequence
  Synthetic
auaaaagauugaucagauuau

SEQ ID NO: 370429 - RNA, 22 nt, Artificial Sequence
  Synthetic
aauaaaagauugaucagauuau

SEQ ID NO: 370430 - RNA, 23 nt, Artificial Sequence
  Synthetic
gaauaaaagauugaucagauuau

SEQ ID NO: 370431 - RNA, 24 nt, Artificial Sequence
  Synthetic
agaauaaaagauugaucagauuau

SEQ ID NO: 370432 - RNA, 18 nt, Artificial Sequence
  Synthetic
auugaauuuauagauuau

SEQ ID NO: 370433 - RNA, 19 nt, Artificial Sequence
  Synthetic
cauugaauuuauagauuau

SEQ ID NO: 370434 - RNA, 20 nt, Artificial Sequence
  Synthetic
gcauugaauuuauagauuau

SEQ ID NO: 370435 - RNA, 21 nt, Artificial Sequence
  Synthetic
ugcauugaauuuauagauuau

SEQ ID NO: 370436 - RNA, 22 nt, Artificial Sequence
  Synthetic
uugcauugaauuuauagauuau

SEQ ID NO: 370437 - RNA, 23 nt, Artificial Sequence
  Synthetic
auugcauugaauuuauagauuau

SEQ ID NO: 370438 - RNA, 24 nt, Artificial Sequence
  Synthetic
gauugcauugaauuuauagauuau

SEQ ID NO: 370439 - RNA, 18 nt, Artificial Sequence
  Synthetic
aaggaugagcuagauuau

SEQ ID NO: 370440 - RNA, 19 nt, Artificial Sequence
  Synthetic
gaaggaugagcuagauuau

SEQ ID NO: 370441 - RNA, 20 nt, Artificial Sequence
  Synthetic
agaaggaugagcuagauuau

SEQ ID NO: 370442 - RNA, 21 nt, Artificial Sequence
  Synthetic
gagaaggaugagcuagauuau

SEQ ID NO: 370443 - RNA, 22 nt, Artificial Sequence
  Synthetic
ugagaaggaugagcuagauuau

SEQ ID NO: 370444 - RNA, 23 nt, Artificial Sequence
  Synthetic
cugagaaggaugagcuagauuau

SEQ ID NO: 370445 - RNA, 24 nt, Artificial Sequence
  Synthetic
gcugagaaggaugagcuagauuau

SEQ ID NO: 370446 - RNA, 18 nt, Artificial Sequence
  Synthetic
aauacauaaaaggauuau

SEQ ID NO: 370447 - RNA, 19 nt, Artificial Sequence
  Synthetic
uaauacauaaaaggauuau

SEQ ID NO: 370448 - RNA, 20 nt, Artificial Sequence
  Synthetic
auaauacauaaaaggauuau

SEQ ID NO: 370449 - RNA, 21 nt, Artificial Sequence
  Synthetic
uauaauacauaaaaggauuau

SEQ ID NO: 370450 - RNA, 22 nt, Artificial Sequence
  Synthetic
uuauaauacauaaaaggauuau

SEQ ID NO: 370451 - RNA, 23 nt, Artificial Sequence
  Synthetic
uuuauaauacauaaaaggauuau

SEQ ID NO: 370452 - RNA, 24 nt, Artificial Sequence
  Synthetic
uuuuauaauacauaaaaggauuau

SEQ ID NO: 370453 - RNA, 18 nt, Artificial Sequence
  Synthetic
ggucauugugaggauuau

SEQ ID NO: 370454 - RNA, 19 nt, Artificial Sequence
  Synthetic
gggucauugugaggauuau

SEQ ID NO: 370455 - RNA, 20 nt, Artificial Sequence
  Synthetic
ugggucauugugaggauuau

SEQ ID NO: 370456 - RNA, 21 nt, Artificial Sequence
  Synthetic
uugggucauugugaggauuau

SEQ ID NO: 370457 - RNA, 22 nt, Artificial Sequence
  Synthetic
uuugggucauugugaggauuau

SEQ ID NO: 370458 - RNA, 23 nt, Artificial Sequence
  Synthetic
guuugggucauugugaggauuau

SEQ ID NO: 370459 - RNA, 24 nt, Artificial Sequence
  Synthetic
uguuugggucauugugaggauuau

SEQ ID NO: 370460 - RNA, 18 nt, Artificial Sequence
  Synthetic
auccacaacuaggauuau

SEQ ID NO: 370461 - RNA, 19 nt, Artificial Sequence
  Synthetic
aauccacaacuaggauuau

SEQ ID NO: 370462 - RNA, 20 nt, Artificial Sequence
  Synthetic
aaauccacaacuaggauuau

SEQ ID NO: 370463 - RNA, 21 nt, Artificial Sequence
  Synthetic
uaaauccacaacuaggauuau

SEQ ID NO: 370464 - RNA, 22 nt, Artificial Sequence
  Synthetic
auaaauccacaacuaggauuau

SEQ ID NO: 370465 - RNA, 23 nt, Artificial Sequence
  Synthetic
uauaaauccacaacuaggauuau

SEQ ID NO: 370466 - RNA, 24 nt, Artificial Sequence
  Synthetic
auauaaauccacaacuaggauuau

SEQ ID NO: 370467 - RNA, 18 nt, Artificial Sequence
  Synthetic
gaaaaaaauagggauuau

SEQ ID NO: 370468 - RNA, 19 nt, Artificial Sequence
  Synthetic
ugaaaaaaauagggauuau

SEQ ID NO: 370469 - RNA, 20 nt, Artificial Sequence
  Synthetic
uugaaaaaaauagggauuau

SEQ ID NO: 370470 - RNA, 21 nt, Artificial Sequence
  Synthetic
guugaaaaaaauagggauuau

SEQ ID NO: 370471 - RNA, 22 nt, Artificial Sequence
  Synthetic
aguugaaaaaaauagggauuau

SEQ ID NO: 370472 - RNA, 23 nt, Artificial Sequence
  Synthetic
aaguugaaaaaaauagggauuau

SEQ ID NO: 370473 - RNA, 24 nt, Artificial Sequence
  Synthetic
caaguugaaaaaaauagggauuau

SEQ ID NO: 370474 - RNA, 18 nt, Artificial Sequence
  Synthetic
uacuugaauggggauuau

SEQ ID NO: 370475 - RNA, 19 nt, Artificial Sequence
  Synthetic
uuacuugaauggggauuau

SEQ ID NO: 370476 - RNA, 20 nt, Artificial Sequence
  Synthetic
guuacuugaauggggauuau

SEQ ID NO: 370477 - RNA, 21 nt, Artificial Sequence
  Synthetic
uguuacuugaauggggauuau

SEQ ID NO: 370478 - RNA, 22 nt, Artificial Sequence
  Synthetic
uuguuacuugaauggggauuau

SEQ ID NO: 370479 - RNA, 23 nt, Artificial Sequence
  Synthetic
uuuguuacuugaauggggauuau

SEQ ID NO: 370480 - RNA, 24 nt, Artificial Sequence
  Synthetic
uuuuguuacuugaauggggauuau

SEQ ID NO: 370481 - RNA, 18 nt, Artificial Sequence
  Synthetic
augacacauggggauuau

SEQ ID NO: 370482 - RNA, 19 nt, Artificial Sequence
  Synthetic
caugacacauggggauuau

SEQ ID NO: 370483 - RNA, 20 nt, Artificial Sequence
  Synthetic
ccaugacacauggggauuau

SEQ ID NO: 370484 - RNA, 21 nt, Artificial Sequence
  Synthetic
cccaugacacauggggauuau

SEQ ID NO: 370485 - RNA, 22 nt, Artificial Sequence
  Synthetic
ucccaugacacauggggauuau

SEQ ID NO: 370486 - RNA, 23 nt, Artificial Sequence
  Synthetic
cucccaugacacauggggauuau

SEQ ID NO: 370487 - RNA, 24 nt, Artificial Sequence
  Synthetic
acucccaugacacauggggauuau

SEQ ID NO: 370488 - RNA, 18 nt, Artificial Sequence
  Synthetic
augacaucuggggauuau

SEQ ID NO: 370489 - RNA, 19 nt, Artificial Sequence
  Synthetic
caugacaucuggggauuau

SEQ ID NO: 370490 - RNA, 20 nt, Artificial Sequence
  Synthetic
ccaugacaucuggggauuau

SEQ ID NO: 370491 - RNA, 21 nt, Artificial Sequence
  Synthetic
cccaugacaucuggggauuau

SEQ ID NO: 370492 - RNA, 22 nt, Artificial Sequence
  Synthetic
ucccaugacaucuggggauuau

SEQ ID NO: 370493 - RNA, 23 nt, Artificial Sequence
  Synthetic
cucccaugacaucuggggauuau

SEQ ID NO: 370494 - RNA, 24 nt, Artificial Sequence
  Synthetic
ccucccaugacaucuggggauuau

SEQ ID NO: 370495 - RNA, 18 nt, Artificial Sequence
  Synthetic
ugcaaaaguuuggauuau

SEQ ID NO: 370496 - RNA, 19 nt, Artificial Sequence
  Synthetic
augcaaaaguuuggauuau

SEQ ID NO: 370497 - RNA, 20 nt, Artificial Sequence
  Synthetic
gaugcaaaaguuuggauuau

SEQ ID NO: 370498 - RNA, 21 nt, Artificial Sequence
  Synthetic
ggaugcaaaaguuuggauuau

SEQ ID NO: 370499 - RNA, 22 nt, Artificial Sequence
  Synthetic
aggaugcaaaaguuuggauuau

SEQ ID NO: 370500 - RNA, 23 nt, Artificial Sequence
  Synthetic
gaggaugcaaaaguuuggauuau

SEQ ID NO: 370501 - RNA, 24 nt, Artificial Sequence
  Synthetic
ugaggaugcaaaaguuuggauuau

SEQ ID NO: 370502 - RNA, 18 nt, Artificial Sequence
  Synthetic
acuuacuagaaugauuau

SEQ ID NO: 370503 - RNA, 19 nt, Artificial Sequence
  Synthetic
aacuuacuagaaugauuau

SEQ ID NO: 370504 - RNA, 20 nt, Artificial Sequence
  Synthetic
caacuuacuagaaugauuau

SEQ ID NO: 370505 - RNA, 21 nt, Artificial Sequence
  Synthetic
acaacuuacuagaaugauuau

SEQ ID NO: 370506 - RNA, 22 nt, Artificial Sequence
  Synthetic
aacaacuuacuagaaugauuau

SEQ ID NO: 370507 - RNA, 23 nt, Artificial Sequence
  Synthetic
aaacaacuuacuagaaugauuau

SEQ ID NO: 370508 - RNA, 24 nt, Artificial Sequence
  Synthetic
uaaacaacuuacuagaaugauuau

SEQ ID NO: 370509 - RNA, 18 nt, Artificial Sequence
  Synthetic
ggauaaggaguugauuau

SEQ ID NO: 370510 - RNA, 19 nt, Artificial Sequence
  Synthetic
aggauaaggaguugauuau

SEQ ID NO: 370511 - RNA, 20 nt, Artificial Sequence
  Synthetic
caggauaaggaguugauuau

SEQ ID NO: 370512 - RNA, 21 nt, Artificial Sequence
  Synthetic
ucaggauaaggaguugauuau

SEQ ID NO: 370513 - RNA, 22 nt, Artificial Sequence
  Synthetic
cucaggauaaggaguugauuau

SEQ ID NO: 370514 - RNA, 23 nt, Artificial Sequence
  Synthetic
acucaggauaaggaguugauuau

SEQ ID NO: 370515 - RNA, 24 nt, Artificial Sequence
  Synthetic
aacucaggauaaggaguugauuau

SEQ ID NO: 370516 - RNA, 18 nt, Artificial Sequence
  Synthetic
aucacaucauaauauuau

SEQ ID NO: 370517 - RNA, 19 nt, Artificial Sequence
  Synthetic
uaucacaucauaauauuau

SEQ ID NO: 370518 - RNA, 20 nt, Artificial Sequence
  Synthetic
auaucacaucauaauauuau

SEQ ID NO: 370519 - RNA, 21 nt, Artificial Sequence
  Synthetic
uauaucacaucauaauauuau

SEQ ID NO: 370520 - RNA, 22 nt, Artificial Sequence
  Synthetic
guauaucacaucauaauauuau

SEQ ID NO: 370521 - RNA, 23 nt, Artificial Sequence
  Synthetic
uguauaucacaucauaauauuau

SEQ ID NO: 370522 - RNA, 24 nt, Artificial Sequence
  Synthetic
cuguauaucacaucauaauauuau

SEQ ID NO: 370523 - RNA, 18 nt, Artificial Sequence
  Synthetic
ucacaauaugcauauuau

SEQ ID NO: 370524 - RNA, 19 nt, Artificial Sequence
  Synthetic
aucacaauaugcauauuau

SEQ ID NO: 370525 - RNA, 20 nt, Artificial Sequence
  Synthetic
aaucacaauaugcauauuau

SEQ ID NO: 370526 - RNA, 21 nt, Artificial Sequence
  Synthetic
uaaucacaauaugcauauuau

SEQ ID NO: 370527 - RNA, 22 nt, Artificial Sequence
  Synthetic
auaaucacaauaugcauauuau

SEQ ID NO: 370528 - RNA, 23 nt, Artificial Sequence
  Synthetic
aauaaucacaauaugcauauuau

SEQ ID NO: 370529 - RNA, 24 nt, Artificial Sequence
  Synthetic
aaauaaucacaauaugcauauuau

SEQ ID NO: 370530 - RNA, 18 nt, Artificial Sequence
  Synthetic
uaauaauuucgauauuau

SEQ ID NO: 370531 - RNA, 19 nt, Artificial Sequence
  Synthetic
guaauaauuucgauauuau

SEQ ID NO: 370532 - RNA, 20 nt, Artificial Sequence
  Synthetic
aguaauaauuucgauauuau

SEQ ID NO: 370533 - RNA, 21 nt, Artificial Sequence
  Synthetic
aaguaauaauuucgauauuau

SEQ ID NO: 370534 - RNA, 22 nt, Artificial Sequence
  Synthetic
gaaguaauaauuucgauauuau

SEQ ID NO: 370535 - RNA, 23 nt, Artificial Sequence
  Synthetic
agaaguaauaauuucgauauuau

SEQ ID NO: 370536 - RNA, 24 nt, Artificial Sequence
  Synthetic
uagaaguaauaauuucgauauuau

SEQ ID NO: 370537 - RNA, 18 nt, Artificial Sequence
  Synthetic
aagaggauaguauauuau

SEQ ID NO: 370538 - RNA, 19 nt, Artificial Sequence
  Synthetic
caagaggauaguauauuau

SEQ ID NO: 370539 - RNA, 20 nt, Artificial Sequence
  Synthetic
ccaagaggauaguauauuau

SEQ ID NO: 370540 - RNA, 21 nt, Artificial Sequence
  Synthetic
uccaagaggauaguauauuau

SEQ ID NO: 370541 - RNA, 22 nt, Artificial Sequence
  Synthetic
uuccaagaggauaguauauuau

SEQ ID NO: 370542 - RNA, 23 nt, Artificial Sequence
  Synthetic
uuuccaagaggauaguauauuau

SEQ ID NO: 370543 - RNA, 24 nt, Artificial Sequence
  Synthetic
auuuccaagaggauaguauauuau

SEQ ID NO: 370544 - RNA, 18 nt, Artificial Sequence
  Synthetic
ucugucauguuauauuau

SEQ ID NO: 370545 - RNA, 19 nt, Artificial Sequence
  Synthetic
uucugucauguuauauuau

SEQ ID NO: 370546 - RNA, 20 nt, Artificial Sequence
  Synthetic
uuucugucauguuauauuau

SEQ ID NO: 370547 - RNA, 21 nt, Artificial Sequence
  Synthetic
cuuucugucauguuauauuau

SEQ ID NO: 370548 - RNA, 22 nt, Artificial Sequence
  Synthetic
gcuuucugucauguuauauuau

SEQ ID NO: 370549 - RNA, 23 nt, Artificial Sequence
  Synthetic
agcuuucugucauguuauauuau

SEQ ID NO: 370550 - RNA, 24 nt, Artificial Sequence
  Synthetic
aagcuuucugucauguuauauuau

SEQ ID NO: 370551 - RNA, 18 nt, Artificial Sequence
  Synthetic
acuguaugaaucuauuau

SEQ ID NO: 370552 - RNA, 19 nt, Artificial Sequence
  Synthetic
uacuguaugaaucuauuau

SEQ ID NO: 370553 - RNA, 20 nt, Artificial Sequence
  Synthetic
uuacuguaugaaucuauuau

SEQ ID NO: 370554 - RNA, 21 nt, Artificial Sequence
  Synthetic
cuuacuguaugaaucuauuau

SEQ ID NO: 370555 - RNA, 22 nt, Artificial Sequence
  Synthetic
acuuacuguaugaaucuauuau

SEQ ID NO: 370556 - RNA, 23 nt, Artificial Sequence
  Synthetic
cacuuacuguaugaaucuauuau

SEQ ID NO: 370557 - RNA, 24 nt, Artificial Sequence
  Synthetic
acacuuacuguaugaaucuauuau

SEQ ID NO: 370558 - RNA, 18 nt, Artificial Sequence
  Synthetic
auagugauucucuauuau

SEQ ID NO: 370559 - RNA, 19 nt, Artificial Sequence
  Synthetic
cauagugauucucuauuau

SEQ ID NO: 370560 - RNA, 20 nt, Artificial Sequence
  Synthetic
ccauagugauucucuauuau

SEQ ID NO: 370561 - RNA, 21 nt, Artificial Sequence
  Synthetic
cccauagugauucucuauuau

SEQ ID NO: 370562 - RNA, 22 nt, Artificial Sequence
  Synthetic
acccauagugauucucuauuau

SEQ ID NO: 370563 - RNA, 23 nt, Artificial Sequence
  Synthetic
gacccauagugauucucuauuau

SEQ ID NO: 370564 - RNA, 24 nt, Artificial Sequence
  Synthetic
ugacccauagugauucucuauuau

SEQ ID NO: 370565 - RNA, 18 nt, Artificial Sequence
  Synthetic
uacaugagugucuauuau

SEQ ID NO: 370566 - RNA, 19 nt, Artificial Sequence
  Synthetic
cuacaugagugucuauuau

SEQ ID NO: 370567 - RNA, 20 nt, Artificial Sequence
  Synthetic
ucuacaugagugucuauuau

SEQ ID NO: 370568 - RNA, 21 nt, Artificial Sequence
  Synthetic
uucuacaugagugucuauuau

SEQ ID NO: 370569 - RNA, 22 nt, Artificial Sequence
  Synthetic
uuucuacaugagugucuauuau

SEQ ID NO: 370570 - RNA, 23 nt, Artificial Sequence
  Synthetic
cuuucuacaugagugucuauuau

SEQ ID NO: 370571 - RNA, 24 nt, Artificial Sequence
  Synthetic
gcuuucuacaugagugucuauuau

SEQ ID NO: 370572 - RNA, 18 nt, Artificial Sequence
  Synthetic
ccauuaaauaaguauuau

SEQ ID NO: 370573 - RNA, 19 nt, Artificial Sequence
  Synthetic
accauuaaauaaguauuau

SEQ ID NO: 370574 - RNA, 20 nt, Artificial Sequence
  Synthetic
caccauuaaauaaguauuau

SEQ ID NO: 370575 - RNA, 21 nt, Artificial Sequence
  Synthetic
gcaccauuaaauaaguauuau

SEQ ID NO: 370576 - RNA, 22 nt, Artificial Sequence
  Synthetic
ugcaccauuaaauaaguauuau

SEQ ID NO: 370577 - RNA, 23 nt, Artificial Sequence
  Synthetic
uugcaccauuaaauaaguauuau

SEQ ID NO: 370578 - RNA, 24 nt, Artificial Sequence
  Synthetic
auugcaccauuaaauaaguauuau

SEQ ID NO: 370579 - RNA, 18 nt, Artificial Sequence
  Synthetic
caguuuucuggguauuau

SEQ ID NO: 370580 - RNA, 19 nt, Artificial Sequence
  Synthetic
ucaguuuucuggguauuau

SEQ ID NO: 370581 - RNA, 20 nt, Artificial Sequence
  Synthetic
aucaguuuucuggguauuau

SEQ ID NO: 370582 - RNA, 21 nt, Artificial Sequence
  Synthetic
aaucaguuuucuggguauuau

SEQ ID NO: 370583 - RNA, 22 nt, Artificial Sequence
  Synthetic
aaaucaguuuucuggguauuau

SEQ ID NO: 370584 - RNA, 23 nt, Artificial Sequence
  Synthetic
uaaaucaguuuucuggguauuau

SEQ ID NO: 370585 - RNA, 24 nt, Artificial Sequence
  Synthetic
guaaaucaguuuucuggguauuau

SEQ ID NO: 370586 - RNA, 18 nt, Artificial Sequence
  Synthetic
uaaguuuucugguauuau

SEQ ID NO: 370587 - RNA, 19 nt, Artificial Sequence
  Synthetic
cuaaguuuucugguauuau

SEQ ID NO: 370588 - RNA, 20 nt, Artificial Sequence
  Synthetic
ucuaaguuuucugguauuau

SEQ ID NO: 370589 - RNA, 21 nt, Artificial Sequence
  Synthetic
uucuaaguuuucugguauuau

SEQ ID NO: 370590 - RNA, 22 nt, Artificial Sequence
  Synthetic
cuucuaaguuuucugguauuau

SEQ ID NO: 370591 - RNA, 23 nt, Artificial Sequence
  Synthetic
gcuucuaaguuuucugguauuau

SEQ ID NO: 370592 - RNA, 24 nt, Artificial Sequence
  Synthetic
ggcuucuaaguuuucugguauuau

SEQ ID NO: 370593 - RNA, 18 nt, Artificial Sequence
  Synthetic
ccuguuuuuguguauuau

SEQ ID NO: 370594 - RNA, 19 nt, Artificial Sequence
  Synthetic
uccuguuuuuguguauuau

SEQ ID NO: 370595 - RNA, 20 nt, Artificial Sequence
  Synthetic
uuccuguuuuuguguauuau

SEQ ID NO: 370596 - RNA, 21 nt, Artificial Sequence
  Synthetic
uuuccuguuuuuguguauuau

SEQ ID NO: 370597 - RNA, 22 nt, Artificial Sequence
  Synthetic
uuuuccuguuuuuguguauuau

SEQ ID NO: 370598 - RNA, 23 nt, Artificial Sequence
  Synthetic
uuuuuccuguuuuuguguauuau

SEQ ID NO: 370599 - RNA, 24 nt, Artificial Sequence
  Synthetic
cuuuuuccuguuuuuguguauuau

SEQ ID NO: 370600 - RNA, 18 nt, Artificial Sequence
  Synthetic
auuuuucauuuguauuau

SEQ ID NO: 370601 - RNA, 19 nt, Artificial Sequence
  Synthetic
uauuuuucauuuguauuau

SEQ ID NO: 370602 - RNA, 20 nt, Artificial Sequence
  Synthetic
uuauuuuucauuuguauuau

SEQ ID NO: 370603 - RNA, 21 nt, Artificial Sequence
  Synthetic
auuauuuuucauuuguauuau

SEQ ID NO: 370604 - RNA, 22 nt, Artificial Sequence
  Synthetic
cauuauuuuucauuuguauuau

SEQ ID NO: 370605 - RNA, 23 nt, Artificial Sequence
  Synthetic
acauuauuuuucauuuguauuau

SEQ ID NO: 370606 - RNA, 24 nt, Artificial Sequence
  Synthetic
uacauuauuuuucauuuguauuau

SEQ ID NO: 370607 - RNA, 18 nt, Artificial Sequence
  Synthetic
caauucaacaauuauuau

SEQ ID NO: 370608 - RNA, 19 nt, Artificial Sequence
  Synthetic
acaauucaacaauuauuau

SEQ ID NO: 370609 - RNA, 20 nt, Artificial Sequence
  Synthetic
gacaauucaacaauuauuau

SEQ ID NO: 370610 - RNA, 21 nt, Artificial Sequence
  Synthetic
agacaauucaacaauuauuau

SEQ ID NO: 370611 - RNA, 22 nt, Artificial Sequence
  Synthetic
uagacaauucaacaauuauuau

SEQ ID NO: 370612 - RNA, 23 nt, Artificial Sequence
  Synthetic
cuagacaauucaacaauuauuau

SEQ ID NO: 370613 - RNA, 24 nt, Artificial Sequence
  Synthetic
acuagacaauucaacaauuauuau

SEQ ID NO: 370614 - RNA, 18 nt, Artificial Sequence
  Synthetic
guuuucuacuauuauuau

SEQ ID NO: 370615 - RNA, 19 nt, Artificial Sequence
  Synthetic
aguuuucuacuauuauuau

SEQ ID NO: 370616 - RNA, 20 nt, Artificial Sequence
  Synthetic
gaguuuucuacuauuauuau

SEQ ID NO: 370617 - RNA, 21 nt, Artificial Sequence
  Synthetic
ugaguuuucuacuauuauuau

SEQ ID NO: 370618 - RNA, 22 nt, Artificial Sequence
  Synthetic
uugaguuuucuacuauuauuau

SEQ ID NO: 370619 - RNA, 23 nt, Artificial Sequence
  Synthetic
uuugaguuuucuacuauuauuau

SEQ ID NO: 370620 - RNA, 24 nt, Artificial Sequence
  Synthetic
uuuugaguuuucuacuauuauuau

SEQ ID NO: 370621 - RNA, 18 nt, Artificial Sequence
  Synthetic
aauuauuauuauuauuau

SEQ ID NO: 370622 - RNA, 19 nt, Artificial Sequence
  Synthetic
uaauuauuauuauuauuau

SEQ ID NO: 370623 - RNA, 20 nt, Artificial Sequence
  Synthetic
auaauuauuauuauuauuau

SEQ ID NO: 370624 - RNA, 21 nt, Artificial Sequence
  Synthetic
aauaauuauuauuauuauuau

SEQ ID NO: 370625 - RNA, 22 nt, Artificial Sequence
  Synthetic
uaauaauuauuauuauuauuau

SEQ ID NO: 370626 - RNA, 23 nt, Artificial Sequence
  Synthetic
auaauaauuauuauuauuauuau

SEQ ID NO: 370627 - RNA, 24 nt, Artificial Sequence
  Synthetic
aauaauaauuauuauuauuauuau

SEQ ID NO: 370628 - RNA, 18 nt, Artificial Sequence
  Synthetic
uuaccacccacuuauuau

SEQ ID NO: 370629 - RNA, 19 nt, Artificial Sequence
  Synthetic
uuuaccacccacuuauuau

SEQ ID NO: 370630 - RNA, 20 nt, Artificial Sequence
  Synthetic
auuuaccacccacuuauuau

SEQ ID NO: 370631 - RNA, 21 nt, Artificial Sequence
  Synthetic
uauuuaccacccacuuauuau

SEQ ID NO: 370632 - RNA, 22 nt, Artificial Sequence
  Synthetic
uuauuuaccacccacuuauuau

SEQ ID NO: 370633 - RNA, 23 nt, Artificial Sequence
  Synthetic
auuauuuaccacccacuuauuau

SEQ ID NO: 370634 - RNA, 24 nt, Artificial Sequence
  Synthetic
aauuauuuaccacccacuuauuau

SEQ ID NO: 370635 - RNA, 18 nt, Artificial Sequence
  Synthetic
uacuagugugguuauuau

SEQ ID NO: 370636 - RNA, 19 nt, Artificial Sequence
  Synthetic
uuacuagugugguuauuau

SEQ ID NO: 370637 - RNA, 20 nt, Artificial Sequence
  Synthetic
uuuacuagugugguuauuau

SEQ ID NO: 370638 - RNA, 21 nt, Artificial Sequence
  Synthetic
guuuacuagugugguuauuau

SEQ ID NO: 370639 - RNA, 22 nt, Artificial Sequence
  Synthetic
uguuuacuagugugguuauuau

SEQ ID NO: 370640 - RNA, 23 nt, Artificial Sequence
  Synthetic
uuguuuacuagugugguuauuau

SEQ ID NO: 370641 - RNA, 24 nt, Artificial Sequence
  Synthetic
cuuguuuacuagugugguuauuau

SEQ ID NO: 370642 - RNA, 18 nt, Artificial Sequence
  Synthetic
uauaaucuguguuauuau

SEQ ID NO: 370643 - RNA, 19 nt, Artificial Sequence
  Synthetic
uuauaaucuguguuauuau

SEQ ID NO: 370644 - RNA, 20 nt, Artificial Sequence
  Synthetic
cuuauaaucuguguuauuau

SEQ ID NO: 370645 - RNA, 21 nt, Artificial Sequence
  Synthetic
ccuuauaaucuguguuauuau

SEQ ID NO: 370646 - RNA, 22 nt, Artificial Sequence
  Synthetic
uccuuauaaucuguguuauuau

SEQ ID NO: 370647 - RNA, 23 nt, Artificial Sequence
  Synthetic
uuccuuauaaucuguguuauuau

SEQ ID NO: 370648 - RNA, 24 nt, Artificial Sequence
  Synthetic
auuccuuauaaucuguguuauuau

SEQ ID NO: 370649 - RNA, 18 nt, Artificial Sequence
  Synthetic
cuaacucucauuuauuau

SEQ ID NO: 370650 - RNA, 19 nt, Artificial Sequence
  Synthetic
gcuaacucucauuuauuau

SEQ ID NO: 370651 - RNA, 20 nt, Artificial Sequence
  Synthetic
ugcuaacucucauuuauuau

SEQ ID NO: 370652 - RNA, 21 nt, Artificial Sequence
  Synthetic
augcuaacucucauuuauuau

SEQ ID NO: 370653 - RNA, 22 nt, Artificial Sequence
  Synthetic
gaugcuaacucucauuuauuau

SEQ ID NO: 370654 - RNA, 23 nt, Artificial Sequence
  Synthetic
agaugcuaacucucauuuauuau

SEQ ID NO: 370655 - RNA, 24 nt, Artificial Sequence
  Synthetic
uagaugcuaacucucauuuauuau

SEQ ID NO: 370656 - RNA, 18 nt, Artificial Sequence
  Synthetic
uaauucggcuuuuauuau

SEQ ID NO: 370657 - RNA, 19 nt, Artificial Sequence
  Synthetic
auaauucggcuuuuauuau

SEQ ID NO: 370658 - RNA, 20 nt, Artificial Sequence
  Synthetic
uauaauucggcuuuuauuau

SEQ ID NO: 370659 - RNA, 21 nt, Artificial Sequence
  Synthetic
auauaauucggcuuuuauuau

SEQ ID NO: 370660 - RNA, 22 nt, Artificial Sequence
  Synthetic
gauauaauucggcuuuuauuau

SEQ ID NO: 370661 - RNA, 23 nt, Artificial Sequence
  Synthetic
agauauaauucggcuuuuauuau

SEQ ID NO: 370662 - RNA, 24 nt, Artificial Sequence
  Synthetic
aagauauaauucggcuuuuauuau

SEQ ID NO: 370663 - RNA, 18 nt, Artificial Sequence
  Synthetic
caauauaccaaaacuuau

SEQ ID NO: 370664 - RNA, 19 nt, Artificial Sequence
  Synthetic
acaauauaccaaaacuuau

SEQ ID NO: 370665 - RNA, 20 nt, Artificial Sequence
  Synthetic
uacaauauaccaaaacuuau

SEQ ID NO: 370666 - RNA, 21 nt, Artificial Sequence
  Synthetic
auacaauauaccaaaacuuau

SEQ ID NO: 370667 - RNA, 22 nt, Artificial Sequence
  Synthetic
aauacaauauaccaaaacuuau

SEQ ID NO: 370668 - RNA, 23 nt, Artificial Sequence
  Synthetic
aaauacaauauaccaaaacuuau

SEQ ID NO: 370669 - RNA, 24 nt, Artificial Sequence
  Synthetic
aaaauacaauauaccaaaacuuau

SEQ ID NO: 370670 - RNA, 18 nt, Artificial Sequence
  Synthetic
uauccuuagcaaacuuau

SEQ ID NO: 370671 - RNA, 19 nt, Artificial Sequence
  Synthetic
uuauccuuagcaaacuuau

SEQ ID NO: 370672 - RNA, 20 nt, Artificial Sequence
  Synthetic
auuauccuuagcaaacuuau

SEQ ID NO: 370673 - RNA, 21 nt, Artificial Sequence
  Synthetic
cauuauccuuagcaaacuuau

SEQ ID NO: 370674 - RNA, 22 nt, Artificial Sequence
  Synthetic
ccauuauccuuagcaaacuuau

SEQ ID NO: 370675 - RNA, 23 nt, Artificial Sequence
  Synthetic
gccauuauccuuagcaaacuuau

SEQ ID NO: 370676 - RNA, 24 nt, Artificial Sequence
  Synthetic
ggccauuauccuuagcaaacuuau

SEQ ID NO: 370677 - RNA, 18 nt, Artificial Sequence
  Synthetic
gggucuucuuuaacuuau

SEQ ID NO: 370678 - RNA, 19 nt, Artificial Sequence
  Synthetic
agggucuucuuuaacuuau

SEQ ID NO: 370679 - RNA, 20 nt, Artificial Sequence
  Synthetic
cagggucuucuuuaacuuau

SEQ ID NO: 370680 - RNA, 21 nt, Artificial Sequence
  Synthetic
ucagggucuucuuuaacuuau

SEQ ID NO: 370681 - RNA, 22 nt, Artificial Sequence
  Synthetic
aucagggucuucuuuaacuuau

SEQ ID NO: 370682 - RNA, 23 nt, Artificial Sequence
  Synthetic
aaucagggucuucuuuaacuuau

SEQ ID NO: 370683 - RNA, 24 nt, Artificial Sequence
  Synthetic
uaaucagggucuucuuuaacuuau

SEQ ID NO: 370684 - RNA, 18 nt, Artificial Sequence
  Synthetic
uguuaaauaaucacuuau

SEQ ID NO: 370685 - RNA, 19 nt, Artificial Sequence
  Synthetic
auguuaaauaaucacuuau

SEQ ID NO: 370686 - RNA, 20 nt, Artificial Sequence
  Synthetic
uauguuaaauaaucacuuau

SEQ ID NO: 370687 - RNA, 21 nt, Artificial Sequence
  Synthetic
uuauguuaaauaaucacuuau

SEQ ID NO: 370688 - RNA, 22 nt, Artificial Sequence
  Synthetic
auuauguuaaauaaucacuuau

SEQ ID NO: 370689 - RNA, 23 nt, Artificial Sequence
  Synthetic
gauuauguuaaauaaucacuuau

SEQ ID NO: 370690 - RNA, 24 nt, Artificial Sequence
  Synthetic
agauuauguuaaauaaucacuuau

SEQ ID NO: 370691 - RNA, 18 nt, Artificial Sequence
  Synthetic
uuuccauagaucacuuau

SEQ ID NO: 370692 - RNA, 19 nt, Artificial Sequence
  Synthetic
cuuuccauagaucacuuau

SEQ ID NO: 370693 - RNA, 20 nt, Artificial Sequence
  Synthetic
ucuuuccauagaucacuuau

SEQ ID NO: 370694 - RNA, 21 nt, Artificial Sequence
  Synthetic
uucuuuccauagaucacuuau

SEQ ID NO: 370695 - RNA, 22 nt, Artificial Sequence
  Synthetic
uuucuuuccauagaucacuuau

SEQ ID NO: 370696 - RNA, 23 nt, Artificial Sequence
  Synthetic
uuuucuuuccauagaucacuuau

SEQ ID NO: 370697 - RNA, 24 nt, Artificial Sequence
  Synthetic
uuuuucuuuccauagaucacuuau

SEQ ID NO: 370698 - RNA, 18 nt, Artificial Sequence
  Synthetic
gauaaaaacaagacuuau

SEQ ID NO: 370699 - RNA, 19 nt, Artificial Sequence
  Synthetic
agauaaaaacaagacuuau

SEQ ID NO: 370700 - RNA, 20 nt, Artificial Sequence
  Synthetic
gagauaaaaacaagacuuau

SEQ ID NO: 370701 - RNA, 21 nt, Artificial Sequence
  Synthetic
ggagauaaaaacaagacuuau

SEQ ID NO: 370702 - RNA, 22 nt, Artificial Sequence
  Synthetic
gggagauaaaaacaagacuuau

SEQ ID NO: 370703 - RNA, 23 nt, Artificial Sequence
  Synthetic
agggagauaaaaacaagacuuau

SEQ ID NO: 370704 - RNA, 24 nt, Artificial Sequence
  Synthetic
aagggagauaaaaacaagacuuau

SEQ ID NO: 370705 - RNA, 18 nt, Artificial Sequence
  Synthetic
aagaugaaacagacuuau

SEQ ID NO: 370706 - RNA, 19 nt, Artificial Sequence
  Synthetic
uaagaugaaacagacuuau

SEQ ID NO: 370707 - RNA, 20 nt, Artificial Sequence
  Synthetic
auaagaugaaacagacuuau

SEQ ID NO: 370708 - RNA, 21 nt, Artificial Sequence
  Synthetic
uauaagaugaaacagacuuau

SEQ ID NO: 370709 - RNA, 22 nt, Artificial Sequence
  Synthetic
auauaagaugaaacagacuuau

SEQ ID NO: 370710 - RNA, 23 nt, Artificial Sequence
  Synthetic
uauauaagaugaaacagacuuau

SEQ ID NO: 370711 - RNA, 24 nt, Artificial Sequence
  Synthetic
uuauauaagaugaaacagacuuau

SEQ ID NO: 370712 - RNA, 18 nt, Artificial Sequence
  Synthetic
uuucucaaguggacuuau

SEQ ID NO: 370713 - RNA, 19 nt, Artificial Sequence
  Synthetic
auuucucaaguggacuuau

SEQ ID NO: 370714 - RNA, 20 nt, Artificial Sequence
  Synthetic
gauuucucaaguggacuuau

SEQ ID NO: 370715 - RNA, 21 nt, Artificial Sequence
  Synthetic
agauuucucaaguggacuuau

SEQ ID NO: 370716 - RNA, 22 nt, Artificial Sequence
  Synthetic
gagauuucucaaguggacuuau

SEQ ID NO: 370717 - RNA, 23 nt, Artificial Sequence
  Synthetic
agagauuucucaaguggacuuau

SEQ ID NO: 370718 - RNA, 24 nt, Artificial Sequence
  Synthetic
gagagauuucucaaguggacuuau

SEQ ID NO: 370719 - RNA, 18 nt, Artificial Sequence
  Synthetic
aaagguuaugugacuuau

SEQ ID NO: 370720 - RNA, 19 nt, Artificial Sequence
  Synthetic
gaaagguuaugugacuuau

SEQ ID NO: 370721 - RNA, 20 nt, Artificial Sequence
  Synthetic
agaaagguuaugugacuuau

SEQ ID NO: 370722 - RNA, 21 nt, Artificial Sequence
  Synthetic
uagaaagguuaugugacuuau

SEQ ID NO: 370723 - RNA, 22 nt, Artificial Sequence
  Synthetic
cuagaaagguuaugugacuuau

SEQ ID NO: 370724 - RNA, 23 nt, Artificial Sequence
  Synthetic
ccuagaaagguuaugugacuuau

SEQ ID NO: 370725 - RNA, 24 nt, Artificial Sequence
  Synthetic
uccuagaaagguuaugugacuuau

SEQ ID NO: 370726 - RNA, 18 nt, Artificial Sequence
  Synthetic
aauaugcagaauacuuau

SEQ ID NO: 370727 - RNA, 19 nt, Artificial Sequence
  Synthetic
uaauaugcagaauacuuau

SEQ ID NO: 370728 - RNA, 20 nt, Artificial Sequence
  Synthetic
uuaauaugcagaauacuuau

SEQ ID NO: 370729 - RNA, 21 nt, Artificial Sequence
  Synthetic
uuuaauaugcagaauacuuau

SEQ ID NO: 370730 - RNA, 22 nt, Artificial Sequence
  Synthetic
guuuaauaugcagaauacuuau

SEQ ID NO: 370731 - RNA, 23 nt, Artificial Sequence
  Synthetic
aguuuaauaugcagaauacuuau

SEQ ID NO: 370732 - RNA, 24 nt, Artificial Sequence
  Synthetic
aaguuuaauaugcagaauacuuau

SEQ ID NO: 370733 - RNA, 18 nt, Artificial Sequence
  Synthetic
uuuuuuucaucuacuuau

SEQ ID NO: 370734 - RNA, 19 nt, Artificial Sequence
  Synthetic
cuuuuuuucaucuacuuau

SEQ ID NO: 370735 - RNA, 20 nt, Artificial Sequence
  Synthetic
ucuuuuuuucaucuacuuau

SEQ ID NO: 370736 - RNA, 21 nt, Artificial Sequence
  Synthetic
uucuuuuuuucaucuacuuau

SEQ ID NO: 370737 - RNA, 22 nt, Artificial Sequence
  Synthetic
uuucuuuuuuucaucuacuuau

SEQ ID NO: 370738 - RNA, 23 nt, Artificial Sequence
  Synthetic
cuuucuuuuuuucaucuacuuau

SEQ ID NO: 370739 - RNA, 24 nt, Artificial Sequence
  Synthetic
ucuuucuuuuuuucaucuacuuau

SEQ ID NO: 370740 - RNA, 18 nt, Artificial Sequence
  Synthetic
uguugucguuuuacuuau

SEQ ID NO: 370741 - RNA, 19 nt, Artificial Sequence
  Synthetic
uuguugucguuuuacuuau

SEQ ID NO: 370742 - RNA, 20 nt, Artificial Sequence
  Synthetic
uuuguugucguuuuacuuau

SEQ ID NO: 370743 - RNA, 21 nt, Artificial Sequence
  Synthetic
uuuuguugucguuuuacuuau

SEQ ID NO: 370744 - RNA, 22 nt, Artificial Sequence
  Synthetic
uuuuuguugucguuuuacuuau

SEQ ID NO: 370745 - RNA, 23 nt, Artificial Sequence
  Synthetic
guuuuuguugucguuuuacuuau

SEQ ID NO: 370746 - RNA, 24 nt, Artificial Sequence
  Synthetic
gguuuuuguugucguuuuacuuau

SEQ ID NO: 370747 - RNA, 18 nt, Artificial Sequence
  Synthetic
auauuuugaaaaccuuau

SEQ ID NO: 370748 - RNA, 19 nt, Artificial Sequence
  Synthetic
cauauuuugaaaaccuuau

SEQ ID NO: 370749 - RNA, 20 nt, Artificial Sequence
  Synthetic
acauauuuugaaaaccuuau

SEQ ID NO: 370750 - RNA, 21 nt, Artificial Sequence
  Synthetic
cacauauuuugaaaaccuuau

SEQ ID NO: 370751 - RNA, 22 nt, Artificial Sequence
  Synthetic
acacauauuuugaaaaccuuau

SEQ ID NO: 370752 - RNA, 23 nt, Artificial Sequence
  Synthetic
cacacauauuuugaaaaccuuau

SEQ ID NO: 370753 - RNA, 24 nt, Artificial Sequence
  Synthetic
gcacacauauuuugaaaaccuuau

SEQ ID NO: 370754 - RNA, 18 nt, Artificial Sequence
  Synthetic
uggccuucuucaccuuau

SEQ ID NO: 370755 - RNA, 19 nt, Artificial Sequence
  Synthetic
guggccuucuucaccuuau

SEQ ID NO: 370756 - RNA, 20 nt, Artificial Sequence
  Synthetic
gguggccuucuucaccuuau

SEQ ID NO: 370757 - RNA, 21 nt, Artificial Sequence
  Synthetic
ugguggccuucuucaccuuau

SEQ ID NO: 370758 - RNA, 22 nt, Artificial Sequence
  Synthetic
gugguggccuucuucaccuuau

SEQ ID NO: 370759 - RNA, 23 nt, Artificial Sequence
  Synthetic
agugguggccuucuucaccuuau

SEQ ID NO: 370760 - RNA, 24 nt, Artificial Sequence
  Synthetic
uagugguggccuucuucaccuuau

SEQ ID NO: 370761 - RNA, 18 nt, Artificial Sequence
  Synthetic
gccauaggaagaccuuau

SEQ ID NO: 370762 - RNA, 19 nt, Artificial Sequence
  Synthetic
ugccauaggaagaccuuau

SEQ ID NO: 370763 - RNA, 20 nt, Artificial Sequence
  Synthetic
augccauaggaagaccuuau

SEQ ID NO: 370764 - RNA, 21 nt, Artificial Sequence
  Synthetic
caugccauaggaagaccuuau

SEQ ID NO: 370765 - RNA, 22 nt, Artificial Sequence
  Synthetic
ccaugccauaggaagaccuuau

SEQ ID NO: 370766 - RNA, 23 nt, Artificial Sequence
  Synthetic
gccaugccauaggaagaccuuau

SEQ ID NO: 370767 - RNA, 24 nt, Artificial Sequence
  Synthetic
ugccaugccauaggaagaccuuau

SEQ ID NO: 370768 - RNA, 18 nt, Artificial Sequence
  Synthetic
cucuucucccucccuuau

SEQ ID NO: 370769 - RNA, 19 nt, Artificial Sequence
  Synthetic
acucuucucccucccuuau

SEQ ID NO: 370770 - RNA, 20 nt, Artificial Sequence
  Synthetic
cacucuucucccucccuuau

SEQ ID NO: 370771 - RNA, 21 nt, Artificial Sequence
  Synthetic
gcacucuucucccucccuuau

SEQ ID NO: 370772 - RNA, 22 nt, Artificial Sequence
  Synthetic
agcacucuucucccucccuuau

SEQ ID NO: 370773 - RNA, 23 nt, Artificial Sequence
  Synthetic
uagcacucuucucccucccuuau

SEQ ID NO: 370774 - RNA, 24 nt, Artificial Sequence
  Synthetic
auagcacucuucucccucccuuau

SEQ ID NO: 370775 - RNA, 18 nt, Artificial Sequence
  Synthetic
cuuaauguauucccuuau

SEQ ID NO: 370776 - RNA, 19 nt, Artificial Sequence
  Synthetic
ccuuaauguauucccuuau

SEQ ID NO: 370777 - RNA, 20 nt, Artificial Sequence
  Synthetic
uccuuaauguauucccuuau

SEQ ID NO: 370778 - RNA, 21 nt, Artificial Sequence
  Synthetic
cuccuuaauguauucccuuau

SEQ ID NO: 370779 - RNA, 22 nt, Artificial Sequence
  Synthetic
ucuccuuaauguauucccuuau

SEQ ID NO: 370780 - RNA, 23 nt, Artificial Sequence
  Synthetic
aucuccuuaauguauucccuuau

SEQ ID NO: 370781 - RNA, 24 nt, Artificial Sequence
  Synthetic
caucuccuuaauguauucccuuau

SEQ ID NO: 370782 - RNA, 18 nt, Artificial Sequence
  Synthetic
aauaggcauuugccuuau

SEQ ID NO: 370783 - RNA, 19 nt, Artificial Sequence
  Synthetic
aaauaggcauuugccuuau

SEQ ID NO: 370784 - RNA, 20 nt, Artificial Sequence
  Synthetic
uaaauaggcauuugccuuau

SEQ ID NO: 370785 - RNA, 21 nt, Artificial Sequence
  Synthetic
guaaauaggcauuugccuuau

SEQ ID NO: 370786 - RNA, 22 nt, Artificial Sequence
  Synthetic
uguaaauaggcauuugccuuau

SEQ ID NO: 370787 - RNA, 23 nt, Artificial Sequence
  Synthetic
guguaaauaggcauuugccuuau

SEQ ID NO: 370788 - RNA, 24 nt, Artificial Sequence
  Synthetic
aguguaaauaggcauuugccuuau

SEQ ID NO: 370789 - RNA, 18 nt, Artificial Sequence
  Synthetic
ucaacaugauguccuuau

SEQ ID NO: 370790 - RNA, 19 nt, Artificial Sequence
  Synthetic
uucaacaugauguccuuau

SEQ ID NO: 370791 - RNA, 20 nt, Artificial Sequence
  Synthetic
cuucaacaugauguccuuau

SEQ ID NO: 370792 - RNA, 21 nt, Artificial Sequence
  Synthetic
ccuucaacaugauguccuuau

SEQ ID NO: 370793 - RNA, 22 nt, Artificial Sequence
  Synthetic
gccuucaacaugauguccuuau

SEQ ID NO: 370794 - RNA, 23 nt, Artificial Sequence
  Synthetic
ggccuucaacaugauguccuuau

SEQ ID NO: 370795 - RNA, 24 nt, Artificial Sequence
  Synthetic
uggccuucaacaugauguccuuau

SEQ ID NO: 370796 - RNA, 18 nt, Artificial Sequence
  Synthetic
ggccaaacuuguccuuau

SEQ ID NO: 370797 - RNA, 19 nt, Artificial Sequence
  Synthetic
gggccaaacuuguccuuau

SEQ ID NO: 370798 - RNA, 20 nt, Artificial Sequence
  Synthetic
ggggccaaacuuguccuuau

SEQ ID NO: 370799 - RNA, 21 nt, Artificial Sequence
  Synthetic
uggggccaaacuuguccuuau

SEQ ID NO: 370800 - RNA, 22 nt, Artificial Sequence
  Synthetic
auggggccaaacuuguccuuau

SEQ ID NO: 370801 - RNA, 23 nt, Artificial Sequence
  Synthetic
aauggggccaaacuuguccuuau

SEQ ID NO: 370802 - RNA, 24 nt, Artificial Sequence
  Synthetic
aaauggggccaaacuuguccuuau

SEQ ID NO: 370803 - RNA, 18 nt, Artificial Sequence
  Synthetic
uauuucucagaagcuuau

SEQ ID NO: 370804 - RNA, 19 nt, Artificial Sequence
  Synthetic
uuauuucucagaagcuuau

SEQ ID NO: 370805 - RNA, 20 nt, Artificial Sequence
  Synthetic
uuuauuucucagaagcuuau

SEQ ID NO: 370806 - RNA, 21 nt, Artificial Sequence
  Synthetic
auuuauuucucagaagcuuau

SEQ ID NO: 370807 - RNA, 22 nt, Artificial Sequence
  Synthetic
uauuuauuucucagaagcuuau

SEQ ID NO: 370808 - RNA, 23 nt, Artificial Sequence
  Synthetic
uuauuuauuucucagaagcuuau

SEQ ID NO: 370809 - RNA, 24 nt, Artificial Sequence
  Synthetic
uuuauuuauuucucagaagcuuau

SEQ ID NO: 370810 - RNA, 18 nt, Artificial Sequence
  Synthetic
uaccacuugggagcuuau

SEQ ID NO: 370811 - RNA, 19 nt, Artificial Sequence
  Synthetic
guaccacuugggagcuuau

SEQ ID NO: 370812 - RNA, 20 nt, Artificial Sequence
  Synthetic
aguaccacuugggagcuuau

SEQ ID NO: 370813 - RNA, 21 nt, Artificial Sequence
  Synthetic
caguaccacuugggagcuuau

SEQ ID NO: 370814 - RNA, 22 nt, Artificial Sequence
  Synthetic
gcaguaccacuugggagcuuau

SEQ ID NO: 370815 - RNA, 23 nt, Artificial Sequence
  Synthetic
agcaguaccacuugggagcuuau

SEQ ID NO: 370816 - RNA, 24 nt, Artificial Sequence
  Synthetic
cagcaguaccacuugggagcuuau

SEQ ID NO: 370817 - RNA, 18 nt, Artificial Sequence
  Synthetic
uaaguauccaaugcuuau

SEQ ID NO: 370818 - RNA, 19 nt, Artificial Sequence
  Synthetic
cuaaguauccaaugcuuau

SEQ ID NO: 370819 - RNA, 20 nt, Artificial Sequence
  Synthetic
acuaaguauccaaugcuuau

SEQ ID NO: 370820 - RNA, 21 nt, Artificial Sequence
  Synthetic
uacuaaguauccaaugcuuau

SEQ ID NO: 370821 - RNA, 22 nt, Artificial Sequence
  Synthetic
cuacuaaguauccaaugcuuau

SEQ ID NO: 370822 - RNA, 23 nt, Artificial Sequence
  Synthetic
gcuacuaaguauccaaugcuuau

SEQ ID NO: 370823 - RNA, 24 nt, Artificial Sequence
  Synthetic
agcuacuaaguauccaaugcuuau

SEQ ID NO: 370824 - RNA, 18 nt, Artificial Sequence
  Synthetic
uaguuuggggaugcuuau

SEQ ID NO: 370825 - RNA, 19 nt, Artificial Sequence
  Synthetic
cuaguuuggggaugcuuau

SEQ ID NO: 370826 - RNA, 20 nt, Artificial Sequence
  Synthetic
gcuaguuuggggaugcuuau

SEQ ID NO: 370827 - RNA, 21 nt, Artificial Sequence
  Synthetic
ugcuaguuuggggaugcuuau

SEQ ID NO: 370828 - RNA, 22 nt, Artificial Sequence
  Synthetic
augcuaguuuggggaugcuuau

SEQ ID NO: 370829 - RNA, 23 nt, Artificial Sequence
  Synthetic
caugcuaguuuggggaugcuuau

SEQ ID NO: 370830 - RNA, 24 nt, Artificial Sequence
  Synthetic
acaugcuaguuuggggaugcuuau

SEQ ID NO: 370831 - RNA, 18 nt, Artificial Sequence
  Synthetic
gucuucgaaucugcuuau

SEQ ID NO: 370832 - RNA, 19 nt, Artificial Sequence
  Synthetic
ugucuucgaaucugcuuau

SEQ ID NO: 370833 - RNA, 20 nt, Artificial Sequence
  Synthetic
uugucuucgaaucugcuuau

SEQ ID NO: 370834 - RNA, 21 nt, Artificial Sequence
  Synthetic
cuugucuucgaaucugcuuau

SEQ ID NO: 370835 - RNA, 22 nt, Artificial Sequence
  Synthetic
ccuugucuucgaaucugcuuau

SEQ ID NO: 370836 - RNA, 23 nt, Artificial Sequence
  Synthetic
cccuugucuucgaaucugcuuau

SEQ ID NO: 370837 - RNA, 24 nt, Artificial Sequence
  Synthetic
ucccuugucuucgaaucugcuuau

SEQ ID NO: 370838 - RNA, 18 nt, Artificial Sequence
  Synthetic
cccuuagaaauugcuuau

SEQ ID NO: 370839 - RNA, 19 nt, Artificial Sequence
  Synthetic
ucccuuagaaauugcuuau

SEQ ID NO: 370840 - RNA, 20 nt, Artificial Sequence
  Synthetic
gucccuuagaaauugcuuau

SEQ ID NO: 370841 - RNA, 21 nt, Artificial Sequence
  Synthetic
ugucccuuagaaauugcuuau

SEQ ID NO: 370842 - RNA, 22 nt, Artificial Sequence
  Synthetic
uugucccuuagaaauugcuuau

SEQ ID NO: 370843 - RNA, 23 nt, Artificial Sequence
  Synthetic
uuugucccuuagaaauugcuuau

SEQ ID NO: 370844 - RNA, 24 nt, Artificial Sequence
  Synthetic
auuugucccuuagaaauugcuuau

SEQ ID NO: 370845 - RNA, 18 nt, Artificial Sequence
  Synthetic
ucaacaaauauugcuuau

SEQ ID NO: 370846 - RNA, 19 nt, Artificial Sequence
  Synthetic
cucaacaaauauugcuuau

SEQ ID NO: 370847 - RNA, 20 nt, Artificial Sequence
  Synthetic
gcucaacaaauauugcuuau

SEQ ID NO: 370848 - RNA, 21 nt, Artificial Sequence
  Synthetic
ugcucaacaaauauugcuuau

SEQ ID NO: 370849 - RNA, 22 nt, Artificial Sequence
  Synthetic
augcucaacaaauauugcuuau

SEQ ID NO: 370850 - RNA, 23 nt, Artificial Sequence
  Synthetic
aaugcucaacaaauauugcuuau

SEQ ID NO: 370851 - RNA, 24 nt, Artificial Sequence
  Synthetic
aaaugcucaacaaauauugcuuau

SEQ ID NO: 370852 - RNA, 18 nt, Artificial Sequence
  Synthetic
agugaaagacaaucuuau

SEQ ID NO: 370853 - RNA, 19 nt, Artificial Sequence
  Synthetic
uagugaaagacaaucuuau

SEQ ID NO: 370854 - RNA, 20 nt, Artificial Sequence
  Synthetic
auagugaaagacaaucuuau

SEQ ID NO: 370855 - RNA, 21 nt, Artificial Sequence
  Synthetic
gauagugaaagacaaucuuau

SEQ ID NO: 370856 - RNA, 22 nt, Artificial Sequence
  Synthetic
agauagugaaagacaaucuuau

SEQ ID NO: 370857 - RNA, 23 nt, Artificial Sequence
  Synthetic
gagauagugaaagacaaucuuau

SEQ ID NO: 370858 - RNA, 24 nt, Artificial Sequence
  Synthetic
agagauagugaaagacaaucuuau

SEQ ID NO: 370859 - RNA, 18 nt, Artificial Sequence
  Synthetic
caacuccugcgaucuuau

SEQ ID NO: 370860 - RNA, 19 nt, Artificial Sequence
  Synthetic
ccaacuccugcgaucuuau

SEQ ID NO: 370861 - RNA, 20 nt, Artificial Sequence
  Synthetic
cccaacuccugcgaucuuau

SEQ ID NO: 370862 - RNA, 21 nt, Artificial Sequence
  Synthetic
gcccaacuccugcgaucuuau

SEQ ID NO: 370863 - RNA, 22 nt, Artificial Sequence
  Synthetic
ugcccaacuccugcgaucuuau

SEQ ID NO: 370864 - RNA, 23 nt, Artificial Sequence
  Synthetic
uugcccaacuccugcgaucuuau

SEQ ID NO: 370865 - RNA, 24 nt, Artificial Sequence
  Synthetic
uuugcccaacuccugcgaucuuau

SEQ ID NO: 370866 - RNA, 18 nt, Artificial Sequence
  Synthetic
cuuuugugaggaucuuau

SEQ ID NO: 370867 - RNA, 19 nt, Artificial Sequence
  Synthetic
gcuuuugugaggaucuuau

SEQ ID NO: 370868 - RNA, 20 nt, Artificial Sequence
  Synthetic
agcuuuugugaggaucuuau

SEQ ID NO: 370869 - RNA, 21 nt, Artificial Sequence
  Synthetic
gagcuuuugugaggaucuuau

SEQ ID NO: 370870 - RNA, 22 nt, Artificial Sequence
  Synthetic
agagcuuuugugaggaucuuau

SEQ ID NO: 370871 - RNA, 23 nt, Artificial Sequence
  Synthetic
cagagcuuuugugaggaucuuau

SEQ ID NO: 370872 - RNA, 24 nt, Artificial Sequence
  Synthetic
gcagagcuuuugugaggaucuuau

SEQ ID NO: 370873 - RNA, 18 nt, Artificial Sequence
  Synthetic
uacucuuucauaucuuau

SEQ ID NO: 370874 - RNA, 19 nt, Artificial Sequence
  Synthetic
cuacucuuucauaucuuau

SEQ ID NO: 370875 - RNA, 20 nt, Artificial Sequence
  Synthetic
ucuacucuuucauaucuuau

SEQ ID NO: 370876 - RNA, 21 nt, Artificial Sequence
  Synthetic
gucuacucuuucauaucuuau

SEQ ID NO: 370877 - RNA, 22 nt, Artificial Sequence
  Synthetic
ggucuacucuuucauaucuuau

SEQ ID NO: 370878 - RNA, 23 nt, Artificial Sequence
  Synthetic
aggucuacucuuucauaucuuau

SEQ ID NO: 370879 - RNA, 24 nt, Artificial Sequence
  Synthetic
caggucuacucuuucauaucuuau

SEQ ID NO: 370880 - RNA, 18 nt, Artificial Sequence
  Synthetic
gacagaaauguaucuuau

SEQ ID NO: 370881 - RNA, 19 nt, Artificial Sequence
  Synthetic
agacagaaauguaucuuau

SEQ ID NO: 370882 - RNA, 20 nt, Artificial Sequence
  Synthetic
aagacagaaauguaucuuau

SEQ ID NO: 370883 - RNA, 21 nt, Artificial Sequence
  Synthetic
aaagacagaaauguaucuuau

SEQ ID NO: 370884 - RNA, 22 nt, Artificial Sequence
  Synthetic
aaaagacagaaauguaucuuau

SEQ ID NO: 370885 - RNA, 23 nt, Artificial Sequence
  Synthetic
aaaaagacagaaauguaucuuau

SEQ ID NO: 370886 - RNA, 24 nt, Artificial Sequence
  Synthetic
uaaaaagacagaaauguaucuuau

SEQ ID NO: 370887 - RNA, 18 nt, Artificial Sequence
  Synthetic
guaguuucauuaucuuau

SEQ ID NO: 370888 - RNA, 19 nt, Artificial Sequence
  Synthetic
aguaguuucauuaucuuau

SEQ ID NO: 370889 - RNA, 20 nt, Artificial Sequence
  Synthetic
caguaguuucauuaucuuau

SEQ ID NO: 370890 - RNA, 21 nt, Artificial Sequence
  Synthetic
acaguaguuucauuaucuuau

SEQ ID NO: 370891 - RNA, 22 nt, Artificial Sequence
  Synthetic
uacaguaguuucauuaucuuau

SEQ ID NO: 370892 - RNA, 23 nt, Artificial Sequence
  Synthetic
uuacaguaguuucauuaucuuau

SEQ ID NO: 370893 - RNA, 24 nt, Artificial Sequence
  Synthetic
cuuacaguaguuucauuaucuuau

SEQ ID NO: 370894 - RNA, 18 nt, Artificial Sequence
  Synthetic
ucugcgugucccucuuau

SEQ ID NO: 370895 - RNA, 19 nt, Artificial Sequence
  Synthetic
uucugcgugucccucuuau

SEQ ID NO: 370896 - RNA, 20 nt, Artificial Sequence
  Synthetic
auucugcgugucccucuuau

SEQ ID NO: 370897 - RNA, 21 nt, Artificial Sequence
  Synthetic
aauucugcgugucccucuuau

SEQ ID NO: 370898 - RNA, 22 nt, Artificial Sequence
  Synthetic
caauucugcgugucccucuuau

SEQ ID NO: 370899 - RNA, 23 nt, Artificial Sequence
  Synthetic
ccaauucugcgugucccucuuau

SEQ ID NO: 370900 - RNA, 24 nt, Artificial Sequence
  Synthetic
uccaauucugcgugucccucuuau

SEQ ID NO: 370901 - RNA, 18 nt, Artificial Sequence
  Synthetic
auuuuuauauccucuuau

SEQ ID NO: 370902 - RNA, 19 nt, Artificial Sequence
  Synthetic
cauuuuuauauccucuuau

SEQ ID NO: 370903 - RNA, 20 nt, Artificial Sequence
  Synthetic
ccauuuuuauauccucuuau

SEQ ID NO: 370904 - RNA, 21 nt, Artificial Sequence
  Synthetic
gccauuuuuauauccucuuau

SEQ ID NO: 370905 - RNA, 22 nt, Artificial Sequence
  Synthetic
ugccauuuuuauauccucuuau

SEQ ID NO: 370906 - RNA, 23 nt, Artificial Sequence
  Synthetic
gugccauuuuuauauccucuuau

SEQ ID NO: 370907 - RNA, 24 nt, Artificial Sequence
  Synthetic
agugccauuuuuauauccucuuau

SEQ ID NO: 370908 - RNA, 18 nt, Artificial Sequence
  Synthetic
uuacugaacuccucuuau

SEQ ID NO: 370909 - RNA, 19 nt, Artificial Sequence
  Synthetic
uuuacugaacuccucuuau

SEQ ID NO: 370910 - RNA, 20 nt, Artificial Sequence
  Synthetic
auuuacugaacuccucuuau

SEQ ID NO: 370911 - RNA, 21 nt, Artificial Sequence
  Synthetic
uauuuacugaacuccucuuau

SEQ ID NO: 370912 - RNA, 22 nt, Artificial Sequence
  Synthetic
auauuuacugaacuccucuuau

SEQ ID NO: 370913 - RNA, 23 nt, Artificial Sequence
  Synthetic
aauauuuacugaacuccucuuau

SEQ ID NO: 370914 - RNA, 24 nt, Artificial Sequence
  Synthetic
aaauauuuacugaacuccucuuau

SEQ ID NO: 370915 - RNA, 18 nt, Artificial Sequence
  Synthetic
auuuuaaauuccucuuau

SEQ ID NO: 370916 - RNA, 19 nt, Artificial Sequence
  Synthetic
uauuuuaaauuccucuuau

SEQ ID NO: 370917 - RNA, 20 nt, Artificial Sequence
  Synthetic
cuauuuuaaauuccucuuau

SEQ ID NO: 370918 - RNA, 21 nt, Artificial Sequence
  Synthetic
ccuauuuuaaauuccucuuau

SEQ ID NO: 370919 - RNA, 22 nt, Artificial Sequence
  Synthetic
cccuauuuuaaauuccucuuau

SEQ ID NO: 370920 - RNA, 23 nt, Artificial Sequence
  Synthetic
acccuauuuuaaauuccucuuau

SEQ ID NO: 370921 - RNA, 24 nt, Artificial Sequence
  Synthetic
uacccuauuuuaaauuccucuuau

SEQ ID NO: 370922 - RNA, 18 nt, Artificial Sequence
  Synthetic
ucuugucucugcucuuau

SEQ ID NO: 370923 - RNA, 19 nt, Artificial Sequence
  Synthetic
cucuugucucugcucuuau

SEQ ID NO: 370924 - RNA, 20 nt, Artificial Sequence
  Synthetic
ucucuugucucugcucuuau

SEQ ID NO: 370925 - RNA, 21 nt, Artificial Sequence
  Synthetic
aucucuugucucugcucuuau

SEQ ID NO: 370926 - RNA, 22 nt, Artificial Sequence
  Synthetic
aaucucuugucucugcucuuau

SEQ ID NO: 370927 - RNA, 23 nt, Artificial Sequence
  Synthetic
aaaucucuugucucugcucuuau

SEQ ID NO: 370928 - RNA, 24 nt, Artificial Sequence
  Synthetic
aaaaucucuugucucugcucuuau

SEQ ID NO: 370929 - RNA, 18 nt, Artificial Sequence
  Synthetic
uucaauucuaucucuuau

SEQ ID NO: 370930 - RNA, 19 nt, Artificial Sequence
  Synthetic
guucaauucuaucucuuau

SEQ ID NO: 370931 - RNA, 20 nt, Artificial Sequence
  Synthetic
uguucaauucuaucucuuau

SEQ ID NO: 370932 - RNA, 21 nt, Artificial Sequence
  Synthetic
cuguucaauucuaucucuuau

SEQ ID NO: 370933 - RNA, 22 nt, Artificial Sequence
  Synthetic
gcuguucaauucuaucucuuau

SEQ ID NO: 370934 - RNA, 23 nt, Artificial Sequence
  Synthetic
agcuguucaauucuaucucuuau

SEQ ID NO: 370935 - RNA, 24 nt, Artificial Sequence
  Synthetic
uagcuguucaauucuaucucuuau

SEQ ID NO: 370936 - RNA, 18 nt, Artificial Sequence
  Synthetic
cauuuucuaacuucuuau

SEQ ID NO: 370937 - RNA, 19 nt, Artificial Sequence
  Synthetic
acauuuucuaacuucuuau

SEQ ID NO: 370938 - RNA, 20 nt, Artificial Sequence
  Synthetic
aacauuuucuaacuucuuau

SEQ ID NO: 370939 - RNA, 21 nt, Artificial Sequence
  Synthetic
caacauuuucuaacuucuuau

SEQ ID NO: 370940 - RNA, 22 nt, Artificial Sequence
  Synthetic
ucaacauuuucuaacuucuuau

SEQ ID NO: 370941 - RNA, 23 nt, Artificial Sequence
  Synthetic
cucaacauuuucuaacuucuuau

SEQ ID NO: 370942 - RNA, 24 nt, Artificial Sequence
  Synthetic
acucaacauuuucuaacuucuuau

SEQ ID NO: 370943 - RNA, 18 nt, Artificial Sequence
  Synthetic
uuguugauuacuucuuau

SEQ ID NO: 370944 - RNA, 19 nt, Artificial Sequence
  Synthetic
auuguugauuacuucuuau

SEQ ID NO: 370945 - RNA, 20 nt, Artificial Sequence
  Synthetic
aauuguugauuacuucuuau

SEQ ID NO: 370946 - RNA, 21 nt, Artificial Sequence
  Synthetic
aaauuguugauuacuucuuau

SEQ ID NO: 370947 - RNA, 22 nt, Artificial Sequence
  Synthetic
aaaauuguugauuacuucuuau

SEQ ID NO: 370948 - RNA, 23 nt, Artificial Sequence
  Synthetic
caaaauuguugauuacuucuuau

SEQ ID NO: 370949 - RNA, 24 nt, Artificial Sequence
  Synthetic
ucaaaauuguugauuacuucuuau

SEQ ID NO: 370950 - RNA, 18 nt, Artificial Sequence
  Synthetic
uacuguucccuuucuuau

SEQ ID NO: 370951 - RNA, 19 nt, Artificial Sequence
  Synthetic
uuacuguucccuuucuuau

SEQ ID NO: 370952 - RNA, 20 nt, Artificial Sequence
  Synthetic
uuuacuguucccuuucuuau

SEQ ID NO: 370953 - RNA, 21 nt, Artificial Sequence
  Synthetic
uuuuacuguucccuuucuuau

SEQ ID NO: 370954 - RNA, 22 nt, Artificial Sequence
  Synthetic
cuuuuacuguucccuuucuuau

SEQ ID NO: 370955 - RNA, 23 nt, Artificial Sequence
  Synthetic
acuuuuacuguucccuuucuuau

SEQ ID NO: 370956 - RNA, 24 nt, Artificial Sequence
  Synthetic
gacuuuuacuguucccuuucuuau

SEQ ID NO: 370957 - RNA, 18 nt, Artificial Sequence
  Synthetic
uuuauacagcuuucuuau

SEQ ID NO: 370958 - RNA, 19 nt, Artificial Sequence
  Synthetic
cuuuauacagcuuucuuau

SEQ ID NO: 370959 - RNA, 20 nt, Artificial Sequence
  Synthetic
acuuuauacagcuuucuuau

SEQ ID NO: 370960 - RNA, 21 nt, Artificial Sequence
  Synthetic
cacuuuauacagcuuucuuau

SEQ ID NO: 370961 - RNA, 22 nt, Artificial Sequence
  Synthetic
acacuuuauacagcuuucuuau

SEQ ID NO: 370962 - RNA, 23 nt, Artificial Sequence
  Synthetic
uacacuuuauacagcuuucuuau

SEQ ID NO: 370963 - RNA, 24 nt, Artificial Sequence
  Synthetic
uuacacuuuauacagcuuucuuau

SEQ ID NO: 370964 - RNA, 18 nt, Artificial Sequence
  Synthetic
uguuuuaccuuuucuuau

SEQ ID NO: 370965 - RNA, 19 nt, Artificial Sequence
  Synthetic
auguuuuaccuuuucuuau

SEQ ID NO: 370966 - RNA, 20 nt, Artificial Sequence
  Synthetic
cauguuuuaccuuuucuuau

SEQ ID NO: 370967 - RNA, 21 nt, Artificial Sequence
  Synthetic
gcauguuuuaccuuuucuuau

SEQ ID NO: 370968 - RNA, 22 nt, Artificial Sequence
  Synthetic
ugcauguuuuaccuuuucuuau

SEQ ID NO: 370969 - RNA, 23 nt, Artificial Sequence
  Synthetic
gugcauguuuuaccuuuucuuau

SEQ ID NO: 370970 - RNA, 24 nt, Artificial Sequence
  Synthetic
ggugcauguuuuaccuuuucuuau

SEQ ID NO: 370971 - RNA, 18 nt, Artificial Sequence
  Synthetic
augcugaggaaaaguuau

SEQ ID NO: 370972 - RNA, 19 nt, Artificial Sequence
  Synthetic
uaugcugaggaaaaguuau

SEQ ID NO: 370973 - RNA, 20 nt, Artificial Sequence
  Synthetic
auaugcugaggaaaaguuau

SEQ ID NO: 370974 - RNA, 21 nt, Artificial Sequence
  Synthetic
aauaugcugaggaaaaguuau

SEQ ID NO: 370975 - RNA, 22 nt, Artificial Sequence
  Synthetic
gaauaugcugaggaaaaguuau

SEQ ID NO: 370976 - RNA, 23 nt, Artificial Sequence
  Synthetic
ggaauaugcugaggaaaaguuau

SEQ ID NO: 370977 - RNA, 24 nt, Artificial Sequence
  Synthetic
uggaauaugcugaggaaaaguuau

SEQ ID NO: 370978 - RNA, 18 nt, Artificial Sequence
  Synthetic
aauucuagacaaaguuau

SEQ ID NO: 370979 - RNA, 19 nt, Artificial Sequence
  Synthetic
caauucuagacaaaguuau

SEQ ID NO: 370980 - RNA, 20 nt, Artificial Sequence
  Synthetic
ucaauucuagacaaaguuau

SEQ ID NO: 370981 - RNA, 21 nt, Artificial Sequence
  Synthetic
aucaauucuagacaaaguuau

SEQ ID NO: 370982 - RNA, 22 nt, Artificial Sequence
  Synthetic
gaucaauucuagacaaaguuau

SEQ ID NO: 370983 - RNA, 23 nt, Artificial Sequence
  Synthetic
ugaucaauucuagacaaaguuau

SEQ ID NO: 370984 - RNA, 24 nt, Artificial Sequence
  Synthetic
uugaucaauucuagacaaaguuau

SEQ ID NO: 370985 - RNA, 18 nt, Artificial Sequence
  Synthetic
aguggacacacaaguuau

SEQ ID NO: 370986 - RNA, 19 nt, Artificial Sequence
  Synthetic
aaguggacacacaaguuau

SEQ ID NO: 370987 - RNA, 20 nt, Artificial Sequence
  Synthetic
gaaguggacacacaaguuau

SEQ ID NO: 370988 - RNA, 21 nt, Artificial Sequence
  Synthetic
ggaaguggacacacaaguuau

SEQ ID NO: 370989 - RNA, 22 nt, Artificial Sequence
  Synthetic
aggaaguggacacacaaguuau

SEQ ID NO: 370990 - RNA, 23 nt, Artificial Sequence
  Synthetic
gaggaaguggacacacaaguuau

SEQ ID NO: 370991 - RNA, 24 nt, Artificial Sequence
  Synthetic
ugaggaaguggacacacaaguuau

SEQ ID NO: 370992 - RNA, 18 nt, Artificial Sequence
  Synthetic
uugagucacagaaguuau

SEQ ID NO: 370993 - RNA, 19 nt, Artificial Sequence
  Synthetic
uuugagucacagaaguuau

SEQ ID NO: 370994 - RNA, 20 nt, Artificial Sequence
  Synthetic
auuugagucacagaaguuau

SEQ ID NO: 370995 - RNA, 21 nt, Artificial Sequence
  Synthetic
cauuugagucacagaaguuau

SEQ ID NO: 370996 - RNA, 22 nt, Artificial Sequence
  Synthetic
ucauuugagucacagaaguuau

SEQ ID NO: 370997 - RNA, 23 nt, Artificial Sequence
  Synthetic
cucauuugagucacagaaguuau

SEQ ID NO: 370998 - RNA, 24 nt, Artificial Sequence
  Synthetic
gcucauuugagucacagaaguuau

SEQ ID NO: 370999 - RNA, 18 nt, Artificial Sequence
  Synthetic
uacuuugaaggaaguuau

SEQ ID NO: 371000 - RNA, 19 nt, Artificial Sequence
  Synthetic
auacuuugaaggaaguuau

SEQ ID NO: 371001 - RNA, 20 nt, Artificial Sequence
  Synthetic
aauacuuugaaggaaguuau

SEQ ID NO: 371002 - RNA, 21 nt, Artificial Sequence
  Synthetic
uaauacuuugaaggaaguuau

SEQ ID NO: 371003 - RNA, 22 nt, Artificial Sequence
  Synthetic
auaauacuuugaaggaaguuau

SEQ ID NO: 371004 - RNA, 23 nt, Artificial Sequence
  Synthetic
gauaauacuuugaaggaaguuau

SEQ ID NO: 371005 - RNA, 24 nt, Artificial Sequence
  Synthetic
agauaauacuuugaaggaaguuau

SEQ ID NO: 371006 - RNA, 18 nt, Artificial Sequence
  Synthetic
ugcaauaagugaaguuau

SEQ ID NO: 371007 - RNA, 19 nt, Artificial Sequence
  Synthetic
augcaauaagugaaguuau

SEQ ID NO: 371008 - RNA, 20 nt, Artificial Sequence
  Synthetic
aaugcaauaagugaaguuau

SEQ ID NO: 371009 - RNA, 21 nt, Artificial Sequence
  Synthetic
gaaugcaauaagugaaguuau

SEQ ID NO: 371010 - RNA, 22 nt, Artificial Sequence
  Synthetic
agaaugcaauaagugaaguuau

SEQ ID NO: 371011 - RNA, 23 nt, Artificial Sequence
  Synthetic
cagaaugcaauaagugaaguuau

SEQ ID NO: 371012 - RNA, 24 nt, Artificial Sequence
  Synthetic
ucagaaugcaauaagugaaguuau

SEQ ID NO: 371013 - RNA, 18 nt, Artificial Sequence
  Synthetic
caaacuaaaauaaguuau

SEQ ID NO: 371014 - RNA, 19 nt, Artificial Sequence
  Synthetic
acaaacuaaaauaaguuau

SEQ ID NO: 371015 - RNA, 20 nt, Artificial Sequence
  Synthetic
aacaaacuaaaauaaguuau

SEQ ID NO: 371016 - RNA, 21 nt, Artificial Sequence
  Synthetic
uaacaaacuaaaauaaguuau

SEQ ID NO: 371017 - RNA, 22 nt, Artificial Sequence
  Synthetic
uuaacaaacuaaaauaaguuau

SEQ ID NO: 371018 - RNA, 23 nt, Artificial Sequence
  Synthetic
uuuaacaaacuaaaauaaguuau

SEQ ID NO: 371019 - RNA, 24 nt, Artificial Sequence
  Synthetic
auuuaacaaacuaaaauaaguuau

SEQ ID NO: 371020 - RNA, 18 nt, Artificial Sequence
  Synthetic
auaugaaucuuaaguuau

SEQ ID NO: 371021 - RNA, 19 nt, Artificial Sequence
  Synthetic
uauaugaaucuuaaguuau

SEQ ID NO: 371022 - RNA, 20 nt, Artificial Sequence
  Synthetic
auauaugaaucuuaaguuau

SEQ ID NO: 371023 - RNA, 21 nt, Artificial Sequence
  Synthetic
gauauaugaaucuuaaguuau

SEQ ID NO: 371024 - RNA, 22 nt, Artificial Sequence
  Synthetic
ggauauaugaaucuuaaguuau

SEQ ID NO: 371025 - RNA, 23 nt, Artificial Sequence
  Synthetic
uggauauaugaaucuuaaguuau

SEQ ID NO: 371026 - RNA, 24 nt, Artificial Sequence
  Synthetic
cuggauauaugaaucuuaaguuau

SEQ ID NO: 371027 - RNA, 18 nt, Artificial Sequence
  Synthetic
auucaaaaagacaguuau

SEQ ID NO: 371028 - RNA, 19 nt, Artificial Sequence
  Synthetic
uauucaaaaagacaguuau

SEQ ID NO: 371029 - RNA, 20 nt, Artificial Sequence
  Synthetic
uuauucaaaaagacaguuau

SEQ ID NO: 371030 - RNA, 21 nt, Artificial Sequence
  Synthetic
guuauucaaaaagacaguuau

SEQ ID NO: 371031 - RNA, 22 nt, Artificial Sequence
  Synthetic
uguuauucaaaaagacaguuau

SEQ ID NO: 371032 - RNA, 23 nt, Artificial Sequence
  Synthetic
auguuauucaaaaagacaguuau

SEQ ID NO: 371033 - RNA, 24 nt, Artificial Sequence
  Synthetic
cauguuauucaaaaagacaguuau

SEQ ID NO: 371034 - RNA, 18 nt, Artificial Sequence
  Synthetic
caugacaguaccaguuau

SEQ ID NO: 371035 - RNA, 19 nt, Artificial Sequence
  Synthetic
ucaugacaguaccaguuau

SEQ ID NO: 371036 - RNA, 20 nt, Artificial Sequence
  Synthetic
uucaugacaguaccaguuau

SEQ ID NO: 371037 - RNA, 21 nt, Artificial Sequence
  Synthetic
uuucaugacaguaccaguuau

SEQ ID NO: 371038 - RNA, 22 nt, Artificial Sequence
  Synthetic
cuuucaugacaguaccaguuau

SEQ ID NO: 371039 - RNA, 23 nt, Artificial Sequence
  Synthetic
ucuuucaugacaguaccaguuau

SEQ ID NO: 371040 - RNA, 24 nt, Artificial Sequence
  Synthetic
aucuuucaugacaguaccaguuau

SEQ ID NO: 371041 - RNA, 18 nt, Artificial Sequence
  Synthetic
agauuagcaaucaguuau

SEQ ID NO: 371042 - RNA, 19 nt, Artificial Sequence
  Synthetic
gagauuagcaaucaguuau

SEQ ID NO: 371043 - RNA, 20 nt, Artificial Sequence
  Synthetic
agagauuagcaaucaguuau

SEQ ID NO: 371044 - RNA, 21 nt, Artificial Sequence
  Synthetic
aagagauuagcaaucaguuau

SEQ ID NO: 371045 - RNA, 22 nt, Artificial Sequence
  Synthetic
aaagagauuagcaaucaguuau

SEQ ID NO: 371046 - RNA, 23 nt, Artificial Sequence
  Synthetic
aaaagagauuagcaaucaguuau

SEQ ID NO: 371047 - RNA, 24 nt, Artificial Sequence
  Synthetic
caaaagagauuagcaaucaguuau

SEQ ID NO: 371048 - RNA, 18 nt, Artificial Sequence
  Synthetic
uugucugucuucaguuau

SEQ ID NO: 371049 - RNA, 19 nt, Artificial Sequence
  Synthetic
uuugucugucuucaguuau

SEQ ID NO: 371050 - RNA, 20 nt, Artificial Sequence
  Synthetic
auuugucugucuucaguuau

SEQ ID NO: 371051 - RNA, 21 nt, Artificial Sequence
  Synthetic
uauuugucugucuucaguuau

SEQ ID NO: 371052 - RNA, 22 nt, Artificial Sequence
  Synthetic
uuauuugucugucuucaguuau

SEQ ID NO: 371053 - RNA, 23 nt, Artificial Sequence
  Synthetic
auuauuugucugucuucaguuau

SEQ ID NO: 371054 - RNA, 24 nt, Artificial Sequence
  Synthetic
aauuauuugucugucuucaguuau

SEQ ID NO: 371055 - RNA, 18 nt, Artificial Sequence
  Synthetic
ucagaaauaaagaguuau

SEQ ID NO: 371056 - RNA, 19 nt, Artificial Sequence
  Synthetic
uucagaaauaaagaguuau

SEQ ID NO: 371057 - RNA, 20 nt, Artificial Sequence
  Synthetic
uuucagaaauaaagaguuau

SEQ ID NO: 371058 - RNA, 21 nt, Artificial Sequence
  Synthetic
uuuucagaaauaaagaguuau

SEQ ID NO: 371059 - RNA, 22 nt, Artificial Sequence
  Synthetic
auuuucagaaauaaagaguuau

SEQ ID NO: 371060 - RNA, 23 nt, Artificial Sequence
  Synthetic
uauuuucagaaauaaagaguuau

SEQ ID NO: 371061 - RNA, 24 nt, Artificial Sequence
  Synthetic
cuauuuucagaaauaaagaguuau

SEQ ID NO: 371062 - RNA, 18 nt, Artificial Sequence
  Synthetic
gaaugagaugggaguuau

SEQ ID NO: 371063 - RNA, 19 nt, Artificial Sequence
  Synthetic
ugaaugagaugggaguuau

SEQ ID NO: 371064 - RNA, 20 nt, Artificial Sequence
  Synthetic
cugaaugagaugggaguuau

SEQ ID NO: 371065 - RNA, 21 nt, Artificial Sequence
  Synthetic
ucugaaugagaugggaguuau

SEQ ID NO: 371066 - RNA, 22 nt, Artificial Sequence
  Synthetic
aucugaaugagaugggaguuau

SEQ ID NO: 371067 - RNA, 23 nt, Artificial Sequence
  Synthetic
aaucugaaugagaugggaguuau

SEQ ID NO: 371068 - RNA, 24 nt, Artificial Sequence
  Synthetic
uaaucugaaugagaugggaguuau

SEQ ID NO: 371069 - RNA, 18 nt, Artificial Sequence
  Synthetic
cacuaggagccuaguuau

SEQ ID NO: 371070 - RNA, 19 nt, Artificial Sequence
  Synthetic
gcacuaggagccuaguuau

SEQ ID NO: 371071 - RNA, 20 nt, Artificial Sequence
  Synthetic
cgcacuaggagccuaguuau

SEQ ID NO: 371072 - RNA, 21 nt, Artificial Sequence
  Synthetic
ccgcacuaggagccuaguuau

SEQ ID NO: 371073 - RNA, 22 nt, Artificial Sequence
  Synthetic
accgcacuaggagccuaguuau

SEQ ID NO: 371074 - RNA, 23 nt, Artificial Sequence
  Synthetic
aaccgcacuaggagccuaguuau

SEQ ID NO: 371075 - RNA, 24 nt, Artificial Sequence
  Synthetic
caaccgcacuaggagccuaguuau

SEQ ID NO: 371076 - RNA, 18 nt, Artificial Sequence
  Synthetic
gagggucacucuaguuau

SEQ ID NO: 371077 - RNA, 19 nt, Artificial Sequence
  Synthetic
agagggucacucuaguuau

SEQ ID NO: 371078 - RNA, 20 nt, Artificial Sequence
  Synthetic
gagagggucacucuaguuau

SEQ ID NO: 371079 - RNA, 21 nt, Artificial Sequence
  Synthetic
agagagggucacucuaguuau

SEQ ID NO: 371080 - RNA, 22 nt, Artificial Sequence
  Synthetic
uagagagggucacucuaguuau

SEQ ID NO: 371081 - RNA, 23 nt, Artificial Sequence
  Synthetic
auagagagggucacucuaguuau

SEQ ID NO: 371082 - RNA, 24 nt, Artificial Sequence
  Synthetic
uauagagagggucacucuaguuau

SEQ ID NO: 371083 - RNA, 18 nt, Artificial Sequence
  Synthetic
uuucaagcagguaguuau

SEQ ID NO: 371084 - RNA, 19 nt, Artificial Sequence
  Synthetic
auuucaagcagguaguuau

SEQ ID NO: 371085 - RNA, 20 nt, Artificial Sequence
  Synthetic
uauuucaagcagguaguuau

SEQ ID NO: 371086 - RNA, 21 nt, Artificial Sequence
  Synthetic
cuauuucaagcagguaguuau

SEQ ID NO: 371087 - RNA, 22 nt, Artificial Sequence
  Synthetic
ucuauuucaagcagguaguuau

SEQ ID NO: 371088 - RNA, 23 nt, Artificial Sequence
  Synthetic
cucuauuucaagcagguaguuau

SEQ ID NO: 371089 - RNA, 24 nt, Artificial Sequence
  Synthetic
ucucuauuucaagcagguaguuau

SEQ ID NO: 371090 - RNA, 18 nt, Artificial Sequence
  Synthetic
aucuagaaauuuaguuau

SEQ ID NO: 371091 - RNA, 19 nt, Artificial Sequence
  Synthetic
aaucuagaaauuuaguuau

SEQ ID NO: 371092 - RNA, 20 nt, Artificial Sequence
  Synthetic
aaaucuagaaauuuaguuau

SEQ ID NO: 371093 - RNA, 21 nt, Artificial Sequence
  Synthetic
aaaaucuagaaauuuaguuau

SEQ ID NO: 371094 - RNA, 22 nt, Artificial Sequence
  Synthetic
caaaaucuagaaauuuaguuau

SEQ ID NO: 371095 - RNA, 23 nt, Artificial Sequence
  Synthetic
ccaaaaucuagaaauuuaguuau

SEQ ID NO: 371096 - RNA, 24 nt, Artificial Sequence
  Synthetic
accaaaaucuagaaauuuaguuau

SEQ ID NO: 371097 - RNA, 18 nt, Artificial Sequence
  Synthetic
guguaaucauuuaguuau

SEQ ID NO: 371098 - RNA, 19 nt, Artificial Sequence
  Synthetic
aguguaaucauuuaguuau

SEQ ID NO: 371099 - RNA, 20 nt, Artificial Sequence
  Synthetic
aaguguaaucauuuaguuau

SEQ ID NO: 371100 - RNA, 21 nt, Artificial Sequence
  Synthetic
aaaguguaaucauuuaguuau

SEQ ID NO: 371101 - RNA, 22 nt, Artificial Sequence
  Synthetic
caaaguguaaucauuuaguuau

SEQ ID NO: 371102 - RNA, 23 nt, Artificial Sequence
  Synthetic
acaaaguguaaucauuuaguuau

SEQ ID NO: 371103 - RNA, 24 nt, Artificial Sequence
  Synthetic
cacaaaguguaaucauuuaguuau

SEQ ID NO: 371104 - RNA, 18 nt, Artificial Sequence
  Synthetic
guauguaguuaagguuau

SEQ ID NO: 371105 - RNA, 19 nt, Artificial Sequence
  Synthetic
uguauguaguuaagguuau

SEQ ID NO: 371106 - RNA, 20 nt, Artificial Sequence
  Synthetic
uuguauguaguuaagguuau

SEQ ID NO: 371107 - RNA, 21 nt, Artificial Sequence
  Synthetic
uuuguauguaguuaagguuau

SEQ ID NO: 371108 - RNA, 22 nt, Artificial Sequence
  Synthetic
uuuuguauguaguuaagguuau

SEQ ID NO: 371109 - RNA, 23 nt, Artificial Sequence
  Synthetic
guuuuguauguaguuaagguuau

SEQ ID NO: 371110 - RNA, 24 nt, Artificial Sequence
  Synthetic
aguuuuguauguaguuaagguuau

SEQ ID NO: 371111 - RNA, 18 nt, Artificial Sequence
  Synthetic
acuggauuauaggguuau

SEQ ID NO: 371112 - RNA, 19 nt, Artificial Sequence
  Synthetic
cacuggauuauaggguuau

SEQ ID NO: 371113 - RNA, 20 nt, Artificial Sequence
  Synthetic
gcacuggauuauaggguuau

SEQ ID NO: 371114 - RNA, 21 nt, Artificial Sequence
  Synthetic
ggcacuggauuauaggguuau

SEQ ID NO: 371115 - RNA, 22 nt, Artificial Sequence
  Synthetic
uggcacuggauuauaggguuau

SEQ ID NO: 371116 - RNA, 23 nt, Artificial Sequence
  Synthetic
uuggcacuggauuauaggguuau

SEQ ID NO: 371117 - RNA, 24 nt, Artificial Sequence
  Synthetic
guuggcacuggauuauaggguuau

SEQ ID NO: 371118 - RNA, 18 nt, Artificial Sequence
  Synthetic
aggacguguggggguuau

SEQ ID NO: 371119 - RNA, 19 nt, Artificial Sequence
  Synthetic
caggacguguggggguuau

SEQ ID NO: 371120 - RNA, 20 nt, Artificial Sequence
  Synthetic
ccaggacguguggggguuau

SEQ ID NO: 371121 - RNA, 21 nt, Artificial Sequence
  Synthetic
cccaggacguguggggguuau

SEQ ID NO: 371122 - RNA, 22 nt, Artificial Sequence
  Synthetic
ucccaggacguguggggguuau

SEQ ID NO: 371123 - RNA, 23 nt, Artificial Sequence
  Synthetic
cucccaggacguguggggguuau

SEQ ID NO: 371124 - RNA, 24 nt, Artificial Sequence
  Synthetic
ccucccaggacguguggggguuau

SEQ ID NO: 371125 - RNA, 18 nt, Artificial Sequence
  Synthetic
agacaaccagaugguuau

SEQ ID NO: 371126 - RNA, 19 nt, Artificial Sequence
  Synthetic
aagacaaccagaugguuau

SEQ ID NO: 371127 - RNA, 20 nt, Artificial Sequence
  Synthetic
gaagacaaccagaugguuau

SEQ ID NO: 371128 - RNA, 21 nt, Artificial Sequence
  Synthetic
ggaagacaaccagaugguuau

SEQ ID NO: 371129 - RNA, 22 nt, Artificial Sequence
  Synthetic
aggaagacaaccagaugguuau

SEQ ID NO: 371130 - RNA, 23 nt, Artificial Sequence
  Synthetic
aaggaagacaaccagaugguuau

SEQ ID NO: 371131 - RNA, 24 nt, Artificial Sequence
  Synthetic
gaaggaagacaaccagaugguuau

SEQ ID NO: 371132 - RNA, 18 nt, Artificial Sequence
  Synthetic
gucauuacgccugguuau

SEQ ID NO: 371133 - RNA, 19 nt, Artificial Sequence
  Synthetic
agucauuacgccugguuau

SEQ ID NO: 371134 - RNA, 20 nt, Artificial Sequence
  Synthetic
aagucauuacgccugguuau

SEQ ID NO: 371135 - RNA, 21 nt, Artificial Sequence
  Synthetic
gaagucauuacgccugguuau

SEQ ID NO: 371136 - RNA, 22 nt, Artificial Sequence
  Synthetic
agaagucauuacgccugguuau

SEQ ID NO: 371137 - RNA, 23 nt, Artificial Sequence
  Synthetic
aagaagucauuacgccugguuau

SEQ ID NO: 371138 - RNA, 24 nt, Artificial Sequence
  Synthetic
aaagaagucauuacgccugguuau

SEQ ID NO: 371139 - RNA, 18 nt, Artificial Sequence
  Synthetic
caaaaaaaaucugguuau

SEQ ID NO: 371140 - RNA, 19 nt, Artificial Sequence
  Synthetic
gcaaaaaaaaucugguuau

SEQ ID NO: 371141 - RNA, 20 nt, Artificial Sequence
  Synthetic
agcaaaaaaaaucugguuau

SEQ ID NO: 371142 - RNA, 21 nt, Artificial Sequence
  Synthetic
aagcaaaaaaaaucugguuau

SEQ ID NO: 371143 - RNA, 22 nt, Artificial Sequence
  Synthetic
gaagcaaaaaaaaucugguuau

SEQ ID NO: 371144 - RNA, 23 nt, Artificial Sequence
  Synthetic
agaagcaaaaaaaaucugguuau

SEQ ID NO: 371145 - RNA, 24 nt, Artificial Sequence
  Synthetic
gagaagcaaaaaaaaucugguuau

SEQ ID NO: 371146 - RNA, 18 nt, Artificial Sequence
  Synthetic
auaugugguggugguuau

SEQ ID NO: 371147 - RNA, 19 nt, Artificial Sequence
  Synthetic
cauaugugguggugguuau

SEQ ID NO: 371148 - RNA, 20 nt, Artificial Sequence
  Synthetic
acauaugugguggugguuau

SEQ ID NO: 371149 - RNA, 21 nt, Artificial Sequence
  Synthetic
uacauaugugguggugguuau

SEQ ID NO: 371150 - RNA, 22 nt, Artificial Sequence
  Synthetic
uuacauaugugguggugguuau

SEQ ID NO: 371151 - RNA, 23 nt, Artificial Sequence
  Synthetic
auuacauaugugguggugguuau

SEQ ID NO: 371152 - RNA, 24 nt, Artificial Sequence
  Synthetic
uauuacauaugugguggugguuau

SEQ ID NO: 371153 - RNA, 18 nt, Artificial Sequence
  Synthetic
gcauacuuuaaauguuau

SEQ ID NO: 371154 - RNA, 19 nt, Artificial Sequence
  Synthetic
agcauacuuuaaauguuau

SEQ ID NO: 371155 - RNA, 20 nt, Artificial Sequence
  Synthetic
uagcauacuuuaaauguuau

SEQ ID NO: 371156 - RNA, 21 nt, Artificial Sequence
  Synthetic
cuagcauacuuuaaauguuau

SEQ ID NO: 371157 - RNA, 22 nt, Artificial Sequence
  Synthetic
ucuagcauacuuuaaauguuau

SEQ ID NO: 371158 - RNA, 23 nt, Artificial Sequence
  Synthetic
gucuagcauacuuuaaauguuau

SEQ ID NO: 371159 - RNA, 24 nt, Artificial Sequence
  Synthetic
agucuagcauacuuuaaauguuau

SEQ ID NO: 371160 - RNA, 18 nt, Artificial Sequence
  Synthetic
cccuggguguaauguuau

SEQ ID NO: 371161 - RNA, 19 nt, Artificial Sequence
  Synthetic
ucccuggguguaauguuau

SEQ ID NO: 371162 - RNA, 20 nt, Artificial Sequence
  Synthetic
gucccuggguguaauguuau

SEQ ID NO: 371163 - RNA, 21 nt, Artificial Sequence
  Synthetic
ugucccuggguguaauguuau

SEQ ID NO: 371164 - RNA, 22 nt, Artificial Sequence
  Synthetic
uugucccuggguguaauguuau

SEQ ID NO: 371165 - RNA, 23 nt, Artificial Sequence
  Synthetic
cuugucccuggguguaauguuau

SEQ ID NO: 371166 - RNA, 24 nt, Artificial Sequence
  Synthetic
ucuugucccuggguguaauguuau

SEQ ID NO: 371167 - RNA, 18 nt, Artificial Sequence
  Synthetic
ccacagggaacauguuau

SEQ ID NO: 371168 - RNA, 19 nt, Artificial Sequence
  Synthetic
accacagggaacauguuau

SEQ ID NO: 371169 - RNA, 20 nt, Artificial Sequence
  Synthetic
caccacagggaacauguuau

SEQ ID NO: 371170 - RNA, 21 nt, Artificial Sequence
  Synthetic
ucaccacagggaacauguuau

SEQ ID NO: 371171 - RNA, 22 nt, Artificial Sequence
  Synthetic
uucaccacagggaacauguuau

SEQ ID NO: 371172 - RNA, 23 nt, Artificial Sequence
  Synthetic
uuucaccacagggaacauguuau

SEQ ID NO: 371173 - RNA, 24 nt, Artificial Sequence
  Synthetic
cuuucaccacagggaacauguuau

SEQ ID NO: 371174 - RNA, 18 nt, Artificial Sequence
  Synthetic
uaauaaccagcauguuau

SEQ ID NO: 371175 - RNA, 19 nt, Artificial Sequence
  Synthetic
uuaauaaccagcauguuau

SEQ ID NO: 371176 - RNA, 20 nt, Artificial Sequence
  Synthetic
auuaauaaccagcauguuau

SEQ ID NO: 371177 - RNA, 21 nt, Artificial Sequence
  Synthetic
aauuaauaaccagcauguuau

SEQ ID NO: 371178 - RNA, 22 nt, Artificial Sequence
  Synthetic
uaauuaauaaccagcauguuau

SEQ ID NO: 371179 - RNA, 23 nt, Artificial Sequence
  Synthetic
guaauuaauaaccagcauguuau

SEQ ID NO: 371180 - RNA, 24 nt, Artificial Sequence
  Synthetic
aguaauuaauaaccagcauguuau

SEQ ID NO: 371181 - RNA, 21 nt, Artificial Sequence
  Synthetic
ucaaaacugaacagauguuau

SEQ ID NO: 371182 - RNA, 22 nt, Artificial Sequence
  Synthetic
cucaaaacugaacagauguuau

SEQ ID NO: 371183 - RNA, 23 nt, Artificial Sequence
  Synthetic
acucaaaacugaacagauguuau

SEQ ID NO: 371184 - RNA, 24 nt, Artificial Sequence
  Synthetic
cacucaaaacugaacagauguuau

SEQ ID NO: 371185 - RNA, 22 nt, Artificial Sequence
  Synthetic
gucaaaacugaacagauguuau

SEQ ID NO: 371186 - RNA, 23 nt, Artificial Sequence
  Synthetic
ugucaaaacugaacagauguuau

SEQ ID NO: 371187 - RNA, 24 nt, Artificial Sequence
  Synthetic
uugucaaaacugaacagauguuau

SEQ ID NO: 371188 - RNA, 18 nt, Artificial Sequence
  Synthetic
gcauaaggacacuguuau

SEQ ID NO: 371189 - RNA, 19 nt, Artificial Sequence
  Synthetic
cgcauaaggacacuguuau

SEQ ID NO: 371190 - RNA, 20 nt, Artificial Sequence
  Synthetic
gcgcauaaggacacuguuau

SEQ ID NO: 371191 - RNA, 21 nt, Artificial Sequence
  Synthetic
agcgcauaaggacacuguuau

SEQ ID NO: 371192 - RNA, 22 nt, Artificial Sequence
  Synthetic
cagcgcauaaggacacuguuau

SEQ ID NO: 371193 - RNA, 23 nt, Artificial Sequence
  Synthetic
acagcgcauaaggacacuguuau

SEQ ID NO: 371194 - RNA, 24 nt, Artificial Sequence
  Synthetic
gacagcgcauaaggacacuguuau

SEQ ID NO: 371195 - RNA, 18 nt, Artificial Sequence
  Synthetic
uuuuuuggcaccuguuau

SEQ ID NO: 371196 - RNA, 19 nt, Artificial Sequence
  Synthetic
auuuuuuggcaccuguuau

SEQ ID NO: 371197 - RNA, 20 nt, Artificial Sequence
  Synthetic
uauuuuuuggcaccuguuau

SEQ ID NO: 371198 - RNA, 21 nt, Artificial Sequence
  Synthetic
uuauuuuuuggcaccuguuau

SEQ ID NO: 371199 - RNA, 22 nt, Artificial Sequence
  Synthetic
auuauuuuuuggcaccuguuau

SEQ ID NO: 371200 - RNA, 23 nt, Artificial Sequence
  Synthetic
cauuauuuuuuggcaccuguuau

SEQ ID NO: 371201 - RNA, 24 nt, Artificial Sequence
  Synthetic
acauuauuuuuuggcaccuguuau

SEQ ID NO: 371202 - RNA, 18 nt, Artificial Sequence
  Synthetic
gaagcuaauuccuguuau

SEQ ID NO: 371203 - RNA, 19 nt, Artificial Sequence
  Synthetic
ugaagcuaauuccuguuau

SEQ ID NO: 371204 - RNA, 20 nt, Artificial Sequence
  Synthetic
augaagcuaauuccuguuau

SEQ ID NO: 371205 - RNA, 21 nt, Artificial Sequence
  Synthetic
uaugaagcuaauuccuguuau

SEQ ID NO: 371206 - RNA, 22 nt, Artificial Sequence
  Synthetic
auaugaagcuaauuccuguuau

SEQ ID NO: 371207 - RNA, 23 nt, Artificial Sequence
  Synthetic
aauaugaagcuaauuccuguuau

SEQ ID NO: 371208 - RNA, 24 nt, Artificial Sequence
  Synthetic
aaauaugaagcuaauuccuguuau

SEQ ID NO: 371209 - RNA, 18 nt, Artificial Sequence
  Synthetic
cauccugauagcuguuau

SEQ ID NO: 371210 - RNA, 19 nt, Artificial Sequence
  Synthetic
ucauccugauagcuguuau

SEQ ID NO: 371211 - RNA, 20 nt, Artificial Sequence
  Synthetic
uucauccugauagcuguuau

SEQ ID NO: 371212 - RNA, 21 nt, Artificial Sequence
  Synthetic
cuucauccugauagcuguuau

SEQ ID NO: 371213 - RNA, 22 nt, Artificial Sequence
  Synthetic
ucuucauccugauagcuguuau

SEQ ID NO: 371214 - RNA, 23 nt, Artificial Sequence
  Synthetic
uucuucauccugauagcuguuau

SEQ ID NO: 371215 - RNA, 24 nt, Artificial Sequence
  Synthetic
auucuucauccugauagcuguuau

SEQ ID NO: 371216 - RNA, 18 nt, Artificial Sequence
  Synthetic
auggaaauguucuguuau

SEQ ID NO: 371217 - RNA, 19 nt, Artificial Sequence
  Synthetic
aauggaaauguucuguuau

SEQ ID NO: 371218 - RNA, 20 nt, Artificial Sequence
  Synthetic
uaauggaaauguucuguuau

SEQ ID NO: 371219 - RNA, 21 nt, Artificial Sequence
  Synthetic
uuaauggaaauguucuguuau

SEQ ID NO: 371220 - RNA, 22 nt, Artificial Sequence
  Synthetic
cuuaauggaaauguucuguuau

SEQ ID NO: 371221 - RNA, 23 nt, Artificial Sequence
  Synthetic
ccuuaauggaaauguucuguuau

SEQ ID NO: 371222 - RNA, 24 nt, Artificial Sequence
  Synthetic
accuuaauggaaauguucuguuau

SEQ ID NO: 371223 - RNA, 18 nt, Artificial Sequence
  Synthetic
aucuuaacaaaguguuau

SEQ ID NO: 371224 - RNA, 19 nt, Artificial Sequence
  Synthetic
aaucuuaacaaaguguuau

SEQ ID NO: 371225 - RNA, 20 nt, Artificial Sequence
  Synthetic
aaaucuuaacaaaguguuau

SEQ ID NO: 371226 - RNA, 21 nt, Artificial Sequence
  Synthetic
aaaaucuuaacaaaguguuau

SEQ ID NO: 371227 - RNA, 22 nt, Artificial Sequence
  Synthetic
uaaaaucuuaacaaaguguuau

SEQ ID NO: 371228 - RNA, 23 nt, Artificial Sequence
  Synthetic
uuaaaaucuuaacaaaguguuau

SEQ ID NO: 371229 - RNA, 24 nt, Artificial Sequence
  Synthetic
uuuaaaaucuuaacaaaguguuau

SEQ ID NO: 371230 - RNA, 18 nt, Artificial Sequence
  Synthetic
uuagugauacaguguuau

SEQ ID NO: 371231 - RNA, 19 nt, Artificial Sequence
  Synthetic
uuuagugauacaguguuau

SEQ ID NO: 371232 - RNA, 20 nt, Artificial Sequence
  Synthetic
guuuagugauacaguguuau

SEQ ID NO: 371233 - RNA, 21 nt, Artificial Sequence
  Synthetic
uguuuagugauacaguguuau

SEQ ID NO: 371234 - RNA, 22 nt, Artificial Sequence
  Synthetic
cuguuuagugauacaguguuau

SEQ ID NO: 371235 - RNA, 23 nt, Artificial Sequence
  Synthetic
ucuguuuagugauacaguguuau

SEQ ID NO: 371236 - RNA, 24 nt, Artificial Sequence
  Synthetic
cucuguuuagugauacaguguuau

SEQ ID NO: 371237 - RNA, 18 nt, Artificial Sequence
  Synthetic
cagggucacugguguuau

SEQ ID NO: 371238 - RNA, 19 nt, Artificial Sequence
  Synthetic
ccagggucacugguguuau

SEQ ID NO: 371239 - RNA, 20 nt, Artificial Sequence
  Synthetic
accagggucacugguguuau

SEQ ID NO: 371240 - RNA, 21 nt, Artificial Sequence
  Synthetic
caccagggucacugguguuau

SEQ ID NO: 371241 - RNA, 22 nt, Artificial Sequence
  Synthetic
ucaccagggucacugguguuau

SEQ ID NO: 371242 - RNA, 23 nt, Artificial Sequence
  Synthetic
aucaccagggucacugguguuau

SEQ ID NO: 371243 - RNA, 24 nt, Artificial Sequence
  Synthetic
uaucaccagggucacugguguuau

SEQ ID NO: 371244 - RNA, 18 nt, Artificial Sequence
  Synthetic
uucuuagauauguguuau

SEQ ID NO: 371245 - RNA, 19 nt, Artificial Sequence
  Synthetic
cuucuuagauauguguuau

SEQ ID NO: 371246 - RNA, 20 nt, Artificial Sequence
  Synthetic
ucuucuuagauauguguuau

SEQ ID NO: 371247 - RNA, 21 nt, Artificial Sequence
  Synthetic
uucuucuuagauauguguuau

SEQ ID NO: 371248 - RNA, 22 nt, Artificial Sequence
  Synthetic
uuucuucuuagauauguguuau

SEQ ID NO: 371249 - RNA, 23 nt, Artificial Sequence
  Synthetic
cuuucuucuuagauauguguuau

SEQ ID NO: 371250 - RNA, 24 nt, Artificial Sequence
  Synthetic
gcuuucuucuuagauauguguuau

SEQ ID NO: 371251 - RNA, 18 nt, Artificial Sequence
  Synthetic
aacucucaaacuuguuau

SEQ ID NO: 371252 - RNA, 19 nt, Artificial Sequence
  Synthetic
uaacucucaaacuuguuau

SEQ ID NO: 371253 - RNA, 20 nt, Artificial Sequence
  Synthetic
guaacucucaaacuuguuau

SEQ ID NO: 371254 - RNA, 21 nt, Artificial Sequence
  Synthetic
gguaacucucaaacuuguuau

SEQ ID NO: 371255 - RNA, 22 nt, Artificial Sequence
  Synthetic
ggguaacucucaaacuuguuau

SEQ ID NO: 371256 - RNA, 23 nt, Artificial Sequence
  Synthetic
aggguaacucucaaacuuguuau

SEQ ID NO: 371257 - RNA, 24 nt, Artificial Sequence
  Synthetic
caggguaacucucaaacuuguuau

SEQ ID NO: 371258 - RNA, 18 nt, Artificial Sequence
  Synthetic
ccuugauucacuuguuau

SEQ ID NO: 371259 - RNA, 19 nt, Artificial Sequence
  Synthetic
uccuugauucacuuguuau

SEQ ID NO: 371260 - RNA, 20 nt, Artificial Sequence
  Synthetic
guccuugauucacuuguuau

SEQ ID NO: 371261 - RNA, 21 nt, Artificial Sequence
  Synthetic
aguccuugauucacuuguuau

SEQ ID NO: 371262 - RNA, 22 nt, Artificial Sequence
  Synthetic
gaguccuugauucacuuguuau

SEQ ID NO: 371263 - RNA, 23 nt, Artificial Sequence
  Synthetic
ggaguccuugauucacuuguuau

SEQ ID NO: 371264 - RNA, 24 nt, Artificial Sequence
  Synthetic
gggaguccuugauucacuuguuau

SEQ ID NO: 371265 - RNA, 18 nt, Artificial Sequence
  Synthetic
gacacuuccucuuguuau

SEQ ID NO: 371266 - RNA, 19 nt, Artificial Sequence
  Synthetic
ugacacuuccucuuguuau

SEQ ID NO: 371267 - RNA, 20 nt, Artificial Sequence
  Synthetic
augacacuuccucuuguuau

SEQ ID NO: 371268 - RNA, 21 nt, Artificial Sequence
  Synthetic
gaugacacuuccucuuguuau

SEQ ID NO: 371269 - RNA, 22 nt, Artificial Sequence
  Synthetic
ugaugacacuuccucuuguuau

SEQ ID NO: 371270 - RNA, 23 nt, Artificial Sequence
  Synthetic
cugaugacacuuccucuuguuau

SEQ ID NO: 371271 - RNA, 24 nt, Artificial Sequence
  Synthetic
ucugaugacacuuccucuuguuau

SEQ ID NO: 371272 - RNA, 18 nt, Artificial Sequence
  Synthetic
guuaaaaggaguuguuau

SEQ ID NO: 371273 - RNA, 19 nt, Artificial Sequence
  Synthetic
uguuaaaaggaguuguuau

SEQ ID NO: 371274 - RNA, 20 nt, Artificial Sequence
  Synthetic
auguuaaaaggaguuguuau

SEQ ID NO: 371275 - RNA, 21 nt, Artificial Sequence
  Synthetic
gauguuaaaaggaguuguuau

SEQ ID NO: 371276 - RNA, 22 nt, Artificial Sequence
  Synthetic
ggauguuaaaaggaguuguuau

SEQ ID NO: 371277 - RNA, 23 nt, Artificial Sequence
  Synthetic
aggauguuaaaaggaguuguuau

SEQ ID NO: 371278 - RNA, 24 nt, Artificial Sequence
  Synthetic
aaggauguuaaaaggaguuguuau

SEQ ID NO: 371279 - RNA, 18 nt, Artificial Sequence
  Synthetic
aaagaagugcuuuguuau

SEQ ID NO: 371280 - RNA, 19 nt, Artificial Sequence
  Synthetic
aaaagaagugcuuuguuau

SEQ ID NO: 371281 - RNA, 20 nt, Artificial Sequence
  Synthetic
caaaagaagugcuuuguuau

SEQ ID NO: 371282 - RNA, 21 nt, Artificial Sequence
  Synthetic
ccaaaagaagugcuuuguuau

SEQ ID NO: 371283 - RNA, 22 nt, Artificial Sequence
  Synthetic
accaaaagaagugcuuuguuau

SEQ ID NO: 371284 - RNA, 23 nt, Artificial Sequence
  Synthetic
gaccaaaagaagugcuuuguuau

SEQ ID NO: 371285 - RNA, 24 nt, Artificial Sequence
  Synthetic
agaccaaaagaagugcuuuguuau

SEQ ID NO: 371286 - RNA, 18 nt, Artificial Sequence
  Synthetic
uucucuuaaaaaauuuau

SEQ ID NO: 371287 - RNA, 19 nt, Artificial Sequence
  Synthetic
uuucucuuaaaaaauuuau

SEQ ID NO: 371288 - RNA, 20 nt, Artificial Sequence
  Synthetic
uuuucucuuaaaaaauuuau

SEQ ID NO: 371289 - RNA, 21 nt, Artificial Sequence
  Synthetic
uuuuucucuuaaaaaauuuau

SEQ ID NO: 371290 - RNA, 22 nt, Artificial Sequence
  Synthetic
auuuuucucuuaaaaaauuuau

SEQ ID NO: 371291 - RNA, 23 nt, Artificial Sequence
  Synthetic
cauuuuucucuuaaaaaauuuau

SEQ ID NO: 371292 - RNA, 24 nt, Artificial Sequence
  Synthetic
acauuuuucucuuaaaaaauuuau

SEQ ID NO: 371293 - RNA, 18 nt, Artificial Sequence
  Synthetic
cacauuuacaaaauuuau

SEQ ID NO: 371294 - RNA, 19 nt, Artificial Sequence
  Synthetic
ucacauuuacaaaauuuau

SEQ ID NO: 371295 - RNA, 20 nt, Artificial Sequence
  Synthetic
uucacauuuacaaaauuuau

SEQ ID NO: 371296 - RNA, 21 nt, Artificial Sequence
  Synthetic
uuucacauuuacaaaauuuau

SEQ ID NO: 371297 - RNA, 22 nt, Artificial Sequence
  Synthetic
cuuucacauuuacaaaauuuau

SEQ ID NO: 371298 - RNA, 23 nt, Artificial Sequence
  Synthetic
ucuuucacauuuacaaaauuuau

SEQ ID NO: 371299 - RNA, 24 nt, Artificial Sequence
  Synthetic
uucuuucacauuuacaaaauuuau

SEQ ID NO: 371300 - RNA, 18 nt, Artificial Sequence
  Synthetic
aggcugcacuaaauuuau

SEQ ID NO: 371301 - RNA, 19 nt, Artificial Sequence
  Synthetic
uaggcugcacuaaauuuau

SEQ ID NO: 371302 - RNA, 20 nt, Artificial Sequence
  Synthetic
uuaggcugcacuaaauuuau

SEQ ID NO: 371303 - RNA, 21 nt, Artificial Sequence
  Synthetic
guuaggcugcacuaaauuuau

SEQ ID NO: 371304 - RNA, 22 nt, Artificial Sequence
  Synthetic
aguuaggcugcacuaaauuuau

SEQ ID NO: 371305 - RNA, 23 nt, Artificial Sequence
  Synthetic
uaguuaggcugcacuaaauuuau

SEQ ID NO: 371306 - RNA, 24 nt, Artificial Sequence
  Synthetic
auaguuaggcugcacuaaauuuau

SEQ ID NO: 371307 - RNA, 18 nt, Artificial Sequence
  Synthetic
acucaaucuuaaauuuau

SEQ ID NO: 371308 - RNA, 19 nt, Artificial Sequence
  Synthetic
aacucaaucuuaaauuuau

SEQ ID NO: 371309 - RNA, 20 nt, Artificial Sequence
  Synthetic
uaacucaaucuuaaauuuau

SEQ ID NO: 371310 - RNA, 21 nt, Artificial Sequence
  Synthetic
uuaacucaaucuuaaauuuau

SEQ ID NO: 371311 - RNA, 22 nt, Artificial Sequence
  Synthetic
uuuaacucaaucuuaaauuuau

SEQ ID NO: 371312 - RNA, 23 nt, Artificial Sequence
  Synthetic
auuuaacucaaucuuaaauuuau

SEQ ID NO: 371313 - RNA, 24 nt, Artificial Sequence
  Synthetic
aauuuaacucaaucuuaaauuuau

SEQ ID NO: 371314 - RNA, 18 nt, Artificial Sequence
  Synthetic
gcaagaacaagaauuuau

SEQ ID NO: 371315 - RNA, 19 nt, Artificial Sequence
  Synthetic
ugcaagaacaagaauuuau

SEQ ID NO: 371316 - RNA, 20 nt, Artificial Sequence
  Synthetic
gugcaagaacaagaauuuau

SEQ ID NO: 371317 - RNA, 21 nt, Artificial Sequence
  Synthetic
ugugcaagaacaagaauuuau

SEQ ID NO: 371318 - RNA, 22 nt, Artificial Sequence
  Synthetic
uugugcaagaacaagaauuuau

SEQ ID NO: 371319 - RNA, 23 nt, Artificial Sequence
  Synthetic
auugugcaagaacaagaauuuau

SEQ ID NO: 371320 - RNA, 24 nt, Artificial Sequence
  Synthetic
gauugugcaagaacaagaauuuau

SEQ ID NO: 371321 - RNA, 18 nt, Artificial Sequence
  Synthetic
ucaacugaaauaauuuau

SEQ ID NO: 371322 - RNA, 19 nt, Artificial Sequence
  Synthetic
uucaacugaaauaauuuau

SEQ ID NO: 371323 - RNA, 20 nt, Artificial Sequence
  Synthetic
guucaacugaaauaauuuau

SEQ ID NO: 371324 - RNA, 21 nt, Artificial Sequence
  Synthetic
gguucaacugaaauaauuuau

SEQ ID NO: 371325 - RNA, 22 nt, Artificial Sequence
  Synthetic
agguucaacugaaauaauuuau

SEQ ID NO: 371326 - RNA, 23 nt, Artificial Sequence
  Synthetic
gagguucaacugaaauaauuuau

SEQ ID NO: 371327 - RNA, 24 nt, Artificial Sequence
  Synthetic
ugagguucaacugaaauaauuuau

SEQ ID NO: 371328 - RNA, 18 nt, Artificial Sequence
  Synthetic
uuuuauaggguaauuuau

SEQ ID NO: 371329 - RNA, 19 nt, Artificial Sequence
  Synthetic
guuuuauaggguaauuuau

SEQ ID NO: 371330 - RNA, 20 nt, Artificial Sequence
  Synthetic
aguuuuauaggguaauuuau

SEQ ID NO: 371331 - RNA, 21 nt, Artificial Sequence
  Synthetic
aaguuuuauaggguaauuuau

SEQ ID NO: 371332 - RNA, 22 nt, Artificial Sequence
  Synthetic
gaaguuuuauaggguaauuuau

SEQ ID NO: 371333 - RNA, 23 nt, Artificial Sequence
  Synthetic
ggaaguuuuauaggguaauuuau

SEQ ID NO: 371334 - RNA, 24 nt, Artificial Sequence
  Synthetic
uggaaguuuuauaggguaauuuau

SEQ ID NO: 371335 - RNA, 18 nt, Artificial Sequence
  Synthetic
gaccuaacuaacauuuau

SEQ ID NO: 371336 - RNA, 19 nt, Artificial Sequence
  Synthetic
ugaccuaacuaacauuuau

SEQ ID NO: 371337 - RNA, 20 nt, Artificial Sequence
  Synthetic
uugaccuaacuaacauuuau

SEQ ID NO: 371338 - RNA, 21 nt, Artificial Sequence
  Synthetic
cuugaccuaacuaacauuuau

SEQ ID NO: 371339 - RNA, 22 nt, Artificial Sequence
  Synthetic
gcuugaccuaacuaacauuuau

SEQ ID NO: 371340 - RNA, 23 nt, Artificial Sequence
  Synthetic
agcuugaccuaacuaacauuuau

SEQ ID NO: 371341 - RNA, 24 nt, Artificial Sequence
  Synthetic
cagcuugaccuaacuaacauuuau

SEQ ID NO: 371342 - RNA, 18 nt, Artificial Sequence
  Synthetic
acuaccaauuccauuuau

SEQ ID NO: 371343 - RNA, 19 nt, Artificial Sequence
  Synthetic
uacuaccaauuccauuuau

SEQ ID NO: 371344 - RNA, 20 nt, Artificial Sequence
  Synthetic
uuacuaccaauuccauuuau

SEQ ID NO: 371345 - RNA, 21 nt, Artificial Sequence
  Synthetic
uuuacuaccaauuccauuuau

SEQ ID NO: 371346 - RNA, 22 nt, Artificial Sequence
  Synthetic
uuuuacuaccaauuccauuuau

SEQ ID NO: 371347 - RNA, 23 nt, Artificial Sequence
  Synthetic
auuuuacuaccaauuccauuuau

SEQ ID NO: 371348 - RNA, 24 nt, Artificial Sequence
  Synthetic
aauuuuacuaccaauuccauuuau

SEQ ID NO: 371349 - RNA, 18 nt, Artificial Sequence
  Synthetic
cugaaugauuccauuuau

SEQ ID NO: 371350 - RNA, 19 nt, Artificial Sequence
  Synthetic
acugaaugauuccauuuau

SEQ ID NO: 371351 - RNA, 20 nt, Artificial Sequence
  Synthetic
uacugaaugauuccauuuau

SEQ ID NO: 371352 - RNA, 21 nt, Artificial Sequence
  Synthetic
auacugaaugauuccauuuau

SEQ ID NO: 371353 - RNA, 22 nt, Artificial Sequence
  Synthetic
aauacugaaugauuccauuuau

SEQ ID NO: 371354 - RNA, 23 nt, Artificial Sequence
  Synthetic
aaauacugaaugauuccauuuau

SEQ ID NO: 371355 - RNA, 24 nt, Artificial Sequence
  Synthetic
caaauacugaaugauuccauuuau

SEQ ID NO: 371356 - RNA, 18 nt, Artificial Sequence
  Synthetic
uugguacuuugcauuuau

SEQ ID NO: 371357 - RNA, 19 nt, Artificial Sequence
  Synthetic
auugguacuuugcauuuau

SEQ ID NO: 371358 - RNA, 20 nt, Artificial Sequence
  Synthetic
aauugguacuuugcauuuau

SEQ ID NO: 371359 - RNA, 21 nt, Artificial Sequence
  Synthetic
gaauugguacuuugcauuuau

SEQ ID NO: 371360 - RNA, 22 nt, Artificial Sequence
  Synthetic
ggaauugguacuuugcauuuau

SEQ ID NO: 371361 - RNA, 23 nt, Artificial Sequence
  Synthetic
gggaauugguacuuugcauuuau

SEQ ID NO: 371362 - RNA, 24 nt, Artificial Sequence
  Synthetic
agggaauugguacuuugcauuuau

SEQ ID NO: 371363 - RNA, 18 nt, Artificial Sequence
  Synthetic
uaguaccgcaucauuuau

SEQ ID NO: 371364 - RNA, 19 nt, Artificial Sequence
  Synthetic
auaguaccgcaucauuuau

SEQ ID NO: 371365 - RNA, 20 nt, Artificial Sequence
  Synthetic
aauaguaccgcaucauuuau

SEQ ID NO: 371366 - RNA, 21 nt, Artificial Sequence
  Synthetic
aaauaguaccgcaucauuuau

SEQ ID NO: 371367 - RNA, 22 nt, Artificial Sequence
  Synthetic
uaaauaguaccgcaucauuuau

SEQ ID NO: 371368 - RNA, 23 nt, Artificial Sequence
  Synthetic
cuaaauaguaccgcaucauuuau

SEQ ID NO: 371369 - RNA, 24 nt, Artificial Sequence
  Synthetic
gcuaaauaguaccgcaucauuuau

SEQ ID NO: 371370 - RNA, 18 nt, Artificial Sequence
  Synthetic
uuugcuucauucauuuau

SEQ ID NO: 371371 - RNA, 19 nt, Artificial Sequence
  Synthetic
auuugcuucauucauuuau

SEQ ID NO: 371372 - RNA, 20 nt, Artificial Sequence
  Synthetic
cauuugcuucauucauuuau

SEQ ID NO: 371373 - RNA, 21 nt, Artificial Sequence
  Synthetic
ucauuugcuucauucauuuau

SEQ ID NO: 371374 - RNA, 22 nt, Artificial Sequence
  Synthetic
uucauuugcuucauucauuuau

SEQ ID NO: 371375 - RNA, 23 nt, Artificial Sequence
  Synthetic
uuucauuugcuucauucauuuau

SEQ ID NO: 371376 - RNA, 24 nt, Artificial Sequence
  Synthetic
uuuucauuugcuucauucauuuau

SEQ ID NO: 371377 - RNA, 18 nt, Artificial Sequence
  Synthetic
uugguguaaaggauuuau

SEQ ID NO: 371378 - RNA, 19 nt, Artificial Sequence
  Synthetic
guugguguaaaggauuuau

SEQ ID NO: 371379 - RNA, 20 nt, Artificial Sequence
  Synthetic
aguugguguaaaggauuuau

SEQ ID NO: 371380 - RNA, 21 nt, Artificial Sequence
  Synthetic
gaguugguguaaaggauuuau

SEQ ID NO: 371381 - RNA, 22 nt, Artificial Sequence
  Synthetic
agaguugguguaaaggauuuau

SEQ ID NO: 371382 - RNA, 23 nt, Artificial Sequence
  Synthetic
uagaguugguguaaaggauuuau

SEQ ID NO: 371383 - RNA, 24 nt, Artificial Sequence
  Synthetic
auagaguugguguaaaggauuuau

SEQ ID NO: 371384 - RNA, 18 nt, Artificial Sequence
  Synthetic
uaguuaacauggauuuau

SEQ ID NO: 371385 - RNA, 19 nt, Artificial Sequence
  Synthetic
cuaguuaacauggauuuau

SEQ ID NO: 371386 - RNA, 20 nt, Artificial Sequence
  Synthetic
ccuaguuaacauggauuuau

SEQ ID NO: 371387 - RNA, 21 nt, Artificial Sequence
  Synthetic
uccuaguuaacauggauuuau

SEQ ID NO: 371388 - RNA, 22 nt, Artificial Sequence
  Synthetic
auccuaguuaacauggauuuau

SEQ ID NO: 371389 - RNA, 23 nt, Artificial Sequence
  Synthetic
aauccuaguuaacauggauuuau

SEQ ID NO: 371390 - RNA, 24 nt, Artificial Sequence
  Synthetic
aaauccuaguuaacauggauuuau

SEQ ID NO: 371391 - RNA, 18 nt, Artificial Sequence
  Synthetic
uaagagcaagugauuuau

SEQ ID NO: 371392 - RNA, 19 nt, Artificial Sequence
  Synthetic
uuaagagcaagugauuuau

SEQ ID NO: 371393 - RNA, 20 nt, Artificial Sequence
  Synthetic
uuuaagagcaagugauuuau

SEQ ID NO: 371394 - RNA, 21 nt, Artificial Sequence
  Synthetic
uuuuaagagcaagugauuuau

SEQ ID NO: 371395 - RNA, 22 nt, Artificial Sequence
  Synthetic
guuuuaagagcaagugauuuau

SEQ ID NO: 371396 - RNA, 23 nt, Artificial Sequence
  Synthetic
gguuuuaagagcaagugauuuau

SEQ ID NO: 371397 - RNA, 24 nt, Artificial Sequence
  Synthetic
agguuuuaagagcaagugauuuau

SEQ ID NO: 371398 - RNA, 18 nt, Artificial Sequence
  Synthetic
cauuguuaggugauuuau

SEQ ID NO: 371399 - RNA, 19 nt, Artificial Sequence
  Synthetic
gcauuguuaggugauuuau

SEQ ID NO: 371400 - RNA, 20 nt, Artificial Sequence
  Synthetic
ugcauuguuaggugauuuau

SEQ ID NO: 371401 - RNA, 21 nt, Artificial Sequence
  Synthetic
uugcauuguuaggugauuuau

SEQ ID NO: 371402 - RNA, 22 nt, Artificial Sequence
  Synthetic
guugcauuguuaggugauuuau

SEQ ID NO: 371403 - RNA, 23 nt, Artificial Sequence
  Synthetic
aguugcauuguuaggugauuuau

SEQ ID NO: 371404 - RNA, 24 nt, Artificial Sequence
  Synthetic
aaguugcauuguuaggugauuuau

SEQ ID NO: 371405 - RNA, 18 nt, Artificial Sequence
  Synthetic
auuucugauuugauuuau

SEQ ID NO: 371406 - RNA, 19 nt, Artificial Sequence
  Synthetic
gauuucugauuugauuuau

SEQ ID NO: 371407 - RNA, 20 nt, Artificial Sequence
  Synthetic
ugauuucugauuugauuuau

SEQ ID NO: 371408 - RNA, 21 nt, Artificial Sequence
  Synthetic
uugauuucugauuugauuuau

SEQ ID NO: 371409 - RNA, 22 nt, Artificial Sequence
  Synthetic
uuugauuucugauuugauuuau

SEQ ID NO: 371410 - RNA, 23 nt, Artificial Sequence
  Synthetic
cuuugauuucugauuugauuuau

SEQ ID NO: 371411 - RNA, 24 nt, Artificial Sequence
  Synthetic
ucuuugauuucugauuugauuuau

SEQ ID NO: 371412 - RNA, 18 nt, Artificial Sequence
  Synthetic
uucaugugccauauuuau

SEQ ID NO: 371413 - RNA, 19 nt, Artificial Sequence
  Synthetic
uuucaugugccauauuuau

SEQ ID NO: 371414 - RNA, 20 nt, Artificial Sequence
  Synthetic
uuuucaugugccauauuuau

SEQ ID NO: 371415 - RNA, 21 nt, Artificial Sequence
  Synthetic
uuuuucaugugccauauuuau

SEQ ID NO: 371416 - RNA, 22 nt, Artificial Sequence
  Synthetic
auuuuucaugugccauauuuau

SEQ ID NO: 371417 - RNA, 23 nt, Artificial Sequence
  Synthetic
uauuuuucaugugccauauuuau

SEQ ID NO: 371418 - RNA, 24 nt, Artificial Sequence
  Synthetic
auauuuuucaugugccauauuuau

SEQ ID NO: 371419 - RNA, 18 nt, Artificial Sequence
  Synthetic
uuauuuuuauauauuuau

SEQ ID NO: 371420 - RNA, 19 nt, Artificial Sequence
  Synthetic
uuuauuuuuauauauuuau

SEQ ID NO: 371421 - RNA, 20 nt, Artificial Sequence
  Synthetic
auuuauuuuuauauauuuau

SEQ ID NO: 371422 - RNA, 21 nt, Artificial Sequence
  Synthetic
aauuuauuuuuauauauuuau

SEQ ID NO: 371423 - RNA, 22 nt, Artificial Sequence
  Synthetic
gaauuuauuuuuauauauuuau

SEQ ID NO: 371424 - RNA, 23 nt, Artificial Sequence
  Synthetic
ggaauuuauuuuuauauauuuau

SEQ ID NO: 371425 - RNA, 24 nt, Artificial Sequence
  Synthetic
aggaauuuauuuuuauauauuuau

SEQ ID NO: 371426 - RNA, 18 nt, Artificial Sequence
  Synthetic
uuauaaaauuauauuuau

SEQ ID NO: 371427 - RNA, 19 nt, Artificial Sequence
  Synthetic
uuuauaaaauuauauuuau

SEQ ID NO: 371428 - RNA, 20 nt, Artificial Sequence
  Synthetic
cuuuauaaaauuauauuuau

SEQ ID NO: 371429 - RNA, 21 nt, Artificial Sequence
  Synthetic
ucuuuauaaaauuauauuuau

SEQ ID NO: 371430 - RNA, 22 nt, Artificial Sequence
  Synthetic
uucuuuauaaaauuauauuuau

SEQ ID NO: 371431 - RNA, 23 nt, Artificial Sequence
  Synthetic
auucuuuauaaaauuauauuuau

SEQ ID NO: 371432 - RNA, 24 nt, Artificial Sequence
  Synthetic
aauucuuuauaaaauuauauuuau

SEQ ID NO: 371433 - RNA, 18 nt, Artificial Sequence
  Synthetic
aguauuguugcuauuuau

SEQ ID NO: 371434 - RNA, 19 nt, Artificial Sequence
  Synthetic
aaguauuguugcuauuuau

SEQ ID NO: 371435 - RNA, 20 nt, Artificial Sequence
  Synthetic
gaaguauuguugcuauuuau

SEQ ID NO: 371436 - RNA, 21 nt, Artificial Sequence
  Synthetic
agaaguauuguugcuauuuau

SEQ ID NO: 371437 - RNA, 22 nt, Artificial Sequence
  Synthetic
gagaaguauuguugcuauuuau

SEQ ID NO: 371438 - RNA, 23 nt, Artificial Sequence
  Synthetic
ugagaaguauuguugcuauuuau

SEQ ID NO: 371439 - RNA, 24 nt, Artificial Sequence
  Synthetic
uugagaaguauuguugcuauuuau

SEQ ID NO: 371440 - RNA, 18 nt, Artificial Sequence
  Synthetic
uuuaaaaaaauuauuuau

SEQ ID NO: 371441 - RNA, 19 nt, Artificial Sequence
  Synthetic
cuuuaaaaaaauuauuuau

SEQ ID NO: 371442 - RNA, 20 nt, Artificial Sequence
  Synthetic
acuuuaaaaaaauuauuuau

SEQ ID NO: 371443 - RNA, 21 nt, Artificial Sequence
  Synthetic
aacuuuaaaaaaauuauuuau

SEQ ID NO: 371444 - RNA, 22 nt, Artificial Sequence
  Synthetic
gaacuuuaaaaaaauuauuuau

SEQ ID NO: 371445 - RNA, 23 nt, Artificial Sequence
  Synthetic
ggaacuuuaaaaaaauuauuuau

SEQ ID NO: 371446 - RNA, 24 nt, Artificial Sequence
  Synthetic
uggaacuuuaaaaaaauuauuuau

SEQ ID NO: 371447 - RNA, 18 nt, Artificial Sequence
  Synthetic
uaauuauuugaacuuuau

SEQ ID NO: 371448 - RNA, 19 nt, Artificial Sequence
  Synthetic
uuaauuauuugaacuuuau

SEQ ID NO: 371449 - RNA, 20 nt, Artificial Sequence
  Synthetic
uuuaauuauuugaacuuuau

SEQ ID NO: 371450 - RNA, 21 nt, Artificial Sequence
  Synthetic
guuuaauuauuugaacuuuau

SEQ ID NO: 371451 - RNA, 22 nt, Artificial Sequence
  Synthetic
uguuuaauuauuugaacuuuau

SEQ ID NO: 371452 - RNA, 23 nt, Artificial Sequence
  Synthetic
uuguuuaauuauuugaacuuuau

SEQ ID NO: 371453 - RNA, 24 nt, Artificial Sequence
  Synthetic
auuguuuaauuauuugaacuuuau

SEQ ID NO: 371454 - RNA, 18 nt, Artificial Sequence
  Synthetic
uucagacacuaacuuuau

SEQ ID NO: 371455 - RNA, 19 nt, Artificial Sequence
  Synthetic
uuucagacacuaacuuuau

SEQ ID NO: 371456 - RNA, 20 nt, Artificial Sequence
  Synthetic
uuuucagacacuaacuuuau

SEQ ID NO: 371457 - RNA, 21 nt, Artificial Sequence
  Synthetic
guuuucagacacuaacuuuau

SEQ ID NO: 371458 - RNA, 22 nt, Artificial Sequence
  Synthetic
gguuuucagacacuaacuuuau

SEQ ID NO: 371459 - RNA, 23 nt, Artificial Sequence
  Synthetic
agguuuucagacacuaacuuuau

SEQ ID NO: 371460 - RNA, 24 nt, Artificial Sequence
  Synthetic
uagguuuucagacacuaacuuuau

SEQ ID NO: 371461 - RNA, 18 nt, Artificial Sequence
  Synthetic
cucccauuccuacuuuau

SEQ ID NO: 371462 - RNA, 19 nt, Artificial Sequence
  Synthetic
ucucccauuccuacuuuau

SEQ ID NO: 371463 - RNA, 20 nt, Artificial Sequence
  Synthetic
cucucccauuccuacuuuau

SEQ ID NO: 371464 - RNA, 21 nt, Artificial Sequence
  Synthetic
ucucucccauuccuacuuuau

SEQ ID NO: 371465 - RNA, 22 nt, Artificial Sequence
  Synthetic
aucucucccauuccuacuuuau

SEQ ID NO: 371466 - RNA, 23 nt, Artificial Sequence
  Synthetic
uaucucucccauuccuacuuuau

SEQ ID NO: 371467 - RNA, 24 nt, Artificial Sequence
  Synthetic
cuaucucucccauuccuacuuuau

SEQ ID NO: 371468 - RNA, 18 nt, Artificial Sequence
  Synthetic
cuuuucuuuuuacuuuau

SEQ ID NO: 371469 - RNA, 19 nt, Artificial Sequence
  Synthetic
ucuuuucuuuuuacuuuau

SEQ ID NO: 371470 - RNA, 20 nt, Artificial Sequence
  Synthetic
uucuuuucuuuuuacuuuau

SEQ ID NO: 371471 - RNA, 21 nt, Artificial Sequence
  Synthetic
uuucuuuucuuuuuacuuuau

SEQ ID NO: 371472 - RNA, 22 nt, Artificial Sequence
  Synthetic
guuucuuuucuuuuuacuuuau

SEQ ID NO: 371473 - RNA, 23 nt, Artificial Sequence
  Synthetic
uguuucuuuucuuuuuacuuuau

SEQ ID NO: 371474 - RNA, 24 nt, Artificial Sequence
  Synthetic
uuguuucuuuucuuuuuacuuuau

SEQ ID NO: 371475 - RNA, 18 nt, Artificial Sequence
  Synthetic
gcagaugccugccuuuau

SEQ ID NO: 371476 - RNA, 19 nt, Artificial Sequence
  Synthetic
ggcagaugccugccuuuau

SEQ ID NO: 371477 - RNA, 20 nt, Artificial Sequence
  Synthetic
aggcagaugccugccuuuau

SEQ ID NO: 371478 - RNA, 21 nt, Artificial Sequence
  Synthetic
gaggcagaugccugccuuuau

SEQ ID NO: 371479 - RNA, 22 nt, Artificial Sequence
  Synthetic
ggaggcagaugccugccuuuau

SEQ ID NO: 371480 - RNA, 23 nt, Artificial Sequence
  Synthetic
gggaggcagaugccugccuuuau

SEQ ID NO: 371481 - RNA, 24 nt, Artificial Sequence
  Synthetic
agggaggcagaugccugccuuuau

SEQ ID NO: 371482 - RNA, 18 nt, Artificial Sequence
  Synthetic
uaguuagggcuccuuuau

SEQ ID NO: 371483 - RNA, 19 nt, Artificial Sequence
  Synthetic
cuaguuagggcuccuuuau

SEQ ID NO: 371484 - RNA, 20 nt, Artificial Sequence
  Synthetic
ucuaguuagggcuccuuuau

SEQ ID NO: 371485 - RNA, 21 nt, Artificial Sequence
  Synthetic
aucuaguuagggcuccuuuau

SEQ ID NO: 371486 - RNA, 22 nt, Artificial Sequence
  Synthetic
gaucuaguuagggcuccuuuau

SEQ ID NO: 371487 - RNA, 23 nt, Artificial Sequence
  Synthetic
ggaucuaguuagggcuccuuuau

SEQ ID NO: 371488 - RNA, 24 nt, Artificial Sequence
  Synthetic
uggaucuaguuagggcuccuuuau

SEQ ID NO: 371489 - RNA, 18 nt, Artificial Sequence
  Synthetic
aaaagauaagagcuuuau

SEQ ID NO: 371490 - RNA, 19 nt, Artificial Sequence
  Synthetic
caaaagauaagagcuuuau

SEQ ID NO: 371491 - RNA, 20 nt, Artificial Sequence
  Synthetic
ccaaaagauaagagcuuuau

SEQ ID NO: 371492 - RNA, 21 nt, Artificial Sequence
  Synthetic
cccaaaagauaagagcuuuau

SEQ ID NO: 371493 - RNA, 22 nt, Artificial Sequence
  Synthetic
ccccaaaagauaagagcuuuau

SEQ ID NO: 371494 - RNA, 23 nt, Artificial Sequence
  Synthetic
uccccaaaagauaagagcuuuau

SEQ ID NO: 371495 - RNA, 24 nt, Artificial Sequence
  Synthetic
cuccccaaaagauaagagcuuuau

SEQ ID NO: 371496 - RNA, 18 nt, Artificial Sequence
  Synthetic
cucauauuagagcuuuau

SEQ ID NO: 371497 - RNA, 19 nt, Artificial Sequence
  Synthetic
ucucauauuagagcuuuau

SEQ ID NO: 371498 - RNA, 20 nt, Artificial Sequence
  Synthetic
uucucauauuagagcuuuau

SEQ ID NO: 371499 - RNA, 21 nt, Artificial Sequence
  Synthetic
uuucucauauuagagcuuuau

SEQ ID NO: 371500 - RNA, 22 nt, Artificial Sequence
  Synthetic
guuucucauauuagagcuuuau

SEQ ID NO: 371501 - RNA, 23 nt, Artificial Sequence
  Synthetic
uguuucucauauuagagcuuuau

SEQ ID NO: 371502 - RNA, 24 nt, Artificial Sequence
  Synthetic
auguuucucauauuagagcuuuau

SEQ ID NO: 371503 - RNA, 18 nt, Artificial Sequence
  Synthetic
aguaucaagaaucuuuau

SEQ ID NO: 371504 - RNA, 19 nt, Artificial Sequence
  Synthetic
aaguaucaagaaucuuuau

SEQ ID NO: 371505 - RNA, 20 nt, Artificial Sequence
  Synthetic
aaaguaucaagaaucuuuau

SEQ ID NO: 371506 - RNA, 21 nt, Artificial Sequence
  Synthetic
aaaaguaucaagaaucuuuau

SEQ ID NO: 371507 - RNA, 22 nt, Artificial Sequence
  Synthetic
aaaaaguaucaagaaucuuuau

SEQ ID NO: 371508 - RNA, 23 nt, Artificial Sequence
  Synthetic
caaaaaguaucaagaaucuuuau

SEQ ID NO: 371509 - RNA, 24 nt, Artificial Sequence
  Synthetic
ucaaaaaguaucaagaaucuuuau

SEQ ID NO: 371510 - RNA, 18 nt, Artificial Sequence
  Synthetic
cuagggggaggucuuuau

SEQ ID NO: 371511 - RNA, 19 nt, Artificial Sequence
  Synthetic
ucuagggggaggucuuuau

SEQ ID NO: 371512 - RNA, 20 nt, Artificial Sequence
  Synthetic
gucuagggggaggucuuuau

SEQ ID NO: 371513 - RNA, 21 nt, Artificial Sequence
  Synthetic
ggucuagggggaggucuuuau

SEQ ID NO: 371514 - RNA, 22 nt, Artificial Sequence
  Synthetic
uggucuagggggaggucuuuau

SEQ ID NO: 371515 - RNA, 23 nt, Artificial Sequence
  Synthetic
cuggucuagggggaggucuuuau

SEQ ID NO: 371516 - RNA, 24 nt, Artificial Sequence
  Synthetic
acuggucuagggggaggucuuuau

SEQ ID NO: 371517 - RNA, 18 nt, Artificial Sequence
  Synthetic
agggaaaagggucuuuau

SEQ ID NO: 371518 - RNA, 19 nt, Artificial Sequence
  Synthetic
gagggaaaagggucuuuau

SEQ ID NO: 371519 - RNA, 20 nt, Artificial Sequence
  Synthetic
ugagggaaaagggucuuuau

SEQ ID NO: 371520 - RNA, 21 nt, Artificial Sequence
  Synthetic
augagggaaaagggucuuuau

SEQ ID NO: 371521 - RNA, 22 nt, Artificial Sequence
  Synthetic
aaugagggaaaagggucuuuau

SEQ ID NO: 371522 - RNA, 23 nt, Artificial Sequence
  Synthetic
gaaugagggaaaagggucuuuau

SEQ ID NO: 371523 - RNA, 24 nt, Artificial Sequence
  Synthetic
ggaaugagggaaaagggucuuuau

SEQ ID NO: 371524 - RNA, 18 nt, Artificial Sequence
  Synthetic
gugugcaugugucuuuau

SEQ ID NO: 371525 - RNA, 19 nt, Artificial Sequence
  Synthetic
cgugugcaugugucuuuau

SEQ ID NO: 371526 - RNA, 20 nt, Artificial Sequence
  Synthetic
acgugugcaugugucuuuau

SEQ ID NO: 371527 - RNA, 18 nt, Artificial Sequence
  Synthetic
cuaucuauauuucuuuau

SEQ ID NO: 371528 - RNA, 19 nt, Artificial Sequence
  Synthetic
ccuaucuauauuucuuuau

SEQ ID NO: 371529 - RNA, 20 nt, Artificial Sequence
  Synthetic
uccuaucuauauuucuuuau

SEQ ID NO: 371530 - RNA, 21 nt, Artificial Sequence
  Synthetic
auccuaucuauauuucuuuau

SEQ ID NO: 371531 - RNA, 22 nt, Artificial Sequence
  Synthetic
aauccuaucuauauuucuuuau

SEQ ID NO: 371532 - RNA, 23 nt, Artificial Sequence
  Synthetic
uaauccuaucuauauuucuuuau

SEQ ID NO: 371533 - RNA, 24 nt, Artificial Sequence
  Synthetic
cuaauccuaucuauauuucuuuau

SEQ ID NO: 371534 - RNA, 18 nt, Artificial Sequence
  Synthetic
ucuaaagcuaaaguuuau

SEQ ID NO: 371535 - RNA, 19 nt, Artificial Sequence
  Synthetic
gucuaaagcuaaaguuuau

SEQ ID NO: 371536 - RNA, 20 nt, Artificial Sequence
  Synthetic
cgucuaaagcuaaaguuuau

SEQ ID NO: 371537 - RNA, 21 nt, Artificial Sequence
  Synthetic
ccgucuaaagcuaaaguuuau

SEQ ID NO: 371538 - RNA, 22 nt, Artificial Sequence
  Synthetic
accgucuaaagcuaaaguuuau

SEQ ID NO: 371539 - RNA, 23 nt, Artificial Sequence
  Synthetic
caccgucuaaagcuaaaguuuau

SEQ ID NO: 371540 - RNA, 24 nt, Artificial Sequence
  Synthetic
ccaccgucuaaagcuaaaguuuau

SEQ ID NO: 371541 - RNA, 18 nt, Artificial Sequence
  Synthetic
aggugaaggucaguuuau

SEQ ID NO: 371542 - RNA, 19 nt, Artificial Sequence
  Synthetic
gaggugaaggucaguuuau

SEQ ID NO: 371543 - RNA, 20 nt, Artificial Sequence
  Synthetic
agaggugaaggucaguuuau

SEQ ID NO: 371544 - RNA, 21 nt, Artificial Sequence
  Synthetic
uagaggugaaggucaguuuau

SEQ ID NO: 371545 - RNA, 22 nt, Artificial Sequence
  Synthetic
auagaggugaaggucaguuuau

SEQ ID NO: 371546 - RNA, 23 nt, Artificial Sequence
  Synthetic
aauagaggugaaggucaguuuau

SEQ ID NO: 371547 - RNA, 24 nt, Artificial Sequence
  Synthetic
gaauagaggugaaggucaguuuau

SEQ ID NO: 371548 - RNA, 18 nt, Artificial Sequence
  Synthetic
ccguuuugcagaguuuau

SEQ ID NO: 371549 - RNA, 19 nt, Artificial Sequence
  Synthetic
uccguuuugcagaguuuau

SEQ ID NO: 371550 - RNA, 20 nt, Artificial Sequence
  Synthetic
uuccguuuugcagaguuuau

SEQ ID NO: 371551 - RNA, 21 nt, Artificial Sequence
  Synthetic
auuccguuuugcagaguuuau

SEQ ID NO: 371552 - RNA, 22 nt, Artificial Sequence
  Synthetic
aauuccguuuugcagaguuuau

SEQ ID NO: 371553 - RNA, 23 nt, Artificial Sequence
  Synthetic
aaauuccguuuugcagaguuuau

SEQ ID NO: 371554 - RNA, 24 nt, Artificial Sequence
  Synthetic
caaauuccguuuugcagaguuuau

SEQ ID NO: 371555 - RNA, 18 nt, Artificial Sequence
  Synthetic
acuggauucauaguuuau

SEQ ID NO: 371556 - RNA, 19 nt, Artificial Sequence
  Synthetic
aacuggauucauaguuuau

SEQ ID NO: 371557 - RNA, 20 nt, Artificial Sequence
  Synthetic
aaacuggauucauaguuuau

SEQ ID NO: 371558 - RNA, 21 nt, Artificial Sequence
  Synthetic
caaacuggauucauaguuuau

SEQ ID NO: 371559 - RNA, 22 nt, Artificial Sequence
  Synthetic
ucaaacuggauucauaguuuau

SEQ ID NO: 371560 - RNA, 23 nt, Artificial Sequence
  Synthetic
uucaaacuggauucauaguuuau

SEQ ID NO: 371561 - RNA, 24 nt, Artificial Sequence
  Synthetic
guucaaacuggauucauaguuuau

SEQ ID NO: 371562 - RNA, 18 nt, Artificial Sequence
  Synthetic
aacguaugauggguuuau

SEQ ID NO: 371563 - RNA, 19 nt, Artificial Sequence
  Synthetic
caacguaugauggguuuau

SEQ ID NO: 371564 - RNA, 20 nt, Artificial Sequence
  Synthetic
ucaacguaugauggguuuau

SEQ ID NO: 371565 - RNA, 21 nt, Artificial Sequence
  Synthetic
uucaacguaugauggguuuau

SEQ ID NO: 371566 - RNA, 22 nt, Artificial Sequence
  Synthetic
uuucaacguaugauggguuuau

SEQ ID NO: 371567 - RNA, 23 nt, Artificial Sequence
  Synthetic
uuuucaacguaugauggguuuau

SEQ ID NO: 371568 - RNA, 24 nt, Artificial Sequence
  Synthetic
guuuucaacguaugauggguuuau

SEQ ID NO: 371569 - RNA, 18 nt, Artificial Sequence
  Synthetic
guugaaaccaugguuuau

SEQ ID NO: 371570 - RNA, 19 nt, Artificial Sequence
  Synthetic
uguugaaaccaugguuuau

SEQ ID NO: 371571 - RNA, 20 nt, Artificial Sequence
  Synthetic
uuguugaaaccaugguuuau

SEQ ID NO: 371572 - RNA, 21 nt, Artificial Sequence
  Synthetic
auuguugaaaccaugguuuau

SEQ ID NO: 371573 - RNA, 22 nt, Artificial Sequence
  Synthetic
aauuguugaaaccaugguuuau

SEQ ID NO: 371574 - RNA, 23 nt, Artificial Sequence
  Synthetic
gaauuguugaaaccaugguuuau

SEQ ID NO: 371575 - RNA, 24 nt, Artificial Sequence
  Synthetic
ugaauuguugaaaccaugguuuau

SEQ ID NO: 371576 - RNA, 18 nt, Artificial Sequence
  Synthetic
caguggcaugugguuuau

SEQ ID NO: 371577 - RNA, 19 nt, Artificial Sequence
  Synthetic
ucaguggcaugugguuuau

SEQ ID NO: 371578 - RNA, 20 nt, Artificial Sequence
  Synthetic
uucaguggcaugugguuuau

SEQ ID NO: 371579 - RNA, 21 nt, Artificial Sequence
  Synthetic
auucaguggcaugugguuuau

SEQ ID NO: 371580 - RNA, 22 nt, Artificial Sequence
  Synthetic
gauucaguggcaugugguuuau

SEQ ID NO: 371581 - RNA, 23 nt, Artificial Sequence
  Synthetic
ugauucaguggcaugugguuuau

SEQ ID NO: 371582 - RNA, 24 nt, Artificial Sequence
  Synthetic
cugauucaguggcaugugguuuau

SEQ ID NO: 371583 - RNA, 18 nt, Artificial Sequence
  Synthetic
aaauguaacaauguuuau

SEQ ID NO: 371584 - RNA, 19 nt, Artificial Sequence
  Synthetic
uaaauguaacaauguuuau

SEQ ID NO: 371585 - RNA, 20 nt, Artificial Sequence
  Synthetic
cuaaauguaacaauguuuau

SEQ ID NO: 371586 - RNA, 21 nt, Artificial Sequence
  Synthetic
ccuaaauguaacaauguuuau

SEQ ID NO: 371587 - RNA, 22 nt, Artificial Sequence
  Synthetic
accuaaauguaacaauguuuau

SEQ ID NO: 371588 - RNA, 23 nt, Artificial Sequence
  Synthetic
uaccuaaauguaacaauguuuau

SEQ ID NO: 371589 - RNA, 24 nt, Artificial Sequence
  Synthetic
uuaccuaaauguaacaauguuuau

SEQ ID NO: 371590 - RNA, 18 nt, Artificial Sequence
  Synthetic
agagcuugcuauguuuau

SEQ ID NO: 371591 - RNA, 19 nt, Artificial Sequence
  Synthetic
aagagcuugcuauguuuau

SEQ ID NO: 371592 - RNA, 20 nt, Artificial Sequence
  Synthetic
aaagagcuugcuauguuuau

SEQ ID NO: 371593 - RNA, 21 nt, Artificial Sequence
  Synthetic
aaaagagcuugcuauguuuau

SEQ ID NO: 371594 - RNA, 22 nt, Artificial Sequence
  Synthetic
caaaagagcuugcuauguuuau

SEQ ID NO: 371595 - RNA, 23 nt, Artificial Sequence
  Synthetic
ucaaaagagcuugcuauguuuau

SEQ ID NO: 371596 - RNA, 24 nt, Artificial Sequence
  Synthetic
aucaaaagagcuugcuauguuuau

SEQ ID NO: 371597 - RNA, 18 nt, Artificial Sequence
  Synthetic
aauugaauggcuguuuau

SEQ ID NO: 371598 - RNA, 19 nt, Artificial Sequence
  Synthetic
uaauugaauggcuguuuau

SEQ ID NO: 371599 - RNA, 20 nt, Artificial Sequence
  Synthetic
auaauugaauggcuguuuau

SEQ ID NO: 371600 - RNA, 21 nt, Artificial Sequence
  Synthetic
cauaauugaauggcuguuuau

SEQ ID NO: 371601 - RNA, 22 nt, Artificial Sequence
  Synthetic
gcauaauugaauggcuguuuau

SEQ ID NO: 371602 - RNA, 23 nt, Artificial Sequence
  Synthetic
agcauaauugaauggcuguuuau

SEQ ID NO: 371603 - RNA, 24 nt, Artificial Sequence
  Synthetic
gagcauaauugaauggcuguuuau

SEQ ID NO: 371604 - RNA, 18 nt, Artificial Sequence
  Synthetic
uguauuuuaaaauuuuau

SEQ ID NO: 371605 - RNA, 19 nt, Artificial Sequence
  Synthetic
guguauuuuaaaauuuuau

SEQ ID NO: 371606 - RNA, 20 nt, Artificial Sequence
  Synthetic
aguguauuuuaaaauuuuau

SEQ ID NO: 371607 - RNA, 21 nt, Artificial Sequence
  Synthetic
aaguguauuuuaaaauuuuau

SEQ ID NO: 371608 - RNA, 22 nt, Artificial Sequence
  Synthetic
aaaguguauuuuaaaauuuuau

SEQ ID NO: 371609 - RNA, 23 nt, Artificial Sequence
  Synthetic
aaaaguguauuuuaaaauuuuau

SEQ ID NO: 371610 - RNA, 24 nt, Artificial Sequence
  Synthetic
gaaaaguguauuuuaaaauuuuau

SEQ ID NO: 371611 - RNA, 18 nt, Artificial Sequence
  Synthetic
cuguagcaccaauuuuau

SEQ ID NO: 371612 - RNA, 19 nt, Artificial Sequence
  Synthetic
ucuguagcaccaauuuuau

SEQ ID NO: 371613 - RNA, 20 nt, Artificial Sequence
  Synthetic
uucuguagcaccaauuuuau

SEQ ID NO: 371614 - RNA, 21 nt, Artificial Sequence
  Synthetic
uuucuguagcaccaauuuuau

SEQ ID NO: 371615 - RNA, 22 nt, Artificial Sequence
  Synthetic
auuucuguagcaccaauuuuau

SEQ ID NO: 371616 - RNA, 23 nt, Artificial Sequence
  Synthetic
uauuucuguagcaccaauuuuau

SEQ ID NO: 371617 - RNA, 24 nt, Artificial Sequence
  Synthetic
uuauuucuguagcaccaauuuuau

SEQ ID NO: 371618 - RNA, 18 nt, Artificial Sequence
  Synthetic
agcaugaaggaauuuuau

SEQ ID NO: 371619 - RNA, 19 nt, Artificial Sequence
  Synthetic
uagcaugaaggaauuuuau

SEQ ID NO: 371620 - RNA, 20 nt, Artificial Sequence
  Synthetic
uuagcaugaaggaauuuuau

SEQ ID NO: 371621 - RNA, 21 nt, Artificial Sequence
  Synthetic
auuagcaugaaggaauuuuau

SEQ ID NO: 371622 - RNA, 22 nt, Artificial Sequence
  Synthetic
gauuagcaugaaggaauuuuau

SEQ ID NO: 371623 - RNA, 23 nt, Artificial Sequence
  Synthetic
ugauuagcaugaaggaauuuuau

SEQ ID NO: 371624 - RNA, 24 nt, Artificial Sequence
  Synthetic
gugauuagcaugaaggaauuuuau

SEQ ID NO: 371625 - RNA, 18 nt, Artificial Sequence
  Synthetic
caguaugacuaauuuuau

SEQ ID NO: 371626 - RNA, 19 nt, Artificial Sequence
  Synthetic
acaguaugacuaauuuuau

SEQ ID NO: 371627 - RNA, 20 nt, Artificial Sequence
  Synthetic
cacaguaugacuaauuuuau

SEQ ID NO: 371628 - RNA, 21 nt, Artificial Sequence
  Synthetic
ccacaguaugacuaauuuuau

SEQ ID NO: 371629 - RNA, 22 nt, Artificial Sequence
  Synthetic
accacaguaugacuaauuuuau

SEQ ID NO: 371630 - RNA, 23 nt, Artificial Sequence
  Synthetic
caccacaguaugacuaauuuuau

SEQ ID NO: 371631 - RNA, 24 nt, Artificial Sequence
  Synthetic
ucaccacaguaugacuaauuuuau

SEQ ID NO: 371632 - RNA, 18 nt, Artificial Sequence
  Synthetic
agaucuuucuaauuuuau

SEQ ID NO: 371633 - RNA, 19 nt, Artificial Sequence
  Synthetic
uagaucuuucuaauuuuau

SEQ ID NO: 371634 - RNA, 20 nt, Artificial Sequence
  Synthetic
uuagaucuuucuaauuuuau

SEQ ID NO: 371635 - RNA, 21 nt, Artificial Sequence
  Synthetic
uuuagaucuuucuaauuuuau

SEQ ID NO: 371636 - RNA, 22 nt, Artificial Sequence
  Synthetic
uuuuagaucuuucuaauuuuau

SEQ ID NO: 371637 - RNA, 23 nt, Artificial Sequence
  Synthetic
auuuuagaucuuucuaauuuuau

SEQ ID NO: 371638 - RNA, 24 nt, Artificial Sequence
  Synthetic
aauuuuagaucuuucuaauuuuau

SEQ ID NO: 371639 - RNA, 18 nt, Artificial Sequence
  Synthetic
caggcaauuuaauuuuau

SEQ ID NO: 371640 - RNA, 19 nt, Artificial Sequence
  Synthetic
acaggcaauuuaauuuuau

SEQ ID NO: 371641 - RNA, 20 nt, Artificial Sequence
  Synthetic
gacaggcaauuuaauuuuau

SEQ ID NO: 371642 - RNA, 21 nt, Artificial Sequence
  Synthetic
ugacaggcaauuuaauuuuau

SEQ ID NO: 371643 - RNA, 22 nt, Artificial Sequence
  Synthetic
augacaggcaauuuaauuuuau

SEQ ID NO: 371644 - RNA, 23 nt, Artificial Sequence
  Synthetic
uaugacaggcaauuuaauuuuau

SEQ ID NO: 371645 - RNA, 24 nt, Artificial Sequence
  Synthetic
auaugacaggcaauuuaauuuuau

SEQ ID NO: 371646 - RNA, 18 nt, Artificial Sequence
  Synthetic
aaaucaaacacauuuuau

SEQ ID NO: 371647 - RNA, 19 nt, Artificial Sequence
  Synthetic
gaaaucaaacacauuuuau

SEQ ID NO: 371648 - RNA, 20 nt, Artificial Sequence
  Synthetic
agaaaucaaacacauuuuau

SEQ ID NO: 371649 - RNA, 21 nt, Artificial Sequence
  Synthetic
gagaaaucaaacacauuuuau

SEQ ID NO: 371650 - RNA, 22 nt, Artificial Sequence
  Synthetic
agagaaaucaaacacauuuuau

SEQ ID NO: 371651 - RNA, 23 nt, Artificial Sequence
  Synthetic
uagagaaaucaaacacauuuuau

SEQ ID NO: 371652 - RNA, 24 nt, Artificial Sequence
  Synthetic
uuagagaaaucaaacacauuuuau

SEQ ID NO: 371653 - RNA, 18 nt, Artificial Sequence
  Synthetic
gcuccccaagcauuuuau

SEQ ID NO: 371654 - RNA, 19 nt, Artificial Sequence
  Synthetic
ugcuccccaagcauuuuau

SEQ ID NO: 371655 - RNA, 20 nt, Artificial Sequence
  Synthetic
uugcuccccaagcauuuuau

SEQ ID NO: 371656 - RNA, 21 nt, Artificial Sequence
  Synthetic
auugcuccccaagcauuuuau

SEQ ID NO: 371657 - RNA, 22 nt, Artificial Sequence
  Synthetic
gauugcuccccaagcauuuuau

SEQ ID NO: 371658 - RNA, 23 nt, Artificial Sequence
  Synthetic
ggauugcuccccaagcauuuuau

SEQ ID NO: 371659 - RNA, 24 nt, Artificial Sequence
  Synthetic
aggauugcuccccaagcauuuuau

SEQ ID NO: 371660 - RNA, 18 nt, Artificial Sequence
  Synthetic
ggacuagaaucauuuuau

SEQ ID NO: 371661 - RNA, 19 nt, Artificial Sequence
  Synthetic
uggacuagaaucauuuuau

SEQ ID NO: 371662 - RNA, 20 nt, Artificial Sequence
  Synthetic
auggacuagaaucauuuuau

SEQ ID NO: 371663 - RNA, 21 nt, Artificial Sequence
  Synthetic
gauggacuagaaucauuuuau

SEQ ID NO: 371664 - RNA, 22 nt, Artificial Sequence
  Synthetic
ugauggacuagaaucauuuuau

SEQ ID NO: 371665 - RNA, 23 nt, Artificial Sequence
  Synthetic
cugauggacuagaaucauuuuau

SEQ ID NO: 371666 - RNA, 24 nt, Artificial Sequence
  Synthetic
gcugauggacuagaaucauuuuau

SEQ ID NO: 371667 - RNA, 18 nt, Artificial Sequence
  Synthetic
cacagggacugauuuuau

SEQ ID NO: 371668 - RNA, 19 nt, Artificial Sequence
  Synthetic
ccacagggacugauuuuau

SEQ ID NO: 371669 - RNA, 20 nt, Artificial Sequence
  Synthetic
accacagggacugauuuuau

SEQ ID NO: 371670 - RNA, 21 nt, Artificial Sequence
  Synthetic
caccacagggacugauuuuau

SEQ ID NO: 371671 - RNA, 22 nt, Artificial Sequence
  Synthetic
ucaccacagggacugauuuuau

SEQ ID NO: 371672 - RNA, 23 nt, Artificial Sequence
  Synthetic
aucaccacagggacugauuuuau

SEQ ID NO: 371673 - RNA, 24 nt, Artificial Sequence
  Synthetic
caucaccacagggacugauuuuau

SEQ ID NO: 371674 - RNA, 18 nt, Artificial Sequence
  Synthetic
auuuaaaaaauauuuuau

SEQ ID NO: 371675 - RNA, 19 nt, Artificial Sequence
  Synthetic
aauuuaaaaaauauuuuau

SEQ ID NO: 371676 - RNA, 20 nt, Artificial Sequence
  Synthetic
gaauuuaaaaaauauuuuau

SEQ ID NO: 371677 - RNA, 21 nt, Artificial Sequence
  Synthetic
ugaauuuaaaaaauauuuuau

SEQ ID NO: 371678 - RNA, 22 nt, Artificial Sequence
  Synthetic
cugaauuuaaaaaauauuuuau

SEQ ID NO: 371679 - RNA, 23 nt, Artificial Sequence
  Synthetic
acugaauuuaaaaaauauuuuau

SEQ ID NO: 371680 - RNA, 24 nt, Artificial Sequence
  Synthetic
aacugaauuuaaaaaauauuuuau

SEQ ID NO: 371681 - RNA, 18 nt, Artificial Sequence
  Synthetic
acauuggagauauuuuau

SEQ ID NO: 371682 - RNA, 19 nt, Artificial Sequence
  Synthetic
aacauuggagauauuuuau

SEQ ID NO: 371683 - RNA, 20 nt, Artificial Sequence
  Synthetic
gaacauuggagauauuuuau

SEQ ID NO: 371684 - RNA, 21 nt, Artificial Sequence
  Synthetic
ugaacauuggagauauuuuau

SEQ ID NO: 371685 - RNA, 22 nt, Artificial Sequence
  Synthetic
uugaacauuggagauauuuuau

SEQ ID NO: 371686 - RNA, 23 nt, Artificial Sequence
  Synthetic
auugaacauuggagauauuuuau

SEQ ID NO: 371687 - RNA, 24 nt, Artificial Sequence
  Synthetic
gauugaacauuggagauauuuuau

SEQ ID NO: 371688 - RNA, 18 nt, Artificial Sequence
  Synthetic
uuggaauaacuauuuuau

SEQ ID NO: 371689 - RNA, 19 nt, Artificial Sequence
  Synthetic
cuuggaauaacuauuuuau

SEQ ID NO: 371690 - RNA, 20 nt, Artificial Sequence
  Synthetic
acuuggaauaacuauuuuau

SEQ ID NO: 371691 - RNA, 21 nt, Artificial Sequence
  Synthetic
gacuuggaauaacuauuuuau

SEQ ID NO: 371692 - RNA, 22 nt, Artificial Sequence
  Synthetic
agacuuggaauaacuauuuuau

SEQ ID NO: 371693 - RNA, 23 nt, Artificial Sequence
  Synthetic
uagacuuggaauaacuauuuuau

SEQ ID NO: 371694 - RNA, 24 nt, Artificial Sequence
  Synthetic
uuagacuuggaauaacuauuuuau

SEQ ID NO: 371695 - RNA, 18 nt, Artificial Sequence
  Synthetic
ccugcuucauuauuuuau

SEQ ID NO: 371696 - RNA, 19 nt, Artificial Sequence
  Synthetic
cccugcuucauuauuuuau

SEQ ID NO: 371697 - RNA, 20 nt, Artificial Sequence
  Synthetic
gcccugcuucauuauuuuau

SEQ ID NO: 371698 - RNA, 21 nt, Artificial Sequence
  Synthetic
ugcccugcuucauuauuuuau

SEQ ID NO: 371699 - RNA, 22 nt, Artificial Sequence
  Synthetic
uugcccugcuucauuauuuuau

SEQ ID NO: 371700 - RNA, 23 nt, Artificial Sequence
  Synthetic
uuugcccugcuucauuauuuuau

SEQ ID NO: 371701 - RNA, 24 nt, Artificial Sequence
  Synthetic
uuuugcccugcuucauuauuuuau

SEQ ID NO: 371702 - RNA, 18 nt, Artificial Sequence
  Synthetic
guaaacgaaaacuuuuau

SEQ ID NO: 371703 - RNA, 19 nt, Artificial Sequence
  Synthetic
uguaaacgaaaacuuuuau

SEQ ID NO: 371704 - RNA, 20 nt, Artificial Sequence
  Synthetic
auguaaacgaaaacuuuuau

SEQ ID NO: 371705 - RNA, 21 nt, Artificial Sequence
  Synthetic
uauguaaacgaaaacuuuuau

SEQ ID NO: 371706 - RNA, 22 nt, Artificial Sequence
  Synthetic
auauguaaacgaaaacuuuuau

SEQ ID NO: 371707 - RNA, 23 nt, Artificial Sequence
  Synthetic
gauauguaaacgaaaacuuuuau

SEQ ID NO: 371708 - RNA, 24 nt, Artificial Sequence
  Synthetic
agauauguaaacgaaaacuuuuau

SEQ ID NO: 371709 - RNA, 18 nt, Artificial Sequence
  Synthetic
cugaacucccacuuuuau

SEQ ID NO: 371710 - RNA, 19 nt, Artificial Sequence
  Synthetic
gcugaacucccacuuuuau

SEQ ID NO: 371711 - RNA, 20 nt, Artificial Sequence
  Synthetic
ggcugaacucccacuuuuau

SEQ ID NO: 371712 - RNA, 21 nt, Artificial Sequence
  Synthetic
gggcugaacucccacuuuuau

SEQ ID NO: 371713 - RNA, 22 nt, Artificial Sequence
  Synthetic
ggggcugaacucccacuuuuau

SEQ ID NO: 371714 - RNA, 23 nt, Artificial Sequence
  Synthetic
gggggcugaacucccacuuuuau

SEQ ID NO: 371715 - RNA, 24 nt, Artificial Sequence
  Synthetic
agggggcugaacucccacuuuuau

SEQ ID NO: 371716 - RNA, 18 nt, Artificial Sequence
  Synthetic
ggcagggcauacuuuuau

SEQ ID NO: 371717 - RNA, 19 nt, Artificial Sequence
  Synthetic
gggcagggcauacuuuuau

SEQ ID NO: 371718 - RNA, 20 nt, Artificial Sequence
  Synthetic
agggcagggcauacuuuuau

SEQ ID NO: 371719 - RNA, 21 nt, Artificial Sequence
  Synthetic
aagggcagggcauacuuuuau

SEQ ID NO: 371720 - RNA, 22 nt, Artificial Sequence
  Synthetic
aaagggcagggcauacuuuuau

SEQ ID NO: 371721 - RNA, 23 nt, Artificial Sequence
  Synthetic
gaaagggcagggcauacuuuuau

SEQ ID NO: 371722 - RNA, 24 nt, Artificial Sequence
  Synthetic
agaaagggcagggcauacuuuuau

SEQ ID NO: 371723 - RNA, 18 nt, Artificial Sequence
  Synthetic
cauacuggcuccuuuuau

SEQ ID NO: 371724 - RNA, 19 nt, Artificial Sequence
  Synthetic
ucauacuggcuccuuuuau

SEQ ID NO: 371725 - RNA, 20 nt, Artificial Sequence
  Synthetic
uucauacuggcuccuuuuau

SEQ ID NO: 371726 - RNA, 21 nt, Artificial Sequence
  Synthetic
guucauacuggcuccuuuuau

SEQ ID NO: 371727 - RNA, 22 nt, Artificial Sequence
  Synthetic
uguucauacuggcuccuuuuau

SEQ ID NO: 371728 - RNA, 23 nt, Artificial Sequence
  Synthetic
auguucauacuggcuccuuuuau

SEQ ID NO: 371729 - RNA, 24 nt, Artificial Sequence
  Synthetic
aauguucauacuggcuccuuuuau

SEQ ID NO: 371730 - RNA, 18 nt, Artificial Sequence
  Synthetic
agcuguucuuccuuuuau

SEQ ID NO: 371731 - RNA, 19 nt, Artificial Sequence
  Synthetic
uagcuguucuuccuuuuau

SEQ ID NO: 371732 - RNA, 20 nt, Artificial Sequence
  Synthetic
guagcuguucuuccuuuuau

SEQ ID NO: 371733 - RNA, 21 nt, Artificial Sequence
  Synthetic
uguagcuguucuuccuuuuau

SEQ ID NO: 371734 - RNA, 22 nt, Artificial Sequence
  Synthetic
uuguagcuguucuuccuuuuau

SEQ ID NO: 371735 - RNA, 23 nt, Artificial Sequence
  Synthetic
cuuguagcuguucuuccuuuuau

SEQ ID NO: 371736 - RNA, 24 nt, Artificial Sequence
  Synthetic
ccuuguagcuguucuuccuuuuau

SEQ ID NO: 371737 - RNA, 18 nt, Artificial Sequence
  Synthetic
cucugaggucucuuuuau

SEQ ID NO: 371738 - RNA, 19 nt, Artificial Sequence
  Synthetic
ucucugaggucucuuuuau

SEQ ID NO: 371739 - RNA, 20 nt, Artificial Sequence
  Synthetic
cucucugaggucucuuuuau

SEQ ID NO: 371740 - RNA, 21 nt, Artificial Sequence
  Synthetic
gcucucugaggucucuuuuau

SEQ ID NO: 371741 - RNA, 22 nt, Artificial Sequence
  Synthetic
agcucucugaggucucuuuuau

SEQ ID NO: 371742 - RNA, 23 nt, Artificial Sequence
  Synthetic
uagcucucugaggucucuuuuau

SEQ ID NO: 371743 - RNA, 24 nt, Artificial Sequence
  Synthetic
cuagcucucugaggucucuuuuau

SEQ ID NO: 371744 - RNA, 18 nt, Artificial Sequence
  Synthetic
ucacuucaggucuuuuau

SEQ ID NO: 371745 - RNA, 19 nt, Artificial Sequence
  Synthetic
aucacuucaggucuuuuau

SEQ ID NO: 371746 - RNA, 20 nt, Artificial Sequence
  Synthetic
uaucacuucaggucuuuuau

SEQ ID NO: 371747 - RNA, 21 nt, Artificial Sequence
  Synthetic
guaucacuucaggucuuuuau

SEQ ID NO: 371748 - RNA, 22 nt, Artificial Sequence
  Synthetic
uguaucacuucaggucuuuuau

SEQ ID NO: 371749 - RNA, 23 nt, Artificial Sequence
  Synthetic
auguaucacuucaggucuuuuau

SEQ ID NO: 371750 - RNA, 24 nt, Artificial Sequence
  Synthetic
aauguaucacuucaggucuuuuau

SEQ ID NO: 371751 - RNA, 18 nt, Artificial Sequence
  Synthetic
gccaaauguuucuuuuau

SEQ ID NO: 371752 - RNA, 19 nt, Artificial Sequence
  Synthetic
ggccaaauguuucuuuuau

SEQ ID NO: 371753 - RNA, 20 nt, Artificial Sequence
  Synthetic
aggccaaauguuucuuuuau

SEQ ID NO: 371754 - RNA, 21 nt, Artificial Sequence
  Synthetic
uaggccaaauguuucuuuuau

SEQ ID NO: 371755 - RNA, 22 nt, Artificial Sequence
  Synthetic
uuaggccaaauguuucuuuuau

SEQ ID NO: 371756 - RNA, 23 nt, Artificial Sequence
  Synthetic
uuuaggccaaauguuucuuuuau

SEQ ID NO: 371757 - RNA, 24 nt, Artificial Sequence
  Synthetic
cuuuaggccaaauguuucuuuuau

SEQ ID NO: 371758 - RNA, 18 nt, Artificial Sequence
  Synthetic
uuagaauguaaguuuuau

SEQ ID NO: 371759 - RNA, 19 nt, Artificial Sequence
  Synthetic
auuagaauguaaguuuuau

SEQ ID NO: 371760 - RNA, 20 nt, Artificial Sequence
  Synthetic
cauuagaauguaaguuuuau

SEQ ID NO: 371761 - RNA, 21 nt, Artificial Sequence
  Synthetic
ccauuagaauguaaguuuuau

SEQ ID NO: 371762 - RNA, 22 nt, Artificial Sequence
  Synthetic
accauuagaauguaaguuuuau

SEQ ID NO: 371763 - RNA, 23 nt, Artificial Sequence
  Synthetic
caccauuagaauguaaguuuuau

SEQ ID NO: 371764 - RNA, 24 nt, Artificial Sequence
  Synthetic
ucaccauuagaauguaaguuuuau

SEQ ID NO: 371765 - RNA, 18 nt, Artificial Sequence
  Synthetic
ugaaagcaucaguuuuau

SEQ ID NO: 371766 - RNA, 19 nt, Artificial Sequence
  Synthetic
cugaaagcaucaguuuuau

SEQ ID NO: 371767 - RNA, 20 nt, Artificial Sequence
  Synthetic
acugaaagcaucaguuuuau

SEQ ID NO: 371768 - RNA, 21 nt, Artificial Sequence
  Synthetic
uacugaaagcaucaguuuuau

SEQ ID NO: 371769 - RNA, 22 nt, Artificial Sequence
  Synthetic
uuacugaaagcaucaguuuuau

SEQ ID NO: 371770 - RNA, 23 nt, Artificial Sequence
  Synthetic
uuuacugaaagcaucaguuuuau

SEQ ID NO: 371771 - RNA, 24 nt, Artificial Sequence
  Synthetic
uuuuacugaaagcaucaguuuuau

SEQ ID NO: 371772 - RNA, 18 nt, Artificial Sequence
  Synthetic
aacauugaaggguuuuau

SEQ ID NO: 371773 - RNA, 19 nt, Artificial Sequence
  Synthetic
aaacauugaaggguuuuau

SEQ ID NO: 371774 - RNA, 20 nt, Artificial Sequence
  Synthetic
gaaacauugaaggguuuuau

SEQ ID NO: 371775 - RNA, 21 nt, Artificial Sequence
  Synthetic
ggaaacauugaaggguuuuau

SEQ ID NO: 371776 - RNA, 22 nt, Artificial Sequence
  Synthetic
gggaaacauugaaggguuuuau

SEQ ID NO: 371777 - RNA, 23 nt, Artificial Sequence
  Synthetic
agggaaacauugaaggguuuuau

SEQ ID NO: 371778 - RNA, 24 nt, Artificial Sequence
  Synthetic
uagggaaacauugaaggguuuuau

SEQ ID NO: 371779 - RNA, 18 nt, Artificial Sequence
  Synthetic
auaguuuuuggguuuuau

SEQ ID NO: 371780 - RNA, 19 nt, Artificial Sequence
  Synthetic
cauaguuuuuggguuuuau

SEQ ID NO: 371781 - RNA, 20 nt, Artificial Sequence
  Synthetic
ucauaguuuuuggguuuuau

SEQ ID NO: 371782 - RNA, 21 nt, Artificial Sequence
  Synthetic
uucauaguuuuuggguuuuau

SEQ ID NO: 371783 - RNA, 22 nt, Artificial Sequence
  Synthetic
cuucauaguuuuuggguuuuau

SEQ ID NO: 371784 - RNA, 23 nt, Artificial Sequence
  Synthetic
ucuucauaguuuuuggguuuuau

SEQ ID NO: 371785 - RNA, 24 nt, Artificial Sequence
  Synthetic
uucuucauaguuuuuggguuuuau

SEQ ID NO: 371786 - RNA, 18 nt, Artificial Sequence
  Synthetic
gagaucuguugguuuuau

SEQ ID NO: 371787 - RNA, 19 nt, Artificial Sequence
  Synthetic
cgagaucuguugguuuuau

SEQ ID NO: 371788 - RNA, 20 nt, Artificial Sequence
  Synthetic
acgagaucuguugguuuuau

SEQ ID NO: 371789 - RNA, 21 nt, Artificial Sequence
  Synthetic
cacgagaucuguugguuuuau

SEQ ID NO: 371790 - RNA, 22 nt, Artificial Sequence
  Synthetic
ucacgagaucuguugguuuuau

SEQ ID NO: 371791 - RNA, 23 nt, Artificial Sequence
  Synthetic
cucacgagaucuguugguuuuau

SEQ ID NO: 371792 - RNA, 24 nt, Artificial Sequence
  Synthetic
ucucacgagaucuguugguuuuau

SEQ ID NO: 371793 - RNA, 18 nt, Artificial Sequence
  Synthetic
guuuaaagucuguuuuau

SEQ ID NO: 371794 - RNA, 19 nt, Artificial Sequence
  Synthetic
gguuuaaagucuguuuuau

SEQ ID NO: 371795 - RNA, 20 nt, Artificial Sequence
  Synthetic
ugguuuaaagucuguuuuau

SEQ ID NO: 371796 - RNA, 21 nt, Artificial Sequence
  Synthetic
uugguuuaaagucuguuuuau

SEQ ID NO: 371797 - RNA, 22 nt, Artificial Sequence
  Synthetic
guugguuuaaagucuguuuuau

SEQ ID NO: 371798 - RNA, 23 nt, Artificial Sequence
  Synthetic
uguugguuuaaagucuguuuuau

SEQ ID NO: 371799 - RNA, 24 nt, Artificial Sequence
  Synthetic
uuguugguuuaaagucuguuuuau

SEQ ID NO: 371800 - RNA, 18 nt, Artificial Sequence
  Synthetic
cucuauacuguguuuuau

SEQ ID NO: 371801 - RNA, 19 nt, Artificial Sequence
  Synthetic
ccucuauacuguguuuuau

SEQ ID NO: 371802 - RNA, 20 nt, Artificial Sequence
  Synthetic
accucuauacuguguuuuau

SEQ ID NO: 371803 - RNA, 21 nt, Artificial Sequence
  Synthetic
aaccucuauacuguguuuuau

SEQ ID NO: 371804 - RNA, 22 nt, Artificial Sequence
  Synthetic
gaaccucuauacuguguuuuau

SEQ ID NO: 371805 - RNA, 23 nt, Artificial Sequence
  Synthetic
ugaaccucuauacuguguuuuau

SEQ ID NO: 371806 - RNA, 24 nt, Artificial Sequence
  Synthetic
uugaaccucuauacuguguuuuau

SEQ ID NO: 371807 - RNA, 18 nt, Artificial Sequence
  Synthetic
aagaucugauuguuuuau

SEQ ID NO: 371808 - RNA, 19 nt, Artificial Sequence
  Synthetic
caagaucugauuguuuuau

SEQ ID NO: 371809 - RNA, 20 nt, Artificial Sequence
  Synthetic
acaagaucugauuguuuuau

SEQ ID NO: 371810 - RNA, 21 nt, Artificial Sequence
  Synthetic
cacaagaucugauuguuuuau

SEQ ID NO: 371811 - RNA, 22 nt, Artificial Sequence
  Synthetic
ucacaagaucugauuguuuuau

SEQ ID NO: 371812 - RNA, 23 nt, Artificial Sequence
  Synthetic
cucacaagaucugauuguuuuau

SEQ ID NO: 371813 - RNA, 24 nt, Artificial Sequence
  Synthetic
ucucacaagaucugauuguuuuau

SEQ ID NO: 371814 - RNA, 18 nt, Artificial Sequence
  Synthetic
uaaagcaauuuguuuuau

SEQ ID NO: 371815 - RNA, 19 nt, Artificial Sequence
  Synthetic
guaaagcaauuuguuuuau

SEQ ID NO: 371816 - RNA, 20 nt, Artificial Sequence
  Synthetic
aguaaagcaauuuguuuuau

SEQ ID NO: 371817 - RNA, 21 nt, Artificial Sequence
  Synthetic
uaguaaagcaauuuguuuuau

SEQ ID NO: 371818 - RNA, 22 nt, Artificial Sequence
  Synthetic
uuaguaaagcaauuuguuuuau

SEQ ID NO: 371819 - RNA, 23 nt, Artificial Sequence
  Synthetic
uuuaguaaagcaauuuguuuuau

SEQ ID NO: 371820 - RNA, 24 nt, Artificial Sequence
  Synthetic
uuuuaguaaagcaauuuguuuuau

SEQ ID NO: 371821 - RNA, 18 nt, Artificial Sequence
  Synthetic
aucuuaccacauuuuuau

SEQ ID NO: 371822 - RNA, 19 nt, Artificial Sequence
  Synthetic
aaucuuaccacauuuuuau

SEQ ID NO: 371823 - RNA, 20 nt, Artificial Sequence
  Synthetic
aaaucuuaccacauuuuuau

SEQ ID NO: 371824 - RNA, 21 nt, Artificial Sequence
  Synthetic
aaaaucuuaccacauuuuuau

SEQ ID NO: 371825 - RNA, 22 nt, Artificial Sequence
  Synthetic
aaaaaucuuaccacauuuuuau

SEQ ID NO: 371826 - RNA, 23 nt, Artificial Sequence
  Synthetic
aaaaaaucuuaccacauuuuuau

SEQ ID NO: 371827 - RNA, 24 nt, Artificial Sequence
  Synthetic
aaaaaaaucuuaccacauuuuuau

SEQ ID NO: 371828 - RNA, 18 nt, Artificial Sequence
  Synthetic
ucauuugaagauuuuuau

SEQ ID NO: 371829 - RNA, 19 nt, Artificial Sequence
  Synthetic
cucauuugaagauuuuuau

SEQ ID NO: 371830 - RNA, 20 nt, Artificial Sequence
  Synthetic
gcucauuugaagauuuuuau

SEQ ID NO: 371831 - RNA, 21 nt, Artificial Sequence
  Synthetic
agcucauuugaagauuuuuau

SEQ ID NO: 371832 - RNA, 22 nt, Artificial Sequence
  Synthetic
cagcucauuugaagauuuuuau

SEQ ID NO: 371833 - RNA, 23 nt, Artificial Sequence
  Synthetic
gcagcucauuugaagauuuuuau

SEQ ID NO: 371834 - RNA, 24 nt, Artificial Sequence
  Synthetic
ugcagcucauuugaagauuuuuau

SEQ ID NO: 371835 - RNA, 18 nt, Artificial Sequence
  Synthetic
cuguaucucuauuuuuau

SEQ ID NO: 371836 - RNA, 19 nt, Artificial Sequence
  Synthetic
acuguaucucuauuuuuau

SEQ ID NO: 371837 - RNA, 20 nt, Artificial Sequence
  Synthetic
uacuguaucucuauuuuuau

SEQ ID NO: 371838 - RNA, 21 nt, Artificial Sequence
  Synthetic
uuacuguaucucuauuuuuau

SEQ ID NO: 371839 - RNA, 22 nt, Artificial Sequence
  Synthetic
auuacuguaucucuauuuuuau

SEQ ID NO: 371840 - RNA, 23 nt, Artificial Sequence
  Synthetic
aauuacuguaucucuauuuuuau

SEQ ID NO: 371841 - RNA, 24 nt, Artificial Sequence
  Synthetic
uaauuacuguaucucuauuuuuau

SEQ ID NO: 371842 - RNA, 18 nt, Artificial Sequence
  Synthetic
uuaagaugguauuuuuau

SEQ ID NO: 371843 - RNA, 19 nt, Artificial Sequence
  Synthetic
guuaagaugguauuuuuau

SEQ ID NO: 371844 - RNA, 20 nt, Artificial Sequence
  Synthetic
aguuaagaugguauuuuuau

SEQ ID NO: 371845 - RNA, 21 nt, Artificial Sequence
  Synthetic
aaguuaagaugguauuuuuau

SEQ ID NO: 371846 - RNA, 22 nt, Artificial Sequence
  Synthetic
caaguuaagaugguauuuuuau

SEQ ID NO: 371847 - RNA, 23 nt, Artificial Sequence
  Synthetic
ucaaguuaagaugguauuuuuau

SEQ ID NO: 371848 - RNA, 24 nt, Artificial Sequence
  Synthetic
gucaaguuaagaugguauuuuuau

SEQ ID NO: 371849 - RNA, 18 nt, Artificial Sequence
  Synthetic
gaaaugagcccuuuuuau

SEQ ID NO: 371850 - RNA, 19 nt, Artificial Sequence
  Synthetic
agaaaugagcccuuuuuau

SEQ ID NO: 371851 - RNA, 20 nt, Artificial Sequence
  Synthetic
aagaaaugagcccuuuuuau

SEQ ID NO: 371852 - RNA, 21 nt, Artificial Sequence
  Synthetic
uaagaaaugagcccuuuuuau

SEQ ID NO: 371853 - RNA, 22 nt, Artificial Sequence
  Synthetic
auaagaaaugagcccuuuuuau

SEQ ID NO: 371854 - RNA, 23 nt, Artificial Sequence
  Synthetic
gauaagaaaugagcccuuuuuau

SEQ ID NO: 371855 - RNA, 24 nt, Artificial Sequence
  Synthetic
agauaagaaaugagcccuuuuuau

SEQ ID NO: 371856 - RNA, 18 nt, Artificial Sequence
  Synthetic
gacaagaugccuuuuuau

SEQ ID NO: 371857 - RNA, 19 nt, Artificial Sequence
  Synthetic
ggacaagaugccuuuuuau

SEQ ID NO: 371858 - RNA, 20 nt, Artificial Sequence
  Synthetic
uggacaagaugccuuuuuau

SEQ ID NO: 371859 - RNA, 21 nt, Artificial Sequence
  Synthetic
guggacaagaugccuuuuuau

SEQ ID NO: 371860 - RNA, 22 nt, Artificial Sequence
  Synthetic
uguggacaagaugccuuuuuau

SEQ ID NO: 371861 - RNA, 23 nt, Artificial Sequence
  Synthetic
cuguggacaagaugccuuuuuau

SEQ ID NO: 371862 - RNA, 24 nt, Artificial Sequence
  Synthetic
gcuguggacaagaugccuuuuuau

SEQ ID NO: 371863 - RNA, 18 nt, Artificial Sequence
  Synthetic
aaaaggauuuguuuuuau

SEQ ID NO: 371864 - RNA, 19 nt, Artificial Sequence
  Synthetic
gaaaaggauuuguuuuuau

SEQ ID NO: 371865 - RNA, 20 nt, Artificial Sequence
  Synthetic
agaaaaggauuuguuuuuau

SEQ ID NO: 371866 - RNA, 21 nt, Artificial Sequence
  Synthetic
uagaaaaggauuuguuuuuau

SEQ ID NO: 371867 - RNA, 22 nt, Artificial Sequence
  Synthetic
guagaaaaggauuuguuuuuau

SEQ ID NO: 371868 - RNA, 23 nt, Artificial Sequence
  Synthetic
aguagaaaaggauuuguuuuuau

SEQ ID NO: 371869 - RNA, 24 nt, Artificial Sequence
  Synthetic
gaguagaaaaggauuuguuuuuau

SEQ ID NO: 371870 - RNA, 18 nt, Artificial Sequence
  Synthetic
guuuaaucaguuuuuuau

SEQ ID NO: 371871 - RNA, 19 nt, Artificial Sequence
  Synthetic
aguuuaaucaguuuuuuau

SEQ ID NO: 371872 - RNA, 20 nt, Artificial Sequence
  Synthetic
aaguuuaaucaguuuuuuau

SEQ ID NO: 371873 - RNA, 21 nt, Artificial Sequence
  Synthetic
aaaguuuaaucaguuuuuuau

SEQ ID NO: 371874 - RNA, 22 nt, Artificial Sequence
  Synthetic
caaaguuuaaucaguuuuuuau

SEQ ID NO: 371875 - RNA, 23 nt, Artificial Sequence
  Synthetic
ucaaaguuuaaucaguuuuuuau

SEQ ID NO: 371876 - RNA, 24 nt, Artificial Sequence
  Synthetic
cucaaaguuuaaucaguuuuuuau

SEQ ID NO: 371877 - RNA, 18 nt, Artificial Sequence
  Synthetic
uaaaucacuguuuuuuau

SEQ ID NO: 371878 - RNA, 19 nt, Artificial Sequence
  Synthetic
auaaaucacuguuuuuuau

SEQ ID NO: 371879 - RNA, 20 nt, Artificial Sequence
  Synthetic
aauaaaucacuguuuuuuau

SEQ ID NO: 371880 - RNA, 21 nt, Artificial Sequence
  Synthetic
uaauaaaucacuguuuuuuau

SEQ ID NO: 371881 - RNA, 22 nt, Artificial Sequence
  Synthetic
cuaauaaaucacuguuuuuuau

SEQ ID NO: 371882 - RNA, 23 nt, Artificial Sequence
  Synthetic
ccuaauaaaucacuguuuuuuau

SEQ ID NO: 371883 - RNA, 24 nt, Artificial Sequence
  Synthetic
accuaauaaaucacuguuuuuuau

SEQ ID NO: 371884 - RNA, 18 nt, Artificial Sequence
  Synthetic
aaaggugaucaaaaaacu

SEQ ID NO: 371885 - RNA, 19 nt, Artificial Sequence
  Synthetic
uaaaggugaucaaaaaacu

SEQ ID NO: 371886 - RNA, 20 nt, Artificial Sequence
  Synthetic
uuaaaggugaucaaaaaacu

SEQ ID NO: 371887 - RNA, 21 nt, Artificial Sequence
  Synthetic
guuaaaggugaucaaaaaacu

SEQ ID NO: 371888 - RNA, 22 nt, Artificial Sequence
  Synthetic
uguuaaaggugaucaaaaaacu

SEQ ID NO: 371889 - RNA, 23 nt, Artificial Sequence
  Synthetic
auguuaaaggugaucaaaaaacu

SEQ ID NO: 371890 - RNA, 24 nt, Artificial Sequence
  Synthetic
uauguuaaaggugaucaaaaaacu

SEQ ID NO: 371891 - RNA, 18 nt, Artificial Sequence
  Synthetic
aggaaagaaacaaaaacu

SEQ ID NO: 371892 - RNA, 19 nt, Artificial Sequence
  Synthetic
caggaaagaaacaaaaacu

SEQ ID NO: 371893 - RNA, 20 nt, Artificial Sequence
  Synthetic
acaggaaagaaacaaaaacu

SEQ ID NO: 371894 - RNA, 21 nt, Artificial Sequence
  Synthetic
uacaggaaagaaacaaaaacu

SEQ ID NO: 371895 - RNA, 22 nt, Artificial Sequence
  Synthetic
guacaggaaagaaacaaaaacu

SEQ ID NO: 371896 - RNA, 23 nt, Artificial Sequence
  Synthetic
uguacaggaaagaaacaaaaacu

SEQ ID NO: 371897 - RNA, 24 nt, Artificial Sequence
  Synthetic
auguacaggaaagaaacaaaaacu

SEQ ID NO: 371898 - RNA, 18 nt, Artificial Sequence
  Synthetic
uaguacagaggaaaaacu

SEQ ID NO: 371899 - RNA, 19 nt, Artificial Sequence
  Synthetic
uuaguacagaggaaaaacu

SEQ ID NO: 371900 - RNA, 20 nt, Artificial Sequence
  Synthetic
uuuaguacagaggaaaaacu

SEQ ID NO: 371901 - RNA, 21 nt, Artificial Sequence
  Synthetic
auuuaguacagaggaaaaacu

SEQ ID NO: 371902 - RNA, 22 nt, Artificial Sequence
  Synthetic
uauuuaguacagaggaaaaacu

SEQ ID NO: 371903 - RNA, 23 nt, Artificial Sequence
  Synthetic
auauuuaguacagaggaaaaacu

SEQ ID NO: 371904 - RNA, 24 nt, Artificial Sequence
  Synthetic
uauauuuaguacagaggaaaaacu

SEQ ID NO: 371905 - RNA, 18 nt, Artificial Sequence
  Synthetic
uuuucccauugaaaaacu

SEQ ID NO: 371906 - RNA, 19 nt, Artificial Sequence
  Synthetic
guuuucccauugaaaaacu

SEQ ID NO: 371907 - RNA, 20 nt, Artificial Sequence
  Synthetic
aguuuucccauugaaaaacu

SEQ ID NO: 371908 - RNA, 21 nt, Artificial Sequence
  Synthetic
caguuuucccauugaaaaacu

SEQ ID NO: 371909 - RNA, 22 nt, Artificial Sequence
  Synthetic
ccaguuuucccauugaaaaacu

SEQ ID NO: 371910 - RNA, 23 nt, Artificial Sequence
  Synthetic
accaguuuucccauugaaaaacu

SEQ ID NO: 371911 - RNA, 24 nt, Artificial Sequence
  Synthetic
aaccaguuuucccauugaaaaacu

SEQ ID NO: 371912 - RNA, 18 nt, Artificial Sequence
  Synthetic
ccauucaugauaaaaacu

SEQ ID NO: 371913 - RNA, 19 nt, Artificial Sequence
  Synthetic
uccauucaugauaaaaacu

SEQ ID NO: 371914 - RNA, 20 nt, Artificial Sequence
  Synthetic
auccauucaugauaaaaacu

SEQ ID NO: 371915 - RNA, 21 nt, Artificial Sequence
  Synthetic
cauccauucaugauaaaaacu

SEQ ID NO: 371916 - RNA, 22 nt, Artificial Sequence
  Synthetic
gcauccauucaugauaaaaacu

SEQ ID NO: 371917 - RNA, 23 nt, Artificial Sequence
  Synthetic
agcauccauucaugauaaaaacu

SEQ ID NO: 371918 - RNA, 24 nt, Artificial Sequence
  Synthetic
cagcauccauucaugauaaaaacu

SEQ ID NO: 371919 - RNA, 18 nt, Artificial Sequence
  Synthetic
caaaaaauguuaaaaacu

SEQ ID NO: 371920 - RNA, 19 nt, Artificial Sequence
  Synthetic
ucaaaaaauguuaaaaacu

SEQ ID NO: 371921 - RNA, 20 nt, Artificial Sequence
  Synthetic
aucaaaaaauguuaaaaacu

SEQ ID NO: 371922 - RNA, 21 nt, Artificial Sequence
  Synthetic
caucaaaaaauguuaaaaacu

SEQ ID NO: 371923 - RNA, 22 nt, Artificial Sequence
  Synthetic
gcaucaaaaaauguuaaaaacu

SEQ ID NO: 371924 - RNA, 23 nt, Artificial Sequence
  Synthetic
ggcaucaaaaaauguuaaaaacu

SEQ ID NO: 371925 - RNA, 24 nt, Artificial Sequence
  Synthetic
uggcaucaaaaaauguuaaaaacu

SEQ ID NO: 371926 - RNA, 18 nt, Artificial Sequence
  Synthetic
acaaggagaaacaaaacu

SEQ ID NO: 371927 - RNA, 19 nt, Artificial Sequence
  Synthetic
gacaaggagaaacaaaacu

SEQ ID NO: 371928 - RNA, 20 nt, Artificial Sequence
  Synthetic
ugacaaggagaaacaaaacu

SEQ ID NO: 371929 - RNA, 21 nt, Artificial Sequence
  Synthetic
cugacaaggagaaacaaaacu

SEQ ID NO: 371930 - RNA, 22 nt, Artificial Sequence
  Synthetic
acugacaaggagaaacaaaacu

SEQ ID NO: 371931 - RNA, 23 nt, Artificial Sequence
  Synthetic
cacugacaaggagaaacaaaacu

SEQ ID NO: 371932 - RNA, 24 nt, Artificial Sequence
  Synthetic
gcacugacaaggagaaacaaaacu

SEQ ID NO: 371933 - RNA, 18 nt, Artificial Sequence
  Synthetic
agaaccuuuagcaaaacu

SEQ ID NO: 371934 - RNA, 19 nt, Artificial Sequence
  Synthetic
aagaaccuuuagcaaaacu

SEQ ID NO: 371935 - RNA, 20 nt, Artificial Sequence
  Synthetic
aaagaaccuuuagcaaaacu

SEQ ID NO: 371936 - RNA, 21 nt, Artificial Sequence
  Synthetic
uaaagaaccuuuagcaaaacu

SEQ ID NO: 371937 - RNA, 22 nt, Artificial Sequence
  Synthetic
auaaagaaccuuuagcaaaacu

SEQ ID NO: 371938 - RNA, 23 nt, Artificial Sequence
  Synthetic
uauaaagaaccuuuagcaaaacu

SEQ ID NO: 371939 - RNA, 24 nt, Artificial Sequence
  Synthetic
auauaaagaaccuuuagcaaaacu

SEQ ID NO: 371940 - RNA, 18 nt, Artificial Sequence
  Synthetic
ggugaaaagaagaaaacu

SEQ ID NO: 371941 - RNA, 19 nt, Artificial Sequence
  Synthetic
aggugaaaagaagaaaacu

SEQ ID NO: 371942 - RNA, 20 nt, Artificial Sequence
  Synthetic
uaggugaaaagaagaaaacu

SEQ ID NO: 371943 - RNA, 21 nt, Artificial Sequence
  Synthetic
cuaggugaaaagaagaaaacu

SEQ ID NO: 371944 - RNA, 22 nt, Artificial Sequence
  Synthetic
ucuaggugaaaagaagaaaacu

SEQ ID NO: 371945 - RNA, 23 nt, Artificial Sequence
  Synthetic
aucuaggugaaaagaagaaaacu

SEQ ID NO: 371946 - RNA, 24 nt, Artificial Sequence
  Synthetic
aaucuaggugaaaagaagaaaacu

SEQ ID NO: 371947 - RNA, 18 nt, Artificial Sequence
  Synthetic
ucuaguuguaggaaaacu

SEQ ID NO: 371948 - RNA, 19 nt, Artificial Sequence
  Synthetic
aucuaguuguaggaaaacu

SEQ ID NO: 371949 - RNA, 20 nt, Artificial Sequence
  Synthetic
aaucuaguuguaggaaaacu

SEQ ID NO: 371950 - RNA, 21 nt, Artificial Sequence
  Synthetic
aaaucuaguuguaggaaaacu

SEQ ID NO: 371951 - RNA, 22 nt, Artificial Sequence
  Synthetic
aaaaucuaguuguaggaaaacu

SEQ ID NO: 371952 - RNA, 23 nt, Artificial Sequence
  Synthetic
aaaaaucuaguuguaggaaaacu

SEQ ID NO: 371953 - RNA, 24 nt, Artificial Sequence
  Synthetic
gaaaaaucuaguuguaggaaaacu

SEQ ID NO: 371954 - RNA, 18 nt, Artificial Sequence
  Synthetic
uucagagaaaugaaaacu

SEQ ID NO: 371955 - RNA, 19 nt, Artificial Sequence
  Synthetic
cuucagagaaaugaaaacu

SEQ ID NO: 371956 - RNA, 20 nt, Artificial Sequence
  Synthetic
ccuucagagaaaugaaaacu

SEQ ID NO: 371957 - RNA, 21 nt, Artificial Sequence
  Synthetic
uccuucagagaaaugaaaacu

SEQ ID NO: 371958 - RNA, 22 nt, Artificial Sequence
  Synthetic
guccuucagagaaaugaaaacu

SEQ ID NO: 371959 - RNA, 23 nt, Artificial Sequence
  Synthetic
aguccuucagagaaaugaaaacu

SEQ ID NO: 371960 - RNA, 24 nt, Artificial Sequence
  Synthetic
uaguccuucagagaaaugaaaacu

SEQ ID NO: 371961 - RNA, 18 nt, Artificial Sequence
  Synthetic
ugugaagacuugaaaacu

SEQ ID NO: 371962 - RNA, 19 nt, Artificial Sequence
  Synthetic
uugugaagacuugaaaacu

SEQ ID NO: 371963 - RNA, 20 nt, Artificial Sequence
  Synthetic
uuugugaagacuugaaaacu

SEQ ID NO: 371964 - RNA, 21 nt, Artificial Sequence
  Synthetic
auuugugaagacuugaaaacu

SEQ ID NO: 371965 - RNA, 22 nt, Artificial Sequence
  Synthetic
cauuugugaagacuugaaaacu

SEQ ID NO: 371966 - RNA, 23 nt, Artificial Sequence
  Synthetic
acauuugugaagacuugaaaacu

SEQ ID NO: 371967 - RNA, 24 nt, Artificial Sequence
  Synthetic
cacauuugugaagacuugaaaacu

SEQ ID NO: 371968 - RNA, 18 nt, Artificial Sequence
  Synthetic
aaugcugaugauaaaacu

SEQ ID NO: 371969 - RNA, 19 nt, Artificial Sequence
  Synthetic
aaaugcugaugauaaaacu

SEQ ID NO: 371970 - RNA, 20 nt, Artificial Sequence
  Synthetic
aaaaugcugaugauaaaacu

SEQ ID NO: 371971 - RNA, 21 nt, Artificial Sequence
  Synthetic
aaaaaugcugaugauaaaacu

SEQ ID NO: 371972 - RNA, 22 nt, Artificial Sequence
  Synthetic
uaaaaaugcugaugauaaaacu

SEQ ID NO: 371973 - RNA, 23 nt, Artificial Sequence
  Synthetic
cuaaaaaugcugaugauaaaacu

SEQ ID NO: 371974 - RNA, 24 nt, Artificial Sequence
  Synthetic
ucuaaaaaugcugaugauaaaacu

SEQ ID NO: 371975 - RNA, 18 nt, Artificial Sequence
  Synthetic
gggaccaccccuaaaacu

SEQ ID NO: 371976 - RNA, 19 nt, Artificial Sequence
  Synthetic
ugggaccaccccuaaaacu

SEQ ID NO: 371977 - RNA, 20 nt, Artificial Sequence
  Synthetic
cugggaccaccccuaaaacu

SEQ ID NO: 371978 - RNA, 21 nt, Artificial Sequence
  Synthetic
gcugggaccaccccuaaaacu

SEQ ID NO: 371979 - RNA, 22 nt, Artificial Sequence
  Synthetic
ggcugggaccaccccuaaaacu

SEQ ID NO: 371980 - RNA, 23 nt, Artificial Sequence
  Synthetic
uggcugggaccaccccuaaaacu

SEQ ID NO: 371981 - RNA, 24 nt, Artificial Sequence
  Synthetic
auggcugggaccaccccuaaaacu

SEQ ID NO: 371982 - RNA, 18 nt, Artificial Sequence
  Synthetic
aauaauguaucuaaaacu

SEQ ID NO: 371983 - RNA, 19 nt, Artificial Sequence
  Synthetic
gaauaauguaucuaaaacu

SEQ ID NO: 371984 - RNA, 20 nt, Artificial Sequence
  Synthetic
ugaauaauguaucuaaaacu

SEQ ID NO: 371985 - RNA, 21 nt, Artificial Sequence
  Synthetic
gugaauaauguaucuaaaacu

SEQ ID NO: 371986 - RNA, 22 nt, Artificial Sequence
  Synthetic
agugaauaauguaucuaaaacu

SEQ ID NO: 371987 - RNA, 23 nt, Artificial Sequence
  Synthetic
cagugaauaauguaucuaaaacu

SEQ ID NO: 371988 - RNA, 24 nt, Artificial Sequence
  Synthetic
acagugaauaauguaucuaaaacu

SEQ ID NO: 371989 - RNA, 18 nt, Artificial Sequence
  Synthetic
uugacuaaaauuaaaacu

SEQ ID NO: 371990 - RNA, 19 nt, Artificial Sequence
  Synthetic
auugacuaaaauuaaaacu

SEQ ID NO: 371991 - RNA, 20 nt, Artificial Sequence
  Synthetic
cauugacuaaaauuaaaacu

SEQ ID NO: 371992 - RNA, 21 nt, Artificial Sequence
  Synthetic
ucauugacuaaaauuaaaacu

SEQ ID NO: 371993 - RNA, 22 nt, Artificial Sequence
  Synthetic
aucauugacuaaaauuaaaacu

SEQ ID NO: 371994 - RNA, 23 nt, Artificial Sequence
  Synthetic
aaucauugacuaaaauuaaaacu

SEQ ID NO: 371995 - RNA, 24 nt, Artificial Sequence
  Synthetic
aaaucauugacuaaaauuaaaacu

SEQ ID NO: 371996 - RNA, 18 nt, Artificial Sequence
  Synthetic
aggcuggaucuuaaaacu

SEQ ID NO: 371997 - RNA, 19 nt, Artificial Sequence
  Synthetic
gaggcuggaucuuaaaacu

SEQ ID NO: 371998 - RNA, 20 nt, Artificial Sequence
  Synthetic
agaggcuggaucuuaaaacu

SEQ ID NO: 371999 - RNA, 21 nt, Artificial Sequence
  Synthetic
cagaggcuggaucuuaaaacu

SEQ ID NO: 372000 - RNA, 22 nt, Artificial Sequence
  Synthetic
ucagaggcuggaucuuaaaacu

SEQ ID NO: 372001 - RNA, 23 nt, Artificial Sequence
  Synthetic
aucagaggcuggaucuuaaaacu

SEQ ID NO: 372002 - RNA, 24 nt, Artificial Sequence
  Synthetic
gaucagaggcuggaucuuaaaacu

SEQ ID NO: 372003 - RNA, 18 nt, Artificial Sequence
  Synthetic
agcacaucuuuuaaaacu

SEQ ID NO: 372004 - RNA, 19 nt, Artificial Sequence
  Synthetic
aagcacaucuuuuaaaacu

SEQ ID NO: 372005 - RNA, 20 nt, Artificial Sequence
  Synthetic
aaagcacaucuuuuaaaacu

SEQ ID NO: 372006 - RNA, 21 nt, Artificial Sequence
  Synthetic
caaagcacaucuuuuaaaacu

SEQ ID NO: 372007 - RNA, 22 nt, Artificial Sequence
  Synthetic
ccaaagcacaucuuuuaaaacu

SEQ ID NO: 372008 - RNA, 23 nt, Artificial Sequence
  Synthetic
cccaaagcacaucuuuuaaaacu

SEQ ID NO: 372009 - RNA, 24 nt, Artificial Sequence
  Synthetic
acccaaagcacaucuuuuaaaacu

SEQ ID NO: 372010 - RNA, 18 nt, Artificial Sequence
  Synthetic
gugaaaugccaacaaacu

SEQ ID NO: 372011 - RNA, 19 nt, Artificial Sequence
  Synthetic
ugugaaaugccaacaaacu

SEQ ID NO: 372012 - RNA, 20 nt, Artificial Sequence
  Synthetic
uugugaaaugccaacaaacu

SEQ ID NO: 372013 - RNA, 21 nt, Artificial Sequence
  Synthetic
cuugugaaaugccaacaaacu

SEQ ID NO: 372014 - RNA, 22 nt, Artificial Sequence
  Synthetic
ucuugugaaaugccaacaaacu

SEQ ID NO: 372015 - RNA, 23 nt, Artificial Sequence
  Synthetic
uucuugugaaaugccaacaaacu

SEQ ID NO: 372016 - RNA, 24 nt, Artificial Sequence
  Synthetic
uuucuugugaaaugccaacaaacu

SEQ ID NO: 372017 - RNA, 18 nt, Artificial Sequence
  Synthetic
uucucagcaagacaaacu

SEQ ID NO: 372018 - RNA, 19 nt, Artificial Sequence
  Synthetic
uuucucagcaagacaaacu

SEQ ID NO: 372019 - RNA, 20 nt, Artificial Sequence
  Synthetic
uuuucucagcaagacaaacu

SEQ ID NO: 372020 - RNA, 21 nt, Artificial Sequence
  Synthetic
uuuuucucagcaagacaaacu

SEQ ID NO: 372021 - RNA, 22 nt, Artificial Sequence
  Synthetic
auuuuucucagcaagacaaacu

SEQ ID NO: 372022 - RNA, 23 nt, Artificial Sequence
  Synthetic
uauuuuucucagcaagacaaacu

SEQ ID NO: 372023 - RNA, 24 nt, Artificial Sequence
  Synthetic
auauuuuucucagcaagacaaacu

SEQ ID NO: 372024 - RNA, 18 nt, Artificial Sequence
  Synthetic
agggauaggauacaaacu

SEQ ID NO: 372025 - RNA, 19 nt, Artificial Sequence
  Synthetic
cagggauaggauacaaacu

SEQ ID NO: 372026 - RNA, 20 nt, Artificial Sequence
  Synthetic
gcagggauaggauacaaacu

SEQ ID NO: 372027 - RNA, 21 nt, Artificial Sequence
  Synthetic
agcagggauaggauacaaacu

SEQ ID NO: 372028 - RNA, 22 nt, Artificial Sequence
  Synthetic
aagcagggauaggauacaaacu

SEQ ID NO: 372029 - RNA, 23 nt, Artificial Sequence
  Synthetic
uaagcagggauaggauacaaacu

SEQ ID NO: 372030 - RNA, 24 nt, Artificial Sequence
  Synthetic
guaagcagggauaggauacaaacu

SEQ ID NO: 372031 - RNA, 18 nt, Artificial Sequence
  Synthetic
guuuucucuagucaaacu

SEQ ID NO: 372032 - RNA, 19 nt, Artificial Sequence
  Synthetic
uguuuucucuagucaaacu

SEQ ID NO: 372033 - RNA, 20 nt, Artificial Sequence
  Synthetic
uuguuuucucuagucaaacu

SEQ ID NO: 372034 - RNA, 21 nt, Artificial Sequence
  Synthetic
uuuguuuucucuagucaaacu

SEQ ID NO: 372035 - RNA, 22 nt, Artificial Sequence
  Synthetic
guuuguuuucucuagucaaacu

SEQ ID NO: 372036 - RNA, 23 nt, Artificial Sequence
  Synthetic
aguuuguuuucucuagucaaacu

SEQ ID NO: 372037 - RNA, 24 nt, Artificial Sequence
  Synthetic
uaguuuguuuucucuagucaaacu

SEQ ID NO: 372038 - RNA, 18 nt, Artificial Sequence
  Synthetic
gcuuagacuuuucaaacu

SEQ ID NO: 372039 - RNA, 19 nt, Artificial Sequence
  Synthetic
ggcuuagacuuuucaaacu

SEQ ID NO: 372040 - RNA, 20 nt, Artificial Sequence
  Synthetic
aggcuuagacuuuucaaacu

SEQ ID NO: 372041 - RNA, 21 nt, Artificial Sequence
  Synthetic
caggcuuagacuuuucaaacu

SEQ ID NO: 372042 - RNA, 22 nt, Artificial Sequence
  Synthetic
ccaggcuuagacuuuucaaacu

SEQ ID NO: 372043 - RNA, 23 nt, Artificial Sequence
  Synthetic
accaggcuuagacuuuucaaacu

SEQ ID NO: 372044 - RNA, 24 nt, Artificial Sequence
  Synthetic
uaccaggcuuagacuuuucaaacu

SEQ ID NO: 372045 - RNA, 18 nt, Artificial Sequence
  Synthetic
gaagaacaagaagaaacu

SEQ ID NO: 372046 - RNA, 19 nt, Artificial Sequence
  Synthetic
ugaagaacaagaagaaacu

SEQ ID NO: 372047 - RNA, 20 nt, Artificial Sequence
  Synthetic
augaagaacaagaagaaacu

SEQ ID NO: 372048 - RNA, 21 nt, Artificial Sequence
  Synthetic
caugaagaacaagaagaaacu

SEQ ID NO: 372049 - RNA, 22 nt, Artificial Sequence
  Synthetic
ucaugaagaacaagaagaaacu

SEQ ID NO: 372050 - RNA, 23 nt, Artificial Sequence
  Synthetic
gucaugaagaacaagaagaaacu

SEQ ID NO: 372051 - RNA, 24 nt, Artificial Sequence
  Synthetic
ggucaugaagaacaagaagaaacu

SEQ ID NO: 372052 - RNA, 18 nt, Artificial Sequence
  Synthetic
acuggaugagaagaaacu

SEQ ID NO: 372053 - RNA, 19 nt, Artificial Sequence
  Synthetic
gacuggaugagaagaaacu

SEQ ID NO: 372054 - RNA, 20 nt, Artificial Sequence
  Synthetic
ugacuggaugagaagaaacu

SEQ ID NO: 372055 - RNA, 21 nt, Artificial Sequence
  Synthetic
gugacuggaugagaagaaacu

SEQ ID NO: 372056 - RNA, 22 nt, Artificial Sequence
  Synthetic
ugugacuggaugagaagaaacu

SEQ ID NO: 372057 - RNA, 23 nt, Artificial Sequence
  Synthetic
uugugacuggaugagaagaaacu

SEQ ID NO: 372058 - RNA, 24 nt, Artificial Sequence
  Synthetic
auugugacuggaugagaagaaacu

SEQ ID NO: 372059 - RNA, 18 nt, Artificial Sequence
  Synthetic
gcacaaaaagcagaaacu

SEQ ID NO: 372060 - RNA, 19 nt, Artificial Sequence
  Synthetic
agcacaaaaagcagaaacu

SEQ ID NO: 372061 - RNA, 20 nt, Artificial Sequence
  Synthetic
cagcacaaaaagcagaaacu

SEQ ID NO: 372062 - RNA, 21 nt, Artificial Sequence
  Synthetic
gcagcacaaaaagcagaaacu

SEQ ID NO: 372063 - RNA, 22 nt, Artificial Sequence
  Synthetic
agcagcacaaaaagcagaaacu

SEQ ID NO: 372064 - RNA, 23 nt, Artificial Sequence
  Synthetic
aagcagcacaaaaagcagaaacu

SEQ ID NO: 372065 - RNA, 24 nt, Artificial Sequence
  Synthetic
aaagcagcacaaaaagcagaaacu

SEQ ID NO: 372066 - RNA, 18 nt, Artificial Sequence
  Synthetic
uggcaaaagucagaaacu

SEQ ID NO: 372067 - RNA, 19 nt, Artificial Sequence
  Synthetic
cuggcaaaagucagaaacu

SEQ ID NO: 372068 - RNA, 20 nt, Artificial Sequence
  Synthetic
gcuggcaaaagucagaaacu

SEQ ID NO: 372069 - RNA, 21 nt, Artificial Sequence
  Synthetic
ggcuggcaaaagucagaaacu

SEQ ID NO: 372070 - RNA, 22 nt, Artificial Sequence
  Synthetic
uggcuggcaaaagucagaaacu

SEQ ID NO: 372071 - RNA, 23 nt, Artificial Sequence
  Synthetic
auggcuggcaaaagucagaaacu

SEQ ID NO: 372072 - RNA, 24 nt, Artificial Sequence
  Synthetic
aauggcuggcaaaagucagaaacu

SEQ ID NO: 372073 - RNA, 18 nt, Artificial Sequence
  Synthetic
uuuugaaagggagaaacu

SEQ ID NO: 372074 - RNA, 19 nt, Artificial Sequence
  Synthetic
guuuugaaagggagaaacu

SEQ ID NO: 372075 - RNA, 20 nt, Artificial Sequence
  Synthetic
uguuuugaaagggagaaacu

SEQ ID NO: 372076 - RNA, 21 nt, Artificial Sequence
  Synthetic
uuguuuugaaagggagaaacu

SEQ ID NO: 372077 - RNA, 22 nt, Artificial Sequence
  Synthetic
cuuguuuugaaagggagaaacu

SEQ ID NO: 372078 - RNA, 23 nt, Artificial Sequence
  Synthetic
ucuuguuuugaaagggagaaacu

SEQ ID NO: 372079 - RNA, 24 nt, Artificial Sequence
  Synthetic
uucuuguuuugaaagggagaaacu

SEQ ID NO: 372080 - RNA, 18 nt, Artificial Sequence
  Synthetic
auggcaacaguagaaacu

SEQ ID NO: 372081 - RNA, 19 nt, Artificial Sequence
  Synthetic
gauggcaacaguagaaacu

SEQ ID NO: 372082 - RNA, 20 nt, Artificial Sequence
  Synthetic
agauggcaacaguagaaacu

SEQ ID NO: 372083 - RNA, 21 nt, Artificial Sequence
  Synthetic
aagauggcaacaguagaaacu

SEQ ID NO: 372084 - RNA, 22 nt, Artificial Sequence
  Synthetic
gaagauggcaacaguagaaacu

SEQ ID NO: 372085 - RNA, 23 nt, Artificial Sequence
  Synthetic
ugaagauggcaacaguagaaacu

SEQ ID NO: 372086 - RNA, 24 nt, Artificial Sequence
  Synthetic
uugaagauggcaacaguagaaacu

SEQ ID NO: 372087 - RNA, 18 nt, Artificial Sequence
  Synthetic
ugauauaagguagaaacu

SEQ ID NO: 372088 - RNA, 19 nt, Artificial Sequence
  Synthetic
uugauauaagguagaaacu

SEQ ID NO: 372089 - RNA, 20 nt, Artificial Sequence
  Synthetic
auugauauaagguagaaacu

SEQ ID NO: 372090 - RNA, 21 nt, Artificial Sequence
  Synthetic
gauugauauaagguagaaacu

SEQ ID NO: 372091 - RNA, 22 nt, Artificial Sequence
  Synthetic
ggauugauauaagguagaaacu

SEQ ID NO: 372092 - RNA, 23 nt, Artificial Sequence
  Synthetic
cggauugauauaagguagaaacu

SEQ ID NO: 372093 - RNA, 24 nt, Artificial Sequence
  Synthetic
ucggauugauauaagguagaaacu

SEQ ID NO: 372094 - RNA, 18 nt, Artificial Sequence
  Synthetic
uuuuaagacgaggaaacu

SEQ ID NO: 372095 - RNA, 19 nt, Artificial Sequence
  Synthetic
auuuuaagacgaggaaacu

SEQ ID NO: 372096 - RNA, 20 nt, Artificial Sequence
  Synthetic
aauuuuaagacgaggaaacu

SEQ ID NO: 372097 - RNA, 21 nt, Artificial Sequence
  Synthetic
uaauuuuaagacgaggaaacu

SEQ ID NO: 372098 - RNA, 22 nt, Artificial Sequence
  Synthetic
cuaauuuuaagacgaggaaacu

SEQ ID NO: 372099 - RNA, 23 nt, Artificial Sequence
  Synthetic
ucuaauuuuaagacgaggaaacu

SEQ ID NO: 372100 - RNA, 24 nt, Artificial Sequence
  Synthetic
uucuaauuuuaagacgaggaaacu

SEQ ID NO: 372101 - RNA, 18 nt, Artificial Sequence
  Synthetic
uuuaucccuugggaaacu

SEQ ID NO: 372102 - RNA, 19 nt, Artificial Sequence
  Synthetic
cuuuaucccuugggaaacu

SEQ ID NO: 372103 - RNA, 20 nt, Artificial Sequence
  Synthetic
gcuuuaucccuugggaaacu

SEQ ID NO: 372104 - RNA, 21 nt, Artificial Sequence
  Synthetic
agcuuuaucccuugggaaacu

SEQ ID NO: 372105 - RNA, 22 nt, Artificial Sequence
  Synthetic
gagcuuuaucccuugggaaacu

SEQ ID NO: 372106 - RNA, 23 nt, Artificial Sequence
  Synthetic
ggagcuuuaucccuugggaaacu

SEQ ID NO: 372107 - RNA, 24 nt, Artificial Sequence
  Synthetic
uggagcuuuaucccuugggaaacu

SEQ ID NO: 372108 - RNA, 18 nt, Artificial Sequence
  Synthetic
cuagcucugaaugaaacu

SEQ ID NO: 372109 - RNA, 19 nt, Artificial Sequence
  Synthetic
gcuagcucugaaugaaacu

SEQ ID NO: 372110 - RNA, 20 nt, Artificial Sequence
  Synthetic
agcuagcucugaaugaaacu

SEQ ID NO: 372111 - RNA, 21 nt, Artificial Sequence
  Synthetic
cagcuagcucugaaugaaacu

SEQ ID NO: 372112 - RNA, 22 nt, Artificial Sequence
  Synthetic
ccagcuagcucugaaugaaacu

SEQ ID NO: 372113 - RNA, 23 nt, Artificial Sequence
  Synthetic
accagcuagcucugaaugaaacu

SEQ ID NO: 372114 - RNA, 24 nt, Artificial Sequence
  Synthetic
uaccagcuagcucugaaugaaacu

SEQ ID NO: 372115 - RNA, 18 nt, Artificial Sequence
  Synthetic
uuugccuuagaugaaacu

SEQ ID NO: 372116 - RNA, 19 nt, Artificial Sequence
  Synthetic
cuuugccuuagaugaaacu

SEQ ID NO: 372117 - RNA, 20 nt, Artificial Sequence
  Synthetic
gcuuugccuuagaugaaacu

SEQ ID NO: 372118 - RNA, 21 nt, Artificial Sequence
  Synthetic
ugcuuugccuuagaugaaacu

SEQ ID NO: 372119 - RNA, 22 nt, Artificial Sequence
  Synthetic
uugcuuugccuuagaugaaacu

SEQ ID NO: 372120 - RNA, 23 nt, Artificial Sequence
  Synthetic
cuugcuuugccuuagaugaaacu

SEQ ID NO: 372121 - RNA, 24 nt, Artificial Sequence
  Synthetic
acuugcuuugccuuagaugaaacu

SEQ ID NO: 372122 - RNA, 18 nt, Artificial Sequence
  Synthetic
aauguuagaacugaaacu

SEQ ID NO: 372123 - RNA, 19 nt, Artificial Sequence
  Synthetic
aaauguuagaacugaaacu

SEQ ID NO: 372124 - RNA, 20 nt, Artificial Sequence
  Synthetic
caaauguuagaacugaaacu

SEQ ID NO: 372125 - RNA, 21 nt, Artificial Sequence
  Synthetic
acaaauguuagaacugaaacu

SEQ ID NO: 372126 - RNA, 22 nt, Artificial Sequence
  Synthetic
aacaaauguuagaacugaaacu

SEQ ID NO: 372127 - RNA, 23 nt, Artificial Sequence
  Synthetic
gaacaaauguuagaacugaaacu

SEQ ID NO: 372128 - RNA, 24 nt, Artificial Sequence
  Synthetic
ugaacaaauguuagaacugaaacu

SEQ ID NO: 372129 - RNA, 18 nt, Artificial Sequence
  Synthetic
auacugaaaccugaaacu

SEQ ID NO: 372130 - RNA, 19 nt, Artificial Sequence
  Synthetic
gauacugaaaccugaaacu

SEQ ID NO: 372131 - RNA, 20 nt, Artificial Sequence
  Synthetic
agauacugaaaccugaaacu

SEQ ID NO: 372132 - RNA, 21 nt, Artificial Sequence
  Synthetic
aagauacugaaaccugaaacu

SEQ ID NO: 372133 - RNA, 22 nt, Artificial Sequence
  Synthetic
aaagauacugaaaccugaaacu

SEQ ID NO: 372134 - RNA, 23 nt, Artificial Sequence
  Synthetic
uaaagauacugaaaccugaaacu

SEQ ID NO: 372135 - RNA, 24 nt, Artificial Sequence
  Synthetic
uuaaagauacugaaaccugaaacu

SEQ ID NO: 372136 - RNA, 18 nt, Artificial Sequence
  Synthetic
aaguucuagauugaaacu

SEQ ID NO: 372137 - RNA, 19 nt, Artificial Sequence
  Synthetic
gaaguucuagauugaaacu

SEQ ID NO: 372138 - RNA, 20 nt, Artificial Sequence
  Synthetic
ugaaguucuagauugaaacu

SEQ ID NO: 372139 - RNA, 21 nt, Artificial Sequence
  Synthetic
augaaguucuagauugaaacu

SEQ ID NO: 372140 - RNA, 22 nt, Artificial Sequence
  Synthetic
gaugaaguucuagauugaaacu

SEQ ID NO: 372141 - RNA, 23 nt, Artificial Sequence
  Synthetic
ugaugaaguucuagauugaaacu

SEQ ID NO: 372142 - RNA, 24 nt, Artificial Sequence
  Synthetic
cugaugaaguucuagauugaaacu

SEQ ID NO: 372143 - RNA, 18 nt, Artificial Sequence
  Synthetic
ugagaauugcuugaaacu

SEQ ID NO: 372144 - RNA, 19 nt, Artificial Sequence
  Synthetic
augagaauugcuugaaacu

SEQ ID NO: 372145 - RNA, 20 nt, Artificial Sequence
  Synthetic
caugagaauugcuugaaacu

SEQ ID NO: 372146 - RNA, 21 nt, Artificial Sequence
  Synthetic
gcaugagaauugcuugaaacu

SEQ ID NO: 372147 - RNA, 22 nt, Artificial Sequence
  Synthetic
ggcaugagaauugcuugaaacu

SEQ ID NO: 372148 - RNA, 23 nt, Artificial Sequence
  Synthetic
aggcaugagaauugcuugaaacu

SEQ ID NO: 372149 - RNA, 24 nt, Artificial Sequence
  Synthetic
gaggcaugagaauugcuugaaacu

SEQ ID NO: 372150 - RNA, 18 nt, Artificial Sequence
  Synthetic
gacacuggguuugaaacu

SEQ ID NO: 372151 - RNA, 19 nt, Artificial Sequence
  Synthetic
ugacacuggguuugaaacu

SEQ ID NO: 372152 - RNA, 20 nt, Artificial Sequence
  Synthetic
uugacacuggguuugaaacu

SEQ ID NO: 372153 - RNA, 21 nt, Artificial Sequence
  Synthetic
auugacacuggguuugaaacu

SEQ ID NO: 372154 - RNA, 22 nt, Artificial Sequence
  Synthetic
uauugacacuggguuugaaacu

SEQ ID NO: 372155 - RNA, 23 nt, Artificial Sequence
  Synthetic
uuauugacacuggguuugaaacu

SEQ ID NO: 372156 - RNA, 24 nt, Artificial Sequence
  Synthetic
cuuauugacacuggguuugaaacu

SEQ ID NO: 372157 - RNA, 18 nt, Artificial Sequence
  Synthetic
cuaaauugcaaauaaacu

SEQ ID NO: 372158 - RNA, 19 nt, Artificial Sequence
  Synthetic
gcuaaauugcaaauaaacu

SEQ ID NO: 372159 - RNA, 20 nt, Artificial Sequence
  Synthetic
ggcuaaauugcaaauaaacu

SEQ ID NO: 372160 - RNA, 21 nt, Artificial Sequence
  Synthetic
uggcuaaauugcaaauaaacu

SEQ ID NO: 372161 - RNA, 22 nt, Artificial Sequence
  Synthetic
guggcuaaauugcaaauaaacu

SEQ ID NO: 372162 - RNA, 23 nt, Artificial Sequence
  Synthetic
aguggcuaaauugcaaauaaacu

SEQ ID NO: 372163 - RNA, 24 nt, Artificial Sequence
  Synthetic
uaguggcuaaauugcaaauaaacu

SEQ ID NO: 372164 - RNA, 18 nt, Artificial Sequence
  Synthetic
ugcucaccugcauaaacu

SEQ ID NO: 372165 - RNA, 19 nt, Artificial Sequence
  Synthetic
gugcucaccugcauaaacu

SEQ ID NO: 372166 - RNA, 20 nt, Artificial Sequence
  Synthetic
ggugcucaccugcauaaacu

SEQ ID NO: 372167 - RNA, 21 nt, Artificial Sequence
  Synthetic
cggugcucaccugcauaaacu

SEQ ID NO: 372168 - RNA, 22 nt, Artificial Sequence
  Synthetic
acggugcucaccugcauaaacu

SEQ ID NO: 372169 - RNA, 23 nt, Artificial Sequence
  Synthetic
cacggugcucaccugcauaaacu

SEQ ID NO: 372170 - RNA, 24 nt, Artificial Sequence
  Synthetic
gcacggugcucaccugcauaaacu

SEQ ID NO: 372171 - RNA, 18 nt, Artificial Sequence
  Synthetic
aauaaaccaucauaaacu

SEQ ID NO: 372172 - RNA, 19 nt, Artificial Sequence
  Synthetic
aaauaaaccaucauaaacu

SEQ ID NO: 372173 - RNA, 20 nt, Artificial Sequence
  Synthetic
gaaauaaaccaucauaaacu

SEQ ID NO: 372174 - RNA, 21 nt, Artificial Sequence
  Synthetic
agaaauaaaccaucauaaacu

SEQ ID NO: 372175 - RNA, 22 nt, Artificial Sequence
  Synthetic
cagaaauaaaccaucauaaacu

SEQ ID NO: 372176 - RNA, 23 nt, Artificial Sequence
  Synthetic
ccagaaauaaaccaucauaaacu

SEQ ID NO: 372177 - RNA, 24 nt, Artificial Sequence
  Synthetic
gccagaaauaaaccaucauaaacu

SEQ ID NO: 372178 - RNA, 18 nt, Artificial Sequence
  Synthetic
aaaaaauguugauaaacu

SEQ ID NO: 372179 - RNA, 19 nt, Artificial Sequence
  Synthetic
aaaaaaauguugauaaacu

SEQ ID NO: 372180 - RNA, 20 nt, Artificial Sequence
  Synthetic
aaaaaaaauguugauaaacu

SEQ ID NO: 372181 - RNA, 21 nt, Artificial Sequence
  Synthetic
aaaaaaaaauguugauaaacu

SEQ ID NO: 372182 - RNA, 22 nt, Artificial Sequence
  Synthetic
caaaaaaaaauguugauaaacu

SEQ ID NO: 372183 - RNA, 23 nt, Artificial Sequence
  Synthetic
ccaaaaaaaaauguugauaaacu

SEQ ID NO: 372184 - RNA, 24 nt, Artificial Sequence
  Synthetic
accaaaaaaaaauguugauaaacu

SEQ ID NO: 372185 - RNA, 18 nt, Artificial Sequence
  Synthetic
guuuagguaauauaaacu

SEQ ID NO: 372186 - RNA, 19 nt, Artificial Sequence
  Synthetic
aguuuagguaauauaaacu

SEQ ID NO: 372187 - RNA, 20 nt, Artificial Sequence
  Synthetic
gaguuuagguaauauaaacu

SEQ ID NO: 372188 - RNA, 21 nt, Artificial Sequence
  Synthetic
ugaguuuagguaauauaaacu

SEQ ID NO: 372189 - RNA, 22 nt, Artificial Sequence
  Synthetic
augaguuuagguaauauaaacu

SEQ ID NO: 372190 - RNA, 23 nt, Artificial Sequence
  Synthetic
gaugaguuuagguaauauaaacu

SEQ ID NO: 372191 - RNA, 24 nt, Artificial Sequence
  Synthetic
ugaugaguuuagguaauauaaacu

SEQ ID NO: 372192 - RNA, 18 nt, Artificial Sequence
  Synthetic
gguagaaauuacuaaacu

SEQ ID NO: 372193 - RNA, 19 nt, Artificial Sequence
  Synthetic
ugguagaaauuacuaaacu

SEQ ID NO: 372194 - RNA, 20 nt, Artificial Sequence
  Synthetic
gugguagaaauuacuaaacu

SEQ ID NO: 372195 - RNA, 21 nt, Artificial Sequence
  Synthetic
cgugguagaaauuacuaaacu

SEQ ID NO: 372196 - RNA, 22 nt, Artificial Sequence
  Synthetic
ccgugguagaaauuacuaaacu

SEQ ID NO: 372197 - RNA, 23 nt, Artificial Sequence
  Synthetic
accgugguagaaauuacuaaacu

SEQ ID NO: 372198 - RNA, 24 nt, Artificial Sequence
  Synthetic
gaccgugguagaaauuacuaaacu

SEQ ID NO: 372199 - RNA, 18 nt, Artificial Sequence
  Synthetic
agcauuaauaaguaaacu

SEQ ID NO: 372200 - RNA, 19 nt, Artificial Sequence
  Synthetic
uagcauuaauaaguaaacu

SEQ ID NO: 372201 - RNA, 20 nt, Artificial Sequence
  Synthetic
uuagcauuaauaaguaaacu

SEQ ID NO: 372202 - RNA, 21 nt, Artificial Sequence
  Synthetic
uuuagcauuaauaaguaaacu

SEQ ID NO: 372203 - RNA, 22 nt, Artificial Sequence
  Synthetic
guuuagcauuaauaaguaaacu

SEQ ID NO: 372204 - RNA, 23 nt, Artificial Sequence
  Synthetic
aguuuagcauuaauaaguaaacu

SEQ ID NO: 372205 - RNA, 24 nt, Artificial Sequence
  Synthetic
caguuuagcauuaauaaguaaacu

SEQ ID NO: 372206 - RNA, 18 nt, Artificial Sequence
  Synthetic
uuuuauaacuaguaaacu

SEQ ID NO: 372207 - RNA, 19 nt, Artificial Sequence
  Synthetic
uuuuuauaacuaguaaacu

SEQ ID NO: 372208 - RNA, 20 nt, Artificial Sequence
  Synthetic
uuuuuuauaacuaguaaacu

SEQ ID NO: 372209 - RNA, 21 nt, Artificial Sequence
  Synthetic
guuuuuuauaacuaguaaacu

SEQ ID NO: 372210 - RNA, 22 nt, Artificial Sequence
  Synthetic
aguuuuuuauaacuaguaaacu

SEQ ID NO: 372211 - RNA, 23 nt, Artificial Sequence
  Synthetic
gaguuuuuuauaacuaguaaacu

SEQ ID NO: 372212 - RNA, 24 nt, Artificial Sequence
  Synthetic
ugaguuuuuuauaacuaguaaacu

SEQ ID NO: 372213 - RNA, 18 nt, Artificial Sequence
  Synthetic
gauuuguucugguaaacu

SEQ ID NO: 372214 - RNA, 19 nt, Artificial Sequence
  Synthetic
ugauuuguucugguaaacu

SEQ ID NO: 372215 - RNA, 20 nt, Artificial Sequence
  Synthetic
uugauuuguucugguaaacu

SEQ ID NO: 372216 - RNA, 21 nt, Artificial Sequence
  Synthetic
guugauuuguucugguaaacu

SEQ ID NO: 372217 - RNA, 22 nt, Artificial Sequence
  Synthetic
uguugauuuguucugguaaacu

SEQ ID NO: 372218 - RNA, 23 nt, Artificial Sequence
  Synthetic
cuguugauuuguucugguaaacu

SEQ ID NO: 372219 - RNA, 24 nt, Artificial Sequence
  Synthetic
ucuguugauuuguucugguaaacu

SEQ ID NO: 372220 - RNA, 18 nt, Artificial Sequence
  Synthetic
caaacucuaauguaaacu

SEQ ID NO: 372221 - RNA, 19 nt, Artificial Sequence
  Synthetic
gcaaacucuaauguaaacu

SEQ ID NO: 372222 - RNA, 20 nt, Artificial Sequence
  Synthetic
agcaaacucuaauguaaacu

SEQ ID NO: 372223 - RNA, 21 nt, Artificial Sequence
  Synthetic
aagcaaacucuaauguaaacu

SEQ ID NO: 372224 - RNA, 22 nt, Artificial Sequence
  Synthetic
caagcaaacucuaauguaaacu

SEQ ID NO: 372225 - RNA, 23 nt, Artificial Sequence
  Synthetic
acaagcaaacucuaauguaaacu

SEQ ID NO: 372226 - RNA, 24 nt, Artificial Sequence
  Synthetic
cacaagcaaacucuaauguaaacu

SEQ ID NO: 372227 - RNA, 18 nt, Artificial Sequence
  Synthetic
aagcacggacuguaaacu

SEQ ID NO: 372228 - RNA, 19 nt, Artificial Sequence
  Synthetic
caagcacggacuguaaacu

SEQ ID NO: 372229 - RNA, 20 nt, Artificial Sequence
  Synthetic
ccaagcacggacuguaaacu

SEQ ID NO: 372230 - RNA, 21 nt, Artificial Sequence
  Synthetic
accaagcacggacuguaaacu

SEQ ID NO: 372231 - RNA, 22 nt, Artificial Sequence
  Synthetic
gaccaagcacggacuguaaacu

SEQ ID NO: 372232 - RNA, 23 nt, Artificial Sequence
  Synthetic
agaccaagcacggacuguaaacu

SEQ ID NO: 372233 - RNA, 24 nt, Artificial Sequence
  Synthetic
aagaccaagcacggacuguaaacu

SEQ ID NO: 372234 - RNA, 18 nt, Artificial Sequence
  Synthetic
augggaucuaauuaaacu

SEQ ID NO: 372235 - RNA, 19 nt, Artificial Sequence
  Synthetic
aaugggaucuaauuaaacu

SEQ ID NO: 372236 - RNA, 20 nt, Artificial Sequence
  Synthetic
aaaugggaucuaauuaaacu

SEQ ID NO: 372237 - RNA, 21 nt, Artificial Sequence
  Synthetic
caaaugggaucuaauuaaacu

SEQ ID NO: 372238 - RNA, 22 nt, Artificial Sequence
  Synthetic
acaaaugggaucuaauuaaacu

SEQ ID NO: 372239 - RNA, 23 nt, Artificial Sequence
  Synthetic
gacaaaugggaucuaauuaaacu

SEQ ID NO: 372240 - RNA, 24 nt, Artificial Sequence
  Synthetic
ugacaaaugggaucuaauuaaacu

SEQ ID NO: 372241 - RNA, 18 nt, Artificial Sequence
  Synthetic
uuauaaguuuguuaaacu

SEQ ID NO: 372242 - RNA, 19 nt, Artificial Sequence
  Synthetic
uuuauaaguuuguuaaacu

SEQ ID NO: 372243 - RNA, 20 nt, Artificial Sequence
  Synthetic
uuuuauaaguuuguuaaacu

SEQ ID NO: 372244 - RNA, 21 nt, Artificial Sequence
  Synthetic
guuuuauaaguuuguuaaacu

SEQ ID NO: 372245 - RNA, 22 nt, Artificial Sequence
  Synthetic
uguuuuauaaguuuguuaaacu

SEQ ID NO: 372246 - RNA, 23 nt, Artificial Sequence
  Synthetic
auguuuuauaaguuuguuaaacu

SEQ ID NO: 372247 - RNA, 24 nt, Artificial Sequence
  Synthetic
gauguuuuauaaguuuguuaaacu

SEQ ID NO: 372248 - RNA, 18 nt, Artificial Sequence
  Synthetic
uucuucuugauuuaaacu

SEQ ID NO: 372249 - RNA, 19 nt, Artificial Sequence
  Synthetic
uuucuucuugauuuaaacu

SEQ ID NO: 372250 - RNA, 20 nt, Artificial Sequence
  Synthetic
auuucuucuugauuuaaacu

SEQ ID NO: 372251 - RNA, 21 nt, Artificial Sequence
  Synthetic
uauuucuucuugauuuaaacu

SEQ ID NO: 372252 - RNA, 22 nt, Artificial Sequence
  Synthetic
cuauuucuucuugauuuaaacu

SEQ ID NO: 372253 - RNA, 23 nt, Artificial Sequence
  Synthetic
ucuauuucuucuugauuuaaacu

SEQ ID NO: 372254 - RNA, 24 nt, Artificial Sequence
  Synthetic
uucuauuucuucuugauuuaaacu

SEQ ID NO: 372255 - RNA, 18 nt, Artificial Sequence
  Synthetic
uauucaaauauuuaaacu

SEQ ID NO: 372256 - RNA, 19 nt, Artificial Sequence
  Synthetic
cuauucaaauauuuaaacu

SEQ ID NO: 372257 - RNA, 20 nt, Artificial Sequence
  Synthetic
acuauucaaauauuuaaacu

SEQ ID NO: 372258 - RNA, 21 nt, Artificial Sequence
  Synthetic
aacuauucaaauauuuaaacu

SEQ ID NO: 372259 - RNA, 22 nt, Artificial Sequence
  Synthetic
gaacuauucaaauauuuaaacu

SEQ ID NO: 372260 - RNA, 23 nt, Artificial Sequence
  Synthetic
ugaacuauucaaauauuuaaacu

SEQ ID NO: 372261 - RNA, 24 nt, Artificial Sequence
  Synthetic
gugaacuauucaaauauuuaaacu

SEQ ID NO: 372262 - RNA, 18 nt, Artificial Sequence
  Synthetic
caucucugacuuuaaacu

SEQ ID NO: 372263 - RNA, 19 nt, Artificial Sequence
  Synthetic
ucaucucugacuuuaaacu

SEQ ID NO: 372264 - RNA, 20 nt, Artificial Sequence
  Synthetic
cucaucucugacuuuaaacu

SEQ ID NO: 372265 - RNA, 21 nt, Artificial Sequence
  Synthetic
ucucaucucugacuuuaaacu

SEQ ID NO: 372266 - RNA, 22 nt, Artificial Sequence
  Synthetic
aucucaucucugacuuuaaacu

SEQ ID NO: 372267 - RNA, 23 nt, Artificial Sequence
  Synthetic
gaucucaucucugacuuuaaacu

SEQ ID NO: 372268 - RNA, 24 nt, Artificial Sequence
  Synthetic
agaucucaucucugacuuuaaacu

SEQ ID NO: 372269 - RNA, 18 nt, Artificial Sequence
  Synthetic
guguuugaccaaacaacu

SEQ ID NO: 372270 - RNA, 19 nt, Artificial Sequence
  Synthetic
gguguuugaccaaacaacu

SEQ ID NO: 372271 - RNA, 20 nt, Artificial Sequence
  Synthetic
ugguguuugaccaaacaacu

SEQ ID NO: 372272 - RNA, 21 nt, Artificial Sequence
  Synthetic
uugguguuugaccaaacaacu

SEQ ID NO: 372273 - RNA, 22 nt, Artificial Sequence
  Synthetic
auugguguuugaccaaacaacu

SEQ ID NO: 372274 - RNA, 23 nt, Artificial Sequence
  Synthetic
gauugguguuugaccaaacaacu

SEQ ID NO: 372275 - RNA, 24 nt, Artificial Sequence
  Synthetic
agauugguguuugaccaaacaacu

SEQ ID NO: 372276 - RNA, 18 nt, Artificial Sequence
  Synthetic
uauauauaugaaacaacu

SEQ ID NO: 372277 - RNA, 19 nt, Artificial Sequence
  Synthetic
auauauauaugaaacaacu

SEQ ID NO: 372278 - RNA, 20 nt, Artificial Sequence
  Synthetic
uauauauauaugaaacaacu

SEQ ID NO: 372279 - RNA, 21 nt, Artificial Sequence
  Synthetic
auauauauauaugaaacaacu

SEQ ID NO: 372280 - RNA, 22 nt, Artificial Sequence
  Synthetic
uauauauauauaugaaacaacu

SEQ ID NO: 372281 - RNA, 23 nt, Artificial Sequence
  Synthetic
guauauauauauaugaaacaacu

SEQ ID NO: 372282 - RNA, 24 nt, Artificial Sequence
  Synthetic
uguauauauauauaugaaacaacu

SEQ ID NO: 372283 - RNA, 18 nt, Artificial Sequence
  Synthetic
uaaaauggugaaacaacu

SEQ ID NO: 372284 - RNA, 19 nt, Artificial Sequence
  Synthetic
guaaaauggugaaacaacu

SEQ ID NO: 372285 - RNA, 20 nt, Artificial Sequence
  Synthetic
uguaaaauggugaaacaacu

SEQ ID NO: 372286 - RNA, 21 nt, Artificial Sequence
  Synthetic
auguaaaauggugaaacaacu

SEQ ID NO: 372287 - RNA, 22 nt, Artificial Sequence
  Synthetic
aauguaaaauggugaaacaacu

SEQ ID NO: 372288 - RNA, 23 nt, Artificial Sequence
  Synthetic
aaauguaaaauggugaaacaacu

SEQ ID NO: 372289 - RNA, 24 nt, Artificial Sequence
  Synthetic
gaaauguaaaauggugaaacaacu

SEQ ID NO: 372290 - RNA, 18 nt, Artificial Sequence
  Synthetic
uucaaaugcugaacaacu

SEQ ID NO: 372291 - RNA, 19 nt, Artificial Sequence
  Synthetic
cuucaaaugcugaacaacu

SEQ ID NO: 372292 - RNA, 20 nt, Artificial Sequence
  Synthetic
gcuucaaaugcugaacaacu

SEQ ID NO: 372293 - RNA, 21 nt, Artificial Sequence
  Synthetic
ugcuucaaaugcugaacaacu

SEQ ID NO: 372294 - RNA, 22 nt, Artificial Sequence
  Synthetic
uugcuucaaaugcugaacaacu

SEQ ID NO: 372295 - RNA, 23 nt, Artificial Sequence
  Synthetic
uuugcuucaaaugcugaacaacu

SEQ ID NO: 372296 - RNA, 24 nt, Artificial Sequence
  Synthetic
auuugcuucaaaugcugaacaacu

SEQ ID NO: 372297 - RNA, 18 nt, Artificial Sequence
  Synthetic
ucugugccacucacaacu

SEQ ID NO: 372298 - RNA, 19 nt, Artificial Sequence
  Synthetic
aucugugccacucacaacu

SEQ ID NO: 372299 - RNA, 20 nt, Artificial Sequence
  Synthetic
aaucugugccacucacaacu

SEQ ID NO: 372300 - RNA, 21 nt, Artificial Sequence
  Synthetic
aaaucugugccacucacaacu

SEQ ID NO: 372301 - RNA, 22 nt, Artificial Sequence
  Synthetic
uaaaucugugccacucacaacu

SEQ ID NO: 372302 - RNA, 23 nt, Artificial Sequence
  Synthetic
auaaaucugugccacucacaacu

SEQ ID NO: 372303 - RNA, 24 nt, Artificial Sequence
  Synthetic
cauaaaucugugccacucacaacu

SEQ ID NO: 372304 - RNA, 18 nt, Artificial Sequence
  Synthetic
auaccuaggaauacaacu

SEQ ID NO: 372305 - RNA, 19 nt, Artificial Sequence
  Synthetic
aauaccuaggaauacaacu

SEQ ID NO: 372306 - RNA, 20 nt, Artificial Sequence
  Synthetic
aaauaccuaggaauacaacu

SEQ ID NO: 372307 - RNA, 21 nt, Artificial Sequence
  Synthetic
aaaauaccuaggaauacaacu

SEQ ID NO: 372308 - RNA, 22 nt, Artificial Sequence
  Synthetic
uaaaauaccuaggaauacaacu

SEQ ID NO: 372309 - RNA, 23 nt, Artificial Sequence
  Synthetic
auaaaauaccuaggaauacaacu

SEQ ID NO: 372310 - RNA, 24 nt, Artificial Sequence
  Synthetic
aauaaaauaccuaggaauacaacu

SEQ ID NO: 372311 - RNA, 18 nt, Artificial Sequence
  Synthetic
uagcugugagguacaacu

SEQ ID NO: 372312 - RNA, 19 nt, Artificial Sequence
  Synthetic
uuagcugugagguacaacu

SEQ ID NO: 372313 - RNA, 20 nt, Artificial Sequence
  Synthetic
uuuagcugugagguacaacu

SEQ ID NO: 372314 - RNA, 21 nt, Artificial Sequence
  Synthetic
auuuagcugugagguacaacu

SEQ ID NO: 372315 - RNA, 22 nt, Artificial Sequence
  Synthetic
uauuuagcugugagguacaacu

SEQ ID NO: 372316 - RNA, 23 nt, Artificial Sequence
  Synthetic
cuauuuagcugugagguacaacu

SEQ ID NO: 372317 - RNA, 24 nt, Artificial Sequence
  Synthetic
acuauuuagcugugagguacaacu

SEQ ID NO: 372318 - RNA, 18 nt, Artificial Sequence
  Synthetic
ugaaaucucaccccaacu

SEQ ID NO: 372319 - RNA, 19 nt, Artificial Sequence
  Synthetic
cugaaaucucaccccaacu

SEQ ID NO: 372320 - RNA, 20 nt, Artificial Sequence
  Synthetic
gcugaaaucucaccccaacu

SEQ ID NO: 372321 - RNA, 21 nt, Artificial Sequence
  Synthetic
cgcugaaaucucaccccaacu

SEQ ID NO: 372322 - RNA, 22 nt, Artificial Sequence
  Synthetic
ucgcugaaaucucaccccaacu

SEQ ID NO: 372323 - RNA, 23 nt, Artificial Sequence
  Synthetic
gucgcugaaaucucaccccaacu

SEQ ID NO: 372324 - RNA, 24 nt, Artificial Sequence
  Synthetic
ggucgcugaaaucucaccccaacu

SEQ ID NO: 372325 - RNA, 18 nt, Artificial Sequence
  Synthetic
uagauggucugcccaacu

SEQ ID NO: 372326 - RNA, 19 nt, Artificial Sequence
  Synthetic
cuagauggucugcccaacu

SEQ ID NO: 372327 - RNA, 20 nt, Artificial Sequence
  Synthetic
ccuagauggucugcccaacu

SEQ ID NO: 372328 - RNA, 21 nt, Artificial Sequence
  Synthetic
gccuagauggucugcccaacu

SEQ ID NO: 372329 - RNA, 22 nt, Artificial Sequence
  Synthetic
ugccuagauggucugcccaacu

SEQ ID NO: 372330 - RNA, 23 nt, Artificial Sequence
  Synthetic
augccuagauggucugcccaacu

SEQ ID NO: 372331 - RNA, 24 nt, Artificial Sequence
  Synthetic
uaugccuagauggucugcccaacu

SEQ ID NO: 372332 - RNA, 18 nt, Artificial Sequence
  Synthetic
gcuuucuuguucccaacu

SEQ ID NO: 372333 - RNA, 19 nt, Artificial Sequence
  Synthetic
agcuuucuuguucccaacu

SEQ ID NO: 372334 - RNA, 20 nt, Artificial Sequence
  Synthetic
gagcuuucuuguucccaacu

SEQ ID NO: 372335 - RNA, 21 nt, Artificial Sequence
  Synthetic
ugagcuuucuuguucccaacu

SEQ ID NO: 372336 - RNA, 22 nt, Artificial Sequence
  Synthetic
gugagcuuucuuguucccaacu

SEQ ID NO: 372337 - RNA, 23 nt, Artificial Sequence
  Synthetic
cgugagcuuucuuguucccaacu

SEQ ID NO: 372338 - RNA, 24 nt, Artificial Sequence
  Synthetic
acgugagcuuucuuguucccaacu

SEQ ID NO: 372339 - RNA, 18 nt, Artificial Sequence
  Synthetic
cuggcuuacacuccaacu

SEQ ID NO: 372340 - RNA, 19 nt, Artificial Sequence
  Synthetic
gcuggcuuacacuccaacu

SEQ ID NO: 372341 - RNA, 20 nt, Artificial Sequence
  Synthetic
agcuggcuuacacuccaacu

SEQ ID NO: 372342 - RNA, 21 nt, Artificial Sequence
  Synthetic
gagcuggcuuacacuccaacu

SEQ ID NO: 372343 - RNA, 22 nt, Artificial Sequence
  Synthetic
agagcuggcuuacacuccaacu

SEQ ID NO: 372344 - RNA, 23 nt, Artificial Sequence
  Synthetic
aagagcuggcuuacacuccaacu

SEQ ID NO: 372345 - RNA, 24 nt, Artificial Sequence
  Synthetic
aaagagcuggcuuacacuccaacu

SEQ ID NO: 372346 - RNA, 18 nt, Artificial Sequence
  Synthetic
cugcucuugucuccaacu

SEQ ID NO: 372347 - RNA, 19 nt, Artificial Sequence
  Synthetic
ucugcucuugucuccaacu

SEQ ID NO: 372348 - RNA, 20 nt, Artificial Sequence
  Synthetic
uucugcucuugucuccaacu

SEQ ID NO: 372349 - RNA, 21 nt, Artificial Sequence
  Synthetic
uuucugcucuugucuccaacu

SEQ ID NO: 372350 - RNA, 22 nt, Artificial Sequence
  Synthetic
auuucugcucuugucuccaacu

SEQ ID NO: 372351 - RNA, 23 nt, Artificial Sequence
  Synthetic
aauuucugcucuugucuccaacu

SEQ ID NO: 372352 - RNA, 24 nt, Artificial Sequence
  Synthetic
aaauuucugcucuugucuccaacu

SEQ ID NO: 372353 - RNA, 18 nt, Artificial Sequence
  Synthetic
caucuaguuaaagcaacu

SEQ ID NO: 372354 - RNA, 19 nt, Artificial Sequence
  Synthetic
ucaucuaguuaaagcaacu

SEQ ID NO: 372355 - RNA, 20 nt, Artificial Sequence
  Synthetic
gucaucuaguuaaagcaacu

SEQ ID NO: 372356 - RNA, 21 nt, Artificial Sequence
  Synthetic
agucaucuaguuaaagcaacu

SEQ ID NO: 372357 - RNA, 22 nt, Artificial Sequence
  Synthetic
cagucaucuaguuaaagcaacu

SEQ ID NO: 372358 - RNA, 23 nt, Artificial Sequence
  Synthetic
gcagucaucuaguuaaagcaacu

SEQ ID NO: 372359 - RNA, 24 nt, Artificial Sequence
  Synthetic
agcagucaucuaguuaaagcaacu

SEQ ID NO: 372360 - RNA, 18 nt, Artificial Sequence
  Synthetic
auaacaaucccagcaacu

SEQ ID NO: 372361 - RNA, 19 nt, Artificial Sequence
  Synthetic
gauaacaaucccagcaacu

SEQ ID NO: 372362 - RNA, 20 nt, Artificial Sequence
  Synthetic
agauaacaaucccagcaacu

SEQ ID NO: 372363 - RNA, 21 nt, Artificial Sequence
  Synthetic
uagauaacaaucccagcaacu

SEQ ID NO: 372364 - RNA, 22 nt, Artificial Sequence
  Synthetic
guagauaacaaucccagcaacu

SEQ ID NO: 372365 - RNA, 23 nt, Artificial Sequence
  Synthetic
aguagauaacaaucccagcaacu

SEQ ID NO: 372366 - RNA, 24 nt, Artificial Sequence
  Synthetic
uaguagauaacaaucccagcaacu

SEQ ID NO: 372367 - RNA, 18 nt, Artificial Sequence
  Synthetic
gauuggauaagagcaacu

SEQ ID NO: 372368 - RNA, 19 nt, Artificial Sequence
  Synthetic
ugauuggauaagagcaacu

SEQ ID NO: 372369 - RNA, 20 nt, Artificial Sequence
  Synthetic
cugauuggauaagagcaacu

SEQ ID NO: 372370 - RNA, 21 nt, Artificial Sequence
  Synthetic
acugauuggauaagagcaacu

SEQ ID NO: 372371 - RNA, 22 nt, Artificial Sequence
  Synthetic
aacugauuggauaagagcaacu

SEQ ID NO: 372372 - RNA, 23 nt, Artificial Sequence
  Synthetic
uaacugauuggauaagagcaacu

SEQ ID NO: 372373 - RNA, 24 nt, Artificial Sequence
  Synthetic
guaacugauuggauaagagcaacu

SEQ ID NO: 372374 - RNA, 18 nt, Artificial Sequence
  Synthetic
aaucuugagcaggcaacu

SEQ ID NO: 372375 - RNA, 19 nt, Artificial Sequence
  Synthetic
gaaucuugagcaggcaacu

SEQ ID NO: 372376 - RNA, 20 nt, Artificial Sequence
  Synthetic
ugaaucuugagcaggcaacu

SEQ ID NO: 372377 - RNA, 21 nt, Artificial Sequence
  Synthetic
augaaucuugagcaggcaacu

SEQ ID NO: 372378 - RNA, 22 nt, Artificial Sequence
  Synthetic
uaugaaucuugagcaggcaacu

SEQ ID NO: 372379 - RNA, 23 nt, Artificial Sequence
  Synthetic
auaugaaucuugagcaggcaacu

SEQ ID NO: 372380 - RNA, 24 nt, Artificial Sequence
  Synthetic
aauaugaaucuugagcaggcaacu

SEQ ID NO: 372381 - RNA, 18 nt, Artificial Sequence
  Synthetic
aacagaagagaggcaacu

SEQ ID NO: 372382 - RNA, 19 nt, Artificial Sequence
  Synthetic
aaacagaagagaggcaacu

SEQ ID NO: 372383 - RNA, 20 nt, Artificial Sequence
  Synthetic
aaaacagaagagaggcaacu

SEQ ID NO: 372384 - RNA, 21 nt, Artificial Sequence
  Synthetic
uaaaacagaagagaggcaacu

SEQ ID NO: 372385 - RNA, 22 nt, Artificial Sequence
  Synthetic
auaaaacagaagagaggcaacu

SEQ ID NO: 372386 - RNA, 23 nt, Artificial Sequence
  Synthetic
aauaaaacagaagagaggcaacu

SEQ ID NO: 372387 - RNA, 24 nt, Artificial Sequence
  Synthetic
aaauaaaacagaagagaggcaacu

SEQ ID NO: 372388 - RNA, 18 nt, Artificial Sequence
  Synthetic
gcaaugucaugggcaacu

SEQ ID NO: 372389 - RNA, 19 nt, Artificial Sequence
  Synthetic
ggcaaugucaugggcaacu

SEQ ID NO: 372390 - RNA, 20 nt, Artificial Sequence
  Synthetic
aggcaaugucaugggcaacu

SEQ ID NO: 372391 - RNA, 21 nt, Artificial Sequence
  Synthetic
caggcaaugucaugggcaacu

SEQ ID NO: 372392 - RNA, 22 nt, Artificial Sequence
  Synthetic
ccaggcaaugucaugggcaacu

SEQ ID NO: 372393 - RNA, 23 nt, Artificial Sequence
  Synthetic
cccaggcaaugucaugggcaacu

SEQ ID NO: 372394 - RNA, 24 nt, Artificial Sequence
  Synthetic
ucccaggcaaugucaugggcaacu

SEQ ID NO: 372395 - RNA, 18 nt, Artificial Sequence
  Synthetic
cuacaggcaguggcaacu

SEQ ID NO: 372396 - RNA, 19 nt, Artificial Sequence
  Synthetic
ccuacaggcaguggcaacu

SEQ ID NO: 372397 - RNA, 20 nt, Artificial Sequence
  Synthetic
gccuacaggcaguggcaacu

SEQ ID NO: 372398 - RNA, 21 nt, Artificial Sequence
  Synthetic
ggccuacaggcaguggcaacu

SEQ ID NO: 372399 - RNA, 22 nt, Artificial Sequence
  Synthetic
uggccuacaggcaguggcaacu

SEQ ID NO: 372400 - RNA, 23 nt, Artificial Sequence
  Synthetic
auggccuacaggcaguggcaacu

SEQ ID NO: 372401 - RNA, 24 nt, Artificial Sequence
  Synthetic
gauggccuacaggcaguggcaacu

SEQ ID NO: 372402 - RNA, 18 nt, Artificial Sequence
  Synthetic
caucccaaaucugcaacu

SEQ ID NO: 372403 - RNA, 19 nt, Artificial Sequence
  Synthetic
ccaucccaaaucugcaacu

SEQ ID NO: 372404 - RNA, 20 nt, Artificial Sequence
  Synthetic
uccaucccaaaucugcaacu

SEQ ID NO: 372405 - RNA, 21 nt, Artificial Sequence
  Synthetic
uuccaucccaaaucugcaacu

SEQ ID NO: 372406 - RNA, 22 nt, Artificial Sequence
  Synthetic
guuccaucccaaaucugcaacu

SEQ ID NO: 372407 - RNA, 23 nt, Artificial Sequence
  Synthetic
uguuccaucccaaaucugcaacu

SEQ ID NO: 372408 - RNA, 24 nt, Artificial Sequence
  Synthetic
uuguuccaucccaaaucugcaacu

SEQ ID NO: 372409 - RNA, 18 nt, Artificial Sequence
  Synthetic
uuguucaaaagugcaacu

SEQ ID NO: 372410 - RNA, 19 nt, Artificial Sequence
  Synthetic
uuuguucaaaagugcaacu

SEQ ID NO: 372411 - RNA, 20 nt, Artificial Sequence
  Synthetic
auuuguucaaaagugcaacu

SEQ ID NO: 372412 - RNA, 21 nt, Artificial Sequence
  Synthetic
uauuuguucaaaagugcaacu

SEQ ID NO: 372413 - RNA, 22 nt, Artificial Sequence
  Synthetic
cuauuuguucaaaagugcaacu

SEQ ID NO: 372414 - RNA, 23 nt, Artificial Sequence
  Synthetic
gcuauuuguucaaaagugcaacu

SEQ ID NO: 372415 - RNA, 24 nt, Artificial Sequence
  Synthetic
agcuauuuguucaaaagugcaacu

SEQ ID NO: 372416 - RNA, 18 nt, Artificial Sequence
  Synthetic
aaugugguaagugcaacu

SEQ ID NO: 372417 - RNA, 19 nt, Artificial Sequence
  Synthetic
aaaugugguaagugcaacu

SEQ ID NO: 372418 - RNA, 20 nt, Artificial Sequence
  Synthetic
gaaaugugguaagugcaacu

SEQ ID NO: 372419 - RNA, 21 nt, Artificial Sequence
  Synthetic
ggaaaugugguaagugcaacu

SEQ ID NO: 372420 - RNA, 22 nt, Artificial Sequence
  Synthetic
uggaaaugugguaagugcaacu

SEQ ID NO: 372421 - RNA, 23 nt, Artificial Sequence
  Synthetic
uuggaaaugugguaagugcaacu

SEQ ID NO: 372422 - RNA, 24 nt, Artificial Sequence
  Synthetic
auuggaaaugugguaagugcaacu

SEQ ID NO: 372423 - RNA, 18 nt, Artificial Sequence
  Synthetic
uuauuaaaauaaucaacu

SEQ ID NO: 372424 - RNA, 19 nt, Artificial Sequence
  Synthetic
uuuauuaaaauaaucaacu

SEQ ID NO: 372425 - RNA, 20 nt, Artificial Sequence
  Synthetic
uuuuauuaaaauaaucaacu

SEQ ID NO: 372426 - RNA, 21 nt, Artificial Sequence
  Synthetic
cuuuuauuaaaauaaucaacu

SEQ ID NO: 372427 - RNA, 22 nt, Artificial Sequence
  Synthetic
ccuuuuauuaaaauaaucaacu

SEQ ID NO: 372428 - RNA, 23 nt, Artificial Sequence
  Synthetic
accuuuuauuaaaauaaucaacu

SEQ ID NO: 372429 - RNA, 24 nt, Artificial Sequence
  Synthetic
uaccuuuuauuaaaauaaucaacu

SEQ ID NO: 372430 - RNA, 18 nt, Artificial Sequence
  Synthetic
gaaugaucuucaucaacu

SEQ ID NO: 372431 - RNA, 19 nt, Artificial Sequence
  Synthetic
cgaaugaucuucaucaacu

SEQ ID NO: 372432 - RNA, 20 nt, Artificial Sequence
  Synthetic
acgaaugaucuucaucaacu

SEQ ID NO: 372433 - RNA, 21 nt, Artificial Sequence
  Synthetic
aacgaaugaucuucaucaacu

SEQ ID NO: 372434 - RNA, 22 nt, Artificial Sequence
  Synthetic
caacgaaugaucuucaucaacu

SEQ ID NO: 372435 - RNA, 23 nt, Artificial Sequence
  Synthetic
ucaacgaaugaucuucaucaacu

SEQ ID NO: 372436 - RNA, 24 nt, Artificial Sequence
  Synthetic
uucaacgaaugaucuucaucaacu

SEQ ID NO: 372437 - RNA, 18 nt, Artificial Sequence
  Synthetic
gaugaugugggaucaacu

SEQ ID NO: 372438 - RNA, 19 nt, Artificial Sequence
  Synthetic
agaugaugugggaucaacu

SEQ ID NO: 372439 - RNA, 20 nt, Artificial Sequence
  Synthetic
gagaugaugugggaucaacu

SEQ ID NO: 372440 - RNA, 21 nt, Artificial Sequence
  Synthetic
agagaugaugugggaucaacu

SEQ ID NO: 372441 - RNA, 22 nt, Artificial Sequence
  Synthetic
uagagaugaugugggaucaacu

SEQ ID NO: 372442 - RNA, 23 nt, Artificial Sequence
  Synthetic
auagagaugaugugggaucaacu

SEQ ID NO: 372443 - RNA, 24 nt, Artificial Sequence
  Synthetic
aauagagaugaugugggaucaacu

SEQ ID NO: 372444 - RNA, 18 nt, Artificial Sequence
  Synthetic
acuauauccuuaucaacu

SEQ ID NO: 372445 - RNA, 19 nt, Artificial Sequence
  Synthetic
aacuauauccuuaucaacu

SEQ ID NO: 372446 - RNA, 20 nt, Artificial Sequence
  Synthetic
aaacuauauccuuaucaacu

SEQ ID NO: 372447 - RNA, 21 nt, Artificial Sequence
  Synthetic
gaaacuauauccuuaucaacu

SEQ ID NO: 372448 - RNA, 22 nt, Artificial Sequence
  Synthetic
agaaacuauauccuuaucaacu

SEQ ID NO: 372449 - RNA, 23 nt, Artificial Sequence
  Synthetic
uagaaacuauauccuuaucaacu

SEQ ID NO: 372450 - RNA, 24 nt, Artificial Sequence
  Synthetic
auagaaacuauauccuuaucaacu

SEQ ID NO: 372451 - RNA, 18 nt, Artificial Sequence
  Synthetic
uaaccacuucacucaacu

SEQ ID NO: 372452 - RNA, 19 nt, Artificial Sequence
  Synthetic
auaaccacuucacucaacu

SEQ ID NO: 372453 - RNA, 20 nt, Artificial Sequence
  Synthetic
uauaaccacuucacucaacu

SEQ ID NO: 372454 - RNA, 21 nt, Artificial Sequence
  Synthetic
uuauaaccacuucacucaacu

SEQ ID NO: 372455 - RNA, 22 nt, Artificial Sequence
  Synthetic
uuuauaaccacuucacucaacu

SEQ ID NO: 372456 - RNA, 23 nt, Artificial Sequence
  Synthetic
auuuauaaccacuucacucaacu

SEQ ID NO: 372457 - RNA, 24 nt, Artificial Sequence
  Synthetic
uauuuauaaccacuucacucaacu

SEQ ID NO: 372458 - RNA, 18 nt, Artificial Sequence
  Synthetic
aauuacaaggccucaacu

SEQ ID NO: 372459 - RNA, 19 nt, Artificial Sequence
  Synthetic
caauuacaaggccucaacu

SEQ ID NO: 372460 - RNA, 20 nt, Artificial Sequence
  Synthetic
acaauuacaaggccucaacu

SEQ ID NO: 372461 - RNA, 21 nt, Artificial Sequence
  Synthetic
aacaauuacaaggccucaacu

SEQ ID NO: 372462 - RNA, 22 nt, Artificial Sequence
  Synthetic
aaacaauuacaaggccucaacu

SEQ ID NO: 372463 - RNA, 23 nt, Artificial Sequence
  Synthetic
uaaacaauuacaaggccucaacu

SEQ ID NO: 372464 - RNA, 24 nt, Artificial Sequence
  Synthetic
cuaaacaauuacaaggccucaacu

SEQ ID NO: 372465 - RNA, 18 nt, Artificial Sequence
  Synthetic
gaagcuggagaaagaacu

SEQ ID NO: 372466 - RNA, 19 nt, Artificial Sequence
  Synthetic
ggaagcuggagaaagaacu

SEQ ID NO: 372467 - RNA, 20 nt, Artificial Sequence
  Synthetic
aggaagcuggagaaagaacu

SEQ ID NO: 372468 - RNA, 21 nt, Artificial Sequence
  Synthetic
caggaagcuggagaaagaacu

SEQ ID NO: 372469 - RNA, 22 nt, Artificial Sequence
  Synthetic
ccaggaagcuggagaaagaacu

SEQ ID NO: 372470 - RNA, 23 nt, Artificial Sequence
  Synthetic
gccaggaagcuggagaaagaacu

SEQ ID NO: 372471 - RNA, 24 nt, Artificial Sequence
  Synthetic
agccaggaagcuggagaaagaacu

SEQ ID NO: 372472 - RNA, 18 nt, Artificial Sequence
  Synthetic
uuuauuuauuaaagaacu

SEQ ID NO: 372473 - RNA, 19 nt, Artificial Sequence
  Synthetic
cuuuauuuauuaaagaacu

SEQ ID NO: 372474 - RNA, 20 nt, Artificial Sequence
  Synthetic
ucuuuauuuauuaaagaacu

SEQ ID NO: 372475 - RNA, 21 nt, Artificial Sequence
  Synthetic
cucuuuauuuauuaaagaacu

SEQ ID NO: 372476 - RNA, 22 nt, Artificial Sequence
  Synthetic
gcucuuuauuuauuaaagaacu

SEQ ID NO: 372477 - RNA, 23 nt, Artificial Sequence
  Synthetic
ggcucuuuauuuauuaaagaacu

SEQ ID NO: 372478 - RNA, 24 nt, Artificial Sequence
  Synthetic
uggcucuuuauuuauuaaagaacu

SEQ ID NO: 372479 - RNA, 18 nt, Artificial Sequence
  Synthetic
ggagcagcucacagaacu

SEQ ID NO: 372480 - RNA, 19 nt, Artificial Sequence
  Synthetic
uggagcagcucacagaacu

SEQ ID NO: 372481 - RNA, 20 nt, Artificial Sequence
  Synthetic
cuggagcagcucacagaacu

SEQ ID NO: 372482 - RNA, 21 nt, Artificial Sequence
  Synthetic
gcuggagcagcucacagaacu

SEQ ID NO: 372483 - RNA, 22 nt, Artificial Sequence
  Synthetic
ugcuggagcagcucacagaacu

SEQ ID NO: 372484 - RNA, 23 nt, Artificial Sequence
  Synthetic
uugcuggagcagcucacagaacu

SEQ ID NO: 372485 - RNA, 24 nt, Artificial Sequence
  Synthetic
cuugcuggagcagcucacagaacu

SEQ ID NO: 372486 - RNA, 18 nt, Artificial Sequence
  Synthetic
caaaagguuuacagaacu

SEQ ID NO: 372487 - RNA, 19 nt, Artificial Sequence
  Synthetic
ucaaaagguuuacagaacu

SEQ ID NO: 372488 - RNA, 20 nt, Artificial Sequence
  Synthetic
uucaaaagguuuacagaacu

SEQ ID NO: 372489 - RNA, 21 nt, Artificial Sequence
  Synthetic
uuucaaaagguuuacagaacu

SEQ ID NO: 372490 - RNA, 22 nt, Artificial Sequence
  Synthetic
cuuucaaaagguuuacagaacu

SEQ ID NO: 372491 - RNA, 23 nt, Artificial Sequence
  Synthetic
acuuucaaaagguuuacagaacu

SEQ ID NO: 372492 - RNA, 24 nt, Artificial Sequence
  Synthetic
uacuuucaaaagguuuacagaacu

SEQ ID NO: 372493 - RNA, 18 nt, Artificial Sequence
  Synthetic
uucuguaaucccagaacu

SEQ ID NO: 372494 - RNA, 19 nt, Artificial Sequence
  Synthetic
cuucuguaaucccagaacu

SEQ ID NO: 372495 - RNA, 20 nt, Artificial Sequence
  Synthetic
acuucuguaaucccagaacu

SEQ ID NO: 372496 - RNA, 21 nt, Artificial Sequence
  Synthetic
cacuucuguaaucccagaacu

SEQ ID NO: 372497 - RNA, 22 nt, Artificial Sequence
  Synthetic
ucacuucuguaaucccagaacu

SEQ ID NO: 372498 - RNA, 23 nt, Artificial Sequence
  Synthetic
gucacuucuguaaucccagaacu

SEQ ID NO: 372499 - RNA, 24 nt, Artificial Sequence
  Synthetic
ggucacuucuguaaucccagaacu

SEQ ID NO: 372500 - RNA, 18 nt, Artificial Sequence
  Synthetic
ucuacuaaauccagaacu

SEQ ID NO: 372501 - RNA, 19 nt, Artificial Sequence
  Synthetic
aucuacuaaauccagaacu

SEQ ID NO: 372502 - RNA, 20 nt, Artificial Sequence
  Synthetic
uaucuacuaaauccagaacu

SEQ ID NO: 372503 - RNA, 21 nt, Artificial Sequence
  Synthetic
guaucuacuaaauccagaacu

SEQ ID NO: 372504 - RNA, 22 nt, Artificial Sequence
  Synthetic
aguaucuacuaaauccagaacu

SEQ ID NO: 372505 - RNA, 23 nt, Artificial Sequence
  Synthetic
caguaucuacuaaauccagaacu

SEQ ID NO: 372506 - RNA, 24 nt, Artificial Sequence
  Synthetic
ccaguaucuacuaaauccagaacu

SEQ ID NO: 372507 - RNA, 18 nt, Artificial Sequence
  Synthetic
uuuguacacaucagaacu

SEQ ID NO: 372508 - RNA, 19 nt, Artificial Sequence
  Synthetic
auuuguacacaucagaacu

SEQ ID NO: 372509 - RNA, 20 nt, Artificial Sequence
  Synthetic
gauuuguacacaucagaacu

SEQ ID NO: 372510 - RNA, 21 nt, Artificial Sequence
  Synthetic
ggauuuguacacaucagaacu

SEQ ID NO: 372511 - RNA, 22 nt, Artificial Sequence
  Synthetic
gggauuuguacacaucagaacu

SEQ ID NO: 372512 - RNA, 23 nt, Artificial Sequence
  Synthetic
cgggauuuguacacaucagaacu

SEQ ID NO: 372513 - RNA, 24 nt, Artificial Sequence
  Synthetic
acgggauuuguacacaucagaacu

SEQ ID NO: 372514 - RNA, 18 nt, Artificial Sequence
  Synthetic
ccaagaaagcagagaacu

SEQ ID NO: 372515 - RNA, 19 nt, Artificial Sequence
  Synthetic
gccaagaaagcagagaacu

SEQ ID NO: 372516 - RNA, 20 nt, Artificial Sequence
  Synthetic
agccaagaaagcagagaacu

SEQ ID NO: 372517 - RNA, 21 nt, Artificial Sequence
  Synthetic
aagccaagaaagcagagaacu

SEQ ID NO: 372518 - RNA, 22 nt, Artificial Sequence
  Synthetic
gaagccaagaaagcagagaacu

SEQ ID NO: 372519 - RNA, 23 nt, Artificial Sequence
  Synthetic
ggaagccaagaaagcagagaacu

SEQ ID NO: 372520 - RNA, 24 nt, Artificial Sequence
  Synthetic
uggaagccaagaaagcagagaacu

SEQ ID NO: 372521 - RNA, 18 nt, Artificial Sequence
  Synthetic
agaacagaauagagaacu

SEQ ID NO: 372522 - RNA, 19 nt, Artificial Sequence
  Synthetic
uagaacagaauagagaacu

SEQ ID NO: 372523 - RNA, 20 nt, Artificial Sequence
  Synthetic
guagaacagaauagagaacu

SEQ ID NO: 372524 - RNA, 21 nt, Artificial Sequence
  Synthetic
aguagaacagaauagagaacu

SEQ ID NO: 372525 - RNA, 22 nt, Artificial Sequence
  Synthetic
caguagaacagaauagagaacu

SEQ ID NO: 372526 - RNA, 23 nt, Artificial Sequence
  Synthetic
ccaguagaacagaauagagaacu

SEQ ID NO: 372527 - RNA, 24 nt, Artificial Sequence
  Synthetic
accaguagaacagaauagagaacu

SEQ ID NO: 372528 - RNA, 18 nt, Artificial Sequence
  Synthetic
auuucacaaaugagaacu

SEQ ID NO: 372529 - RNA, 19 nt, Artificial Sequence
  Synthetic
uauuucacaaaugagaacu

SEQ ID NO: 372530 - RNA, 20 nt, Artificial Sequence
  Synthetic
cuauuucacaaaugagaacu

SEQ ID NO: 372531 - RNA, 21 nt, Artificial Sequence
  Synthetic
ccuauuucacaaaugagaacu

SEQ ID NO: 372532 - RNA, 22 nt, Artificial Sequence
  Synthetic
gccuauuucacaaaugagaacu

SEQ ID NO: 372533 - RNA, 23 nt, Artificial Sequence
  Synthetic
ugccuauuucacaaaugagaacu

SEQ ID NO: 372534 - RNA, 24 nt, Artificial Sequence
  Synthetic
augccuauuucacaaaugagaacu

SEQ ID NO: 372535 - RNA, 18 nt, Artificial Sequence
  Synthetic
acuagcuuaaauagaacu

SEQ ID NO: 372536 - RNA, 19 nt, Artificial Sequence
  Synthetic
gacuagcuuaaauagaacu

SEQ ID NO: 372537 - RNA, 20 nt, Artificial Sequence
  Synthetic
ugacuagcuuaaauagaacu

SEQ ID NO: 372538 - RNA, 21 nt, Artificial Sequence
  Synthetic
augacuagcuuaaauagaacu

SEQ ID NO: 372539 - RNA, 22 nt, Artificial Sequence
  Synthetic
uaugacuagcuuaaauagaacu

SEQ ID NO: 372540 - RNA, 23 nt, Artificial Sequence
  Synthetic
uuaugacuagcuuaaauagaacu

SEQ ID NO: 372541 - RNA, 24 nt, Artificial Sequence
  Synthetic
cuuaugacuagcuuaaauagaacu

SEQ ID NO: 372542 - RNA, 18 nt, Artificial Sequence
  Synthetic
ucacugagucauagaacu

SEQ ID NO: 372543 - RNA, 19 nt, Artificial Sequence
  Synthetic
cucacugagucauagaacu

SEQ ID NO: 372544 - RNA, 20 nt, Artificial Sequence
  Synthetic
ucucacugagucauagaacu

SEQ ID NO: 372545 - RNA, 21 nt, Artificial Sequence
  Synthetic
uucucacugagucauagaacu

SEQ ID NO: 372546 - RNA, 22 nt, Artificial Sequence
  Synthetic
guucucacugagucauagaacu

SEQ ID NO: 372547 - RNA, 23 nt, Artificial Sequence
  Synthetic
uguucucacugagucauagaacu

SEQ ID NO: 372548 - RNA, 24 nt, Artificial Sequence
  Synthetic
auguucucacugagucauagaacu

SEQ ID NO: 372549 - RNA, 18 nt, Artificial Sequence
  Synthetic
cguauuuuaauuagaacu

SEQ ID NO: 372550 - RNA, 19 nt, Artificial Sequence
  Synthetic
ucguauuuuaauuagaacu

SEQ ID NO: 372551 - RNA, 20 nt, Artificial Sequence
  Synthetic
aucguauuuuaauuagaacu

SEQ ID NO: 372552 - RNA, 21 nt, Artificial Sequence
  Synthetic
caucguauuuuaauuagaacu

SEQ ID NO: 372553 - RNA, 22 nt, Artificial Sequence
  Synthetic
gcaucguauuuuaauuagaacu

SEQ ID NO: 372554 - RNA, 23 nt, Artificial Sequence
  Synthetic
ggcaucguauuuuaauuagaacu

SEQ ID NO: 372555 - RNA, 24 nt, Artificial Sequence
  Synthetic
uggcaucguauuuuaauuagaacu

SEQ ID NO: 372556 - RNA, 18 nt, Artificial Sequence
  Synthetic
cugccauguauuagaacu

SEQ ID NO: 372557 - RNA, 19 nt, Artificial Sequence
  Synthetic
ccugccauguauuagaacu

SEQ ID NO: 372558 - RNA, 20 nt, Artificial Sequence
  Synthetic
accugccauguauuagaacu

SEQ ID NO: 372559 - RNA, 21 nt, Artificial Sequence
  Synthetic
caccugccauguauuagaacu

SEQ ID NO: 372560 - RNA, 22 nt, Artificial Sequence
  Synthetic
ucaccugccauguauuagaacu

SEQ ID NO: 372561 - RNA, 23 nt, Artificial Sequence
  Synthetic
aucaccugccauguauuagaacu

SEQ ID NO: 372562 - RNA, 24 nt, Artificial Sequence
  Synthetic
caucaccugccauguauuagaacu

SEQ ID NO: 372563 - RNA, 18 nt, Artificial Sequence
  Synthetic
uuccaaguacuuagaacu

SEQ ID NO: 372564 - RNA, 19 nt, Artificial Sequence
  Synthetic
auuccaaguacuuagaacu

SEQ ID NO: 372565 - RNA, 20 nt, Artificial Sequence
  Synthetic
aauuccaaguacuuagaacu

SEQ ID NO: 372566 - RNA, 21 nt, Artificial Sequence
  Synthetic
gaauuccaaguacuuagaacu

SEQ ID NO: 372567 - RNA, 22 nt, Artificial Sequence
  Synthetic
ugaauuccaaguacuuagaacu

SEQ ID NO: 372568 - RNA, 23 nt, Artificial Sequence
  Synthetic
cugaauuccaaguacuuagaacu

SEQ ID NO: 372569 - RNA, 24 nt, Artificial Sequence
  Synthetic
ccugaauuccaaguacuuagaacu

SEQ ID NO: 372570 - RNA, 18 nt, Artificial Sequence
  Synthetic
ugccugacccuuagaacu

SEQ ID NO: 372571 - RNA, 19 nt, Artificial Sequence
  Synthetic
cugccugacccuuagaacu

SEQ ID NO: 372572 - RNA, 20 nt, Artificial Sequence
  Synthetic
ccugccugacccuuagaacu

SEQ ID NO: 372573 - RNA, 21 nt, Artificial Sequence
  Synthetic
cccugccugacccuuagaacu

SEQ ID NO: 372574 - RNA, 22 nt, Artificial Sequence
  Synthetic
acccugccugacccuuagaacu

SEQ ID NO: 372575 - RNA, 23 nt, Artificial Sequence
  Synthetic
gacccugccugacccuuagaacu

SEQ ID NO: 372576 - RNA, 24 nt, Artificial Sequence
  Synthetic
cgacccugccugacccuuagaacu

SEQ ID NO: 372577 - RNA, 18 nt, Artificial Sequence
  Synthetic
cuuaauugauuccgaacu

SEQ ID NO: 372578 - RNA, 19 nt, Artificial Sequence
  Synthetic
ucuuaauugauuccgaacu

SEQ ID NO: 372579 - RNA, 20 nt, Artificial Sequence
  Synthetic
cucuuaauugauuccgaacu

SEQ ID NO: 372580 - RNA, 21 nt, Artificial Sequence
  Synthetic
ucucuuaauugauuccgaacu

SEQ ID NO: 372581 - RNA, 22 nt, Artificial Sequence
  Synthetic
gucucuuaauugauuccgaacu

SEQ ID NO: 372582 - RNA, 23 nt, Artificial Sequence
  Synthetic
agucucuuaauugauuccgaacu

SEQ ID NO: 372583 - RNA, 24 nt, Artificial Sequence
  Synthetic
uagucucuuaauugauuccgaacu

SEQ ID NO: 372584 - RNA, 18 nt, Artificial Sequence
  Synthetic
agaaaaggaagaggaacu

SEQ ID NO: 372585 - RNA, 19 nt, Artificial Sequence
  Synthetic
gagaaaaggaagaggaacu

SEQ ID NO: 372586 - RNA, 20 nt, Artificial Sequence
  Synthetic
ggagaaaaggaagaggaacu

SEQ ID NO: 372587 - RNA, 21 nt, Artificial Sequence
  Synthetic
uggagaaaaggaagaggaacu

SEQ ID NO: 372588 - RNA, 22 nt, Artificial Sequence
  Synthetic
auggagaaaaggaagaggaacu

SEQ ID NO: 372589 - RNA, 23 nt, Artificial Sequence
  Synthetic
cauggagaaaaggaagaggaacu

SEQ ID NO: 372590 - RNA, 24 nt, Artificial Sequence
  Synthetic
acauggagaaaaggaagaggaacu

SEQ ID NO: 372591 - RNA, 18 nt, Artificial Sequence
  Synthetic
acuuuguaaauaggaacu

SEQ ID NO: 372592 - RNA, 19 nt, Artificial Sequence
  Synthetic
uacuuuguaaauaggaacu

SEQ ID NO: 372593 - RNA, 20 nt, Artificial Sequence
  Synthetic
auacuuuguaaauaggaacu

SEQ ID NO: 372594 - RNA, 21 nt, Artificial Sequence
  Synthetic
cauacuuuguaaauaggaacu

SEQ ID NO: 372595 - RNA, 22 nt, Artificial Sequence
  Synthetic
acauacuuuguaaauaggaacu

SEQ ID NO: 372596 - RNA, 23 nt, Artificial Sequence
  Synthetic
aacauacuuuguaaauaggaacu

SEQ ID NO: 372597 - RNA, 24 nt, Artificial Sequence
  Synthetic
gaacauacuuuguaaauaggaacu

SEQ ID NO: 372598 - RNA, 18 nt, Artificial Sequence
  Synthetic
uguuguuuugcuggaacu

SEQ ID NO: 372599 - RNA, 19 nt, Artificial Sequence
  Synthetic
cuguuguuuugcuggaacu

SEQ ID NO: 372600 - RNA, 20 nt, Artificial Sequence
  Synthetic
gcuguuguuuugcuggaacu

SEQ ID NO: 372601 - RNA, 21 nt, Artificial Sequence
  Synthetic
agcuguuguuuugcuggaacu

SEQ ID NO: 372602 - RNA, 22 nt, Artificial Sequence
  Synthetic
uagcuguuguuuugcuggaacu

SEQ ID NO: 372603 - RNA, 23 nt, Artificial Sequence
  Synthetic
uuagcuguuguuuugcuggaacu

SEQ ID NO: 372604 - RNA, 24 nt, Artificial Sequence
  Synthetic
uuuagcuguuguuuugcuggaacu

SEQ ID NO: 372605 - RNA, 18 nt, Artificial Sequence
  Synthetic
cagagagaauuuggaacu

SEQ ID NO: 372606 - RNA, 19 nt, Artificial Sequence
  Synthetic
acagagagaauuuggaacu

SEQ ID NO: 372607 - RNA, 20 nt, Artificial Sequence
  Synthetic
cacagagagaauuuggaacu

SEQ ID NO: 372608 - RNA, 21 nt, Artificial Sequence
  Synthetic
acacagagagaauuuggaacu

SEQ ID NO: 372609 - RNA, 22 nt, Artificial Sequence
  Synthetic
cacacagagagaauuuggaacu

SEQ ID NO: 372610 - RNA, 23 nt, Artificial Sequence
  Synthetic
acacacagagagaauuuggaacu

SEQ ID NO: 372611 - RNA, 24 nt, Artificial Sequence
  Synthetic
uacacacagagagaauuuggaacu

SEQ ID NO: 372612 - RNA, 18 nt, Artificial Sequence
  Synthetic
uauaguaagaaaugaacu

SEQ ID NO: 372613 - RNA, 19 nt, Artificial Sequence
  Synthetic
cuauaguaagaaaugaacu

SEQ ID NO: 372614 - RNA, 20 nt, Artificial Sequence
  Synthetic
gcuauaguaagaaaugaacu

SEQ ID NO: 372615 - RNA, 21 nt, Artificial Sequence
  Synthetic
agcuauaguaagaaaugaacu

SEQ ID NO: 372616 - RNA, 22 nt, Artificial Sequence
  Synthetic
aagcuauaguaagaaaugaacu

SEQ ID NO: 372617 - RNA, 23 nt, Artificial Sequence
  Synthetic
uaagcuauaguaagaaaugaacu

SEQ ID NO: 372618 - RNA, 24 nt, Artificial Sequence
  Synthetic
cuaagcuauaguaagaaaugaacu

SEQ ID NO: 372619 - RNA, 18 nt, Artificial Sequence
  Synthetic
auacuucuuaaaugaacu

SEQ ID NO: 372620 - RNA, 19 nt, Artificial Sequence
  Synthetic
cauacuucuuaaaugaacu

SEQ ID NO: 372621 - RNA, 20 nt, Artificial Sequence
  Synthetic
acauacuucuuaaaugaacu

SEQ ID NO: 372622 - RNA, 21 nt, Artificial Sequence
  Synthetic
aacauacuucuuaaaugaacu

SEQ ID NO: 372623 - RNA, 22 nt, Artificial Sequence
  Synthetic
caacauacuucuuaaaugaacu

SEQ ID NO: 372624 - RNA, 23 nt, Artificial Sequence
  Synthetic
acaacauacuucuuaaaugaacu

SEQ ID NO: 372625 - RNA, 24 nt, Artificial Sequence
  Synthetic
uacaacauacuucuuaaaugaacu

SEQ ID NO: 372626 - RNA, 18 nt, Artificial Sequence
  Synthetic
auuuccuacuaaugaacu

SEQ ID NO: 372627 - RNA, 19 nt, Artificial Sequence
  Synthetic
gauuuccuacuaaugaacu

SEQ ID NO: 372628 - RNA, 20 nt, Artificial Sequence
  Synthetic
ggauuuccuacuaaugaacu

SEQ ID NO: 372629 - RNA, 21 nt, Artificial Sequence
  Synthetic
gggauuuccuacuaaugaacu

SEQ ID NO: 372630 - RNA, 22 nt, Artificial Sequence
  Synthetic
ugggauuuccuacuaaugaacu

SEQ ID NO: 372631 - RNA, 23 nt, Artificial Sequence
  Synthetic
uugggauuuccuacuaaugaacu

SEQ ID NO: 372632 - RNA, 24 nt, Artificial Sequence
  Synthetic
uuugggauuuccuacuaaugaacu

SEQ ID NO: 372633 - RNA, 18 nt, Artificial Sequence
  Synthetic
cuucaaaggccaugaacu

SEQ ID NO: 372634 - RNA, 19 nt, Artificial Sequence
  Synthetic
gcuucaaaggccaugaacu

SEQ ID NO: 372635 - RNA, 20 nt, Artificial Sequence
  Synthetic
ugcuucaaaggccaugaacu

SEQ ID NO: 372636 - RNA, 21 nt, Artificial Sequence
  Synthetic
gugcuucaaaggccaugaacu

SEQ ID NO: 372637 - RNA, 22 nt, Artificial Sequence
  Synthetic
ggugcuucaaaggccaugaacu

SEQ ID NO: 372638 - RNA, 23 nt, Artificial Sequence
  Synthetic
gggugcuucaaaggccaugaacu

SEQ ID NO: 372639 - RNA, 24 nt, Artificial Sequence
  Synthetic
agggugcuucaaaggccaugaacu

SEQ ID NO: 372640 - RNA, 18 nt, Artificial Sequence
  Synthetic
cuaaaauagggaugaacu

SEQ ID NO: 372641 - RNA, 19 nt, Artificial Sequence
  Synthetic
ccuaaaauagggaugaacu

SEQ ID NO: 372642 - RNA, 20 nt, Artificial Sequence
  Synthetic
uccuaaaauagggaugaacu

SEQ ID NO: 372643 - RNA, 21 nt, Artificial Sequence
  Synthetic
auccuaaaauagggaugaacu

SEQ ID NO: 372644 - RNA, 22 nt, Artificial Sequence
  Synthetic
cauccuaaaauagggaugaacu

SEQ ID NO: 372645 - RNA, 23 nt, Artificial Sequence
  Synthetic
acauccuaaaauagggaugaacu

SEQ ID NO: 372646 - RNA, 24 nt, Artificial Sequence
  Synthetic
cacauccuaaaauagggaugaacu

SEQ ID NO: 372647 - RNA, 18 nt, Artificial Sequence
  Synthetic
acucccaagcccugaacu

SEQ ID NO: 372648 - RNA, 19 nt, Artificial Sequence
  Synthetic
cacucccaagcccugaacu

SEQ ID NO: 372649 - RNA, 20 nt, Artificial Sequence
  Synthetic
ccacucccaagcccugaacu

SEQ ID NO: 372650 - RNA, 21 nt, Artificial Sequence
  Synthetic
cccacucccaagcccugaacu

SEQ ID NO: 372651 - RNA, 22 nt, Artificial Sequence
  Synthetic
ccccacucccaagcccugaacu

SEQ ID NO: 372652 - RNA, 23 nt, Artificial Sequence
  Synthetic
cccccacucccaagcccugaacu

SEQ ID NO: 372653 - RNA, 24 nt, Artificial Sequence
  Synthetic
ucccccacucccaagcccugaacu

SEQ ID NO: 372654 - RNA, 18 nt, Artificial Sequence
  Synthetic
aggcagaaauccugaacu

SEQ ID NO: 372655 - RNA, 19 nt, Artificial Sequence
  Synthetic
uaggcagaaauccugaacu

SEQ ID NO: 372656 - RNA, 20 nt, Artificial Sequence
  Synthetic
auaggcagaaauccugaacu

SEQ ID NO: 372657 - RNA, 21 nt, Artificial Sequence
  Synthetic
aauaggcagaaauccugaacu

SEQ ID NO: 372658 - RNA, 22 nt, Artificial Sequence
  Synthetic
aaauaggcagaaauccugaacu

SEQ ID NO: 372659 - RNA, 23 nt, Artificial Sequence
  Synthetic
uaaauaggcagaaauccugaacu

SEQ ID NO: 372660 - RNA, 24 nt, Artificial Sequence
  Synthetic
uuaaauaggcagaaauccugaacu

SEQ ID NO: 372661 - RNA, 18 nt, Artificial Sequence
  Synthetic
caguggaaaagcugaacu

SEQ ID NO: 372662 - RNA, 19 nt, Artificial Sequence
  Synthetic
ccaguggaaaagcugaacu

SEQ ID NO: 372663 - RNA, 20 nt, Artificial Sequence
  Synthetic
cccaguggaaaagcugaacu

SEQ ID NO: 372664 - RNA, 21 nt, Artificial Sequence
  Synthetic
ucccaguggaaaagcugaacu

SEQ ID NO: 372665 - RNA, 22 nt, Artificial Sequence
  Synthetic
aucccaguggaaaagcugaacu

SEQ ID NO: 372666 - RNA, 23 nt, Artificial Sequence
  Synthetic
gaucccaguggaaaagcugaacu

SEQ ID NO: 372667 - RNA, 24 nt, Artificial Sequence
  Synthetic
ugaucccaguggaaaagcugaacu

SEQ ID NO: 372668 - RNA, 18 nt, Artificial Sequence
  Synthetic
cuucaaguggagugaacu

SEQ ID NO: 372669 - RNA, 19 nt, Artificial Sequence
  Synthetic
acuucaaguggagugaacu

SEQ ID NO: 372670 - RNA, 20 nt, Artificial Sequence
  Synthetic
aacuucaaguggagugaacu

SEQ ID NO: 372671 - RNA, 21 nt, Artificial Sequence
  Synthetic
gaacuucaaguggagugaacu

SEQ ID NO: 372672 - RNA, 22 nt, Artificial Sequence
  Synthetic
ugaacuucaaguggagugaacu

SEQ ID NO: 372673 - RNA, 23 nt, Artificial Sequence
  Synthetic
augaacuucaaguggagugaacu

SEQ ID NO: 372674 - RNA, 24 nt, Artificial Sequence
  Synthetic
caugaacuucaaguggagugaacu

SEQ ID NO: 372675 - RNA, 18 nt, Artificial Sequence
  Synthetic
uguuucauagugugaacu

SEQ ID NO: 372676 - RNA, 19 nt, Artificial Sequence
  Synthetic
guguuucauagugugaacu

SEQ ID NO: 372677 - RNA, 20 nt, Artificial Sequence
  Synthetic
aguguuucauagugugaacu

SEQ ID NO: 372678 - RNA, 21 nt, Artificial Sequence
  Synthetic
uaguguuucauagugugaacu

SEQ ID NO: 372679 - RNA, 22 nt, Artificial Sequence
  Synthetic
auaguguuucauagugugaacu

SEQ ID NO: 372680 - RNA, 23 nt, Artificial Sequence
  Synthetic
gauaguguuucauagugugaacu

SEQ ID NO: 372681 - RNA, 24 nt, Artificial Sequence
  Synthetic
ggauaguguuucauagugugaacu

SEQ ID NO: 372682 - RNA, 18 nt, Artificial Sequence
  Synthetic
acgagaaucacuugaacu

SEQ ID NO: 372683 - RNA, 19 nt, Artificial Sequence
  Synthetic
cacgagaaucacuugaacu

SEQ ID NO: 372684 - RNA, 20 nt, Artificial Sequence
  Synthetic
gcacgagaaucacuugaacu

SEQ ID NO: 372685 - RNA, 21 nt, Artificial Sequence
  Synthetic
ggcacgagaaucacuugaacu

SEQ ID NO: 372686 - RNA, 22 nt, Artificial Sequence
  Synthetic
aggcacgagaaucacuugaacu

SEQ ID NO: 372687 - RNA, 23 nt, Artificial Sequence
  Synthetic
gaggcacgagaaucacuugaacu

SEQ ID NO: 372688 - RNA, 24 nt, Artificial Sequence
  Synthetic
ugaggcacgagaaucacuugaacu

SEQ ID NO: 372689 - RNA, 18 nt, Artificial Sequence
  Synthetic
cucacugagccuugaacu

SEQ ID NO: 372690 - RNA, 19 nt, Artificial Sequence
  Synthetic
gcucacugagccuugaacu

SEQ ID NO: 372691 - RNA, 20 nt, Artificial Sequence
  Synthetic
agcucacugagccuugaacu

SEQ ID NO: 372692 - RNA, 21 nt, Artificial Sequence
  Synthetic
uagcucacugagccuugaacu

SEQ ID NO: 372693 - RNA, 22 nt, Artificial Sequence
  Synthetic
auagcucacugagccuugaacu

SEQ ID NO: 372694 - RNA, 23 nt, Artificial Sequence
  Synthetic
cauagcucacugagccuugaacu

SEQ ID NO: 372695 - RNA, 24 nt, Artificial Sequence
  Synthetic
ucauagcucacugagccuugaacu

SEQ ID NO: 372696 - RNA, 18 nt, Artificial Sequence
  Synthetic
ucaggcuggccuugaacu

SEQ ID NO: 372697 - RNA, 19 nt, Artificial Sequence
  Synthetic
aucaggcuggccuugaacu

SEQ ID NO: 372698 - RNA, 20 nt, Artificial Sequence
  Synthetic
gaucaggcuggccuugaacu

SEQ ID NO: 372699 - RNA, 21 nt, Artificial Sequence
  Synthetic
ugaucaggcuggccuugaacu

SEQ ID NO: 372700 - RNA, 22 nt, Artificial Sequence
  Synthetic
augaucaggcuggccuugaacu

SEQ ID NO: 372701 - RNA, 23 nt, Artificial Sequence
  Synthetic
aaugaucaggcuggccuugaacu

SEQ ID NO: 372702 - RNA, 24 nt, Artificial Sequence
  Synthetic
uaaugaucaggcuggccuugaacu

SEQ ID NO: 372703 - RNA, 18 nt, Artificial Sequence
  Synthetic
accagaaucgcuugaacu

SEQ ID NO: 372704 - RNA, 19 nt, Artificial Sequence
  Synthetic
uaccagaaucgcuugaacu

SEQ ID NO: 372705 - RNA, 20 nt, Artificial Sequence
  Synthetic
guaccagaaucgcuugaacu

SEQ ID NO: 372706 - RNA, 21 nt, Artificial Sequence
  Synthetic
gguaccagaaucgcuugaacu

SEQ ID NO: 372707 - RNA, 22 nt, Artificial Sequence
  Synthetic
agguaccagaaucgcuugaacu

SEQ ID NO: 372708 - RNA, 23 nt, Artificial Sequence
  Synthetic
gagguaccagaaucgcuugaacu

SEQ ID NO: 372709 - RNA, 24 nt, Artificial Sequence
  Synthetic
ugagguaccagaaucgcuugaacu

SEQ ID NO: 372710 - RNA, 18 nt, Artificial Sequence
  Synthetic
ccaggcuguucuugaacu

SEQ ID NO: 372711 - RNA, 19 nt, Artificial Sequence
  Synthetic
cccaggcuguucuugaacu

SEQ ID NO: 372712 - RNA, 20 nt, Artificial Sequence
  Synthetic
gcccaggcuguucuugaacu

SEQ ID NO: 372713 - RNA, 21 nt, Artificial Sequence
  Synthetic
ugcccaggcuguucuugaacu

SEQ ID NO: 372714 - RNA, 22 nt, Artificial Sequence
  Synthetic
uugcccaggcuguucuugaacu

SEQ ID NO: 372715 - RNA, 23 nt, Artificial Sequence
  Synthetic
guugcccaggcuguucuugaacu

SEQ ID NO: 372716 - RNA, 24 nt, Artificial Sequence
  Synthetic
uguugcccaggcuguucuugaacu

SEQ ID NO: 372717 - RNA, 18 nt, Artificial Sequence
  Synthetic
agcuuuagacuuugaacu

SEQ ID NO: 372718 - RNA, 19 nt, Artificial Sequence
  Synthetic
uagcuuuagacuuugaacu

SEQ ID NO: 372719 - RNA, 20 nt, Artificial Sequence
  Synthetic
cuagcuuuagacuuugaacu

SEQ ID NO: 372720 - RNA, 21 nt, Artificial Sequence
  Synthetic
acuagcuuuagacuuugaacu

SEQ ID NO: 372721 - RNA, 22 nt, Artificial Sequence
  Synthetic
cacuagcuuuagacuuugaacu

SEQ ID NO: 372722 - RNA, 23 nt, Artificial Sequence
  Synthetic
ucacuagcuuuagacuuugaacu

SEQ ID NO: 372723 - RNA, 24 nt, Artificial Sequence
  Synthetic
uucacuagcuuuagacuuugaacu

SEQ ID NO: 372724 - RNA, 18 nt, Artificial Sequence
  Synthetic
ugccauauauuuugaacu

SEQ ID NO: 372725 - RNA, 19 nt, Artificial Sequence
  Synthetic
augccauauauuuugaacu

SEQ ID NO: 372726 - RNA, 20 nt, Artificial Sequence
  Synthetic
aaugccauauauuuugaacu

SEQ ID NO: 372727 - RNA, 21 nt, Artificial Sequence
  Synthetic
gaaugccauauauuuugaacu

SEQ ID NO: 372728 - RNA, 22 nt, Artificial Sequence
  Synthetic
agaaugccauauauuuugaacu

SEQ ID NO: 372729 - RNA, 23 nt, Artificial Sequence
  Synthetic
uagaaugccauauauuuugaacu

SEQ ID NO: 372730 - RNA, 24 nt, Artificial Sequence
  Synthetic
auagaaugccauauauuuugaacu

SEQ ID NO: 372731 - RNA, 18 nt, Artificial Sequence
  Synthetic
uugcucagagaaauaacu

SEQ ID NO: 372732 - RNA, 19 nt, Artificial Sequence
  Synthetic
uuugcucagagaaauaacu

SEQ ID NO: 372733 - RNA, 20 nt, Artificial Sequence
  Synthetic
cuuugcucagagaaauaacu

SEQ ID NO: 372734 - RNA, 21 nt, Artificial Sequence
  Synthetic
acuuugcucagagaaauaacu

SEQ ID NO: 372735 - RNA, 22 nt, Artificial Sequence
  Synthetic
aacuuugcucagagaaauaacu

SEQ ID NO: 372736 - RNA, 23 nt, Artificial Sequence
  Synthetic
aaacuuugcucagagaaauaacu

SEQ ID NO: 372737 - RNA, 24 nt, Artificial Sequence
  Synthetic
gaaacuuugcucagagaaauaacu

SEQ ID NO: 372738 - RNA, 18 nt, Artificial Sequence
  Synthetic
gauuuuuauucaauaacu

SEQ ID NO: 372739 - RNA, 19 nt, Artificial Sequence
  Synthetic
ugauuuuuauucaauaacu

SEQ ID NO: 372740 - RNA, 20 nt, Artificial Sequence
  Synthetic
uugauuuuuauucaauaacu

SEQ ID NO: 372741 - RNA, 21 nt, Artificial Sequence
  Synthetic
guugauuuuuauucaauaacu

SEQ ID NO: 372742 - RNA, 22 nt, Artificial Sequence
  Synthetic
uguugauuuuuauucaauaacu

SEQ ID NO: 372743 - RNA, 23 nt, Artificial Sequence
  Synthetic
uuguugauuuuuauucaauaacu

SEQ ID NO: 372744 - RNA, 24 nt, Artificial Sequence
  Synthetic
cuuguugauuuuuauucaauaacu

SEQ ID NO: 372745 - RNA, 18 nt, Artificial Sequence
  Synthetic
acuauauggauaauaacu

SEQ ID NO: 372746 - RNA, 19 nt, Artificial Sequence
  Synthetic
uacuauauggauaauaacu

SEQ ID NO: 372747 - RNA, 20 nt, Artificial Sequence
  Synthetic
uuacuauauggauaauaacu

SEQ ID NO: 372748 - RNA, 21 nt, Artificial Sequence
  Synthetic
auuacuauauggauaauaacu

SEQ ID NO: 372749 - RNA, 22 nt, Artificial Sequence
  Synthetic
aauuacuauauggauaauaacu

SEQ ID NO: 372750 - RNA, 23 nt, Artificial Sequence
  Synthetic
caauuacuauauggauaauaacu

SEQ ID NO: 372751 - RNA, 24 nt, Artificial Sequence
  Synthetic
ccaauuacuauauggauaauaacu

SEQ ID NO: 372752 - RNA, 18 nt, Artificial Sequence
  Synthetic
ugucucuugguaauaacu

SEQ ID NO: 372753 - RNA, 19 nt, Artificial Sequence
  Synthetic
augucucuugguaauaacu

SEQ ID NO: 372754 - RNA, 20 nt, Artificial Sequence
  Synthetic
aaugucucuugguaauaacu

SEQ ID NO: 372755 - RNA, 21 nt, Artificial Sequence
  Synthetic
aaaugucucuugguaauaacu

SEQ ID NO: 372756 - RNA, 22 nt, Artificial Sequence
  Synthetic
caaaugucucuugguaauaacu

SEQ ID NO: 372757 - RNA, 23 nt, Artificial Sequence
  Synthetic
ucaaaugucucuugguaauaacu

SEQ ID NO: 372758 - RNA, 24 nt, Artificial Sequence
  Synthetic
uucaaaugucucuugguaauaacu

SEQ ID NO: 372759 - RNA, 18 nt, Artificial Sequence
  Synthetic
ucacacuacuuaauaacu

SEQ ID NO: 372760 - RNA, 19 nt, Artificial Sequence
  Synthetic
uucacacuacuuaauaacu

SEQ ID NO: 372761 - RNA, 20 nt, Artificial Sequence
  Synthetic
cuucacacuacuuaauaacu

SEQ ID NO: 372762 - RNA, 21 nt, Artificial Sequence
  Synthetic
ucuucacacuacuuaauaacu

SEQ ID NO: 372763 - RNA, 22 nt, Artificial Sequence
  Synthetic
gucuucacacuacuuaauaacu

SEQ ID NO: 372764 - RNA, 23 nt, Artificial Sequence
  Synthetic
ugucuucacacuacuuaauaacu

SEQ ID NO: 372765 - RNA, 24 nt, Artificial Sequence
  Synthetic
uugucuucacacuacuuaauaacu

SEQ ID NO: 372766 - RNA, 18 nt, Artificial Sequence
  Synthetic
gccaagauacacauaacu

SEQ ID NO: 372767 - RNA, 19 nt, Artificial Sequence
  Synthetic
ugccaagauacacauaacu

SEQ ID NO: 372768 - RNA, 20 nt, Artificial Sequence
  Synthetic
gugccaagauacacauaacu

SEQ ID NO: 372769 - RNA, 21 nt, Artificial Sequence
  Synthetic
cgugccaagauacacauaacu

SEQ ID NO: 372770 - RNA, 22 nt, Artificial Sequence
  Synthetic
ucgugccaagauacacauaacu

SEQ ID NO: 372771 - RNA, 23 nt, Artificial Sequence
  Synthetic
aucgugccaagauacacauaacu

SEQ ID NO: 372772 - RNA, 24 nt, Artificial Sequence
  Synthetic
gaucgugccaagauacacauaacu

SEQ ID NO: 372773 - RNA, 18 nt, Artificial Sequence
  Synthetic
uuuagagaugacauaacu

SEQ ID NO: 372774 - RNA, 19 nt, Artificial Sequence
  Synthetic
guuuagagaugacauaacu

SEQ ID NO: 372775 - RNA, 20 nt, Artificial Sequence
  Synthetic
uguuuagagaugacauaacu

SEQ ID NO: 372776 - RNA, 21 nt, Artificial Sequence
  Synthetic
uuguuuagagaugacauaacu

SEQ ID NO: 372777 - RNA, 22 nt, Artificial Sequence
  Synthetic
guuguuuagagaugacauaacu

SEQ ID NO: 372778 - RNA, 23 nt, Artificial Sequence
  Synthetic
aguuguuuagagaugacauaacu

SEQ ID NO: 372779 - RNA, 24 nt, Artificial Sequence
  Synthetic
aaguuguuuagagaugacauaacu

SEQ ID NO: 372780 - RNA, 18 nt, Artificial Sequence
  Synthetic
ugaagccuugacauaacu

SEQ ID NO: 372781 - RNA, 19 nt, Artificial Sequence
  Synthetic
uugaagccuugacauaacu

SEQ ID NO: 372782 - RNA, 20 nt, Artificial Sequence
  Synthetic
auugaagccuugacauaacu

SEQ ID NO: 372783 - RNA, 21 nt, Artificial Sequence
  Synthetic
gauugaagccuugacauaacu

SEQ ID NO: 372784 - RNA, 22 nt, Artificial Sequence
  Synthetic
ugauugaagccuugacauaacu

SEQ ID NO: 372785 - RNA, 23 nt, Artificial Sequence
  Synthetic
gugauugaagccuugacauaacu

SEQ ID NO: 372786 - RNA, 24 nt, Artificial Sequence
  Synthetic
ugugauugaagccuugacauaacu

SEQ ID NO: 372787 - RNA, 18 nt, Artificial Sequence
  Synthetic
acucacuaacucauaacu

SEQ ID NO: 372788 - RNA, 19 nt, Artificial Sequence
  Synthetic
cacucacuaacucauaacu

SEQ ID NO: 372789 - RNA, 20 nt, Artificial Sequence
  Synthetic
acacucacuaacucauaacu

SEQ ID NO: 372790 - RNA, 21 nt, Artificial Sequence
  Synthetic
aacacucacuaacucauaacu

SEQ ID NO: 372791 - RNA, 22 nt, Artificial Sequence
  Synthetic
caacacucacuaacucauaacu

SEQ ID NO: 372792 - RNA, 23 nt, Artificial Sequence
  Synthetic
ucaacacucacuaacucauaacu

SEQ ID NO: 372793 - RNA, 24 nt, Artificial Sequence
  Synthetic
uucaacacucacuaacucauaacu

SEQ ID NO: 372794 - RNA, 18 nt, Artificial Sequence
  Synthetic
aaguugauguucauaacu

SEQ ID NO: 372795 - RNA, 19 nt, Artificial Sequence
  Synthetic
gaaguugauguucauaacu

SEQ ID NO: 372796 - RNA, 20 nt, Artificial Sequence
  Synthetic
ugaaguugauguucauaacu

SEQ ID NO: 372797 - RNA, 21 nt, Artificial Sequence
  Synthetic
augaaguugauguucauaacu

SEQ ID NO: 372798 - RNA, 22 nt, Artificial Sequence
  Synthetic
caugaaguugauguucauaacu

SEQ ID NO: 372799 - RNA, 23 nt, Artificial Sequence
  Synthetic
gcaugaaguugauguucauaacu

SEQ ID NO: 372800 - RNA, 24 nt, Artificial Sequence
  Synthetic
ugcaugaaguugauguucauaacu

SEQ ID NO: 372801 - RNA, 18 nt, Artificial Sequence
  Synthetic
aaaucccauuucauaacu

SEQ ID NO: 372802 - RNA, 19 nt, Artificial Sequence
  Synthetic
uaaaucccauuucauaacu

SEQ ID NO: 372803 - RNA, 20 nt, Artificial Sequence
  Synthetic
guaaaucccauuucauaacu

SEQ ID NO: 372804 - RNA, 21 nt, Artificial Sequence
  Synthetic
gguaaaucccauuucauaacu

SEQ ID NO: 372805 - RNA, 22 nt, Artificial Sequence
  Synthetic
ugguaaaucccauuucauaacu

SEQ ID NO: 372806 - RNA, 23 nt, Artificial Sequence
  Synthetic
cugguaaaucccauuucauaacu

SEQ ID NO: 372807 - RNA, 24 nt, Artificial Sequence
  Synthetic
ucugguaaaucccauuucauaacu

SEQ ID NO: 372808 - RNA, 18 nt, Artificial Sequence
  Synthetic
gacuuuauacuuauaacu

SEQ ID NO: 372809 - RNA, 19 nt, Artificial Sequence
  Synthetic
ugacuuuauacuuauaacu

SEQ ID NO: 372810 - RNA, 20 nt, Artificial Sequence
  Synthetic
cugacuuuauacuuauaacu

SEQ ID NO: 372811 - RNA, 21 nt, Artificial Sequence
  Synthetic
gcugacuuuauacuuauaacu

SEQ ID NO: 372812 - RNA, 22 nt, Artificial Sequence
  Synthetic
ggcugacuuuauacuuauaacu

SEQ ID NO: 372813 - RNA, 23 nt, Artificial Sequence
  Synthetic
gggcugacuuuauacuuauaacu

SEQ ID NO: 372814 - RNA, 24 nt, Artificial Sequence
  Synthetic
agggcugacuuuauacuuauaacu

SEQ ID NO: 372815 - RNA, 18 nt, Artificial Sequence
  Synthetic
aguauuaagauacuaacu

SEQ ID NO: 372816 - RNA, 19 nt, Artificial Sequence
  Synthetic
gaguauuaagauacuaacu

SEQ ID NO: 372817 - RNA, 20 nt, Artificial Sequence
  Synthetic
ugaguauuaagauacuaacu

SEQ ID NO: 372818 - RNA, 21 nt, Artificial Sequence
  Synthetic
augaguauuaagauacuaacu

SEQ ID NO: 372819 - RNA, 22 nt, Artificial Sequence
  Synthetic
aaugaguauuaagauacuaacu

SEQ ID NO: 372820 - RNA, 23 nt, Artificial Sequence
  Synthetic
uaaugaguauuaagauacuaacu

SEQ ID NO: 372821 - RNA, 24 nt, Artificial Sequence
  Synthetic
auaaugaguauuaagauacuaacu

SEQ ID NO: 372822 - RNA, 18 nt, Artificial Sequence
  Synthetic
acauggucacaccuaacu

SEQ ID NO: 372823 - RNA, 19 nt, Artificial Sequence
  Synthetic
cacauggucacaccuaacu

SEQ ID NO: 372824 - RNA, 20 nt, Artificial Sequence
  Synthetic
ucacauggucacaccuaacu

SEQ ID NO: 372825 - RNA, 21 nt, Artificial Sequence
  Synthetic
gucacauggucacaccuaacu

SEQ ID NO: 372826 - RNA, 22 nt, Artificial Sequence
  Synthetic
ugucacauggucacaccuaacu

SEQ ID NO: 372827 - RNA, 23 nt, Artificial Sequence
  Synthetic
uugucacauggucacaccuaacu

SEQ ID NO: 372828 - RNA, 24 nt, Artificial Sequence
  Synthetic
cuugucacauggucacaccuaacu

SEQ ID NO: 372829 - RNA, 18 nt, Artificial Sequence
  Synthetic
acguggucaugccuaacu

SEQ ID NO: 372830 - RNA, 19 nt, Artificial Sequence
  Synthetic
cacguggucaugccuaacu

SEQ ID NO: 372831 - RNA, 20 nt, Artificial Sequence
  Synthetic
ucacguggucaugccuaacu

SEQ ID NO: 372832 - RNA, 21 nt, Artificial Sequence
  Synthetic
gucacguggucaugccuaacu

SEQ ID NO: 372833 - RNA, 22 nt, Artificial Sequence
  Synthetic
agucacguggucaugccuaacu

SEQ ID NO: 372834 - RNA, 23 nt, Artificial Sequence
  Synthetic
aagucacguggucaugccuaacu

SEQ ID NO: 372835 - RNA, 24 nt, Artificial Sequence
  Synthetic
gaagucacguggucaugccuaacu

SEQ ID NO: 372836 - RNA, 18 nt, Artificial Sequence
  Synthetic
uuguaguccuggcuaacu

SEQ ID NO: 372837 - RNA, 19 nt, Artificial Sequence
  Synthetic
cuuguaguccuggcuaacu

SEQ ID NO: 372838 - RNA, 20 nt, Artificial Sequence
  Synthetic
gcuuguaguccuggcuaacu

SEQ ID NO: 372839 - RNA, 21 nt, Artificial Sequence
  Synthetic
ugcuuguaguccuggcuaacu

SEQ ID NO: 372840 - RNA, 22 nt, Artificial Sequence
  Synthetic
gugcuuguaguccuggcuaacu

SEQ ID NO: 372841 - RNA, 23 nt, Artificial Sequence
  Synthetic
ugugcuuguaguccuggcuaacu

SEQ ID NO: 372842 - RNA, 24 nt, Artificial Sequence
  Synthetic
gugugcuuguaguccuggcuaacu

SEQ ID NO: 372843 - RNA, 18 nt, Artificial Sequence
  Synthetic
uccuucccucugcuaacu

SEQ ID NO: 372844 - RNA, 19 nt, Artificial Sequence
  Synthetic
uuccuucccucugcuaacu

SEQ ID NO: 372845 - RNA, 20 nt, Artificial Sequence
  Synthetic
uuuccuucccucugcuaacu

SEQ ID NO: 372846 - RNA, 21 nt, Artificial Sequence
  Synthetic
auuuccuucccucugcuaacu

SEQ ID NO: 372847 - RNA, 22 nt, Artificial Sequence
  Synthetic
uauuuccuucccucugcuaacu

SEQ ID NO: 372848 - RNA, 23 nt, Artificial Sequence
  Synthetic
auauuuccuucccucugcuaacu

SEQ ID NO: 372849 - RNA, 24 nt, Artificial Sequence
  Synthetic
aauauuuccuucccucugcuaacu

SEQ ID NO: 372850 - RNA, 18 nt, Artificial Sequence
  Synthetic
uucuucuuucugcuaacu

SEQ ID NO: 372851 - RNA, 19 nt, Artificial Sequence
  Synthetic
uuucuucuuucugcuaacu

SEQ ID NO: 372852 - RNA, 20 nt, Artificial Sequence
  Synthetic
uuuucuucuuucugcuaacu

SEQ ID NO: 372853 - RNA, 21 nt, Artificial Sequence
  Synthetic
auuuucuucuuucugcuaacu

SEQ ID NO: 372854 - RNA, 22 nt, Artificial Sequence
  Synthetic
uauuuucuucuuucugcuaacu

SEQ ID NO: 372855 - RNA, 23 nt, Artificial Sequence
  Synthetic
uuauuuucuucuuucugcuaacu

SEQ ID NO: 372856 - RNA, 24 nt, Artificial Sequence
  Synthetic
guuauuuucuucuuucugcuaacu

SEQ ID NO: 372857 - RNA, 18 nt, Artificial Sequence
  Synthetic
guaauuuuauugcuaacu

SEQ ID NO: 372858 - RNA, 19 nt, Artificial Sequence
  Synthetic
aguaauuuuauugcuaacu

SEQ ID NO: 372859 - RNA, 20 nt, Artificial Sequence
  Synthetic
uaguaauuuuauugcuaacu

SEQ ID NO: 372860 - RNA, 21 nt, Artificial Sequence
  Synthetic
uuaguaauuuuauugcuaacu

SEQ ID NO: 372861 - RNA, 22 nt, Artificial Sequence
  Synthetic
uuuaguaauuuuauugcuaacu

SEQ ID NO: 372862 - RNA, 23 nt, Artificial Sequence
  Synthetic
auuuaguaauuuuauugcuaacu

SEQ ID NO: 372863 - RNA, 24 nt, Artificial Sequence
  Synthetic
aauuuaguaauuuuauugcuaacu

SEQ ID NO: 372864 - RNA, 18 nt, Artificial Sequence
  Synthetic
agcuuuauuauucuaacu

SEQ ID NO: 372865 - RNA, 19 nt, Artificial Sequence
  Synthetic
gagcuuuauuauucuaacu

SEQ ID NO: 372866 - RNA, 20 nt, Artificial Sequence
  Synthetic
agagcuuuauuauucuaacu

SEQ ID NO: 372867 - RNA, 21 nt, Artificial Sequence
  Synthetic
cagagcuuuauuauucuaacu

SEQ ID NO: 372868 - RNA, 22 nt, Artificial Sequence
  Synthetic
gcagagcuuuauuauucuaacu

SEQ ID NO: 372869 - RNA, 23 nt, Artificial Sequence
  Synthetic
ggcagagcuuuauuauucuaacu

SEQ ID NO: 372870 - RNA, 24 nt, Artificial Sequence
  Synthetic
uggcagagcuuuauuauucuaacu

SEQ ID NO: 372871 - RNA, 18 nt, Artificial Sequence
  Synthetic
gagugugugaggguaacu

SEQ ID NO: 372872 - RNA, 19 nt, Artificial Sequence
  Synthetic
ugagugugugaggguaacu

SEQ ID NO: 372873 - RNA, 20 nt, Artificial Sequence
  Synthetic
cugagugugugaggguaacu

SEQ ID NO: 372874 - RNA, 21 nt, Artificial Sequence
  Synthetic
ccugagugugugaggguaacu

SEQ ID NO: 372875 - RNA, 22 nt, Artificial Sequence
  Synthetic
accugagugugugaggguaacu

SEQ ID NO: 372876 - RNA, 23 nt, Artificial Sequence
  Synthetic
uaccugagugugugaggguaacu

SEQ ID NO: 372877 - RNA, 24 nt, Artificial Sequence
  Synthetic
auaccugagugugugaggguaacu

SEQ ID NO: 372878 - RNA, 18 nt, Artificial Sequence
  Synthetic
ucuucaguuaggguaacu

SEQ ID NO: 372879 - RNA, 19 nt, Artificial Sequence
  Synthetic
uucuucaguuaggguaacu

SEQ ID NO: 372880 - RNA, 20 nt, Artificial Sequence
  Synthetic
auucuucaguuaggguaacu

SEQ ID NO: 372881 - RNA, 21 nt, Artificial Sequence
  Synthetic
cauucuucaguuaggguaacu

SEQ ID NO: 372882 - RNA, 22 nt, Artificial Sequence
  Synthetic
ucauucuucaguuaggguaacu

SEQ ID NO: 372883 - RNA, 23 nt, Artificial Sequence
  Synthetic
cucauucuucaguuaggguaacu

SEQ ID NO: 372884 - RNA, 24 nt, Artificial Sequence
  Synthetic
acucauucuucaguuaggguaacu

SEQ ID NO: 372885 - RNA, 18 nt, Artificial Sequence
  Synthetic
agugaaaaauggguaacu

SEQ ID NO: 372886 - RNA, 19 nt, Artificial Sequence
  Synthetic
gagugaaaaauggguaacu

SEQ ID NO: 372887 - RNA, 20 nt, Artificial Sequence
  Synthetic
agagugaaaaauggguaacu

SEQ ID NO: 372888 - RNA, 21 nt, Artificial Sequence
  Synthetic
cagagugaaaaauggguaacu

SEQ ID NO: 372889 - RNA, 22 nt, Artificial Sequence
  Synthetic
acagagugaaaaauggguaacu

SEQ ID NO: 372890 - RNA, 23 nt, Artificial Sequence
  Synthetic
cacagagugaaaaauggguaacu

SEQ ID NO: 372891 - RNA, 24 nt, Artificial Sequence
  Synthetic
ccacagagugaaaaauggguaacu

SEQ ID NO: 372892 - RNA, 18 nt, Artificial Sequence
  Synthetic
gggacauaguggguaacu

SEQ ID NO: 372893 - RNA, 19 nt, Artificial Sequence
  Synthetic
ggggacauaguggguaacu

SEQ ID NO: 372894 - RNA, 20 nt, Artificial Sequence
  Synthetic
cggggacauaguggguaacu

SEQ ID NO: 372895 - RNA, 21 nt, Artificial Sequence
  Synthetic
ucggggacauaguggguaacu

SEQ ID NO: 372896 - RNA, 22 nt, Artificial Sequence
  Synthetic
cucggggacauaguggguaacu

SEQ ID NO: 372897 - RNA, 23 nt, Artificial Sequence
  Synthetic
ucucggggacauaguggguaacu

SEQ ID NO: 372898 - RNA, 24 nt, Artificial Sequence
  Synthetic
gucucggggacauaguggguaacu

SEQ ID NO: 372899 - RNA, 18 nt, Artificial Sequence
  Synthetic
uauaucacucugguaacu

SEQ ID NO: 372900 - RNA, 19 nt, Artificial Sequence
  Synthetic
auauaucacucugguaacu

SEQ ID NO: 372901 - RNA, 20 nt, Artificial Sequence
  Synthetic
aauauaucacucugguaacu

SEQ ID NO: 372902 - RNA, 21 nt, Artificial Sequence
  Synthetic
aaauauaucacucugguaacu

SEQ ID NO: 372903 - RNA, 22 nt, Artificial Sequence
  Synthetic
caaauauaucacucugguaacu

SEQ ID NO: 372904 - RNA, 23 nt, Artificial Sequence
  Synthetic
ucaaauauaucacucugguaacu

SEQ ID NO: 372905 - RNA, 24 nt, Artificial Sequence
  Synthetic
uucaaauauaucacucugguaacu

SEQ ID NO: 372906 - RNA, 18 nt, Artificial Sequence
  Synthetic
ucuuucugagugguaacu

SEQ ID NO: 372907 - RNA, 19 nt, Artificial Sequence
  Synthetic
uucuuucugagugguaacu

SEQ ID NO: 372908 - RNA, 20 nt, Artificial Sequence
  Synthetic
auucuuucugagugguaacu

SEQ ID NO: 372909 - RNA, 21 nt, Artificial Sequence
  Synthetic
uauucuuucugagugguaacu

SEQ ID NO: 372910 - RNA, 22 nt, Artificial Sequence
  Synthetic
auauucuuucugagugguaacu

SEQ ID NO: 372911 - RNA, 23 nt, Artificial Sequence
  Synthetic
aauauucuuucugagugguaacu

SEQ ID NO: 372912 - RNA, 24 nt, Artificial Sequence
  Synthetic
uaauauucuuucugagugguaacu

SEQ ID NO: 372913 - RNA, 18 nt, Artificial Sequence
  Synthetic
uaguguuugcauguaacu

SEQ ID NO: 372914 - RNA, 19 nt, Artificial Sequence
  Synthetic
auaguguuugcauguaacu

SEQ ID NO: 372915 - RNA, 20 nt, Artificial Sequence
  Synthetic
cauaguguuugcauguaacu

SEQ ID NO: 372916 - RNA, 21 nt, Artificial Sequence
  Synthetic
gcauaguguuugcauguaacu

SEQ ID NO: 372917 - RNA, 22 nt, Artificial Sequence
  Synthetic
ggcauaguguuugcauguaacu

SEQ ID NO: 372918 - RNA, 23 nt, Artificial Sequence
  Synthetic
uggcauaguguuugcauguaacu

SEQ ID NO: 372919 - RNA, 24 nt, Artificial Sequence
  Synthetic
auggcauaguguuugcauguaacu

SEQ ID NO: 372920 - RNA, 18 nt, Artificial Sequence
  Synthetic
aggagaacugcuguaacu

SEQ ID NO: 372921 - RNA, 19 nt, Artificial Sequence
  Synthetic
gaggagaacugcuguaacu

SEQ ID NO: 372922 - RNA, 20 nt, Artificial Sequence
  Synthetic
ugaggagaacugcuguaacu

SEQ ID NO: 372923 - RNA, 21 nt, Artificial Sequence
  Synthetic
gugaggagaacugcuguaacu

SEQ ID NO: 372924 - RNA, 22 nt, Artificial Sequence
  Synthetic
agugaggagaacugcuguaacu

SEQ ID NO: 372925 - RNA, 23 nt, Artificial Sequence
  Synthetic
uagugaggagaacugcuguaacu

SEQ ID NO: 372926 - RNA, 24 nt, Artificial Sequence
  Synthetic
guagugaggagaacugcuguaacu

SEQ ID NO: 372927 - RNA, 18 nt, Artificial Sequence
  Synthetic
cacugucauuuuguaacu

SEQ ID NO: 372928 - RNA, 19 nt, Artificial Sequence
  Synthetic
ucacugucauuuuguaacu

SEQ ID NO: 372929 - RNA, 20 nt, Artificial Sequence
  Synthetic
uucacugucauuuuguaacu

SEQ ID NO: 372930 - RNA, 21 nt, Artificial Sequence
  Synthetic
uuucacugucauuuuguaacu

SEQ ID NO: 372931 - RNA, 22 nt, Artificial Sequence
  Synthetic
uuuucacugucauuuuguaacu

SEQ ID NO: 372932 - RNA, 23 nt, Artificial Sequence
  Synthetic
uuuuucacugucauuuuguaacu

SEQ ID NO: 372933 - RNA, 24 nt, Artificial Sequence
  Synthetic
uuuuuucacugucauuuuguaacu

SEQ ID NO: 372934 - RNA, 18 nt, Artificial Sequence
  Synthetic
cgccagaauaaauuaacu

SEQ ID NO: 372935 - RNA, 19 nt, Artificial Sequence
  Synthetic
ucgccagaauaaauuaacu

SEQ ID NO: 372936 - RNA, 20 nt, Artificial Sequence
  Synthetic
cucgccagaauaaauuaacu

SEQ ID NO: 372937 - RNA, 21 nt, Artificial Sequence
  Synthetic
ucucgccagaauaaauuaacu

SEQ ID NO: 372938 - RNA, 22 nt, Artificial Sequence
  Synthetic
uucucgccagaauaaauuaacu

SEQ ID NO: 372939 - RNA, 23 nt, Artificial Sequence
  Synthetic
cuucucgccagaauaaauuaacu

SEQ ID NO: 372940 - RNA, 24 nt, Artificial Sequence
  Synthetic
acuucucgccagaauaaauuaacu

SEQ ID NO: 372941 - RNA, 18 nt, Artificial Sequence
  Synthetic
aaauuauuuaaauuaacu

SEQ ID NO: 372942 - RNA, 19 nt, Artificial Sequence
  Synthetic
aaaauuauuuaaauuaacu

SEQ ID NO: 372943 - RNA, 20 nt, Artificial Sequence
  Synthetic
gaaaauuauuuaaauuaacu

SEQ ID NO: 372944 - RNA, 21 nt, Artificial Sequence
  Synthetic
ugaaaauuauuuaaauuaacu

SEQ ID NO: 372945 - RNA, 22 nt, Artificial Sequence
  Synthetic
augaaaauuauuuaaauuaacu

SEQ ID NO: 372946 - RNA, 23 nt, Artificial Sequence
  Synthetic
gaugaaaauuauuuaaauuaacu

SEQ ID NO: 372947 - RNA, 24 nt, Artificial Sequence
  Synthetic
agaugaaaauuauuuaaauuaacu

SEQ ID NO: 372948 - RNA, 18 nt, Artificial Sequence
  Synthetic
caugguuuccaauuaacu

SEQ ID NO: 372949 - RNA, 19 nt, Artificial Sequence
  Synthetic
ucaugguuuccaauuaacu

SEQ ID NO: 372950 - RNA, 20 nt, Artificial Sequence
  Synthetic
gucaugguuuccaauuaacu

SEQ ID NO: 372951 - RNA, 21 nt, Artificial Sequence
  Synthetic
ggucaugguuuccaauuaacu

SEQ ID NO: 372952 - RNA, 22 nt, Artificial Sequence
  Synthetic
aggucaugguuuccaauuaacu

SEQ ID NO: 372953 - RNA, 23 nt, Artificial Sequence
  Synthetic
uaggucaugguuuccaauuaacu

SEQ ID NO: 372954 - RNA, 24 nt, Artificial Sequence
  Synthetic
uuaggucaugguuuccaauuaacu

SEQ ID NO: 372955 - RNA, 18 nt, Artificial Sequence
  Synthetic
uuguauauacuauuaacu

SEQ ID NO: 372956 - RNA, 19 nt, Artificial Sequence
  Synthetic
auuguauauacuauuaacu

SEQ ID NO: 372957 - RNA, 20 nt, Artificial Sequence
  Synthetic
cauuguauauacuauuaacu

SEQ ID NO: 372958 - RNA, 21 nt, Artificial Sequence
  Synthetic
ucauuguauauacuauuaacu

SEQ ID NO: 372959 - RNA, 22 nt, Artificial Sequence
  Synthetic
aucauuguauauacuauuaacu

SEQ ID NO: 372960 - RNA, 23 nt, Artificial Sequence
  Synthetic
gaucauuguauauacuauuaacu

SEQ ID NO: 372961 - RNA, 24 nt, Artificial Sequence
  Synthetic
agaucauuguauauacuauuaacu

SEQ ID NO: 372962 - RNA, 18 nt, Artificial Sequence
  Synthetic
uguuaaauauacuuaacu

SEQ ID NO: 372963 - RNA, 19 nt, Artificial Sequence
  Synthetic
uuguuaaauauacuuaacu

SEQ ID NO: 372964 - RNA, 20 nt, Artificial Sequence
  Synthetic
guuguuaaauauacuuaacu

SEQ ID NO: 372965 - RNA, 21 nt, Artificial Sequence
  Synthetic
aguuguuaaauauacuuaacu

SEQ ID NO: 372966 - RNA, 22 nt, Artificial Sequence
  Synthetic
aaguuguuaaauauacuuaacu

SEQ ID NO: 372967 - RNA, 23 nt, Artificial Sequence
  Synthetic
uaaguuguuaaauauacuuaacu

SEQ ID NO: 372968 - RNA, 24 nt, Artificial Sequence
  Synthetic
cuaaguuguuaaauauacuuaacu

SEQ ID NO: 372969 - RNA, 18 nt, Artificial Sequence
  Synthetic
uuuuaaaucuccuuaacu

SEQ ID NO: 372970 - RNA, 19 nt, Artificial Sequence
  Synthetic
cuuuuaaaucuccuuaacu

SEQ ID NO: 372971 - RNA, 20 nt, Artificial Sequence
  Synthetic
ucuuuuaaaucuccuuaacu

SEQ ID NO: 372972 - RNA, 21 nt, Artificial Sequence
  Synthetic
cucuuuuaaaucuccuuaacu

SEQ ID NO: 372973 - RNA, 22 nt, Artificial Sequence
  Synthetic
ucucuuuuaaaucuccuuaacu

SEQ ID NO: 372974 - RNA, 23 nt, Artificial Sequence
  Synthetic
aucucuuuuaaaucuccuuaacu

SEQ ID NO: 372975 - RNA, 24 nt, Artificial Sequence
  Synthetic
aaucucuuuuaaaucuccuuaacu

SEQ ID NO: 372976 - RNA, 18 nt, Artificial Sequence
  Synthetic
augcguuuuagcuuaacu

SEQ ID NO: 372977 - RNA, 19 nt, Artificial Sequence
  Synthetic
caugcguuuuagcuuaacu

SEQ ID NO: 372978 - RNA, 20 nt, Artificial Sequence
  Synthetic
ucaugcguuuuagcuuaacu

SEQ ID NO: 372979 - RNA, 21 nt, Artificial Sequence
  Synthetic
aucaugcguuuuagcuuaacu

SEQ ID NO: 372980 - RNA, 22 nt, Artificial Sequence
  Synthetic
aaucaugcguuuuagcuuaacu

SEQ ID NO: 372981 - RNA, 23 nt, Artificial Sequence
  Synthetic
aaaucaugcguuuuagcuuaacu

SEQ ID NO: 372982 - RNA, 24 nt, Artificial Sequence
  Synthetic
aaaaucaugcguuuuagcuuaacu

SEQ ID NO: 372983 - RNA, 18 nt, Artificial Sequence
  Synthetic
uuuucugucugcuuaacu

SEQ ID NO: 372984 - RNA, 19 nt, Artificial Sequence
  Synthetic
auuuucugucugcuuaacu

SEQ ID NO: 372985 - RNA, 20 nt, Artificial Sequence
  Synthetic
gauuuucugucugcuuaacu

SEQ ID NO: 372986 - RNA, 21 nt, Artificial Sequence
  Synthetic
ugauuuucugucugcuuaacu

SEQ ID NO: 372987 - RNA, 22 nt, Artificial Sequence
  Synthetic
uugauuuucugucugcuuaacu

SEQ ID NO: 372988 - RNA, 23 nt, Artificial Sequence
  Synthetic
cuugauuuucugucugcuuaacu

SEQ ID NO: 372989 - RNA, 24 nt, Artificial Sequence
  Synthetic
gcuugauuuucugucugcuuaacu

SEQ ID NO: 372990 - RNA, 18 nt, Artificial Sequence
  Synthetic
auuauuacacaguuaacu

SEQ ID NO: 372991 - RNA, 19 nt, Artificial Sequence
  Synthetic
aauuauuacacaguuaacu

SEQ ID NO: 372992 - RNA, 20 nt, Artificial Sequence
  Synthetic
gaauuauuacacaguuaacu

SEQ ID NO: 372993 - RNA, 21 nt, Artificial Sequence
  Synthetic
ugaauuauuacacaguuaacu

SEQ ID NO: 372994 - RNA, 22 nt, Artificial Sequence
  Synthetic
gugaauuauuacacaguuaacu

SEQ ID NO: 372995 - RNA, 23 nt, Artificial Sequence
  Synthetic
agugaauuauuacacaguuaacu

SEQ ID NO: 372996 - RNA, 24 nt, Artificial Sequence
  Synthetic
aagugaauuauuacacaguuaacu

SEQ ID NO: 372997 - RNA, 18 nt, Artificial Sequence
  Synthetic
uuuuuauuucaguuaacu

SEQ ID NO: 372998 - RNA, 19 nt, Artificial Sequence
  Synthetic
guuuuuauuucaguuaacu

SEQ ID NO: 372999 - RNA, 20 nt, Artificial Sequence
  Synthetic
uguuuuuauuucaguuaacu

SEQ ID NO: 373000 - RNA, 21 nt, Artificial Sequence
  Synthetic
guguuuuuauuucaguuaacu

SEQ ID NO: 373001 - RNA, 22 nt, Artificial Sequence
  Synthetic
uguguuuuuauuucaguuaacu

SEQ ID NO: 373002 - RNA, 23 nt, Artificial Sequence
  Synthetic
auguguuuuuauuucaguuaacu

SEQ ID NO: 373003 - RNA, 24 nt, Artificial Sequence
  Synthetic
aauguguuuuuauuucaguuaacu

SEQ ID NO: 373004 - RNA, 18 nt, Artificial Sequence
  Synthetic
aggauguuuuaguuaacu

SEQ ID NO: 373005 - RNA, 19 nt, Artificial Sequence
  Synthetic
uaggauguuuuaguuaacu

SEQ ID NO: 373006 - RNA, 20 nt, Artificial Sequence
  Synthetic
cuaggauguuuuaguuaacu

SEQ ID NO: 373007 - RNA, 21 nt, Artificial Sequence
  Synthetic
ucuaggauguuuuaguuaacu

SEQ ID NO: 373008 - RNA, 22 nt, Artificial Sequence
  Synthetic
uucuaggauguuuuaguuaacu

SEQ ID NO: 373009 - RNA, 23 nt, Artificial Sequence
  Synthetic
auucuaggauguuuuaguuaacu

SEQ ID NO: 373010 - RNA, 24 nt, Artificial Sequence
  Synthetic
gauucuaggauguuuuaguuaacu

SEQ ID NO: 373011 - RNA, 18 nt, Artificial Sequence
  Synthetic
guauguagaagguuaacu

SEQ ID NO: 373012 - RNA, 19 nt, Artificial Sequence
  Synthetic
uguauguagaagguuaacu

SEQ ID NO: 373013 - RNA, 20 nt, Artificial Sequence
  Synthetic
uuguauguagaagguuaacu

SEQ ID NO: 373014 - RNA, 21 nt, Artificial Sequence
  Synthetic
uuuguauguagaagguuaacu

SEQ ID NO: 373015 - RNA, 22 nt, Artificial Sequence
  Synthetic
auuuguauguagaagguuaacu

SEQ ID NO: 373016 - RNA, 23 nt, Artificial Sequence
  Synthetic
gauuuguauguagaagguuaacu

SEQ ID NO: 373017 - RNA, 24 nt, Artificial Sequence
  Synthetic
agauuuguauguagaagguuaacu

SEQ ID NO: 373018 - RNA, 18 nt, Artificial Sequence
  Synthetic
auaagcccaauguuaacu

SEQ ID NO: 373019 - RNA, 19 nt, Artificial Sequence
  Synthetic
aauaagcccaauguuaacu

SEQ ID NO: 373020 - RNA, 20 nt, Artificial Sequence
  Synthetic
caauaagcccaauguuaacu

SEQ ID NO: 373021 - RNA, 21 nt, Artificial Sequence
  Synthetic
acaauaagcccaauguuaacu

SEQ ID NO: 373022 - RNA, 22 nt, Artificial Sequence
  Synthetic
gacaauaagcccaauguuaacu

SEQ ID NO: 373023 - RNA, 23 nt, Artificial Sequence
  Synthetic
ugacaauaagcccaauguuaacu

SEQ ID NO: 373024 - RNA, 24 nt, Artificial Sequence
  Synthetic
augacaauaagcccaauguuaacu

SEQ ID NO: 373025 - RNA, 18 nt, Artificial Sequence
  Synthetic
uaaaguucucuguuaacu

SEQ ID NO: 373026 - RNA, 19 nt, Artificial Sequence
  Synthetic
uuaaaguucucuguuaacu

SEQ ID NO: 373027 - RNA, 20 nt, Artificial Sequence
  Synthetic
uuuaaaguucucuguuaacu

SEQ ID NO: 373028 - RNA, 21 nt, Artificial Sequence
  Synthetic
auuuaaaguucucuguuaacu

SEQ ID NO: 373029 - RNA, 22 nt, Artificial Sequence
  Synthetic
uauuuaaaguucucuguuaacu

SEQ ID NO: 373030 - RNA, 23 nt, Artificial Sequence
  Synthetic
guauuuaaaguucucuguuaacu

SEQ ID NO: 373031 - RNA, 24 nt, Artificial Sequence
  Synthetic
uguauuuaaaguucucuguuaacu

SEQ ID NO: 373032 - RNA, 18 nt, Artificial Sequence
  Synthetic
acucaaaacaaaaacacu

SEQ ID NO: 373033 - RNA, 19 nt, Artificial Sequence
  Synthetic
uacucaaaacaaaaacacu

SEQ ID NO: 373034 - RNA, 20 nt, Artificial Sequence
  Synthetic
guacucaaaacaaaaacacu

SEQ ID NO: 373035 - RNA, 21 nt, Artificial Sequence
  Synthetic
aguacucaaaacaaaaacacu

SEQ ID NO: 373036 - RNA, 22 nt, Artificial Sequence
  Synthetic
uaguacucaaaacaaaaacacu

SEQ ID NO: 373037 - RNA, 23 nt, Artificial Sequence
  Synthetic
auaguacucaaaacaaaaacacu

SEQ ID NO: 373038 - RNA, 24 nt, Artificial Sequence
  Synthetic
uauaguacucaaaacaaaaacacu

SEQ ID NO: 373039 - RNA, 18 nt, Artificial Sequence
  Synthetic
ucccuuauccaaaacacu

SEQ ID NO: 373040 - RNA, 19 nt, Artificial Sequence
  Synthetic
aucccuuauccaaaacacu

SEQ ID NO: 373041 - RNA, 20 nt, Artificial Sequence
  Synthetic
uaucccuuauccaaaacacu

SEQ ID NO: 373042 - RNA, 21 nt, Artificial Sequence
  Synthetic
guaucccuuauccaaaacacu

SEQ ID NO: 373043 - RNA, 22 nt, Artificial Sequence
  Synthetic
aguaucccuuauccaaaacacu

SEQ ID NO: 373044 - RNA, 23 nt, Artificial Sequence
  Synthetic
gaguaucccuuauccaaaacacu

SEQ ID NO: 373045 - RNA, 24 nt, Artificial Sequence
  Synthetic
ugaguaucccuuauccaaaacacu

SEQ ID NO: 373046 - RNA, 18 nt, Artificial Sequence
  Synthetic
gaaaaaccucaaaacacu

SEQ ID NO: 373047 - RNA, 19 nt, Artificial Sequence
  Synthetic
agaaaaaccucaaaacacu

SEQ ID NO: 373048 - RNA, 20 nt, Artificial Sequence
  Synthetic
aagaaaaaccucaaaacacu

SEQ ID NO: 373049 - RNA, 21 nt, Artificial Sequence
  Synthetic
aaagaaaaaccucaaaacacu

SEQ ID NO: 373050 - RNA, 22 nt, Artificial Sequence
  Synthetic
aaaagaaaaaccucaaaacacu

SEQ ID NO: 373051 - RNA, 23 nt, Artificial Sequence
  Synthetic
caaaagaaaaaccucaaaacacu

SEQ ID NO: 373052 - RNA, 24 nt, Artificial Sequence
  Synthetic
acaaaagaaaaaccucaaaacacu

SEQ ID NO: 373053 - RNA, 18 nt, Artificial Sequence
  Synthetic
guccagagugaaaacacu

SEQ ID NO: 373054 - RNA, 19 nt, Artificial Sequence
  Synthetic
uguccagagugaaaacacu

SEQ ID NO: 373055 - RNA, 20 nt, Artificial Sequence
  Synthetic
auguccagagugaaaacacu

SEQ ID NO: 373056 - RNA, 21 nt, Artificial Sequence
  Synthetic
cauguccagagugaaaacacu

SEQ ID NO: 373057 - RNA, 22 nt, Artificial Sequence
  Synthetic
ucauguccagagugaaaacacu

SEQ ID NO: 373058 - RNA, 23 nt, Artificial Sequence
  Synthetic
gucauguccagagugaaaacacu

SEQ ID NO: 373059 - RNA, 24 nt, Artificial Sequence
  Synthetic
cgucauguccagagugaaaacacu

SEQ ID NO: 373060 - RNA, 18 nt, Artificial Sequence
  Synthetic
ucaaguauuauaaacacu

SEQ ID NO: 373061 - RNA, 19 nt, Artificial Sequence
  Synthetic
cucaaguauuauaaacacu

SEQ ID NO: 373062 - RNA, 20 nt, Artificial Sequence
  Synthetic
gcucaaguauuauaaacacu

SEQ ID NO: 373063 - RNA, 21 nt, Artificial Sequence
  Synthetic
agcucaaguauuauaaacacu

SEQ ID NO: 373064 - RNA, 22 nt, Artificial Sequence
  Synthetic
aagcucaaguauuauaaacacu

SEQ ID NO: 373065 - RNA, 23 nt, Artificial Sequence
  Synthetic
uaagcucaaguauuauaaacacu

SEQ ID NO: 373066 - RNA, 24 nt, Artificial Sequence
  Synthetic
cuaagcucaaguauuauaaacacu

SEQ ID NO: 373067 - RNA, 18 nt, Artificial Sequence
  Synthetic
acuaguaaucccaacacu

SEQ ID NO: 373068 - RNA, 19 nt, Artificial Sequence
  Synthetic
cacuaguaaucccaacacu

SEQ ID NO: 373069 - RNA, 20 nt, Artificial Sequence
  Synthetic
acacuaguaaucccaacacu

SEQ ID NO: 373070 - RNA, 21 nt, Artificial Sequence
  Synthetic
cacacuaguaaucccaacacu

SEQ ID NO: 373071 - RNA, 22 nt, Artificial Sequence
  Synthetic
ucacacuaguaaucccaacacu

SEQ ID NO: 373072 - RNA, 23 nt, Artificial Sequence
  Synthetic
cucacacuaguaaucccaacacu

SEQ ID NO: 373073 - RNA, 24 nt, Artificial Sequence
  Synthetic
ccucacacuaguaaucccaacacu

SEQ ID NO: 373074 - RNA, 18 nt, Artificial Sequence
  Synthetic
gccuguaaucccaacacu

SEQ ID NO: 373075 - RNA, 19 nt, Artificial Sequence
  Synthetic
cgccuguaaucccaacacu

SEQ ID NO: 373076 - RNA, 20 nt, Artificial Sequence
  Synthetic
acgccuguaaucccaacacu

SEQ ID NO: 373077 - RNA, 21 nt, Artificial Sequence
  Synthetic
cacgccuguaaucccaacacu

SEQ ID NO: 373078 - RNA, 22 nt, Artificial Sequence
  Synthetic
ucacgccuguaaucccaacacu

SEQ ID NO: 373079 - RNA, 23 nt, Artificial Sequence
  Synthetic
cucacgccuguaaucccaacacu

SEQ ID NO: 373080 - RNA, 24 nt, Artificial Sequence
  Synthetic
gcucacgccuguaaucccaacacu

SEQ ID NO: 373081 - RNA, 18 nt, Artificial Sequence
  Synthetic
gcuuguaaucccaacacu

SEQ ID NO: 373082 - RNA, 19 nt, Artificial Sequence
  Synthetic
ugcuuguaaucccaacacu

SEQ ID NO: 373083 - RNA, 20 nt, Artificial Sequence
  Synthetic
augcuuguaaucccaacacu

SEQ ID NO: 373084 - RNA, 21 nt, Artificial Sequence
  Synthetic
caugcuuguaaucccaacacu

SEQ ID NO: 373085 - RNA, 22 nt, Artificial Sequence
  Synthetic
ucaugcuuguaaucccaacacu

SEQ ID NO: 373086 - RNA, 23 nt, Artificial Sequence
  Synthetic
cucaugcuuguaaucccaacacu

SEQ ID NO: 373087 - RNA, 24 nt, Artificial Sequence
  Synthetic
gcucaugcuuguaaucccaacacu

SEQ ID NO: 373088 - RNA, 18 nt, Artificial Sequence
  Synthetic
gccucuacucccaacacu

SEQ ID NO: 373089 - RNA, 19 nt, Artificial Sequence
  Synthetic
cgccucuacucccaacacu

SEQ ID NO: 373090 - RNA, 20 nt, Artificial Sequence
  Synthetic
acgccucuacucccaacacu

SEQ ID NO: 373091 - RNA, 21 nt, Artificial Sequence
  Synthetic
uacgccucuacucccaacacu

SEQ ID NO: 373092 - RNA, 22 nt, Artificial Sequence
  Synthetic
uuacgccucuacucccaacacu

SEQ ID NO: 373093 - RNA, 23 nt, Artificial Sequence
  Synthetic
cuuacgccucuacucccaacacu

SEQ ID NO: 373094 - RNA, 24 nt, Artificial Sequence
  Synthetic
gcuuacgccucuacucccaacacu

SEQ ID NO: 373095 - RNA, 18 nt, Artificial Sequence
  Synthetic
aauuagauuaucaacacu

SEQ ID NO: 373096 - RNA, 19 nt, Artificial Sequence
  Synthetic
aaauuagauuaucaacacu

SEQ ID NO: 373097 - RNA, 20 nt, Artificial Sequence
  Synthetic
aaaauuagauuaucaacacu

SEQ ID NO: 373098 - RNA, 21 nt, Artificial Sequence
  Synthetic
caaaauuagauuaucaacacu

SEQ ID NO: 373099 - RNA, 22 nt, Artificial Sequence
  Synthetic
acaaaauuagauuaucaacacu

SEQ ID NO: 373100 - RNA, 23 nt, Artificial Sequence
  Synthetic
aacaaaauuagauuaucaacacu

SEQ ID NO: 373101 - RNA, 24 nt, Artificial Sequence
  Synthetic
aaacaaaauuagauuaucaacacu

SEQ ID NO: 373102 - RNA, 18 nt, Artificial Sequence
  Synthetic
accuguaaucucaacacu

SEQ ID NO: 373103 - RNA, 19 nt, Artificial Sequence
  Synthetic
caccuguaaucucaacacu

SEQ ID NO: 373104 - RNA, 20 nt, Artificial Sequence
  Synthetic
acaccuguaaucucaacacu

SEQ ID NO: 373105 - RNA, 21 nt, Artificial Sequence
  Synthetic
cacaccuguaaucucaacacu

SEQ ID NO: 373106 - RNA, 22 nt, Artificial Sequence
  Synthetic
ucacaccuguaaucucaacacu

SEQ ID NO: 373107 - RNA, 23 nt, Artificial Sequence
  Synthetic
cucacaccuguaaucucaacacu

SEQ ID NO: 373108 - RNA, 24 nt, Artificial Sequence
  Synthetic
gcucacaccuguaaucucaacacu

SEQ ID NO: 373109 - RNA, 18 nt, Artificial Sequence
  Synthetic
aaaaaaagcuugaacacu

SEQ ID NO: 373110 - RNA, 19 nt, Artificial Sequence
  Synthetic
aaaaaaaagcuugaacacu

SEQ ID NO: 373111 - RNA, 20 nt, Artificial Sequence
  Synthetic
aaaaaaaaagcuugaacacu

SEQ ID NO: 373112 - RNA, 21 nt, Artificial Sequence
  Synthetic
aaaaaaaaaagcuugaacacu

SEQ ID NO: 373113 - RNA, 22 nt, Artificial Sequence
  Synthetic
aaaaaaaaaaagcuugaacacu

SEQ ID NO: 373114 - RNA, 23 nt, Artificial Sequence
  Synthetic
aaaaaaaaaaaagcuugaacacu

SEQ ID NO: 373115 - RNA, 24 nt, Artificial Sequence
  Synthetic
aaaaaaaaaaaaagcuugaacacu

SEQ ID NO: 373116 - RNA, 18 nt, Artificial Sequence
  Synthetic
accuguaauccuaacacu

SEQ ID NO: 373117 - RNA, 19 nt, Artificial Sequence
  Synthetic
caccuguaauccuaacacu

SEQ ID NO: 373118 - RNA, 20 nt, Artificial Sequence
  Synthetic
acaccuguaauccuaacacu

SEQ ID NO: 373119 - RNA, 21 nt, Artificial Sequence
  Synthetic
cacaccuguaauccuaacacu

SEQ ID NO: 373120 - RNA, 22 nt, Artificial Sequence
  Synthetic
ucacaccuguaauccuaacacu

SEQ ID NO: 373121 - RNA, 23 nt, Artificial Sequence
  Synthetic
cucacaccuguaauccuaacacu

SEQ ID NO: 373122 - RNA, 24 nt, Artificial Sequence
  Synthetic
gcucacaccuguaauccuaacacu

SEQ ID NO: 373123 - RNA, 18 nt, Artificial Sequence
  Synthetic
uuguccagugcuaacacu

SEQ ID NO: 373124 - RNA, 19 nt, Artificial Sequence
  Synthetic
auuguccagugcuaacacu

SEQ ID NO: 373125 - RNA, 20 nt, Artificial Sequence
  Synthetic
uauuguccagugcuaacacu

SEQ ID NO: 373126 - RNA, 21 nt, Artificial Sequence
  Synthetic
guauuguccagugcuaacacu

SEQ ID NO: 373127 - RNA, 22 nt, Artificial Sequence
  Synthetic
aguauuguccagugcuaacacu

SEQ ID NO: 373128 - RNA, 23 nt, Artificial Sequence
  Synthetic
aaguauuguccagugcuaacacu

SEQ ID NO: 373129 - RNA, 24 nt, Artificial Sequence
  Synthetic
uaaguauuguccagugcuaacacu

SEQ ID NO: 373130 - RNA, 18 nt, Artificial Sequence
  Synthetic
caucacuuugcuaacacu

SEQ ID NO: 373131 - RNA, 19 nt, Artificial Sequence
  Synthetic
ccaucacuuugcuaacacu

SEQ ID NO: 373132 - RNA, 20 nt, Artificial Sequence
  Synthetic
cccaucacuuugcuaacacu

SEQ ID NO: 373133 - RNA, 21 nt, Artificial Sequence
  Synthetic
acccaucacuuugcuaacacu

SEQ ID NO: 373134 - RNA, 22 nt, Artificial Sequence
  Synthetic
aacccaucacuuugcuaacacu

SEQ ID NO: 373135 - RNA, 23 nt, Artificial Sequence
  Synthetic
gaacccaucacuuugcuaacacu

SEQ ID NO: 373136 - RNA, 24 nt, Artificial Sequence
  Synthetic
ugaacccaucacuuugcuaacacu

SEQ ID NO: 373137 - RNA, 18 nt, Artificial Sequence
  Synthetic
gauguaguauuuaacacu

SEQ ID NO: 373138 - RNA, 19 nt, Artificial Sequence
  Synthetic
ugauguaguauuuaacacu

SEQ ID NO: 373139 - RNA, 20 nt, Artificial Sequence
  Synthetic
uugauguaguauuuaacacu

SEQ ID NO: 373140 - RNA, 21 nt, Artificial Sequence
  Synthetic
uuugauguaguauuuaacacu

SEQ ID NO: 373141 - RNA, 22 nt, Artificial Sequence
  Synthetic
uuuugauguaguauuuaacacu

SEQ ID NO: 373142 - RNA, 23 nt, Artificial Sequence
  Synthetic
uuuuugauguaguauuuaacacu

SEQ ID NO: 373143 - RNA, 24 nt, Artificial Sequence
  Synthetic
auuuuugauguaguauuuaacacu

SEQ ID NO: 373144 - RNA, 18 nt, Artificial Sequence
  Synthetic
gagucuaggaaacacacu

SEQ ID NO: 373145 - RNA, 19 nt, Artificial Sequence
  Synthetic
ugagucuaggaaacacacu

SEQ ID NO: 373146 - RNA, 20 nt, Artificial Sequence
  Synthetic
augagucuaggaaacacacu

SEQ ID NO: 373147 - RNA, 21 nt, Artificial Sequence
  Synthetic
aaugagucuaggaaacacacu

SEQ ID NO: 373148 - RNA, 22 nt, Artificial Sequence
  Synthetic
caaugagucuaggaaacacacu

SEQ ID NO: 373149 - RNA, 23 nt, Artificial Sequence
  Synthetic
ucaaugagucuaggaaacacacu

SEQ ID NO: 373150 - RNA, 24 nt, Artificial Sequence
  Synthetic
uucaaugagucuaggaaacacacu

SEQ ID NO: 373151 - RNA, 18 nt, Artificial Sequence
  Synthetic
cacagacacacacacacu

SEQ ID NO: 373152 - RNA, 19 nt, Artificial Sequence
  Synthetic
acacagacacacacacacu

SEQ ID NO: 373153 - RNA, 20 nt, Artificial Sequence
  Synthetic
cacacagacacacacacacu

SEQ ID NO: 373154 - RNA, 21 nt, Artificial Sequence
  Synthetic
acacacagacacacacacacu

SEQ ID NO: 373155 - RNA, 22 nt, Artificial Sequence
  Synthetic
cacacacagacacacacacacu

SEQ ID NO: 373156 - RNA, 23 nt, Artificial Sequence
  Synthetic
acacacacagacacacacacacu

SEQ ID NO: 373157 - RNA, 24 nt, Artificial Sequence
  Synthetic
cacacacacagacacacacacacu

SEQ ID NO: 373158 - RNA, 18 nt, Artificial Sequence
  Synthetic
uaucaacagccacacacu

SEQ ID NO: 373159 - RNA, 19 nt, Artificial Sequence
  Synthetic
auaucaacagccacacacu

SEQ ID NO: 373160 - RNA, 20 nt, Artificial Sequence
  Synthetic
aauaucaacagccacacacu

SEQ ID NO: 373161 - RNA, 21 nt, Artificial Sequence
  Synthetic
gaauaucaacagccacacacu

SEQ ID NO: 373162 - RNA, 22 nt, Artificial Sequence
  Synthetic
agaauaucaacagccacacacu

SEQ ID NO: 373163 - RNA, 23 nt, Artificial Sequence
  Synthetic
aagaauaucaacagccacacacu

SEQ ID NO: 373164 - RNA, 24 nt, Artificial Sequence
  Synthetic
aaagaauaucaacagccacacacu

SEQ ID NO: 373165 - RNA, 18 nt, Artificial Sequence
  Synthetic
acaaacaacauacacacu

SEQ ID NO: 373166 - RNA, 19 nt, Artificial Sequence
  Synthetic
uacaaacaacauacacacu

SEQ ID NO: 373167 - RNA, 20 nt, Artificial Sequence
  Synthetic
guacaaacaacauacacacu

SEQ ID NO: 373168 - RNA, 21 nt, Artificial Sequence
  Synthetic
uguacaaacaacauacacacu

SEQ ID NO: 373169 - RNA, 22 nt, Artificial Sequence
  Synthetic
auguacaaacaacauacacacu

SEQ ID NO: 373170 - RNA, 23 nt, Artificial Sequence
  Synthetic
cauguacaaacaacauacacacu

SEQ ID NO: 373171 - RNA, 24 nt, Artificial Sequence
  Synthetic
acauguacaaacaacauacacacu

SEQ ID NO: 373172 - RNA, 18 nt, Artificial Sequence
  Synthetic
gaaggggaacaucacacu

SEQ ID NO: 373173 - RNA, 19 nt, Artificial Sequence
  Synthetic
ggaaggggaacaucacacu

SEQ ID NO: 373174 - RNA, 20 nt, Artificial Sequence
  Synthetic
aggaaggggaacaucacacu

SEQ ID NO: 373175 - RNA, 21 nt, Artificial Sequence
  Synthetic
caggaaggggaacaucacacu

SEQ ID NO: 373176 - RNA, 22 nt, Artificial Sequence
  Synthetic
acaggaaggggaacaucacacu

SEQ ID NO: 373177 - RNA, 23 nt, Artificial Sequence
  Synthetic
cacaggaaggggaacaucacacu

SEQ ID NO: 373178 - RNA, 24 nt, Artificial Sequence
  Synthetic
acacaggaaggggaacaucacacu

SEQ ID NO: 373179 - RNA, 18 nt, Artificial Sequence
  Synthetic
uguaaagaccaucacacu

SEQ ID NO: 373180 - RNA, 19 nt, Artificial Sequence
  Synthetic
uuguaaagaccaucacacu

SEQ ID NO: 373181 - RNA, 20 nt, Artificial Sequence
  Synthetic
auuguaaagaccaucacacu

SEQ ID NO: 373182 - RNA, 21 nt, Artificial Sequence
  Synthetic
aauuguaaagaccaucacacu

SEQ ID NO: 373183 - RNA, 22 nt, Artificial Sequence
  Synthetic
aaauuguaaagaccaucacacu

SEQ ID NO: 373184 - RNA, 23 nt, Artificial Sequence
  Synthetic
caaauuguaaagaccaucacacu

SEQ ID NO: 373185 - RNA, 24 nt, Artificial Sequence
  Synthetic
acaaauuguaaagaccaucacacu

SEQ ID NO: 373186 - RNA, 18 nt, Artificial Sequence
  Synthetic
gaaggggaauaucacacu

SEQ ID NO: 373187 - RNA, 19 nt, Artificial Sequence
  Synthetic
ggaaggggaauaucacacu

SEQ ID NO: 373188 - RNA, 20 nt, Artificial Sequence
  Synthetic
aggaaggggaauaucacacu

SEQ ID NO: 373189 - RNA, 18 nt, Artificial Sequence
  Synthetic
ucagaaggggcucacacu

SEQ ID NO: 373190 - RNA, 19 nt, Artificial Sequence
  Synthetic
uucagaaggggcucacacu

SEQ ID NO: 373191 - RNA, 20 nt, Artificial Sequence
  Synthetic
auucagaaggggcucacacu

SEQ ID NO: 373192 - RNA, 21 nt, Artificial Sequence
  Synthetic
cauucagaaggggcucacacu

SEQ ID NO: 373193 - RNA, 22 nt, Artificial Sequence
  Synthetic
gcauucagaaggggcucacacu

SEQ ID NO: 373194 - RNA, 23 nt, Artificial Sequence
  Synthetic
ugcauucagaaggggcucacacu

SEQ ID NO: 373195 - RNA, 24 nt, Artificial Sequence
  Synthetic
uugcauucagaaggggcucacacu

SEQ ID NO: 373196 - RNA, 18 nt, Artificial Sequence
  Synthetic
ucaauuucuucucacacu

SEQ ID NO: 373197 - RNA, 19 nt, Artificial Sequence
  Synthetic
cucaauuucuucucacacu

SEQ ID NO: 373198 - RNA, 20 nt, Artificial Sequence
  Synthetic
ucucaauuucuucucacacu

SEQ ID NO: 373199 - RNA, 21 nt, Artificial Sequence
  Synthetic
aucucaauuucuucucacacu

SEQ ID NO: 373200 - RNA, 22 nt, Artificial Sequence
  Synthetic
gaucucaauuucuucucacacu

SEQ ID NO: 373201 - RNA, 23 nt, Artificial Sequence
  Synthetic
agaucucaauuucuucucacacu

SEQ ID NO: 373202 - RNA, 24 nt, Artificial Sequence
  Synthetic
gagaucucaauuucuucucacacu

SEQ ID NO: 373203 - RNA, 18 nt, Artificial Sequence
  Synthetic
gauaucaaccaagacacu

SEQ ID NO: 373204 - RNA, 19 nt, Artificial Sequence
  Synthetic
ugauaucaaccaagacacu

SEQ ID NO: 373205 - RNA, 20 nt, Artificial Sequence
  Synthetic
cugauaucaaccaagacacu

SEQ ID NO: 373206 - RNA, 21 nt, Artificial Sequence
  Synthetic
ccugauaucaaccaagacacu

SEQ ID NO: 373207 - RNA, 22 nt, Artificial Sequence
  Synthetic
accugauaucaaccaagacacu

SEQ ID NO: 373208 - RNA, 23 nt, Artificial Sequence
  Synthetic
caccugauaucaaccaagacacu

SEQ ID NO: 373209 - RNA, 24 nt, Artificial Sequence
  Synthetic
ucaccugauaucaaccaagacacu

SEQ ID NO: 373210 - RNA, 18 nt, Artificial Sequence
  Synthetic
aauauggccagggacacu

SEQ ID NO: 373211 - RNA, 19 nt, Artificial Sequence
  Synthetic
uaauauggccagggacacu

SEQ ID NO: 373212 - RNA, 20 nt, Artificial Sequence
  Synthetic
guaauauggccagggacacu

SEQ ID NO: 373213 - RNA, 21 nt, Artificial Sequence
  Synthetic
gguaauauggccagggacacu

SEQ ID NO: 373214 - RNA, 22 nt, Artificial Sequence
  Synthetic
ugguaauauggccagggacacu

SEQ ID NO: 373215 - RNA, 23 nt, Artificial Sequence
  Synthetic
augguaauauggccagggacacu

SEQ ID NO: 373216 - RNA, 24 nt, Artificial Sequence
  Synthetic
aaugguaauauggccagggacacu

SEQ ID NO: 373217 - RNA, 18 nt, Artificial Sequence
  Synthetic
uauuuuauguaugacacu

SEQ ID NO: 373218 - RNA, 19 nt, Artificial Sequence
  Synthetic
auauuuuauguaugacacu

SEQ ID NO: 373219 - RNA, 20 nt, Artificial Sequence
  Synthetic
gauauuuuauguaugacacu

SEQ ID NO: 373220 - RNA, 21 nt, Artificial Sequence
  Synthetic
ugauauuuuauguaugacacu

SEQ ID NO: 373221 - RNA, 22 nt, Artificial Sequence
  Synthetic
uugauauuuuauguaugacacu

SEQ ID NO: 373222 - RNA, 23 nt, Artificial Sequence
  Synthetic
auugauauuuuauguaugacacu

SEQ ID NO: 373223 - RNA, 24 nt, Artificial Sequence
  Synthetic
aauugauauuuuauguaugacacu

SEQ ID NO: 373224 - RNA, 18 nt, Artificial Sequence
  Synthetic
aacaaggucccugacacu

SEQ ID NO: 373225 - RNA, 19 nt, Artificial Sequence
  Synthetic
caacaaggucccugacacu

SEQ ID NO: 373226 - RNA, 20 nt, Artificial Sequence
  Synthetic
ccaacaaggucccugacacu

SEQ ID NO: 373227 - RNA, 21 nt, Artificial Sequence
  Synthetic
accaacaaggucccugacacu

SEQ ID NO: 373228 - RNA, 22 nt, Artificial Sequence
  Synthetic
gaccaacaaggucccugacacu

SEQ ID NO: 373229 - RNA, 23 nt, Artificial Sequence
  Synthetic
ugaccaacaaggucccugacacu

SEQ ID NO: 373230 - RNA, 24 nt, Artificial Sequence
  Synthetic
cugaccaacaaggucccugacacu

SEQ ID NO: 373231 - RNA, 18 nt, Artificial Sequence
  Synthetic
ucuuaguguccugacacu

SEQ ID NO: 373232 - RNA, 19 nt, Artificial Sequence
  Synthetic
uucuuaguguccugacacu

SEQ ID NO: 373233 - RNA, 20 nt, Artificial Sequence
  Synthetic
auucuuaguguccugacacu

SEQ ID NO: 373234 - RNA, 21 nt, Artificial Sequence
  Synthetic
aauucuuaguguccugacacu

SEQ ID NO: 373235 - RNA, 22 nt, Artificial Sequence
  Synthetic
uaauucuuaguguccugacacu

SEQ ID NO: 373236 - RNA, 23 nt, Artificial Sequence
  Synthetic
auaauucuuaguguccugacacu

SEQ ID NO: 373237 - RNA, 24 nt, Artificial Sequence
  Synthetic
uauaauucuuaguguccugacacu

SEQ ID NO: 373238 - RNA, 18 nt, Artificial Sequence
  Synthetic
auucauagcgcugacacu

SEQ ID NO: 373239 - RNA, 19 nt, Artificial Sequence
  Synthetic
cauucauagcgcugacacu

SEQ ID NO: 373240 - RNA, 20 nt, Artificial Sequence
  Synthetic
ccauucauagcgcugacacu

SEQ ID NO: 373241 - RNA, 21 nt, Artificial Sequence
  Synthetic
cccauucauagcgcugacacu

SEQ ID NO: 373242 - RNA, 22 nt, Artificial Sequence
  Synthetic
acccauucauagcgcugacacu

SEQ ID NO: 373243 - RNA, 23 nt, Artificial Sequence
  Synthetic
gacccauucauagcgcugacacu

SEQ ID NO: 373244 - RNA, 24 nt, Artificial Sequence
  Synthetic
agacccauucauagcgcugacacu

SEQ ID NO: 373245 - RNA, 18 nt, Artificial Sequence
  Synthetic
caguggucugcugacacu

SEQ ID NO: 373246 - RNA, 19 nt, Artificial Sequence
  Synthetic
acaguggucugcugacacu

SEQ ID NO: 373247 - RNA, 20 nt, Artificial Sequence
  Synthetic
cacaguggucugcugacacu

SEQ ID NO: 373248 - RNA, 21 nt, Artificial Sequence
  Synthetic
gcacaguggucugcugacacu

SEQ ID NO: 373249 - RNA, 22 nt, Artificial Sequence
  Synthetic
ugcacaguggucugcugacacu

SEQ ID NO: 373250 - RNA, 23 nt, Artificial Sequence
  Synthetic
augcacaguggucugcugacacu

SEQ ID NO: 373251 - RNA, 24 nt, Artificial Sequence
  Synthetic
caugcacaguggucugcugacacu

SEQ ID NO: 373252 - RNA, 18 nt, Artificial Sequence
  Synthetic
aucuuaacaaaauacacu

SEQ ID NO: 373253 - RNA, 19 nt, Artificial Sequence
  Synthetic
caucuuaacaaaauacacu

SEQ ID NO: 373254 - RNA, 20 nt, Artificial Sequence
  Synthetic
acaucuuaacaaaauacacu

SEQ ID NO: 373255 - RNA, 21 nt, Artificial Sequence
  Synthetic
uacaucuuaacaaaauacacu

SEQ ID NO: 373256 - RNA, 22 nt, Artificial Sequence
  Synthetic
guacaucuuaacaaaauacacu

SEQ ID NO: 373257 - RNA, 23 nt, Artificial Sequence
  Synthetic
aguacaucuuaacaaaauacacu

SEQ ID NO: 373258 - RNA, 24 nt, Artificial Sequence
  Synthetic
aaguacaucuuaacaaaauacacu

SEQ ID NO: 373259 - RNA, 18 nt, Artificial Sequence
  Synthetic
aucucaauauuauacacu

SEQ ID NO: 373260 - RNA, 19 nt, Artificial Sequence
  Synthetic
aaucucaauauuauacacu

SEQ ID NO: 373261 - RNA, 20 nt, Artificial Sequence
  Synthetic
aaaucucaauauuauacacu

SEQ ID NO: 373262 - RNA, 21 nt, Artificial Sequence
  Synthetic
aaaaucucaauauuauacacu

SEQ ID NO: 373263 - RNA, 22 nt, Artificial Sequence
  Synthetic
aaaaaucucaauauuauacacu

SEQ ID NO: 373264 - RNA, 23 nt, Artificial Sequence
  Synthetic
uaaaaaucucaauauuauacacu

SEQ ID NO: 373265 - RNA, 24 nt, Artificial Sequence
  Synthetic
cuaaaaaucucaauauuauacacu

SEQ ID NO: 373266 - RNA, 18 nt, Artificial Sequence
  Synthetic
aaacucacucacuacacu

SEQ ID NO: 373267 - RNA, 19 nt, Artificial Sequence
  Synthetic
aaaacucacucacuacacu

SEQ ID NO: 373268 - RNA, 20 nt, Artificial Sequence
  Synthetic
gaaaacucacucacuacacu

SEQ ID NO: 373269 - RNA, 21 nt, Artificial Sequence
  Synthetic
ugaaaacucacucacuacacu

SEQ ID NO: 373270 - RNA, 22 nt, Artificial Sequence
  Synthetic
augaaaacucacucacuacacu

SEQ ID NO: 373271 - RNA, 23 nt, Artificial Sequence
  Synthetic
caugaaaacucacucacuacacu

SEQ ID NO: 373272 - RNA, 24 nt, Artificial Sequence
  Synthetic
ucaugaaaacucacucacuacacu

SEQ ID NO: 373273 - RNA, 18 nt, Artificial Sequence
  Synthetic
aaaguuuugaccuacacu

SEQ ID NO: 373274 - RNA, 19 nt, Artificial Sequence
  Synthetic
aaaaguuuugaccuacacu

SEQ ID NO: 373275 - RNA, 20 nt, Artificial Sequence
  Synthetic
gaaaaguuuugaccuacacu

SEQ ID NO: 373276 - RNA, 21 nt, Artificial Sequence
  Synthetic
ggaaaaguuuugaccuacacu

SEQ ID NO: 373277 - RNA, 22 nt, Artificial Sequence
  Synthetic
uggaaaaguuuugaccuacacu

SEQ ID NO: 373278 - RNA, 23 nt, Artificial Sequence
  Synthetic
auggaaaaguuuugaccuacacu

SEQ ID NO: 373279 - RNA, 24 nt, Artificial Sequence
  Synthetic
uauggaaaaguuuugaccuacacu

SEQ ID NO: 373280 - RNA, 18 nt, Artificial Sequence
  Synthetic
ugaaugacauucuacacu

SEQ ID NO: 373281 - RNA, 19 nt, Artificial Sequence
  Synthetic
augaaugacauucuacacu

SEQ ID NO: 373282 - RNA, 20 nt, Artificial Sequence
  Synthetic
aaugaaugacauucuacacu

SEQ ID NO: 373283 - RNA, 21 nt, Artificial Sequence
  Synthetic
gaaugaaugacauucuacacu

SEQ ID NO: 373284 - RNA, 22 nt, Artificial Sequence
  Synthetic
agaaugaaugacauucuacacu

SEQ ID NO: 373285 - RNA, 23 nt, Artificial Sequence
  Synthetic
aagaaugaaugacauucuacacu

SEQ ID NO: 373286 - RNA, 24 nt, Artificial Sequence
  Synthetic
gaagaaugaaugacauucuacacu

SEQ ID NO: 373287 - RNA, 18 nt, Artificial Sequence
  Synthetic
aagucacaugcguacacu

SEQ ID NO: 373288 - RNA, 19 nt, Artificial Sequence
  Synthetic
caagucacaugcguacacu

SEQ ID NO: 373289 - RNA, 20 nt, Artificial Sequence
  Synthetic
acaagucacaugcguacacu

SEQ ID NO: 373290 - RNA, 21 nt, Artificial Sequence
  Synthetic
uacaagucacaugcguacacu

SEQ ID NO: 373291 - RNA, 22 nt, Artificial Sequence
  Synthetic
guacaagucacaugcguacacu

SEQ ID NO: 373292 - RNA, 23 nt, Artificial Sequence
  Synthetic
uguacaagucacaugcguacacu

SEQ ID NO: 373293 - RNA, 24 nt, Artificial Sequence
  Synthetic
uuguacaagucacaugcguacacu

SEQ ID NO: 373294 - RNA, 18 nt, Artificial Sequence
  Synthetic
acuugguggugguacacu

SEQ ID NO: 373295 - RNA, 19 nt, Artificial Sequence
  Synthetic
aacuugguggugguacacu

SEQ ID NO: 373296 - RNA, 20 nt, Artificial Sequence
  Synthetic
caacuugguggugguacacu

SEQ ID NO: 373297 - RNA, 21 nt, Artificial Sequence
  Synthetic
ucaacuugguggugguacacu

SEQ ID NO: 373298 - RNA, 22 nt, Artificial Sequence
  Synthetic
gucaacuugguggugguacacu

SEQ ID NO: 373299 - RNA, 23 nt, Artificial Sequence
  Synthetic
ugucaacuugguggugguacacu

SEQ ID NO: 373300 - RNA, 24 nt, Artificial Sequence
  Synthetic
gugucaacuugguggugguacacu

SEQ ID NO: 373301 - RNA, 18 nt, Artificial Sequence
  Synthetic
gcaaaauuuuuguacacu

SEQ ID NO: 373302 - RNA, 19 nt, Artificial Sequence
  Synthetic
ggcaaaauuuuuguacacu

SEQ ID NO: 373303 - RNA, 20 nt, Artificial Sequence
  Synthetic
aggcaaaauuuuuguacacu

SEQ ID NO: 373304 - RNA, 21 nt, Artificial Sequence
  Synthetic
uaggcaaaauuuuuguacacu

SEQ ID NO: 373305 - RNA, 22 nt, Artificial Sequence
  Synthetic
cuaggcaaaauuuuuguacacu

SEQ ID NO: 373306 - RNA, 23 nt, Artificial Sequence
  Synthetic
ccuaggcaaaauuuuuguacacu

SEQ ID NO: 373307 - RNA, 24 nt, Artificial Sequence
  Synthetic
accuaggcaaaauuuuuguacacu

SEQ ID NO: 373308 - RNA, 18 nt, Artificial Sequence
  Synthetic
augcaaaucaaaaccacu

SEQ ID NO: 373309 - RNA, 19 nt, Artificial Sequence
  Synthetic
aaugcaaaucaaaaccacu

SEQ ID NO: 373310 - RNA, 20 nt, Artificial Sequence
  Synthetic
aaaugcaaaucaaaaccacu

SEQ ID NO: 373311 - RNA, 21 nt, Artificial Sequence
  Synthetic
gaaaugcaaaucaaaaccacu

SEQ ID NO: 373312 - RNA, 22 nt, Artificial Sequence
  Synthetic
agaaaugcaaaucaaaaccacu

SEQ ID NO: 373313 - RNA, 23 nt, Artificial Sequence
  Synthetic
gagaaaugcaaaucaaaaccacu

SEQ ID NO: 373314 - RNA, 24 nt, Artificial Sequence
  Synthetic
agagaaaugcaaaucaaaaccacu

SEQ ID NO: 373315 - RNA, 20 nt, Artificial Sequence
  Synthetic
uaaugcaaaucaaaaccacu

SEQ ID NO: 373316 - RNA, 21 nt, Artificial Sequence
  Synthetic
guaaugcaaaucaaaaccacu

SEQ ID NO: 373317 - RNA, 22 nt, Artificial Sequence
  Synthetic
aguaaugcaaaucaaaaccacu

SEQ ID NO: 373318 - RNA, 23 nt, Artificial Sequence
  Synthetic
gaguaaugcaaaucaaaaccacu

SEQ ID NO: 373319 - RNA, 24 nt, Artificial Sequence
  Synthetic
agaguaaugcaaaucaaaaccacu

SEQ ID NO: 373320 - RNA, 18 nt, Artificial Sequence
  Synthetic
aaguuaauguuaaccacu

SEQ ID NO: 373321 - RNA, 19 nt, Artificial Sequence
  Synthetic
aaaguuaauguuaaccacu

SEQ ID NO: 373322 - RNA, 20 nt, Artificial Sequence
  Synthetic
caaaguuaauguuaaccacu

SEQ ID NO: 373323 - RNA, 21 nt, Artificial Sequence
  Synthetic
ccaaaguuaauguuaaccacu

SEQ ID NO: 373324 - RNA, 22 nt, Artificial Sequence
  Synthetic
accaaaguuaauguuaaccacu

SEQ ID NO: 373325 - RNA, 23 nt, Artificial Sequence
  Synthetic
caccaaaguuaauguuaaccacu

SEQ ID NO: 373326 - RNA, 24 nt, Artificial Sequence
  Synthetic
ccaccaaaguuaauguuaaccacu

SEQ ID NO: 373327 - RNA, 18 nt, Artificial Sequence
  Synthetic
aucaagccaaacaccacu

SEQ ID NO: 373328 - RNA, 19 nt, Artificial Sequence
  Synthetic
uaucaagccaaacaccacu

SEQ ID NO: 373329 - RNA, 20 nt, Artificial Sequence
  Synthetic
uuaucaagccaaacaccacu

SEQ ID NO: 373330 - RNA, 21 nt, Artificial Sequence
  Synthetic
guuaucaagccaaacaccacu

SEQ ID NO: 373331 - RNA, 22 nt, Artificial Sequence
  Synthetic
uguuaucaagccaaacaccacu

SEQ ID NO: 373332 - RNA, 23 nt, Artificial Sequence
  Synthetic
auguuaucaagccaaacaccacu

SEQ ID NO: 373333 - RNA, 24 nt, Artificial Sequence
  Synthetic
uauguuaucaagccaaacaccacu

SEQ ID NO: 373334 - RNA, 18 nt, Artificial Sequence
  Synthetic
ugcauuuugcacaccacu

SEQ ID NO: 373335 - RNA, 19 nt, Artificial Sequence
  Synthetic
uugcauuuugcacaccacu

SEQ ID NO: 373336 - RNA, 20 nt, Artificial Sequence
  Synthetic
auugcauuuugcacaccacu

SEQ ID NO: 373337 - RNA, 21 nt, Artificial Sequence
  Synthetic
cauugcauuuugcacaccacu

SEQ ID NO: 373338 - RNA, 22 nt, Artificial Sequence
  Synthetic
ucauugcauuuugcacaccacu

SEQ ID NO: 373339 - RNA, 23 nt, Artificial Sequence
  Synthetic
gucauugcauuuugcacaccacu

SEQ ID NO: 373340 - RNA, 24 nt, Artificial Sequence
  Synthetic
agucauugcauuuugcacaccacu

SEQ ID NO: 373341 - RNA, 18 nt, Artificial Sequence
  Synthetic
cagagcagcaguaccacu

SEQ ID NO: 373342 - RNA, 19 nt, Artificial Sequence
  Synthetic
acagagcagcaguaccacu

SEQ ID NO: 373343 - RNA, 20 nt, Artificial Sequence
  Synthetic
cacagagcagcaguaccacu

SEQ ID NO: 373344 - RNA, 21 nt, Artificial Sequence
  Synthetic
ccacagagcagcaguaccacu

SEQ ID NO: 373345 - RNA, 22 nt, Artificial Sequence
  Synthetic
uccacagagcagcaguaccacu

SEQ ID NO: 373346 - RNA, 23 nt, Artificial Sequence
  Synthetic
guccacagagcagcaguaccacu

SEQ ID NO: 373347 - RNA, 24 nt, Artificial Sequence
  Synthetic
gguccacagagcagcaguaccacu

SEQ ID NO: 373348 - RNA, 18 nt, Artificial Sequence
  Synthetic
aaaauguuugguaccacu

SEQ ID NO: 373349 - RNA, 19 nt, Artificial Sequence
  Synthetic
gaaaauguuugguaccacu

SEQ ID NO: 373350 - RNA, 20 nt, Artificial Sequence
  Synthetic
agaaaauguuugguaccacu

SEQ ID NO: 373351 - RNA, 21 nt, Artificial Sequence
  Synthetic
uagaaaauguuugguaccacu

SEQ ID NO: 373352 - RNA, 22 nt, Artificial Sequence
  Synthetic
cuagaaaauguuugguaccacu

SEQ ID NO: 373353 - RNA, 23 nt, Artificial Sequence
  Synthetic
ucuagaaaauguuugguaccacu

SEQ ID NO: 373354 - RNA, 24 nt, Artificial Sequence
  Synthetic
uucuagaaaauguuugguaccacu

SEQ ID NO: 373355 - RNA, 18 nt, Artificial Sequence
  Synthetic
agauccaguuuuaccacu

SEQ ID NO: 373356 - RNA, 19 nt, Artificial Sequence
  Synthetic
gagauccaguuuuaccacu

SEQ ID NO: 373357 - RNA, 20 nt, Artificial Sequence
  Synthetic
agagauccaguuuuaccacu

SEQ ID NO: 373358 - RNA, 21 nt, Artificial Sequence
  Synthetic
gagagauccaguuuuaccacu

SEQ ID NO: 373359 - RNA, 22 nt, Artificial Sequence
  Synthetic
agagagauccaguuuuaccacu

SEQ ID NO: 373360 - RNA, 23 nt, Artificial Sequence
  Synthetic
aagagagauccaguuuuaccacu

SEQ ID NO: 373361 - RNA, 24 nt, Artificial Sequence
  Synthetic
caagagagauccaguuuuaccacu

SEQ ID NO: 373362 - RNA, 18 nt, Artificial Sequence
  Synthetic
ggcaaucauaaacccacu

SEQ ID NO: 373363 - RNA, 19 nt, Artificial Sequence
  Synthetic
uggcaaucauaaacccacu

SEQ ID NO: 373364 - RNA, 20 nt, Artificial Sequence
  Synthetic
uuggcaaucauaaacccacu

SEQ ID NO: 373365 - RNA, 21 nt, Artificial Sequence
  Synthetic
uuuggcaaucauaaacccacu

SEQ ID NO: 373366 - RNA, 22 nt, Artificial Sequence
  Synthetic
guuuggcaaucauaaacccacu

SEQ ID NO: 373367 - RNA, 23 nt, Artificial Sequence
  Synthetic
gguuuggcaaucauaaacccacu

SEQ ID NO: 373368 - RNA, 24 nt, Artificial Sequence
  Synthetic
agguuuggcaaucauaaacccacu

SEQ ID NO: 373369 - RNA, 18 nt, Artificial Sequence
  Synthetic
uacauuaguucacccacu

SEQ ID NO: 373370 - RNA, 19 nt, Artificial Sequence
  Synthetic
guacauuaguucacccacu

SEQ ID NO: 373371 - RNA, 20 nt, Artificial Sequence
  Synthetic
uguacauuaguucacccacu

SEQ ID NO: 373372 - RNA, 21 nt, Artificial Sequence
  Synthetic
guguacauuaguucacccacu

SEQ ID NO: 373373 - RNA, 22 nt, Artificial Sequence
  Synthetic
aguguacauuaguucacccacu

SEQ ID NO: 373374 - RNA, 23 nt, Artificial Sequence
  Synthetic
gaguguacauuaguucacccacu

SEQ ID NO: 373375 - RNA, 24 nt, Artificial Sequence
  Synthetic
ggaguguacauuaguucacccacu

SEQ ID NO: 373376 - RNA, 18 nt, Artificial Sequence
  Synthetic
ccagauuggcuacccacu

SEQ ID NO: 373377 - RNA, 19 nt, Artificial Sequence
  Synthetic
uccagauuggcuacccacu

SEQ ID NO: 373378 - RNA, 20 nt, Artificial Sequence
  Synthetic
guccagauuggcuacccacu

SEQ ID NO: 373379 - RNA, 21 nt, Artificial Sequence
  Synthetic
uguccagauuggcuacccacu

SEQ ID NO: 373380 - RNA, 22 nt, Artificial Sequence
  Synthetic
uuguccagauuggcuacccacu

SEQ ID NO: 373381 - RNA, 23 nt, Artificial Sequence
  Synthetic
uuuguccagauuggcuacccacu

SEQ ID NO: 373382 - RNA, 24 nt, Artificial Sequence
  Synthetic
cuuuguccagauuggcuacccacu

SEQ ID NO: 373383 - RNA, 18 nt, Artificial Sequence
  Synthetic
guggaguuuaaucccacu

SEQ ID NO: 373384 - RNA, 19 nt, Artificial Sequence
  Synthetic
aguggaguuuaaucccacu

SEQ ID NO: 373385 - RNA, 20 nt, Artificial Sequence
  Synthetic
uaguggaguuuaaucccacu

SEQ ID NO: 373386 - RNA, 21 nt, Artificial Sequence
  Synthetic
cuaguggaguuuaaucccacu

SEQ ID NO: 373387 - RNA, 22 nt, Artificial Sequence
  Synthetic
ucuaguggaguuuaaucccacu

SEQ ID NO: 373388 - RNA, 23 nt, Artificial Sequence
  Synthetic
gucuaguggaguuuaaucccacu

SEQ ID NO: 373389 - RNA, 24 nt, Artificial Sequence
  Synthetic
ggucuaguggaguuuaaucccacu

SEQ ID NO: 373390 - RNA, 18 nt, Artificial Sequence
  Synthetic
caauuuguugaucccacu

SEQ ID NO: 373391 - RNA, 19 nt, Artificial Sequence
  Synthetic
acaauuuguugaucccacu

SEQ ID NO: 373392 - RNA, 20 nt, Artificial Sequence
  Synthetic
uacaauuuguugaucccacu

SEQ ID NO: 373393 - RNA, 21 nt, Artificial Sequence
  Synthetic
uuacaauuuguugaucccacu

SEQ ID NO: 373394 - RNA, 22 nt, Artificial Sequence
  Synthetic
cuuacaauuuguugaucccacu

SEQ ID NO: 373395 - RNA, 23 nt, Artificial Sequence
  Synthetic
acuuacaauuuguugaucccacu

SEQ ID NO: 373396 - RNA, 24 nt, Artificial Sequence
  Synthetic
aacuuacaauuuguugaucccacu

SEQ ID NO: 373397 - RNA, 18 nt, Artificial Sequence
  Synthetic
ccucaugcuccucccacu

SEQ ID NO: 373398 - RNA, 19 nt, Artificial Sequence
  Synthetic
cccucaugcuccucccacu

SEQ ID NO: 373399 - RNA, 20 nt, Artificial Sequence
  Synthetic
ucccucaugcuccucccacu

SEQ ID NO: 373400 - RNA, 21 nt, Artificial Sequence
  Synthetic
uucccucaugcuccucccacu

SEQ ID NO: 373401 - RNA, 22 nt, Artificial Sequence
  Synthetic
uuucccucaugcuccucccacu

SEQ ID NO: 373402 - RNA, 23 nt, Artificial Sequence
  Synthetic
auuucccucaugcuccucccacu

SEQ ID NO: 373403 - RNA, 24 nt, Artificial Sequence
  Synthetic
aauuucccucaugcuccucccacu

SEQ ID NO: 373404 - RNA, 18 nt, Artificial Sequence
  Synthetic
ucagcuccccuucccacu

SEQ ID NO: 373405 - RNA, 19 nt, Artificial Sequence
  Synthetic
uucagcuccccuucccacu

SEQ ID NO: 373406 - RNA, 20 nt, Artificial Sequence
  Synthetic
uuucagcuccccuucccacu

SEQ ID NO: 373407 - RNA, 21 nt, Artificial Sequence
  Synthetic
uuuucagcuccccuucccacu

SEQ ID NO: 373408 - RNA, 22 nt, Artificial Sequence
  Synthetic
cuuuucagcuccccuucccacu

SEQ ID NO: 373409 - RNA, 23 nt, Artificial Sequence
  Synthetic
ccuuuucagcuccccuucccacu

SEQ ID NO: 373410 - RNA, 24 nt, Artificial Sequence
  Synthetic
cccuuuucagcuccccuucccacu

SEQ ID NO: 373411 - RNA, 18 nt, Artificial Sequence
  Synthetic
ucuuaauuaaaagccacu

SEQ ID NO: 373412 - RNA, 19 nt, Artificial Sequence
  Synthetic
aucuuaauuaaaagccacu

SEQ ID NO: 373413 - RNA, 20 nt, Artificial Sequence
  Synthetic
gaucuuaauuaaaagccacu

SEQ ID NO: 373414 - RNA, 21 nt, Artificial Sequence
  Synthetic
agaucuuaauuaaaagccacu

SEQ ID NO: 373415 - RNA, 22 nt, Artificial Sequence
  Synthetic
gagaucuuaauuaaaagccacu

SEQ ID NO: 373416 - RNA, 23 nt, Artificial Sequence
  Synthetic
agagaucuuaauuaaaagccacu

SEQ ID NO: 373417 - RNA, 24 nt, Artificial Sequence
  Synthetic
gagagaucuuaauuaaaagccacu

SEQ ID NO: 373418 - RNA, 18 nt, Artificial Sequence
  Synthetic
aaaccgguaccagccacu

SEQ ID NO: 373419 - RNA, 19 nt, Artificial Sequence
  Synthetic
aaaaccgguaccagccacu

SEQ ID NO: 373420 - RNA, 20 nt, Artificial Sequence
  Synthetic
aaaaaccgguaccagccacu

SEQ ID NO: 373421 - RNA, 21 nt, Artificial Sequence
  Synthetic
gaaaaaccgguaccagccacu

SEQ ID NO: 373422 - RNA, 22 nt, Artificial Sequence
  Synthetic
ggaaaaaccgguaccagccacu

SEQ ID NO: 373423 - RNA, 23 nt, Artificial Sequence
  Synthetic
aggaaaaaccgguaccagccacu

SEQ ID NO: 373424 - RNA, 24 nt, Artificial Sequence
  Synthetic
aaggaaaaaccgguaccagccacu

SEQ ID NO: 373425 - RNA, 20 nt, Artificial Sequence
  Synthetic
cgccuguaaucccagccacu

SEQ ID NO: 373426 - RNA, 21 nt, Artificial Sequence
  Synthetic
gcgccuguaaucccagccacu

SEQ ID NO: 373427 - RNA, 22 nt, Artificial Sequence
  Synthetic
ggcgccuguaaucccagccacu

SEQ ID NO: 373428 - RNA, 23 nt, Artificial Sequence
  Synthetic
gggcgccuguaaucccagccacu

SEQ ID NO: 373429 - RNA, 24 nt, Artificial Sequence
  Synthetic
ugggcgccuguaaucccagccacu

SEQ ID NO: 373430 - RNA, 18 nt, Artificial Sequence
  Synthetic
ucccuuguaggagccacu

SEQ ID NO: 373431 - RNA, 19 nt, Artificial Sequence
  Synthetic
aucccuuguaggagccacu

SEQ ID NO: 373432 - RNA, 20 nt, Artificial Sequence
  Synthetic
aaucccuuguaggagccacu

SEQ ID NO: 373433 - RNA, 21 nt, Artificial Sequence
  Synthetic
uaaucccuuguaggagccacu

SEQ ID NO: 373434 - RNA, 22 nt, Artificial Sequence
  Synthetic
cuaaucccuuguaggagccacu

SEQ ID NO: 373435 - RNA, 23 nt, Artificial Sequence
  Synthetic
ucuaaucccuuguaggagccacu

SEQ ID NO: 373436 - RNA, 24 nt, Artificial Sequence
  Synthetic
gucuaaucccuuguaggagccacu

SEQ ID NO: 373437 - RNA, 18 nt, Artificial Sequence
  Synthetic
ccuaaaugaauagccacu

SEQ ID NO: 373438 - RNA, 19 nt, Artificial Sequence
  Synthetic
uccuaaaugaauagccacu

SEQ ID NO: 373439 - RNA, 20 nt, Artificial Sequence
  Synthetic
auccuaaaugaauagccacu

SEQ ID NO: 373440 - RNA, 21 nt, Artificial Sequence
  Synthetic
uauccuaaaugaauagccacu

SEQ ID NO: 373441 - RNA, 22 nt, Artificial Sequence
  Synthetic
auauccuaaaugaauagccacu

SEQ ID NO: 373442 - RNA, 23 nt, Artificial Sequence
  Synthetic
gauauccuaaaugaauagccacu

SEQ ID NO: 373443 - RNA, 24 nt, Artificial Sequence
  Synthetic
ggauauccuaaaugaauagccacu

SEQ ID NO: 373444 - RNA, 18 nt, Artificial Sequence
  Synthetic
auaacucacaaggccacu

SEQ ID NO: 373445 - RNA, 19 nt, Artificial Sequence
  Synthetic
cauaacucacaaggccacu

SEQ ID NO: 373446 - RNA, 20 nt, Artificial Sequence
  Synthetic
ccauaacucacaaggccacu

SEQ ID NO: 373447 - RNA, 21 nt, Artificial Sequence
  Synthetic
accauaacucacaaggccacu

SEQ ID NO: 373448 - RNA, 22 nt, Artificial Sequence
  Synthetic
uaccauaacucacaaggccacu

SEQ ID NO: 373449 - RNA, 23 nt, Artificial Sequence
  Synthetic
uuaccauaacucacaaggccacu

SEQ ID NO: 373450 - RNA, 24 nt, Artificial Sequence
  Synthetic
uuuaccauaacucacaaggccacu

SEQ ID NO: 373451 - RNA, 18 nt, Artificial Sequence
  Synthetic
cucaacuacugggccacu

SEQ ID NO: 373452 - RNA, 19 nt, Artificial Sequence
  Synthetic
acucaacuacugggccacu

SEQ ID NO: 373453 - RNA, 20 nt, Artificial Sequence
  Synthetic
cacucaacuacugggccacu

SEQ ID NO: 373454 - RNA, 21 nt, Artificial Sequence
  Synthetic
acacucaacuacugggccacu

SEQ ID NO: 373455 - RNA, 22 nt, Artificial Sequence
  Synthetic
cacacucaacuacugggccacu

SEQ ID NO: 373456 - RNA, 23 nt, Artificial Sequence
  Synthetic
acacacucaacuacugggccacu

SEQ ID NO: 373457 - RNA, 24 nt, Artificial Sequence
  Synthetic
cacacacucaacuacugggccacu

SEQ ID NO: 373458 - RNA, 18 nt, Artificial Sequence
  Synthetic
uuuucuguuaaugccacu

SEQ ID NO: 373459 - RNA, 19 nt, Artificial Sequence
  Synthetic
auuuucuguuaaugccacu

SEQ ID NO: 373460 - RNA, 20 nt, Artificial Sequence
  Synthetic
aauuuucuguuaaugccacu

SEQ ID NO: 373461 - RNA, 21 nt, Artificial Sequence
  Synthetic
uaauuuucuguuaaugccacu

SEQ ID NO: 373462 - RNA, 22 nt, Artificial Sequence
  Synthetic
cuaauuuucuguuaaugccacu

SEQ ID NO: 373463 - RNA, 23 nt, Artificial Sequence
  Synthetic
acuaauuuucuguuaaugccacu

SEQ ID NO: 373464 - RNA, 24 nt, Artificial Sequence
  Synthetic
aacuaauuuucuguuaaugccacu

SEQ ID NO: 373465 - RNA, 18 nt, Artificial Sequence
  Synthetic
gcaauauaccaugccacu

SEQ ID NO: 373466 - RNA, 19 nt, Artificial Sequence
  Synthetic
agcaauauaccaugccacu

SEQ ID NO: 373467 - RNA, 20 nt, Artificial Sequence
  Synthetic
gagcaauauaccaugccacu

SEQ ID NO: 373468 - RNA, 21 nt, Artificial Sequence
  Synthetic
agagcaauauaccaugccacu

SEQ ID NO: 373469 - RNA, 22 nt, Artificial Sequence
  Synthetic
cagagcaauauaccaugccacu

SEQ ID NO: 373470 - RNA, 23 nt, Artificial Sequence
  Synthetic
ccagagcaauauaccaugccacu

SEQ ID NO: 373471 - RNA, 24 nt, Artificial Sequence
  Synthetic
uccagagcaauauaccaugccacu

SEQ ID NO: 373472 - RNA, 18 nt, Artificial Sequence
  Synthetic
uccgagagcuaugccacu

SEQ ID NO: 373473 - RNA, 19 nt, Artificial Sequence
  Synthetic
uuccgagagcuaugccacu

SEQ ID NO: 373474 - RNA, 20 nt, Artificial Sequence
  Synthetic
auuccgagagcuaugccacu

SEQ ID NO: 373475 - RNA, 21 nt, Artificial Sequence
  Synthetic
uauuccgagagcuaugccacu

SEQ ID NO: 373476 - RNA, 22 nt, Artificial Sequence
  Synthetic
auauuccgagagcuaugccacu

SEQ ID NO: 373477 - RNA, 23 nt, Artificial Sequence
  Synthetic
aauauuccgagagcuaugccacu

SEQ ID NO: 373478 - RNA, 24 nt, Artificial Sequence
  Synthetic
uaauauuccgagagcuaugccacu

SEQ ID NO: 373479 - RNA, 18 nt, Artificial Sequence
  Synthetic
cccaaggcuucugccacu

SEQ ID NO: 373480 - RNA, 19 nt, Artificial Sequence
  Synthetic
gcccaaggcuucugccacu

SEQ ID NO: 373481 - RNA, 20 nt, Artificial Sequence
  Synthetic
agcccaaggcuucugccacu

SEQ ID NO: 373482 - RNA, 21 nt, Artificial Sequence
  Synthetic
aagcccaaggcuucugccacu

SEQ ID NO: 373483 - RNA, 22 nt, Artificial Sequence
  Synthetic
gaagcccaaggcuucugccacu

SEQ ID NO: 373484 - RNA, 23 nt, Artificial Sequence
  Synthetic
ugaagcccaaggcuucugccacu

SEQ ID NO: 373485 - RNA, 24 nt, Artificial Sequence
  Synthetic
uugaagcccaaggcuucugccacu

SEQ ID NO: 373486 - RNA, 18 nt, Artificial Sequence
  Synthetic
aaccacuuuucauccacu

SEQ ID NO: 373487 - RNA, 19 nt, Artificial Sequence
  Synthetic
gaaccacuuuucauccacu

SEQ ID NO: 373488 - RNA, 20 nt, Artificial Sequence
  Synthetic
agaaccacuuuucauccacu

SEQ ID NO: 373489 - RNA, 21 nt, Artificial Sequence
  Synthetic
cagaaccacuuuucauccacu

SEQ ID NO: 373490 - RNA, 22 nt, Artificial Sequence
  Synthetic
ucagaaccacuuuucauccacu

SEQ ID NO: 373491 - RNA, 23 nt, Artificial Sequence
  Synthetic
uucagaaccacuuuucauccacu

SEQ ID NO: 373492 - RNA, 24 nt, Artificial Sequence
  Synthetic
cuucagaaccacuuuucauccacu

SEQ ID NO: 373493 - RNA, 18 nt, Artificial Sequence
  Synthetic
gagcacugaaacuccacu

SEQ ID NO: 373494 - RNA, 19 nt, Artificial Sequence
  Synthetic
ugagcacugaaacuccacu

SEQ ID NO: 373495 - RNA, 20 nt, Artificial Sequence
  Synthetic
augagcacugaaacuccacu

SEQ ID NO: 373496 - RNA, 21 nt, Artificial Sequence
  Synthetic
uaugagcacugaaacuccacu

SEQ ID NO: 373497 - RNA, 22 nt, Artificial Sequence
  Synthetic
guaugagcacugaaacuccacu

SEQ ID NO: 373498 - RNA, 23 nt, Artificial Sequence
  Synthetic
aguaugagcacugaaacuccacu

SEQ ID NO: 373499 - RNA, 24 nt, Artificial Sequence
  Synthetic
caguaugagcacugaaacuccacu

SEQ ID NO: 373500 - RNA, 18 nt, Artificial Sequence
  Synthetic
aaacuuuuaaccuccacu

SEQ ID NO: 373501 - RNA, 19 nt, Artificial Sequence
  Synthetic
aaaacuuuuaaccuccacu

SEQ ID NO: 373502 - RNA, 20 nt, Artificial Sequence
  Synthetic
caaaacuuuuaaccuccacu

SEQ ID NO: 373503 - RNA, 21 nt, Artificial Sequence
  Synthetic
ucaaaacuuuuaaccuccacu

SEQ ID NO: 373504 - RNA, 22 nt, Artificial Sequence
  Synthetic
gucaaaacuuuuaaccuccacu

SEQ ID NO: 373505 - RNA, 23 nt, Artificial Sequence
  Synthetic
agucaaaacuuuuaaccuccacu

SEQ ID NO: 373506 - RNA, 24 nt, Artificial Sequence
  Synthetic
gagucaaaacuuuuaaccuccacu

SEQ ID NO: 373507 - RNA, 18 nt, Artificial Sequence
  Synthetic
auuucuccaugguccacu

SEQ ID NO: 373508 - RNA, 19 nt, Artificial Sequence
  Synthetic
aauuucuccaugguccacu

SEQ ID NO: 373509 - RNA, 20 nt, Artificial Sequence
  Synthetic
gaauuucuccaugguccacu

SEQ ID NO: 373510 - RNA, 21 nt, Artificial Sequence
  Synthetic
ugaauuucuccaugguccacu

SEQ ID NO: 373511 - RNA, 22 nt, Artificial Sequence
  Synthetic
uugaauuucuccaugguccacu

SEQ ID NO: 373512 - RNA, 23 nt, Artificial Sequence
  Synthetic
uuugaauuucuccaugguccacu

SEQ ID NO: 373513 - RNA, 24 nt, Artificial Sequence
  Synthetic
auuugaauuucuccaugguccacu

SEQ ID NO: 373514 - RNA, 18 nt, Artificial Sequence
  Synthetic
uucccugccugguccacu

SEQ ID NO: 373515 - RNA, 19 nt, Artificial Sequence
  Synthetic
auucccugccugguccacu

SEQ ID NO: 373516 - RNA, 20 nt, Artificial Sequence
  Synthetic
gauucccugccugguccacu

SEQ ID NO: 373517 - RNA, 21 nt, Artificial Sequence
  Synthetic
ugauucccugccugguccacu

SEQ ID NO: 373518 - RNA, 22 nt, Artificial Sequence
  Synthetic
cugauucccugccugguccacu

SEQ ID NO: 373519 - RNA, 23 nt, Artificial Sequence
  Synthetic
ucugauucccugccugguccacu

SEQ ID NO: 373520 - RNA, 24 nt, Artificial Sequence
  Synthetic
cucugauucccugccugguccacu

SEQ ID NO: 373521 - RNA, 18 nt, Artificial Sequence
  Synthetic
auauuaaaagauuccacu

SEQ ID NO: 373522 - RNA, 19 nt, Artificial Sequence
  Synthetic
aauauuaaaagauuccacu

SEQ ID NO: 373523 - RNA, 20 nt, Artificial Sequence
  Synthetic
gaauauuaaaagauuccacu

SEQ ID NO: 373524 - RNA, 21 nt, Artificial Sequence
  Synthetic
ggaauauuaaaagauuccacu

SEQ ID NO: 373525 - RNA, 22 nt, Artificial Sequence
  Synthetic
uggaauauuaaaagauuccacu

SEQ ID NO: 373526 - RNA, 23 nt, Artificial Sequence
  Synthetic
auggaauauuaaaagauuccacu

SEQ ID NO: 373527 - RNA, 24 nt, Artificial Sequence
  Synthetic
uauggaauauuaaaagauuccacu

SEQ ID NO: 373528 - RNA, 18 nt, Artificial Sequence
  Synthetic
ucucaauaaucuuccacu

SEQ ID NO: 373529 - RNA, 19 nt, Artificial Sequence
  Synthetic
aucucaauaaucuuccacu

SEQ ID NO: 373530 - RNA, 20 nt, Artificial Sequence
  Synthetic
gaucucaauaaucuuccacu

SEQ ID NO: 373531 - RNA, 21 nt, Artificial Sequence
  Synthetic
ggaucucaauaaucuuccacu

SEQ ID NO: 373532 - RNA, 22 nt, Artificial Sequence
  Synthetic
uggaucucaauaaucuuccacu

SEQ ID NO: 373533 - RNA, 23 nt, Artificial Sequence
  Synthetic
cuggaucucaauaaucuuccacu

SEQ ID NO: 373534 - RNA, 24 nt, Artificial Sequence
  Synthetic
gcuggaucucaauaaucuuccacu

SEQ ID NO: 373535 - RNA, 18 nt, Artificial Sequence
  Synthetic
aucccccuuauuuccacu

SEQ ID NO: 373536 - RNA, 19 nt, Artificial Sequence
  Synthetic
caucccccuuauuuccacu

SEQ ID NO: 373537 - RNA, 20 nt, Artificial Sequence
  Synthetic
ccaucccccuuauuuccacu

SEQ ID NO: 373538 - RNA, 21 nt, Artificial Sequence
  Synthetic
cccaucccccuuauuuccacu

SEQ ID NO: 373539 - RNA, 22 nt, Artificial Sequence
  Synthetic
ucccaucccccuuauuuccacu

SEQ ID NO: 373540 - RNA, 23 nt, Artificial Sequence
  Synthetic
uucccaucccccuuauuuccacu

SEQ ID NO: 373541 - RNA, 24 nt, Artificial Sequence
  Synthetic
uuucccaucccccuuauuuccacu

SEQ ID NO: 373542 - RNA, 18 nt, Artificial Sequence
  Synthetic
cucacucagaaaagcacu

SEQ ID NO: 373543 - RNA, 19 nt, Artificial Sequence
  Synthetic
ucucacucagaaaagcacu

SEQ ID NO: 373544 - RNA, 20 nt, Artificial Sequence
  Synthetic
cucucacucagaaaagcacu

SEQ ID NO: 373545 - RNA, 21 nt, Artificial Sequence
  Synthetic
ucucucacucagaaaagcacu

SEQ ID NO: 373546 - RNA, 22 nt, Artificial Sequence
  Synthetic
cucucucacucagaaaagcacu

SEQ ID NO: 373547 - RNA, 23 nt, Artificial Sequence
  Synthetic
ccucucucacucagaaaagcacu

SEQ ID NO: 373548 - RNA, 24 nt, Artificial Sequence
  Synthetic
cccucucucacucagaaaagcacu

SEQ ID NO: 373549 - RNA, 18 nt, Artificial Sequence
  Synthetic
cucugcuggcaaagcacu

SEQ ID NO: 373550 - RNA, 19 nt, Artificial Sequence
  Synthetic
ucucugcuggcaaagcacu

SEQ ID NO: 373551 - RNA, 20 nt, Artificial Sequence
  Synthetic
gucucugcuggcaaagcacu

SEQ ID NO: 373552 - RNA, 21 nt, Artificial Sequence
  Synthetic
ugucucugcuggcaaagcacu

SEQ ID NO: 373553 - RNA, 22 nt, Artificial Sequence
  Synthetic
gugucucugcuggcaaagcacu

SEQ ID NO: 373554 - RNA, 23 nt, Artificial Sequence
  Synthetic
agugucucugcuggcaaagcacu

SEQ ID NO: 373555 - RNA, 24 nt, Artificial Sequence
  Synthetic
aagugucucugcuggcaaagcacu

SEQ ID NO: 373556 - RNA, 18 nt, Artificial Sequence
  Synthetic
aauaaauaugaaagcacu

SEQ ID NO: 373557 - RNA, 19 nt, Artificial Sequence
  Synthetic
gaauaaauaugaaagcacu

SEQ ID NO: 373558 - RNA, 20 nt, Artificial Sequence
  Synthetic
ggaauaaauaugaaagcacu

SEQ ID NO: 373559 - RNA, 21 nt, Artificial Sequence
  Synthetic
gggaauaaauaugaaagcacu

SEQ ID NO: 373560 - RNA, 22 nt, Artificial Sequence
  Synthetic
agggaauaaauaugaaagcacu

SEQ ID NO: 373561 - RNA, 23 nt, Artificial Sequence
  Synthetic
aagggaauaaauaugaaagcacu

SEQ ID NO: 373562 - RNA, 24 nt, Artificial Sequence
  Synthetic
uaagggaauaaauaugaaagcacu

SEQ ID NO: 373563 - RNA, 18 nt, Artificial Sequence
  Synthetic
uguccaugguaaagcacu

SEQ ID NO: 373564 - RNA, 19 nt, Artificial Sequence
  Synthetic
uuguccaugguaaagcacu

SEQ ID NO: 373565 - RNA, 20 nt, Artificial Sequence
  Synthetic
uuuguccaugguaaagcacu

SEQ ID NO: 373566 - RNA, 21 nt, Artificial Sequence
  Synthetic
auuuguccaugguaaagcacu

SEQ ID NO: 373567 - RNA, 22 nt, Artificial Sequence
  Synthetic
cauuuguccaugguaaagcacu

SEQ ID NO: 373568 - RNA, 23 nt, Artificial Sequence
  Synthetic
acauuuguccaugguaaagcacu

SEQ ID NO: 373569 - RNA, 24 nt, Artificial Sequence
  Synthetic
aacauuuguccaugguaaagcacu

SEQ ID NO: 373570 - RNA, 18 nt, Artificial Sequence
  Synthetic
gccuguaauccaagcacu

SEQ ID NO: 373571 - RNA, 19 nt, Artificial Sequence
  Synthetic
cgccuguaauccaagcacu

SEQ ID NO: 373572 - RNA, 20 nt, Artificial Sequence
  Synthetic
acgccuguaauccaagcacu

SEQ ID NO: 373573 - RNA, 21 nt, Artificial Sequence
  Synthetic
cacgccuguaauccaagcacu

SEQ ID NO: 373574 - RNA, 22 nt, Artificial Sequence
  Synthetic
ucacgccuguaauccaagcacu

SEQ ID NO: 373575 - RNA, 23 nt, Artificial Sequence
  Synthetic
cucacgccuguaauccaagcacu

SEQ ID NO: 373576 - RNA, 24 nt, Artificial Sequence
  Synthetic
gcucacgccuguaauccaagcacu

SEQ ID NO: 373577 - RNA, 18 nt, Artificial Sequence
  Synthetic
aucuuuagagcaagcacu

SEQ ID NO: 373578 - RNA, 19 nt, Artificial Sequence
  Synthetic
aaucuuuagagcaagcacu

SEQ ID NO: 373579 - RNA, 20 nt, Artificial Sequence
  Synthetic
uaaucuuuagagcaagcacu

SEQ ID NO: 373580 - RNA, 21 nt, Artificial Sequence
  Synthetic
guaaucuuuagagcaagcacu

SEQ ID NO: 373581 - RNA, 22 nt, Artificial Sequence
  Synthetic
uguaaucuuuagagcaagcacu

SEQ ID NO: 373582 - RNA, 23 nt, Artificial Sequence
  Synthetic
auguaaucuuuagagcaagcacu

SEQ ID NO: 373583 - RNA, 24 nt, Artificial Sequence
  Synthetic
uauguaaucuuuagagcaagcacu

SEQ ID NO: 373584 - RNA, 18 nt, Artificial Sequence
  Synthetic
uuaagguaacgaagcacu

SEQ ID NO: 373585 - RNA, 19 nt, Artificial Sequence
  Synthetic
auuaagguaacgaagcacu

SEQ ID NO: 373586 - RNA, 20 nt, Artificial Sequence
  Synthetic
aauuaagguaacgaagcacu

SEQ ID NO: 373587 - RNA, 21 nt, Artificial Sequence
  Synthetic
aaauuaagguaacgaagcacu

SEQ ID NO: 373588 - RNA, 22 nt, Artificial Sequence
  Synthetic
gaaauuaagguaacgaagcacu

SEQ ID NO: 373589 - RNA, 23 nt, Artificial Sequence
  Synthetic
ugaaauuaagguaacgaagcacu

SEQ ID NO: 373590 - RNA, 24 nt, Artificial Sequence
  Synthetic
augaaauuaagguaacgaagcacu

SEQ ID NO: 373591 - RNA, 18 nt, Artificial Sequence
  Synthetic
uuagacaagggaagcacu

SEQ ID NO: 373592 - RNA, 19 nt, Artificial Sequence
  Synthetic
uuuagacaagggaagcacu

SEQ ID NO: 373593 - RNA, 20 nt, Artificial Sequence
  Synthetic
auuuagacaagggaagcacu

SEQ ID NO: 373594 - RNA, 21 nt, Artificial Sequence
  Synthetic
uauuuagacaagggaagcacu

SEQ ID NO: 373595 - RNA, 22 nt, Artificial Sequence
  Synthetic
uuauuuagacaagggaagcacu

SEQ ID NO: 373596 - RNA, 23 nt, Artificial Sequence
  Synthetic
uuuauuuagacaagggaagcacu

SEQ ID NO: 373597 - RNA, 24 nt, Artificial Sequence
  Synthetic
uuuuauuuagacaagggaagcacu

SEQ ID NO: 373598 - RNA, 18 nt, Artificial Sequence
  Synthetic
acaucaaaagacagcacu

SEQ ID NO: 373599 - RNA, 19 nt, Artificial Sequence
  Synthetic
uacaucaaaagacagcacu

SEQ ID NO: 373600 - RNA, 20 nt, Artificial Sequence
  Synthetic
auacaucaaaagacagcacu

SEQ ID NO: 373601 - RNA, 21 nt, Artificial Sequence
  Synthetic
uauacaucaaaagacagcacu

SEQ ID NO: 373602 - RNA, 22 nt, Artificial Sequence
  Synthetic
cuauacaucaaaagacagcacu

SEQ ID NO: 373603 - RNA, 23 nt, Artificial Sequence
  Synthetic
ucuauacaucaaaagacagcacu

SEQ ID NO: 373604 - RNA, 24 nt, Artificial Sequence
  Synthetic
aucuauacaucaaaagacagcacu

SEQ ID NO: 373605 - RNA, 19 nt, Artificial Sequence
  Synthetic
cgccuguaauaccagcacu

SEQ ID NO: 373606 - RNA, 20 nt, Artificial Sequence
  Synthetic
gcgccuguaauaccagcacu

SEQ ID NO: 373607 - RNA, 21 nt, Artificial Sequence
  Synthetic
cgcgccuguaauaccagcacu

SEQ ID NO: 373608 - RNA, 22 nt, Artificial Sequence
  Synthetic
ucgcgccuguaauaccagcacu

SEQ ID NO: 373609 - RNA, 23 nt, Artificial Sequence
  Synthetic
cucgcgccuguaauaccagcacu

SEQ ID NO: 373610 - RNA, 24 nt, Artificial Sequence
  Synthetic
gcucgcgccuguaauaccagcacu

SEQ ID NO: 373611 - RNA, 18 nt, Artificial Sequence
  Synthetic
gccuguaaccccagcacu

SEQ ID NO: 373612 - RNA, 19 nt, Artificial Sequence
  Synthetic
ugccuguaaccccagcacu

SEQ ID NO: 373613 - RNA, 20 nt, Artificial Sequence
  Synthetic
augccuguaaccccagcacu

SEQ ID NO: 373614 - RNA, 21 nt, Artificial Sequence
  Synthetic
caugccuguaaccccagcacu

SEQ ID NO: 373615 - RNA, 22 nt, Artificial Sequence
  Synthetic
ucaugccuguaaccccagcacu

SEQ ID NO: 373616 - RNA, 23 nt, Artificial Sequence
  Synthetic
cucaugccuguaaccccagcacu

SEQ ID NO: 373617 - RNA, 24 nt, Artificial Sequence
  Synthetic
gcucaugccuguaaccccagcacu

SEQ ID NO: 373618 - RNA, 18 nt, Artificial Sequence
  Synthetic
ccccauaaucccagcacu

SEQ ID NO: 373619 - RNA, 19 nt, Artificial Sequence
  Synthetic
uccccauaaucccagcacu

SEQ ID NO: 373620 - RNA, 20 nt, Artificial Sequence
  Synthetic
guccccauaaucccagcacu

SEQ ID NO: 373621 - RNA, 21 nt, Artificial Sequence
  Synthetic
uguccccauaaucccagcacu

SEQ ID NO: 373622 - RNA, 22 nt, Artificial Sequence
  Synthetic
auguccccauaaucccagcacu

SEQ ID NO: 373623 - RNA, 23 nt, Artificial Sequence
  Synthetic
cauguccccauaaucccagcacu

SEQ ID NO: 373624 - RNA, 24 nt, Artificial Sequence
  Synthetic
acauguccccauaaucccagcacu

SEQ ID NO: 373625 - RNA, 18 nt, Artificial Sequence
  Synthetic
gcauauaaucccagcacu

SEQ ID NO: 373626 - RNA, 19 nt, Artificial Sequence
  Synthetic
ugcauauaaucccagcacu

SEQ ID NO: 373627 - RNA, 20 nt, Artificial Sequence
  Synthetic
augcauauaaucccagcacu

SEQ ID NO: 373628 - RNA, 21 nt, Artificial Sequence
  Synthetic
caugcauauaaucccagcacu

SEQ ID NO: 373629 - RNA, 22 nt, Artificial Sequence
  Synthetic
ucaugcauauaaucccagcacu

SEQ ID NO: 373630 - RNA, 23 nt, Artificial Sequence
  Synthetic
cucaugcauauaaucccagcacu

SEQ ID NO: 373631 - RNA, 24 nt, Artificial Sequence
  Synthetic
gcucaugcauauaaucccagcacu

SEQ ID NO: 373632 - RNA, 18 nt, Artificial Sequence
  Synthetic
accuauaaucccagcacu

SEQ ID NO: 373633 - RNA, 19 nt, Artificial Sequence
  Synthetic
caccuauaaucccagcacu

SEQ ID NO: 373634 - RNA, 20 nt, Artificial Sequence
  Synthetic
acaccuauaaucccagcacu

SEQ ID NO: 373635 - RNA, 21 nt, Artificial Sequence
  Synthetic
cacaccuauaaucccagcacu

SEQ ID NO: 373636 - RNA, 22 nt, Artificial Sequence
  Synthetic
ucacaccuauaaucccagcacu

SEQ ID NO: 373637 - RNA, 23 nt, Artificial Sequence
  Synthetic
cucacaccuauaaucccagcacu

SEQ ID NO: 373638 - RNA, 24 nt, Artificial Sequence
  Synthetic
gcucacaccuauaaucccagcacu

SEQ ID NO: 373639 - RNA, 18 nt, Artificial Sequence
  Synthetic
gccuauaaucccagcacu

SEQ ID NO: 373640 - RNA, 19 nt, Artificial Sequence
  Synthetic
cgccuauaaucccagcacu

SEQ ID NO: 373641 - RNA, 20 nt, Artificial Sequence
  Synthetic
acgccuauaaucccagcacu

SEQ ID NO: 373642 - RNA, 21 nt, Artificial Sequence
  Synthetic
cacgccuauaaucccagcacu

SEQ ID NO: 373643 - RNA, 22 nt, Artificial Sequence
  Synthetic
ucacgccuauaaucccagcacu

SEQ ID NO: 373644 - RNA, 23 nt, Artificial Sequence
  Synthetic
cucacgccuauaaucccagcacu

SEQ ID NO: 373645 - RNA, 24 nt, Artificial Sequence
  Synthetic
gcucacgccuauaaucccagcacu

SEQ ID NO: 373646 - RNA, 18 nt, Artificial Sequence
  Synthetic
uccuauaaucccagcacu

SEQ ID NO: 373647 - RNA, 19 nt, Artificial Sequence
  Synthetic
cuccuauaaucccagcacu

SEQ ID NO: 373648 - RNA, 20 nt, Artificial Sequence
  Synthetic
acuccuauaaucccagcacu

SEQ ID NO: 373649 - RNA, 21 nt, Artificial Sequence
  Synthetic
cacuccuauaaucccagcacu

SEQ ID NO: 373650 - RNA, 22 nt, Artificial Sequence
  Synthetic
ucacuccuauaaucccagcacu

SEQ ID NO: 373651 - RNA, 23 nt, Artificial Sequence
  Synthetic
cucacuccuauaaucccagcacu

SEQ ID NO: 373652 - RNA, 24 nt, Artificial Sequence
  Synthetic
gcucacuccuauaaucccagcacu

SEQ ID NO: 373653 - RNA, 18 nt, Artificial Sequence
  Synthetic
accuguaaucccagcacu

SEQ ID NO: 373654 - RNA, 19 nt, Artificial Sequence
  Synthetic
uaccuguaaucccagcacu

SEQ ID NO: 373655 - RNA, 20 nt, Artificial Sequence
  Synthetic
auaccuguaaucccagcacu

SEQ ID NO: 373656 - RNA, 21 nt, Artificial Sequence
  Synthetic
cauaccuguaaucccagcacu

SEQ ID NO: 373657 - RNA, 22 nt, Artificial Sequence
  Synthetic
ucauaccuguaaucccagcacu

SEQ ID NO: 373658 - RNA, 23 nt, Artificial Sequence
  Synthetic
cucauaccuguaaucccagcacu

SEQ ID NO: 373659 - RNA, 24 nt, Artificial Sequence
  Synthetic
gcucauaccuguaaucccagcacu

SEQ ID NO: 373660 - RNA, 19 nt, Artificial Sequence
  Synthetic
agccuguaaucccagcacu

SEQ ID NO: 373661 - RNA, 20 nt, Artificial Sequence
  Synthetic
aagccuguaaucccagcacu

SEQ ID NO: 373662 - RNA, 21 nt, Artificial Sequence
  Synthetic
caagccuguaaucccagcacu

SEQ ID NO: 373663 - RNA, 22 nt, Artificial Sequence
  Synthetic
ucaagccuguaaucccagcacu

SEQ ID NO: 373664 - RNA, 23 nt, Artificial Sequence
  Synthetic
uucaagccuguaaucccagcacu

SEQ ID NO: 373665 - RNA, 24 nt, Artificial Sequence
  Synthetic
guucaagccuguaaucccagcacu

SEQ ID NO: 373666 - RNA, 21 nt, Artificial Sequence
  Synthetic
aacgccuguaaucccagcacu

SEQ ID NO: 373667 - RNA, 22 nt, Artificial Sequence
  Synthetic
caacgccuguaaucccagcacu

SEQ ID NO: 373668 - RNA, 23 nt, Artificial Sequence
  Synthetic
ucaacgccuguaaucccagcacu

SEQ ID NO: 373669 - RNA, 24 nt, Artificial Sequence
  Synthetic
cucaacgccuguaaucccagcacu

SEQ ID NO: 373670 - RNA, 21 nt, Artificial Sequence
  Synthetic
cacgccuguaaucccagcacu

SEQ ID NO: 373671 - RNA, 22 nt, Artificial Sequence
  Synthetic
ucacgccuguaaucccagcacu

SEQ ID NO: 373672 - RNA, 23 nt, Artificial Sequence
  Synthetic
cucacgccuguaaucccagcacu

SEQ ID NO: 373673 - RNA, 24 nt, Artificial Sequence
  Synthetic
ccucacgccuguaaucccagcacu

SEQ ID NO: 373674 - RNA, 21 nt, Artificial Sequence
  Synthetic
uacgccuguaaucccagcacu

SEQ ID NO: 373675 - RNA, 22 nt, Artificial Sequence
  Synthetic
uuacgccuguaaucccagcacu

SEQ ID NO: 373676 - RNA, 23 nt, Artificial Sequence
  Synthetic
cuuacgccuguaaucccagcacu

SEQ ID NO: 373677 - RNA, 24 nt, Artificial Sequence
  Synthetic
gcuuacgccuguaaucccagcacu

SEQ ID NO: 373678 - RNA, 19 nt, Artificial Sequence
  Synthetic
ggccuguaaucccagcacu

SEQ ID NO: 373679 - RNA, 20 nt, Artificial Sequence
  Synthetic
aggccuguaaucccagcacu

SEQ ID NO: 373680 - RNA, 21 nt, Artificial Sequence
  Synthetic
caggccuguaaucccagcacu

SEQ ID NO: 373681 - RNA, 22 nt, Artificial Sequence
  Synthetic
ucaggccuguaaucccagcacu

SEQ ID NO: 373682 - RNA, 23 nt, Artificial Sequence
  Synthetic
cucaggccuguaaucccagcacu

SEQ ID NO: 373683 - RNA, 24 nt, Artificial Sequence
  Synthetic
gcucaggccuguaaucccagcacu

SEQ ID NO: 373684 - RNA, 21 nt, Artificial Sequence
  Synthetic
caugccuguaaucccagcacu

SEQ ID NO: 373685 - RNA, 22 nt, Artificial Sequence
  Synthetic
gcaugccuguaaucccagcacu

SEQ ID NO: 373686 - RNA, 23 nt, Artificial Sequence
  Synthetic
ugcaugccuguaaucccagcacu

SEQ ID NO: 373687 - RNA, 24 nt, Artificial Sequence
  Synthetic
uugcaugccuguaaucccagcacu

SEQ ID NO: 373688 - RNA, 22 nt, Artificial Sequence
  Synthetic
ucaugccuguaaucccagcacu

SEQ ID NO: 373689 - RNA, 23 nt, Artificial Sequence
  Synthetic
cucaugccuguaaucccagcacu

SEQ ID NO: 373690 - RNA, 24 nt, Artificial Sequence
  Synthetic
acucaugccuguaaucccagcacu

SEQ ID NO: 373691 - RNA, 19 nt, Artificial Sequence
  Synthetic
ugucuguaaucccagcacu

SEQ ID NO: 373692 - RNA, 20 nt, Artificial Sequence
  Synthetic
augucuguaaucccagcacu

SEQ ID NO: 373693 - RNA, 21 nt, Artificial Sequence
  Synthetic
caugucuguaaucccagcacu

SEQ ID NO: 373694 - RNA, 22 nt, Artificial Sequence
  Synthetic
ucaugucuguaaucccagcacu

SEQ ID NO: 373695 - RNA, 23 nt, Artificial Sequence
  Synthetic
cucaugucuguaaucccagcacu

SEQ ID NO: 373696 - RNA, 24 nt, Artificial Sequence
  Synthetic
gcucaugucuguaaucccagcacu

SEQ ID NO: 373697 - RNA, 18 nt, Artificial Sequence
  Synthetic
accuguacucccagcacu

SEQ ID NO: 373698 - RNA, 19 nt, Artificial Sequence
  Synthetic
caccuguacucccagcacu

SEQ ID NO: 373699 - RNA, 20 nt, Artificial Sequence
  Synthetic
acaccuguacucccagcacu

SEQ ID NO: 373700 - RNA, 21 nt, Artificial Sequence
  Synthetic
cacaccuguacucccagcacu

SEQ ID NO: 373701 - RNA, 22 nt, Artificial Sequence
  Synthetic
ucacaccuguacucccagcacu

SEQ ID NO: 373702 - RNA, 23 nt, Artificial Sequence
  Synthetic
cucacaccuguacucccagcacu

SEQ ID NO: 373703 - RNA, 24 nt, Artificial Sequence
  Synthetic
gcucacaccuguacucccagcacu

SEQ ID NO: 373704 - RNA, 18 nt, Artificial Sequence
  Synthetic
uccuguaauuccagcacu

SEQ ID NO: 373705 - RNA, 19 nt, Artificial Sequence
  Synthetic
cuccuguaauuccagcacu

SEQ ID NO: 373706 - RNA, 20 nt, Artificial Sequence
  Synthetic
acuccuguaauuccagcacu

SEQ ID NO: 373707 - RNA, 21 nt, Artificial Sequence
  Synthetic
cacuccuguaauuccagcacu

SEQ ID NO: 373708 - RNA, 22 nt, Artificial Sequence
  Synthetic
ucacuccuguaauuccagcacu

SEQ ID NO: 373709 - RNA, 23 nt, Artificial Sequence
  Synthetic
cucacuccuguaauuccagcacu

SEQ ID NO: 373710 - RNA, 24 nt, Artificial Sequence
  Synthetic
gcucacuccuguaauuccagcacu

SEQ ID NO: 373711 - RNA, 18 nt, Artificial Sequence
  Synthetic
gccuguaaucgcagcacu

SEQ ID NO: 373712 - RNA, 19 nt, Artificial Sequence
  Synthetic
cgccuguaaucgcagcacu

SEQ ID NO: 373713 - RNA, 20 nt, Artificial Sequence
  Synthetic
acgccuguaaucgcagcacu

SEQ ID NO: 373714 - RNA, 21 nt, Artificial Sequence
  Synthetic
cacgccuguaaucgcagcacu

SEQ ID NO: 373715 - RNA, 22 nt, Artificial Sequence
  Synthetic
ucacgccuguaaucgcagcacu

SEQ ID NO: 373716 - RNA, 23 nt, Artificial Sequence
  Synthetic
cucacgccuguaaucgcagcacu

SEQ ID NO: 373717 - RNA, 24 nt, Artificial Sequence
  Synthetic
gcucacgccuguaaucgcagcacu

SEQ ID NO: 373718 - RNA, 18 nt, Artificial Sequence
  Synthetic
gccuguaaucucagcacu

SEQ ID NO: 373719 - RNA, 19 nt, Artificial Sequence
  Synthetic
ugccuguaaucucagcacu

SEQ ID NO: 373720 - RNA, 20 nt, Artificial Sequence
  Synthetic
augccuguaaucucagcacu

SEQ ID NO: 373721 - RNA, 21 nt, Artificial Sequence
  Synthetic
caugccuguaaucucagcacu

SEQ ID NO: 373722 - RNA, 22 nt, Artificial Sequence
  Synthetic
ucaugccuguaaucucagcacu

SEQ ID NO: 373723 - RNA, 23 nt, Artificial Sequence
  Synthetic
uucaugccuguaaucucagcacu

SEQ ID NO: 373724 - RNA, 24 nt, Artificial Sequence
  Synthetic
guucaugccuguaaucucagcacu

SEQ ID NO: 373725 - RNA, 18 nt, Artificial Sequence
  Synthetic
acugauuguaagagcacu

SEQ ID NO: 373726 - RNA, 19 nt, Artificial Sequence
  Synthetic
aacugauuguaagagcacu

SEQ ID NO: 373727 - RNA, 20 nt, Artificial Sequence
  Synthetic
uaacugauuguaagagcacu

SEQ ID NO: 373728 - RNA, 21 nt, Artificial Sequence
  Synthetic
cuaacugauuguaagagcacu

SEQ ID NO: 373729 - RNA, 22 nt, Artificial Sequence
  Synthetic
ucuaacugauuguaagagcacu

SEQ ID NO: 373730 - RNA, 23 nt, Artificial Sequence
  Synthetic
cucuaacugauuguaagagcacu

SEQ ID NO: 373731 - RNA, 24 nt, Artificial Sequence
  Synthetic
ccucuaacugauuguaagagcacu

SEQ ID NO: 373732 - RNA, 18 nt, Artificial Sequence
  Synthetic
gccuaugauccuagcacu

SEQ ID NO: 373733 - RNA, 19 nt, Artificial Sequence
  Synthetic
ugccuaugauccuagcacu

SEQ ID NO: 373734 - RNA, 20 nt, Artificial Sequence
  Synthetic
augccuaugauccuagcacu

SEQ ID NO: 373735 - RNA, 21 nt, Artificial Sequence
  Synthetic
caugccuaugauccuagcacu

SEQ ID NO: 373736 - RNA, 22 nt, Artificial Sequence
  Synthetic
ucaugccuaugauccuagcacu

SEQ ID NO: 373737 - RNA, 23 nt, Artificial Sequence
  Synthetic
cucaugccuaugauccuagcacu

SEQ ID NO: 373738 - RNA, 24 nt, Artificial Sequence
  Synthetic
gcucaugccuaugauccuagcacu

SEQ ID NO: 373739 - RNA, 18 nt, Artificial Sequence
  Synthetic
auuaguuaugguagcacu

SEQ ID NO: 373740 - RNA, 19 nt, Artificial Sequence
  Synthetic
uauuaguuaugguagcacu

SEQ ID NO: 373741 - RNA, 20 nt, Artificial Sequence
  Synthetic
uuauuaguuaugguagcacu

SEQ ID NO: 373742 - RNA, 21 nt, Artificial Sequence
  Synthetic
uuuauuaguuaugguagcacu

SEQ ID NO: 373743 - RNA, 22 nt, Artificial Sequence
  Synthetic
guuuauuaguuaugguagcacu

SEQ ID NO: 373744 - RNA, 23 nt, Artificial Sequence
  Synthetic
aguuuauuaguuaugguagcacu

SEQ ID NO: 373745 - RNA, 24 nt, Artificial Sequence
  Synthetic
gaguuuauuaguuaugguagcacu

SEQ ID NO: 373746 - RNA, 18 nt, Artificial Sequence
  Synthetic
acccuugccauuagcacu

SEQ ID NO: 373747 - RNA, 19 nt, Artificial Sequence
  Synthetic
gacccuugccauuagcacu

SEQ ID NO: 373748 - RNA, 20 nt, Artificial Sequence
  Synthetic
ugacccuugccauuagcacu

SEQ ID NO: 373749 - RNA, 21 nt, Artificial Sequence
  Synthetic
cugacccuugccauuagcacu

SEQ ID NO: 373750 - RNA, 22 nt, Artificial Sequence
  Synthetic
ucugacccuugccauuagcacu

SEQ ID NO: 373751 - RNA, 23 nt, Artificial Sequence
  Synthetic
uucugacccuugccauuagcacu

SEQ ID NO: 373752 - RNA, 24 nt, Artificial Sequence
  Synthetic
auucugacccuugccauuagcacu

SEQ ID NO: 373753 - RNA, 18 nt, Artificial Sequence
  Synthetic
uuagcauacaaccgcacu

SEQ ID NO: 373754 - RNA, 19 nt, Artificial Sequence
  Synthetic
auuagcauacaaccgcacu

SEQ ID NO: 373755 - RNA, 20 nt, Artificial Sequence
  Synthetic
gauuagcauacaaccgcacu

SEQ ID NO: 373756 - RNA, 21 nt, Artificial Sequence
  Synthetic
ggauuagcauacaaccgcacu

SEQ ID NO: 373757 - RNA, 22 nt, Artificial Sequence
  Synthetic
aggauuagcauacaaccgcacu

SEQ ID NO: 373758 - RNA, 23 nt, Artificial Sequence
  Synthetic
uaggauuagcauacaaccgcacu

SEQ ID NO: 373759 - RNA, 24 nt, Artificial Sequence
  Synthetic
cuaggauuagcauacaaccgcacu

SEQ ID NO: 373760 - RNA, 18 nt, Artificial Sequence
  Synthetic
uucaguagcaaaggcacu

SEQ ID NO: 373761 - RNA, 19 nt, Artificial Sequence
  Synthetic
auucaguagcaaaggcacu

SEQ ID NO: 373762 - RNA, 20 nt, Artificial Sequence
  Synthetic
cauucaguagcaaaggcacu

SEQ ID NO: 373763 - RNA, 21 nt, Artificial Sequence
  Synthetic
acauucaguagcaaaggcacu

SEQ ID NO: 373764 - RNA, 22 nt, Artificial Sequence
  Synthetic
cacauucaguagcaaaggcacu

SEQ ID NO: 373765 - RNA, 23 nt, Artificial Sequence
  Synthetic
ccacauucaguagcaaaggcacu

SEQ ID NO: 373766 - RNA, 24 nt, Artificial Sequence
  Synthetic
accacauucaguagcaaaggcacu

SEQ ID NO: 373767 - RNA, 18 nt, Artificial Sequence
  Synthetic
cuauugcacacaggcacu

SEQ ID NO: 373768 - RNA, 19 nt, Artificial Sequence
  Synthetic
acuauugcacacaggcacu

SEQ ID NO: 373769 - RNA, 20 nt, Artificial Sequence
  Synthetic
gacuauugcacacaggcacu

SEQ ID NO: 373770 - RNA, 21 nt, Artificial Sequence
  Synthetic
ugacuauugcacacaggcacu

SEQ ID NO: 373771 - RNA, 22 nt, Artificial Sequence
  Synthetic
uugacuauugcacacaggcacu

SEQ ID NO: 373772 - RNA, 23 nt, Artificial Sequence
  Synthetic
uuugacuauugcacacaggcacu

SEQ ID NO: 373773 - RNA, 24 nt, Artificial Sequence
  Synthetic
uuuugacuauugcacacaggcacu

SEQ ID NO: 373774 - RNA, 18 nt, Artificial Sequence
  Synthetic
agcugugugucaggcacu

SEQ ID NO: 373775 - RNA, 19 nt, Artificial Sequence
  Synthetic
aagcugugugucaggcacu

SEQ ID NO: 373776 - RNA, 20 nt, Artificial Sequence
  Synthetic
gaagcugugugucaggcacu

SEQ ID NO: 373777 - RNA, 21 nt, Artificial Sequence
  Synthetic
ggaagcugugugucaggcacu

SEQ ID NO: 373778 - RNA, 22 nt, Artificial Sequence
  Synthetic
gggaagcugugugucaggcacu

SEQ ID NO: 373779 - RNA, 23 nt, Artificial Sequence
  Synthetic
ggggaagcugugugucaggcacu

SEQ ID NO: 373780 - RNA, 24 nt, Artificial Sequence
  Synthetic
aggggaagcugugugucaggcacu

SEQ ID NO: 373781 - RNA, 18 nt, Artificial Sequence
  Synthetic
acuaaaaaauuaggcacu

SEQ ID NO: 373782 - RNA, 19 nt, Artificial Sequence
  Synthetic
aacuaaaaaauuaggcacu

SEQ ID NO: 373783 - RNA, 20 nt, Artificial Sequence
  Synthetic
aaacuaaaaaauuaggcacu

SEQ ID NO: 373784 - RNA, 21 nt, Artificial Sequence
  Synthetic
gaaacuaaaaaauuaggcacu

SEQ ID NO: 373785 - RNA, 22 nt, Artificial Sequence
  Synthetic
ugaaacuaaaaaauuaggcacu

SEQ ID NO: 373786 - RNA, 23 nt, Artificial Sequence
  Synthetic
augaaacuaaaaaauuaggcacu

SEQ ID NO: 373787 - RNA, 24 nt, Artificial Sequence
  Synthetic
uaugaaacuaaaaaauuaggcacu

SEQ ID NO: 373788 - RNA, 18 nt, Artificial Sequence
  Synthetic
caacacgaauuaggcacu

SEQ ID NO: 373789 - RNA, 19 nt, Artificial Sequence
  Synthetic
ccaacacgaauuaggcacu

SEQ ID NO: 373790 - RNA, 20 nt, Artificial Sequence
  Synthetic
uccaacacgaauuaggcacu

SEQ ID NO: 373791 - RNA, 21 nt, Artificial Sequence
  Synthetic
uuccaacacgaauuaggcacu

SEQ ID NO: 373792 - RNA, 22 nt, Artificial Sequence
  Synthetic
uuuccaacacgaauuaggcacu

SEQ ID NO: 373793 - RNA, 23 nt, Artificial Sequence
  Synthetic
auuuccaacacgaauuaggcacu

SEQ ID NO: 373794 - RNA, 24 nt, Artificial Sequence
  Synthetic
aauuuccaacacgaauuaggcacu

SEQ ID NO: 373795 - RNA, 18 nt, Artificial Sequence
  Synthetic
uaaaugaguuuaggcacu

SEQ ID NO: 373796 - RNA, 19 nt, Artificial Sequence
  Synthetic
guaaaugaguuuaggcacu

SEQ ID NO: 373797 - RNA, 20 nt, Artificial Sequence
  Synthetic
uguaaaugaguuuaggcacu

SEQ ID NO: 373798 - RNA, 21 nt, Artificial Sequence
  Synthetic
auguaaaugaguuuaggcacu

SEQ ID NO: 373799 - RNA, 22 nt, Artificial Sequence
  Synthetic
aauguaaaugaguuuaggcacu

SEQ ID NO: 373800 - RNA, 23 nt, Artificial Sequence
  Synthetic
gaauguaaaugaguuuaggcacu

SEQ ID NO: 373801 - RNA, 24 nt, Artificial Sequence
  Synthetic
ggaauguaaaugaguuuaggcacu

SEQ ID NO: 373802 - RNA, 18 nt, Artificial Sequence
  Synthetic
aaucuacgauagggcacu

SEQ ID NO: 373803 - RNA, 19 nt, Artificial Sequence
  Synthetic
aaaucuacgauagggcacu

SEQ ID NO: 373804 - RNA, 20 nt, Artificial Sequence
  Synthetic
aaaaucuacgauagggcacu

SEQ ID NO: 373805 - RNA, 21 nt, Artificial Sequence
  Synthetic
caaaaucuacgauagggcacu

SEQ ID NO: 373806 - RNA, 22 nt, Artificial Sequence
  Synthetic
ccaaaaucuacgauagggcacu

SEQ ID NO: 373807 - RNA, 23 nt, Artificial Sequence
  Synthetic
accaaaaucuacgauagggcacu

SEQ ID NO: 373808 - RNA, 24 nt, Artificial Sequence
  Synthetic
uaccaaaaucuacgauagggcacu

SEQ ID NO: 373809 - RNA, 18 nt, Artificial Sequence
  Synthetic
cuugggauguagggcacu

SEQ ID NO: 373810 - RNA, 19 nt, Artificial Sequence
  Synthetic
ccuugggauguagggcacu

SEQ ID NO: 373811 - RNA, 20 nt, Artificial Sequence
  Synthetic
accuugggauguagggcacu

SEQ ID NO: 373812 - RNA, 21 nt, Artificial Sequence
  Synthetic
gaccuugggauguagggcacu

SEQ ID NO: 373813 - RNA, 22 nt, Artificial Sequence
  Synthetic
cgaccuugggauguagggcacu

SEQ ID NO: 373814 - RNA, 23 nt, Artificial Sequence
  Synthetic
gcgaccuugggauguagggcacu

SEQ ID NO: 373815 - RNA, 24 nt, Artificial Sequence
  Synthetic
ggcgaccuugggauguagggcacu

SEQ ID NO: 373816 - RNA, 18 nt, Artificial Sequence
  Synthetic
uuauaguagaugggcacu

SEQ ID NO: 373817 - RNA, 19 nt, Artificial Sequence
  Synthetic
auuauaguagaugggcacu

SEQ ID NO: 373818 - RNA, 20 nt, Artificial Sequence
  Synthetic
aauuauaguagaugggcacu

SEQ ID NO: 373819 - RNA, 21 nt, Artificial Sequence
  Synthetic
aaauuauaguagaugggcacu

SEQ ID NO: 373820 - RNA, 22 nt, Artificial Sequence
  Synthetic
aaaauuauaguagaugggcacu

SEQ ID NO: 373821 - RNA, 23 nt, Artificial Sequence
  Synthetic
aaaaauuauaguagaugggcacu

SEQ ID NO: 373822 - RNA, 24 nt, Artificial Sequence
  Synthetic
uaaaaauuauaguagaugggcacu

SEQ ID NO: 373823 - RNA, 18 nt, Artificial Sequence
  Synthetic
uguaugcugcugggcacu

SEQ ID NO: 373824 - RNA, 19 nt, Artificial Sequence
  Synthetic
auguaugcugcugggcacu

SEQ ID NO: 373825 - RNA, 20 nt, Artificial Sequence
  Synthetic
uauguaugcugcugggcacu

SEQ ID NO: 373826 - RNA, 21 nt, Artificial Sequence
  Synthetic
uuauguaugcugcugggcacu

SEQ ID NO: 373827 - RNA, 22 nt, Artificial Sequence
  Synthetic
guuauguaugcugcugggcacu

SEQ ID NO: 373828 - RNA, 23 nt, Artificial Sequence
  Synthetic
uguuauguaugcugcugggcacu

SEQ ID NO: 373829 - RNA, 24 nt, Artificial Sequence
  Synthetic
uuguuauguaugcugcugggcacu

SEQ ID NO: 373830 - RNA, 18 nt, Artificial Sequence
  Synthetic
ucaagagcagauggcacu

SEQ ID NO: 373831 - RNA, 19 nt, Artificial Sequence
  Synthetic
cucaagagcagauggcacu

SEQ ID NO: 373832 - RNA, 20 nt, Artificial Sequence
  Synthetic
ccucaagagcagauggcacu

SEQ ID NO: 373833 - RNA, 21 nt, Artificial Sequence
  Synthetic
uccucaagagcagauggcacu

SEQ ID NO: 373834 - RNA, 22 nt, Artificial Sequence
  Synthetic
cuccucaagagcagauggcacu

SEQ ID NO: 373835 - RNA, 23 nt, Artificial Sequence
  Synthetic
acuccucaagagcagauggcacu

SEQ ID NO: 373836 - RNA, 24 nt, Artificial Sequence
  Synthetic
uacuccucaagagcagauggcacu

SEQ ID NO: 373837 - RNA, 18 nt, Artificial Sequence
  Synthetic
caaugaaaugcuggcacu

SEQ ID NO: 373838 - RNA, 19 nt, Artificial Sequence
  Synthetic
gcaaugaaaugcuggcacu

SEQ ID NO: 373839 - RNA, 20 nt, Artificial Sequence
  Synthetic
ggcaaugaaaugcuggcacu

SEQ ID NO: 373840 - RNA, 21 nt, Artificial Sequence
  Synthetic
aggcaaugaaaugcuggcacu

SEQ ID NO: 373841 - RNA, 22 nt, Artificial Sequence
  Synthetic
caggcaaugaaaugcuggcacu

SEQ ID NO: 373842 - RNA, 23 nt, Artificial Sequence
  Synthetic
ucaggcaaugaaaugcuggcacu

SEQ ID NO: 373843 - RNA, 24 nt, Artificial Sequence
  Synthetic
uucaggcaaugaaaugcuggcacu

SEQ ID NO: 373844 - RNA, 18 nt, Artificial Sequence
  Synthetic
cauaacauuuaaugcacu

SEQ ID NO: 373845 - RNA, 19 nt, Artificial Sequence
  Synthetic
acauaacauuuaaugcacu

SEQ ID NO: 373846 - RNA, 20 nt, Artificial Sequence
  Synthetic
aacauaacauuuaaugcacu

SEQ ID NO: 373847 - RNA, 21 nt, Artificial Sequence
  Synthetic
aaacauaacauuuaaugcacu

SEQ ID NO: 373848 - RNA, 22 nt, Artificial Sequence
  Synthetic
uaaacauaacauuuaaugcacu

SEQ ID NO: 373849 - RNA, 23 nt, Artificial Sequence
  Synthetic
guaaacauaacauuuaaugcacu

SEQ ID NO: 373850 - RNA, 24 nt, Artificial Sequence
  Synthetic
uguaaacauaacauuuaaugcacu

SEQ ID NO: 373851 - RNA, 18 nt, Artificial Sequence
  Synthetic
aauuuaaccccaugcacu

SEQ ID NO: 373852 - RNA, 19 nt, Artificial Sequence
  Synthetic
aaauuuaaccccaugcacu

SEQ ID NO: 373853 - RNA, 20 nt, Artificial Sequence
  Synthetic
gaaauuuaaccccaugcacu

SEQ ID NO: 373854 - RNA, 21 nt, Artificial Sequence
  Synthetic
ugaaauuuaaccccaugcacu

SEQ ID NO: 373855 - RNA, 22 nt, Artificial Sequence
  Synthetic
gugaaauuuaaccccaugcacu

SEQ ID NO: 373856 - RNA, 23 nt, Artificial Sequence
  Synthetic
ugugaaauuuaaccccaugcacu

SEQ ID NO: 373857 - RNA, 24 nt, Artificial Sequence
  Synthetic
augugaaauuuaaccccaugcacu

SEQ ID NO: 373858 - RNA, 18 nt, Artificial Sequence
  Synthetic
cccucuguuagaugcacu

SEQ ID NO: 373859 - RNA, 19 nt, Artificial Sequence
  Synthetic
ccccucuguuagaugcacu

SEQ ID NO: 373860 - RNA, 20 nt, Artificial Sequence
  Synthetic
accccucuguuagaugcacu

SEQ ID NO: 373861 - RNA, 21 nt, Artificial Sequence
  Synthetic
aaccccucuguuagaugcacu

SEQ ID NO: 373862 - RNA, 22 nt, Artificial Sequence
  Synthetic
uaaccccucuguuagaugcacu

SEQ ID NO: 373863 - RNA, 23 nt, Artificial Sequence
  Synthetic
auaaccccucuguuagaugcacu

SEQ ID NO: 373864 - RNA, 24 nt, Artificial Sequence
  Synthetic
aauaaccccucuguuagaugcacu

SEQ ID NO: 373865 - RNA, 18 nt, Artificial Sequence
  Synthetic
uaaccuugcuuaugcacu

SEQ ID NO: 373866 - RNA, 19 nt, Artificial Sequence
  Synthetic
uuaaccuugcuuaugcacu

SEQ ID NO: 373867 - RNA, 20 nt, Artificial Sequence
  Synthetic
uuuaaccuugcuuaugcacu

SEQ ID NO: 373868 - RNA, 21 nt, Artificial Sequence
  Synthetic
uuuuaaccuugcuuaugcacu

SEQ ID NO: 373869 - RNA, 22 nt, Artificial Sequence
  Synthetic
auuuuaaccuugcuuaugcacu

SEQ ID NO: 373870 - RNA, 23 nt, Artificial Sequence
  Synthetic
gauuuuaaccuugcuuaugcacu

SEQ ID NO: 373871 - RNA, 24 nt, Artificial Sequence
  Synthetic
ggauuuuaaccuugcuuaugcacu

SEQ ID NO: 373872 - RNA, 18 nt, Artificial Sequence
  Synthetic
uuuacuccauccugcacu

SEQ ID NO: 373873 - RNA, 19 nt, Artificial Sequence
  Synthetic
cuuuacuccauccugcacu

SEQ ID NO: 373874 - RNA, 20 nt, Artificial Sequence
  Synthetic
ccuuuacuccauccugcacu

SEQ ID NO: 373875 - RNA, 21 nt, Artificial Sequence
  Synthetic
uccuuuacuccauccugcacu

SEQ ID NO: 373876 - RNA, 22 nt, Artificial Sequence
  Synthetic
cuccuuuacuccauccugcacu

SEQ ID NO: 373877 - RNA, 23 nt, Artificial Sequence
  Synthetic
ccuccuuuacuccauccugcacu

SEQ ID NO: 373878 - RNA, 24 nt, Artificial Sequence
  Synthetic
accuccuuuacuccauccugcacu

SEQ ID NO: 373879 - RNA, 18 nt, Artificial Sequence
  Synthetic
ccacuugcuggcugcacu

SEQ ID NO: 373880 - RNA, 19 nt, Artificial Sequence
  Synthetic
gccacuugcuggcugcacu

SEQ ID NO: 373881 - RNA, 20 nt, Artificial Sequence
  Synthetic
agccacuugcuggcugcacu

SEQ ID NO: 373882 - RNA, 21 nt, Artificial Sequence
  Synthetic
uagccacuugcuggcugcacu

SEQ ID NO: 373883 - RNA, 22 nt, Artificial Sequence
  Synthetic
guagccacuugcuggcugcacu

SEQ ID NO: 373884 - RNA, 23 nt, Artificial Sequence
  Synthetic
uguagccacuugcuggcugcacu

SEQ ID NO: 373885 - RNA, 24 nt, Artificial Sequence
  Synthetic
auguagccacuugcuggcugcacu

SEQ ID NO: 373886 - RNA, 18 nt, Artificial Sequence
  Synthetic
ugguccuaaaauugcacu

SEQ ID NO: 373887 - RNA, 19 nt, Artificial Sequence
  Synthetic
uugguccuaaaauugcacu

SEQ ID NO: 373888 - RNA, 20 nt, Artificial Sequence
  Synthetic
auugguccuaaaauugcacu

SEQ ID NO: 373889 - RNA, 21 nt, Artificial Sequence
  Synthetic
cauugguccuaaaauugcacu

SEQ ID NO: 373890 - RNA, 22 nt, Artificial Sequence
  Synthetic
ucauugguccuaaaauugcacu

SEQ ID NO: 373891 - RNA, 23 nt, Artificial Sequence
  Synthetic
uucauugguccuaaaauugcacu

SEQ ID NO: 373892 - RNA, 24 nt, Artificial Sequence
  Synthetic
uuucauugguccuaaaauugcacu

SEQ ID NO: 373893 - RNA, 18 nt, Artificial Sequence
  Synthetic
gaaaugaagcuuugcacu

SEQ ID NO: 373894 - RNA, 19 nt, Artificial Sequence
  Synthetic
ugaaaugaagcuuugcacu

SEQ ID NO: 373895 - RNA, 20 nt, Artificial Sequence
  Synthetic
uugaaaugaagcuuugcacu

SEQ ID NO: 373896 - RNA, 21 nt, Artificial Sequence
  Synthetic
uuugaaaugaagcuuugcacu

SEQ ID NO: 373897 - RNA, 22 nt, Artificial Sequence
  Synthetic
uuuugaaaugaagcuuugcacu

SEQ ID NO: 373898 - RNA, 23 nt, Artificial Sequence
  Synthetic
auuuugaaaugaagcuuugcacu

SEQ ID NO: 373899 - RNA, 24 nt, Artificial Sequence
  Synthetic
gauuuugaaaugaagcuuugcacu

SEQ ID NO: 373900 - RNA, 18 nt, Artificial Sequence
  Synthetic
cguguacguaaaaucacu

SEQ ID NO: 373901 - RNA, 19 nt, Artificial Sequence
  Synthetic
ucguguacguaaaaucacu

SEQ ID NO: 373902 - RNA, 20 nt, Artificial Sequence
  Synthetic
aucguguacguaaaaucacu

SEQ ID NO: 373903 - RNA, 21 nt, Artificial Sequence
  Synthetic
gaucguguacguaaaaucacu

SEQ ID NO: 373904 - RNA, 22 nt, Artificial Sequence
  Synthetic
agaucguguacguaaaaucacu

SEQ ID NO: 373905 - RNA, 23 nt, Artificial Sequence
  Synthetic
gagaucguguacguaaaaucacu

SEQ ID NO: 373906 - RNA, 24 nt, Artificial Sequence
  Synthetic
agagaucguguacguaaaaucacu

SEQ ID NO: 373907 - RNA, 18 nt, Artificial Sequence
  Synthetic
agcuuguuuuaaaucacu

SEQ ID NO: 373908 - RNA, 19 nt, Artificial Sequence
  Synthetic
cagcuuguuuuaaaucacu

SEQ ID NO: 373909 - RNA, 20 nt, Artificial Sequence
  Synthetic
gcagcuuguuuuaaaucacu

SEQ ID NO: 373910 - RNA, 21 nt, Artificial Sequence
  Synthetic
ugcagcuuguuuuaaaucacu

SEQ ID NO: 373911 - RNA, 22 nt, Artificial Sequence
  Synthetic
cugcagcuuguuuuaaaucacu

SEQ ID NO: 373912 - RNA, 23 nt, Artificial Sequence
  Synthetic
ccugcagcuuguuuuaaaucacu

SEQ ID NO: 373913 - RNA, 24 nt, Artificial Sequence
  Synthetic
uccugcagcuuguuuuaaaucacu

SEQ ID NO: 373914 - RNA, 18 nt, Artificial Sequence
  Synthetic
aggaaacuuacaaucacu

SEQ ID NO: 373915 - RNA, 19 nt, Artificial Sequence
  Synthetic
caggaaacuuacaaucacu

SEQ ID NO: 373916 - RNA, 20 nt, Artificial Sequence
  Synthetic
ucaggaaacuuacaaucacu

SEQ ID NO: 373917 - RNA, 21 nt, Artificial Sequence
  Synthetic
cucaggaaacuuacaaucacu

SEQ ID NO: 373918 - RNA, 22 nt, Artificial Sequence
  Synthetic
ccucaggaaacuuacaaucacu

SEQ ID NO: 373919 - RNA, 23 nt, Artificial Sequence
  Synthetic
gccucaggaaacuuacaaucacu

SEQ ID NO: 373920 - RNA, 24 nt, Artificial Sequence
  Synthetic
ggccucaggaaacuuacaaucacu

SEQ ID NO: 373921 - RNA, 18 nt, Artificial Sequence
  Synthetic
cugcacguuagaaucacu

SEQ ID NO: 373922 - RNA, 19 nt, Artificial Sequence
  Synthetic
gcugcacguuagaaucacu

SEQ ID NO: 373923 - RNA, 20 nt, Artificial Sequence
  Synthetic
ggcugcacguuagaaucacu

SEQ ID NO: 373924 - RNA, 21 nt, Artificial Sequence
  Synthetic
uggcugcacguuagaaucacu

SEQ ID NO: 373925 - RNA, 22 nt, Artificial Sequence
  Synthetic
cuggcugcacguuagaaucacu

SEQ ID NO: 373926 - RNA, 23 nt, Artificial Sequence
  Synthetic
ccuggcugcacguuagaaucacu

SEQ ID NO: 373927 - RNA, 24 nt, Artificial Sequence
  Synthetic
cccuggcugcacguuagaaucacu

SEQ ID NO: 373928 - RNA, 18 nt, Artificial Sequence
  Synthetic
caaguagguugaaucacu

SEQ ID NO: 373929 - RNA, 19 nt, Artificial Sequence
  Synthetic
acaaguagguugaaucacu

SEQ ID NO: 373930 - RNA, 20 nt, Artificial Sequence
  Synthetic
gacaaguagguugaaucacu

SEQ ID NO: 373931 - RNA, 21 nt, Artificial Sequence
  Synthetic
ggacaaguagguugaaucacu

SEQ ID NO: 373932 - RNA, 22 nt, Artificial Sequence
  Synthetic
gggacaaguagguugaaucacu

SEQ ID NO: 373933 - RNA, 23 nt, Artificial Sequence
  Synthetic
ggggacaaguagguugaaucacu

SEQ ID NO: 373934 - RNA, 24 nt, Artificial Sequence
  Synthetic
uggggacaaguagguugaaucacu

SEQ ID NO: 373935 - RNA, 18 nt, Artificial Sequence
  Synthetic
agcagcguuagcaucacu

SEQ ID NO: 373936 - RNA, 19 nt, Artificial Sequence
  Synthetic
cagcagcguuagcaucacu

SEQ ID NO: 373937 - RNA, 20 nt, Artificial Sequence
  Synthetic
ucagcagcguuagcaucacu

SEQ ID NO: 373938 - RNA, 21 nt, Artificial Sequence
  Synthetic
aucagcagcguuagcaucacu

SEQ ID NO: 373939 - RNA, 22 nt, Artificial Sequence
  Synthetic
gaucagcagcguuagcaucacu

SEQ ID NO: 373940 - RNA, 23 nt, Artificial Sequence
  Synthetic
ggaucagcagcguuagcaucacu

SEQ ID NO: 373941 - RNA, 24 nt, Artificial Sequence
  Synthetic
gggaucagcagcguuagcaucacu

SEQ ID NO: 373942 - RNA, 18 nt, Artificial Sequence
  Synthetic
agcaguaucggcaucacu

SEQ ID NO: 373943 - RNA, 19 nt, Artificial Sequence
  Synthetic
uagcaguaucggcaucacu

SEQ ID NO: 373944 - RNA, 20 nt, Artificial Sequence
  Synthetic
cuagcaguaucggcaucacu

SEQ ID NO: 373945 - RNA, 21 nt, Artificial Sequence
  Synthetic
acuagcaguaucggcaucacu

SEQ ID NO: 373946 - RNA, 22 nt, Artificial Sequence
  Synthetic
gacuagcaguaucggcaucacu

SEQ ID NO: 373947 - RNA, 23 nt, Artificial Sequence
  Synthetic
ggacuagcaguaucggcaucacu

SEQ ID NO: 373948 - RNA, 24 nt, Artificial Sequence
  Synthetic
uggacuagcaguaucggcaucacu

SEQ ID NO: 373949 - RNA, 18 nt, Artificial Sequence
  Synthetic
uaaguauagaucaucacu

SEQ ID NO: 373950 - RNA, 19 nt, Artificial Sequence
  Synthetic
auaaguauagaucaucacu

SEQ ID NO: 373951 - RNA, 20 nt, Artificial Sequence
  Synthetic
uauaaguauagaucaucacu

SEQ ID NO: 373952 - RNA, 21 nt, Artificial Sequence
  Synthetic
auauaaguauagaucaucacu

SEQ ID NO: 373953 - RNA, 22 nt, Artificial Sequence
  Synthetic
aauauaaguauagaucaucacu

SEQ ID NO: 373954 - RNA, 23 nt, Artificial Sequence
  Synthetic
aaauauaaguauagaucaucacu

SEQ ID NO: 373955 - RNA, 24 nt, Artificial Sequence
  Synthetic
gaaauauaaguauagaucaucacu

SEQ ID NO: 373956 - RNA, 18 nt, Artificial Sequence
  Synthetic
cucguauccacgaucacu

SEQ ID NO: 373957 - RNA, 19 nt, Artificial Sequence
  Synthetic
ucucguauccacgaucacu

SEQ ID NO: 373958 - RNA, 20 nt, Artificial Sequence
  Synthetic
cucucguauccacgaucacu

SEQ ID NO: 373959 - RNA, 21 nt, Artificial Sequence
  Synthetic
ccucucguauccacgaucacu

SEQ ID NO: 373960 - RNA, 22 nt, Artificial Sequence
  Synthetic
accucucguauccacgaucacu

SEQ ID NO: 373961 - RNA, 23 nt, Artificial Sequence
  Synthetic
caccucucguauccacgaucacu

SEQ ID NO: 373962 - RNA, 24 nt, Artificial Sequence
  Synthetic
ucaccucucguauccacgaucacu

SEQ ID NO: 373963 - RNA, 18 nt, Artificial Sequence
  Synthetic
guggucacuaugaucacu

SEQ ID NO: 373964 - RNA, 19 nt, Artificial Sequence
  Synthetic
uguggucacuaugaucacu

SEQ ID NO: 373965 - RNA, 20 nt, Artificial Sequence
  Synthetic
auguggucacuaugaucacu

SEQ ID NO: 373966 - RNA, 21 nt, Artificial Sequence
  Synthetic
cauguggucacuaugaucacu

SEQ ID NO: 373967 - RNA, 22 nt, Artificial Sequence
  Synthetic
ccauguggucacuaugaucacu

SEQ ID NO: 373968 - RNA, 23 nt, Artificial Sequence
  Synthetic
cccauguggucacuaugaucacu

SEQ ID NO: 373969 - RNA, 24 nt, Artificial Sequence
  Synthetic
acccauguggucacuaugaucacu

SEQ ID NO: 373970 - RNA, 18 nt, Artificial Sequence
  Synthetic
aaacuuuaagugaucacu

SEQ ID NO: 373971 - RNA, 19 nt, Artificial Sequence
  Synthetic
caaacuuuaagugaucacu

SEQ ID NO: 373972 - RNA, 20 nt, Artificial Sequence
  Synthetic
acaaacuuuaagugaucacu

SEQ ID NO: 373973 - RNA, 21 nt, Artificial Sequence
  Synthetic
aacaaacuuuaagugaucacu

SEQ ID NO: 373974 - RNA, 22 nt, Artificial Sequence
  Synthetic
aaacaaacuuuaagugaucacu

SEQ ID NO: 373975 - RNA, 23 nt, Artificial Sequence
  Synthetic
aaaacaaacuuuaagugaucacu

SEQ ID NO: 373976 - RNA, 24 nt, Artificial Sequence
  Synthetic
caaaacaaacuuuaagugaucacu

SEQ ID NO: 373977 - RNA, 18 nt, Artificial Sequence
  Synthetic
ugaaaggaguauaucacu

SEQ ID NO: 373978 - RNA, 19 nt, Artificial Sequence
  Synthetic
uugaaaggaguauaucacu

SEQ ID NO: 373979 - RNA, 20 nt, Artificial Sequence
  Synthetic
cuugaaaggaguauaucacu

SEQ ID NO: 373980 - RNA, 21 nt, Artificial Sequence
  Synthetic
gcuugaaaggaguauaucacu

SEQ ID NO: 373981 - RNA, 22 nt, Artificial Sequence
  Synthetic
cgcuugaaaggaguauaucacu

SEQ ID NO: 373982 - RNA, 23 nt, Artificial Sequence
  Synthetic
gcgcuugaaaggaguauaucacu

SEQ ID NO: 373983 - RNA, 24 nt, Artificial Sequence
  Synthetic
ugcgcuugaaaggaguauaucacu

SEQ ID NO: 373984 - RNA, 18 nt, Artificial Sequence
  Synthetic
uuaaaacugucuaucacu

SEQ ID NO: 373985 - RNA, 19 nt, Artificial Sequence
  Synthetic
auuaaaacugucuaucacu

SEQ ID NO: 373986 - RNA, 20 nt, Artificial Sequence
  Synthetic
gauuaaaacugucuaucacu

SEQ ID NO: 373987 - RNA, 21 nt, Artificial Sequence
  Synthetic
ugauuaaaacugucuaucacu

SEQ ID NO: 373988 - RNA, 22 nt, Artificial Sequence
  Synthetic
uugauuaaaacugucuaucacu

SEQ ID NO: 373989 - RNA, 23 nt, Artificial Sequence
  Synthetic
uuugauuaaaacugucuaucacu

SEQ ID NO: 373990 - RNA, 24 nt, Artificial Sequence
  Synthetic
cuuugauuaaaacugucuaucacu

SEQ ID NO: 373991 - RNA, 18 nt, Artificial Sequence
  Synthetic
auaucagauuguaucacu

SEQ ID NO: 373992 - RNA, 19 nt, Artificial Sequence
  Synthetic
gauaucagauuguaucacu

SEQ ID NO: 373993 - RNA, 20 nt, Artificial Sequence
  Synthetic
ugauaucagauuguaucacu

SEQ ID NO: 373994 - RNA, 21 nt, Artificial Sequence
  Synthetic
gugauaucagauuguaucacu

SEQ ID NO: 373995 - RNA, 22 nt, Artificial Sequence
  Synthetic
ugugauaucagauuguaucacu

SEQ ID NO: 373996 - RNA, 23 nt, Artificial Sequence
  Synthetic
cugugauaucagauuguaucacu

SEQ ID NO: 373997 - RNA, 24 nt, Artificial Sequence
  Synthetic
gcugugauaucagauuguaucacu

SEQ ID NO: 373998 - RNA, 18 nt, Artificial Sequence
  Synthetic
uaagugaauauuaucacu

SEQ ID NO: 373999 - RNA, 19 nt, Artificial Sequence
  Synthetic
uuaagugaauauuaucacu

SEQ ID NO: 374000 - RNA, 20 nt, Artificial Sequence
  Synthetic
auuaagugaauauuaucacu

SEQ ID NO: 374001 - RNA, 21 nt, Artificial Sequence
  Synthetic
cauuaagugaauauuaucacu

SEQ ID NO: 374002 - RNA, 22 nt, Artificial Sequence
  Synthetic
acauuaagugaauauuaucacu

SEQ ID NO: 374003 - RNA, 23 nt, Artificial Sequence
  Synthetic
gacauuaagugaauauuaucacu

SEQ ID NO: 374004 - RNA, 24 nt, Artificial Sequence
  Synthetic
cgacauuaagugaauauuaucacu

SEQ ID NO: 374005 - RNA, 18 nt, Artificial Sequence
  Synthetic
uuucaggcccuuaucacu

SEQ ID NO: 374006 - RNA, 19 nt, Artificial Sequence
  Synthetic
guuucaggcccuuaucacu

SEQ ID NO: 374007 - RNA, 20 nt, Artificial Sequence
  Synthetic
gguuucaggcccuuaucacu

SEQ ID NO: 374008 - RNA, 21 nt, Artificial Sequence
  Synthetic
ugguuucaggcccuuaucacu

SEQ ID NO: 374009 - RNA, 22 nt, Artificial Sequence
  Synthetic
augguuucaggcccuuaucacu

SEQ ID NO: 374010 - RNA, 23 nt, Artificial Sequence
  Synthetic
uaugguuucaggcccuuaucacu

SEQ ID NO: 374011 - RNA, 24 nt, Artificial Sequence
  Synthetic
cuaugguuucaggcccuuaucacu

SEQ ID NO: 374012 - RNA, 18 nt, Artificial Sequence
  Synthetic
agucuucaauaccucacu

SEQ ID NO: 374013 - RNA, 19 nt, Artificial Sequence
  Synthetic
aagucuucaauaccucacu

SEQ ID NO: 374014 - RNA, 20 nt, Artificial Sequence
  Synthetic
aaagucuucaauaccucacu

SEQ ID NO: 374015 - RNA, 21 nt, Artificial Sequence
  Synthetic
aaaagucuucaauaccucacu

SEQ ID NO: 374016 - RNA, 22 nt, Artificial Sequence
  Synthetic
aaaaagucuucaauaccucacu

SEQ ID NO: 374017 - RNA, 23 nt, Artificial Sequence
  Synthetic
gaaaaagucuucaauaccucacu

SEQ ID NO: 374018 - RNA, 24 nt, Artificial Sequence
  Synthetic
ugaaaaagucuucaauaccucacu

SEQ ID NO: 374019 - RNA, 18 nt, Artificial Sequence
  Synthetic
uaaaagaugucccucacu

SEQ ID NO: 374020 - RNA, 19 nt, Artificial Sequence
  Synthetic
auaaaagaugucccucacu

SEQ ID NO: 374021 - RNA, 20 nt, Artificial Sequence
  Synthetic
aauaaaagaugucccucacu

SEQ ID NO: 374022 - RNA, 21 nt, Artificial Sequence
  Synthetic
uaauaaaagaugucccucacu

SEQ ID NO: 374023 - RNA, 22 nt, Artificial Sequence
  Synthetic
uuaauaaaagaugucccucacu

SEQ ID NO: 374024 - RNA, 23 nt, Artificial Sequence
  Synthetic
uuuaauaaaagaugucccucacu

SEQ ID NO: 374025 - RNA, 24 nt, Artificial Sequence
  Synthetic
guuuaauaaaagaugucccucacu

SEQ ID NO: 374026 - RNA, 18 nt, Artificial Sequence
  Synthetic
ugagugguuucccucacu

SEQ ID NO: 374027 - RNA, 19 nt, Artificial Sequence
  Synthetic
gugagugguuucccucacu

SEQ ID NO: 374028 - RNA, 20 nt, Artificial Sequence
  Synthetic
agugagugguuucccucacu

SEQ ID NO: 374029 - RNA, 21 nt, Artificial Sequence
  Synthetic
aagugagugguuucccucacu

SEQ ID NO: 374030 - RNA, 22 nt, Artificial Sequence
  Synthetic
aaagugagugguuucccucacu

SEQ ID NO: 374031 - RNA, 23 nt, Artificial Sequence
  Synthetic
gaaagugagugguuucccucacu

SEQ ID NO: 374032 - RNA, 24 nt, Artificial Sequence
  Synthetic
ugaaagugagugguuucccucacu

SEQ ID NO: 374033 - RNA, 18 nt, Artificial Sequence
  Synthetic
auaggaucauugcucacu

SEQ ID NO: 374034 - RNA, 19 nt, Artificial Sequence
  Synthetic
aauaggaucauugcucacu

SEQ ID NO: 374035 - RNA, 20 nt, Artificial Sequence
  Synthetic
gaauaggaucauugcucacu

SEQ ID NO: 374036 - RNA, 21 nt, Artificial Sequence
  Synthetic
ugaauaggaucauugcucacu

SEQ ID NO: 374037 - RNA, 22 nt, Artificial Sequence
  Synthetic
cugaauaggaucauugcucacu

SEQ ID NO: 374038 - RNA, 23 nt, Artificial Sequence
  Synthetic
gcugaauaggaucauugcucacu

SEQ ID NO: 374039 - RNA, 24 nt, Artificial Sequence
  Synthetic
ggcugaauaggaucauugcucacu

SEQ ID NO: 374040 - RNA, 18 nt, Artificial Sequence
  Synthetic
uugacuauauugcucacu

SEQ ID NO: 374041 - RNA, 19 nt, Artificial Sequence
  Synthetic
auugacuauauugcucacu

SEQ ID NO: 374042 - RNA, 20 nt, Artificial Sequence
  Synthetic
uauugacuauauugcucacu

SEQ ID NO: 374043 - RNA, 21 nt, Artificial Sequence
  Synthetic
auauugacuauauugcucacu

SEQ ID NO: 374044 - RNA, 22 nt, Artificial Sequence
  Synthetic
aauauugacuauauugcucacu

SEQ ID NO: 374045 - RNA, 23 nt, Artificial Sequence
  Synthetic
uaauauugacuauauugcucacu

SEQ ID NO: 374046 - RNA, 24 nt, Artificial Sequence
  Synthetic
uuaauauugacuauauugcucacu

SEQ ID NO: 374047 - RNA, 18 nt, Artificial Sequence
  Synthetic
uuccuucaaaaucucacu

SEQ ID NO: 374048 - RNA, 19 nt, Artificial Sequence
  Synthetic
uuuccuucaaaaucucacu

SEQ ID NO: 374049 - RNA, 20 nt, Artificial Sequence
  Synthetic
uuuuccuucaaaaucucacu

SEQ ID NO: 374050 - RNA, 21 nt, Artificial Sequence
  Synthetic
cuuuuccuucaaaaucucacu

SEQ ID NO: 374051 - RNA, 22 nt, Artificial Sequence
  Synthetic
acuuuuccuucaaaaucucacu

SEQ ID NO: 374052 - RNA, 23 nt, Artificial Sequence
  Synthetic
uacuuuuccuucaaaaucucacu

SEQ ID NO: 374053 - RNA, 24 nt, Artificial Sequence
  Synthetic
uuacuuuuccuucaaaaucucacu

SEQ ID NO: 374054 - RNA, 18 nt, Artificial Sequence
  Synthetic
aaaaauuaucaucucacu

SEQ ID NO: 374055 - RNA, 19 nt, Artificial Sequence
  Synthetic
aaaaaauuaucaucucacu

SEQ ID NO: 374056 - RNA, 20 nt, Artificial Sequence
  Synthetic
gaaaaaauuaucaucucacu

SEQ ID NO: 374057 - RNA, 21 nt, Artificial Sequence
  Synthetic
agaaaaaauuaucaucucacu

SEQ ID NO: 374058 - RNA, 22 nt, Artificial Sequence
  Synthetic
gagaaaaaauuaucaucucacu

SEQ ID NO: 374059 - RNA, 23 nt, Artificial Sequence
  Synthetic
ugagaaaaaauuaucaucucacu

SEQ ID NO: 374060 - RNA, 24 nt, Artificial Sequence
  Synthetic
gugagaaaaaauuaucaucucacu

SEQ ID NO: 374061 - RNA, 18 nt, Artificial Sequence
  Synthetic
aggcaaacugcucucacu

SEQ ID NO: 374062 - RNA, 19 nt, Artificial Sequence
  Synthetic
caggcaaacugcucucacu

SEQ ID NO: 374063 - RNA, 20 nt, Artificial Sequence
  Synthetic
ccaggcaaacugcucucacu

SEQ ID NO: 374064 - RNA, 21 nt, Artificial Sequence
  Synthetic
gccaggcaaacugcucucacu

SEQ ID NO: 374065 - RNA, 22 nt, Artificial Sequence
  Synthetic
ugccaggcaaacugcucucacu

SEQ ID NO: 374066 - RNA, 23 nt, Artificial Sequence
  Synthetic
gugccaggcaaacugcucucacu

SEQ ID NO: 374067 - RNA, 24 nt, Artificial Sequence
  Synthetic
cgugccaggcaaacugcucucacu

SEQ ID NO: 374068 - RNA, 18 nt, Artificial Sequence
  Synthetic
ugugcacccucucucacu

SEQ ID NO: 374069 - RNA, 19 nt, Artificial Sequence
  Synthetic
cugugcacccucucucacu

SEQ ID NO: 374070 - RNA, 20 nt, Artificial Sequence
  Synthetic
acugugcacccucucucacu

SEQ ID NO: 374071 - RNA, 21 nt, Artificial Sequence
  Synthetic
gacugugcacccucucucacu

SEQ ID NO: 374072 - RNA, 22 nt, Artificial Sequence
  Synthetic
ugacugugcacccucucucacu

SEQ ID NO: 374073 - RNA, 23 nt, Artificial Sequence
  Synthetic
cugacugugcacccucucucacu

SEQ ID NO: 374074 - RNA, 24 nt, Artificial Sequence
  Synthetic
ucugacugugcacccucucucacu

SEQ ID NO: 374075 - RNA, 18 nt, Artificial Sequence
  Synthetic
uuacuaaaaagucucacu

SEQ ID NO: 374076 - RNA, 19 nt, Artificial Sequence
  Synthetic
auuacuaaaaagucucacu

SEQ ID NO: 374077 - RNA, 20 nt, Artificial Sequence
  Synthetic
aauuacuaaaaagucucacu

SEQ ID NO: 374078 - RNA, 21 nt, Artificial Sequence
  Synthetic
aaauuacuaaaaagucucacu

SEQ ID NO: 374079 - RNA, 22 nt, Artificial Sequence
  Synthetic
uaaauuacuaaaaagucucacu

SEQ ID NO: 374080 - RNA, 23 nt, Artificial Sequence
  Synthetic
auaaauuacuaaaaagucucacu

SEQ ID NO: 374081 - RNA, 24 nt, Artificial Sequence
  Synthetic
uauaaauuacuaaaaagucucacu

SEQ ID NO: 374082 - RNA, 18 nt, Artificial Sequence
  Synthetic
ccuagggcacuucucacu

SEQ ID NO: 374083 - RNA, 19 nt, Artificial Sequence
  Synthetic
accuagggcacuucucacu

SEQ ID NO: 374084 - RNA, 20 nt, Artificial Sequence
  Synthetic
uaccuagggcacuucucacu

SEQ ID NO: 374085 - RNA, 21 nt, Artificial Sequence
  Synthetic
cuaccuagggcacuucucacu

SEQ ID NO: 374086 - RNA, 22 nt, Artificial Sequence
  Synthetic
ucuaccuagggcacuucucacu

SEQ ID NO: 374087 - RNA, 23 nt, Artificial Sequence
  Synthetic
gucuaccuagggcacuucucacu

SEQ ID NO: 374088 - RNA, 24 nt, Artificial Sequence
  Synthetic
ugucuaccuagggcacuucucacu

SEQ ID NO: 374089 - RNA, 18 nt, Artificial Sequence
  Synthetic
ucugauaaauaagucacu

SEQ ID NO: 374090 - RNA, 19 nt, Artificial Sequence
  Synthetic
aucugauaaauaagucacu

SEQ ID NO: 374091 - RNA, 20 nt, Artificial Sequence
  Synthetic
uaucugauaaauaagucacu

SEQ ID NO: 374092 - RNA, 21 nt, Artificial Sequence
  Synthetic
uuaucugauaaauaagucacu

SEQ ID NO: 374093 - RNA, 22 nt, Artificial Sequence
  Synthetic
guuaucugauaaauaagucacu

SEQ ID NO: 374094 - RNA, 23 nt, Artificial Sequence
  Synthetic
uguuaucugauaaauaagucacu

SEQ ID NO: 374095 - RNA, 24 nt, Artificial Sequence
  Synthetic
cuguuaucugauaaauaagucacu

SEQ ID NO: 374096 - RNA, 18 nt, Artificial Sequence
  Synthetic
cugaucauuguagucacu

SEQ ID NO: 374097 - RNA, 19 nt, Artificial Sequence
  Synthetic
ucugaucauuguagucacu

SEQ ID NO: 374098 - RNA, 20 nt, Artificial Sequence
  Synthetic
uucugaucauuguagucacu

SEQ ID NO: 374099 - RNA, 21 nt, Artificial Sequence
  Synthetic
guucugaucauuguagucacu

SEQ ID NO: 374100 - RNA, 22 nt, Artificial Sequence
  Synthetic
gguucugaucauuguagucacu

SEQ ID NO: 374101 - RNA, 23 nt, Artificial Sequence
  Synthetic
ggguucugaucauuguagucacu

SEQ ID NO: 374102 - RNA, 24 nt, Artificial Sequence
  Synthetic
aggguucugaucauuguagucacu

SEQ ID NO: 374103 - RNA, 18 nt, Artificial Sequence
  Synthetic
cuacuuagcuuagucacu

SEQ ID NO: 374104 - RNA, 19 nt, Artificial Sequence
  Synthetic
ucuacuuagcuuagucacu

SEQ ID NO: 374105 - RNA, 20 nt, Artificial Sequence
  Synthetic
uucuacuuagcuuagucacu

SEQ ID NO: 374106 - RNA, 21 nt, Artificial Sequence
  Synthetic
auucuacuuagcuuagucacu

SEQ ID NO: 374107 - RNA, 22 nt, Artificial Sequence
  Synthetic
cauucuacuuagcuuagucacu

SEQ ID NO: 374108 - RNA, 23 nt, Artificial Sequence
  Synthetic
gcauucuacuuagcuuagucacu

SEQ ID NO: 374109 - RNA, 24 nt, Artificial Sequence
  Synthetic
agcauucuacuuagcuuagucacu

SEQ ID NO: 374110 - RNA, 18 nt, Artificial Sequence
  Synthetic
gucucuuuguaggucacu

SEQ ID NO: 374111 - RNA, 19 nt, Artificial Sequence
  Synthetic
agucucuuuguaggucacu

SEQ ID NO: 374112 - RNA, 20 nt, Artificial Sequence
  Synthetic
aagucucuuuguaggucacu

SEQ ID NO: 374113 - RNA, 21 nt, Artificial Sequence
  Synthetic
uaagucucuuuguaggucacu

SEQ ID NO: 374114 - RNA, 22 nt, Artificial Sequence
  Synthetic
cuaagucucuuuguaggucacu

SEQ ID NO: 374115 - RNA, 23 nt, Artificial Sequence
  Synthetic
ucuaagucucuuuguaggucacu

SEQ ID NO: 374116 - RNA, 24 nt, Artificial Sequence
  Synthetic
gucuaagucucuuuguaggucacu

SEQ ID NO: 374117 - RNA, 18 nt, Artificial Sequence
  Synthetic
ucccccaacauggucacu

SEQ ID NO: 374118 - RNA, 19 nt, Artificial Sequence
  Synthetic
gucccccaacauggucacu

SEQ ID NO: 374119 - RNA, 20 nt, Artificial Sequence
  Synthetic
ugucccccaacauggucacu

SEQ ID NO: 374120 - RNA, 21 nt, Artificial Sequence
  Synthetic
cugucccccaacauggucacu

SEQ ID NO: 374121 - RNA, 22 nt, Artificial Sequence
  Synthetic
gcugucccccaacauggucacu

SEQ ID NO: 374122 - RNA, 23 nt, Artificial Sequence
  Synthetic
agcugucccccaacauggucacu

SEQ ID NO: 374123 - RNA, 24 nt, Artificial Sequence
  Synthetic
gagcugucccccaacauggucacu

SEQ ID NO: 374124 - RNA, 18 nt, Artificial Sequence
  Synthetic
augauguucuuugucacu

SEQ ID NO: 374125 - RNA, 19 nt, Artificial Sequence
  Synthetic
aaugauguucuuugucacu

SEQ ID NO: 374126 - RNA, 20 nt, Artificial Sequence
  Synthetic
uaaugauguucuuugucacu

SEQ ID NO: 374127 - RNA, 21 nt, Artificial Sequence
  Synthetic
auaaugauguucuuugucacu

SEQ ID NO: 374128 - RNA, 22 nt, Artificial Sequence
  Synthetic
uauaaugauguucuuugucacu

SEQ ID NO: 374129 - RNA, 23 nt, Artificial Sequence
  Synthetic
auauaaugauguucuuugucacu

SEQ ID NO: 374130 - RNA, 24 nt, Artificial Sequence
  Synthetic
uauauaaugauguucuuugucacu

SEQ ID NO: 374131 - RNA, 18 nt, Artificial Sequence
  Synthetic
agauuuaaagaauucacu

SEQ ID NO: 374132 - RNA, 19 nt, Artificial Sequence
  Synthetic
gagauuuaaagaauucacu

SEQ ID NO: 374133 - RNA, 20 nt, Artificial Sequence
  Synthetic
agagauuuaaagaauucacu

SEQ ID NO: 374134 - RNA, 21 nt, Artificial Sequence
  Synthetic
aagagauuuaaagaauucacu

SEQ ID NO: 374135 - RNA, 22 nt, Artificial Sequence
  Synthetic
aaagagauuuaaagaauucacu

SEQ ID NO: 374136 - RNA, 23 nt, Artificial Sequence
  Synthetic
aaaagagauuuaaagaauucacu

SEQ ID NO: 374137 - RNA, 24 nt, Artificial Sequence
  Synthetic
caaaagagauuuaaagaauucacu

SEQ ID NO: 374138 - RNA, 18 nt, Artificial Sequence
  Synthetic
gaacacaguuaauucacu

SEQ ID NO: 374139 - RNA, 19 nt, Artificial Sequence
  Synthetic
ggaacacaguuaauucacu

SEQ ID NO: 374140 - RNA, 20 nt, Artificial Sequence
  Synthetic
uggaacacaguuaauucacu

SEQ ID NO: 374141 - RNA, 21 nt, Artificial Sequence
  Synthetic
cuggaacacaguuaauucacu

SEQ ID NO: 374142 - RNA, 22 nt, Artificial Sequence
  Synthetic
ucuggaacacaguuaauucacu

SEQ ID NO: 374143 - RNA, 23 nt, Artificial Sequence
  Synthetic
uucuggaacacaguuaauucacu

SEQ ID NO: 374144 - RNA, 24 nt, Artificial Sequence
  Synthetic
guucuggaacacaguuaauucacu

SEQ ID NO: 374145 - RNA, 18 nt, Artificial Sequence
  Synthetic
auuaaguguuaauucacu

SEQ ID NO: 374146 - RNA, 19 nt, Artificial Sequence
  Synthetic
gauuaaguguuaauucacu

SEQ ID NO: 374147 - RNA, 20 nt, Artificial Sequence
  Synthetic
agauuaaguguuaauucacu

SEQ ID NO: 374148 - RNA, 21 nt, Artificial Sequence
  Synthetic
aagauuaaguguuaauucacu

SEQ ID NO: 374149 - RNA, 22 nt, Artificial Sequence
  Synthetic
aaagauuaaguguuaauucacu

SEQ ID NO: 374150 - RNA, 23 nt, Artificial Sequence
  Synthetic
uaaagauuaaguguuaauucacu

SEQ ID NO: 374151 - RNA, 24 nt, Artificial Sequence
  Synthetic
auaaagauuaaguguuaauucacu

SEQ ID NO: 374152 - RNA, 18 nt, Artificial Sequence
  Synthetic
gugugcuauucauucacu

SEQ ID NO: 374153 - RNA, 19 nt, Artificial Sequence
  Synthetic
agugugcuauucauucacu

SEQ ID NO: 374154 - RNA, 20 nt, Artificial Sequence
  Synthetic
aagugugcuauucauucacu

SEQ ID NO: 374155 - RNA, 21 nt, Artificial Sequence
  Synthetic
gaagugugcuauucauucacu

SEQ ID NO: 374156 - RNA, 22 nt, Artificial Sequence
  Synthetic
ugaagugugcuauucauucacu

SEQ ID NO: 374157 - RNA, 23 nt, Artificial Sequence
  Synthetic
augaagugugcuauucauucacu

SEQ ID NO: 374158 - RNA, 24 nt, Artificial Sequence
  Synthetic
aaugaagugugcuauucauucacu

SEQ ID NO: 374159 - RNA, 18 nt, Artificial Sequence
  Synthetic
gccuuuuauauauucacu

SEQ ID NO: 374160 - RNA, 19 nt, Artificial Sequence
  Synthetic
ugccuuuuauauauucacu

SEQ ID NO: 374161 - RNA, 20 nt, Artificial Sequence
  Synthetic
augccuuuuauauauucacu

SEQ ID NO: 374162 - RNA, 21 nt, Artificial Sequence
  Synthetic
uaugccuuuuauauauucacu

SEQ ID NO: 374163 - RNA, 22 nt, Artificial Sequence
  Synthetic
auaugccuuuuauauauucacu

SEQ ID NO: 374164 - RNA, 23 nt, Artificial Sequence
  Synthetic
uauaugccuuuuauauauucacu

SEQ ID NO: 374165 - RNA, 24 nt, Artificial Sequence
  Synthetic
auauaugccuuuuauauauucacu

SEQ ID NO: 374166 - RNA, 18 nt, Artificial Sequence
  Synthetic
auaaaguucugcuucacu

SEQ ID NO: 374167 - RNA, 19 nt, Artificial Sequence
  Synthetic
gauaaaguucugcuucacu

SEQ ID NO: 374168 - RNA, 20 nt, Artificial Sequence
  Synthetic
agauaaaguucugcuucacu

SEQ ID NO: 374169 - RNA, 21 nt, Artificial Sequence
  Synthetic
aagauaaaguucugcuucacu

SEQ ID NO: 374170 - RNA, 22 nt, Artificial Sequence
  Synthetic
aaagauaaaguucugcuucacu

SEQ ID NO: 374171 - RNA, 23 nt, Artificial Sequence
  Synthetic
uaaagauaaaguucugcuucacu

SEQ ID NO: 374172 - RNA, 24 nt, Artificial Sequence
  Synthetic
auaaagauaaaguucugcuucacu

SEQ ID NO: 374173 - RNA, 18 nt, Artificial Sequence
  Synthetic
ucauuauuaaaguucacu

SEQ ID NO: 374174 - RNA, 19 nt, Artificial Sequence
  Synthetic
cucauuauuaaaguucacu

SEQ ID NO: 374175 - RNA, 20 nt, Artificial Sequence
  Synthetic
ucucauuauuaaaguucacu

SEQ ID NO: 374176 - RNA, 21 nt, Artificial Sequence
  Synthetic
cucucauuauuaaaguucacu

SEQ ID NO: 374177 - RNA, 22 nt, Artificial Sequence
  Synthetic
acucucauuauuaaaguucacu

SEQ ID NO: 374178 - RNA, 23 nt, Artificial Sequence
  Synthetic
gacucucauuauuaaaguucacu

SEQ ID NO: 374179 - RNA, 24 nt, Artificial Sequence
  Synthetic
ggacucucauuauuaaaguucacu

SEQ ID NO: 374180 - RNA, 18 nt, Artificial Sequence
  Synthetic
aaaucuucacaguucacu

SEQ ID NO: 374181 - RNA, 19 nt, Artificial Sequence
  Synthetic
uaaaucuucacaguucacu

SEQ ID NO: 374182 - RNA, 20 nt, Artificial Sequence
  Synthetic
auaaaucuucacaguucacu

SEQ ID NO: 374183 - RNA, 21 nt, Artificial Sequence
  Synthetic
uauaaaucuucacaguucacu

SEQ ID NO: 374184 - RNA, 22 nt, Artificial Sequence
  Synthetic
uuauaaaucuucacaguucacu

SEQ ID NO: 374185 - RNA, 23 nt, Artificial Sequence
  Synthetic
cuuauaaaucuucacaguucacu

SEQ ID NO: 374186 - RNA, 24 nt, Artificial Sequence
  Synthetic
ucuuauaaaucuucacaguucacu

SEQ ID NO: 374187 - RNA, 18 nt, Artificial Sequence
  Synthetic
guuucuuucgcguucacu

SEQ ID NO: 374188 - RNA, 19 nt, Artificial Sequence
  Synthetic
aguuucuuucgcguucacu

SEQ ID NO: 374189 - RNA, 20 nt, Artificial Sequence
  Synthetic
caguuucuuucgcguucacu

SEQ ID NO: 374190 - RNA, 21 nt, Artificial Sequence
  Synthetic
ucaguuucuuucgcguucacu

SEQ ID NO: 374191 - RNA, 22 nt, Artificial Sequence
  Synthetic
uucaguuucuuucgcguucacu

SEQ ID NO: 374192 - RNA, 23 nt, Artificial Sequence
  Synthetic
cuucaguuucuuucgcguucacu

SEQ ID NO: 374193 - RNA, 24 nt, Artificial Sequence
  Synthetic
ucuucaguuucuuucgcguucacu

SEQ ID NO: 374194 - RNA, 18 nt, Artificial Sequence
  Synthetic
ucuucccuuggguucacu

SEQ ID NO: 374195 - RNA, 19 nt, Artificial Sequence
  Synthetic
aucuucccuuggguucacu

SEQ ID NO: 374196 - RNA, 20 nt, Artificial Sequence
  Synthetic
uaucuucccuuggguucacu

SEQ ID NO: 374197 - RNA, 21 nt, Artificial Sequence
  Synthetic
uuaucuucccuuggguucacu

SEQ ID NO: 374198 - RNA, 22 nt, Artificial Sequence
  Synthetic
cuuaucuucccuuggguucacu

SEQ ID NO: 374199 - RNA, 23 nt, Artificial Sequence
  Synthetic
acuuaucuucccuuggguucacu

SEQ ID NO: 374200 - RNA, 24 nt, Artificial Sequence
  Synthetic
cacuuaucuucccuuggguucacu

SEQ ID NO: 374201 - RNA, 18 nt, Artificial Sequence
  Synthetic
uaagauuggucuuucacu

SEQ ID NO: 374202 - RNA, 19 nt, Artificial Sequence
  Synthetic
uuaagauuggucuuucacu

SEQ ID NO: 374203 - RNA, 20 nt, Artificial Sequence
  Synthetic
uuuaagauuggucuuucacu

SEQ ID NO: 374204 - RNA, 21 nt, Artificial Sequence
  Synthetic
guuuaagauuggucuuucacu

SEQ ID NO: 374205 - RNA, 22 nt, Artificial Sequence
  Synthetic
gguuuaagauuggucuuucacu

SEQ ID NO: 374206 - RNA, 23 nt, Artificial Sequence
  Synthetic
ugguuuaagauuggucuuucacu

SEQ ID NO: 374207 - RNA, 24 nt, Artificial Sequence
  Synthetic
uugguuuaagauuggucuuucacu

SEQ ID NO: 374208 - RNA, 18 nt, Artificial Sequence
  Synthetic
uugauaaauucuuucacu

SEQ ID NO: 374209 - RNA, 19 nt, Artificial Sequence
  Synthetic
guugauaaauucuuucacu

SEQ ID NO: 374210 - RNA, 20 nt, Artificial Sequence
  Synthetic
uguugauaaauucuuucacu

SEQ ID NO: 374211 - RNA, 21 nt, Artificial Sequence
  Synthetic
cuguugauaaauucuuucacu

SEQ ID NO: 374212 - RNA, 22 nt, Artificial Sequence
  Synthetic
ucuguugauaaauucuuucacu

SEQ ID NO: 374213 - RNA, 23 nt, Artificial Sequence
  Synthetic
cucuguugauaaauucuuucacu

SEQ ID NO: 374214 - RNA, 24 nt, Artificial Sequence
  Synthetic
acucuguugauaaauucuuucacu

SEQ ID NO: 374215 - RNA, 18 nt, Artificial Sequence
  Synthetic
uuuauugauuguuucacu

SEQ ID NO: 374216 - RNA, 19 nt, Artificial Sequence
  Synthetic
cuuuauugauuguuucacu

SEQ ID NO: 374217 - RNA, 20 nt, Artificial Sequence
  Synthetic
acuuuauugauuguuucacu

SEQ ID NO: 374218 - RNA, 21 nt, Artificial Sequence
  Synthetic
cacuuuauugauuguuucacu

SEQ ID NO: 374219 - RNA, 22 nt, Artificial Sequence
  Synthetic
ucacuuuauugauuguuucacu

SEQ ID NO: 374220 - RNA, 23 nt, Artificial Sequence
  Synthetic
uucacuuuauugauuguuucacu

SEQ ID NO: 374221 - RNA, 24 nt, Artificial Sequence
  Synthetic
cuucacuuuauugauuguuucacu

SEQ ID NO: 374222 - RNA, 18 nt, Artificial Sequence
  Synthetic
ccaagagccauuuucacu

SEQ ID NO: 374223 - RNA, 19 nt, Artificial Sequence
  Synthetic
accaagagccauuuucacu

SEQ ID NO: 374224 - RNA, 20 nt, Artificial Sequence
  Synthetic
uaccaagagccauuuucacu

SEQ ID NO: 374225 - RNA, 21 nt, Artificial Sequence
  Synthetic
uuaccaagagccauuuucacu

SEQ ID NO: 374226 - RNA, 22 nt, Artificial Sequence
  Synthetic
guuaccaagagccauuuucacu

SEQ ID NO: 374227 - RNA, 23 nt, Artificial Sequence
  Synthetic
aguuaccaagagccauuuucacu

SEQ ID NO: 374228 - RNA, 24 nt, Artificial Sequence
  Synthetic
aaguuaccaagagccauuuucacu

SEQ ID NO: 374229 - RNA, 18 nt, Artificial Sequence
  Synthetic
uucaacuuaaaaaagacu

SEQ ID NO: 374230 - RNA, 19 nt, Artificial Sequence
  Synthetic
uuucaacuuaaaaaagacu

SEQ ID NO: 374231 - RNA, 20 nt, Artificial Sequence
  Synthetic
auuucaacuuaaaaaagacu

SEQ ID NO: 374232 - RNA, 21 nt, Artificial Sequence
  Synthetic
uauuucaacuuaaaaaagacu

SEQ ID NO: 374233 - RNA, 22 nt, Artificial Sequence
  Synthetic
cuauuucaacuuaaaaaagacu

SEQ ID NO: 374234 - RNA, 23 nt, Artificial Sequence
  Synthetic
acuauuucaacuuaaaaaagacu

SEQ ID NO: 374235 - RNA, 24 nt, Artificial Sequence
  Synthetic
aacuauuucaacuuaaaaaagacu

SEQ ID NO: 374236 - RNA, 18 nt, Artificial Sequence
  Synthetic
aauucugccaaaaagacu

SEQ ID NO: 374237 - RNA, 19 nt, Artificial Sequence
  Synthetic
gaauucugccaaaaagacu

SEQ ID NO: 374238 - RNA, 20 nt, Artificial Sequence
  Synthetic
agaauucugccaaaaagacu

SEQ ID NO: 374239 - RNA, 21 nt, Artificial Sequence
  Synthetic
aagaauucugccaaaaagacu

SEQ ID NO: 374240 - RNA, 22 nt, Artificial Sequence
  Synthetic
aaagaauucugccaaaaagacu

SEQ ID NO: 374241 - RNA, 23 nt, Artificial Sequence
  Synthetic
aaaagaauucugccaaaaagacu

SEQ ID NO: 374242 - RNA, 24 nt, Artificial Sequence
  Synthetic
caaaagaauucugccaaaaagacu

SEQ ID NO: 374243 - RNA, 18 nt, Artificial Sequence
  Synthetic
auucuucaucaaaagacu

SEQ ID NO: 374244 - RNA, 19 nt, Artificial Sequence
  Synthetic
aauucuucaucaaaagacu

SEQ ID NO: 374245 - RNA, 20 nt, Artificial Sequence
  Synthetic
uaauucuucaucaaaagacu

SEQ ID NO: 374246 - RNA, 21 nt, Artificial Sequence
  Synthetic
auaauucuucaucaaaagacu

SEQ ID NO: 374247 - RNA, 22 nt, Artificial Sequence
  Synthetic
cauaauucuucaucaaaagacu

SEQ ID NO: 374248 - RNA, 23 nt, Artificial Sequence
  Synthetic
ucauaauucuucaucaaaagacu

SEQ ID NO: 374249 - RNA, 24 nt, Artificial Sequence
  Synthetic
uucauaauucuucaucaaaagacu

SEQ ID NO: 374250 - RNA, 18 nt, Artificial Sequence
  Synthetic
uucacaauaacaaagacu

SEQ ID NO: 374251 - RNA, 19 nt, Artificial Sequence
  Synthetic
auucacaauaacaaagacu

SEQ ID NO: 374252 - RNA, 20 nt, Artificial Sequence
  Synthetic
uauucacaauaacaaagacu

SEQ ID NO: 374253 - RNA, 21 nt, Artificial Sequence
  Synthetic
cuauucacaauaacaaagacu

SEQ ID NO: 374254 - RNA, 22 nt, Artificial Sequence
  Synthetic
acuauucacaauaacaaagacu

SEQ ID NO: 374255 - RNA, 23 nt, Artificial Sequence
  Synthetic
cacuauucacaauaacaaagacu

SEQ ID NO: 374256 - RNA, 24 nt, Artificial Sequence
  Synthetic
gcacuauucacaauaacaaagacu

SEQ ID NO: 374257 - RNA, 18 nt, Artificial Sequence
  Synthetic
aaugacuucccaaagacu

SEQ ID NO: 374258 - RNA, 19 nt, Artificial Sequence
  Synthetic
aaaugacuucccaaagacu

SEQ ID NO: 374259 - RNA, 20 nt, Artificial Sequence
  Synthetic
aaaaugacuucccaaagacu

SEQ ID NO: 374260 - RNA, 21 nt, Artificial Sequence
  Synthetic
gaaaaugacuucccaaagacu

SEQ ID NO: 374261 - RNA, 22 nt, Artificial Sequence
  Synthetic
agaaaaugacuucccaaagacu

SEQ ID NO: 374262 - RNA, 23 nt, Artificial Sequence
  Synthetic
uagaaaaugacuucccaaagacu

SEQ ID NO: 374263 - RNA, 24 nt, Artificial Sequence
  Synthetic
uuagaaaaugacuucccaaagacu

SEQ ID NO: 374264 - RNA, 18 nt, Artificial Sequence
  Synthetic
uucacaauagcaaagacu

SEQ ID NO: 374265 - RNA, 19 nt, Artificial Sequence
  Synthetic
auucacaauagcaaagacu

SEQ ID NO: 374266 - RNA, 20 nt, Artificial Sequence
  Synthetic
uauucacaauagcaaagacu

SEQ ID NO: 374267 - RNA, 22 nt, Artificial Sequence
  Synthetic
acuauucacaauagcaaagacu

SEQ ID NO: 374268 - RNA, 23 nt, Artificial Sequence
  Synthetic
cacuauucacaauagcaaagacu

SEQ ID NO: 374269 - RNA, 24 nt, Artificial Sequence
  Synthetic
gcacuauucacaauagcaaagacu

SEQ ID NO: 374270 - RNA, 22 nt, Artificial Sequence
  Synthetic
gcuauucacaauagcaaagacu

SEQ ID NO: 374271 - RNA, 23 nt, Artificial Sequence
  Synthetic
cgcuauucacaauagcaaagacu

SEQ ID NO: 374272 - RNA, 24 nt, Artificial Sequence
  Synthetic
gcgcuauucacaauagcaaagacu

SEQ ID NO: 374273 - RNA, 19 nt, Artificial Sequence
  Synthetic
guucacaauagcaaagacu

SEQ ID NO: 374274 - RNA, 20 nt, Artificial Sequence
  Synthetic
uguucacaauagcaaagacu

SEQ ID NO: 374275 - RNA, 21 nt, Artificial Sequence
  Synthetic
cuguucacaauagcaaagacu

SEQ ID NO: 374276 - RNA, 22 nt, Artificial Sequence
  Synthetic
acuguucacaauagcaaagacu

SEQ ID NO: 374277 - RNA, 23 nt, Artificial Sequence
  Synthetic
cacuguucacaauagcaaagacu

SEQ ID NO: 374278 - RNA, 24 nt, Artificial Sequence
  Synthetic
gcacuguucacaauagcaaagacu

SEQ ID NO: 374279 - RNA, 18 nt, Artificial Sequence
  Synthetic
uuuacaauagcaaagacu

SEQ ID NO: 374280 - RNA, 19 nt, Artificial Sequence
  Synthetic
auuuacaauagcaaagacu

SEQ ID NO: 374281 - RNA, 20 nt, Artificial Sequence
  Synthetic
uauuuacaauagcaaagacu

SEQ ID NO: 374282 - RNA, 19 nt, Artificial Sequence
  Synthetic
guuuacaauagcaaagacu

SEQ ID NO: 374283 - RNA, 20 nt, Artificial Sequence
  Synthetic
uguuuacaauagcaaagacu

SEQ ID NO: 374284 - RNA, 21 nt, Artificial Sequence
  Synthetic
cuguuuacaauagcaaagacu

SEQ ID NO: 374285 - RNA, 22 nt, Artificial Sequence
  Synthetic
acuguuuacaauagcaaagacu

SEQ ID NO: 374286 - RNA, 23 nt, Artificial Sequence
  Synthetic
cacuguuuacaauagcaaagacu

SEQ ID NO: 374287 - RNA, 24 nt, Artificial Sequence
  Synthetic
gcacuguuuacaauagcaaagacu

SEQ ID NO: 374288 - RNA, 18 nt, Artificial Sequence
  Synthetic
ugggcaauagcaaagacu

SEQ ID NO: 374289 - RNA, 19 nt, Artificial Sequence
  Synthetic
augggcaauagcaaagacu

SEQ ID NO: 374290 - RNA, 20 nt, Artificial Sequence
  Synthetic
gaugggcaauagcaaagacu

SEQ ID NO: 374291 - RNA, 21 nt, Artificial Sequence
  Synthetic
ugaugggcaauagcaaagacu

SEQ ID NO: 374292 - RNA, 22 nt, Artificial Sequence
  Synthetic
gugaugggcaauagcaaagacu

SEQ ID NO: 374293 - RNA, 23 nt, Artificial Sequence
  Synthetic
ggugaugggcaauagcaaagacu

SEQ ID NO: 374294 - RNA, 24 nt, Artificial Sequence
  Synthetic
aggugaugggcaauagcaaagacu

SEQ ID NO: 374295 - RNA, 18 nt, Artificial Sequence
  Synthetic
uuuacaguagcaaagacu

SEQ ID NO: 374296 - RNA, 19 nt, Artificial Sequence
  Synthetic
auuuacaguagcaaagacu

SEQ ID NO: 374297 - RNA, 20 nt, Artificial Sequence
  Synthetic
uauuuacaguagcaaagacu

SEQ ID NO: 374298 - RNA, 21 nt, Artificial Sequence
  Synthetic
cuauuuacaguagcaaagacu

SEQ ID NO: 374299 - RNA, 22 nt, Artificial Sequence
  Synthetic
acuauuuacaguagcaaagacu

SEQ ID NO: 374300 - RNA, 23 nt, Artificial Sequence
  Synthetic
cacuauuuacaguagcaaagacu

SEQ ID NO: 374301 - RNA, 24 nt, Artificial Sequence
  Synthetic
gcacuauuuacaguagcaaagacu

SEQ ID NO: 374302 - RNA, 18 nt, Artificial Sequence
  Synthetic
ugccaucugagaaagacu

SEQ ID NO: 374303 - RNA, 19 nt, Artificial Sequence
  Synthetic
uugccaucugagaaagacu

SEQ ID NO: 374304 - RNA, 20 nt, Artificial Sequence
  Synthetic
guugccaucugagaaagacu

SEQ ID NO: 374305 - RNA, 21 nt, Artificial Sequence
  Synthetic
uguugccaucugagaaagacu

SEQ ID NO: 374306 - RNA, 22 nt, Artificial Sequence
  Synthetic
auguugccaucugagaaagacu

SEQ ID NO: 374307 - RNA, 23 nt, Artificial Sequence
  Synthetic
gauguugccaucugagaaagacu

SEQ ID NO: 374308 - RNA, 24 nt, Artificial Sequence
  Synthetic
ugauguugccaucugagaaagacu

SEQ ID NO: 374309 - RNA, 18 nt, Artificial Sequence
  Synthetic
aucuuuugaugaaagacu

SEQ ID NO: 374310 - RNA, 19 nt, Artificial Sequence
  Synthetic
gaucuuuugaugaaagacu

SEQ ID NO: 374311 - RNA, 20 nt, Artificial Sequence
  Synthetic
ugaucuuuugaugaaagacu

SEQ ID NO: 374312 - RNA, 21 nt, Artificial Sequence
  Synthetic
augaucuuuugaugaaagacu

SEQ ID NO: 374313 - RNA, 22 nt, Artificial Sequence
  Synthetic
aaugaucuuuugaugaaagacu

SEQ ID NO: 374314 - RNA, 23 nt, Artificial Sequence
  Synthetic
uaaugaucuuuugaugaaagacu

SEQ ID NO: 374315 - RNA, 24 nt, Artificial Sequence
  Synthetic
auaaugaucuuuugaugaaagacu

SEQ ID NO: 374316 - RNA, 18 nt, Artificial Sequence
  Synthetic
aucucacagauaaagacu

SEQ ID NO: 374317 - RNA, 19 nt, Artificial Sequence
  Synthetic
uaucucacagauaaagacu

SEQ ID NO: 374318 - RNA, 20 nt, Artificial Sequence
  Synthetic
uuaucucacagauaaagacu

SEQ ID NO: 374319 - RNA, 21 nt, Artificial Sequence
  Synthetic
cuuaucucacagauaaagacu

SEQ ID NO: 374320 - RNA, 22 nt, Artificial Sequence
  Synthetic
ccuuaucucacagauaaagacu

SEQ ID NO: 374321 - RNA, 23 nt, Artificial Sequence
  Synthetic
uccuuaucucacagauaaagacu

SEQ ID NO: 374322 - RNA, 24 nt, Artificial Sequence
  Synthetic
uuccuuaucucacagauaaagacu

SEQ ID NO: 374323 - RNA, 18 nt, Artificial Sequence
  Synthetic
uuagaaaggguaaagacu

SEQ ID NO: 374324 - RNA, 19 nt, Artificial Sequence
  Synthetic
uuuagaaaggguaaagacu

SEQ ID NO: 374325 - RNA, 20 nt, Artificial Sequence
  Synthetic
uuuuagaaaggguaaagacu

SEQ ID NO: 374326 - RNA, 21 nt, Artificial Sequence
  Synthetic
auuuuagaaaggguaaagacu

SEQ ID NO: 374327 - RNA, 22 nt, Artificial Sequence
  Synthetic
cauuuuagaaaggguaaagacu

SEQ ID NO: 374328 - RNA, 23 nt, Artificial Sequence
  Synthetic
gcauuuuagaaaggguaaagacu

SEQ ID NO: 374329 - RNA, 24 nt, Artificial Sequence
  Synthetic
ugcauuuuagaaaggguaaagacu

SEQ ID NO: 374330 - RNA, 18 nt, Artificial Sequence
  Synthetic
aguguugaacacaagacu

SEQ ID NO: 374331 - RNA, 19 nt, Artificial Sequence
  Synthetic
caguguugaacacaagacu

SEQ ID NO: 374332 - RNA, 20 nt, Artificial Sequence
  Synthetic
ucaguguugaacacaagacu

SEQ ID NO: 374333 - RNA, 21 nt, Artificial Sequence
  Synthetic
cucaguguugaacacaagacu

SEQ ID NO: 374334 - RNA, 22 nt, Artificial Sequence
  Synthetic
ucucaguguugaacacaagacu

SEQ ID NO: 374335 - RNA, 23 nt, Artificial Sequence
  Synthetic
gucucaguguugaacacaagacu

SEQ ID NO: 374336 - RNA, 24 nt, Artificial Sequence
  Synthetic
agucucaguguugaacacaagacu

SEQ ID NO: 374337 - RNA, 18 nt, Artificial Sequence
  Synthetic
gcaaaauaaaagaagacu

SEQ ID NO: 374338 - RNA, 19 nt, Artificial Sequence
  Synthetic
ugcaaaauaaaagaagacu

SEQ ID NO: 374339 - RNA, 20 nt, Artificial Sequence
  Synthetic
augcaaaauaaaagaagacu

SEQ ID NO: 374340 - RNA, 21 nt, Artificial Sequence
  Synthetic
gaugcaaaauaaaagaagacu

SEQ ID NO: 374341 - RNA, 22 nt, Artificial Sequence
  Synthetic
ugaugcaaaauaaaagaagacu

SEQ ID NO: 374342 - RNA, 23 nt, Artificial Sequence
  Synthetic
gugaugcaaaauaaaagaagacu

SEQ ID NO: 374343 - RNA, 24 nt, Artificial Sequence
  Synthetic
agugaugcaaaauaaaagaagacu

SEQ ID NO: 374344 - RNA, 18 nt, Artificial Sequence
  Synthetic
uuuugucguuagaagacu

SEQ ID NO: 374345 - RNA, 19 nt, Artificial Sequence
  Synthetic
uuuuugucguuagaagacu

SEQ ID NO: 374346 - RNA, 20 nt, Artificial Sequence
  Synthetic
guuuuugucguuagaagacu

SEQ ID NO: 374347 - RNA, 21 nt, Artificial Sequence
  Synthetic
uguuuuugucguuagaagacu

SEQ ID NO: 374348 - RNA, 22 nt, Artificial Sequence
  Synthetic
cuguuuuugucguuagaagacu

SEQ ID NO: 374349 - RNA, 23 nt, Artificial Sequence
  Synthetic
gcuguuuuugucguuagaagacu

SEQ ID NO: 374350 - RNA, 24 nt, Artificial Sequence
  Synthetic
ugcuguuuuugucguuagaagacu

SEQ ID NO: 374351 - RNA, 18 nt, Artificial Sequence
  Synthetic
guaaaaaugucgaagacu

SEQ ID NO: 374352 - RNA, 19 nt, Artificial Sequence
  Synthetic
aguaaaaaugucgaagacu

SEQ ID NO: 374353 - RNA, 20 nt, Artificial Sequence
  Synthetic
aaguaaaaaugucgaagacu

SEQ ID NO: 374354 - RNA, 21 nt, Artificial Sequence
  Synthetic
aaaguaaaaaugucgaagacu

SEQ ID NO: 374355 - RNA, 22 nt, Artificial Sequence
  Synthetic
aaaaguaaaaaugucgaagacu

SEQ ID NO: 374356 - RNA, 23 nt, Artificial Sequence
  Synthetic
aaaaaguaaaaaugucgaagacu

SEQ ID NO: 374357 - RNA, 24 nt, Artificial Sequence
  Synthetic
aaaaaaguaaaaaugucgaagacu

SEQ ID NO: 374358 - RNA, 18 nt, Artificial Sequence
  Synthetic
aaaguuuauuggaagacu

SEQ ID NO: 374359 - RNA, 19 nt, Artificial Sequence
  Synthetic
uaaaguuuauuggaagacu

SEQ ID NO: 374360 - RNA, 20 nt, Artificial Sequence
  Synthetic
cuaaaguuuauuggaagacu

SEQ ID NO: 374361 - RNA, 21 nt, Artificial Sequence
  Synthetic
gcuaaaguuuauuggaagacu

SEQ ID NO: 374362 - RNA, 22 nt, Artificial Sequence
  Synthetic
agcuaaaguuuauuggaagacu

SEQ ID NO: 374363 - RNA, 23 nt, Artificial Sequence
  Synthetic
aagcuaaaguuuauuggaagacu

SEQ ID NO: 374364 - RNA, 24 nt, Artificial Sequence
  Synthetic
aaagcuaaaguuuauuggaagacu

SEQ ID NO: 374365 - RNA, 18 nt, Artificial Sequence
  Synthetic
augaaaguaaugaagacu

SEQ ID NO: 374366 - RNA, 19 nt, Artificial Sequence
  Synthetic
aaugaaaguaaugaagacu

SEQ ID NO: 374367 - RNA, 20 nt, Artificial Sequence
  Synthetic
aaaugaaaguaaugaagacu

SEQ ID NO: 374368 - RNA, 21 nt, Artificial Sequence
  Synthetic
caaaugaaaguaaugaagacu

SEQ ID NO: 374369 - RNA, 22 nt, Artificial Sequence
  Synthetic
ucaaaugaaaguaaugaagacu

SEQ ID NO: 374370 - RNA, 23 nt, Artificial Sequence
  Synthetic
cucaaaugaaaguaaugaagacu

SEQ ID NO: 374371 - RNA, 24 nt, Artificial Sequence
  Synthetic
ucucaaaugaaaguaaugaagacu

SEQ ID NO: 374372 - RNA, 18 nt, Artificial Sequence
  Synthetic
gaauggacuuugaagacu

SEQ ID NO: 374373 - RNA, 19 nt, Artificial Sequence
  Synthetic
agaauggacuuugaagacu

SEQ ID NO: 374374 - RNA, 20 nt, Artificial Sequence
  Synthetic
uagaauggacuuugaagacu

SEQ ID NO: 374375 - RNA, 21 nt, Artificial Sequence
  Synthetic
guagaauggacuuugaagacu

SEQ ID NO: 374376 - RNA, 22 nt, Artificial Sequence
  Synthetic
gguagaauggacuuugaagacu

SEQ ID NO: 374377 - RNA, 23 nt, Artificial Sequence
  Synthetic
ugguagaauggacuuugaagacu

SEQ ID NO: 374378 - RNA, 24 nt, Artificial Sequence
  Synthetic
gugguagaauggacuuugaagacu

SEQ ID NO: 374379 - RNA, 18 nt, Artificial Sequence
  Synthetic
cuggucaugaauaagacu

SEQ ID NO: 374380 - RNA, 19 nt, Artificial Sequence
  Synthetic
ccuggucaugaauaagacu

SEQ ID NO: 374381 - RNA, 20 nt, Artificial Sequence
  Synthetic
accuggucaugaauaagacu

SEQ ID NO: 374382 - RNA, 21 nt, Artificial Sequence
  Synthetic
gaccuggucaugaauaagacu

SEQ ID NO: 374383 - RNA, 22 nt, Artificial Sequence
  Synthetic
ugaccuggucaugaauaagacu

SEQ ID NO: 374384 - RNA, 23 nt, Artificial Sequence
  Synthetic
uugaccuggucaugaauaagacu

SEQ ID NO: 374385 - RNA, 24 nt, Artificial Sequence
  Synthetic
uuugaccuggucaugaauaagacu

SEQ ID NO: 374386 - RNA, 18 nt, Artificial Sequence
  Synthetic
caaaugaaagcuaagacu

SEQ ID NO: 374387 - RNA, 19 nt, Artificial Sequence
  Synthetic
acaaaugaaagcuaagacu

SEQ ID NO: 374388 - RNA, 20 nt, Artificial Sequence
  Synthetic
aacaaaugaaagcuaagacu

SEQ ID NO: 374389 - RNA, 21 nt, Artificial Sequence
  Synthetic
caacaaaugaaagcuaagacu

SEQ ID NO: 374390 - RNA, 22 nt, Artificial Sequence
  Synthetic
ccaacaaaugaaagcuaagacu

SEQ ID NO: 374391 - RNA, 23 nt, Artificial Sequence
  Synthetic
gccaacaaaugaaagcuaagacu

SEQ ID NO: 374392 - RNA, 24 nt, Artificial Sequence
  Synthetic
agccaacaaaugaaagcuaagacu

SEQ ID NO: 374393 - RNA, 18 nt, Artificial Sequence
  Synthetic
aauuagacuuguaagacu

SEQ ID NO: 374394 - RNA, 19 nt, Artificial Sequence
  Synthetic
caauuagacuuguaagacu

SEQ ID NO: 374395 - RNA, 20 nt, Artificial Sequence
  Synthetic
ccaauuagacuuguaagacu

SEQ ID NO: 374396 - RNA, 21 nt, Artificial Sequence
  Synthetic
cccaauuagacuuguaagacu

SEQ ID NO: 374397 - RNA, 22 nt, Artificial Sequence
  Synthetic
ccccaauuagacuuguaagacu

SEQ ID NO: 374398 - RNA, 23 nt, Artificial Sequence
  Synthetic
uccccaauuagacuuguaagacu

SEQ ID NO: 374399 - RNA, 24 nt, Artificial Sequence
  Synthetic
uuccccaauuagacuuguaagacu

SEQ ID NO: 374400 - RNA, 18 nt, Artificial Sequence
  Synthetic
cgugucccagaacagacu

SEQ ID NO: 374401 - RNA, 19 nt, Artificial Sequence
  Synthetic
acgugucccagaacagacu

SEQ ID NO: 374402 - RNA, 20 nt, Artificial Sequence
  Synthetic
uacgugucccagaacagacu

SEQ ID NO: 374403 - RNA, 21 nt, Artificial Sequence
  Synthetic
uuacgugucccagaacagacu

SEQ ID NO: 374404 - RNA, 22 nt, Artificial Sequence
  Synthetic
uuuacgugucccagaacagacu

SEQ ID NO: 374405 - RNA, 23 nt, Artificial Sequence
  Synthetic
cuuuacgugucccagaacagacu

SEQ ID NO: 374406 - RNA, 24 nt, Artificial Sequence
  Synthetic
acuuuacgugucccagaacagacu

SEQ ID NO: 374407 - RNA, 18 nt, Artificial Sequence
  Synthetic
ucaagcauuuuacagacu

SEQ ID NO: 374408 - RNA, 19 nt, Artificial Sequence
  Synthetic
uucaagcauuuuacagacu

SEQ ID NO: 374409 - RNA, 20 nt, Artificial Sequence
  Synthetic
auucaagcauuuuacagacu

SEQ ID NO: 374410 - RNA, 21 nt, Artificial Sequence
  Synthetic
uauucaagcauuuuacagacu

SEQ ID NO: 374411 - RNA, 22 nt, Artificial Sequence
  Synthetic
guauucaagcauuuuacagacu

SEQ ID NO: 374412 - RNA, 23 nt, Artificial Sequence
  Synthetic
gguauucaagcauuuuacagacu

SEQ ID NO: 374413 - RNA, 24 nt, Artificial Sequence
  Synthetic
agguauucaagcauuuuacagacu

SEQ ID NO: 374414 - RNA, 18 nt, Artificial Sequence
  Synthetic
guuuuagcuaaccagacu

SEQ ID NO: 374415 - RNA, 19 nt, Artificial Sequence
  Synthetic
gguuuuagcuaaccagacu

SEQ ID NO: 374416 - RNA, 20 nt, Artificial Sequence
  Synthetic
ugguuuuagcuaaccagacu

SEQ ID NO: 374417 - RNA, 21 nt, Artificial Sequence
  Synthetic
gugguuuuagcuaaccagacu

SEQ ID NO: 374418 - RNA, 22 nt, Artificial Sequence
  Synthetic
ggugguuuuagcuaaccagacu

SEQ ID NO: 374419 - RNA, 23 nt, Artificial Sequence
  Synthetic
gggugguuuuagcuaaccagacu

SEQ ID NO: 374420 - RNA, 24 nt, Artificial Sequence
  Synthetic
ggggugguuuuagcuaaccagacu

SEQ ID NO: 374421 - RNA, 18 nt, Artificial Sequence
  Synthetic
auccuuuguugccagacu

SEQ ID NO: 374422 - RNA, 19 nt, Artificial Sequence
  Synthetic
aauccuuuguugccagacu

SEQ ID NO: 374423 - RNA, 20 nt, Artificial Sequence
  Synthetic
gaauccuuuguugccagacu

SEQ ID NO: 374424 - RNA, 21 nt, Artificial Sequence
  Synthetic
ggaauccuuuguugccagacu

SEQ ID NO: 374425 - RNA, 22 nt, Artificial Sequence
  Synthetic
gggaauccuuuguugccagacu

SEQ ID NO: 374426 - RNA, 23 nt, Artificial Sequence
  Synthetic
ugggaauccuuuguugccagacu

SEQ ID NO: 374427 - RNA, 24 nt, Artificial Sequence
  Synthetic
augggaauccuuuguugccagacu

SEQ ID NO: 374428 - RNA, 18 nt, Artificial Sequence
  Synthetic
gaguaugaguuccagacu

SEQ ID NO: 374429 - RNA, 19 nt, Artificial Sequence
  Synthetic
agaguaugaguuccagacu

SEQ ID NO: 374430 - RNA, 20 nt, Artificial Sequence
  Synthetic
aagaguaugaguuccagacu

SEQ ID NO: 374431 - RNA, 21 nt, Artificial Sequence
  Synthetic
aaagaguaugaguuccagacu

SEQ ID NO: 374432 - RNA, 22 nt, Artificial Sequence
  Synthetic
caaagaguaugaguuccagacu

SEQ ID NO: 374433 - RNA, 23 nt, Artificial Sequence
  Synthetic
gcaaagaguaugaguuccagacu

SEQ ID NO: 374434 - RNA, 24 nt, Artificial Sequence
  Synthetic
ggcaaagaguaugaguuccagacu

SEQ ID NO: 374435 - RNA, 18 nt, Artificial Sequence
  Synthetic
gccaguguaaagcagacu

SEQ ID NO: 374436 - RNA, 19 nt, Artificial Sequence
  Synthetic
ugccaguguaaagcagacu

SEQ ID NO: 374437 - RNA, 20 nt, Artificial Sequence
  Synthetic
cugccaguguaaagcagacu

SEQ ID NO: 374438 - RNA, 21 nt, Artificial Sequence
  Synthetic
ccugccaguguaaagcagacu

SEQ ID NO: 374439 - RNA, 22 nt, Artificial Sequence
  Synthetic
gccugccaguguaaagcagacu

SEQ ID NO: 374440 - RNA, 23 nt, Artificial Sequence
  Synthetic
ggccugccaguguaaagcagacu

SEQ ID NO: 374441 - RNA, 24 nt, Artificial Sequence
  Synthetic
uggccugccaguguaaagcagacu

SEQ ID NO: 374442 - RNA, 18 nt, Artificial Sequence
  Synthetic
auagaguguaagcagacu

SEQ ID NO: 374443 - RNA, 19 nt, Artificial Sequence
  Synthetic
aauagaguguaagcagacu

SEQ ID NO: 374444 - RNA, 20 nt, Artificial Sequence
  Synthetic
gaauagaguguaagcagacu

SEQ ID NO: 374445 - RNA, 21 nt, Artificial Sequence
  Synthetic
agaauagaguguaagcagacu

SEQ ID NO: 374446 - RNA, 22 nt, Artificial Sequence
  Synthetic
uagaauagaguguaagcagacu

SEQ ID NO: 374447 - RNA, 23 nt, Artificial Sequence
  Synthetic
uuagaauagaguguaagcagacu

SEQ ID NO: 374448 - RNA, 24 nt, Artificial Sequence
  Synthetic
cuuagaauagaguguaagcagacu

SEQ ID NO: 374449 - RNA, 18 nt, Artificial Sequence
  Synthetic
gcuuuugagaaucagacu

SEQ ID NO: 374450 - RNA, 19 nt, Artificial Sequence
  Synthetic
ugcuuuugagaaucagacu

SEQ ID NO: 374451 - RNA, 20 nt, Artificial Sequence
  Synthetic
uugcuuuugagaaucagacu

SEQ ID NO: 374452 - RNA, 21 nt, Artificial Sequence
  Synthetic
auugcuuuugagaaucagacu

SEQ ID NO: 374453 - RNA, 22 nt, Artificial Sequence
  Synthetic
aauugcuuuugagaaucagacu

SEQ ID NO: 374454 - RNA, 23 nt, Artificial Sequence
  Synthetic
uaauugcuuuugagaaucagacu

SEQ ID NO: 374455 - RNA, 24 nt, Artificial Sequence
  Synthetic
cuaauugcuuuugagaaucagacu

SEQ ID NO: 374456 - RNA, 18 nt, Artificial Sequence
  Synthetic
auguuagguagucagacu

SEQ ID NO: 374457 - RNA, 19 nt, Artificial Sequence
  Synthetic
gauguuagguagucagacu

SEQ ID NO: 374458 - RNA, 20 nt, Artificial Sequence
  Synthetic
ugauguuagguagucagacu

SEQ ID NO: 374459 - RNA, 21 nt, Artificial Sequence
  Synthetic
gugauguuagguagucagacu

SEQ ID NO: 374460 - RNA, 22 nt, Artificial Sequence
  Synthetic
ugugauguuagguagucagacu

SEQ ID NO: 374461 - RNA, 23 nt, Artificial Sequence
  Synthetic
gugugauguuagguagucagacu

SEQ ID NO: 374462 - RNA, 24 nt, Artificial Sequence
  Synthetic
ggugugauguuagguagucagacu

SEQ ID NO: 374463 - RNA, 18 nt, Artificial Sequence
  Synthetic
ccaaagugcugucagacu

SEQ ID NO: 374464 - RNA, 19 nt, Artificial Sequence
  Synthetic
uccaaagugcugucagacu

SEQ ID NO: 374465 - RNA, 20 nt, Artificial Sequence
  Synthetic
uuccaaagugcugucagacu

SEQ ID NO: 374466 - RNA, 21 nt, Artificial Sequence
  Synthetic
auuccaaagugcugucagacu

SEQ ID NO: 374467 - RNA, 22 nt, Artificial Sequence
  Synthetic
uauuccaaagugcugucagacu

SEQ ID NO: 374468 - RNA, 23 nt, Artificial Sequence
  Synthetic
auauuccaaagugcugucagacu

SEQ ID NO: 374469 - RNA, 24 nt, Artificial Sequence
  Synthetic
gauauuccaaagugcugucagacu

SEQ ID NO: 374470 - RNA, 18 nt, Artificial Sequence
  Synthetic
ccaccuauuuuucagacu

SEQ ID NO: 374471 - RNA, 19 nt, Artificial Sequence
  Synthetic
gccaccuauuuuucagacu

SEQ ID NO: 374472 - RNA, 20 nt, Artificial Sequence
  Synthetic
ugccaccuauuuuucagacu

SEQ ID NO: 374473 - RNA, 21 nt, Artificial Sequence
  Synthetic
uugccaccuauuuuucagacu

SEQ ID NO: 374474 - RNA, 22 nt, Artificial Sequence
  Synthetic
cuugccaccuauuuuucagacu

SEQ ID NO: 374475 - RNA, 23 nt, Artificial Sequence
  Synthetic
ccuugccaccuauuuuucagacu

SEQ ID NO: 374476 - RNA, 24 nt, Artificial Sequence
  Synthetic
cccuugccaccuauuuuucagacu

SEQ ID NO: 374477 - RNA, 18 nt, Artificial Sequence
  Synthetic
guggacuaugaagagacu

SEQ ID NO: 374478 - RNA, 19 nt, Artificial Sequence
  Synthetic
uguggacuaugaagagacu

SEQ ID NO: 374479 - RNA, 20 nt, Artificial Sequence
  Synthetic
uuguggacuaugaagagacu

SEQ ID NO: 374480 - RNA, 21 nt, Artificial Sequence
  Synthetic
guuguggacuaugaagagacu

SEQ ID NO: 374481 - RNA, 22 nt, Artificial Sequence
  Synthetic
uguuguggacuaugaagagacu

SEQ ID NO: 374482 - RNA, 23 nt, Artificial Sequence
  Synthetic
guguuguggacuaugaagagacu

SEQ ID NO: 374483 - RNA, 24 nt, Artificial Sequence
  Synthetic
aguguuguggacuaugaagagacu

SEQ ID NO: 374484 - RNA, 18 nt, Artificial Sequence
  Synthetic
caauguauccuagagacu

SEQ ID NO: 374485 - RNA, 19 nt, Artificial Sequence
  Synthetic
ccaauguauccuagagacu

SEQ ID NO: 374486 - RNA, 20 nt, Artificial Sequence
  Synthetic
cccaauguauccuagagacu

SEQ ID NO: 374487 - RNA, 21 nt, Artificial Sequence
  Synthetic
ccccaauguauccuagagacu

SEQ ID NO: 374488 - RNA, 22 nt, Artificial Sequence
  Synthetic
uccccaauguauccuagagacu

SEQ ID NO: 374489 - RNA, 23 nt, Artificial Sequence
  Synthetic
cuccccaauguauccuagagacu

SEQ ID NO: 374490 - RNA, 24 nt, Artificial Sequence
  Synthetic
acuccccaauguauccuagagacu

SEQ ID NO: 374491 - RNA, 18 nt, Artificial Sequence
  Synthetic
gagucagaaguagagacu

SEQ ID NO: 374492 - RNA, 19 nt, Artificial Sequence
  Synthetic
ugagucagaaguagagacu

SEQ ID NO: 374493 - RNA, 20 nt, Artificial Sequence
  Synthetic
cugagucagaaguagagacu

SEQ ID NO: 374494 - RNA, 21 nt, Artificial Sequence
  Synthetic
ucugagucagaaguagagacu

SEQ ID NO: 374495 - RNA, 22 nt, Artificial Sequence
  Synthetic
cucugagucagaaguagagacu

SEQ ID NO: 374496 - RNA, 23 nt, Artificial Sequence
  Synthetic
ucucugagucagaaguagagacu

SEQ ID NO: 374497 - RNA, 24 nt, Artificial Sequence
  Synthetic
cucucugagucagaaguagagacu

SEQ ID NO: 374498 - RNA, 18 nt, Artificial Sequence
  Synthetic
agacagaaaaccgagacu

SEQ ID NO: 374499 - RNA, 19 nt, Artificial Sequence
  Synthetic
gagacagaaaaccgagacu

SEQ ID NO: 374500 - RNA, 20 nt, Artificial Sequence
  Synthetic
agagacagaaaaccgagacu

SEQ ID NO: 374501 - RNA, 21 nt, Artificial Sequence
  Synthetic
uagagacagaaaaccgagacu

SEQ ID NO: 374502 - RNA, 22 nt, Artificial Sequence
  Synthetic
uuagagacagaaaaccgagacu

SEQ ID NO: 374503 - RNA, 23 nt, Artificial Sequence
  Synthetic
uuuagagacagaaaaccgagacu

SEQ ID NO: 374504 - RNA, 24 nt, Artificial Sequence
  Synthetic
uuuuagagacagaaaaccgagacu

SEQ ID NO: 374505 - RNA, 18 nt, Artificial Sequence
  Synthetic
cuaauggcaagggagacu

SEQ ID NO: 374506 - RNA, 19 nt, Artificial Sequence
  Synthetic
acuaauggcaagggagacu

SEQ ID NO: 374507 - RNA, 20 nt, Artificial Sequence
  Synthetic
aacuaauggcaagggagacu

SEQ ID NO: 374508 - RNA, 21 nt, Artificial Sequence
  Synthetic
aaacuaauggcaagggagacu

SEQ ID NO: 374509 - RNA, 22 nt, Artificial Sequence
  Synthetic
caaacuaauggcaagggagacu

SEQ ID NO: 374510 - RNA, 23 nt, Artificial Sequence
  Synthetic
ccaaacuaauggcaagggagacu

SEQ ID NO: 374511 - RNA, 24 nt, Artificial Sequence
  Synthetic
gccaaacuaauggcaagggagacu

SEQ ID NO: 374512 - RNA, 18 nt, Artificial Sequence
  Synthetic
cuccauaagugggagacu

SEQ ID NO: 374513 - RNA, 19 nt, Artificial Sequence
  Synthetic
acuccauaagugggagacu

SEQ ID NO: 374514 - RNA, 20 nt, Artificial Sequence
  Synthetic
uacuccauaagugggagacu

SEQ ID NO: 374515 - RNA, 21 nt, Artificial Sequence
  Synthetic
guacuccauaagugggagacu

SEQ ID NO: 374516 - RNA, 22 nt, Artificial Sequence
  Synthetic
gguacuccauaagugggagacu

SEQ ID NO: 374517 - RNA, 23 nt, Artificial Sequence
  Synthetic
ggguacuccauaagugggagacu

SEQ ID NO: 374518 - RNA, 24 nt, Artificial Sequence
  Synthetic
uggguacuccauaagugggagacu

SEQ ID NO: 374519 - RNA, 18 nt, Artificial Sequence
  Synthetic
uuauagaaaauggagacu

SEQ ID NO: 374520 - RNA, 19 nt, Artificial Sequence
  Synthetic
cuuauagaaaauggagacu

SEQ ID NO: 374521 - RNA, 20 nt, Artificial Sequence
  Synthetic
gcuuauagaaaauggagacu

SEQ ID NO: 374522 - RNA, 21 nt, Artificial Sequence
  Synthetic
cgcuuauagaaaauggagacu

SEQ ID NO: 374523 - RNA, 22 nt, Artificial Sequence
  Synthetic
ucgcuuauagaaaauggagacu

SEQ ID NO: 374524 - RNA, 23 nt, Artificial Sequence
  Synthetic
cucgcuuauagaaaauggagacu

SEQ ID NO: 374525 - RNA, 24 nt, Artificial Sequence
  Synthetic
gcucgcuuauagaaaauggagacu

SEQ ID NO: 374526 - RNA, 18 nt, Artificial Sequence
  Synthetic
cucacaguucuggagacu

SEQ ID NO: 374527 - RNA, 19 nt, Artificial Sequence
  Synthetic
gcucacaguucuggagacu

SEQ ID NO: 374528 - RNA, 20 nt, Artificial Sequence
  Synthetic
ggcucacaguucuggagacu

SEQ ID NO: 374529 - RNA, 21 nt, Artificial Sequence
  Synthetic
uggcucacaguucuggagacu

SEQ ID NO: 374530 - RNA, 22 nt, Artificial Sequence
  Synthetic
uuggcucacaguucuggagacu

SEQ ID NO: 374531 - RNA, 23 nt, Artificial Sequence
  Synthetic
auuggcucacaguucuggagacu

SEQ ID NO: 374532 - RNA, 24 nt, Artificial Sequence
  Synthetic
uauuggcucacaguucuggagacu

SEQ ID NO: 374533 - RNA, 18 nt, Artificial Sequence
  Synthetic
agcauguucuuggagacu

SEQ ID NO: 374534 - RNA, 19 nt, Artificial Sequence
  Synthetic
uagcauguucuuggagacu

SEQ ID NO: 374535 - RNA, 20 nt, Artificial Sequence
  Synthetic
cuagcauguucuuggagacu

SEQ ID NO: 374536 - RNA, 21 nt, Artificial Sequence
  Synthetic
gcuagcauguucuuggagacu

SEQ ID NO: 374537 - RNA, 22 nt, Artificial Sequence
  Synthetic
agcuagcauguucuuggagacu

SEQ ID NO: 374538 - RNA, 23 nt, Artificial Sequence
  Synthetic
aagcuagcauguucuuggagacu

SEQ ID NO: 374539 - RNA, 24 nt, Artificial Sequence
  Synthetic
aaagcuagcauguucuuggagacu

SEQ ID NO: 374540 - RNA, 18 nt, Artificial Sequence
  Synthetic
cuaguaagaaaugagacu

SEQ ID NO: 374541 - RNA, 19 nt, Artificial Sequence
  Synthetic
gcuaguaagaaaugagacu

SEQ ID NO: 374542 - RNA, 20 nt, Artificial Sequence
  Synthetic
ugcuaguaagaaaugagacu

SEQ ID NO: 374543 - RNA, 21 nt, Artificial Sequence
  Synthetic
augcuaguaagaaaugagacu

SEQ ID NO: 374544 - RNA, 22 nt, Artificial Sequence
  Synthetic
aaugcuaguaagaaaugagacu

SEQ ID NO: 374545 - RNA, 23 nt, Artificial Sequence
  Synthetic
aaaugcuaguaagaaaugagacu

SEQ ID NO: 374546 - RNA, 24 nt, Artificial Sequence
  Synthetic
aaaaugcuaguaagaaaugagacu

SEQ ID NO: 374547 - RNA, 18 nt, Artificial Sequence
  Synthetic
agaaagaggcaugagacu

SEQ ID NO: 374548 - RNA, 19 nt, Artificial Sequence
  Synthetic
aagaaagaggcaugagacu

SEQ ID NO: 374549 - RNA, 20 nt, Artificial Sequence
  Synthetic
aaagaaagaggcaugagacu

SEQ ID NO: 374550 - RNA, 21 nt, Artificial Sequence
  Synthetic
uaaagaaagaggcaugagacu

SEQ ID NO: 374551 - RNA, 22 nt, Artificial Sequence
  Synthetic
auaaagaaagaggcaugagacu

SEQ ID NO: 374552 - RNA, 23 nt, Artificial Sequence
  Synthetic
gauaaagaaagaggcaugagacu

SEQ ID NO: 374553 - RNA, 24 nt, Artificial Sequence
  Synthetic
ugauaaagaaagaggcaugagacu

SEQ ID NO: 374554 - RNA, 18 nt, Artificial Sequence
  Synthetic
ugugagauaacugagacu

SEQ ID NO: 374555 - RNA, 19 nt, Artificial Sequence
  Synthetic
gugugagauaacugagacu

SEQ ID NO: 374556 - RNA, 20 nt, Artificial Sequence
  Synthetic
ugugugagauaacugagacu

SEQ ID NO: 374557 - RNA, 21 nt, Artificial Sequence
  Synthetic
augugugagauaacugagacu

SEQ ID NO: 374558 - RNA, 22 nt, Artificial Sequence
  Synthetic
uaugugugagauaacugagacu

SEQ ID NO: 374559 - RNA, 23 nt, Artificial Sequence
  Synthetic
uuaugugugagauaacugagacu

SEQ ID NO: 374560 - RNA, 24 nt, Artificial Sequence
  Synthetic
uuuaugugugagauaacugagacu

SEQ ID NO: 374561 - RNA, 18 nt, Artificial Sequence
  Synthetic
cagaaaaggacugagacu

SEQ ID NO: 374562 - RNA, 19 nt, Artificial Sequence
  Synthetic
ucagaaaaggacugagacu

SEQ ID NO: 374563 - RNA, 20 nt, Artificial Sequence
  Synthetic
cucagaaaaggacugagacu

SEQ ID NO: 374564 - RNA, 21 nt, Artificial Sequence
  Synthetic
gcucagaaaaggacugagacu

SEQ ID NO: 374565 - RNA, 22 nt, Artificial Sequence
  Synthetic
agcucagaaaaggacugagacu

SEQ ID NO: 374566 - RNA, 23 nt, Artificial Sequence
  Synthetic
aagcucagaaaaggacugagacu

SEQ ID NO: 374567 - RNA, 24 nt, Artificial Sequence
  Synthetic
aaagcucagaaaaggacugagacu

SEQ ID NO: 374568 - RNA, 18 nt, Artificial Sequence
  Synthetic
agguaagauagugagacu

SEQ ID NO: 374569 - RNA, 19 nt, Artificial Sequence
  Synthetic
gagguaagauagugagacu

SEQ ID NO: 374570 - RNA, 20 nt, Artificial Sequence
  Synthetic
ugagguaagauagugagacu

SEQ ID NO: 374571 - RNA, 21 nt, Artificial Sequence
  Synthetic
gugagguaagauagugagacu

SEQ ID NO: 374572 - RNA, 22 nt, Artificial Sequence
  Synthetic
ugugagguaagauagugagacu

SEQ ID NO: 374573 - RNA, 23 nt, Artificial Sequence
  Synthetic
augugagguaagauagugagacu

SEQ ID NO: 374574 - RNA, 24 nt, Artificial Sequence
  Synthetic
aaugugagguaagauagugagacu

SEQ ID NO: 374575 - RNA, 18 nt, Artificial Sequence
  Synthetic
auuuaauuuuuauagacu

SEQ ID NO: 374576 - RNA, 19 nt, Artificial Sequence
  Synthetic
aauuuaauuuuuauagacu

SEQ ID NO: 374577 - RNA, 20 nt, Artificial Sequence
  Synthetic
aaauuuaauuuuuauagacu

SEQ ID NO: 374578 - RNA, 21 nt, Artificial Sequence
  Synthetic
aaaauuuaauuuuuauagacu

SEQ ID NO: 374579 - RNA, 22 nt, Artificial Sequence
  Synthetic
caaaauuuaauuuuuauagacu

SEQ ID NO: 374580 - RNA, 23 nt, Artificial Sequence
  Synthetic
acaaaauuuaauuuuuauagacu

SEQ ID NO: 374581 - RNA, 24 nt, Artificial Sequence
  Synthetic
aacaaaauuuaauuuuuauagacu

SEQ ID NO: 374582 - RNA, 18 nt, Artificial Sequence
  Synthetic
agagcccugaccuagacu

SEQ ID NO: 374583 - RNA, 19 nt, Artificial Sequence
  Synthetic
aagagcccugaccuagacu

SEQ ID NO: 374584 - RNA, 20 nt, Artificial Sequence
  Synthetic
uaagagcccugaccuagacu

SEQ ID NO: 374585 - RNA, 21 nt, Artificial Sequence
  Synthetic
uuaagagcccugaccuagacu

SEQ ID NO: 374586 - RNA, 22 nt, Artificial Sequence
  Synthetic
uuuaagagcccugaccuagacu

SEQ ID NO: 374587 - RNA, 23 nt, Artificial Sequence
  Synthetic
cuuuaagagcccugaccuagacu

SEQ ID NO: 374588 - RNA, 24 nt, Artificial Sequence
  Synthetic
gcuuuaagagcccugaccuagacu

SEQ ID NO: 374589 - RNA, 18 nt, Artificial Sequence
  Synthetic
auuucuacacccuagacu

SEQ ID NO: 374590 - RNA, 19 nt, Artificial Sequence
  Synthetic
uauuucuacacccuagacu

SEQ ID NO: 374591 - RNA, 20 nt, Artificial Sequence
  Synthetic
cuauuucuacacccuagacu

SEQ ID NO: 374592 - RNA, 21 nt, Artificial Sequence
  Synthetic
ucuauuucuacacccuagacu

SEQ ID NO: 374593 - RNA, 22 nt, Artificial Sequence
  Synthetic
aucuauuucuacacccuagacu

SEQ ID NO: 374594 - RNA, 23 nt, Artificial Sequence
  Synthetic
aaucuauuucuacacccuagacu

SEQ ID NO: 374595 - RNA, 24 nt, Artificial Sequence
  Synthetic
caaucuauuucuacacccuagacu

SEQ ID NO: 374596 - RNA, 18 nt, Artificial Sequence
  Synthetic
cuaucucuugccuagacu

SEQ ID NO: 374597 - RNA, 19 nt, Artificial Sequence
  Synthetic
acuaucucuugccuagacu

SEQ ID NO: 374598 - RNA, 20 nt, Artificial Sequence
  Synthetic
cacuaucucuugccuagacu

SEQ ID NO: 374599 - RNA, 21 nt, Artificial Sequence
  Synthetic
acacuaucucuugccuagacu

SEQ ID NO: 374600 - RNA, 22 nt, Artificial Sequence
  Synthetic
aacacuaucucuugccuagacu

SEQ ID NO: 374601 - RNA, 23 nt, Artificial Sequence
  Synthetic
aaacacuaucucuugccuagacu

SEQ ID NO: 374602 - RNA, 24 nt, Artificial Sequence
  Synthetic
aaaacacuaucucuugccuagacu

SEQ ID NO: 374603 - RNA, 18 nt, Artificial Sequence
  Synthetic
uguggacagggcuagacu

SEQ ID NO: 374604 - RNA, 19 nt, Artificial Sequence
  Synthetic
auguggacagggcuagacu

SEQ ID NO: 374605 - RNA, 20 nt, Artificial Sequence
  Synthetic
cauguggacagggcuagacu

SEQ ID NO: 374606 - RNA, 21 nt, Artificial Sequence
  Synthetic
acauguggacagggcuagacu

SEQ ID NO: 374607 - RNA, 22 nt, Artificial Sequence
  Synthetic
gacauguggacagggcuagacu

SEQ ID NO: 374608 - RNA, 23 nt, Artificial Sequence
  Synthetic
ugacauguggacagggcuagacu

SEQ ID NO: 374609 - RNA, 24 nt, Artificial Sequence
  Synthetic
augacauguggacagggcuagacu

SEQ ID NO: 374610 - RNA, 18 nt, Artificial Sequence
  Synthetic
uauauauaugcuuagacu

SEQ ID NO: 374611 - RNA, 19 nt, Artificial Sequence
  Synthetic
auauauauaugcuuagacu

SEQ ID NO: 374612 - RNA, 20 nt, Artificial Sequence
  Synthetic
uauauauauaugcuuagacu

SEQ ID NO: 374613 - RNA, 21 nt, Artificial Sequence
  Synthetic
auauauauauaugcuuagacu

SEQ ID NO: 374614 - RNA, 22 nt, Artificial Sequence
  Synthetic
uauauauauauaugcuuagacu

SEQ ID NO: 374615 - RNA, 23 nt, Artificial Sequence
  Synthetic
auauauauauauaugcuuagacu

SEQ ID NO: 374616 - RNA, 24 nt, Artificial Sequence
  Synthetic
uauauauauauauaugcuuagacu

SEQ ID NO: 374617 - RNA, 18 nt, Artificial Sequence
  Synthetic
uuucacuagcuuuagacu

SEQ ID NO: 374618 - RNA, 19 nt, Artificial Sequence
  Synthetic
cuuucacuagcuuuagacu

SEQ ID NO: 374619 - RNA, 20 nt, Artificial Sequence
  Synthetic
ccuuucacuagcuuuagacu

SEQ ID NO: 374620 - RNA, 21 nt, Artificial Sequence
  Synthetic
accuuucacuagcuuuagacu

SEQ ID NO: 374621 - RNA, 22 nt, Artificial Sequence
  Synthetic
aaccuuucacuagcuuuagacu

SEQ ID NO: 374622 - RNA, 23 nt, Artificial Sequence
  Synthetic
uaaccuuucacuagcuuuagacu

SEQ ID NO: 374623 - RNA, 24 nt, Artificial Sequence
  Synthetic
cuaaccuuucacuagcuuuagacu

SEQ ID NO: 374624 - RNA, 18 nt, Artificial Sequence
  Synthetic
uuuaggaagguuuagacu

SEQ ID NO: 374625 - RNA, 19 nt, Artificial Sequence
  Synthetic
auuuaggaagguuuagacu

SEQ ID NO: 374626 - RNA, 20 nt, Artificial Sequence
  Synthetic
uauuuaggaagguuuagacu

SEQ ID NO: 374627 - RNA, 21 nt, Artificial Sequence
  Synthetic
cuauuuaggaagguuuagacu

SEQ ID NO: 374628 - RNA, 22 nt, Artificial Sequence
  Synthetic
gcuauuuaggaagguuuagacu

SEQ ID NO: 374629 - RNA, 23 nt, Artificial Sequence
  Synthetic
ggcuauuuaggaagguuuagacu

SEQ ID NO: 374630 - RNA, 24 nt, Artificial Sequence
  Synthetic
aggcuauuuaggaagguuuagacu

SEQ ID NO: 374631 - RNA, 18 nt, Artificial Sequence
  Synthetic
ucaaguuaugcaacgacu

SEQ ID NO: 374632 - RNA, 19 nt, Artificial Sequence
  Synthetic
aucaaguuaugcaacgacu

SEQ ID NO: 374633 - RNA, 20 nt, Artificial Sequence
  Synthetic
gaucaaguuaugcaacgacu

SEQ ID NO: 374634 - RNA, 21 nt, Artificial Sequence
  Synthetic
ugaucaaguuaugcaacgacu

SEQ ID NO: 374635 - RNA, 22 nt, Artificial Sequence
  Synthetic
uugaucaaguuaugcaacgacu

SEQ ID NO: 374636 - RNA, 23 nt, Artificial Sequence
  Synthetic
uuugaucaaguuaugcaacgacu

SEQ ID NO: 374637 - RNA, 24 nt, Artificial Sequence
  Synthetic
auuugaucaaguuaugcaacgacu

SEQ ID NO: 374638 - RNA, 18 nt, Artificial Sequence
  Synthetic
gaguuagauuuaacgacu

SEQ ID NO: 374639 - RNA, 19 nt, Artificial Sequence
  Synthetic
agaguuagauuuaacgacu

SEQ ID NO: 374640 - RNA, 20 nt, Artificial Sequence
  Synthetic
cagaguuagauuuaacgacu

SEQ ID NO: 374641 - RNA, 21 nt, Artificial Sequence
  Synthetic
ucagaguuagauuuaacgacu

SEQ ID NO: 374642 - RNA, 22 nt, Artificial Sequence
  Synthetic
aucagaguuagauuuaacgacu

SEQ ID NO: 374643 - RNA, 23 nt, Artificial Sequence
  Synthetic
caucagaguuagauuuaacgacu

SEQ ID NO: 374644 - RNA, 24 nt, Artificial Sequence
  Synthetic
ucaucagaguuagauuuaacgacu

SEQ ID NO: 374645 - RNA, 18 nt, Artificial Sequence
  Synthetic
ccuuuauuuggcccgacu

SEQ ID NO: 374646 - RNA, 19 nt, Artificial Sequence
  Synthetic
gccuuuauuuggcccgacu

SEQ ID NO: 374647 - RNA, 20 nt, Artificial Sequence
  Synthetic
ugccuuuauuuggcccgacu

SEQ ID NO: 374648 - RNA, 21 nt, Artificial Sequence
  Synthetic
uugccuuuauuuggcccgacu

SEQ ID NO: 374649 - RNA, 22 nt, Artificial Sequence
  Synthetic
cuugccuuuauuuggcccgacu

SEQ ID NO: 374650 - RNA, 23 nt, Artificial Sequence
  Synthetic
ccuugccuuuauuuggcccgacu

SEQ ID NO: 374651 - RNA, 24 nt, Artificial Sequence
  Synthetic
gccuugccuuuauuuggcccgacu

SEQ ID NO: 374652 - RNA, 18 nt, Artificial Sequence
  Synthetic
acccauucucggccgacu

SEQ ID NO: 374653 - RNA, 19 nt, Artificial Sequence
  Synthetic
aacccauucucggccgacu

SEQ ID NO: 374654 - RNA, 20 nt, Artificial Sequence
  Synthetic
aaacccauucucggccgacu

SEQ ID NO: 374655 - RNA, 21 nt, Artificial Sequence
  Synthetic
aaaacccauucucggccgacu

SEQ ID NO: 374656 - RNA, 22 nt, Artificial Sequence
  Synthetic
gaaaacccauucucggccgacu

SEQ ID NO: 374657 - RNA, 23 nt, Artificial Sequence
  Synthetic
ugaaaacccauucucggccgacu

SEQ ID NO: 374658 - RNA, 24 nt, Artificial Sequence
  Synthetic
augaaaacccauucucggccgacu

SEQ ID NO: 374659 - RNA, 18 nt, Artificial Sequence
  Synthetic
ggaaacuccaaaaggacu

SEQ ID NO: 374660 - RNA, 19 nt, Artificial Sequence
  Synthetic
gggaaacuccaaaaggacu

SEQ ID NO: 374661 - RNA, 20 nt, Artificial Sequence
  Synthetic
ugggaaacuccaaaaggacu

SEQ ID NO: 374662 - RNA, 21 nt, Artificial Sequence
  Synthetic
cugggaaacuccaaaaggacu

SEQ ID NO: 374663 - RNA, 22 nt, Artificial Sequence
  Synthetic
acugggaaacuccaaaaggacu

SEQ ID NO: 374664 - RNA, 23 nt, Artificial Sequence
  Synthetic
uacugggaaacuccaaaaggacu

SEQ ID NO: 374665 - RNA, 24 nt, Artificial Sequence
  Synthetic
uuacugggaaacuccaaaaggacu

SEQ ID NO: 374666 - RNA, 18 nt, Artificial Sequence
  Synthetic
augaaaguugaaaggacu

SEQ ID NO: 374667 - RNA, 19 nt, Artificial Sequence
  Synthetic
aaugaaaguugaaaggacu

SEQ ID NO: 374668 - RNA, 20 nt, Artificial Sequence
  Synthetic
uaaugaaaguugaaaggacu

SEQ ID NO: 374669 - RNA, 21 nt, Artificial Sequence
  Synthetic
auaaugaaaguugaaaggacu

SEQ ID NO: 374670 - RNA, 22 nt, Artificial Sequence
  Synthetic
gauaaugaaaguugaaaggacu

SEQ ID NO: 374671 - RNA, 23 nt, Artificial Sequence
  Synthetic
agauaaugaaaguugaaaggacu

SEQ ID NO: 374672 - RNA, 24 nt, Artificial Sequence
  Synthetic
aagauaaugaaaguugaaaggacu

SEQ ID NO: 374673 - RNA, 18 nt, Artificial Sequence
  Synthetic
ucuucaccaguaaggacu

SEQ ID NO: 374674 - RNA, 19 nt, Artificial Sequence
  Synthetic
cucuucaccaguaaggacu

SEQ ID NO: 374675 - RNA, 20 nt, Artificial Sequence
  Synthetic
acucuucaccaguaaggacu

SEQ ID NO: 374676 - RNA, 21 nt, Artificial Sequence
  Synthetic
uacucuucaccaguaaggacu

SEQ ID NO: 374677 - RNA, 22 nt, Artificial Sequence
  Synthetic
auacucuucaccaguaaggacu

SEQ ID NO: 374678 - RNA, 23 nt, Artificial Sequence
  Synthetic
cauacucuucaccaguaaggacu

SEQ ID NO: 374679 - RNA, 24 nt, Artificial Sequence
  Synthetic
ccauacucuucaccaguaaggacu

SEQ ID NO: 374680 - RNA, 18 nt, Artificial Sequence
  Synthetic
uaguccauuuuaaggacu

SEQ ID NO: 374681 - RNA, 19 nt, Artificial Sequence
  Synthetic
guaguccauuuuaaggacu

SEQ ID NO: 374682 - RNA, 20 nt, Artificial Sequence
  Synthetic
uguaguccauuuuaaggacu

SEQ ID NO: 374683 - RNA, 21 nt, Artificial Sequence
  Synthetic
uuguaguccauuuuaaggacu

SEQ ID NO: 374684 - RNA, 22 nt, Artificial Sequence
  Synthetic
cuuguaguccauuuuaaggacu

SEQ ID NO: 374685 - RNA, 23 nt, Artificial Sequence
  Synthetic
ccuuguaguccauuuuaaggacu

SEQ ID NO: 374686 - RNA, 24 nt, Artificial Sequence
  Synthetic
accuuguaguccauuuuaaggacu

SEQ ID NO: 374687 - RNA, 18 nt, Artificial Sequence
  Synthetic
agaaccuaggccaggacu

SEQ ID NO: 374688 - RNA, 19 nt, Artificial Sequence
  Synthetic
aagaaccuaggccaggacu

SEQ ID NO: 374689 - RNA, 20 nt, Artificial Sequence
  Synthetic
caagaaccuaggccaggacu

SEQ ID NO: 374690 - RNA, 21 nt, Artificial Sequence
  Synthetic
ccaagaaccuaggccaggacu

SEQ ID NO: 374691 - RNA, 22 nt, Artificial Sequence
  Synthetic
uccaagaaccuaggccaggacu

SEQ ID NO: 374692 - RNA, 23 nt, Artificial Sequence
  Synthetic
guccaagaaccuaggccaggacu

SEQ ID NO: 374693 - RNA, 24 nt, Artificial Sequence
  Synthetic
uguccaagaaccuaggccaggacu

SEQ ID NO: 374694 - RNA, 18 nt, Artificial Sequence
  Synthetic
gaaaaaaguuagaggacu

SEQ ID NO: 374695 - RNA, 19 nt, Artificial Sequence
  Synthetic
agaaaaaaguuagaggacu

SEQ ID NO: 374696 - RNA, 20 nt, Artificial Sequence
  Synthetic
aagaaaaaaguuagaggacu

SEQ ID NO: 374697 - RNA, 21 nt, Artificial Sequence
  Synthetic
gaagaaaaaaguuagaggacu

SEQ ID NO: 374698 - RNA, 22 nt, Artificial Sequence
  Synthetic
agaagaaaaaaguuagaggacu

SEQ ID NO: 374699 - RNA, 23 nt, Artificial Sequence
  Synthetic
aagaagaaaaaaguuagaggacu

SEQ ID NO: 374700 - RNA, 24 nt, Artificial Sequence
  Synthetic
aaagaagaaaaaaguuagaggacu

SEQ ID NO: 374701 - RNA, 18 nt, Artificial Sequence
  Synthetic
gucuguaacccuaggacu

SEQ ID NO: 374702 - RNA, 19 nt, Artificial Sequence
  Synthetic
cgucuguaacccuaggacu

SEQ ID NO: 374703 - RNA, 20 nt, Artificial Sequence
  Synthetic
acgucuguaacccuaggacu

SEQ ID NO: 374704 - RNA, 21 nt, Artificial Sequence
  Synthetic
cacgucuguaacccuaggacu

SEQ ID NO: 374705 - RNA, 22 nt, Artificial Sequence
  Synthetic
ucacgucuguaacccuaggacu

SEQ ID NO: 374706 - RNA, 23 nt, Artificial Sequence
  Synthetic
cucacgucuguaacccuaggacu

SEQ ID NO: 374707 - RNA, 24 nt, Artificial Sequence
  Synthetic
gcucacgucuguaacccuaggacu

SEQ ID NO: 374708 - RNA, 18 nt, Artificial Sequence
  Synthetic
uuggggucuauuaggacu

SEQ ID NO: 374709 - RNA, 19 nt, Artificial Sequence
  Synthetic
uuuggggucuauuaggacu

SEQ ID NO: 374710 - RNA, 20 nt, Artificial Sequence
  Synthetic
cuuuggggucuauuaggacu

SEQ ID NO: 374711 - RNA, 21 nt, Artificial Sequence
  Synthetic
ccuuuggggucuauuaggacu

SEQ ID NO: 374712 - RNA, 22 nt, Artificial Sequence
  Synthetic
cccuuuggggucuauuaggacu

SEQ ID NO: 374713 - RNA, 23 nt, Artificial Sequence
  Synthetic
ccccuuuggggucuauuaggacu

SEQ ID NO: 374714 - RNA, 24 nt, Artificial Sequence
  Synthetic
uccccuuuggggucuauuaggacu

SEQ ID NO: 374715 - RNA, 18 nt, Artificial Sequence
  Synthetic
uucuggaauguuaggacu

SEQ ID NO: 374716 - RNA, 19 nt, Artificial Sequence
  Synthetic
uuucuggaauguuaggacu

SEQ ID NO: 374717 - RNA, 20 nt, Artificial Sequence
  Synthetic
auuucuggaauguuaggacu

SEQ ID NO: 374718 - RNA, 21 nt, Artificial Sequence
  Synthetic
aauuucuggaauguuaggacu

SEQ ID NO: 374719 - RNA, 22 nt, Artificial Sequence
  Synthetic
aaauuucuggaauguuaggacu

SEQ ID NO: 374720 - RNA, 23 nt, Artificial Sequence
  Synthetic
gaaauuucuggaauguuaggacu

SEQ ID NO: 374721 - RNA, 24 nt, Artificial Sequence
  Synthetic
ugaaauuucuggaauguuaggacu

SEQ ID NO: 374722 - RNA, 18 nt, Artificial Sequence
  Synthetic
aaccuacacaaagggacu

SEQ ID NO: 374723 - RNA, 19 nt, Artificial Sequence
  Synthetic
aaaccuacacaaagggacu

SEQ ID NO: 374724 - RNA, 20 nt, Artificial Sequence
  Synthetic
caaaccuacacaaagggacu

SEQ ID NO: 374725 - RNA, 21 nt, Artificial Sequence
  Synthetic
ccaaaccuacacaaagggacu

SEQ ID NO: 374726 - RNA, 22 nt, Artificial Sequence
  Synthetic
uccaaaccuacacaaagggacu

SEQ ID NO: 374727 - RNA, 23 nt, Artificial Sequence
  Synthetic
uuccaaaccuacacaaagggacu

SEQ ID NO: 374728 - RNA, 24 nt, Artificial Sequence
  Synthetic
uuuccaaaccuacacaaagggacu

SEQ ID NO: 374729 - RNA, 18 nt, Artificial Sequence
  Synthetic
gaugccuguugggggacu

SEQ ID NO: 374730 - RNA, 19 nt, Artificial Sequence
  Synthetic
agaugccuguugggggacu

SEQ ID NO: 374731 - RNA, 20 nt, Artificial Sequence
  Synthetic
aagaugccuguugggggacu

SEQ ID NO: 374732 - RNA, 21 nt, Artificial Sequence
  Synthetic
aaagaugccuguugggggacu

SEQ ID NO: 374733 - RNA, 22 nt, Artificial Sequence
  Synthetic
gaaagaugccuguugggggacu

SEQ ID NO: 374734 - RNA, 23 nt, Artificial Sequence
  Synthetic
agaaagaugccuguugggggacu

SEQ ID NO: 374735 - RNA, 24 nt, Artificial Sequence
  Synthetic
aagaaagaugccuguugggggacu

SEQ ID NO: 374736 - RNA, 18 nt, Artificial Sequence
  Synthetic
agauuuuugaaugggacu

SEQ ID NO: 374737 - RNA, 19 nt, Artificial Sequence
  Synthetic
uagauuuuugaaugggacu

SEQ ID NO: 374738 - RNA, 20 nt, Artificial Sequence
  Synthetic
guagauuuuugaaugggacu

SEQ ID NO: 374739 - RNA, 21 nt, Artificial Sequence
  Synthetic
uguagauuuuugaaugggacu

SEQ ID NO: 374740 - RNA, 22 nt, Artificial Sequence
  Synthetic
uuguagauuuuugaaugggacu

SEQ ID NO: 374741 - RNA, 23 nt, Artificial Sequence
  Synthetic
uuuguagauuuuugaaugggacu

SEQ ID NO: 374742 - RNA, 24 nt, Artificial Sequence
  Synthetic
guuuguagauuuuugaaugggacu

SEQ ID NO: 374743 - RNA, 18 nt, Artificial Sequence
  Synthetic
aucucuggggaugggacu

SEQ ID NO: 374744 - RNA, 19 nt, Artificial Sequence
  Synthetic
aaucucuggggaugggacu

SEQ ID NO: 374745 - RNA, 20 nt, Artificial Sequence
  Synthetic
gaaucucuggggaugggacu

SEQ ID NO: 374746 - RNA, 21 nt, Artificial Sequence
  Synthetic
agaaucucuggggaugggacu

SEQ ID NO: 374747 - RNA, 22 nt, Artificial Sequence
  Synthetic
cagaaucucuggggaugggacu

SEQ ID NO: 374748 - RNA, 23 nt, Artificial Sequence
  Synthetic
ucagaaucucuggggaugggacu

SEQ ID NO: 374749 - RNA, 24 nt, Artificial Sequence
  Synthetic
aucagaaucucuggggaugggacu

SEQ ID NO: 374750 - RNA, 18 nt, Artificial Sequence
  Synthetic
acgaagaaagaauggacu

SEQ ID NO: 374751 - RNA, 19 nt, Artificial Sequence
  Synthetic
aacgaagaaagaauggacu

SEQ ID NO: 374752 - RNA, 20 nt, Artificial Sequence
  Synthetic
aaacgaagaaagaauggacu

SEQ ID NO: 374753 - RNA, 21 nt, Artificial Sequence
  Synthetic
aaaacgaagaaagaauggacu

SEQ ID NO: 374754 - RNA, 22 nt, Artificial Sequence
  Synthetic
uaaaacgaagaaagaauggacu

SEQ ID NO: 374755 - RNA, 23 nt, Artificial Sequence
  Synthetic
auaaaacgaagaaagaauggacu

SEQ ID NO: 374756 - RNA, 24 nt, Artificial Sequence
  Synthetic
cauaaaacgaagaaagaauggacu

SEQ ID NO: 374757 - RNA, 18 nt, Artificial Sequence
  Synthetic
agagugguagaauggacu

SEQ ID NO: 374758 - RNA, 19 nt, Artificial Sequence
  Synthetic
cagagugguagaauggacu

SEQ ID NO: 374759 - RNA, 20 nt, Artificial Sequence
  Synthetic
acagagugguagaauggacu

SEQ ID NO: 374760 - RNA, 21 nt, Artificial Sequence
  Synthetic
gacagagugguagaauggacu

SEQ ID NO: 374761 - RNA, 22 nt, Artificial Sequence
  Synthetic
agacagagugguagaauggacu

SEQ ID NO: 374762 - RNA, 23 nt, Artificial Sequence
  Synthetic
cagacagagugguagaauggacu

SEQ ID NO: 374763 - RNA, 24 nt, Artificial Sequence
  Synthetic
gcagacagagugguagaauggacu

SEQ ID NO: 374764 - RNA, 18 nt, Artificial Sequence
  Synthetic
gcugcugguccauggacu

SEQ ID NO: 374765 - RNA, 19 nt, Artificial Sequence
  Synthetic
ugcugcugguccauggacu

SEQ ID NO: 374766 - RNA, 20 nt, Artificial Sequence
  Synthetic
gugcugcugguccauggacu

SEQ ID NO: 374767 - RNA, 21 nt, Artificial Sequence
  Synthetic
ggugcugcugguccauggacu

SEQ ID NO: 374768 - RNA, 22 nt, Artificial Sequence
  Synthetic
uggugcugcugguccauggacu

SEQ ID NO: 374769 - RNA, 23 nt, Artificial Sequence
  Synthetic
cuggugcugcugguccauggacu

SEQ ID NO: 374770 - RNA, 24 nt, Artificial Sequence
  Synthetic
gcuggugcugcugguccauggacu

SEQ ID NO: 374771 - RNA, 18 nt, Artificial Sequence
  Synthetic
agaacaaguaacuggacu

SEQ ID NO: 374772 - RNA, 19 nt, Artificial Sequence
  Synthetic
cagaacaaguaacuggacu

SEQ ID NO: 374773 - RNA, 20 nt, Artificial Sequence
  Synthetic
ccagaacaaguaacuggacu

SEQ ID NO: 374774 - RNA, 21 nt, Artificial Sequence
  Synthetic
gccagaacaaguaacuggacu

SEQ ID NO: 374775 - RNA, 22 nt, Artificial Sequence
  Synthetic
agccagaacaaguaacuggacu

SEQ ID NO: 374776 - RNA, 23 nt, Artificial Sequence
  Synthetic
uagccagaacaaguaacuggacu

SEQ ID NO: 374777 - RNA, 24 nt, Artificial Sequence
  Synthetic
auagccagaacaaguaacuggacu

SEQ ID NO: 374778 - RNA, 18 nt, Artificial Sequence
  Synthetic
acacaaaaagacuggacu

SEQ ID NO: 374779 - RNA, 19 nt, Artificial Sequence
  Synthetic
uacacaaaaagacuggacu

SEQ ID NO: 374780 - RNA, 20 nt, Artificial Sequence
  Synthetic
uuacacaaaaagacuggacu

SEQ ID NO: 374781 - RNA, 21 nt, Artificial Sequence
  Synthetic
auuacacaaaaagacuggacu

SEQ ID NO: 374782 - RNA, 22 nt, Artificial Sequence
  Synthetic
gauuacacaaaaagacuggacu

SEQ ID NO: 374783 - RNA, 23 nt, Artificial Sequence
  Synthetic
ugauuacacaaaaagacuggacu

SEQ ID NO: 374784 - RNA, 24 nt, Artificial Sequence
  Synthetic
cugauuacacaaaaagacuggacu

SEQ ID NO: 374785 - RNA, 18 nt, Artificial Sequence
  Synthetic
gugguuaaaugcuggacu

SEQ ID NO: 374786 - RNA, 19 nt, Artificial Sequence
  Synthetic
agugguuaaaugcuggacu

SEQ ID NO: 374787 - RNA, 20 nt, Artificial Sequence
  Synthetic
aagugguuaaaugcuggacu

SEQ ID NO: 374788 - RNA, 21 nt, Artificial Sequence
  Synthetic
uaagugguuaaaugcuggacu

SEQ ID NO: 374789 - RNA, 22 nt, Artificial Sequence
  Synthetic
uuaagugguuaaaugcuggacu

SEQ ID NO: 374790 - RNA, 23 nt, Artificial Sequence
  Synthetic
guuaagugguuaaaugcuggacu

SEQ ID NO: 374791 - RNA, 24 nt, Artificial Sequence
  Synthetic
gguuaagugguuaaaugcuggacu

SEQ ID NO: 374792 - RNA, 18 nt, Artificial Sequence
  Synthetic
uacauguagguguggacu

SEQ ID NO: 374793 - RNA, 19 nt, Artificial Sequence
  Synthetic
auacauguagguguggacu

SEQ ID NO: 374794 - RNA, 20 nt, Artificial Sequence
  Synthetic
gauacauguagguguggacu

SEQ ID NO: 374795 - RNA, 21 nt, Artificial Sequence
  Synthetic
ugauacauguagguguggacu

SEQ ID NO: 374796 - RNA, 22 nt, Artificial Sequence
  Synthetic
cugauacauguagguguggacu

SEQ ID NO: 374797 - RNA, 23 nt, Artificial Sequence
  Synthetic
ucugauacauguagguguggacu

SEQ ID NO: 374798 - RNA, 24 nt, Artificial Sequence
  Synthetic
gucugauacauguagguguggacu

SEQ ID NO: 374799 - RNA, 18 nt, Artificial Sequence
  Synthetic
ggugaaguguuguggacu

SEQ ID NO: 374800 - RNA, 19 nt, Artificial Sequence
  Synthetic
gggugaaguguuguggacu

SEQ ID NO: 374801 - RNA, 20 nt, Artificial Sequence
  Synthetic
agggugaaguguuguggacu

SEQ ID NO: 374802 - RNA, 21 nt, Artificial Sequence
  Synthetic
gagggugaaguguuguggacu

SEQ ID NO: 374803 - RNA, 22 nt, Artificial Sequence
  Synthetic
ugagggugaaguguuguggacu

SEQ ID NO: 374804 - RNA, 23 nt, Artificial Sequence
  Synthetic
augagggugaaguguuguggacu

SEQ ID NO: 374805 - RNA, 24 nt, Artificial Sequence
  Synthetic
aaugagggugaaguguuguggacu

SEQ ID NO: 374806 - RNA, 18 nt, Artificial Sequence
  Synthetic
cugguuauuguuuggacu

SEQ ID NO: 374807 - RNA, 19 nt, Artificial Sequence
  Synthetic
ccugguuauuguuuggacu

SEQ ID NO: 374808 - RNA, 20 nt, Artificial Sequence
  Synthetic
gccugguuauuguuuggacu

SEQ ID NO: 374809 - RNA, 21 nt, Artificial Sequence
  Synthetic
ggccugguuauuguuuggacu

SEQ ID NO: 374810 - RNA, 22 nt, Artificial Sequence
  Synthetic
aggccugguuauuguuuggacu

SEQ ID NO: 374811 - RNA, 23 nt, Artificial Sequence
  Synthetic
aaggccugguuauuguuuggacu

SEQ ID NO: 374812 - RNA, 24 nt, Artificial Sequence
  Synthetic
caaggccugguuauuguuuggacu

SEQ ID NO: 374813 - RNA, 18 nt, Artificial Sequence
  Synthetic
agacccauuuuuuggacu

SEQ ID NO: 374814 - RNA, 19 nt, Artificial Sequence
  Synthetic
gagacccauuuuuuggacu

SEQ ID NO: 374815 - RNA, 20 nt, Artificial Sequence
  Synthetic
ugagacccauuuuuuggacu

SEQ ID NO: 374816 - RNA, 21 nt, Artificial Sequence
  Synthetic
gugagacccauuuuuuggacu

SEQ ID NO: 374817 - RNA, 22 nt, Artificial Sequence
  Synthetic
ugugagacccauuuuuuggacu

SEQ ID NO: 374818 - RNA, 23 nt, Artificial Sequence
  Synthetic
uugugagacccauuuuuuggacu

SEQ ID NO: 374819 - RNA, 24 nt, Artificial Sequence
  Synthetic
cuugugagacccauuuuuuggacu

SEQ ID NO: 374820 - RNA, 18 nt, Artificial Sequence
  Synthetic
agcccagccaaaaugacu

SEQ ID NO: 374821 - RNA, 19 nt, Artificial Sequence
  Synthetic
uagcccagccaaaaugacu

SEQ ID NO: 374822 - RNA, 20 nt, Artificial Sequence
  Synthetic
guagcccagccaaaaugacu

SEQ ID NO: 374823 - RNA, 21 nt, Artificial Sequence
  Synthetic
aguagcccagccaaaaugacu

SEQ ID NO: 374824 - RNA, 22 nt, Artificial Sequence
  Synthetic
gaguagcccagccaaaaugacu

SEQ ID NO: 374825 - RNA, 23 nt, Artificial Sequence
  Synthetic
agaguagcccagccaaaaugacu

SEQ ID NO: 374826 - RNA, 24 nt, Artificial Sequence
  Synthetic
cagaguagcccagccaaaaugacu

SEQ ID NO: 374827 - RNA, 18 nt, Artificial Sequence
  Synthetic
agugaggcauaaaugacu

SEQ ID NO: 374828 - RNA, 19 nt, Artificial Sequence
  Synthetic
uagugaggcauaaaugacu

SEQ ID NO: 374829 - RNA, 20 nt, Artificial Sequence
  Synthetic
auagugaggcauaaaugacu

SEQ ID NO: 374830 - RNA, 21 nt, Artificial Sequence
  Synthetic
aauagugaggcauaaaugacu

SEQ ID NO: 374831 - RNA, 22 nt, Artificial Sequence
  Synthetic
uaauagugaggcauaaaugacu

SEQ ID NO: 374832 - RNA, 23 nt, Artificial Sequence
  Synthetic
uuaauagugaggcauaaaugacu

SEQ ID NO: 374833 - RNA, 24 nt, Artificial Sequence
  Synthetic
cuuaauagugaggcauaaaugacu

SEQ ID NO: 374834 - RNA, 18 nt, Artificial Sequence
  Synthetic
aaauuugaguaaaugacu

SEQ ID NO: 374835 - RNA, 19 nt, Artificial Sequence
  Synthetic
aaaauuugaguaaaugacu

SEQ ID NO: 374836 - RNA, 20 nt, Artificial Sequence
  Synthetic
uaaaauuugaguaaaugacu

SEQ ID NO: 374837 - RNA, 21 nt, Artificial Sequence
  Synthetic
cuaaaauuugaguaaaugacu

SEQ ID NO: 374838 - RNA, 22 nt, Artificial Sequence
  Synthetic
ucuaaaauuugaguaaaugacu

SEQ ID NO: 374839 - RNA, 23 nt, Artificial Sequence
  Synthetic
uucuaaaauuugaguaaaugacu

SEQ ID NO: 374840 - RNA, 24 nt, Artificial Sequence
  Synthetic
guucuaaaauuugaguaaaugacu

SEQ ID NO: 374841 - RNA, 18 nt, Artificial Sequence
  Synthetic
agaaagaacacaaugacu

SEQ ID NO: 374842 - RNA, 19 nt, Artificial Sequence
  Synthetic
aagaaagaacacaaugacu

SEQ ID NO: 374843 - RNA, 20 nt, Artificial Sequence
  Synthetic
caagaaagaacacaaugacu

SEQ ID NO: 374844 - RNA, 21 nt, Artificial Sequence
  Synthetic
ucaagaaagaacacaaugacu

SEQ ID NO: 374845 - RNA, 22 nt, Artificial Sequence
  Synthetic
gucaagaaagaacacaaugacu

SEQ ID NO: 374846 - RNA, 23 nt, Artificial Sequence
  Synthetic
agucaagaaagaacacaaugacu

SEQ ID NO: 374847 - RNA, 24 nt, Artificial Sequence
  Synthetic
uagucaagaaagaacacaaugacu

SEQ ID NO: 374848 - RNA, 18 nt, Artificial Sequence
  Synthetic
caacacucaucaaugacu

SEQ ID NO: 374849 - RNA, 19 nt, Artificial Sequence
  Synthetic
ccaacacucaucaaugacu

SEQ ID NO: 374850 - RNA, 20 nt, Artificial Sequence
  Synthetic
uccaacacucaucaaugacu

SEQ ID NO: 374851 - RNA, 21 nt, Artificial Sequence
  Synthetic
uuccaacacucaucaaugacu

SEQ ID NO: 374852 - RNA, 22 nt, Artificial Sequence
  Synthetic
auuccaacacucaucaaugacu

SEQ ID NO: 374853 - RNA, 23 nt, Artificial Sequence
  Synthetic
aauuccaacacucaucaaugacu

SEQ ID NO: 374854 - RNA, 24 nt, Artificial Sequence
  Synthetic
uaauuccaacacucaucaaugacu

SEQ ID NO: 374855 - RNA, 18 nt, Artificial Sequence
  Synthetic
caaaggagaagaaugacu

SEQ ID NO: 374856 - RNA, 19 nt, Artificial Sequence
  Synthetic
acaaaggagaagaaugacu

SEQ ID NO: 374857 - RNA, 20 nt, Artificial Sequence
  Synthetic
uacaaaggagaagaaugacu

SEQ ID NO: 374858 - RNA, 21 nt, Artificial Sequence
  Synthetic
cuacaaaggagaagaaugacu

SEQ ID NO: 374859 - RNA, 22 nt, Artificial Sequence
  Synthetic
gcuacaaaggagaagaaugacu

SEQ ID NO: 374860 - RNA, 23 nt, Artificial Sequence
  Synthetic
ggcuacaaaggagaagaaugacu

SEQ ID NO: 374861 - RNA, 24 nt, Artificial Sequence
  Synthetic
aggcuacaaaggagaagaaugacu

SEQ ID NO: 374862 - RNA, 18 nt, Artificial Sequence
  Synthetic
aagauuuauuuaaugacu

SEQ ID NO: 374863 - RNA, 19 nt, Artificial Sequence
  Synthetic
uaagauuuauuuaaugacu

SEQ ID NO: 374864 - RNA, 20 nt, Artificial Sequence
  Synthetic
uuaagauuuauuuaaugacu

SEQ ID NO: 374865 - RNA, 21 nt, Artificial Sequence
  Synthetic
auuaagauuuauuuaaugacu

SEQ ID NO: 374866 - RNA, 22 nt, Artificial Sequence
  Synthetic
uauuaagauuuauuuaaugacu

SEQ ID NO: 374867 - RNA, 23 nt, Artificial Sequence
  Synthetic
auauuaagauuuauuuaaugacu

SEQ ID NO: 374868 - RNA, 24 nt, Artificial Sequence
  Synthetic
cauauuaagauuuauuuaaugacu

SEQ ID NO: 374869 - RNA, 18 nt, Artificial Sequence
  Synthetic
augacaaagaacaugacu

SEQ ID NO: 374870 - RNA, 19 nt, Artificial Sequence
  Synthetic
caugacaaagaacaugacu

SEQ ID NO: 374871 - RNA, 20 nt, Artificial Sequence
  Synthetic
ucaugacaaagaacaugacu

SEQ ID NO: 374872 - RNA, 21 nt, Artificial Sequence
  Synthetic
cucaugacaaagaacaugacu

SEQ ID NO: 374873 - RNA, 22 nt, Artificial Sequence
  Synthetic
ucucaugacaaagaacaugacu

SEQ ID NO: 374874 - RNA, 23 nt, Artificial Sequence
  Synthetic
aucucaugacaaagaacaugacu

SEQ ID NO: 374875 - RNA, 24 nt, Artificial Sequence
  Synthetic
aaucucaugacaaagaacaugacu

SEQ ID NO: 374876 - RNA, 18 nt, Artificial Sequence
  Synthetic
ucacagucucacaugacu

SEQ ID NO: 374877 - RNA, 19 nt, Artificial Sequence
  Synthetic
cucacagucucacaugacu

SEQ ID NO: 374878 - RNA, 20 nt, Artificial Sequence
  Synthetic
acucacagucucacaugacu

SEQ ID NO: 374879 - RNA, 21 nt, Artificial Sequence
  Synthetic
gacucacagucucacaugacu

SEQ ID NO: 374880 - RNA, 22 nt, Artificial Sequence
  Synthetic
ggacucacagucucacaugacu

SEQ ID NO: 374881 - RNA, 23 nt, Artificial Sequence
  Synthetic
uggacucacagucucacaugacu

SEQ ID NO: 374882 - RNA, 24 nt, Artificial Sequence
  Synthetic
auggacucacagucucacaugacu

SEQ ID NO: 374883 - RNA, 18 nt, Artificial Sequence
  Synthetic
auagcuaugaauaugacu

SEQ ID NO: 374884 - RNA, 19 nt, Artificial Sequence
  Synthetic
aauagcuaugaauaugacu

SEQ ID NO: 374885 - RNA, 20 nt, Artificial Sequence
  Synthetic
aaauagcuaugaauaugacu

SEQ ID NO: 374886 - RNA, 21 nt, Artificial Sequence
  Synthetic
aaaauagcuaugaauaugacu

SEQ ID NO: 374887 - RNA, 22 nt, Artificial Sequence
  Synthetic
aaaaauagcuaugaauaugacu

SEQ ID NO: 374888 - RNA, 23 nt, Artificial Sequence
  Synthetic
uaaaaauagcuaugaauaugacu

SEQ ID NO: 374889 - RNA, 24 nt, Artificial Sequence
  Synthetic
uuaaaaauagcuaugaauaugacu

SEQ ID NO: 374890 - RNA, 18 nt, Artificial Sequence
  Synthetic
cauacccaguaacugacu

SEQ ID NO: 374891 - RNA, 19 nt, Artificial Sequence
  Synthetic
ccauacccaguaacugacu

SEQ ID NO: 374892 - RNA, 20 nt, Artificial Sequence
  Synthetic
gccauacccaguaacugacu

SEQ ID NO: 374893 - RNA, 21 nt, Artificial Sequence
  Synthetic
agccauacccaguaacugacu

SEQ ID NO: 374894 - RNA, 22 nt, Artificial Sequence
  Synthetic
uagccauacccaguaacugacu

SEQ ID NO: 374895 - RNA, 23 nt, Artificial Sequence
  Synthetic
uuagccauacccaguaacugacu

SEQ ID NO: 374896 - RNA, 24 nt, Artificial Sequence
  Synthetic
cuuagccauacccaguaacugacu

SEQ ID NO: 374897 - RNA, 18 nt, Artificial Sequence
  Synthetic
agaguuaaaauacugacu

SEQ ID NO: 374898 - RNA, 19 nt, Artificial Sequence
  Synthetic
cagaguuaaaauacugacu

SEQ ID NO: 374899 - RNA, 20 nt, Artificial Sequence
  Synthetic
gcagaguuaaaauacugacu

SEQ ID NO: 374900 - RNA, 21 nt, Artificial Sequence
  Synthetic
agcagaguuaaaauacugacu

SEQ ID NO: 374901 - RNA, 22 nt, Artificial Sequence
  Synthetic
uagcagaguuaaaauacugacu

SEQ ID NO: 374902 - RNA, 23 nt, Artificial Sequence
  Synthetic
guagcagaguuaaaauacugacu

SEQ ID NO: 374903 - RNA, 24 nt, Artificial Sequence
  Synthetic
aguagcagaguuaaaauacugacu

SEQ ID NO: 374904 - RNA, 18 nt, Artificial Sequence
  Synthetic
caucaaauuuuacugacu

SEQ ID NO: 374905 - RNA, 19 nt, Artificial Sequence
  Synthetic
acaucaaauuuuacugacu

SEQ ID NO: 374906 - RNA, 20 nt, Artificial Sequence
  Synthetic
uacaucaaauuuuacugacu

SEQ ID NO: 374907 - RNA, 21 nt, Artificial Sequence
  Synthetic
guacaucaaauuuuacugacu

SEQ ID NO: 374908 - RNA, 22 nt, Artificial Sequence
  Synthetic
uguacaucaaauuuuacugacu

SEQ ID NO: 374909 - RNA, 23 nt, Artificial Sequence
  Synthetic
uuguacaucaaauuuuacugacu

SEQ ID NO: 374910 - RNA, 24 nt, Artificial Sequence
  Synthetic
auuguacaucaaauuuuacugacu

SEQ ID NO: 374911 - RNA, 18 nt, Artificial Sequence
  Synthetic
acuugggaaaaccugacu

SEQ ID NO: 374912 - RNA, 19 nt, Artificial Sequence
  Synthetic
gacuugggaaaaccugacu

SEQ ID NO: 374913 - RNA, 20 nt, Artificial Sequence
  Synthetic
ugacuugggaaaaccugacu

SEQ ID NO: 374914 - RNA, 21 nt, Artificial Sequence
  Synthetic
cugacuugggaaaaccugacu

SEQ ID NO: 374915 - RNA, 22 nt, Artificial Sequence
  Synthetic
ucugacuugggaaaaccugacu

SEQ ID NO: 374916 - RNA, 23 nt, Artificial Sequence
  Synthetic
gucugacuugggaaaaccugacu

SEQ ID NO: 374917 - RNA, 24 nt, Artificial Sequence
  Synthetic
agucugacuugggaaaaccugacu

SEQ ID NO: 374918 - RNA, 18 nt, Artificial Sequence
  Synthetic
uaaugaccaucccugacu

SEQ ID NO: 374919 - RNA, 19 nt, Artificial Sequence
  Synthetic
cuaaugaccaucccugacu

SEQ ID NO: 374920 - RNA, 20 nt, Artificial Sequence
  Synthetic
acuaaugaccaucccugacu

SEQ ID NO: 374921 - RNA, 21 nt, Artificial Sequence
  Synthetic
cacuaaugaccaucccugacu

SEQ ID NO: 374922 - RNA, 22 nt, Artificial Sequence
  Synthetic
ucacuaaugaccaucccugacu

SEQ ID NO: 374923 - RNA, 23 nt, Artificial Sequence
  Synthetic
aucacuaaugaccaucccugacu

SEQ ID NO: 374924 - RNA, 24 nt, Artificial Sequence
  Synthetic
caucacuaaugaccaucccugacu

SEQ ID NO: 374925 - RNA, 18 nt, Artificial Sequence
  Synthetic
cccccgugccuccugacu

SEQ ID NO: 374926 - RNA, 19 nt, Artificial Sequence
  Synthetic
acccccgugccuccugacu

SEQ ID NO: 374927 - RNA, 20 nt, Artificial Sequence
  Synthetic
gacccccgugccuccugacu

SEQ ID NO: 374928 - RNA, 21 nt, Artificial Sequence
  Synthetic
ugacccccgugccuccugacu

SEQ ID NO: 374929 - RNA, 22 nt, Artificial Sequence
  Synthetic
cugacccccgugccuccugacu

SEQ ID NO: 374930 - RNA, 23 nt, Artificial Sequence
  Synthetic
ccugacccccgugccuccugacu

SEQ ID NO: 374931 - RNA, 24 nt, Artificial Sequence
  Synthetic
uccugacccccgugccuccugacu

SEQ ID NO: 374932 - RNA, 18 nt, Artificial Sequence
  Synthetic
uaaaguuccuuccugacu

SEQ ID NO: 374933 - RNA, 19 nt, Artificial Sequence
  Synthetic
auaaaguuccuuccugacu

SEQ ID NO: 374934 - RNA, 20 nt, Artificial Sequence
  Synthetic
uauaaaguuccuuccugacu

SEQ ID NO: 374935 - RNA, 21 nt, Artificial Sequence
  Synthetic
auauaaaguuccuuccugacu

SEQ ID NO: 374936 - RNA, 22 nt, Artificial Sequence
  Synthetic
cauauaaaguuccuuccugacu

SEQ ID NO: 374937 - RNA, 23 nt, Artificial Sequence
  Synthetic
gcauauaaaguuccuuccugacu

SEQ ID NO: 374938 - RNA, 24 nt, Artificial Sequence
  Synthetic
ggcauauaaaguuccuuccugacu

SEQ ID NO: 374939 - RNA, 18 nt, Artificial Sequence
  Synthetic
acgcuaaauuuccugacu

SEQ ID NO: 374940 - RNA, 19 nt, Artificial Sequence
  Synthetic
cacgcuaaauuuccugacu

SEQ ID NO: 374941 - RNA, 20 nt, Artificial Sequence
  Synthetic
ccacgcuaaauuuccugacu

SEQ ID NO: 374942 - RNA, 21 nt, Artificial Sequence
  Synthetic
gccacgcuaaauuuccugacu

SEQ ID NO: 374943 - RNA, 22 nt, Artificial Sequence
  Synthetic
agccacgcuaaauuuccugacu

SEQ ID NO: 374944 - RNA, 23 nt, Artificial Sequence
  Synthetic
aagccacgcuaaauuuccugacu

SEQ ID NO: 374945 - RNA, 24 nt, Artificial Sequence
  Synthetic
aaagccacgcuaaauuuccugacu

SEQ ID NO: 374946 - RNA, 18 nt, Artificial Sequence
  Synthetic
gaggaccacaagcugacu

SEQ ID NO: 374947 - RNA, 19 nt, Artificial Sequence
  Synthetic
ggaggaccacaagcugacu

SEQ ID NO: 374948 - RNA, 20 nt, Artificial Sequence
  Synthetic
gggaggaccacaagcugacu

SEQ ID NO: 374949 - RNA, 21 nt, Artificial Sequence
  Synthetic
ugggaggaccacaagcugacu

SEQ ID NO: 374950 - RNA, 22 nt, Artificial Sequence
  Synthetic
uugggaggaccacaagcugacu

SEQ ID NO: 374951 - RNA, 23 nt, Artificial Sequence
  Synthetic
auugggaggaccacaagcugacu

SEQ ID NO: 374952 - RNA, 24 nt, Artificial Sequence
  Synthetic
gauugggaggaccacaagcugacu

SEQ ID NO: 374953 - RNA, 18 nt, Artificial Sequence
  Synthetic
aggaauacagagcugacu

SEQ ID NO: 374954 - RNA, 19 nt, Artificial Sequence
  Synthetic
uaggaauacagagcugacu

SEQ ID NO: 374955 - RNA, 20 nt, Artificial Sequence
  Synthetic
cuaggaauacagagcugacu

SEQ ID NO: 374956 - RNA, 21 nt, Artificial Sequence
  Synthetic
gcuaggaauacagagcugacu

SEQ ID NO: 374957 - RNA, 22 nt, Artificial Sequence
  Synthetic
ugcuaggaauacagagcugacu

SEQ ID NO: 374958 - RNA, 23 nt, Artificial Sequence
  Synthetic
cugcuaggaauacagagcugacu

SEQ ID NO: 374959 - RNA, 24 nt, Artificial Sequence
  Synthetic
gcugcuaggaauacagagcugacu

SEQ ID NO: 374960 - RNA, 18 nt, Artificial Sequence
  Synthetic
uacaugguguaucugacu

SEQ ID NO: 374961 - RNA, 19 nt, Artificial Sequence
  Synthetic
cuacaugguguaucugacu

SEQ ID NO: 374962 - RNA, 20 nt, Artificial Sequence
  Synthetic
ccuacaugguguaucugacu

SEQ ID NO: 374963 - RNA, 21 nt, Artificial Sequence
  Synthetic
gccuacaugguguaucugacu

SEQ ID NO: 374964 - RNA, 22 nt, Artificial Sequence
  Synthetic
ugccuacaugguguaucugacu

SEQ ID NO: 374965 - RNA, 23 nt, Artificial Sequence
  Synthetic
uugccuacaugguguaucugacu

SEQ ID NO: 374966 - RNA, 24 nt, Artificial Sequence
  Synthetic
uuugccuacaugguguaucugacu

SEQ ID NO: 374967 - RNA, 18 nt, Artificial Sequence
  Synthetic
gggauaccuagucugacu

SEQ ID NO: 374968 - RNA, 19 nt, Artificial Sequence
  Synthetic
ugggauaccuagucugacu

SEQ ID NO: 374969 - RNA, 20 nt, Artificial Sequence
  Synthetic
cugggauaccuagucugacu

SEQ ID NO: 374970 - RNA, 21 nt, Artificial Sequence
  Synthetic
ucugggauaccuagucugacu

SEQ ID NO: 374971 - RNA, 22 nt, Artificial Sequence
  Synthetic
cucugggauaccuagucugacu

SEQ ID NO: 374972 - RNA, 23 nt, Artificial Sequence
  Synthetic
ccucugggauaccuagucugacu

SEQ ID NO: 374973 - RNA, 24 nt, Artificial Sequence
  Synthetic
accucugggauaccuagucugacu

SEQ ID NO: 374974 - RNA, 18 nt, Artificial Sequence
  Synthetic
gaaaauguggaagugacu

SEQ ID NO: 374975 - RNA, 19 nt, Artificial Sequence
  Synthetic
ugaaaauguggaagugacu

SEQ ID NO: 374976 - RNA, 20 nt, Artificial Sequence
  Synthetic
cugaaaauguggaagugacu

SEQ ID NO: 374977 - RNA, 21 nt, Artificial Sequence
  Synthetic
ccugaaaauguggaagugacu

SEQ ID NO: 374978 - RNA, 22 nt, Artificial Sequence
  Synthetic
accugaaaauguggaagugacu

SEQ ID NO: 374979 - RNA, 23 nt, Artificial Sequence
  Synthetic
uaccugaaaauguggaagugacu

SEQ ID NO: 374980 - RNA, 24 nt, Artificial Sequence
  Synthetic
auaccugaaaauguggaagugacu

SEQ ID NO: 374981 - RNA, 18 nt, Artificial Sequence
  Synthetic
cauuccuucacagugacu

SEQ ID NO: 374982 - RNA, 19 nt, Artificial Sequence
  Synthetic
gcauuccuucacagugacu

SEQ ID NO: 374983 - RNA, 20 nt, Artificial Sequence
  Synthetic
agcauuccuucacagugacu

SEQ ID NO: 374984 - RNA, 21 nt, Artificial Sequence
  Synthetic
uagcauuccuucacagugacu

SEQ ID NO: 374985 - RNA, 22 nt, Artificial Sequence
  Synthetic
guagcauuccuucacagugacu

SEQ ID NO: 374986 - RNA, 23 nt, Artificial Sequence
  Synthetic
gguagcauuccuucacagugacu

SEQ ID NO: 374987 - RNA, 24 nt, Artificial Sequence
  Synthetic
agguagcauuccuucacagugacu

SEQ ID NO: 374988 - RNA, 18 nt, Artificial Sequence
  Synthetic
agaaaugacaacgugacu

SEQ ID NO: 374989 - RNA, 19 nt, Artificial Sequence
  Synthetic
uagaaaugacaacgugacu

SEQ ID NO: 374990 - RNA, 20 nt, Artificial Sequence
  Synthetic
auagaaaugacaacgugacu

SEQ ID NO: 374991 - RNA, 21 nt, Artificial Sequence
  Synthetic
gauagaaaugacaacgugacu

SEQ ID NO: 374992 - RNA, 22 nt, Artificial Sequence
  Synthetic
agauagaaaugacaacgugacu

SEQ ID NO: 374993 - RNA, 23 nt, Artificial Sequence
  Synthetic
uagauagaaaugacaacgugacu

SEQ ID NO: 374994 - RNA, 24 nt, Artificial Sequence
  Synthetic
auagauagaaaugacaacgugacu

SEQ ID NO: 374995 - RNA, 18 nt, Artificial Sequence
  Synthetic
guugcuaagcaggugacu

SEQ ID NO: 374996 - RNA, 19 nt, Artificial Sequence
  Synthetic
gguugcuaagcaggugacu

SEQ ID NO: 374997 - RNA, 20 nt, Artificial Sequence
  Synthetic
agguugcuaagcaggugacu

SEQ ID NO: 374998 - RNA, 21 nt, Artificial Sequence
  Synthetic
aagguugcuaagcaggugacu

SEQ ID NO: 374999 - RNA, 22 nt, Artificial Sequence
  Synthetic
uaagguugcuaagcaggugacu

SEQ ID NO: 375000 - RNA, 23 nt, Artificial Sequence
  Synthetic
uuaagguugcuaagcaggugacu

SEQ ID NO: 375001 - RNA, 24 nt, Artificial Sequence
  Synthetic
auuaagguugcuaagcaggugacu

SEQ ID NO: 375002 - RNA, 18 nt, Artificial Sequence
  Synthetic
uacuuuuauuaggugacu

SEQ ID NO: 375003 - RNA, 19 nt, Artificial Sequence
  Synthetic
guacuuuuauuaggugacu

SEQ ID NO: 375004 - RNA, 20 nt, Artificial Sequence
  Synthetic
uguacuuuuauuaggugacu

SEQ ID NO: 375005 - RNA, 21 nt, Artificial Sequence
  Synthetic
auguacuuuuauuaggugacu

SEQ ID NO: 375006 - RNA, 22 nt, Artificial Sequence
  Synthetic
aauguacuuuuauuaggugacu

SEQ ID NO: 375007 - RNA, 23 nt, Artificial Sequence
  Synthetic
aaauguacuuuuauuaggugacu

SEQ ID NO: 375008 - RNA, 24 nt, Artificial Sequence
  Synthetic
aaaauguacuuuuauuaggugacu

SEQ ID NO: 375009 - RNA, 18 nt, Artificial Sequence
  Synthetic
aucauaguuugggugacu

SEQ ID NO: 375010 - RNA, 19 nt, Artificial Sequence
  Synthetic
uaucauaguuugggugacu

SEQ ID NO: 375011 - RNA, 20 nt, Artificial Sequence
  Synthetic
auaucauaguuugggugacu

SEQ ID NO: 375012 - RNA, 21 nt, Artificial Sequence
  Synthetic
aauaucauaguuugggugacu

SEQ ID NO: 375013 - RNA, 22 nt, Artificial Sequence
  Synthetic
uaauaucauaguuugggugacu

SEQ ID NO: 375014 - RNA, 23 nt, Artificial Sequence
  Synthetic
auaauaucauaguuugggugacu

SEQ ID NO: 375015 - RNA, 24 nt, Artificial Sequence
  Synthetic
gauaauaucauaguuugggugacu

SEQ ID NO: 375016 - RNA, 18 nt, Artificial Sequence
  Synthetic
auucacaagaaugugacu

SEQ ID NO: 375017 - RNA, 19 nt, Artificial Sequence
  Synthetic
aauucacaagaaugugacu

SEQ ID NO: 375018 - RNA, 20 nt, Artificial Sequence
  Synthetic
gaauucacaagaaugugacu

SEQ ID NO: 375019 - RNA, 21 nt, Artificial Sequence
  Synthetic
agaauucacaagaaugugacu

SEQ ID NO: 375020 - RNA, 22 nt, Artificial Sequence
  Synthetic
cagaauucacaagaaugugacu

SEQ ID NO: 375021 - RNA, 23 nt, Artificial Sequence
  Synthetic
ccagaauucacaagaaugugacu

SEQ ID NO: 375022 - RNA, 24 nt, Artificial Sequence
  Synthetic
gccagaauucacaagaaugugacu

SEQ ID NO: 375023 - RNA, 18 nt, Artificial Sequence
  Synthetic
cuucuaaagagugugacu

SEQ ID NO: 375024 - RNA, 19 nt, Artificial Sequence
  Synthetic
ccuucuaaagagugugacu

SEQ ID NO: 375025 - RNA, 20 nt, Artificial Sequence
  Synthetic
gccuucuaaagagugugacu

SEQ ID NO: 375026 - RNA, 21 nt, Artificial Sequence
  Synthetic
ugccuucuaaagagugugacu

SEQ ID NO: 375027 - RNA, 22 nt, Artificial Sequence
  Synthetic
cugccuucuaaagagugugacu

SEQ ID NO: 375028 - RNA, 23 nt, Artificial Sequence
  Synthetic
ucugccuucuaaagagugugacu

SEQ ID NO: 375029 - RNA, 24 nt, Artificial Sequence
  Synthetic
aucugccuucuaaagagugugacu

SEQ ID NO: 375030 - RNA, 18 nt, Artificial Sequence
  Synthetic
agaguuggucgugugacu

SEQ ID NO: 375031 - RNA, 19 nt, Artificial Sequence
  Synthetic
gagaguuggucgugugacu

SEQ ID NO: 375032 - RNA, 20 nt, Artificial Sequence
  Synthetic
ggagaguuggucgugugacu

SEQ ID NO: 375033 - RNA, 21 nt, Artificial Sequence
  Synthetic
uggagaguuggucgugugacu

SEQ ID NO: 375034 - RNA, 22 nt, Artificial Sequence
  Synthetic
cuggagaguuggucgugugacu

SEQ ID NO: 375035 - RNA, 23 nt, Artificial Sequence
  Synthetic
ccuggagaguuggucgugugacu

SEQ ID NO: 375036 - RNA, 24 nt, Artificial Sequence
  Synthetic
accuggagaguuggucgugugacu

SEQ ID NO: 375037 - RNA, 18 nt, Artificial Sequence
  Synthetic
uccauacacauugugacu

SEQ ID NO: 375038 - RNA, 19 nt, Artificial Sequence
  Synthetic
cuccauacacauugugacu

SEQ ID NO: 375039 - RNA, 20 nt, Artificial Sequence
  Synthetic
ucuccauacacauugugacu

SEQ ID NO: 375040 - RNA, 21 nt, Artificial Sequence
  Synthetic
cucuccauacacauugugacu

SEQ ID NO: 375041 - RNA, 22 nt, Artificial Sequence
  Synthetic
ccucuccauacacauugugacu

SEQ ID NO: 375042 - RNA, 23 nt, Artificial Sequence
  Synthetic
uccucuccauacacauugugacu

SEQ ID NO: 375043 - RNA, 24 nt, Artificial Sequence
  Synthetic
cuccucuccauacacauugugacu

SEQ ID NO: 375044 - RNA, 18 nt, Artificial Sequence
  Synthetic
uaauaaaccauugugacu

SEQ ID NO: 375045 - RNA, 19 nt, Artificial Sequence
  Synthetic
guaauaaaccauugugacu

SEQ ID NO: 375046 - RNA, 20 nt, Artificial Sequence
  Synthetic
gguaauaaaccauugugacu

SEQ ID NO: 375047 - RNA, 21 nt, Artificial Sequence
  Synthetic
ggguaauaaaccauugugacu

SEQ ID NO: 375048 - RNA, 22 nt, Artificial Sequence
  Synthetic
aggguaauaaaccauugugacu

SEQ ID NO: 375049 - RNA, 23 nt, Artificial Sequence
  Synthetic
gaggguaauaaaccauugugacu

SEQ ID NO: 375050 - RNA, 24 nt, Artificial Sequence
  Synthetic
agaggguaauaaaccauugugacu

SEQ ID NO: 375051 - RNA, 18 nt, Artificial Sequence
  Synthetic
uuacuucucauugugacu

SEQ ID NO: 375052 - RNA, 19 nt, Artificial Sequence
  Synthetic
guuacuucucauugugacu

SEQ ID NO: 375053 - RNA, 20 nt, Artificial Sequence
  Synthetic
uguuacuucucauugugacu

SEQ ID NO: 375054 - RNA, 21 nt, Artificial Sequence
  Synthetic
uuguuacuucucauugugacu

SEQ ID NO: 375055 - RNA, 22 nt, Artificial Sequence
  Synthetic
uuuguuacuucucauugugacu

SEQ ID NO: 375056 - RNA, 23 nt, Artificial Sequence
  Synthetic
guuuguuacuucucauugugacu

SEQ ID NO: 375057 - RNA, 24 nt, Artificial Sequence
  Synthetic
aguuuguuacuucucauugugacu

SEQ ID NO: 375058 - RNA, 18 nt, Artificial Sequence
  Synthetic
uuaaaaaguuuugugacu

SEQ ID NO: 375059 - RNA, 19 nt, Artificial Sequence
  Synthetic
uuuaaaaaguuuugugacu

SEQ ID NO: 375060 - RNA, 20 nt, Artificial Sequence
  Synthetic
guuuaaaaaguuuugugacu

SEQ ID NO: 375061 - RNA, 21 nt, Artificial Sequence
  Synthetic
aguuuaaaaaguuuugugacu

SEQ ID NO: 375062 - RNA, 22 nt, Artificial Sequence
  Synthetic
aaguuuaaaaaguuuugugacu

SEQ ID NO: 375063 - RNA, 23 nt, Artificial Sequence
  Synthetic
caaguuuaaaaaguuuugugacu

SEQ ID NO: 375064 - RNA, 24 nt, Artificial Sequence
  Synthetic
ccaaguuuaaaaaguuuugugacu

SEQ ID NO: 375065 - RNA, 18 nt, Artificial Sequence
  Synthetic
uguuucuucucauugacu

SEQ ID NO: 375066 - RNA, 19 nt, Artificial Sequence
  Synthetic
uuguuucuucucauugacu

SEQ ID NO: 375067 - RNA, 20 nt, Artificial Sequence
  Synthetic
cuuguuucuucucauugacu

SEQ ID NO: 375068 - RNA, 21 nt, Artificial Sequence
  Synthetic
gcuuguuucuucucauugacu

SEQ ID NO: 375069 - RNA, 22 nt, Artificial Sequence
  Synthetic
ugcuuguuucuucucauugacu

SEQ ID NO: 375070 - RNA, 23 nt, Artificial Sequence
  Synthetic
augcuuguuucuucucauugacu

SEQ ID NO: 375071 - RNA, 24 nt, Artificial Sequence
  Synthetic
caugcuuguuucuucucauugacu

SEQ ID NO: 375072 - RNA, 18 nt, Artificial Sequence
  Synthetic
agaaaaucuucauugacu

SEQ ID NO: 375073 - RNA, 19 nt, Artificial Sequence
  Synthetic
cagaaaaucuucauugacu

SEQ ID NO: 375074 - RNA, 20 nt, Artificial Sequence
  Synthetic
acagaaaaucuucauugacu

SEQ ID NO: 375075 - RNA, 21 nt, Artificial Sequence
  Synthetic
aacagaaaaucuucauugacu

SEQ ID NO: 375076 - RNA, 22 nt, Artificial Sequence
  Synthetic
uaacagaaaaucuucauugacu

SEQ ID NO: 375077 - RNA, 23 nt, Artificial Sequence
  Synthetic
auaacagaaaaucuucauugacu

SEQ ID NO: 375078 - RNA, 24 nt, Artificial Sequence
  Synthetic
aauaacagaaaaucuucauugacu

SEQ ID NO: 375079 - RNA, 18 nt, Artificial Sequence
  Synthetic
ucuuuuuuuuucuugacu

SEQ ID NO: 375080 - RNA, 19 nt, Artificial Sequence
  Synthetic
uucuuuuuuuuucuugacu

SEQ ID NO: 375081 - RNA, 20 nt, Artificial Sequence
  Synthetic
auucuuuuuuuuucuugacu

SEQ ID NO: 375082 - RNA, 21 nt, Artificial Sequence
  Synthetic
aauucuuuuuuuuucuugacu

SEQ ID NO: 375083 - RNA, 22 nt, Artificial Sequence
  Synthetic
aaauucuuuuuuuuucuugacu

SEQ ID NO: 375084 - RNA, 23 nt, Artificial Sequence
  Synthetic
aaaauucuuuuuuuuucuugacu

SEQ ID NO: 375085 - RNA, 24 nt, Artificial Sequence
  Synthetic
uaaaauucuuuuuuuuucuugacu

SEQ ID NO: 375086 - RNA, 18 nt, Artificial Sequence
  Synthetic
uuaguuuaccuguugacu

SEQ ID NO: 375087 - RNA, 19 nt, Artificial Sequence
  Synthetic
cuuaguuuaccuguugacu

SEQ ID NO: 375088 - RNA, 20 nt, Artificial Sequence
  Synthetic
ucuuaguuuaccuguugacu

SEQ ID NO: 375089 - RNA, 21 nt, Artificial Sequence
  Synthetic
uucuuaguuuaccuguugacu

SEQ ID NO: 375090 - RNA, 22 nt, Artificial Sequence
  Synthetic
guucuuaguuuaccuguugacu

SEQ ID NO: 375091 - RNA, 23 nt, Artificial Sequence
  Synthetic
uguucuuaguuuaccuguugacu

SEQ ID NO: 375092 - RNA, 24 nt, Artificial Sequence
  Synthetic
cuguucuuaguuuaccuguugacu

SEQ ID NO: 375093 - RNA, 18 nt, Artificial Sequence
  Synthetic
uuagcuucacauuugacu

SEQ ID NO: 375094 - RNA, 19 nt, Artificial Sequence
  Synthetic
uuuagcuucacauuugacu

SEQ ID NO: 375095 - RNA, 20 nt, Artificial Sequence
  Synthetic
auuuagcuucacauuugacu

SEQ ID NO: 375096 - RNA, 21 nt, Artificial Sequence
  Synthetic
cauuuagcuucacauuugacu

SEQ ID NO: 375097 - RNA, 22 nt, Artificial Sequence
  Synthetic
gcauuuagcuucacauuugacu

SEQ ID NO: 375098 - RNA, 23 nt, Artificial Sequence
  Synthetic
ugcauuuagcuucacauuugacu

SEQ ID NO: 375099 - RNA, 24 nt, Artificial Sequence
  Synthetic
gugcauuuagcuucacauuugacu

SEQ ID NO: 375100 - RNA, 18 nt, Artificial Sequence
  Synthetic
augacauuuucuuugacu

SEQ ID NO: 375101 - RNA, 19 nt, Artificial Sequence
  Synthetic
gaugacauuuucuuugacu

SEQ ID NO: 375102 - RNA, 20 nt, Artificial Sequence
  Synthetic
ugaugacauuuucuuugacu

SEQ ID NO: 375103 - RNA, 21 nt, Artificial Sequence
  Synthetic
gugaugacauuuucuuugacu

SEQ ID NO: 375104 - RNA, 22 nt, Artificial Sequence
  Synthetic
ugugaugacauuuucuuugacu

SEQ ID NO: 375105 - RNA, 23 nt, Artificial Sequence
  Synthetic
augugaugacauuuucuuugacu

SEQ ID NO: 375106 - RNA, 24 nt, Artificial Sequence
  Synthetic
gaugugaugacauuuucuuugacu

SEQ ID NO: 375107 - RNA, 18 nt, Artificial Sequence
  Synthetic
uuaaaaaauauuuugacu

SEQ ID NO: 375108 - RNA, 19 nt, Artificial Sequence
  Synthetic
guuaaaaaauauuuugacu

SEQ ID NO: 375109 - RNA, 20 nt, Artificial Sequence
  Synthetic
gguuaaaaaauauuuugacu

SEQ ID NO: 375110 - RNA, 21 nt, Artificial Sequence
  Synthetic
ugguuaaaaaauauuuugacu

SEQ ID NO: 375111 - RNA, 22 nt, Artificial Sequence
  Synthetic
gugguuaaaaaauauuuugacu

SEQ ID NO: 375112 - RNA, 23 nt, Artificial Sequence
  Synthetic
agugguuaaaaaauauuuugacu

SEQ ID NO: 375113 - RNA, 24 nt, Artificial Sequence
  Synthetic
aagugguuaaaaaauauuuugacu

SEQ ID NO: 375114 - RNA, 18 nt, Artificial Sequence
  Synthetic
ccuagauuaguuuugacu

SEQ ID NO: 375115 - RNA, 19 nt, Artificial Sequence
  Synthetic
accuagauuaguuuugacu

SEQ ID NO: 375116 - RNA, 20 nt, Artificial Sequence
  Synthetic
caccuagauuaguuuugacu

SEQ ID NO: 375117 - RNA, 21 nt, Artificial Sequence
  Synthetic
acaccuagauuaguuuugacu

SEQ ID NO: 375118 - RNA, 22 nt, Artificial Sequence
  Synthetic
aacaccuagauuaguuuugacu

SEQ ID NO: 375119 - RNA, 23 nt, Artificial Sequence
  Synthetic
uaacaccuagauuaguuuugacu

SEQ ID NO: 375120 - RNA, 24 nt, Artificial Sequence
  Synthetic
cuaacaccuagauuaguuuugacu

SEQ ID NO: 375121 - RNA, 18 nt, Artificial Sequence
  Synthetic
uaauugaaauuuuugacu

SEQ ID NO: 375122 - RNA, 19 nt, Artificial Sequence
  Synthetic
cuaauugaaauuuuugacu

SEQ ID NO: 375123 - RNA, 20 nt, Artificial Sequence
  Synthetic
ucuaauugaaauuuuugacu

SEQ ID NO: 375124 - RNA, 21 nt, Artificial Sequence
  Synthetic
uucuaauugaaauuuuugacu

SEQ ID NO: 375125 - RNA, 22 nt, Artificial Sequence
  Synthetic
uuucuaauugaaauuuuugacu

SEQ ID NO: 375126 - RNA, 23 nt, Artificial Sequence
  Synthetic
uuuucuaauugaaauuuuugacu

SEQ ID NO: 375127 - RNA, 24 nt, Artificial Sequence
  Synthetic
uuuuucuaauugaaauuuuugacu

SEQ ID NO: 375128 - RNA, 18 nt, Artificial Sequence
  Synthetic
uuuaauuaacaaaauacu

SEQ ID NO: 375129 - RNA, 19 nt, Artificial Sequence
  Synthetic
uuuuaauuaacaaaauacu

SEQ ID NO: 375130 - RNA, 20 nt, Artificial Sequence
  Synthetic
cuuuuaauuaacaaaauacu

SEQ ID NO: 375131 - RNA, 21 nt, Artificial Sequence
  Synthetic
ccuuuuaauuaacaaaauacu

SEQ ID NO: 375132 - RNA, 22 nt, Artificial Sequence
  Synthetic
accuuuuaauuaacaaaauacu

SEQ ID NO: 375133 - RNA, 23 nt, Artificial Sequence
  Synthetic
caccuuuuaauuaacaaaauacu

SEQ ID NO: 375134 - RNA, 24 nt, Artificial Sequence
  Synthetic
acaccuuuuaauuaacaaaauacu

SEQ ID NO: 375135 - RNA, 18 nt, Artificial Sequence
  Synthetic
uggaggcuuuaaaauacu

SEQ ID NO: 375136 - RNA, 19 nt, Artificial Sequence
  Synthetic
auggaggcuuuaaaauacu

SEQ ID NO: 375137 - RNA, 20 nt, Artificial Sequence
  Synthetic
uauggaggcuuuaaaauacu

SEQ ID NO: 375138 - RNA, 21 nt, Artificial Sequence
  Synthetic
cuauggaggcuuuaaaauacu

SEQ ID NO: 375139 - RNA, 22 nt, Artificial Sequence
  Synthetic
gcuauggaggcuuuaaaauacu

SEQ ID NO: 375140 - RNA, 23 nt, Artificial Sequence
  Synthetic
ugcuauggaggcuuuaaaauacu

SEQ ID NO: 375141 - RNA, 24 nt, Artificial Sequence
  Synthetic
augcuauggaggcuuuaaaauacu

SEQ ID NO: 375142 - RNA, 18 nt, Artificial Sequence
  Synthetic
uuaaaggacucaaauacu

SEQ ID NO: 375143 - RNA, 19 nt, Artificial Sequence
  Synthetic
auuaaaggacucaaauacu

SEQ ID NO: 375144 - RNA, 20 nt, Artificial Sequence
  Synthetic
uauuaaaggacucaaauacu

SEQ ID NO: 375145 - RNA, 21 nt, Artificial Sequence
  Synthetic
uuauuaaaggacucaaauacu

SEQ ID NO: 375146 - RNA, 22 nt, Artificial Sequence
  Synthetic
auuauuaaaggacucaaauacu

SEQ ID NO: 375147 - RNA, 23 nt, Artificial Sequence
  Synthetic
aauuauuaaaggacucaaauacu

SEQ ID NO: 375148 - RNA, 24 nt, Artificial Sequence
  Synthetic
aaauuauuaaaggacucaaauacu

SEQ ID NO: 375149 - RNA, 18 nt, Artificial Sequence
  Synthetic
auagacaauucaaauacu

SEQ ID NO: 375150 - RNA, 19 nt, Artificial Sequence
  Synthetic
aauagacaauucaaauacu

SEQ ID NO: 375151 - RNA, 20 nt, Artificial Sequence
  Synthetic
aaauagacaauucaaauacu

SEQ ID NO: 375152 - RNA, 21 nt, Artificial Sequence
  Synthetic
uaaauagacaauucaaauacu

SEQ ID NO: 375153 - RNA, 22 nt, Artificial Sequence
  Synthetic
auaaauagacaauucaaauacu

SEQ ID NO: 375154 - RNA, 23 nt, Artificial Sequence
  Synthetic
uauaaauagacaauucaaauacu

SEQ ID NO: 375155 - RNA, 24 nt, Artificial Sequence
  Synthetic
auauaaauagacaauucaaauacu

SEQ ID NO: 375156 - RNA, 18 nt, Artificial Sequence
  Synthetic
uuuuaauguauaaauacu

SEQ ID NO: 375157 - RNA, 19 nt, Artificial Sequence
  Synthetic
guuuuaauguauaaauacu

SEQ ID NO: 375158 - RNA, 20 nt, Artificial Sequence
  Synthetic
gguuuuaauguauaaauacu

SEQ ID NO: 375159 - RNA, 21 nt, Artificial Sequence
  Synthetic
agguuuuaauguauaaauacu

SEQ ID NO: 375160 - RNA, 22 nt, Artificial Sequence
  Synthetic
aagguuuuaauguauaaauacu

SEQ ID NO: 375161 - RNA, 23 nt, Artificial Sequence
  Synthetic
aaagguuuuaauguauaaauacu

SEQ ID NO: 375162 - RNA, 24 nt, Artificial Sequence
  Synthetic
aaaagguuuuaauguauaaauacu

SEQ ID NO: 375163 - RNA, 18 nt, Artificial Sequence
  Synthetic
guaucaauuuuaaauacu

SEQ ID NO: 375164 - RNA, 19 nt, Artificial Sequence
  Synthetic
aguaucaauuuuaaauacu

SEQ ID NO: 375165 - RNA, 20 nt, Artificial Sequence
  Synthetic
gaguaucaauuuuaaauacu

SEQ ID NO: 375166 - RNA, 21 nt, Artificial Sequence
  Synthetic
agaguaucaauuuuaaauacu

SEQ ID NO: 375167 - RNA, 22 nt, Artificial Sequence
  Synthetic
uagaguaucaauuuuaaauacu

SEQ ID NO: 375168 - RNA, 23 nt, Artificial Sequence
  Synthetic
auagaguaucaauuuuaaauacu

SEQ ID NO: 375169 - RNA, 24 nt, Artificial Sequence
  Synthetic
aauagaguaucaauuuuaaauacu

SEQ ID NO: 375170 - RNA, 18 nt, Artificial Sequence
  Synthetic
gaacuaaucagcaauacu

SEQ ID NO: 375171 - RNA, 19 nt, Artificial Sequence
  Synthetic
agaacuaaucagcaauacu

SEQ ID NO: 375172 - RNA, 20 nt, Artificial Sequence
  Synthetic
gagaacuaaucagcaauacu

SEQ ID NO: 375173 - RNA, 21 nt, Artificial Sequence
  Synthetic
ugagaacuaaucagcaauacu

SEQ ID NO: 375174 - RNA, 22 nt, Artificial Sequence
  Synthetic
cugagaacuaaucagcaauacu

SEQ ID NO: 375175 - RNA, 23 nt, Artificial Sequence
  Synthetic
ucugagaacuaaucagcaauacu

SEQ ID NO: 375176 - RNA, 24 nt, Artificial Sequence
  Synthetic
uucugagaacuaaucagcaauacu

SEQ ID NO: 375177 - RNA, 18 nt, Artificial Sequence
  Synthetic
uagugaacuaucaauacu

SEQ ID NO: 375178 - RNA, 19 nt, Artificial Sequence
  Synthetic
guagugaacuaucaauacu

SEQ ID NO: 375179 - RNA, 20 nt, Artificial Sequence
  Synthetic
uguagugaacuaucaauacu

SEQ ID NO: 375180 - RNA, 21 nt, Artificial Sequence
  Synthetic
uuguagugaacuaucaauacu

SEQ ID NO: 375181 - RNA, 22 nt, Artificial Sequence
  Synthetic
auuguagugaacuaucaauacu

SEQ ID NO: 375182 - RNA, 23 nt, Artificial Sequence
  Synthetic
cauuguagugaacuaucaauacu

SEQ ID NO: 375183 - RNA, 24 nt, Artificial Sequence
  Synthetic
acauuguagugaacuaucaauacu

SEQ ID NO: 375184 - RNA, 18 nt, Artificial Sequence
  Synthetic
aggaaaacacagaauacu

SEQ ID NO: 375185 - RNA, 19 nt, Artificial Sequence
  Synthetic
aaggaaaacacagaauacu

SEQ ID NO: 375186 - RNA, 20 nt, Artificial Sequence
  Synthetic
caaggaaaacacagaauacu

SEQ ID NO: 375187 - RNA, 21 nt, Artificial Sequence
  Synthetic
ccaaggaaaacacagaauacu

SEQ ID NO: 375188 - RNA, 22 nt, Artificial Sequence
  Synthetic
accaaggaaaacacagaauacu

SEQ ID NO: 375189 - RNA, 23 nt, Artificial Sequence
  Synthetic
caccaaggaaaacacagaauacu

SEQ ID NO: 375190 - RNA, 24 nt, Artificial Sequence
  Synthetic
ccaccaaggaaaacacagaauacu

SEQ ID NO: 375191 - RNA, 18 nt, Artificial Sequence
  Synthetic
acuaggauguagaauacu

SEQ ID NO: 375192 - RNA, 19 nt, Artificial Sequence
  Synthetic
uacuaggauguagaauacu

SEQ ID NO: 375193 - RNA, 20 nt, Artificial Sequence
  Synthetic
auacuaggauguagaauacu

SEQ ID NO: 375194 - RNA, 21 nt, Artificial Sequence
  Synthetic
aauacuaggauguagaauacu

SEQ ID NO: 375195 - RNA, 22 nt, Artificial Sequence
  Synthetic
aaauacuaggauguagaauacu

SEQ ID NO: 375196 - RNA, 23 nt, Artificial Sequence
  Synthetic
caaauacuaggauguagaauacu

SEQ ID NO: 375197 - RNA, 24 nt, Artificial Sequence
  Synthetic
acaaauacuaggauguagaauacu

SEQ ID NO: 375198 - RNA, 18 nt, Artificial Sequence
  Synthetic
ugccaggguuugaauacu

SEQ ID NO: 375199 - RNA, 19 nt, Artificial Sequence
  Synthetic
augccaggguuugaauacu

SEQ ID NO: 375200 - RNA, 20 nt, Artificial Sequence
  Synthetic
caugccaggguuugaauacu

SEQ ID NO: 375201 - RNA, 21 nt, Artificial Sequence
  Synthetic
acaugccaggguuugaauacu

SEQ ID NO: 375202 - RNA, 22 nt, Artificial Sequence
  Synthetic
cacaugccaggguuugaauacu

SEQ ID NO: 375203 - RNA, 23 nt, Artificial Sequence
  Synthetic
acacaugccaggguuugaauacu

SEQ ID NO: 375204 - RNA, 24 nt, Artificial Sequence
  Synthetic
cacacaugccaggguuugaauacu

SEQ ID NO: 375205 - RNA, 18 nt, Artificial Sequence
  Synthetic
gaaucccuacauaauacu

SEQ ID NO: 375206 - RNA, 19 nt, Artificial Sequence
  Synthetic
ugaaucccuacauaauacu

SEQ ID NO: 375207 - RNA, 20 nt, Artificial Sequence
  Synthetic
uugaaucccuacauaauacu

SEQ ID NO: 375208 - RNA, 21 nt, Artificial Sequence
  Synthetic
uuugaaucccuacauaauacu

SEQ ID NO: 375209 - RNA, 22 nt, Artificial Sequence
  Synthetic
guuugaaucccuacauaauacu

SEQ ID NO: 375210 - RNA, 23 nt, Artificial Sequence
  Synthetic
uguuugaaucccuacauaauacu

SEQ ID NO: 375211 - RNA, 24 nt, Artificial Sequence
  Synthetic
uuguuugaaucccuacauaauacu

SEQ ID NO: 375212 - RNA, 18 nt, Artificial Sequence
  Synthetic
uaaaacauucauaauacu

SEQ ID NO: 375213 - RNA, 19 nt, Artificial Sequence
  Synthetic
guaaaacauucauaauacu

SEQ ID NO: 375214 - RNA, 20 nt, Artificial Sequence
  Synthetic
uguaaaacauucauaauacu

SEQ ID NO: 375215 - RNA, 21 nt, Artificial Sequence
  Synthetic
uuguaaaacauucauaauacu

SEQ ID NO: 375216 - RNA, 22 nt, Artificial Sequence
  Synthetic
auuguaaaacauucauaauacu

SEQ ID NO: 375217 - RNA, 23 nt, Artificial Sequence
  Synthetic
cauuguaaaacauucauaauacu

SEQ ID NO: 375218 - RNA, 24 nt, Artificial Sequence
  Synthetic
acauuguaaaacauucauaauacu

SEQ ID NO: 375219 - RNA, 18 nt, Artificial Sequence
  Synthetic
gaggaugaagauaauacu

SEQ ID NO: 375220 - RNA, 19 nt, Artificial Sequence
  Synthetic
ugaggaugaagauaauacu

SEQ ID NO: 375221 - RNA, 20 nt, Artificial Sequence
  Synthetic
augaggaugaagauaauacu

SEQ ID NO: 375222 - RNA, 21 nt, Artificial Sequence
  Synthetic
uaugaggaugaagauaauacu

SEQ ID NO: 375223 - RNA, 22 nt, Artificial Sequence
  Synthetic
auaugaggaugaagauaauacu

SEQ ID NO: 375224 - RNA, 23 nt, Artificial Sequence
  Synthetic
cauaugaggaugaagauaauacu

SEQ ID NO: 375225 - RNA, 24 nt, Artificial Sequence
  Synthetic
ucauaugaggaugaagauaauacu

SEQ ID NO: 375226 - RNA, 18 nt, Artificial Sequence
  Synthetic
ggaaauuuagauaauacu

SEQ ID NO: 375227 - RNA, 19 nt, Artificial Sequence
  Synthetic
aggaaauuuagauaauacu

SEQ ID NO: 375228 - RNA, 20 nt, Artificial Sequence
  Synthetic
aaggaaauuuagauaauacu

SEQ ID NO: 375229 - RNA, 21 nt, Artificial Sequence
  Synthetic
gaaggaaauuuagauaauacu

SEQ ID NO: 375230 - RNA, 22 nt, Artificial Sequence
  Synthetic
agaaggaaauuuagauaauacu

SEQ ID NO: 375231 - RNA, 23 nt, Artificial Sequence
  Synthetic
uagaaggaaauuuagauaauacu

SEQ ID NO: 375232 - RNA, 24 nt, Artificial Sequence
  Synthetic
uuagaaggaaauuuagauaauacu

SEQ ID NO: 375233 - RNA, 18 nt, Artificial Sequence
  Synthetic
gaaaaugcagcuaauacu

SEQ ID NO: 375234 - RNA, 19 nt, Artificial Sequence
  Synthetic
ugaaaaugcagcuaauacu

SEQ ID NO: 375235 - RNA, 20 nt, Artificial Sequence
  Synthetic
uugaaaaugcagcuaauacu

SEQ ID NO: 375236 - RNA, 21 nt, Artificial Sequence
  Synthetic
uuugaaaaugcagcuaauacu

SEQ ID NO: 375237 - RNA, 22 nt, Artificial Sequence
  Synthetic
auuugaaaaugcagcuaauacu

SEQ ID NO: 375238 - RNA, 23 nt, Artificial Sequence
  Synthetic
cauuugaaaaugcagcuaauacu

SEQ ID NO: 375239 - RNA, 24 nt, Artificial Sequence
  Synthetic
gcauuugaaaaugcagcuaauacu

SEQ ID NO: 375240 - RNA, 18 nt, Artificial Sequence
  Synthetic
ugaacaguuuguaauacu

SEQ ID NO: 375241 - RNA, 19 nt, Artificial Sequence
  Synthetic
augaacaguuuguaauacu

SEQ ID NO: 375242 - RNA, 20 nt, Artificial Sequence
  Synthetic
aaugaacaguuuguaauacu

SEQ ID NO: 375243 - RNA, 21 nt, Artificial Sequence
  Synthetic
uaaugaacaguuuguaauacu

SEQ ID NO: 375244 - RNA, 22 nt, Artificial Sequence
  Synthetic
guaaugaacaguuuguaauacu

SEQ ID NO: 375245 - RNA, 23 nt, Artificial Sequence
  Synthetic
uguaaugaacaguuuguaauacu

SEQ ID NO: 375246 - RNA, 24 nt, Artificial Sequence
  Synthetic
auguaaugaacaguuuguaauacu

SEQ ID NO: 375247 - RNA, 18 nt, Artificial Sequence
  Synthetic
uuuacacucccacauacu

SEQ ID NO: 375248 - RNA, 19 nt, Artificial Sequence
  Synthetic
cuuuacacucccacauacu

SEQ ID NO: 375249 - RNA, 20 nt, Artificial Sequence
  Synthetic
gcuuuacacucccacauacu

SEQ ID NO: 375250 - RNA, 21 nt, Artificial Sequence
  Synthetic
agcuuuacacucccacauacu

SEQ ID NO: 375251 - RNA, 22 nt, Artificial Sequence
  Synthetic
aagcuuuacacucccacauacu

SEQ ID NO: 375252 - RNA, 23 nt, Artificial Sequence
  Synthetic
gaagcuuuacacucccacauacu

SEQ ID NO: 375253 - RNA, 24 nt, Artificial Sequence
  Synthetic
ugaagcuuuacacucccacauacu

SEQ ID NO: 375254 - RNA, 18 nt, Artificial Sequence
  Synthetic
agauuuguagagcauacu

SEQ ID NO: 375255 - RNA, 19 nt, Artificial Sequence
  Synthetic
aagauuuguagagcauacu

SEQ ID NO: 375256 - RNA, 20 nt, Artificial Sequence
  Synthetic
aaagauuuguagagcauacu

SEQ ID NO: 375257 - RNA, 21 nt, Artificial Sequence
  Synthetic
aaaagauuuguagagcauacu

SEQ ID NO: 375258 - RNA, 22 nt, Artificial Sequence
  Synthetic
aaaaagauuuguagagcauacu

SEQ ID NO: 375259 - RNA, 23 nt, Artificial Sequence
  Synthetic
aaaaaagauuuguagagcauacu

SEQ ID NO: 375260 - RNA, 24 nt, Artificial Sequence
  Synthetic
aaaaaaagauuuguagagcauacu

SEQ ID NO: 375261 - RNA, 18 nt, Artificial Sequence
  Synthetic
acaucugcuuagcauacu

SEQ ID NO: 375262 - RNA, 19 nt, Artificial Sequence
  Synthetic
gacaucugcuuagcauacu

SEQ ID NO: 375263 - RNA, 20 nt, Artificial Sequence
  Synthetic
agacaucugcuuagcauacu

SEQ ID NO: 375264 - RNA, 21 nt, Artificial Sequence
  Synthetic
cagacaucugcuuagcauacu

SEQ ID NO: 375265 - RNA, 22 nt, Artificial Sequence
  Synthetic
ucagacaucugcuuagcauacu

SEQ ID NO: 375266 - RNA, 23 nt, Artificial Sequence
  Synthetic
uucagacaucugcuuagcauacu

SEQ ID NO: 375267 - RNA, 24 nt, Artificial Sequence
  Synthetic
uuucagacaucugcuuagcauacu

SEQ ID NO: 375268 - RNA, 18 nt, Artificial Sequence
  Synthetic
ucuagaaguaggcauacu

SEQ ID NO: 375269 - RNA, 19 nt, Artificial Sequence
  Synthetic
uucuagaaguaggcauacu

SEQ ID NO: 375270 - RNA, 20 nt, Artificial Sequence
  Synthetic
cuucuagaaguaggcauacu

SEQ ID NO: 375271 - RNA, 21 nt, Artificial Sequence
  Synthetic
acuucuagaaguaggcauacu

SEQ ID NO: 375272 - RNA, 22 nt, Artificial Sequence
  Synthetic
uacuucuagaaguaggcauacu

SEQ ID NO: 375273 - RNA, 23 nt, Artificial Sequence
  Synthetic
uuacuucuagaaguaggcauacu

SEQ ID NO: 375274 - RNA, 24 nt, Artificial Sequence
  Synthetic
guuacuucuagaaguaggcauacu

SEQ ID NO: 375275 - RNA, 18 nt, Artificial Sequence
  Synthetic
auccuuauaccagauacu

SEQ ID NO: 375276 - RNA, 19 nt, Artificial Sequence
  Synthetic
cauccuuauaccagauacu

SEQ ID NO: 375277 - RNA, 20 nt, Artificial Sequence
  Synthetic
ucauccuuauaccagauacu

SEQ ID NO: 375278 - RNA, 21 nt, Artificial Sequence
  Synthetic
aucauccuuauaccagauacu

SEQ ID NO: 375279 - RNA, 22 nt, Artificial Sequence
  Synthetic
caucauccuuauaccagauacu

SEQ ID NO: 375280 - RNA, 23 nt, Artificial Sequence
  Synthetic
ucaucauccuuauaccagauacu

SEQ ID NO: 375281 - RNA, 24 nt, Artificial Sequence
  Synthetic
uucaucauccuuauaccagauacu

SEQ ID NO: 375282 - RNA, 18 nt, Artificial Sequence
  Synthetic
ccuguagucccagauacu

SEQ ID NO: 375283 - RNA, 19 nt, Artificial Sequence
  Synthetic
gccuguagucccagauacu

SEQ ID NO: 375284 - RNA, 20 nt, Artificial Sequence
  Synthetic
ugccuguagucccagauacu

SEQ ID NO: 375285 - RNA, 21 nt, Artificial Sequence
  Synthetic
augccuguagucccagauacu

SEQ ID NO: 375286 - RNA, 22 nt, Artificial Sequence
  Synthetic
aaugccuguagucccagauacu

SEQ ID NO: 375287 - RNA, 23 nt, Artificial Sequence
  Synthetic
aaaugccuguagucccagauacu

SEQ ID NO: 375288 - RNA, 24 nt, Artificial Sequence
  Synthetic
caaaugccuguagucccagauacu

SEQ ID NO: 375289 - RNA, 22 nt, Artificial Sequence
  Synthetic
caugccuguagucccagauacu

SEQ ID NO: 375290 - RNA, 23 nt, Artificial Sequence
  Synthetic
acaugccuguagucccagauacu

SEQ ID NO: 375291 - RNA, 24 nt, Artificial Sequence
  Synthetic
cacaugccuguagucccagauacu

SEQ ID NO: 375292 - RNA, 18 nt, Artificial Sequence
  Synthetic
agucaucaugcagauacu

SEQ ID NO: 375293 - RNA, 19 nt, Artificial Sequence
  Synthetic
uagucaucaugcagauacu

SEQ ID NO: 375294 - RNA, 20 nt, Artificial Sequence
  Synthetic
uuagucaucaugcagauacu

SEQ ID NO: 375295 - RNA, 21 nt, Artificial Sequence
  Synthetic
auuagucaucaugcagauacu

SEQ ID NO: 375296 - RNA, 22 nt, Artificial Sequence
  Synthetic
aauuagucaucaugcagauacu

SEQ ID NO: 375297 - RNA, 23 nt, Artificial Sequence
  Synthetic
aaauuagucaucaugcagauacu

SEQ ID NO: 375298 - RNA, 24 nt, Artificial Sequence
  Synthetic
aaaauuagucaucaugcagauacu

SEQ ID NO: 375299 - RNA, 18 nt, Artificial Sequence
  Synthetic
cuaggaaguauagauacu

SEQ ID NO: 375300 - RNA, 19 nt, Artificial Sequence
  Synthetic
acuaggaaguauagauacu

SEQ ID NO: 375301 - RNA, 20 nt, Artificial Sequence
  Synthetic
aacuaggaaguauagauacu

SEQ ID NO: 375302 - RNA, 21 nt, Artificial Sequence
  Synthetic
gaacuaggaaguauagauacu

SEQ ID NO: 375303 - RNA, 22 nt, Artificial Sequence
  Synthetic
ggaacuaggaaguauagauacu

SEQ ID NO: 375304 - RNA, 23 nt, Artificial Sequence
  Synthetic
aggaacuaggaaguauagauacu

SEQ ID NO: 375305 - RNA, 24 nt, Artificial Sequence
  Synthetic
gaggaacuaggaaguauagauacu

SEQ ID NO: 375306 - RNA, 18 nt, Artificial Sequence
  Synthetic
gacgguuggguagauacu

SEQ ID NO: 375307 - RNA, 19 nt, Artificial Sequence
  Synthetic
ugacgguuggguagauacu

SEQ ID NO: 375308 - RNA, 20 nt, Artificial Sequence
  Synthetic
uugacgguuggguagauacu

SEQ ID NO: 375309 - RNA, 21 nt, Artificial Sequence
  Synthetic
auugacgguuggguagauacu

SEQ ID NO: 375310 - RNA, 22 nt, Artificial Sequence
  Synthetic
aauugacgguuggguagauacu

SEQ ID NO: 375311 - RNA, 23 nt, Artificial Sequence
  Synthetic
uaauugacgguuggguagauacu

SEQ ID NO: 375312 - RNA, 24 nt, Artificial Sequence
  Synthetic
guaauugacgguuggguagauacu

SEQ ID NO: 375313 - RNA, 18 nt, Artificial Sequence
  Synthetic
uucaguuccaaggauacu

SEQ ID NO: 375314 - RNA, 19 nt, Artificial Sequence
  Synthetic
uuucaguuccaaggauacu

SEQ ID NO: 375315 - RNA, 20 nt, Artificial Sequence
  Synthetic
uuuucaguuccaaggauacu

SEQ ID NO: 375316 - RNA, 21 nt, Artificial Sequence
  Synthetic
uuuuucaguuccaaggauacu

SEQ ID NO: 375317 - RNA, 22 nt, Artificial Sequence
  Synthetic
auuuuucaguuccaaggauacu

SEQ ID NO: 375318 - RNA, 23 nt, Artificial Sequence
  Synthetic
cauuuuucaguuccaaggauacu

SEQ ID NO: 375319 - RNA, 24 nt, Artificial Sequence
  Synthetic
gcauuuuucaguuccaaggauacu

SEQ ID NO: 375320 - RNA, 18 nt, Artificial Sequence
  Synthetic
caaucccccauggauacu

SEQ ID NO: 375321 - RNA, 19 nt, Artificial Sequence
  Synthetic
ccaaucccccauggauacu

SEQ ID NO: 375322 - RNA, 20 nt, Artificial Sequence
  Synthetic
accaaucccccauggauacu

SEQ ID NO: 375323 - RNA, 21 nt, Artificial Sequence
  Synthetic
aaccaaucccccauggauacu

SEQ ID NO: 375324 - RNA, 22 nt, Artificial Sequence
  Synthetic
gaaccaaucccccauggauacu

SEQ ID NO: 375325 - RNA, 23 nt, Artificial Sequence
  Synthetic
ggaaccaaucccccauggauacu

SEQ ID NO: 375326 - RNA, 24 nt, Artificial Sequence
  Synthetic
uggaaccaaucccccauggauacu

SEQ ID NO: 375327 - RNA, 18 nt, Artificial Sequence
  Synthetic
uagcacccucuggauacu

SEQ ID NO: 375328 - RNA, 19 nt, Artificial Sequence
  Synthetic
auagcacccucuggauacu

SEQ ID NO: 375329 - RNA, 20 nt, Artificial Sequence
  Synthetic
aauagcacccucuggauacu

SEQ ID NO: 375330 - RNA, 21 nt, Artificial Sequence
  Synthetic
aaauagcacccucuggauacu

SEQ ID NO: 375331 - RNA, 22 nt, Artificial Sequence
  Synthetic
caaauagcacccucuggauacu

SEQ ID NO: 375332 - RNA, 23 nt, Artificial Sequence
  Synthetic
gcaaauagcacccucuggauacu

SEQ ID NO: 375333 - RNA, 24 nt, Artificial Sequence
  Synthetic
ugcaaauagcacccucuggauacu

SEQ ID NO: 375334 - RNA, 18 nt, Artificial Sequence
  Synthetic
uugugcuuuguggauacu

SEQ ID NO: 375335 - RNA, 19 nt, Artificial Sequence
  Synthetic
uuugugcuuuguggauacu

SEQ ID NO: 375336 - RNA, 20 nt, Artificial Sequence
  Synthetic
guuugugcuuuguggauacu

SEQ ID NO: 375337 - RNA, 21 nt, Artificial Sequence
  Synthetic
aguuugugcuuuguggauacu

SEQ ID NO: 375338 - RNA, 22 nt, Artificial Sequence
  Synthetic
aaguuugugcuuuguggauacu

SEQ ID NO: 375339 - RNA, 23 nt, Artificial Sequence
  Synthetic
uaaguuugugcuuuguggauacu

SEQ ID NO: 375340 - RNA, 24 nt, Artificial Sequence
  Synthetic
auaaguuugugcuuuguggauacu

SEQ ID NO: 375341 - RNA, 18 nt, Artificial Sequence
  Synthetic
aaaauugaaaaugauacu

SEQ ID NO: 375342 - RNA, 19 nt, Artificial Sequence
  Synthetic
aaaaauugaaaaugauacu

SEQ ID NO: 375343 - RNA, 20 nt, Artificial Sequence
  Synthetic
aaaaaauugaaaaugauacu

SEQ ID NO: 375344 - RNA, 21 nt, Artificial Sequence
  Synthetic
uaaaaaauugaaaaugauacu

SEQ ID NO: 375345 - RNA, 22 nt, Artificial Sequence
  Synthetic
auaaaaaauugaaaaugauacu

SEQ ID NO: 375346 - RNA, 23 nt, Artificial Sequence
  Synthetic
aauaaaaaauugaaaaugauacu

SEQ ID NO: 375347 - RNA, 24 nt, Artificial Sequence
  Synthetic
caauaaaaaauugaaaaugauacu

SEQ ID NO: 375348 - RNA, 18 nt, Artificial Sequence
  Synthetic
uugccucgaaaugauacu

SEQ ID NO: 375349 - RNA, 19 nt, Artificial Sequence
  Synthetic
uuugccucgaaaugauacu

SEQ ID NO: 375350 - RNA, 20 nt, Artificial Sequence
  Synthetic
auuugccucgaaaugauacu

SEQ ID NO: 375351 - RNA, 21 nt, Artificial Sequence
  Synthetic
aauuugccucgaaaugauacu

SEQ ID NO: 375352 - RNA, 22 nt, Artificial Sequence
  Synthetic
gaauuugccucgaaaugauacu

SEQ ID NO: 375353 - RNA, 23 nt, Artificial Sequence
  Synthetic
agaauuugccucgaaaugauacu

SEQ ID NO: 375354 - RNA, 24 nt, Artificial Sequence
  Synthetic
cagaauuugccucgaaaugauacu

SEQ ID NO: 375355 - RNA, 18 nt, Artificial Sequence
  Synthetic
auacuaaaagaugauacu

SEQ ID NO: 375356 - RNA, 19 nt, Artificial Sequence
  Synthetic
cauacuaaaagaugauacu

SEQ ID NO: 375357 - RNA, 20 nt, Artificial Sequence
  Synthetic
ucauacuaaaagaugauacu

SEQ ID NO: 375358 - RNA, 21 nt, Artificial Sequence
  Synthetic
uucauacuaaaagaugauacu

SEQ ID NO: 375359 - RNA, 22 nt, Artificial Sequence
  Synthetic
cuucauacuaaaagaugauacu

SEQ ID NO: 375360 - RNA, 23 nt, Artificial Sequence
  Synthetic
ucuucauacuaaaagaugauacu

SEQ ID NO: 375361 - RNA, 24 nt, Artificial Sequence
  Synthetic
aucuucauacuaaaagaugauacu

SEQ ID NO: 375362 - RNA, 18 nt, Artificial Sequence
  Synthetic
cugaagaacccugauacu

SEQ ID NO: 375363 - RNA, 19 nt, Artificial Sequence
  Synthetic
gcugaagaacccugauacu

SEQ ID NO: 375364 - RNA, 20 nt, Artificial Sequence
  Synthetic
cgcugaagaacccugauacu

SEQ ID NO: 375365 - RNA, 21 nt, Artificial Sequence
  Synthetic
acgcugaagaacccugauacu

SEQ ID NO: 375366 - RNA, 22 nt, Artificial Sequence
  Synthetic
aacgcugaagaacccugauacu

SEQ ID NO: 375367 - RNA, 23 nt, Artificial Sequence
  Synthetic
caacgcugaagaacccugauacu

SEQ ID NO: 375368 - RNA, 24 nt, Artificial Sequence
  Synthetic
acaacgcugaagaacccugauacu

SEQ ID NO: 375369 - RNA, 18 nt, Artificial Sequence
  Synthetic
caguguauauaauauacu

SEQ ID NO: 375370 - RNA, 19 nt, Artificial Sequence
  Synthetic
ucaguguauauaauauacu

SEQ ID NO: 375371 - RNA, 20 nt, Artificial Sequence
  Synthetic
uucaguguauauaauauacu

SEQ ID NO: 375372 - RNA, 21 nt, Artificial Sequence
  Synthetic
uuucaguguauauaauauacu

SEQ ID NO: 375373 - RNA, 22 nt, Artificial Sequence
  Synthetic
auuucaguguauauaauauacu

SEQ ID NO: 375374 - RNA, 23 nt, Artificial Sequence
  Synthetic
uauuucaguguauauaauauacu

SEQ ID NO: 375375 - RNA, 24 nt, Artificial Sequence
  Synthetic
auauuucaguguauauaauauacu

SEQ ID NO: 375376 - RNA, 18 nt, Artificial Sequence
  Synthetic
ugucaauuagcauauacu

SEQ ID NO: 375377 - RNA, 19 nt, Artificial Sequence
  Synthetic
uugucaauuagcauauacu

SEQ ID NO: 375378 - RNA, 20 nt, Artificial Sequence
  Synthetic
guugucaauuagcauauacu

SEQ ID NO: 375379 - RNA, 21 nt, Artificial Sequence
  Synthetic
uguugucaauuagcauauacu

SEQ ID NO: 375380 - RNA, 22 nt, Artificial Sequence
  Synthetic
auguugucaauuagcauauacu

SEQ ID NO: 375381 - RNA, 23 nt, Artificial Sequence
  Synthetic
aauguugucaauuagcauauacu

SEQ ID NO: 375382 - RNA, 24 nt, Artificial Sequence
  Synthetic
caauguugucaauuagcauauacu

SEQ ID NO: 375383 - RNA, 18 nt, Artificial Sequence
  Synthetic
agaaugaugugauauacu

SEQ ID NO: 375384 - RNA, 19 nt, Artificial Sequence
  Synthetic
cagaaugaugugauauacu

SEQ ID NO: 375385 - RNA, 20 nt, Artificial Sequence
  Synthetic
ucagaaugaugugauauacu

SEQ ID NO: 375386 - RNA, 21 nt, Artificial Sequence
  Synthetic
aucagaaugaugugauauacu

SEQ ID NO: 375387 - RNA, 22 nt, Artificial Sequence
  Synthetic
aaucagaaugaugugauauacu

SEQ ID NO: 375388 - RNA, 23 nt, Artificial Sequence
  Synthetic
uaaucagaaugaugugauauacu

SEQ ID NO: 375389 - RNA, 24 nt, Artificial Sequence
  Synthetic
auaaucagaaugaugugauauacu

SEQ ID NO: 375390 - RNA, 18 nt, Artificial Sequence
  Synthetic
ccagauuucuacuauacu

SEQ ID NO: 375391 - RNA, 19 nt, Artificial Sequence
  Synthetic
uccagauuucuacuauacu

SEQ ID NO: 375392 - RNA, 20 nt, Artificial Sequence
  Synthetic
uuccagauuucuacuauacu

SEQ ID NO: 375393 - RNA, 21 nt, Artificial Sequence
  Synthetic
cuuccagauuucuacuauacu

SEQ ID NO: 375394 - RNA, 22 nt, Artificial Sequence
  Synthetic
acuuccagauuucuacuauacu

SEQ ID NO: 375395 - RNA, 23 nt, Artificial Sequence
  Synthetic
cacuuccagauuucuacuauacu

SEQ ID NO: 375396 - RNA, 24 nt, Artificial Sequence
  Synthetic
acacuuccagauuucuacuauacu

SEQ ID NO: 375397 - RNA, 18 nt, Artificial Sequence
  Synthetic
uccuaaaacugcuauacu

SEQ ID NO: 375398 - RNA, 19 nt, Artificial Sequence
  Synthetic
cuccuaaaacugcuauacu

SEQ ID NO: 375399 - RNA, 20 nt, Artificial Sequence
  Synthetic
acuccuaaaacugcuauacu

SEQ ID NO: 375400 - RNA, 21 nt, Artificial Sequence
  Synthetic
uacuccuaaaacugcuauacu

SEQ ID NO: 375401 - RNA, 22 nt, Artificial Sequence
  Synthetic
cuacuccuaaaacugcuauacu

SEQ ID NO: 375402 - RNA, 23 nt, Artificial Sequence
  Synthetic
ccuacuccuaaaacugcuauacu

SEQ ID NO: 375403 - RNA, 24 nt, Artificial Sequence
  Synthetic
cccuacuccuaaaacugcuauacu

SEQ ID NO: 375404 - RNA, 18 nt, Artificial Sequence
  Synthetic
aaguugucagucuauacu

SEQ ID NO: 375405 - RNA, 19 nt, Artificial Sequence
  Synthetic
aaaguugucagucuauacu

SEQ ID NO: 375406 - RNA, 20 nt, Artificial Sequence
  Synthetic
gaaaguugucagucuauacu

SEQ ID NO: 375407 - RNA, 21 nt, Artificial Sequence
  Synthetic
ugaaaguugucagucuauacu

SEQ ID NO: 375408 - RNA, 22 nt, Artificial Sequence
  Synthetic
gugaaaguugucagucuauacu

SEQ ID NO: 375409 - RNA, 23 nt, Artificial Sequence
  Synthetic
ugugaaaguugucagucuauacu

SEQ ID NO: 375410 - RNA, 24 nt, Artificial Sequence
  Synthetic
augugaaaguugucagucuauacu

SEQ ID NO: 375411 - RNA, 18 nt, Artificial Sequence
  Synthetic
guaugcugcaaguauacu

SEQ ID NO: 375412 - RNA, 19 nt, Artificial Sequence
  Synthetic
uguaugcugcaaguauacu

SEQ ID NO: 375413 - RNA, 20 nt, Artificial Sequence
  Synthetic
auguaugcugcaaguauacu

SEQ ID NO: 375414 - RNA, 21 nt, Artificial Sequence
  Synthetic
aauguaugcugcaaguauacu

SEQ ID NO: 375415 - RNA, 22 nt, Artificial Sequence
  Synthetic
caauguaugcugcaaguauacu

SEQ ID NO: 375416 - RNA, 23 nt, Artificial Sequence
  Synthetic
acaauguaugcugcaaguauacu

SEQ ID NO: 375417 - RNA, 24 nt, Artificial Sequence
  Synthetic
cacaauguaugcugcaaguauacu

SEQ ID NO: 375418 - RNA, 18 nt, Artificial Sequence
  Synthetic
caugcacagcaguauacu

SEQ ID NO: 375419 - RNA, 19 nt, Artificial Sequence
  Synthetic
acaugcacagcaguauacu

SEQ ID NO: 375420 - RNA, 20 nt, Artificial Sequence
  Synthetic
aacaugcacagcaguauacu

SEQ ID NO: 375421 - RNA, 21 nt, Artificial Sequence
  Synthetic
caacaugcacagcaguauacu

SEQ ID NO: 375422 - RNA, 22 nt, Artificial Sequence
  Synthetic
ucaacaugcacagcaguauacu

SEQ ID NO: 375423 - RNA, 23 nt, Artificial Sequence
  Synthetic
cucaacaugcacagcaguauacu

SEQ ID NO: 375424 - RNA, 24 nt, Artificial Sequence
  Synthetic
ccucaacaugcacagcaguauacu

SEQ ID NO: 375425 - RNA, 18 nt, Artificial Sequence
  Synthetic
uuuuguucagaguauacu

SEQ ID NO: 375426 - RNA, 19 nt, Artificial Sequence
  Synthetic
auuuuguucagaguauacu

SEQ ID NO: 375427 - RNA, 20 nt, Artificial Sequence
  Synthetic
aauuuuguucagaguauacu

SEQ ID NO: 375428 - RNA, 21 nt, Artificial Sequence
  Synthetic
uaauuuuguucagaguauacu

SEQ ID NO: 375429 - RNA, 22 nt, Artificial Sequence
  Synthetic
uuaauuuuguucagaguauacu

SEQ ID NO: 375430 - RNA, 23 nt, Artificial Sequence
  Synthetic
uuuaauuuuguucagaguauacu

SEQ ID NO: 375431 - RNA, 24 nt, Artificial Sequence
  Synthetic
guuuaauuuuguucagaguauacu

SEQ ID NO: 375432 - RNA, 18 nt, Artificial Sequence
  Synthetic
gcaaugaaauaguauacu

SEQ ID NO: 375433 - RNA, 19 nt, Artificial Sequence
  Synthetic
agcaaugaaauaguauacu

SEQ ID NO: 375434 - RNA, 20 nt, Artificial Sequence
  Synthetic
aagcaaugaaauaguauacu

SEQ ID NO: 375435 - RNA, 21 nt, Artificial Sequence
  Synthetic
aaagcaaugaaauaguauacu

SEQ ID NO: 375436 - RNA, 22 nt, Artificial Sequence
  Synthetic
gaaagcaaugaaauaguauacu

SEQ ID NO: 375437 - RNA, 23 nt, Artificial Sequence
  Synthetic
ugaaagcaaugaaauaguauacu

SEQ ID NO: 375438 - RNA, 24 nt, Artificial Sequence
  Synthetic
augaaagcaaugaaauaguauacu

SEQ ID NO: 375439 - RNA, 18 nt, Artificial Sequence
  Synthetic
aacugaugugcuuauacu

SEQ ID NO: 375440 - RNA, 19 nt, Artificial Sequence
  Synthetic
uaacugaugugcuuauacu

SEQ ID NO: 375441 - RNA, 20 nt, Artificial Sequence
  Synthetic
auaacugaugugcuuauacu

SEQ ID NO: 375442 - RNA, 21 nt, Artificial Sequence
  Synthetic
gauaacugaugugcuuauacu

SEQ ID NO: 375443 - RNA, 22 nt, Artificial Sequence
  Synthetic
agauaacugaugugcuuauacu

SEQ ID NO: 375444 - RNA, 23 nt, Artificial Sequence
  Synthetic
uagauaacugaugugcuuauacu

SEQ ID NO: 375445 - RNA, 24 nt, Artificial Sequence
  Synthetic
uuagauaacugaugugcuuauacu

SEQ ID NO: 375446 - RNA, 18 nt, Artificial Sequence
  Synthetic
ucaauaaaaucuuauacu

SEQ ID NO: 375447 - RNA, 19 nt, Artificial Sequence
  Synthetic
gucaauaaaaucuuauacu

SEQ ID NO: 375448 - RNA, 20 nt, Artificial Sequence
  Synthetic
ugucaauaaaaucuuauacu

SEQ ID NO: 375449 - RNA, 21 nt, Artificial Sequence
  Synthetic
gugucaauaaaaucuuauacu

SEQ ID NO: 375450 - RNA, 22 nt, Artificial Sequence
  Synthetic
ugugucaauaaaaucuuauacu

SEQ ID NO: 375451 - RNA, 23 nt, Artificial Sequence
  Synthetic
augugucaauaaaaucuuauacu

SEQ ID NO: 375452 - RNA, 24 nt, Artificial Sequence
  Synthetic
uaugugucaauaaaaucuuauacu

SEQ ID NO: 375453 - RNA, 18 nt, Artificial Sequence
  Synthetic
caggguacugguuauacu

SEQ ID NO: 375454 - RNA, 19 nt, Artificial Sequence
  Synthetic
acaggguacugguuauacu

SEQ ID NO: 375455 - RNA, 20 nt, Artificial Sequence
  Synthetic
gacaggguacugguuauacu

SEQ ID NO: 375456 - RNA, 21 nt, Artificial Sequence
  Synthetic
ugacaggguacugguuauacu

SEQ ID NO: 375457 - RNA, 22 nt, Artificial Sequence
  Synthetic
uugacaggguacugguuauacu

SEQ ID NO: 375458 - RNA, 23 nt, Artificial Sequence
  Synthetic
guugacaggguacugguuauacu

SEQ ID NO: 375459 - RNA, 24 nt, Artificial Sequence
  Synthetic
aguugacaggguacugguuauacu

SEQ ID NO: 375460 - RNA, 18 nt, Artificial Sequence
  Synthetic
cagcucaaauguuauacu

SEQ ID NO: 375461 - RNA, 19 nt, Artificial Sequence
  Synthetic
ucagcucaaauguuauacu

SEQ ID NO: 375462 - RNA, 20 nt, Artificial Sequence
  Synthetic
cucagcucaaauguuauacu

SEQ ID NO: 375463 - RNA, 21 nt, Artificial Sequence
  Synthetic
ucucagcucaaauguuauacu

SEQ ID NO: 375464 - RNA, 22 nt, Artificial Sequence
  Synthetic
gucucagcucaaauguuauacu

SEQ ID NO: 375465 - RNA, 23 nt, Artificial Sequence
  Synthetic
ggucucagcucaaauguuauacu

SEQ ID NO: 375466 - RNA, 24 nt, Artificial Sequence
  Synthetic
aggucucagcucaaauguuauacu

SEQ ID NO: 375467 - RNA, 18 nt, Artificial Sequence
  Synthetic
uuugugugagaaacuacu

SEQ ID NO: 375468 - RNA, 19 nt, Artificial Sequence
  Synthetic
auuugugugagaaacuacu

SEQ ID NO: 375469 - RNA, 20 nt, Artificial Sequence
  Synthetic
gauuugugugagaaacuacu

SEQ ID NO: 375470 - RNA, 21 nt, Artificial Sequence
  Synthetic
ugauuugugugagaaacuacu

SEQ ID NO: 375471 - RNA, 22 nt, Artificial Sequence
  Synthetic
uugauuugugugagaaacuacu

SEQ ID NO: 375472 - RNA, 23 nt, Artificial Sequence
  Synthetic
uuugauuugugugagaaacuacu

SEQ ID NO: 375473 - RNA, 24 nt, Artificial Sequence
  Synthetic
auuugauuugugugagaaacuacu

SEQ ID NO: 375474 - RNA, 18 nt, Artificial Sequence
  Synthetic
uccuauuacgaaacuacu

SEQ ID NO: 375475 - RNA, 19 nt, Artificial Sequence
  Synthetic
cuccuauuacgaaacuacu

SEQ ID NO: 375476 - RNA, 20 nt, Artificial Sequence
  Synthetic
ucuccuauuacgaaacuacu

SEQ ID NO: 375477 - RNA, 21 nt, Artificial Sequence
  Synthetic
uucuccuauuacgaaacuacu

SEQ ID NO: 375478 - RNA, 22 nt, Artificial Sequence
  Synthetic
uuucuccuauuacgaaacuacu

SEQ ID NO: 375479 - RNA, 23 nt, Artificial Sequence
  Synthetic
uuuucuccuauuacgaaacuacu

SEQ ID NO: 375480 - RNA, 24 nt, Artificial Sequence
  Synthetic
cuuuucuccuauuacgaaacuacu

SEQ ID NO: 375481 - RNA, 18 nt, Artificial Sequence
  Synthetic
ccuauaaucccaacuacu

SEQ ID NO: 375482 - RNA, 19 nt, Artificial Sequence
  Synthetic
accuauaaucccaacuacu

SEQ ID NO: 375483 - RNA, 20 nt, Artificial Sequence
  Synthetic
caccuauaaucccaacuacu

SEQ ID NO: 375484 - RNA, 21 nt, Artificial Sequence
  Synthetic
acaccuauaaucccaacuacu

SEQ ID NO: 375485 - RNA, 22 nt, Artificial Sequence
  Synthetic
cacaccuauaaucccaacuacu

SEQ ID NO: 375486 - RNA, 23 nt, Artificial Sequence
  Synthetic
acacaccuauaaucccaacuacu

SEQ ID NO: 375487 - RNA, 24 nt, Artificial Sequence
  Synthetic
cacacaccuauaaucccaacuacu

SEQ ID NO: 375488 - RNA, 18 nt, Artificial Sequence
  Synthetic
ccuguaaucccaacuacu

SEQ ID NO: 375489 - RNA, 19 nt, Artificial Sequence
  Synthetic
gccuguaaucccaacuacu

SEQ ID NO: 375490 - RNA, 20 nt, Artificial Sequence
  Synthetic
cgccuguaaucccaacuacu

SEQ ID NO: 375491 - RNA, 21 nt, Artificial Sequence
  Synthetic
acgccuguaaucccaacuacu

SEQ ID NO: 375492 - RNA, 22 nt, Artificial Sequence
  Synthetic
cacgccuguaaucccaacuacu

SEQ ID NO: 375493 - RNA, 23 nt, Artificial Sequence
  Synthetic
acacgccuguaaucccaacuacu

SEQ ID NO: 375494 - RNA, 24 nt, Artificial Sequence
  Synthetic
cacacgccuguaaucccaacuacu

SEQ ID NO: 375495 - RNA, 18 nt, Artificial Sequence
  Synthetic
uugagcucauuaacuacu

SEQ ID NO: 375496 - RNA, 19 nt, Artificial Sequence
  Synthetic
guugagcucauuaacuacu

SEQ ID NO: 375497 - RNA, 20 nt, Artificial Sequence
  Synthetic
aguugagcucauuaacuacu

SEQ ID NO: 375498 - RNA, 21 nt, Artificial Sequence
  Synthetic
gaguugagcucauuaacuacu

SEQ ID NO: 375499 - RNA, 22 nt, Artificial Sequence
  Synthetic
ugaguugagcucauuaacuacu

SEQ ID NO: 375500 - RNA, 23 nt, Artificial Sequence
  Synthetic
uugaguugagcucauuaacuacu

SEQ ID NO: 375501 - RNA, 24 nt, Artificial Sequence
  Synthetic
cuugaguugagcucauuaacuacu

SEQ ID NO: 375502 - RNA, 18 nt, Artificial Sequence
  Synthetic
uagccagauuuaacuacu

SEQ ID NO: 375503 - RNA, 19 nt, Artificial Sequence
  Synthetic
auagccagauuuaacuacu

SEQ ID NO: 375504 - RNA, 20 nt, Artificial Sequence
  Synthetic
cauagccagauuuaacuacu

SEQ ID NO: 375505 - RNA, 21 nt, Artificial Sequence
  Synthetic
ucauagccagauuuaacuacu

SEQ ID NO: 375506 - RNA, 22 nt, Artificial Sequence
  Synthetic
aucauagccagauuuaacuacu

SEQ ID NO: 375507 - RNA, 23 nt, Artificial Sequence
  Synthetic
gaucauagccagauuuaacuacu

SEQ ID NO: 375508 - RNA, 24 nt, Artificial Sequence
  Synthetic
agaucauagccagauuuaacuacu

SEQ ID NO: 375509 - RNA, 18 nt, Artificial Sequence
  Synthetic
gccuguagucccacuacu

SEQ ID NO: 375510 - RNA, 19 nt, Artificial Sequence
  Synthetic
cgccuguagucccacuacu

SEQ ID NO: 375511 - RNA, 20 nt, Artificial Sequence
  Synthetic
gcgccuguagucccacuacu

SEQ ID NO: 375512 - RNA, 21 nt, Artificial Sequence
  Synthetic
ggcgccuguagucccacuacu

SEQ ID NO: 375513 - RNA, 22 nt, Artificial Sequence
  Synthetic
gggcgccuguagucccacuacu

SEQ ID NO: 375514 - RNA, 23 nt, Artificial Sequence
  Synthetic
ugggcgccuguagucccacuacu

SEQ ID NO: 375515 - RNA, 24 nt, Artificial Sequence
  Synthetic
gugggcgccuguagucccacuacu

SEQ ID NO: 375516 - RNA, 18 nt, Artificial Sequence
  Synthetic
aaaucuccccagacuacu

SEQ ID NO: 375517 - RNA, 19 nt, Artificial Sequence
  Synthetic
aaaaucuccccagacuacu

SEQ ID NO: 375518 - RNA, 20 nt, Artificial Sequence
  Synthetic
gaaaaucuccccagacuacu

SEQ ID NO: 375519 - RNA, 21 nt, Artificial Sequence
  Synthetic
ggaaaaucuccccagacuacu

SEQ ID NO: 375520 - RNA, 22 nt, Artificial Sequence
  Synthetic
uggaaaaucuccccagacuacu

SEQ ID NO: 375521 - RNA, 23 nt, Artificial Sequence
  Synthetic
auggaaaaucuccccagacuacu

SEQ ID NO: 375522 - RNA, 24 nt, Artificial Sequence
  Synthetic
cauggaaaaucuccccagacuacu

SEQ ID NO: 375523 - RNA, 18 nt, Artificial Sequence
  Synthetic
cuacucagagauacuacu

SEQ ID NO: 375524 - RNA, 19 nt, Artificial Sequence
  Synthetic
acuacucagagauacuacu

SEQ ID NO: 375525 - RNA, 20 nt, Artificial Sequence
  Synthetic
uacuacucagagauacuacu

SEQ ID NO: 375526 - RNA, 21 nt, Artificial Sequence
  Synthetic
guacuacucagagauacuacu

SEQ ID NO: 375527 - RNA, 22 nt, Artificial Sequence
  Synthetic
uguacuacucagagauacuacu

SEQ ID NO: 375528 - RNA, 23 nt, Artificial Sequence
  Synthetic
uuguacuacucagagauacuacu

SEQ ID NO: 375529 - RNA, 24 nt, Artificial Sequence
  Synthetic
uuuguacuacucagagauacuacu

SEQ ID NO: 375530 - RNA, 18 nt, Artificial Sequence
  Synthetic
aaccugguuuguacuacu

SEQ ID NO: 375531 - RNA, 19 nt, Artificial Sequence
  Synthetic
aaaccugguuuguacuacu

SEQ ID NO: 375532 - RNA, 20 nt, Artificial Sequence
  Synthetic
caaaccugguuuguacuacu

SEQ ID NO: 375533 - RNA, 21 nt, Artificial Sequence
  Synthetic
acaaaccugguuuguacuacu

SEQ ID NO: 375534 - RNA, 22 nt, Artificial Sequence
  Synthetic
uacaaaccugguuuguacuacu

SEQ ID NO: 375535 - RNA, 23 nt, Artificial Sequence
  Synthetic
guacaaaccugguuuguacuacu

SEQ ID NO: 375536 - RNA, 24 nt, Artificial Sequence
  Synthetic
aguacaaaccugguuuguacuacu

SEQ ID NO: 375537 - RNA, 18 nt, Artificial Sequence
  Synthetic
cgagaaauauuuacuacu

SEQ ID NO: 375538 - RNA, 19 nt, Artificial Sequence
  Synthetic
ccgagaaauauuuacuacu

SEQ ID NO: 375539 - RNA, 20 nt, Artificial Sequence
  Synthetic
cccgagaaauauuuacuacu

SEQ ID NO: 375540 - RNA, 21 nt, Artificial Sequence
  Synthetic
ccccgagaaauauuuacuacu

SEQ ID NO: 375541 - RNA, 22 nt, Artificial Sequence
  Synthetic
accccgagaaauauuuacuacu

SEQ ID NO: 375542 - RNA, 23 nt, Artificial Sequence
  Synthetic
caccccgagaaauauuuacuacu

SEQ ID NO: 375543 - RNA, 24 nt, Artificial Sequence
  Synthetic
ucaccccgagaaauauuuacuacu

SEQ ID NO: 375544 - RNA, 18 nt, Artificial Sequence
  Synthetic
augaccucaugaccuacu

SEQ ID NO: 375545 - RNA, 19 nt, Artificial Sequence
  Synthetic
gaugaccucaugaccuacu

SEQ ID NO: 375546 - RNA, 20 nt, Artificial Sequence
  Synthetic
agaugaccucaugaccuacu

SEQ ID NO: 375547 - RNA, 21 nt, Artificial Sequence
  Synthetic
aagaugaccucaugaccuacu

SEQ ID NO: 375548 - RNA, 22 nt, Artificial Sequence
  Synthetic
aaagaugaccucaugaccuacu

SEQ ID NO: 375549 - RNA, 23 nt, Artificial Sequence
  Synthetic
caaagaugaccucaugaccuacu

SEQ ID NO: 375550 - RNA, 24 nt, Artificial Sequence
  Synthetic
ucaaagaugaccucaugaccuacu

SEQ ID NO: 375551 - RNA, 18 nt, Artificial Sequence
  Synthetic
auuucauccugaccuacu

SEQ ID NO: 375552 - RNA, 19 nt, Artificial Sequence
  Synthetic
cauuucauccugaccuacu

SEQ ID NO: 375553 - RNA, 20 nt, Artificial Sequence
  Synthetic
ucauuucauccugaccuacu

SEQ ID NO: 375554 - RNA, 21 nt, Artificial Sequence
  Synthetic
aucauuucauccugaccuacu

SEQ ID NO: 375555 - RNA, 22 nt, Artificial Sequence
  Synthetic
aaucauuucauccugaccuacu

SEQ ID NO: 375556 - RNA, 23 nt, Artificial Sequence
  Synthetic
aaaucauuucauccugaccuacu

SEQ ID NO: 375557 - RNA, 24 nt, Artificial Sequence
  Synthetic
uaaaucauuucauccugaccuacu

SEQ ID NO: 375558 - RNA, 18 nt, Artificial Sequence
  Synthetic
uucccucuuauaccuacu

SEQ ID NO: 375559 - RNA, 19 nt, Artificial Sequence
  Synthetic
uuucccucuuauaccuacu

SEQ ID NO: 375560 - RNA, 20 nt, Artificial Sequence
  Synthetic
cuuucccucuuauaccuacu

SEQ ID NO: 375561 - RNA, 21 nt, Artificial Sequence
  Synthetic
acuuucccucuuauaccuacu

SEQ ID NO: 375562 - RNA, 22 nt, Artificial Sequence
  Synthetic
aacuuucccucuuauaccuacu

SEQ ID NO: 375563 - RNA, 23 nt, Artificial Sequence
  Synthetic
caacuuucccucuuauaccuacu

SEQ ID NO: 375564 - RNA, 24 nt, Artificial Sequence
  Synthetic
ucaacuuucccucuuauaccuacu

SEQ ID NO: 375565 - RNA, 18 nt, Artificial Sequence
  Synthetic
gagccagcccuaccuacu

SEQ ID NO: 375566 - RNA, 19 nt, Artificial Sequence
  Synthetic
agagccagcccuaccuacu

SEQ ID NO: 375567 - RNA, 20 nt, Artificial Sequence
  Synthetic
uagagccagcccuaccuacu

SEQ ID NO: 375568 - RNA, 21 nt, Artificial Sequence
  Synthetic
cuagagccagcccuaccuacu

SEQ ID NO: 375569 - RNA, 22 nt, Artificial Sequence
  Synthetic
ccuagagccagcccuaccuacu

SEQ ID NO: 375570 - RNA, 23 nt, Artificial Sequence
  Synthetic
gccuagagccagcccuaccuacu

SEQ ID NO: 375571 - RNA, 24 nt, Artificial Sequence
  Synthetic
ugccuagagccagcccuaccuacu

SEQ ID NO: 375572 - RNA, 18 nt, Artificial Sequence
  Synthetic
gcuaguuauuccccuacu

SEQ ID NO: 375573 - RNA, 19 nt, Artificial Sequence
  Synthetic
cgcuaguuauuccccuacu

SEQ ID NO: 375574 - RNA, 20 nt, Artificial Sequence
  Synthetic
ccgcuaguuauuccccuacu

SEQ ID NO: 375575 - RNA, 21 nt, Artificial Sequence
  Synthetic
uccgcuaguuauuccccuacu

SEQ ID NO: 375576 - RNA, 22 nt, Artificial Sequence
  Synthetic
auccgcuaguuauuccccuacu

SEQ ID NO: 375577 - RNA, 23 nt, Artificial Sequence
  Synthetic
uauccgcuaguuauuccccuacu

SEQ ID NO: 375578 - RNA, 24 nt, Artificial Sequence
  Synthetic
guauccgcuaguuauuccccuacu

SEQ ID NO: 375579 - RNA, 18 nt, Artificial Sequence
  Synthetic
gcuuuuaaaaugccuacu

SEQ ID NO: 375580 - RNA, 19 nt, Artificial Sequence
  Synthetic
agcuuuuaaaaugccuacu

SEQ ID NO: 375581 - RNA, 20 nt, Artificial Sequence
  Synthetic
cagcuuuuaaaaugccuacu

SEQ ID NO: 375582 - RNA, 21 nt, Artificial Sequence
  Synthetic
gcagcuuuuaaaaugccuacu

SEQ ID NO: 375583 - RNA, 22 nt, Artificial Sequence
  Synthetic
ggcagcuuuuaaaaugccuacu

SEQ ID NO: 375584 - RNA, 23 nt, Artificial Sequence
  Synthetic
aggcagcuuuuaaaaugccuacu

SEQ ID NO: 375585 - RNA, 24 nt, Artificial Sequence
  Synthetic
caggcagcuuuuaaaaugccuacu

SEQ ID NO: 375586 - RNA, 18 nt, Artificial Sequence
  Synthetic
ugucauagcgcuccuacu

SEQ ID NO: 375587 - RNA, 19 nt, Artificial Sequence
  Synthetic
uugucauagcgcuccuacu

SEQ ID NO: 375588 - RNA, 20 nt, Artificial Sequence
  Synthetic
guugucauagcgcuccuacu

SEQ ID NO: 375589 - RNA, 21 nt, Artificial Sequence
  Synthetic
gguugucauagcgcuccuacu

SEQ ID NO: 375590 - RNA, 22 nt, Artificial Sequence
  Synthetic
ugguugucauagcgcuccuacu

SEQ ID NO: 375591 - RNA, 23 nt, Artificial Sequence
  Synthetic
uugguugucauagcgcuccuacu

SEQ ID NO: 375592 - RNA, 24 nt, Artificial Sequence
  Synthetic
uuugguugucauagcgcuccuacu

SEQ ID NO: 375593 - RNA, 18 nt, Artificial Sequence
  Synthetic
acuugaaucacagcuacu

SEQ ID NO: 375594 - RNA, 19 nt, Artificial Sequence
  Synthetic
gacuugaaucacagcuacu

SEQ ID NO: 375595 - RNA, 20 nt, Artificial Sequence
  Synthetic
ugacuugaaucacagcuacu

SEQ ID NO: 375596 - RNA, 21 nt, Artificial Sequence
  Synthetic
augacuugaaucacagcuacu

SEQ ID NO: 375597 - RNA, 22 nt, Artificial Sequence
  Synthetic
caugacuugaaucacagcuacu

SEQ ID NO: 375598 - RNA, 23 nt, Artificial Sequence
  Synthetic
acaugacuugaaucacagcuacu

SEQ ID NO: 375599 - RNA, 24 nt, Artificial Sequence
  Synthetic
cacaugacuugaaucacagcuacu

SEQ ID NO: 375600 - RNA, 18 nt, Artificial Sequence
  Synthetic
ccuguaaccccagcuacu

SEQ ID NO: 375601 - RNA, 19 nt, Artificial Sequence
  Synthetic
gccuguaaccccagcuacu

SEQ ID NO: 375602 - RNA, 20 nt, Artificial Sequence
  Synthetic
ugccuguaaccccagcuacu

SEQ ID NO: 375603 - RNA, 21 nt, Artificial Sequence
  Synthetic
augccuguaaccccagcuacu

SEQ ID NO: 375604 - RNA, 22 nt, Artificial Sequence
  Synthetic
caugccuguaaccccagcuacu

SEQ ID NO: 375605 - RNA, 23 nt, Artificial Sequence
  Synthetic
gcaugccuguaaccccagcuacu

SEQ ID NO: 375606 - RNA, 24 nt, Artificial Sequence
  Synthetic
cgcaugccuguaaccccagcuacu

SEQ ID NO: 375607 - RNA, 18 nt, Artificial Sequence
  Synthetic
ccuguagccccagcuacu

SEQ ID NO: 375608 - RNA, 19 nt, Artificial Sequence
  Synthetic
cccuguagccccagcuacu

SEQ ID NO: 375609 - RNA, 20 nt, Artificial Sequence
  Synthetic
ccccuguagccccagcuacu

SEQ ID NO: 375610 - RNA, 21 nt, Artificial Sequence
  Synthetic
gccccuguagccccagcuacu

SEQ ID NO: 375611 - RNA, 22 nt, Artificial Sequence
  Synthetic
ugccccuguagccccagcuacu

SEQ ID NO: 375612 - RNA, 23 nt, Artificial Sequence
  Synthetic
gugccccuguagccccagcuacu

SEQ ID NO: 375613 - RNA, 24 nt, Artificial Sequence
  Synthetic
ugugccccuguagccccagcuacu

SEQ ID NO: 375614 - RNA, 18 nt, Artificial Sequence
  Synthetic
ccuauaaucccagcuacu

SEQ ID NO: 375615 - RNA, 19 nt, Artificial Sequence
  Synthetic
gccuauaaucccagcuacu

SEQ ID NO: 375616 - RNA, 20 nt, Artificial Sequence
  Synthetic
ugccuauaaucccagcuacu

SEQ ID NO: 375617 - RNA, 21 nt, Artificial Sequence
  Synthetic
augccuauaaucccagcuacu

SEQ ID NO: 375618 - RNA, 22 nt, Artificial Sequence
  Synthetic
caugccuauaaucccagcuacu

SEQ ID NO: 375619 - RNA, 23 nt, Artificial Sequence
  Synthetic
ccaugccuauaaucccagcuacu

SEQ ID NO: 375620 - RNA, 24 nt, Artificial Sequence
  Synthetic
cccaugccuauaaucccagcuacu

SEQ ID NO: 375621 - RNA, 20 nt, Artificial Sequence
  Synthetic
ugccucuaaucccagcuacu

SEQ ID NO: 375622 - RNA, 21 nt, Artificial Sequence
  Synthetic
gugccucuaaucccagcuacu

SEQ ID NO: 375623 - RNA, 22 nt, Artificial Sequence
  Synthetic
agugccucuaaucccagcuacu

SEQ ID NO: 375624 - RNA, 23 nt, Artificial Sequence
  Synthetic
gagugccucuaaucccagcuacu

SEQ ID NO: 375625 - RNA, 24 nt, Artificial Sequence
  Synthetic
ugagugccucuaaucccagcuacu

SEQ ID NO: 375626 - RNA, 18 nt, Artificial Sequence
  Synthetic
ccuguaaucccagcuacu

SEQ ID NO: 375627 - RNA, 21 nt, Artificial Sequence
  Synthetic
acaccuguaaucccagcuacu

SEQ ID NO: 375628 - RNA, 22 nt, Artificial Sequence
  Synthetic
cacaccuguaaucccagcuacu

SEQ ID NO: 375629 - RNA, 23 nt, Artificial Sequence
  Synthetic
gcacaccuguaaucccagcuacu

SEQ ID NO: 375630 - RNA, 24 nt, Artificial Sequence
  Synthetic
ugcacaccuguaaucccagcuacu

SEQ ID NO: 375631 - RNA, 19 nt, Artificial Sequence
  Synthetic
cccuguaaucccagcuacu

SEQ ID NO: 375632 - RNA, 20 nt, Artificial Sequence
  Synthetic
ucccuguaaucccagcuacu

SEQ ID NO: 375633 - RNA, 21 nt, Artificial Sequence
  Synthetic
aucccuguaaucccagcuacu

SEQ ID NO: 375634 - RNA, 22 nt, Artificial Sequence
  Synthetic
caucccuguaaucccagcuacu

SEQ ID NO: 375635 - RNA, 23 nt, Artificial Sequence
  Synthetic
gcaucccuguaaucccagcuacu

SEQ ID NO: 375636 - RNA, 24 nt, Artificial Sequence
  Synthetic
cgcaucccuguaaucccagcuacu

SEQ ID NO: 375637 - RNA, 21 nt, Artificial Sequence
  Synthetic
gcgccuguaaucccagcuacu

SEQ ID NO: 375638 - RNA, 22 nt, Artificial Sequence
  Synthetic
ggcgccuguaaucccagcuacu

SEQ ID NO: 375639 - RNA, 23 nt, Artificial Sequence
  Synthetic
aggcgccuguaaucccagcuacu

SEQ ID NO: 375640 - RNA, 24 nt, Artificial Sequence
  Synthetic
caggcgccuguaaucccagcuacu

SEQ ID NO: 375641 - RNA, 23 nt, Artificial Sequence
  Synthetic
gggcgccuguaaucccagcuacu

SEQ ID NO: 375642 - RNA, 24 nt, Artificial Sequence
  Synthetic
cgggcgccuguaaucccagcuacu

SEQ ID NO: 375643 - RNA, 22 nt, Artificial Sequence
  Synthetic
ugcgccuguaaucccagcuacu

SEQ ID NO: 375644 - RNA, 23 nt, Artificial Sequence
  Synthetic
gugcgccuguaaucccagcuacu

SEQ ID NO: 375645 - RNA, 24 nt, Artificial Sequence
  Synthetic
ugugcgccuguaaucccagcuacu

SEQ ID NO: 375646 - RNA, 21 nt, Artificial Sequence
  Synthetic
augccuguaaucccagcuacu

SEQ ID NO: 375647 - RNA, 22 nt, Artificial Sequence
  Synthetic
caugccuguaaucccagcuacu

SEQ ID NO: 375648 - RNA, 23 nt, Artificial Sequence
  Synthetic
gcaugccuguaaucccagcuacu

SEQ ID NO: 375649 - RNA, 24 nt, Artificial Sequence
  Synthetic
cgcaugccuguaaucccagcuacu

SEQ ID NO: 375650 - RNA, 24 nt, Artificial Sequence
  Synthetic
ugcaugccuguaaucccagcuacu

SEQ ID NO: 375651 - RNA, 24 nt, Artificial Sequence
  Synthetic
caggugccuguaaucccagcuacu

SEQ ID NO: 375652 - RNA, 19 nt, Artificial Sequence
  Synthetic
cucuguaaucccagcuacu

SEQ ID NO: 375653 - RNA, 20 nt, Artificial Sequence
  Synthetic
ccucuguaaucccagcuacu

SEQ ID NO: 375654 - RNA, 21 nt, Artificial Sequence
  Synthetic
accucuguaaucccagcuacu

SEQ ID NO: 375655 - RNA, 22 nt, Artificial Sequence
  Synthetic
caccucuguaaucccagcuacu

SEQ ID NO: 375656 - RNA, 23 nt, Artificial Sequence
  Synthetic
acaccucuguaaucccagcuacu

SEQ ID NO: 375657 - RNA, 24 nt, Artificial Sequence
  Synthetic
aacaccucuguaaucccagcuacu

SEQ ID NO: 375658 - RNA, 21 nt, Artificial Sequence
  Synthetic
augcuuguaaucccagcuacu

SEQ ID NO: 375659 - RNA, 22 nt, Artificial Sequence
  Synthetic
caugcuuguaaucccagcuacu

SEQ ID NO: 375660 - RNA, 23 nt, Artificial Sequence
  Synthetic
gcaugcuuguaaucccagcuacu

SEQ ID NO: 375661 - RNA, 24 nt, Artificial Sequence
  Synthetic
cgcaugcuuguaaucccagcuacu

SEQ ID NO: 375662 - RNA, 24 nt, Artificial Sequence
  Synthetic
ugcaugcuuguaaucccagcuacu

SEQ ID NO: 375663 - RNA, 18 nt, Artificial Sequence
  Synthetic
auuuuaaucccagcuacu

SEQ ID NO: 375664 - RNA, 19 nt, Artificial Sequence
  Synthetic
cauuuuaaucccagcuacu

SEQ ID NO: 375665 - RNA, 20 nt, Artificial Sequence
  Synthetic
gcauuuuaaucccagcuacu

SEQ ID NO: 375666 - RNA, 21 nt, Artificial Sequence
  Synthetic
cgcauuuuaaucccagcuacu

SEQ ID NO: 375667 - RNA, 22 nt, Artificial Sequence
  Synthetic
ucgcauuuuaaucccagcuacu

SEQ ID NO: 375668 - RNA, 23 nt, Artificial Sequence
  Synthetic
aucgcauuuuaaucccagcuacu

SEQ ID NO: 375669 - RNA, 24 nt, Artificial Sequence
  Synthetic
uaucgcauuuuaaucccagcuacu

SEQ ID NO: 375670 - RNA, 18 nt, Artificial Sequence
  Synthetic
ccuagagucccagcuacu

SEQ ID NO: 375671 - RNA, 19 nt, Artificial Sequence
  Synthetic
gccuagagucccagcuacu

SEQ ID NO: 375672 - RNA, 20 nt, Artificial Sequence
  Synthetic
ugccuagagucccagcuacu

SEQ ID NO: 375673 - RNA, 21 nt, Artificial Sequence
  Synthetic
augccuagagucccagcuacu

SEQ ID NO: 375674 - RNA, 22 nt, Artificial Sequence
  Synthetic
caugccuagagucccagcuacu

SEQ ID NO: 375675 - RNA, 23 nt, Artificial Sequence
  Synthetic
gcaugccuagagucccagcuacu

SEQ ID NO: 375676 - RNA, 24 nt, Artificial Sequence
  Synthetic
ugcaugccuagagucccagcuacu

SEQ ID NO: 375677 - RNA, 18 nt, Artificial Sequence
  Synthetic
cugauagucccagcuacu

SEQ ID NO: 375678 - RNA, 19 nt, Artificial Sequence
  Synthetic
gcugauagucccagcuacu

SEQ ID NO: 375679 - RNA, 20 nt, Artificial Sequence
  Synthetic
ugcugauagucccagcuacu

SEQ ID NO: 375680 - RNA, 21 nt, Artificial Sequence
  Synthetic
uugcugauagucccagcuacu

SEQ ID NO: 375681 - RNA, 22 nt, Artificial Sequence
  Synthetic
cuugcugauagucccagcuacu

SEQ ID NO: 375682 - RNA, 23 nt, Artificial Sequence
  Synthetic
gcuugcugauagucccagcuacu

SEQ ID NO: 375683 - RNA, 24 nt, Artificial Sequence
  Synthetic
cgcuugcugauagucccagcuacu

SEQ ID NO: 375684 - RNA, 21 nt, Artificial Sequence
  Synthetic
acgccuauagucccagcuacu

SEQ ID NO: 375685 - RNA, 22 nt, Artificial Sequence
  Synthetic
cacgccuauagucccagcuacu

SEQ ID NO: 375686 - RNA, 23 nt, Artificial Sequence
  Synthetic
gcacgccuauagucccagcuacu

SEQ ID NO: 375687 - RNA, 24 nt, Artificial Sequence
  Synthetic
ugcacgccuauagucccagcuacu

SEQ ID NO: 375688 - RNA, 21 nt, Artificial Sequence
  Synthetic
gcgccuauagucccagcuacu

SEQ ID NO: 375689 - RNA, 22 nt, Artificial Sequence
  Synthetic
ggcgccuauagucccagcuacu

SEQ ID NO: 375690 - RNA, 23 nt, Artificial Sequence
  Synthetic
gggcgccuauagucccagcuacu

SEQ ID NO: 375691 - RNA, 24 nt, Artificial Sequence
  Synthetic
cgggcgccuauagucccagcuacu

SEQ ID NO: 375692 - RNA, 24 nt, Artificial Sequence
  Synthetic
ugggcgccuauagucccagcuacu

SEQ ID NO: 375693 - RNA, 18 nt, Artificial Sequence
  Synthetic
ccgguagucccagcuacu

SEQ ID NO: 375694 - RNA, 19 nt, Artificial Sequence
  Synthetic
gccgguagucccagcuacu

SEQ ID NO: 375695 - RNA, 20 nt, Artificial Sequence
  Synthetic
ugccgguagucccagcuacu

SEQ ID NO: 375696 - RNA, 21 nt, Artificial Sequence
  Synthetic
gugccgguagucccagcuacu

SEQ ID NO: 375697 - RNA, 22 nt, Artificial Sequence
  Synthetic
ugugccgguagucccagcuacu

SEQ ID NO: 375698 - RNA, 23 nt, Artificial Sequence
  Synthetic
augugccgguagucccagcuacu

SEQ ID NO: 375699 - RNA, 24 nt, Artificial Sequence
  Synthetic
caugugccgguagucccagcuacu

SEQ ID NO: 375700 - RNA, 18 nt, Artificial Sequence
  Synthetic
ccuguagucccagcuacu

SEQ ID NO: 375701 - RNA, 19 nt, Artificial Sequence
  Synthetic
accuguagucccagcuacu

SEQ ID NO: 375702 - RNA, 20 nt, Artificial Sequence
  Synthetic
caccuguagucccagcuacu

SEQ ID NO: 375703 - RNA, 21 nt, Artificial Sequence
  Synthetic
gcaccuguagucccagcuacu

SEQ ID NO: 375704 - RNA, 22 nt, Artificial Sequence
  Synthetic
ggcaccuguagucccagcuacu

SEQ ID NO: 375705 - RNA, 23 nt, Artificial Sequence
  Synthetic
aggcaccuguagucccagcuacu

SEQ ID NO: 375706 - RNA, 24 nt, Artificial Sequence
  Synthetic
caggcaccuguagucccagcuacu

SEQ ID NO: 375707 - RNA, 21 nt, Artificial Sequence
  Synthetic
acgccuguagucccagcuacu

SEQ ID NO: 375708 - RNA, 22 nt, Artificial Sequence
  Synthetic
uacgccuguagucccagcuacu

SEQ ID NO: 375709 - RNA, 23 nt, Artificial Sequence
  Synthetic
guacgccuguagucccagcuacu

SEQ ID NO: 375710 - RNA, 24 nt, Artificial Sequence
  Synthetic
aguacgccuguagucccagcuacu

SEQ ID NO: 375711 - RNA, 23 nt, Artificial Sequence
  Synthetic
acgcgccuguagucccagcuacu

SEQ ID NO: 375712 - RNA, 24 nt, Artificial Sequence
  Synthetic
cacgcgccuguagucccagcuacu

SEQ ID NO: 375713 - RNA, 22 nt, Artificial Sequence
  Synthetic
ggcgccuguagucccagcuacu

SEQ ID NO: 375714 - RNA, 23 nt, Artificial Sequence
  Synthetic
aggcgccuguagucccagcuacu

SEQ ID NO: 375715 - RNA, 24 nt, Artificial Sequence
  Synthetic
caggcgccuguagucccagcuacu

SEQ ID NO: 375716 - RNA, 23 nt, Artificial Sequence
  Synthetic
gggcgccuguagucccagcuacu

SEQ ID NO: 375717 - RNA, 24 nt, Artificial Sequence
  Synthetic
ugggcgccuguagucccagcuacu

SEQ ID NO: 375718 - RNA, 21 nt, Artificial Sequence
  Synthetic
augccuguagucccagcuacu

SEQ ID NO: 375719 - RNA, 22 nt, Artificial Sequence
  Synthetic
caugccuguagucccagcuacu

SEQ ID NO: 375720 - RNA, 23 nt, Artificial Sequence
  Synthetic
gcaugccuguagucccagcuacu

SEQ ID NO: 375721 - RNA, 24 nt, Artificial Sequence
  Synthetic
ugcaugccuguagucccagcuacu

SEQ ID NO: 375722 - RNA, 21 nt, Artificial Sequence
  Synthetic
gugccuguagucccagcuacu

SEQ ID NO: 375723 - RNA, 22 nt, Artificial Sequence
  Synthetic
ggugccuguagucccagcuacu

SEQ ID NO: 375724 - RNA, 23 nt, Artificial Sequence
  Synthetic
gggugccuguagucccagcuacu

SEQ ID NO: 375725 - RNA, 24 nt, Artificial Sequence
  Synthetic
ugggugccuguagucccagcuacu

SEQ ID NO: 375726 - RNA, 22 nt, Artificial Sequence
  Synthetic
ugugccuguagucccagcuacu

SEQ ID NO: 375727 - RNA, 23 nt, Artificial Sequence
  Synthetic
augugccuguagucccagcuacu

SEQ ID NO: 375728 - RNA, 24 nt, Artificial Sequence
  Synthetic
caugugccuguagucccagcuacu

SEQ ID NO: 375729 - RNA, 23 nt, Artificial Sequence
  Synthetic
gugugccuguagucccagcuacu

SEQ ID NO: 375730 - RNA, 24 nt, Artificial Sequence
  Synthetic
ugugugccuguagucccagcuacu

SEQ ID NO: 375731 - RNA, 18 nt, Artificial Sequence
  Synthetic
ucuguagucccagcuacu

SEQ ID NO: 375732 - RNA, 19 nt, Artificial Sequence
  Synthetic
aucuguagucccagcuacu

SEQ ID NO: 375733 - RNA, 20 nt, Artificial Sequence
  Synthetic
caucuguagucccagcuacu

SEQ ID NO: 375734 - RNA, 21 nt, Artificial Sequence
  Synthetic
gcaucuguagucccagcuacu

SEQ ID NO: 375735 - RNA, 22 nt, Artificial Sequence
  Synthetic
ggcaucuguagucccagcuacu

SEQ ID NO: 375736 - RNA, 23 nt, Artificial Sequence
  Synthetic
aggcaucuguagucccagcuacu

SEQ ID NO: 375737 - RNA, 24 nt, Artificial Sequence
  Synthetic
caggcaucuguagucccagcuacu

SEQ ID NO: 375738 - RNA, 18 nt, Artificial Sequence
  Synthetic
cuuguagucccagcuacu

SEQ ID NO: 375739 - RNA, 19 nt, Artificial Sequence
  Synthetic
gcuuguagucccagcuacu

SEQ ID NO: 375740 - RNA, 20 nt, Artificial Sequence
  Synthetic
cgcuuguagucccagcuacu

SEQ ID NO: 375741 - RNA, 21 nt, Artificial Sequence
  Synthetic
gcgcuuguagucccagcuacu

SEQ ID NO: 375742 - RNA, 22 nt, Artificial Sequence
  Synthetic
ugcgcuuguagucccagcuacu

SEQ ID NO: 375743 - RNA, 23 nt, Artificial Sequence
  Synthetic
augcgcuuguagucccagcuacu

SEQ ID NO: 375744 - RNA, 24 nt, Artificial Sequence
  Synthetic
caugcgcuuguagucccagcuacu

SEQ ID NO: 375745 - RNA, 18 nt, Artificial Sequence
  Synthetic
uuuguagucccagcuacu

SEQ ID NO: 375746 - RNA, 19 nt, Artificial Sequence
  Synthetic
guuuguagucccagcuacu

SEQ ID NO: 375747 - RNA, 20 nt, Artificial Sequence
  Synthetic
aguuuguagucccagcuacu

SEQ ID NO: 375748 - RNA, 21 nt, Artificial Sequence
  Synthetic
aaguuuguagucccagcuacu

SEQ ID NO: 375749 - RNA, 22 nt, Artificial Sequence
  Synthetic
caaguuuguagucccagcuacu

SEQ ID NO: 375750 - RNA, 23 nt, Artificial Sequence
  Synthetic
ccaaguuuguagucccagcuacu

SEQ ID NO: 375751 - RNA, 24 nt, Artificial Sequence
  Synthetic
gccaaguuuguagucccagcuacu

SEQ ID NO: 375752 - RNA, 18 nt, Artificial Sequence
  Synthetic
ccuguggucccagcuacu

SEQ ID NO: 375753 - RNA, 19 nt, Artificial Sequence
  Synthetic
gccuguggucccagcuacu

SEQ ID NO: 375754 - RNA, 21 nt, Artificial Sequence
  Synthetic
gcgccuguggucccagcuacu

SEQ ID NO: 375755 - RNA, 22 nt, Artificial Sequence
  Synthetic
ggcgccuguggucccagcuacu

SEQ ID NO: 375756 - RNA, 23 nt, Artificial Sequence
  Synthetic
gggcgccuguggucccagcuacu

SEQ ID NO: 375757 - RNA, 24 nt, Artificial Sequence
  Synthetic
cgggcgccuguggucccagcuacu

SEQ ID NO: 375758 - RNA, 24 nt, Artificial Sequence
  Synthetic
ugggcgccuguggucccagcuacu

SEQ ID NO: 375759 - RNA, 20 nt, Artificial Sequence
  Synthetic
ugccuguggucccagcuacu

SEQ ID NO: 375760 - RNA, 21 nt, Artificial Sequence
  Synthetic
gugccuguggucccagcuacu

SEQ ID NO: 375761 - RNA, 22 nt, Artificial Sequence
  Synthetic
ggugccuguggucccagcuacu

SEQ ID NO: 375762 - RNA, 23 nt, Artificial Sequence
  Synthetic
gggugccuguggucccagcuacu

SEQ ID NO: 375763 - RNA, 24 nt, Artificial Sequence
  Synthetic
ugggugccuguggucccagcuacu

SEQ ID NO: 375764 - RNA, 18 nt, Artificial Sequence
  Synthetic
ccuguaaucucagcuacu

SEQ ID NO: 375765 - RNA, 19 nt, Artificial Sequence
  Synthetic
accuguaaucucagcuacu

SEQ ID NO: 375766 - RNA, 20 nt, Artificial Sequence
  Synthetic
caccuguaaucucagcuacu

SEQ ID NO: 375767 - RNA, 21 nt, Artificial Sequence
  Synthetic
gcaccuguaaucucagcuacu

SEQ ID NO: 375768 - RNA, 22 nt, Artificial Sequence
  Synthetic
cgcaccuguaaucucagcuacu

SEQ ID NO: 375769 - RNA, 23 nt, Artificial Sequence
  Synthetic
acgcaccuguaaucucagcuacu

SEQ ID NO: 375770 - RNA, 24 nt, Artificial Sequence
  Synthetic
cacgcaccuguaaucucagcuacu

SEQ ID NO: 375771 - RNA, 19 nt, Artificial Sequence
  Synthetic
gccuguaaucucagcuacu

SEQ ID NO: 375772 - RNA, 20 nt, Artificial Sequence
  Synthetic
ugccuguaaucucagcuacu

SEQ ID NO: 375773 - RNA, 21 nt, Artificial Sequence
  Synthetic
augccuguaaucucagcuacu

SEQ ID NO: 375774 - RNA, 22 nt, Artificial Sequence
  Synthetic
caugccuguaaucucagcuacu

SEQ ID NO: 375775 - RNA, 23 nt, Artificial Sequence
  Synthetic
gcaugccuguaaucucagcuacu

SEQ ID NO: 375776 - RNA, 24 nt, Artificial Sequence
  Synthetic
ugcaugccuguaaucucagcuacu

SEQ ID NO: 375777 - RNA, 18 nt, Artificial Sequence
  Synthetic
ccuguagucucagcuacu

SEQ ID NO: 375778 - RNA, 19 nt, Artificial Sequence
  Synthetic
accuguagucucagcuacu

SEQ ID NO: 375779 - RNA, 20 nt, Artificial Sequence
  Synthetic
caccuguagucucagcuacu

SEQ ID NO: 375780 - RNA, 21 nt, Artificial Sequence
  Synthetic
gcaccuguagucucagcuacu

SEQ ID NO: 375781 - RNA, 22 nt, Artificial Sequence
  Synthetic
ggcaccuguagucucagcuacu

SEQ ID NO: 375782 - RNA, 23 nt, Artificial Sequence
  Synthetic
aggcaccuguagucucagcuacu

SEQ ID NO: 375783 - RNA, 24 nt, Artificial Sequence
  Synthetic
caggcaccuguagucucagcuacu

SEQ ID NO: 375784 - RNA, 18 nt, Artificial Sequence
  Synthetic
uguuacauuugagcuacu

SEQ ID NO: 375785 - RNA, 19 nt, Artificial Sequence
  Synthetic
auguuacauuugagcuacu

SEQ ID NO: 375786 - RNA, 20 nt, Artificial Sequence
  Synthetic
uauguuacauuugagcuacu

SEQ ID NO: 375787 - RNA, 21 nt, Artificial Sequence
  Synthetic
auauguuacauuugagcuacu

SEQ ID NO: 375788 - RNA, 22 nt, Artificial Sequence
  Synthetic
uauauguuacauuugagcuacu

SEQ ID NO: 375789 - RNA, 23 nt, Artificial Sequence
  Synthetic
auauauguuacauuugagcuacu

SEQ ID NO: 375790 - RNA, 24 nt, Artificial Sequence
  Synthetic
gauauauguuacauuugagcuacu

SEQ ID NO: 375791 - RNA, 18 nt, Artificial Sequence
  Synthetic
ccuguaauccuagcuacu

SEQ ID NO: 375792 - RNA, 19 nt, Artificial Sequence
  Synthetic
gccuguaauccuagcuacu

SEQ ID NO: 375793 - RNA, 20 nt, Artificial Sequence
  Synthetic
cgccuguaauccuagcuacu

SEQ ID NO: 375794 - RNA, 21 nt, Artificial Sequence
  Synthetic
gcgccuguaauccuagcuacu

SEQ ID NO: 375795 - RNA, 22 nt, Artificial Sequence
  Synthetic
ugcgccuguaauccuagcuacu

SEQ ID NO: 375796 - RNA, 23 nt, Artificial Sequence
  Synthetic
cugcgccuguaauccuagcuacu

SEQ ID NO: 375797 - RNA, 24 nt, Artificial Sequence
  Synthetic
ccugcgccuguaauccuagcuacu

SEQ ID NO: 375798 - RNA, 18 nt, Artificial Sequence
  Synthetic
uaguacugaguagcuacu

SEQ ID NO: 375799 - RNA, 19 nt, Artificial Sequence
  Synthetic
guaguacugaguagcuacu

SEQ ID NO: 375800 - RNA, 20 nt, Artificial Sequence
  Synthetic
aguaguacugaguagcuacu

SEQ ID NO: 375801 - RNA, 21 nt, Artificial Sequence
  Synthetic
uaguaguacugaguagcuacu

SEQ ID NO: 375802 - RNA, 22 nt, Artificial Sequence
  Synthetic
guaguaguacugaguagcuacu

SEQ ID NO: 375803 - RNA, 23 nt, Artificial Sequence
  Synthetic
aguaguaguacugaguagcuacu

SEQ ID NO: 375804 - RNA, 24 nt, Artificial Sequence
  Synthetic
caguaguaguacugaguagcuacu

SEQ ID NO: 375805 - RNA, 18 nt, Artificial Sequence
  Synthetic
cuuguagccuuagcuacu

SEQ ID NO: 375806 - RNA, 19 nt, Artificial Sequence
  Synthetic
gcuuguagccuuagcuacu

SEQ ID NO: 375807 - RNA, 20 nt, Artificial Sequence
  Synthetic
ggcuuguagccuuagcuacu

SEQ ID NO: 375808 - RNA, 21 nt, Artificial Sequence
  Synthetic
gggcuuguagccuuagcuacu

SEQ ID NO: 375809 - RNA, 22 nt, Artificial Sequence
  Synthetic
ugggcuuguagccuuagcuacu

SEQ ID NO: 375810 - RNA, 23 nt, Artificial Sequence
  Synthetic
gugggcuuguagccuuagcuacu

SEQ ID NO: 375811 - RNA, 24 nt, Artificial Sequence
  Synthetic
ugugggcuuguagccuuagcuacu

SEQ ID NO: 375812 - RNA, 18 nt, Artificial Sequence
  Synthetic
gaaauagucuuagcuacu

SEQ ID NO: 375813 - RNA, 19 nt, Artificial Sequence
  Synthetic
agaaauagucuuagcuacu

SEQ ID NO: 375814 - RNA, 20 nt, Artificial Sequence
  Synthetic
aagaaauagucuuagcuacu

SEQ ID NO: 375815 - RNA, 21 nt, Artificial Sequence
  Synthetic
gaagaaauagucuuagcuacu

SEQ ID NO: 375816 - RNA, 22 nt, Artificial Sequence
  Synthetic
agaagaaauagucuuagcuacu

SEQ ID NO: 375817 - RNA, 23 nt, Artificial Sequence
  Synthetic
aagaagaaauagucuuagcuacu

SEQ ID NO: 375818 - RNA, 24 nt, Artificial Sequence
  Synthetic
gaagaagaaauagucuuagcuacu

SEQ ID NO: 375819 - RNA, 18 nt, Artificial Sequence
  Synthetic
cgaaaccacaucgcuacu

SEQ ID NO: 375820 - RNA, 19 nt, Artificial Sequence
  Synthetic
gcgaaaccacaucgcuacu

SEQ ID NO: 375821 - RNA, 20 nt, Artificial Sequence
  Synthetic
ggcgaaaccacaucgcuacu

SEQ ID NO: 375822 - RNA, 21 nt, Artificial Sequence
  Synthetic
uggcgaaaccacaucgcuacu

SEQ ID NO: 375823 - RNA, 22 nt, Artificial Sequence
  Synthetic
auggcgaaaccacaucgcuacu

SEQ ID NO: 375824 - RNA, 23 nt, Artificial Sequence
  Synthetic
cauggcgaaaccacaucgcuacu

SEQ ID NO: 375825 - RNA, 24 nt, Artificial Sequence
  Synthetic
acauggcgaaaccacaucgcuacu

SEQ ID NO: 375826 - RNA, 18 nt, Artificial Sequence
  Synthetic
guagcuauugaggcuacu

SEQ ID NO: 375827 - RNA, 19 nt, Artificial Sequence
  Synthetic
aguagcuauugaggcuacu

SEQ ID NO: 375828 - RNA, 20 nt, Artificial Sequence
  Synthetic
aaguagcuauugaggcuacu

SEQ ID NO: 375829 - RNA, 21 nt, Artificial Sequence
  Synthetic
aaaguagcuauugaggcuacu

SEQ ID NO: 375830 - RNA, 22 nt, Artificial Sequence
  Synthetic
uaaaguagcuauugaggcuacu

SEQ ID NO: 375831 - RNA, 23 nt, Artificial Sequence
  Synthetic
auaaaguagcuauugaggcuacu

SEQ ID NO: 375832 - RNA, 24 nt, Artificial Sequence
  Synthetic
aauaaaguagcuauugaggcuacu

SEQ ID NO: 375833 - RNA, 18 nt, Artificial Sequence
  Synthetic
ccuguaguuccugcuacu

SEQ ID NO: 375834 - RNA, 19 nt, Artificial Sequence
  Synthetic
gccuguaguuccugcuacu

SEQ ID NO: 375835 - RNA, 20 nt, Artificial Sequence
  Synthetic
ugccuguaguuccugcuacu

SEQ ID NO: 375836 - RNA, 21 nt, Artificial Sequence
  Synthetic
gugccuguaguuccugcuacu

SEQ ID NO: 375837 - RNA, 22 nt, Artificial Sequence
  Synthetic
cgugccuguaguuccugcuacu

SEQ ID NO: 375838 - RNA, 23 nt, Artificial Sequence
  Synthetic
acgugccuguaguuccugcuacu

SEQ ID NO: 375839 - RNA, 24 nt, Artificial Sequence
  Synthetic
cacgugccuguaguuccugcuacu

SEQ ID NO: 375840 - RNA, 18 nt, Artificial Sequence
  Synthetic
auuucuggguuugcuacu

SEQ ID NO: 375841 - RNA, 19 nt, Artificial Sequence
  Synthetic
uauuucuggguuugcuacu

SEQ ID NO: 375842 - RNA, 20 nt, Artificial Sequence
  Synthetic
uuauuucuggguuugcuacu

SEQ ID NO: 375843 - RNA, 21 nt, Artificial Sequence
  Synthetic
uuuauuucuggguuugcuacu

SEQ ID NO: 375844 - RNA, 22 nt, Artificial Sequence
  Synthetic
uuuuauuucuggguuugcuacu

SEQ ID NO: 375845 - RNA, 23 nt, Artificial Sequence
  Synthetic
uuuuuauuucuggguuugcuacu

SEQ ID NO: 375846 - RNA, 24 nt, Artificial Sequence
  Synthetic
auuuuuauuucuggguuugcuacu

SEQ ID NO: 375847 - RNA, 18 nt, Artificial Sequence
  Synthetic
ccuguagucccaucuacu

SEQ ID NO: 375848 - RNA, 19 nt, Artificial Sequence
  Synthetic
gccuguagucccaucuacu

SEQ ID NO: 375849 - RNA, 20 nt, Artificial Sequence
  Synthetic
ugccuguagucccaucuacu

SEQ ID NO: 375850 - RNA, 21 nt, Artificial Sequence
  Synthetic
gugccuguagucccaucuacu

SEQ ID NO: 375851 - RNA, 22 nt, Artificial Sequence
  Synthetic
cgugccuguagucccaucuacu

SEQ ID NO: 375852 - RNA, 23 nt, Artificial Sequence
  Synthetic
gcgugccuguagucccaucuacu

SEQ ID NO: 375853 - RNA, 24 nt, Artificial Sequence
  Synthetic
cgcgugccuguagucccaucuacu

SEQ ID NO: 375854 - RNA, 18 nt, Artificial Sequence
  Synthetic
ucagucaccuuaucuacu

SEQ ID NO: 375855 - RNA, 19 nt, Artificial Sequence
  Synthetic
uucagucaccuuaucuacu

SEQ ID NO: 375856 - RNA, 20 nt, Artificial Sequence
  Synthetic
uuucagucaccuuaucuacu

SEQ ID NO: 375857 - RNA, 21 nt, Artificial Sequence
  Synthetic
auuucagucaccuuaucuacu

SEQ ID NO: 375858 - RNA, 22 nt, Artificial Sequence
  Synthetic
gauuucagucaccuuaucuacu

SEQ ID NO: 375859 - RNA, 23 nt, Artificial Sequence
  Synthetic
ugauuucagucaccuuaucuacu

SEQ ID NO: 375860 - RNA, 24 nt, Artificial Sequence
  Synthetic
augauuucagucaccuuaucuacu

SEQ ID NO: 375861 - RNA, 18 nt, Artificial Sequence
  Synthetic
uacagagauuuaucuacu

SEQ ID NO: 375862 - RNA, 19 nt, Artificial Sequence
  Synthetic
cuacagagauuuaucuacu

SEQ ID NO: 375863 - RNA, 20 nt, Artificial Sequence
  Synthetic
ucuacagagauuuaucuacu

SEQ ID NO: 375864 - RNA, 21 nt, Artificial Sequence
  Synthetic
uucuacagagauuuaucuacu

SEQ ID NO: 375865 - RNA, 22 nt, Artificial Sequence
  Synthetic
uuucuacagagauuuaucuacu

SEQ ID NO: 375866 - RNA, 23 nt, Artificial Sequence
  Synthetic
uuuucuacagagauuuaucuacu

SEQ ID NO: 375867 - RNA, 24 nt, Artificial Sequence
  Synthetic
auuuucuacagagauuuaucuacu

SEQ ID NO: 375868 - RNA, 18 nt, Artificial Sequence
  Synthetic
ggcuuuaccagcucuacu

SEQ ID NO: 375869 - RNA, 19 nt, Artificial Sequence
  Synthetic
cggcuuuaccagcucuacu

SEQ ID NO: 375870 - RNA, 20 nt, Artificial Sequence
  Synthetic
ucggcuuuaccagcucuacu

SEQ ID NO: 375871 - RNA, 21 nt, Artificial Sequence
  Synthetic
uucggcuuuaccagcucuacu

SEQ ID NO: 375872 - RNA, 22 nt, Artificial Sequence
  Synthetic
cuucggcuuuaccagcucuacu

SEQ ID NO: 375873 - RNA, 23 nt, Artificial Sequence
  Synthetic
ucuucggcuuuaccagcucuacu

SEQ ID NO: 375874 - RNA, 24 nt, Artificial Sequence
  Synthetic
cucuucggcuuuaccagcucuacu

SEQ ID NO: 375875 - RNA, 18 nt, Artificial Sequence
  Synthetic
auucuaaaguggucuacu

SEQ ID NO: 375876 - RNA, 19 nt, Artificial Sequence
  Synthetic
cauucuaaaguggucuacu

SEQ ID NO: 375877 - RNA, 20 nt, Artificial Sequence
  Synthetic
ccauucuaaaguggucuacu

SEQ ID NO: 375878 - RNA, 21 nt, Artificial Sequence
  Synthetic
gccauucuaaaguggucuacu

SEQ ID NO: 375879 - RNA, 22 nt, Artificial Sequence
  Synthetic
ggccauucuaaaguggucuacu

SEQ ID NO: 375880 - RNA, 23 nt, Artificial Sequence
  Synthetic
gggccauucuaaaguggucuacu

SEQ ID NO: 375881 - RNA, 24 nt, Artificial Sequence
  Synthetic
agggccauucuaaaguggucuacu

SEQ ID NO: 375882 - RNA, 18 nt, Artificial Sequence
  Synthetic
aauauuguuuguucuacu

SEQ ID NO: 375883 - RNA, 19 nt, Artificial Sequence
  Synthetic
aaauauuguuuguucuacu

SEQ ID NO: 375884 - RNA, 20 nt, Artificial Sequence
  Synthetic
uaaauauuguuuguucuacu

SEQ ID NO: 375885 - RNA, 21 nt, Artificial Sequence
  Synthetic
guaaauauuguuuguucuacu

SEQ ID NO: 375886 - RNA, 22 nt, Artificial Sequence
  Synthetic
uguaaauauuguuuguucuacu

SEQ ID NO: 375887 - RNA, 23 nt, Artificial Sequence
  Synthetic
guguaaauauuguuuguucuacu

SEQ ID NO: 375888 - RNA, 24 nt, Artificial Sequence
  Synthetic
aguguaaauauuguuuguucuacu

SEQ ID NO: 375889 - RNA, 18 nt, Artificial Sequence
  Synthetic
ggcaugucaauuucuacu

SEQ ID NO: 375890 - RNA, 19 nt, Artificial Sequence
  Synthetic
uggcaugucaauuucuacu

SEQ ID NO: 375891 - RNA, 20 nt, Artificial Sequence
  Synthetic
uuggcaugucaauuucuacu

SEQ ID NO: 375892 - RNA, 21 nt, Artificial Sequence
  Synthetic
auuggcaugucaauuucuacu

SEQ ID NO: 375893 - RNA, 22 nt, Artificial Sequence
  Synthetic
gauuggcaugucaauuucuacu

SEQ ID NO: 375894 - RNA, 23 nt, Artificial Sequence
  Synthetic
ggauuggcaugucaauuucuacu

SEQ ID NO: 375895 - RNA, 24 nt, Artificial Sequence
  Synthetic
aggauuggcaugucaauuucuacu

SEQ ID NO: 375896 - RNA, 18 nt, Artificial Sequence
  Synthetic
ucaacucucgaaaguacu

SEQ ID NO: 375897 - RNA, 19 nt, Artificial Sequence
  Synthetic
gucaacucucgaaaguacu

SEQ ID NO: 375898 - RNA, 20 nt, Artificial Sequence
  Synthetic
agucaacucucgaaaguacu

SEQ ID NO: 375899 - RNA, 21 nt, Artificial Sequence
  Synthetic
cagucaacucucgaaaguacu

SEQ ID NO: 375900 - RNA, 22 nt, Artificial Sequence
  Synthetic
acagucaacucucgaaaguacu

SEQ ID NO: 375901 - RNA, 23 nt, Artificial Sequence
  Synthetic
uacagucaacucucgaaaguacu

SEQ ID NO: 375902 - RNA, 24 nt, Artificial Sequence
  Synthetic
cuacagucaacucucgaaaguacu

SEQ ID NO: 375903 - RNA, 18 nt, Artificial Sequence
  Synthetic
uuaugaucauaaaguacu

SEQ ID NO: 375904 - RNA, 19 nt, Artificial Sequence
  Synthetic
auuaugaucauaaaguacu

SEQ ID NO: 375905 - RNA, 20 nt, Artificial Sequence
  Synthetic
uauuaugaucauaaaguacu

SEQ ID NO: 375906 - RNA, 21 nt, Artificial Sequence
  Synthetic
uuauuaugaucauaaaguacu

SEQ ID NO: 375907 - RNA, 22 nt, Artificial Sequence
  Synthetic
uuuauuaugaucauaaaguacu

SEQ ID NO: 375908 - RNA, 23 nt, Artificial Sequence
  Synthetic
auuuauuaugaucauaaaguacu

SEQ ID NO: 375909 - RNA, 24 nt, Artificial Sequence
  Synthetic
gauuuauuaugaucauaaaguacu

SEQ ID NO: 375910 - RNA, 18 nt, Artificial Sequence
  Synthetic
accugaauuccaaguacu

SEQ ID NO: 375911 - RNA, 19 nt, Artificial Sequence
  Synthetic
aaccugaauuccaaguacu

SEQ ID NO: 375912 - RNA, 20 nt, Artificial Sequence
  Synthetic
aaaccugaauuccaaguacu

SEQ ID NO: 375913 - RNA, 21 nt, Artificial Sequence
  Synthetic
gaaaccugaauuccaaguacu

SEQ ID NO: 375914 - RNA, 22 nt, Artificial Sequence
  Synthetic
ggaaaccugaauuccaaguacu

SEQ ID NO: 375915 - RNA, 23 nt, Artificial Sequence
  Synthetic
uggaaaccugaauuccaaguacu

SEQ ID NO: 375916 - RNA, 24 nt, Artificial Sequence
  Synthetic
uuggaaaccugaauuccaaguacu

SEQ ID NO: 375917 - RNA, 18 nt, Artificial Sequence
  Synthetic
gcaggaaggagaaguacu

SEQ ID NO: 375918 - RNA, 19 nt, Artificial Sequence
  Synthetic
ggcaggaaggagaaguacu

SEQ ID NO: 375919 - RNA, 20 nt, Artificial Sequence
  Synthetic
uggcaggaaggagaaguacu

SEQ ID NO: 375920 - RNA, 21 nt, Artificial Sequence
  Synthetic
guggcaggaaggagaaguacu

SEQ ID NO: 375921 - RNA, 22 nt, Artificial Sequence
  Synthetic
gguggcaggaaggagaaguacu

SEQ ID NO: 375922 - RNA, 23 nt, Artificial Sequence
  Synthetic
agguggcaggaaggagaaguacu

SEQ ID NO: 375923 - RNA, 24 nt, Artificial Sequence
  Synthetic
aagguggcaggaaggagaaguacu

SEQ ID NO: 375924 - RNA, 18 nt, Artificial Sequence
  Synthetic
uaauuaauauacaguacu

SEQ ID NO: 375925 - RNA, 19 nt, Artificial Sequence
  Synthetic
auaauuaauauacaguacu

SEQ ID NO: 375926 - RNA, 20 nt, Artificial Sequence
  Synthetic
aauaauuaauauacaguacu

SEQ ID NO: 375927 - RNA, 21 nt, Artificial Sequence
  Synthetic
aaauaauuaauauacaguacu

SEQ ID NO: 375928 - RNA, 22 nt, Artificial Sequence
  Synthetic
uaaauaauuaauauacaguacu

SEQ ID NO: 375929 - RNA, 23 nt, Artificial Sequence
  Synthetic
uuaaauaauuaauauacaguacu

SEQ ID NO: 375930 - RNA, 24 nt, Artificial Sequence
  Synthetic
uuuaaauaauuaauauacaguacu

SEQ ID NO: 375931 - RNA, 18 nt, Artificial Sequence
  Synthetic
gccuguaaucccaguacu

SEQ ID NO: 375932 - RNA, 19 nt, Artificial Sequence
  Synthetic
agccuguaaucccaguacu

SEQ ID NO: 375933 - RNA, 20 nt, Artificial Sequence
  Synthetic
cagccuguaaucccaguacu

SEQ ID NO: 375934 - RNA, 21 nt, Artificial Sequence
  Synthetic
gcagccuguaaucccaguacu

SEQ ID NO: 375935 - RNA, 22 nt, Artificial Sequence
  Synthetic
cgcagccuguaaucccaguacu

SEQ ID NO: 375936 - RNA, 23 nt, Artificial Sequence
  Synthetic
gcgcagccuguaaucccaguacu

SEQ ID NO: 375937 - RNA, 24 nt, Artificial Sequence
  Synthetic
ggcgcagccuguaaucccaguacu

SEQ ID NO: 375938 - RNA, 18 nt, Artificial Sequence
  Synthetic
aaccaacucaagaguacu

SEQ ID NO: 375939 - RNA, 19 nt, Artificial Sequence
  Synthetic
uaaccaacucaagaguacu

SEQ ID NO: 375940 - RNA, 20 nt, Artificial Sequence
  Synthetic
uuaaccaacucaagaguacu

SEQ ID NO: 375941 - RNA, 21 nt, Artificial Sequence
  Synthetic
uuuaaccaacucaagaguacu

SEQ ID NO: 375942 - RNA, 22 nt, Artificial Sequence
  Synthetic
cuuuaaccaacucaagaguacu

SEQ ID NO: 375943 - RNA, 23 nt, Artificial Sequence
  Synthetic
acuuuaaccaacucaagaguacu

SEQ ID NO: 375944 - RNA, 24 nt, Artificial Sequence
  Synthetic
gacuuuaaccaacucaagaguacu

SEQ ID NO: 375945 - RNA, 18 nt, Artificial Sequence
  Synthetic
gggagaccuaagaguacu

SEQ ID NO: 375946 - RNA, 19 nt, Artificial Sequence
  Synthetic
agggagaccuaagaguacu

SEQ ID NO: 375947 - RNA, 20 nt, Artificial Sequence
  Synthetic
gagggagaccuaagaguacu

SEQ ID NO: 375948 - RNA, 21 nt, Artificial Sequence
  Synthetic
agagggagaccuaagaguacu

SEQ ID NO: 375949 - RNA, 22 nt, Artificial Sequence
  Synthetic
aagagggagaccuaagaguacu

SEQ ID NO: 375950 - RNA, 23 nt, Artificial Sequence
  Synthetic
caagagggagaccuaagaguacu

SEQ ID NO: 375951 - RNA, 24 nt, Artificial Sequence
  Synthetic
acaagagggagaccuaagaguacu

SEQ ID NO: 375952 - RNA, 18 nt, Artificial Sequence
  Synthetic
accuguaauccuaguacu

SEQ ID NO: 375953 - RNA, 19 nt, Artificial Sequence
  Synthetic
caccuguaauccuaguacu

SEQ ID NO: 375954 - RNA, 20 nt, Artificial Sequence
  Synthetic
acaccuguaauccuaguacu

SEQ ID NO: 375955 - RNA, 21 nt, Artificial Sequence
  Synthetic
cacaccuguaauccuaguacu

SEQ ID NO: 375956 - RNA, 22 nt, Artificial Sequence
  Synthetic
ucacaccuguaauccuaguacu

SEQ ID NO: 375957 - RNA, 23 nt, Artificial Sequence
  Synthetic
cucacaccuguaauccuaguacu

SEQ ID NO: 375958 - RNA, 24 nt, Artificial Sequence
  Synthetic
gcucacaccuguaauccuaguacu

SEQ ID NO: 375959 - RNA, 18 nt, Artificial Sequence
  Synthetic
cgauaaugugcuaguacu

SEQ ID NO: 375960 - RNA, 19 nt, Artificial Sequence
  Synthetic
ucgauaaugugcuaguacu

SEQ ID NO: 375961 - RNA, 20 nt, Artificial Sequence
  Synthetic
gucgauaaugugcuaguacu

SEQ ID NO: 375962 - RNA, 21 nt, Artificial Sequence
  Synthetic
ugucgauaaugugcuaguacu

SEQ ID NO: 375963 - RNA, 22 nt, Artificial Sequence
  Synthetic
gugucgauaaugugcuaguacu

SEQ ID NO: 375964 - RNA, 23 nt, Artificial Sequence
  Synthetic
ggugucgauaaugugcuaguacu

SEQ ID NO: 375965 - RNA, 24 nt, Artificial Sequence
  Synthetic
aggugucgauaaugugcuaguacu

SEQ ID NO: 375966 - RNA, 18 nt, Artificial Sequence
  Synthetic
aaauaagauaguaguacu

SEQ ID NO: 375967 - RNA, 19 nt, Artificial Sequence
  Synthetic
caaauaagauaguaguacu

SEQ ID NO: 375968 - RNA, 20 nt, Artificial Sequence
  Synthetic
ccaaauaagauaguaguacu

SEQ ID NO: 375969 - RNA, 21 nt, Artificial Sequence
  Synthetic
accaaauaagauaguaguacu

SEQ ID NO: 375970 - RNA, 22 nt, Artificial Sequence
  Synthetic
caccaaauaagauaguaguacu

SEQ ID NO: 375971 - RNA, 23 nt, Artificial Sequence
  Synthetic
ucaccaaauaagauaguaguacu

SEQ ID NO: 375972 - RNA, 24 nt, Artificial Sequence
  Synthetic
aucaccaaauaagauaguaguacu

SEQ ID NO: 375973 - RNA, 18 nt, Artificial Sequence
  Synthetic
aagcacccacuuaguacu

SEQ ID NO: 375974 - RNA, 19 nt, Artificial Sequence
  Synthetic
caagcacccacuuaguacu

SEQ ID NO: 375975 - RNA, 20 nt, Artificial Sequence
  Synthetic
gcaagcacccacuuaguacu

SEQ ID NO: 375976 - RNA, 21 nt, Artificial Sequence
  Synthetic
agcaagcacccacuuaguacu

SEQ ID NO: 375977 - RNA, 22 nt, Artificial Sequence
  Synthetic
uagcaagcacccacuuaguacu

SEQ ID NO: 375978 - RNA, 23 nt, Artificial Sequence
  Synthetic
guagcaagcacccacuuaguacu

SEQ ID NO: 375979 - RNA, 24 nt, Artificial Sequence
  Synthetic
uguagcaagcacccacuuaguacu

SEQ ID NO: 375980 - RNA, 18 nt, Artificial Sequence
  Synthetic
aauaacaaaauucguacu

SEQ ID NO: 375981 - RNA, 19 nt, Artificial Sequence
  Synthetic
aaauaacaaaauucguacu

SEQ ID NO: 375982 - RNA, 20 nt, Artificial Sequence
  Synthetic
aaaauaacaaaauucguacu

SEQ ID NO: 375983 - RNA, 21 nt, Artificial Sequence
  Synthetic
caaaauaacaaaauucguacu

SEQ ID NO: 375984 - RNA, 22 nt, Artificial Sequence
  Synthetic
ucaaaauaacaaaauucguacu

SEQ ID NO: 375985 - RNA, 23 nt, Artificial Sequence
  Synthetic
aucaaaauaacaaaauucguacu

SEQ ID NO: 375986 - RNA, 24 nt, Artificial Sequence
  Synthetic
gaucaaaauaacaaaauucguacu

SEQ ID NO: 375987 - RNA, 18 nt, Artificial Sequence
  Synthetic
aauugaaaaaaagguacu

SEQ ID NO: 375988 - RNA, 19 nt, Artificial Sequence
  Synthetic
aaauugaaaaaaagguacu

SEQ ID NO: 375989 - RNA, 20 nt, Artificial Sequence
  Synthetic
aaaauugaaaaaaagguacu

SEQ ID NO: 375990 - RNA, 21 nt, Artificial Sequence
  Synthetic
caaaauugaaaaaaagguacu

SEQ ID NO: 375991 - RNA, 22 nt, Artificial Sequence
  Synthetic
acaaaauugaaaaaaagguacu

SEQ ID NO: 375992 - RNA, 23 nt, Artificial Sequence
  Synthetic
uacaaaauugaaaaaaagguacu

SEQ ID NO: 375993 - RNA, 24 nt, Artificial Sequence
  Synthetic
cuacaaaauugaaaaaaagguacu

SEQ ID NO: 375994 - RNA, 18 nt, Artificial Sequence
  Synthetic
ccuguaaucccagguacu

SEQ ID NO: 375995 - RNA, 19 nt, Artificial Sequence
  Synthetic
gccuguaaucccagguacu

SEQ ID NO: 375996 - RNA, 20 nt, Artificial Sequence
  Synthetic
ugccuguaaucccagguacu

SEQ ID NO: 375997 - RNA, 21 nt, Artificial Sequence
  Synthetic
augccuguaaucccagguacu

SEQ ID NO: 375998 - RNA, 22 nt, Artificial Sequence
  Synthetic
caugccuguaaucccagguacu

SEQ ID NO: 375999 - RNA, 23 nt, Artificial Sequence
  Synthetic
acaugccuguaaucccagguacu

SEQ ID NO: 376000 - RNA, 24 nt, Artificial Sequence
  Synthetic
cacaugccuguaaucccagguacu

SEQ ID NO: 376001 - RNA, 18 nt, Artificial Sequence
  Synthetic
aggaaagaaagagguacu

SEQ ID NO: 376002 - RNA, 19 nt, Artificial Sequence
  Synthetic
gaggaaagaaagagguacu

SEQ ID NO: 376003 - RNA, 20 nt, Artificial Sequence
  Synthetic
cgaggaaagaaagagguacu

SEQ ID NO: 376004 - RNA, 21 nt, Artificial Sequence
  Synthetic
ucgaggaaagaaagagguacu

SEQ ID NO: 376005 - RNA, 22 nt, Artificial Sequence
  Synthetic
gucgaggaaagaaagagguacu

SEQ ID NO: 376006 - RNA, 23 nt, Artificial Sequence
  Synthetic
ugucgaggaaagaaagagguacu

SEQ ID NO: 376007 - RNA, 24 nt, Artificial Sequence
  Synthetic
cugucgaggaaagaaagagguacu

SEQ ID NO: 376008 - RNA, 18 nt, Artificial Sequence
  Synthetic
uaaguaauccgagguacu

SEQ ID NO: 376009 - RNA, 19 nt, Artificial Sequence
  Synthetic
uuaaguaauccgagguacu

SEQ ID NO: 376010 - RNA, 20 nt, Artificial Sequence
  Synthetic
uuuaaguaauccgagguacu

SEQ ID NO: 376011 - RNA, 21 nt, Artificial Sequence
  Synthetic
guuuaaguaauccgagguacu

SEQ ID NO: 376012 - RNA, 22 nt, Artificial Sequence
  Synthetic
gguuuaaguaauccgagguacu

SEQ ID NO: 376013 - RNA, 23 nt, Artificial Sequence
  Synthetic
ugguuuaaguaauccgagguacu

SEQ ID NO: 376014 - RNA, 24 nt, Artificial Sequence
  Synthetic
gugguuuaaguaauccgagguacu

SEQ ID NO: 376015 - RNA, 18 nt, Artificial Sequence
  Synthetic
aaucucuagauugguacu

SEQ ID NO: 376016 - RNA, 19 nt, Artificial Sequence
  Synthetic
aaaucucuagauugguacu

SEQ ID NO: 376017 - RNA, 20 nt, Artificial Sequence
  Synthetic
aaaaucucuagauugguacu

SEQ ID NO: 376018 - RNA, 21 nt, Artificial Sequence
  Synthetic
aaaaaucucuagauugguacu

SEQ ID NO: 376019 - RNA, 22 nt, Artificial Sequence
  Synthetic
uaaaaaucucuagauugguacu

SEQ ID NO: 376020 - RNA, 23 nt, Artificial Sequence
  Synthetic
auaaaaaucucuagauugguacu

SEQ ID NO: 376021 - RNA, 24 nt, Artificial Sequence
  Synthetic
uauaaaaaucucuagauugguacu

SEQ ID NO: 376022 - RNA, 18 nt, Artificial Sequence
  Synthetic
aaauauauguaauguacu

SEQ ID NO: 376023 - RNA, 19 nt, Artificial Sequence
  Synthetic
uaaauauauguaauguacu

SEQ ID NO: 376024 - RNA, 20 nt, Artificial Sequence
  Synthetic
guaaauauauguaauguacu

SEQ ID NO: 376025 - RNA, 21 nt, Artificial Sequence
  Synthetic
aguaaauauauguaauguacu

SEQ ID NO: 376026 - RNA, 22 nt, Artificial Sequence
  Synthetic
aaguaaauauauguaauguacu

SEQ ID NO: 376027 - RNA, 23 nt, Artificial Sequence
  Synthetic
aaaguaaauauauguaauguacu

SEQ ID NO: 376028 - RNA, 24 nt, Artificial Sequence
  Synthetic
aaaaguaaauauauguaauguacu

SEQ ID NO: 376029 - RNA, 18 nt, Artificial Sequence
  Synthetic
guacuaauuucauguacu

SEQ ID NO: 376030 - RNA, 19 nt, Artificial Sequence
  Synthetic
aguacuaauuucauguacu

SEQ ID NO: 376031 - RNA, 20 nt, Artificial Sequence
  Synthetic
caguacuaauuucauguacu

SEQ ID NO: 376032 - RNA, 21 nt, Artificial Sequence
  Synthetic
ccaguacuaauuucauguacu

SEQ ID NO: 376033 - RNA, 22 nt, Artificial Sequence
  Synthetic
uccaguacuaauuucauguacu

SEQ ID NO: 376034 - RNA, 23 nt, Artificial Sequence
  Synthetic
cuccaguacuaauuucauguacu

SEQ ID NO: 376035 - RNA, 24 nt, Artificial Sequence
  Synthetic
ccuccaguacuaauuucauguacu

SEQ ID NO: 376036 - RNA, 18 nt, Artificial Sequence
  Synthetic
uuugagaaccacuguacu

SEQ ID NO: 376037 - RNA, 19 nt, Artificial Sequence
  Synthetic
guuugagaaccacuguacu

SEQ ID NO: 376038 - RNA, 20 nt, Artificial Sequence
  Synthetic
aguuugagaaccacuguacu

SEQ ID NO: 376039 - RNA, 21 nt, Artificial Sequence
  Synthetic
aaguuugagaaccacuguacu

SEQ ID NO: 376040 - RNA, 22 nt, Artificial Sequence
  Synthetic
caaguuugagaaccacuguacu

SEQ ID NO: 376041 - RNA, 23 nt, Artificial Sequence
  Synthetic
ucaaguuugagaaccacuguacu

SEQ ID NO: 376042 - RNA, 24 nt, Artificial Sequence
  Synthetic
cucaaguuugagaaccacuguacu

SEQ ID NO: 376043 - RNA, 18 nt, Artificial Sequence
  Synthetic
ucuuaugucuacuguacu

SEQ ID NO: 376044 - RNA, 19 nt, Artificial Sequence
  Synthetic
uucuuaugucuacuguacu

SEQ ID NO: 376045 - RNA, 20 nt, Artificial Sequence
  Synthetic
guucuuaugucuacuguacu

SEQ ID NO: 376046 - RNA, 21 nt, Artificial Sequence
  Synthetic
aguucuuaugucuacuguacu

SEQ ID NO: 376047 - RNA, 22 nt, Artificial Sequence
  Synthetic
gaguucuuaugucuacuguacu

SEQ ID NO: 376048 - RNA, 23 nt, Artificial Sequence
  Synthetic
agaguucuuaugucuacuguacu

SEQ ID NO: 376049 - RNA, 24 nt, Artificial Sequence
  Synthetic
gagaguucuuaugucuacuguacu

SEQ ID NO: 376050 - RNA, 18 nt, Artificial Sequence
  Synthetic
aaguacuaaaccuguacu

SEQ ID NO: 376051 - RNA, 19 nt, Artificial Sequence
  Synthetic
uaaguacuaaaccuguacu

SEQ ID NO: 376052 - RNA, 20 nt, Artificial Sequence
  Synthetic
auaaguacuaaaccuguacu

SEQ ID NO: 376053 - RNA, 21 nt, Artificial Sequence
  Synthetic
uauaaguacuaaaccuguacu

SEQ ID NO: 376054 - RNA, 22 nt, Artificial Sequence
  Synthetic
auauaaguacuaaaccuguacu

SEQ ID NO: 376055 - RNA, 23 nt, Artificial Sequence
  Synthetic
aauauaaguacuaaaccuguacu

SEQ ID NO: 376056 - RNA, 24 nt, Artificial Sequence
  Synthetic
aaauauaaguacuaaaccuguacu

SEQ ID NO: 376057 - RNA, 18 nt, Artificial Sequence
  Synthetic
uugacagauuccuguacu

SEQ ID NO: 376058 - RNA, 19 nt, Artificial Sequence
  Synthetic
cuugacagauuccuguacu

SEQ ID NO: 376059 - RNA, 20 nt, Artificial Sequence
  Synthetic
gcuugacagauuccuguacu

SEQ ID NO: 376060 - RNA, 21 nt, Artificial Sequence
  Synthetic
agcuugacagauuccuguacu

SEQ ID NO: 376061 - RNA, 22 nt, Artificial Sequence
  Synthetic
aagcuugacagauuccuguacu

SEQ ID NO: 376062 - RNA, 23 nt, Artificial Sequence
  Synthetic
aaagcuugacagauuccuguacu

SEQ ID NO: 376063 - RNA, 24 nt, Artificial Sequence
  Synthetic
aaaagcuugacagauuccuguacu

SEQ ID NO: 376064 - RNA, 18 nt, Artificial Sequence
  Synthetic
gcuaguacauauuguacu

SEQ ID NO: 376065 - RNA, 19 nt, Artificial Sequence
  Synthetic
agcuaguacauauuguacu

SEQ ID NO: 376066 - RNA, 20 nt, Artificial Sequence
  Synthetic
uagcuaguacauauuguacu

SEQ ID NO: 376067 - RNA, 21 nt, Artificial Sequence
  Synthetic
uuagcuaguacauauuguacu

SEQ ID NO: 376068 - RNA, 22 nt, Artificial Sequence
  Synthetic
cuuagcuaguacauauuguacu

SEQ ID NO: 376069 - RNA, 23 nt, Artificial Sequence
  Synthetic
acuuagcuaguacauauuguacu

SEQ ID NO: 376070 - RNA, 24 nt, Artificial Sequence
  Synthetic
cacuuagcuaguacauauuguacu

SEQ ID NO: 376071 - RNA, 18 nt, Artificial Sequence
  Synthetic
uacaagaauuguuguacu

SEQ ID NO: 376072 - RNA, 19 nt, Artificial Sequence
  Synthetic
uuacaagaauuguuguacu

SEQ ID NO: 376073 - RNA, 20 nt, Artificial Sequence
  Synthetic
guuacaagaauuguuguacu

SEQ ID NO: 376074 - RNA, 21 nt, Artificial Sequence
  Synthetic
aguuacaagaauuguuguacu

SEQ ID NO: 376075 - RNA, 22 nt, Artificial Sequence
  Synthetic
uaguuacaagaauuguuguacu

SEQ ID NO: 376076 - RNA, 23 nt, Artificial Sequence
  Synthetic
uuaguuacaagaauuguuguacu

SEQ ID NO: 376077 - RNA, 24 nt, Artificial Sequence
  Synthetic
cuuaguuacaagaauuguuguacu

SEQ ID NO: 376078 - RNA, 18 nt, Artificial Sequence
  Synthetic
auguuuucgaaaauuacu

SEQ ID NO: 376079 - RNA, 19 nt, Artificial Sequence
  Synthetic
uauguuuucgaaaauuacu

SEQ ID NO: 376080 - RNA, 20 nt, Artificial Sequence
  Synthetic
auauguuuucgaaaauuacu

SEQ ID NO: 376081 - RNA, 21 nt, Artificial Sequence
  Synthetic
aauauguuuucgaaaauuacu

SEQ ID NO: 376082 - RNA, 22 nt, Artificial Sequence
  Synthetic
uaauauguuuucgaaaauuacu

SEQ ID NO: 376083 - RNA, 23 nt, Artificial Sequence
  Synthetic
auaauauguuuucgaaaauuacu

SEQ ID NO: 376084 - RNA, 24 nt, Artificial Sequence
  Synthetic
aauaauauguuuucgaaaauuacu

SEQ ID NO: 376085 - RNA, 18 nt, Artificial Sequence
  Synthetic
agcuaaaagcaaauuacu

SEQ ID NO: 376086 - RNA, 19 nt, Artificial Sequence
  Synthetic
aagcuaaaagcaaauuacu

SEQ ID NO: 376087 - RNA, 20 nt, Artificial Sequence
  Synthetic
aaagcuaaaagcaaauuacu

SEQ ID NO: 376088 - RNA, 21 nt, Artificial Sequence
  Synthetic
uaaagcuaaaagcaaauuacu

SEQ ID NO: 376089 - RNA, 22 nt, Artificial Sequence
  Synthetic
auaaagcuaaaagcaaauuacu

SEQ ID NO: 376090 - RNA, 23 nt, Artificial Sequence
  Synthetic
uauaaagcuaaaagcaaauuacu

SEQ ID NO: 376091 - RNA, 24 nt, Artificial Sequence
  Synthetic
uuauaaagcuaaaagcaaauuacu

SEQ ID NO: 376092 - RNA, 18 nt, Artificial Sequence
  Synthetic
gaauuaauauaaauuacu

SEQ ID NO: 376093 - RNA, 19 nt, Artificial Sequence
  Synthetic
ugaauuaauauaaauuacu

SEQ ID NO: 376094 - RNA, 20 nt, Artificial Sequence
  Synthetic
cugaauuaauauaaauuacu

SEQ ID NO: 376095 - RNA, 21 nt, Artificial Sequence
  Synthetic
acugaauuaauauaaauuacu

SEQ ID NO: 376096 - RNA, 22 nt, Artificial Sequence
  Synthetic
gacugaauuaauauaaauuacu

SEQ ID NO: 376097 - RNA, 23 nt, Artificial Sequence
  Synthetic
ugacugaauuaauauaaauuacu

SEQ ID NO: 376098 - RNA, 24 nt, Artificial Sequence
  Synthetic
augacugaauuaauauaaauuacu

SEQ ID NO: 376099 - RNA, 18 nt, Artificial Sequence
  Synthetic
uugaaucuauaaauuacu

SEQ ID NO: 376100 - RNA, 19 nt, Artificial Sequence
  Synthetic
auugaaucuauaaauuacu

SEQ ID NO: 376101 - RNA, 20 nt, Artificial Sequence
  Synthetic
cauugaaucuauaaauuacu

SEQ ID NO: 376102 - RNA, 21 nt, Artificial Sequence
  Synthetic
gcauugaaucuauaaauuacu

SEQ ID NO: 376103 - RNA, 22 nt, Artificial Sequence
  Synthetic
agcauugaaucuauaaauuacu

SEQ ID NO: 376104 - RNA, 23 nt, Artificial Sequence
  Synthetic
uagcauugaaucuauaaauuacu

SEQ ID NO: 376105 - RNA, 24 nt, Artificial Sequence
  Synthetic
guagcauugaaucuauaaauuacu

SEQ ID NO: 376106 - RNA, 18 nt, Artificial Sequence
  Synthetic
cuacaaguuggaauuacu

SEQ ID NO: 376107 - RNA, 19 nt, Artificial Sequence
  Synthetic
gcuacaaguuggaauuacu

SEQ ID NO: 376108 - RNA, 20 nt, Artificial Sequence
  Synthetic
agcuacaaguuggaauuacu

SEQ ID NO: 376109 - RNA, 21 nt, Artificial Sequence
  Synthetic
uagcuacaaguuggaauuacu

SEQ ID NO: 376110 - RNA, 22 nt, Artificial Sequence
  Synthetic
uuagcuacaaguuggaauuacu

SEQ ID NO: 376111 - RNA, 23 nt, Artificial Sequence
  Synthetic
cuuagcuacaaguuggaauuacu

SEQ ID NO: 376112 - RNA, 24 nt, Artificial Sequence
  Synthetic
ucuuagcuacaaguuggaauuacu

SEQ ID NO: 376113 - RNA, 18 nt, Artificial Sequence
  Synthetic
aaugcuuacaacauuacu

SEQ ID NO: 376114 - RNA, 19 nt, Artificial Sequence
  Synthetic
uaaugcuuacaacauuacu

SEQ ID NO: 376115 - RNA, 20 nt, Artificial Sequence
  Synthetic
uuaaugcuuacaacauuacu

SEQ ID NO: 376116 - RNA, 21 nt, Artificial Sequence
  Synthetic
uuuaaugcuuacaacauuacu

SEQ ID NO: 376117 - RNA, 22 nt, Artificial Sequence
  Synthetic
cuuuaaugcuuacaacauuacu

SEQ ID NO: 376118 - RNA, 23 nt, Artificial Sequence
  Synthetic
ucuuuaaugcuuacaacauuacu

SEQ ID NO: 376119 - RNA, 24 nt, Artificial Sequence
  Synthetic
uucuuuaaugcuuacaacauuacu

SEQ ID NO: 376120 - RNA, 18 nt, Artificial Sequence
  Synthetic
ccucuuagguucauuacu

SEQ ID NO: 376121 - RNA, 19 nt, Artificial Sequence
  Synthetic
cccucuuagguucauuacu

SEQ ID NO: 376122 - RNA, 20 nt, Artificial Sequence
  Synthetic
ccccucuuagguucauuacu

SEQ ID NO: 376123 - RNA, 21 nt, Artificial Sequence
  Synthetic
uccccucuuagguucauuacu

SEQ ID NO: 376124 - RNA, 22 nt, Artificial Sequence
  Synthetic
cuccccucuuagguucauuacu

SEQ ID NO: 376125 - RNA, 23 nt, Artificial Sequence
  Synthetic
acuccccucuuagguucauuacu

SEQ ID NO: 376126 - RNA, 24 nt, Artificial Sequence
  Synthetic
cacuccccucuuagguucauuacu

SEQ ID NO: 376127 - RNA, 18 nt, Artificial Sequence
  Synthetic
uauuuuuagcagauuacu

SEQ ID NO: 376128 - RNA, 19 nt, Artificial Sequence
  Synthetic
cuauuuuuagcagauuacu

SEQ ID NO: 376129 - RNA, 20 nt, Artificial Sequence
  Synthetic
ucuauuuuuagcagauuacu

SEQ ID NO: 376130 - RNA, 21 nt, Artificial Sequence
  Synthetic
gucuauuuuuagcagauuacu

SEQ ID NO: 376131 - RNA, 22 nt, Artificial Sequence
  Synthetic
agucuauuuuuagcagauuacu

SEQ ID NO: 376132 - RNA, 23 nt, Artificial Sequence
  Synthetic
uagucuauuuuuagcagauuacu

SEQ ID NO: 376133 - RNA, 24 nt, Artificial Sequence
  Synthetic
uuagucuauuuuuagcagauuacu

SEQ ID NO: 376134 - RNA, 18 nt, Artificial Sequence
  Synthetic
aggcuuuuugagauuacu

SEQ ID NO: 376135 - RNA, 19 nt, Artificial Sequence
  Synthetic
aaggcuuuuugagauuacu

SEQ ID NO: 376136 - RNA, 20 nt, Artificial Sequence
  Synthetic
uaaggcuuuuugagauuacu

SEQ ID NO: 376137 - RNA, 21 nt, Artificial Sequence
  Synthetic
cuaaggcuuuuugagauuacu

SEQ ID NO: 376138 - RNA, 22 nt, Artificial Sequence
  Synthetic
ucuaaggcuuuuugagauuacu

SEQ ID NO: 376139 - RNA, 23 nt, Artificial Sequence
  Synthetic
uucuaaggcuuuuugagauuacu

SEQ ID NO: 376140 - RNA, 24 nt, Artificial Sequence
  Synthetic
uuucuaaggcuuuuugagauuacu

SEQ ID NO: 376141 - RNA, 18 nt, Artificial Sequence
  Synthetic
aauuugcuuuagauuacu

SEQ ID NO: 376142 - RNA, 19 nt, Artificial Sequence
  Synthetic
gaauuugcuuuagauuacu

SEQ ID NO: 376143 - RNA, 20 nt, Artificial Sequence
  Synthetic
ugaauuugcuuuagauuacu

SEQ ID NO: 376144 - RNA, 21 nt, Artificial Sequence
  Synthetic
augaauuugcuuuagauuacu

SEQ ID NO: 376145 - RNA, 22 nt, Artificial Sequence
  Synthetic
uaugaauuugcuuuagauuacu

SEQ ID NO: 376146 - RNA, 23 nt, Artificial Sequence
  Synthetic
cuaugaauuugcuuuagauuacu

SEQ ID NO: 376147 - RNA, 24 nt, Artificial Sequence
  Synthetic
ccuaugaauuugcuuuagauuacu

SEQ ID NO: 376148 - RNA, 18 nt, Artificial Sequence
  Synthetic
agggaaagauguauuacu

SEQ ID NO: 376149 - RNA, 19 nt, Artificial Sequence
  Synthetic
uagggaaagauguauuacu

SEQ ID NO: 376150 - RNA, 20 nt, Artificial Sequence
  Synthetic
auagggaaagauguauuacu

SEQ ID NO: 376151 - RNA, 21 nt, Artificial Sequence
  Synthetic
aauagggaaagauguauuacu

SEQ ID NO: 376152 - RNA, 22 nt, Artificial Sequence
  Synthetic
gaauagggaaagauguauuacu

SEQ ID NO: 376153 - RNA, 23 nt, Artificial Sequence
  Synthetic
agaauagggaaagauguauuacu

SEQ ID NO: 376154 - RNA, 24 nt, Artificial Sequence
  Synthetic
aagaauagggaaagauguauuacu

SEQ ID NO: 376155 - RNA, 18 nt, Artificial Sequence
  Synthetic
cuaaauauuuguauuacu

SEQ ID NO: 376156 - RNA, 19 nt, Artificial Sequence
  Synthetic
acuaaauauuuguauuacu

SEQ ID NO: 376157 - RNA, 20 nt, Artificial Sequence
  Synthetic
uacuaaauauuuguauuacu

SEQ ID NO: 376158 - RNA, 21 nt, Artificial Sequence
  Synthetic
uuacuaaauauuuguauuacu

SEQ ID NO: 376159 - RNA, 22 nt, Artificial Sequence
  Synthetic
uuuacuaaauauuuguauuacu

SEQ ID NO: 376160 - RNA, 23 nt, Artificial Sequence
  Synthetic
uuuuacuaaauauuuguauuacu

SEQ ID NO: 376161 - RNA, 24 nt, Artificial Sequence
  Synthetic
cuuuuacuaaauauuuguauuacu

SEQ ID NO: 376162 - RNA, 18 nt, Artificial Sequence
  Synthetic
ugaaauaauguuauuacu

SEQ ID NO: 376163 - RNA, 19 nt, Artificial Sequence
  Synthetic
augaaauaauguuauuacu

SEQ ID NO: 376164 - RNA, 20 nt, Artificial Sequence
  Synthetic
uaugaaauaauguuauuacu

SEQ ID NO: 376165 - RNA, 21 nt, Artificial Sequence
  Synthetic
cuaugaaauaauguuauuacu

SEQ ID NO: 376166 - RNA, 22 nt, Artificial Sequence
  Synthetic
acuaugaaauaauguuauuacu

SEQ ID NO: 376167 - RNA, 23 nt, Artificial Sequence
  Synthetic
uacuaugaaauaauguuauuacu

SEQ ID NO: 376168 - RNA, 24 nt, Artificial Sequence
  Synthetic
cuacuaugaaauaauguuauuacu

SEQ ID NO: 376169 - RNA, 18 nt, Artificial Sequence
  Synthetic
gcuuucuuuguuauuacu

SEQ ID NO: 376170 - RNA, 19 nt, Artificial Sequence
  Synthetic
ugcuuucuuuguuauuacu

SEQ ID NO: 376171 - RNA, 20 nt, Artificial Sequence
  Synthetic
uugcuuucuuuguuauuacu

SEQ ID NO: 376172 - RNA, 21 nt, Artificial Sequence
  Synthetic
uuugcuuucuuuguuauuacu

SEQ ID NO: 376173 - RNA, 22 nt, Artificial Sequence
  Synthetic
uuuugcuuucuuuguuauuacu

SEQ ID NO: 376174 - RNA, 23 nt, Artificial Sequence
  Synthetic
cuuuugcuuucuuuguuauuacu

SEQ ID NO: 376175 - RNA, 24 nt, Artificial Sequence
  Synthetic
acuuuugcuuucuuuguuauuacu

SEQ ID NO: 376176 - RNA, 18 nt, Artificial Sequence
  Synthetic
auguaaaauuuuauuacu

SEQ ID NO: 376177 - RNA, 19 nt, Artificial Sequence
  Synthetic
gauguaaaauuuuauuacu

SEQ ID NO: 376178 - RNA, 20 nt, Artificial Sequence
  Synthetic
ugauguaaaauuuuauuacu

SEQ ID NO: 376179 - RNA, 21 nt, Artificial Sequence
  Synthetic
cugauguaaaauuuuauuacu

SEQ ID NO: 376180 - RNA, 22 nt, Artificial Sequence
  Synthetic
ucugauguaaaauuuuauuacu

SEQ ID NO: 376181 - RNA, 23 nt, Artificial Sequence
  Synthetic
uucugauguaaaauuuuauuacu

SEQ ID NO: 376182 - RNA, 24 nt, Artificial Sequence
  Synthetic
cuucugauguaaaauuuuauuacu

SEQ ID NO: 376183 - RNA, 18 nt, Artificial Sequence
  Synthetic
caccauugagcacuuacu

SEQ ID NO: 376184 - RNA, 19 nt, Artificial Sequence
  Synthetic
ccaccauugagcacuuacu

SEQ ID NO: 376185 - RNA, 20 nt, Artificial Sequence
  Synthetic
gccaccauugagcacuuacu

SEQ ID NO: 376186 - RNA, 21 nt, Artificial Sequence
  Synthetic
ugccaccauugagcacuuacu

SEQ ID NO: 376187 - RNA, 22 nt, Artificial Sequence
  Synthetic
uugccaccauugagcacuuacu

SEQ ID NO: 376188 - RNA, 23 nt, Artificial Sequence
  Synthetic
auugccaccauugagcacuuacu

SEQ ID NO: 376189 - RNA, 24 nt, Artificial Sequence
  Synthetic
uauugccaccauugagcacuuacu

SEQ ID NO: 376190 - RNA, 18 nt, Artificial Sequence
  Synthetic
uaaaaaaaaugacuuacu

SEQ ID NO: 376191 - RNA, 19 nt, Artificial Sequence
  Synthetic
uuaaaaaaaaugacuuacu

SEQ ID NO: 376192 - RNA, 20 nt, Artificial Sequence
  Synthetic
uuuaaaaaaaaugacuuacu

SEQ ID NO: 376193 - RNA, 21 nt, Artificial Sequence
  Synthetic
cuuuaaaaaaaaugacuuacu

SEQ ID NO: 376194 - RNA, 22 nt, Artificial Sequence
  Synthetic
acuuuaaaaaaaaugacuuacu

SEQ ID NO: 376195 - RNA, 23 nt, Artificial Sequence
  Synthetic
uacuuuaaaaaaaaugacuuacu

SEQ ID NO: 376196 - RNA, 24 nt, Artificial Sequence
  Synthetic
cuacuuuaaaaaaaaugacuuacu

SEQ ID NO: 376197 - RNA, 18 nt, Artificial Sequence
  Synthetic
uuuacaaauugacuuacu

SEQ ID NO: 376198 - RNA, 19 nt, Artificial Sequence
  Synthetic
guuuacaaauugacuuacu

SEQ ID NO: 376199 - RNA, 20 nt, Artificial Sequence
  Synthetic
gguuuacaaauugacuuacu

SEQ ID NO: 376200 - RNA, 21 nt, Artificial Sequence
  Synthetic
cgguuuacaaauugacuuacu

SEQ ID NO: 376201 - RNA, 22 nt, Artificial Sequence
  Synthetic
gcgguuuacaaauugacuuacu

SEQ ID NO: 376202 - RNA, 23 nt, Artificial Sequence
  Synthetic
ugcgguuuacaaauugacuuacu

SEQ ID NO: 376203 - RNA, 24 nt, Artificial Sequence
  Synthetic
augcgguuuacaaauugacuuacu

SEQ ID NO: 376204 - RNA, 18 nt, Artificial Sequence
  Synthetic
auuucaauguuacuuacu

SEQ ID NO: 376205 - RNA, 19 nt, Artificial Sequence
  Synthetic
aauuucaauguuacuuacu

SEQ ID NO: 376206 - RNA, 20 nt, Artificial Sequence
  Synthetic
caauuucaauguuacuuacu

SEQ ID NO: 376207 - RNA, 21 nt, Artificial Sequence
  Synthetic
ucaauuucaauguuacuuacu

SEQ ID NO: 376208 - RNA, 22 nt, Artificial Sequence
  Synthetic
cucaauuucaauguuacuuacu

SEQ ID NO: 376209 - RNA, 23 nt, Artificial Sequence
  Synthetic
gcucaauuucaauguuacuuacu

SEQ ID NO: 376210 - RNA, 24 nt, Artificial Sequence
  Synthetic
ggcucaauuucaauguuacuuacu

SEQ ID NO: 376211 - RNA, 18 nt, Artificial Sequence
  Synthetic
guucugauugaccuuacu

SEQ ID NO: 376212 - RNA, 19 nt, Artificial Sequence
  Synthetic
gguucugauugaccuuacu

SEQ ID NO: 376213 - RNA, 20 nt, Artificial Sequence
  Synthetic
ugguucugauugaccuuacu

SEQ ID NO: 376214 - RNA, 21 nt, Artificial Sequence
  Synthetic
uugguucugauugaccuuacu

SEQ ID NO: 376215 - RNA, 22 nt, Artificial Sequence
  Synthetic
auugguucugauugaccuuacu

SEQ ID NO: 376216 - RNA, 23 nt, Artificial Sequence
  Synthetic
cauugguucugauugaccuuacu

SEQ ID NO: 376217 - RNA, 24 nt, Artificial Sequence
  Synthetic
ucauugguucugauugaccuuacu

SEQ ID NO: 376218 - RNA, 18 nt, Artificial Sequence
  Synthetic
gaaaauccuucccuuacu

SEQ ID NO: 376219 - RNA, 19 nt, Artificial Sequence
  Synthetic
ugaaaauccuucccuuacu

SEQ ID NO: 376220 - RNA, 20 nt, Artificial Sequence
  Synthetic
gugaaaauccuucccuuacu

SEQ ID NO: 376221 - RNA, 21 nt, Artificial Sequence
  Synthetic
agugaaaauccuucccuuacu

SEQ ID NO: 376222 - RNA, 22 nt, Artificial Sequence
  Synthetic
aagugaaaauccuucccuuacu

SEQ ID NO: 376223 - RNA, 23 nt, Artificial Sequence
  Synthetic
uaagugaaaauccuucccuuacu

SEQ ID NO: 376224 - RNA, 24 nt, Artificial Sequence
  Synthetic
uuaagugaaaauccuucccuuacu

SEQ ID NO: 376225 - RNA, 18 nt, Artificial Sequence
  Synthetic
cuuaacgcaguccuuacu

SEQ ID NO: 376226 - RNA, 19 nt, Artificial Sequence
  Synthetic
acuuaacgcaguccuuacu

SEQ ID NO: 376227 - RNA, 20 nt, Artificial Sequence
  Synthetic
uacuuaacgcaguccuuacu

SEQ ID NO: 376228 - RNA, 21 nt, Artificial Sequence
  Synthetic
guacuuaacgcaguccuuacu

SEQ ID NO: 376229 - RNA, 22 nt, Artificial Sequence
  Synthetic
uguacuuaacgcaguccuuacu

SEQ ID NO: 376230 - RNA, 23 nt, Artificial Sequence
  Synthetic
cuguacuuaacgcaguccuuacu

SEQ ID NO: 376231 - RNA, 24 nt, Artificial Sequence
  Synthetic
ucuguacuuaacgcaguccuuacu

SEQ ID NO: 376232 - RNA, 18 nt, Artificial Sequence
  Synthetic
uuuaaggguuggcuuacu

SEQ ID NO: 376233 - RNA, 19 nt, Artificial Sequence
  Synthetic
guuuaaggguuggcuuacu

SEQ ID NO: 376234 - RNA, 20 nt, Artificial Sequence
  Synthetic
uguuuaaggguuggcuuacu

SEQ ID NO: 376235 - RNA, 21 nt, Artificial Sequence
  Synthetic
auguuuaaggguuggcuuacu

SEQ ID NO: 376236 - RNA, 22 nt, Artificial Sequence
  Synthetic
gauguuuaaggguuggcuuacu

SEQ ID NO: 376237 - RNA, 23 nt, Artificial Sequence
  Synthetic
ugauguuuaaggguuggcuuacu

SEQ ID NO: 376238 - RNA, 24 nt, Artificial Sequence
  Synthetic
uugauguuuaaggguuggcuuacu

SEQ ID NO: 376239 - RNA, 18 nt, Artificial Sequence
  Synthetic
guguuauuaaugcuuacu

SEQ ID NO: 376240 - RNA, 19 nt, Artificial Sequence
  Synthetic
aguguuauuaaugcuuacu

SEQ ID NO: 376241 - RNA, 20 nt, Artificial Sequence
  Synthetic
caguguuauuaaugcuuacu

SEQ ID NO: 376242 - RNA, 21 nt, Artificial Sequence
  Synthetic
gcaguguuauuaaugcuuacu

SEQ ID NO: 376243 - RNA, 22 nt, Artificial Sequence
  Synthetic
agcaguguuauuaaugcuuacu

SEQ ID NO: 376244 - RNA, 23 nt, Artificial Sequence
  Synthetic
cagcaguguuauuaaugcuuacu

SEQ ID NO: 376245 - RNA, 24 nt, Artificial Sequence
  Synthetic
ucagcaguguuauuaaugcuuacu

SEQ ID NO: 376246 - RNA, 18 nt, Artificial Sequence
  Synthetic
caagcugcccugcuuacu

SEQ ID NO: 376247 - RNA, 19 nt, Artificial Sequence
  Synthetic
gcaagcugcccugcuuacu

SEQ ID NO: 376248 - RNA, 20 nt, Artificial Sequence
  Synthetic
ugcaagcugcccugcuuacu

SEQ ID NO: 376249 - RNA, 21 nt, Artificial Sequence
  Synthetic
augcaagcugcccugcuuacu

SEQ ID NO: 376250 - RNA, 22 nt, Artificial Sequence
  Synthetic
gaugcaagcugcccugcuuacu

SEQ ID NO: 376251 - RNA, 23 nt, Artificial Sequence
  Synthetic
ggaugcaagcugcccugcuuacu

SEQ ID NO: 376252 - RNA, 24 nt, Artificial Sequence
  Synthetic
gggaugcaagcugcccugcuuacu

SEQ ID NO: 376253 - RNA, 18 nt, Artificial Sequence
  Synthetic
ucauuaauaaaucuuacu

SEQ ID NO: 376254 - RNA, 19 nt, Artificial Sequence
  Synthetic
aucauuaauaaaucuuacu

SEQ ID NO: 376255 - RNA, 20 nt, Artificial Sequence
  Synthetic
aaucauuaauaaaucuuacu

SEQ ID NO: 376256 - RNA, 21 nt, Artificial Sequence
  Synthetic
aaaucauuaauaaaucuuacu

SEQ ID NO: 376257 - RNA, 22 nt, Artificial Sequence
  Synthetic
uaaaucauuaauaaaucuuacu

SEQ ID NO: 376258 - RNA, 23 nt, Artificial Sequence
  Synthetic
cuaaaucauuaauaaaucuuacu

SEQ ID NO: 376259 - RNA, 24 nt, Artificial Sequence
  Synthetic
acuaaaucauuaauaaaucuuacu

SEQ ID NO: 376260 - RNA, 18 nt, Artificial Sequence
  Synthetic
acuuuuauuguucuuacu

SEQ ID NO: 376261 - RNA, 19 nt, Artificial Sequence
  Synthetic
aacuuuuauuguucuuacu

SEQ ID NO: 376262 - RNA, 20 nt, Artificial Sequence
  Synthetic
aaacuuuuauuguucuuacu

SEQ ID NO: 376263 - RNA, 21 nt, Artificial Sequence
  Synthetic
aaaacuuuuauuguucuuacu

SEQ ID NO: 376264 - RNA, 22 nt, Artificial Sequence
  Synthetic
uaaaacuuuuauuguucuuacu

SEQ ID NO: 376265 - RNA, 23 nt, Artificial Sequence
  Synthetic
uuaaaacuuuuauuguucuuacu

SEQ ID NO: 376266 - RNA, 24 nt, Artificial Sequence
  Synthetic
uuuaaaacuuuuauuguucuuacu

SEQ ID NO: 376267 - RNA, 18 nt, Artificial Sequence
  Synthetic
uaacuugcauuucuuacu

SEQ ID NO: 376268 - RNA, 19 nt, Artificial Sequence
  Synthetic
uuaacuugcauuucuuacu

SEQ ID NO: 376269 - RNA, 20 nt, Artificial Sequence
  Synthetic
uuuaacuugcauuucuuacu

SEQ ID NO: 376270 - RNA, 21 nt, Artificial Sequence
  Synthetic
uuuuaacuugcauuucuuacu

SEQ ID NO: 376271 - RNA, 22 nt, Artificial Sequence
  Synthetic
cuuuuaacuugcauuucuuacu

SEQ ID NO: 376272 - RNA, 23 nt, Artificial Sequence
  Synthetic
acuuuuaacuugcauuucuuacu

SEQ ID NO: 376273 - RNA, 24 nt, Artificial Sequence
  Synthetic
aacuuuuaacuugcauuucuuacu

SEQ ID NO: 376274 - RNA, 18 nt, Artificial Sequence
  Synthetic
uaacgaagagaaguuacu

SEQ ID NO: 376275 - RNA, 19 nt, Artificial Sequence
  Synthetic
cuaacgaagagaaguuacu

SEQ ID NO: 376276 - RNA, 20 nt, Artificial Sequence
  Synthetic
ucuaacgaagagaaguuacu

SEQ ID NO: 376277 - RNA, 21 nt, Artificial Sequence
  Synthetic
cucuaacgaagagaaguuacu

SEQ ID NO: 376278 - RNA, 22 nt, Artificial Sequence
  Synthetic
ucucuaacgaagagaaguuacu

SEQ ID NO: 376279 - RNA, 23 nt, Artificial Sequence
  Synthetic
aucucuaacgaagagaaguuacu

SEQ ID NO: 376280 - RNA, 24 nt, Artificial Sequence
  Synthetic
caucucuaacgaagagaaguuacu

SEQ ID NO: 376281 - RNA, 18 nt, Artificial Sequence
  Synthetic
ugugaauuuaggguuacu

SEQ ID NO: 376282 - RNA, 19 nt, Artificial Sequence
  Synthetic
cugugaauuuaggguuacu

SEQ ID NO: 376283 - RNA, 20 nt, Artificial Sequence
  Synthetic
ccugugaauuuaggguuacu

SEQ ID NO: 376284 - RNA, 21 nt, Artificial Sequence
  Synthetic
gccugugaauuuaggguuacu

SEQ ID NO: 376285 - RNA, 22 nt, Artificial Sequence
  Synthetic
ugccugugaauuuaggguuacu

SEQ ID NO: 376286 - RNA, 23 nt, Artificial Sequence
  Synthetic
augccugugaauuuaggguuacu

SEQ ID NO: 376287 - RNA, 24 nt, Artificial Sequence
  Synthetic
uaugccugugaauuuaggguuacu

SEQ ID NO: 376288 - RNA, 18 nt, Artificial Sequence
  Synthetic
gagccaguaaugguuacu

SEQ ID NO: 376289 - RNA, 19 nt, Artificial Sequence
  Synthetic
ugagccaguaaugguuacu

SEQ ID NO: 376290 - RNA, 20 nt, Artificial Sequence
  Synthetic
augagccaguaaugguuacu

SEQ ID NO: 376291 - RNA, 21 nt, Artificial Sequence
  Synthetic
caugagccaguaaugguuacu

SEQ ID NO: 376292 - RNA, 22 nt, Artificial Sequence
  Synthetic
gcaugagccaguaaugguuacu

SEQ ID NO: 376293 - RNA, 23 nt, Artificial Sequence
  Synthetic
ggcaugagccaguaaugguuacu

SEQ ID NO: 376294 - RNA, 24 nt, Artificial Sequence
  Synthetic
uggcaugagccaguaaugguuacu

SEQ ID NO: 376295 - RNA, 18 nt, Artificial Sequence
  Synthetic
cuuuaucaugugguuacu

SEQ ID NO: 376296 - RNA, 19 nt, Artificial Sequence
  Synthetic
ucuuuaucaugugguuacu

SEQ ID NO: 376297 - RNA, 20 nt, Artificial Sequence
  Synthetic
uucuuuaucaugugguuacu

SEQ ID NO: 376298 - RNA, 21 nt, Artificial Sequence
  Synthetic
guucuuuaucaugugguuacu

SEQ ID NO: 376299 - RNA, 22 nt, Artificial Sequence
  Synthetic
aguucuuuaucaugugguuacu

SEQ ID NO: 376300 - RNA, 23 nt, Artificial Sequence
  Synthetic
uaguucuuuaucaugugguuacu

SEQ ID NO: 376301 - RNA, 24 nt, Artificial Sequence
  Synthetic
auaguucuuuaucaugugguuacu

SEQ ID NO: 376302 - RNA, 18 nt, Artificial Sequence
  Synthetic
acacaaccugugguuacu

SEQ ID NO: 376303 - RNA, 19 nt, Artificial Sequence
  Synthetic
gacacaaccugugguuacu

SEQ ID NO: 376304 - RNA, 20 nt, Artificial Sequence
  Synthetic
ugacacaaccugugguuacu

SEQ ID NO: 376305 - RNA, 21 nt, Artificial Sequence
  Synthetic
gugacacaaccugugguuacu

SEQ ID NO: 376306 - RNA, 22 nt, Artificial Sequence
  Synthetic
ggugacacaaccugugguuacu

SEQ ID NO: 376307 - RNA, 23 nt, Artificial Sequence
  Synthetic
uggugacacaaccugugguuacu

SEQ ID NO: 376308 - RNA, 24 nt, Artificial Sequence
  Synthetic
cuggugacacaaccugugguuacu

SEQ ID NO: 376309 - RNA, 18 nt, Artificial Sequence
  Synthetic
agaaaauacgauguuacu

SEQ ID NO: 376310 - RNA, 19 nt, Artificial Sequence
  Synthetic
gagaaaauacgauguuacu

SEQ ID NO: 376311 - RNA, 20 nt, Artificial Sequence
  Synthetic
agagaaaauacgauguuacu

SEQ ID NO: 376312 - RNA, 21 nt, Artificial Sequence
  Synthetic
uagagaaaauacgauguuacu

SEQ ID NO: 376313 - RNA, 22 nt, Artificial Sequence
  Synthetic
uuagagaaaauacgauguuacu

SEQ ID NO: 376314 - RNA, 23 nt, Artificial Sequence
  Synthetic
guuagagaaaauacgauguuacu

SEQ ID NO: 376315 - RNA, 24 nt, Artificial Sequence
  Synthetic
aguuagagaaaauacgauguuacu

SEQ ID NO: 376316 - RNA, 18 nt, Artificial Sequence
  Synthetic
auguauaugauuguuacu

SEQ ID NO: 376317 - RNA, 19 nt, Artificial Sequence
  Synthetic
aauguauaugauuguuacu

SEQ ID NO: 376318 - RNA, 20 nt, Artificial Sequence
  Synthetic
caauguauaugauuguuacu

SEQ ID NO: 376319 - RNA, 21 nt, Artificial Sequence
  Synthetic
acaauguauaugauuguuacu

SEQ ID NO: 376320 - RNA, 22 nt, Artificial Sequence
  Synthetic
cacaauguauaugauuguuacu

SEQ ID NO: 376321 - RNA, 23 nt, Artificial Sequence
  Synthetic
ccacaauguauaugauuguuacu

SEQ ID NO: 376322 - RNA, 24 nt, Artificial Sequence
  Synthetic
uccacaauguauaugauuguuacu

SEQ ID NO: 376323 - RNA, 18 nt, Artificial Sequence
  Synthetic
ggagucacuuuuguuacu

SEQ ID NO: 376324 - RNA, 19 nt, Artificial Sequence
  Synthetic
aggagucacuuuuguuacu

SEQ ID NO: 376325 - RNA, 20 nt, Artificial Sequence
  Synthetic
aaggagucacuuuuguuacu

SEQ ID NO: 376326 - RNA, 21 nt, Artificial Sequence
  Synthetic
uaaggagucacuuuuguuacu

SEQ ID NO: 376327 - RNA, 22 nt, Artificial Sequence
  Synthetic
guaaggagucacuuuuguuacu

SEQ ID NO: 376328 - RNA, 23 nt, Artificial Sequence
  Synthetic
aguaaggagucacuuuuguuacu

SEQ ID NO: 376329 - RNA, 24 nt, Artificial Sequence
  Synthetic
aaguaaggagucacuuuuguuacu

SEQ ID NO: 376330 - RNA, 18 nt, Artificial Sequence
  Synthetic
cacagaccuuuuguuacu

SEQ ID NO: 376331 - RNA, 19 nt, Artificial Sequence
  Synthetic
ucacagaccuuuuguuacu

SEQ ID NO: 376332 - RNA, 20 nt, Artificial Sequence
  Synthetic
gucacagaccuuuuguuacu

SEQ ID NO: 376333 - RNA, 21 nt, Artificial Sequence
  Synthetic
ugucacagaccuuuuguuacu

SEQ ID NO: 376334 - RNA, 22 nt, Artificial Sequence
  Synthetic
gugucacagaccuuuuguuacu

SEQ ID NO: 376335 - RNA, 23 nt, Artificial Sequence
  Synthetic
cgugucacagaccuuuuguuacu

SEQ ID NO: 376336 - RNA, 24 nt, Artificial Sequence
  Synthetic
ucgugucacagaccuuuuguuacu

SEQ ID NO: 376337 - RNA, 18 nt, Artificial Sequence
  Synthetic
gucccgugacaauuuacu

SEQ ID NO: 376338 - RNA, 19 nt, Artificial Sequence
  Synthetic
ugucccgugacaauuuacu

SEQ ID NO: 376339 - RNA, 20 nt, Artificial Sequence
  Synthetic
gugucccgugacaauuuacu

SEQ ID NO: 376340 - RNA, 21 nt, Artificial Sequence
  Synthetic
ugugucccgugacaauuuacu

SEQ ID NO: 376341 - RNA, 22 nt, Artificial Sequence
  Synthetic
cugugucccgugacaauuuacu

SEQ ID NO: 376342 - RNA, 23 nt, Artificial Sequence
  Synthetic
gcugugucccgugacaauuuacu

SEQ ID NO: 376343 - RNA, 24 nt, Artificial Sequence
  Synthetic
ggcugugucccgugacaauuuacu

SEQ ID NO: 376344 - RNA, 18 nt, Artificial Sequence
  Synthetic
uggaagaaggaauuuacu

SEQ ID NO: 376345 - RNA, 19 nt, Artificial Sequence
  Synthetic
cuggaagaaggaauuuacu

SEQ ID NO: 376346 - RNA, 20 nt, Artificial Sequence
  Synthetic
ucuggaagaaggaauuuacu

SEQ ID NO: 376347 - RNA, 21 nt, Artificial Sequence
  Synthetic
gucuggaagaaggaauuuacu

SEQ ID NO: 376348 - RNA, 22 nt, Artificial Sequence
  Synthetic
ggucuggaagaaggaauuuacu

SEQ ID NO: 376349 - RNA, 23 nt, Artificial Sequence
  Synthetic
uggucuggaagaaggaauuuacu

SEQ ID NO: 376350 - RNA, 24 nt, Artificial Sequence
  Synthetic
cuggucuggaagaaggaauuuacu

SEQ ID NO: 376351 - RNA, 18 nt, Artificial Sequence
  Synthetic
uagaagaggacauuuacu

SEQ ID NO: 376352 - RNA, 19 nt, Artificial Sequence
  Synthetic
cuagaagaggacauuuacu

SEQ ID NO: 376353 - RNA, 20 nt, Artificial Sequence
  Synthetic
acuagaagaggacauuuacu

SEQ ID NO: 376354 - RNA, 21 nt, Artificial Sequence
  Synthetic
cacuagaagaggacauuuacu

SEQ ID NO: 376355 - RNA, 22 nt, Artificial Sequence
  Synthetic
gcacuagaagaggacauuuacu

SEQ ID NO: 376356 - RNA, 23 nt, Artificial Sequence
  Synthetic
ggcacuagaagaggacauuuacu

SEQ ID NO: 376357 - RNA, 24 nt, Artificial Sequence
  Synthetic
aggcacuagaagaggacauuuacu

SEQ ID NO: 376358 - RNA, 18 nt, Artificial Sequence
  Synthetic
cuucagaaaccauuuacu

SEQ ID NO: 376359 - RNA, 19 nt, Artificial Sequence
  Synthetic
acuucagaaaccauuuacu

SEQ ID NO: 376360 - RNA, 20 nt, Artificial Sequence
  Synthetic
uacuucagaaaccauuuacu

SEQ ID NO: 376361 - RNA, 21 nt, Artificial Sequence
  Synthetic
cuacuucagaaaccauuuacu

SEQ ID NO: 376362 - RNA, 22 nt, Artificial Sequence
  Synthetic
ucuacuucagaaaccauuuacu

SEQ ID NO: 376363 - RNA, 23 nt, Artificial Sequence
  Synthetic
uucuacuucagaaaccauuuacu

SEQ ID NO: 376364 - RNA, 24 nt, Artificial Sequence
  Synthetic
uuucuacuucagaaaccauuuacu

SEQ ID NO: 376365 - RNA, 18 nt, Artificial Sequence
  Synthetic
cuccaaugagcauuuacu

SEQ ID NO: 376366 - RNA, 19 nt, Artificial Sequence
  Synthetic
acuccaaugagcauuuacu

SEQ ID NO: 376367 - RNA, 20 nt, Artificial Sequence
  Synthetic
uacuccaaugagcauuuacu

SEQ ID NO: 376368 - RNA, 21 nt, Artificial Sequence
  Synthetic
auacuccaaugagcauuuacu

SEQ ID NO: 376369 - RNA, 22 nt, Artificial Sequence
  Synthetic
aauacuccaaugagcauuuacu

SEQ ID NO: 376370 - RNA, 23 nt, Artificial Sequence
  Synthetic
aaauacuccaaugagcauuuacu

SEQ ID NO: 376371 - RNA, 24 nt, Artificial Sequence
  Synthetic
gaaauacuccaaugagcauuuacu

SEQ ID NO: 376372 - RNA, 18 nt, Artificial Sequence
  Synthetic
uagguaggaucauuuacu

SEQ ID NO: 376373 - RNA, 19 nt, Artificial Sequence
  Synthetic
guagguaggaucauuuacu

SEQ ID NO: 376374 - RNA, 20 nt, Artificial Sequence
  Synthetic
uguagguaggaucauuuacu

SEQ ID NO: 376375 - RNA, 21 nt, Artificial Sequence
  Synthetic
uuguagguaggaucauuuacu

SEQ ID NO: 376376 - RNA, 22 nt, Artificial Sequence
  Synthetic
auuguagguaggaucauuuacu

SEQ ID NO: 376377 - RNA, 23 nt, Artificial Sequence
  Synthetic
aauuguagguaggaucauuuacu

SEQ ID NO: 376378 - RNA, 24 nt, Artificial Sequence
  Synthetic
gaauuguagguaggaucauuuacu

SEQ ID NO: 376379 - RNA, 18 nt, Artificial Sequence
  Synthetic
ugaguuucaauauuuacu

SEQ ID NO: 376380 - RNA, 19 nt, Artificial Sequence
  Synthetic
augaguuucaauauuuacu

SEQ ID NO: 376381 - RNA, 20 nt, Artificial Sequence
  Synthetic
aaugaguuucaauauuuacu

SEQ ID NO: 376382 - RNA, 21 nt, Artificial Sequence
  Synthetic
gaaugaguuucaauauuuacu

SEQ ID NO: 376383 - RNA, 22 nt, Artificial Sequence
  Synthetic
agaaugaguuucaauauuuacu

SEQ ID NO: 376384 - RNA, 23 nt, Artificial Sequence
  Synthetic
gagaaugaguuucaauauuuacu

SEQ ID NO: 376385 - RNA, 24 nt, Artificial Sequence
  Synthetic
agagaaugaguuucaauauuuacu

SEQ ID NO: 376386 - RNA, 18 nt, Artificial Sequence
  Synthetic
aucaggcagauauuuacu

SEQ ID NO: 376387 - RNA, 19 nt, Artificial Sequence
  Synthetic
caucaggcagauauuuacu

SEQ ID NO: 376388 - RNA, 20 nt, Artificial Sequence
  Synthetic
ucaucaggcagauauuuacu

SEQ ID NO: 376389 - RNA, 21 nt, Artificial Sequence
  Synthetic
uucaucaggcagauauuuacu

SEQ ID NO: 376390 - RNA, 22 nt, Artificial Sequence
  Synthetic
uuucaucaggcagauauuuacu

SEQ ID NO: 376391 - RNA, 23 nt, Artificial Sequence
  Synthetic
guuucaucaggcagauauuuacu

SEQ ID NO: 376392 - RNA, 24 nt, Artificial Sequence
  Synthetic
uguuucaucaggcagauauuuacu

SEQ ID NO: 376393 - RNA, 18 nt, Artificial Sequence
  Synthetic
guccuaacuauauuuacu

SEQ ID NO: 376394 - RNA, 19 nt, Artificial Sequence
  Synthetic
uguccuaacuauauuuacu

SEQ ID NO: 376395 - RNA, 20 nt, Artificial Sequence
  Synthetic
guguccuaacuauauuuacu

SEQ ID NO: 376396 - RNA, 21 nt, Artificial Sequence
  Synthetic
uguguccuaacuauauuuacu

SEQ ID NO: 376397 - RNA, 22 nt, Artificial Sequence
  Synthetic
auguguccuaacuauauuuacu

SEQ ID NO: 376398 - RNA, 23 nt, Artificial Sequence
  Synthetic
cauguguccuaacuauauuuacu

SEQ ID NO: 376399 - RNA, 24 nt, Artificial Sequence
  Synthetic
ccauguguccuaacuauauuuacu

SEQ ID NO: 376400 - RNA, 18 nt, Artificial Sequence
  Synthetic
aguaagaguugcuuuacu

SEQ ID NO: 376401 - RNA, 19 nt, Artificial Sequence
  Synthetic
caguaagaguugcuuuacu

SEQ ID NO: 376402 - RNA, 20 nt, Artificial Sequence
  Synthetic
acaguaagaguugcuuuacu

SEQ ID NO: 376403 - RNA, 21 nt, Artificial Sequence
  Synthetic
aacaguaagaguugcuuuacu

SEQ ID NO: 376404 - RNA, 22 nt, Artificial Sequence
  Synthetic
aaacaguaagaguugcuuuacu

SEQ ID NO: 376405 - RNA, 23 nt, Artificial Sequence
  Synthetic
uaaacaguaagaguugcuuuacu

SEQ ID NO: 376406 - RNA, 24 nt, Artificial Sequence
  Synthetic
guaaacaguaagaguugcuuuacu

SEQ ID NO: 376407 - RNA, 18 nt, Artificial Sequence
  Synthetic
acggacaccaucuuuacu

SEQ ID NO: 376408 - RNA, 19 nt, Artificial Sequence
  Synthetic
cacggacaccaucuuuacu

SEQ ID NO: 376409 - RNA, 20 nt, Artificial Sequence
  Synthetic
ccacggacaccaucuuuacu

SEQ ID NO: 376410 - RNA, 21 nt, Artificial Sequence
  Synthetic
accacggacaccaucuuuacu

SEQ ID NO: 376411 - RNA, 22 nt, Artificial Sequence
  Synthetic
uaccacggacaccaucuuuacu

SEQ ID NO: 376412 - RNA, 23 nt, Artificial Sequence
  Synthetic
auaccacggacaccaucuuuacu

SEQ ID NO: 376413 - RNA, 24 nt, Artificial Sequence
  Synthetic
cauaccacggacaccaucuuuacu

SEQ ID NO: 376414 - RNA, 18 nt, Artificial Sequence
  Synthetic
aucacuaauaucuuuacu

SEQ ID NO: 376415 - RNA, 19 nt, Artificial Sequence
  Synthetic
uaucacuaauaucuuuacu

SEQ ID NO: 376416 - RNA, 20 nt, Artificial Sequence
  Synthetic
auaucacuaauaucuuuacu

SEQ ID NO: 376417 - RNA, 21 nt, Artificial Sequence
  Synthetic
aauaucacuaauaucuuuacu

SEQ ID NO: 376418 - RNA, 22 nt, Artificial Sequence
  Synthetic
uaauaucacuaauaucuuuacu

SEQ ID NO: 376419 - RNA, 23 nt, Artificial Sequence
  Synthetic
auaauaucacuaauaucuuuacu

SEQ ID NO: 376420 - RNA, 24 nt, Artificial Sequence
  Synthetic
cauaauaucacuaauaucuuuacu

SEQ ID NO: 376421 - RNA, 18 nt, Artificial Sequence
  Synthetic
auacacauccucuuuacu

SEQ ID NO: 376422 - RNA, 19 nt, Artificial Sequence
  Synthetic
aauacacauccucuuuacu

SEQ ID NO: 376423 - RNA, 20 nt, Artificial Sequence
  Synthetic
uaauacacauccucuuuacu

SEQ ID NO: 376424 - RNA, 21 nt, Artificial Sequence
  Synthetic
auaauacacauccucuuuacu

SEQ ID NO: 376425 - RNA, 22 nt, Artificial Sequence
  Synthetic
cauaauacacauccucuuuacu

SEQ ID NO: 376426 - RNA, 23 nt, Artificial Sequence
  Synthetic
acauaauacacauccucuuuacu

SEQ ID NO: 376427 - RNA, 24 nt, Artificial Sequence
  Synthetic
aacauaauacacauccucuuuacu

SEQ ID NO: 376428 - RNA, 18 nt, Artificial Sequence
  Synthetic
cccaagcuuuucuuuacu

SEQ ID NO: 376429 - RNA, 19 nt, Artificial Sequence
  Synthetic
ucccaagcuuuucuuuacu

SEQ ID NO: 376430 - RNA, 20 nt, Artificial Sequence
  Synthetic
gucccaagcuuuucuuuacu

SEQ ID NO: 376431 - RNA, 21 nt, Artificial Sequence
  Synthetic
ggucccaagcuuuucuuuacu

SEQ ID NO: 376432 - RNA, 22 nt, Artificial Sequence
  Synthetic
gggucccaagcuuuucuuuacu

SEQ ID NO: 376433 - RNA, 23 nt, Artificial Sequence
  Synthetic
cgggucccaagcuuuucuuuacu

SEQ ID NO: 376434 - RNA, 24 nt, Artificial Sequence
  Synthetic
ucgggucccaagcuuuucuuuacu

SEQ ID NO: 376435 - RNA, 18 nt, Artificial Sequence
  Synthetic
uguaaguugcaguuuacu

SEQ ID NO: 376436 - RNA, 19 nt, Artificial Sequence
  Synthetic
cuguaaguugcaguuuacu

SEQ ID NO: 376437 - RNA, 20 nt, Artificial Sequence
  Synthetic
acuguaaguugcaguuuacu

SEQ ID NO: 376438 - RNA, 21 nt, Artificial Sequence
  Synthetic
gacuguaaguugcaguuuacu

SEQ ID NO: 376439 - RNA, 22 nt, Artificial Sequence
  Synthetic
ugacuguaaguugcaguuuacu

SEQ ID NO: 376440 - RNA, 23 nt, Artificial Sequence
  Synthetic
uugacuguaaguugcaguuuacu

SEQ ID NO: 376441 - RNA, 24 nt, Artificial Sequence
  Synthetic
guugacuguaaguugcaguuuacu

SEQ ID NO: 376442 - RNA, 18 nt, Artificial Sequence
  Synthetic
ucucuugugagguuuacu

SEQ ID NO: 376443 - RNA, 19 nt, Artificial Sequence
  Synthetic
uucucuugugagguuuacu

SEQ ID NO: 376444 - RNA, 20 nt, Artificial Sequence
  Synthetic
uuucucuugugagguuuacu

SEQ ID NO: 376445 - RNA, 21 nt, Artificial Sequence
  Synthetic
uuuucucuugugagguuuacu

SEQ ID NO: 376446 - RNA, 22 nt, Artificial Sequence
  Synthetic
uuuuucucuugugagguuuacu

SEQ ID NO: 376447 - RNA, 23 nt, Artificial Sequence
  Synthetic
uuuuuucucuugugagguuuacu

SEQ ID NO: 376448 - RNA, 24 nt, Artificial Sequence
  Synthetic
cuuuuuucucuugugagguuuacu

SEQ ID NO: 376449 - RNA, 18 nt, Artificial Sequence
  Synthetic
gaaaaaaguaauuuuacu

SEQ ID NO: 376450 - RNA, 19 nt, Artificial Sequence
  Synthetic
ggaaaaaaguaauuuuacu

SEQ ID NO: 376451 - RNA, 20 nt, Artificial Sequence
  Synthetic
gggaaaaaaguaauuuuacu

SEQ ID NO: 376452 - RNA, 21 nt, Artificial Sequence
  Synthetic
ggggaaaaaaguaauuuuacu

SEQ ID NO: 376453 - RNA, 22 nt, Artificial Sequence
  Synthetic
aggggaaaaaaguaauuuuacu

SEQ ID NO: 376454 - RNA, 23 nt, Artificial Sequence
  Synthetic
aaggggaaaaaaguaauuuuacu

SEQ ID NO: 376455 - RNA, 24 nt, Artificial Sequence
  Synthetic
gaaggggaaaaaaguaauuuuacu

SEQ ID NO: 376456 - RNA, 18 nt, Artificial Sequence
  Synthetic
guuagacaccauuuuacu

SEQ ID NO: 376457 - RNA, 19 nt, Artificial Sequence
  Synthetic
gguuagacaccauuuuacu

SEQ ID NO: 376458 - RNA, 20 nt, Artificial Sequence
  Synthetic
agguuagacaccauuuuacu

SEQ ID NO: 376459 - RNA, 21 nt, Artificial Sequence
  Synthetic
cagguuagacaccauuuuacu

SEQ ID NO: 376460 - RNA, 22 nt, Artificial Sequence
  Synthetic
ucagguuagacaccauuuuacu

SEQ ID NO: 376461 - RNA, 23 nt, Artificial Sequence
  Synthetic
uucagguuagacaccauuuuacu

SEQ ID NO: 376462 - RNA, 24 nt, Artificial Sequence
  Synthetic
guucagguuagacaccauuuuacu

SEQ ID NO: 376463 - RNA, 18 nt, Artificial Sequence
  Synthetic
aguuggugagauuuuacu

SEQ ID NO: 376464 - RNA, 19 nt, Artificial Sequence
  Synthetic
caguuggugagauuuuacu

SEQ ID NO: 376465 - RNA, 20 nt, Artificial Sequence
  Synthetic
ucaguuggugagauuuuacu

SEQ ID NO: 376466 - RNA, 21 nt, Artificial Sequence
  Synthetic
cucaguuggugagauuuuacu

SEQ ID NO: 376467 - RNA, 22 nt, Artificial Sequence
  Synthetic
gcucaguuggugagauuuuacu

SEQ ID NO: 376468 - RNA, 23 nt, Artificial Sequence
  Synthetic
cgcucaguuggugagauuuuacu

SEQ ID NO: 376469 - RNA, 24 nt, Artificial Sequence
  Synthetic
ucgcucaguuggugagauuuuacu

SEQ ID NO: 376470 - RNA, 18 nt, Artificial Sequence
  Synthetic
gguggaauuuauuuuacu

SEQ ID NO: 376471 - RNA, 19 nt, Artificial Sequence
  Synthetic
agguggaauuuauuuuacu

SEQ ID NO: 376472 - RNA, 20 nt, Artificial Sequence
  Synthetic
gagguggaauuuauuuuacu

SEQ ID NO: 376473 - RNA, 21 nt, Artificial Sequence
  Synthetic
agagguggaauuuauuuuacu

SEQ ID NO: 376474 - RNA, 22 nt, Artificial Sequence
  Synthetic
aagagguggaauuuauuuuacu

SEQ ID NO: 376475 - RNA, 23 nt, Artificial Sequence
  Synthetic
uaagagguggaauuuauuuuacu

SEQ ID NO: 376476 - RNA, 24 nt, Artificial Sequence
  Synthetic
uuaagagguggaauuuauuuuacu

SEQ ID NO: 376477 - RNA, 18 nt, Artificial Sequence
  Synthetic
auuuuuuuuccuuuuacu

SEQ ID NO: 376478 - RNA, 19 nt, Artificial Sequence
  Synthetic
aauuuuuuuuccuuuuacu

SEQ ID NO: 376479 - RNA, 20 nt, Artificial Sequence
  Synthetic
caauuuuuuuuccuuuuacu

SEQ ID NO: 376480 - RNA, 21 nt, Artificial Sequence
  Synthetic
ucaauuuuuuuuccuuuuacu

SEQ ID NO: 376481 - RNA, 22 nt, Artificial Sequence
  Synthetic
cucaauuuuuuuuccuuuuacu

SEQ ID NO: 376482 - RNA, 23 nt, Artificial Sequence
  Synthetic
ccucaauuuuuuuuccuuuuacu

SEQ ID NO: 376483 - RNA, 24 nt, Artificial Sequence
  Synthetic
uccucaauuuuuuuuccuuuuacu

SEQ ID NO: 376484 - RNA, 18 nt, Artificial Sequence
  Synthetic
uuaaucgagucuuuuacu

SEQ ID NO: 376485 - RNA, 19 nt, Artificial Sequence
  Synthetic
cuuaaucgagucuuuuacu

SEQ ID NO: 376486 - RNA, 20 nt, Artificial Sequence
  Synthetic
acuuaaucgagucuuuuacu

SEQ ID NO: 376487 - RNA, 21 nt, Artificial Sequence
  Synthetic
cacuuaaucgagucuuuuacu

SEQ ID NO: 376488 - RNA, 22 nt, Artificial Sequence
  Synthetic
ccacuuaaucgagucuuuuacu

SEQ ID NO: 376489 - RNA, 23 nt, Artificial Sequence
  Synthetic
gccacuuaaucgagucuuuuacu

SEQ ID NO: 376490 - RNA, 24 nt, Artificial Sequence
  Synthetic
agccacuuaaucgagucuuuuacu

SEQ ID NO: 376491 - RNA, 18 nt, Artificial Sequence
  Synthetic
uuuucaagaaguuuuacu

SEQ ID NO: 376492 - RNA, 19 nt, Artificial Sequence
  Synthetic
uuuuucaagaaguuuuacu

SEQ ID NO: 376493 - RNA, 20 nt, Artificial Sequence
  Synthetic
cuuuuucaagaaguuuuacu

SEQ ID NO: 376494 - RNA, 21 nt, Artificial Sequence
  Synthetic
acuuuuucaagaaguuuuacu

SEQ ID NO: 376495 - RNA, 22 nt, Artificial Sequence
  Synthetic
aacuuuuucaagaaguuuuacu

SEQ ID NO: 376496 - RNA, 23 nt, Artificial Sequence
  Synthetic
caacuuuuucaagaaguuuuacu

SEQ ID NO: 376497 - RNA, 24 nt, Artificial Sequence
  Synthetic
acaacuuuuucaagaaguuuuacu

SEQ ID NO: 376498 - RNA, 18 nt, Artificial Sequence
  Synthetic
aaugggaaagguuuuacu

SEQ ID NO: 376499 - RNA, 19 nt, Artificial Sequence
  Synthetic
aaaugggaaagguuuuacu

SEQ ID NO: 376500 - RNA, 20 nt, Artificial Sequence
  Synthetic
uaaaugggaaagguuuuacu

SEQ ID NO: 376501 - RNA, 21 nt, Artificial Sequence
  Synthetic
guaaaugggaaagguuuuacu

SEQ ID NO: 376502 - RNA, 22 nt, Artificial Sequence
  Synthetic
uguaaaugggaaagguuuuacu

SEQ ID NO: 376503 - RNA, 23 nt, Artificial Sequence
  Synthetic
cuguaaaugggaaagguuuuacu

SEQ ID NO: 376504 - RNA, 24 nt, Artificial Sequence
  Synthetic
ucuguaaaugggaaagguuuuacu

SEQ ID NO: 376505 - RNA, 18 nt, Artificial Sequence
  Synthetic
ucucauucuuuuuuuacu

SEQ ID NO: 376506 - RNA, 19 nt, Artificial Sequence
  Synthetic
uucucauucuuuuuuuacu

SEQ ID NO: 376507 - RNA, 20 nt, Artificial Sequence
  Synthetic
auucucauucuuuuuuuacu

SEQ ID NO: 376508 - RNA, 21 nt, Artificial Sequence
  Synthetic
cauucucauucuuuuuuuacu

SEQ ID NO: 376509 - RNA, 22 nt, Artificial Sequence
  Synthetic
ucauucucauucuuuuuuuacu

SEQ ID NO: 376510 - RNA, 23 nt, Artificial Sequence
  Synthetic
cucauucucauucuuuuuuuacu

SEQ ID NO: 376511 - RNA, 24 nt, Artificial Sequence
  Synthetic
ucucauucucauucuuuuuuuacu

SEQ ID NO: 376512 - RNA, 18 nt, Artificial Sequence
  Synthetic
auucgugaaagaaaaccu

SEQ ID NO: 376513 - RNA, 19 nt, Artificial Sequence
  Synthetic
cauucgugaaagaaaaccu

SEQ ID NO: 376514 - RNA, 20 nt, Artificial Sequence
  Synthetic
gcauucgugaaagaaaaccu

SEQ ID NO: 376515 - RNA, 21 nt, Artificial Sequence
  Synthetic
ugcauucgugaaagaaaaccu

SEQ ID NO: 376516 - RNA, 22 nt, Artificial Sequence
  Synthetic
uugcauucgugaaagaaaaccu

SEQ ID NO: 376517 - RNA, 23 nt, Artificial Sequence
  Synthetic
cuugcauucgugaaagaaaaccu

SEQ ID NO: 376518 - RNA, 24 nt, Artificial Sequence
  Synthetic
gcuugcauucgugaaagaaaaccu

SEQ ID NO: 376519 - RNA, 18 nt, Artificial Sequence
  Synthetic
aaucgcagaagaaaaccu

SEQ ID NO: 376520 - RNA, 19 nt, Artificial Sequence
  Synthetic
gaaucgcagaagaaaaccu

SEQ ID NO: 376521 - RNA, 20 nt, Artificial Sequence
  Synthetic
agaaucgcagaagaaaaccu

SEQ ID NO: 376522 - RNA, 21 nt, Artificial Sequence
  Synthetic
aagaaucgcagaagaaaaccu

SEQ ID NO: 376523 - RNA, 22 nt, Artificial Sequence
  Synthetic
gaagaaucgcagaagaaaaccu

SEQ ID NO: 376524 - RNA, 23 nt, Artificial Sequence
  Synthetic
agaagaaucgcagaagaaaaccu

SEQ ID NO: 376525 - RNA, 24 nt, Artificial Sequence
  Synthetic
uagaagaaucgcagaagaaaaccu

SEQ ID NO: 376526 - RNA, 18 nt, Artificial Sequence
  Synthetic
auugugcagagaaaaccu

SEQ ID NO: 376527 - RNA, 19 nt, Artificial Sequence
  Synthetic
uauugugcagagaaaaccu

SEQ ID NO: 376528 - RNA, 20 nt, Artificial Sequence
  Synthetic
uuauugugcagagaaaaccu

SEQ ID NO: 376529 - RNA, 21 nt, Artificial Sequence
  Synthetic
auuauugugcagagaaaaccu

SEQ ID NO: 376530 - RNA, 22 nt, Artificial Sequence
  Synthetic
gauuauugugcagagaaaaccu

SEQ ID NO: 376531 - RNA, 23 nt, Artificial Sequence
  Synthetic
ggauuauugugcagagaaaaccu

SEQ ID NO: 376532 - RNA, 24 nt, Artificial Sequence
  Synthetic
aggauuauugugcagagaaaaccu

SEQ ID NO: 376533 - RNA, 18 nt, Artificial Sequence
  Synthetic
cucgucacgagaaaaccu

SEQ ID NO: 376534 - RNA, 19 nt, Artificial Sequence
  Synthetic
gcucgucacgagaaaaccu

SEQ ID NO: 376535 - RNA, 20 nt, Artificial Sequence
  Synthetic
ggcucgucacgagaaaaccu

SEQ ID NO: 376536 - RNA, 21 nt, Artificial Sequence
  Synthetic
uggcucgucacgagaaaaccu

SEQ ID NO: 376537 - RNA, 22 nt, Artificial Sequence
  Synthetic
uuggcucgucacgagaaaaccu

SEQ ID NO: 376538 - RNA, 23 nt, Artificial Sequence
  Synthetic
cuuggcucgucacgagaaaaccu

SEQ ID NO: 376539 - RNA, 24 nt, Artificial Sequence
  Synthetic
ccuuggcucgucacgagaaaaccu

SEQ ID NO: 376540 - RNA, 18 nt, Artificial Sequence
  Synthetic
gcugugcucauaaaaccu

SEQ ID NO: 376541 - RNA, 19 nt, Artificial Sequence
  Synthetic
ggcugugcucauaaaaccu

SEQ ID NO: 376542 - RNA, 20 nt, Artificial Sequence
  Synthetic
aggcugugcucauaaaaccu

SEQ ID NO: 376543 - RNA, 21 nt, Artificial Sequence
  Synthetic
caggcugugcucauaaaaccu

SEQ ID NO: 376544 - RNA, 22 nt, Artificial Sequence
  Synthetic
ucaggcugugcucauaaaaccu

SEQ ID NO: 376545 - RNA, 23 nt, Artificial Sequence
  Synthetic
aucaggcugugcucauaaaaccu

SEQ ID NO: 376546 - RNA, 24 nt, Artificial Sequence
  Synthetic
uaucaggcugugcucauaaaaccu

SEQ ID NO: 376547 - RNA, 18 nt, Artificial Sequence
  Synthetic
gaaugugacaacaaaccu

SEQ ID NO: 376548 - RNA, 19 nt, Artificial Sequence
  Synthetic
agaaugugacaacaaaccu

SEQ ID NO: 376549 - RNA, 20 nt, Artificial Sequence
  Synthetic
gagaaugugacaacaaaccu

SEQ ID NO: 376550 - RNA, 21 nt, Artificial Sequence
  Synthetic
ugagaaugugacaacaaaccu

SEQ ID NO: 376551 - RNA, 22 nt, Artificial Sequence
  Synthetic
gugagaaugugacaacaaaccu

SEQ ID NO: 376552 - RNA, 23 nt, Artificial Sequence
  Synthetic
agugagaaugugacaacaaaccu

SEQ ID NO: 376553 - RNA, 24 nt, Artificial Sequence
  Synthetic
uagugagaaugugacaacaaaccu

SEQ ID NO: 376554 - RNA, 18 nt, Artificial Sequence
  Synthetic
cugaucuuuaacaaaccu

SEQ ID NO: 376555 - RNA, 19 nt, Artificial Sequence
  Synthetic
ucugaucuuuaacaaaccu

SEQ ID NO: 376556 - RNA, 20 nt, Artificial Sequence
  Synthetic
aucugaucuuuaacaaaccu

SEQ ID NO: 376557 - RNA, 21 nt, Artificial Sequence
  Synthetic
uaucugaucuuuaacaaaccu

SEQ ID NO: 376558 - RNA, 22 nt, Artificial Sequence
  Synthetic
cuaucugaucuuuaacaaaccu

SEQ ID NO: 376559 - RNA, 23 nt, Artificial Sequence
  Synthetic
acuaucugaucuuuaacaaaccu

SEQ ID NO: 376560 - RNA, 24 nt, Artificial Sequence
  Synthetic
aacuaucugaucuuuaacaaaccu

SEQ ID NO: 376561 - RNA, 24 nt, Artificial Sequence
  Synthetic
aacuaucugaucuuugacaaaccu

SEQ ID NO: 376562 - RNA, 24 nt, Artificial Sequence
  Synthetic
cacuaucugaucuuugacaaaccu

SEQ ID NO: 376563 - RNA, 18 nt, Artificial Sequence
  Synthetic
ugucaauggaucaaaccu

SEQ ID NO: 376564 - RNA, 19 nt, Artificial Sequence
  Synthetic
augucaauggaucaaaccu

SEQ ID NO: 376565 - RNA, 20 nt, Artificial Sequence
  Synthetic
aaugucaauggaucaaaccu

SEQ ID NO: 376566 - RNA, 21 nt, Artificial Sequence
  Synthetic
gaaugucaauggaucaaaccu

SEQ ID NO: 376567 - RNA, 22 nt, Artificial Sequence
  Synthetic
agaaugucaauggaucaaaccu

SEQ ID NO: 376568 - RNA, 23 nt, Artificial Sequence
  Synthetic
uagaaugucaauggaucaaaccu

SEQ ID NO: 376569 - RNA, 24 nt, Artificial Sequence
  Synthetic
cuagaaugucaauggaucaaaccu

SEQ ID NO: 376570 - RNA, 18 nt, Artificial Sequence
  Synthetic
caaaaaagugcuaaaccu

SEQ ID NO: 376571 - RNA, 19 nt, Artificial Sequence
  Synthetic
gcaaaaaagugcuaaaccu

SEQ ID NO: 376572 - RNA, 20 nt, Artificial Sequence
  Synthetic
agcaaaaaagugcuaaaccu

SEQ ID NO: 376573 - RNA, 21 nt, Artificial Sequence
  Synthetic
uagcaaaaaagugcuaaaccu

SEQ ID NO: 376574 - RNA, 22 nt, Artificial Sequence
  Synthetic
auagcaaaaaagugcuaaaccu

SEQ ID NO: 376575 - RNA, 23 nt, Artificial Sequence
  Synthetic
gauagcaaaaaagugcuaaaccu

SEQ ID NO: 376576 - RNA, 24 nt, Artificial Sequence
  Synthetic
agauagcaaaaaagugcuaaaccu

SEQ ID NO: 376577 - RNA, 18 nt, Artificial Sequence
  Synthetic
guuaggacaaguaaaccu

SEQ ID NO: 376578 - RNA, 19 nt, Artificial Sequence
  Synthetic
uguuaggacaaguaaaccu

SEQ ID NO: 376579 - RNA, 20 nt, Artificial Sequence
  Synthetic
uuguuaggacaaguaaaccu

SEQ ID NO: 376580 - RNA, 21 nt, Artificial Sequence
  Synthetic
auuguuaggacaaguaaaccu

SEQ ID NO: 376581 - RNA, 22 nt, Artificial Sequence
  Synthetic
aauuguuaggacaaguaaaccu

SEQ ID NO: 376582 - RNA, 23 nt, Artificial Sequence
  Synthetic
aaauuguuaggacaaguaaaccu

SEQ ID NO: 376583 - RNA, 24 nt, Artificial Sequence
  Synthetic
aaaauuguuaggacaaguaaaccu

SEQ ID NO: 376584 - RNA, 18 nt, Artificial Sequence
  Synthetic
ugguuucaugcacaaccu

SEQ ID NO: 376585 - RNA, 19 nt, Artificial Sequence
  Synthetic
cugguuucaugcacaaccu

SEQ ID NO: 376586 - RNA, 20 nt, Artificial Sequence
  Synthetic
ucugguuucaugcacaaccu

SEQ ID NO: 376587 - RNA, 21 nt, Artificial Sequence
  Synthetic
uucugguuucaugcacaaccu

SEQ ID NO: 376588 - RNA, 22 nt, Artificial Sequence
  Synthetic
guucugguuucaugcacaaccu

SEQ ID NO: 376589 - RNA, 23 nt, Artificial Sequence
  Synthetic
gguucugguuucaugcacaaccu

SEQ ID NO: 376590 - RNA, 24 nt, Artificial Sequence
  Synthetic
ggguucugguuucaugcacaaccu

SEQ ID NO: 376591 - RNA, 18 nt, Artificial Sequence
  Synthetic
gaacaaggcucacaaccu

SEQ ID NO: 376592 - RNA, 19 nt, Artificial Sequence
  Synthetic
agaacaaggcucacaaccu

SEQ ID NO: 376593 - RNA, 20 nt, Artificial Sequence
  Synthetic
gagaacaaggcucacaaccu

SEQ ID NO: 376594 - RNA, 21 nt, Artificial Sequence
  Synthetic
ugagaacaaggcucacaaccu

SEQ ID NO: 376595 - RNA, 22 nt, Artificial Sequence
  Synthetic
cugagaacaaggcucacaaccu

SEQ ID NO: 376596 - RNA, 23 nt, Artificial Sequence
  Synthetic
ccugagaacaaggcucacaaccu

SEQ ID NO: 376597 - RNA, 24 nt, Artificial Sequence
  Synthetic
gccugagaacaaggcucacaaccu

SEQ ID NO: 376598 - RNA, 18 nt, Artificial Sequence
  Synthetic
uuaacuuguauacaaccu

SEQ ID NO: 376599 - RNA, 19 nt, Artificial Sequence
  Synthetic
cuuaacuuguauacaaccu

SEQ ID NO: 376600 - RNA, 20 nt, Artificial Sequence
  Synthetic
acuuaacuuguauacaaccu

SEQ ID NO: 376601 - RNA, 21 nt, Artificial Sequence
  Synthetic
cacuuaacuuguauacaaccu

SEQ ID NO: 376602 - RNA, 22 nt, Artificial Sequence
  Synthetic
ccacuuaacuuguauacaaccu

SEQ ID NO: 376603 - RNA, 23 nt, Artificial Sequence
  Synthetic
gccacuuaacuuguauacaaccu

SEQ ID NO: 376604 - RNA, 24 nt, Artificial Sequence
  Synthetic
ugccacuuaacuuguauacaaccu

SEQ ID NO: 376605 - RNA, 18 nt, Artificial Sequence
  Synthetic
ccuuuuucuccccaaccu

SEQ ID NO: 376606 - RNA, 19 nt, Artificial Sequence
  Synthetic
gccuuuuucuccccaaccu

SEQ ID NO: 376607 - RNA, 20 nt, Artificial Sequence
  Synthetic
ggccuuuuucuccccaaccu

SEQ ID NO: 376608 - RNA, 21 nt, Artificial Sequence
  Synthetic
gggccuuuuucuccccaaccu

SEQ ID NO: 376609 - RNA, 22 nt, Artificial Sequence
  Synthetic
cgggccuuuuucuccccaaccu

SEQ ID NO: 376610 - RNA, 23 nt, Artificial Sequence
  Synthetic
gcgggccuuuuucuccccaaccu

SEQ ID NO: 376611 - RNA, 24 nt, Artificial Sequence
  Synthetic
agcgggccuuuuucuccccaaccu

SEQ ID NO: 376612 - RNA, 18 nt, Artificial Sequence
  Synthetic
ggucaaucuggccaaccu

SEQ ID NO: 376613 - RNA, 19 nt, Artificial Sequence
  Synthetic
uggucaaucuggccaaccu

SEQ ID NO: 376614 - RNA, 20 nt, Artificial Sequence
  Synthetic
uuggucaaucuggccaaccu

SEQ ID NO: 376615 - RNA, 21 nt, Artificial Sequence
  Synthetic
uuuggucaaucuggccaaccu

SEQ ID NO: 376616 - RNA, 22 nt, Artificial Sequence
  Synthetic
cuuuggucaaucuggccaaccu

SEQ ID NO: 376617 - RNA, 23 nt, Artificial Sequence
  Synthetic
ccuuuggucaaucuggccaaccu

SEQ ID NO: 376618 - RNA, 24 nt, Artificial Sequence
  Synthetic
uccuuuggucaaucuggccaaccu

SEQ ID NO: 376619 - RNA, 18 nt, Artificial Sequence
  Synthetic
uucccuuuacuccaaccu

SEQ ID NO: 376620 - RNA, 19 nt, Artificial Sequence
  Synthetic
auucccuuuacuccaaccu

SEQ ID NO: 376621 - RNA, 20 nt, Artificial Sequence
  Synthetic
uauucccuuuacuccaaccu

SEQ ID NO: 376622 - RNA, 21 nt, Artificial Sequence
  Synthetic
guauucccuuuacuccaaccu

SEQ ID NO: 376623 - RNA, 22 nt, Artificial Sequence
  Synthetic
aguauucccuuuacuccaaccu

SEQ ID NO: 376624 - RNA, 23 nt, Artificial Sequence
  Synthetic
caguauucccuuuacuccaaccu

SEQ ID NO: 376625 - RNA, 24 nt, Artificial Sequence
  Synthetic
acaguauucccuuuacuccaaccu

SEQ ID NO: 376626 - RNA, 18 nt, Artificial Sequence
  Synthetic
ucaucuuacuuccaaccu

SEQ ID NO: 376627 - RNA, 19 nt, Artificial Sequence
  Synthetic
cucaucuuacuuccaaccu

SEQ ID NO: 376628 - RNA, 20 nt, Artificial Sequence
  Synthetic
ucucaucuuacuuccaaccu

SEQ ID NO: 376629 - RNA, 21 nt, Artificial Sequence
  Synthetic
cucucaucuuacuuccaaccu

SEQ ID NO: 376630 - RNA, 22 nt, Artificial Sequence
  Synthetic
ccucucaucuuacuuccaaccu

SEQ ID NO: 376631 - RNA, 23 nt, Artificial Sequence
  Synthetic
accucucaucuuacuuccaaccu

SEQ ID NO: 376632 - RNA, 24 nt, Artificial Sequence
  Synthetic
uaccucucaucuuacuuccaaccu

SEQ ID NO: 376633 - RNA, 18 nt, Artificial Sequence
  Synthetic
cacucaugcuggcaaccu

SEQ ID NO: 376634 - RNA, 19 nt, Artificial Sequence
  Synthetic
acacucaugcuggcaaccu

SEQ ID NO: 376635 - RNA, 20 nt, Artificial Sequence
  Synthetic
gacacucaugcuggcaaccu

SEQ ID NO: 376636 - RNA, 21 nt, Artificial Sequence
  Synthetic
ugacacucaugcuggcaaccu

SEQ ID NO: 376637 - RNA, 22 nt, Artificial Sequence
  Synthetic
augacacucaugcuggcaaccu

SEQ ID NO: 376638 - RNA, 23 nt, Artificial Sequence
  Synthetic
gaugacacucaugcuggcaaccu

SEQ ID NO: 376639 - RNA, 24 nt, Artificial Sequence
  Synthetic
ugaugacacucaugcuggcaaccu

SEQ ID NO: 376640 - RNA, 18 nt, Artificial Sequence
  Synthetic
uuuuaaaugcugcaaccu

SEQ ID NO: 376641 - RNA, 19 nt, Artificial Sequence
  Synthetic
uuuuuaaaugcugcaaccu

SEQ ID NO: 376642 - RNA, 20 nt, Artificial Sequence
  Synthetic
uuuuuuaaaugcugcaaccu

SEQ ID NO: 376643 - RNA, 21 nt, Artificial Sequence
  Synthetic
cuuuuuuaaaugcugcaaccu

SEQ ID NO: 376644 - RNA, 22 nt, Artificial Sequence
  Synthetic
acuuuuuuaaaugcugcaaccu

SEQ ID NO: 376645 - RNA, 23 nt, Artificial Sequence
  Synthetic
cacuuuuuuaaaugcugcaaccu

SEQ ID NO: 376646 - RNA, 24 nt, Artificial Sequence
  Synthetic
ucacuuuuuuaaaugcugcaaccu

SEQ ID NO: 376647 - RNA, 18 nt, Artificial Sequence
  Synthetic
uaugcuuaacuucaaccu

SEQ ID NO: 376648 - RNA, 19 nt, Artificial Sequence
  Synthetic
auaugcuuaacuucaaccu

SEQ ID NO: 376649 - RNA, 20 nt, Artificial Sequence
  Synthetic
aauaugcuuaacuucaaccu

SEQ ID NO: 376650 - RNA, 21 nt, Artificial Sequence
  Synthetic
uaauaugcuuaacuucaaccu

SEQ ID NO: 376651 - RNA, 22 nt, Artificial Sequence
  Synthetic
guaauaugcuuaacuucaaccu

SEQ ID NO: 376652 - RNA, 23 nt, Artificial Sequence
  Synthetic
aguaauaugcuuaacuucaaccu

SEQ ID NO: 376653 - RNA, 24 nt, Artificial Sequence
  Synthetic
aaguaauaugcuuaacuucaaccu

SEQ ID NO: 376654 - RNA, 18 nt, Artificial Sequence
  Synthetic
ggagaauggcaugaaccu

SEQ ID NO: 376655 - RNA, 19 nt, Artificial Sequence
  Synthetic
aggagaauggcaugaaccu

SEQ ID NO: 376656 - RNA, 20 nt, Artificial Sequence
  Synthetic
caggagaauggcaugaaccu

SEQ ID NO: 376657 - RNA, 21 nt, Artificial Sequence
  Synthetic
gcaggagaauggcaugaaccu

SEQ ID NO: 376658 - RNA, 22 nt, Artificial Sequence
  Synthetic
ggcaggagaauggcaugaaccu

SEQ ID NO: 376659 - RNA, 23 nt, Artificial Sequence
  Synthetic
aggcaggagaauggcaugaaccu

SEQ ID NO: 376660 - RNA, 24 nt, Artificial Sequence
  Synthetic
gaggcaggagaauggcaugaaccu

SEQ ID NO: 376661 - RNA, 18 nt, Artificial Sequence
  Synthetic
gguaugugagcugaaccu

SEQ ID NO: 376662 - RNA, 19 nt, Artificial Sequence
  Synthetic
agguaugugagcugaaccu

SEQ ID NO: 376663 - RNA, 20 nt, Artificial Sequence
  Synthetic
uagguaugugagcugaaccu

SEQ ID NO: 376664 - RNA, 21 nt, Artificial Sequence
  Synthetic
cuagguaugugagcugaaccu

SEQ ID NO: 376665 - RNA, 22 nt, Artificial Sequence
  Synthetic
ccuagguaugugagcugaaccu

SEQ ID NO: 376666 - RNA, 23 nt, Artificial Sequence
  Synthetic
accuagguaugugagcugaaccu

SEQ ID NO: 376667 - RNA, 24 nt, Artificial Sequence
  Synthetic
uaccuagguaugugagcugaaccu

SEQ ID NO: 376668 - RNA, 18 nt, Artificial Sequence
  Synthetic
gcaaagaaaagugaaccu

SEQ ID NO: 376669 - RNA, 19 nt, Artificial Sequence
  Synthetic
ugcaaagaaaagugaaccu

SEQ ID NO: 376670 - RNA, 20 nt, Artificial Sequence
  Synthetic
gugcaaagaaaagugaaccu

SEQ ID NO: 376671 - RNA, 21 nt, Artificial Sequence
  Synthetic
ggugcaaagaaaagugaaccu

SEQ ID NO: 376672 - RNA, 22 nt, Artificial Sequence
  Synthetic
uggugcaaagaaaagugaaccu

SEQ ID NO: 376673 - RNA, 23 nt, Artificial Sequence
  Synthetic
cuggugcaaagaaaagugaaccu

SEQ ID NO: 376674 - RNA, 24 nt, Artificial Sequence
  Synthetic
ccuggugcaaagaaaagugaaccu

SEQ ID NO: 376675 - RNA, 18 nt, Artificial Sequence
  Synthetic
ggagaaaggcgugaaccu

SEQ ID NO: 376676 - RNA, 19 nt, Artificial Sequence
  Synthetic
gggagaaaggcgugaaccu

SEQ ID NO: 376677 - RNA, 20 nt, Artificial Sequence
  Synthetic
cgggagaaaggcgugaaccu

SEQ ID NO: 376678 - RNA, 21 nt, Artificial Sequence
  Synthetic
gcgggagaaaggcgugaaccu

SEQ ID NO: 376679 - RNA, 22 nt, Artificial Sequence
  Synthetic
ggcgggagaaaggcgugaaccu

SEQ ID NO: 376680 - RNA, 23 nt, Artificial Sequence
  Synthetic
aggcgggagaaaggcgugaaccu

SEQ ID NO: 376681 - RNA, 24 nt, Artificial Sequence
  Synthetic
gaggcgggagaaaggcgugaaccu

SEQ ID NO: 376682 - RNA, 18 nt, Artificial Sequence
  Synthetic
ggagaauggcgugaaccu

SEQ ID NO: 376683 - RNA, 19 nt, Artificial Sequence
  Synthetic
aggagaauggcgugaaccu

SEQ ID NO: 376684 - RNA, 20 nt, Artificial Sequence
  Synthetic
caggagaauggcgugaaccu

SEQ ID NO: 376685 - RNA, 21 nt, Artificial Sequence
  Synthetic
gcaggagaauggcgugaaccu

SEQ ID NO: 376686 - RNA, 22 nt, Artificial Sequence
  Synthetic
ggcaggagaauggcgugaaccu

SEQ ID NO: 376687 - RNA, 23 nt, Artificial Sequence
  Synthetic
aggcaggagaauggcgugaaccu

SEQ ID NO: 376688 - RNA, 24 nt, Artificial Sequence
  Synthetic
gaggcaggagaauggcgugaaccu

SEQ ID NO: 376689 - RNA, 18 nt, Artificial Sequence
  Synthetic
ugcuuauaaauugaaccu

SEQ ID NO: 376690 - RNA, 19 nt, Artificial Sequence
  Synthetic
uugcuuauaaauugaaccu

SEQ ID NO: 376691 - RNA, 20 nt, Artificial Sequence
  Synthetic
guugcuuauaaauugaaccu

SEQ ID NO: 376692 - RNA, 21 nt, Artificial Sequence
  Synthetic
aguugcuuauaaauugaaccu

SEQ ID NO: 376693 - RNA, 22 nt, Artificial Sequence
  Synthetic
uaguugcuuauaaauugaaccu

SEQ ID NO: 376694 - RNA, 23 nt, Artificial Sequence
  Synthetic
uuaguugcuuauaaauugaaccu

SEQ ID NO: 376695 - RNA, 24 nt, Artificial Sequence
  Synthetic
auuaguugcuuauaaauugaaccu

SEQ ID NO: 376696 - RNA, 18 nt, Artificial Sequence
  Synthetic
ggagaaucacuugaaccu

SEQ ID NO: 376697 - RNA, 19 nt, Artificial Sequence
  Synthetic
aggagaaucacuugaaccu

SEQ ID NO: 376698 - RNA, 20 nt, Artificial Sequence
  Synthetic
caggagaaucacuugaaccu

SEQ ID NO: 376699 - RNA, 21 nt, Artificial Sequence
  Synthetic
gcaggagaaucacuugaaccu

SEQ ID NO: 376700 - RNA, 22 nt, Artificial Sequence
  Synthetic
ggcaggagaaucacuugaaccu

SEQ ID NO: 376701 - RNA, 23 nt, Artificial Sequence
  Synthetic
aggcaggagaaucacuugaaccu

SEQ ID NO: 376702 - RNA, 24 nt, Artificial Sequence
  Synthetic
gaggcaggagaaucacuugaaccu

SEQ ID NO: 376703 - RNA, 18 nt, Artificial Sequence
  Synthetic
gcagaauugcuugaaccu

SEQ ID NO: 376704 - RNA, 19 nt, Artificial Sequence
  Synthetic
agcagaauugcuugaaccu

SEQ ID NO: 376705 - RNA, 20 nt, Artificial Sequence
  Synthetic
cagcagaauugcuugaaccu

SEQ ID NO: 376706 - RNA, 21 nt, Artificial Sequence
  Synthetic
gcagcagaauugcuugaaccu

SEQ ID NO: 376707 - RNA, 22 nt, Artificial Sequence
  Synthetic
ggcagcagaauugcuugaaccu

SEQ ID NO: 376708 - RNA, 23 nt, Artificial Sequence
  Synthetic
aggcagcagaauugcuugaaccu

SEQ ID NO: 376709 - RNA, 24 nt, Artificial Sequence
  Synthetic
gaggcagcagaauugcuugaaccu

SEQ ID NO: 376710 - RNA, 18 nt, Artificial Sequence
  Synthetic
ggagaauugcuugaaccu

SEQ ID NO: 376711 - RNA, 19 nt, Artificial Sequence
  Synthetic
aggagaauugcuugaaccu

SEQ ID NO: 376712 - RNA, 20 nt, Artificial Sequence
  Synthetic
caggagaauugcuugaaccu

SEQ ID NO: 376713 - RNA, 21 nt, Artificial Sequence
  Synthetic
gcaggagaauugcuugaaccu

SEQ ID NO: 376714 - RNA, 22 nt, Artificial Sequence
  Synthetic
ggcaggagaauugcuugaaccu

SEQ ID NO: 376715 - RNA, 23 nt, Artificial Sequence
  Synthetic
aggcaggagaauugcuugaaccu

SEQ ID NO: 376716 - RNA, 24 nt, Artificial Sequence
  Synthetic
gaggcaggagaauugcuugaaccu

SEQ ID NO: 376717 - RNA, 18 nt, Artificial Sequence
  Synthetic
ggaagauugcuugaaccu

SEQ ID NO: 376718 - RNA, 19 nt, Artificial Sequence
  Synthetic
gggaagauugcuugaaccu

SEQ ID NO: 376719 - RNA, 20 nt, Artificial Sequence
  Synthetic
cgggaagauugcuugaaccu

SEQ ID NO: 376720 - RNA, 21 nt, Artificial Sequence
  Synthetic
gcgggaagauugcuugaaccu

SEQ ID NO: 376721 - RNA, 22 nt, Artificial Sequence
  Synthetic
ggcgggaagauugcuugaaccu

SEQ ID NO: 376722 - RNA, 23 nt, Artificial Sequence
  Synthetic
aggcgggaagauugcuugaaccu

SEQ ID NO: 376723 - RNA, 24 nt, Artificial Sequence
  Synthetic
gaggcgggaagauugcuugaaccu

SEQ ID NO: 376724 - RNA, 18 nt, Artificial Sequence
  Synthetic
ggagaauuguuugaaccu

SEQ ID NO: 376725 - RNA, 19 nt, Artificial Sequence
  Synthetic
aggagaauuguuugaaccu

SEQ ID NO: 376726 - RNA, 20 nt, Artificial Sequence
  Synthetic
caggagaauuguuugaaccu

SEQ ID NO: 376727 - RNA, 21 nt, Artificial Sequence
  Synthetic
gcaggagaauuguuugaaccu

SEQ ID NO: 376728 - RNA, 22 nt, Artificial Sequence
  Synthetic
ggcaggagaauuguuugaaccu

SEQ ID NO: 376729 - RNA, 23 nt, Artificial Sequence
  Synthetic
aggcaggagaauuguuugaaccu

SEQ ID NO: 376730 - RNA, 24 nt, Artificial Sequence
  Synthetic
gaggcaggagaauuguuugaaccu

SEQ ID NO: 376731 - RNA, 18 nt, Artificial Sequence
  Synthetic
gcauuuggaaaauaaccu

SEQ ID NO: 376732 - RNA, 19 nt, Artificial Sequence
  Synthetic
agcauuuggaaaauaaccu

SEQ ID NO: 376733 - RNA, 20 nt, Artificial Sequence
  Synthetic
uagcauuuggaaaauaaccu

SEQ ID NO: 376734 - RNA, 21 nt, Artificial Sequence
  Synthetic
guagcauuuggaaaauaaccu

SEQ ID NO: 376735 - RNA, 22 nt, Artificial Sequence
  Synthetic
uguagcauuuggaaaauaaccu

SEQ ID NO: 376736 - RNA, 23 nt, Artificial Sequence
  Synthetic
uuguagcauuuggaaaauaaccu

SEQ ID NO: 376737 - RNA, 24 nt, Artificial Sequence
  Synthetic
auuguagcauuuggaaaauaaccu

SEQ ID NO: 376738 - RNA, 18 nt, Artificial Sequence
  Synthetic
ucacuauuaguauaaccu

SEQ ID NO: 376739 - RNA, 19 nt, Artificial Sequence
  Synthetic
aucacuauuaguauaaccu

SEQ ID NO: 376740 - RNA, 20 nt, Artificial Sequence
  Synthetic
caucacuauuaguauaaccu

SEQ ID NO: 376741 - RNA, 21 nt, Artificial Sequence
  Synthetic
gcaucacuauuaguauaaccu

SEQ ID NO: 376742 - RNA, 22 nt, Artificial Sequence
  Synthetic
ugcaucacuauuaguauaaccu

SEQ ID NO: 376743 - RNA, 23 nt, Artificial Sequence
  Synthetic
uugcaucacuauuaguauaaccu

SEQ ID NO: 376744 - RNA, 24 nt, Artificial Sequence
  Synthetic
auugcaucacuauuaguauaaccu

SEQ ID NO: 376745 - RNA, 18 nt, Artificial Sequence
  Synthetic
uauuuuguggacuaaccu

SEQ ID NO: 376746 - RNA, 19 nt, Artificial Sequence
  Synthetic
uuauuuuguggacuaaccu

SEQ ID NO: 376747 - RNA, 20 nt, Artificial Sequence
  Synthetic
auuauuuuguggacuaaccu

SEQ ID NO: 376748 - RNA, 21 nt, Artificial Sequence
  Synthetic
uauuauuuuguggacuaaccu

SEQ ID NO: 376749 - RNA, 22 nt, Artificial Sequence
  Synthetic
cuauuauuuuguggacuaaccu

SEQ ID NO: 376750 - RNA, 23 nt, Artificial Sequence
  Synthetic
acuauuauuuuguggacuaaccu

SEQ ID NO: 376751 - RNA, 24 nt, Artificial Sequence
  Synthetic
aacuauuauuuuguggacuaaccu

SEQ ID NO: 376752 - RNA, 18 nt, Artificial Sequence
  Synthetic
aaacaagaaaccuaaccu

SEQ ID NO: 376753 - RNA, 19 nt, Artificial Sequence
  Synthetic
aaaacaagaaaccuaaccu

SEQ ID NO: 376754 - RNA, 20 nt, Artificial Sequence
  Synthetic
gaaaacaagaaaccuaaccu

SEQ ID NO: 376755 - RNA, 21 nt, Artificial Sequence
  Synthetic
ggaaaacaagaaaccuaaccu

SEQ ID NO: 376756 - RNA, 22 nt, Artificial Sequence
  Synthetic
uggaaaacaagaaaccuaaccu

SEQ ID NO: 376757 - RNA, 23 nt, Artificial Sequence
  Synthetic
uuggaaaacaagaaaccuaaccu

SEQ ID NO: 376758 - RNA, 24 nt, Artificial Sequence
  Synthetic
guuggaaaacaagaaaccuaaccu

SEQ ID NO: 376759 - RNA, 18 nt, Artificial Sequence
  Synthetic
acucuucacugcuaaccu

SEQ ID NO: 376760 - RNA, 19 nt, Artificial Sequence
  Synthetic
cacucuucacugcuaaccu

SEQ ID NO: 376761 - RNA, 20 nt, Artificial Sequence
  Synthetic
ucacucuucacugcuaaccu

SEQ ID NO: 376762 - RNA, 21 nt, Artificial Sequence
  Synthetic
gucacucuucacugcuaaccu

SEQ ID NO: 376763 - RNA, 22 nt, Artificial Sequence
  Synthetic
agucacucuucacugcuaaccu

SEQ ID NO: 376764 - RNA, 23 nt, Artificial Sequence
  Synthetic
gagucacucuucacugcuaaccu

SEQ ID NO: 376765 - RNA, 24 nt, Artificial Sequence
  Synthetic
ugagucacucuucacugcuaaccu

SEQ ID NO: 376766 - RNA, 18 nt, Artificial Sequence
  Synthetic
agcucccacaauuaaccu

SEQ ID NO: 376767 - RNA, 19 nt, Artificial Sequence
  Synthetic
gagcucccacaauuaaccu

SEQ ID NO: 376768 - RNA, 20 nt, Artificial Sequence
  Synthetic
ugagcucccacaauuaaccu

SEQ ID NO: 376769 - RNA, 21 nt, Artificial Sequence
  Synthetic
uugagcucccacaauuaaccu

SEQ ID NO: 376770 - RNA, 22 nt, Artificial Sequence
  Synthetic
auugagcucccacaauuaaccu

SEQ ID NO: 376771 - RNA, 23 nt, Artificial Sequence
  Synthetic
uauugagcucccacaauuaaccu

SEQ ID NO: 376772 - RNA, 24 nt, Artificial Sequence
  Synthetic
uuauugagcucccacaauuaaccu

SEQ ID NO: 376773 - RNA, 18 nt, Artificial Sequence
  Synthetic
agcuucaggaauuaaccu

SEQ ID NO: 376774 - RNA, 19 nt, Artificial Sequence
  Synthetic
uagcuucaggaauuaaccu

SEQ ID NO: 376775 - RNA, 20 nt, Artificial Sequence
  Synthetic
cuagcuucaggaauuaaccu

SEQ ID NO: 376776 - RNA, 21 nt, Artificial Sequence
  Synthetic
ucuagcuucaggaauuaaccu

SEQ ID NO: 376777 - RNA, 22 nt, Artificial Sequence
  Synthetic
cucuagcuucaggaauuaaccu

SEQ ID NO: 376778 - RNA, 23 nt, Artificial Sequence
  Synthetic
ccucuagcuucaggaauuaaccu

SEQ ID NO: 376779 - RNA, 24 nt, Artificial Sequence
  Synthetic
uccucuagcuucaggaauuaaccu

SEQ ID NO: 376780 - RNA, 18 nt, Artificial Sequence
  Synthetic
auacaguuuaauuaaccu

SEQ ID NO: 376781 - RNA, 19 nt, Artificial Sequence
  Synthetic
uauacaguuuaauuaaccu

SEQ ID NO: 376782 - RNA, 20 nt, Artificial Sequence
  Synthetic
uuauacaguuuaauuaaccu

SEQ ID NO: 376783 - RNA, 21 nt, Artificial Sequence
  Synthetic
auuauacaguuuaauuaaccu

SEQ ID NO: 376784 - RNA, 22 nt, Artificial Sequence
  Synthetic
uauuauacaguuuaauuaaccu

SEQ ID NO: 376785 - RNA, 23 nt, Artificial Sequence
  Synthetic
uuauuauacaguuuaauuaaccu

SEQ ID NO: 376786 - RNA, 24 nt, Artificial Sequence
  Synthetic
uuuauuauacaguuuaauuaaccu

SEQ ID NO: 376787 - RNA, 18 nt, Artificial Sequence
  Synthetic
gcaggaugcaguuaaccu

SEQ ID NO: 376788 - RNA, 19 nt, Artificial Sequence
  Synthetic
ggcaggaugcaguuaaccu

SEQ ID NO: 376789 - RNA, 20 nt, Artificial Sequence
  Synthetic
aggcaggaugcaguuaaccu

SEQ ID NO: 376790 - RNA, 21 nt, Artificial Sequence
  Synthetic
gaggcaggaugcaguuaaccu

SEQ ID NO: 376791 - RNA, 22 nt, Artificial Sequence
  Synthetic
agaggcaggaugcaguuaaccu

SEQ ID NO: 376792 - RNA, 23 nt, Artificial Sequence
  Synthetic
uagaggcaggaugcaguuaaccu

SEQ ID NO: 376793 - RNA, 24 nt, Artificial Sequence
  Synthetic
cuagaggcaggaugcaguuaaccu

SEQ ID NO: 376794 - RNA, 18 nt, Artificial Sequence
  Synthetic
auaggucugaguuaaccu

SEQ ID NO: 376795 - RNA, 19 nt, Artificial Sequence
  Synthetic
uauaggucugaguuaaccu

SEQ ID NO: 376796 - RNA, 20 nt, Artificial Sequence
  Synthetic
cuauaggucugaguuaaccu

SEQ ID NO: 376797 - RNA, 21 nt, Artificial Sequence
  Synthetic
ucuauaggucugaguuaaccu

SEQ ID NO: 376798 - RNA, 22 nt, Artificial Sequence
  Synthetic
uucuauaggucugaguuaaccu

SEQ ID NO: 376799 - RNA, 23 nt, Artificial Sequence
  Synthetic
auucuauaggucugaguuaaccu

SEQ ID NO: 376800 - RNA, 24 nt, Artificial Sequence
  Synthetic
cauucuauaggucugaguuaaccu

SEQ ID NO: 376801 - RNA, 18 nt, Artificial Sequence
  Synthetic
gagaaauaaauuuaaccu

SEQ ID NO: 376802 - RNA, 19 nt, Artificial Sequence
  Synthetic
ugagaaauaaauuuaaccu

SEQ ID NO: 376803 - RNA, 20 nt, Artificial Sequence
  Synthetic
augagaaauaaauuuaaccu

SEQ ID NO: 376804 - RNA, 21 nt, Artificial Sequence
  Synthetic
aaugagaaauaaauuuaaccu

SEQ ID NO: 376805 - RNA, 22 nt, Artificial Sequence
  Synthetic
aaaugagaaauaaauuuaaccu

SEQ ID NO: 376806 - RNA, 23 nt, Artificial Sequence
  Synthetic
caaaugagaaauaaauuuaaccu

SEQ ID NO: 376807 - RNA, 24 nt, Artificial Sequence
  Synthetic
gcaaaugagaaauaaauuuaaccu

SEQ ID NO: 376808 - RNA, 18 nt, Artificial Sequence
  Synthetic
uuuaguauuucaacaccu

SEQ ID NO: 376809 - RNA, 19 nt, Artificial Sequence
  Synthetic
uuuuaguauuucaacaccu

SEQ ID NO: 376810 - RNA, 20 nt, Artificial Sequence
  Synthetic
uuuuuaguauuucaacaccu

SEQ ID NO: 376811 - RNA, 21 nt, Artificial Sequence
  Synthetic
uuuuuuaguauuucaacaccu

SEQ ID NO: 376812 - RNA, 22 nt, Artificial Sequence
  Synthetic
auuuuuuaguauuucaacaccu

SEQ ID NO: 376813 - RNA, 23 nt, Artificial Sequence
  Synthetic
cauuuuuuaguauuucaacaccu

SEQ ID NO: 376814 - RNA, 24 nt, Artificial Sequence
  Synthetic
gcauuuuuuaguauuucaacaccu

SEQ ID NO: 376815 - RNA, 18 nt, Artificial Sequence
  Synthetic
cucucaggauuaacaccu

SEQ ID NO: 376816 - RNA, 19 nt, Artificial Sequence
  Synthetic
gcucucaggauuaacaccu

SEQ ID NO: 376817 - RNA, 20 nt, Artificial Sequence
  Synthetic
ugcucucaggauuaacaccu

SEQ ID NO: 376818 - RNA, 21 nt, Artificial Sequence
  Synthetic
gugcucucaggauuaacaccu

SEQ ID NO: 376819 - RNA, 22 nt, Artificial Sequence
  Synthetic
agugcucucaggauuaacaccu

SEQ ID NO: 376820 - RNA, 23 nt, Artificial Sequence
  Synthetic
gagugcucucaggauuaacaccu

SEQ ID NO: 376821 - RNA, 24 nt, Artificial Sequence
  Synthetic
agagugcucucaggauuaacaccu

SEQ ID NO: 376822 - RNA, 18 nt, Artificial Sequence
  Synthetic
aaauuuuaacagacaccu

SEQ ID NO: 376823 - RNA, 19 nt, Artificial Sequence
  Synthetic
caaauuuuaacagacaccu

SEQ ID NO: 376824 - RNA, 20 nt, Artificial Sequence
  Synthetic
ccaaauuuuaacagacaccu

SEQ ID NO: 376825 - RNA, 21 nt, Artificial Sequence
  Synthetic
accaaauuuuaacagacaccu

SEQ ID NO: 376826 - RNA, 22 nt, Artificial Sequence
  Synthetic
aaccaaauuuuaacagacaccu

SEQ ID NO: 376827 - RNA, 23 nt, Artificial Sequence
  Synthetic
aaaccaaauuuuaacagacaccu

SEQ ID NO: 376828 - RNA, 24 nt, Artificial Sequence
  Synthetic
gaaaccaaauuuuaacagacaccu

SEQ ID NO: 376829 - RNA, 18 nt, Artificial Sequence
  Synthetic
caaaugagggagacaccu

SEQ ID NO: 376830 - RNA, 19 nt, Artificial Sequence
  Synthetic
acaaaugagggagacaccu

SEQ ID NO: 376831 - RNA, 20 nt, Artificial Sequence
  Synthetic
aacaaaugagggagacaccu

SEQ ID NO: 376832 - RNA, 21 nt, Artificial Sequence
  Synthetic
aaacaaaugagggagacaccu

SEQ ID NO: 376833 - RNA, 22 nt, Artificial Sequence
  Synthetic
gaaacaaaugagggagacaccu

SEQ ID NO: 376834 - RNA, 23 nt, Artificial Sequence
  Synthetic
agaaacaaaugagggagacaccu

SEQ ID NO: 376835 - RNA, 24 nt, Artificial Sequence
  Synthetic
cagaaacaaaugagggagacaccu

SEQ ID NO: 376836 - RNA, 18 nt, Artificial Sequence
  Synthetic
uucugaugucauacaccu

SEQ ID NO: 376837 - RNA, 19 nt, Artificial Sequence
  Synthetic
uuucugaugucauacaccu

SEQ ID NO: 376838 - RNA, 20 nt, Artificial Sequence
  Synthetic
guuucugaugucauacaccu

SEQ ID NO: 376839 - RNA, 21 nt, Artificial Sequence
  Synthetic
aguuucugaugucauacaccu

SEQ ID NO: 376840 - RNA, 22 nt, Artificial Sequence
  Synthetic
caguuucugaugucauacaccu

SEQ ID NO: 376841 - RNA, 23 nt, Artificial Sequence
  Synthetic
ccaguuucugaugucauacaccu

SEQ ID NO: 376842 - RNA, 24 nt, Artificial Sequence
  Synthetic
cccaguuucugaugucauacaccu

SEQ ID NO: 376843 - RNA, 18 nt, Artificial Sequence
  Synthetic
cugauucaaaguacaccu

SEQ ID NO: 376844 - RNA, 19 nt, Artificial Sequence
  Synthetic
ucugauucaaaguacaccu

SEQ ID NO: 376845 - RNA, 20 nt, Artificial Sequence
  Synthetic
aucugauucaaaguacaccu

SEQ ID NO: 376846 - RNA, 21 nt, Artificial Sequence
  Synthetic
aaucugauucaaaguacaccu

SEQ ID NO: 376847 - RNA, 22 nt, Artificial Sequence
  Synthetic
caaucugauucaaaguacaccu

SEQ ID NO: 376848 - RNA, 23 nt, Artificial Sequence
  Synthetic
ucaaucugauucaaaguacaccu

SEQ ID NO: 376849 - RNA, 24 nt, Artificial Sequence
  Synthetic
aucaaucugauucaaaguacaccu

SEQ ID NO: 376850 - RNA, 18 nt, Artificial Sequence
  Synthetic
caguccuccauuacaccu

SEQ ID NO: 376851 - RNA, 19 nt, Artificial Sequence
  Synthetic
acaguccuccauuacaccu

SEQ ID NO: 376852 - RNA, 20 nt, Artificial Sequence
  Synthetic
gacaguccuccauuacaccu

SEQ ID NO: 376853 - RNA, 21 nt, Artificial Sequence
  Synthetic
ugacaguccuccauuacaccu

SEQ ID NO: 376854 - RNA, 22 nt, Artificial Sequence
  Synthetic
uugacaguccuccauuacaccu

SEQ ID NO: 376855 - RNA, 23 nt, Artificial Sequence
  Synthetic
auugacaguccuccauuacaccu

SEQ ID NO: 376856 - RNA, 24 nt, Artificial Sequence
  Synthetic
aauugacaguccuccauuacaccu

SEQ ID NO: 376857 - RNA, 18 nt, Artificial Sequence
  Synthetic
guggcucauuaaccaccu

SEQ ID NO: 376858 - RNA, 19 nt, Artificial Sequence
  Synthetic
aguggcucauuaaccaccu

SEQ ID NO: 376859 - RNA, 20 nt, Artificial Sequence
  Synthetic
aaguggcucauuaaccaccu

SEQ ID NO: 376860 - RNA, 21 nt, Artificial Sequence
  Synthetic
aaaguggcucauuaaccaccu

SEQ ID NO: 376861 - RNA, 22 nt, Artificial Sequence
  Synthetic
caaaguggcucauuaaccaccu

SEQ ID NO: 376862 - RNA, 23 nt, Artificial Sequence
  Synthetic
ccaaaguggcucauuaaccaccu

SEQ ID NO: 376863 - RNA, 24 nt, Artificial Sequence
  Synthetic
uccaaaguggcucauuaaccaccu

SEQ ID NO: 376864 - RNA, 18 nt, Artificial Sequence
  Synthetic
gugaugacagucccaccu

SEQ ID NO: 376865 - RNA, 19 nt, Artificial Sequence
  Synthetic
agugaugacagucccaccu

SEQ ID NO: 376866 - RNA, 20 nt, Artificial Sequence
  Synthetic
uagugaugacagucccaccu

SEQ ID NO: 376867 - RNA, 21 nt, Artificial Sequence
  Synthetic
auagugaugacagucccaccu

SEQ ID NO: 376868 - RNA, 22 nt, Artificial Sequence
  Synthetic
gauagugaugacagucccaccu

SEQ ID NO: 376869 - RNA, 23 nt, Artificial Sequence
  Synthetic
ugauagugaugacagucccaccu

SEQ ID NO: 376870 - RNA, 24 nt, Artificial Sequence
  Synthetic
uugauagugaugacagucccaccu

SEQ ID NO: 376871 - RNA, 18 nt, Artificial Sequence
  Synthetic
cacuucuuccugccaccu

SEQ ID NO: 376872 - RNA, 19 nt, Artificial Sequence
  Synthetic
gcacuucuuccugccaccu

SEQ ID NO: 376873 - RNA, 20 nt, Artificial Sequence
  Synthetic
ggcacuucuuccugccaccu

SEQ ID NO: 376874 - RNA, 21 nt, Artificial Sequence
  Synthetic
gggcacuucuuccugccaccu

SEQ ID NO: 376875 - RNA, 22 nt, Artificial Sequence
  Synthetic
ugggcacuucuuccugccaccu

SEQ ID NO: 376876 - RNA, 23 nt, Artificial Sequence
  Synthetic
cugggcacuucuuccugccaccu

SEQ ID NO: 376877 - RNA, 24 nt, Artificial Sequence
  Synthetic
acugggcacuucuuccugccaccu

SEQ ID NO: 376878 - RNA, 18 nt, Artificial Sequence
  Synthetic
aagagugaaacuccaccu

SEQ ID NO: 376879 - RNA, 19 nt, Artificial Sequence
  Synthetic
caagagugaaacuccaccu

SEQ ID NO: 376880 - RNA, 20 nt, Artificial Sequence
  Synthetic
gcaagagugaaacuccaccu

SEQ ID NO: 376881 - RNA, 21 nt, Artificial Sequence
  Synthetic
agcaagagugaaacuccaccu

SEQ ID NO: 376882 - RNA, 22 nt, Artificial Sequence
  Synthetic
cagcaagagugaaacuccaccu

SEQ ID NO: 376883 - RNA, 23 nt, Artificial Sequence
  Synthetic
gcagcaagagugaaacuccaccu

SEQ ID NO: 376884 - RNA, 24 nt, Artificial Sequence
  Synthetic
ggcagcaagagugaaacuccaccu

SEQ ID NO: 376885 - RNA, 18 nt, Artificial Sequence
  Synthetic
auuagaaucugagcaccu

SEQ ID NO: 376886 - RNA, 19 nt, Artificial Sequence
  Synthetic
uauuagaaucugagcaccu

SEQ ID NO: 376887 - RNA, 20 nt, Artificial Sequence
  Synthetic
cuauuagaaucugagcaccu

SEQ ID NO: 376888 - RNA, 21 nt, Artificial Sequence
  Synthetic
ucuauuagaaucugagcaccu

SEQ ID NO: 376889 - RNA, 22 nt, Artificial Sequence
  Synthetic
cucuauuagaaucugagcaccu

SEQ ID NO: 376890 - RNA, 23 nt, Artificial Sequence
  Synthetic
acucuauuagaaucugagcaccu

SEQ ID NO: 376891 - RNA, 24 nt, Artificial Sequence
  Synthetic
uacucuauuagaaucugagcaccu

SEQ ID NO: 376892 - RNA, 18 nt, Artificial Sequence
  Synthetic
ucauggcauuaggcaccu

SEQ ID NO: 376893 - RNA, 19 nt, Artificial Sequence
  Synthetic
aucauggcauuaggcaccu

SEQ ID NO: 376894 - RNA, 20 nt, Artificial Sequence
  Synthetic
caucauggcauuaggcaccu

SEQ ID NO: 376895 - RNA, 21 nt, Artificial Sequence
  Synthetic
ucaucauggcauuaggcaccu

SEQ ID NO: 376896 - RNA, 22 nt, Artificial Sequence
  Synthetic
cucaucauggcauuaggcaccu

SEQ ID NO: 376897 - RNA, 23 nt, Artificial Sequence
  Synthetic
gcucaucauggcauuaggcaccu

SEQ ID NO: 376898 - RNA, 24 nt, Artificial Sequence
  Synthetic
agcucaucauggcauuaggcaccu

SEQ ID NO: 376899 - RNA, 18 nt, Artificial Sequence
  Synthetic
ugcguaucugaaucaccu

SEQ ID NO: 376900 - RNA, 19 nt, Artificial Sequence
  Synthetic
uugcguaucugaaucaccu

SEQ ID NO: 376901 - RNA, 20 nt, Artificial Sequence
  Synthetic
auugcguaucugaaucaccu

SEQ ID NO: 376902 - RNA, 21 nt, Artificial Sequence
  Synthetic
gauugcguaucugaaucaccu

SEQ ID NO: 376903 - RNA, 22 nt, Artificial Sequence
  Synthetic
ugauugcguaucugaaucaccu

SEQ ID NO: 376904 - RNA, 23 nt, Artificial Sequence
  Synthetic
uugauugcguaucugaaucaccu

SEQ ID NO: 376905 - RNA, 24 nt, Artificial Sequence
  Synthetic
uuugauugcguaucugaaucaccu

SEQ ID NO: 376906 - RNA, 18 nt, Artificial Sequence
  Synthetic
ucaagcuauagaucaccu

SEQ ID NO: 376907 - RNA, 19 nt, Artificial Sequence
  Synthetic
uucaagcuauagaucaccu

SEQ ID NO: 376908 - RNA, 20 nt, Artificial Sequence
  Synthetic
guucaagcuauagaucaccu

SEQ ID NO: 376909 - RNA, 21 nt, Artificial Sequence
  Synthetic
aguucaagcuauagaucaccu

SEQ ID NO: 376910 - RNA, 22 nt, Artificial Sequence
  Synthetic
uaguucaagcuauagaucaccu

SEQ ID NO: 376911 - RNA, 23 nt, Artificial Sequence
  Synthetic
uuaguucaagcuauagaucaccu

SEQ ID NO: 376912 - RNA, 24 nt, Artificial Sequence
  Synthetic
uuuaguucaagcuauagaucaccu

SEQ ID NO: 376913 - RNA, 18 nt, Artificial Sequence
  Synthetic
cguuguucccuaucaccu

SEQ ID NO: 376914 - RNA, 19 nt, Artificial Sequence
  Synthetic
gcguuguucccuaucaccu

SEQ ID NO: 376915 - RNA, 20 nt, Artificial Sequence
  Synthetic
ugcguuguucccuaucaccu

SEQ ID NO: 376916 - RNA, 21 nt, Artificial Sequence
  Synthetic
augcguuguucccuaucaccu

SEQ ID NO: 376917 - RNA, 22 nt, Artificial Sequence
  Synthetic
aaugcguuguucccuaucaccu

SEQ ID NO: 376918 - RNA, 23 nt, Artificial Sequence
  Synthetic
aaaugcguuguucccuaucaccu

SEQ ID NO: 376919 - RNA, 24 nt, Artificial Sequence
  Synthetic
aaaaugcguuguucccuaucaccu

SEQ ID NO: 376920 - RNA, 18 nt, Artificial Sequence
  Synthetic
gcagcauugguaucaccu

SEQ ID NO: 376921 - RNA, 19 nt, Artificial Sequence
  Synthetic
ggcagcauugguaucaccu

SEQ ID NO: 376922 - RNA, 20 nt, Artificial Sequence
  Synthetic
uggcagcauugguaucaccu

SEQ ID NO: 376923 - RNA, 21 nt, Artificial Sequence
  Synthetic
cuggcagcauugguaucaccu

SEQ ID NO: 376924 - RNA, 22 nt, Artificial Sequence
  Synthetic
acuggcagcauugguaucaccu

SEQ ID NO: 376925 - RNA, 23 nt, Artificial Sequence
  Synthetic
gacuggcagcauugguaucaccu

SEQ ID NO: 376926 - RNA, 24 nt, Artificial Sequence
  Synthetic
ugacuggcagcauugguaucaccu

SEQ ID NO: 376927 - RNA, 18 nt, Artificial Sequence
  Synthetic
cuuauuaauuacucaccu

SEQ ID NO: 376928 - RNA, 19 nt, Artificial Sequence
  Synthetic
ccuuauuaauuacucaccu

SEQ ID NO: 376929 - RNA, 20 nt, Artificial Sequence
  Synthetic
uccuuauuaauuacucaccu

SEQ ID NO: 376930 - RNA, 21 nt, Artificial Sequence
  Synthetic
uuccuuauuaauuacucaccu

SEQ ID NO: 376931 - RNA, 22 nt, Artificial Sequence
  Synthetic
auuccuuauuaauuacucaccu

SEQ ID NO: 376932 - RNA, 23 nt, Artificial Sequence
  Synthetic
aauuccuuauuaauuacucaccu

SEQ ID NO: 376933 - RNA, 24 nt, Artificial Sequence
  Synthetic
gaauuccuuauuaauuacucaccu

SEQ ID NO: 376934 - RNA, 18 nt, Artificial Sequence
  Synthetic
guuuagagaaagucaccu

SEQ ID NO: 376935 - RNA, 19 nt, Artificial Sequence
  Synthetic
uguuuagagaaagucaccu

SEQ ID NO: 376936 - RNA, 20 nt, Artificial Sequence
  Synthetic
cuguuuagagaaagucaccu

SEQ ID NO: 376937 - RNA, 21 nt, Artificial Sequence
  Synthetic
ucuguuuagagaaagucaccu

SEQ ID NO: 376938 - RNA, 22 nt, Artificial Sequence
  Synthetic
cucuguuuagagaaagucaccu

SEQ ID NO: 376939 - RNA, 23 nt, Artificial Sequence
  Synthetic
ccucuguuuagagaaagucaccu

SEQ ID NO: 376940 - RNA, 24 nt, Artificial Sequence
  Synthetic
accucuguuuagagaaagucaccu

SEQ ID NO: 376941 - RNA, 18 nt, Artificial Sequence
  Synthetic
aauucuuaauggucaccu

SEQ ID NO: 376942 - RNA, 19 nt, Artificial Sequence
  Synthetic
gaauucuuaauggucaccu

SEQ ID NO: 376943 - RNA, 20 nt, Artificial Sequence
  Synthetic
agaauucuuaauggucaccu

SEQ ID NO: 376944 - RNA, 21 nt, Artificial Sequence
  Synthetic
uagaauucuuaauggucaccu

SEQ ID NO: 376945 - RNA, 22 nt, Artificial Sequence
  Synthetic
uuagaauucuuaauggucaccu

SEQ ID NO: 376946 - RNA, 23 nt, Artificial Sequence
  Synthetic
guuagaauucuuaauggucaccu

SEQ ID NO: 376947 - RNA, 24 nt, Artificial Sequence
  Synthetic
aguuagaauucuuaauggucaccu

SEQ ID NO: 376948 - RNA, 18 nt, Artificial Sequence
  Synthetic
cuuucagcacauucaccu

SEQ ID NO: 376949 - RNA, 19 nt, Artificial Sequence
  Synthetic
ucuuucagcacauucaccu

SEQ ID NO: 376950 - RNA, 20 nt, Artificial Sequence
  Synthetic
aucuuucagcacauucaccu

SEQ ID NO: 376951 - RNA, 21 nt, Artificial Sequence
  Synthetic
aaucuuucagcacauucaccu

SEQ ID NO: 376952 - RNA, 22 nt, Artificial Sequence
  Synthetic
gaaucuuucagcacauucaccu

SEQ ID NO: 376953 - RNA, 23 nt, Artificial Sequence
  Synthetic
ggaaucuuucagcacauucaccu

SEQ ID NO: 376954 - RNA, 24 nt, Artificial Sequence
  Synthetic
aggaaucuuucagcacauucaccu

SEQ ID NO: 376955 - RNA, 18 nt, Artificial Sequence
  Synthetic
gggccuguuucuucaccu

SEQ ID NO: 376956 - RNA, 19 nt, Artificial Sequence
  Synthetic
ugggccuguuucuucaccu

SEQ ID NO: 376957 - RNA, 20 nt, Artificial Sequence
  Synthetic
cugggccuguuucuucaccu

SEQ ID NO: 376958 - RNA, 21 nt, Artificial Sequence
  Synthetic
ucugggccuguuucuucaccu

SEQ ID NO: 376959 - RNA, 22 nt, Artificial Sequence
  Synthetic
cucugggccuguuucuucaccu

SEQ ID NO: 376960 - RNA, 23 nt, Artificial Sequence
  Synthetic
acucugggccuguuucuucaccu

SEQ ID NO: 376961 - RNA, 24 nt, Artificial Sequence
  Synthetic
gacucugggccuguuucuucaccu

SEQ ID NO: 376962 - RNA, 18 nt, Artificial Sequence
  Synthetic
ggccuaacaaaaagaccu

SEQ ID NO: 376963 - RNA, 19 nt, Artificial Sequence
  Synthetic
aggccuaacaaaaagaccu

SEQ ID NO: 376964 - RNA, 20 nt, Artificial Sequence
  Synthetic
gaggccuaacaaaaagaccu

SEQ ID NO: 376965 - RNA, 21 nt, Artificial Sequence
  Synthetic
ggaggccuaacaaaaagaccu

SEQ ID NO: 376966 - RNA, 22 nt, Artificial Sequence
  Synthetic
uggaggccuaacaaaaagaccu

SEQ ID NO: 376967 - RNA, 23 nt, Artificial Sequence
  Synthetic
uuggaggccuaacaaaaagaccu

SEQ ID NO: 376968 - RNA, 24 nt, Artificial Sequence
  Synthetic
uuuggaggccuaacaaaaagaccu

SEQ ID NO: 376969 - RNA, 18 nt, Artificial Sequence
  Synthetic
uugcacugcaaaagaccu

SEQ ID NO: 376970 - RNA, 19 nt, Artificial Sequence
  Synthetic
uuugcacugcaaaagaccu

SEQ ID NO: 376971 - RNA, 20 nt, Artificial Sequence
  Synthetic
cuuugcacugcaaaagaccu

SEQ ID NO: 376972 - RNA, 21 nt, Artificial Sequence
  Synthetic
ccuuugcacugcaaaagaccu

SEQ ID NO: 376973 - RNA, 22 nt, Artificial Sequence
  Synthetic
accuuugcacugcaaaagaccu

SEQ ID NO: 376974 - RNA, 23 nt, Artificial Sequence
  Synthetic
aaccuuugcacugcaaaagaccu

SEQ ID NO: 376975 - RNA, 24 nt, Artificial Sequence
  Synthetic
aaaccuuugcacugcaaaagaccu

SEQ ID NO: 376976 - RNA, 18 nt, Artificial Sequence
  Synthetic
aaagagucccaaagaccu

SEQ ID NO: 376977 - RNA, 19 nt, Artificial Sequence
  Synthetic
aaaagagucccaaagaccu

SEQ ID NO: 376978 - RNA, 20 nt, Artificial Sequence
  Synthetic
gaaaagagucccaaagaccu

SEQ ID NO: 376979 - RNA, 21 nt, Artificial Sequence
  Synthetic
ggaaaagagucccaaagaccu

SEQ ID NO: 376980 - RNA, 22 nt, Artificial Sequence
  Synthetic
uggaaaagagucccaaagaccu

SEQ ID NO: 376981 - RNA, 23 nt, Artificial Sequence
  Synthetic
auggaaaagagucccaaagaccu

SEQ ID NO: 376982 - RNA, 24 nt, Artificial Sequence
  Synthetic
uauggaaaagagucccaaagaccu

SEQ ID NO: 376983 - RNA, 18 nt, Artificial Sequence
  Synthetic
acauuauuccacagaccu

SEQ ID NO: 376984 - RNA, 19 nt, Artificial Sequence
  Synthetic
uacauuauuccacagaccu

SEQ ID NO: 376985 - RNA, 20 nt, Artificial Sequence
  Synthetic
auacauuauuccacagaccu

SEQ ID NO: 376986 - RNA, 21 nt, Artificial Sequence
  Synthetic
uauacauuauuccacagaccu

SEQ ID NO: 376987 - RNA, 22 nt, Artificial Sequence
  Synthetic
cuauacauuauuccacagaccu

SEQ ID NO: 376988 - RNA, 23 nt, Artificial Sequence
  Synthetic
ccuauacauuauuccacagaccu

SEQ ID NO: 376989 - RNA, 24 nt, Artificial Sequence
  Synthetic
gccuauacauuauuccacagaccu

SEQ ID NO: 376990 - RNA, 18 nt, Artificial Sequence
  Synthetic
uuaaauagucacagaccu

SEQ ID NO: 376991 - RNA, 19 nt, Artificial Sequence
  Synthetic
uuuaaauagucacagaccu

SEQ ID NO: 376992 - RNA, 20 nt, Artificial Sequence
  Synthetic
cuuuaaauagucacagaccu

SEQ ID NO: 376993 - RNA, 21 nt, Artificial Sequence
  Synthetic
ccuuuaaauagucacagaccu

SEQ ID NO: 376994 - RNA, 22 nt, Artificial Sequence
  Synthetic
uccuuuaaauagucacagaccu

SEQ ID NO: 376995 - RNA, 23 nt, Artificial Sequence
  Synthetic
auccuuuaaauagucacagaccu

SEQ ID NO: 376996 - RNA, 24 nt, Artificial Sequence
  Synthetic
aauccuuuaaauagucacagaccu

SEQ ID NO: 376997 - RNA, 18 nt, Artificial Sequence
  Synthetic
acaucuaaauggagaccu

SEQ ID NO: 376998 - RNA, 19 nt, Artificial Sequence
  Synthetic
gacaucuaaauggagaccu

SEQ ID NO: 376999 - RNA, 20 nt, Artificial Sequence
  Synthetic
ugacaucuaaauggagaccu

SEQ ID NO: 377000 - RNA, 21 nt, Artificial Sequence
  Synthetic
cugacaucuaaauggagaccu

SEQ ID NO: 377001 - RNA, 22 nt, Artificial Sequence
  Synthetic
ccugacaucuaaauggagaccu

SEQ ID NO: 377002 - RNA, 23 nt, Artificial Sequence
  Synthetic
uccugacaucuaaauggagaccu

SEQ ID NO: 377003 - RNA, 24 nt, Artificial Sequence
  Synthetic
cuccugacaucuaaauggagaccu

SEQ ID NO: 377004 - RNA, 18 nt, Artificial Sequence
  Synthetic
uguuccuggaugagaccu

SEQ ID NO: 377005 - RNA, 19 nt, Artificial Sequence
  Synthetic
guguuccuggaugagaccu

SEQ ID NO: 377006 - RNA, 20 nt, Artificial Sequence
  Synthetic
aguguuccuggaugagaccu

SEQ ID NO: 377007 - RNA, 21 nt, Artificial Sequence
  Synthetic
caguguuccuggaugagaccu

SEQ ID NO: 377008 - RNA, 22 nt, Artificial Sequence
  Synthetic
ucaguguuccuggaugagaccu

SEQ ID NO: 377009 - RNA, 23 nt, Artificial Sequence
  Synthetic
uucaguguuccuggaugagaccu

SEQ ID NO: 377010 - RNA, 24 nt, Artificial Sequence
  Synthetic
guucaguguuccuggaugagaccu

SEQ ID NO: 377011 - RNA, 18 nt, Artificial Sequence
  Synthetic
aaauacuaaacuagaccu

SEQ ID NO: 377012 - RNA, 19 nt, Artificial Sequence
  Synthetic
uaaauacuaaacuagaccu

SEQ ID NO: 377013 - RNA, 20 nt, Artificial Sequence
  Synthetic
auaaauacuaaacuagaccu

SEQ ID NO: 377014 - RNA, 21 nt, Artificial Sequence
  Synthetic
uauaaauacuaaacuagaccu

SEQ ID NO: 377015 - RNA, 22 nt, Artificial Sequence
  Synthetic
auauaaauacuaaacuagaccu

SEQ ID NO: 377016 - RNA, 23 nt, Artificial Sequence
  Synthetic
aauauaaauacuaaacuagaccu

SEQ ID NO: 377017 - RNA, 24 nt, Artificial Sequence
  Synthetic
aaauauaaauacuaaacuagaccu

SEQ ID NO: 377018 - RNA, 18 nt, Artificial Sequence
  Synthetic
gauuaaggugggcgaccu

SEQ ID NO: 377019 - RNA, 19 nt, Artificial Sequence
  Synthetic
ggauuaaggugggcgaccu

SEQ ID NO: 377020 - RNA, 20 nt, Artificial Sequence
  Synthetic
gggauuaaggugggcgaccu

SEQ ID NO: 377021 - RNA, 21 nt, Artificial Sequence
  Synthetic
cgggauuaaggugggcgaccu

SEQ ID NO: 377022 - RNA, 22 nt, Artificial Sequence
  Synthetic
ucgggauuaaggugggcgaccu

SEQ ID NO: 377023 - RNA, 23 nt, Artificial Sequence
  Synthetic
cucgggauuaaggugggcgaccu

SEQ ID NO: 377024 - RNA, 24 nt, Artificial Sequence
  Synthetic
gcucgggauuaaggugggcgaccu

SEQ ID NO: 377025 - RNA, 18 nt, Artificial Sequence
  Synthetic
cacuccaaccagggaccu

SEQ ID NO: 377026 - RNA, 19 nt, Artificial Sequence
  Synthetic
gcacuccaaccagggaccu

SEQ ID NO: 377027 - RNA, 20 nt, Artificial Sequence
  Synthetic
ggcacuccaaccagggaccu

SEQ ID NO: 377028 - RNA, 21 nt, Artificial Sequence
  Synthetic
aggcacuccaaccagggaccu

SEQ ID NO: 377029 - RNA, 22 nt, Artificial Sequence
  Synthetic
aaggcacuccaaccagggaccu

SEQ ID NO: 377030 - RNA, 23 nt, Artificial Sequence
  Synthetic
aaaggcacuccaaccagggaccu

SEQ ID NO: 377031 - RNA, 24 nt, Artificial Sequence
  Synthetic
aaaaggcacuccaaccagggaccu

SEQ ID NO: 377032 - RNA, 18 nt, Artificial Sequence
  Synthetic
agcaagggaucuggaccu

SEQ ID NO: 377033 - RNA, 19 nt, Artificial Sequence
  Synthetic
aagcaagggaucuggaccu

SEQ ID NO: 377034 - RNA, 20 nt, Artificial Sequence
  Synthetic
gaagcaagggaucuggaccu

SEQ ID NO: 377035 - RNA, 21 nt, Artificial Sequence
  Synthetic
ugaagcaagggaucuggaccu

SEQ ID NO: 377036 - RNA, 22 nt, Artificial Sequence
  Synthetic
uugaagcaagggaucuggaccu

SEQ ID NO: 377037 - RNA, 23 nt, Artificial Sequence
  Synthetic
auugaagcaagggaucuggaccu

SEQ ID NO: 377038 - RNA, 24 nt, Artificial Sequence
  Synthetic
aauugaagcaagggaucuggaccu

SEQ ID NO: 377039 - RNA, 18 nt, Artificial Sequence
  Synthetic
ugaggugaggguggaccu

SEQ ID NO: 377040 - RNA, 19 nt, Artificial Sequence
  Synthetic
gugaggugaggguggaccu

SEQ ID NO: 377041 - RNA, 20 nt, Artificial Sequence
  Synthetic
agugaggugaggguggaccu

SEQ ID NO: 377042 - RNA, 21 nt, Artificial Sequence
  Synthetic
uagugaggugaggguggaccu

SEQ ID NO: 377043 - RNA, 22 nt, Artificial Sequence
  Synthetic
uuagugaggugaggguggaccu

SEQ ID NO: 377044 - RNA, 23 nt, Artificial Sequence
  Synthetic
guuagugaggugaggguggaccu

SEQ ID NO: 377045 - RNA, 24 nt, Artificial Sequence
  Synthetic
uguuagugaggugaggguggaccu

SEQ ID NO: 377046 - RNA, 18 nt, Artificial Sequence
  Synthetic
auaggguagaaaugaccu

SEQ ID NO: 377047 - RNA, 19 nt, Artificial Sequence
  Synthetic
aauaggguagaaaugaccu

SEQ ID NO: 377048 - RNA, 20 nt, Artificial Sequence
  Synthetic
aaauaggguagaaaugaccu

SEQ ID NO: 377049 - RNA, 21 nt, Artificial Sequence
  Synthetic
caaauaggguagaaaugaccu

SEQ ID NO: 377050 - RNA, 22 nt, Artificial Sequence
  Synthetic
ucaaauaggguagaaaugaccu

SEQ ID NO: 377051 - RNA, 23 nt, Artificial Sequence
  Synthetic
uucaaauaggguagaaaugaccu

SEQ ID NO: 377052 - RNA, 24 nt, Artificial Sequence
  Synthetic
uuucaaauaggguagaaaugaccu

SEQ ID NO: 377053 - RNA, 18 nt, Artificial Sequence
  Synthetic
ugauucugauaaugaccu

SEQ ID NO: 377054 - RNA, 19 nt, Artificial Sequence
  Synthetic
cugauucugauaaugaccu

SEQ ID NO: 377055 - RNA, 20 nt, Artificial Sequence
  Synthetic
ucugauucugauaaugaccu

SEQ ID NO: 377056 - RNA, 21 nt, Artificial Sequence
  Synthetic
uucugauucugauaaugaccu

SEQ ID NO: 377057 - RNA, 22 nt, Artificial Sequence
  Synthetic
guucugauucugauaaugaccu

SEQ ID NO: 377058 - RNA, 23 nt, Artificial Sequence
  Synthetic
gguucugauucugauaaugaccu

SEQ ID NO: 377059 - RNA, 24 nt, Artificial Sequence
  Synthetic
ggguucugauucugauaaugaccu

SEQ ID NO: 377060 - RNA, 18 nt, Artificial Sequence
  Synthetic
ugcuguggaccaugaccu

SEQ ID NO: 377061 - RNA, 19 nt, Artificial Sequence
  Synthetic
uugcuguggaccaugaccu

SEQ ID NO: 377062 - RNA, 20 nt, Artificial Sequence
  Synthetic
uuugcuguggaccaugaccu

SEQ ID NO: 377063 - RNA, 21 nt, Artificial Sequence
  Synthetic
uuuugcuguggaccaugaccu

SEQ ID NO: 377064 - RNA, 22 nt, Artificial Sequence
  Synthetic
cuuuugcuguggaccaugaccu

SEQ ID NO: 377065 - RNA, 23 nt, Artificial Sequence
  Synthetic
acuuuugcuguggaccaugaccu

SEQ ID NO: 377066 - RNA, 24 nt, Artificial Sequence
  Synthetic
aacuuuugcuguggaccaugaccu

SEQ ID NO: 377067 - RNA, 18 nt, Artificial Sequence
  Synthetic
gaauuugcugggugaccu

SEQ ID NO: 377068 - RNA, 19 nt, Artificial Sequence
  Synthetic
ggaauuugcugggugaccu

SEQ ID NO: 377069 - RNA, 20 nt, Artificial Sequence
  Synthetic
gggaauuugcugggugaccu

SEQ ID NO: 377070 - RNA, 21 nt, Artificial Sequence
  Synthetic
ugggaauuugcugggugaccu

SEQ ID NO: 377071 - RNA, 22 nt, Artificial Sequence
  Synthetic
cugggaauuugcugggugaccu

SEQ ID NO: 377072 - RNA, 23 nt, Artificial Sequence
  Synthetic
gcugggaauuugcugggugaccu

SEQ ID NO: 377073 - RNA, 24 nt, Artificial Sequence
  Synthetic
agcugggaauuugcugggugaccu

SEQ ID NO: 377074 - RNA, 18 nt, Artificial Sequence
  Synthetic
uuauuuaagaauugaccu

SEQ ID NO: 377075 - RNA, 19 nt, Artificial Sequence
  Synthetic
uuuauuuaagaauugaccu

SEQ ID NO: 377076 - RNA, 20 nt, Artificial Sequence
  Synthetic
uuuuauuuaagaauugaccu

SEQ ID NO: 377077 - RNA, 21 nt, Artificial Sequence
  Synthetic
auuuuauuuaagaauugaccu

SEQ ID NO: 377078 - RNA, 22 nt, Artificial Sequence
  Synthetic
aauuuuauuuaagaauugaccu

SEQ ID NO: 377079 - RNA, 23 nt, Artificial Sequence
  Synthetic
aaauuuuauuuaagaauugaccu

SEQ ID NO: 377080 - RNA, 24 nt, Artificial Sequence
  Synthetic
aaaauuuuauuuaagaauugaccu

SEQ ID NO: 377081 - RNA, 18 nt, Artificial Sequence
  Synthetic
uaauguuguuauugaccu

SEQ ID NO: 377082 - RNA, 19 nt, Artificial Sequence
  Synthetic
guaauguuguuauugaccu

SEQ ID NO: 377083 - RNA, 20 nt, Artificial Sequence
  Synthetic
uguaauguuguuauugaccu

SEQ ID NO: 377084 - RNA, 21 nt, Artificial Sequence
  Synthetic
uuguaauguuguuauugaccu

SEQ ID NO: 377085 - RNA, 22 nt, Artificial Sequence
  Synthetic
uuuguaauguuguuauugaccu

SEQ ID NO: 377086 - RNA, 23 nt, Artificial Sequence
  Synthetic
uuuuguaauguuguuauugaccu

SEQ ID NO: 377087 - RNA, 24 nt, Artificial Sequence
  Synthetic
uuuuuguaauguuguuauugaccu

SEQ ID NO: 377088 - RNA, 18 nt, Artificial Sequence
  Synthetic
guguguacaaaaauaccu

SEQ ID NO: 377089 - RNA, 19 nt, Artificial Sequence
  Synthetic
uguguguacaaaaauaccu

SEQ ID NO: 377090 - RNA, 20 nt, Artificial Sequence
  Synthetic
cuguguguacaaaaauaccu

SEQ ID NO: 377091 - RNA, 21 nt, Artificial Sequence
  Synthetic
ucuguguguacaaaaauaccu

SEQ ID NO: 377092 - RNA, 22 nt, Artificial Sequence
  Synthetic
aucuguguguacaaaaauaccu

SEQ ID NO: 377093 - RNA, 23 nt, Artificial Sequence
  Synthetic
uaucuguguguacaaaaauaccu

SEQ ID NO: 377094 - RNA, 24 nt, Artificial Sequence
  Synthetic
uuaucuguguguacaaaaauaccu

SEQ ID NO: 377095 - RNA, 18 nt, Artificial Sequence
  Synthetic
auuucuucauaaauaccu

SEQ ID NO: 377096 - RNA, 19 nt, Artificial Sequence
  Synthetic
aauuucuucauaaauaccu

SEQ ID NO: 377097 - RNA, 20 nt, Artificial Sequence
  Synthetic
aaauuucuucauaaauaccu

SEQ ID NO: 377098 - RNA, 21 nt, Artificial Sequence
  Synthetic
uaaauuucuucauaaauaccu

SEQ ID NO: 377099 - RNA, 22 nt, Artificial Sequence
  Synthetic
auaaauuucuucauaaauaccu

SEQ ID NO: 377100 - RNA, 23 nt, Artificial Sequence
  Synthetic
cauaaauuucuucauaaauaccu

SEQ ID NO: 377101 - RNA, 24 nt, Artificial Sequence
  Synthetic
ucauaaauuucuucauaaauaccu

SEQ ID NO: 377102 - RNA, 18 nt, Artificial Sequence
  Synthetic
uuauauaaacuaauaccu

SEQ ID NO: 377103 - RNA, 19 nt, Artificial Sequence
  Synthetic
uuuauauaaacuaauaccu

SEQ ID NO: 377104 - RNA, 20 nt, Artificial Sequence
  Synthetic
uuuuauauaaacuaauaccu

SEQ ID NO: 377105 - RNA, 21 nt, Artificial Sequence
  Synthetic
auuuuauauaaacuaauaccu

SEQ ID NO: 377106 - RNA, 22 nt, Artificial Sequence
  Synthetic
aauuuuauauaaacuaauaccu

SEQ ID NO: 377107 - RNA, 23 nt, Artificial Sequence
  Synthetic
aaauuuuauauaaacuaauaccu

SEQ ID NO: 377108 - RNA, 24 nt, Artificial Sequence
  Synthetic
aaaauuuuauauaaacuaauaccu

SEQ ID NO: 377109 - RNA, 18 nt, Artificial Sequence
  Synthetic
uuuaggagcaacauaccu

SEQ ID NO: 377110 - RNA, 19 nt, Artificial Sequence
  Synthetic
cuuuaggagcaacauaccu

SEQ ID NO: 377111 - RNA, 20 nt, Artificial Sequence
  Synthetic
ccuuuaggagcaacauaccu

SEQ ID NO: 377112 - RNA, 21 nt, Artificial Sequence
  Synthetic
gccuuuaggagcaacauaccu

SEQ ID NO: 377113 - RNA, 22 nt, Artificial Sequence
  Synthetic
ugccuuuaggagcaacauaccu

SEQ ID NO: 377114 - RNA, 23 nt, Artificial Sequence
  Synthetic
uugccuuuaggagcaacauaccu

SEQ ID NO: 377115 - RNA, 24 nt, Artificial Sequence
  Synthetic
uuugccuuuaggagcaacauaccu

SEQ ID NO: 377116 - RNA, 18 nt, Artificial Sequence
  Synthetic
cacacacuucacauaccu

SEQ ID NO: 377117 - RNA, 19 nt, Artificial Sequence
  Synthetic
ucacacacuucacauaccu

SEQ ID NO: 377118 - RNA, 20 nt, Artificial Sequence
  Synthetic
uucacacacuucacauaccu

SEQ ID NO: 377119 - RNA, 21 nt, Artificial Sequence
  Synthetic
uuucacacacuucacauaccu

SEQ ID NO: 377120 - RNA, 22 nt, Artificial Sequence
  Synthetic
uuuucacacacuucacauaccu

SEQ ID NO: 377121 - RNA, 23 nt, Artificial Sequence
  Synthetic
cuuuucacacacuucacauaccu

SEQ ID NO: 377122 - RNA, 24 nt, Artificial Sequence
  Synthetic
ucuuuucacacacuucacauaccu

SEQ ID NO: 377123 - RNA, 18 nt, Artificial Sequence
  Synthetic
acauauacaggcauaccu

SEQ ID NO: 377124 - RNA, 19 nt, Artificial Sequence
  Synthetic
cacauauacaggcauaccu

SEQ ID NO: 377125 - RNA, 20 nt, Artificial Sequence
  Synthetic
acacauauacaggcauaccu

SEQ ID NO: 377126 - RNA, 21 nt, Artificial Sequence
  Synthetic
uacacauauacaggcauaccu

SEQ ID NO: 377127 - RNA, 22 nt, Artificial Sequence
  Synthetic
auacacauauacaggcauaccu

SEQ ID NO: 377128 - RNA, 23 nt, Artificial Sequence
  Synthetic
uauacacauauacaggcauaccu

SEQ ID NO: 377129 - RNA, 24 nt, Artificial Sequence
  Synthetic
guauacacauauacaggcauaccu

SEQ ID NO: 377130 - RNA, 18 nt, Artificial Sequence
  Synthetic
guuaauuuugagauaccu

SEQ ID NO: 377131 - RNA, 19 nt, Artificial Sequence
  Synthetic
uguuaauuuugagauaccu

SEQ ID NO: 377132 - RNA, 20 nt, Artificial Sequence
  Synthetic
guguuaauuuugagauaccu

SEQ ID NO: 377133 - RNA, 21 nt, Artificial Sequence
  Synthetic
uguguuaauuuugagauaccu

SEQ ID NO: 377134 - RNA, 22 nt, Artificial Sequence
  Synthetic
auguguuaauuuugagauaccu

SEQ ID NO: 377135 - RNA, 23 nt, Artificial Sequence
  Synthetic
gauguguuaauuuugagauaccu

SEQ ID NO: 377136 - RNA, 24 nt, Artificial Sequence
  Synthetic
ggauguguuaauuuugagauaccu

SEQ ID NO: 377137 - RNA, 18 nt, Artificial Sequence
  Synthetic
ugcuagaugaggauaccu

SEQ ID NO: 377138 - RNA, 19 nt, Artificial Sequence
  Synthetic
augcuagaugaggauaccu

SEQ ID NO: 377139 - RNA, 20 nt, Artificial Sequence
  Synthetic
aaugcuagaugaggauaccu

SEQ ID NO: 377140 - RNA, 21 nt, Artificial Sequence
  Synthetic
aaaugcuagaugaggauaccu

SEQ ID NO: 377141 - RNA, 22 nt, Artificial Sequence
  Synthetic
uaaaugcuagaugaggauaccu

SEQ ID NO: 377142 - RNA, 23 nt, Artificial Sequence
  Synthetic
cuaaaugcuagaugaggauaccu

SEQ ID NO: 377143 - RNA, 24 nt, Artificial Sequence
  Synthetic
acuaaaugcuagaugaggauaccu

SEQ ID NO: 377144 - RNA, 18 nt, Artificial Sequence
  Synthetic
agaaccuugaugauaccu

SEQ ID NO: 377145 - RNA, 19 nt, Artificial Sequence
  Synthetic
cagaaccuugaugauaccu

SEQ ID NO: 377146 - RNA, 20 nt, Artificial Sequence
  Synthetic
acagaaccuugaugauaccu

SEQ ID NO: 377147 - RNA, 21 nt, Artificial Sequence
  Synthetic
aacagaaccuugaugauaccu

SEQ ID NO: 377148 - RNA, 22 nt, Artificial Sequence
  Synthetic
aaacagaaccuugaugauaccu

SEQ ID NO: 377149 - RNA, 23 nt, Artificial Sequence
  Synthetic
aaaacagaaccuugaugauaccu

SEQ ID NO: 377150 - RNA, 24 nt, Artificial Sequence
  Synthetic
aaaaacagaaccuugaugauaccu

SEQ ID NO: 377151 - RNA, 18 nt, Artificial Sequence
  Synthetic
aagaaaauucugauaccu

SEQ ID NO: 377152 - RNA, 19 nt, Artificial Sequence
  Synthetic
aaagaaaauucugauaccu

SEQ ID NO: 377153 - RNA, 20 nt, Artificial Sequence
  Synthetic
aaaagaaaauucugauaccu

SEQ ID NO: 377154 - RNA, 21 nt, Artificial Sequence
  Synthetic
aaaaagaaaauucugauaccu

SEQ ID NO: 377155 - RNA, 22 nt, Artificial Sequence
  Synthetic
caaaaagaaaauucugauaccu

SEQ ID NO: 377156 - RNA, 23 nt, Artificial Sequence
  Synthetic
ucaaaaagaaaauucugauaccu

SEQ ID NO: 377157 - RNA, 24 nt, Artificial Sequence
  Synthetic
cucaaaaagaaaauucugauaccu

SEQ ID NO: 377158 - RNA, 18 nt, Artificial Sequence
  Synthetic
uguucacccuguauaccu

SEQ ID NO: 377159 - RNA, 19 nt, Artificial Sequence
  Synthetic
uuguucacccuguauaccu

SEQ ID NO: 377160 - RNA, 20 nt, Artificial Sequence
  Synthetic
cuuguucacccuguauaccu

SEQ ID NO: 377161 - RNA, 21 nt, Artificial Sequence
  Synthetic
gcuuguucacccuguauaccu

SEQ ID NO: 377162 - RNA, 22 nt, Artificial Sequence
  Synthetic
ugcuuguucacccuguauaccu

SEQ ID NO: 377163 - RNA, 23 nt, Artificial Sequence
  Synthetic
uugcuuguucacccuguauaccu

SEQ ID NO: 377164 - RNA, 24 nt, Artificial Sequence
  Synthetic
cuugcuuguucacccuguauaccu

SEQ ID NO: 377165 - RNA, 18 nt, Artificial Sequence
  Synthetic
uucaaaugauuuauaccu

SEQ ID NO: 377166 - RNA, 19 nt, Artificial Sequence
  Synthetic
auucaaaugauuuauaccu

SEQ ID NO: 377167 - RNA, 20 nt, Artificial Sequence
  Synthetic
cauucaaaugauuuauaccu

SEQ ID NO: 377168 - RNA, 21 nt, Artificial Sequence
  Synthetic
acauucaaaugauuuauaccu

SEQ ID NO: 377169 - RNA, 22 nt, Artificial Sequence
  Synthetic
cacauucaaaugauuuauaccu

SEQ ID NO: 377170 - RNA, 23 nt, Artificial Sequence
  Synthetic
acacauucaaaugauuuauaccu

SEQ ID NO: 377171 - RNA, 24 nt, Artificial Sequence
  Synthetic
aacacauucaaaugauuuauaccu

SEQ ID NO: 377172 - RNA, 18 nt, Artificial Sequence
  Synthetic
uuauaaugcuuuauaccu

SEQ ID NO: 377173 - RNA, 19 nt, Artificial Sequence
  Synthetic
cuuauaaugcuuuauaccu

SEQ ID NO: 377174 - RNA, 20 nt, Artificial Sequence
  Synthetic
ucuuauaaugcuuuauaccu

SEQ ID NO: 377175 - RNA, 21 nt, Artificial Sequence
  Synthetic
gucuuauaaugcuuuauaccu

SEQ ID NO: 377176 - RNA, 22 nt, Artificial Sequence
  Synthetic
ggucuuauaaugcuuuauaccu

SEQ ID NO: 377177 - RNA, 23 nt, Artificial Sequence
  Synthetic
uggucuuauaaugcuuuauaccu

SEQ ID NO: 377178 - RNA, 24 nt, Artificial Sequence
  Synthetic
uuggucuuauaaugcuuuauaccu

SEQ ID NO: 377179 - RNA, 18 nt, Artificial Sequence
  Synthetic
cuguagucccagcuaccu

SEQ ID NO: 377180 - RNA, 19 nt, Artificial Sequence
  Synthetic
ccuguagucccagcuaccu

SEQ ID NO: 377181 - RNA, 20 nt, Artificial Sequence
  Synthetic
accuguagucccagcuaccu

SEQ ID NO: 377182 - RNA, 21 nt, Artificial Sequence
  Synthetic
caccuguagucccagcuaccu

SEQ ID NO: 377183 - RNA, 22 nt, Artificial Sequence
  Synthetic
gcaccuguagucccagcuaccu

SEQ ID NO: 377184 - RNA, 23 nt, Artificial Sequence
  Synthetic
cgcaccuguagucccagcuaccu

SEQ ID NO: 377185 - RNA, 24 nt, Artificial Sequence
  Synthetic
acgcaccuguagucccagcuaccu

SEQ ID NO: 377186 - RNA, 18 nt, Artificial Sequence
  Synthetic
cauguaugguagcuaccu

SEQ ID NO: 377187 - RNA, 19 nt, Artificial Sequence
  Synthetic
ucauguaugguagcuaccu

SEQ ID NO: 377188 - RNA, 20 nt, Artificial Sequence
  Synthetic
aucauguaugguagcuaccu

SEQ ID NO: 377189 - RNA, 21 nt, Artificial Sequence
  Synthetic
uaucauguaugguagcuaccu

SEQ ID NO: 377190 - RNA, 22 nt, Artificial Sequence
  Synthetic
uuaucauguaugguagcuaccu

SEQ ID NO: 377191 - RNA, 23 nt, Artificial Sequence
  Synthetic
uuuaucauguaugguagcuaccu

SEQ ID NO: 377192 - RNA, 24 nt, Artificial Sequence
  Synthetic
uuuuaucauguaugguagcuaccu

SEQ ID NO: 377193 - RNA, 18 nt, Artificial Sequence
  Synthetic
ccacaauuguagcuaccu

SEQ ID NO: 377194 - RNA, 19 nt, Artificial Sequence
  Synthetic
gccacaauuguagcuaccu

SEQ ID NO: 377195 - RNA, 20 nt, Artificial Sequence
  Synthetic
agccacaauuguagcuaccu

SEQ ID NO: 377196 - RNA, 21 nt, Artificial Sequence
  Synthetic
cagccacaauuguagcuaccu

SEQ ID NO: 377197 - RNA, 22 nt, Artificial Sequence
  Synthetic
gcagccacaauuguagcuaccu

SEQ ID NO: 377198 - RNA, 23 nt, Artificial Sequence
  Synthetic
agcagccacaauuguagcuaccu

SEQ ID NO: 377199 - RNA, 24 nt, Artificial Sequence
  Synthetic
aagcagccacaauuguagcuaccu

SEQ ID NO: 377200 - RNA, 18 nt, Artificial Sequence
  Synthetic
aaaaaaaaaaggcuaccu

SEQ ID NO: 377201 - RNA, 19 nt, Artificial Sequence
  Synthetic
aaaaaaaaaaaggcuaccu

SEQ ID NO: 377202 - RNA, 20 nt, Artificial Sequence
  Synthetic
aaaaaaaaaaaaggcuaccu

SEQ ID NO: 377203 - RNA, 21 nt, Artificial Sequence
  Synthetic
gaaaaaaaaaaaaggcuaccu

SEQ ID NO: 377204 - RNA, 22 nt, Artificial Sequence
  Synthetic
agaaaaaaaaaaaaggcuaccu

SEQ ID NO: 377205 - RNA, 23 nt, Artificial Sequence
  Synthetic
gagaaaaaaaaaaaaggcuaccu

SEQ ID NO: 377206 - RNA, 24 nt, Artificial Sequence
  Synthetic
ggagaaaaaaaaaaaaggcuaccu

SEQ ID NO: 377207 - RNA, 18 nt, Artificial Sequence
  Synthetic
caacaccauuugcuaccu

SEQ ID NO: 377208 - RNA, 19 nt, Artificial Sequence
  Synthetic
gcaacaccauuugcuaccu

SEQ ID NO: 377209 - RNA, 20 nt, Artificial Sequence
  Synthetic
ugcaacaccauuugcuaccu

SEQ ID NO: 377210 - RNA, 21 nt, Artificial Sequence
  Synthetic
uugcaacaccauuugcuaccu

SEQ ID NO: 377211 - RNA, 22 nt, Artificial Sequence
  Synthetic
auugcaacaccauuugcuaccu

SEQ ID NO: 377212 - RNA, 23 nt, Artificial Sequence
  Synthetic
aauugcaacaccauuugcuaccu

SEQ ID NO: 377213 - RNA, 24 nt, Artificial Sequence
  Synthetic
gaauugcaacaccauuugcuaccu

SEQ ID NO: 377214 - RNA, 18 nt, Artificial Sequence
  Synthetic
ucaccuguaaaucuaccu

SEQ ID NO: 377215 - RNA, 19 nt, Artificial Sequence
  Synthetic
aucaccuguaaaucuaccu

SEQ ID NO: 377216 - RNA, 20 nt, Artificial Sequence
  Synthetic
aaucaccuguaaaucuaccu

SEQ ID NO: 377217 - RNA, 21 nt, Artificial Sequence
  Synthetic
aaaucaccuguaaaucuaccu

SEQ ID NO: 377218 - RNA, 22 nt, Artificial Sequence
  Synthetic
uaaaucaccuguaaaucuaccu

SEQ ID NO: 377219 - RNA, 23 nt, Artificial Sequence
  Synthetic
auaaaucaccuguaaaucuaccu

SEQ ID NO: 377220 - RNA, 24 nt, Artificial Sequence
  Synthetic
aauaaaucaccuguaaaucuaccu

SEQ ID NO: 377221 - RNA, 18 nt, Artificial Sequence
  Synthetic
aagagguggggucuaccu

SEQ ID NO: 377222 - RNA, 19 nt, Artificial Sequence
  Synthetic
aaagagguggggucuaccu

SEQ ID NO: 377223 - RNA, 20 nt, Artificial Sequence
  Synthetic
aaaagagguggggucuaccu

SEQ ID NO: 377224 - RNA, 21 nt, Artificial Sequence
  Synthetic
aaaaagagguggggucuaccu

SEQ ID NO: 377225 - RNA, 22 nt, Artificial Sequence
  Synthetic
caaaaagagguggggucuaccu

SEQ ID NO: 377226 - RNA, 23 nt, Artificial Sequence
  Synthetic
gcaaaaagagguggggucuaccu

SEQ ID NO: 377227 - RNA, 24 nt, Artificial Sequence
  Synthetic
ggcaaaaagagguggggucuaccu

SEQ ID NO: 377228 - RNA, 18 nt, Artificial Sequence
  Synthetic
agcugccacuaaguaccu

SEQ ID NO: 377229 - RNA, 19 nt, Artificial Sequence
  Synthetic
gagcugccacuaaguaccu

SEQ ID NO: 377230 - RNA, 20 nt, Artificial Sequence
  Synthetic
ugagcugccacuaaguaccu

SEQ ID NO: 377231 - RNA, 21 nt, Artificial Sequence
  Synthetic
uugagcugccacuaaguaccu

SEQ ID NO: 377232 - RNA, 22 nt, Artificial Sequence
  Synthetic
auugagcugccacuaaguaccu

SEQ ID NO: 377233 - RNA, 23 nt, Artificial Sequence
  Synthetic
uauugagcugccacuaaguaccu

SEQ ID NO: 377234 - RNA, 24 nt, Artificial Sequence
  Synthetic
cuauugagcugccacuaaguaccu

SEQ ID NO: 377235 - RNA, 18 nt, Artificial Sequence
  Synthetic
guaguacaaucaguaccu

SEQ ID NO: 377236 - RNA, 19 nt, Artificial Sequence
  Synthetic
aguaguacaaucaguaccu

SEQ ID NO: 377237 - RNA, 20 nt, Artificial Sequence
  Synthetic
caguaguacaaucaguaccu

SEQ ID NO: 377238 - RNA, 21 nt, Artificial Sequence
  Synthetic
acaguaguacaaucaguaccu

SEQ ID NO: 377239 - RNA, 22 nt, Artificial Sequence
  Synthetic
cacaguaguacaaucaguaccu

SEQ ID NO: 377240 - RNA, 23 nt, Artificial Sequence
  Synthetic
ucacaguaguacaaucaguaccu

SEQ ID NO: 377241 - RNA, 24 nt, Artificial Sequence
  Synthetic
aucacaguaguacaaucaguaccu

SEQ ID NO: 377242 - RNA, 18 nt, Artificial Sequence
  Synthetic
ccuuaaguaguaguaccu

SEQ ID NO: 377243 - RNA, 19 nt, Artificial Sequence
  Synthetic
gccuuaaguaguaguaccu

SEQ ID NO: 377244 - RNA, 20 nt, Artificial Sequence
  Synthetic
ggccuuaaguaguaguaccu

SEQ ID NO: 377245 - RNA, 21 nt, Artificial Sequence
  Synthetic
gggccuuaaguaguaguaccu

SEQ ID NO: 377246 - RNA, 22 nt, Artificial Sequence
  Synthetic
ugggccuuaaguaguaguaccu

SEQ ID NO: 377247 - RNA, 23 nt, Artificial Sequence
  Synthetic
uugggccuuaaguaguaguaccu

SEQ ID NO: 377248 - RNA, 24 nt, Artificial Sequence
  Synthetic
auugggccuuaaguaguaguaccu

SEQ ID NO: 377249 - RNA, 18 nt, Artificial Sequence
  Synthetic
cauuaaauugagguaccu

SEQ ID NO: 377250 - RNA, 19 nt, Artificial Sequence
  Synthetic
ucauuaaauugagguaccu

SEQ ID NO: 377251 - RNA, 20 nt, Artificial Sequence
  Synthetic
gucauuaaauugagguaccu

SEQ ID NO: 377252 - RNA, 21 nt, Artificial Sequence
  Synthetic
agucauuaaauugagguaccu

SEQ ID NO: 377253 - RNA, 22 nt, Artificial Sequence
  Synthetic
gagucauuaaauugagguaccu

SEQ ID NO: 377254 - RNA, 23 nt, Artificial Sequence
  Synthetic
ggagucauuaaauugagguaccu

SEQ ID NO: 377255 - RNA, 24 nt, Artificial Sequence
  Synthetic
gggagucauuaaauugagguaccu

SEQ ID NO: 377256 - RNA, 18 nt, Artificial Sequence
  Synthetic
guggcugagcugguaccu

SEQ ID NO: 377257 - RNA, 19 nt, Artificial Sequence
  Synthetic
uguggcugagcugguaccu

SEQ ID NO: 377258 - RNA, 20 nt, Artificial Sequence
  Synthetic
cuguggcugagcugguaccu

SEQ ID NO: 377259 - RNA, 21 nt, Artificial Sequence
  Synthetic
ucuguggcugagcugguaccu

SEQ ID NO: 377260 - RNA, 22 nt, Artificial Sequence
  Synthetic
uucuguggcugagcugguaccu

SEQ ID NO: 377261 - RNA, 23 nt, Artificial Sequence
  Synthetic
uuucuguggcugagcugguaccu

SEQ ID NO: 377262 - RNA, 24 nt, Artificial Sequence
  Synthetic
cuuucuguggcugagcugguaccu

SEQ ID NO: 377263 - RNA, 18 nt, Artificial Sequence
  Synthetic
uguuauauuuugguaccu

SEQ ID NO: 377264 - RNA, 19 nt, Artificial Sequence
  Synthetic
cuguuauauuuugguaccu

SEQ ID NO: 377265 - RNA, 20 nt, Artificial Sequence
  Synthetic
ucuguuauauuuugguaccu

SEQ ID NO: 377266 - RNA, 21 nt, Artificial Sequence
  Synthetic
uucuguuauauuuugguaccu

SEQ ID NO: 377267 - RNA, 22 nt, Artificial Sequence
  Synthetic
uuucuguuauauuuugguaccu

SEQ ID NO: 377268 - RNA, 23 nt, Artificial Sequence
  Synthetic
auuucuguuauauuuugguaccu

SEQ ID NO: 377269 - RNA, 24 nt, Artificial Sequence
  Synthetic
aauuucuguuauauuuugguaccu

SEQ ID NO: 377270 - RNA, 18 nt, Artificial Sequence
  Synthetic
caaacucuggcuguaccu

SEQ ID NO: 377271 - RNA, 19 nt, Artificial Sequence
  Synthetic
ucaaacucuggcuguaccu

SEQ ID NO: 377272 - RNA, 20 nt, Artificial Sequence
  Synthetic
uucaaacucuggcuguaccu

SEQ ID NO: 377273 - RNA, 21 nt, Artificial Sequence
  Synthetic
auucaaacucuggcuguaccu

SEQ ID NO: 377274 - RNA, 22 nt, Artificial Sequence
  Synthetic
gauucaaacucuggcuguaccu

SEQ ID NO: 377275 - RNA, 23 nt, Artificial Sequence
  Synthetic
ggauucaaacucuggcuguaccu

SEQ ID NO: 377276 - RNA, 24 nt, Artificial Sequence
  Synthetic
uggauucaaacucuggcuguaccu

SEQ ID NO: 377277 - RNA, 18 nt, Artificial Sequence
  Synthetic
gaagaauugcuuguaccu

SEQ ID NO: 377278 - RNA, 19 nt, Artificial Sequence
  Synthetic
agaagaauugcuuguaccu

SEQ ID NO: 377279 - RNA, 20 nt, Artificial Sequence
  Synthetic
cagaagaauugcuuguaccu

SEQ ID NO: 377280 - RNA, 21 nt, Artificial Sequence
  Synthetic
gcagaagaauugcuuguaccu

SEQ ID NO: 377281 - RNA, 22 nt, Artificial Sequence
  Synthetic
ggcagaagaauugcuuguaccu

SEQ ID NO: 377282 - RNA, 23 nt, Artificial Sequence
  Synthetic
aggcagaagaauugcuuguaccu

SEQ ID NO: 377283 - RNA, 24 nt, Artificial Sequence
  Synthetic
gaggcagaagaauugcuuguaccu

SEQ ID NO: 377284 - RNA, 18 nt, Artificial Sequence
  Synthetic
agggauaaaaaauuaccu

SEQ ID NO: 377285 - RNA, 19 nt, Artificial Sequence
  Synthetic
gagggauaaaaaauuaccu

SEQ ID NO: 377286 - RNA, 20 nt, Artificial Sequence
  Synthetic
ugagggauaaaaaauuaccu

SEQ ID NO: 377287 - RNA, 21 nt, Artificial Sequence
  Synthetic
gugagggauaaaaaauuaccu

SEQ ID NO: 377288 - RNA, 22 nt, Artificial Sequence
  Synthetic
agugagggauaaaaaauuaccu

SEQ ID NO: 377289 - RNA, 23 nt, Artificial Sequence
  Synthetic
uagugagggauaaaaaauuaccu

SEQ ID NO: 377290 - RNA, 24 nt, Artificial Sequence
  Synthetic
guagugagggauaaaaaauuaccu

SEQ ID NO: 377291 - RNA, 18 nt, Artificial Sequence
  Synthetic
agaauuagaacauuaccu

SEQ ID NO: 377292 - RNA, 19 nt, Artificial Sequence
  Synthetic
aagaauuagaacauuaccu

SEQ ID NO: 377293 - RNA, 20 nt, Artificial Sequence
  Synthetic
caagaauuagaacauuaccu

SEQ ID NO: 377294 - RNA, 21 nt, Artificial Sequence
  Synthetic
ucaagaauuagaacauuaccu

SEQ ID NO: 377295 - RNA, 22 nt, Artificial Sequence
  Synthetic
uucaagaauuagaacauuaccu

SEQ ID NO: 377296 - RNA, 23 nt, Artificial Sequence
  Synthetic
guucaagaauuagaacauuaccu

SEQ ID NO: 377297 - RNA, 24 nt, Artificial Sequence
  Synthetic
aguucaagaauuagaacauuaccu

SEQ ID NO: 377298 - RNA, 18 nt, Artificial Sequence
  Synthetic
uaaaaauuuccauuaccu

SEQ ID NO: 377299 - RNA, 19 nt, Artificial Sequence
  Synthetic
auaaaaauuuccauuaccu

SEQ ID NO: 377300 - RNA, 20 nt, Artificial Sequence
  Synthetic
aauaaaaauuuccauuaccu

SEQ ID NO: 377301 - RNA, 21 nt, Artificial Sequence
  Synthetic
aaauaaaaauuuccauuaccu

SEQ ID NO: 377302 - RNA, 22 nt, Artificial Sequence
  Synthetic
aaaauaaaaauuuccauuaccu

SEQ ID NO: 377303 - RNA, 23 nt, Artificial Sequence
  Synthetic
uaaaauaaaaauuuccauuaccu

SEQ ID NO: 377304 - RNA, 24 nt, Artificial Sequence
  Synthetic
auaaaauaaaaauuuccauuaccu

SEQ ID NO: 377305 - RNA, 18 nt, Artificial Sequence
  Synthetic
aauauuuucagauuaccu

SEQ ID NO: 377306 - RNA, 19 nt, Artificial Sequence
  Synthetic
uaauauuuucagauuaccu

SEQ ID NO: 377307 - RNA, 20 nt, Artificial Sequence
  Synthetic
auaauauuuucagauuaccu

SEQ ID NO: 377308 - RNA, 21 nt, Artificial Sequence
  Synthetic
gauaauauuuucagauuaccu

SEQ ID NO: 377309 - RNA, 22 nt, Artificial Sequence
  Synthetic
agauaauauuuucagauuaccu

SEQ ID NO: 377310 - RNA, 23 nt, Artificial Sequence
  Synthetic
gagauaauauuuucagauuaccu

SEQ ID NO: 377311 - RNA, 24 nt, Artificial Sequence
  Synthetic
ggagauaauauuuucagauuaccu

SEQ ID NO: 377312 - RNA, 18 nt, Artificial Sequence
  Synthetic
gagguggguggauuaccu

SEQ ID NO: 377313 - RNA, 19 nt, Artificial Sequence
  Synthetic
ugagguggguggauuaccu

SEQ ID NO: 377314 - RNA, 20 nt, Artificial Sequence
  Synthetic
cugagguggguggauuaccu

SEQ ID NO: 377315 - RNA, 21 nt, Artificial Sequence
  Synthetic
ucugagguggguggauuaccu

SEQ ID NO: 377316 - RNA, 22 nt, Artificial Sequence
  Synthetic
gucugagguggguggauuaccu

SEQ ID NO: 377317 - RNA, 23 nt, Artificial Sequence
  Synthetic
agucugagguggguggauuaccu

SEQ ID NO: 377318 - RNA, 24 nt, Artificial Sequence
  Synthetic
gagucugagguggguggauuaccu

SEQ ID NO: 377319 - RNA, 18 nt, Artificial Sequence
  Synthetic
gugaauaaaauauuaccu

SEQ ID NO: 377320 - RNA, 19 nt, Artificial Sequence
  Synthetic
ugugaauaaaauauuaccu

SEQ ID NO: 377321 - RNA, 20 nt, Artificial Sequence
  Synthetic
cugugaauaaaauauuaccu

SEQ ID NO: 377322 - RNA, 21 nt, Artificial Sequence
  Synthetic
gcugugaauaaaauauuaccu

SEQ ID NO: 377323 - RNA, 22 nt, Artificial Sequence
  Synthetic
ugcugugaauaaaauauuaccu

SEQ ID NO: 377324 - RNA, 23 nt, Artificial Sequence
  Synthetic
augcugugaauaaaauauuaccu

SEQ ID NO: 377325 - RNA, 24 nt, Artificial Sequence
  Synthetic
uaugcugugaauaaaauauuaccu

SEQ ID NO: 377326 - RNA, 18 nt, Artificial Sequence
  Synthetic
cuauaaaugcuauuaccu

SEQ ID NO: 377327 - RNA, 19 nt, Artificial Sequence
  Synthetic
ccuauaaaugcuauuaccu

SEQ ID NO: 377328 - RNA, 20 nt, Artificial Sequence
  Synthetic
uccuauaaaugcuauuaccu

SEQ ID NO: 377329 - RNA, 21 nt, Artificial Sequence
  Synthetic
auccuauaaaugcuauuaccu

SEQ ID NO: 377330 - RNA, 22 nt, Artificial Sequence
  Synthetic
cauccuauaaaugcuauuaccu

SEQ ID NO: 377331 - RNA, 23 nt, Artificial Sequence
  Synthetic
ucauccuauaaaugcuauuaccu

SEQ ID NO: 377332 - RNA, 24 nt, Artificial Sequence
  Synthetic
cucauccuauaaaugcuauuaccu

SEQ ID NO: 377333 - RNA, 18 nt, Artificial Sequence
  Synthetic
caccuguguuuauuaccu

SEQ ID NO: 377334 - RNA, 19 nt, Artificial Sequence
  Synthetic
ccaccuguguuuauuaccu

SEQ ID NO: 377335 - RNA, 20 nt, Artificial Sequence
  Synthetic
cccaccuguguuuauuaccu

SEQ ID NO: 377336 - RNA, 21 nt, Artificial Sequence
  Synthetic
ucccaccuguguuuauuaccu

SEQ ID NO: 377337 - RNA, 22 nt, Artificial Sequence
  Synthetic
uucccaccuguguuuauuaccu

SEQ ID NO: 377338 - RNA, 23 nt, Artificial Sequence
  Synthetic
cuucccaccuguguuuauuaccu

SEQ ID NO: 377339 - RNA, 24 nt, Artificial Sequence
  Synthetic
ucuucccaccuguguuuauuaccu

SEQ ID NO: 377340 - RNA, 18 nt, Artificial Sequence
  Synthetic
uucgaaauccccuuaccu

SEQ ID NO: 377341 - RNA, 19 nt, Artificial Sequence
  Synthetic
auucgaaauccccuuaccu

SEQ ID NO: 377342 - RNA, 20 nt, Artificial Sequence
  Synthetic
uauucgaaauccccuuaccu

SEQ ID NO: 377343 - RNA, 21 nt, Artificial Sequence
  Synthetic
uuauucgaaauccccuuaccu

SEQ ID NO: 377344 - RNA, 22 nt, Artificial Sequence
  Synthetic
cuuauucgaaauccccuuaccu

SEQ ID NO: 377345 - RNA, 23 nt, Artificial Sequence
  Synthetic
ccuuauucgaaauccccuuaccu

SEQ ID NO: 377346 - RNA, 24 nt, Artificial Sequence
  Synthetic
accuuauucgaaauccccuuaccu

SEQ ID NO: 377347 - RNA, 18 nt, Artificial Sequence
  Synthetic
ugguucuggagcuuaccu

SEQ ID NO: 377348 - RNA, 19 nt, Artificial Sequence
  Synthetic
augguucuggagcuuaccu

SEQ ID NO: 377349 - RNA, 20 nt, Artificial Sequence
  Synthetic
aaugguucuggagcuuaccu

SEQ ID NO: 377350 - RNA, 21 nt, Artificial Sequence
  Synthetic
gaaugguucuggagcuuaccu

SEQ ID NO: 377351 - RNA, 22 nt, Artificial Sequence
  Synthetic
agaaugguucuggagcuuaccu

SEQ ID NO: 377352 - RNA, 23 nt, Artificial Sequence
  Synthetic
aagaaugguucuggagcuuaccu

SEQ ID NO: 377353 - RNA, 24 nt, Artificial Sequence
  Synthetic
aaagaaugguucuggagcuuaccu

SEQ ID NO: 377354 - RNA, 18 nt, Artificial Sequence
  Synthetic
cacauugcacuguuaccu

SEQ ID NO: 377355 - RNA, 19 nt, Artificial Sequence
  Synthetic
acacauugcacuguuaccu

SEQ ID NO: 377356 - RNA, 20 nt, Artificial Sequence
  Synthetic
cacacauugcacuguuaccu

SEQ ID NO: 377357 - RNA, 21 nt, Artificial Sequence
  Synthetic
ccacacauugcacuguuaccu

SEQ ID NO: 377358 - RNA, 22 nt, Artificial Sequence
  Synthetic
accacacauugcacuguuaccu

SEQ ID NO: 377359 - RNA, 23 nt, Artificial Sequence
  Synthetic
aaccacacauugcacuguuaccu

SEQ ID NO: 377360 - RNA, 24 nt, Artificial Sequence
  Synthetic
uaaccacacauugcacuguuaccu

SEQ ID NO: 377361 - RNA, 18 nt, Artificial Sequence
  Synthetic
guuuccagagcuuuaccu

SEQ ID NO: 377362 - RNA, 19 nt, Artificial Sequence
  Synthetic
gguuuccagagcuuuaccu

SEQ ID NO: 377363 - RNA, 20 nt, Artificial Sequence
  Synthetic
agguuuccagagcuuuaccu

SEQ ID NO: 377364 - RNA, 21 nt, Artificial Sequence
  Synthetic
cagguuuccagagcuuuaccu

SEQ ID NO: 377365 - RNA, 22 nt, Artificial Sequence
  Synthetic
ucagguuuccagagcuuuaccu

SEQ ID NO: 377366 - RNA, 23 nt, Artificial Sequence
  Synthetic
uucagguuuccagagcuuuaccu

SEQ ID NO: 377367 - RNA, 24 nt, Artificial Sequence
  Synthetic
uuucagguuuccagagcuuuaccu

SEQ ID NO: 377368 - RNA, 18 nt, Artificial Sequence
  Synthetic
uaucccauuuuuuuaccu

SEQ ID NO: 377369 - RNA, 19 nt, Artificial Sequence
  Synthetic
auaucccauuuuuuuaccu

SEQ ID NO: 377370 - RNA, 20 nt, Artificial Sequence
  Synthetic
aauaucccauuuuuuuaccu

SEQ ID NO: 377371 - RNA, 21 nt, Artificial Sequence
  Synthetic
aaauaucccauuuuuuuaccu

SEQ ID NO: 377372 - RNA, 22 nt, Artificial Sequence
  Synthetic
aaaauaucccauuuuuuuaccu

SEQ ID NO: 377373 - RNA, 23 nt, Artificial Sequence
  Synthetic
aaaaauaucccauuuuuuuaccu

SEQ ID NO: 377374 - RNA, 24 nt, Artificial Sequence
  Synthetic
uaaaaauaucccauuuuuuuaccu

SEQ ID NO: 377375 - RNA, 18 nt, Artificial Sequence
  Synthetic
gucuagagaccaaacccu

SEQ ID NO: 377376 - RNA, 19 nt, Artificial Sequence
  Synthetic
ggucuagagaccaaacccu

SEQ ID NO: 377377 - RNA, 20 nt, Artificial Sequence
  Synthetic
uggucuagagaccaaacccu

SEQ ID NO: 377378 - RNA, 21 nt, Artificial Sequence
  Synthetic
uuggucuagagaccaaacccu

SEQ ID NO: 377379 - RNA, 22 nt, Artificial Sequence
  Synthetic
auuggucuagagaccaaacccu

SEQ ID NO: 377380 - RNA, 23 nt, Artificial Sequence
  Synthetic
cauuggucuagagaccaaacccu

SEQ ID NO: 377381 - RNA, 24 nt, Artificial Sequence
  Synthetic
gcauuggucuagagaccaaacccu

SEQ ID NO: 377382 - RNA, 18 nt, Artificial Sequence
  Synthetic
gggcaccugccaaacccu

SEQ ID NO: 377383 - RNA, 19 nt, Artificial Sequence
  Synthetic
agggcaccugccaaacccu

SEQ ID NO: 377384 - RNA, 20 nt, Artificial Sequence
  Synthetic
cagggcaccugccaaacccu

SEQ ID NO: 377385 - RNA, 21 nt, Artificial Sequence
  Synthetic
ccagggcaccugccaaacccu

SEQ ID NO: 377386 - RNA, 22 nt, Artificial Sequence
  Synthetic
uccagggcaccugccaaacccu

SEQ ID NO: 377387 - RNA, 23 nt, Artificial Sequence
  Synthetic
guccagggcaccugccaaacccu

SEQ ID NO: 377388 - RNA, 24 nt, Artificial Sequence
  Synthetic
uguccagggcaccugccaaacccu

SEQ ID NO: 377389 - RNA, 18 nt, Artificial Sequence
  Synthetic
cccacuaagagaaacccu

SEQ ID NO: 377390 - RNA, 19 nt, Artificial Sequence
  Synthetic
acccacuaagagaaacccu

SEQ ID NO: 377391 - RNA, 20 nt, Artificial Sequence
  Synthetic
aacccacuaagagaaacccu

SEQ ID NO: 377392 - RNA, 21 nt, Artificial Sequence
  Synthetic
aaacccacuaagagaaacccu

SEQ ID NO: 377393 - RNA, 22 nt, Artificial Sequence
  Synthetic
uaaacccacuaagagaaacccu

SEQ ID NO: 377394 - RNA, 23 nt, Artificial Sequence
  Synthetic
auaaacccacuaagagaaacccu

SEQ ID NO: 377395 - RNA, 24 nt, Artificial Sequence
  Synthetic
cauaaacccacuaagagaaacccu

SEQ ID NO: 377396 - RNA, 18 nt, Artificial Sequence
  Synthetic
aagcucccaauaaacccu

SEQ ID NO: 377397 - RNA, 19 nt, Artificial Sequence
  Synthetic
caagcucccaauaaacccu

SEQ ID NO: 377398 - RNA, 20 nt, Artificial Sequence
  Synthetic
acaagcucccaauaaacccu

SEQ ID NO: 377399 - RNA, 21 nt, Artificial Sequence
  Synthetic
cacaagcucccaauaaacccu

SEQ ID NO: 377400 - RNA, 22 nt, Artificial Sequence
  Synthetic
ucacaagcucccaauaaacccu

SEQ ID NO: 377401 - RNA, 23 nt, Artificial Sequence
  Synthetic
gucacaagcucccaauaaacccu

SEQ ID NO: 377402 - RNA, 24 nt, Artificial Sequence
  Synthetic
ugucacaagcucccaauaaacccu

SEQ ID NO: 377403 - RNA, 18 nt, Artificial Sequence
  Synthetic
aauucuuauaacaacccu

SEQ ID NO: 377404 - RNA, 19 nt, Artificial Sequence
  Synthetic
uaauucuuauaacaacccu

SEQ ID NO: 377405 - RNA, 20 nt, Artificial Sequence
  Synthetic
uuaauucuuauaacaacccu

SEQ ID NO: 377406 - RNA, 21 nt, Artificial Sequence
  Synthetic
uuuaauucuuauaacaacccu

SEQ ID NO: 377407 - RNA, 22 nt, Artificial Sequence
  Synthetic
uuuuaauucuuauaacaacccu

SEQ ID NO: 377408 - RNA, 23 nt, Artificial Sequence
  Synthetic
uuuuuaauucuuauaacaacccu

SEQ ID NO: 377409 - RNA, 24 nt, Artificial Sequence
  Synthetic
auuuuuaauucuuauaacaacccu

SEQ ID NO: 377410 - RNA, 18 nt, Artificial Sequence
  Synthetic
aucuuaucagacaacccu

SEQ ID NO: 377411 - RNA, 19 nt, Artificial Sequence
  Synthetic
uaucuuaucagacaacccu

SEQ ID NO: 377412 - RNA, 20 nt, Artificial Sequence
  Synthetic
uuaucuuaucagacaacccu

SEQ ID NO: 377413 - RNA, 21 nt, Artificial Sequence
  Synthetic
guuaucuuaucagacaacccu

SEQ ID NO: 377414 - RNA, 22 nt, Artificial Sequence
  Synthetic
gguuaucuuaucagacaacccu

SEQ ID NO: 377415 - RNA, 23 nt, Artificial Sequence
  Synthetic
ggguuaucuuaucagacaacccu

SEQ ID NO: 377416 - RNA, 24 nt, Artificial Sequence
  Synthetic
aggguuaucuuaucagacaacccu

SEQ ID NO: 377417 - RNA, 18 nt, Artificial Sequence
  Synthetic
aaugcucucagcaacccu

SEQ ID NO: 377418 - RNA, 19 nt, Artificial Sequence
  Synthetic
uaaugcucucagcaacccu

SEQ ID NO: 377419 - RNA, 20 nt, Artificial Sequence
  Synthetic
uuaaugcucucagcaacccu

SEQ ID NO: 377420 - RNA, 21 nt, Artificial Sequence
  Synthetic
uuuaaugcucucagcaacccu

SEQ ID NO: 377421 - RNA, 22 nt, Artificial Sequence
  Synthetic
guuuaaugcucucagcaacccu

SEQ ID NO: 377422 - RNA, 23 nt, Artificial Sequence
  Synthetic
gguuuaaugcucucagcaacccu

SEQ ID NO: 377423 - RNA, 24 nt, Artificial Sequence
  Synthetic
cgguuuaaugcucucagcaacccu

SEQ ID NO: 377424 - RNA, 18 nt, Artificial Sequence
  Synthetic
guaguuuuuaguaacccu

SEQ ID NO: 377425 - RNA, 19 nt, Artificial Sequence
  Synthetic
uguaguuuuuaguaacccu

SEQ ID NO: 377426 - RNA, 20 nt, Artificial Sequence
  Synthetic
uuguaguuuuuaguaacccu

SEQ ID NO: 377427 - RNA, 21 nt, Artificial Sequence
  Synthetic
guuguaguuuuuaguaacccu

SEQ ID NO: 377428 - RNA, 22 nt, Artificial Sequence
  Synthetic
aguuguaguuuuuaguaacccu

SEQ ID NO: 377429 - RNA, 23 nt, Artificial Sequence
  Synthetic
uaguuguaguuuuuaguaacccu

SEQ ID NO: 377430 - RNA, 24 nt, Artificial Sequence
  Synthetic
auaguuguaguuuuuaguaacccu

SEQ ID NO: 377431 - RNA, 18 nt, Artificial Sequence
  Synthetic
cacacucuuauuaacccu

SEQ ID NO: 377432 - RNA, 19 nt, Artificial Sequence
  Synthetic
acacacucuuauuaacccu

SEQ ID NO: 377433 - RNA, 20 nt, Artificial Sequence
  Synthetic
cacacacucuuauuaacccu

SEQ ID NO: 377434 - RNA, 21 nt, Artificial Sequence
  Synthetic
acacacacucuuauuaacccu

SEQ ID NO: 377435 - RNA, 22 nt, Artificial Sequence
  Synthetic
cacacacacucuuauuaacccu

SEQ ID NO: 377436 - RNA, 23 nt, Artificial Sequence
  Synthetic
acacacacacucuuauuaacccu

SEQ ID NO: 377437 - RNA, 24 nt, Artificial Sequence
  Synthetic
cacacacacacucuuauuaacccu

SEQ ID NO: 377438 - RNA, 18 nt, Artificial Sequence
  Synthetic
uauaauauggaacacccu

SEQ ID NO: 377439 - RNA, 19 nt, Artificial Sequence
  Synthetic
guauaauauggaacacccu

SEQ ID NO: 377440 - RNA, 20 nt, Artificial Sequence
  Synthetic
aguauaauauggaacacccu

SEQ ID NO: 377441 - RNA, 21 nt, Artificial Sequence
  Synthetic
caguauaauauggaacacccu

SEQ ID NO: 377442 - RNA, 22 nt, Artificial Sequence
  Synthetic
acaguauaauauggaacacccu

SEQ ID NO: 377443 - RNA, 23 nt, Artificial Sequence
  Synthetic
cacaguauaauauggaacacccu

SEQ ID NO: 377444 - RNA, 24 nt, Artificial Sequence
  Synthetic
ccacaguauaauauggaacacccu

SEQ ID NO: 377445 - RNA, 18 nt, Artificial Sequence
  Synthetic
agcacuguaacacacccu

SEQ ID NO: 377446 - RNA, 19 nt, Artificial Sequence
  Synthetic
gagcacuguaacacacccu

SEQ ID NO: 377447 - RNA, 20 nt, Artificial Sequence
  Synthetic
agagcacuguaacacacccu

SEQ ID NO: 377448 - RNA, 21 nt, Artificial Sequence
  Synthetic
cagagcacuguaacacacccu

SEQ ID NO: 377449 - RNA, 22 nt, Artificial Sequence
  Synthetic
acagagcacuguaacacacccu

SEQ ID NO: 377450 - RNA, 23 nt, Artificial Sequence
  Synthetic
aacagagcacuguaacacacccu

SEQ ID NO: 377451 - RNA, 24 nt, Artificial Sequence
  Synthetic
uaacagagcacuguaacacacccu

SEQ ID NO: 377452 - RNA, 18 nt, Artificial Sequence
  Synthetic
uaacaguggucccacccu

SEQ ID NO: 377453 - RNA, 19 nt, Artificial Sequence
  Synthetic
cuaacaguggucccacccu

SEQ ID NO: 377454 - RNA, 20 nt, Artificial Sequence
  Synthetic
gcuaacaguggucccacccu

SEQ ID NO: 377455 - RNA, 21 nt, Artificial Sequence
  Synthetic
agcuaacaguggucccacccu

SEQ ID NO: 377456 - RNA, 22 nt, Artificial Sequence
  Synthetic
cagcuaacaguggucccacccu

SEQ ID NO: 377457 - RNA, 23 nt, Artificial Sequence
  Synthetic
gcagcuaacaguggucccacccu

SEQ ID NO: 377458 - RNA, 24 nt, Artificial Sequence
  Synthetic
cgcagcuaacaguggucccacccu

SEQ ID NO: 377459 - RNA, 18 nt, Artificial Sequence
  Synthetic
ucucccuccugccacccu

SEQ ID NO: 377460 - RNA, 19 nt, Artificial Sequence
  Synthetic
uucucccuccugccacccu

SEQ ID NO: 377461 - RNA, 20 nt, Artificial Sequence
  Synthetic
auucucccuccugccacccu

SEQ ID NO: 377462 - RNA, 21 nt, Artificial Sequence
  Synthetic
cauucucccuccugccacccu

SEQ ID NO: 377463 - RNA, 22 nt, Artificial Sequence
  Synthetic
ucauucucccuccugccacccu

SEQ ID NO: 377464 - RNA, 23 nt, Artificial Sequence
  Synthetic
cucauucucccuccugccacccu

SEQ ID NO: 377465 - RNA, 24 nt, Artificial Sequence
  Synthetic
acucauucucccuccugccacccu

SEQ ID NO: 377466 - RNA, 18 nt, Artificial Sequence
  Synthetic
uuuuauuuggggcacccu

SEQ ID NO: 377467 - RNA, 19 nt, Artificial Sequence
  Synthetic
uuuuuauuuggggcacccu

SEQ ID NO: 377468 - RNA, 20 nt, Artificial Sequence
  Synthetic
cuuuuuauuuggggcacccu

SEQ ID NO: 377469 - RNA, 21 nt, Artificial Sequence
  Synthetic
ccuuuuuauuuggggcacccu

SEQ ID NO: 377470 - RNA, 22 nt, Artificial Sequence
  Synthetic
cccuuuuuauuuggggcacccu

SEQ ID NO: 377471 - RNA, 23 nt, Artificial Sequence
  Synthetic
gcccuuuuuauuuggggcacccu

SEQ ID NO: 377472 - RNA, 24 nt, Artificial Sequence
  Synthetic
agcccuuuuuauuuggggcacccu

SEQ ID NO: 377473 - RNA, 18 nt, Artificial Sequence
  Synthetic
ucucucuccuaucacccu

SEQ ID NO: 377474 - RNA, 19 nt, Artificial Sequence
  Synthetic
uucucucuccuaucacccu

SEQ ID NO: 377475 - RNA, 20 nt, Artificial Sequence
  Synthetic
auucucucuccuaucacccu

SEQ ID NO: 377476 - RNA, 21 nt, Artificial Sequence
  Synthetic
cauucucucuccuaucacccu

SEQ ID NO: 377477 - RNA, 22 nt, Artificial Sequence
  Synthetic
ucauucucucuccuaucacccu

SEQ ID NO: 377478 - RNA, 23 nt, Artificial Sequence
  Synthetic
cucauucucucuccuaucacccu

SEQ ID NO: 377479 - RNA, 24 nt, Artificial Sequence
  Synthetic
acucauucucucuccuaucacccu

SEQ ID NO: 377480 - RNA, 18 nt, Artificial Sequence
  Synthetic
auuuaagcuggucacccu

SEQ ID NO: 377481 - RNA, 19 nt, Artificial Sequence
  Synthetic
aauuuaagcuggucacccu

SEQ ID NO: 377482 - RNA, 20 nt, Artificial Sequence
  Synthetic
gaauuuaagcuggucacccu

SEQ ID NO: 377483 - RNA, 21 nt, Artificial Sequence
  Synthetic
ugaauuuaagcuggucacccu

SEQ ID NO: 377484 - RNA, 22 nt, Artificial Sequence
  Synthetic
cugaauuuaagcuggucacccu

SEQ ID NO: 377485 - RNA, 23 nt, Artificial Sequence
  Synthetic
gcugaauuuaagcuggucacccu

SEQ ID NO: 377486 - RNA, 24 nt, Artificial Sequence
  Synthetic
agcugaauuuaagcuggucacccu

SEQ ID NO: 377487 - RNA, 18 nt, Artificial Sequence
  Synthetic
caauuugaaauucacccu

SEQ ID NO: 377488 - RNA, 19 nt, Artificial Sequence
  Synthetic
ccaauuugaaauucacccu

SEQ ID NO: 377489 - RNA, 20 nt, Artificial Sequence
  Synthetic
gccaauuugaaauucacccu

SEQ ID NO: 377490 - RNA, 21 nt, Artificial Sequence
  Synthetic
cgccaauuugaaauucacccu

SEQ ID NO: 377491 - RNA, 22 nt, Artificial Sequence
  Synthetic
acgccaauuugaaauucacccu

SEQ ID NO: 377492 - RNA, 23 nt, Artificial Sequence
  Synthetic
gacgccaauuugaaauucacccu

SEQ ID NO: 377493 - RNA, 24 nt, Artificial Sequence
  Synthetic
agacgccaauuugaaauucacccu

SEQ ID NO: 377494 - RNA, 18 nt, Artificial Sequence
  Synthetic
uaauuucuuuuucacccu

SEQ ID NO: 377495 - RNA, 19 nt, Artificial Sequence
  Synthetic
cuaauuucuuuuucacccu

SEQ ID NO: 377496 - RNA, 20 nt, Artificial Sequence
  Synthetic
ucuaauuucuuuuucacccu

SEQ ID NO: 377497 - RNA, 21 nt, Artificial Sequence
  Synthetic
cucuaauuucuuuuucacccu

SEQ ID NO: 377498 - RNA, 22 nt, Artificial Sequence
  Synthetic
gcucuaauuucuuuuucacccu

SEQ ID NO: 377499 - RNA, 23 nt, Artificial Sequence
  Synthetic
ggcucuaauuucuuuuucacccu

SEQ ID NO: 377500 - RNA, 24 nt, Artificial Sequence
  Synthetic
uggcucuaauuucuuuuucacccu

SEQ ID NO: 377501 - RNA, 18 nt, Artificial Sequence
  Synthetic
guucacucagaagacccu

SEQ ID NO: 377502 - RNA, 19 nt, Artificial Sequence
  Synthetic
gguucacucagaagacccu

SEQ ID NO: 377503 - RNA, 20 nt, Artificial Sequence
  Synthetic
ggguucacucagaagacccu

SEQ ID NO: 377504 - RNA, 21 nt, Artificial Sequence
  Synthetic
uggguucacucagaagacccu

SEQ ID NO: 377505 - RNA, 22 nt, Artificial Sequence
  Synthetic
uuggguucacucagaagacccu

SEQ ID NO: 377506 - RNA, 23 nt, Artificial Sequence
  Synthetic
cuuggguucacucagaagacccu

SEQ ID NO: 377507 - RNA, 24 nt, Artificial Sequence
  Synthetic
ccuuggguucacucagaagacccu

SEQ ID NO: 377508 - RNA, 18 nt, Artificial Sequence
  Synthetic
uccaugaacgcagacccu

SEQ ID NO: 377509 - RNA, 19 nt, Artificial Sequence
  Synthetic
uuccaugaacgcagacccu

SEQ ID NO: 377510 - RNA, 20 nt, Artificial Sequence
  Synthetic
guuccaugaacgcagacccu

SEQ ID NO: 377511 - RNA, 21 nt, Artificial Sequence
  Synthetic
gguuccaugaacgcagacccu

SEQ ID NO: 377512 - RNA, 22 nt, Artificial Sequence
  Synthetic
agguuccaugaacgcagacccu

SEQ ID NO: 377513 - RNA, 23 nt, Artificial Sequence
  Synthetic
cagguuccaugaacgcagacccu

SEQ ID NO: 377514 - RNA, 24 nt, Artificial Sequence
  Synthetic
ucagguuccaugaacgcagacccu

SEQ ID NO: 377515 - RNA, 18 nt, Artificial Sequence
  Synthetic
augcuuauuagagacccu

SEQ ID NO: 377516 - RNA, 19 nt, Artificial Sequence
  Synthetic
gaugcuuauuagagacccu

SEQ ID NO: 377517 - RNA, 20 nt, Artificial Sequence
  Synthetic
ggaugcuuauuagagacccu

SEQ ID NO: 377518 - RNA, 21 nt, Artificial Sequence
  Synthetic
gggaugcuuauuagagacccu

SEQ ID NO: 377519 - RNA, 22 nt, Artificial Sequence
  Synthetic
ggggaugcuuauuagagacccu

SEQ ID NO: 377520 - RNA, 23 nt, Artificial Sequence
  Synthetic
uggggaugcuuauuagagacccu

SEQ ID NO: 377521 - RNA, 24 nt, Artificial Sequence
  Synthetic
uuggggaugcuuauuagagacccu

SEQ ID NO: 377522 - RNA, 18 nt, Artificial Sequence
  Synthetic
guaaagaccaucgacccu

SEQ ID NO: 377523 - RNA, 19 nt, Artificial Sequence
  Synthetic
uguaaagaccaucgacccu

SEQ ID NO: 377524 - RNA, 20 nt, Artificial Sequence
  Synthetic
uuguaaagaccaucgacccu

SEQ ID NO: 377525 - RNA, 21 nt, Artificial Sequence
  Synthetic
auuguaaagaccaucgacccu

SEQ ID NO: 377526 - RNA, 22 nt, Artificial Sequence
  Synthetic
aauuguaaagaccaucgacccu

SEQ ID NO: 377527 - RNA, 23 nt, Artificial Sequence
  Synthetic
aaauuguaaagaccaucgacccu

SEQ ID NO: 377528 - RNA, 24 nt, Artificial Sequence
  Synthetic
caaauuguaaagaccaucgacccu

SEQ ID NO: 377529 - RNA, 18 nt, Artificial Sequence
  Synthetic
acgacccugccugacccu

SEQ ID NO: 377530 - RNA, 19 nt, Artificial Sequence
  Synthetic
uacgacccugccugacccu

SEQ ID NO: 377531 - RNA, 20 nt, Artificial Sequence
  Synthetic
auacgacccugccugacccu

SEQ ID NO: 377532 - RNA, 21 nt, Artificial Sequence
  Synthetic
aauacgacccugccugacccu

SEQ ID NO: 377533 - RNA, 22 nt, Artificial Sequence
  Synthetic
caauacgacccugccugacccu

SEQ ID NO: 377534 - RNA, 23 nt, Artificial Sequence
  Synthetic
acaauacgacccugccugacccu

SEQ ID NO: 377535 - RNA, 24 nt, Artificial Sequence
  Synthetic
aacaauacgacccugccugacccu

SEQ ID NO: 377536 - RNA, 18 nt, Artificial Sequence
  Synthetic
gaaguaaccagugacccu

SEQ ID NO: 377537 - RNA, 19 nt, Artificial Sequence
  Synthetic
ugaaguaaccagugacccu

SEQ ID NO: 377538 - RNA, 20 nt, Artificial Sequence
  Synthetic
augaaguaaccagugacccu

SEQ ID NO: 377539 - RNA, 21 nt, Artificial Sequence
  Synthetic
caugaaguaaccagugacccu

SEQ ID NO: 377540 - RNA, 22 nt, Artificial Sequence
  Synthetic
ccaugaaguaaccagugacccu

SEQ ID NO: 377541 - RNA, 23 nt, Artificial Sequence
  Synthetic
cccaugaaguaaccagugacccu

SEQ ID NO: 377542 - RNA, 24 nt, Artificial Sequence
  Synthetic
ucccaugaaguaaccagugacccu

SEQ ID NO: 377543 - RNA, 18 nt, Artificial Sequence
  Synthetic
aaccuguuguucuacccu

SEQ ID NO: 377544 - RNA, 19 nt, Artificial Sequence
  Synthetic
uaaccuguuguucuacccu

SEQ ID NO: 377545 - RNA, 20 nt, Artificial Sequence
  Synthetic
cuaaccuguuguucuacccu

SEQ ID NO: 377546 - RNA, 21 nt, Artificial Sequence
  Synthetic
ucuaaccuguuguucuacccu

SEQ ID NO: 377547 - RNA, 22 nt, Artificial Sequence
  Synthetic
cucuaaccuguuguucuacccu

SEQ ID NO: 377548 - RNA, 23 nt, Artificial Sequence
  Synthetic
ucucuaaccuguuguucuacccu

SEQ ID NO: 377549 - RNA, 24 nt, Artificial Sequence
  Synthetic
aucucuaaccuguuguucuacccu

SEQ ID NO: 377550 - RNA, 18 nt, Artificial Sequence
  Synthetic
caauauaguuucuacccu

SEQ ID NO: 377551 - RNA, 19 nt, Artificial Sequence
  Synthetic
ucaauauaguuucuacccu

SEQ ID NO: 377552 - RNA, 20 nt, Artificial Sequence
  Synthetic
uucaauauaguuucuacccu

SEQ ID NO: 377553 - RNA, 21 nt, Artificial Sequence
  Synthetic
auucaauauaguuucuacccu

SEQ ID NO: 377554 - RNA, 22 nt, Artificial Sequence
  Synthetic
gauucaauauaguuucuacccu

SEQ ID NO: 377555 - RNA, 23 nt, Artificial Sequence
  Synthetic
ugauucaauauaguuucuacccu

SEQ ID NO: 377556 - RNA, 24 nt, Artificial Sequence
  Synthetic
gugauucaauauaguuucuacccu

SEQ ID NO: 377557 - RNA, 18 nt, Artificial Sequence
  Synthetic
uuggcuacacuguacccu

SEQ ID NO: 377558 - RNA, 19 nt, Artificial Sequence
  Synthetic
auuggcuacacuguacccu

SEQ ID NO: 377559 - RNA, 20 nt, Artificial Sequence
  Synthetic
cauuggcuacacuguacccu

SEQ ID NO: 377560 - RNA, 21 nt, Artificial Sequence
  Synthetic
ucauuggcuacacuguacccu

SEQ ID NO: 377561 - RNA, 22 nt, Artificial Sequence
  Synthetic
cucauuggcuacacuguacccu

SEQ ID NO: 377562 - RNA, 23 nt, Artificial Sequence
  Synthetic
ucucauuggcuacacuguacccu

SEQ ID NO: 377563 - RNA, 24 nt, Artificial Sequence
  Synthetic
cucucauuggcuacacuguacccu

SEQ ID NO: 377564 - RNA, 18 nt, Artificial Sequence
  Synthetic
auucacuaugauuacccu

SEQ ID NO: 377565 - RNA, 19 nt, Artificial Sequence
  Synthetic
uauucacuaugauuacccu

SEQ ID NO: 377566 - RNA, 20 nt, Artificial Sequence
  Synthetic
auauucacuaugauuacccu

SEQ ID NO: 377567 - RNA, 21 nt, Artificial Sequence
  Synthetic
cauauucacuaugauuacccu

SEQ ID NO: 377568 - RNA, 22 nt, Artificial Sequence
  Synthetic
ucauauucacuaugauuacccu

SEQ ID NO: 377569 - RNA, 23 nt, Artificial Sequence
  Synthetic
cucauauucacuaugauuacccu

SEQ ID NO: 377570 - RNA, 24 nt, Artificial Sequence
  Synthetic
ccucauauucacuaugauuacccu

SEQ ID NO: 377571 - RNA, 18 nt, Artificial Sequence
  Synthetic
uaaaaaucuguuuacccu

SEQ ID NO: 377572 - RNA, 19 nt, Artificial Sequence
  Synthetic
uuaaaaaucuguuuacccu

SEQ ID NO: 377573 - RNA, 20 nt, Artificial Sequence
  Synthetic
uuuaaaaaucuguuuacccu

SEQ ID NO: 377574 - RNA, 21 nt, Artificial Sequence
  Synthetic
cuuuaaaaaucuguuuacccu

SEQ ID NO: 377575 - RNA, 22 nt, Artificial Sequence
  Synthetic
gcuuuaaaaaucuguuuacccu

SEQ ID NO: 377576 - RNA, 23 nt, Artificial Sequence
  Synthetic
cgcuuuaaaaaucuguuuacccu

SEQ ID NO: 377577 - RNA, 24 nt, Artificial Sequence
  Synthetic
acgcuuuaaaaaucuguuuacccu

SEQ ID NO: 377578 - RNA, 18 nt, Artificial Sequence
  Synthetic
gcuuuaaguguuuacccu

SEQ ID NO: 377579 - RNA, 19 nt, Artificial Sequence
  Synthetic
ugcuuuaaguguuuacccu

SEQ ID NO: 377580 - RNA, 20 nt, Artificial Sequence
  Synthetic
gugcuuuaaguguuuacccu

SEQ ID NO: 377581 - RNA, 21 nt, Artificial Sequence
  Synthetic
ugugcuuuaaguguuuacccu

SEQ ID NO: 377582 - RNA, 22 nt, Artificial Sequence
  Synthetic
cugugcuuuaaguguuuacccu

SEQ ID NO: 377583 - RNA, 23 nt, Artificial Sequence
  Synthetic
acugugcuuuaaguguuuacccu

SEQ ID NO: 377584 - RNA, 24 nt, Artificial Sequence
  Synthetic
uacugugcuuuaaguguuuacccu

SEQ ID NO: 377585 - RNA, 18 nt, Artificial Sequence
  Synthetic
gcuaccccucccaccccu

SEQ ID NO: 377586 - RNA, 19 nt, Artificial Sequence
  Synthetic
ggcuaccccucccaccccu

SEQ ID NO: 377587 - RNA, 20 nt, Artificial Sequence
  Synthetic
cggcuaccccucccaccccu

SEQ ID NO: 377588 - RNA, 21 nt, Artificial Sequence
  Synthetic
ucggcuaccccucccaccccu

SEQ ID NO: 377589 - RNA, 22 nt, Artificial Sequence
  Synthetic
aucggcuaccccucccaccccu

SEQ ID NO: 377590 - RNA, 23 nt, Artificial Sequence
  Synthetic
caucggcuaccccucccaccccu

SEQ ID NO: 377591 - RNA, 24 nt, Artificial Sequence
  Synthetic
ucaucggcuaccccucccaccccu

SEQ ID NO: 377592 - RNA, 18 nt, Artificial Sequence
  Synthetic
cuugguuauuccaccccu

SEQ ID NO: 377593 - RNA, 19 nt, Artificial Sequence
  Synthetic
ccuugguuauuccaccccu

SEQ ID NO: 377594 - RNA, 20 nt, Artificial Sequence
  Synthetic
uccuugguuauuccaccccu

SEQ ID NO: 377595 - RNA, 21 nt, Artificial Sequence
  Synthetic
guccuugguuauuccaccccu

SEQ ID NO: 377596 - RNA, 22 nt, Artificial Sequence
  Synthetic
uguccuugguuauuccaccccu

SEQ ID NO: 377597 - RNA, 23 nt, Artificial Sequence
  Synthetic
auguccuugguuauuccaccccu

SEQ ID NO: 377598 - RNA, 24 nt, Artificial Sequence
  Synthetic
aauguccuugguuauuccaccccu

SEQ ID NO: 377599 - RNA, 18 nt, Artificial Sequence
  Synthetic
uccagugcacucaccccu

SEQ ID NO: 377600 - RNA, 19 nt, Artificial Sequence
  Synthetic
auccagugcacucaccccu

SEQ ID NO: 377601 - RNA, 20 nt, Artificial Sequence
  Synthetic
gauccagugcacucaccccu

SEQ ID NO: 377602 - RNA, 21 nt, Artificial Sequence
  Synthetic
ugauccagugcacucaccccu

SEQ ID NO: 377603 - RNA, 22 nt, Artificial Sequence
  Synthetic
gugauccagugcacucaccccu

SEQ ID NO: 377604 - RNA, 23 nt, Artificial Sequence
  Synthetic
cgugauccagugcacucaccccu

SEQ ID NO: 377605 - RNA, 24 nt, Artificial Sequence
  Synthetic
gcgugauccagugcacucaccccu

SEQ ID NO: 377606 - RNA, 18 nt, Artificial Sequence
  Synthetic
gaucaaagggagaccccu

SEQ ID NO: 377607 - RNA, 19 nt, Artificial Sequence
  Synthetic
agaucaaagggagaccccu

SEQ ID NO: 377608 - RNA, 20 nt, Artificial Sequence
  Synthetic
aagaucaaagggagaccccu

SEQ ID NO: 377609 - RNA, 21 nt, Artificial Sequence
  Synthetic
aaagaucaaagggagaccccu

SEQ ID NO: 377610 - RNA, 22 nt, Artificial Sequence
  Synthetic
aaaagaucaaagggagaccccu

SEQ ID NO: 377611 - RNA, 23 nt, Artificial Sequence
  Synthetic
aaaaagaucaaagggagaccccu

SEQ ID NO: 377612 - RNA, 24 nt, Artificial Sequence
  Synthetic
caaaaagaucaaagggagaccccu

SEQ ID NO: 377613 - RNA, 18 nt, Artificial Sequence
  Synthetic
cagguguguuugaccccu

SEQ ID NO: 377614 - RNA, 19 nt, Artificial Sequence
  Synthetic
acagguguguuugaccccu

SEQ ID NO: 377615 - RNA, 20 nt, Artificial Sequence
  Synthetic
aacagguguguuugaccccu

SEQ ID NO: 377616 - RNA, 21 nt, Artificial Sequence
  Synthetic
aaacagguguguuugaccccu

SEQ ID NO: 377617 - RNA, 22 nt, Artificial Sequence
  Synthetic
caaacagguguguuugaccccu

SEQ ID NO: 377618 - RNA, 23 nt, Artificial Sequence
  Synthetic
acaaacagguguguuugaccccu

SEQ ID NO: 377619 - RNA, 24 nt, Artificial Sequence
  Synthetic
cacaaacagguguguuugaccccu

SEQ ID NO: 377620 - RNA, 18 nt, Artificial Sequence
  Synthetic
gguucucuaaguaccccu

SEQ ID NO: 377621 - RNA, 19 nt, Artificial Sequence
  Synthetic
ugguucucuaaguaccccu

SEQ ID NO: 377622 - RNA, 20 nt, Artificial Sequence
  Synthetic
gugguucucuaaguaccccu

SEQ ID NO: 377623 - RNA, 21 nt, Artificial Sequence
  Synthetic
agugguucucuaaguaccccu

SEQ ID NO: 377624 - RNA, 22 nt, Artificial Sequence
  Synthetic
aagugguucucuaaguaccccu

SEQ ID NO: 377625 - RNA, 23 nt, Artificial Sequence
  Synthetic
uaagugguucucuaaguaccccu

SEQ ID NO: 377626 - RNA, 24 nt, Artificial Sequence
  Synthetic
uuaagugguucucuaaguaccccu

SEQ ID NO: 377627 - RNA, 18 nt, Artificial Sequence
  Synthetic
uugauauauuaucccccu

SEQ ID NO: 377628 - RNA, 19 nt, Artificial Sequence
  Synthetic
cuugauauauuaucccccu

SEQ ID NO: 377629 - RNA, 20 nt, Artificial Sequence
  Synthetic
ucuugauauauuaucccccu

SEQ ID NO: 377630 - RNA, 21 nt, Artificial Sequence
  Synthetic
aucuugauauauuaucccccu

SEQ ID NO: 377631 - RNA, 22 nt, Artificial Sequence
  Synthetic
aaucuugauauauuaucccccu

SEQ ID NO: 377632 - RNA, 23 nt, Artificial Sequence
  Synthetic
aaaucuugauauauuaucccccu

SEQ ID NO: 377633 - RNA, 24 nt, Artificial Sequence
  Synthetic
gaaaucuugauauauuaucccccu

SEQ ID NO: 377634 - RNA, 18 nt, Artificial Sequence
  Synthetic
uauauuaaauuucccccu

SEQ ID NO: 377635 - RNA, 19 nt, Artificial Sequence
  Synthetic
auauauuaaauuucccccu

SEQ ID NO: 377636 - RNA, 20 nt, Artificial Sequence
  Synthetic
gauauauuaaauuucccccu

SEQ ID NO: 377637 - RNA, 21 nt, Artificial Sequence
  Synthetic
ugauauauuaaauuucccccu

SEQ ID NO: 377638 - RNA, 22 nt, Artificial Sequence
  Synthetic
uugauauauuaaauuucccccu

SEQ ID NO: 377639 - RNA, 23 nt, Artificial Sequence
  Synthetic
uuugauauauuaaauuucccccu

SEQ ID NO: 377640 - RNA, 24 nt, Artificial Sequence
  Synthetic
guuugauauauuaaauuucccccu

SEQ ID NO: 377641 - RNA, 18 nt, Artificial Sequence
  Synthetic
acacauucauuucccccu

SEQ ID NO: 377642 - RNA, 19 nt, Artificial Sequence
  Synthetic
gacacauucauuucccccu

SEQ ID NO: 377643 - RNA, 20 nt, Artificial Sequence
  Synthetic
ugacacauucauuucccccu

SEQ ID NO: 377644 - RNA, 21 nt, Artificial Sequence
  Synthetic
cugacacauucauuucccccu

SEQ ID NO: 377645 - RNA, 22 nt, Artificial Sequence
  Synthetic
ccugacacauucauuucccccu

SEQ ID NO: 377646 - RNA, 23 nt, Artificial Sequence
  Synthetic
uccugacacauucauuucccccu

SEQ ID NO: 377647 - RNA, 24 nt, Artificial Sequence
  Synthetic
uuccugacacauucauuucccccu

SEQ ID NO: 377648 - RNA, 18 nt, Artificial Sequence
  Synthetic
uucuaguucuaggccccu

SEQ ID NO: 377649 - RNA, 19 nt, Artificial Sequence
  Synthetic
uuucuaguucuaggccccu

SEQ ID NO: 377650 - RNA, 20 nt, Artificial Sequence
  Synthetic
auuucuaguucuaggccccu

SEQ ID NO: 377651 - RNA, 21 nt, Artificial Sequence
  Synthetic
uauuucuaguucuaggccccu

SEQ ID NO: 377652 - RNA, 22 nt, Artificial Sequence
  Synthetic
guauuucuaguucuaggccccu

SEQ ID NO: 377653 - RNA, 23 nt, Artificial Sequence
  Synthetic
gguauuucuaguucuaggccccu

SEQ ID NO: 377654 - RNA, 24 nt, Artificial Sequence
  Synthetic
ugguauuucuaguucuaggccccu

SEQ ID NO: 377655 - RNA, 18 nt, Artificial Sequence
  Synthetic
gaagcuaagcaugccccu

SEQ ID NO: 377656 - RNA, 19 nt, Artificial Sequence
  Synthetic
agaagcuaagcaugccccu

SEQ ID NO: 377657 - RNA, 20 nt, Artificial Sequence
  Synthetic
uagaagcuaagcaugccccu

SEQ ID NO: 377658 - RNA, 21 nt, Artificial Sequence
  Synthetic
auagaagcuaagcaugccccu

SEQ ID NO: 377659 - RNA, 22 nt, Artificial Sequence
  Synthetic
gauagaagcuaagcaugccccu

SEQ ID NO: 377660 - RNA, 23 nt, Artificial Sequence
  Synthetic
agauagaagcuaagcaugccccu

SEQ ID NO: 377661 - RNA, 24 nt, Artificial Sequence
  Synthetic
uagauagaagcuaagcaugccccu

SEQ ID NO: 377662 - RNA, 18 nt, Artificial Sequence
  Synthetic
caucuggcaggugccccu

SEQ ID NO: 377663 - RNA, 19 nt, Artificial Sequence
  Synthetic
gcaucuggcaggugccccu

SEQ ID NO: 377664 - RNA, 20 nt, Artificial Sequence
  Synthetic
ggcaucuggcaggugccccu

SEQ ID NO: 377665 - RNA, 21 nt, Artificial Sequence
  Synthetic
uggcaucuggcaggugccccu

SEQ ID NO: 377666 - RNA, 22 nt, Artificial Sequence
  Synthetic
cuggcaucuggcaggugccccu

SEQ ID NO: 377667 - RNA, 23 nt, Artificial Sequence
  Synthetic
gcuggcaucuggcaggugccccu

SEQ ID NO: 377668 - RNA, 24 nt, Artificial Sequence
  Synthetic
ggcuggcaucuggcaggugccccu

SEQ ID NO: 377669 - RNA, 18 nt, Artificial Sequence
  Synthetic
uuuccuuugcuugccccu

SEQ ID NO: 377670 - RNA, 19 nt, Artificial Sequence
  Synthetic
auuuccuuugcuugccccu

SEQ ID NO: 377671 - RNA, 20 nt, Artificial Sequence
  Synthetic
cauuuccuuugcuugccccu

SEQ ID NO: 377672 - RNA, 21 nt, Artificial Sequence
  Synthetic
ccauuuccuuugcuugccccu

SEQ ID NO: 377673 - RNA, 22 nt, Artificial Sequence
  Synthetic
uccauuuccuuugcuugccccu

SEQ ID NO: 377674 - RNA, 23 nt, Artificial Sequence
  Synthetic
uuccauuuccuuugcuugccccu

SEQ ID NO: 377675 - RNA, 24 nt, Artificial Sequence
  Synthetic
uuuccauuuccuuugcuugccccu

SEQ ID NO: 377676 - RNA, 18 nt, Artificial Sequence
  Synthetic
ccacccacaccauccccu

SEQ ID NO: 377677 - RNA, 19 nt, Artificial Sequence
  Synthetic
gccacccacaccauccccu

SEQ ID NO: 377678 - RNA, 20 nt, Artificial Sequence
  Synthetic
ggccacccacaccauccccu

SEQ ID NO: 377679 - RNA, 21 nt, Artificial Sequence
  Synthetic
aggccacccacaccauccccu

SEQ ID NO: 377680 - RNA, 22 nt, Artificial Sequence
  Synthetic
uaggccacccacaccauccccu

SEQ ID NO: 377681 - RNA, 23 nt, Artificial Sequence
  Synthetic
cuaggccacccacaccauccccu

SEQ ID NO: 377682 - RNA, 24 nt, Artificial Sequence
  Synthetic
ucuaggccacccacaccauccccu

SEQ ID NO: 377683 - RNA, 18 nt, Artificial Sequence
  Synthetic
ccuaaccccccauccccu

SEQ ID NO: 377684 - RNA, 19 nt, Artificial Sequence
  Synthetic
cccuaaccccccauccccu

SEQ ID NO: 377685 - RNA, 20 nt, Artificial Sequence
  Synthetic
ccccuaaccccccauccccu

SEQ ID NO: 377686 - RNA, 21 nt, Artificial Sequence
  Synthetic
uccccuaaccccccauccccu

SEQ ID NO: 377687 - RNA, 22 nt, Artificial Sequence
  Synthetic
cuccccuaaccccccauccccu

SEQ ID NO: 377688 - RNA, 23 nt, Artificial Sequence
  Synthetic
ccuccccuaaccccccauccccu

SEQ ID NO: 377689 - RNA, 24 nt, Artificial Sequence
  Synthetic
cccuccccuaaccccccauccccu

SEQ ID NO: 377690 - RNA, 18 nt, Artificial Sequence
  Synthetic
ccaaaaaagagcuccccu

SEQ ID NO: 377691 - RNA, 19 nt, Artificial Sequence
  Synthetic
uccaaaaaagagcuccccu

SEQ ID NO: 377692 - RNA, 20 nt, Artificial Sequence
  Synthetic
auccaaaaaagagcuccccu

SEQ ID NO: 377693 - RNA, 21 nt, Artificial Sequence
  Synthetic
uauccaaaaaagagcuccccu

SEQ ID NO: 377694 - RNA, 22 nt, Artificial Sequence
  Synthetic
guauccaaaaaagagcuccccu

SEQ ID NO: 377695 - RNA, 23 nt, Artificial Sequence
  Synthetic
uguauccaaaaaagagcuccccu

SEQ ID NO: 377696 - RNA, 24 nt, Artificial Sequence
  Synthetic
auguauccaaaaaagagcuccccu

SEQ ID NO: 377697 - RNA, 18 nt, Artificial Sequence
  Synthetic
aucaagguaugcuccccu

SEQ ID NO: 377698 - RNA, 19 nt, Artificial Sequence
  Synthetic
uaucaagguaugcuccccu

SEQ ID NO: 377699 - RNA, 20 nt, Artificial Sequence
  Synthetic
uuaucaagguaugcuccccu

SEQ ID NO: 377700 - RNA, 21 nt, Artificial Sequence
  Synthetic
auuaucaagguaugcuccccu

SEQ ID NO: 377701 - RNA, 22 nt, Artificial Sequence
  Synthetic
uauuaucaagguaugcuccccu

SEQ ID NO: 377702 - RNA, 23 nt, Artificial Sequence
  Synthetic
auauuaucaagguaugcuccccu

SEQ ID NO: 377703 - RNA, 24 nt, Artificial Sequence
  Synthetic
aauauuaucaagguaugcuccccu

SEQ ID NO: 377704 - RNA, 18 nt, Artificial Sequence
  Synthetic
uagaaucagaaguccccu

SEQ ID NO: 377705 - RNA, 19 nt, Artificial Sequence
  Synthetic
auagaaucagaaguccccu

SEQ ID NO: 377706 - RNA, 20 nt, Artificial Sequence
  Synthetic
gauagaaucagaaguccccu

SEQ ID NO: 377707 - RNA, 21 nt, Artificial Sequence
  Synthetic
agauagaaucagaaguccccu

SEQ ID NO: 377708 - RNA, 22 nt, Artificial Sequence
  Synthetic
cagauagaaucagaaguccccu

SEQ ID NO: 377709 - RNA, 23 nt, Artificial Sequence
  Synthetic
acagauagaaucagaaguccccu

SEQ ID NO: 377710 - RNA, 24 nt, Artificial Sequence
  Synthetic
cacagauagaaucagaaguccccu

SEQ ID NO: 377711 - RNA, 18 nt, Artificial Sequence
  Synthetic
aagaagguugaguccccu

SEQ ID NO: 377712 - RNA, 19 nt, Artificial Sequence
  Synthetic
aaagaagguugaguccccu

SEQ ID NO: 377713 - RNA, 20 nt, Artificial Sequence
  Synthetic
uaaagaagguugaguccccu

SEQ ID NO: 377714 - RNA, 21 nt, Artificial Sequence
  Synthetic
guaaagaagguugaguccccu

SEQ ID NO: 377715 - RNA, 22 nt, Artificial Sequence
  Synthetic
uguaaagaagguugaguccccu

SEQ ID NO: 377716 - RNA, 23 nt, Artificial Sequence
  Synthetic
uuguaaagaagguugaguccccu

SEQ ID NO: 377717 - RNA, 24 nt, Artificial Sequence
  Synthetic
uuuguaaagaagguugaguccccu

SEQ ID NO: 377718 - RNA, 18 nt, Artificial Sequence
  Synthetic
uaucucugauauuccccu

SEQ ID NO: 377719 - RNA, 19 nt, Artificial Sequence
  Synthetic
uuaucucugauauuccccu

SEQ ID NO: 377720 - RNA, 20 nt, Artificial Sequence
  Synthetic
uuuaucucugauauuccccu

SEQ ID NO: 377721 - RNA, 21 nt, Artificial Sequence
  Synthetic
guuuaucucugauauuccccu

SEQ ID NO: 377722 - RNA, 22 nt, Artificial Sequence
  Synthetic
uguuuaucucugauauuccccu

SEQ ID NO: 377723 - RNA, 23 nt, Artificial Sequence
  Synthetic
guguuuaucucugauauuccccu

SEQ ID NO: 377724 - RNA, 24 nt, Artificial Sequence
  Synthetic
uguguuuaucucugauauuccccu

SEQ ID NO: 377725 - RNA, 18 nt, Artificial Sequence
  Synthetic
ccuaaucugccuuccccu

SEQ ID NO: 377726 - RNA, 19 nt, Artificial Sequence
  Synthetic
uccuaaucugccuuccccu

SEQ ID NO: 377727 - RNA, 20 nt, Artificial Sequence
  Synthetic
auccuaaucugccuuccccu

SEQ ID NO: 377728 - RNA, 21 nt, Artificial Sequence
  Synthetic
uauccuaaucugccuuccccu

SEQ ID NO: 377729 - RNA, 22 nt, Artificial Sequence
  Synthetic
cuauccuaaucugccuuccccu

SEQ ID NO: 377730 - RNA, 23 nt, Artificial Sequence
  Synthetic
ucuauccuaaucugccuuccccu

SEQ ID NO: 377731 - RNA, 24 nt, Artificial Sequence
  Synthetic
uucuauccuaaucugccuuccccu

SEQ ID NO: 377732 - RNA, 18 nt, Artificial Sequence
  Synthetic
aguaaaugagaaagcccu

SEQ ID NO: 377733 - RNA, 19 nt, Artificial Sequence
  Synthetic
gaguaaaugagaaagcccu

SEQ ID NO: 377734 - RNA, 20 nt, Artificial Sequence
  Synthetic
ugaguaaaugagaaagcccu

SEQ ID NO: 377735 - RNA, 21 nt, Artificial Sequence
  Synthetic
uugaguaaaugagaaagcccu

SEQ ID NO: 377736 - RNA, 22 nt, Artificial Sequence
  Synthetic
auugaguaaaugagaaagcccu

SEQ ID NO: 377737 - RNA, 23 nt, Artificial Sequence
  Synthetic
gauugaguaaaugagaaagcccu

SEQ ID NO: 377738 - RNA, 24 nt, Artificial Sequence
  Synthetic
agauugaguaaaugagaaagcccu

SEQ ID NO: 377739 - RNA, 18 nt, Artificial Sequence
  Synthetic
ccacagggcagaagcccu

SEQ ID NO: 377740 - RNA, 19 nt, Artificial Sequence
  Synthetic
uccacagggcagaagcccu

SEQ ID NO: 377741 - RNA, 20 nt, Artificial Sequence
  Synthetic
uuccacagggcagaagcccu

SEQ ID NO: 377742 - RNA, 21 nt, Artificial Sequence
  Synthetic
uuuccacagggcagaagcccu

SEQ ID NO: 377743 - RNA, 22 nt, Artificial Sequence
  Synthetic
guuuccacagggcagaagcccu

SEQ ID NO: 377744 - RNA, 23 nt, Artificial Sequence
  Synthetic
gguuuccacagggcagaagcccu

SEQ ID NO: 377745 - RNA, 24 nt, Artificial Sequence
  Synthetic
ugguuuccacagggcagaagcccu

SEQ ID NO: 377746 - RNA, 18 nt, Artificial Sequence
  Synthetic
agggaaauuguaagcccu

SEQ ID NO: 377747 - RNA, 19 nt, Artificial Sequence
  Synthetic
cagggaaauuguaagcccu

SEQ ID NO: 377748 - RNA, 20 nt, Artificial Sequence
  Synthetic
acagggaaauuguaagcccu

SEQ ID NO: 377749 - RNA, 21 nt, Artificial Sequence
  Synthetic
uacagggaaauuguaagcccu

SEQ ID NO: 377750 - RNA, 22 nt, Artificial Sequence
  Synthetic
uuacagggaaauuguaagcccu

SEQ ID NO: 377751 - RNA, 23 nt, Artificial Sequence
  Synthetic
auuacagggaaauuguaagcccu

SEQ ID NO: 377752 - RNA, 24 nt, Artificial Sequence
  Synthetic
gauuacagggaaauuguaagcccu

SEQ ID NO: 377753 - RNA, 18 nt, Artificial Sequence
  Synthetic
gauauucaguuaagcccu

SEQ ID NO: 377754 - RNA, 19 nt, Artificial Sequence
  Synthetic
agauauucaguuaagcccu

SEQ ID NO: 377755 - RNA, 20 nt, Artificial Sequence
  Synthetic
uagauauucaguuaagcccu

SEQ ID NO: 377756 - RNA, 21 nt, Artificial Sequence
  Synthetic
auagauauucaguuaagcccu

SEQ ID NO: 377757 - RNA, 22 nt, Artificial Sequence
  Synthetic
gauagauauucaguuaagcccu

SEQ ID NO: 377758 - RNA, 23 nt, Artificial Sequence
  Synthetic
cgauagauauucaguuaagcccu

SEQ ID NO: 377759 - RNA, 24 nt, Artificial Sequence
  Synthetic
ccgauagauauucaguuaagcccu

SEQ ID NO: 377760 - RNA, 18 nt, Artificial Sequence
  Synthetic
cucagcaauuuaagcccu

SEQ ID NO: 377761 - RNA, 19 nt, Artificial Sequence
  Synthetic
acucagcaauuuaagcccu

SEQ ID NO: 377762 - RNA, 20 nt, Artificial Sequence
  Synthetic
cacucagcaauuuaagcccu

SEQ ID NO: 377763 - RNA, 21 nt, Artificial Sequence
  Synthetic
ccacucagcaauuuaagcccu

SEQ ID NO: 377764 - RNA, 22 nt, Artificial Sequence
  Synthetic
uccacucagcaauuuaagcccu

SEQ ID NO: 377765 - RNA, 23 nt, Artificial Sequence
  Synthetic
uuccacucagcaauuuaagcccu

SEQ ID NO: 377766 - RNA, 24 nt, Artificial Sequence
  Synthetic
uuuccacucagcaauuuaagcccu

SEQ ID NO: 377767 - RNA, 18 nt, Artificial Sequence
  Synthetic
uaaguacuagacagcccu

SEQ ID NO: 377768 - RNA, 19 nt, Artificial Sequence
  Synthetic
uuaaguacuagacagcccu

SEQ ID NO: 377769 - RNA, 20 nt, Artificial Sequence
  Synthetic
auuaaguacuagacagcccu

SEQ ID NO: 377770 - RNA, 21 nt, Artificial Sequence
  Synthetic
cauuaaguacuagacagcccu

SEQ ID NO: 377771 - RNA, 22 nt, Artificial Sequence
  Synthetic
acauuaaguacuagacagcccu

SEQ ID NO: 377772 - RNA, 23 nt, Artificial Sequence
  Synthetic
cacauuaaguacuagacagcccu

SEQ ID NO: 377773 - RNA, 24 nt, Artificial Sequence
  Synthetic
ccacauuaaguacuagacagcccu

SEQ ID NO: 377774 - RNA, 18 nt, Artificial Sequence
  Synthetic
agauauggucccagcccu

SEQ ID NO: 377775 - RNA, 19 nt, Artificial Sequence
  Synthetic
cagauauggucccagcccu

SEQ ID NO: 377776 - RNA, 20 nt, Artificial Sequence
  Synthetic
gcagauauggucccagcccu

SEQ ID NO: 377777 - RNA, 21 nt, Artificial Sequence
  Synthetic
ggcagauauggucccagcccu

SEQ ID NO: 377778 - RNA, 22 nt, Artificial Sequence
  Synthetic
aggcagauauggucccagcccu

SEQ ID NO: 377779 - RNA, 23 nt, Artificial Sequence
  Synthetic
aaggcagauauggucccagcccu

SEQ ID NO: 377780 - RNA, 24 nt, Artificial Sequence
  Synthetic
caaggcagauauggucccagcccu

SEQ ID NO: 377781 - RNA, 18 nt, Artificial Sequence
  Synthetic
cugaagaaagccagcccu

SEQ ID NO: 377782 - RNA, 19 nt, Artificial Sequence
  Synthetic
ucugaagaaagccagcccu

SEQ ID NO: 377783 - RNA, 20 nt, Artificial Sequence
  Synthetic
uucugaagaaagccagcccu

SEQ ID NO: 377784 - RNA, 21 nt, Artificial Sequence
  Synthetic
guucugaagaaagccagcccu

SEQ ID NO: 377785 - RNA, 22 nt, Artificial Sequence
  Synthetic
uguucugaagaaagccagcccu

SEQ ID NO: 377786 - RNA, 23 nt, Artificial Sequence
  Synthetic
auguucugaagaaagccagcccu

SEQ ID NO: 377787 - RNA, 24 nt, Artificial Sequence
  Synthetic
gauguucugaagaaagccagcccu

SEQ ID NO: 377788 - RNA, 18 nt, Artificial Sequence
  Synthetic
caugucaugagcagcccu

SEQ ID NO: 377789 - RNA, 19 nt, Artificial Sequence
  Synthetic
acaugucaugagcagcccu

SEQ ID NO: 377790 - RNA, 20 nt, Artificial Sequence
  Synthetic
cacaugucaugagcagcccu

SEQ ID NO: 377791 - RNA, 21 nt, Artificial Sequence
  Synthetic
acacaugucaugagcagcccu

SEQ ID NO: 377792 - RNA, 22 nt, Artificial Sequence
  Synthetic
aacacaugucaugagcagcccu

SEQ ID NO: 377793 - RNA, 23 nt, Artificial Sequence
  Synthetic
gaacacaugucaugagcagcccu

SEQ ID NO: 377794 - RNA, 24 nt, Artificial Sequence
  Synthetic
ggaacacaugucaugagcagcccu

SEQ ID NO: 377795 - RNA, 18 nt, Artificial Sequence
  Synthetic
uggucacccaagagcccu

SEQ ID NO: 377796 - RNA, 19 nt, Artificial Sequence
  Synthetic
cuggucacccaagagcccu

SEQ ID NO: 377797 - RNA, 20 nt, Artificial Sequence
  Synthetic
ccuggucacccaagagcccu

SEQ ID NO: 377798 - RNA, 21 nt, Artificial Sequence
  Synthetic
cccuggucacccaagagcccu

SEQ ID NO: 377799 - RNA, 22 nt, Artificial Sequence
  Synthetic
ucccuggucacccaagagcccu

SEQ ID NO: 377800 - RNA, 23 nt, Artificial Sequence
  Synthetic
gucccuggucacccaagagcccu

SEQ ID NO: 377801 - RNA, 24 nt, Artificial Sequence
  Synthetic
ugucccuggucacccaagagcccu

SEQ ID NO: 377802 - RNA, 18 nt, Artificial Sequence
  Synthetic
ggaacagaacagagcccu

SEQ ID NO: 377803 - RNA, 19 nt, Artificial Sequence
  Synthetic
uggaacagaacagagcccu

SEQ ID NO: 377804 - RNA, 20 nt, Artificial Sequence
  Synthetic
auggaacagaacagagcccu

SEQ ID NO: 377805 - RNA, 21 nt, Artificial Sequence
  Synthetic
aauggaacagaacagagcccu

SEQ ID NO: 377806 - RNA, 22 nt, Artificial Sequence
  Synthetic
caauggaacagaacagagcccu

SEQ ID NO: 377807 - RNA, 23 nt, Artificial Sequence
  Synthetic
ucaauggaacagaacagagcccu

SEQ ID NO: 377808 - RNA, 24 nt, Artificial Sequence
  Synthetic
aucaauggaacagaacagagcccu

SEQ ID NO: 377809 - RNA, 20 nt, Artificial Sequence
  Synthetic
guggaacagaacagagcccu

SEQ ID NO: 377810 - RNA, 21 nt, Artificial Sequence
  Synthetic
aguggaacagaacagagcccu

SEQ ID NO: 377811 - RNA, 22 nt, Artificial Sequence
  Synthetic
caguggaacagaacagagcccu

SEQ ID NO: 377812 - RNA, 23 nt, Artificial Sequence
  Synthetic
ucaguggaacagaacagagcccu

SEQ ID NO: 377813 - RNA, 24 nt, Artificial Sequence
  Synthetic
aucaguggaacagaacagagcccu

SEQ ID NO: 377814 - RNA, 18 nt, Artificial Sequence
  Synthetic
uuuuauuuaaggagcccu

SEQ ID NO: 377815 - RNA, 19 nt, Artificial Sequence
  Synthetic
guuuuauuuaaggagcccu

SEQ ID NO: 377816 - RNA, 20 nt, Artificial Sequence
  Synthetic
uguuuuauuuaaggagcccu

SEQ ID NO: 377817 - RNA, 21 nt, Artificial Sequence
  Synthetic
uuguuuuauuuaaggagcccu

SEQ ID NO: 377818 - RNA, 22 nt, Artificial Sequence
  Synthetic
uuuguuuuauuuaaggagcccu

SEQ ID NO: 377819 - RNA, 23 nt, Artificial Sequence
  Synthetic
uuuuguuuuauuuaaggagcccu

SEQ ID NO: 377820 - RNA, 24 nt, Artificial Sequence
  Synthetic
guuuuguuuuauuuaaggagcccu

SEQ ID NO: 377821 - RNA, 18 nt, Artificial Sequence
  Synthetic
aguuuuaauuggagcccu

SEQ ID NO: 377822 - RNA, 19 nt, Artificial Sequence
  Synthetic
aaguuuuaauuggagcccu

SEQ ID NO: 377823 - RNA, 20 nt, Artificial Sequence
  Synthetic
gaaguuuuaauuggagcccu

SEQ ID NO: 377824 - RNA, 21 nt, Artificial Sequence
  Synthetic
ggaaguuuuaauuggagcccu

SEQ ID NO: 377825 - RNA, 22 nt, Artificial Sequence
  Synthetic
gggaaguuuuaauuggagcccu

SEQ ID NO: 377826 - RNA, 23 nt, Artificial Sequence
  Synthetic
ugggaaguuuuaauuggagcccu

SEQ ID NO: 377827 - RNA, 24 nt, Artificial Sequence
  Synthetic
uugggaaguuuuaauuggagcccu

SEQ ID NO: 377828 - RNA, 18 nt, Artificial Sequence
  Synthetic
auaaucagcuugagcccu

SEQ ID NO: 377829 - RNA, 19 nt, Artificial Sequence
  Synthetic
aauaaucagcuugagcccu

SEQ ID NO: 377830 - RNA, 20 nt, Artificial Sequence
  Synthetic
aaauaaucagcuugagcccu

SEQ ID NO: 377831 - RNA, 21 nt, Artificial Sequence
  Synthetic
aaaauaaucagcuugagcccu

SEQ ID NO: 377832 - RNA, 22 nt, Artificial Sequence
  Synthetic
gaaaauaaucagcuugagcccu

SEQ ID NO: 377833 - RNA, 23 nt, Artificial Sequence
  Synthetic
agaaaauaaucagcuugagcccu

SEQ ID NO: 377834 - RNA, 24 nt, Artificial Sequence
  Synthetic
aagaaaauaaucagcuugagcccu

SEQ ID NO: 377835 - RNA, 18 nt, Artificial Sequence
  Synthetic
uaggaauuagcuagcccu

SEQ ID NO: 377836 - RNA, 19 nt, Artificial Sequence
  Synthetic
uuaggaauuagcuagcccu

SEQ ID NO: 377837 - RNA, 20 nt, Artificial Sequence
  Synthetic
uuuaggaauuagcuagcccu

SEQ ID NO: 377838 - RNA, 21 nt, Artificial Sequence
  Synthetic
cuuuaggaauuagcuagcccu

SEQ ID NO: 377839 - RNA, 22 nt, Artificial Sequence
  Synthetic
ucuuuaggaauuagcuagcccu

SEQ ID NO: 377840 - RNA, 23 nt, Artificial Sequence
  Synthetic
aucuuuaggaauuagcuagcccu

SEQ ID NO: 377841 - RNA, 24 nt, Artificial Sequence
  Synthetic
uaucuuuaggaauuagcuagcccu

SEQ ID NO: 377842 - RNA, 18 nt, Artificial Sequence
  Synthetic
caaaauuuauuuagcccu

SEQ ID NO: 377843 - RNA, 19 nt, Artificial Sequence
  Synthetic
acaaaauuuauuuagcccu

SEQ ID NO: 377844 - RNA, 20 nt, Artificial Sequence
  Synthetic
gacaaaauuuauuuagcccu

SEQ ID NO: 377845 - RNA, 21 nt, Artificial Sequence
  Synthetic
agacaaaauuuauuuagcccu

SEQ ID NO: 377846 - RNA, 22 nt, Artificial Sequence
  Synthetic
gagacaaaauuuauuuagcccu

SEQ ID NO: 377847 - RNA, 23 nt, Artificial Sequence
  Synthetic
agagacaaaauuuauuuagcccu

SEQ ID NO: 377848 - RNA, 24 nt, Artificial Sequence
  Synthetic
uagagacaaaauuuauuuagcccu

SEQ ID NO: 377849 - RNA, 18 nt, Artificial Sequence
  Synthetic
ucuuugcuucagggcccu

SEQ ID NO: 377850 - RNA, 19 nt, Artificial Sequence
  Synthetic
uucuuugcuucagggcccu

SEQ ID NO: 377851 - RNA, 20 nt, Artificial Sequence
  Synthetic
cuucuuugcuucagggcccu

SEQ ID NO: 377852 - RNA, 21 nt, Artificial Sequence
  Synthetic
acuucuuugcuucagggcccu

SEQ ID NO: 377853 - RNA, 22 nt, Artificial Sequence
  Synthetic
uacuucuuugcuucagggcccu

SEQ ID NO: 377854 - RNA, 23 nt, Artificial Sequence
  Synthetic
cuacuucuuugcuucagggcccu

SEQ ID NO: 377855 - RNA, 24 nt, Artificial Sequence
  Synthetic
ucuacuucuuugcuucagggcccu

SEQ ID NO: 377856 - RNA, 18 nt, Artificial Sequence
  Synthetic
guaauugagcuuggcccu

SEQ ID NO: 377857 - RNA, 19 nt, Artificial Sequence
  Synthetic
aguaauugagcuuggcccu

SEQ ID NO: 377858 - RNA, 20 nt, Artificial Sequence
  Synthetic
uaguaauugagcuuggcccu

SEQ ID NO: 377859 - RNA, 21 nt, Artificial Sequence
  Synthetic
auaguaauugagcuuggcccu

SEQ ID NO: 377860 - RNA, 22 nt, Artificial Sequence
  Synthetic
gauaguaauugagcuuggcccu

SEQ ID NO: 377861 - RNA, 23 nt, Artificial Sequence
  Synthetic
ugauaguaauugagcuuggcccu

SEQ ID NO: 377862 - RNA, 24 nt, Artificial Sequence
  Synthetic
uugauaguaauugagcuuggcccu

SEQ ID NO: 377863 - RNA, 18 nt, Artificial Sequence
  Synthetic
aguugcuccacaugcccu

SEQ ID NO: 377864 - RNA, 19 nt, Artificial Sequence
  Synthetic
caguugcuccacaugcccu

SEQ ID NO: 377865 - RNA, 20 nt, Artificial Sequence
  Synthetic
ucaguugcuccacaugcccu

SEQ ID NO: 377866 - RNA, 21 nt, Artificial Sequence
  Synthetic
cucaguugcuccacaugcccu

SEQ ID NO: 377867 - RNA, 22 nt, Artificial Sequence
  Synthetic
ucucaguugcuccacaugcccu

SEQ ID NO: 377868 - RNA, 23 nt, Artificial Sequence
  Synthetic
uucucaguugcuccacaugcccu

SEQ ID NO: 377869 - RNA, 24 nt, Artificial Sequence
  Synthetic
cuucucaguugcuccacaugcccu

SEQ ID NO: 377870 - RNA, 18 nt, Artificial Sequence
  Synthetic
cucauagacagaugcccu

SEQ ID NO: 377871 - RNA, 19 nt, Artificial Sequence
  Synthetic
acucauagacagaugcccu

SEQ ID NO: 377872 - RNA, 20 nt, Artificial Sequence
  Synthetic
uacucauagacagaugcccu

SEQ ID NO: 377873 - RNA, 21 nt, Artificial Sequence
  Synthetic
cuacucauagacagaugcccu

SEQ ID NO: 377874 - RNA, 22 nt, Artificial Sequence
  Synthetic
ccuacucauagacagaugcccu

SEQ ID NO: 377875 - RNA, 23 nt, Artificial Sequence
  Synthetic
uccuacucauagacagaugcccu

SEQ ID NO: 377876 - RNA, 24 nt, Artificial Sequence
  Synthetic
auccuacucauagacagaugcccu

SEQ ID NO: 377877 - RNA, 18 nt, Artificial Sequence
  Synthetic
aaguaaagaugaugcccu

SEQ ID NO: 377878 - RNA, 19 nt, Artificial Sequence
  Synthetic
uaaguaaagaugaugcccu

SEQ ID NO: 377879 - RNA, 20 nt, Artificial Sequence
  Synthetic
guaaguaaagaugaugcccu

SEQ ID NO: 377880 - RNA, 21 nt, Artificial Sequence
  Synthetic
uguaaguaaagaugaugcccu

SEQ ID NO: 377881 - RNA, 22 nt, Artificial Sequence
  Synthetic
auguaaguaaagaugaugcccu

SEQ ID NO: 377882 - RNA, 23 nt, Artificial Sequence
  Synthetic
gauguaaguaaagaugaugcccu

SEQ ID NO: 377883 - RNA, 24 nt, Artificial Sequence
  Synthetic
ggauguaaguaaagaugaugcccu

SEQ ID NO: 377884 - RNA, 18 nt, Artificial Sequence
  Synthetic
gugcaucucaugugcccu

SEQ ID NO: 377885 - RNA, 19 nt, Artificial Sequence
  Synthetic
agugcaucucaugugcccu

SEQ ID NO: 377886 - RNA, 20 nt, Artificial Sequence
  Synthetic
cagugcaucucaugugcccu

SEQ ID NO: 377887 - RNA, 21 nt, Artificial Sequence
  Synthetic
acagugcaucucaugugcccu

SEQ ID NO: 377888 - RNA, 22 nt, Artificial Sequence
  Synthetic
gacagugcaucucaugugcccu

SEQ ID NO: 377889 - RNA, 23 nt, Artificial Sequence
  Synthetic
ggacagugcaucucaugugcccu

SEQ ID NO: 377890 - RNA, 24 nt, Artificial Sequence
  Synthetic
gggacagugcaucucaugugcccu

SEQ ID NO: 377891 - RNA, 18 nt, Artificial Sequence
  Synthetic
cgugagggacugugcccu

SEQ ID NO: 377892 - RNA, 19 nt, Artificial Sequence
  Synthetic
ccgugagggacugugcccu

SEQ ID NO: 377893 - RNA, 20 nt, Artificial Sequence
  Synthetic
gccgugagggacugugcccu

SEQ ID NO: 377894 - RNA, 21 nt, Artificial Sequence
  Synthetic
agccgugagggacugugcccu

SEQ ID NO: 377895 - RNA, 22 nt, Artificial Sequence
  Synthetic
aagccgugagggacugugcccu

SEQ ID NO: 377896 - RNA, 23 nt, Artificial Sequence
  Synthetic
gaagccgugagggacugugcccu

SEQ ID NO: 377897 - RNA, 24 nt, Artificial Sequence
  Synthetic
agaagccgugagggacugugcccu

SEQ ID NO: 377898 - RNA, 18 nt, Artificial Sequence
  Synthetic
uguuuccaauguugcccu

SEQ ID NO: 377899 - RNA, 19 nt, Artificial Sequence
  Synthetic
cuguuuccaauguugcccu

SEQ ID NO: 377900 - RNA, 20 nt, Artificial Sequence
  Synthetic
ucuguuuccaauguugcccu

SEQ ID NO: 377901 - RNA, 21 nt, Artificial Sequence
  Synthetic
cucuguuuccaauguugcccu

SEQ ID NO: 377902 - RNA, 22 nt, Artificial Sequence
  Synthetic
acucuguuuccaauguugcccu

SEQ ID NO: 377903 - RNA, 23 nt, Artificial Sequence
  Synthetic
gacucuguuuccaauguugcccu

SEQ ID NO: 377904 - RNA, 24 nt, Artificial Sequence
  Synthetic
ugacucuguuuccaauguugcccu

SEQ ID NO: 377905 - RNA, 18 nt, Artificial Sequence
  Synthetic
aaaugccaccuuugcccu

SEQ ID NO: 377906 - RNA, 19 nt, Artificial Sequence
  Synthetic
caaaugccaccuuugcccu

SEQ ID NO: 377907 - RNA, 20 nt, Artificial Sequence
  Synthetic
acaaaugccaccuuugcccu

SEQ ID NO: 377908 - RNA, 21 nt, Artificial Sequence
  Synthetic
gacaaaugccaccuuugcccu

SEQ ID NO: 377909 - RNA, 22 nt, Artificial Sequence
  Synthetic
ugacaaaugccaccuuugcccu

SEQ ID NO: 377910 - RNA, 23 nt, Artificial Sequence
  Synthetic
cugacaaaugccaccuuugcccu

SEQ ID NO: 377911 - RNA, 24 nt, Artificial Sequence
  Synthetic
acugacaaaugccaccuuugcccu

SEQ ID NO: 377912 - RNA, 18 nt, Artificial Sequence
  Synthetic
ucccacgccuaaaucccu

SEQ ID NO: 377913 - RNA, 19 nt, Artificial Sequence
  Synthetic
cucccacgccuaaaucccu

SEQ ID NO: 377914 - RNA, 20 nt, Artificial Sequence
  Synthetic
acucccacgccuaaaucccu

SEQ ID NO: 377915 - RNA, 21 nt, Artificial Sequence
  Synthetic
gacucccacgccuaaaucccu

SEQ ID NO: 377916 - RNA, 22 nt, Artificial Sequence
  Synthetic
ugacucccacgccuaaaucccu

SEQ ID NO: 377917 - RNA, 23 nt, Artificial Sequence
  Synthetic
uugacucccacgccuaaaucccu

SEQ ID NO: 377918 - RNA, 24 nt, Artificial Sequence
  Synthetic
auugacucccacgccuaaaucccu

SEQ ID NO: 377919 - RNA, 18 nt, Artificial Sequence
  Synthetic
auccuccccuacaucccu

SEQ ID NO: 377920 - RNA, 19 nt, Artificial Sequence
  Synthetic
aauccuccccuacaucccu

SEQ ID NO: 377921 - RNA, 20 nt, Artificial Sequence
  Synthetic
gaauccuccccuacaucccu

SEQ ID NO: 377922 - RNA, 21 nt, Artificial Sequence
  Synthetic
agaauccuccccuacaucccu

SEQ ID NO: 377923 - RNA, 22 nt, Artificial Sequence
  Synthetic
aagaauccuccccuacaucccu

SEQ ID NO: 377924 - RNA, 23 nt, Artificial Sequence
  Synthetic
aaagaauccuccccuacaucccu

SEQ ID NO: 377925 - RNA, 24 nt, Artificial Sequence
  Synthetic
aaaagaauccuccccuacaucccu

SEQ ID NO: 377926 - RNA, 18 nt, Artificial Sequence
  Synthetic
aaggcauuauccaucccu

SEQ ID NO: 377927 - RNA, 19 nt, Artificial Sequence
  Synthetic
aaaggcauuauccaucccu

SEQ ID NO: 377928 - RNA, 20 nt, Artificial Sequence
  Synthetic
caaaggcauuauccaucccu

SEQ ID NO: 377929 - RNA, 21 nt, Artificial Sequence
  Synthetic
acaaaggcauuauccaucccu

SEQ ID NO: 377930 - RNA, 22 nt, Artificial Sequence
  Synthetic
gacaaaggcauuauccaucccu

SEQ ID NO: 377931 - RNA, 23 nt, Artificial Sequence
  Synthetic
agacaaaggcauuauccaucccu

SEQ ID NO: 377932 - RNA, 24 nt, Artificial Sequence
  Synthetic
uagacaaaggcauuauccaucccu

SEQ ID NO: 377933 - RNA, 18 nt, Artificial Sequence
  Synthetic
gauaaacaugucaucccu

SEQ ID NO: 377934 - RNA, 19 nt, Artificial Sequence
  Synthetic
ggauaaacaugucaucccu

SEQ ID NO: 377935 - RNA, 20 nt, Artificial Sequence
  Synthetic
aggauaaacaugucaucccu

SEQ ID NO: 377936 - RNA, 21 nt, Artificial Sequence
  Synthetic
caggauaaacaugucaucccu

SEQ ID NO: 377937 - RNA, 22 nt, Artificial Sequence
  Synthetic
gcaggauaaacaugucaucccu

SEQ ID NO: 377938 - RNA, 23 nt, Artificial Sequence
  Synthetic
ugcaggauaaacaugucaucccu

SEQ ID NO: 377939 - RNA, 24 nt, Artificial Sequence
  Synthetic
augcaggauaaacaugucaucccu

SEQ ID NO: 377940 - RNA, 18 nt, Artificial Sequence
  Synthetic
ggcaagaacaagaucccu

SEQ ID NO: 377941 - RNA, 19 nt, Artificial Sequence
  Synthetic
gggcaagaacaagaucccu

SEQ ID NO: 377942 - RNA, 20 nt, Artificial Sequence
  Synthetic
agggcaagaacaagaucccu

SEQ ID NO: 377943 - RNA, 21 nt, Artificial Sequence
  Synthetic
gagggcaagaacaagaucccu

SEQ ID NO: 377944 - RNA, 22 nt, Artificial Sequence
  Synthetic
agagggcaagaacaagaucccu

SEQ ID NO: 377945 - RNA, 23 nt, Artificial Sequence
  Synthetic
aagagggcaagaacaagaucccu

SEQ ID NO: 377946 - RNA, 24 nt, Artificial Sequence
  Synthetic
caagagggcaagaacaagaucccu

SEQ ID NO: 377947 - RNA, 18 nt, Artificial Sequence
  Synthetic
uucuaguucuagaucccu

SEQ ID NO: 377948 - RNA, 19 nt, Artificial Sequence
  Synthetic
uuucuaguucuagaucccu

SEQ ID NO: 377949 - RNA, 20 nt, Artificial Sequence
  Synthetic
auuucuaguucuagaucccu

SEQ ID NO: 377950 - RNA, 18 nt, Artificial Sequence
  Synthetic
uuuuuuuaauggaucccu

SEQ ID NO: 377951 - RNA, 19 nt, Artificial Sequence
  Synthetic
auuuuuuuaauggaucccu

SEQ ID NO: 377952 - RNA, 20 nt, Artificial Sequence
  Synthetic
uauuuuuuuaauggaucccu

SEQ ID NO: 377953 - RNA, 21 nt, Artificial Sequence
  Synthetic
guauuuuuuuaauggaucccu

SEQ ID NO: 377954 - RNA, 22 nt, Artificial Sequence
  Synthetic
uguauuuuuuuaauggaucccu

SEQ ID NO: 377955 - RNA, 23 nt, Artificial Sequence
  Synthetic
uuguauuuuuuuaauggaucccu

SEQ ID NO: 377956 - RNA, 24 nt, Artificial Sequence
  Synthetic
uuuguauuuuuuuaauggaucccu

SEQ ID NO: 377957 - RNA, 18 nt, Artificial Sequence
  Synthetic
ggaauauuuaauaucccu

SEQ ID NO: 377958 - RNA, 19 nt, Artificial Sequence
  Synthetic
aggaauauuuaauaucccu

SEQ ID NO: 377959 - RNA, 20 nt, Artificial Sequence
  Synthetic
gaggaauauuuaauaucccu

SEQ ID NO: 377960 - RNA, 21 nt, Artificial Sequence
  Synthetic
ggaggaauauuuaauaucccu

SEQ ID NO: 377961 - RNA, 22 nt, Artificial Sequence
  Synthetic
aggaggaauauuuaauaucccu

SEQ ID NO: 377962 - RNA, 23 nt, Artificial Sequence
  Synthetic
uaggaggaauauuuaauaucccu

SEQ ID NO: 377963 - RNA, 24 nt, Artificial Sequence
  Synthetic
uuaggaggaauauuuaauaucccu

SEQ ID NO: 377964 - RNA, 18 nt, Artificial Sequence
  Synthetic
ucaaggucaauuaucccu

SEQ ID NO: 377965 - RNA, 19 nt, Artificial Sequence
  Synthetic
aucaaggucaauuaucccu

SEQ ID NO: 377966 - RNA, 20 nt, Artificial Sequence
  Synthetic
aaucaaggucaauuaucccu

SEQ ID NO: 377967 - RNA, 21 nt, Artificial Sequence
  Synthetic
aaaucaaggucaauuaucccu

SEQ ID NO: 377968 - RNA, 22 nt, Artificial Sequence
  Synthetic
aaaaucaaggucaauuaucccu

SEQ ID NO: 377969 - RNA, 23 nt, Artificial Sequence
  Synthetic
caaaaucaaggucaauuaucccu

SEQ ID NO: 377970 - RNA, 24 nt, Artificial Sequence
  Synthetic
ccaaaaucaaggucaauuaucccu

SEQ ID NO: 377971 - RNA, 18 nt, Artificial Sequence
  Synthetic
cacuggagcuuuaucccu

SEQ ID NO: 377972 - RNA, 19 nt, Artificial Sequence
  Synthetic
ucacuggagcuuuaucccu

SEQ ID NO: 377973 - RNA, 20 nt, Artificial Sequence
  Synthetic
gucacuggagcuuuaucccu

SEQ ID NO: 377974 - RNA, 21 nt, Artificial Sequence
  Synthetic
ggucacuggagcuuuaucccu

SEQ ID NO: 377975 - RNA, 22 nt, Artificial Sequence
  Synthetic
gggucacuggagcuuuaucccu

SEQ ID NO: 377976 - RNA, 23 nt, Artificial Sequence
  Synthetic
ugggucacuggagcuuuaucccu

SEQ ID NO: 377977 - RNA, 24 nt, Artificial Sequence
  Synthetic
gugggucacuggagcuuuaucccu

SEQ ID NO: 377978 - RNA, 18 nt, Artificial Sequence
  Synthetic
agggcaccacgacucccu

SEQ ID NO: 377979 - RNA, 19 nt, Artificial Sequence
  Synthetic
aagggcaccacgacucccu

SEQ ID NO: 377980 - RNA, 20 nt, Artificial Sequence
  Synthetic
uaagggcaccacgacucccu

SEQ ID NO: 377981 - RNA, 21 nt, Artificial Sequence
  Synthetic
uuaagggcaccacgacucccu

SEQ ID NO: 377982 - RNA, 22 nt, Artificial Sequence
  Synthetic
cuuaagggcaccacgacucccu

SEQ ID NO: 377983 - RNA, 23 nt, Artificial Sequence
  Synthetic
ucuuaagggcaccacgacucccu

SEQ ID NO: 377984 - RNA, 24 nt, Artificial Sequence
  Synthetic
aucuuaagggcaccacgacucccu

SEQ ID NO: 377985 - RNA, 18 nt, Artificial Sequence
  Synthetic
ucuccuaauucccucccu

SEQ ID NO: 377986 - RNA, 19 nt, Artificial Sequence
  Synthetic
uucuccuaauucccucccu

SEQ ID NO: 377987 - RNA, 20 nt, Artificial Sequence
  Synthetic
auucuccuaauucccucccu

SEQ ID NO: 377988 - RNA, 21 nt, Artificial Sequence
  Synthetic
uauucuccuaauucccucccu

SEQ ID NO: 377989 - RNA, 22 nt, Artificial Sequence
  Synthetic
uuauucuccuaauucccucccu

SEQ ID NO: 377990 - RNA, 23 nt, Artificial Sequence
  Synthetic
uuuauucuccuaauucccucccu

SEQ ID NO: 377991 - RNA, 24 nt, Artificial Sequence
  Synthetic
auuuauucuccuaauucccucccu

SEQ ID NO: 377992 - RNA, 18 nt, Artificial Sequence
  Synthetic
uaaauaacauuccucccu

SEQ ID NO: 377993 - RNA, 19 nt, Artificial Sequence
  Synthetic
auaaauaacauuccucccu

SEQ ID NO: 377994 - RNA, 20 nt, Artificial Sequence
  Synthetic
uauaaauaacauuccucccu

SEQ ID NO: 377995 - RNA, 21 nt, Artificial Sequence
  Synthetic
guauaaauaacauuccucccu

SEQ ID NO: 377996 - RNA, 22 nt, Artificial Sequence
  Synthetic
uguauaaauaacauuccucccu

SEQ ID NO: 377997 - RNA, 23 nt, Artificial Sequence
  Synthetic
guguauaaauaacauuccucccu

SEQ ID NO: 377998 - RNA, 24 nt, Artificial Sequence
  Synthetic
uguguauaaauaacauuccucccu

SEQ ID NO: 377999 - RNA, 18 nt, Artificial Sequence
  Synthetic
gcucugacugggcucccu

SEQ ID NO: 378000 - RNA, 19 nt, Artificial Sequence
  Synthetic
ugcucugacugggcucccu

SEQ ID NO: 378001 - RNA, 20 nt, Artificial Sequence
  Synthetic
cugcucugacugggcucccu

SEQ ID NO: 378002 - RNA, 21 nt, Artificial Sequence
  Synthetic
ucugcucugacugggcucccu

SEQ ID NO: 378003 - RNA, 22 nt, Artificial Sequence
  Synthetic
aucugcucugacugggcucccu

SEQ ID NO: 378004 - RNA, 23 nt, Artificial Sequence
  Synthetic
uaucugcucugacugggcucccu

SEQ ID NO: 378005 - RNA, 24 nt, Artificial Sequence
  Synthetic
uuaucugcucugacugggcucccu

SEQ ID NO: 378006 - RNA, 18 nt, Artificial Sequence
  Synthetic
gcuugggacuugcucccu

SEQ ID NO: 378007 - RNA, 19 nt, Artificial Sequence
  Synthetic
agcuugggacuugcucccu

SEQ ID NO: 378008 - RNA, 20 nt, Artificial Sequence
  Synthetic
aagcuugggacuugcucccu

SEQ ID NO: 378009 - RNA, 21 nt, Artificial Sequence
  Synthetic
aaagcuugggacuugcucccu

SEQ ID NO: 378010 - RNA, 22 nt, Artificial Sequence
  Synthetic
caaagcuugggacuugcucccu

SEQ ID NO: 378011 - RNA, 23 nt, Artificial Sequence
  Synthetic
ccaaagcuugggacuugcucccu

SEQ ID NO: 378012 - RNA, 24 nt, Artificial Sequence
  Synthetic
gccaaagcuugggacuugcucccu

SEQ ID NO: 378013 - RNA, 18 nt, Artificial Sequence
  Synthetic
gaaguuucucaucucccu

SEQ ID NO: 378014 - RNA, 19 nt, Artificial Sequence
  Synthetic
agaaguuucucaucucccu

SEQ ID NO: 378015 - RNA, 20 nt, Artificial Sequence
  Synthetic
aagaaguuucucaucucccu

SEQ ID NO: 378016 - RNA, 21 nt, Artificial Sequence
  Synthetic
caagaaguuucucaucucccu

SEQ ID NO: 378017 - RNA, 22 nt, Artificial Sequence
  Synthetic
ccaagaaguuucucaucucccu

SEQ ID NO: 378018 - RNA, 23 nt, Artificial Sequence
  Synthetic
accaagaaguuucucaucucccu

SEQ ID NO: 378019 - RNA, 24 nt, Artificial Sequence
  Synthetic
uaccaagaaguuucucaucucccu

SEQ ID NO: 378020 - RNA, 18 nt, Artificial Sequence
  Synthetic
uucaguuuaucucucccu

SEQ ID NO: 378021 - RNA, 19 nt, Artificial Sequence
  Synthetic
cuucaguuuaucucucccu

SEQ ID NO: 378022 - RNA, 20 nt, Artificial Sequence
  Synthetic
acuucaguuuaucucucccu

SEQ ID NO: 378023 - RNA, 21 nt, Artificial Sequence
  Synthetic
cacuucaguuuaucucucccu

SEQ ID NO: 378024 - RNA, 22 nt, Artificial Sequence
  Synthetic
acacuucaguuuaucucucccu

SEQ ID NO: 378025 - RNA, 23 nt, Artificial Sequence
  Synthetic
uacacuucaguuuaucucucccu

SEQ ID NO: 378026 - RNA, 24 nt, Artificial Sequence
  Synthetic
cuacacuucaguuuaucucucccu

SEQ ID NO: 378027 - RNA, 18 nt, Artificial Sequence
  Synthetic
auauggcucauucucccu

SEQ ID NO: 378028 - RNA, 19 nt, Artificial Sequence
  Synthetic
aauauggcucauucucccu

SEQ ID NO: 378029 - RNA, 20 nt, Artificial Sequence
  Synthetic
aaauauggcucauucucccu

SEQ ID NO: 378030 - RNA, 21 nt, Artificial Sequence
  Synthetic
uaaauauggcucauucucccu

SEQ ID NO: 378031 - RNA, 22 nt, Artificial Sequence
  Synthetic
uuaaauauggcucauucucccu

SEQ ID NO: 378032 - RNA, 23 nt, Artificial Sequence
  Synthetic
auuaaauauggcucauucucccu

SEQ ID NO: 378033 - RNA, 24 nt, Artificial Sequence
  Synthetic
uauuaaauauggcucauucucccu

SEQ ID NO: 378034 - RNA, 18 nt, Artificial Sequence
  Synthetic
acauuuccaaaugucccu

SEQ ID NO: 378035 - RNA, 19 nt, Artificial Sequence
  Synthetic
gacauuuccaaaugucccu

SEQ ID NO: 378036 - RNA, 20 nt, Artificial Sequence
  Synthetic
agacauuuccaaaugucccu

SEQ ID NO: 378037 - RNA, 21 nt, Artificial Sequence
  Synthetic
cagacauuuccaaaugucccu

SEQ ID NO: 378038 - RNA, 22 nt, Artificial Sequence
  Synthetic
ccagacauuuccaaaugucccu

SEQ ID NO: 378039 - RNA, 23 nt, Artificial Sequence
  Synthetic
cccagacauuuccaaaugucccu

SEQ ID NO: 378040 - RNA, 24 nt, Artificial Sequence
  Synthetic
ucccagacauuuccaaaugucccu

SEQ ID NO: 378041 - RNA, 18 nt, Artificial Sequence
  Synthetic
auauuuaagaaugucccu

SEQ ID NO: 378042 - RNA, 19 nt, Artificial Sequence
  Synthetic
aauauuuaagaaugucccu

SEQ ID NO: 378043 - RNA, 20 nt, Artificial Sequence
  Synthetic
uaauauuuaagaaugucccu

SEQ ID NO: 378044 - RNA, 21 nt, Artificial Sequence
  Synthetic
auaauauuuaagaaugucccu

SEQ ID NO: 378045 - RNA, 22 nt, Artificial Sequence
  Synthetic
cauaauauuuaagaaugucccu

SEQ ID NO: 378046 - RNA, 23 nt, Artificial Sequence
  Synthetic
ccauaauauuuaagaaugucccu

SEQ ID NO: 378047 - RNA, 24 nt, Artificial Sequence
  Synthetic
uccauaauauuuaagaaugucccu

SEQ ID NO: 378048 - RNA, 18 nt, Artificial Sequence
  Synthetic
aaaacucuuggugucccu

SEQ ID NO: 378049 - RNA, 19 nt, Artificial Sequence
  Synthetic
gaaaacucuuggugucccu

SEQ ID NO: 378050 - RNA, 20 nt, Artificial Sequence
  Synthetic
agaaaacucuuggugucccu

SEQ ID NO: 378051 - RNA, 21 nt, Artificial Sequence
  Synthetic
uagaaaacucuuggugucccu

SEQ ID NO: 378052 - RNA, 22 nt, Artificial Sequence
  Synthetic
auagaaaacucuuggugucccu

SEQ ID NO: 378053 - RNA, 23 nt, Artificial Sequence
  Synthetic
cauagaaaacucuuggugucccu

SEQ ID NO: 378054 - RNA, 24 nt, Artificial Sequence
  Synthetic
ucauagaaaacucuuggugucccu

SEQ ID NO: 378055 - RNA, 18 nt, Artificial Sequence
  Synthetic
aaguaaccuguugucccu

SEQ ID NO: 378056 - RNA, 19 nt, Artificial Sequence
  Synthetic
uaaguaaccuguugucccu

SEQ ID NO: 378057 - RNA, 20 nt, Artificial Sequence
  Synthetic
cuaaguaaccuguugucccu

SEQ ID NO: 378058 - RNA, 21 nt, Artificial Sequence
  Synthetic
acuaaguaaccuguugucccu

SEQ ID NO: 378059 - RNA, 22 nt, Artificial Sequence
  Synthetic
gacuaaguaaccuguugucccu

SEQ ID NO: 378060 - RNA, 23 nt, Artificial Sequence
  Synthetic
ugacuaaguaaccuguugucccu

SEQ ID NO: 378061 - RNA, 24 nt, Artificial Sequence
  Synthetic
uugacuaaguaaccuguugucccu

SEQ ID NO: 378062 - RNA, 18 nt, Artificial Sequence
  Synthetic
gugagggaauuugucccu

SEQ ID NO: 378063 - RNA, 19 nt, Artificial Sequence
  Synthetic
agugagggaauuugucccu

SEQ ID NO: 378064 - RNA, 20 nt, Artificial Sequence
  Synthetic
aagugagggaauuugucccu

SEQ ID NO: 378065 - RNA, 21 nt, Artificial Sequence
  Synthetic
uaagugagggaauuugucccu

SEQ ID NO: 378066 - RNA, 22 nt, Artificial Sequence
  Synthetic
cuaagugagggaauuugucccu

SEQ ID NO: 378067 - RNA, 23 nt, Artificial Sequence
  Synthetic
ccuaagugagggaauuugucccu

SEQ ID NO: 378068 - RNA, 24 nt, Artificial Sequence
  Synthetic
uccuaagugagggaauuugucccu

SEQ ID NO: 378069 - RNA, 18 nt, Artificial Sequence
  Synthetic
aaacuggaagcauucccu

SEQ ID NO: 378070 - RNA, 19 nt, Artificial Sequence
  Synthetic
aaaacuggaagcauucccu

SEQ ID NO: 378071 - RNA, 20 nt, Artificial Sequence
  Synthetic
aaaaacuggaagcauucccu

SEQ ID NO: 378072 - RNA, 21 nt, Artificial Sequence
  Synthetic
caaaaacuggaagcauucccu

SEQ ID NO: 378073 - RNA, 22 nt, Artificial Sequence
  Synthetic
gcaaaaacuggaagcauucccu

SEQ ID NO: 378074 - RNA, 23 nt, Artificial Sequence
  Synthetic
ggcaaaaacuggaagcauucccu

SEQ ID NO: 378075 - RNA, 24 nt, Artificial Sequence
  Synthetic
gggcaaaaacuggaagcauucccu

SEQ ID NO: 378076 - RNA, 18 nt, Artificial Sequence
  Synthetic
aauguaaacguauucccu

SEQ ID NO: 378077 - RNA, 19 nt, Artificial Sequence
  Synthetic
aaauguaaacguauucccu

SEQ ID NO: 378078 - RNA, 20 nt, Artificial Sequence
  Synthetic
uaaauguaaacguauucccu

SEQ ID NO: 378079 - RNA, 21 nt, Artificial Sequence
  Synthetic
guaaauguaaacguauucccu

SEQ ID NO: 378080 - RNA, 22 nt, Artificial Sequence
  Synthetic
uguaaauguaaacguauucccu

SEQ ID NO: 378081 - RNA, 23 nt, Artificial Sequence
  Synthetic
uuguaaauguaaacguauucccu

SEQ ID NO: 378082 - RNA, 24 nt, Artificial Sequence
  Synthetic
auuguaaauguaaacguauucccu

SEQ ID NO: 378083 - RNA, 18 nt, Artificial Sequence
  Synthetic
uuacccucuaacuucccu

SEQ ID NO: 378084 - RNA, 19 nt, Artificial Sequence
  Synthetic
cuuacccucuaacuucccu

SEQ ID NO: 378085 - RNA, 20 nt, Artificial Sequence
  Synthetic
ucuuacccucuaacuucccu

SEQ ID NO: 378086 - RNA, 21 nt, Artificial Sequence
  Synthetic
gucuuacccucuaacuucccu

SEQ ID NO: 378087 - RNA, 22 nt, Artificial Sequence
  Synthetic
cgucuuacccucuaacuucccu

SEQ ID NO: 378088 - RNA, 23 nt, Artificial Sequence
  Synthetic
acgucuuacccucuaacuucccu

SEQ ID NO: 378089 - RNA, 24 nt, Artificial Sequence
  Synthetic
cacgucuuacccucuaacuucccu

SEQ ID NO: 378090 - RNA, 18 nt, Artificial Sequence
  Synthetic
cuauguuaacccuucccu

SEQ ID NO: 378091 - RNA, 19 nt, Artificial Sequence
  Synthetic
gcuauguuaacccuucccu

SEQ ID NO: 378092 - RNA, 20 nt, Artificial Sequence
  Synthetic
ugcuauguuaacccuucccu

SEQ ID NO: 378093 - RNA, 21 nt, Artificial Sequence
  Synthetic
cugcuauguuaacccuucccu

SEQ ID NO: 378094 - RNA, 22 nt, Artificial Sequence
  Synthetic
ucugcuauguuaacccuucccu

SEQ ID NO: 378095 - RNA, 23 nt, Artificial Sequence
  Synthetic
uucugcuauguuaacccuucccu

SEQ ID NO: 378096 - RNA, 24 nt, Artificial Sequence
  Synthetic
auucugcuauguuaacccuucccu

SEQ ID NO: 378097 - RNA, 18 nt, Artificial Sequence
  Synthetic
aauguguugcccuucccu

SEQ ID NO: 378098 - RNA, 19 nt, Artificial Sequence
  Synthetic
uaauguguugcccuucccu

SEQ ID NO: 378099 - RNA, 20 nt, Artificial Sequence
  Synthetic
uuaauguguugcccuucccu

SEQ ID NO: 378100 - RNA, 21 nt, Artificial Sequence
  Synthetic
guuaauguguugcccuucccu

SEQ ID NO: 378101 - RNA, 22 nt, Artificial Sequence
  Synthetic
uguuaauguguugcccuucccu

SEQ ID NO: 378102 - RNA, 23 nt, Artificial Sequence
  Synthetic
cuguuaauguguugcccuucccu

SEQ ID NO: 378103 - RNA, 24 nt, Artificial Sequence
  Synthetic
gcuguuaauguguugcccuucccu

SEQ ID NO: 378104 - RNA, 18 nt, Artificial Sequence
  Synthetic
ggucuuccccucuucccu

SEQ ID NO: 378105 - RNA, 19 nt, Artificial Sequence
  Synthetic
gggucuuccccucuucccu

SEQ ID NO: 378106 - RNA, 20 nt, Artificial Sequence
  Synthetic
ugggucuuccccucuucccu

SEQ ID NO: 378107 - RNA, 21 nt, Artificial Sequence
  Synthetic
augggucuuccccucuucccu

SEQ ID NO: 378108 - RNA, 22 nt, Artificial Sequence
  Synthetic
caugggucuuccccucuucccu

SEQ ID NO: 378109 - RNA, 23 nt, Artificial Sequence
  Synthetic
ccaugggucuuccccucuucccu

SEQ ID NO: 378110 - RNA, 24 nt, Artificial Sequence
  Synthetic
gccaugggucuuccccucuucccu

SEQ ID NO: 378111 - RNA, 18 nt, Artificial Sequence
  Synthetic
gaguuacuguucuucccu

SEQ ID NO: 378112 - RNA, 19 nt, Artificial Sequence
  Synthetic
agaguuacuguucuucccu

SEQ ID NO: 378113 - RNA, 20 nt, Artificial Sequence
  Synthetic
aagaguuacuguucuucccu

SEQ ID NO: 378114 - RNA, 21 nt, Artificial Sequence
  Synthetic
aaagaguuacuguucuucccu

SEQ ID NO: 378115 - RNA, 22 nt, Artificial Sequence
  Synthetic
gaaagaguuacuguucuucccu

SEQ ID NO: 378116 - RNA, 23 nt, Artificial Sequence
  Synthetic
ugaaagaguuacuguucuucccu

SEQ ID NO: 378117 - RNA, 24 nt, Artificial Sequence
  Synthetic
cugaaagaguuacuguucuucccu

SEQ ID NO: 378118 - RNA, 18 nt, Artificial Sequence
  Synthetic
cuuuggcagaaguucccu

SEQ ID NO: 378119 - RNA, 19 nt, Artificial Sequence
  Synthetic
ccuuuggcagaaguucccu

SEQ ID NO: 378120 - RNA, 20 nt, Artificial Sequence
  Synthetic
gccuuuggcagaaguucccu

SEQ ID NO: 378121 - RNA, 21 nt, Artificial Sequence
  Synthetic
agccuuuggcagaaguucccu

SEQ ID NO: 378122 - RNA, 22 nt, Artificial Sequence
  Synthetic
aagccuuuggcagaaguucccu

SEQ ID NO: 378123 - RNA, 23 nt, Artificial Sequence
  Synthetic
caagccuuuggcagaaguucccu

SEQ ID NO: 378124 - RNA, 24 nt, Artificial Sequence
  Synthetic
gcaagccuuuggcagaaguucccu

SEQ ID NO: 378125 - RNA, 18 nt, Artificial Sequence
  Synthetic
uccuccaucuuguucccu

SEQ ID NO: 378126 - RNA, 19 nt, Artificial Sequence
  Synthetic
auccuccaucuuguucccu

SEQ ID NO: 378127 - RNA, 20 nt, Artificial Sequence
  Synthetic
aauccuccaucuuguucccu

SEQ ID NO: 378128 - RNA, 21 nt, Artificial Sequence
  Synthetic
gaauccuccaucuuguucccu

SEQ ID NO: 378129 - RNA, 22 nt, Artificial Sequence
  Synthetic
agaauccuccaucuuguucccu

SEQ ID NO: 378130 - RNA, 23 nt, Artificial Sequence
  Synthetic
gagaauccuccaucuuguucccu

SEQ ID NO: 378131 - RNA, 24 nt, Artificial Sequence
  Synthetic
ugagaauccuccaucuuguucccu

SEQ ID NO: 378132 - RNA, 18 nt, Artificial Sequence
  Synthetic
augcuuucaaauuucccu

SEQ ID NO: 378133 - RNA, 19 nt, Artificial Sequence
  Synthetic
caugcuuucaaauuucccu

SEQ ID NO: 378134 - RNA, 20 nt, Artificial Sequence
  Synthetic
acaugcuuucaaauuucccu

SEQ ID NO: 378135 - RNA, 21 nt, Artificial Sequence
  Synthetic
uacaugcuuucaaauuucccu

SEQ ID NO: 378136 - RNA, 22 nt, Artificial Sequence
  Synthetic
uuacaugcuuucaaauuucccu

SEQ ID NO: 378137 - RNA, 23 nt, Artificial Sequence
  Synthetic
cuuacaugcuuucaaauuucccu

SEQ ID NO: 378138 - RNA, 24 nt, Artificial Sequence
  Synthetic
ucuuacaugcuuucaaauuucccu

SEQ ID NO: 378139 - RNA, 18 nt, Artificial Sequence
  Synthetic
ggaggcugugauuucccu

SEQ ID NO: 378140 - RNA, 19 nt, Artificial Sequence
  Synthetic
uggaggcugugauuucccu

SEQ ID NO: 378141 - RNA, 20 nt, Artificial Sequence
  Synthetic
cuggaggcugugauuucccu

SEQ ID NO: 378142 - RNA, 21 nt, Artificial Sequence
  Synthetic
acuggaggcugugauuucccu

SEQ ID NO: 378143 - RNA, 22 nt, Artificial Sequence
  Synthetic
gacuggaggcugugauuucccu

SEQ ID NO: 378144 - RNA, 23 nt, Artificial Sequence
  Synthetic
ggacuggaggcugugauuucccu

SEQ ID NO: 378145 - RNA, 24 nt, Artificial Sequence
  Synthetic
uggacuggaggcugugauuucccu

SEQ ID NO: 378146 - RNA, 18 nt, Artificial Sequence
  Synthetic
ucgccacccgguuucccu

SEQ ID NO: 378147 - RNA, 19 nt, Artificial Sequence
  Synthetic
cucgccacccgguuucccu

SEQ ID NO: 378148 - RNA, 20 nt, Artificial Sequence
  Synthetic
acucgccacccgguuucccu

SEQ ID NO: 378149 - RNA, 21 nt, Artificial Sequence
  Synthetic
aacucgccacccgguuucccu

SEQ ID NO: 378150 - RNA, 22 nt, Artificial Sequence
  Synthetic
aaacucgccacccgguuucccu

SEQ ID NO: 378151 - RNA, 23 nt, Artificial Sequence
  Synthetic
gaaacucgccacccgguuucccu

SEQ ID NO: 378152 - RNA, 24 nt, Artificial Sequence
  Synthetic
ggaaacucgccacccgguuucccu

SEQ ID NO: 378153 - RNA, 18 nt, Artificial Sequence
  Synthetic
uuuguuuugguuuucccu

SEQ ID NO: 378154 - RNA, 19 nt, Artificial Sequence
  Synthetic
uuuuguuuugguuuucccu

SEQ ID NO: 378155 - RNA, 20 nt, Artificial Sequence
  Synthetic
guuuuguuuugguuuucccu

SEQ ID NO: 378156 - RNA, 21 nt, Artificial Sequence
  Synthetic
uguuuuguuuugguuuucccu

SEQ ID NO: 378157 - RNA, 22 nt, Artificial Sequence
  Synthetic
auguuuuguuuugguuuucccu

SEQ ID NO: 378158 - RNA, 23 nt, Artificial Sequence
  Synthetic
aauguuuuguuuugguuuucccu

SEQ ID NO: 378159 - RNA, 24 nt, Artificial Sequence
  Synthetic
caauguuuuguuuugguuuucccu

SEQ ID NO: 378160 - RNA, 18 nt, Artificial Sequence
  Synthetic
uucuguccauuuuucccu

SEQ ID NO: 378161 - RNA, 19 nt, Artificial Sequence
  Synthetic
cuucuguccauuuuucccu

SEQ ID NO: 378162 - RNA, 20 nt, Artificial Sequence
  Synthetic
ccuucuguccauuuuucccu

SEQ ID NO: 378163 - RNA, 21 nt, Artificial Sequence
  Synthetic
accuucuguccauuuuucccu

SEQ ID NO: 378164 - RNA, 22 nt, Artificial Sequence
  Synthetic
aaccuucuguccauuuuucccu

SEQ ID NO: 378165 - RNA, 23 nt, Artificial Sequence
  Synthetic
uaaccuucuguccauuuuucccu

SEQ ID NO: 378166 - RNA, 24 nt, Artificial Sequence
  Synthetic
guaaccuucuguccauuuuucccu

SEQ ID NO: 378167 - RNA, 18 nt, Artificial Sequence
  Synthetic
cacuucaauuuuuucccu

SEQ ID NO: 378168 - RNA, 19 nt, Artificial Sequence
  Synthetic
ucacuucaauuuuuucccu

SEQ ID NO: 378169 - RNA, 20 nt, Artificial Sequence
  Synthetic
aucacuucaauuuuuucccu

SEQ ID NO: 378170 - RNA, 21 nt, Artificial Sequence
  Synthetic
aaucacuucaauuuuuucccu

SEQ ID NO: 378171 - RNA, 22 nt, Artificial Sequence
  Synthetic
aaaucacuucaauuuuuucccu

SEQ ID NO: 378172 - RNA, 23 nt, Artificial Sequence
  Synthetic
aaaaucacuucaauuuuuucccu

SEQ ID NO: 378173 - RNA, 24 nt, Artificial Sequence
  Synthetic
aaaaaucacuucaauuuuuucccu

SEQ ID NO: 378174 - RNA, 18 nt, Artificial Sequence
  Synthetic
guuuuuaaagcaaagccu

SEQ ID NO: 378175 - RNA, 19 nt, Artificial Sequence
  Synthetic
cguuuuuaaagcaaagccu

SEQ ID NO: 378176 - RNA, 20 nt, Artificial Sequence
  Synthetic
ccguuuuuaaagcaaagccu

SEQ ID NO: 378177 - RNA, 21 nt, Artificial Sequence
  Synthetic
gccguuuuuaaagcaaagccu

SEQ ID NO: 378178 - RNA, 22 nt, Artificial Sequence
  Synthetic
agccguuuuuaaagcaaagccu

SEQ ID NO: 378179 - RNA, 23 nt, Artificial Sequence
  Synthetic
cagccguuuuuaaagcaaagccu

SEQ ID NO: 378180 - RNA, 24 nt, Artificial Sequence
  Synthetic
acagccguuuuuaaagcaaagccu

SEQ ID NO: 378181 - RNA, 18 nt, Artificial Sequence
  Synthetic
gaaucaauaggaaagccu

SEQ ID NO: 378182 - RNA, 19 nt, Artificial Sequence
  Synthetic
ggaaucaauaggaaagccu

SEQ ID NO: 378183 - RNA, 20 nt, Artificial Sequence
  Synthetic
uggaaucaauaggaaagccu

SEQ ID NO: 378184 - RNA, 21 nt, Artificial Sequence
  Synthetic
auggaaucaauaggaaagccu

SEQ ID NO: 378185 - RNA, 22 nt, Artificial Sequence
  Synthetic
cauggaaucaauaggaaagccu

SEQ ID NO: 378186 - RNA, 23 nt, Artificial Sequence
  Synthetic
ucauggaaucaauaggaaagccu

SEQ ID NO: 378187 - RNA, 24 nt, Artificial Sequence
  Synthetic
cucauggaaucaauaggaaagccu

SEQ ID NO: 378188 - RNA, 18 nt, Artificial Sequence
  Synthetic
uggcacaaaaugaagccu

SEQ ID NO: 378189 - RNA, 19 nt, Artificial Sequence
  Synthetic
uuggcacaaaaugaagccu

SEQ ID NO: 378190 - RNA, 20 nt, Artificial Sequence
  Synthetic
uuuggcacaaaaugaagccu

SEQ ID NO: 378191 - RNA, 21 nt, Artificial Sequence
  Synthetic
uuuuggcacaaaaugaagccu

SEQ ID NO: 378192 - RNA, 22 nt, Artificial Sequence
  Synthetic
auuuuggcacaaaaugaagccu

SEQ ID NO: 378193 - RNA, 23 nt, Artificial Sequence
  Synthetic
aauuuuggcacaaaaugaagccu

SEQ ID NO: 378194 - RNA, 24 nt, Artificial Sequence
  Synthetic
caauuuuggcacaaaaugaagccu

SEQ ID NO: 378195 - RNA, 18 nt, Artificial Sequence
  Synthetic
ugucacagcuugaagccu

SEQ ID NO: 378196 - RNA, 19 nt, Artificial Sequence
  Synthetic
augucacagcuugaagccu

SEQ ID NO: 378197 - RNA, 20 nt, Artificial Sequence
  Synthetic
uaugucacagcuugaagccu

SEQ ID NO: 378198 - RNA, 21 nt, Artificial Sequence
  Synthetic
guaugucacagcuugaagccu

SEQ ID NO: 378199 - RNA, 22 nt, Artificial Sequence
  Synthetic
gguaugucacagcuugaagccu

SEQ ID NO: 378200 - RNA, 23 nt, Artificial Sequence
  Synthetic
ugguaugucacagcuugaagccu

SEQ ID NO: 378201 - RNA, 24 nt, Artificial Sequence
  Synthetic
cugguaugucacagcuugaagccu

SEQ ID NO: 378202 - RNA, 18 nt, Artificial Sequence
  Synthetic
gugaugcucuugaagccu

SEQ ID NO: 378203 - RNA, 19 nt, Artificial Sequence
  Synthetic
agugaugcucuugaagccu

SEQ ID NO: 378204 - RNA, 20 nt, Artificial Sequence
  Synthetic
uagugaugcucuugaagccu

SEQ ID NO: 378205 - RNA, 21 nt, Artificial Sequence
  Synthetic
uuagugaugcucuugaagccu

SEQ ID NO: 378206 - RNA, 22 nt, Artificial Sequence
  Synthetic
guuagugaugcucuugaagccu

SEQ ID NO: 378207 - RNA, 23 nt, Artificial Sequence
  Synthetic
aguuagugaugcucuugaagccu

SEQ ID NO: 378208 - RNA, 24 nt, Artificial Sequence
  Synthetic
uaguuagugaugcucuugaagccu

SEQ ID NO: 378209 - RNA, 18 nt, Artificial Sequence
  Synthetic
caaacguauuugaagccu

SEQ ID NO: 378210 - RNA, 19 nt, Artificial Sequence
  Synthetic
ccaaacguauuugaagccu

SEQ ID NO: 378211 - RNA, 20 nt, Artificial Sequence
  Synthetic
uccaaacguauuugaagccu

SEQ ID NO: 378212 - RNA, 21 nt, Artificial Sequence
  Synthetic
cuccaaacguauuugaagccu

SEQ ID NO: 378213 - RNA, 22 nt, Artificial Sequence
  Synthetic
acuccaaacguauuugaagccu

SEQ ID NO: 378214 - RNA, 23 nt, Artificial Sequence
  Synthetic
gacuccaaacguauuugaagccu

SEQ ID NO: 378215 - RNA, 24 nt, Artificial Sequence
  Synthetic
ugacuccaaacguauuugaagccu

SEQ ID NO: 378216 - RNA, 18 nt, Artificial Sequence
  Synthetic
auaaagggacaacagccu

SEQ ID NO: 378217 - RNA, 19 nt, Artificial Sequence
  Synthetic
aauaaagggacaacagccu

SEQ ID NO: 378218 - RNA, 20 nt, Artificial Sequence
  Synthetic
caauaaagggacaacagccu

SEQ ID NO: 378219 - RNA, 21 nt, Artificial Sequence
  Synthetic
acaauaaagggacaacagccu

SEQ ID NO: 378220 - RNA, 22 nt, Artificial Sequence
  Synthetic
gacaauaaagggacaacagccu

SEQ ID NO: 378221 - RNA, 23 nt, Artificial Sequence
  Synthetic
ugacaauaaagggacaacagccu

SEQ ID NO: 378222 - RNA, 24 nt, Artificial Sequence
  Synthetic
augacaauaaagggacaacagccu

SEQ ID NO: 378223 - RNA, 18 nt, Artificial Sequence
  Synthetic
aaucuccucacacagccu

SEQ ID NO: 378224 - RNA, 19 nt, Artificial Sequence
  Synthetic
gaaucuccucacacagccu

SEQ ID NO: 378225 - RNA, 20 nt, Artificial Sequence
  Synthetic
agaaucuccucacacagccu

SEQ ID NO: 378226 - RNA, 21 nt, Artificial Sequence
  Synthetic
aagaaucuccucacacagccu

SEQ ID NO: 378227 - RNA, 22 nt, Artificial Sequence
  Synthetic
gaagaaucuccucacacagccu

SEQ ID NO: 378228 - RNA, 23 nt, Artificial Sequence
  Synthetic
agaagaaucuccucacacagccu

SEQ ID NO: 378229 - RNA, 24 nt, Artificial Sequence
  Synthetic
cagaagaaucuccucacacagccu

SEQ ID NO: 378230 - RNA, 18 nt, Artificial Sequence
  Synthetic
auccugucagcacagccu

SEQ ID NO: 378231 - RNA, 19 nt, Artificial Sequence
  Synthetic
aauccugucagcacagccu

SEQ ID NO: 378232 - RNA, 20 nt, Artificial Sequence
  Synthetic
aaauccugucagcacagccu

SEQ ID NO: 378233 - RNA, 21 nt, Artificial Sequence
  Synthetic
aaaauccugucagcacagccu

SEQ ID NO: 378234 - RNA, 22 nt, Artificial Sequence
  Synthetic
caaaauccugucagcacagccu

SEQ ID NO: 378235 - RNA, 23 nt, Artificial Sequence
  Synthetic
ccaaaauccugucagcacagccu

SEQ ID NO: 378236 - RNA, 24 nt, Artificial Sequence
  Synthetic
accaaaauccugucagcacagccu

SEQ ID NO: 378237 - RNA, 18 nt, Artificial Sequence
  Synthetic
guugauacccuacagccu

SEQ ID NO: 378238 - RNA, 19 nt, Artificial Sequence
  Synthetic
cguugauacccuacagccu

SEQ ID NO: 378239 - RNA, 20 nt, Artificial Sequence
  Synthetic
ucguugauacccuacagccu

SEQ ID NO: 378240 - RNA, 21 nt, Artificial Sequence
  Synthetic
cucguugauacccuacagccu

SEQ ID NO: 378241 - RNA, 22 nt, Artificial Sequence
  Synthetic
acucguugauacccuacagccu

SEQ ID NO: 378242 - RNA, 23 nt, Artificial Sequence
  Synthetic
aacucguugauacccuacagccu

SEQ ID NO: 378243 - RNA, 24 nt, Artificial Sequence
  Synthetic
aaacucguugauacccuacagccu

SEQ ID NO: 378244 - RNA, 18 nt, Artificial Sequence
  Synthetic
aagcuaugucuacagccu

SEQ ID NO: 378245 - RNA, 19 nt, Artificial Sequence
  Synthetic
aaagcuaugucuacagccu

SEQ ID NO: 378246 - RNA, 20 nt, Artificial Sequence
  Synthetic
caaagcuaugucuacagccu

SEQ ID NO: 378247 - RNA, 21 nt, Artificial Sequence
  Synthetic
acaaagcuaugucuacagccu

SEQ ID NO: 378248 - RNA, 22 nt, Artificial Sequence
  Synthetic
cacaaagcuaugucuacagccu

SEQ ID NO: 378249 - RNA, 23 nt, Artificial Sequence
  Synthetic
ucacaaagcuaugucuacagccu

SEQ ID NO: 378250 - RNA, 24 nt, Artificial Sequence
  Synthetic
aucacaaagcuaugucuacagccu

SEQ ID NO: 378251 - RNA, 18 nt, Artificial Sequence
  Synthetic
accacuucacuccagccu

SEQ ID NO: 378252 - RNA, 19 nt, Artificial Sequence
  Synthetic
caccacuucacuccagccu

SEQ ID NO: 378253 - RNA, 20 nt, Artificial Sequence
  Synthetic
gcaccacuucacuccagccu

SEQ ID NO: 378254 - RNA, 21 nt, Artificial Sequence
  Synthetic
cgcaccacuucacuccagccu

SEQ ID NO: 378255 - RNA, 22 nt, Artificial Sequence
  Synthetic
ucgcaccacuucacuccagccu

SEQ ID NO: 378256 - RNA, 23 nt, Artificial Sequence
  Synthetic
aucgcaccacuucacuccagccu

SEQ ID NO: 378257 - RNA, 24 nt, Artificial Sequence
  Synthetic
gaucgcaccacuucacuccagccu

SEQ ID NO: 378258 - RNA, 18 nt, Artificial Sequence
  Synthetic
gauuugccgcagcagccu

SEQ ID NO: 378259 - RNA, 19 nt, Artificial Sequence
  Synthetic
ugauuugccgcagcagccu

SEQ ID NO: 378260 - RNA, 20 nt, Artificial Sequence
  Synthetic
uugauuugccgcagcagccu

SEQ ID NO: 378261 - RNA, 21 nt, Artificial Sequence
  Synthetic
uuugauuugccgcagcagccu

SEQ ID NO: 378262 - RNA, 22 nt, Artificial Sequence
  Synthetic
uuuugauuugccgcagcagccu

SEQ ID NO: 378263 - RNA, 23 nt, Artificial Sequence
  Synthetic
auuuugauuugccgcagcagccu

SEQ ID NO: 378264 - RNA, 24 nt, Artificial Sequence
  Synthetic
uauuuugauuugccgcagcagccu

SEQ ID NO: 378265 - RNA, 18 nt, Artificial Sequence
  Synthetic
uugcgugauaugcagccu

SEQ ID NO: 378266 - RNA, 19 nt, Artificial Sequence
  Synthetic
guugcgugauaugcagccu

SEQ ID NO: 378267 - RNA, 20 nt, Artificial Sequence
  Synthetic
gguugcgugauaugcagccu

SEQ ID NO: 378268 - RNA, 21 nt, Artificial Sequence
  Synthetic
ggguugcgugauaugcagccu

SEQ ID NO: 378269 - RNA, 22 nt, Artificial Sequence
  Synthetic
aggguugcgugauaugcagccu

SEQ ID NO: 378270 - RNA, 23 nt, Artificial Sequence
  Synthetic
uaggguugcgugauaugcagccu

SEQ ID NO: 378271 - RNA, 24 nt, Artificial Sequence
  Synthetic
auaggguugcgugauaugcagccu

SEQ ID NO: 378272 - RNA, 18 nt, Artificial Sequence
  Synthetic
aucugcucaccucagccu

SEQ ID NO: 378273 - RNA, 19 nt, Artificial Sequence
  Synthetic
gaucugcucaccucagccu

SEQ ID NO: 378274 - RNA, 20 nt, Artificial Sequence
  Synthetic
ugaucugcucaccucagccu

SEQ ID NO: 378275 - RNA, 21 nt, Artificial Sequence
  Synthetic
augaucugcucaccucagccu

SEQ ID NO: 378276 - RNA, 22 nt, Artificial Sequence
  Synthetic
caugaucugcucaccucagccu

SEQ ID NO: 378277 - RNA, 23 nt, Artificial Sequence
  Synthetic
ucaugaucugcucaccucagccu

SEQ ID NO: 378278 - RNA, 24 nt, Artificial Sequence
  Synthetic
cucaugaucugcucaccucagccu

SEQ ID NO: 378279 - RNA, 18 nt, Artificial Sequence
  Synthetic
auuccccugccucagccu

SEQ ID NO: 378280 - RNA, 19 nt, Artificial Sequence
  Synthetic
gauuccccugccucagccu

SEQ ID NO: 378281 - RNA, 20 nt, Artificial Sequence
  Synthetic
ugauuccccugccucagccu

SEQ ID NO: 378282 - RNA, 21 nt, Artificial Sequence
  Synthetic
gugauuccccugccucagccu

SEQ ID NO: 378283 - RNA, 22 nt, Artificial Sequence
  Synthetic
agugauuccccugccucagccu

SEQ ID NO: 378284 - RNA, 23 nt, Artificial Sequence
  Synthetic
gagugauuccccugccucagccu

SEQ ID NO: 378285 - RNA, 24 nt, Artificial Sequence
  Synthetic
cgagugauuccccugccucagccu

SEQ ID NO: 378286 - RNA, 18 nt, Artificial Sequence
  Synthetic
ucccauucucaagagccu

SEQ ID NO: 378287 - RNA, 19 nt, Artificial Sequence
  Synthetic
uucccauucucaagagccu

SEQ ID NO: 378288 - RNA, 20 nt, Artificial Sequence
  Synthetic
cuucccauucucaagagccu

SEQ ID NO: 378289 - RNA, 21 nt, Artificial Sequence
  Synthetic
ccuucccauucucaagagccu

SEQ ID NO: 378290 - RNA, 22 nt, Artificial Sequence
  Synthetic
gccuucccauucucaagagccu

SEQ ID NO: 378291 - RNA, 23 nt, Artificial Sequence
  Synthetic
ggccuucccauucucaagagccu

SEQ ID NO: 378292 - RNA, 24 nt, Artificial Sequence
  Synthetic
aggccuucccauucucaagagccu

SEQ ID NO: 378293 - RNA, 18 nt, Artificial Sequence
  Synthetic
agauuaacaagagagccu

SEQ ID NO: 378294 - RNA, 19 nt, Artificial Sequence
  Synthetic
aagauuaacaagagagccu

SEQ ID NO: 378295 - RNA, 20 nt, Artificial Sequence
  Synthetic
uaagauuaacaagagagccu

SEQ ID NO: 378296 - RNA, 21 nt, Artificial Sequence
  Synthetic
cuaagauuaacaagagagccu

SEQ ID NO: 378297 - RNA, 22 nt, Artificial Sequence
  Synthetic
ccuaagauuaacaagagagccu

SEQ ID NO: 378298 - RNA, 23 nt, Artificial Sequence
  Synthetic
gccuaagauuaacaagagagccu

SEQ ID NO: 378299 - RNA, 24 nt, Artificial Sequence
  Synthetic
ugccuaagauuaacaagagagccu

SEQ ID NO: 378300 - RNA, 18 nt, Artificial Sequence
  Synthetic
aaaacucccauagagccu

SEQ ID NO: 378301 - RNA, 19 nt, Artificial Sequence
  Synthetic
uaaaacucccauagagccu

SEQ ID NO: 378302 - RNA, 20 nt, Artificial Sequence
  Synthetic
auaaaacucccauagagccu

SEQ ID NO: 378303 - RNA, 21 nt, Artificial Sequence
  Synthetic
gauaaaacucccauagagccu

SEQ ID NO: 378304 - RNA, 22 nt, Artificial Sequence
  Synthetic
agauaaaacucccauagagccu

SEQ ID NO: 378305 - RNA, 23 nt, Artificial Sequence
  Synthetic
cagauaaaacucccauagagccu

SEQ ID NO: 378306 - RNA, 24 nt, Artificial Sequence
  Synthetic
ccagauaaaacucccauagagccu

SEQ ID NO: 378307 - RNA, 18 nt, Artificial Sequence
  Synthetic
acagggcaaagggagccu

SEQ ID NO: 378308 - RNA, 19 nt, Artificial Sequence
  Synthetic
aacagggcaaagggagccu

SEQ ID NO: 378309 - RNA, 20 nt, Artificial Sequence
  Synthetic
gaacagggcaaagggagccu

SEQ ID NO: 378310 - RNA, 21 nt, Artificial Sequence
  Synthetic
agaacagggcaaagggagccu

SEQ ID NO: 378311 - RNA, 22 nt, Artificial Sequence
  Synthetic
aagaacagggcaaagggagccu

SEQ ID NO: 378312 - RNA, 23 nt, Artificial Sequence
  Synthetic
uaagaacagggcaaagggagccu

SEQ ID NO: 378313 - RNA, 24 nt, Artificial Sequence
  Synthetic
cuaagaacagggcaaagggagccu

SEQ ID NO: 378314 - RNA, 18 nt, Artificial Sequence
  Synthetic
uaucugaaaauggagccu

SEQ ID NO: 378315 - RNA, 19 nt, Artificial Sequence
  Synthetic
auaucugaaaauggagccu

SEQ ID NO: 378316 - RNA, 20 nt, Artificial Sequence
  Synthetic
aauaucugaaaauggagccu

SEQ ID NO: 378317 - RNA, 21 nt, Artificial Sequence
  Synthetic
aaauaucugaaaauggagccu

SEQ ID NO: 378318 - RNA, 22 nt, Artificial Sequence
  Synthetic
aaaauaucugaaaauggagccu

SEQ ID NO: 378319 - RNA, 23 nt, Artificial Sequence
  Synthetic
aaaaauaucugaaaauggagccu

SEQ ID NO: 378320 - RNA, 24 nt, Artificial Sequence
  Synthetic
caaaaauaucugaaaauggagccu

SEQ ID NO: 378321 - RNA, 18 nt, Artificial Sequence
  Synthetic
gaaggaucacuugagccu

SEQ ID NO: 378322 - RNA, 19 nt, Artificial Sequence
  Synthetic
ugaaggaucacuugagccu

SEQ ID NO: 378323 - RNA, 20 nt, Artificial Sequence
  Synthetic
cugaaggaucacuugagccu

SEQ ID NO: 378324 - RNA, 21 nt, Artificial Sequence
  Synthetic
gcugaaggaucacuugagccu

SEQ ID NO: 378325 - RNA, 22 nt, Artificial Sequence
  Synthetic
ggcugaaggaucacuugagccu

SEQ ID NO: 378326 - RNA, 23 nt, Artificial Sequence
  Synthetic
aggcugaaggaucacuugagccu

SEQ ID NO: 378327 - RNA, 24 nt, Artificial Sequence
  Synthetic
gaggcugaaggaucacuugagccu

SEQ ID NO: 378328 - RNA, 18 nt, Artificial Sequence
  Synthetic
ggaggauugcuugagccu

SEQ ID NO: 378329 - RNA, 19 nt, Artificial Sequence
  Synthetic
aggaggauugcuugagccu

SEQ ID NO: 378330 - RNA, 20 nt, Artificial Sequence
  Synthetic
caggaggauugcuugagccu

SEQ ID NO: 378331 - RNA, 21 nt, Artificial Sequence
  Synthetic
gcaggaggauugcuugagccu

SEQ ID NO: 378332 - RNA, 22 nt, Artificial Sequence
  Synthetic
ggcaggaggauugcuugagccu

SEQ ID NO: 378333 - RNA, 23 nt, Artificial Sequence
  Synthetic
aggcaggaggauugcuugagccu

SEQ ID NO: 378334 - RNA, 24 nt, Artificial Sequence
  Synthetic
gaggcaggaggauugcuugagccu

SEQ ID NO: 378335 - RNA, 18 nt, Artificial Sequence
  Synthetic
guguacacuguugagccu

SEQ ID NO: 378336 - RNA, 19 nt, Artificial Sequence
  Synthetic
aguguacacuguugagccu

SEQ ID NO: 378337 - RNA, 20 nt, Artificial Sequence
  Synthetic
uaguguacacuguugagccu

SEQ ID NO: 378338 - RNA, 21 nt, Artificial Sequence
  Synthetic
auaguguacacuguugagccu

SEQ ID NO: 378339 - RNA, 22 nt, Artificial Sequence
  Synthetic
aauaguguacacuguugagccu

SEQ ID NO: 378340 - RNA, 23 nt, Artificial Sequence
  Synthetic
aaauaguguacacuguugagccu

SEQ ID NO: 378341 - RNA, 24 nt, Artificial Sequence
  Synthetic
gaaauaguguacacuguugagccu

SEQ ID NO: 378342 - RNA, 18 nt, Artificial Sequence
  Synthetic
cuccugcuauaauagccu

SEQ ID NO: 378343 - RNA, 19 nt, Artificial Sequence
  Synthetic
ucuccugcuauaauagccu

SEQ ID NO: 378344 - RNA, 20 nt, Artificial Sequence
  Synthetic
uucuccugcuauaauagccu

SEQ ID NO: 378345 - RNA, 21 nt, Artificial Sequence
  Synthetic
uuucuccugcuauaauagccu

SEQ ID NO: 378346 - RNA, 22 nt, Artificial Sequence
  Synthetic
guuucuccugcuauaauagccu

SEQ ID NO: 378347 - RNA, 23 nt, Artificial Sequence
  Synthetic
aguuucuccugcuauaauagccu

SEQ ID NO: 378348 - RNA, 24 nt, Artificial Sequence
  Synthetic
gaguuucuccugcuauaauagccu

SEQ ID NO: 378349 - RNA, 18 nt, Artificial Sequence
  Synthetic
gugucuucuauauagccu

SEQ ID NO: 378350 - RNA, 19 nt, Artificial Sequence
  Synthetic
cgugucuucuauauagccu

SEQ ID NO: 378351 - RNA, 20 nt, Artificial Sequence
  Synthetic
ucgugucuucuauauagccu

SEQ ID NO: 378352 - RNA, 21 nt, Artificial Sequence
  Synthetic
aucgugucuucuauauagccu

SEQ ID NO: 378353 - RNA, 22 nt, Artificial Sequence
  Synthetic
aaucgugucuucuauauagccu

SEQ ID NO: 378354 - RNA, 23 nt, Artificial Sequence
  Synthetic
caaucgugucuucuauauagccu

SEQ ID NO: 378355 - RNA, 24 nt, Artificial Sequence
  Synthetic
gcaaucgugucuucuauauagccu

SEQ ID NO: 378356 - RNA, 18 nt, Artificial Sequence
  Synthetic
ccaagucuauccuagccu

SEQ ID NO: 378357 - RNA, 19 nt, Artificial Sequence
  Synthetic
cccaagucuauccuagccu

SEQ ID NO: 378358 - RNA, 20 nt, Artificial Sequence
  Synthetic
ucccaagucuauccuagccu

SEQ ID NO: 378359 - RNA, 21 nt, Artificial Sequence
  Synthetic
uucccaagucuauccuagccu

SEQ ID NO: 378360 - RNA, 22 nt, Artificial Sequence
  Synthetic
uuucccaagucuauccuagccu

SEQ ID NO: 378361 - RNA, 23 nt, Artificial Sequence
  Synthetic
auuucccaagucuauccuagccu

SEQ ID NO: 378362 - RNA, 24 nt, Artificial Sequence
  Synthetic
uauuucccaagucuauccuagccu

SEQ ID NO: 378363 - RNA, 18 nt, Artificial Sequence
  Synthetic
ucaacacacugcuagccu

SEQ ID NO: 378364 - RNA, 19 nt, Artificial Sequence
  Synthetic
uucaacacacugcuagccu

SEQ ID NO: 378365 - RNA, 20 nt, Artificial Sequence
  Synthetic
auucaacacacugcuagccu

SEQ ID NO: 378366 - RNA, 21 nt, Artificial Sequence
  Synthetic
aauucaacacacugcuagccu

SEQ ID NO: 378367 - RNA, 22 nt, Artificial Sequence
  Synthetic
gaauucaacacacugcuagccu

SEQ ID NO: 378368 - RNA, 23 nt, Artificial Sequence
  Synthetic
cgaauucaacacacugcuagccu

SEQ ID NO: 378369 - RNA, 24 nt, Artificial Sequence
  Synthetic
ccgaauucaacacacugcuagccu

SEQ ID NO: 378370 - RNA, 18 nt, Artificial Sequence
  Synthetic
cccauccgcuaguagccu

SEQ ID NO: 378371 - RNA, 19 nt, Artificial Sequence
  Synthetic
ucccauccgcuaguagccu

SEQ ID NO: 378372 - RNA, 20 nt, Artificial Sequence
  Synthetic
uucccauccgcuaguagccu

SEQ ID NO: 378373 - RNA, 21 nt, Artificial Sequence
  Synthetic
cuucccauccgcuaguagccu

SEQ ID NO: 378374 - RNA, 22 nt, Artificial Sequence
  Synthetic
ucuucccauccgcuaguagccu

SEQ ID NO: 378375 - RNA, 23 nt, Artificial Sequence
  Synthetic
cucuucccauccgcuaguagccu

SEQ ID NO: 378376 - RNA, 24 nt, Artificial Sequence
  Synthetic
ucucuucccauccgcuaguagccu

SEQ ID NO: 378377 - RNA, 18 nt, Artificial Sequence
  Synthetic
aaugcuacgugguagccu

SEQ ID NO: 378378 - RNA, 19 nt, Artificial Sequence
  Synthetic
aaaugcuacgugguagccu

SEQ ID NO: 378379 - RNA, 20 nt, Artificial Sequence
  Synthetic
gaaaugcuacgugguagccu

SEQ ID NO: 378380 - RNA, 21 nt, Artificial Sequence
  Synthetic
ugaaaugcuacgugguagccu

SEQ ID NO: 378381 - RNA, 22 nt, Artificial Sequence
  Synthetic
cugaaaugcuacgugguagccu

SEQ ID NO: 378382 - RNA, 23 nt, Artificial Sequence
  Synthetic
ccugaaaugcuacgugguagccu

SEQ ID NO: 378383 - RNA, 24 nt, Artificial Sequence
  Synthetic
uccugaaaugcuacgugguagccu

SEQ ID NO: 378384 - RNA, 18 nt, Artificial Sequence
  Synthetic
ucucgcaucauguagccu

SEQ ID NO: 378385 - RNA, 19 nt, Artificial Sequence
  Synthetic
aucucgcaucauguagccu

SEQ ID NO: 378386 - RNA, 20 nt, Artificial Sequence
  Synthetic
uaucucgcaucauguagccu

SEQ ID NO: 378387 - RNA, 21 nt, Artificial Sequence
  Synthetic
auaucucgcaucauguagccu

SEQ ID NO: 378388 - RNA, 22 nt, Artificial Sequence
  Synthetic
cauaucucgcaucauguagccu

SEQ ID NO: 378389 - RNA, 23 nt, Artificial Sequence
  Synthetic
ucauaucucgcaucauguagccu

SEQ ID NO: 378390 - RNA, 24 nt, Artificial Sequence
  Synthetic
gucauaucucgcaucauguagccu

SEQ ID NO: 378391 - RNA, 18 nt, Artificial Sequence
  Synthetic
acauuaaaguuguagccu

SEQ ID NO: 378392 - RNA, 19 nt, Artificial Sequence
  Synthetic
cacauuaaaguuguagccu

SEQ ID NO: 378393 - RNA, 20 nt, Artificial Sequence
  Synthetic
ccacauuaaaguuguagccu

SEQ ID NO: 378394 - RNA, 21 nt, Artificial Sequence
  Synthetic
gccacauuaaaguuguagccu

SEQ ID NO: 378395 - RNA, 22 nt, Artificial Sequence
  Synthetic
ugccacauuaaaguuguagccu

SEQ ID NO: 378396 - RNA, 23 nt, Artificial Sequence
  Synthetic
uugccacauuaaaguuguagccu

SEQ ID NO: 378397 - RNA, 24 nt, Artificial Sequence
  Synthetic
uuugccacauuaaaguuguagccu

SEQ ID NO: 378398 - RNA, 18 nt, Artificial Sequence
  Synthetic
gggaugaguuguuagccu

SEQ ID NO: 378399 - RNA, 19 nt, Artificial Sequence
  Synthetic
ugggaugaguuguuagccu

SEQ ID NO: 378400 - RNA, 20 nt, Artificial Sequence
  Synthetic
gugggaugaguuguuagccu

SEQ ID NO: 378401 - RNA, 21 nt, Artificial Sequence
  Synthetic
agugggaugaguuguuagccu

SEQ ID NO: 378402 - RNA, 22 nt, Artificial Sequence
  Synthetic
cagugggaugaguuguuagccu

SEQ ID NO: 378403 - RNA, 23 nt, Artificial Sequence
  Synthetic
acagugggaugaguuguuagccu

SEQ ID NO: 378404 - RNA, 24 nt, Artificial Sequence
  Synthetic
uacagugggaugaguuguuagccu

SEQ ID NO: 378405 - RNA, 18 nt, Artificial Sequence
  Synthetic
uuuugaugguuuuagccu

SEQ ID NO: 378406 - RNA, 19 nt, Artificial Sequence
  Synthetic
uuuuugaugguuuuagccu

SEQ ID NO: 378407 - RNA, 20 nt, Artificial Sequence
  Synthetic
uuuuuugaugguuuuagccu

SEQ ID NO: 378408 - RNA, 21 nt, Artificial Sequence
  Synthetic
auuuuuugaugguuuuagccu

SEQ ID NO: 378409 - RNA, 22 nt, Artificial Sequence
  Synthetic
cauuuuuugaugguuuuagccu

SEQ ID NO: 378410 - RNA, 23 nt, Artificial Sequence
  Synthetic
acauuuuuugaugguuuuagccu

SEQ ID NO: 378411 - RNA, 24 nt, Artificial Sequence
  Synthetic
aacauuuuuugaugguuuuagccu

SEQ ID NO: 378412 - RNA, 18 nt, Artificial Sequence
  Synthetic
caaagaacacagacgccu

SEQ ID NO: 378413 - RNA, 19 nt, Artificial Sequence
  Synthetic
acaaagaacacagacgccu

SEQ ID NO: 378414 - RNA, 20 nt, Artificial Sequence
  Synthetic
cacaaagaacacagacgccu

SEQ ID NO: 378415 - RNA, 21 nt, Artificial Sequence
  Synthetic
acacaaagaacacagacgccu

SEQ ID NO: 378416 - RNA, 22 nt, Artificial Sequence
  Synthetic
gacacaaagaacacagacgccu

SEQ ID NO: 378417 - RNA, 23 nt, Artificial Sequence
  Synthetic
ugacacaaagaacacagacgccu

SEQ ID NO: 378418 - RNA, 24 nt, Artificial Sequence
  Synthetic
augacacaaagaacacagacgccu

SEQ ID NO: 378419 - RNA, 18 nt, Artificial Sequence
  Synthetic
gcuauucccaucccgccu

SEQ ID NO: 378420 - RNA, 19 nt, Artificial Sequence
  Synthetic
ugcuauucccaucccgccu

SEQ ID NO: 378421 - RNA, 20 nt, Artificial Sequence
  Synthetic
augcuauucccaucccgccu

SEQ ID NO: 378422 - RNA, 21 nt, Artificial Sequence
  Synthetic
caugcuauucccaucccgccu

SEQ ID NO: 378423 - RNA, 22 nt, Artificial Sequence
  Synthetic
ccaugcuauucccaucccgccu

SEQ ID NO: 378424 - RNA, 23 nt, Artificial Sequence
  Synthetic
accaugcuauucccaucccgccu

SEQ ID NO: 378425 - RNA, 24 nt, Artificial Sequence
  Synthetic
uaccaugcuauucccaucccgccu

SEQ ID NO: 378426 - RNA, 18 nt, Artificial Sequence
  Synthetic
cgaggagaaauugcgccu

SEQ ID NO: 378427 - RNA, 19 nt, Artificial Sequence
  Synthetic
ucgaggagaaauugcgccu

SEQ ID NO: 378428 - RNA, 20 nt, Artificial Sequence
  Synthetic
uucgaggagaaauugcgccu

SEQ ID NO: 378429 - RNA, 21 nt, Artificial Sequence
  Synthetic
cuucgaggagaaauugcgccu

SEQ ID NO: 378430 - RNA, 22 nt, Artificial Sequence
  Synthetic
acuucgaggagaaauugcgccu

SEQ ID NO: 378431 - RNA, 23 nt, Artificial Sequence
  Synthetic
cacuucgaggagaaauugcgccu

SEQ ID NO: 378432 - RNA, 24 nt, Artificial Sequence
  Synthetic
gcacuucgaggagaaauugcgccu

SEQ ID NO: 378433 - RNA, 18 nt, Artificial Sequence
  Synthetic
acaguuagauaaaggccu

SEQ ID NO: 378434 - RNA, 19 nt, Artificial Sequence
  Synthetic
gacaguuagauaaaggccu

SEQ ID NO: 378435 - RNA, 20 nt, Artificial Sequence
  Synthetic
agacaguuagauaaaggccu

SEQ ID NO: 378436 - RNA, 21 nt, Artificial Sequence
  Synthetic
cagacaguuagauaaaggccu

SEQ ID NO: 378437 - RNA, 22 nt, Artificial Sequence
  Synthetic
ucagacaguuagauaaaggccu

SEQ ID NO: 378438 - RNA, 23 nt, Artificial Sequence
  Synthetic
gucagacaguuagauaaaggccu

SEQ ID NO: 378439 - RNA, 24 nt, Artificial Sequence
  Synthetic
agucagacaguuagauaaaggccu

SEQ ID NO: 378440 - RNA, 18 nt, Artificial Sequence
  Synthetic
caagauacugcaaggccu

SEQ ID NO: 378441 - RNA, 19 nt, Artificial Sequence
  Synthetic
ccaagauacugcaaggccu

SEQ ID NO: 378442 - RNA, 20 nt, Artificial Sequence
  Synthetic
cccaagauacugcaaggccu

SEQ ID NO: 378443 - RNA, 21 nt, Artificial Sequence
  Synthetic
ucccaagauacugcaaggccu

SEQ ID NO: 378444 - RNA, 22 nt, Artificial Sequence
  Synthetic
aucccaagauacugcaaggccu

SEQ ID NO: 378445 - RNA, 23 nt, Artificial Sequence
  Synthetic
uaucccaagauacugcaaggccu

SEQ ID NO: 378446 - RNA, 24 nt, Artificial Sequence
  Synthetic
cuaucccaagauacugcaaggccu

SEQ ID NO: 378447 - RNA, 18 nt, Artificial Sequence
  Synthetic
agggauauaagaaggccu

SEQ ID NO: 378448 - RNA, 19 nt, Artificial Sequence
  Synthetic
uagggauauaagaaggccu

SEQ ID NO: 378449 - RNA, 20 nt, Artificial Sequence
  Synthetic
auagggauauaagaaggccu

SEQ ID NO: 378450 - RNA, 21 nt, Artificial Sequence
  Synthetic
aauagggauauaagaaggccu

SEQ ID NO: 378451 - RNA, 22 nt, Artificial Sequence
  Synthetic
uaauagggauauaagaaggccu

SEQ ID NO: 378452 - RNA, 23 nt, Artificial Sequence
  Synthetic
auaauagggauauaagaaggccu

SEQ ID NO: 378453 - RNA, 24 nt, Artificial Sequence
  Synthetic
cauaauagggauauaagaaggccu

SEQ ID NO: 378454 - RNA, 18 nt, Artificial Sequence
  Synthetic
agucucaaguccaggccu

SEQ ID NO: 378455 - RNA, 19 nt, Artificial Sequence
  Synthetic
cagucucaaguccaggccu

SEQ ID NO: 378456 - RNA, 20 nt, Artificial Sequence
  Synthetic
ccagucucaaguccaggccu

SEQ ID NO: 378457 - RNA, 21 nt, Artificial Sequence
  Synthetic
accagucucaaguccaggccu

SEQ ID NO: 378458 - RNA, 22 nt, Artificial Sequence
  Synthetic
caccagucucaaguccaggccu

SEQ ID NO: 378459 - RNA, 23 nt, Artificial Sequence
  Synthetic
acaccagucucaaguccaggccu

SEQ ID NO: 378460 - RNA, 24 nt, Artificial Sequence
  Synthetic
cacaccagucucaaguccaggccu

SEQ ID NO: 378461 - RNA, 18 nt, Artificial Sequence
  Synthetic
ccaauggaacagaggccu

SEQ ID NO: 378462 - RNA, 19 nt, Artificial Sequence
  Synthetic
accaauggaacagaggccu

SEQ ID NO: 378463 - RNA, 20 nt, Artificial Sequence
  Synthetic
gaccaauggaacagaggccu

SEQ ID NO: 378464 - RNA, 21 nt, Artificial Sequence
  Synthetic
agaccaauggaacagaggccu

SEQ ID NO: 378465 - RNA, 22 nt, Artificial Sequence
  Synthetic
uagaccaauggaacagaggccu

SEQ ID NO: 378466 - RNA, 23 nt, Artificial Sequence
  Synthetic
auagaccaauggaacagaggccu

SEQ ID NO: 378467 - RNA, 24 nt, Artificial Sequence
  Synthetic
uauagaccaauggaacagaggccu

SEQ ID NO: 378468 - RNA, 18 nt, Artificial Sequence
  Synthetic
guaaguuuccggaggccu

SEQ ID NO: 378469 - RNA, 19 nt, Artificial Sequence
  Synthetic
uguaaguuuccggaggccu

SEQ ID NO: 378470 - RNA, 20 nt, Artificial Sequence
  Synthetic
uuguaaguuuccggaggccu

SEQ ID NO: 378471 - RNA, 21 nt, Artificial Sequence
  Synthetic
auuguaaguuuccggaggccu

SEQ ID NO: 378472 - RNA, 22 nt, Artificial Sequence
  Synthetic
gauuguaaguuuccggaggccu

SEQ ID NO: 378473 - RNA, 23 nt, Artificial Sequence
  Synthetic
ugauuguaaguuuccggaggccu

SEQ ID NO: 378474 - RNA, 24 nt, Artificial Sequence
  Synthetic
augauuguaaguuuccggaggccu

SEQ ID NO: 378475 - RNA, 18 nt, Artificial Sequence
  Synthetic
uggcuccuggggaggccu

SEQ ID NO: 378476 - RNA, 19 nt, Artificial Sequence
  Synthetic
uuggcuccuggggaggccu

SEQ ID NO: 378477 - RNA, 20 nt, Artificial Sequence
  Synthetic
cuuggcuccuggggaggccu

SEQ ID NO: 378478 - RNA, 21 nt, Artificial Sequence
  Synthetic
gcuuggcuccuggggaggccu

SEQ ID NO: 378479 - RNA, 22 nt, Artificial Sequence
  Synthetic
ugcuuggcuccuggggaggccu

SEQ ID NO: 378480 - RNA, 23 nt, Artificial Sequence
  Synthetic
uugcuuggcuccuggggaggccu

SEQ ID NO: 378481 - RNA, 24 nt, Artificial Sequence
  Synthetic
uuugcuuggcuccuggggaggccu

SEQ ID NO: 378482 - RNA, 18 nt, Artificial Sequence
  Synthetic
acauggcuggggaggccu

SEQ ID NO: 378483 - RNA, 19 nt, Artificial Sequence
  Synthetic
cacauggcuggggaggccu

SEQ ID NO: 378484 - RNA, 20 nt, Artificial Sequence
  Synthetic
ccacauggcuggggaggccu

SEQ ID NO: 378485 - RNA, 21 nt, Artificial Sequence
  Synthetic
uccacauggcuggggaggccu

SEQ ID NO: 378486 - RNA, 22 nt, Artificial Sequence
  Synthetic
uuccacauggcuggggaggccu

SEQ ID NO: 378487 - RNA, 23 nt, Artificial Sequence
  Synthetic
guuccacauggcuggggaggccu

SEQ ID NO: 378488 - RNA, 24 nt, Artificial Sequence
  Synthetic
aguuccacauggcuggggaggccu

SEQ ID NO: 378489 - RNA, 18 nt, Artificial Sequence
  Synthetic
gcauggcuggggaggccu

SEQ ID NO: 378490 - RNA, 19 nt, Artificial Sequence
  Synthetic
agcauggcuggggaggccu

SEQ ID NO: 378491 - RNA, 20 nt, Artificial Sequence
  Synthetic
cagcauggcuggggaggccu

SEQ ID NO: 378492 - RNA, 19 nt, Artificial Sequence
  Synthetic
ugcauggcuggggaggccu

SEQ ID NO: 378493 - RNA, 20 nt, Artificial Sequence
  Synthetic
uugcauggcuggggaggccu

SEQ ID NO: 378494 - RNA, 21 nt, Artificial Sequence
  Synthetic
uuugcauggcuggggaggccu

SEQ ID NO: 378495 - RNA, 22 nt, Artificial Sequence
  Synthetic
guuugcauggcuggggaggccu

SEQ ID NO: 378496 - RNA, 23 nt, Artificial Sequence
  Synthetic
gguuugcauggcuggggaggccu

SEQ ID NO: 378497 - RNA, 24 nt, Artificial Sequence
  Synthetic
ugguuugcauggcuggggaggccu

SEQ ID NO: 378498 - RNA, 18 nt, Artificial Sequence
  Synthetic
auauggcuggggaggccu

SEQ ID NO: 378499 - RNA, 19 nt, Artificial Sequence
  Synthetic
aauauggcuggggaggccu

SEQ ID NO: 378500 - RNA, 20 nt, Artificial Sequence
  Synthetic
caauauggcuggggaggccu

SEQ ID NO: 378501 - RNA, 21 nt, Artificial Sequence
  Synthetic
ucaauauggcuggggaggccu

SEQ ID NO: 378502 - RNA, 22 nt, Artificial Sequence
  Synthetic
uucaauauggcuggggaggccu

SEQ ID NO: 378503 - RNA, 23 nt, Artificial Sequence
  Synthetic
guucaauauggcuggggaggccu

SEQ ID NO: 378504 - RNA, 24 nt, Artificial Sequence
  Synthetic
aguucaauauggcuggggaggccu

SEQ ID NO: 378505 - RNA, 18 nt, Artificial Sequence
  Synthetic
guguggcuggggaggccu

SEQ ID NO: 378506 - RNA, 19 nt, Artificial Sequence
  Synthetic
uguguggcuggggaggccu

SEQ ID NO: 378507 - RNA, 20 nt, Artificial Sequence
  Synthetic
cuguguggcuggggaggccu

SEQ ID NO: 378508 - RNA, 21 nt, Artificial Sequence
  Synthetic
ucuguguggcuggggaggccu

SEQ ID NO: 378509 - RNA, 22 nt, Artificial Sequence
  Synthetic
uucuguguggcuggggaggccu

SEQ ID NO: 378510 - RNA, 23 nt, Artificial Sequence
  Synthetic
guucuguguggcuggggaggccu

SEQ ID NO: 378511 - RNA, 24 nt, Artificial Sequence
  Synthetic
aguucuguguggcuggggaggccu

SEQ ID NO: 378512 - RNA, 18 nt, Artificial Sequence
  Synthetic
cagcuucuggggaggccu

SEQ ID NO: 378513 - RNA, 19 nt, Artificial Sequence
  Synthetic
ucagcuucuggggaggccu

SEQ ID NO: 378514 - RNA, 20 nt, Artificial Sequence
  Synthetic
cucagcuucuggggaggccu

SEQ ID NO: 378515 - RNA, 21 nt, Artificial Sequence
  Synthetic
acucagcuucuggggaggccu

SEQ ID NO: 378516 - RNA, 22 nt, Artificial Sequence
  Synthetic
uacucagcuucuggggaggccu

SEQ ID NO: 378517 - RNA, 23 nt, Artificial Sequence
  Synthetic
cuacucagcuucuggggaggccu

SEQ ID NO: 378518 - RNA, 24 nt, Artificial Sequence
  Synthetic
ucuacucagcuucuggggaggccu

SEQ ID NO: 378519 - RNA, 18 nt, Artificial Sequence
  Synthetic
cuguuucuggggaggccu

SEQ ID NO: 378520 - RNA, 19 nt, Artificial Sequence
  Synthetic
ucuguuucuggggaggccu

SEQ ID NO: 378521 - RNA, 20 nt, Artificial Sequence
  Synthetic
aucuguuucuggggaggccu

SEQ ID NO: 378522 - RNA, 21 nt, Artificial Sequence
  Synthetic
caucuguuucuggggaggccu

SEQ ID NO: 378523 - RNA, 22 nt, Artificial Sequence
  Synthetic
acaucuguuucuggggaggccu

SEQ ID NO: 378524 - RNA, 23 nt, Artificial Sequence
  Synthetic
aacaucuguuucuggggaggccu

SEQ ID NO: 378525 - RNA, 24 nt, Artificial Sequence
  Synthetic
caacaucuguuucuggggaggccu

SEQ ID NO: 378526 - RNA, 18 nt, Artificial Sequence
  Synthetic
acauggcuggguaggccu

SEQ ID NO: 378527 - RNA, 19 nt, Artificial Sequence
  Synthetic
cacauggcuggguaggccu

SEQ ID NO: 378528 - RNA, 20 nt, Artificial Sequence
  Synthetic
ccacauggcuggguaggccu

SEQ ID NO: 378529 - RNA, 21 nt, Artificial Sequence
  Synthetic
uccacauggcuggguaggccu

SEQ ID NO: 378530 - RNA, 22 nt, Artificial Sequence
  Synthetic
uuccacauggcuggguaggccu

SEQ ID NO: 378531 - RNA, 23 nt, Artificial Sequence
  Synthetic
guuccacauggcuggguaggccu

SEQ ID NO: 378532 - RNA, 24 nt, Artificial Sequence
  Synthetic
aguuccacauggcuggguaggccu

SEQ ID NO: 378533 - RNA, 18 nt, Artificial Sequence
  Synthetic
uauuggccuuuuaggccu

SEQ ID NO: 378534 - RNA, 19 nt, Artificial Sequence
  Synthetic
auauuggccuuuuaggccu

SEQ ID NO: 378535 - RNA, 20 nt, Artificial Sequence
  Synthetic
uauauuggccuuuuaggccu

SEQ ID NO: 378536 - RNA, 21 nt, Artificial Sequence
  Synthetic
uuauauuggccuuuuaggccu

SEQ ID NO: 378537 - RNA, 22 nt, Artificial Sequence
  Synthetic
auuauauuggccuuuuaggccu

SEQ ID NO: 378538 - RNA, 23 nt, Artificial Sequence
  Synthetic
gauuauauuggccuuuuaggccu

SEQ ID NO: 378539 - RNA, 24 nt, Artificial Sequence
  Synthetic
ugauuauauuggccuuuuaggccu

SEQ ID NO: 378540 - RNA, 18 nt, Artificial Sequence
  Synthetic
aaucaggucacacggccu

SEQ ID NO: 378541 - RNA, 19 nt, Artificial Sequence
  Synthetic
gaaucaggucacacggccu

SEQ ID NO: 378542 - RNA, 20 nt, Artificial Sequence
  Synthetic
ugaaucaggucacacggccu

SEQ ID NO: 378543 - RNA, 21 nt, Artificial Sequence
  Synthetic
cugaaucaggucacacggccu

SEQ ID NO: 378544 - RNA, 22 nt, Artificial Sequence
  Synthetic
ucugaaucaggucacacggccu

SEQ ID NO: 378545 - RNA, 23 nt, Artificial Sequence
  Synthetic
cucugaaucaggucacacggccu

SEQ ID NO: 378546 - RNA, 24 nt, Artificial Sequence
  Synthetic
gcucugaaucaggucacacggccu

SEQ ID NO: 378547 - RNA, 18 nt, Artificial Sequence
  Synthetic
uaagaauuaguacggccu

SEQ ID NO: 378548 - RNA, 19 nt, Artificial Sequence
  Synthetic
auaagaauuaguacggccu

SEQ ID NO: 378549 - RNA, 20 nt, Artificial Sequence
  Synthetic
gauaagaauuaguacggccu

SEQ ID NO: 378550 - RNA, 21 nt, Artificial Sequence
  Synthetic
ugauaagaauuaguacggccu

SEQ ID NO: 378551 - RNA, 22 nt, Artificial Sequence
  Synthetic
augauaagaauuaguacggccu

SEQ ID NO: 378552 - RNA, 23 nt, Artificial Sequence
  Synthetic
uaugauaagaauuaguacggccu

SEQ ID NO: 378553 - RNA, 24 nt, Artificial Sequence
  Synthetic
auaugauaagaauuaguacggccu

SEQ ID NO: 378554 - RNA, 18 nt, Artificial Sequence
  Synthetic
uccuuuugucaagggccu

SEQ ID NO: 378555 - RNA, 19 nt, Artificial Sequence
  Synthetic
cuccuuuugucaagggccu

SEQ ID NO: 378556 - RNA, 20 nt, Artificial Sequence
  Synthetic
ucuccuuuugucaagggccu

SEQ ID NO: 378557 - RNA, 21 nt, Artificial Sequence
  Synthetic
aucuccuuuugucaagggccu

SEQ ID NO: 378558 - RNA, 22 nt, Artificial Sequence
  Synthetic
uaucuccuuuugucaagggccu

SEQ ID NO: 378559 - RNA, 23 nt, Artificial Sequence
  Synthetic
uuaucuccuuuugucaagggccu

SEQ ID NO: 378560 - RNA, 24 nt, Artificial Sequence
  Synthetic
auuaucuccuuuugucaagggccu

SEQ ID NO: 378561 - RNA, 18 nt, Artificial Sequence
  Synthetic
aaaaagucauaagggccu

SEQ ID NO: 378562 - RNA, 19 nt, Artificial Sequence
  Synthetic
gaaaaagucauaagggccu

SEQ ID NO: 378563 - RNA, 20 nt, Artificial Sequence
  Synthetic
agaaaaagucauaagggccu

SEQ ID NO: 378564 - RNA, 21 nt, Artificial Sequence
  Synthetic
cagaaaaagucauaagggccu

SEQ ID NO: 378565 - RNA, 22 nt, Artificial Sequence
  Synthetic
ccagaaaaagucauaagggccu

SEQ ID NO: 378566 - RNA, 23 nt, Artificial Sequence
  Synthetic
cccagaaaaagucauaagggccu

SEQ ID NO: 378567 - RNA, 24 nt, Artificial Sequence
  Synthetic
acccagaaaaagucauaagggccu

SEQ ID NO: 378568 - RNA, 18 nt, Artificial Sequence
  Synthetic
ccagauuguggagggccu

SEQ ID NO: 378569 - RNA, 19 nt, Artificial Sequence
  Synthetic
uccagauuguggagggccu

SEQ ID NO: 378570 - RNA, 20 nt, Artificial Sequence
  Synthetic
guccagauuguggagggccu

SEQ ID NO: 378571 - RNA, 21 nt, Artificial Sequence
  Synthetic
uguccagauuguggagggccu

SEQ ID NO: 378572 - RNA, 22 nt, Artificial Sequence
  Synthetic
guguccagauuguggagggccu

SEQ ID NO: 378573 - RNA, 23 nt, Artificial Sequence
  Synthetic
aguguccagauuguggagggccu

SEQ ID NO: 378574 - RNA, 24 nt, Artificial Sequence
  Synthetic
gaguguccagauuguggagggccu

SEQ ID NO: 378575 - RNA, 18 nt, Artificial Sequence
  Synthetic
cucauuuuaauggggccu

SEQ ID NO: 378576 - RNA, 19 nt, Artificial Sequence
  Synthetic
ucucauuuuaauggggccu

SEQ ID NO: 378577 - RNA, 20 nt, Artificial Sequence
  Synthetic
cucucauuuuaauggggccu

SEQ ID NO: 378578 - RNA, 21 nt, Artificial Sequence
  Synthetic
ucucucauuuuaauggggccu

SEQ ID NO: 378579 - RNA, 22 nt, Artificial Sequence
  Synthetic
cucucucauuuuaauggggccu

SEQ ID NO: 378580 - RNA, 23 nt, Artificial Sequence
  Synthetic
ucucucucauuuuaauggggccu

SEQ ID NO: 378581 - RNA, 24 nt, Artificial Sequence
  Synthetic
gucucucucauuuuaauggggccu

SEQ ID NO: 378582 - RNA, 18 nt, Artificial Sequence
  Synthetic
aagauaguuuuggggccu

SEQ ID NO: 378583 - RNA, 19 nt, Artificial Sequence
  Synthetic
aaagauaguuuuggggccu

SEQ ID NO: 378584 - RNA, 20 nt, Artificial Sequence
  Synthetic
aaaagauaguuuuggggccu

SEQ ID NO: 378585 - RNA, 21 nt, Artificial Sequence
  Synthetic
aaaaagauaguuuuggggccu

SEQ ID NO: 378586 - RNA, 22 nt, Artificial Sequence
  Synthetic
caaaaagauaguuuuggggccu

SEQ ID NO: 378587 - RNA, 23 nt, Artificial Sequence
  Synthetic
ccaaaaagauaguuuuggggccu

SEQ ID NO: 378588 - RNA, 24 nt, Artificial Sequence
  Synthetic
accaaaaagauaguuuuggggccu

SEQ ID NO: 378589 - RNA, 18 nt, Artificial Sequence
  Synthetic
cauuuaaggaaugggccu

SEQ ID NO: 378590 - RNA, 19 nt, Artificial Sequence
  Synthetic
acauuuaaggaaugggccu

SEQ ID NO: 378591 - RNA, 20 nt, Artificial Sequence
  Synthetic
aacauuuaaggaaugggccu

SEQ ID NO: 378592 - RNA, 21 nt, Artificial Sequence
  Synthetic
caacauuuaaggaaugggccu

SEQ ID NO: 378593 - RNA, 22 nt, Artificial Sequence
  Synthetic
gcaacauuuaaggaaugggccu

SEQ ID NO: 378594 - RNA, 23 nt, Artificial Sequence
  Synthetic
agcaacauuuaaggaaugggccu

SEQ ID NO: 378595 - RNA, 24 nt, Artificial Sequence
  Synthetic
uagcaacauuuaaggaaugggccu

SEQ ID NO: 378596 - RNA, 18 nt, Artificial Sequence
  Synthetic
ugccuuaggaaugggccu

SEQ ID NO: 378597 - RNA, 19 nt, Artificial Sequence
  Synthetic
gugccuuaggaaugggccu

SEQ ID NO: 378598 - RNA, 20 nt, Artificial Sequence
  Synthetic
ugugccuuaggaaugggccu

SEQ ID NO: 378599 - RNA, 21 nt, Artificial Sequence
  Synthetic
uugugccuuaggaaugggccu

SEQ ID NO: 378600 - RNA, 22 nt, Artificial Sequence
  Synthetic
cuugugccuuaggaaugggccu

SEQ ID NO: 378601 - RNA, 23 nt, Artificial Sequence
  Synthetic
ccuugugccuuaggaaugggccu

SEQ ID NO: 378602 - RNA, 24 nt, Artificial Sequence
  Synthetic
gccuugugccuuaggaaugggccu

SEQ ID NO: 378603 - RNA, 18 nt, Artificial Sequence
  Synthetic
ccacaagcugcugggccu

SEQ ID NO: 378604 - RNA, 19 nt, Artificial Sequence
  Synthetic
uccacaagcugcugggccu

SEQ ID NO: 378605 - RNA, 20 nt, Artificial Sequence
  Synthetic
auccacaagcugcugggccu

SEQ ID NO: 378606 - RNA, 21 nt, Artificial Sequence
  Synthetic
uauccacaagcugcugggccu

SEQ ID NO: 378607 - RNA, 22 nt, Artificial Sequence
  Synthetic
uuauccacaagcugcugggccu

SEQ ID NO: 378608 - RNA, 23 nt, Artificial Sequence
  Synthetic
cuuauccacaagcugcugggccu

SEQ ID NO: 378609 - RNA, 24 nt, Artificial Sequence
  Synthetic
ucuuauccacaagcugcugggccu

SEQ ID NO: 378610 - RNA, 18 nt, Artificial Sequence
  Synthetic
uaaucaguccuugggccu

SEQ ID NO: 378611 - RNA, 19 nt, Artificial Sequence
  Synthetic
uuaaucaguccuugggccu

SEQ ID NO: 378612 - RNA, 20 nt, Artificial Sequence
  Synthetic
auuaaucaguccuugggccu

SEQ ID NO: 378613 - RNA, 21 nt, Artificial Sequence
  Synthetic
cauuaaucaguccuugggccu

SEQ ID NO: 378614 - RNA, 22 nt, Artificial Sequence
  Synthetic
gcauuaaucaguccuugggccu

SEQ ID NO: 378615 - RNA, 23 nt, Artificial Sequence
  Synthetic
ugcauuaaucaguccuugggccu

SEQ ID NO: 378616 - RNA, 24 nt, Artificial Sequence
  Synthetic
gugcauuaaucaguccuugggccu

SEQ ID NO: 378617 - RNA, 18 nt, Artificial Sequence
  Synthetic
auuuucugcuuugggccu

SEQ ID NO: 378618 - RNA, 19 nt, Artificial Sequence
  Synthetic
cauuuucugcuuugggccu

SEQ ID NO: 378619 - RNA, 20 nt, Artificial Sequence
  Synthetic
acauuuucugcuuugggccu

SEQ ID NO: 378620 - RNA, 21 nt, Artificial Sequence
  Synthetic
aacauuuucugcuuugggccu

SEQ ID NO: 378621 - RNA, 22 nt, Artificial Sequence
  Synthetic
aaacauuuucugcuuugggccu

SEQ ID NO: 378622 - RNA, 23 nt, Artificial Sequence
  Synthetic
aaaacauuuucugcuuugggccu

SEQ ID NO: 378623 - RNA, 24 nt, Artificial Sequence
  Synthetic
caaaacauuuucugcuuugggccu

SEQ ID NO: 378624 - RNA, 18 nt, Artificial Sequence
  Synthetic
uuguucaacucauggccu

SEQ ID NO: 378625 - RNA, 19 nt, Artificial Sequence
  Synthetic
cuuguucaacucauggccu

SEQ ID NO: 378626 - RNA, 20 nt, Artificial Sequence
  Synthetic
gcuuguucaacucauggccu

SEQ ID NO: 378627 - RNA, 21 nt, Artificial Sequence
  Synthetic
agcuuguucaacucauggccu

SEQ ID NO: 378628 - RNA, 22 nt, Artificial Sequence
  Synthetic
aagcuuguucaacucauggccu

SEQ ID NO: 378629 - RNA, 23 nt, Artificial Sequence
  Synthetic
caagcuuguucaacucauggccu

SEQ ID NO: 378630 - RNA, 24 nt, Artificial Sequence
  Synthetic
gcaagcuuguucaacucauggccu

SEQ ID NO: 378631 - RNA, 18 nt, Artificial Sequence
  Synthetic
cuacggaggguauggccu

SEQ ID NO: 378632 - RNA, 19 nt, Artificial Sequence
  Synthetic
ccuacggaggguauggccu

SEQ ID NO: 378633 - RNA, 20 nt, Artificial Sequence
  Synthetic
accuacggaggguauggccu

SEQ ID NO: 378634 - RNA, 21 nt, Artificial Sequence
  Synthetic
gaccuacggaggguauggccu

SEQ ID NO: 378635 - RNA, 22 nt, Artificial Sequence
  Synthetic
ugaccuacggaggguauggccu

SEQ ID NO: 378636 - RNA, 23 nt, Artificial Sequence
  Synthetic
augaccuacggaggguauggccu

SEQ ID NO: 378637 - RNA, 24 nt, Artificial Sequence
  Synthetic
aaugaccuacggaggguauggccu

SEQ ID NO: 378638 - RNA, 18 nt, Artificial Sequence
  Synthetic
guaaauuuaggcuggccu

SEQ ID NO: 378639 - RNA, 19 nt, Artificial Sequence
  Synthetic
gguaaauuuaggcuggccu

SEQ ID NO: 378640 - RNA, 20 nt, Artificial Sequence
  Synthetic
ugguaaauuuaggcuggccu

SEQ ID NO: 378641 - RNA, 21 nt, Artificial Sequence
  Synthetic
gugguaaauuuaggcuggccu

SEQ ID NO: 378642 - RNA, 22 nt, Artificial Sequence
  Synthetic
agugguaaauuuaggcuggccu

SEQ ID NO: 378643 - RNA, 23 nt, Artificial Sequence
  Synthetic
aagugguaaauuuaggcuggccu

SEQ ID NO: 378644 - RNA, 24 nt, Artificial Sequence
  Synthetic
aaagugguaaauuuaggcuggccu

SEQ ID NO: 378645 - RNA, 18 nt, Artificial Sequence
  Synthetic
auggguugaguguggccu

SEQ ID NO: 378646 - RNA, 19 nt, Artificial Sequence
  Synthetic
aauggguugaguguggccu

SEQ ID NO: 378647 - RNA, 20 nt, Artificial Sequence
  Synthetic
gaauggguugaguguggccu

SEQ ID NO: 378648 - RNA, 21 nt, Artificial Sequence
  Synthetic
agaauggguugaguguggccu

SEQ ID NO: 378649 - RNA, 22 nt, Artificial Sequence
  Synthetic
aagaauggguugaguguggccu

SEQ ID NO: 378650 - RNA, 23 nt, Artificial Sequence
  Synthetic
uaagaauggguugaguguggccu

SEQ ID NO: 378651 - RNA, 24 nt, Artificial Sequence
  Synthetic
uuaagaauggguugaguguggccu

SEQ ID NO: 378652 - RNA, 18 nt, Artificial Sequence
  Synthetic
cuuuuaagaaaaaugccu

SEQ ID NO: 378653 - RNA, 19 nt, Artificial Sequence
  Synthetic
gcuuuuaagaaaaaugccu

SEQ ID NO: 378654 - RNA, 20 nt, Artificial Sequence
  Synthetic
ugcuuuuaagaaaaaugccu

SEQ ID NO: 378655 - RNA, 21 nt, Artificial Sequence
  Synthetic
gugcuuuuaagaaaaaugccu

SEQ ID NO: 378656 - RNA, 22 nt, Artificial Sequence
  Synthetic
agugcuuuuaagaaaaaugccu

SEQ ID NO: 378657 - RNA, 23 nt, Artificial Sequence
  Synthetic
gagugcuuuuaagaaaaaugccu

SEQ ID NO: 378658 - RNA, 24 nt, Artificial Sequence
  Synthetic
ugagugcuuuuaagaaaaaugccu

SEQ ID NO: 378659 - RNA, 18 nt, Artificial Sequence
  Synthetic
aaaggaauaauaaugccu

SEQ ID NO: 378660 - RNA, 19 nt, Artificial Sequence
  Synthetic
aaaaggaauaauaaugccu

SEQ ID NO: 378661 - RNA, 20 nt, Artificial Sequence
  Synthetic
aaaaaggaauaauaaugccu

SEQ ID NO: 378662 - RNA, 21 nt, Artificial Sequence
  Synthetic
gaaaaaggaauaauaaugccu

SEQ ID NO: 378663 - RNA, 22 nt, Artificial Sequence
  Synthetic
agaaaaaggaauaauaaugccu

SEQ ID NO: 378664 - RNA, 23 nt, Artificial Sequence
  Synthetic
aagaaaaaggaauaauaaugccu

SEQ ID NO: 378665 - RNA, 24 nt, Artificial Sequence
  Synthetic
uaagaaaaaggaauaauaaugccu

SEQ ID NO: 378666 - RNA, 18 nt, Artificial Sequence
  Synthetic
augcagauuuuaaugccu

SEQ ID NO: 378667 - RNA, 19 nt, Artificial Sequence
  Synthetic
caugcagauuuuaaugccu

SEQ ID NO: 378668 - RNA, 20 nt, Artificial Sequence
  Synthetic
ucaugcagauuuuaaugccu

SEQ ID NO: 378669 - RNA, 21 nt, Artificial Sequence
  Synthetic
aucaugcagauuuuaaugccu

SEQ ID NO: 378670 - RNA, 22 nt, Artificial Sequence
  Synthetic
caucaugcagauuuuaaugccu

SEQ ID NO: 378671 - RNA, 23 nt, Artificial Sequence
  Synthetic
acaucaugcagauuuuaaugccu

SEQ ID NO: 378672 - RNA, 24 nt, Artificial Sequence
  Synthetic
aacaucaugcagauuuuaaugccu

SEQ ID NO: 378673 - RNA, 18 nt, Artificial Sequence
  Synthetic
uucuugguucucaugccu

SEQ ID NO: 378674 - RNA, 19 nt, Artificial Sequence
  Synthetic
uuucuugguucucaugccu

SEQ ID NO: 378675 - RNA, 20 nt, Artificial Sequence
  Synthetic
cuuucuugguucucaugccu

SEQ ID NO: 378676 - RNA, 21 nt, Artificial Sequence
  Synthetic
gcuuucuugguucucaugccu

SEQ ID NO: 378677 - RNA, 22 nt, Artificial Sequence
  Synthetic
ggcuuucuugguucucaugccu

SEQ ID NO: 378678 - RNA, 23 nt, Artificial Sequence
  Synthetic
uggcuuucuugguucucaugccu

SEQ ID NO: 378679 - RNA, 24 nt, Artificial Sequence
  Synthetic
uuggcuuucuugguucucaugccu

SEQ ID NO: 378680 - RNA, 18 nt, Artificial Sequence
  Synthetic
uagaaauaguucaugccu

SEQ ID NO: 378681 - RNA, 19 nt, Artificial Sequence
  Synthetic
uuagaaauaguucaugccu

SEQ ID NO: 378682 - RNA, 20 nt, Artificial Sequence
  Synthetic
cuuagaaauaguucaugccu

SEQ ID NO: 378683 - RNA, 21 nt, Artificial Sequence
  Synthetic
ucuuagaaauaguucaugccu

SEQ ID NO: 378684 - RNA, 22 nt, Artificial Sequence
  Synthetic
uucuuagaaauaguucaugccu

SEQ ID NO: 378685 - RNA, 23 nt, Artificial Sequence
  Synthetic
auucuuagaaauaguucaugccu

SEQ ID NO: 378686 - RNA, 24 nt, Artificial Sequence
  Synthetic
aauucuuagaaauaguucaugccu

SEQ ID NO: 378687 - RNA, 18 nt, Artificial Sequence
  Synthetic
uuuuucaguacuaugccu

SEQ ID NO: 378688 - RNA, 19 nt, Artificial Sequence
  Synthetic
uuuuuucaguacuaugccu

SEQ ID NO: 378689 - RNA, 20 nt, Artificial Sequence
  Synthetic
uuuuuuucaguacuaugccu

SEQ ID NO: 378690 - RNA, 21 nt, Artificial Sequence
  Synthetic
uuuuuuuucaguacuaugccu

SEQ ID NO: 378691 - RNA, 22 nt, Artificial Sequence
  Synthetic
uuuuuuuuucaguacuaugccu

SEQ ID NO: 378692 - RNA, 23 nt, Artificial Sequence
  Synthetic
uuuuuuuuuucaguacuaugccu

SEQ ID NO: 378693 - RNA, 24 nt, Artificial Sequence
  Synthetic
uuuuuuuuuuucaguacuaugccu

SEQ ID NO: 378694 - RNA, 18 nt, Artificial Sequence
  Synthetic
ggagagaacauuaugccu

SEQ ID NO: 378695 - RNA, 19 nt, Artificial Sequence
  Synthetic
cggagagaacauuaugccu

SEQ ID NO: 378696 - RNA, 20 nt, Artificial Sequence
  Synthetic
ucggagagaacauuaugccu

SEQ ID NO: 378697 - RNA, 21 nt, Artificial Sequence
  Synthetic
uucggagagaacauuaugccu

SEQ ID NO: 378698 - RNA, 22 nt, Artificial Sequence
  Synthetic
uuucggagagaacauuaugccu

SEQ ID NO: 378699 - RNA, 23 nt, Artificial Sequence
  Synthetic
guuucggagagaacauuaugccu

SEQ ID NO: 378700 - RNA, 24 nt, Artificial Sequence
  Synthetic
gguuucggagagaacauuaugccu

SEQ ID NO: 378701 - RNA, 18 nt, Artificial Sequence
  Synthetic
uuuaagacaguuaugccu

SEQ ID NO: 378702 - RNA, 19 nt, Artificial Sequence
  Synthetic
uuuuaagacaguuaugccu

SEQ ID NO: 378703 - RNA, 20 nt, Artificial Sequence
  Synthetic
uuuuuaagacaguuaugccu

SEQ ID NO: 378704 - RNA, 21 nt, Artificial Sequence
  Synthetic
cuuuuuaagacaguuaugccu

SEQ ID NO: 378705 - RNA, 22 nt, Artificial Sequence
  Synthetic
ucuuuuuaagacaguuaugccu

SEQ ID NO: 378706 - RNA, 23 nt, Artificial Sequence
  Synthetic
cucuuuuuaagacaguuaugccu

SEQ ID NO: 378707 - RNA, 24 nt, Artificial Sequence
  Synthetic
gcucuuuuuaagacaguuaugccu

SEQ ID NO: 378708 - RNA, 18 nt, Artificial Sequence
  Synthetic
aucugauuucaacugccu

SEQ ID NO: 378709 - RNA, 19 nt, Artificial Sequence
  Synthetic
aaucugauuucaacugccu

SEQ ID NO: 378710 - RNA, 20 nt, Artificial Sequence
  Synthetic
aaaucugauuucaacugccu

SEQ ID NO: 378711 - RNA, 21 nt, Artificial Sequence
  Synthetic
aaaaucugauuucaacugccu

SEQ ID NO: 378712 - RNA, 22 nt, Artificial Sequence
  Synthetic
caaaaucugauuucaacugccu

SEQ ID NO: 378713 - RNA, 23 nt, Artificial Sequence
  Synthetic
ucaaaaucugauuucaacugccu

SEQ ID NO: 378714 - RNA, 24 nt, Artificial Sequence
  Synthetic
cucaaaaucugauuucaacugccu

SEQ ID NO: 378715 - RNA, 18 nt, Artificial Sequence
  Synthetic
uuacucuuucuacugccu

SEQ ID NO: 378716 - RNA, 19 nt, Artificial Sequence
  Synthetic
auuacucuuucuacugccu

SEQ ID NO: 378717 - RNA, 20 nt, Artificial Sequence
  Synthetic
uauuacucuuucuacugccu

SEQ ID NO: 378718 - RNA, 21 nt, Artificial Sequence
  Synthetic
uuauuacucuuucuacugccu

SEQ ID NO: 378719 - RNA, 22 nt, Artificial Sequence
  Synthetic
cuuauuacucuuucuacugccu

SEQ ID NO: 378720 - RNA, 23 nt, Artificial Sequence
  Synthetic
ccuuauuacucuuucuacugccu

SEQ ID NO: 378721 - RNA, 24 nt, Artificial Sequence
  Synthetic
uccuuauuacucuuucuacugccu

SEQ ID NO: 378722 - RNA, 18 nt, Artificial Sequence
  Synthetic
gcuuuucuaccccugccu

SEQ ID NO: 378723 - RNA, 19 nt, Artificial Sequence
  Synthetic
agcuuuucuaccccugccu

SEQ ID NO: 378724 - RNA, 20 nt, Artificial Sequence
  Synthetic
cagcuuuucuaccccugccu

SEQ ID NO: 378725 - RNA, 21 nt, Artificial Sequence
  Synthetic
acagcuuuucuaccccugccu

SEQ ID NO: 378726 - RNA, 22 nt, Artificial Sequence
  Synthetic
aacagcuuuucuaccccugccu

SEQ ID NO: 378727 - RNA, 23 nt, Artificial Sequence
  Synthetic
caacagcuuuucuaccccugccu

SEQ ID NO: 378728 - RNA, 24 nt, Artificial Sequence
  Synthetic
ucaacagcuuuucuaccccugccu

SEQ ID NO: 378729 - RNA, 18 nt, Artificial Sequence
  Synthetic
acccaucuuuuccugccu

SEQ ID NO: 378730 - RNA, 19 nt, Artificial Sequence
  Synthetic
cacccaucuuuuccugccu

SEQ ID NO: 378731 - RNA, 20 nt, Artificial Sequence
  Synthetic
acacccaucuuuuccugccu

SEQ ID NO: 378732 - RNA, 21 nt, Artificial Sequence
  Synthetic
aacacccaucuuuuccugccu

SEQ ID NO: 378733 - RNA, 22 nt, Artificial Sequence
  Synthetic
gaacacccaucuuuuccugccu

SEQ ID NO: 378734 - RNA, 23 nt, Artificial Sequence
  Synthetic
ggaacacccaucuuuuccugccu

SEQ ID NO: 378735 - RNA, 24 nt, Artificial Sequence
  Synthetic
uggaacacccaucuuuuccugccu

SEQ ID NO: 378736 - RNA, 18 nt, Artificial Sequence
  Synthetic
ugguggccauagcugccu

SEQ ID NO: 378737 - RNA, 19 nt, Artificial Sequence
  Synthetic
augguggccauagcugccu

SEQ ID NO: 378738 - RNA, 20 nt, Artificial Sequence
  Synthetic
caugguggccauagcugccu

SEQ ID NO: 378739 - RNA, 21 nt, Artificial Sequence
  Synthetic
ccaugguggccauagcugccu

SEQ ID NO: 378740 - RNA, 22 nt, Artificial Sequence
  Synthetic
gccaugguggccauagcugccu

SEQ ID NO: 378741 - RNA, 23 nt, Artificial Sequence
  Synthetic
ggccaugguggccauagcugccu

SEQ ID NO: 378742 - RNA, 24 nt, Artificial Sequence
  Synthetic
uggccaugguggccauagcugccu

SEQ ID NO: 378743 - RNA, 18 nt, Artificial Sequence
  Synthetic
auuauauacaggcugccu

SEQ ID NO: 378744 - RNA, 19 nt, Artificial Sequence
  Synthetic
cauuauauacaggcugccu

SEQ ID NO: 378745 - RNA, 20 nt, Artificial Sequence
  Synthetic
ucauuauauacaggcugccu

SEQ ID NO: 378746 - RNA, 21 nt, Artificial Sequence
  Synthetic
gucauuauauacaggcugccu

SEQ ID NO: 378747 - RNA, 22 nt, Artificial Sequence
  Synthetic
agucauuauauacaggcugccu

SEQ ID NO: 378748 - RNA, 23 nt, Artificial Sequence
  Synthetic
uagucauuauauacaggcugccu

SEQ ID NO: 378749 - RNA, 24 nt, Artificial Sequence
  Synthetic
uuagucauuauauacaggcugccu

SEQ ID NO: 378750 - RNA, 18 nt, Artificial Sequence
  Synthetic
acugaaugagggcugccu

SEQ ID NO: 378751 - RNA, 19 nt, Artificial Sequence
  Synthetic
cacugaaugagggcugccu

SEQ ID NO: 378752 - RNA, 20 nt, Artificial Sequence
  Synthetic
ucacugaaugagggcugccu

SEQ ID NO: 378753 - RNA, 21 nt, Artificial Sequence
  Synthetic
gucacugaaugagggcugccu

SEQ ID NO: 378754 - RNA, 22 nt, Artificial Sequence
  Synthetic
agucacugaaugagggcugccu

SEQ ID NO: 378755 - RNA, 23 nt, Artificial Sequence
  Synthetic
cagucacugaaugagggcugccu

SEQ ID NO: 378756 - RNA, 24 nt, Artificial Sequence
  Synthetic
ucagucacugaaugagggcugccu

SEQ ID NO: 378757 - RNA, 18 nt, Artificial Sequence
  Synthetic
auaucauuuuggcugccu

SEQ ID NO: 378758 - RNA, 19 nt, Artificial Sequence
  Synthetic
aauaucauuuuggcugccu

SEQ ID NO: 378759 - RNA, 20 nt, Artificial Sequence
  Synthetic
aaauaucauuuuggcugccu

SEQ ID NO: 378760 - RNA, 21 nt, Artificial Sequence
  Synthetic
gaaauaucauuuuggcugccu

SEQ ID NO: 378761 - RNA, 22 nt, Artificial Sequence
  Synthetic
agaaauaucauuuuggcugccu

SEQ ID NO: 378762 - RNA, 23 nt, Artificial Sequence
  Synthetic
aagaaauaucauuuuggcugccu

SEQ ID NO: 378763 - RNA, 24 nt, Artificial Sequence
  Synthetic
gaagaaauaucauuuuggcugccu

SEQ ID NO: 378764 - RNA, 18 nt, Artificial Sequence
  Synthetic
cagucccgcagucugccu

SEQ ID NO: 378765 - RNA, 19 nt, Artificial Sequence
  Synthetic
gcagucccgcagucugccu

SEQ ID NO: 378766 - RNA, 20 nt, Artificial Sequence
  Synthetic
ugcagucccgcagucugccu

SEQ ID NO: 378767 - RNA, 21 nt, Artificial Sequence
  Synthetic
augcagucccgcagucugccu

SEQ ID NO: 378768 - RNA, 22 nt, Artificial Sequence
  Synthetic
gaugcagucccgcagucugccu

SEQ ID NO: 378769 - RNA, 23 nt, Artificial Sequence
  Synthetic
ggaugcagucccgcagucugccu

SEQ ID NO: 378770 - RNA, 24 nt, Artificial Sequence
  Synthetic
aggaugcagucccgcagucugccu

SEQ ID NO: 378771 - RNA, 18 nt, Artificial Sequence
  Synthetic
cucaguucaugucugccu

SEQ ID NO: 378772 - RNA, 19 nt, Artificial Sequence
  Synthetic
ccucaguucaugucugccu

SEQ ID NO: 378773 - RNA, 20 nt, Artificial Sequence
  Synthetic
uccucaguucaugucugccu

SEQ ID NO: 378774 - RNA, 21 nt, Artificial Sequence
  Synthetic
guccucaguucaugucugccu

SEQ ID NO: 378775 - RNA, 22 nt, Artificial Sequence
  Synthetic
aguccucaguucaugucugccu

SEQ ID NO: 378776 - RNA, 23 nt, Artificial Sequence
  Synthetic
gaguccucaguucaugucugccu

SEQ ID NO: 378777 - RNA, 24 nt, Artificial Sequence
  Synthetic
cgaguccucaguucaugucugccu

SEQ ID NO: 378778 - RNA, 18 nt, Artificial Sequence
  Synthetic
gaacugaaaauucugccu

SEQ ID NO: 378779 - RNA, 19 nt, Artificial Sequence
  Synthetic
ugaacugaaaauucugccu

SEQ ID NO: 378780 - RNA, 20 nt, Artificial Sequence
  Synthetic
augaacugaaaauucugccu

SEQ ID NO: 378781 - RNA, 21 nt, Artificial Sequence
  Synthetic
aaugaacugaaaauucugccu

SEQ ID NO: 378782 - RNA, 22 nt, Artificial Sequence
  Synthetic
uaaugaacugaaaauucugccu

SEQ ID NO: 378783 - RNA, 23 nt, Artificial Sequence
  Synthetic
uuaaugaacugaaaauucugccu

SEQ ID NO: 378784 - RNA, 24 nt, Artificial Sequence
  Synthetic
uuuaaugaacugaaaauucugccu

SEQ ID NO: 378785 - RNA, 18 nt, Artificial Sequence
  Synthetic
ggcaagucacuucugccu

SEQ ID NO: 378786 - RNA, 19 nt, Artificial Sequence
  Synthetic
aggcaagucacuucugccu

SEQ ID NO: 378787 - RNA, 20 nt, Artificial Sequence
  Synthetic
aaggcaagucacuucugccu

SEQ ID NO: 378788 - RNA, 21 nt, Artificial Sequence
  Synthetic
caaggcaagucacuucugccu

SEQ ID NO: 378789 - RNA, 22 nt, Artificial Sequence
  Synthetic
acaaggcaagucacuucugccu

SEQ ID NO: 378790 - RNA, 23 nt, Artificial Sequence
  Synthetic
gacaaggcaagucacuucugccu

SEQ ID NO: 378791 - RNA, 24 nt, Artificial Sequence
  Synthetic
agacaaggcaagucacuucugccu

SEQ ID NO: 378792 - RNA, 18 nt, Artificial Sequence
  Synthetic
ggcaagucuguucugccu

SEQ ID NO: 378793 - RNA, 19 nt, Artificial Sequence
  Synthetic
aggcaagucuguucugccu

SEQ ID NO: 378794 - RNA, 20 nt, Artificial Sequence
  Synthetic
aaggcaagucuguucugccu

SEQ ID NO: 378795 - RNA, 21 nt, Artificial Sequence
  Synthetic
caaggcaagucuguucugccu

SEQ ID NO: 378796 - RNA, 22 nt, Artificial Sequence
  Synthetic
acaaggcaagucuguucugccu

SEQ ID NO: 378797 - RNA, 23 nt, Artificial Sequence
  Synthetic
gacaaggcaagucuguucugccu

SEQ ID NO: 378798 - RNA, 24 nt, Artificial Sequence
  Synthetic
agacaaggcaagucuguucugccu

SEQ ID NO: 378799 - RNA, 18 nt, Artificial Sequence
  Synthetic
uuaacauuauuucugccu

SEQ ID NO: 378800 - RNA, 19 nt, Artificial Sequence
  Synthetic
uuuaacauuauuucugccu

SEQ ID NO: 378801 - RNA, 20 nt, Artificial Sequence
  Synthetic
uuuuaacauuauuucugccu

SEQ ID NO: 378802 - RNA, 21 nt, Artificial Sequence
  Synthetic
auuuuaacauuauuucugccu

SEQ ID NO: 378803 - RNA, 22 nt, Artificial Sequence
  Synthetic
uauuuuaacauuauuucugccu

SEQ ID NO: 378804 - RNA, 23 nt, Artificial Sequence
  Synthetic
guauuuuaacauuauuucugccu

SEQ ID NO: 378805 - RNA, 24 nt, Artificial Sequence
  Synthetic
uguauuuuaacauuauuucugccu

SEQ ID NO: 378806 - RNA, 18 nt, Artificial Sequence
  Synthetic
auaaugggguuucugccu

SEQ ID NO: 378807 - RNA, 19 nt, Artificial Sequence
  Synthetic
cauaaugggguuucugccu

SEQ ID NO: 378808 - RNA, 20 nt, Artificial Sequence
  Synthetic
gcauaaugggguuucugccu

SEQ ID NO: 378809 - RNA, 21 nt, Artificial Sequence
  Synthetic
agcauaaugggguuucugccu

SEQ ID NO: 378810 - RNA, 22 nt, Artificial Sequence
  Synthetic
uagcauaaugggguuucugccu

SEQ ID NO: 378811 - RNA, 23 nt, Artificial Sequence
  Synthetic
guagcauaaugggguuucugccu

SEQ ID NO: 378812 - RNA, 24 nt, Artificial Sequence
  Synthetic
uguagcauaaugggguuucugccu

SEQ ID NO: 378813 - RNA, 18 nt, Artificial Sequence
  Synthetic
aauccuuguuuucugccu

SEQ ID NO: 378814 - RNA, 19 nt, Artificial Sequence
  Synthetic
aaauccuuguuuucugccu

SEQ ID NO: 378815 - RNA, 20 nt, Artificial Sequence
  Synthetic
caaauccuuguuuucugccu

SEQ ID NO: 378816 - RNA, 21 nt, Artificial Sequence
  Synthetic
ucaaauccuuguuuucugccu

SEQ ID NO: 378817 - RNA, 22 nt, Artificial Sequence
  Synthetic
aucaaauccuuguuuucugccu

SEQ ID NO: 378818 - RNA, 23 nt, Artificial Sequence
  Synthetic
uaucaaauccuuguuuucugccu

SEQ ID NO: 378819 - RNA, 24 nt, Artificial Sequence
  Synthetic
auaucaaauccuuguuuucugccu

SEQ ID NO: 378820 - RNA, 18 nt, Artificial Sequence
  Synthetic
ccucucagcucagugccu

SEQ ID NO: 378821 - RNA, 19 nt, Artificial Sequence
  Synthetic
gccucucagcucagugccu

SEQ ID NO: 378822 - RNA, 20 nt, Artificial Sequence
  Synthetic
cgccucucagcucagugccu

SEQ ID NO: 378823 - RNA, 21 nt, Artificial Sequence
  Synthetic
gcgccucucagcucagugccu

SEQ ID NO: 378824 - RNA, 22 nt, Artificial Sequence
  Synthetic
ugcgccucucagcucagugccu

SEQ ID NO: 378825 - RNA, 23 nt, Artificial Sequence
  Synthetic
cugcgccucucagcucagugccu

SEQ ID NO: 378826 - RNA, 24 nt, Artificial Sequence
  Synthetic
ucugcgccucucagcucagugccu

SEQ ID NO: 378827 - RNA, 18 nt, Artificial Sequence
  Synthetic
aaguucugcaaggugccu

SEQ ID NO: 378828 - RNA, 19 nt, Artificial Sequence
  Synthetic
aaaguucugcaaggugccu

SEQ ID NO: 378829 - RNA, 20 nt, Artificial Sequence
  Synthetic
gaaaguucugcaaggugccu

SEQ ID NO: 378830 - RNA, 21 nt, Artificial Sequence
  Synthetic
agaaaguucugcaaggugccu

SEQ ID NO: 378831 - RNA, 22 nt, Artificial Sequence
  Synthetic
uagaaaguucugcaaggugccu

SEQ ID NO: 378832 - RNA, 23 nt, Artificial Sequence
  Synthetic
cuagaaaguucugcaaggugccu

SEQ ID NO: 378833 - RNA, 24 nt, Artificial Sequence
  Synthetic
ucuagaaaguucugcaaggugccu

SEQ ID NO: 378834 - RNA, 18 nt, Artificial Sequence
  Synthetic
ucaauguugaaggugccu

SEQ ID NO: 378835 - RNA, 19 nt, Artificial Sequence
  Synthetic
uucaauguugaaggugccu

SEQ ID NO: 378836 - RNA, 20 nt, Artificial Sequence
  Synthetic
uuucaauguugaaggugccu

SEQ ID NO: 378837 - RNA, 21 nt, Artificial Sequence
  Synthetic
auuucaauguugaaggugccu

SEQ ID NO: 378838 - RNA, 22 nt, Artificial Sequence
  Synthetic
aauuucaauguugaaggugccu

SEQ ID NO: 378839 - RNA, 23 nt, Artificial Sequence
  Synthetic
aaauuucaauguugaaggugccu

SEQ ID NO: 378840 - RNA, 24 nt, Artificial Sequence
  Synthetic
caaauuucaauguugaaggugccu

SEQ ID NO: 378841 - RNA, 18 nt, Artificial Sequence
  Synthetic
ucugucuugauggugccu

SEQ ID NO: 378842 - RNA, 19 nt, Artificial Sequence
  Synthetic
aucugucuugauggugccu

SEQ ID NO: 378843 - RNA, 20 nt, Artificial Sequence
  Synthetic
uaucugucuugauggugccu

SEQ ID NO: 378844 - RNA, 21 nt, Artificial Sequence
  Synthetic
auaucugucuugauggugccu

SEQ ID NO: 378845 - RNA, 22 nt, Artificial Sequence
  Synthetic
aauaucugucuugauggugccu

SEQ ID NO: 378846 - RNA, 23 nt, Artificial Sequence
  Synthetic
uaauaucugucuugauggugccu

SEQ ID NO: 378847 - RNA, 24 nt, Artificial Sequence
  Synthetic
uuaauaucugucuugauggugccu

SEQ ID NO: 378848 - RNA, 18 nt, Artificial Sequence
  Synthetic
auguccuguauggugccu

SEQ ID NO: 378849 - RNA, 19 nt, Artificial Sequence
  Synthetic
aauguccuguauggugccu

SEQ ID NO: 378850 - RNA, 20 nt, Artificial Sequence
  Synthetic
caauguccuguauggugccu

SEQ ID NO: 378851 - RNA, 21 nt, Artificial Sequence
  Synthetic
gcaauguccuguauggugccu

SEQ ID NO: 378852 - RNA, 22 nt, Artificial Sequence
  Synthetic
agcaauguccuguauggugccu

SEQ ID NO: 378853 - RNA, 23 nt, Artificial Sequence
  Synthetic
cagcaauguccuguauggugccu

SEQ ID NO: 378854 - RNA, 24 nt, Artificial Sequence
  Synthetic
ucagcaauguccuguauggugccu

SEQ ID NO: 378855 - RNA, 18 nt, Artificial Sequence
  Synthetic
caugaacuuuaugugccu

SEQ ID NO: 378856 - RNA, 19 nt, Artificial Sequence
  Synthetic
ccaugaacuuuaugugccu

SEQ ID NO: 378857 - RNA, 20 nt, Artificial Sequence
  Synthetic
uccaugaacuuuaugugccu

SEQ ID NO: 378858 - RNA, 21 nt, Artificial Sequence
  Synthetic
uuccaugaacuuuaugugccu

SEQ ID NO: 378859 - RNA, 22 nt, Artificial Sequence
  Synthetic
cuuccaugaacuuuaugugccu

SEQ ID NO: 378860 - RNA, 23 nt, Artificial Sequence
  Synthetic
ccuuccaugaacuuuaugugccu

SEQ ID NO: 378861 - RNA, 24 nt, Artificial Sequence
  Synthetic
gccuuccaugaacuuuaugugccu

SEQ ID NO: 378862 - RNA, 18 nt, Artificial Sequence
  Synthetic
uguguucccgcugugccu

SEQ ID NO: 378863 - RNA, 19 nt, Artificial Sequence
  Synthetic
guguguucccgcugugccu

SEQ ID NO: 378864 - RNA, 20 nt, Artificial Sequence
  Synthetic
aguguguucccgcugugccu

SEQ ID NO: 378865 - RNA, 21 nt, Artificial Sequence
  Synthetic
aaguguguucccgcugugccu

SEQ ID NO: 378866 - RNA, 22 nt, Artificial Sequence
  Synthetic
caaguguguucccgcugugccu

SEQ ID NO: 378867 - RNA, 23 nt, Artificial Sequence
  Synthetic
gcaaguguguucccgcugugccu

SEQ ID NO: 378868 - RNA, 24 nt, Artificial Sequence
  Synthetic
cgcaaguguguucccgcugugccu

SEQ ID NO: 378869 - RNA, 18 nt, Artificial Sequence
  Synthetic
cuaucuuuuugugugccu

SEQ ID NO: 378870 - RNA, 19 nt, Artificial Sequence
  Synthetic
ucuaucuuuuugugugccu

SEQ ID NO: 378871 - RNA, 20 nt, Artificial Sequence
  Synthetic
uucuaucuuuuugugugccu

SEQ ID NO: 378872 - RNA, 21 nt, Artificial Sequence
  Synthetic
auucuaucuuuuugugugccu

SEQ ID NO: 378873 - RNA, 22 nt, Artificial Sequence
  Synthetic
cauucuaucuuuuugugugccu

SEQ ID NO: 378874 - RNA, 23 nt, Artificial Sequence
  Synthetic
ucauucuaucuuuuugugugccu

SEQ ID NO: 378875 - RNA, 24 nt, Artificial Sequence
  Synthetic
uucauucuaucuuuuugugugccu

SEQ ID NO: 378876 - RNA, 18 nt, Artificial Sequence
  Synthetic
gcaaguagccuugugccu

SEQ ID NO: 378877 - RNA, 19 nt, Artificial Sequence
  Synthetic
ggcaaguagccuugugccu

SEQ ID NO: 378878 - RNA, 20 nt, Artificial Sequence
  Synthetic
aggcaaguagccuugugccu

SEQ ID NO: 378879 - RNA, 21 nt, Artificial Sequence
  Synthetic
caggcaaguagccuugugccu

SEQ ID NO: 378880 - RNA, 22 nt, Artificial Sequence
  Synthetic
ucaggcaaguagccuugugccu

SEQ ID NO: 378881 - RNA, 23 nt, Artificial Sequence
  Synthetic
cucaggcaaguagccuugugccu

SEQ ID NO: 378882 - RNA, 24 nt, Artificial Sequence
  Synthetic
gcucaggcaaguagccuugugccu

SEQ ID NO: 378883 - RNA, 18 nt, Artificial Sequence
  Synthetic
uaaucgaguuuugugccu

SEQ ID NO: 378884 - RNA, 19 nt, Artificial Sequence
  Synthetic
auaaucgaguuuugugccu

SEQ ID NO: 378885 - RNA, 20 nt, Artificial Sequence
  Synthetic
aauaaucgaguuuugugccu

SEQ ID NO: 378886 - RNA, 21 nt, Artificial Sequence
  Synthetic
aaauaaucgaguuuugugccu

SEQ ID NO: 378887 - RNA, 22 nt, Artificial Sequence
  Synthetic
aaaauaaucgaguuuugugccu

SEQ ID NO: 378888 - RNA, 23 nt, Artificial Sequence
  Synthetic
aaaaauaaucgaguuuugugccu

SEQ ID NO: 378889 - RNA, 24 nt, Artificial Sequence
  Synthetic
uaaaaauaaucgaguuuugugccu

SEQ ID NO: 378890 - RNA, 18 nt, Artificial Sequence
  Synthetic
gaggugggaggauugccu

SEQ ID NO: 378891 - RNA, 19 nt, Artificial Sequence
  Synthetic
ugaggugggaggauugccu

SEQ ID NO: 378892 - RNA, 20 nt, Artificial Sequence
  Synthetic
cugaggugggaggauugccu

SEQ ID NO: 378893 - RNA, 21 nt, Artificial Sequence
  Synthetic
gcugaggugggaggauugccu

SEQ ID NO: 378894 - RNA, 22 nt, Artificial Sequence
  Synthetic
ggcugaggugggaggauugccu

SEQ ID NO: 378895 - RNA, 23 nt, Artificial Sequence
  Synthetic
aggcugaggugggaggauugccu

SEQ ID NO: 378896 - RNA, 24 nt, Artificial Sequence
  Synthetic
gaggcugaggugggaggauugccu

SEQ ID NO: 378897 - RNA, 18 nt, Artificial Sequence
  Synthetic
uuucuccuccuauugccu

SEQ ID NO: 378898 - RNA, 19 nt, Artificial Sequence
  Synthetic
uuuucuccuccuauugccu

SEQ ID NO: 378899 - RNA, 20 nt, Artificial Sequence
  Synthetic
uuuuucuccuccuauugccu

SEQ ID NO: 378900 - RNA, 21 nt, Artificial Sequence
  Synthetic
auuuuucuccuccuauugccu

SEQ ID NO: 378901 - RNA, 22 nt, Artificial Sequence
  Synthetic
gauuuuucuccuccuauugccu

SEQ ID NO: 378902 - RNA, 23 nt, Artificial Sequence
  Synthetic
agauuuuucuccuccuauugccu

SEQ ID NO: 378903 - RNA, 24 nt, Artificial Sequence
  Synthetic
uagauuuuucuccuccuauugccu

SEQ ID NO: 378904 - RNA, 18 nt, Artificial Sequence
  Synthetic
agcuauauuuacuugccu

SEQ ID NO: 378905 - RNA, 19 nt, Artificial Sequence
  Synthetic
cagcuauauuuacuugccu

SEQ ID NO: 378906 - RNA, 20 nt, Artificial Sequence
  Synthetic
gcagcuauauuuacuugccu

SEQ ID NO: 378907 - RNA, 21 nt, Artificial Sequence
  Synthetic
ggcagcuauauuuacuugccu

SEQ ID NO: 378908 - RNA, 22 nt, Artificial Sequence
  Synthetic
cggcagcuauauuuacuugccu

SEQ ID NO: 378909 - RNA, 23 nt, Artificial Sequence
  Synthetic
acggcagcuauauuuacuugccu

SEQ ID NO: 378910 - RNA, 24 nt, Artificial Sequence
  Synthetic
uacggcagcuauauuuacuugccu

SEQ ID NO: 378911 - RNA, 18 nt, Artificial Sequence
  Synthetic
cagauucuguccuugccu

SEQ ID NO: 378912 - RNA, 19 nt, Artificial Sequence
  Synthetic
acagauucuguccuugccu

SEQ ID NO: 378913 - RNA, 20 nt, Artificial Sequence
  Synthetic
uacagauucuguccuugccu

SEQ ID NO: 378914 - RNA, 21 nt, Artificial Sequence
  Synthetic
cuacagauucuguccuugccu

SEQ ID NO: 378915 - RNA, 22 nt, Artificial Sequence
  Synthetic
ucuacagauucuguccuugccu

SEQ ID NO: 378916 - RNA, 23 nt, Artificial Sequence
  Synthetic
uucuacagauucuguccuugccu

SEQ ID NO: 378917 - RNA, 24 nt, Artificial Sequence
  Synthetic
cuucuacagauucuguccuugccu

SEQ ID NO: 378918 - RNA, 18 nt, Artificial Sequence
  Synthetic
ucauuugaaagcuugccu

SEQ ID NO: 378919 - RNA, 19 nt, Artificial Sequence
  Synthetic
cucauuugaaagcuugccu

SEQ ID NO: 378920 - RNA, 20 nt, Artificial Sequence
  Synthetic
ucucauuugaaagcuugccu

SEQ ID NO: 378921 - RNA, 21 nt, Artificial Sequence
  Synthetic
gucucauuugaaagcuugccu

SEQ ID NO: 378922 - RNA, 22 nt, Artificial Sequence
  Synthetic
ggucucauuugaaagcuugccu

SEQ ID NO: 378923 - RNA, 23 nt, Artificial Sequence
  Synthetic
gggucucauuugaaagcuugccu

SEQ ID NO: 378924 - RNA, 24 nt, Artificial Sequence
  Synthetic
agggucucauuugaaagcuugccu

SEQ ID NO: 378925 - RNA, 18 nt, Artificial Sequence
  Synthetic
gugaucaguuucuugccu

SEQ ID NO: 378926 - RNA, 19 nt, Artificial Sequence
  Synthetic
agugaucaguuucuugccu

SEQ ID NO: 378927 - RNA, 20 nt, Artificial Sequence
  Synthetic
aagugaucaguuucuugccu

SEQ ID NO: 378928 - RNA, 21 nt, Artificial Sequence
  Synthetic
uaagugaucaguuucuugccu

SEQ ID NO: 378929 - RNA, 22 nt, Artificial Sequence
  Synthetic
guaagugaucaguuucuugccu

SEQ ID NO: 378930 - RNA, 23 nt, Artificial Sequence
  Synthetic
gguaagugaucaguuucuugccu

SEQ ID NO: 378931 - RNA, 24 nt, Artificial Sequence
  Synthetic
agguaagugaucaguuucuugccu

SEQ ID NO: 378932 - RNA, 18 nt, Artificial Sequence
  Synthetic
ccugaguuuagguugccu

SEQ ID NO: 378933 - RNA, 19 nt, Artificial Sequence
  Synthetic
uccugaguuuagguugccu

SEQ ID NO: 378934 - RNA, 20 nt, Artificial Sequence
  Synthetic
cuccugaguuuagguugccu

SEQ ID NO: 378935 - RNA, 21 nt, Artificial Sequence
  Synthetic
ucuccugaguuuagguugccu

SEQ ID NO: 378936 - RNA, 22 nt, Artificial Sequence
  Synthetic
uucuccugaguuuagguugccu

SEQ ID NO: 378937 - RNA, 23 nt, Artificial Sequence
  Synthetic
uuucuccugaguuuagguugccu

SEQ ID NO: 378938 - RNA, 24 nt, Artificial Sequence
  Synthetic
uuuucuccugaguuuagguugccu

SEQ ID NO: 378939 - RNA, 18 nt, Artificial Sequence
  Synthetic
caccacucagauuugccu

SEQ ID NO: 378940 - RNA, 19 nt, Artificial Sequence
  Synthetic
ucaccacucagauuugccu

SEQ ID NO: 378941 - RNA, 20 nt, Artificial Sequence
  Synthetic
cucaccacucagauuugccu

SEQ ID NO: 378942 - RNA, 21 nt, Artificial Sequence
  Synthetic
acucaccacucagauuugccu

SEQ ID NO: 378943 - RNA, 22 nt, Artificial Sequence
  Synthetic
aacucaccacucagauuugccu

SEQ ID NO: 378944 - RNA, 23 nt, Artificial Sequence
  Synthetic
caacucaccacucagauuugccu

SEQ ID NO: 378945 - RNA, 24 nt, Artificial Sequence
  Synthetic
ucaacucaccacucagauuugccu

SEQ ID NO: 378946 - RNA, 18 nt, Artificial Sequence
  Synthetic
uguaugcaggauuugccu

SEQ ID NO: 378947 - RNA, 19 nt, Artificial Sequence
  Synthetic
auguaugcaggauuugccu

SEQ ID NO: 378948 - RNA, 20 nt, Artificial Sequence
  Synthetic
uauguaugcaggauuugccu

SEQ ID NO: 378949 - RNA, 21 nt, Artificial Sequence
  Synthetic
uuauguaugcaggauuugccu

SEQ ID NO: 378950 - RNA, 22 nt, Artificial Sequence
  Synthetic
auuauguaugcaggauuugccu

SEQ ID NO: 378951 - RNA, 23 nt, Artificial Sequence
  Synthetic
aauuauguaugcaggauuugccu

SEQ ID NO: 378952 - RNA, 24 nt, Artificial Sequence
  Synthetic
uaauuauguaugcaggauuugccu

SEQ ID NO: 378953 - RNA, 18 nt, Artificial Sequence
  Synthetic
caaguucuuccuuugccu

SEQ ID NO: 378954 - RNA, 19 nt, Artificial Sequence
  Synthetic
ucaaguucuuccuuugccu

SEQ ID NO: 378955 - RNA, 20 nt, Artificial Sequence
  Synthetic
gucaaguucuuccuuugccu

SEQ ID NO: 378956 - RNA, 21 nt, Artificial Sequence
  Synthetic
ugucaaguucuuccuuugccu

SEQ ID NO: 378957 - RNA, 22 nt, Artificial Sequence
  Synthetic
augucaaguucuuccuuugccu

SEQ ID NO: 378958 - RNA, 23 nt, Artificial Sequence
  Synthetic
aaugucaaguucuuccuuugccu

SEQ ID NO: 378959 - RNA, 24 nt, Artificial Sequence
  Synthetic
aaaugucaaguucuuccuuugccu

SEQ ID NO: 378960 - RNA, 18 nt, Artificial Sequence
  Synthetic
cuaaucagagcuuugccu

SEQ ID NO: 378961 - RNA, 19 nt, Artificial Sequence
  Synthetic
ccuaaucagagcuuugccu

SEQ ID NO: 378962 - RNA, 20 nt, Artificial Sequence
  Synthetic
uccuaaucagagcuuugccu

SEQ ID NO: 378963 - RNA, 21 nt, Artificial Sequence
  Synthetic
cuccuaaucagagcuuugccu

SEQ ID NO: 378964 - RNA, 22 nt, Artificial Sequence
  Synthetic
acuccuaaucagagcuuugccu

SEQ ID NO: 378965 - RNA, 23 nt, Artificial Sequence
  Synthetic
gacuccuaaucagagcuuugccu

SEQ ID NO: 378966 - RNA, 24 nt, Artificial Sequence
  Synthetic
agacuccuaaucagagcuuugccu

SEQ ID NO: 378967 - RNA, 18 nt, Artificial Sequence
  Synthetic
gucucugacuguuugccu

SEQ ID NO: 378968 - RNA, 19 nt, Artificial Sequence
  Synthetic
ugucucugacuguuugccu

SEQ ID NO: 378969 - RNA, 20 nt, Artificial Sequence
  Synthetic
gugucucugacuguuugccu

SEQ ID NO: 378970 - RNA, 21 nt, Artificial Sequence
  Synthetic
agugucucugacuguuugccu

SEQ ID NO: 378971 - RNA, 22 nt, Artificial Sequence
  Synthetic
aagugucucugacuguuugccu

SEQ ID NO: 378972 - RNA, 23 nt, Artificial Sequence
  Synthetic
caagugucucugacuguuugccu

SEQ ID NO: 378973 - RNA, 24 nt, Artificial Sequence
  Synthetic
ccaagugucucugacuguuugccu

SEQ ID NO: 378974 - RNA, 18 nt, Artificial Sequence
  Synthetic
gucaccuagauuuugccu

SEQ ID NO: 378975 - RNA, 19 nt, Artificial Sequence
  Synthetic
ugucaccuagauuuugccu

SEQ ID NO: 378976 - RNA, 20 nt, Artificial Sequence
  Synthetic
gugucaccuagauuuugccu

SEQ ID NO: 378977 - RNA, 21 nt, Artificial Sequence
  Synthetic
ugugucaccuagauuuugccu

SEQ ID NO: 378978 - RNA, 22 nt, Artificial Sequence
  Synthetic
uugugucaccuagauuuugccu

SEQ ID NO: 378979 - RNA, 23 nt, Artificial Sequence
  Synthetic
auugugucaccuagauuuugccu

SEQ ID NO: 378980 - RNA, 24 nt, Artificial Sequence
  Synthetic
aauugugucaccuagauuuugccu

SEQ ID NO: 378981 - RNA, 18 nt, Artificial Sequence
  Synthetic
aauaaugcucaaaauccu

SEQ ID NO: 378982 - RNA, 19 nt, Artificial Sequence
  Synthetic
gaauaaugcucaaaauccu

SEQ ID NO: 378983 - RNA, 20 nt, Artificial Sequence
  Synthetic
ggaauaaugcucaaaauccu

SEQ ID NO: 378984 - RNA, 21 nt, Artificial Sequence
  Synthetic
aggaauaaugcucaaaauccu

SEQ ID NO: 378985 - RNA, 22 nt, Artificial Sequence
  Synthetic
uaggaauaaugcucaaaauccu

SEQ ID NO: 378986 - RNA, 23 nt, Artificial Sequence
  Synthetic
uuaggaauaaugcucaaaauccu

SEQ ID NO: 378987 - RNA, 24 nt, Artificial Sequence
  Synthetic
guuaggaauaaugcucaaaauccu

SEQ ID NO: 378988 - RNA, 18 nt, Artificial Sequence
  Synthetic
uucagaauggaaaauccu

SEQ ID NO: 378989 - RNA, 19 nt, Artificial Sequence
  Synthetic
uuucagaauggaaaauccu

SEQ ID NO: 378990 - RNA, 20 nt, Artificial Sequence
  Synthetic
uuuucagaauggaaaauccu

SEQ ID NO: 378991 - RNA, 21 nt, Artificial Sequence
  Synthetic
cuuuucagaauggaaaauccu

SEQ ID NO: 378992 - RNA, 22 nt, Artificial Sequence
  Synthetic
acuuuucagaauggaaaauccu

SEQ ID NO: 378993 - RNA, 23 nt, Artificial Sequence
  Synthetic
uacuuuucagaauggaaaauccu

SEQ ID NO: 378994 - RNA, 24 nt, Artificial Sequence
  Synthetic
cuacuuuucagaauggaaaauccu

SEQ ID NO: 378995 - RNA, 18 nt, Artificial Sequence
  Synthetic
ggugcaggaacaaauccu

SEQ ID NO: 378996 - RNA, 19 nt, Artificial Sequence
  Synthetic
gggugcaggaacaaauccu

SEQ ID NO: 378997 - RNA, 20 nt, Artificial Sequence
  Synthetic
agggugcaggaacaaauccu

SEQ ID NO: 378998 - RNA, 21 nt, Artificial Sequence
  Synthetic
aagggugcaggaacaaauccu

SEQ ID NO: 378999 - RNA, 22 nt, Artificial Sequence
  Synthetic
caagggugcaggaacaaauccu

SEQ ID NO: 379000 - RNA, 23 nt, Artificial Sequence
  Synthetic
acaagggugcaggaacaaauccu

SEQ ID NO: 379001 - RNA, 24 nt, Artificial Sequence
  Synthetic
uacaagggugcaggaacaaauccu

SEQ ID NO: 379002 - RNA, 18 nt, Artificial Sequence
  Synthetic
uugaauauaucaaauccu

SEQ ID NO: 379003 - RNA, 19 nt, Artificial Sequence
  Synthetic
cuugaauauaucaaauccu

SEQ ID NO: 379004 - RNA, 20 nt, Artificial Sequence
  Synthetic
ccuugaauauaucaaauccu

SEQ ID NO: 379005 - RNA, 21 nt, Artificial Sequence
  Synthetic
cccuugaauauaucaaauccu

SEQ ID NO: 379006 - RNA, 22 nt, Artificial Sequence
  Synthetic
acccuugaauauaucaaauccu

SEQ ID NO: 379007 - RNA, 23 nt, Artificial Sequence
  Synthetic
gacccuugaauauaucaaauccu

SEQ ID NO: 379008 - RNA, 24 nt, Artificial Sequence
  Synthetic
agacccuugaauauaucaaauccu

SEQ ID NO: 379009 - RNA, 18 nt, Artificial Sequence
  Synthetic
uuugcaagcucaaauccu

SEQ ID NO: 379010 - RNA, 19 nt, Artificial Sequence
  Synthetic
cuuugcaagcucaaauccu

SEQ ID NO: 379011 - RNA, 20 nt, Artificial Sequence
  Synthetic
gcuuugcaagcucaaauccu

SEQ ID NO: 379012 - RNA, 21 nt, Artificial Sequence
  Synthetic
agcuuugcaagcucaaauccu

SEQ ID NO: 379013 - RNA, 22 nt, Artificial Sequence
  Synthetic
aagcuuugcaagcucaaauccu

SEQ ID NO: 379014 - RNA, 23 nt, Artificial Sequence
  Synthetic
gaagcuuugcaagcucaaauccu

SEQ ID NO: 379015 - RNA, 24 nt, Artificial Sequence
  Synthetic
ggaagcuuugcaagcucaaauccu

SEQ ID NO: 379016 - RNA, 18 nt, Artificial Sequence
  Synthetic
uacagucagaacaauccu

SEQ ID NO: 379017 - RNA, 19 nt, Artificial Sequence
  Synthetic
uuacagucagaacaauccu

SEQ ID NO: 379018 - RNA, 20 nt, Artificial Sequence
  Synthetic
cuuacagucagaacaauccu

SEQ ID NO: 379019 - RNA, 21 nt, Artificial Sequence
  Synthetic
acuuacagucagaacaauccu

SEQ ID NO: 379020 - RNA, 22 nt, Artificial Sequence
  Synthetic
uacuuacagucagaacaauccu

SEQ ID NO: 379021 - RNA, 23 nt, Artificial Sequence
  Synthetic
guacuuacagucagaacaauccu

SEQ ID NO: 379022 - RNA, 24 nt, Artificial Sequence
  Synthetic
uguacuuacagucagaacaauccu

SEQ ID NO: 379023 - RNA, 18 nt, Artificial Sequence
  Synthetic
aggcuaugacagaauccu

SEQ ID NO: 379024 - RNA, 19 nt, Artificial Sequence
  Synthetic
uaggcuaugacagaauccu

SEQ ID NO: 379025 - RNA, 20 nt, Artificial Sequence
  Synthetic
auaggcuaugacagaauccu

SEQ ID NO: 379026 - RNA, 21 nt, Artificial Sequence
  Synthetic
aauaggcuaugacagaauccu

SEQ ID NO: 379027 - RNA, 22 nt, Artificial Sequence
  Synthetic
caauaggcuaugacagaauccu

SEQ ID NO: 379028 - RNA, 23 nt, Artificial Sequence
  Synthetic
ccaauaggcuaugacagaauccu

SEQ ID NO: 379029 - RNA, 24 nt, Artificial Sequence
  Synthetic
gccaauaggcuaugacagaauccu

SEQ ID NO: 379030 - RNA, 18 nt, Artificial Sequence
  Synthetic
gguagauucuugaauccu

SEQ ID NO: 379031 - RNA, 19 nt, Artificial Sequence
  Synthetic
ugguagauucuugaauccu

SEQ ID NO: 379032 - RNA, 20 nt, Artificial Sequence
  Synthetic
augguagauucuugaauccu

SEQ ID NO: 379033 - RNA, 21 nt, Artificial Sequence
  Synthetic
aaugguagauucuugaauccu

SEQ ID NO: 379034 - RNA, 22 nt, Artificial Sequence
  Synthetic
caaugguagauucuugaauccu

SEQ ID NO: 379035 - RNA, 23 nt, Artificial Sequence
  Synthetic
acaaugguagauucuugaauccu

SEQ ID NO: 379036 - RNA, 24 nt, Artificial Sequence
  Synthetic
uacaaugguagauucuugaauccu

SEQ ID NO: 379037 - RNA, 18 nt, Artificial Sequence
  Synthetic
cgcugagguuauaauccu

SEQ ID NO: 379038 - RNA, 19 nt, Artificial Sequence
  Synthetic
ccgcugagguuauaauccu

SEQ ID NO: 379039 - RNA, 20 nt, Artificial Sequence
  Synthetic
uccgcugagguuauaauccu

SEQ ID NO: 379040 - RNA, 21 nt, Artificial Sequence
  Synthetic
uuccgcugagguuauaauccu

SEQ ID NO: 379041 - RNA, 22 nt, Artificial Sequence
  Synthetic
uuuccgcugagguuauaauccu

SEQ ID NO: 379042 - RNA, 23 nt, Artificial Sequence
  Synthetic
cuuuccgcugagguuauaauccu

SEQ ID NO: 379043 - RNA, 24 nt, Artificial Sequence
  Synthetic
ucuuuccgcugagguuauaauccu

SEQ ID NO: 379044 - RNA, 18 nt, Artificial Sequence
  Synthetic
aguccuaacaguaauccu

SEQ ID NO: 379045 - RNA, 19 nt, Artificial Sequence
  Synthetic
gaguccuaacaguaauccu

SEQ ID NO: 379046 - RNA, 20 nt, Artificial Sequence
  Synthetic
ugaguccuaacaguaauccu

SEQ ID NO: 379047 - RNA, 21 nt, Artificial Sequence
  Synthetic
cugaguccuaacaguaauccu

SEQ ID NO: 379048 - RNA, 22 nt, Artificial Sequence
  Synthetic
acugaguccuaacaguaauccu

SEQ ID NO: 379049 - RNA, 23 nt, Artificial Sequence
  Synthetic
uacugaguccuaacaguaauccu

SEQ ID NO: 379050 - RNA, 24 nt, Artificial Sequence
  Synthetic
uuacugaguccuaacaguaauccu

SEQ ID NO: 379051 - RNA, 18 nt, Artificial Sequence
  Synthetic
acuagccucuguaauccu

SEQ ID NO: 379052 - RNA, 19 nt, Artificial Sequence
  Synthetic
cacuagccucuguaauccu

SEQ ID NO: 379053 - RNA, 20 nt, Artificial Sequence
  Synthetic
acacuagccucuguaauccu

SEQ ID NO: 379054 - RNA, 21 nt, Artificial Sequence
  Synthetic
aacacuagccucuguaauccu

SEQ ID NO: 379055 - RNA, 22 nt, Artificial Sequence
  Synthetic
aaacacuagccucuguaauccu

SEQ ID NO: 379056 - RNA, 23 nt, Artificial Sequence
  Synthetic
uaaacacuagccucuguaauccu

SEQ ID NO: 379057 - RNA, 24 nt, Artificial Sequence
  Synthetic
cuaaacacuagccucuguaauccu

SEQ ID NO: 379058 - RNA, 18 nt, Artificial Sequence
  Synthetic
uaauauuuauuuaauccu

SEQ ID NO: 379059 - RNA, 19 nt, Artificial Sequence
  Synthetic
uuaauauuuauuuaauccu

SEQ ID NO: 379060 - RNA, 20 nt, Artificial Sequence
  Synthetic
auuaauauuuauuuaauccu

SEQ ID NO: 379061 - RNA, 21 nt, Artificial Sequence
  Synthetic
gauuaauauuuauuuaauccu

SEQ ID NO: 379062 - RNA, 22 nt, Artificial Sequence
  Synthetic
ugauuaauauuuauuuaauccu

SEQ ID NO: 379063 - RNA, 23 nt, Artificial Sequence
  Synthetic
augauuaauauuuauuuaauccu

SEQ ID NO: 379064 - RNA, 24 nt, Artificial Sequence
  Synthetic
gaugauuaauauuuauuuaauccu

SEQ ID NO: 379065 - RNA, 18 nt, Artificial Sequence
  Synthetic
cugccagugcaacauccu

SEQ ID NO: 379066 - RNA, 19 nt, Artificial Sequence
  Synthetic
gcugccagugcaacauccu

SEQ ID NO: 379067 - RNA, 20 nt, Artificial Sequence
  Synthetic
agcugccagugcaacauccu

SEQ ID NO: 379068 - RNA, 21 nt, Artificial Sequence
  Synthetic
cagcugccagugcaacauccu

SEQ ID NO: 379069 - RNA, 22 nt, Artificial Sequence
  Synthetic
ucagcugccagugcaacauccu

SEQ ID NO: 379070 - RNA, 23 nt, Artificial Sequence
  Synthetic
gucagcugccagugcaacauccu

SEQ ID NO: 379071 - RNA, 24 nt, Artificial Sequence
  Synthetic
ugucagcugccagugcaacauccu

SEQ ID NO: 379072 - RNA, 18 nt, Artificial Sequence
  Synthetic
cuaauaggaacacauccu

SEQ ID NO: 379073 - RNA, 19 nt, Artificial Sequence
  Synthetic
gcuaauaggaacacauccu

SEQ ID NO: 379074 - RNA, 20 nt, Artificial Sequence
  Synthetic
agcuaauaggaacacauccu

SEQ ID NO: 379075 - RNA, 21 nt, Artificial Sequence
  Synthetic
cagcuaauaggaacacauccu

SEQ ID NO: 379076 - RNA, 22 nt, Artificial Sequence
  Synthetic
gcagcuaauaggaacacauccu

SEQ ID NO: 379077 - RNA, 23 nt, Artificial Sequence
  Synthetic
ugcagcuaauaggaacacauccu

SEQ ID NO: 379078 - RNA, 24 nt, Artificial Sequence
  Synthetic
uugcagcuaauaggaacacauccu

SEQ ID NO: 379079 - RNA, 18 nt, Artificial Sequence
  Synthetic
ggaguuuccauacauccu

SEQ ID NO: 379080 - RNA, 19 nt, Artificial Sequence
  Synthetic
aggaguuuccauacauccu

SEQ ID NO: 379081 - RNA, 20 nt, Artificial Sequence
  Synthetic
caggaguuuccauacauccu

SEQ ID NO: 379082 - RNA, 21 nt, Artificial Sequence
  Synthetic
ccaggaguuuccauacauccu

SEQ ID NO: 379083 - RNA, 22 nt, Artificial Sequence
  Synthetic
uccaggaguuuccauacauccu

SEQ ID NO: 379084 - RNA, 23 nt, Artificial Sequence
  Synthetic
auccaggaguuuccauacauccu

SEQ ID NO: 379085 - RNA, 24 nt, Artificial Sequence
  Synthetic
cauccaggaguuuccauacauccu

SEQ ID NO: 379086 - RNA, 18 nt, Artificial Sequence
  Synthetic
aagacaaugcaucauccu

SEQ ID NO: 379087 - RNA, 19 nt, Artificial Sequence
  Synthetic
aaagacaaugcaucauccu

SEQ ID NO: 379088 - RNA, 20 nt, Artificial Sequence
  Synthetic
caaagacaaugcaucauccu

SEQ ID NO: 379089 - RNA, 21 nt, Artificial Sequence
  Synthetic
gcaaagacaaugcaucauccu

SEQ ID NO: 379090 - RNA, 22 nt, Artificial Sequence
  Synthetic
ugcaaagacaaugcaucauccu

SEQ ID NO: 379091 - RNA, 23 nt, Artificial Sequence
  Synthetic
augcaaagacaaugcaucauccu

SEQ ID NO: 379092 - RNA, 24 nt, Artificial Sequence
  Synthetic
uaugcaaagacaaugcaucauccu

SEQ ID NO: 379093 - RNA, 18 nt, Artificial Sequence
  Synthetic
accaggaaggaucauccu

SEQ ID NO: 379094 - RNA, 19 nt, Artificial Sequence
  Synthetic
caccaggaaggaucauccu

SEQ ID NO: 379095 - RNA, 20 nt, Artificial Sequence
  Synthetic
ccaccaggaaggaucauccu

SEQ ID NO: 379096 - RNA, 21 nt, Artificial Sequence
  Synthetic
gccaccaggaaggaucauccu

SEQ ID NO: 379097 - RNA, 22 nt, Artificial Sequence
  Synthetic
agccaccaggaaggaucauccu

SEQ ID NO: 379098 - RNA, 23 nt, Artificial Sequence
  Synthetic
aagccaccaggaaggaucauccu

SEQ ID NO: 379099 - RNA, 24 nt, Artificial Sequence
  Synthetic
gaagccaccaggaaggaucauccu

SEQ ID NO: 379100 - RNA, 18 nt, Artificial Sequence
  Synthetic
ucaagucucccucauccu

SEQ ID NO: 379101 - RNA, 19 nt, Artificial Sequence
  Synthetic
cucaagucucccucauccu

SEQ ID NO: 379102 - RNA, 20 nt, Artificial Sequence
  Synthetic
acucaagucucccucauccu

SEQ ID NO: 379103 - RNA, 21 nt, Artificial Sequence
  Synthetic
uacucaagucucccucauccu

SEQ ID NO: 379104 - RNA, 22 nt, Artificial Sequence
  Synthetic
auacucaagucucccucauccu

SEQ ID NO: 379105 - RNA, 23 nt, Artificial Sequence
  Synthetic
cauacucaagucucccucauccu

SEQ ID NO: 379106 - RNA, 24 nt, Artificial Sequence
  Synthetic
acauacucaagucucccucauccu

SEQ ID NO: 379107 - RNA, 18 nt, Artificial Sequence
  Synthetic
acuucauauccucauccu

SEQ ID NO: 379108 - RNA, 19 nt, Artificial Sequence
  Synthetic
uacuucauauccucauccu

SEQ ID NO: 379109 - RNA, 20 nt, Artificial Sequence
  Synthetic
guacuucauauccucauccu

SEQ ID NO: 379110 - RNA, 21 nt, Artificial Sequence
  Synthetic
gguacuucauauccucauccu

SEQ ID NO: 379111 - RNA, 22 nt, Artificial Sequence
  Synthetic
ggguacuucauauccucauccu

SEQ ID NO: 379112 - RNA, 23 nt, Artificial Sequence
  Synthetic
aggguacuucauauccucauccu

SEQ ID NO: 379113 - RNA, 24 nt, Artificial Sequence
  Synthetic
caggguacuucauauccucauccu

SEQ ID NO: 379114 - RNA, 18 nt, Artificial Sequence
  Synthetic
gaaggcuagggucauccu

SEQ ID NO: 379115 - RNA, 19 nt, Artificial Sequence
  Synthetic
ggaaggcuagggucauccu

SEQ ID NO: 379116 - RNA, 20 nt, Artificial Sequence
  Synthetic
gggaaggcuagggucauccu

SEQ ID NO: 379117 - RNA, 21 nt, Artificial Sequence
  Synthetic
agggaaggcuagggucauccu

SEQ ID NO: 379118 - RNA, 22 nt, Artificial Sequence
  Synthetic
aagggaaggcuagggucauccu

SEQ ID NO: 379119 - RNA, 23 nt, Artificial Sequence
  Synthetic
uaagggaaggcuagggucauccu

SEQ ID NO: 379120 - RNA, 24 nt, Artificial Sequence
  Synthetic
uuaagggaaggcuagggucauccu

SEQ ID NO: 379121 - RNA, 18 nt, Artificial Sequence
  Synthetic
auauauuccaaagauccu

SEQ ID NO: 379122 - RNA, 19 nt, Artificial Sequence
  Synthetic
gauauauuccaaagauccu

SEQ ID NO: 379123 - RNA, 20 nt, Artificial Sequence
  Synthetic
agauauauuccaaagauccu

SEQ ID NO: 379124 - RNA, 21 nt, Artificial Sequence
  Synthetic
gagauauauuccaaagauccu

SEQ ID NO: 379125 - RNA, 22 nt, Artificial Sequence
  Synthetic
ugagauauauuccaaagauccu

SEQ ID NO: 379126 - RNA, 23 nt, Artificial Sequence
  Synthetic
uugagauauauuccaaagauccu

SEQ ID NO: 379127 - RNA, 24 nt, Artificial Sequence
  Synthetic
uuugagauauauuccaaagauccu

SEQ ID NO: 379128 - RNA, 18 nt, Artificial Sequence
  Synthetic
caguaggccucugauccu

SEQ ID NO: 379129 - RNA, 19 nt, Artificial Sequence
  Synthetic
ccaguaggccucugauccu

SEQ ID NO: 379130 - RNA, 20 nt, Artificial Sequence
  Synthetic
uccaguaggccucugauccu

SEQ ID NO: 379131 - RNA, 21 nt, Artificial Sequence
  Synthetic
uuccaguaggccucugauccu

SEQ ID NO: 379132 - RNA, 22 nt, Artificial Sequence
  Synthetic
auuccaguaggccucugauccu

SEQ ID NO: 379133 - RNA, 23 nt, Artificial Sequence
  Synthetic
gauuccaguaggccucugauccu

SEQ ID NO: 379134 - RNA, 24 nt, Artificial Sequence
  Synthetic
agauuccaguaggccucugauccu

SEQ ID NO: 379135 - RNA, 18 nt, Artificial Sequence
  Synthetic
gacauuuccauauauccu

SEQ ID NO: 379136 - RNA, 19 nt, Artificial Sequence
  Synthetic
agacauuuccauauauccu

SEQ ID NO: 379137 - RNA, 20 nt, Artificial Sequence
  Synthetic
uagacauuuccauauauccu

SEQ ID NO: 379138 - RNA, 21 nt, Artificial Sequence
  Synthetic
cuagacauuuccauauauccu

SEQ ID NO: 379139 - RNA, 22 nt, Artificial Sequence
  Synthetic
ucuagacauuuccauauauccu

SEQ ID NO: 379140 - RNA, 23 nt, Artificial Sequence
  Synthetic
aucuagacauuuccauauauccu

SEQ ID NO: 379141 - RNA, 24 nt, Artificial Sequence
  Synthetic
uaucuagacauuuccauauauccu

SEQ ID NO: 379142 - RNA, 18 nt, Artificial Sequence
  Synthetic
cucuuaaguuucuauccu

SEQ ID NO: 379143 - RNA, 19 nt, Artificial Sequence
  Synthetic
gcucuuaaguuucuauccu

SEQ ID NO: 379144 - RNA, 20 nt, Artificial Sequence
  Synthetic
ggcucuuaaguuucuauccu

SEQ ID NO: 379145 - RNA, 21 nt, Artificial Sequence
  Synthetic
uggcucuuaaguuucuauccu

SEQ ID NO: 379146 - RNA, 22 nt, Artificial Sequence
  Synthetic
uuggcucuuaaguuucuauccu

SEQ ID NO: 379147 - RNA, 23 nt, Artificial Sequence
  Synthetic
cuuggcucuuaaguuucuauccu

SEQ ID NO: 379148 - RNA, 24 nt, Artificial Sequence
  Synthetic
ucuuggcucuuaaguuucuauccu

SEQ ID NO: 379149 - RNA, 18 nt, Artificial Sequence
  Synthetic
cccaagagcaauuauccu

SEQ ID NO: 379150 - RNA, 19 nt, Artificial Sequence
  Synthetic
ucccaagagcaauuauccu

SEQ ID NO: 379151 - RNA, 20 nt, Artificial Sequence
  Synthetic
gucccaagagcaauuauccu

SEQ ID NO: 379152 - RNA, 21 nt, Artificial Sequence
  Synthetic
ggucccaagagcaauuauccu

SEQ ID NO: 379153 - RNA, 22 nt, Artificial Sequence
  Synthetic
gggucccaagagcaauuauccu

SEQ ID NO: 379154 - RNA, 23 nt, Artificial Sequence
  Synthetic
ugggucccaagagcaauuauccu

SEQ ID NO: 379155 - RNA, 24 nt, Artificial Sequence
  Synthetic
uugggucccaagagcaauuauccu

SEQ ID NO: 379156 - RNA, 18 nt, Artificial Sequence
  Synthetic
acaaucuaggcuuauccu

SEQ ID NO: 379157 - RNA, 19 nt, Artificial Sequence
  Synthetic
gacaaucuaggcuuauccu

SEQ ID NO: 379158 - RNA, 20 nt, Artificial Sequence
  Synthetic
agacaaucuaggcuuauccu

SEQ ID NO: 379159 - RNA, 21 nt, Artificial Sequence
  Synthetic
uagacaaucuaggcuuauccu

SEQ ID NO: 379160 - RNA, 22 nt, Artificial Sequence
  Synthetic
uuagacaaucuaggcuuauccu

SEQ ID NO: 379161 - RNA, 23 nt, Artificial Sequence
  Synthetic
uuuagacaaucuaggcuuauccu

SEQ ID NO: 379162 - RNA, 24 nt, Artificial Sequence
  Synthetic
auuuagacaaucuaggcuuauccu

SEQ ID NO: 379163 - RNA, 18 nt, Artificial Sequence
  Synthetic
acuuucuucucuuauccu

SEQ ID NO: 379164 - RNA, 19 nt, Artificial Sequence
  Synthetic
aacuuucuucucuuauccu

SEQ ID NO: 379165 - RNA, 20 nt, Artificial Sequence
  Synthetic
caacuuucuucucuuauccu

SEQ ID NO: 379166 - RNA, 21 nt, Artificial Sequence
  Synthetic
ucaacuuucuucucuuauccu

SEQ ID NO: 379167 - RNA, 22 nt, Artificial Sequence
  Synthetic
uucaacuuucuucucuuauccu

SEQ ID NO: 379168 - RNA, 23 nt, Artificial Sequence
  Synthetic
guucaacuuucuucucuuauccu

SEQ ID NO: 379169 - RNA, 24 nt, Artificial Sequence
  Synthetic
gguucaacuuucuucucuuauccu

SEQ ID NO: 379170 - RNA, 18 nt, Artificial Sequence
  Synthetic
gaacuaaaaaguuauccu

SEQ ID NO: 379171 - RNA, 19 nt, Artificial Sequence
  Synthetic
ggaacuaaaaaguuauccu

SEQ ID NO: 379172 - RNA, 20 nt, Artificial Sequence
  Synthetic
uggaacuaaaaaguuauccu

SEQ ID NO: 379173 - RNA, 21 nt, Artificial Sequence
  Synthetic
uuggaacuaaaaaguuauccu

SEQ ID NO: 379174 - RNA, 22 nt, Artificial Sequence
  Synthetic
uuuggaacuaaaaaguuauccu

SEQ ID NO: 379175 - RNA, 23 nt, Artificial Sequence
  Synthetic
uuuuggaacuaaaaaguuauccu

SEQ ID NO: 379176 - RNA, 24 nt, Artificial Sequence
  Synthetic
auuuuggaacuaaaaaguuauccu

SEQ ID NO: 379177 - RNA, 18 nt, Artificial Sequence
  Synthetic
uagagaguaaaaacuccu

SEQ ID NO: 379178 - RNA, 19 nt, Artificial Sequence
  Synthetic
uuagagaguaaaaacuccu

SEQ ID NO: 379179 - RNA, 20 nt, Artificial Sequence
  Synthetic
auuagagaguaaaaacuccu

SEQ ID NO: 379180 - RNA, 21 nt, Artificial Sequence
  Synthetic
cauuagagaguaaaaacuccu

SEQ ID NO: 379181 - RNA, 22 nt, Artificial Sequence
  Synthetic
acauuagagaguaaaaacuccu

SEQ ID NO: 379182 - RNA, 23 nt, Artificial Sequence
  Synthetic
gacauuagagaguaaaaacuccu

SEQ ID NO: 379183 - RNA, 24 nt, Artificial Sequence
  Synthetic
agacauuagagaguaaaaacuccu

SEQ ID NO: 379184 - RNA, 18 nt, Artificial Sequence
  Synthetic
uaauuuucccaaacuccu

SEQ ID NO: 379185 - RNA, 19 nt, Artificial Sequence
  Synthetic
auaauuuucccaaacuccu

SEQ ID NO: 379186 - RNA, 20 nt, Artificial Sequence
  Synthetic
aauaauuuucccaaacuccu

SEQ ID NO: 379187 - RNA, 21 nt, Artificial Sequence
  Synthetic
aaauaauuuucccaaacuccu

SEQ ID NO: 379188 - RNA, 22 nt, Artificial Sequence
  Synthetic
aaaauaauuuucccaaacuccu

SEQ ID NO: 379189 - RNA, 23 nt, Artificial Sequence
  Synthetic
gaaaauaauuuucccaaacuccu

SEQ ID NO: 379190 - RNA, 24 nt, Artificial Sequence
  Synthetic
agaaaauaauuuucccaaacuccu

SEQ ID NO: 379191 - RNA, 18 nt, Artificial Sequence
  Synthetic
cuucccuuucaaacuccu

SEQ ID NO: 379192 - RNA, 19 nt, Artificial Sequence
  Synthetic
ccuucccuuucaaacuccu

SEQ ID NO: 379193 - RNA, 20 nt, Artificial Sequence
  Synthetic
accuucccuuucaaacuccu

SEQ ID NO: 379194 - RNA, 21 nt, Artificial Sequence
  Synthetic
caccuucccuuucaaacuccu

SEQ ID NO: 379195 - RNA, 22 nt, Artificial Sequence
  Synthetic
acaccuucccuuucaaacuccu

SEQ ID NO: 379196 - RNA, 23 nt, Artificial Sequence
  Synthetic
aacaccuucccuuucaaacuccu

SEQ ID NO: 379197 - RNA, 24 nt, Artificial Sequence
  Synthetic
aaacaccuucccuuucaaacuccu

SEQ ID NO: 379198 - RNA, 18 nt, Artificial Sequence
  Synthetic
ugguugagauaaacuccu

SEQ ID NO: 379199 - RNA, 19 nt, Artificial Sequence
  Synthetic
cugguugagauaaacuccu

SEQ ID NO: 379200 - RNA, 20 nt, Artificial Sequence
  Synthetic
acugguugagauaaacuccu

SEQ ID NO: 379201 - RNA, 21 nt, Artificial Sequence
  Synthetic
cacugguugagauaaacuccu

SEQ ID NO: 379202 - RNA, 22 nt, Artificial Sequence
  Synthetic
ucacugguugagauaaacuccu

SEQ ID NO: 379203 - RNA, 23 nt, Artificial Sequence
  Synthetic
uucacugguugagauaaacuccu

SEQ ID NO: 379204 - RNA, 24 nt, Artificial Sequence
  Synthetic
auucacugguugagauaaacuccu

SEQ ID NO: 379205 - RNA, 18 nt, Artificial Sequence
  Synthetic
agaugaucuccaacuccu

SEQ ID NO: 379206 - RNA, 19 nt, Artificial Sequence
  Synthetic
gagaugaucuccaacuccu

SEQ ID NO: 379207 - RNA, 20 nt, Artificial Sequence
  Synthetic
ggagaugaucuccaacuccu

SEQ ID NO: 379208 - RNA, 21 nt, Artificial Sequence
  Synthetic
aggagaugaucuccaacuccu

SEQ ID NO: 379209 - RNA, 22 nt, Artificial Sequence
  Synthetic
aaggagaugaucuccaacuccu

SEQ ID NO: 379210 - RNA, 23 nt, Artificial Sequence
  Synthetic
uaaggagaugaucuccaacuccu

SEQ ID NO: 379211 - RNA, 24 nt, Artificial Sequence
  Synthetic
auaaggagaugaucuccaacuccu

SEQ ID NO: 379212 - RNA, 18 nt, Artificial Sequence
  Synthetic
gaaguccuccccacuccu

SEQ ID NO: 379213 - RNA, 19 nt, Artificial Sequence
  Synthetic
ugaaguccuccccacuccu

SEQ ID NO: 379214 - RNA, 20 nt, Artificial Sequence
  Synthetic
uugaaguccuccccacuccu

SEQ ID NO: 379215 - RNA, 21 nt, Artificial Sequence
  Synthetic
uuugaaguccuccccacuccu

SEQ ID NO: 379216 - RNA, 22 nt, Artificial Sequence
  Synthetic
uuuugaaguccuccccacuccu

SEQ ID NO: 379217 - RNA, 23 nt, Artificial Sequence
  Synthetic
guuuugaaguccuccccacuccu

SEQ ID NO: 379218 - RNA, 24 nt, Artificial Sequence
  Synthetic
uguuuugaaguccuccccacuccu

SEQ ID NO: 379219 - RNA, 18 nt, Artificial Sequence
  Synthetic
agcugacuuaugacuccu

SEQ ID NO: 379220 - RNA, 19 nt, Artificial Sequence
  Synthetic
uagcugacuuaugacuccu

SEQ ID NO: 379221 - RNA, 20 nt, Artificial Sequence
  Synthetic
guagcugacuuaugacuccu

SEQ ID NO: 379222 - RNA, 21 nt, Artificial Sequence
  Synthetic
aguagcugacuuaugacuccu

SEQ ID NO: 379223 - RNA, 22 nt, Artificial Sequence
  Synthetic
caguagcugacuuaugacuccu

SEQ ID NO: 379224 - RNA, 23 nt, Artificial Sequence
  Synthetic
ccaguagcugacuuaugacuccu

SEQ ID NO: 379225 - RNA, 24 nt, Artificial Sequence
  Synthetic
cccaguagcugacuuaugacuccu

SEQ ID NO: 379226 - RNA, 18 nt, Artificial Sequence
  Synthetic
aggaaauucugaccuccu

SEQ ID NO: 379227 - RNA, 19 nt, Artificial Sequence
  Synthetic
caggaaauucugaccuccu

SEQ ID NO: 379228 - RNA, 20 nt, Artificial Sequence
  Synthetic
ccaggaaauucugaccuccu

SEQ ID NO: 379229 - RNA, 21 nt, Artificial Sequence
  Synthetic
cccaggaaauucugaccuccu

SEQ ID NO: 379230 - RNA, 22 nt, Artificial Sequence
  Synthetic
ucccaggaaauucugaccuccu

SEQ ID NO: 379231 - RNA, 23 nt, Artificial Sequence
  Synthetic
aucccaggaaauucugaccuccu

SEQ ID NO: 379232 - RNA, 24 nt, Artificial Sequence
  Synthetic
aaucccaggaaauucugaccuccu

SEQ ID NO: 379233 - RNA, 18 nt, Artificial Sequence
  Synthetic
auucuuccugacccuccu

SEQ ID NO: 379234 - RNA, 19 nt, Artificial Sequence
  Synthetic
uauucuuccugacccuccu

SEQ ID NO: 379235 - RNA, 20 nt, Artificial Sequence
  Synthetic
cuauucuuccugacccuccu

SEQ ID NO: 379236 - RNA, 21 nt, Artificial Sequence
  Synthetic
ccuauucuuccugacccuccu

SEQ ID NO: 379237 - RNA, 22 nt, Artificial Sequence
  Synthetic
cccuauucuuccugacccuccu

SEQ ID NO: 379238 - RNA, 23 nt, Artificial Sequence
  Synthetic
ccccuauucuuccugacccuccu

SEQ ID NO: 379239 - RNA, 24 nt, Artificial Sequence
  Synthetic
cccccuauucuuccugacccuccu

SEQ ID NO: 379240 - RNA, 18 nt, Artificial Sequence
  Synthetic
cuuucauaaugcccuccu

SEQ ID NO: 379241 - RNA, 19 nt, Artificial Sequence
  Synthetic
ucuuucauaaugcccuccu

SEQ ID NO: 379242 - RNA, 20 nt, Artificial Sequence
  Synthetic
aucuuucauaaugcccuccu

SEQ ID NO: 379243 - RNA, 21 nt, Artificial Sequence
  Synthetic
uaucuuucauaaugcccuccu

SEQ ID NO: 379244 - RNA, 22 nt, Artificial Sequence
  Synthetic
uuaucuuucauaaugcccuccu

SEQ ID NO: 379245 - RNA, 23 nt, Artificial Sequence
  Synthetic
uuuaucuuucauaaugcccuccu

SEQ ID NO: 379246 - RNA, 24 nt, Artificial Sequence
  Synthetic
uuuuaucuuucauaaugcccuccu

SEQ ID NO: 379247 - RNA, 18 nt, Artificial Sequence
  Synthetic
ccuuaauucaugccuccu

SEQ ID NO: 379248 - RNA, 19 nt, Artificial Sequence
  Synthetic
accuuaauucaugccuccu

SEQ ID NO: 379249 - RNA, 20 nt, Artificial Sequence
  Synthetic
aaccuuaauucaugccuccu

SEQ ID NO: 379250 - RNA, 21 nt, Artificial Sequence
  Synthetic
caaccuuaauucaugccuccu

SEQ ID NO: 379251 - RNA, 22 nt, Artificial Sequence
  Synthetic
gcaaccuuaauucaugccuccu

SEQ ID NO: 379252 - RNA, 23 nt, Artificial Sequence
  Synthetic
agcaaccuuaauucaugccuccu

SEQ ID NO: 379253 - RNA, 24 nt, Artificial Sequence
  Synthetic
cagcaaccuuaauucaugccuccu

SEQ ID NO: 379254 - RNA, 18 nt, Artificial Sequence
  Synthetic
ggagggcagcugccuccu

SEQ ID NO: 379255 - RNA, 19 nt, Artificial Sequence
  Synthetic
uggagggcagcugccuccu

SEQ ID NO: 379256 - RNA, 20 nt, Artificial Sequence
  Synthetic
guggagggcagcugccuccu

SEQ ID NO: 379257 - RNA, 21 nt, Artificial Sequence
  Synthetic
gguggagggcagcugccuccu

SEQ ID NO: 379258 - RNA, 22 nt, Artificial Sequence
  Synthetic
ugguggagggcagcugccuccu

SEQ ID NO: 379259 - RNA, 23 nt, Artificial Sequence
  Synthetic
cugguggagggcagcugccuccu

SEQ ID NO: 379260 - RNA, 24 nt, Artificial Sequence
  Synthetic
gcugguggagggcagcugccuccu

SEQ ID NO: 379261 - RNA, 18 nt, Artificial Sequence
  Synthetic
aauuuagagcugccuccu

SEQ ID NO: 379262 - RNA, 19 nt, Artificial Sequence
  Synthetic
caauuuagagcugccuccu

SEQ ID NO: 379263 - RNA, 20 nt, Artificial Sequence
  Synthetic
ccaauuuagagcugccuccu

SEQ ID NO: 379264 - RNA, 21 nt, Artificial Sequence
  Synthetic
gccaauuuagagcugccuccu

SEQ ID NO: 379265 - RNA, 22 nt, Artificial Sequence
  Synthetic
ugccaauuuagagcugccuccu

SEQ ID NO: 379266 - RNA, 23 nt, Artificial Sequence
  Synthetic
uugccaauuuagagcugccuccu

SEQ ID NO: 379267 - RNA, 24 nt, Artificial Sequence
  Synthetic
auugccaauuuagagcugccuccu

SEQ ID NO: 379268 - RNA, 18 nt, Artificial Sequence
  Synthetic
aaucacaagaguccuccu

SEQ ID NO: 379269 - RNA, 19 nt, Artificial Sequence
  Synthetic
uaaucacaagaguccuccu

SEQ ID NO: 379270 - RNA, 20 nt, Artificial Sequence
  Synthetic
guaaucacaagaguccuccu

SEQ ID NO: 379271 - RNA, 21 nt, Artificial Sequence
  Synthetic
uguaaucacaagaguccuccu

SEQ ID NO: 379272 - RNA, 22 nt, Artificial Sequence
  Synthetic
auguaaucacaagaguccuccu

SEQ ID NO: 379273 - RNA, 23 nt, Artificial Sequence
  Synthetic
aauguaaucacaagaguccuccu

SEQ ID NO: 379274 - RNA, 24 nt, Artificial Sequence
  Synthetic
caauguaaucacaagaguccuccu

SEQ ID NO: 379275 - RNA, 18 nt, Artificial Sequence
  Synthetic
acuauauaguuuccuccu

SEQ ID NO: 379276 - RNA, 19 nt, Artificial Sequence
  Synthetic
cacuauauaguuuccuccu

SEQ ID NO: 379277 - RNA, 20 nt, Artificial Sequence
  Synthetic
ucacuauauaguuuccuccu

SEQ ID NO: 379278 - RNA, 21 nt, Artificial Sequence
  Synthetic
uucacuauauaguuuccuccu

SEQ ID NO: 379279 - RNA, 22 nt, Artificial Sequence
  Synthetic
guucacuauauaguuuccuccu

SEQ ID NO: 379280 - RNA, 23 nt, Artificial Sequence
  Synthetic
uguucacuauauaguuuccuccu

SEQ ID NO: 379281 - RNA, 24 nt, Artificial Sequence
  Synthetic
uuguucacuauauaguuuccuccu

SEQ ID NO: 379282 - RNA, 18 nt, Artificial Sequence
  Synthetic
auaugacuuguagcuccu

SEQ ID NO: 379283 - RNA, 19 nt, Artificial Sequence
  Synthetic
aauaugacuuguagcuccu

SEQ ID NO: 379284 - RNA, 20 nt, Artificial Sequence
  Synthetic
gaauaugacuuguagcuccu

SEQ ID NO: 379285 - RNA, 21 nt, Artificial Sequence
  Synthetic
ugaauaugacuuguagcuccu

SEQ ID NO: 379286 - RNA, 22 nt, Artificial Sequence
  Synthetic
cugaauaugacuuguagcuccu

SEQ ID NO: 379287 - RNA, 23 nt, Artificial Sequence
  Synthetic
ccugaauaugacuuguagcuccu

SEQ ID NO: 379288 - RNA, 24 nt, Artificial Sequence
  Synthetic
accugaauaugacuuguagcuccu

SEQ ID NO: 379289 - RNA, 18 nt, Artificial Sequence
  Synthetic
guuaaauucugcgcuccu

SEQ ID NO: 379290 - RNA, 19 nt, Artificial Sequence
  Synthetic
aguuaaauucugcgcuccu

SEQ ID NO: 379291 - RNA, 20 nt, Artificial Sequence
  Synthetic
caguuaaauucugcgcuccu

SEQ ID NO: 379292 - RNA, 21 nt, Artificial Sequence
  Synthetic
ccaguuaaauucugcgcuccu

SEQ ID NO: 379293 - RNA, 22 nt, Artificial Sequence
  Synthetic
uccaguuaaauucugcgcuccu

SEQ ID NO: 379294 - RNA, 23 nt, Artificial Sequence
  Synthetic
cuccaguuaaauucugcgcuccu

SEQ ID NO: 379295 - RNA, 24 nt, Artificial Sequence
  Synthetic
ccuccaguuaaauucugcgcuccu

SEQ ID NO: 379296 - RNA, 18 nt, Artificial Sequence
  Synthetic
ggcauuugcuuggcuccu

SEQ ID NO: 379297 - RNA, 19 nt, Artificial Sequence
  Synthetic
aggcauuugcuuggcuccu

SEQ ID NO: 379298 - RNA, 20 nt, Artificial Sequence
  Synthetic
caggcauuugcuuggcuccu

SEQ ID NO: 379299 - RNA, 21 nt, Artificial Sequence
  Synthetic
acaggcauuugcuuggcuccu

SEQ ID NO: 379300 - RNA, 22 nt, Artificial Sequence
  Synthetic
cacaggcauuugcuuggcuccu

SEQ ID NO: 379301 - RNA, 23 nt, Artificial Sequence
  Synthetic
gcacaggcauuugcuuggcuccu

SEQ ID NO: 379302 - RNA, 24 nt, Artificial Sequence
  Synthetic
ggcacaggcauuugcuuggcuccu

SEQ ID NO: 379303 - RNA, 18 nt, Artificial Sequence
  Synthetic
ccaauuuguuuggcuccu

SEQ ID NO: 379304 - RNA, 19 nt, Artificial Sequence
  Synthetic
gccaauuuguuuggcuccu

SEQ ID NO: 379305 - RNA, 20 nt, Artificial Sequence
  Synthetic
agccaauuuguuuggcuccu

SEQ ID NO: 379306 - RNA, 21 nt, Artificial Sequence
  Synthetic
cagccaauuuguuuggcuccu

SEQ ID NO: 379307 - RNA, 22 nt, Artificial Sequence
  Synthetic
acagccaauuuguuuggcuccu

SEQ ID NO: 379308 - RNA, 23 nt, Artificial Sequence
  Synthetic
uacagccaauuuguuuggcuccu

SEQ ID NO: 379309 - RNA, 24 nt, Artificial Sequence
  Synthetic
cuacagccaauuuguuuggcuccu

SEQ ID NO: 379310 - RNA, 18 nt, Artificial Sequence
  Synthetic
gccauuucccaugcuccu

SEQ ID NO: 379311 - RNA, 19 nt, Artificial Sequence
  Synthetic
agccauuucccaugcuccu

SEQ ID NO: 379312 - RNA, 20 nt, Artificial Sequence
  Synthetic
aagccauuucccaugcuccu

SEQ ID NO: 379313 - RNA, 21 nt, Artificial Sequence
  Synthetic
gaagccauuucccaugcuccu

SEQ ID NO: 379314 - RNA, 22 nt, Artificial Sequence
  Synthetic
ggaagccauuucccaugcuccu

SEQ ID NO: 379315 - RNA, 23 nt, Artificial Sequence
  Synthetic
gggaagccauuucccaugcuccu

SEQ ID NO: 379316 - RNA, 24 nt, Artificial Sequence
  Synthetic
ggggaagccauuucccaugcuccu

SEQ ID NO: 379317 - RNA, 18 nt, Artificial Sequence
  Synthetic
cucauggccucugcuccu

SEQ ID NO: 379318 - RNA, 19 nt, Artificial Sequence
  Synthetic
acucauggccucugcuccu

SEQ ID NO: 379319 - RNA, 20 nt, Artificial Sequence
  Synthetic
cacucauggccucugcuccu

SEQ ID NO: 379320 - RNA, 21 nt, Artificial Sequence
  Synthetic
acacucauggccucugcuccu

SEQ ID NO: 379321 - RNA, 22 nt, Artificial Sequence
  Synthetic
aacacucauggccucugcuccu

SEQ ID NO: 379322 - RNA, 23 nt, Artificial Sequence
  Synthetic
gaacacucauggccucugcuccu

SEQ ID NO: 379323 - RNA, 24 nt, Artificial Sequence
  Synthetic
agaacacucauggccucugcuccu

SEQ ID NO: 379324 - RNA, 18 nt, Artificial Sequence
  Synthetic
ccuccaucagaaucuccu

SEQ ID NO: 379325 - RNA, 19 nt, Artificial Sequence
  Synthetic
cccuccaucagaaucuccu

SEQ ID NO: 379326 - RNA, 20 nt, Artificial Sequence
  Synthetic
ccccuccaucagaaucuccu

SEQ ID NO: 379327 - RNA, 21 nt, Artificial Sequence
  Synthetic
accccuccaucagaaucuccu

SEQ ID NO: 379328 - RNA, 22 nt, Artificial Sequence
  Synthetic
aaccccuccaucagaaucuccu

SEQ ID NO: 379329 - RNA, 23 nt, Artificial Sequence
  Synthetic
gaaccccuccaucagaaucuccu

SEQ ID NO: 379330 - RNA, 24 nt, Artificial Sequence
  Synthetic
agaaccccuccaucagaaucuccu

SEQ ID NO: 379331 - RNA, 18 nt, Artificial Sequence
  Synthetic
aaacugcucacaucuccu

SEQ ID NO: 379332 - RNA, 19 nt, Artificial Sequence
  Synthetic
uaaacugcucacaucuccu

SEQ ID NO: 379333 - RNA, 20 nt, Artificial Sequence
  Synthetic
uuaaacugcucacaucuccu

SEQ ID NO: 379334 - RNA, 21 nt, Artificial Sequence
  Synthetic
guuaaacugcucacaucuccu

SEQ ID NO: 379335 - RNA, 22 nt, Artificial Sequence
  Synthetic
uguuaaacugcucacaucuccu

SEQ ID NO: 379336 - RNA, 23 nt, Artificial Sequence
  Synthetic
auguuaaacugcucacaucuccu

SEQ ID NO: 379337 - RNA, 24 nt, Artificial Sequence
  Synthetic
uauguuaaacugcucacaucuccu

SEQ ID NO: 379338 - RNA, 18 nt, Artificial Sequence
  Synthetic
ucaagacucuuaucuccu

SEQ ID NO: 379339 - RNA, 19 nt, Artificial Sequence
  Synthetic
uucaagacucuuaucuccu

SEQ ID NO: 379340 - RNA, 20 nt, Artificial Sequence
  Synthetic
cuucaagacucuuaucuccu

SEQ ID NO: 379341 - RNA, 21 nt, Artificial Sequence
  Synthetic
ucuucaagacucuuaucuccu

SEQ ID NO: 379342 - RNA, 22 nt, Artificial Sequence
  Synthetic
aucuucaagacucuuaucuccu

SEQ ID NO: 379343 - RNA, 23 nt, Artificial Sequence
  Synthetic
caucuucaagacucuuaucuccu

SEQ ID NO: 379344 - RNA, 24 nt, Artificial Sequence
  Synthetic
ucaucuucaagacucuuaucuccu

SEQ ID NO: 379345 - RNA, 18 nt, Artificial Sequence
  Synthetic
ggugguaagaacucuccu

SEQ ID NO: 379346 - RNA, 19 nt, Artificial Sequence
  Synthetic
cggugguaagaacucuccu

SEQ ID NO: 379347 - RNA, 20 nt, Artificial Sequence
  Synthetic
gcggugguaagaacucuccu

SEQ ID NO: 379348 - RNA, 21 nt, Artificial Sequence
  Synthetic
ugcggugguaagaacucuccu

SEQ ID NO: 379349 - RNA, 22 nt, Artificial Sequence
  Synthetic
uugcggugguaagaacucuccu

SEQ ID NO: 379350 - RNA, 23 nt, Artificial Sequence
  Synthetic
uuugcggugguaagaacucuccu

SEQ ID NO: 379351 - RNA, 24 nt, Artificial Sequence
  Synthetic
uuuugcggugguaagaacucuccu

SEQ ID NO: 379352 - RNA, 18 nt, Artificial Sequence
  Synthetic
caaauggcucccucuccu

SEQ ID NO: 379353 - RNA, 19 nt, Artificial Sequence
  Synthetic
ucaaauggcucccucuccu

SEQ ID NO: 379354 - RNA, 20 nt, Artificial Sequence
  Synthetic
aucaaauggcucccucuccu

SEQ ID NO: 379355 - RNA, 21 nt, Artificial Sequence
  Synthetic
caucaaauggcucccucuccu

SEQ ID NO: 379356 - RNA, 22 nt, Artificial Sequence
  Synthetic
ccaucaaauggcucccucuccu

SEQ ID NO: 379357 - RNA, 23 nt, Artificial Sequence
  Synthetic
uccaucaaauggcucccucuccu

SEQ ID NO: 379358 - RNA, 24 nt, Artificial Sequence
  Synthetic
cuccaucaaauggcucccucuccu

SEQ ID NO: 379359 - RNA, 18 nt, Artificial Sequence
  Synthetic
uucuaaauuccgucuccu

SEQ ID NO: 379360 - RNA, 19 nt, Artificial Sequence
  Synthetic
guucuaaauuccgucuccu

SEQ ID NO: 379361 - RNA, 20 nt, Artificial Sequence
  Synthetic
uguucuaaauuccgucuccu

SEQ ID NO: 379362 - RNA, 21 nt, Artificial Sequence
  Synthetic
cuguucuaaauuccgucuccu

SEQ ID NO: 379363 - RNA, 22 nt, Artificial Sequence
  Synthetic
ccuguucuaaauuccgucuccu

SEQ ID NO: 379364 - RNA, 23 nt, Artificial Sequence
  Synthetic
cccuguucuaaauuccgucuccu

SEQ ID NO: 379365 - RNA, 24 nt, Artificial Sequence
  Synthetic
acccuguucuaaauuccgucuccu

SEQ ID NO: 379366 - RNA, 18 nt, Artificial Sequence
  Synthetic
auauuacuaaauucuccu

SEQ ID NO: 379367 - RNA, 19 nt, Artificial Sequence
  Synthetic
aauauuacuaaauucuccu

SEQ ID NO: 379368 - RNA, 20 nt, Artificial Sequence
  Synthetic
aaauauuacuaaauucuccu

SEQ ID NO: 379369 - RNA, 21 nt, Artificial Sequence
  Synthetic
uaaauauuacuaaauucuccu

SEQ ID NO: 379370 - RNA, 22 nt, Artificial Sequence
  Synthetic
cuaaauauuacuaaauucuccu

SEQ ID NO: 379371 - RNA, 23 nt, Artificial Sequence
  Synthetic
ucuaaauauuacuaaauucuccu

SEQ ID NO: 379372 - RNA, 24 nt, Artificial Sequence
  Synthetic
aucuaaauauuacuaaauucuccu

SEQ ID NO: 379373 - RNA, 18 nt, Artificial Sequence
  Synthetic
ucccucagagauucuccu

SEQ ID NO: 379374 - RNA, 19 nt, Artificial Sequence
  Synthetic
uucccucagagauucuccu

SEQ ID NO: 379375 - RNA, 20 nt, Artificial Sequence
  Synthetic
uuucccucagagauucuccu

SEQ ID NO: 379376 - RNA, 21 nt, Artificial Sequence
  Synthetic
guuucccucagagauucuccu

SEQ ID NO: 379377 - RNA, 22 nt, Artificial Sequence
  Synthetic
gguuucccucagagauucuccu

SEQ ID NO: 379378 - RNA, 23 nt, Artificial Sequence
  Synthetic
cgguuucccucagagauucuccu

SEQ ID NO: 379379 - RNA, 24 nt, Artificial Sequence
  Synthetic
ccgguuucccucagagauucuccu

SEQ ID NO: 379380 - RNA, 18 nt, Artificial Sequence
  Synthetic
aaaauucauuauucuccu

SEQ ID NO: 379381 - RNA, 19 nt, Artificial Sequence
  Synthetic
caaaauucauuauucuccu

SEQ ID NO: 379382 - RNA, 20 nt, Artificial Sequence
  Synthetic
ccaaaauucauuauucuccu

SEQ ID NO: 379383 - RNA, 21 nt, Artificial Sequence
  Synthetic
accaaaauucauuauucuccu

SEQ ID NO: 379384 - RNA, 22 nt, Artificial Sequence
  Synthetic
uaccaaaauucauuauucuccu

SEQ ID NO: 379385 - RNA, 23 nt, Artificial Sequence
  Synthetic
uuaccaaaauucauuauucuccu

SEQ ID NO: 379386 - RNA, 24 nt, Artificial Sequence
  Synthetic
auuaccaaaauucauuauucuccu

SEQ ID NO: 379387 - RNA, 18 nt, Artificial Sequence
  Synthetic
uuauaaauuuauucuccu

SEQ ID NO: 379388 - RNA, 19 nt, Artificial Sequence
  Synthetic
auuauaaauuuauucuccu

SEQ ID NO: 379389 - RNA, 20 nt, Artificial Sequence
  Synthetic
gauuauaaauuuauucuccu

SEQ ID NO: 379390 - RNA, 21 nt, Artificial Sequence
  Synthetic
agauuauaaauuuauucuccu

SEQ ID NO: 379391 - RNA, 22 nt, Artificial Sequence
  Synthetic
uagauuauaaauuuauucuccu

SEQ ID NO: 379392 - RNA, 23 nt, Artificial Sequence
  Synthetic
guagauuauaaauuuauucuccu

SEQ ID NO: 379393 - RNA, 24 nt, Artificial Sequence
  Synthetic
aguagauuauaaauuuauucuccu

SEQ ID NO: 379394 - RNA, 18 nt, Artificial Sequence
  Synthetic
ucagauugaauuucuccu

SEQ ID NO: 379395 - RNA, 19 nt, Artificial Sequence
  Synthetic
gucagauugaauuucuccu

SEQ ID NO: 379396 - RNA, 20 nt, Artificial Sequence
  Synthetic
agucagauugaauuucuccu

SEQ ID NO: 379397 - RNA, 21 nt, Artificial Sequence
  Synthetic
uagucagauugaauuucuccu

SEQ ID NO: 379398 - RNA, 22 nt, Artificial Sequence
  Synthetic
guagucagauugaauuucuccu

SEQ ID NO: 379399 - RNA, 23 nt, Artificial Sequence
  Synthetic
uguagucagauugaauuucuccu

SEQ ID NO: 379400 - RNA, 24 nt, Artificial Sequence
  Synthetic
cuguagucagauugaauuucuccu

SEQ ID NO: 379401 - RNA, 18 nt, Artificial Sequence
  Synthetic
gguuaagaucuuucuccu

SEQ ID NO: 379402 - RNA, 19 nt, Artificial Sequence
  Synthetic
ugguuaagaucuuucuccu

SEQ ID NO: 379403 - RNA, 20 nt, Artificial Sequence
  Synthetic
cugguuaagaucuuucuccu

SEQ ID NO: 379404 - RNA, 21 nt, Artificial Sequence
  Synthetic
acugguuaagaucuuucuccu

SEQ ID NO: 379405 - RNA, 22 nt, Artificial Sequence
  Synthetic
cacugguuaagaucuuucuccu

SEQ ID NO: 379406 - RNA, 23 nt, Artificial Sequence
  Synthetic
acacugguuaagaucuuucuccu

SEQ ID NO: 379407 - RNA, 24 nt, Artificial Sequence
  Synthetic
uacacugguuaagaucuuucuccu

SEQ ID NO: 379408 - RNA, 18 nt, Artificial Sequence
  Synthetic
aaaaaugauuuuucuccu

SEQ ID NO: 379409 - RNA, 19 nt, Artificial Sequence
  Synthetic
caaaaaugauuuuucuccu

SEQ ID NO: 379410 - RNA, 20 nt, Artificial Sequence
  Synthetic
acaaaaaugauuuuucuccu

SEQ ID NO: 379411 - RNA, 21 nt, Artificial Sequence
  Synthetic
aacaaaaaugauuuuucuccu

SEQ ID NO: 379412 - RNA, 22 nt, Artificial Sequence
  Synthetic
aaacaaaaaugauuuuucuccu

SEQ ID NO: 379413 - RNA, 23 nt, Artificial Sequence
  Synthetic
aaaacaaaaaugauuuuucuccu

SEQ ID NO: 379414 - RNA, 24 nt, Artificial Sequence
  Synthetic
uaaaacaaaaaugauuuuucuccu

SEQ ID NO: 379415 - RNA, 18 nt, Artificial Sequence
  Synthetic
aagaaaacccaaaguccu

SEQ ID NO: 379416 - RNA, 19 nt, Artificial Sequence
  Synthetic
aaagaaaacccaaaguccu

SEQ ID NO: 379417 - RNA, 20 nt, Artificial Sequence
  Synthetic
aaaagaaaacccaaaguccu

SEQ ID NO: 379418 - RNA, 21 nt, Artificial Sequence
  Synthetic
caaaagaaaacccaaaguccu

SEQ ID NO: 379419 - RNA, 22 nt, Artificial Sequence
  Synthetic
acaaaagaaaacccaaaguccu

SEQ ID NO: 379420 - RNA, 23 nt, Artificial Sequence
  Synthetic
uacaaaagaaaacccaaaguccu

SEQ ID NO: 379421 - RNA, 24 nt, Artificial Sequence
  Synthetic
uuacaaaagaaaacccaaaguccu

SEQ ID NO: 379422 - RNA, 18 nt, Artificial Sequence
  Synthetic
aguuguguuuuaaguccu

SEQ ID NO: 379423 - RNA, 19 nt, Artificial Sequence
  Synthetic
uaguuguguuuuaaguccu

SEQ ID NO: 379424 - RNA, 20 nt, Artificial Sequence
  Synthetic
auaguuguguuuuaaguccu

SEQ ID NO: 379425 - RNA, 21 nt, Artificial Sequence
  Synthetic
gauaguuguguuuuaaguccu

SEQ ID NO: 379426 - RNA, 22 nt, Artificial Sequence
  Synthetic
cgauaguuguguuuuaaguccu

SEQ ID NO: 379427 - RNA, 23 nt, Artificial Sequence
  Synthetic
acgauaguuguguuuuaaguccu

SEQ ID NO: 379428 - RNA, 24 nt, Artificial Sequence
  Synthetic
aacgauaguuguguuuuaaguccu

SEQ ID NO: 379429 - RNA, 18 nt, Artificial Sequence
  Synthetic
uuauuuuaugccaguccu

SEQ ID NO: 379430 - RNA, 19 nt, Artificial Sequence
  Synthetic
uuuauuuuaugccaguccu

SEQ ID NO: 379431 - RNA, 20 nt, Artificial Sequence
  Synthetic
guuuauuuuaugccaguccu

SEQ ID NO: 379432 - RNA, 21 nt, Artificial Sequence
  Synthetic
aguuuauuuuaugccaguccu

SEQ ID NO: 379433 - RNA, 22 nt, Artificial Sequence
  Synthetic
uaguuuauuuuaugccaguccu

SEQ ID NO: 379434 - RNA, 23 nt, Artificial Sequence
  Synthetic
uuaguuuauuuuaugccaguccu

SEQ ID NO: 379435 - RNA, 24 nt, Artificial Sequence
  Synthetic
auuaguuuauuuuaugccaguccu

SEQ ID NO: 379436 - RNA, 18 nt, Artificial Sequence
  Synthetic
cuccuuggcuucaguccu

SEQ ID NO: 379437 - RNA, 19 nt, Artificial Sequence
  Synthetic
acuccuuggcuucaguccu

SEQ ID NO: 379438 - RNA, 20 nt, Artificial Sequence
  Synthetic
aacuccuuggcuucaguccu

SEQ ID NO: 379439 - RNA, 21 nt, Artificial Sequence
  Synthetic
aaacuccuuggcuucaguccu

SEQ ID NO: 379440 - RNA, 22 nt, Artificial Sequence
  Synthetic
aaaacuccuuggcuucaguccu

SEQ ID NO: 379441 - RNA, 23 nt, Artificial Sequence
  Synthetic
gaaaacuccuuggcuucaguccu

SEQ ID NO: 379442 - RNA, 24 nt, Artificial Sequence
  Synthetic
agaaaacuccuuggcuucaguccu

SEQ ID NO: 379443 - RNA, 18 nt, Artificial Sequence
  Synthetic
caacacagggagaguccu

SEQ ID NO: 379444 - RNA, 19 nt, Artificial Sequence
  Synthetic
ucaacacagggagaguccu

SEQ ID NO: 379445 - RNA, 20 nt, Artificial Sequence
  Synthetic
uucaacacagggagaguccu

SEQ ID NO: 379446 - RNA, 21 nt, Artificial Sequence
  Synthetic
auucaacacagggagaguccu

SEQ ID NO: 379447 - RNA, 22 nt, Artificial Sequence
  Synthetic
uauucaacacagggagaguccu

SEQ ID NO: 379448 - RNA, 23 nt, Artificial Sequence
  Synthetic
cuauucaacacagggagaguccu

SEQ ID NO: 379449 - RNA, 24 nt, Artificial Sequence
  Synthetic
ucuauucaacacagggagaguccu

SEQ ID NO: 379450 - RNA, 18 nt, Artificial Sequence
  Synthetic
guaggugaugagaguccu

SEQ ID NO: 379451 - RNA, 19 nt, Artificial Sequence
  Synthetic
cguaggugaugagaguccu

SEQ ID NO: 379452 - RNA, 20 nt, Artificial Sequence
  Synthetic
ccguaggugaugagaguccu

SEQ ID NO: 379453 - RNA, 21 nt, Artificial Sequence
  Synthetic
uccguaggugaugagaguccu

SEQ ID NO: 379454 - RNA, 22 nt, Artificial Sequence
  Synthetic
uuccguaggugaugagaguccu

SEQ ID NO: 379455 - RNA, 23 nt, Artificial Sequence
  Synthetic
auuccguaggugaugagaguccu

SEQ ID NO: 379456 - RNA, 24 nt, Artificial Sequence
  Synthetic
aauuccguaggugaugagaguccu

SEQ ID NO: 379457 - RNA, 18 nt, Artificial Sequence
  Synthetic
agcauauaaccuaguccu

SEQ ID NO: 379458 - RNA, 19 nt, Artificial Sequence
  Synthetic
aagcauauaaccuaguccu

SEQ ID NO: 379459 - RNA, 20 nt, Artificial Sequence
  Synthetic
uaagcauauaaccuaguccu

SEQ ID NO: 379460 - RNA, 21 nt, Artificial Sequence
  Synthetic
uuaagcauauaaccuaguccu

SEQ ID NO: 379461 - RNA, 22 nt, Artificial Sequence
  Synthetic
uuuaagcauauaaccuaguccu

SEQ ID NO: 379462 - RNA, 23 nt, Artificial Sequence
  Synthetic
auuuaagcauauaaccuaguccu

SEQ ID NO: 379463 - RNA, 24 nt, Artificial Sequence
  Synthetic
aauuuaagcauauaaccuaguccu

SEQ ID NO: 379464 - RNA, 18 nt, Artificial Sequence
  Synthetic
acccuucagaguaguccu

SEQ ID NO: 379465 - RNA, 19 nt, Artificial Sequence
  Synthetic
gacccuucagaguaguccu

SEQ ID NO: 379466 - RNA, 20 nt, Artificial Sequence
  Synthetic
ugacccuucagaguaguccu

SEQ ID NO: 379467 - RNA, 21 nt, Artificial Sequence
  Synthetic
augacccuucagaguaguccu

SEQ ID NO: 379468 - RNA, 22 nt, Artificial Sequence
  Synthetic
aaugacccuucagaguaguccu

SEQ ID NO: 379469 - RNA, 23 nt, Artificial Sequence
  Synthetic
gaaugacccuucagaguaguccu

SEQ ID NO: 379470 - RNA, 24 nt, Artificial Sequence
  Synthetic
cgaaugacccuucagaguaguccu

SEQ ID NO: 379471 - RNA, 18 nt, Artificial Sequence
  Synthetic
aaaaacagcauagguccu

SEQ ID NO: 379472 - RNA, 19 nt, Artificial Sequence
  Synthetic
aaaaaacagcauagguccu

SEQ ID NO: 379473 - RNA, 20 nt, Artificial Sequence
  Synthetic
aaaaaaacagcauagguccu

SEQ ID NO: 379474 - RNA, 21 nt, Artificial Sequence
  Synthetic
aaaaaaaacagcauagguccu

SEQ ID NO: 379475 - RNA, 22 nt, Artificial Sequence
  Synthetic
aaaaaaaaacagcauagguccu

SEQ ID NO: 379476 - RNA, 23 nt, Artificial Sequence
  Synthetic
aaaaaaaaaacagcauagguccu

SEQ ID NO: 379477 - RNA, 24 nt, Artificial Sequence
  Synthetic
aaaaaaaaaaacagcauagguccu

SEQ ID NO: 379478 - RNA, 18 nt, Artificial Sequence
  Synthetic
caguuuugccuggguccu

SEQ ID NO: 379479 - RNA, 19 nt, Artificial Sequence
  Synthetic
ucaguuuugccuggguccu

SEQ ID NO: 379480 - RNA, 20 nt, Artificial Sequence
  Synthetic
aucaguuuugccuggguccu

SEQ ID NO: 379481 - RNA, 21 nt, Artificial Sequence
  Synthetic
aaucaguuuugccuggguccu

SEQ ID NO: 379482 - RNA, 22 nt, Artificial Sequence
  Synthetic
aaaucaguuuugccuggguccu

SEQ ID NO: 379483 - RNA, 23 nt, Artificial Sequence
  Synthetic
uaaaucaguuuugccuggguccu

SEQ ID NO: 379484 - RNA, 24 nt, Artificial Sequence
  Synthetic
auaaaucaguuuugccuggguccu

SEQ ID NO: 379485 - RNA, 18 nt, Artificial Sequence
  Synthetic
cguguugugcuggguccu

SEQ ID NO: 379486 - RNA, 19 nt, Artificial Sequence
  Synthetic
acguguugugcuggguccu

SEQ ID NO: 379487 - RNA, 20 nt, Artificial Sequence
  Synthetic
uacguguugugcuggguccu

SEQ ID NO: 379488 - RNA, 21 nt, Artificial Sequence
  Synthetic
uuacguguugugcuggguccu

SEQ ID NO: 379489 - RNA, 22 nt, Artificial Sequence
  Synthetic
auuacguguugugcuggguccu

SEQ ID NO: 379490 - RNA, 23 nt, Artificial Sequence
  Synthetic
uauuacguguugugcuggguccu

SEQ ID NO: 379491 - RNA, 24 nt, Artificial Sequence
  Synthetic
uuauuacguguugugcuggguccu

SEQ ID NO: 379492 - RNA, 18 nt, Artificial Sequence
  Synthetic
ucugcaaauugugguccu

SEQ ID NO: 379493 - RNA, 19 nt, Artificial Sequence
  Synthetic
aucugcaaauugugguccu

SEQ ID NO: 379494 - RNA, 20 nt, Artificial Sequence
  Synthetic
uaucugcaaauugugguccu

SEQ ID NO: 379495 - RNA, 21 nt, Artificial Sequence
  Synthetic
guaucugcaaauugugguccu

SEQ ID NO: 379496 - RNA, 22 nt, Artificial Sequence
  Synthetic
gguaucugcaaauugugguccu

SEQ ID NO: 379497 - RNA, 23 nt, Artificial Sequence
  Synthetic
ggguaucugcaaauugugguccu

SEQ ID NO: 379498 - RNA, 24 nt, Artificial Sequence
  Synthetic
aggguaucugcaaauugugguccu

SEQ ID NO: 379499 - RNA, 18 nt, Artificial Sequence
  Synthetic
cauuguaucacauguccu

SEQ ID NO: 379500 - RNA, 19 nt, Artificial Sequence
  Synthetic
ucauuguaucacauguccu

SEQ ID NO: 379501 - RNA, 20 nt, Artificial Sequence
  Synthetic
aucauuguaucacauguccu

SEQ ID NO: 379502 - RNA, 21 nt, Artificial Sequence
  Synthetic
caucauuguaucacauguccu

SEQ ID NO: 379503 - RNA, 22 nt, Artificial Sequence
  Synthetic
ccaucauuguaucacauguccu

SEQ ID NO: 379504 - RNA, 23 nt, Artificial Sequence
  Synthetic
gccaucauuguaucacauguccu

SEQ ID NO: 379505 - RNA, 24 nt, Artificial Sequence
  Synthetic
ugccaucauuguaucacauguccu

SEQ ID NO: 379506 - RNA, 18 nt, Artificial Sequence
  Synthetic
agaacgaguucauguccu

SEQ ID NO: 379507 - RNA, 19 nt, Artificial Sequence
  Synthetic
aagaacgaguucauguccu

SEQ ID NO: 379508 - RNA, 20 nt, Artificial Sequence
  Synthetic
aaagaacgaguucauguccu

SEQ ID NO: 379509 - RNA, 21 nt, Artificial Sequence
  Synthetic
aaaagaacgaguucauguccu

SEQ ID NO: 379510 - RNA, 22 nt, Artificial Sequence
  Synthetic
aaaaagaacgaguucauguccu

SEQ ID NO: 379511 - RNA, 23 nt, Artificial Sequence
  Synthetic
aaaaaagaacgaguucauguccu

SEQ ID NO: 379512 - RNA, 24 nt, Artificial Sequence
  Synthetic
uaaaaaagaacgaguucauguccu

SEQ ID NO: 379513 - RNA, 18 nt, Artificial Sequence
  Synthetic
acccucaaagccuguccu

SEQ ID NO: 379514 - RNA, 19 nt, Artificial Sequence
  Synthetic
uacccucaaagccuguccu

SEQ ID NO: 379515 - RNA, 20 nt, Artificial Sequence
  Synthetic
cuacccucaaagccuguccu

SEQ ID NO: 379516 - RNA, 21 nt, Artificial Sequence
  Synthetic
ucuacccucaaagccuguccu

SEQ ID NO: 379517 - RNA, 22 nt, Artificial Sequence
  Synthetic
gucuacccucaaagccuguccu

SEQ ID NO: 379518 - RNA, 23 nt, Artificial Sequence
  Synthetic
ugucuacccucaaagccuguccu

SEQ ID NO: 379519 - RNA, 24 nt, Artificial Sequence
  Synthetic
uugucuacccucaaagccuguccu

SEQ ID NO: 379520 - RNA, 18 nt, Artificial Sequence
  Synthetic
agagagucagccuguccu

SEQ ID NO: 379521 - RNA, 19 nt, Artificial Sequence
  Synthetic
aagagagucagccuguccu

SEQ ID NO: 379522 - RNA, 20 nt, Artificial Sequence
  Synthetic
aaagagagucagccuguccu

SEQ ID NO: 379523 - RNA, 21 nt, Artificial Sequence
  Synthetic
aaaagagagucagccuguccu

SEQ ID NO: 379524 - RNA, 22 nt, Artificial Sequence
  Synthetic
caaaagagagucagccuguccu

SEQ ID NO: 379525 - RNA, 23 nt, Artificial Sequence
  Synthetic
ucaaaagagagucagccuguccu

SEQ ID NO: 379526 - RNA, 24 nt, Artificial Sequence
  Synthetic
cucaaaagagagucagccuguccu

SEQ ID NO: 379527 - RNA, 18 nt, Artificial Sequence
  Synthetic
cuucaaaacuucuguccu

SEQ ID NO: 379528 - RNA, 19 nt, Artificial Sequence
  Synthetic
acuucaaaacuucuguccu

SEQ ID NO: 379529 - RNA, 20 nt, Artificial Sequence
  Synthetic
gacuucaaaacuucuguccu

SEQ ID NO: 379530 - RNA, 21 nt, Artificial Sequence
  Synthetic
ggacuucaaaacuucuguccu

SEQ ID NO: 379531 - RNA, 22 nt, Artificial Sequence
  Synthetic
aggacuucaaaacuucuguccu

SEQ ID NO: 379532 - RNA, 23 nt, Artificial Sequence
  Synthetic
caggacuucaaaacuucuguccu

SEQ ID NO: 379533 - RNA, 24 nt, Artificial Sequence
  Synthetic
ucaggacuucaaaacuucuguccu

SEQ ID NO: 379534 - RNA, 18 nt, Artificial Sequence
  Synthetic
uugcuagauuuguguccu

SEQ ID NO: 379535 - RNA, 19 nt, Artificial Sequence
  Synthetic
cuugcuagauuuguguccu

SEQ ID NO: 379536 - RNA, 20 nt, Artificial Sequence
  Synthetic
gcuugcuagauuuguguccu

SEQ ID NO: 379537 - RNA, 21 nt, Artificial Sequence
  Synthetic
ugcuugcuagauuuguguccu

SEQ ID NO: 379538 - RNA, 22 nt, Artificial Sequence
  Synthetic
uugcuugcuagauuuguguccu

SEQ ID NO: 379539 - RNA, 23 nt, Artificial Sequence
  Synthetic
guugcuugcuagauuuguguccu

SEQ ID NO: 379540 - RNA, 24 nt, Artificial Sequence
  Synthetic
uguugcuugcuagauuuguguccu

SEQ ID NO: 379541 - RNA, 18 nt, Artificial Sequence
  Synthetic
uauagcuaauauuguccu

SEQ ID NO: 379542 - RNA, 19 nt, Artificial Sequence
  Synthetic
auauagcuaauauuguccu

SEQ ID NO: 379543 - RNA, 20 nt, Artificial Sequence
  Synthetic
uauauagcuaauauuguccu

SEQ ID NO: 379544 - RNA, 21 nt, Artificial Sequence
  Synthetic
guauauagcuaauauuguccu

SEQ ID NO: 379545 - RNA, 22 nt, Artificial Sequence
  Synthetic
uguauauagcuaauauuguccu

SEQ ID NO: 379546 - RNA, 23 nt, Artificial Sequence
  Synthetic
auguauauagcuaauauuguccu

SEQ ID NO: 379547 - RNA, 24 nt, Artificial Sequence
  Synthetic
aauguauauagcuaauauuguccu

SEQ ID NO: 379548 - RNA, 18 nt, Artificial Sequence
  Synthetic
uucauaaaagcuuguccu

SEQ ID NO: 379549 - RNA, 19 nt, Artificial Sequence
  Synthetic
uuucauaaaagcuuguccu

SEQ ID NO: 379550 - RNA, 20 nt, Artificial Sequence
  Synthetic
auuucauaaaagcuuguccu

SEQ ID NO: 379551 - RNA, 21 nt, Artificial Sequence
  Synthetic
cauuucauaaaagcuuguccu

SEQ ID NO: 379552 - RNA, 22 nt, Artificial Sequence
  Synthetic
acauuucauaaaagcuuguccu

SEQ ID NO: 379553 - RNA, 23 nt, Artificial Sequence
  Synthetic
uacauuucauaaaagcuuguccu

SEQ ID NO: 379554 - RNA, 24 nt, Artificial Sequence
  Synthetic
uuacauuucauaaaagcuuguccu

SEQ ID NO: 379555 - RNA, 18 nt, Artificial Sequence
  Synthetic
aaaugcaaauguuguccu

SEQ ID NO: 379556 - RNA, 19 nt, Artificial Sequence
  Synthetic
aaaaugcaaauguuguccu

SEQ ID NO: 379557 - RNA, 20 nt, Artificial Sequence
  Synthetic
aaaaaugcaaauguuguccu

SEQ ID NO: 379558 - RNA, 21 nt, Artificial Sequence
  Synthetic
uaaaaaugcaaauguuguccu

SEQ ID NO: 379559 - RNA, 22 nt, Artificial Sequence
  Synthetic
auaaaaaugcaaauguuguccu

SEQ ID NO: 379560 - RNA, 23 nt, Artificial Sequence
  Synthetic
uauaaaaaugcaaauguuguccu

SEQ ID NO: 379561 - RNA, 24 nt, Artificial Sequence
  Synthetic
guauaaaaaugcaaauguuguccu

SEQ ID NO: 379562 - RNA, 18 nt, Artificial Sequence
  Synthetic
aguuuuucuauuuguccu

SEQ ID NO: 379563 - RNA, 19 nt, Artificial Sequence
  Synthetic
uaguuuuucuauuuguccu

SEQ ID NO: 379564 - RNA, 20 nt, Artificial Sequence
  Synthetic
cuaguuuuucuauuuguccu

SEQ ID NO: 379565 - RNA, 21 nt, Artificial Sequence
  Synthetic
ucuaguuuuucuauuuguccu

SEQ ID NO: 379566 - RNA, 22 nt, Artificial Sequence
  Synthetic
gucuaguuuuucuauuuguccu

SEQ ID NO: 379567 - RNA, 23 nt, Artificial Sequence
  Synthetic
ugucuaguuuuucuauuuguccu

SEQ ID NO: 379568 - RNA, 24 nt, Artificial Sequence
  Synthetic
augucuaguuuuucuauuuguccu

SEQ ID NO: 379569 - RNA, 18 nt, Artificial Sequence
  Synthetic
cccaauacgaaaauuccu

SEQ ID NO: 379570 - RNA, 19 nt, Artificial Sequence
  Synthetic
acccaauacgaaaauuccu

SEQ ID NO: 379571 - RNA, 20 nt, Artificial Sequence
  Synthetic
uacccaauacgaaaauuccu

SEQ ID NO: 379572 - RNA, 21 nt, Artificial Sequence
  Synthetic
cuacccaauacgaaaauuccu

SEQ ID NO: 379573 - RNA, 22 nt, Artificial Sequence
  Synthetic
ucuacccaauacgaaaauuccu

SEQ ID NO: 379574 - RNA, 23 nt, Artificial Sequence
  Synthetic
uucuacccaauacgaaaauuccu

SEQ ID NO: 379575 - RNA, 24 nt, Artificial Sequence
  Synthetic
uuucuacccaauacgaaaauuccu

SEQ ID NO: 379576 - RNA, 18 nt, Artificial Sequence
  Synthetic
gaguuguuccaaauuccu

SEQ ID NO: 379577 - RNA, 19 nt, Artificial Sequence
  Synthetic
ugaguuguuccaaauuccu

SEQ ID NO: 379578 - RNA, 20 nt, Artificial Sequence
  Synthetic
gugaguuguuccaaauuccu

SEQ ID NO: 379579 - RNA, 21 nt, Artificial Sequence
  Synthetic
agugaguuguuccaaauuccu

SEQ ID NO: 379580 - RNA, 22 nt, Artificial Sequence
  Synthetic
cagugaguuguuccaaauuccu

SEQ ID NO: 379581 - RNA, 23 nt, Artificial Sequence
  Synthetic
ccagugaguuguuccaaauuccu

SEQ ID NO: 379582 - RNA, 24 nt, Artificial Sequence
  Synthetic
cccagugaguuguuccaaauuccu

SEQ ID NO: 379583 - RNA, 18 nt, Artificial Sequence
  Synthetic
gauucuuguacaauuccu

SEQ ID NO: 379584 - RNA, 19 nt, Artificial Sequence
  Synthetic
ugauucuuguacaauuccu

SEQ ID NO: 379585 - RNA, 20 nt, Artificial Sequence
  Synthetic
augauucuuguacaauuccu

SEQ ID NO: 379586 - RNA, 21 nt, Artificial Sequence
  Synthetic
caugauucuuguacaauuccu

SEQ ID NO: 379587 - RNA, 22 nt, Artificial Sequence
  Synthetic
ccaugauucuuguacaauuccu

SEQ ID NO: 379588 - RNA, 23 nt, Artificial Sequence
  Synthetic
cccaugauucuuguacaauuccu

SEQ ID NO: 379589 - RNA, 24 nt, Artificial Sequence
  Synthetic
ucccaugauucuuguacaauuccu

SEQ ID NO: 379590 - RNA, 18 nt, Artificial Sequence
  Synthetic
auaaaaacuagaauuccu

SEQ ID NO: 379591 - RNA, 19 nt, Artificial Sequence
  Synthetic
uauaaaaacuagaauuccu

SEQ ID NO: 379592 - RNA, 20 nt, Artificial Sequence
  Synthetic
cuauaaaaacuagaauuccu

SEQ ID NO: 379593 - RNA, 21 nt, Artificial Sequence
  Synthetic
ccuauaaaaacuagaauuccu

SEQ ID NO: 379594 - RNA, 22 nt, Artificial Sequence
  Synthetic
accuauaaaaacuagaauuccu

SEQ ID NO: 379595 - RNA, 23 nt, Artificial Sequence
  Synthetic
uaccuauaaaaacuagaauuccu

SEQ ID NO: 379596 - RNA, 24 nt, Artificial Sequence
  Synthetic
uuaccuauaaaaacuagaauuccu

SEQ ID NO: 379597 - RNA, 18 nt, Artificial Sequence
  Synthetic
gucuuagaguacauuccu

SEQ ID NO: 379598 - RNA, 19 nt, Artificial Sequence
  Synthetic
agucuuagaguacauuccu

SEQ ID NO: 379599 - RNA, 20 nt, Artificial Sequence
  Synthetic
aagucuuagaguacauuccu

SEQ ID NO: 379600 - RNA, 21 nt, Artificial Sequence
  Synthetic
aaagucuuagaguacauuccu

SEQ ID NO: 379601 - RNA, 22 nt, Artificial Sequence
  Synthetic
aaaagucuuagaguacauuccu

SEQ ID NO: 379602 - RNA, 23 nt, Artificial Sequence
  Synthetic
aaaaagucuuagaguacauuccu

SEQ ID NO: 379603 - RNA, 24 nt, Artificial Sequence
  Synthetic
caaaaagucuuagaguacauuccu

SEQ ID NO: 379604 - RNA, 18 nt, Artificial Sequence
  Synthetic
auuuauuaauccauuccu

SEQ ID NO: 379605 - RNA, 19 nt, Artificial Sequence
  Synthetic
uauuuauuaauccauuccu

SEQ ID NO: 379606 - RNA, 20 nt, Artificial Sequence
  Synthetic
uuauuuauuaauccauuccu

SEQ ID NO: 379607 - RNA, 21 nt, Artificial Sequence
  Synthetic
guuauuuauuaauccauuccu

SEQ ID NO: 379608 - RNA, 22 nt, Artificial Sequence
  Synthetic
gguuauuuauuaauccauuccu

SEQ ID NO: 379609 - RNA, 23 nt, Artificial Sequence
  Synthetic
agguuauuuauuaauccauuccu

SEQ ID NO: 379610 - RNA, 24 nt, Artificial Sequence
  Synthetic
uagguuauuuauuaauccauuccu

SEQ ID NO: 379611 - RNA, 18 nt, Artificial Sequence
  Synthetic
gaaaaguguaucauuccu

SEQ ID NO: 379612 - RNA, 19 nt, Artificial Sequence
  Synthetic
agaaaaguguaucauuccu

SEQ ID NO: 379613 - RNA, 20 nt, Artificial Sequence
  Synthetic
gagaaaaguguaucauuccu

SEQ ID NO: 379614 - RNA, 21 nt, Artificial Sequence
  Synthetic
ugagaaaaguguaucauuccu

SEQ ID NO: 379615 - RNA, 22 nt, Artificial Sequence
  Synthetic
augagaaaaguguaucauuccu

SEQ ID NO: 379616 - RNA, 23 nt, Artificial Sequence
  Synthetic
gaugagaaaaguguaucauuccu

SEQ ID NO: 379617 - RNA, 24 nt, Artificial Sequence
  Synthetic
ugaugagaaaaguguaucauuccu

SEQ ID NO: 379618 - RNA, 18 nt, Artificial Sequence
  Synthetic
gucaguguggcgauuccu

SEQ ID NO: 379619 - RNA, 19 nt, Artificial Sequence
  Synthetic
agucaguguggcgauuccu

SEQ ID NO: 379620 - RNA, 20 nt, Artificial Sequence
  Synthetic
aagucaguguggcgauuccu

SEQ ID NO: 379621 - RNA, 18 nt, Artificial Sequence
  Synthetic
gucgguguggcgauuccu

SEQ ID NO: 379622 - RNA, 19 nt, Artificial Sequence
  Synthetic
agucgguguggcgauuccu

SEQ ID NO: 379623 - RNA, 20 nt, Artificial Sequence
  Synthetic
aagucgguguggcgauuccu

SEQ ID NO: 379624 - RNA, 21 nt, Artificial Sequence
  Synthetic
gaagucgguguggcgauuccu

SEQ ID NO: 379625 - RNA, 22 nt, Artificial Sequence
  Synthetic
ggaagucgguguggcgauuccu

SEQ ID NO: 379626 - RNA, 23 nt, Artificial Sequence
  Synthetic
uggaagucgguguggcgauuccu

SEQ ID NO: 379627 - RNA, 24 nt, Artificial Sequence
  Synthetic
guggaagucgguguggcgauuccu

SEQ ID NO: 379628 - RNA, 18 nt, Artificial Sequence
  Synthetic
aaucaaauccauauuccu

SEQ ID NO: 379629 - RNA, 19 nt, Artificial Sequence
  Synthetic
gaaucaaauccauauuccu

SEQ ID NO: 379630 - RNA, 20 nt, Artificial Sequence
  Synthetic
agaaucaaauccauauuccu

SEQ ID NO: 379631 - RNA, 21 nt, Artificial Sequence
  Synthetic
gagaaucaaauccauauuccu

SEQ ID NO: 379632 - RNA, 22 nt, Artificial Sequence
  Synthetic
agagaaucaaauccauauuccu

SEQ ID NO: 379633 - RNA, 23 nt, Artificial Sequence
  Synthetic
cagagaaucaaauccauauuccu

SEQ ID NO: 379634 - RNA, 24 nt, Artificial Sequence
  Synthetic
gcagagaaucaaauccauauuccu

SEQ ID NO: 379635 - RNA, 18 nt, Artificial Sequence
  Synthetic
ggacaagcaaaacuuccu

SEQ ID NO: 379636 - RNA, 19 nt, Artificial Sequence
  Synthetic
uggacaagcaaaacuuccu

SEQ ID NO: 379637 - RNA, 20 nt, Artificial Sequence
  Synthetic
auggacaagcaaaacuuccu

SEQ ID NO: 379638 - RNA, 21 nt, Artificial Sequence
  Synthetic
aauggacaagcaaaacuuccu

SEQ ID NO: 379639 - RNA, 22 nt, Artificial Sequence
  Synthetic
caauggacaagcaaaacuuccu

SEQ ID NO: 379640 - RNA, 23 nt, Artificial Sequence
  Synthetic
acaauggacaagcaaaacuuccu

SEQ ID NO: 379641 - RNA, 24 nt, Artificial Sequence
  Synthetic
aacaauggacaagcaaaacuuccu

SEQ ID NO: 379642 - RNA, 18 nt, Artificial Sequence
  Synthetic
uuugaaccugaacuuccu

SEQ ID NO: 379643 - RNA, 19 nt, Artificial Sequence
  Synthetic
cuuugaaccugaacuuccu

SEQ ID NO: 379644 - RNA, 20 nt, Artificial Sequence
  Synthetic
ccuuugaaccugaacuuccu

SEQ ID NO: 379645 - RNA, 21 nt, Artificial Sequence
  Synthetic
cccuuugaaccugaacuuccu

SEQ ID NO: 379646 - RNA, 22 nt, Artificial Sequence
  Synthetic
acccuuugaaccugaacuuccu

SEQ ID NO: 379647 - RNA, 23 nt, Artificial Sequence
  Synthetic
uacccuuugaaccugaacuuccu

SEQ ID NO: 379648 - RNA, 24 nt, Artificial Sequence
  Synthetic
guacccuuugaaccugaacuuccu

SEQ ID NO: 379649 - RNA, 18 nt, Artificial Sequence
  Synthetic
auauuggauuaacuuccu

SEQ ID NO: 379650 - RNA, 19 nt, Artificial Sequence
  Synthetic
aauauuggauuaacuuccu

SEQ ID NO: 379651 - RNA, 20 nt, Artificial Sequence
  Synthetic
uaauauuggauuaacuuccu

SEQ ID NO: 379652 - RNA, 21 nt, Artificial Sequence
  Synthetic
uuaauauuggauuaacuuccu

SEQ ID NO: 379653 - RNA, 22 nt, Artificial Sequence
  Synthetic
auuaauauuggauuaacuuccu

SEQ ID NO: 379654 - RNA, 23 nt, Artificial Sequence
  Synthetic
uauuaauauuggauuaacuuccu

SEQ ID NO: 379655 - RNA, 24 nt, Artificial Sequence
  Synthetic
auauuaauauuggauuaacuuccu

SEQ ID NO: 379656 - RNA, 18 nt, Artificial Sequence
  Synthetic
auagauugaaagcuuccu

SEQ ID NO: 379657 - RNA, 19 nt, Artificial Sequence
  Synthetic
cauagauugaaagcuuccu

SEQ ID NO: 379658 - RNA, 20 nt, Artificial Sequence
  Synthetic
acauagauugaaagcuuccu

SEQ ID NO: 379659 - RNA, 21 nt, Artificial Sequence
  Synthetic
cacauagauugaaagcuuccu

SEQ ID NO: 379660 - RNA, 22 nt, Artificial Sequence
  Synthetic
ucacauagauugaaagcuuccu

SEQ ID NO: 379661 - RNA, 23 nt, Artificial Sequence
  Synthetic
cucacauagauugaaagcuuccu

SEQ ID NO: 379662 - RNA, 24 nt, Artificial Sequence
  Synthetic
ucucacauagauugaaagcuuccu

SEQ ID NO: 379663 - RNA, 18 nt, Artificial Sequence
  Synthetic
uuuugacaaaaucuuccu

SEQ ID NO: 379664 - RNA, 19 nt, Artificial Sequence
  Synthetic
cuuuugacaaaaucuuccu

SEQ ID NO: 379665 - RNA, 20 nt, Artificial Sequence
  Synthetic
gcuuuugacaaaaucuuccu

SEQ ID NO: 379666 - RNA, 21 nt, Artificial Sequence
  Synthetic
ugcuuuugacaaaaucuuccu

SEQ ID NO: 379667 - RNA, 22 nt, Artificial Sequence
  Synthetic
uugcuuuugacaaaaucuuccu
